United States Patent Application Publication US 2014/0004565 A1 - sequence listing, part 116

SEQ ID NO: 2905551 - RNA, 19 nt, Artificial Sequence
  Description of Artificial Sequence: Synthetic oligonucleotide
uugacuguccagaugcagg

SEQ ID NO: 2905552 - RNA, 19 nt, Artificial Sequence
  Description of Artificial Sequence: Synthetic oligonucleotide
ucuuuguacuuucucaaca

SEQ ID NO: 2905553 - RNA, 19 nt, Artificial Sequence
  Description of Artificial Sequence: Synthetic oligonucleotide
ugcguucugacuaagcagc

SEQ ID NO: 2905554 - RNA, 19 nt, Artificial Sequence
  Description of Artificial Sequence: Synthetic oligonucleotide
uuuaaaacucaguguauga

SEQ ID NO: 2905555 - RNA, 19 nt, Artificial Sequence
  Description of Artificial Sequence: Synthetic oligonucleotide
uuuuaguugagagaagugu

SEQ ID NO: 2905556 - RNA, 19 nt, Artificial Sequence
  Description of Artificial Sequence: Synthetic oligonucleotide
acuucuacucuucccaugg

SEQ ID NO: 2905557 - RNA, 19 nt, Artificial Sequence
  Description of Artificial Sequence: Synthetic oligonucleotide
ugcuucucgauuaaggagu

SEQ ID NO: 2905558 - RNA, 19 nt, Artificial Sequence
  Description of Artificial Sequence: Synthetic oligonucleotide
gaaacuucuacucuuccca

SEQ ID NO: 2905559 - RNA, 19 nt, Artificial Sequence
  Description of Artificial Sequence: Synthetic oligonucleotide
guucugauggucaaggagg

SEQ ID NO: 2905560 - RNA, 19 nt, Artificial Sequence
  Description of Artificial Sequence: Synthetic oligonucleotide
uuguacuuucucaacagcu

SEQ ID NO: 2905561 - RNA, 19 nt, Artificial Sequence
  Description of Artificial Sequence: Synthetic oligonucleotide
cuuugcuucuuuaaaacuc

SEQ ID NO: 2905562 - RNA, 19 nt, Artificial Sequence
  Description of Artificial Sequence: Synthetic oligonucleotide
guguugacuguccagaugc

SEQ ID NO: 2905563 - RNA, 19 nt, Artificial Sequence
  Description of Artificial Sequence: Synthetic oligonucleotide
agcaaauggguguugacug

SEQ ID NO: 2905564 - RNA, 19 nt, Artificial Sequence
  Description of Artificial Sequence: Synthetic oligonucleotide
uuucuuuugcucccguucc

SEQ ID NO: 2905565 - RNA, 19 nt, Artificial Sequence
  Description of Artificial Sequence: Synthetic oligonucleotide
ugugguguuuucagguugg

SEQ ID NO: 2905566 - RNA, 19 nt, Artificial Sequence
  Description of Artificial Sequence: Synthetic oligonucleotide
gaacuagacacauuaugac

SEQ ID NO: 2905567 - RNA, 19 nt, Artificial Sequence
  Description of Artificial Sequence: Synthetic oligonucleotide
ucuguugcauguucuacag

SEQ ID NO: 2905568 - RNA, 19 nt, Artificial Sequence
  Description of Artificial Sequence: Synthetic oligonucleotide
uucugauggucaaggaggg

SEQ ID NO: 2905569 - RNA, 19 nt, Artificial Sequence
  Description of Artificial Sequence: Synthetic oligonucleotide
cuuuucacagagaggaaag

SEQ ID NO: 2905570 - RNA, 19 nt, Artificial Sequence
  Description of Artificial Sequence: Synthetic oligonucleotide
uuuaguugagagaaguguu

SEQ ID NO: 2905571 - RNA, 19 nt, Artificial Sequence
  Description of Artificial Sequence: Synthetic oligonucleotide
cuuuguacuuucucaacag

SEQ ID NO: 2905572 - RNA, 19 nt, Artificial Sequence
  Description of Artificial Sequence: Synthetic oligonucleotide
ucaguguaugauuucuugc

SEQ ID NO: 2905573 - RNA, 19 nt, Artificial Sequence
  Description of Artificial Sequence: Synthetic oligonucleotide
uuuguacuuucucaacagc

SEQ ID NO: 2905574 - RNA, 19 nt, Artificial Sequence
  Description of Artificial Sequence: Synthetic oligonucleotide
ucuacucuucccauggugu

SEQ ID NO: 2905575 - RNA, 19 nt, Artificial Sequence
  Description of Artificial Sequence: Synthetic oligonucleotide
uuaugacuuggguuugugg

SEQ ID NO: 2905576 - RNA, 19 nt, Artificial Sequence
  Description of Artificial Sequence: Synthetic oligonucleotide
aaggccugucuuuucacag

SEQ ID NO: 2905577 - RNA, 19 nt, Artificial Sequence
  Description of Artificial Sequence: Synthetic oligonucleotide
uaaccagcagcacacuugc

SEQ ID NO: 2905578 - RNA, 19 nt, Artificial Sequence
  Description of Artificial Sequence: Synthetic oligonucleotide
gcaguauuacucuucaagg

SEQ ID NO: 2905579 - RNA, 19 nt, Artificial Sequence
  Description of Artificial Sequence: Synthetic oligonucleotide
uuguuuguagcaguggcag

SEQ ID NO: 2905580 - RNA, 19 nt, Artificial Sequence
  Description of Artificial Sequence: Synthetic oligonucleotide
caguauuacucuucaaggc

SEQ ID NO: 2905581 - RNA, 19 nt, Artificial Sequence
  Description of Artificial Sequence: Synthetic oligonucleotide
uaagcagcgcuuuuaguug

SEQ ID NO: 2905582 - RNA, 19 nt, Artificial Sequence
  Description of Artificial Sequence: Synthetic oligonucleotide
accagcagcacacuugcgg

SEQ ID NO: 2905583 - RNA, 19 nt, Artificial Sequence
  Description of Artificial Sequence: Synthetic oligonucleotide
acuugcggagucuuuguac

SEQ ID NO: 2905584 - RNA, 19 nt, Artificial Sequence
  Description of Artificial Sequence: Synthetic oligonucleotide
aaacucaguguaugauuuc

SEQ ID NO: 2905585 - RNA, 19 nt, Artificial Sequence
  Description of Artificial Sequence: Synthetic oligonucleotide
uucacagagaggaaaggaa

SEQ ID NO: 2905586 - RNA, 19 nt, Artificial Sequence
  Description of Artificial Sequence: Synthetic oligonucleotide
uugcuucucgauuaaggag

SEQ ID NO: 2905587 - RNA, 19 nt, Artificial Sequence
  Description of Artificial Sequence: Synthetic oligonucleotide
uucauuguucuguugcaug

SEQ ID NO: 2905588 - RNA, 19 nt, Artificial Sequence
  Description of Artificial Sequence: Synthetic oligonucleotide
aggaaacuucuacucuucc

SEQ ID NO: 2905589 - RNA, 19 nt, Artificial Sequence
  Description of Artificial Sequence: Synthetic oligonucleotide
uucucugugguguuuucag

SEQ ID NO: 2905590 - RNA, 19 nt, Artificial Sequence
  Description of Artificial Sequence: Synthetic oligonucleotide
gaugcguucugacuaagca

SEQ ID NO: 2905591 - RNA, 19 nt, Artificial Sequence
  Description of Artificial Sequence: Synthetic oligonucleotide
ggcaguauuacucuucaag

SEQ ID NO: 2905592 - RNA, 19 nt, Artificial Sequence
  Description of Artificial Sequence: Synthetic oligonucleotide
guauuacucuucaaggcgg

SEQ ID NO: 2905593 - RNA, 19 nt, Artificial Sequence
  Description of Artificial Sequence: Synthetic oligonucleotide
ucaaaggccugucuuuuca

SEQ ID NO: 2905594 - RNA, 19 nt, Artificial Sequence
  Description of Artificial Sequence: Synthetic oligonucleotide
auguucuacagguaaccag

SEQ ID NO: 2905595 - RNA, 19 nt, Artificial Sequence
  Description of Artificial Sequence: Synthetic oligonucleotide
uugccuuuggaacuagaca

SEQ ID NO: 2905596 - RNA, 19 nt, Artificial Sequence
  Description of Artificial Sequence: Synthetic oligonucleotide
aaaacucaguguaugauuu

SEQ ID NO: 2905597 - RNA, 19 nt, Artificial Sequence
  Description of Artificial Sequence: Synthetic oligonucleotide
acuuucucaacagcuuugc

SEQ ID NO: 2905598 - RNA, 19 nt, Artificial Sequence
  Description of Artificial Sequence: Synthetic oligonucleotide
uaaaacucaguguaugauu

SEQ ID NO: 2905599 - RNA, 19 nt, Artificial Sequence
  Description of Artificial Sequence: Synthetic oligonucleotide
uucaaggcggacaggaaac

SEQ ID NO: 2905600 - RNA, 19 nt, Artificial Sequence
  Description of Artificial Sequence: Synthetic oligonucleotide
ucauuguucuguugcaugu

SEQ ID NO: 2905601 - RNA, 19 nt, Artificial Sequence
  Description of Artificial Sequence: Synthetic oligonucleotide
uugaggagcaaaugggugu

SEQ ID NO: 2905602 - RNA, 19 nt, Artificial Sequence
  Description of Artificial Sequence: Synthetic oligonucleotide
uuucucaacagcuuugcuu

SEQ ID NO: 2905603 - RNA, 19 nt, Artificial Sequence
  Description of Artificial Sequence: Synthetic oligonucleotide
auuucuugcuucucgauua

SEQ ID NO: 2905604 - RNA, 19 nt, Artificial Sequence
  Description of Artificial Sequence: Synthetic oligonucleotide
agcaguggcaguauuacuc

SEQ ID NO: 2905605 - RNA, 19 nt, Artificial Sequence
  Description of Artificial Sequence: Synthetic oligonucleotide
aaauggguguugacugucc

SEQ ID NO: 2905606 - RNA, 19 nt, Artificial Sequence
  Description of Artificial Sequence: Synthetic oligonucleotide
uuuucacagagaggaaagg

SEQ ID NO: 2905607 - RNA, 19 nt, Artificial Sequence
  Description of Artificial Sequence: Synthetic oligonucleotide
uucuacucuucccauggug

SEQ ID NO: 2905608 - RNA, 19 nt, Artificial Sequence
  Description of Artificial Sequence: Synthetic oligonucleotide
uucuguugcauguucuaca

SEQ ID NO: 2905609 - RNA, 19 nt, Artificial Sequence
  Description of Artificial Sequence: Synthetic oligonucleotide
uucccaugguguuucauug

SEQ ID NO: 2905610 - RNA, 19 nt, Artificial Sequence
  Description of Artificial Sequence: Synthetic oligonucleotide
uugcauguucuacagguaa

SEQ ID NO: 2905611 - RNA, 19 nt, Artificial Sequence
  Description of Artificial Sequence: Synthetic oligonucleotide
gacuaagcagcgcuuuuag

SEQ ID NO: 2905612 - RNA, 19 nt, Artificial Sequence
  Description of Artificial Sequence: Synthetic oligonucleotide
uuucacagagaggaaagga

SEQ ID NO: 2905613 - RNA, 19 nt, Artificial Sequence
  Description of Artificial Sequence: Synthetic oligonucleotide
aacagcuuugcuucuuuaa

SEQ ID NO: 2905614 - RNA, 19 nt, Artificial Sequence
  Description of Artificial Sequence: Synthetic oligonucleotide
aacucaguguaugauuucu

SEQ ID NO: 2905615 - RNA, 19 nt, Artificial Sequence
  Description of Artificial Sequence: Synthetic oligonucleotide
uacuuucucaacagcuuug

SEQ ID NO: 2905616 - RNA, 19 nt, Artificial Sequence
  Description of Artificial Sequence: Synthetic oligonucleotide
ucuuuaaaacucaguguau

SEQ ID NO: 2905617 - RNA, 19 nt, Artificial Sequence
  Description of Artificial Sequence: Synthetic oligonucleotide
cuuuuaguugagagaagug

SEQ ID NO: 2905618 - RNA, 19 nt, Artificial Sequence
  Description of Artificial Sequence: Synthetic oligonucleotide
gaaaggaagugccugaagu

SEQ ID NO: 2905619 - RNA, 19 nt, Artificial Sequence
  Description of Artificial Sequence: Synthetic oligonucleotide
cuugaggagcaaaugggug

SEQ ID NO: 2905620 - RNA, 19 nt, Artificial Sequence
  Description of Artificial Sequence: Synthetic oligonucleotide
uguacuuucucaacagcuu

SEQ ID NO: 2905621 - RNA, 19 nt, Artificial Sequence
  Description of Artificial Sequence: Synthetic oligonucleotide
uuaaaacucaguguaugau

SEQ ID NO: 2905622 - RNA, 19 nt, Artificial Sequence
  Description of Artificial Sequence: Synthetic oligonucleotide
aaaggccugucuuuucaca

SEQ ID NO: 2905623 - RNA, 19 nt, Artificial Sequence
  Description of Artificial Sequence: Synthetic oligonucleotide
aacuucuacucuucccaug

SEQ ID NO: 2905624 - RNA, 19 nt, Artificial Sequence
  Description of Artificial Sequence: Synthetic oligonucleotide
acagguaaccagcagcaca

SEQ ID NO: 2905625 - RNA, 19 nt, Artificial Sequence
  Description of Artificial Sequence: Synthetic oligonucleotide
uuaguugagagaaguguuu

SEQ ID NO: 2905626 - RNA, 19 nt, Artificial Sequence
  Description of Artificial Sequence: Synthetic oligonucleotide
uuggcuuuguuuguagcag

SEQ ID NO: 2905627 - RNA, 19 nt, Artificial Sequence
  Description of Artificial Sequence: Synthetic oligonucleotide
augcguucugacuaagcag

SEQ ID NO: 2905628 - RNA, 19 nt, Artificial Sequence
  Description of Artificial Sequence: Synthetic oligonucleotide
ugguguuucauuguucugu

SEQ ID NO: 2905629 - RNA, 19 nt, Artificial Sequence
  Description of Artificial Sequence: Synthetic oligonucleotide
cugauggucaaggaggggc

SEQ ID NO: 2905630 - RNA, 19 nt, Artificial Sequence
  Description of Artificial Sequence: Synthetic oligonucleotide
aauggguguugacugucca

SEQ ID NO: 2905631 - RNA, 19 nt, Artificial Sequence
  Description of Artificial Sequence: Synthetic oligonucleotide
ucuuuucacagagaggaaa

SEQ ID NO: 2905632 - RNA, 19 nt, Artificial Sequence
  Description of Artificial Sequence: Synthetic oligonucleotide
ucucugugguguuuucagg

SEQ ID NO: 2905633 - RNA, 19 nt, Artificial Sequence
  Description of Artificial Sequence: Synthetic oligonucleotide
aaggcggacaggaaacuuc

SEQ ID NO: 2905634 - RNA, 19 nt, Artificial Sequence
  Description of Artificial Sequence: Synthetic oligonucleotide
cagguaaccagcagcacac

SEQ ID NO: 2905635 - RNA, 19 nt, Artificial Sequence
  Description of Artificial Sequence: Synthetic oligonucleotide
agucuuuguacuuucucaa

SEQ ID NO: 2905636 - RNA, 19 nt, Artificial Sequence
  Description of Artificial Sequence: Synthetic oligonucleotide
acacauuaugacuuggguu

SEQ ID NO: 2905637 - RNA, 19 nt, Artificial Sequence
  Description of Artificial Sequence: Synthetic oligonucleotide
uauuacucuucaaggcgga

SEQ ID NO: 2905638 - RNA, 19 nt, Artificial Sequence
  Description of Artificial Sequence: Synthetic oligonucleotide
cuugcuucucgauuaagga

SEQ ID NO: 2905639 - RNA, 19 nt, Artificial Sequence
  Description of Artificial Sequence: Synthetic oligonucleotide
uucuacagguaaccagcag

SEQ ID NO: 2905640 - RNA, 19 nt, Artificial Sequence
  Description of Artificial Sequence: Synthetic oligonucleotide
ucaaggaggggcucuugcc

SEQ ID NO: 2905641 - RNA, 19 nt, Artificial Sequence
  Description of Artificial Sequence: Synthetic oligonucleotide
aagugccugaaguccagcu

SEQ ID NO: 2905642 - RNA, 19 nt, Artificial Sequence
  Description of Artificial Sequence: Synthetic oligonucleotide
aaacuucuacucuucccau

SEQ ID NO: 2905643 - RNA, 19 nt, Artificial Sequence
  Description of Artificial Sequence: Synthetic oligonucleotide
uguagcaguggcaguauua

SEQ ID NO: 2905644 - RNA, 19 nt, Artificial Sequence
  Description of Artificial Sequence: Synthetic oligonucleotide
ugacuguccagaugcaggu

SEQ ID NO: 2905645 - RNA, 19 nt, Artificial Sequence
  Description of Artificial Sequence: Synthetic oligonucleotide
ugcauguucuacagguaac

SEQ ID NO: 2905646 - RNA, 19 nt, Artificial Sequence
  Description of Artificial Sequence: Synthetic oligonucleotide
guuuguggagccuggaguc

SEQ ID NO: 2905647 - RNA, 19 nt, Artificial Sequence
  Description of Artificial Sequence: Synthetic oligonucleotide
ugcuucuuuaaaacucagu

SEQ ID NO: 2905648 - RNA, 19 nt, Artificial Sequence
  Description of Artificial Sequence: Synthetic oligonucleotide
augauuucuugcuucucga

SEQ ID NO: 2905649 - RNA, 19 nt, Artificial Sequence
  Description of Artificial Sequence: Synthetic oligonucleotide
uugcuucuuuaaaacucag

SEQ ID NO: 2905650 - RNA, 19 nt, Artificial Sequence
  Description of Artificial Sequence: Synthetic oligonucleotide
agcgcuuuuaguugagaga

SEQ ID NO: 2905651 - RNA, 19 nt, Artificial Sequence
  Description of Artificial Sequence: Synthetic oligonucleotide
uagacacauuaugacuugg

SEQ ID NO: 2905652 - RNA, 19 nt, Artificial Sequence
  Description of Artificial Sequence: Synthetic oligonucleotide
acuagacacauuaugacuu

SEQ ID NO: 2905653 - RNA, 19 nt, Artificial Sequence
  Description of Artificial Sequence: Synthetic oligonucleotide
ccugucuuuucacagagag

SEQ ID NO: 2905654 - RNA, 19 nt, Artificial Sequence
  Description of Artificial Sequence: Synthetic oligonucleotide
uuggguuuguggagccugg

SEQ ID NO: 2905655 - RNA, 19 nt, Artificial Sequence
  Description of Artificial Sequence: Synthetic oligonucleotide
ucucagaugcguucugacu

SEQ ID NO: 2905656 - RNA, 19 nt, Artificial Sequence
  Description of Artificial Sequence: Synthetic oligonucleotide
cuagacacauuaugacuug

SEQ ID NO: 2905657 - RNA, 19 nt, Artificial Sequence
  Description of Artificial Sequence: Synthetic oligonucleotide
ugauggucaaggaggggcu

SEQ ID NO: 2905658 - RNA, 19 nt, Artificial Sequence
  Description of Artificial Sequence: Synthetic oligonucleotide
uuucagguuggcuuuguuu

SEQ ID NO: 2905659 - RNA, 19 nt, Artificial Sequence
  Description of Artificial Sequence: Synthetic oligonucleotide
acaggaaacuucuacucuu

SEQ ID NO: 2905660 - RNA, 19 nt, Artificial Sequence
  Description of Artificial Sequence: Synthetic oligonucleotide
uucucgauuaaggaguuuu

SEQ ID NO: 2905661 - RNA, 19 nt, Artificial Sequence
  Description of Artificial Sequence: Synthetic oligonucleotide
cuacagguaaccagcagca

SEQ ID NO: 2905662 - RNA, 19 nt, Artificial Sequence
  Description of Artificial Sequence: Synthetic oligonucleotide
uuacucuucaaggcggaca

SEQ ID NO: 2905663 - RNA, 19 nt, Artificial Sequence
  Description of Artificial Sequence: Synthetic oligonucleotide
aagcagcgcuuuuaguuga

SEQ ID NO: 2905664 - RNA, 19 nt, Artificial Sequence
  Description of Artificial Sequence: Synthetic oligonucleotide
gguguucugauggucaagg

SEQ ID NO: 2905665 - RNA, 19 nt, Artificial Sequence
  Description of Artificial Sequence: Synthetic oligonucleotide
uggagucuuucucuguggu

SEQ ID NO: 2905666 - RNA, 19 nt, Artificial Sequence
  Description of Artificial Sequence: Synthetic oligonucleotide
ggaacuagacacauuauga

SEQ ID NO: 2905667 - RNA, 19 nt, Artificial Sequence
  Description of Artificial Sequence: Synthetic oligonucleotide
guaaccagcagcacacuug

SEQ ID NO: 2905668 - RNA, 19 nt, Artificial Sequence
  Description of Artificial Sequence: Synthetic oligonucleotide
agacacauuaugacuuggg

SEQ ID NO: 2905669 - RNA, 19 nt, Artificial Sequence
  Description of Artificial Sequence: Synthetic oligonucleotide
cagcgcuuuuaguugagag

SEQ ID NO: 2905670 - RNA, 19 nt, Artificial Sequence
  Description of Artificial Sequence: Synthetic oligonucleotide
ggaaacuucuacucuuccc

SEQ ID NO: 2905671 - RNA, 19 nt, Artificial Sequence
  Description of Artificial Sequence: Synthetic oligonucleotide
aguggcaguauuacucuuc

SEQ ID NO: 2905672 - RNA, 19 nt, Artificial Sequence
  Description of Artificial Sequence: Synthetic oligonucleotide
uucucagaugcguucugac

SEQ ID NO: 2905673 - RNA, 19 nt, Artificial Sequence
  Description of Artificial Sequence: Synthetic oligonucleotide
uggguguugacuguccaga

SEQ ID NO: 2905674 - RNA, 19 nt, Artificial Sequence
  Description of Artificial Sequence: Synthetic oligonucleotide
cagagaggaaaggaagugc

SEQ ID NO: 2905675 - RNA, 19 nt, Artificial Sequence
  Description of Artificial Sequence: Synthetic oligonucleotide
ugacuuggguuuguggagc

SEQ ID NO: 2905676 - RNA, 19 nt, Artificial Sequence
  Description of Artificial Sequence: Synthetic oligonucleotide
cuggagucuuucucugugg

SEQ ID NO: 2905677 - RNA, 19 nt, Artificial Sequence
  Description of Artificial Sequence: Synthetic oligonucleotide
aguguaugauuucuugcuu

SEQ ID NO: 2905678 - RNA, 19 nt, Artificial Sequence
  Description of Artificial Sequence: Synthetic oligonucleotide
cacauuaugacuuggguuu

SEQ ID NO: 2905679 - RNA, 19 nt, Artificial Sequence
  Description of Artificial Sequence: Synthetic oligonucleotide
uccagcuuugggcucuucu

SEQ ID NO: 2905680 - RNA, 19 nt, Artificial Sequence
  Description of Artificial Sequence: Synthetic oligonucleotide
guagcaguggcaguauuac

SEQ ID NO: 2905681 - RNA, 19 nt, Artificial Sequence
  Description of Artificial Sequence: Synthetic oligonucleotide
ucuucucagaugcguucug

SEQ ID NO: 2905682 - RNA, 19 nt, Artificial Sequence
  Description of Artificial Sequence: Synthetic oligonucleotide
gacacauuaugacuugggu

SEQ ID NO: 2905683 - RNA, 19 nt, Artificial Sequence
  Description of Artificial Sequence: Synthetic oligonucleotide
acucuucccaugguguuuc

SEQ ID NO: 2905684 - RNA, 19 nt, Artificial Sequence
  Description of Artificial Sequence: Synthetic oligonucleotide
gaggaaaggaagugccuga

SEQ ID NO: 2905685 - RNA, 19 nt, Artificial Sequence
  Description of Artificial Sequence: Synthetic oligonucleotide
agaugcagguguucugaug

SEQ ID NO: 2905686 - RNA, 19 nt, Artificial Sequence
  Description of Artificial Sequence: Synthetic oligonucleotide
agaugcguucugacuaagc

SEQ ID NO: 2905687 - RNA, 19 nt, Artificial Sequence
  Description of Artificial Sequence: Synthetic oligonucleotide
cuucuuuaaaacucagugu

SEQ ID NO: 2905688 - RNA, 19 nt, Artificial Sequence
  Description of Artificial Sequence: Synthetic oligonucleotide
auggguguugacuguccag

SEQ ID NO: 2905689 - RNA, 19 nt, Artificial Sequence
  Description of Artificial Sequence: Synthetic oligonucleotide
cugugguguuuucagguug

SEQ ID NO: 2905690 - RNA, 19 nt, Artificial Sequence
  Description of Artificial Sequence: Synthetic oligonucleotide
ucagaugcguucugacuaa

SEQ ID NO: 2905691 - RNA, 19 nt, Artificial Sequence
  Description of Artificial Sequence: Synthetic oligonucleotide
uuugggcucuucucagaug

SEQ ID NO: 2905692 - RNA, 19 nt, Artificial Sequence
  Description of Artificial Sequence: Synthetic oligonucleotide
cucagaugcguucugacua

SEQ ID NO: 2905693 - RNA, 19 nt, Artificial Sequence
  Description of Artificial Sequence: Synthetic oligonucleotide
ugauuucuugcuucucgau

SEQ ID NO: 2905694 - RNA, 19 nt, Artificial Sequence
  Description of Artificial Sequence: Synthetic oligonucleotide
uuggaacuagacacauuau

SEQ ID NO: 2905695 - RNA, 19 nt, Artificial Sequence
  Description of Artificial Sequence: Synthetic oligonucleotide
ucagguuggcuuuguuugu

SEQ ID NO: 2905696 - RNA, 19 nt, Artificial Sequence
  Description of Artificial Sequence: Synthetic oligonucleotide
gucuuuguacuuucucaac

SEQ ID NO: 2905697 - RNA, 19 nt, Artificial Sequence
  Description of Artificial Sequence: Synthetic oligonucleotide
auuacucuucaaggcggac

SEQ ID NO: 2905698 - RNA, 19 nt, Artificial Sequence
  Description of Artificial Sequence: Synthetic oligonucleotide
auuaugacuuggguuugug

SEQ ID NO: 2905699 - RNA, 19 nt, Artificial Sequence
  Description of Artificial Sequence: Synthetic oligonucleotide
uucuuuugcucccguuccu

SEQ ID NO: 2905700 - RNA, 19 nt, Artificial Sequence
  Description of Artificial Sequence: Synthetic oligonucleotide
uuucucugugguguuuuca

SEQ ID NO: 2905701 - RNA, 19 nt, Artificial Sequence
  Description of Artificial Sequence: Synthetic oligonucleotide
uccagaugcagguguucug

SEQ ID NO: 2905702 - RNA, 19 nt, Artificial Sequence
  Description of Artificial Sequence: Synthetic oligonucleotide
acuaagcagcgcuuuuagu

SEQ ID NO: 2905703 - RNA, 19 nt, Artificial Sequence
  Description of Artificial Sequence: Synthetic oligonucleotide
uguugacuguccagaugca

SEQ ID NO: 2905704 - RNA, 19 nt, Artificial Sequence
  Description of Artificial Sequence: Synthetic oligonucleotide
agguuggcuuuguuuguag

SEQ ID NO: 2905705 - RNA, 19 nt, Artificial Sequence
  Description of Artificial Sequence: Synthetic oligonucleotide
gacuuggguuuguggagcc

SEQ ID NO: 2905706 - RNA, 19 nt, Artificial Sequence
  Description of Artificial Sequence: Synthetic oligonucleotide
ucccguuccuugaggagca

SEQ ID NO: 2905707 - RNA, 19 nt, Artificial Sequence
  Description of Artificial Sequence: Synthetic oligonucleotide
gucaaggaggggcucuugc

SEQ ID NO: 2905708 - RNA, 19 nt, Artificial Sequence
  Description of Artificial Sequence: Synthetic oligonucleotide
guugacuguccagaugcag

SEQ ID NO: 2905709 - RNA, 19 nt, Artificial Sequence
  Description of Artificial Sequence: Synthetic oligonucleotide
ucaacagcuuugcuucuuu

SEQ ID NO: 2905710 - RNA, 19 nt, Artificial Sequence
  Description of Artificial Sequence: Synthetic oligonucleotide
uuucauuguucuguugcau

SEQ ID NO: 2905711 - RNA, 19 nt, Artificial Sequence
  Description of Artificial Sequence: Synthetic oligonucleotide
cuaagcagcgcuuuuaguu

SEQ ID NO: 2905712 - RNA, 19 nt, Artificial Sequence
  Description of Artificial Sequence: Synthetic oligonucleotide
caugguguuucauuguucu

SEQ ID NO: 2905713 - RNA, 19 nt, Artificial Sequence
  Description of Artificial Sequence: Synthetic oligonucleotide
uguuuguagcaguggcagu

SEQ ID NO: 2905714 - RNA, 19 nt, Artificial Sequence
  Description of Artificial Sequence: Synthetic oligonucleotide
ugcucccguuccuugagga

SEQ ID NO: 2905715 - RNA, 19 nt, Artificial Sequence
  Description of Artificial Sequence: Synthetic oligonucleotide
gagucuuucucuguggugu

SEQ ID NO: 2905716 - RNA, 19 nt, Artificial Sequence
  Description of Artificial Sequence: Synthetic oligonucleotide
gacaggaaacuucuacucu

SEQ ID NO: 2905717 - RNA, 19 nt, Artificial Sequence
  Description of Artificial Sequence: Synthetic oligonucleotide
uugcucccguuccuugagg

SEQ ID NO: 2905718 - RNA, 19 nt, Artificial Sequence
  Description of Artificial Sequence: Synthetic oligonucleotide
caggaaacuucuacucuuc

SEQ ID NO: 2905719 - RNA, 19 nt, Artificial Sequence
  Description of Artificial Sequence: Synthetic oligonucleotide
ucugauggucaaggagggg

SEQ ID NO: 2905720 - RNA, 19 nt, Artificial Sequence
  Description of Artificial Sequence: Synthetic oligonucleotide
ggacaggaaacuucuacuc

SEQ ID NO: 2905721 - RNA, 19 nt, Artificial Sequence
  Description of Artificial Sequence: Synthetic oligonucleotide
uggcuuuguuuguagcagu

SEQ ID NO: 2905722 - RNA, 19 nt, Artificial Sequence
  Description of Artificial Sequence: Synthetic oligonucleotide
cuuggguuuguggagccug

SEQ ID NO: 2905723 - RNA, 19 nt, Artificial Sequence
  Description of Artificial Sequence: Synthetic oligonucleotide
ucuucaaggcggacaggaa

SEQ ID NO: 2905724 - RNA, 19 nt, Artificial Sequence
  Description of Artificial Sequence: Synthetic oligonucleotide
ugggcucuucucagaugcg

SEQ ID NO: 2905725 - RNA, 19 nt, Artificial Sequence
  Description of Artificial Sequence: Synthetic oligonucleotide
caaaggccugucuuuucac

SEQ ID NO: 2905726 - RNA, 19 nt, Artificial Sequence
  Description of Artificial Sequence: Synthetic oligonucleotide
guucugacuaagcagcgcu

SEQ ID NO: 2905727 - RNA, 19 nt, Artificial Sequence
  Description of Artificial Sequence: Synthetic oligonucleotide
ucugugguguuuucagguu

SEQ ID NO: 2905728 - RNA, 19 nt, Artificial Sequence
  Description of Artificial Sequence: Synthetic oligonucleotide
guggcaguauuacucuuca

SEQ ID NO: 2905729 - RNA, 19 nt, Artificial Sequence
  Description of Artificial Sequence: Synthetic oligonucleotide
uaguugagagaaguguuuu

SEQ ID NO: 2905730 - RNA, 19 nt, Artificial Sequence
  Description of Artificial Sequence: Synthetic oligonucleotide
ucuugccuuuggaacuaga

SEQ ID NO: 2905731 - RNA, 19 nt, Artificial Sequence
  Description of Artificial Sequence: Synthetic oligonucleotide
caguguaugauuucuugcu

SEQ ID NO: 2905732 - RNA, 19 nt, Artificial Sequence
  Description of Artificial Sequence: Synthetic oligonucleotide
uucaaaggccugucuuuuc

SEQ ID NO: 2905733 - RNA, 19 nt, Artificial Sequence
  Description of Artificial Sequence: Synthetic oligonucleotide
cuguugcauguucuacagg

SEQ ID NO: 2905734 - RNA, 19 nt, Artificial Sequence
  Description of Artificial Sequence: Synthetic oligonucleotide
cuucaaggcggacaggaaa

SEQ ID NO: 2905735 - RNA, 19 nt, Artificial Sequence
  Description of Artificial Sequence: Synthetic oligonucleotide
uguuuucagguuggcuuug

SEQ ID NO: 2905736 - RNA, 19 nt, Artificial Sequence
  Description of Artificial Sequence: Synthetic oligonucleotide
acauuaugacuuggguuug

SEQ ID NO: 2905737 - RNA, 19 nt, Artificial Sequence
  Description of Artificial Sequence: Synthetic oligonucleotide
gauuucuugcuucucgauu

SEQ ID NO: 2905738 - RNA, 19 nt, Artificial Sequence
  Description of Artificial Sequence: Synthetic oligonucleotide
guucuguugcauguucuac

SEQ ID NO: 2905739 - RNA, 19 nt, Artificial Sequence
  Description of Artificial Sequence: Synthetic oligonucleotide
ggaaaggaagugccugaag

SEQ ID NO: 2905740 - RNA, 19 nt, Artificial Sequence
  Description of Artificial Sequence: Synthetic oligonucleotide
ucugacuaagcagcgcuuu

SEQ ID NO: 2905741 - RNA, 19 nt, Artificial Sequence
  Description of Artificial Sequence: Synthetic oligonucleotide
ggccugucuuuucacagag

SEQ ID NO: 2905742 - RNA, 19 nt, Artificial Sequence
  Description of Artificial Sequence: Synthetic oligonucleotide
cucuucaaggcggacagga

SEQ ID NO: 2905743 - RNA, 19 nt, Artificial Sequence
  Description of Artificial Sequence: Synthetic oligonucleotide
guuuguagcaguggcagua

SEQ ID NO: 2905744 - RNA, 19 nt, Artificial Sequence
  Description of Artificial Sequence: Synthetic oligonucleotide
ucccaugguguuucauugu

SEQ ID NO: 2905745 - RNA, 19 nt, Artificial Sequence
  Description of Artificial Sequence: Synthetic oligonucleotide
uagcaguggcaguauuacu

SEQ ID NO: 2905746 - RNA, 19 nt, Artificial Sequence
  Description of Artificial Sequence: Synthetic oligonucleotide
agugccugaaguccagcuu

SEQ ID NO: 2905747 - RNA, 19 nt, Artificial Sequence
  Description of Artificial Sequence: Synthetic oligonucleotide
agccuggagucuuucucug

SEQ ID NO: 2905748 - RNA, 19 nt, Artificial Sequence
  Description of Artificial Sequence: Synthetic oligonucleotide
caaauggguguugacuguc

SEQ ID NO: 2905749 - RNA, 19 nt, Artificial Sequence
  Description of Artificial Sequence: Synthetic oligonucleotide
uuuguggagccuggagucu

SEQ ID NO: 2905750 - RNA, 19 nt, Artificial Sequence
  Description of Artificial Sequence: Synthetic oligonucleotide
uuuguagcaguggcaguau

SEQ ID NO: 2905751 - RNA, 19 nt, Artificial Sequence
  Description of Artificial Sequence: Synthetic oligonucleotide
ugacuaagcagcgcuuuua

SEQ ID NO: 2905752 - RNA, 19 nt, Artificial Sequence
  Description of Artificial Sequence: Synthetic oligonucleotide
gcauguucuacagguaacc

SEQ ID NO: 2905753 - RNA, 19 nt, Artificial Sequence
  Description of Artificial Sequence: Synthetic oligonucleotide
gguguuuucagguuggcuu

SEQ ID NO: 2905754 - RNA, 19 nt, Artificial Sequence
  Description of Artificial Sequence: Synthetic oligonucleotide
gguuggcuuuguuuguagc

SEQ ID NO: 2905755 - RNA, 19 nt, Artificial Sequence
  Description of Artificial Sequence: Synthetic oligonucleotide
ucaaggcggacaggaaacu

SEQ ID NO: 2905756 - RNA, 19 nt, Artificial Sequence
  Description of Artificial Sequence: Synthetic oligonucleotide
uucugacuaagcagcgcuu

SEQ ID NO: 2905757 - RNA, 19 nt, Artificial Sequence
  Description of Artificial Sequence: Synthetic oligonucleotide
ccugaaguccagcuuuggg

SEQ ID NO: 2905758 - RNA, 19 nt, Artificial Sequence
  Description of Artificial Sequence: Synthetic oligonucleotide
gguguugacuguccagaug

SEQ ID NO: 2905759 - RNA, 19 nt, Artificial Sequence
  Description of Artificial Sequence: Synthetic oligonucleotide
cuugcggagucuuuguacu

SEQ ID NO: 2905760 - RNA, 19 nt, Artificial Sequence
  Description of Artificial Sequence: Synthetic oligonucleotide
ggagucuuuguacuuucuc

SEQ ID NO: 2905761 - RNA, 19 nt, Artificial Sequence
  Description of Artificial Sequence: Synthetic oligonucleotide
ugguguuuucagguuggcu

SEQ ID NO: 2905762 - RNA, 19 nt, Artificial Sequence
  Description of Artificial Sequence: Synthetic oligonucleotide
gcuuuguuuguagcagugg

SEQ ID NO: 2905763 - RNA, 19 nt, Artificial Sequence
  Description of Artificial Sequence: Synthetic oligonucleotide
gaaguccagcuuugggcuc

SEQ ID NO: 2905764 - RNA, 19 nt, Artificial Sequence
  Description of Artificial Sequence: Synthetic oligonucleotide
aggagcaaauggguguuga

SEQ ID NO: 2905765 - RNA, 19 nt, Artificial Sequence
  Description of Artificial Sequence: Synthetic oligonucleotide
gcggacaggaaacuucuac

SEQ ID NO: 2905766 - RNA, 19 nt, Artificial Sequence
  Description of Artificial Sequence: Synthetic oligonucleotide
gggcucuugccuuuggaac

SEQ ID NO: 2905767 - RNA, 19 nt, Artificial Sequence
  Description of Artificial Sequence: Synthetic oligonucleotide
aggaagugccugaagucca

SEQ ID NO: 2905768 - RNA, 19 nt, Artificial Sequence
  Description of Artificial Sequence: Synthetic oligonucleotide
cauguucuacagguaacca

SEQ ID NO: 2905769 - RNA, 19 nt, Artificial Sequence
  Description of Artificial Sequence: Synthetic oligonucleotide
ugcagguguucugaugguc

SEQ ID NO: 2905770 - RNA, 19 nt, Artificial Sequence
  Description of Artificial Sequence: Synthetic oligonucleotide
cagcuuugggcucuucuca

SEQ ID NO: 2905771 - RNA, 19 nt, Artificial Sequence
  Description of Artificial Sequence: Synthetic oligonucleotide
cacagagaggaaaggaagu

SEQ ID NO: 2905772 - RNA, 19 nt, Artificial Sequence
  Description of Artificial Sequence: Synthetic oligonucleotide
cagcagcacacuugcggag

SEQ ID NO: 2905773 - RNA, 19 nt, Artificial Sequence
  Description of Artificial Sequence: Synthetic oligonucleotide
ggagucuuucucuguggug

SEQ ID NO: 2905774 - RNA, 19 nt, Artificial Sequence
  Description of Artificial Sequence: Synthetic oligonucleotide
ggagccuggagucuuucuc

SEQ ID NO: 2905775 - RNA, 19 nt, Artificial Sequence
  Description of Artificial Sequence: Synthetic oligonucleotide
gcgcuuuuaguugagagaa

SEQ ID NO: 2905776 - RNA, 19 nt, Artificial Sequence
  Description of Artificial Sequence: Synthetic oligonucleotide
gagccuggagucuuucucu

SEQ ID NO: 2905777 - RNA, 19 nt, Artificial Sequence
  Description of Artificial Sequence: Synthetic oligonucleotide
uacagguaaccagcagcac

SEQ ID NO: 2905778 - RNA, 19 nt, Artificial Sequence
  Description of Artificial Sequence: Synthetic oligonucleotide
ggguuuguggagccuggag

SEQ ID NO: 2905779 - RNA, 19 nt, Artificial Sequence
  Description of Artificial Sequence: Synthetic oligonucleotide
uuguagcaguggcaguauu

SEQ ID NO: 2905780 - RNA, 19 nt, Artificial Sequence
  Description of Artificial Sequence: Synthetic oligonucleotide
uggagccuggagucuuucu

SEQ ID NO: 2905781 - RNA, 19 nt, Artificial Sequence
  Description of Artificial Sequence: Synthetic oligonucleotide
agcagcacacuugcggagu

SEQ ID NO: 2905782 - RNA, 19 nt, Artificial Sequence
  Description of Artificial Sequence: Synthetic oligonucleotide
aaccagcagcacacuugcg

SEQ ID NO: 2905783 - RNA, 19 nt, Artificial Sequence
  Description of Artificial Sequence: Synthetic oligonucleotide
guucuacagguaaccagca

SEQ ID NO: 2905784 - RNA, 19 nt, Artificial Sequence
  Description of Artificial Sequence: Synthetic oligonucleotide
augcagguguucugauggu

SEQ ID NO: 2905785 - RNA, 19 nt, Artificial Sequence
  Description of Artificial Sequence: Synthetic oligonucleotide
aggcggacaggaaacuucu

SEQ ID NO: 2905786 - RNA, 19 nt, Artificial Sequence
  Description of Artificial Sequence: Synthetic oligonucleotide
ugcggagucuuuguacuuu

SEQ ID NO: 2905787 - RNA, 19 nt, Artificial Sequence
  Description of Artificial Sequence: Synthetic oligonucleotide
guacuuucucaacagcuuu

SEQ ID NO: 2905788 - RNA, 19 nt, Artificial Sequence
  Description of Artificial Sequence: Synthetic oligonucleotide
ccuggagucuuucucugug

SEQ ID NO: 2905789 - RNA, 19 nt, Artificial Sequence
  Description of Artificial Sequence: Synthetic oligonucleotide
guguucugauggucaagga

SEQ ID NO: 2905790 - RNA, 19 nt, Artificial Sequence
  Description of Artificial Sequence: Synthetic oligonucleotide
gcuuuuaguugagagaagu

SEQ ID NO: 2905791 - RNA, 19 nt, Artificial Sequence
  Description of Artificial Sequence: Synthetic oligonucleotide
aggaaaggaagugccugaa

SEQ ID NO: 2905792 - RNA, 19 nt, Artificial Sequence
  Description of Artificial Sequence: Synthetic oligonucleotide
gacuguccagaugcaggug

SEQ ID NO: 2905793 - RNA, 19 nt, Artificial Sequence
  Description of Artificial Sequence: Synthetic oligonucleotide
agucuuucucugugguguu

SEQ ID NO: 2905794 - RNA, 19 nt, Artificial Sequence
  Description of Artificial Sequence: Synthetic oligonucleotide
uguccagaugcagguguuc

SEQ ID NO: 2905795 - RNA, 19 nt, Artificial Sequence
  Description of Artificial Sequence: Synthetic oligonucleotide
ggcuuuguuuguagcagug

SEQ ID NO: 2905796 - RNA, 19 nt, Artificial Sequence
  Description of Artificial Sequence: Synthetic oligonucleotide
auggucaaggaggggcucu

SEQ ID NO: 2905797 - RNA, 19 nt, Artificial Sequence
  Description of Artificial Sequence: Synthetic oligonucleotide
aggggcucuugccuuugga

SEQ ID NO: 2905798 - RNA, 19 nt, Artificial Sequence
  Description of Artificial Sequence: Synthetic oligonucleotide
gauggucaaggaggggcuc

SEQ ID NO: 2905799 - RNA, 19 nt, Artificial Sequence
  Description of Artificial Sequence: Synthetic oligonucleotide
acucuucaaggcggacagg

SEQ ID NO: 2905800 - RNA, 19 nt, Artificial Sequence
  Description of Artificial Sequence: Synthetic oligonucleotide
uacucuucccaugguguuu

SEQ ID NO: 2905801 - RNA, 19 nt, Artificial Sequence
  Description of Artificial Sequence: Synthetic oligonucleotide
uggcaguauuacucuucaa

SEQ ID NO: 2905802 - RNA, 19 nt, Artificial Sequence
  Description of Artificial Sequence: Synthetic oligonucleotide
ccagcuuugggcucuucuc

SEQ ID NO: 2905803 - RNA, 19 nt, Artificial Sequence
  Description of Artificial Sequence: Synthetic oligonucleotide
gaggagcaaauggguguug

SEQ ID NO: 2905804 - RNA, 19 nt, Artificial Sequence
  Description of Artificial Sequence: Synthetic oligonucleotide
uugcggagucuuuguacuu

SEQ ID NO: 2905805 - RNA, 19 nt, Artificial Sequence
  Description of Artificial Sequence: Synthetic oligonucleotide
cuucucagaugcguucuga

SEQ ID NO: 2905806 - RNA, 19 nt, Artificial Sequence
  Description of Artificial Sequence: Synthetic oligonucleotide
uggguuuguggagccugga

SEQ ID NO: 2905807 - RNA, 19 nt, Artificial Sequence
  Description of Artificial Sequence: Synthetic oligonucleotide
guguuuucagguuggcuuu

SEQ ID NO: 2905808 - RNA, 19 nt, Artificial Sequence
  Description of Artificial Sequence: Synthetic oligonucleotide
ucuucccaugguguuucau

SEQ ID NO: 2905809 - RNA, 19 nt, Artificial Sequence
  Description of Artificial Sequence: Synthetic oligonucleotide
cagaugcguucugacuaag

SEQ ID NO: 2905810 - RNA, 19 nt, Artificial Sequence
  Description of Artificial Sequence: Synthetic oligonucleotide
ggaagugccugaaguccag

SEQ ID NO: 2905811 - RNA, 19 nt, Artificial Sequence
  Description of Artificial Sequence: Synthetic oligonucleotide
gcagguguucugaugguca

SEQ ID NO: 2905812 - RNA, 19 nt, Artificial Sequence
  Description of Artificial Sequence: Synthetic oligonucleotide
gugccugaaguccagcuuu

SEQ ID NO: 2905813 - RNA, 19 nt, Artificial Sequence
  Description of Artificial Sequence: Synthetic oligonucleotide
agcacacuugcggagucuu

SEQ ID NO: 2905814 - RNA, 19 nt, Artificial Sequence
  Description of Artificial Sequence: Synthetic oligonucleotide
ccaugguguuucauuguuc

SEQ ID NO: 2905815 - RNA, 19 nt, Artificial Sequence
  Description of Artificial Sequence: Synthetic oligonucleotide
ggcucuugccuuuggaacu

SEQ ID NO: 2905816 - RNA, 19 nt, Artificial Sequence
  Description of Artificial Sequence: Synthetic oligonucleotide
cuucccaugguguuucauu

SEQ ID NO: 2905817 - RNA, 19 nt, Artificial Sequence
  Description of Artificial Sequence: Synthetic oligonucleotide
cagguguucugauggucaa

SEQ ID NO: 2905818 - RNA, 19 nt, Artificial Sequence
  Description of Artificial Sequence: Synthetic oligonucleotide
gugguguuuucagguuggc

SEQ ID NO: 2905819 - RNA, 19 nt, Artificial Sequence
  Description of Artificial Sequence: Synthetic oligonucleotide
cuuugggcucuucucagau

SEQ ID NO: 2905820 - RNA, 19 nt, Artificial Sequence
  Description of Artificial Sequence: Synthetic oligonucleotide
agcagcgcuuuuaguugag

SEQ ID NO: 2905821 - RNA, 19 nt, Artificial Sequence
  Description of Artificial Sequence: Synthetic oligonucleotide
gcguucugacuaagcagcg

SEQ ID NO: 2905822 - RNA, 19 nt, Artificial Sequence
  Description of Artificial Sequence: Synthetic oligonucleotide
gcucccguuccuugaggag

SEQ ID NO: 2905823 - RNA, 19 nt, Artificial Sequence
  Description of Artificial Sequence: Synthetic oligonucleotide
acuuggguuuguggagccu

SEQ ID NO: 2905824 - RNA, 19 nt, Artificial Sequence
  Description of Artificial Sequence: Synthetic oligonucleotide
gcaguggcaguauuacucu

SEQ ID NO: 2905825 - RNA, 19 nt, Artificial Sequence
  Description of Artificial Sequence: Synthetic oligonucleotide
cucuugccuuuggaacuag

SEQ ID NO: 2905826 - RNA, 19 nt, Artificial Sequence
  Description of Artificial Sequence: Synthetic oligonucleotide
ggggcucuugccuuuggaa

SEQ ID NO: 2905827 - RNA, 19 nt, Artificial Sequence
  Description of Artificial Sequence: Synthetic oligonucleotide
cuuucucaacagcuuugcu

SEQ ID NO: 2905828 - RNA, 19 nt, Artificial Sequence
  Description of Artificial Sequence: Synthetic oligonucleotide
gcggagucuuuguacuuuc

SEQ ID NO: 2905829 - RNA, 19 nt, Artificial Sequence
  Description of Artificial Sequence: Synthetic oligonucleotide
agguaaccagcagcacacu

SEQ ID NO: 2905830 - RNA, 19 nt, Artificial Sequence
  Description of Artificial Sequence: Synthetic oligonucleotide
guccagaugcagguguucu

SEQ ID NO: 2905831 - RNA, 19 nt, Artificial Sequence
  Description of Artificial Sequence: Synthetic oligonucleotide
gguguuucauuguucuguu

SEQ ID NO: 2905832 - RNA, 19 nt, Artificial Sequence
  Description of Artificial Sequence: Synthetic oligonucleotide
cucuucucagaugcguucu

SEQ ID NO: 2905833 - RNA, 19 nt, Artificial Sequence
  Description of Artificial Sequence: Synthetic oligonucleotide
gcuuugggcucuucucaga

SEQ ID NO: 2905834 - RNA, 19 nt, Artificial Sequence
  Description of Artificial Sequence: Synthetic oligonucleotide
uggucaaggaggggcucuu

SEQ ID NO: 2905835 - RNA, 19 nt, Artificial Sequence
  Description of Artificial Sequence: Synthetic oligonucleotide
ccagaugcagguguucuga

SEQ ID NO: 2905836 - RNA, 19 nt, Artificial Sequence
  Description of Artificial Sequence: Synthetic oligonucleotide
ccuugaggagcaaaugggu

SEQ ID NO: 2905837 - RNA, 19 nt, Artificial Sequence
  Description of Artificial Sequence: Synthetic oligonucleotide
gccugaaguccagcuuugg

SEQ ID NO: 2905838 - RNA, 19 nt, Artificial Sequence
  Description of Artificial Sequence: Synthetic oligonucleotide
gcaaauggguguugacugu

SEQ ID NO: 2905839 - RNA, 19 nt, Artificial Sequence
  Description of Artificial Sequence: Synthetic oligonucleotide
gccuuuggaacuagacaca

SEQ ID NO: 2905840 - RNA, 19 nt, Artificial Sequence
  Description of Artificial Sequence: Synthetic oligonucleotide
cuacucuucccaugguguu

SEQ ID NO: 2905841 - RNA, 19 nt, Artificial Sequence
  Description of Artificial Sequence: Synthetic oligonucleotide
gcagcacacuugcggaguc

SEQ ID NO: 2905842 - RNA, 19 nt, Artificial Sequence
  Description of Artificial Sequence: Synthetic oligonucleotide
cgcuuuuaguugagagaag

SEQ ID NO: 2905843 - RNA, 19 nt, Artificial Sequence
  Description of Artificial Sequence: Synthetic oligonucleotide
cuuuggaacuagacacauu

SEQ ID NO: 2905844 - RNA, 19 nt, Artificial Sequence
  Description of Artificial Sequence: Synthetic oligonucleotide
gguaaccagcagcacacuu

SEQ ID NO: 2905845 - RNA, 19 nt, Artificial Sequence
  Description of Artificial Sequence: Synthetic oligonucleotide
guuuucagguuggcuuugu

SEQ ID NO: 2905846 - RNA, 19 nt, Artificial Sequence
  Description of Artificial Sequence: Synthetic oligonucleotide
cauuaugacuuggguuugu

SEQ ID NO: 2905847 - RNA, 19 nt, Artificial Sequence
  Description of Artificial Sequence: Synthetic oligonucleotide
cuucuacucuucccauggu

SEQ ID NO: 2905848 - RNA, 19 nt, Artificial Sequence
  Description of Artificial Sequence: Synthetic oligonucleotide
cguucugacuaagcagcgc

SEQ ID NO: 2905849 - RNA, 19 nt, Artificial Sequence
  Description of Artificial Sequence: Synthetic oligonucleotide
cagguuggcuuuguuugua

SEQ ID NO: 2905850 - RNA, 19 nt, Artificial Sequence
  Description of Artificial Sequence: Synthetic oligonucleotide
ggucaaggaggggcucuug

SEQ ID NO: 2905851 - RNA, 19 nt, Artificial Sequence
  Description of Artificial Sequence: Synthetic oligonucleotide
cucuucccaugguguuuca

SEQ ID NO: 2905852 - RNA, 19 nt, Artificial Sequence
  Description of Artificial Sequence: Synthetic oligonucleotide
cugacuaagcagcgcuuuu

SEQ ID NO: 2905853 - RNA, 19 nt, Artificial Sequence
  Description of Artificial Sequence: Synthetic oligonucleotide
cagaugcagguguucugau

SEQ ID NO: 2905854 - RNA, 19 nt, Artificial Sequence
  Description of Artificial Sequence: Synthetic oligonucleotide
cggacaggaaacuucuacu

SEQ ID NO: 2905855 - RNA, 19 nt, Artificial Sequence
  Description of Artificial Sequence: Synthetic oligonucleotide
cauuguucuguugcauguu

SEQ ID NO: 2905856 - RNA, 19 nt, Artificial Sequence
  Description of Artificial Sequence: Synthetic oligonucleotide
ggaggggcucuugccuuug

SEQ ID NO: 2905857 - RNA, 19 nt, Artificial Sequence
  Description of Artificial Sequence: Synthetic oligonucleotide
cuguccagaugcagguguu

SEQ ID NO: 2905858 - RNA, 19 nt, Artificial Sequence
  Description of Artificial Sequence: Synthetic oligonucleotide
ggguguugacuguccagau

SEQ ID NO: 2905859 - RNA, 19 nt, Artificial Sequence
  Description of Artificial Sequence: Synthetic oligonucleotide
gcagcgcuuuuaguugaga

SEQ ID NO: 2905860 - RNA, 19 nt, Artificial Sequence
  Description of Artificial Sequence: Synthetic oligonucleotide
caguggcaguauuacucuu

SEQ ID NO: 2905861 - RNA, 19 nt, Artificial Sequence
  Description of Artificial Sequence: Synthetic oligonucleotide
caaggcggacaggaaacuu

SEQ ID NO: 2905862 - RNA, 19 nt, Artificial Sequence
  Description of Artificial Sequence: Synthetic oligonucleotide
ccuuuggaacuagacacau

SEQ ID NO: 2905863 - RNA, 19 nt, Artificial Sequence
  Description of Artificial Sequence: Synthetic oligonucleotide
gccugucuuuucacagaga

SEQ ID NO: 2905864 - RNA, 19 nt, Artificial Sequence
  Description of Artificial Sequence: Synthetic oligonucleotide
aguccagcuuugggcucuu

SEQ ID NO: 2905865 - RNA, 19 nt, Artificial Sequence
  Description of Artificial Sequence: Synthetic oligonucleotide
gucuuucucugugguguuu

SEQ ID NO: 2905866 - RNA, 19 nt, Artificial Sequence
  Description of Artificial Sequence: Synthetic oligonucleotide
cccaugguguuucauuguu

SEQ ID NO: 2905867 - RNA, 19 nt, Artificial Sequence
  Description of Artificial Sequence: Synthetic oligonucleotide
gccuggagucuuucucugu

SEQ ID NO: 2905868 - RNA, 19 nt, Artificial Sequence
  Description of Artificial Sequence: Synthetic oligonucleotide
gcuucucgauuaaggaguu

SEQ ID NO: 2905869 - RNA, 19 nt, Artificial Sequence
  Description of Artificial Sequence: Synthetic oligonucleotide
cagcacacuugcggagucu

SEQ ID NO: 2905870 - RNA, 19 nt, Artificial Sequence
  Description of Artificial Sequence: Synthetic oligonucleotide
guccagcuuugggcucuuc

SEQ ID NO: 2905871 - RNA, 19 nt, Artificial Sequence
  Description of Artificial Sequence: Synthetic oligonucleotide
cuucucgauuaaggaguuu

SEQ ID NO: 2905872 - RNA, 19 nt, Artificial Sequence
  Description of Artificial Sequence: Synthetic oligonucleotide
ggcggacaggaaacuucua

SEQ ID NO: 2905873 - RNA, 19 nt, Artificial Sequence
  Description of Artificial Sequence: Synthetic oligonucleotide
ccguuccuugaggagcaaa

SEQ ID NO: 2905874 - RNA, 19 nt, Artificial Sequence
  Description of Artificial Sequence: Synthetic oligonucleotide
gcacacuugcggagucuuu

SEQ ID NO: 2905875 - RNA, 19 nt, Artificial Sequence
  Description of Artificial Sequence: Synthetic oligonucleotide
cccguuccuugaggagcaa

SEQ ID NO: 2905876 - RNA, 19 nt, Artificial Sequence
  Description of Artificial Sequence: Synthetic oligonucleotide
aacaucuugguucaguugc

SEQ ID NO: 2905877 - RNA, 19 nt, Artificial Sequence
  Description of Artificial Sequence: Synthetic oligonucleotide
auagcuaacugauagaugg

SEQ ID NO: 2905878 - RNA, 19 nt, Artificial Sequence
  Description of Artificial Sequence: Synthetic oligonucleotide
caucaauaaauauugaucc

SEQ ID NO: 2905879 - RNA, 19 nt, Artificial Sequence
  Description of Artificial Sequence: Synthetic oligonucleotide
agaggagagcaucagaugc

SEQ ID NO: 2905880 - RNA, 19 nt, Artificial Sequence
  Description of Artificial Sequence: Synthetic oligonucleotide
ugaaaagggagacaaagca

SEQ ID NO: 2905881 - RNA, 19 nt, Artificial Sequence
  Description of Artificial Sequence: Synthetic oligonucleotide
uuauuucaagugaaaaggg

SEQ ID NO: 2905882 - RNA, 19 nt, Artificial Sequence
  Description of Artificial Sequence: Synthetic oligonucleotide
uuacucaucagauuccugg

SEQ ID NO: 2905883 - RNA, 19 nt, Artificial Sequence
  Description of Artificial Sequence: Synthetic oligonucleotide
uauugauccccuaagaaga

SEQ ID NO: 2905884 - RNA, 19 nt, Artificial Sequence
  Description of Artificial Sequence: Synthetic oligonucleotide
aagacugcuuuauuggugg

SEQ ID NO: 2905885 - RNA, 19 nt, Artificial Sequence
  Description of Artificial Sequence: Synthetic oligonucleotide
caaagcaugguaaagacug

SEQ ID NO: 2905886 - RNA, 19 nt, Artificial Sequence
  Description of Artificial Sequence: Synthetic oligonucleotide
uaaauauugauccccuaag

SEQ ID NO: 2905887 - RNA, 19 nt, Artificial Sequence
  Description of Artificial Sequence: Synthetic oligonucleotide
uccauuauccuccugaaac

SEQ ID NO: 2905888 - RNA, 19 nt, Artificial Sequence
  Description of Artificial Sequence: Synthetic oligonucleotide
ucaguuacucaucagauuc

SEQ ID NO: 2905889 - RNA, 19 nt, Artificial Sequence
  Description of Artificial Sequence: Synthetic oligonucleotide
ugauagauggcguacacug

SEQ ID NO: 2905890 - RNA, 19 nt, Artificial Sequence
  Description of Artificial Sequence: Synthetic oligonucleotide
guaaagacugcuuuauugg

SEQ ID NO: 2905891 - RNA, 19 nt, Artificial Sequence
  Description of Artificial Sequence: Synthetic oligonucleotide
aaccuuguuuucaaaaugc

SEQ ID NO: 2905892 - RNA, 19 nt, Artificial Sequence
  Description of Artificial Sequence: Synthetic oligonucleotide
aucaauaaauauugauccc

SEQ ID NO: 2905893 - RNA, 19 nt, Artificial Sequence
  Description of Artificial Sequence: Synthetic oligonucleotide
auauugauccccuaagaag

SEQ ID NO: 2905894 - RNA, 19 nt, Artificial Sequence
  Description of Artificial Sequence: Synthetic oligonucleotide
uacugaacgccaaaagucg

SEQ ID NO: 2905895 - RNA, 19 nt, Artificial Sequence
  Description of Artificial Sequence: Synthetic oligonucleotide
ucaauaaauauugaucccc

SEQ ID NO: 2905896 - RNA, 19 nt, Artificial Sequence
  Description of Artificial Sequence: Synthetic oligonucleotide
aauauugauccccuaagaa

SEQ ID NO: 2905897 - RNA, 19 nt, Artificial Sequence
  Description of Artificial Sequence: Synthetic oligonucleotide
uccaccaagugucagagcc

SEQ ID NO: 2905898 - RNA, 19 nt, Artificial Sequence
  Description of Artificial Sequence: Synthetic oligonucleotide
acaucaauaaauauugauc

SEQ ID NO: 2905899 - RNA, 19 nt, Artificial Sequence
  Description of Artificial Sequence: Synthetic oligonucleotide
aaugcaacugaaccauggg

SEQ ID NO: 2905900 - RNA, 19 nt, Artificial Sequence
  Description of Artificial Sequence: Synthetic oligonucleotide
ugaaccaugggaaggcugg

SEQ ID NO: 2905901 - RNA, 19 nt, Artificial Sequence
  Description of Artificial Sequence: Synthetic oligonucleotide
cuaagaagagcucaguuac

SEQ ID NO: 2905902 - RNA, 19 nt, Artificial Sequence
  Description of Artificial Sequence: Synthetic oligonucleotide
ugggauuccauuauccucc

SEQ ID NO: 2905903 - RNA, 19 nt, Artificial Sequence
  Description of Artificial Sequence: Synthetic oligonucleotide
uuaguacacaucaauaaau

SEQ ID NO: 2905904 - RNA, 19 nt, Artificial Sequence
  Description of Artificial Sequence: Synthetic oligonucleotide
aaauauugauccccuaaga

SEQ ID NO: 2905905 - RNA, 19 nt, Artificial Sequence
  Description of Artificial Sequence: Synthetic oligonucleotide
aaaagggagacaaagcaug

SEQ ID NO: 2905906 - RNA, 19 nt, Artificial Sequence
  Description of Artificial Sequence: Synthetic oligonucleotide
uauuucaagugaaaaggga

SEQ ID NO: 2905907 - RNA, 19 nt, Artificial Sequence
  Description of Artificial Sequence: Synthetic oligonucleotide
auugguggcaguuaguaca

SEQ ID NO: 2905908 - RNA, 19 nt, Artificial Sequence
  Description of Artificial Sequence: Synthetic oligonucleotide
agugaaaagggagacaaag

SEQ ID NO: 2905909 - RNA, 19 nt, Artificial Sequence
  Description of Artificial Sequence: Synthetic oligonucleotide
aacugaaccaugggaaggc

SEQ ID NO: 2905910 - RNA, 19 nt, Artificial Sequence
  Description of Artificial Sequence: Synthetic oligonucleotide
uuucaagugaaaagggaga

SEQ ID NO: 2905911 - RNA, 19 nt, Artificial Sequence
  Description of Artificial Sequence: Synthetic oligonucleotide
uuauccuccugaaacagcu

SEQ ID NO: 2905912 - RNA, 19 nt, Artificial Sequence
  Description of Artificial Sequence: Synthetic oligonucleotide
agccauagcuaacugauag

SEQ ID NO: 2905913 - RNA, 19 nt, Artificial Sequence
  Description of Artificial Sequence: Synthetic oligonucleotide
gaaaugaagccauagcuaa

SEQ ID NO: 2905914 - RNA, 19 nt, Artificial Sequence
  Description of Artificial Sequence: Synthetic oligonucleotide
aguuaguacacaucaauaa

SEQ ID NO: 2905915 - RNA, 19 nt, Artificial Sequence
  Description of Artificial Sequence: Synthetic oligonucleotide
uggcaguuaguacacauca

SEQ ID NO: 2905916 - RNA, 19 nt, Artificial Sequence
  Description of Artificial Sequence: Synthetic oligonucleotide
gauuccauuauccuccuga

SEQ ID NO: 2905917 - RNA, 19 nt, Artificial Sequence
  Description of Artificial Sequence: Synthetic oligonucleotide
aaugaagccauagcuaacu

SEQ ID NO: 2905918 - RNA, 19 nt, Artificial Sequence
  Description of Artificial Sequence: Synthetic oligonucleotide
auuucaagugaaaagggag

SEQ ID NO: 2905919 - RNA, 19 nt, Artificial Sequence
  Description of Artificial Sequence: Synthetic oligonucleotide
acuacugaacgccaaaagu

SEQ ID NO: 2905920 - RNA, 19 nt, Artificial Sequence
  Description of Artificial Sequence: Synthetic oligonucleotide
cuuuuguuucucuggaacc

SEQ ID NO: 2905921 - RNA, 19 nt, Artificial Sequence
  Description of Artificial Sequence: Synthetic oligonucleotide
ugcaacugaaccaugggaa

SEQ ID NO: 2905922 - RNA, 19 nt, Artificial Sequence
  Description of Artificial Sequence: Synthetic oligonucleotide
auaaauauugauccccuaa

SEQ ID NO: 2905923 - RNA, 19 nt, Artificial Sequence
  Description of Artificial Sequence: Synthetic oligonucleotide
cuacugaacgccaaaaguc

SEQ ID NO: 2905924 - RNA, 19 nt, Artificial Sequence
  Description of Artificial Sequence: Synthetic oligonucleotide
gaaccuuguuuucaaaaug

SEQ ID NO: 2905925 - RNA, 19 nt, Artificial Sequence
  Description of Artificial Sequence: Synthetic oligonucleotide
auugugagucuguagagga

SEQ ID NO: 2905926 - RNA, 19 nt, Artificial Sequence
  Description of Artificial Sequence: Synthetic oligonucleotide
agucaguucugcuucuugg

SEQ ID NO: 2905927 - RNA, 19 nt, Artificial Sequence
  Description of Artificial Sequence: Synthetic oligonucleotide
uggguaaccugacggaggg

SEQ ID NO: 2905928 - RNA, 19 nt, Artificial Sequence
  Description of Artificial Sequence: Synthetic oligonucleotide
gguaaagacugcuuuauug

SEQ ID NO: 2905929 - RNA, 19 nt, Artificial Sequence
  Description of Artificial Sequence: Synthetic oligonucleotide
gagagcaucagaugccccg

SEQ ID NO: 2905930 - RNA, 19 nt, Artificial Sequence
  Description of Artificial Sequence: Synthetic oligonucleotide
cuucuugggaaaugaagcc

SEQ ID NO: 2905931 - RNA, 19 nt, Artificial Sequence
  Description of Artificial Sequence: Synthetic oligonucleotide
aucuugguucaguugcugc

SEQ ID NO: 2905932 - RNA, 19 nt, Artificial Sequence
  Description of Artificial Sequence: Synthetic oligonucleotide
agauggcguacacuguucc

SEQ ID NO: 2905933 - RNA, 19 nt, Artificial Sequence
  Description of Artificial Sequence: Synthetic oligonucleotide
ugauccccuaagaagagcu

SEQ ID NO: 2905934 - RNA, 19 nt, Artificial Sequence
  Description of Artificial Sequence: Synthetic oligonucleotide
gaaugcaacugaaccaugg

SEQ ID NO: 2905935 - RNA, 19 nt, Artificial Sequence
  Description of Artificial Sequence: Synthetic oligonucleotide
uguuuucaaaaugccgucg

SEQ ID NO: 2905936 - RNA, 19 nt, Artificial Sequence
  Description of Artificial Sequence: Synthetic oligonucleotide
aagugucagagccauugug

SEQ ID NO: 2905937 - RNA, 19 nt, Artificial Sequence
  Description of Artificial Sequence: Synthetic oligonucleotide
uuccgcaacaucuugguuc

SEQ ID NO: 2905938 - RNA, 19 nt, Artificial Sequence
  Description of Artificial Sequence: Synthetic oligonucleotide
cacuguuccaccaaguguc

SEQ ID NO: 2905939 - RNA, 19 nt, Artificial Sequence
  Description of Artificial Sequence: Synthetic oligonucleotide
ucagauuccugguccgucg

SEQ ID NO: 2905940 - RNA, 19 nt, Artificial Sequence
  Description of Artificial Sequence: Synthetic oligonucleotide
acugauagauggcguacac

SEQ ID NO: 2905941 - RNA, 19 nt, Artificial Sequence
  Description of Artificial Sequence: Synthetic oligonucleotide
ugggaaaugaagccauagc

SEQ ID NO: 2905942 - RNA, 19 nt, Artificial Sequence
  Description of Artificial Sequence: Synthetic oligonucleotide
augaugaagucaguucugc

SEQ ID NO: 2905943 - RNA, 19 nt, Artificial Sequence
  Description of Artificial Sequence: Synthetic oligonucleotide
uacacuguuccaccaagug

SEQ ID NO: 2905944 - RNA, 19 nt, Artificial Sequence
  Description of Artificial Sequence: Synthetic oligonucleotide
gaaguagugcugauggucc

SEQ ID NO: 2905945 - RNA, 19 nt, Artificial Sequence
  Description of Artificial Sequence: Synthetic oligonucleotide
aaagggagacaaagcaugg

SEQ ID NO: 2905946 - RNA, 19 nt, Artificial Sequence
  Description of Artificial Sequence: Synthetic oligonucleotide
uuucaaaaugccgucguga

SEQ ID NO: 2905947 - RNA, 19 nt, Artificial Sequence
  Description of Artificial Sequence: Synthetic oligonucleotide
aaccgcgacuacugaacgc

SEQ ID NO: 2905948 - RNA, 19 nt, Artificial Sequence
  Description of Artificial Sequence: Synthetic oligonucleotide
aaagcaugguaaagacugc

SEQ ID NO: 2905949 - RNA, 19 nt, Artificial Sequence
  Description of Artificial Sequence: Synthetic oligonucleotide
uaguacacaucaauaaaua

SEQ ID NO: 2905950 - RNA, 19 nt, Artificial Sequence
  Description of Artificial Sequence: Synthetic oligonucleotide
uaaagacugcuuuauuggu

SEQ ID NO: 2905951 - RNA, 19 nt, Artificial Sequence
  Description of Artificial Sequence: Synthetic oligonucleotide
uuuucaaaaugccgucgug

SEQ ID NO: 2905952 - RNA, 19 nt, Artificial Sequence
  Description of Artificial Sequence: Synthetic oligonucleotide
ucuguagaggagagcauca

SEQ ID NO: 2905953 - RNA, 19 nt, Artificial Sequence
  Description of Artificial Sequence: Synthetic oligonucleotide
aguacacaucaauaaauau

SEQ ID NO: 2905954 - RNA, 19 nt, Artificial Sequence
  Description of Artificial Sequence: Synthetic oligonucleotide
ucaaaaugccgucgugaag

SEQ ID NO: 2905955 - RNA, 19 nt, Artificial Sequence
  Description of Artificial Sequence: Synthetic oligonucleotide
gacuacugaacgccaaaag

SEQ ID NO: 2905956 - RNA, 19 nt, Artificial Sequence
  Description of Artificial Sequence: Synthetic oligonucleotide
aaggcugggaugaugaagu

SEQ ID NO: 2905957 - RNA, 19 nt, Artificial Sequence
  Description of Artificial Sequence: Synthetic oligonucleotide
cuuguuuucaaaaugccgu

SEQ ID NO: 2905958 - RNA, 19 nt, Artificial Sequence
  Description of Artificial Sequence: Synthetic oligonucleotide
aaagacugcuuuauuggug

SEQ ID NO: 2905959 - RNA, 19 nt, Artificial Sequence
  Description of Artificial Sequence: Synthetic oligonucleotide
ugccccgccuuucagaugc

SEQ ID NO: 2905960 - RNA, 19 nt, Artificial Sequence
  Description of Artificial Sequence: Synthetic oligonucleotide
aaaugaagccauagcuaac

SEQ ID NO: 2905961 - RNA, 19 nt, Artificial Sequence
  Description of Artificial Sequence: Synthetic oligonucleotide
agcuaacugauagauggcg

SEQ ID NO: 2905962 - RNA, 19 nt, Artificial Sequence
  Description of Artificial Sequence: Synthetic oligonucleotide
ugaagccauagcuaacuga

SEQ ID NO: 2905963 - RNA, 19 nt, Artificial Sequence
  Description of Artificial Sequence: Synthetic oligonucleotide
ucuugggaaaugaagccau

SEQ ID NO: 2905964 - RNA, 19 nt, Artificial Sequence
  Description of Artificial Sequence: Synthetic oligonucleotide
aauaaauauugauccccua

SEQ ID NO: 2905965 - RNA, 19 nt, Artificial Sequence
  Description of Artificial Sequence: Synthetic oligonucleotide
ucaguugcugcccaccaac

SEQ ID NO: 2905966 - RNA, 19 nt, Artificial Sequence
  Description of Artificial Sequence: Synthetic oligonucleotide
uucaaaaugccgucgugaa

SEQ ID NO: 2905967 - RNA, 19 nt, Artificial Sequence
  Description of Artificial Sequence: Synthetic oligonucleotide
accgcgacuacugaacgcc

SEQ ID NO: 2905968 - RNA, 19 nt, Artificial Sequence
  Description of Artificial Sequence: Synthetic oligonucleotide
aaugccgucgugaaguagu

SEQ ID NO: 2905969 - RNA, 19 nt, Artificial Sequence
  Description of Artificial Sequence: Synthetic oligonucleotide
uucaagugaaaagggagac

SEQ ID NO: 2905970 - RNA, 19 nt, Artificial Sequence
  Description of Artificial Sequence: Synthetic oligonucleotide
guuaguacacaucaauaaa

SEQ ID NO: 2905971 - RNA, 19 nt, Artificial Sequence
  Description of Artificial Sequence: Synthetic oligonucleotide
uucagaugcacugggauuc

SEQ ID NO: 2905972 - RNA, 19 nt, Artificial Sequence
  Description of Artificial Sequence: Synthetic oligonucleotide
gucaguucugcuucuuggg

SEQ ID NO: 2905973 - RNA, 19 nt, Artificial Sequence
  Description of Artificial Sequence: Synthetic oligonucleotide
auuccugguccgucgagcg

SEQ ID NO: 2905974 - RNA, 19 nt, Artificial Sequence
  Description of Artificial Sequence: Synthetic oligonucleotide
agugcugaugguccucugg

SEQ ID NO: 2905975 - RNA, 19 nt, Artificial Sequence
  Description of Artificial Sequence: Synthetic oligonucleotide
ugugagucuguagaggaga

SEQ ID NO: 2905976 - RNA, 19 nt, Artificial Sequence
  Description of Artificial Sequence: Synthetic oligonucleotide
accuuguuuucaaaaugcc

SEQ ID NO: 2905977 - RNA, 19 nt, Artificial Sequence
  Description of Artificial Sequence: Synthetic oligonucleotide
gagucuguagaggagagca

SEQ ID NO: 2905978 - RNA, 19 nt, Artificial Sequence
  Description of Artificial Sequence: Synthetic oligonucleotide
uugggaaaugaagccauag

SEQ ID NO: 2905979 - RNA, 19 nt, Artificial Sequence
  Description of Artificial Sequence: Synthetic oligonucleotide
uugcugcccaccaaccgcg

SEQ ID NO: 2905980 - RNA, 19 nt, Artificial Sequence
  Description of Artificial Sequence: Synthetic oligonucleotide
auuauccuccugaaacagc

SEQ ID NO: 2905981 - RNA, 19 nt, Artificial Sequence
  Description of Artificial Sequence: Synthetic oligonucleotide
gagacaaagcaugguaaag

SEQ ID NO: 2905982 - RNA, 19 nt, Artificial Sequence
  Description of Artificial Sequence: Synthetic oligonucleotide
agcagauuccgcaacaucu

SEQ ID NO: 2905983 - RNA, 19 nt, Artificial Sequence
  Description of Artificial Sequence: Synthetic oligonucleotide
agagcucaguuacucauca

SEQ ID NO: 2905984 - RNA, 19 nt, Artificial Sequence
  Description of Artificial Sequence: Synthetic oligonucleotide
acucaucagauuccugguc

SEQ ID NO: 2905985 - RNA, 19 nt, Artificial Sequence
  Description of Artificial Sequence: Synthetic oligonucleotide
ucugcuucuugggaaauga

SEQ ID NO: 2905986 - RNA, 19 nt, Artificial Sequence
  Description of Artificial Sequence: Synthetic oligonucleotide
uggaaccuuguuuucaaaa

SEQ ID NO: 2905987 - RNA, 19 nt, Artificial Sequence
  Description of Artificial Sequence: Synthetic oligonucleotide
uccgcaacaucuugguuca

SEQ ID NO: 2905988 - RNA, 19 nt, Artificial Sequence
  Description of Artificial Sequence: Synthetic oligonucleotide
aguugcugcccaccaaccg

SEQ ID NO: 2905989 - RNA, 19 nt, Artificial Sequence
  Description of Artificial Sequence: Synthetic oligonucleotide
uuauugguggcaguuagua

SEQ ID NO: 2905990 - RNA, 19 nt, Artificial Sequence
  Description of Artificial Sequence: Synthetic oligonucleotide
uuuauugguggcaguuagu

SEQ ID NO: 2905991 - RNA, 19 nt, Artificial Sequence
  Description of Artificial Sequence: Synthetic oligonucleotide
agacaaagcaugguaaaga

SEQ ID NO: 2905992 - RNA, 19 nt, Artificial Sequence
  Description of Artificial Sequence: Synthetic oligonucleotide
gucagagccauugugaguc

SEQ ID NO: 2905993 - RNA, 19 nt, Artificial Sequence
  Description of Artificial Sequence: Synthetic oligonucleotide
uuguuuucaaaaugccguc

SEQ ID NO: 2905994 - RNA, 19 nt, Artificial Sequence
  Description of Artificial Sequence: Synthetic oligonucleotide
cauugugagucuguagagg

SEQ ID NO: 2905995 - RNA, 19 nt, Artificial Sequence
  Description of Artificial Sequence: Synthetic oligonucleotide
uguuccaccaagugucaga

SEQ ID NO: 2905996 - RNA, 19 nt, Artificial Sequence
  Description of Artificial Sequence: Synthetic oligonucleotide
acggagggccagcagauuc

SEQ ID NO: 2905997 - RNA, 19 nt, Artificial Sequence
  Description of Artificial Sequence: Synthetic oligonucleotide
auggcguacacuguuccac

SEQ ID NO: 2905998 - RNA, 19 nt, Artificial Sequence
  Description of Artificial Sequence: Synthetic oligonucleotide
uuguuucucuggaaccuug

SEQ ID NO: 2905999 - RNA, 19 nt, Artificial Sequence
  Description of Artificial Sequence: Synthetic oligonucleotide
ccuuguuuucaaaaugccg

SEQ ID NO: 2906000 - RNA, 19 nt, Artificial Sequence
  Description of Artificial Sequence: Synthetic oligonucleotide
uucuugggaaaugaagcca

SEQ ID NO: 2906001 - RNA, 19 nt, Artificial Sequence
  Description of Artificial Sequence: Synthetic oligonucleotide
uagaggagagcaucagaug

SEQ ID NO: 2906002 - RNA, 19 nt, Artificial Sequence
  Description of Artificial Sequence: Synthetic oligonucleotide
acacuguuccaccaagugu

SEQ ID NO: 2906003 - RNA, 19 nt, Artificial Sequence
  Description of Artificial Sequence: Synthetic oligonucleotide
uugugagucuguagaggag

SEQ ID NO: 2906004 - RNA, 19 nt, Artificial Sequence
  Description of Artificial Sequence: Synthetic oligonucleotide
ucuggguaaccugacggag

SEQ ID NO: 2906005 - RNA, 19 nt, Artificial Sequence
  Description of Artificial Sequence: Synthetic oligonucleotide
gugucagagccauugugag

SEQ ID NO: 2906006 - RNA, 19 nt, Artificial Sequence
  Description of Artificial Sequence: Synthetic oligonucleotide
augcaacugaaccauggga

SEQ ID NO: 2906007 - RNA, 19 nt, Artificial Sequence
  Description of Artificial Sequence: Synthetic oligonucleotide
cgugaaguagugcugaugg

SEQ ID NO: 2906008 - RNA, 19 nt, Artificial Sequence
  Description of Artificial Sequence: Synthetic oligonucleotide
gugcugaugguccucuggg

SEQ ID NO: 2906009 - RNA, 19 nt, Artificial Sequence
  Description of Artificial Sequence: Synthetic oligonucleotide
cauuauccuccugaaacag

SEQ ID NO: 2906010 - RNA, 19 nt, Artificial Sequence
  Description of Artificial Sequence: Synthetic oligonucleotide
gaugaugaagucaguucug

SEQ ID NO: 2906011 - RNA, 19 nt, Artificial Sequence
  Description of Artificial Sequence: Synthetic oligonucleotide
guugcugcccaccaaccgc

SEQ ID NO: 2906012 - RNA, 19 nt, Artificial Sequence
  Description of Artificial Sequence: Synthetic oligonucleotide
aagagcucaguuacucauc

SEQ ID NO: 2906013 - RNA, 19 nt, Artificial Sequence
  Description of Artificial Sequence: Synthetic oligonucleotide
cugaaacagcuuuuguuuc

SEQ ID NO: 2906014 - RNA, 19 nt, Artificial Sequence
  Description of Artificial Sequence: Synthetic oligonucleotide
uaagaagagcucaguuacu

SEQ ID NO: 2906015 - RNA, 19 nt, Artificial Sequence
  Description of Artificial Sequence: Synthetic oligonucleotide
uccccuaagaagagcucag

SEQ ID NO: 2906016 - RNA, 19 nt, Artificial Sequence
  Description of Artificial Sequence: Synthetic oligonucleotide
uauugguggcaguuaguac

SEQ ID NO: 2906017 - RNA, 19 nt, Artificial Sequence
  Description of Artificial Sequence: Synthetic oligonucleotide
auagauggcguacacuguu

SEQ ID NO: 2906018 - RNA, 19 nt, Artificial Sequence
  Description of Artificial Sequence: Synthetic oligonucleotide
aaacagcuuuuguuucucu

SEQ ID NO: 2906019 - RNA, 19 nt, Artificial Sequence
  Description of Artificial Sequence: Synthetic oligonucleotide
cuggguaaccugacggagg

SEQ ID NO: 2906020 - RNA, 19 nt, Artificial Sequence
  Description of Artificial Sequence: Synthetic oligonucleotide
ugaaugcaacugaaccaug

SEQ ID NO: 2906021 - RNA, 19 nt, Artificial Sequence
  Description of Artificial Sequence: Synthetic oligonucleotide
caguuacucaucagauucc

SEQ ID NO: 2906022 - RNA, 19 nt, Artificial Sequence
  Description of Artificial Sequence: Synthetic oligonucleotide
uagcuaacugauagauggc

SEQ ID NO: 2906023 - RNA, 19 nt, Artificial Sequence
  Description of Artificial Sequence: Synthetic oligonucleotide
agagcaucagaugccccgc

SEQ ID NO: 2906024 - RNA, 19 nt, Artificial Sequence
  Description of Artificial Sequence: Synthetic oligonucleotide
uacucaucagauuccuggu

SEQ ID NO: 2906025 - RNA, 19 nt, Artificial Sequence
  Description of Artificial Sequence: Synthetic oligonucleotide
cugggauuccauuauccuc

SEQ ID NO: 2906026 - RNA, 19 nt, Artificial Sequence
  Description of Artificial Sequence: Synthetic oligonucleotide
aagcaugguaaagacugcu

SEQ ID NO: 2906027 - RNA, 19 nt, Artificial Sequence
  Description of Artificial Sequence: Synthetic oligonucleotide
gugaaaagggagacaaagc

SEQ ID NO: 2906028 - RNA, 19 nt, Artificial Sequence
  Description of Artificial Sequence: Synthetic oligonucleotide
ugcacugggauuccauuau

SEQ ID NO: 2906029 - RNA, 19 nt, Artificial Sequence
  Description of Artificial Sequence: Synthetic oligonucleotide
caagugaaaagggagacaa

SEQ ID NO: 2906030 - RNA, 19 nt, Artificial Sequence
  Description of Artificial Sequence: Synthetic oligonucleotide
agacugcuuuauugguggc

SEQ ID NO: 2906031 - RNA, 19 nt, Artificial Sequence
  Description of Artificial Sequence: Synthetic oligonucleotide
agugucagagccauuguga

SEQ ID NO: 2906032 - RNA, 19 nt, Artificial Sequence
  Description of Artificial Sequence: Synthetic oligonucleotide
caacugaaccaugggaagg

SEQ ID NO: 2906033 - RNA, 19 nt, Artificial Sequence
  Description of Artificial Sequence: Synthetic oligonucleotide
ugaugaagucaguucugcu

SEQ ID NO: 2906034 - RNA, 19 nt, Artificial Sequence
  Description of Artificial Sequence: Synthetic oligonucleotide
uuucagaugcacugggauu

SEQ ID NO: 2906035 - RNA, 19 nt, Artificial Sequence
  Description of Artificial Sequence: Synthetic oligonucleotide
agaagagcucaguuacuca

SEQ ID NO: 2906036 - RNA, 19 nt, Artificial Sequence
  Description of Artificial Sequence: Synthetic oligonucleotide
aacugauagauggcguaca

SEQ ID NO: 2906037 - RNA, 19 nt, Artificial Sequence
  Description of Artificial Sequence: Synthetic oligonucleotide
guuccaccaagugucagag

SEQ ID NO: 2906038 - RNA, 19 nt, Artificial Sequence
  Description of Artificial Sequence: Synthetic oligonucleotide
agauuccgcaacaucuugg

SEQ ID NO: 2906039 - RNA, 19 nt, Artificial Sequence
  Description of Artificial Sequence: Synthetic oligonucleotide
ucaagugaaaagggagaca

SEQ ID NO: 2906040 - RNA, 19 nt, Artificial Sequence
  Description of Artificial Sequence: Synthetic oligonucleotide
aaguagugcugaugguccu

SEQ ID NO: 2906041 - RNA, 19 nt, Artificial Sequence
  Description of Artificial Sequence: Synthetic oligonucleotide
gcugggaugaugaagucag

SEQ ID NO: 2906042 - RNA, 19 nt, Artificial Sequence
  Description of Artificial Sequence: Synthetic oligonucleotide
uaacugauagauggcguac

SEQ ID NO: 2906043 - RNA, 19 nt, Artificial Sequence
  Description of Artificial Sequence: Synthetic oligonucleotide
gcuuuuguuucucuggaac

SEQ ID NO: 2906044 - RNA, 19 nt, Artificial Sequence
  Description of Artificial Sequence: Synthetic oligonucleotide
cuugguucaguugcugccc

SEQ ID NO: 2906045 - RNA, 19 nt, Artificial Sequence
  Description of Artificial Sequence: Synthetic oligonucleotide
agggccagcagauuccgca

SEQ ID NO: 2906046 - RNA, 19 nt, Artificial Sequence
  Description of Artificial Sequence: Synthetic oligonucleotide
ucagaugccccgccuuuca

SEQ ID NO: 2906047 - RNA, 19 nt, Artificial Sequence
  Description of Artificial Sequence: Synthetic oligonucleotide
auuccauuauccuccugaa

SEQ ID NO: 2906048 - RNA, 19 nt, Artificial Sequence
  Description of Artificial Sequence: Synthetic oligonucleotide
gaugaagucaguucugcuu

SEQ ID NO: 2906049 - RNA, 19 nt, Artificial Sequence
  Description of Artificial Sequence: Synthetic oligonucleotide
aguuacucaucagauuccu

SEQ ID NO: 2906050 - RNA, 19 nt, Artificial Sequence
  Description of Artificial Sequence: Synthetic oligonucleotide
gaggagagcaucagaugcc

SEQ ID NO: 2906051 - RNA, 19 nt, Artificial Sequence
  Description of Artificial Sequence: Synthetic oligonucleotide
aguucugcuucuugggaaa

SEQ ID NO: 2906052 - RNA, 19 nt, Artificial Sequence
  Description of Artificial Sequence: Synthetic oligonucleotide
gguaaccugacggagggcc

SEQ ID NO: 2906053 - RNA, 19 nt, Artificial Sequence
  Description of Artificial Sequence: Synthetic oligonucleotide
gccauugugagucuguaga

SEQ ID NO: 2906054 - RNA, 19 nt, Artificial Sequence
  Description of Artificial Sequence: Synthetic oligonucleotide
caaccgcgacuacugaacg

SEQ ID NO: 2906055 - RNA, 19 nt, Artificial Sequence
  Description of Artificial Sequence: Synthetic oligonucleotide
caacaucuugguucaguug

SEQ ID NO: 2906056 - RNA, 19 nt, Artificial Sequence
  Description of Artificial Sequence: Synthetic oligonucleotide
gggaaaugaagccauagcu

SEQ ID NO: 2906057 - RNA, 19 nt, Artificial Sequence
  Description of Artificial Sequence: Synthetic oligonucleotide
gaagccauagcuaacugau

SEQ ID NO: 2906058 - RNA, 19 nt, Artificial Sequence
  Description of Artificial Sequence: Synthetic oligonucleotide
gauuccugguccgucgagc

SEQ ID NO: 2906059 - RNA, 19 nt, Artificial Sequence
  Description of Artificial Sequence: Synthetic oligonucleotide
caaaaugccgucgugaagu

SEQ ID NO: 2906060 - RNA, 19 nt, Artificial Sequence
  Description of Artificial Sequence: Synthetic oligonucleotide
gcugaaugcaacugaacca

SEQ ID NO: 2906061 - RNA, 19 nt, Artificial Sequence
  Description of Artificial Sequence: Synthetic oligonucleotide
aucagauuccugguccguc

SEQ ID NO: 2906062 - RNA, 19 nt, Artificial Sequence
  Description of Artificial Sequence: Synthetic oligonucleotide
aaaaugccgucgugaagua

SEQ ID NO: 2906063 - RNA, 19 nt, Artificial Sequence
  Description of Artificial Sequence: Synthetic oligonucleotide
gcaacugaaccaugggaag

SEQ ID NO: 2906064 - RNA, 19 nt, Artificial Sequence
  Description of Artificial Sequence: Synthetic oligonucleotide
gaagagcucaguuacucau

SEQ ID NO: 2906065 - RNA, 19 nt, Artificial Sequence
  Description of Artificial Sequence: Synthetic oligonucleotide
aaaugccgucgugaaguag

SEQ ID NO: 2906066 - RNA, 19 nt, Artificial Sequence
  Description of Artificial Sequence: Synthetic oligonucleotide
uggcguacacuguuccacc

SEQ ID NO: 2906067 - RNA, 19 nt, Artificial Sequence
  Description of Artificial Sequence: Synthetic oligonucleotide
ugaagucaguucugcuucu

SEQ ID NO: 2906068 - RNA, 19 nt, Artificial Sequence
  Description of Artificial Sequence: Synthetic oligonucleotide
uugguucaguugcugccca

SEQ ID NO: 2906069 - RNA, 19 nt, Artificial Sequence
  Description of Artificial Sequence: Synthetic oligonucleotide
auugauccccuaagaagag

SEQ ID NO: 2906070 - RNA, 19 nt, Artificial Sequence
  Description of Artificial Sequence: Synthetic oligonucleotide
uccgucgagcgcugaaugc

SEQ ID NO: 2906071 - RNA, 19 nt, Artificial Sequence
  Description of Artificial Sequence: Synthetic oligonucleotide
augguaaagacugcuuuau

SEQ ID NO: 2906072 - RNA, 19 nt, Artificial Sequence
  Description of Artificial Sequence: Synthetic oligonucleotide
uuccauuauccuccugaaa

SEQ ID NO: 2906073 - RNA, 19 nt, Artificial Sequence
  Description of Artificial Sequence: Synthetic oligonucleotide
ugucagagccauugugagu

SEQ ID NO: 2906074 - RNA, 19 nt, Artificial Sequence
  Description of Artificial Sequence: Synthetic oligonucleotide
agccauugugagucuguag

SEQ ID NO: 2906075 - RNA, 19 nt, Artificial Sequence
  Description of Artificial Sequence: Synthetic oligonucleotide
ggaugaugaagucaguucu

SEQ ID NO: 2906076 - RNA, 19 nt, Artificial Sequence
  Description of Artificial Sequence: Synthetic oligonucleotide
uagauggcguacacuguuc

SEQ ID NO: 2906077 - RNA, 19 nt, Artificial Sequence
  Description of Artificial Sequence: Synthetic oligonucleotide
caauaaauauugauccccu

SEQ ID NO: 2906078 - RNA, 19 nt, Artificial Sequence
  Description of Artificial Sequence: Synthetic oligonucleotide
cuaacugauagauggcgua

SEQ ID NO: 2906079 - RNA, 19 nt, Artificial Sequence
  Description of Artificial Sequence: Synthetic oligonucleotide
cugaaccaugggaaggcug

SEQ ID NO: 2906080 - RNA, 19 nt, Artificial Sequence
  Description of Artificial Sequence: Synthetic oligonucleotide
cacaucaauaaauauugau

SEQ ID NO: 2906081 - RNA, 19 nt, Artificial Sequence
  Description of Artificial Sequence: Synthetic oligonucleotide
ccucuggguaaccugacgg

SEQ ID NO: 2906082 - RNA, 19 nt, Artificial Sequence
  Description of Artificial Sequence: Synthetic oligonucleotide
gggaugaugaagucaguuc

SEQ ID NO: 2906083 - RNA, 19 nt, Artificial Sequence
  Description of Artificial Sequence: Synthetic oligonucleotide
auccuccugaaacagcuuu

SEQ ID NO: 2906084 - RNA, 19 nt, Artificial Sequence
  Description of Artificial Sequence: Synthetic oligonucleotide
ugguccucuggguaaccug

SEQ ID NO: 2906085 - RNA, 19 nt, Artificial Sequence
  Description of Artificial Sequence: Synthetic oligonucleotide
gauuccgcaacaucuuggu

SEQ ID NO: 2906086 - RNA, 19 nt, Artificial Sequence
  Description of Artificial Sequence: Synthetic oligonucleotide
accaugggaaggcugggau

SEQ ID NO: 2906087 - RNA, 19 nt, Artificial Sequence
  Description of Artificial Sequence: Synthetic oligonucleotide
ucgagcgcugaaugcaacu

SEQ ID NO: 2906088 - RNA, 19 nt, Artificial Sequence
  Description of Artificial Sequence: Synthetic oligonucleotide
aguagugcugaugguccuc

SEQ ID NO: 2906089 - RNA, 19 nt, Artificial Sequence
  Description of Artificial Sequence: Synthetic oligonucleotide
cagauuccgcaacaucuug

SEQ ID NO: 2906090 - RNA, 19 nt, Artificial Sequence
  Description of Artificial Sequence: Synthetic oligonucleotide
acaaagcaugguaaagacu

SEQ ID NO: 2906091 - RNA, 19 nt, Artificial Sequence
  Description of Artificial Sequence: Synthetic oligonucleotide
caguuaguacacaucaaua

SEQ ID NO: 2906092 - RNA, 19 nt, Artificial Sequence
  Description of Artificial Sequence: Synthetic oligonucleotide
uugauccccuaagaagagc

SEQ ID NO: 2906093 - RNA, 19 nt, Artificial Sequence
  Description of Artificial Sequence: Synthetic oligonucleotide
guuuucaaaaugccgucgu

SEQ ID NO: 2906094 - RNA, 19 nt, Artificial Sequence
  Description of Artificial Sequence: Synthetic oligonucleotide
cgcugaaugcaacugaacc

SEQ ID NO: 2906095 - RNA, 19 nt, Artificial Sequence
  Description of Artificial Sequence: Synthetic oligonucleotide
auccccuaagaagagcuca

SEQ ID NO: 2906096 - RNA, 19 nt, Artificial Sequence
  Description of Artificial Sequence: Synthetic oligonucleotide
aaccugacggagggccagc

SEQ ID NO: 2906097 - RNA, 19 nt, Artificial Sequence
  Description of Artificial Sequence: Synthetic oligonucleotide
ugacggagggccagcagau

SEQ ID NO: 2906098 - RNA, 19 nt, Artificial Sequence
  Description of Artificial Sequence: Synthetic oligonucleotide
ucgugaaguagugcugaug

SEQ ID NO: 2906099 - RNA, 19 nt, Artificial Sequence
  Description of Artificial Sequence: Synthetic oligonucleotide
caugggaaggcugggauga

SEQ ID NO: 2906100 - RNA, 19 nt, Artificial Sequence
  Description of Artificial Sequence: Synthetic oligonucleotide
ugggaugaugaagucaguu

SEQ ID NO: 2906101 - RNA, 19 nt, Artificial Sequence
  Description of Artificial Sequence: Synthetic oligonucleotide
caugguaaagacugcuuua

SEQ ID NO: 2906102 - RNA, 19 nt, Artificial Sequence
  Description of Artificial Sequence: Synthetic oligonucleotide
ugguaaagacugcuuuauu

SEQ ID NO: 2906103 - RNA, 19 nt, Artificial Sequence
  Description of Artificial Sequence: Synthetic oligonucleotide
agauuccugguccgucgag

SEQ ID NO: 2906104 - RNA, 19 nt, Artificial Sequence
  Description of Artificial Sequence: Synthetic oligonucleotide
gauggcguacacuguucca

SEQ ID NO: 2906105 - RNA, 19 nt, Artificial Sequence
  Description of Artificial Sequence: Synthetic oligonucleotide
ugagucuguagaggagagc

SEQ ID NO: 2906106 - RNA, 19 nt, Artificial Sequence
  Description of Artificial Sequence: Synthetic oligonucleotide
uucaguugcugcccaccaa

SEQ ID NO: 2906107 - RNA, 19 nt, Artificial Sequence
  Description of Artificial Sequence: Synthetic oligonucleotide
gucuguagaggagagcauc

SEQ ID NO: 2906108 - RNA, 19 nt, Artificial Sequence
  Description of Artificial Sequence: Synthetic oligonucleotide
caguugcugcccaccaacc

SEQ ID NO: 2906109 - RNA, 19 nt, Artificial Sequence
  Description of Artificial Sequence: Synthetic oligonucleotide
uccugguccgucgagcgcu

SEQ ID NO: 2906110 - RNA, 19 nt, Artificial Sequence
  Description of Artificial Sequence: Synthetic oligonucleotide
gaaccaugggaaggcuggg

SEQ ID NO: 2906111 - RNA, 19 nt, Artificial Sequence
  Description of Artificial Sequence: Synthetic oligonucleotide
gaaaagggagacaaagcau

SEQ ID NO: 2906112 - RNA, 19 nt, Artificial Sequence
  Description of Artificial Sequence: Synthetic oligonucleotide
agaugccccgccuuucaga

SEQ ID NO: 2906113 - RNA, 19 nt, Artificial Sequence
  Description of Artificial Sequence: Synthetic oligonucleotide
gagcucaguuacucaucag

SEQ ID NO: 2906114 - RNA, 19 nt, Artificial Sequence
  Description of Artificial Sequence: Synthetic oligonucleotide
augcacugggauuccauua

SEQ ID NO: 2906115 - RNA, 19 nt, Artificial Sequence
  Description of Artificial Sequence: Synthetic oligonucleotide
ccaagugucagagccauug

SEQ ID NO: 2906116 - RNA, 19 nt, Artificial Sequence
  Description of Artificial Sequence: Synthetic oligonucleotide
gugagucuguagaggagag

SEQ ID NO: 2906117 - RNA, 19 nt, Artificial Sequence
  Description of Artificial Sequence: Synthetic oligonucleotide
gagcgcugaaugcaacuga

SEQ ID NO: 2906118 - RNA, 19 nt, Artificial Sequence
  Description of Artificial Sequence: Synthetic oligonucleotide
ugcugaugguccucugggu

SEQ ID NO: 2906119 - RNA, 19 nt, Artificial Sequence
  Description of Artificial Sequence: Synthetic oligonucleotide
uucugcuucuugggaaaug

SEQ ID NO: 2906120 - RNA, 19 nt, Artificial Sequence
  Description of Artificial Sequence: Synthetic oligonucleotide
uuuguuucucuggaaccuu

SEQ ID NO: 2906121 - RNA, 19 nt, Artificial Sequence
  Description of Artificial Sequence: Synthetic oligonucleotide
ucagaugcacugggauucc

SEQ ID NO: 2906122 - RNA, 19 nt, Artificial Sequence
  Description of Artificial Sequence: Synthetic oligonucleotide
guagaggagagcaucagau

SEQ ID NO: 2906123 - RNA, 19 nt, Artificial Sequence
  Description of Artificial Sequence: Synthetic oligonucleotide
ccauugugagucuguagag

SEQ ID NO: 2906124 - RNA, 19 nt, Artificial Sequence
  Description of Artificial Sequence: Synthetic oligonucleotide
agcaucagaugccccgccu

SEQ ID NO: 2906125 - RNA, 19 nt, Artificial Sequence
  Description of Artificial Sequence: Synthetic oligonucleotide
uccuccugaaacagcuuuu

SEQ ID NO: 2906126 - RNA, 19 nt, Artificial Sequence
  Description of Artificial Sequence: Synthetic oligonucleotide
cugacggagggccagcaga

SEQ ID NO: 2906127 - RNA, 19 nt, Artificial Sequence
  Description of Artificial Sequence: Synthetic oligonucleotide
aaccaugggaaggcuggga

SEQ ID NO: 2906128 - RNA, 19 nt, Artificial Sequence
  Description of Artificial Sequence: Synthetic oligonucleotide
guucaguugcugcccacca

SEQ ID NO: 2906129 - RNA, 19 nt, Artificial Sequence
  Description of Artificial Sequence: Synthetic oligonucleotide
aggcugggaugaugaaguc

SEQ ID NO: 2906130 - RNA, 19 nt, Artificial Sequence
  Description of Artificial Sequence: Synthetic oligonucleotide
accaaccgcgacuacugaa

SEQ ID NO: 2906131 - RNA, 19 nt, Artificial Sequence
  Description of Artificial Sequence: Synthetic oligonucleotide
ggaaaugaagccauagcua

SEQ ID NO: 2906132 - RNA, 19 nt, Artificial Sequence
  Description of Artificial Sequence: Synthetic oligonucleotide
ggagacaaagcaugguaaa

SEQ ID NO: 2906133 - RNA, 19 nt, Artificial Sequence
  Description of Artificial Sequence: Synthetic oligonucleotide
cuguagaggagagcaucag

SEQ ID NO: 2906134 - RNA, 19 nt, Artificial Sequence
  Description of Artificial Sequence: Synthetic oligonucleotide
guccgucgagcgcugaaug

SEQ ID NO: 2906135 - RNA, 19 nt, Artificial Sequence
  Description of Artificial Sequence: Synthetic oligonucleotide
uuccugguccgucgagcgc

SEQ ID NO: 2906136 - RNA, 19 nt, Artificial Sequence
  Description of Artificial Sequence: Synthetic oligonucleotide
guuacucaucagauuccug

SEQ ID NO: 2906137 - RNA, 19 nt, Artificial Sequence
  Description of Artificial Sequence: Synthetic oligonucleotide
acugaacgccaaaagucga

SEQ ID NO: 2906138 - RNA, 19 nt, Artificial Sequence
  Description of Artificial Sequence: Synthetic oligonucleotide
gagcaucagaugccccgcc

SEQ ID NO: 2906139 - RNA, 19 nt, Artificial Sequence
  Description of Artificial Sequence: Synthetic oligonucleotide
cagcuuuuguuucucugga

SEQ ID NO: 2906140 - RNA, 19 nt, Artificial Sequence
  Description of Artificial Sequence: Synthetic oligonucleotide
ccaaccgcgacuacugaac

SEQ ID NO: 2906141 - RNA, 19 nt, Artificial Sequence
  Description of Artificial Sequence: Synthetic oligonucleotide
cuuucagaugcacugggau

SEQ ID NO: 2906142 - RNA, 19 nt, Artificial Sequence
  Description of Artificial Sequence: Synthetic oligonucleotide
ugaugguccucuggguaac

SEQ ID NO: 2906143 - RNA, 19 nt, Artificial Sequence
  Description of Artificial Sequence: Synthetic oligonucleotide
acacaucaauaaauauuga

SEQ ID NO: 2906144 - RNA, 19 nt, Artificial Sequence
  Description of Artificial Sequence: Synthetic oligonucleotide
cucuggguaaccugacgga

SEQ ID NO: 2906145 - RNA, 19 nt, Artificial Sequence
  Description of Artificial Sequence: Synthetic oligonucleotide
cugaugguccucuggguaa

SEQ ID NO: 2906146 - RNA, 19 nt, Artificial Sequence
  Description of Artificial Sequence: Synthetic oligonucleotide
ugggaaggcugggaugaug

SEQ ID NO: 2906147 - RNA, 19 nt, Artificial Sequence
  Description of Artificial Sequence: Synthetic oligonucleotide
uuccaccaagugucagagc

SEQ ID NO: 2906148 - RNA, 19 nt, Artificial Sequence
  Description of Artificial Sequence: Synthetic oligonucleotide
caucuugguucaguugcug

SEQ ID NO: 2906149 - RNA, 19 nt, Artificial Sequence
  Description of Artificial Sequence: Synthetic oligonucleotide
cagcagauuccgcaacauc

SEQ ID NO: 2906150 - RNA, 19 nt, Artificial Sequence
  Description of Artificial Sequence: Synthetic oligonucleotide
gaugccccgccuuucagau

SEQ ID NO: 2906151 - RNA, 19 nt, Artificial Sequence
  Description of Artificial Sequence: Synthetic oligonucleotide
ccuaagaagagcucaguua

SEQ ID NO: 2906152 - RNA, 19 nt, Artificial Sequence
  Description of Artificial Sequence: Synthetic oligonucleotide
uauccuccugaaacagcuu

SEQ ID NO: 2906153 - RNA, 19 nt, Artificial Sequence
  Description of Artificial Sequence: Synthetic oligonucleotide
ggaaccuuguuuucaaaau

SEQ ID NO: 2906154 - RNA, 19 nt, Artificial Sequence
  Description of Artificial Sequence: Synthetic oligonucleotide
ccgccuuucagaugcacug

SEQ ID NO: 2906155 - RNA, 19 nt, Artificial Sequence
  Description of Artificial Sequence: Synthetic oligonucleotide
agagccauugugagucugu

SEQ ID NO: 2906156 - RNA, 19 nt, Artificial Sequence
  Description of Artificial Sequence: Synthetic oligonucleotide
cugaaugcaacugaaccau

SEQ ID NO: 2906157 - RNA, 19 nt, Artificial Sequence
  Description of Artificial Sequence: Synthetic oligonucleotide
acugaaccaugggaaggcu

SEQ ID NO: 2906158 - RNA, 19 nt, Artificial Sequence
  Description of Artificial Sequence: Synthetic oligonucleotide
guggcaguuaguacacauc

SEQ ID NO: 2906159 - RNA, 19 nt, Artificial Sequence
  Description of Artificial Sequence: Synthetic oligonucleotide
gcaguuaguacacaucaau

SEQ ID NO: 2906160 - RNA, 19 nt, Artificial Sequence
  Description of Artificial Sequence: Synthetic oligonucleotide
gaugcacugggauuccauu

SEQ ID NO: 2906161 - RNA, 19 nt, Artificial Sequence
  Description of Artificial Sequence: Synthetic oligonucleotide
gaugguccucuggguaacc

SEQ ID NO: 2906162 - RNA, 19 nt, Artificial Sequence
  Description of Artificial Sequence: Synthetic oligonucleotide
acaucuugguucaguugcu

SEQ ID NO: 2906163 - RNA, 19 nt, Artificial Sequence
  Description of Artificial Sequence: Synthetic oligonucleotide
auuccgcaacaucuugguu

SEQ ID NO: 2906164 - RNA, 19 nt, Artificial Sequence
  Description of Artificial Sequence: Synthetic oligonucleotide
ccauuauccuccugaaaca

SEQ ID NO: 2906165 - RNA, 19 nt, Artificial Sequence
  Description of Artificial Sequence: Synthetic oligonucleotide
gauagauggcguacacugu

SEQ ID NO: 2906166 - RNA, 19 nt, Artificial Sequence
  Description of Artificial Sequence: Synthetic oligonucleotide
gauccccuaagaagagcuc

SEQ ID NO: 2906167 - RNA, 19 nt, Artificial Sequence
  Description of Artificial Sequence: Synthetic oligonucleotide
gguucaguugcugcccacc

SEQ ID NO: 2906168 - RNA, 19 nt, Artificial Sequence
  Description of Artificial Sequence: Synthetic oligonucleotide
ccaccaaccgcgacuacug

SEQ ID NO: 2906169 - RNA, 19 nt, Artificial Sequence
  Description of Artificial Sequence: Synthetic oligonucleotide
agcgcugaaugcaacugaa

SEQ ID NO: 2906170 - RNA, 19 nt, Artificial Sequence
  Description of Artificial Sequence: Synthetic oligonucleotide
ugguucaguugcugcccac

SEQ ID NO: 2906171 - RNA, 19 nt, Artificial Sequence
  Description of Artificial Sequence: Synthetic oligonucleotide
uagugcugaugguccucug

SEQ ID NO: 2906172 - RNA, 19 nt, Artificial Sequence
  Description of Artificial Sequence: Synthetic oligonucleotide
cagaugccccgccuuucag

SEQ ID NO: 2906173 - RNA, 19 nt, Artificial Sequence
  Description of Artificial Sequence: Synthetic oligonucleotide
acuguuccaccaaguguca

SEQ ID NO: 2906174 - RNA, 19 nt, Artificial Sequence
  Description of Artificial Sequence: Synthetic oligonucleotide
cguacacuguuccaccaag

SEQ ID NO: 2906175 - RNA, 19 nt, Artificial Sequence
  Description of Artificial Sequence: Synthetic oligonucleotide
gggagacaaagcaugguaa

SEQ ID NO: 2906176 - RNA, 19 nt, Artificial Sequence
  Description of Artificial Sequence: Synthetic oligonucleotide
ugguccgucgagcgcugaa

SEQ ID NO: 2906177 - RNA, 19 nt, Artificial Sequence
  Description of Artificial Sequence: Synthetic oligonucleotide
ugcccaccaaccgcgacua

SEQ ID NO: 2906178 - RNA, 19 nt, Artificial Sequence
  Description of Artificial Sequence: Synthetic oligonucleotide
ccugaaacagcuuuuguuu

SEQ ID NO: 2906179 - RNA, 19 nt, Artificial Sequence
  Description of Artificial Sequence: Synthetic oligonucleotide
gccauagcuaacugauaga

SEQ ID NO: 2906180 - RNA, 19 nt, Artificial Sequence
  Description of Artificial Sequence: Synthetic oligonucleotide
ugccgucgugaaguagugc

SEQ ID NO: 2906181 - RNA, 19 nt, Artificial Sequence
  Description of Artificial Sequence: Synthetic oligonucleotide
agaugcacugggauuccau

SEQ ID NO: 2906182 - RNA, 19 nt, Artificial Sequence
  Description of Artificial Sequence: Synthetic oligonucleotide
aagccauagcuaacugaua

SEQ ID NO: 2906183 - RNA, 19 nt, Artificial Sequence
  Description of Artificial Sequence: Synthetic oligonucleotide
augguccucuggguaaccu

SEQ ID NO: 2906184 - RNA, 19 nt, Artificial Sequence
  Description of Artificial Sequence: Synthetic oligonucleotide
gccgucgugaaguagugcu

SEQ ID NO: 2906185 - RNA, 19 nt, Artificial Sequence
  Description of Artificial Sequence: Synthetic oligonucleotide
gguccucuggguaaccuga

SEQ ID NO: 2906186 - RNA, 19 nt, Artificial Sequence
  Description of Artificial Sequence: Synthetic oligonucleotide
cuugggaaaugaagccaua

SEQ ID NO: 2906187 - RNA, 19 nt, Artificial Sequence
  Description of Artificial Sequence: Synthetic oligonucleotide
gcugaugguccucugggua

SEQ ID NO: 2906188 - RNA, 19 nt, Artificial Sequence
  Description of Artificial Sequence: Synthetic oligonucleotide
cagagccauugugagucug

SEQ ID NO: 2906189 - RNA, 19 nt, Artificial Sequence
  Description of Artificial Sequence: Synthetic oligonucleotide
guaaccugacggagggcca

SEQ ID NO: 2906190 - RNA, 19 nt, Artificial Sequence
  Description of Artificial Sequence: Synthetic oligonucleotide
ugcugcccaccaaccgcga

SEQ ID NO: 2906191 - RNA, 19 nt, Artificial Sequence
  Description of Artificial Sequence: Synthetic oligonucleotide
augccgucgugaaguagug

SEQ ID NO: 2906192 - RNA, 19 nt, Artificial Sequence
  Description of Artificial Sequence: Synthetic oligonucleotide
cagauuccugguccgucga

SEQ ID NO: 2906193 - RNA, 19 nt, Artificial Sequence
  Description of Artificial Sequence: Synthetic oligonucleotide
ccaugggaaggcugggaug

SEQ ID NO: 2906194 - RNA, 19 nt, Artificial Sequence
  Description of Artificial Sequence: Synthetic oligonucleotide
agucuguagaggagagcau

SEQ ID NO: 2906195 - RNA, 19 nt, Artificial Sequence
  Description of Artificial Sequence: Synthetic oligonucleotide
gugaaguagugcugauggu

SEQ ID NO: 2906196 - RNA, 19 nt, Artificial Sequence
  Description of Artificial Sequence: Synthetic oligonucleotide
cuggaaccuuguuuucaaa

SEQ ID NO: 2906197 - RNA, 19 nt, Artificial Sequence
  Description of Artificial Sequence: Synthetic oligonucleotide
gguggcaguuaguacacau

SEQ ID NO: 2906198 - RNA, 19 nt, Artificial Sequence
  Description of Artificial Sequence: Synthetic oligonucleotide
gcaugguaaagacugcuuu

SEQ ID NO: 2906199 - RNA, 19 nt, Artificial Sequence
  Description of Artificial Sequence: Synthetic oligonucleotide
ccuccugaaacagcuuuug

SEQ ID NO: 2906200 - RNA, 19 nt, Artificial Sequence
  Description of Artificial Sequence: Synthetic oligonucleotide
ggcguacacuguuccacca

SEQ ID NO: 2906201 - RNA, 19 nt, Artificial Sequence
  Description of Artificial Sequence: Synthetic oligonucleotide
ugguggcaguuaguacaca

SEQ ID NO: 2906202 - RNA, 19 nt, Artificial Sequence
  Description of Artificial Sequence: Synthetic oligonucleotide
gagccauugugagucugua

SEQ ID NO: 2906203 - RNA, 19 nt, Artificial Sequence
  Description of Artificial Sequence: Synthetic oligonucleotide
guagugcugaugguccucu

SEQ ID NO: 2906204 - RNA, 19 nt, Artificial Sequence
  Description of Artificial Sequence: Synthetic oligonucleotide
ggcugggaugaugaaguca

SEQ ID NO: 2906205 - RNA, 19 nt, Artificial Sequence
  Description of Artificial Sequence: Synthetic oligonucleotide
gccagcagauuccgcaaca

SEQ ID NO: 2906206 - RNA, 19 nt, Artificial Sequence
  Description of Artificial Sequence: Synthetic oligonucleotide
gucgagcgcugaaugcaac

SEQ ID NO: 2906207 - RNA, 19 nt, Artificial Sequence
  Description of Artificial Sequence: Synthetic oligonucleotide
augccccgccuuucagaug

SEQ ID NO: 2906208 - RNA, 19 nt, Artificial Sequence
  Description of Artificial Sequence: Synthetic oligonucleotide
gcaacaucuugguucaguu

SEQ ID NO: 2906209 - RNA, 19 nt, Artificial Sequence
  Description of Artificial Sequence: Synthetic oligonucleotide
guuucucuggaaccuuguu

SEQ ID NO: 2906210 - RNA, 19 nt, Artificial Sequence
  Description of Artificial Sequence: Synthetic oligonucleotide
ggagagcaucagaugcccc

SEQ ID NO: 2906211 - RNA, 19 nt, Artificial Sequence
  Description of Artificial Sequence: Synthetic oligonucleotide
ggauuccauuauccuccug

SEQ ID NO: 2906212 - RNA, 19 nt, Artificial Sequence
  Description of Artificial Sequence: Synthetic oligonucleotide
caagugucagagccauugu

SEQ ID NO: 2906213 - RNA, 19 nt, Artificial Sequence
  Description of Artificial Sequence: Synthetic oligonucleotide
gagggccagcagauuccgc

SEQ ID NO: 2906214 - RNA, 19 nt, Artificial Sequence
  Description of Artificial Sequence: Synthetic oligonucleotide
gcacugggauuccauuauc

SEQ ID NO: 2906215 - RNA, 19 nt, Artificial Sequence
  Description of Artificial Sequence: Synthetic oligonucleotide
ccgucgugaaguagugcug

SEQ ID NO: 2906216 - RNA, 19 nt, Artificial Sequence
  Description of Artificial Sequence: Synthetic oligonucleotide
cugauagauggcguacacu

SEQ ID NO: 2906217 - RNA, 19 nt, Artificial Sequence
  Description of Artificial Sequence: Synthetic oligonucleotide
guacacuguuccaccaagu

SEQ ID NO: 2906218 - RNA, 19 nt, Artificial Sequence
  Description of Artificial Sequence: Synthetic oligonucleotide
gcuaacugauagauggcgu

SEQ ID NO: 2906219 - RNA, 19 nt, Artificial Sequence
  Description of Artificial Sequence: Synthetic oligonucleotide
ggccagcagauuccgcaac

SEQ ID NO: 2906220 - RNA, 19 nt, Artificial Sequence
  Description of Artificial Sequence: Synthetic oligonucleotide
cuccugaaacagcuuuugu

SEQ ID NO: 2906221 - RNA, 19 nt, Artificial Sequence
  Description of Artificial Sequence: Synthetic oligonucleotide
accugacggagggccagca

SEQ ID NO: 2906222 - RNA, 19 nt, Artificial Sequence
  Description of Artificial Sequence: Synthetic oligonucleotide
ccauagcuaacugauagau

SEQ ID NO: 2906223 - RNA, 19 nt, Artificial Sequence
  Description of Artificial Sequence: Synthetic oligonucleotide
gcgacuacugaacgccaaa

SEQ ID NO: 2906224 - RNA, 19 nt, Artificial Sequence
  Description of Artificial Sequence: Synthetic oligonucleotide
caccaaccgcgacuacuga

SEQ ID NO: 2906225 - RNA, 19 nt, Artificial Sequence
  Description of Artificial Sequence: Synthetic oligonucleotide
ggcaguuaguacacaucaa

SEQ ID NO: 2906226 - RNA, 19 nt, Artificial Sequence
  Description of Artificial Sequence: Synthetic oligonucleotide
cugcccaccaaccgcgacu

SEQ ID NO: 2906227 - RNA, 19 nt, Artificial Sequence
  Description of Artificial Sequence: Synthetic oligonucleotide
ggaaggcugggaugaugaa

SEQ ID NO: 2906228 - RNA, 19 nt, Artificial Sequence
  Description of Artificial Sequence: Synthetic oligonucleotide
caccaagugucagagccau

SEQ ID NO: 2906229 - RNA, 19 nt, Artificial Sequence
  Description of Artificial Sequence: Synthetic oligonucleotide
cgagcgcugaaugcaacug

SEQ ID NO: 2906230 - RNA, 19 nt, Artificial Sequence
  Description of Artificial Sequence: Synthetic oligonucleotide
ccugacggagggccagcag

SEQ ID NO: 2906231 - RNA, 19 nt, Artificial Sequence
  Description of Artificial Sequence: Synthetic oligonucleotide
gaagucaguucugcuucuu

SEQ ID NO: 2906232 - RNA, 19 nt, Artificial Sequence
  Description of Artificial Sequence: Synthetic oligonucleotide
ccaccaagugucagagcca

SEQ ID NO: 2906233 - RNA, 19 nt, Artificial Sequence
  Description of Artificial Sequence: Synthetic oligonucleotide
gucgugaaguagugcugau

SEQ ID NO: 2906234 - RNA, 19 nt, Artificial Sequence
  Description of Artificial Sequence: Synthetic oligonucleotide
gcguacacuguuccaccaa

SEQ ID NO: 2906235 - RNA, 19 nt, Artificial Sequence
  Description of Artificial Sequence: Synthetic oligonucleotide
gggccagcagauuccgcaa

SEQ ID NO: 2906236 - RNA, 19 nt, Artificial Sequence
  Description of Artificial Sequence: Synthetic oligonucleotide
cgccuuucagaugcacugg

SEQ ID NO: 2906237 - RNA, 19 nt, Artificial Sequence
  Description of Artificial Sequence: Synthetic oligonucleotide
cagaugcacugggauucca

SEQ ID NO: 2906238 - RNA, 19 nt, Artificial Sequence
  Description of Artificial Sequence: Synthetic oligonucleotide
gcgcugaaugcaacugaac

SEQ ID NO: 2906239 - RNA, 19 nt, Artificial Sequence
  Description of Artificial Sequence: Synthetic oligonucleotide
gcugcccaccaaccgcgac

SEQ ID NO: 2906240 - RNA, 19 nt, Artificial Sequence
  Description of Artificial Sequence: Synthetic oligonucleotide
augggaaggcugggaugau

SEQ ID NO: 2906241 - RNA, 19 nt, Artificial Sequence
  Description of Artificial Sequence: Synthetic oligonucleotide
cugggaugaugaagucagu

SEQ ID NO: 2906242 - RNA, 19 nt, Artificial Sequence
  Description of Artificial Sequence: Synthetic oligonucleotide
ccgucgagcgcugaaugca

SEQ ID NO: 2906243 - RNA, 19 nt, Artificial Sequence
  Description of Artificial Sequence: Synthetic oligonucleotide
gggauuccauuauccuccu

SEQ ID NO: 2906244 - RNA, 19 nt, Artificial Sequence
  Description of Artificial Sequence: Synthetic oligonucleotide
ggguaaccugacggagggc

SEQ ID NO: 2906245 - RNA, 19 nt, Artificial Sequence
  Description of Artificial Sequence: Synthetic oligonucleotide
cgucgugaaguagugcuga

SEQ ID NO: 2906246 - RNA, 19 nt, Artificial Sequence
  Description of Artificial Sequence: Synthetic oligonucleotide
guucugcuucuugggaaau

SEQ ID NO: 2906247 - RNA, 19 nt, Artificial Sequence
  Description of Artificial Sequence: Synthetic oligonucleotide
gcagauuccgcaacaucuu

SEQ ID NO: 2906248 - RNA, 19 nt, Artificial Sequence
  Description of Artificial Sequence: Synthetic oligonucleotide
cccuaagaagagcucaguu

SEQ ID NO: 2906249 - RNA, 19 nt, Artificial Sequence
  Description of Artificial Sequence: Synthetic oligonucleotide
ccugguccgucgagcgcug

SEQ ID NO: 2906250 - RNA, 19 nt, Artificial Sequence
  Description of Artificial Sequence: Synthetic oligonucleotide
accaagugucagagccauu

SEQ ID NO: 2906251 - RNA, 19 nt, Artificial Sequence
  Description of Artificial Sequence: Synthetic oligonucleotide
cccgccuuucagaugcacu

SEQ ID NO: 2906252 - RNA, 19 nt, Artificial Sequence
  Description of Artificial Sequence: Synthetic oligonucleotide
cgacuacugaacgccaaaa

SEQ ID NO: 2906253 - RNA, 19 nt, Artificial Sequence
  Description of Artificial Sequence: Synthetic oligonucleotide
ccgcgacuacugaacgcca

SEQ ID NO: 2906254 - RNA, 19 nt, Artificial Sequence
  Description of Artificial Sequence: Synthetic oligonucleotide
cgucgagcgcugaaugcaa

SEQ ID NO: 2906255 - RNA, 19 nt, Artificial Sequence
  Description of Artificial Sequence: Synthetic oligonucleotide
gguccgucgagcgcugaau

SEQ ID NO: 2906256 - RNA, 19 nt, Artificial Sequence
  Description of Artificial Sequence: Synthetic oligonucleotide
cccaccaaccgcgacuacu

SEQ ID NO: 2906257 - RNA, 19 nt, Artificial Sequence
  Description of Artificial Sequence: Synthetic oligonucleotide
gacggagggccagcagauu

SEQ ID NO: 2906258 - RNA, 19 nt, Artificial Sequence
  Description of Artificial Sequence: Synthetic oligonucleotide
cgcgacuacugaacgccaa

SEQ ID NO: 2906259 - RNA, 19 nt, Artificial Sequence
  Description of Artificial Sequence: Synthetic oligonucleotide
cugguccgucgagcgcuga

SEQ ID NO: 2906260 - RNA, 19 nt, Artificial Sequence
  Description of Artificial Sequence: Synthetic oligonucleotide
ccccgccuuucagaugcac

SEQ ID NO: 2906261 - RNA, 19 nt, Artificial Sequence
  Description of Artificial Sequence: Synthetic oligonucleotide
cgcaacaucuugguucagu

SEQ ID NO: 2906262 - RNA, 19 nt, Artificial Sequence
  Description of Artificial Sequence: Synthetic oligonucleotide
gcccaccaaccgcgacuac

SEQ ID NO: 2906263 - RNA, 19 nt, Artificial Sequence
  Description of Artificial Sequence: Synthetic oligonucleotide
ccagcagauuccgcaacau

SEQ ID NO: 2906264 - RNA, 19 nt, Artificial Sequence
  Description of Artificial Sequence: Synthetic oligonucleotide
ccgcaacaucuugguucag

SEQ ID NO: 2906265 - RNA, 19 nt, Artificial Sequence
  Description of Artificial Sequence: Synthetic oligonucleotide
ccccuaagaagagcucagu

SEQ ID NO: 2906266 - RNA, 19 nt, Artificial Sequence
  Description of Artificial Sequence: Synthetic oligonucleotide
gccccgccuuucagaugca

SEQ ID NO: 2906267 - RNA, 19 nt, Artificial Sequence
  Description of Artificial Sequence: Synthetic oligonucleotide
auaaauuucacuuuuggac

SEQ ID NO: 2906268 - RNA, 19 nt, Artificial Sequence
  Description of Artificial Sequence: Synthetic oligonucleotide
aaauaaauuucacuuuugg

SEQ ID NO: 2906269 - RNA, 19 nt, Artificial Sequence
  Description of Artificial Sequence: Synthetic oligonucleotide
aauuccaauaaauaaauuu

SEQ ID NO: 2906270 - RNA, 19 nt, Artificial Sequence
  Description of Artificial Sequence: Synthetic oligonucleotide
aauaaauuucacuuuugga

SEQ ID NO: 2906271 - RNA, 19 nt, Artificial Sequence
  Description of Artificial Sequence: Synthetic oligonucleotide
auucaaucugccuaguaac

SEQ ID NO: 2906272 - RNA, 19 nt, Artificial Sequence
  Description of Artificial Sequence: Synthetic oligonucleotide
cuaguaacaagucuuuugg

SEQ ID NO: 2906273 - RNA, 19 nt, Artificial Sequence
  Description of Artificial Sequence: Synthetic oligonucleotide
auuccaauaaauaaauuuc

SEQ ID NO: 2906274 - RNA, 19 nt, Artificial Sequence
  Description of Artificial Sequence: Synthetic oligonucleotide
ugagguauggccuacugcc

SEQ ID NO: 2906275 - RNA, 19 nt, Artificial Sequence
  Description of Artificial Sequence: Synthetic oligonucleotide
aacauguugacaacucucc

SEQ ID NO: 2906276 - RNA, 19 nt, Artificial Sequence
  Description of Artificial Sequence: Synthetic oligonucleotide
cuuaucccaacauaguucc

SEQ ID NO: 2906277 - RNA, 19 nt, Artificial Sequence
  Description of Artificial Sequence: Synthetic oligonucleotide
aauuacugaauuccaauaa

SEQ ID NO: 2906278 - RNA, 19 nt, Artificial Sequence
  Description of Artificial Sequence: Synthetic oligonucleotide
ugaauuccaauaaauaaau

SEQ ID NO: 2906279 - RNA, 19 nt, Artificial Sequence
  Description of Artificial Sequence: Synthetic oligonucleotide
uuccaauaaauaaauuuca

SEQ ID NO: 2906280 - RNA, 19 nt, Artificial Sequence
  Description of Artificial Sequence: Synthetic oligonucleotide
acugaauuccaauaaauaa

SEQ ID NO: 2906281 - RNA, 19 nt, Artificial Sequence
  Description of Artificial Sequence: Synthetic oligonucleotide
ugugauacaaccuggaauu

SEQ ID NO: 2906282 - RNA, 19 nt, Artificial Sequence
  Description of Artificial Sequence: Synthetic oligonucleotide
acuuuuggacauuugaucu

SEQ ID NO: 2906283 - RNA, 19 nt, Artificial Sequence
  Description of Artificial Sequence: Synthetic oligonucleotide
uaacucaacauguugacaa

SEQ ID NO: 2906284 - RNA, 19 nt, Artificial Sequence
  Description of Artificial Sequence: Synthetic oligonucleotide
auaaauaaauuucacuuuu

SEQ ID NO: 2906285 - RNA, 19 nt, Artificial Sequence
  Description of Artificial Sequence: Synthetic oligonucleotide
uuuagcaccaacagacuug

SEQ ID NO: 2906286 - RNA, 19 nt, Artificial Sequence
  Description of Artificial Sequence: Synthetic oligonucleotide
cacacuuaucccaacauag

SEQ ID NO: 2906287 - RNA, 19 nt, Artificial Sequence
  Description of Artificial Sequence: Synthetic oligonucleotide
uaaauaaauuucacuuuug

SEQ ID NO: 2906288 - RNA, 19 nt, Artificial Sequence
  Description of Artificial Sequence: Synthetic oligonucleotide
aguggugucaaugaagcgg

SEQ ID NO: 2906289 - RNA, 19 nt, Artificial Sequence
  Description of Artificial Sequence: Synthetic oligonucleotide
agaguggugucaaugaagc

SEQ ID NO: 2906290 - RNA, 19 nt, Artificial Sequence
  Description of Artificial Sequence: Synthetic oligonucleotide
aagcgguccacacagcuag

SEQ ID NO: 2906291 - RNA, 19 nt, Artificial Sequence
  Description of Artificial Sequence: Synthetic oligonucleotide
acauuuauuaaccggugug

SEQ ID NO: 2906292 - RNA, 19 nt, Artificial Sequence
  Description of Artificial Sequence: Synthetic oligonucleotide
uccaauaaauaaauuucac

SEQ ID NO: 2906293 - RNA, 19 nt, Artificial Sequence
  Description of Artificial Sequence: Synthetic oligonucleotide
uuucuguacgaucugggca

SEQ ID NO: 2906294 - RNA, 19 nt, Artificial Sequence
  Description of Artificial Sequence: Synthetic oligonucleotide
ugaugcuaacucaacaugu

SEQ ID NO: 2906295 - RNA, 19 nt, Artificial Sequence
  Description of Artificial Sequence: Synthetic oligonucleotide
aacucaacauguugacaac

SEQ ID NO: 2906296 - RNA, 19 nt, Artificial Sequence
  Description of Artificial Sequence: Synthetic oligonucleotide
caugaagugaugcaccugc

SEQ ID NO: 2906297 - RNA, 19 nt, Artificial Sequence
  Description of Artificial Sequence: Synthetic oligonucleotide
ugcuaacucaacauguuga

SEQ ID NO: 2906298 - RNA, 19 nt, Artificial Sequence
  Description of Artificial Sequence: Synthetic oligonucleotide
uaacaagucuuuuggaucu

SEQ ID NO: 2906299 - RNA, 19 nt, Artificial Sequence
  Description of Artificial Sequence: Synthetic oligonucleotide
agacgucacauuuauuaac

SEQ ID NO: 2906300 - RNA, 19 nt, Artificial Sequence
  Description of Artificial Sequence: Synthetic oligonucleotide
gucugcuucaccaagcucg

SEQ ID NO: 2906301 - RNA, 19 nt, Artificial Sequence
  Description of Artificial Sequence: Synthetic oligonucleotide
gaucugggcaaaccgaccg

SEQ ID NO: 2906302 - RNA, 19 nt, Artificial Sequence
  Description of Artificial Sequence: Synthetic oligonucleotide
uggacauuugaucuguacu

SEQ ID NO: 2906303 - RNA, 19 nt, Artificial Sequence
  Description of Artificial Sequence: Synthetic oligonucleotide
agagaggcaguuuucagug

SEQ ID NO: 2906304 - RNA, 19 nt, Artificial Sequence
  Description of Artificial Sequence: Synthetic oligonucleotide
agucuagccgauuuccugg

SEQ ID NO: 2906305 - RNA, 19 nt, Artificial Sequence
  Description of Artificial Sequence: Synthetic oligonucleotide
uguaacuccgcuucgucug

SEQ ID NO: 2906306 - RNA, 19 nt, Artificial Sequence
  Description of Artificial Sequence: Synthetic oligonucleotide
uuacugaauuccaauaaau

SEQ ID NO: 2906307 - RNA, 19 nt, Artificial Sequence
  Description of Artificial Sequence: Synthetic oligonucleotide
uaaccggugugauacaacc

SEQ ID NO: 2906308 - RNA, 19 nt, Artificial Sequence
  Description of Artificial Sequence: Synthetic oligonucleotide
aguaacaagucuuuuggau

SEQ ID NO: 2906309 - RNA, 19 nt, Artificial Sequence
  Description of Artificial Sequence: Synthetic oligonucleotide
uuagcaccaacagacuugg

SEQ ID NO: 2906310 - RNA, 19 nt, Artificial Sequence
  Description of Artificial Sequence: Synthetic oligonucleotide
agaggcaguuuucagugcg

SEQ ID NO: 2906311 - RNA, 19 nt, Artificial Sequence
  Description of Artificial Sequence: Synthetic oligonucleotide
uugacaacucuccacuggc

SEQ ID NO: 2906312 - RNA, 19 nt, Artificial Sequence
  Description of Artificial Sequence: Synthetic oligonucleotide
aaauuucacuuuuggacau

SEQ ID NO: 2906313 - RNA, 19 nt, Artificial Sequence
  Description of Artificial Sequence: Synthetic oligonucleotide
aaaccgaccggugauagca

SEQ ID NO: 2906314 - RNA, 19 nt, Artificial Sequence
  Description of Artificial Sequence: Synthetic oligonucleotide
agugaacugcgccuucugc

SEQ ID NO: 2906315 - RNA, 19 nt, Artificial Sequence
  Description of Artificial Sequence: Synthetic oligonucleotide
aagugaugcaccugcgcag

SEQ ID NO: 2906316 - RNA, 19 nt, Artificial Sequence
  Description of Artificial Sequence: Synthetic oligonucleotide
agucuuuuggaucuucugu

SEQ ID NO: 2906317 - RNA, 19 nt, Artificial Sequence
  Description of Artificial Sequence: Synthetic oligonucleotide
cuucuccacacacuuaucc

SEQ ID NO: 2906318 - RNA, 19 nt, Artificial Sequence
  Description of Artificial Sequence: Synthetic oligonucleotide
gacgucacauuuauuaacc

SEQ ID NO: 2906319 - RNA, 19 nt, Artificial Sequence
  Description of Artificial Sequence: Synthetic oligonucleotide
ucugccuaguaacaagucu

SEQ ID NO: 2906320 - RNA, 19 nt, Artificial Sequence
  Description of Artificial Sequence: Synthetic oligonucleotide
uacugaauuccaauaaaua

SEQ ID NO: 2906321 - RNA, 19 nt, Artificial Sequence
  Description of Artificial Sequence: Synthetic oligonucleotide
ugcuucaccaagcucggcc

SEQ ID NO: 2906322 - RNA, 19 nt, Artificial Sequence
  Description of Artificial Sequence: Synthetic oligonucleotide
ucauuccugagguauggcc

SEQ ID NO: 2906323 - RNA, 19 nt, Artificial Sequence
  Description of Artificial Sequence: Synthetic oligonucleotide
auuacugaauuccaauaaa

SEQ ID NO: 2906324 - RNA, 19 nt, Artificial Sequence
  Description of Artificial Sequence: Synthetic oligonucleotide
guaacaagucuuuuggauc

SEQ ID NO: 2906325 - RNA, 19 nt, Artificial Sequence
  Description of Artificial Sequence: Synthetic oligonucleotide
guugacaacucuccacugg

SEQ ID NO: 2906326 - RNA, 19 nt, Artificial Sequence
  Description of Artificial Sequence: Synthetic oligonucleotide
uucaaucugccuaguaaca

SEQ ID NO: 2906327 - RNA, 19 nt, Artificial Sequence
  Description of Artificial Sequence: Synthetic oligonucleotide
uuccaugaagugaugcacc

SEQ ID NO: 2906328 - RNA, 19 nt, Artificial Sequence
  Description of Artificial Sequence: Synthetic oligonucleotide
ucaacauguugacaacucu

SEQ ID NO: 2906329 - RNA, 19 nt, Artificial Sequence
  Description of Artificial Sequence: Synthetic oligonucleotide
ucacauuuauuaaccggug

SEQ ID NO: 2906330 - RNA, 19 nt, Artificial Sequence
  Description of Artificial Sequence: Synthetic oligonucleotide
acuuaucccaacauaguuc

SEQ ID NO: 2906331 - RNA, 19 nt, Artificial Sequence
  Description of Artificial Sequence: Synthetic oligonucleotide
cugaauuccaauaaauaaa

SEQ ID NO: 2906332 - RNA, 19 nt, Artificial Sequence
  Description of Artificial Sequence: Synthetic oligonucleotide
acaaccuggaauuacugaa

SEQ ID NO: 2906333 - RNA, 19 nt, Artificial Sequence
  Description of Artificial Sequence: Synthetic oligonucleotide
auguugacaacucuccacu

SEQ ID NO: 2906334 - RNA, 19 nt, Artificial Sequence
  Description of Artificial Sequence: Synthetic oligonucleotide
ucacuuuuggacauuugau

SEQ ID NO: 2906335 - RNA, 19 nt, Artificial Sequence
  Description of Artificial Sequence: Synthetic oligonucleotide
aagaguggugucaaugaag

SEQ ID NO: 2906336 - RNA, 19 nt, Artificial Sequence
  Description of Artificial Sequence: Synthetic oligonucleotide
gaagugaugcaccugcgca

SEQ ID NO: 2906337 - RNA, 19 nt, Artificial Sequence
  Description of Artificial Sequence: Synthetic oligonucleotide
uucuguacgaucugggcaa

SEQ ID NO: 2906338 - RNA, 19 nt, Artificial Sequence
  Description of Artificial Sequence: Synthetic oligonucleotide
ucuccacacacuuauccca

SEQ ID NO: 2906339 - RNA, 19 nt, Artificial Sequence
  Description of Artificial Sequence: Synthetic oligonucleotide
guacgaucugggcaaaccg

SEQ ID NO: 2906340 - RNA, 19 nt, Artificial Sequence
  Description of Artificial Sequence: Synthetic oligonucleotide
gguccacacagcuagagag

SEQ ID NO: 2906341 - RNA, 19 nt, Artificial Sequence
  Description of Artificial Sequence: Synthetic oligonucleotide
ucuuuuggaucuucuguca

SEQ ID NO: 2906342 - RNA, 19 nt, Artificial Sequence
  Description of Artificial Sequence: Synthetic oligonucleotide
ucugcuucaccaagcucgg

SEQ ID NO: 2906343 - RNA, 19 nt, Artificial Sequence
  Description of Artificial Sequence: Synthetic oligonucleotide
cacuuuuggacauuugauc

SEQ ID NO: 2906344 - RNA, 19 nt, Artificial Sequence
  Description of Artificial Sequence: Synthetic oligonucleotide
uggaucuucugucauuccu

SEQ ID NO: 2906345 - RNA, 19 nt, Artificial Sequence
  Description of Artificial Sequence: Synthetic oligonucleotide
cauguugacaacucuccac

SEQ ID NO: 2906346 - RNA, 19 nt, Artificial Sequence
  Description of Artificial Sequence: Synthetic oligonucleotide
uuuuagcaccaacagacuu

SEQ ID NO: 2906347 - RNA, 19 nt, Artificial Sequence
  Description of Artificial Sequence: Synthetic oligonucleotide
ugaagugaugcaccugcgc

SEQ ID NO: 2906348 - RNA, 19 nt, Artificial Sequence
  Description of Artificial Sequence: Synthetic oligonucleotide
cuuucuguacgaucugggc

SEQ ID NO: 2906349 - RNA, 19 nt, Artificial Sequence
  Description of Artificial Sequence: Synthetic oligonucleotide
uagagaggcaguuuucagu

SEQ ID NO: 2906350 - RNA, 19 nt, Artificial Sequence
  Description of Artificial Sequence: Synthetic oligonucleotide
ucugucauuccugagguau

SEQ ID NO: 2906351 - RNA, 19 nt, Artificial Sequence
  Description of Artificial Sequence: Synthetic oligonucleotide
gaauuacugaauuccaaua

SEQ ID NO: 2906352 - RNA, 19 nt, Artificial Sequence
  Description of Artificial Sequence: Synthetic oligonucleotide
ugucauuccugagguaugg

SEQ ID NO: 2906353 - RNA, 19 nt, Artificial Sequence
  Description of Artificial Sequence: Synthetic oligonucleotide
accggugugauacaaccug

SEQ ID NO: 2906354 - RNA, 19 nt, Artificial Sequence
  Description of Artificial Sequence: Synthetic oligonucleotide
ugaagcgguccacacagcu

SEQ ID NO: 2906355 - RNA, 19 nt, Artificial Sequence
  Description of Artificial Sequence: Synthetic oligonucleotide
uacaaccuggaauuacuga

SEQ ID NO: 2906356 - RNA, 19 nt, Artificial Sequence
  Description of Artificial Sequence: Synthetic oligonucleotide
uggaauuacugaauuccaa

SEQ ID NO: 2906357 - RNA, 19 nt, Artificial Sequence
  Description of Artificial Sequence: Synthetic oligonucleotide
aguuccaugaagugaugca

SEQ ID NO: 2906358 - RNA, 19 nt, Artificial Sequence
  Description of Artificial Sequence: Synthetic oligonucleotide
uuuuggacauuugaucugu

SEQ ID NO: 2906359 - RNA, 19 nt, Artificial Sequence
  Description of Artificial Sequence: Synthetic oligonucleotide
caaucugccuaguaacaag

SEQ ID NO: 2906360 - RNA, 19 nt, Artificial Sequence
  Description of Artificial Sequence: Synthetic oligonucleotide
ugaacugcgccuucugcug

SEQ ID NO: 2906361 - RNA, 19 nt, Artificial Sequence
  Description of Artificial Sequence: Synthetic oligonucleotide
caacagacuugguagcugc

SEQ ID NO: 2906362 - RNA, 19 nt, Artificial Sequence
  Description of Artificial Sequence: Synthetic oligonucleotide
acgucacauuuauuaaccg

SEQ ID NO: 2906363 - RNA, 19 nt, Artificial Sequence
  Description of Artificial Sequence: Synthetic oligonucleotide
accggugauagcaagagug

SEQ ID NO: 2906364 - RNA, 19 nt, Artificial Sequence
  Description of Artificial Sequence: Synthetic oligonucleotide
gcaccaacagacuugguag

SEQ ID NO: 2906365 - RNA, 19 nt, Artificial Sequence
  Description of Artificial Sequence: Synthetic oligonucleotide
uacgaucugggcaaaccga

SEQ ID NO: 2906366 - RNA, 19 nt, Artificial Sequence
  Description of Artificial Sequence: Synthetic oligonucleotide
aaucugccuaguaacaagu

SEQ ID NO: 2906367 - RNA, 19 nt, Artificial Sequence
  Description of Artificial Sequence: Synthetic oligonucleotide
uguacgaucugggcaaacc

SEQ ID NO: 2906368 - RNA, 19 nt, Artificial Sequence
  Description of Artificial Sequence: Synthetic oligonucleotide
caacauguugacaacucuc

SEQ ID NO: 2906369 - RNA, 19 nt, Artificial Sequence
  Description of Artificial Sequence: Synthetic oligonucleotide
uggccauucaaucugccua

SEQ ID NO: 2906370 - RNA, 19 nt, Artificial Sequence
  Description of Artificial Sequence: Synthetic oligonucleotide
uccacuggccauucaaucu

SEQ ID NO: 2906371 - RNA, 19 nt, Artificial Sequence
  Description of Artificial Sequence: Synthetic oligonucleotide
cuuuuggacauuugaucug

SEQ ID NO: 2906372 - RNA, 19 nt, Artificial Sequence
  Description of Artificial Sequence: Synthetic oligonucleotide
augcuaacucaacauguug

SEQ ID NO: 2906373 - RNA, 19 nt, Artificial Sequence
  Description of Artificial Sequence: Synthetic oligonucleotide
accuggaauuacugaauuc

SEQ ID NO: 2906374 - RNA, 19 nt, Artificial Sequence
  Description of Artificial Sequence: Synthetic oligonucleotide
cugaugcuaacucaacaug

SEQ ID NO: 2906375 - RNA, 19 nt, Artificial Sequence
  Description of Artificial Sequence: Synthetic oligonucleotide
uuuauuaaccggugugaua

SEQ ID NO: 2906376 - RNA, 19 nt, Artificial Sequence
  Description of Artificial Sequence: Synthetic oligonucleotide
aaccuggaauuacugaauu

SEQ ID NO: 2906377 - RNA, 19 nt, Artificial Sequence
  Description of Artificial Sequence: Synthetic oligonucleotide
gucuuuuggaucuucuguc

SEQ ID NO: 2906378 - RNA, 19 nt, Artificial Sequence
  Description of Artificial Sequence: Synthetic oligonucleotide
uucgucugcuucaccaagc

SEQ ID NO: 2906379 - RNA, 19 nt, Artificial Sequence
  Description of Artificial Sequence: Synthetic oligonucleotide
uaguaacaagucuuuugga

SEQ ID NO: 2906380 - RNA, 19 nt, Artificial Sequence
  Description of Artificial Sequence: Synthetic oligonucleotide
gagucuagccgauuuccug

SEQ ID NO: 2906381 - RNA, 19 nt, Artificial Sequence
  Description of Artificial Sequence: Synthetic oligonucleotide
cucaacauguugacaacuc

SEQ ID NO: 2906382 - RNA, 19 nt, Artificial Sequence
  Description of Artificial Sequence: Synthetic oligonucleotide
agcugccugaugcuaacuc

SEQ ID NO: 2906383 - RNA, 19 nt, Artificial Sequence
  Description of Artificial Sequence: Synthetic oligonucleotide
gauagcaagagugguguca

SEQ ID NO: 2906384 - RNA, 19 nt, Artificial Sequence
  Description of Artificial Sequence: Synthetic oligonucleotide
uccuuucuguacgaucugg

SEQ ID NO: 2906385 - RNA, 19 nt, Artificial Sequence
  Description of Artificial Sequence: Synthetic oligonucleotide
agugcgggagucuagccga

SEQ ID NO: 2906386 - RNA, 19 nt, Artificial Sequence
  Description of Artificial Sequence: Synthetic oligonucleotide
aacagacuugguagcugcc

SEQ ID NO: 2906387 - RNA, 19 nt, Artificial Sequence
  Description of Artificial Sequence: Synthetic oligonucleotide
cacacagcuagagaggcag

SEQ ID NO: 2906388 - RNA, 19 nt, Artificial Sequence
  Description of Artificial Sequence: Synthetic oligonucleotide
ccuggaauuacugaauucc

SEQ ID NO: 2906389 - RNA, 19 nt, Artificial Sequence
  Description of Artificial Sequence: Synthetic oligonucleotide
ccaagcucggccauggucg

SEQ ID NO: 2906390 - RNA, 19 nt, Artificial Sequence
  Description of Artificial Sequence: Synthetic oligonucleotide
uccaugaagugaugcaccu

SEQ ID NO: 2906391 - RNA, 19 nt, Artificial Sequence
  Description of Artificial Sequence: Synthetic oligonucleotide
ugcaccugcgcagugaacu

SEQ ID NO: 2906392 - RNA, 19 nt, Artificial Sequence
  Description of Artificial Sequence: Synthetic oligonucleotide
cuagagaggcaguuuucag

SEQ ID NO: 2906393 - RNA, 19 nt, Artificial Sequence
  Description of Artificial Sequence: Synthetic oligonucleotide
uccacacagcuagagaggc

SEQ ID NO: 2906394 - RNA, 19 nt, Artificial Sequence
  Description of Artificial Sequence: Synthetic oligonucleotide
uuaaccggugugauacaac

SEQ ID NO: 2906395 - RNA, 19 nt, Artificial Sequence
  Description of Artificial Sequence: Synthetic oligonucleotide
agcaccaacagacuuggua

SEQ ID NO: 2906396 - RNA, 19 nt, Artificial Sequence
  Description of Artificial Sequence: Synthetic oligonucleotide
ugauacaaccuggaauuac

SEQ ID NO: 2906397 - RNA, 19 nt, Artificial Sequence
  Description of Artificial Sequence: Synthetic oligonucleotide
acugcccuccuuucuguac

SEQ ID NO: 2906398 - RNA, 19 nt, Artificial Sequence
  Description of Artificial Sequence: Synthetic oligonucleotide
cauucaaucugccuaguaa

SEQ ID NO: 2906399 - RNA, 19 nt, Artificial Sequence
  Description of Artificial Sequence: Synthetic oligonucleotide
uguugacaacucuccacug

SEQ ID NO: 2906400 - RNA, 19 nt, Artificial Sequence
  Description of Artificial Sequence: Synthetic oligonucleotide
uaguuccaugaagugaugc

SEQ ID NO: 2906401 - RNA, 19 nt, Artificial Sequence
  Description of Artificial Sequence: Synthetic oligonucleotide
ugggcaaaccgaccgguga

SEQ ID NO: 2906402 - RNA, 19 nt, Artificial Sequence
  Description of Artificial Sequence: Synthetic oligonucleotide
gaucuucugucauuccuga

SEQ ID NO: 2906403 - RNA, 19 nt, Artificial Sequence
  Description of Artificial Sequence: Synthetic oligonucleotide
agcaagaguggugucaaug

SEQ ID NO: 2906404 - RNA, 19 nt, Artificial Sequence
  Description of Artificial Sequence: Synthetic oligonucleotide
cauaguuccaugaagugau

SEQ ID NO: 2906405 - RNA, 19 nt, Artificial Sequence
  Description of Artificial Sequence: Synthetic oligonucleotide
ucccaacauaguuccauga

SEQ ID NO: 2906406 - RNA, 19 nt, Artificial Sequence
  Description of Artificial Sequence: Synthetic oligonucleotide
ugcgcagugaacugcgccu

SEQ ID NO: 2906407 - RNA, 19 nt, Artificial Sequence
  Description of Artificial Sequence: Synthetic oligonucleotide
ucaccaagcucggccaugg

SEQ ID NO: 2906408 - RNA, 19 nt, Artificial Sequence
  Description of Artificial Sequence: Synthetic oligonucleotide
ucaaucugccuaguaacaa

SEQ ID NO: 2906409 - RNA, 19 nt, Artificial Sequence
  Description of Artificial Sequence: Synthetic oligonucleotide
guuccaugaagugaugcac

SEQ ID NO: 2906410 - RNA, 19 nt, Artificial Sequence
  Description of Artificial Sequence: Synthetic oligonucleotide
ccuaguaacaagucuuuug

SEQ ID NO: 2906411 - RNA, 19 nt, Artificial Sequence
  Description of Artificial Sequence: Synthetic oligonucleotide
auuuauuaaccggugugau

SEQ ID NO: 2906412 - RNA, 19 nt, Artificial Sequence
  Description of Artificial Sequence: Synthetic oligonucleotide
auuuccuggcuucuccaca

SEQ ID NO: 2906413 - RNA, 19 nt, Artificial Sequence
  Description of Artificial Sequence: Synthetic oligonucleotide
acauguugacaacucucca

SEQ ID NO: 2906414 - RNA, 19 nt, Artificial Sequence
  Description of Artificial Sequence: Synthetic oligonucleotide
uaucccaacauaguuccau

SEQ ID NO: 2906415 - RNA, 19 nt, Artificial Sequence
  Description of Artificial Sequence: Synthetic oligonucleotide
cauuuauuaaccgguguga

SEQ ID NO: 2906416 - RNA, 19 nt, Artificial Sequence
  Description of Artificial Sequence: Synthetic oligonucleotide
gagacgucacauuuauuaa

SEQ ID NO: 2906417 - RNA, 19 nt, Artificial Sequence
  Description of Artificial Sequence: Synthetic oligonucleotide
cugagguauggccuacugc

SEQ ID NO: 2906418 - RNA, 19 nt, Artificial Sequence
  Description of Artificial Sequence: Synthetic oligonucleotide
caacauaguuccaugaagu

SEQ ID NO: 2906419 - RNA, 19 nt, Artificial Sequence
  Description of Artificial Sequence: Synthetic oligonucleotide
acgaucugggcaaaccgac

SEQ ID NO: 2906420 - RNA, 19 nt, Artificial Sequence
  Description of Artificial Sequence: Synthetic oligonucleotide
uuucagugcgggagucuag

SEQ ID NO: 2906421 - RNA, 19 nt, Artificial Sequence
  Description of Artificial Sequence: Synthetic oligonucleotide
ugcuccgcggccaccaggc

SEQ ID NO: 2906422 - RNA, 19 nt, Artificial Sequence
  Description of Artificial Sequence: Synthetic oligonucleotide
aucccaacauaguuccaug

SEQ ID NO: 2906423 - RNA, 19 nt, Artificial Sequence
  Description of Artificial Sequence: Synthetic oligonucleotide
ccaacauaguuccaugaag

SEQ ID NO: 2906424 - RNA, 19 nt, Artificial Sequence
  Description of Artificial Sequence: Synthetic oligonucleotide
uucagugcgggagucuagc

SEQ ID NO: 2906425 - RNA, 19 nt, Artificial Sequence
  Description of Artificial Sequence: Synthetic oligonucleotide
cugcccuccuuucuguacg

SEQ ID NO: 2906426 - RNA, 19 nt, Artificial Sequence
  Description of Artificial Sequence: Synthetic oligonucleotide
aucugggcaaaccgaccgg

SEQ ID NO: 2906427 - RNA, 19 nt, Artificial Sequence
  Description of Artificial Sequence: Synthetic oligonucleotide
ucgucugcuucaccaagcu

SEQ ID NO: 2906428 - RNA, 19 nt, Artificial Sequence
  Description of Artificial Sequence: Synthetic oligonucleotide
gauacaaccuggaauuacu

SEQ ID NO: 2906429 - RNA, 19 nt, Artificial Sequence
  Description of Artificial Sequence: Synthetic oligonucleotide
cagugcgggagucuagccg

SEQ ID NO: 2906430 - RNA, 19 nt, Artificial Sequence
  Description of Artificial Sequence: Synthetic oligonucleotide
aguuuucagugcgggaguc

SEQ ID NO: 2906431 - RNA, 19 nt, Artificial Sequence
  Description of Artificial Sequence: Synthetic oligonucleotide
gugucaaugaagcggucca

SEQ ID NO: 2906432 - RNA, 19 nt, Artificial Sequence
  Description of Artificial Sequence: Synthetic oligonucleotide
caccaacagacuugguagc

SEQ ID NO: 2906433 - RNA, 19 nt, Artificial Sequence
  Description of Artificial Sequence: Synthetic oligonucleotide
gucacauuuauuaaccggu

SEQ ID NO: 2906434 - RNA, 19 nt, Artificial Sequence
  Description of Artificial Sequence: Synthetic oligonucleotide
cuucgucugcuucaccaag

SEQ ID NO: 2906435 - RNA, 19 nt, Artificial Sequence
  Description of Artificial Sequence: Synthetic oligonucleotide
acauuugaucuguacuuuu

SEQ ID NO: 2906436 - RNA, 19 nt, Artificial Sequence
  Description of Artificial Sequence: Synthetic oligonucleotide
uauuaaccggugugauaca

SEQ ID NO: 2906437 - RNA, 19 nt, Artificial Sequence
  Description of Artificial Sequence: Synthetic oligonucleotide
acucaacauguugacaacu

SEQ ID NO: 2906438 - RNA, 19 nt, Artificial Sequence
  Description of Artificial Sequence: Synthetic oligonucleotide
ucuccacuggccauucaau

SEQ ID NO: 2906439 - RNA, 19 nt, Artificial Sequence
  Description of Artificial Sequence: Synthetic oligonucleotide
acacacuuaucccaacaua

SEQ ID NO: 2906440 - RNA, 19 nt, Artificial Sequence
  Description of Artificial Sequence: Synthetic oligonucleotide
gcuaacucaacauguugac

SEQ ID NO: 2906441 - RNA, 19 nt, Artificial Sequence
  Description of Artificial Sequence: Synthetic oligonucleotide
agguauggccuacugcccu

SEQ ID NO: 2906442 - RNA, 19 nt, Artificial Sequence
  Description of Artificial Sequence: Synthetic oligonucleotide
uuuucagugcgggagucua

SEQ ID NO: 2906443 - RNA, 19 nt, Artificial Sequence
  Description of Artificial Sequence: Synthetic oligonucleotide
acuccgcuucgucugcuuc

SEQ ID NO: 2906444 - RNA, 19 nt, Artificial Sequence
  Description of Artificial Sequence: Synthetic oligonucleotide
aacucuccacuggccauuc

SEQ ID NO: 2906445 - RNA, 19 nt, Artificial Sequence
  Description of Artificial Sequence: Synthetic oligonucleotide
uuggaucuucugucauucc

SEQ ID NO: 2906446 - RNA, 19 nt, Artificial Sequence
  Description of Artificial Sequence: Synthetic oligonucleotide
ugccuaguaacaagucuuu

SEQ ID NO: 2906447 - RNA, 19 nt, Artificial Sequence
  Description of Artificial Sequence: Synthetic oligonucleotide
auagcaagaguggugucaa

SEQ ID NO: 2906448 - RNA, 19 nt, Artificial Sequence
  Description of Artificial Sequence: Synthetic oligonucleotide
cuccacuggccauucaauc

SEQ ID NO: 2906449 - RNA, 19 nt, Artificial Sequence
  Description of Artificial Sequence: Synthetic oligonucleotide
gagaggcaguuuucagugc

SEQ ID NO: 2906450 - RNA, 19 nt, Artificial Sequence
  Description of Artificial Sequence: Synthetic oligonucleotide
aucuucugucauuccugag

SEQ ID NO: 2906451 - RNA, 19 nt, Artificial Sequence
  Description of Artificial Sequence: Synthetic oligonucleotide
gaggcaguuuucagugcgg

SEQ ID NO: 2906452 - RNA, 19 nt, Artificial Sequence
  Description of Artificial Sequence: Synthetic oligonucleotide
cgucacauuuauuaaccgg

SEQ ID NO: 2906453 - RNA, 19 nt, Artificial Sequence
  Description of Artificial Sequence: Synthetic oligonucleotide
ggccauucaaucugccuag

SEQ ID NO: 2906454 - RNA, 19 nt, Artificial Sequence
  Description of Artificial Sequence: Synthetic oligonucleotide
cagacuugguagcugccug

SEQ ID NO: 2906455 - RNA, 19 nt, Artificial Sequence
  Description of Artificial Sequence: Synthetic oligonucleotide
uuaucccaacauaguucca

SEQ ID NO: 2906456 - RNA, 19 nt, Artificial Sequence
  Description of Artificial Sequence: Synthetic oligonucleotide
agacuugguagcugccuga

SEQ ID NO: 2906457 - RNA, 19 nt, Artificial Sequence
  Description of Artificial Sequence: Synthetic oligonucleotide
aggcaguuuucagugcggg

SEQ ID NO: 2906458 - RNA, 19 nt, Artificial Sequence
  Description of Artificial Sequence: Synthetic oligonucleotide
guccacacagcuagagagg

SEQ ID NO: 2906459 - RNA, 19 nt, Artificial Sequence
  Description of Artificial Sequence: Synthetic oligonucleotide
ccuuucuguacgaucuggg

SEQ ID NO: 2906460 - RNA, 19 nt, Artificial Sequence
  Description of Artificial Sequence: Synthetic oligonucleotide
auuaaccggugugauacaa

SEQ ID NO: 2906461 - RNA, 19 nt, Artificial Sequence
  Description of Artificial Sequence: Synthetic oligonucleotide
cugucauuccugagguaug

SEQ ID NO: 2906462 - RNA, 19 nt, Artificial Sequence
  Description of Artificial Sequence: Synthetic oligonucleotide
gugugauacaaccuggaau

SEQ ID NO: 2906463 - RNA, 19 nt, Artificial Sequence
  Description of Artificial Sequence: Synthetic oligonucleotide
uccgcggccaccaggcgcu

SEQ ID NO: 2906464 - RNA, 19 nt, Artificial Sequence
  Description of Artificial Sequence: Synthetic oligonucleotide
uggccuacugcccuccuuu

SEQ ID NO: 2906465 - RNA, 19 nt, Artificial Sequence
  Description of Artificial Sequence: Synthetic oligonucleotide
ggugauagcaagaguggug

SEQ ID NO: 2906466 - RNA, 19 nt, Artificial Sequence
  Description of Artificial Sequence: Synthetic oligonucleotide
gcaagaguggugucaauga

SEQ ID NO: 2906467 - RNA, 19 nt, Artificial Sequence
  Description of Artificial Sequence: Synthetic oligonucleotide
aacugcgccuucugcugcu

SEQ ID NO: 2906468 - RNA, 19 nt, Artificial Sequence
  Description of Artificial Sequence: Synthetic oligonucleotide
acaacucuccacuggccau

SEQ ID NO: 2906469 - RNA, 19 nt, Artificial Sequence
  Description of Artificial Sequence: Synthetic oligonucleotide
ugccugaugcuaacucaac

SEQ ID NO: 2906470 - RNA, 19 nt, Artificial Sequence
  Description of Artificial Sequence: Synthetic oligonucleotide
gaugcaccugcgcagugaa

SEQ ID NO: 2906471 - RNA, 19 nt, Artificial Sequence
  Description of Artificial Sequence: Synthetic oligonucleotide
guaacuccgcuucgucugc

SEQ ID NO: 2906472 - RNA, 19 nt, Artificial Sequence
  Description of Artificial Sequence: Synthetic oligonucleotide
ucugggcaaaccgaccggu

SEQ ID NO: 2906473 - RNA, 19 nt, Artificial Sequence
  Description of Artificial Sequence: Synthetic oligonucleotide
cugcgcagugaacugcgcc

SEQ ID NO: 2906474 - RNA, 19 nt, Artificial Sequence
  Description of Artificial Sequence: Synthetic oligonucleotide
cacuggccauucaaucugc

SEQ ID NO: 2906475 - RNA, 19 nt, Artificial Sequence
  Description of Artificial Sequence: Synthetic oligonucleotide
accgaccggugauagcaag

SEQ ID NO: 2906476 - RNA, 19 nt, Artificial Sequence
  Description of Artificial Sequence: Synthetic oligonucleotide
auuccugagguauggccua

SEQ ID NO: 2906477 - RNA, 19 nt, Artificial Sequence
  Description of Artificial Sequence: Synthetic oligonucleotide
aucugccuaguaacaaguc

SEQ ID NO: 2906478 - RNA, 19 nt, Artificial Sequence
  Description of Artificial Sequence: Synthetic oligonucleotide
augaagugaugcaccugcg

SEQ ID NO: 2906479 - RNA, 19 nt, Artificial Sequence
  Description of Artificial Sequence: Synthetic oligonucleotide
ggcgcuguaacuccgcuuc

SEQ ID NO: 2906480 - RNA, 19 nt, Artificial Sequence
  Description of Artificial Sequence: Synthetic oligonucleotide
uagccgauuuccuggcuuc

SEQ ID NO: 2906481 - RNA, 19 nt, Artificial Sequence
  Description of Artificial Sequence: Synthetic oligonucleotide
ggugucaaugaagcggucc

SEQ ID NO: 2906482 - RNA, 19 nt, Artificial Sequence
  Description of Artificial Sequence: Synthetic oligonucleotide
acuggccauucaaucugcc

SEQ ID NO: 2906483 - RNA, 19 nt, Artificial Sequence
  Description of Artificial Sequence: Synthetic oligonucleotide
gucuagccgauuuccuggc

SEQ ID NO: 2906484 - RNA, 19 nt, Artificial Sequence
  Description of Artificial Sequence: Synthetic oligonucleotide
caagcucggccauggucgg

SEQ ID NO: 2906485 - RNA, 19 nt, Artificial Sequence
  Description of Artificial Sequence: Synthetic oligonucleotide
gagguauggccuacugccc

SEQ ID NO: 2906486 - RNA, 19 nt, Artificial Sequence
  Description of Artificial Sequence: Synthetic oligonucleotide
auuucacuuuuggacauuu

SEQ ID NO: 2906487 - RNA, 19 nt, Artificial Sequence
  Description of Artificial Sequence: Synthetic oligonucleotide
cauuccugagguauggccu

SEQ ID NO: 2906488 - RNA, 19 nt, Artificial Sequence
  Description of Artificial Sequence: Synthetic oligonucleotide
ggaucuucugucauuccug

SEQ ID NO: 2906489 - RNA, 19 nt, Artificial Sequence
  Description of Artificial Sequence: Synthetic oligonucleotide
acacuuaucccaacauagu

SEQ ID NO: 2906490 - RNA, 19 nt, Artificial Sequence
  Description of Artificial Sequence: Synthetic oligonucleotide
gugauagcaagaguggugu

SEQ ID NO: 2906491 - RNA, 19 nt, Artificial Sequence
  Description of Artificial Sequence: Synthetic oligonucleotide
caccaggcgcuguaacucc

SEQ ID NO: 2906492 - RNA, 19 nt, Artificial Sequence
  Description of Artificial Sequence: Synthetic oligonucleotide
ugucaaugaagcgguccac

SEQ ID NO: 2906493 - RNA, 19 nt, Artificial Sequence
  Description of Artificial Sequence: Synthetic oligonucleotide
ucuagccgauuuccuggcu

SEQ ID NO: 2906494 - RNA, 19 nt, Artificial Sequence
  Description of Artificial Sequence: Synthetic oligonucleotide
cuucugucauuccugaggu

SEQ ID NO: 2906495 - RNA, 19 nt, Artificial Sequence
  Description of Artificial Sequence: Synthetic oligonucleotide
agugaugcaccugcgcagu

SEQ ID NO: 2906496 - RNA, 19 nt, Artificial Sequence
  Description of Artificial Sequence: Synthetic oligonucleotide
ugaugcaccugcgcaguga

SEQ ID NO: 2906497 - RNA, 19 nt, Artificial Sequence
  Description of Artificial Sequence: Synthetic oligonucleotide
caaaccgaccggugauagc

SEQ ID NO: 2906498 - RNA, 19 nt, Artificial Sequence
  Description of Artificial Sequence: Synthetic oligonucleotide
ccaauaaauaaauuucacu

SEQ ID NO: 2906499 - RNA, 19 nt, Artificial Sequence
  Description of Artificial Sequence: Synthetic oligonucleotide
acagacuugguagcugccu

SEQ ID NO: 2906500 - RNA, 19 nt, Artificial Sequence
  Description of Artificial Sequence: Synthetic oligonucleotide
agcuagagaggcaguuuuc

SEQ ID NO: 2906501 - RNA, 19 nt, Artificial Sequence
  Description of Artificial Sequence: Synthetic oligonucleotide
ccggugauagcaagagugg

SEQ ID NO: 2906502 - RNA, 19 nt, Artificial Sequence
  Description of Artificial Sequence: Synthetic oligonucleotide
aauuucacuuuuggacauu

SEQ ID NO: 2906503 - RNA, 19 nt, Artificial Sequence
  Description of Artificial Sequence: Synthetic oligonucleotide
ggaauuacugaauuccaau

SEQ ID NO: 2906504 - RNA, 19 nt, Artificial Sequence
  Description of Artificial Sequence: Synthetic oligonucleotide
accaacagacuugguagcu

SEQ ID NO: 2906505 - RNA, 19 nt, Artificial Sequence
  Description of Artificial Sequence: Synthetic oligonucleotide
guagcugccugaugcuaac

SEQ ID NO: 2906506 - RNA, 19 nt, Artificial Sequence
  Description of Artificial Sequence: Synthetic oligonucleotide
ugauagcaagagugguguc

SEQ ID NO: 2906507 - RNA, 19 nt, Artificial Sequence
  Description of Artificial Sequence: Synthetic oligonucleotide
cuaacucaacauguugaca

SEQ ID NO: 2906508 - RNA, 19 nt, Artificial Sequence
  Description of Artificial Sequence: Synthetic oligonucleotide
aaccggugugauacaaccu

SEQ ID NO: 2906509 - RNA, 19 nt, Artificial Sequence
  Description of Artificial Sequence: Synthetic oligonucleotide
acuugguagcugccugaug

SEQ ID NO: 2906510 - RNA, 19 nt, Artificial Sequence
  Description of Artificial Sequence: Synthetic oligonucleotide
accugcgcagugaacugcg

SEQ ID NO: 2906511 - RNA, 19 nt, Artificial Sequence
  Description of Artificial Sequence: Synthetic oligonucleotide
uucaccaagcucggccaug

SEQ ID NO: 2906512 - RNA, 19 nt, Artificial Sequence
  Description of Artificial Sequence: Synthetic oligonucleotide
uccacacacuuaucccaac

SEQ ID NO: 2906513 - RNA, 19 nt, Artificial Sequence
  Description of Artificial Sequence: Synthetic oligonucleotide
gggagucuagccgauuucc

SEQ ID NO: 2906514 - RNA, 19 nt, Artificial Sequence
  Description of Artificial Sequence: Synthetic oligonucleotide
caagaguggugucaaugaa

SEQ ID NO: 2906515 - RNA, 19 nt, Artificial Sequence
  Description of Artificial Sequence: Synthetic oligonucleotide
ggacauuugaucuguacuu

SEQ ID NO: 2906516 - RNA, 19 nt, Artificial Sequence
  Description of Artificial Sequence: Synthetic oligonucleotide
augaagcgguccacacagc

SEQ ID NO: 2906517 - RNA, 19 nt, Artificial Sequence
  Description of Artificial Sequence: Synthetic oligonucleotide
ccggugugauacaaccugg

SEQ ID NO: 2906518 - RNA, 19 nt, Artificial Sequence
  Description of Artificial Sequence: Synthetic oligonucleotide
cugccugaugcuaacucaa

SEQ ID NO: 2906519 - RNA, 19 nt, Artificial Sequence
  Description of Artificial Sequence: Synthetic oligonucleotide
uuccuggcuucuccacaca

SEQ ID NO: 2906520 - RNA, 19 nt, Artificial Sequence
  Description of Artificial Sequence: Synthetic oligonucleotide
cuccgcggccaccaggcgc

SEQ ID NO: 2906521 - RNA, 19 nt, Artificial Sequence
  Description of Artificial Sequence: Synthetic oligonucleotide
cugccuaguaacaagucuu

SEQ ID NO: 2906522 - RNA, 19 nt, Artificial Sequence
  Description of Artificial Sequence: Synthetic oligonucleotide
gcugccugaugcuaacuca

SEQ ID NO: 2906523 - RNA, 19 nt, Artificial Sequence
  Description of Artificial Sequence: Synthetic oligonucleotide
cugggcaaaccgaccggug

SEQ ID NO: 2906524 - RNA, 19 nt, Artificial Sequence
  Description of Artificial Sequence: Synthetic oligonucleotide
cuccuuucuguacgaucug

SEQ ID NO: 2906525 - RNA, 19 nt, Artificial Sequence
  Description of Artificial Sequence: Synthetic oligonucleotide
cucuccacuggccauucaa

SEQ ID NO: 2906526 - RNA, 19 nt, Artificial Sequence
  Description of Artificial Sequence: Synthetic oligonucleotide
auaguuccaugaagugaug

SEQ ID NO: 2906527 - RNA, 19 nt, Artificial Sequence
  Description of Artificial Sequence: Synthetic oligonucleotide
gcaaaccgaccggugauag

SEQ ID NO: 2906528 - RNA, 19 nt, Artificial Sequence
  Description of Artificial Sequence: Synthetic oligonucleotide
uauggccuacugcccuccu

SEQ ID NO: 2906529 - RNA, 19 nt, Artificial Sequence
  Description of Artificial Sequence: Synthetic oligonucleotide
cagugaacugcgccuucug

SEQ ID NO: 2906530 - RNA, 19 nt, Artificial Sequence
  Description of Artificial Sequence: Synthetic oligonucleotide
gucauuccugagguauggc

SEQ ID NO: 2906531 - RNA, 19 nt, Artificial Sequence
  Description of Artificial Sequence: Synthetic oligonucleotide
ugcccuccuuucuguacga

SEQ ID NO: 2906532 - RNA, 19 nt, Artificial Sequence
  Description of Artificial Sequence: Synthetic oligonucleotide
ccgauuuccuggcuucucc

SEQ ID NO: 2906533 - RNA, 19 nt, Artificial Sequence
  Description of Artificial Sequence: Synthetic oligonucleotide
gaugcuaacucaacauguu

SEQ ID NO: 2906534 - RNA, 19 nt, Artificial Sequence
  Description of Artificial Sequence: Synthetic oligonucleotide
ggugugauacaaccuggaa

SEQ ID NO: 2906535 - RNA, 19 nt, Artificial Sequence
  Description of Artificial Sequence: Synthetic oligonucleotide
aacaagucuuuuggaucuu

SEQ ID NO: 2906536 - RNA, 19 nt, Artificial Sequence
  Description of Artificial Sequence: Synthetic oligonucleotide
guggugucaaugaagcggu

SEQ ID NO: 2906537 - RNA, 19 nt, Artificial Sequence
  Description of Artificial Sequence: Synthetic oligonucleotide
gcuagagaggcaguuuuca

SEQ ID NO: 2906538 - RNA, 19 nt, Artificial Sequence
  Description of Artificial Sequence: Synthetic oligonucleotide
uccgcuucgucugcuucac

SEQ ID NO: 2906539 - RNA, 19 nt, Artificial Sequence
  Description of Artificial Sequence: Synthetic oligonucleotide
aacuccgcuucgucugcuu

SEQ ID NO: 2906540 - RNA, 19 nt, Artificial Sequence
  Description of Artificial Sequence: Synthetic oligonucleotide
cuccacacacuuaucccaa

SEQ ID NO: 2906541 - RNA, 19 nt, Artificial Sequence
  Description of Artificial Sequence: Synthetic oligonucleotide
cacuuaucccaacauaguu

SEQ ID NO: 2906542 - RNA, 19 nt, Artificial Sequence
  Description of Artificial Sequence: Synthetic oligonucleotide
gccugaugcuaacucaaca

SEQ ID NO: 2906543 - RNA, 19 nt, Artificial Sequence
  Description of Artificial Sequence: Synthetic oligonucleotide
guauggccuacugcccucc

SEQ ID NO: 2906544 - RNA, 19 nt, Artificial Sequence
  Description of Artificial Sequence: Synthetic oligonucleotide
gacauuugaucuguacuuu

SEQ ID NO: 2906545 - RNA, 19 nt, Artificial Sequence
  Description of Artificial Sequence: Synthetic oligonucleotide
accaggcgcuguaacuccg

SEQ ID NO: 2906546 - RNA, 19 nt, Artificial Sequence
  Description of Artificial Sequence: Synthetic oligonucleotide
acagcuagagaggcaguuu

SEQ ID NO: 2906547 - RNA, 19 nt, Artificial Sequence
  Description of Artificial Sequence: Synthetic oligonucleotide
gaauuccaauaaauaaauu

SEQ ID NO: 2906548 - RNA, 19 nt, Artificial Sequence
  Description of Artificial Sequence: Synthetic oligonucleotide
caccugcgcagugaacugc

SEQ ID NO: 2906549 - RNA, 19 nt, Artificial Sequence
  Description of Artificial Sequence: Synthetic oligonucleotide
uucugucauuccugaggua

SEQ ID NO: 2906550 - RNA, 19 nt, Artificial Sequence
  Description of Artificial Sequence: Synthetic oligonucleotide
cuguaacuccgcuucgucu

SEQ ID NO: 2906551 - RNA, 19 nt, Artificial Sequence
  Description of Artificial Sequence: Synthetic oligonucleotide
uggugucaaugaagcgguc

SEQ ID NO: 2906552 - RNA, 19 nt, Artificial Sequence
  Description of Artificial Sequence: Synthetic oligonucleotide
gcuguaacuccgcuucguc

SEQ ID NO: 2906553 - RNA, 19 nt, Artificial Sequence
  Description of Artificial Sequence: Synthetic oligonucleotide
cuccgcuucgucugcuuca

SEQ ID NO: 2906554 - RNA, 19 nt, Artificial Sequence
  Description of Artificial Sequence: Synthetic oligonucleotide
uggcuucuccacacacuua

SEQ ID NO: 2906555 - RNA, 19 nt, Artificial Sequence
  Description of Artificial Sequence: Synthetic oligonucleotide
ugguagcugccugaugcua

SEQ ID NO: 2906556 - RNA, 19 nt, Artificial Sequence
  Description of Artificial Sequence: Synthetic oligonucleotide
cugcuccgcggccaccagg

SEQ ID NO: 2906557 - RNA, 19 nt, Artificial Sequence
  Description of Artificial Sequence: Synthetic oligonucleotide
gugaugcaccugcgcagug

SEQ ID NO: 2906558 - RNA, 19 nt, Artificial Sequence
  Description of Artificial Sequence: Synthetic oligonucleotide
ucuguacgaucugggcaaa

SEQ ID NO: 2906559 - RNA, 19 nt, Artificial Sequence
  Description of Artificial Sequence: Synthetic oligonucleotide
caaccuggaauuacugaau

SEQ ID NO: 2906560 - RNA, 19 nt, Artificial Sequence
  Description of Artificial Sequence: Synthetic oligonucleotide
ccuccuuucuguacgaucu

SEQ ID NO: 2906561 - RNA, 19 nt, Artificial Sequence
  Description of Artificial Sequence: Synthetic oligonucleotide
ggcuucuccacacacuuau

SEQ ID NO: 2906562 - RNA, 19 nt, Artificial Sequence
  Description of Artificial Sequence: Synthetic oligonucleotide
uacugcccuccuuucugua

SEQ ID NO: 2906563 - RNA, 19 nt, Artificial Sequence
  Description of Artificial Sequence: Synthetic oligonucleotide
gaagcgguccacacagcua

SEQ ID NO: 2906564 - RNA, 19 nt, Artificial Sequence
  Description of Artificial Sequence: Synthetic oligonucleotide
uuccugagguauggccuac

SEQ ID NO: 2906565 - RNA, 19 nt, Artificial Sequence
  Description of Artificial Sequence: Synthetic oligonucleotide
cacacacuuaucccaacau

SEQ ID NO: 2906566 - RNA, 19 nt, Artificial Sequence
  Description of Artificial Sequence: Synthetic oligonucleotide
cugcgccuucugcugcucc

SEQ ID NO: 2906567 - RNA, 19 nt, Artificial Sequence
  Description of Artificial Sequence: Synthetic oligonucleotide
gguauggccuacugcccuc

SEQ ID NO: 2906568 - RNA, 19 nt, Artificial Sequence
  Description of Artificial Sequence: Synthetic oligonucleotide
uaacuccgcuucgucugcu

SEQ ID NO: 2906569 - RNA, 19 nt, Artificial Sequence
  Description of Artificial Sequence: Synthetic oligonucleotide
ccugagguauggccuacug

SEQ ID NO: 2906570 - RNA, 19 nt, Artificial Sequence
  Description of Artificial Sequence: Synthetic oligonucleotide
uagcaagaguggugucaau

SEQ ID NO: 2906571 - RNA, 19 nt, Artificial Sequence
  Description of Artificial Sequence: Synthetic oligonucleotide
uccugagguauggccuacu

SEQ ID NO: 2906572 - RNA, 19 nt, Artificial Sequence
  Description of Artificial Sequence: Synthetic oligonucleotide
gccuucugcugcuccgcgg

SEQ ID NO: 2906573 - RNA, 19 nt, Artificial Sequence
  Description of Artificial Sequence: Synthetic oligonucleotide
uagcugccugaugcuaacu

SEQ ID NO: 2906574 - RNA, 19 nt, Artificial Sequence
  Description of Artificial Sequence: Synthetic oligonucleotide
cuggcuucuccacacacuu

SEQ ID NO: 2906575 - RNA, 19 nt, Artificial Sequence
  Description of Artificial Sequence: Synthetic oligonucleotide
ggcaguuuucagugcggga

SEQ ID NO: 2906576 - RNA, 19 nt, Artificial Sequence
  Description of Artificial Sequence: Synthetic oligonucleotide
aaccgaccggugauagcaa

SEQ ID NO: 2906577 - RNA, 19 nt, Artificial Sequence
  Description of Artificial Sequence: Synthetic oligonucleotide
acugcgccuucugcugcuc

SEQ ID NO: 2906578 - RNA, 19 nt, Artificial Sequence
  Description of Artificial Sequence: Synthetic oligonucleotide
gcaccugcgcagugaacug

SEQ ID NO: 2906579 - RNA, 19 nt, Artificial Sequence
  Description of Artificial Sequence: Synthetic oligonucleotide
ccugaugcuaacucaacau

SEQ ID NO: 2906580 - RNA, 19 nt, Artificial Sequence
  Description of Artificial Sequence: Synthetic oligonucleotide
cuggccauucaaucugccu

SEQ ID NO: 2906581 - RNA, 19 nt, Artificial Sequence
  Description of Artificial Sequence: Synthetic oligonucleotide
uagcaccaacagacuuggu

SEQ ID NO: 2906582 - RNA, 19 nt, Artificial Sequence
  Description of Artificial Sequence: Synthetic oligonucleotide
aggcgcuguaacuccgcuu

SEQ ID NO: 2906583 - RNA, 19 nt, Artificial Sequence
  Description of Artificial Sequence: Synthetic oligonucleotide
augcaccugcgcagugaac

SEQ ID NO: 2906584 - RNA, 19 nt, Artificial Sequence
  Description of Artificial Sequence: Synthetic oligonucleotide
ccaacagacuugguagcug

SEQ ID NO: 2906585 - RNA, 19 nt, Artificial Sequence
  Description of Artificial Sequence: Synthetic oligonucleotide
cuguacgaucugggcaaac

SEQ ID NO: 2906586 - RNA, 19 nt, Artificial Sequence
  Description of Artificial Sequence: Synthetic oligonucleotide
auggccuacugcccuccuu

SEQ ID NO: 2906587 - RNA, 19 nt, Artificial Sequence
  Description of Artificial Sequence: Synthetic oligonucleotide
cccuccuuucuguacgauc

SEQ ID NO: 2906588 - RNA, 19 nt, Artificial Sequence
  Description of Artificial Sequence: Synthetic oligonucleotide
gugauacaaccuggaauua

SEQ ID NO: 2906589 - RNA, 19 nt, Artificial Sequence
  Description of Artificial Sequence: Synthetic oligonucleotide
gaccggugauagcaagagu

SEQ ID NO: 2906590 - RNA, 19 nt, Artificial Sequence
  Description of Artificial Sequence: Synthetic oligonucleotide
acucuccacuggccauuca

SEQ ID NO: 2906591 - RNA, 19 nt, Artificial Sequence
  Description of Artificial Sequence: Synthetic oligonucleotide
caguuuucagugcgggagu

SEQ ID NO: 2906592 - RNA, 19 nt, Artificial Sequence
  Description of Artificial Sequence: Synthetic oligonucleotide
agccgauuuccuggcuucu

SEQ ID NO: 2906593 - RNA, 19 nt, Artificial Sequence
  Description of Artificial Sequence: Synthetic oligonucleotide
cccaacauaguuccaugaa

SEQ ID NO: 2906594 - RNA, 19 nt, Artificial Sequence
  Description of Artificial Sequence: Synthetic oligonucleotide
cagcuagagaggcaguuuu

SEQ ID NO: 2906595 - RNA, 19 nt, Artificial Sequence
  Description of Artificial Sequence: Synthetic oligonucleotide
gcgcuguaacuccgcuucg

SEQ ID NO: 2906596 - RNA, 19 nt, Artificial Sequence
  Description of Artificial Sequence: Synthetic oligonucleotide
gcgguccacacagcuagag

SEQ ID NO: 2906597 - RNA, 19 nt, Artificial Sequence
  Description of Artificial Sequence: Synthetic oligonucleotide
gcuucgucugcuucaccaa

SEQ ID NO: 2906598 - RNA, 19 nt, Artificial Sequence
  Description of Artificial Sequence: Synthetic oligonucleotide
ccaccaggcgcuguaacuc

SEQ ID NO: 2906599 - RNA, 19 nt, Artificial Sequence
  Description of Artificial Sequence: Synthetic oligonucleotide
cgaccggugauagcaagag

SEQ ID NO: 2906600 - RNA, 19 nt, Artificial Sequence
  Description of Artificial Sequence: Synthetic oligonucleotide
cuagccgauuuccuggcuu

SEQ ID NO: 2906601 - RNA, 19 nt, Artificial Sequence
  Description of Artificial Sequence: Synthetic oligonucleotide
cgcuucgucugcuucacca

SEQ ID NO: 2906602 - RNA, 19 nt, Artificial Sequence
  Description of Artificial Sequence: Synthetic oligonucleotide
ccaggcgcuguaacuccgc

SEQ ID NO: 2906603 - RNA, 19 nt, Artificial Sequence
  Description of Artificial Sequence: Synthetic oligonucleotide
gacuugguagcugccugau

SEQ ID NO: 2906604 - RNA, 19 nt, Artificial Sequence
  Description of Artificial Sequence: Synthetic oligonucleotide
cugcuucaccaagcucggc

SEQ ID NO: 2906605 - RNA, 19 nt, Artificial Sequence
  Description of Artificial Sequence: Synthetic oligonucleotide
ccaugaagugaugcaccug

SEQ ID NO: 2906606 - RNA, 19 nt, Artificial Sequence
  Description of Artificial Sequence: Synthetic oligonucleotide
ggccaccaggcgcuguaac

SEQ ID NO: 2906607 - RNA, 19 nt, Artificial Sequence
  Description of Artificial Sequence: Synthetic oligonucleotide
ccugcgcagugaacugcgc

SEQ ID NO: 2906608 - RNA, 19 nt, Artificial Sequence
  Description of Artificial Sequence: Synthetic oligonucleotide
gccaccaggcgcuguaacu

SEQ ID NO: 2906609 - RNA, 19 nt, Artificial Sequence
  Description of Artificial Sequence: Synthetic oligonucleotide
ggccuacugcccuccuuuc

SEQ ID NO: 2906610 - RNA, 19 nt, Artificial Sequence
  Description of Artificial Sequence: Synthetic oligonucleotide
ggagucuagccgauuuccu

SEQ ID NO: 2906611 - RNA, 19 nt, Artificial Sequence
  Description of Artificial Sequence: Synthetic oligonucleotide
cgauuuccuggcuucucca

SEQ ID NO: 2906612 - RNA, 19 nt, Artificial Sequence
  Description of Artificial Sequence: Synthetic oligonucleotide
ccgaccggugauagcaaga

SEQ ID NO: 2906613 - RNA, 19 nt, Artificial Sequence
  Description of Artificial Sequence: Synthetic oligonucleotide
cacagcuagagaggcaguu

SEQ ID NO: 2906614 - RNA, 19 nt, Artificial Sequence
  Description of Artificial Sequence: Synthetic oligonucleotide
ugcgggagucuagccgauu

SEQ ID NO: 2906615 - RNA, 19 nt, Artificial Sequence
  Description of Artificial Sequence: Synthetic oligonucleotide
gcuucuccacacacuuauc

SEQ ID NO: 2906616 - RNA, 19 nt, Artificial Sequence
  Description of Artificial Sequence: Synthetic oligonucleotide
gggcaaaccgaccggugau

SEQ ID NO: 2906617 - RNA, 19 nt, Artificial Sequence
  Description of Artificial Sequence: Synthetic oligonucleotide
ccauucaaucugccuagua

SEQ ID NO: 2906618 - RNA, 19 nt, Artificial Sequence
  Description of Artificial Sequence: Synthetic oligonucleotide
agcgguccacacagcuaga

SEQ ID NO: 2906619 - RNA, 19 nt, Artificial Sequence
  Description of Artificial Sequence: Synthetic oligonucleotide
gcuccgcggccaccaggcg

SEQ ID NO: 2906620 - RNA, 19 nt, Artificial Sequence
  Description of Artificial Sequence: Synthetic oligonucleotide
cuucaccaagcucggccau

SEQ ID NO: 2906621 - RNA, 19 nt, Artificial Sequence
  Description of Artificial Sequence: Synthetic oligonucleotide
gcugcuccgcggccaccag

SEQ ID NO: 2906622 - RNA, 19 nt, Artificial Sequence
  Description of Artificial Sequence: Synthetic oligonucleotide
cggugugauacaaccugga

SEQ ID NO: 2906623 - RNA, 19 nt, Artificial Sequence
  Description of Artificial Sequence: Synthetic oligonucleotide
ggcaaaccgaccggugaua

SEQ ID NO: 2906624 - RNA, 19 nt, Artificial Sequence
  Description of Artificial Sequence: Synthetic oligonucleotide
gccgauuuccuggcuucuc

SEQ ID NO: 2906625 - RNA, 19 nt, Artificial Sequence
  Description of Artificial Sequence: Synthetic oligonucleotide
gcgccuucugcugcuccgc

SEQ ID NO: 2906626 - RNA, 19 nt, Artificial Sequence
  Description of Artificial Sequence: Synthetic oligonucleotide
caggcgcuguaacuccgcu

SEQ ID NO: 2906627 - RNA, 19 nt, Artificial Sequence
  Description of Artificial Sequence: Synthetic oligonucleotide
cgucugcuucaccaagcuc

SEQ ID NO: 2906628 - RNA, 19 nt, Artificial Sequence
  Description of Artificial Sequence: Synthetic oligonucleotide
cgggagucuagccgauuuc

SEQ ID NO: 2906629 - RNA, 19 nt, Artificial Sequence
  Description of Artificial Sequence: Synthetic oligonucleotide
gcgggagucuagccgauuu

SEQ ID NO: 2906630 - RNA, 19 nt, Artificial Sequence
  Description of Artificial Sequence: Synthetic oligonucleotide
cgccuucugcugcuccgcg

SEQ ID NO: 2906631 - RNA, 19 nt, Artificial Sequence
  Description of Artificial Sequence: Synthetic oligonucleotide
gccuacugcccuccuuucu

SEQ ID NO: 2906632 - RNA, 19 nt, Artificial Sequence
  Description of Artificial Sequence: Synthetic oligonucleotide
gcagugaacugcgccuucu

SEQ ID NO: 2906633 - RNA, 19 nt, Artificial Sequence
  Description of Artificial Sequence: Synthetic oligonucleotide
caacucuccacuggccauu

SEQ ID NO: 2906634 - RNA, 19 nt, Artificial Sequence
  Description of Artificial Sequence: Synthetic oligonucleotide
cgguccacacagcuagaga

SEQ ID NO: 2906635 - RNA, 19 nt, Artificial Sequence
  Description of Artificial Sequence: Synthetic oligonucleotide
ccgcuucgucugcuucacc

SEQ ID NO: 2906636 - RNA, 19 nt, Artificial Sequence
  Description of Artificial Sequence: Synthetic oligonucleotide
gcggccaccaggcgcugua

SEQ ID NO: 2906637 - RNA, 19 nt, Artificial Sequence
  Description of Artificial Sequence: Synthetic oligonucleotide
cgcagugaacugcgccuuc

SEQ ID NO: 2906638 - RNA, 19 nt, Artificial Sequence
  Description of Artificial Sequence: Synthetic oligonucleotide
gccuaguaacaagucuuuu

SEQ ID NO: 2906639 - RNA, 19 nt, Artificial Sequence
  Description of Artificial Sequence: Synthetic oligonucleotide
gccauucaaucugccuagu

SEQ ID NO: 2906640 - RNA, 19 nt, Artificial Sequence
  Description of Artificial Sequence: Synthetic oligonucleotide
caccaagcucggccauggu

SEQ ID NO: 2906641 - RNA, 19 nt, Artificial Sequence
  Description of Artificial Sequence: Synthetic oligonucleotide
cggugauagcaagaguggu

SEQ ID NO: 2906642 - RNA, 19 nt, Artificial Sequence
  Description of Artificial Sequence: Synthetic oligonucleotide
gugcgggagucuagccgau

SEQ ID NO: 2906643 - RNA, 19 nt, Artificial Sequence
  Description of Artificial Sequence: Synthetic oligonucleotide
gcgcagugaacugcgccuu

SEQ ID NO: 2906644 - RNA, 19 nt, Artificial Sequence
  Description of Artificial Sequence: Synthetic oligonucleotide
cgcuguaacuccgcuucgu

SEQ ID NO: 2906645 - RNA, 19 nt, Artificial Sequence
  Description of Artificial Sequence: Synthetic oligonucleotide
gcccuccuuucuguacgau

SEQ ID NO: 2906646 - RNA, 19 nt, Artificial Sequence
  Description of Artificial Sequence: Synthetic oligonucleotide
cggccaccaggcgcuguaa

SEQ ID NO: 2906647 - RNA, 19 nt, Artificial Sequence
  Description of Artificial Sequence: Synthetic oligonucleotide
aaaggcaccggcuagacac

SEQ ID NO: 2906648 - RNA, 19 nt, Artificial Sequence
  Description of Artificial Sequence: Synthetic oligonucleotide
aguaguuaaacccuggcuc

SEQ ID NO: 2906649 - RNA, 19 nt, Artificial Sequence
  Description of Artificial Sequence: Synthetic oligonucleotide
gauaaaggcacccagggcc

SEQ ID NO: 2906650 - RNA, 19 nt, Artificial Sequence
  Description of Artificial Sequence: Synthetic oligonucleotide
uuguucagaaaucucaggg

SEQ ID NO: 2906651 - RNA, 19 nt, Artificial Sequence
  Description of Artificial Sequence: Synthetic oligonucleotide
guugcuaucagucaccagg

SEQ ID NO: 2906652 - RNA, 19 nt, Artificial Sequence
  Description of Artificial Sequence: Synthetic oligonucleotide
uguaccauguggcaggugg

SEQ ID NO: 2906653 - RNA, 19 nt, Artificial Sequence
  Description of Artificial Sequence: Synthetic oligonucleotide
aaacccuggcuccaaaggc

SEQ ID NO: 2906654 - RNA, 19 nt, Artificial Sequence
  Description of Artificial Sequence: Synthetic oligonucleotide
cuuggcaguaguuaaaccc

SEQ ID NO: 2906655 - RNA, 19 nt, Artificial Sequence
  Description of Artificial Sequence: Synthetic oligonucleotide
aaucucagggcuucguugg

SEQ ID NO: 2906656 - RNA, 19 nt, Artificial Sequence
  Description of Artificial Sequence: Synthetic oligonucleotide
ucaggguucaggcagaucu

SEQ ID NO: 2906657 - RNA, 19 nt, Artificial Sequence
  Description of Artificial Sequence: Synthetic oligonucleotide
ucgauaaaggcacccaggg

SEQ ID NO: 2906658 - RNA, 19 nt, Artificial Sequence
  Description of Artificial Sequence: Synthetic oligonucleotide
ugugccauggccagcaagg

SEQ ID NO: 2906659 - RNA, 19 nt, Artificial Sequence
  Description of Artificial Sequence: Synthetic oligonucleotide
uaaacccuggcuccaaagg

SEQ ID NO: 2906660 - RNA, 19 nt, Artificial Sequence
  Description of Artificial Sequence: Synthetic oligonucleotide
aaaucucagggcuucguug

SEQ ID NO: 2906661 - RNA, 19 nt, Artificial Sequence
  Description of Artificial Sequence: Synthetic oligonucleotide
ugggccaucucgauaaagg

SEQ ID NO: 2906662 - RNA, 19 nt, Artificial Sequence
  Description of Artificial Sequence: Synthetic oligonucleotide
uuuguucagaaaucucagg

SEQ ID NO: 2906663 - RNA, 19 nt, Artificial Sequence
  Description of Artificial Sequence: Synthetic oligonucleotide
ucuacguuugccuucuccc

SEQ ID NO: 2906664 - RNA, 19 nt, Artificial Sequence
  Description of Artificial Sequence: Synthetic oligonucleotide
uguucagaaaucucagggc

SEQ ID NO: 2906665 - RNA, 19 nt, Artificial Sequence
  Description of Artificial Sequence: Synthetic oligonucleotide
cucuccaccgacuaucucg

SEQ ID NO: 2906666 - RNA, 19 nt, Artificial Sequence
  Description of Artificial Sequence: Synthetic oligonucleotide
guagaauucccgcaggagc

SEQ ID NO: 2906667 - RNA, 19 nt, Artificial Sequence
  Description of Artificial Sequence: Synthetic oligonucleotide
cuuuguucagaaaucucag

SEQ ID NO: 2906668 - RNA, 19 nt, Artificial Sequence
  Description of Artificial Sequence: Synthetic oligonucleotide
uccaccgacuaucucgucg

SEQ ID NO: 2906669 - RNA, 19 nt, Artificial Sequence
  Description of Artificial Sequence: Synthetic oligonucleotide
guaguuaaacccuggcucc

SEQ ID NO: 2906670 - RNA, 19 nt, Artificial Sequence
  Description of Artificial Sequence: Synthetic oligonucleotide
uagaauucccgcaggagcu

SEQ ID NO: 2906671 - RNA, 19 nt, Artificial Sequence
  Description of Artificial Sequence: Synthetic oligonucleotide
uuggcaguaguuaaacccu

SEQ ID NO: 2906672 - RNA, 19 nt, Artificial Sequence
  Description of Artificial Sequence: Synthetic oligonucleotide
ucucgauaaaggcacccag

SEQ ID NO: 2906673 - RNA, 19 nt, Artificial Sequence
  Description of Artificial Sequence: Synthetic oligonucleotide
cucaaagaccucuccaccg

SEQ ID NO: 2906674 - RNA, 19 nt, Artificial Sequence
  Description of Artificial Sequence: Synthetic oligonucleotide
cagaucuguaccauguggc

SEQ ID NO: 2906675 - RNA, 19 nt, Artificial Sequence
  Description of Artificial Sequence: Synthetic oligonucleotide
gacuaucucgucgucaggg

SEQ ID NO: 2906676 - RNA, 19 nt, Artificial Sequence
  Description of Artificial Sequence: Synthetic oligonucleotide
ucgggcuuuguucagaaau

SEQ ID NO: 2906677 - RNA, 19 nt, Artificial Sequence
  Description of Artificial Sequence: Synthetic oligonucleotide
uuaaacccuggcuccaaag

SEQ ID NO: 2906678 - RNA, 19 nt, Artificial Sequence
  Description of Artificial Sequence: Synthetic oligonucleotide
uugcuaucagucaccaggc

SEQ ID NO: 2906679 - RNA, 19 nt, Artificial Sequence
  Description of Artificial Sequence: Synthetic oligonucleotide
cucgauaaaggcacccagg

SEQ ID NO: 2906680 - RNA, 19 nt, Artificial Sequence
  Description of Artificial Sequence: Synthetic oligonucleotide
gaggguagaauucccgcag

SEQ ID NO: 2906681 - RNA, 19 nt, Artificial Sequence
  Description of Artificial Sequence: Synthetic oligonucleotide
gacucuuuccggcuggcag

SEQ ID NO: 2906682 - RNA, 19 nt, Artificial Sequence
  Description of Artificial Sequence: Synthetic oligonucleotide
gcaguaaaugccuuggcag

SEQ ID NO: 2906683 - RNA, 19 nt, Artificial Sequence
  Description of Artificial Sequence: Synthetic oligonucleotide
gucgucaggguucaggcag

SEQ ID NO: 2906684 - RNA, 19 nt, Artificial Sequence
  Description of Artificial Sequence: Synthetic oligonucleotide
aaugugccagcaguaaaug

SEQ ID NO: 2906685 - RNA, 19 nt, Artificial Sequence
  Description of Artificial Sequence: Synthetic oligonucleotide
agcaguaaaugccuuggca

SEQ ID NO: 2906686 - RNA, 19 nt, Artificial Sequence
  Description of Artificial Sequence: Synthetic oligonucleotide
acagaggcucugcagcagc

SEQ ID NO: 2906687 - RNA, 19 nt, Artificial Sequence
  Description of Artificial Sequence: Synthetic oligonucleotide
ucaaagaccucuccaccga

SEQ ID NO: 2906688 - RNA, 19 nt, Artificial Sequence
  Description of Artificial Sequence: Synthetic oligonucleotide
cucucaaagaccucuccac

SEQ ID NO: 2906689 - RNA, 19 nt, Artificial Sequence
  Description of Artificial Sequence: Synthetic oligonucleotide
cuagacaccuucuuggcca

SEQ ID NO: 2906690 - RNA, 19 nt, Artificial Sequence
  Description of Artificial Sequence: Synthetic oligonucleotide
agaguugcuaucagucacc

SEQ ID NO: 2906691 - RNA, 19 nt, Artificial Sequence
  Description of Artificial Sequence: Synthetic oligonucleotide
guucaggcagaucuguacc

SEQ ID NO: 2906692 - RNA, 19 nt, Artificial Sequence
  Description of Artificial Sequence: Synthetic oligonucleotide
ugaggguagaauucccgca

SEQ ID NO: 2906693 - RNA, 19 nt, Artificial Sequence
  Description of Artificial Sequence: Synthetic oligonucleotide
ugcccaaugugccagcagu

SEQ ID NO: 2906694 - RNA, 19 nt, Artificial Sequence
  Description of Artificial Sequence: Synthetic oligonucleotide
aaugccuuggcaguaguua

SEQ ID NO: 2906695 - RNA, 19 nt, Artificial Sequence
  Description of Artificial Sequence: Synthetic oligonucleotide
uccuuucgggcuuuguuca

SEQ ID NO: 2906696 - RNA, 19 nt, Artificial Sequence
  Description of Artificial Sequence: Synthetic oligonucleotide
ucagucaccaggcucucaa

SEQ ID NO: 2906697 - RNA, 19 nt, Artificial Sequence
  Description of Artificial Sequence: Synthetic oligonucleotide
uacguuugccuucucccug

SEQ ID NO: 2906698 - RNA, 19 nt, Artificial Sequence
  Description of Artificial Sequence: Synthetic oligonucleotide
gaucuguaccauguggcag

SEQ ID NO: 2906699 - RNA, 19 nt, Artificial Sequence
  Description of Artificial Sequence: Synthetic oligonucleotide
ucgucgucaggguucaggc

SEQ ID NO: 2906700 - RNA, 19 nt, Artificial Sequence
  Description of Artificial Sequence: Synthetic oligonucleotide
ucugcccggaguccgagug

SEQ ID NO: 2906701 - RNA, 19 nt, Artificial Sequence
  Description of Artificial Sequence: Synthetic oligonucleotide
uaucucgucgucaggguuc

SEQ ID NO: 2906702 - RNA, 19 nt, Artificial Sequence
  Description of Artificial Sequence: Synthetic oligonucleotide
aggugcuguccuuucgggc

SEQ ID NO: 2906703 - RNA, 19 nt, Artificial Sequence
  Description of Artificial Sequence: Synthetic oligonucleotide
uucaggcagaucuguacca

SEQ ID NO: 2906704 - RNA, 19 nt, Artificial Sequence
  Description of Artificial Sequence: Synthetic oligonucleotide
agaucuguaccauguggca

SEQ ID NO: 2906705 - RNA, 19 nt, Artificial Sequence
  Description of Artificial Sequence: Synthetic oligonucleotide
gcagaucuguaccaugugg

SEQ ID NO: 2906706 - RNA, 19 nt, Artificial Sequence
  Description of Artificial Sequence: Synthetic oligonucleotide
gcugcugggacucuuuccg

SEQ ID NO: 2906707 - RNA, 19 nt, Artificial Sequence
  Description of Artificial Sequence: Synthetic oligonucleotide
auaaaggcacccagggccg

SEQ ID NO: 2906708 - RNA, 19 nt, Artificial Sequence
  Description of Artificial Sequence: Synthetic oligonucleotide
ucuccaccgacuaucucgu

SEQ ID NO: 2906709 - RNA, 19 nt, Artificial Sequence
  Description of Artificial Sequence: Synthetic oligonucleotide
gugaggguagaauucccgc

SEQ ID NO: 2906710 - RNA, 19 nt, Artificial Sequence
  Description of Artificial Sequence: Synthetic oligonucleotide
cucugcagugcguacuccg

SEQ ID NO: 2906711 - RNA, 19 nt, Artificial Sequence
  Description of Artificial Sequence: Synthetic oligonucleotide
agugaggguagaauucccg

SEQ ID NO: 2906712 - RNA, 19 nt, Artificial Sequence
  Description of Artificial Sequence: Synthetic oligonucleotide
ucagaaaucucagggcuuc

SEQ ID NO: 2906713 - RNA, 19 nt, Artificial Sequence
  Description of Artificial Sequence: Synthetic oligonucleotide
aggagcuucucugcagugc

SEQ ID NO: 2906714 - RNA, 19 nt, Artificial Sequence
  Description of Artificial Sequence: Synthetic oligonucleotide
cucggucugggccaucucg

SEQ ID NO: 2906715 - RNA, 19 nt, Artificial Sequence
  Description of Artificial Sequence: Synthetic oligonucleotide
uccgagugaggguagaauu

SEQ ID NO: 2906716 - RNA, 19 nt, Artificial Sequence
  Description of Artificial Sequence: Synthetic oligonucleotide
ugcagugcguacuccgugc

SEQ ID NO: 2906717 - RNA, 19 nt, Artificial Sequence
  Description of Artificial Sequence: Synthetic oligonucleotide
guucagaaaucucagggcu

SEQ ID NO: 2906718 - RNA, 19 nt, Artificial Sequence
  Description of Artificial Sequence: Synthetic oligonucleotide
ggagcuucucugcagugcg

SEQ ID NO: 2906719 - RNA, 19 nt, Artificial Sequence
  Description of Artificial Sequence: Synthetic oligonucleotide
aggguagaauucccgcagg

SEQ ID NO: 2906720 - RNA, 19 nt, Artificial Sequence
  Description of Artificial Sequence: Synthetic oligonucleotide
acguuugccuucucccugg

SEQ ID NO: 2906721 - RNA, 19 nt, Artificial Sequence
  Description of Artificial Sequence: Synthetic oligonucleotide
ugggacucuuuccggcugg

SEQ ID NO: 2906722 - RNA, 19 nt, Artificial Sequence
  Description of Artificial Sequence: Synthetic oligonucleotide
aagaccucuccaccgacua

SEQ ID NO: 2906723 - RNA, 19 nt, Artificial Sequence
  Description of Artificial Sequence: Synthetic oligonucleotide
gcaaucugaccccaggugc

SEQ ID NO: 2906724 - RNA, 19 nt, Artificial Sequence
  Description of Artificial Sequence: Synthetic oligonucleotide
uguggcagguggcaaucug

SEQ ID NO: 2906725 - RNA, 19 nt, Artificial Sequence
  Description of Artificial Sequence: Synthetic oligonucleotide
uggcaguaguuaaacccug

SEQ ID NO: 2906726 - RNA, 19 nt, Artificial Sequence
  Description of Artificial Sequence: Synthetic oligonucleotide
cucuacguuugccuucucc

SEQ ID NO: 2906727 - RNA, 19 nt, Artificial Sequence
  Description of Artificial Sequence: Synthetic oligonucleotide
uaaaugccuuggcaguagu

SEQ ID NO: 2906728 - RNA, 19 nt, Artificial Sequence
  Description of Artificial Sequence: Synthetic oligonucleotide
guggcaaucugaccccagg

SEQ ID NO: 2906729 - RNA, 19 nt, Artificial Sequence
  Description of Artificial Sequence: Synthetic oligonucleotide
uacuccgugcugcugggac

SEQ ID NO: 2906730 - RNA, 19 nt, Artificial Sequence
  Description of Artificial Sequence: Synthetic oligonucleotide
uucagaaaucucagggcuu

SEQ ID NO: 2906731 - RNA, 19 nt, Artificial Sequence
  Description of Artificial Sequence: Synthetic oligonucleotide
uguccuuucgggcuuuguu

SEQ ID NO: 2906732 - RNA, 19 nt, Artificial Sequence
  Description of Artificial Sequence: Synthetic oligonucleotide
ucugcagugcguacuccgu

SEQ ID NO: 2906733 - RNA, 19 nt, Artificial Sequence
  Description of Artificial Sequence: Synthetic oligonucleotide
uggcaaucugaccccaggu

SEQ ID NO: 2906734 - RNA, 19 nt, Artificial Sequence
  Description of Artificial Sequence: Synthetic oligonucleotide
ugcugggacucuuuccggc

SEQ ID NO: 2906735 - RNA, 19 nt, Artificial Sequence
  Description of Artificial Sequence: Synthetic oligonucleotide
acucuuuccggcuggcaga

SEQ ID NO: 2906736 - RNA, 19 nt, Artificial Sequence
  Description of Artificial Sequence: Synthetic oligonucleotide
uggcagguggcaaucugac

SEQ ID NO: 2906737 - RNA, 19 nt, Artificial Sequence
  Description of Artificial Sequence: Synthetic oligonucleotide
uccuucucggucugggcca

SEQ ID NO: 2906738 - RNA, 19 nt, Artificial Sequence
  Description of Artificial Sequence: Synthetic oligonucleotide
cuaucagucaccaggcucu

SEQ ID NO: 2906739 - RNA, 19 nt, Artificial Sequence
  Description of Artificial Sequence: Synthetic oligonucleotide
uucucugcagugcguacuc

SEQ ID NO: 2906740 - RNA, 19 nt, Artificial Sequence
  Description of Artificial Sequence: Synthetic oligonucleotide
guccuuucgggcuuuguuc

SEQ ID NO: 2906741 - RNA, 19 nt, Artificial Sequence
  Description of Artificial Sequence: Synthetic oligonucleotide
uucguugggcugcccaaug

SEQ ID NO: 2906742 - RNA, 19 nt, Artificial Sequence
  Description of Artificial Sequence: Synthetic oligonucleotide
guaaaugccuuggcaguag

SEQ ID NO: 2906743 - RNA, 19 nt, Artificial Sequence
  Description of Artificial Sequence: Synthetic oligonucleotide
aaggcaccggcuagacacc

SEQ ID NO: 2906744 - RNA, 19 nt, Artificial Sequence
  Description of Artificial Sequence: Synthetic oligonucleotide
ucccgcaggagcuucucug

SEQ ID NO: 2906745 - RNA, 19 nt, Artificial Sequence
  Description of Artificial Sequence: Synthetic oligonucleotide
acuaucucgucgucagggu

SEQ ID NO: 2906746 - RNA, 19 nt, Artificial Sequence
  Description of Artificial Sequence: Synthetic oligonucleotide
ucggucugggccaucucga

SEQ ID NO: 2906747 - RNA, 19 nt, Artificial Sequence
  Description of Artificial Sequence: Synthetic oligonucleotide
uagacaccuucuuggccag

SEQ ID NO: 2906748 - RNA, 19 nt, Artificial Sequence
  Description of Artificial Sequence: Synthetic oligonucleotide
gcuuuguucagaaaucuca

SEQ ID NO: 2906749 - RNA, 19 nt, Artificial Sequence
  Description of Artificial Sequence: Synthetic oligonucleotide
uuuccggcuggcagaguug

SEQ ID NO: 2906750 - RNA, 19 nt, Artificial Sequence
  Description of Artificial Sequence: Synthetic oligonucleotide
uuucgggcuuuguucagaa

SEQ ID NO: 2906751 - RNA, 19 nt, Artificial Sequence
  Description of Artificial Sequence: Synthetic oligonucleotide
aacccuggcuccaaaggca

SEQ ID NO: 2906752 - RNA, 19 nt, Artificial Sequence
  Description of Artificial Sequence: Synthetic oligonucleotide
ugcugcugggacucuuucc

SEQ ID NO: 2906753 - RNA, 19 nt, Artificial Sequence
  Description of Artificial Sequence: Synthetic oligonucleotide
auguaggccugugccaugg

SEQ ID NO: 2906754 - RNA, 19 nt, Artificial Sequence
  Description of Artificial Sequence: Synthetic oligonucleotide
gguucaggcagaucuguac

SEQ ID NO: 2906755 - RNA, 19 nt, Artificial Sequence
  Description of Artificial Sequence: Synthetic oligonucleotide
guaggccugugccauggcc

SEQ ID NO: 2906756 - RNA, 19 nt, Artificial Sequence
  Description of Artificial Sequence: Synthetic oligonucleotide
uugccuucucccugguggc

SEQ ID NO: 2906757 - RNA, 19 nt, Artificial Sequence
  Description of Artificial Sequence: Synthetic oligonucleotide
caucucgauaaaggcaccc

SEQ ID NO: 2906758 - RNA, 19 nt, Artificial Sequence
  Description of Artificial Sequence: Synthetic oligonucleotide
caggugcuguccuuucggg

SEQ ID NO: 2906759 - RNA, 19 nt, Artificial Sequence
  Description of Artificial Sequence: Synthetic oligonucleotide
aaucugaccccaggugcug

SEQ ID NO: 2906760 - RNA, 19 nt, Artificial Sequence
  Description of Artificial Sequence: Synthetic oligonucleotide
caccaggcucucaaagacc

SEQ ID NO: 2906761 - RNA, 19 nt, Artificial Sequence
  Description of Artificial Sequence: Synthetic oligonucleotide
gucaccaggcucucaaaga

SEQ ID NO: 2906762 - RNA, 19 nt, Artificial Sequence
  Description of Artificial Sequence: Synthetic oligonucleotide
cagguggcaaucugacccc

SEQ ID NO: 2906763 - RNA, 19 nt, Artificial Sequence
  Description of Artificial Sequence: Synthetic oligonucleotide
cucgucgucaggguucagg

SEQ ID NO: 2906764 - RNA, 19 nt, Artificial Sequence
  Description of Artificial Sequence: Synthetic oligonucleotide
gggauggcuguccuucucg

SEQ ID NO: 2906765 - RNA, 19 nt, Artificial Sequence
  Description of Artificial Sequence: Synthetic oligonucleotide
aucucagggcuucguuggg

SEQ ID NO: 2906766 - RNA, 19 nt, Artificial Sequence
  Description of Artificial Sequence: Synthetic oligonucleotide
aaagaccucuccaccgacu

SEQ ID NO: 2906767 - RNA, 19 nt, Artificial Sequence
  Description of Artificial Sequence: Synthetic oligonucleotide
gccaucucgauaaaggcac

SEQ ID NO: 2906768 - RNA, 19 nt, Artificial Sequence
  Description of Artificial Sequence: Synthetic oligonucleotide
ugguggccagcagacagag

SEQ ID NO: 2906769 - RNA, 19 nt, Artificial Sequence
  Description of Artificial Sequence: Synthetic oligonucleotide
aguugcuaucagucaccag

SEQ ID NO: 2906770 - RNA, 19 nt, Artificial Sequence
  Description of Artificial Sequence: Synthetic oligonucleotide
uguccuucucggucugggc

SEQ ID NO: 2906771 - RNA, 19 nt, Artificial Sequence
  Description of Artificial Sequence: Synthetic oligonucleotide
ugggucugcccggaguccg

SEQ ID NO: 2906772 - RNA, 19 nt, Artificial Sequence
  Description of Artificial Sequence: Synthetic oligonucleotide
ggcaaucugaccccaggug

SEQ ID NO: 2906773 - RNA, 19 nt, Artificial Sequence
  Description of Artificial Sequence: Synthetic oligonucleotide
gccauggccagcaaggcag

SEQ ID NO: 2906774 - RNA, 19 nt, Artificial Sequence
  Description of Artificial Sequence: Synthetic oligonucleotide
gcaguaguuaaacccuggc

SEQ ID NO: 2906775 - RNA, 19 nt, Artificial Sequence
  Description of Artificial Sequence: Synthetic oligonucleotide
agggauggcuguccuucuc

SEQ ID NO: 2906776 - RNA, 19 nt, Artificial Sequence
  Description of Artificial Sequence: Synthetic oligonucleotide
ugcuaucagucaccaggcu

SEQ ID NO: 2906777 - RNA, 19 nt, Artificial Sequence
  Description of Artificial Sequence: Synthetic oligonucleotide
uggcuguccuucucggucu

SEQ ID NO: 2906778 - RNA, 19 nt, Artificial Sequence
  Description of Artificial Sequence: Synthetic oligonucleotide
gcuaucagucaccaggcuc

SEQ ID NO: 2906779 - RNA, 19 nt, Artificial Sequence
  Description of Artificial Sequence: Synthetic oligonucleotide
uaguuaaacccuggcucca

SEQ ID NO: 2906780 - RNA, 19 nt, Artificial Sequence
  Description of Artificial Sequence: Synthetic oligonucleotide
gguagaauucccgcaggag

SEQ ID NO: 2906781 - RNA, 19 nt, Artificial Sequence
  Description of Artificial Sequence: Synthetic oligonucleotide
uccaaaggcaccggcuaga

SEQ ID NO: 2906782 - RNA, 19 nt, Artificial Sequence
  Description of Artificial Sequence: Synthetic oligonucleotide
caaagaccucuccaccgac

SEQ ID NO: 2906783 - RNA, 19 nt, Artificial Sequence
  Description of Artificial Sequence: Synthetic oligonucleotide
ucguugggcugcccaaugu

SEQ ID NO: 2906784 - RNA, 19 nt, Artificial Sequence
  Description of Artificial Sequence: Synthetic oligonucleotide
gggccaucucgauaaaggc

SEQ ID NO: 2906785 - RNA, 19 nt, Artificial Sequence
  Description of Artificial Sequence: Synthetic oligonucleotide
cuccaaaggcaccggcuag

SEQ ID NO: 2906786 - RNA, 19 nt, Artificial Sequence
  Description of Artificial Sequence: Synthetic oligonucleotide
gaccucuccaccgacuauc

SEQ ID NO: 2906787 - RNA, 19 nt, Artificial Sequence
  Description of Artificial Sequence: Synthetic oligonucleotide
uuccggcuggcagaguugc

SEQ ID NO: 2906788 - RNA, 19 nt, Artificial Sequence
  Description of Artificial Sequence: Synthetic oligonucleotide
gccagcaaggcagggaugg

SEQ ID NO: 2906789 - RNA, 19 nt, Artificial Sequence
  Description of Artificial Sequence: Synthetic oligonucleotide
aggccugugccauggccag

SEQ ID NO: 2906790 - RNA, 19 nt, Artificial Sequence
  Description of Artificial Sequence: Synthetic oligonucleotide
ugccuuggcaguaguuaaa

SEQ ID NO: 2906791 - RNA, 19 nt, Artificial Sequence
  Description of Artificial Sequence: Synthetic oligonucleotide
aguaaaugccuuggcagua

SEQ ID NO: 2906792 - RNA, 19 nt, Artificial Sequence
  Description of Artificial Sequence: Synthetic oligonucleotide
gagugaggguagaauuccc

SEQ ID NO: 2906793 - RNA, 19 nt, Artificial Sequence
  Description of Artificial Sequence: Synthetic oligonucleotide
agaaaucucagggcuucgu

SEQ ID NO: 2906794 - RNA, 19 nt, Artificial Sequence
  Description of Artificial Sequence: Synthetic oligonucleotide
agcaaggcagggauggcug

SEQ ID NO: 2906795 - RNA, 19 nt, Artificial Sequence
  Description of Artificial Sequence: Synthetic oligonucleotide
gcguacuccgugcugcugg

SEQ ID NO: 2906796 - RNA, 19 nt, Artificial Sequence
  Description of Artificial Sequence: Synthetic oligonucleotide
aucucgauaaaggcaccca

SEQ ID NO: 2906797 - RNA, 19 nt, Artificial Sequence
  Description of Artificial Sequence: Synthetic oligonucleotide
ggauggcuguccuucucgg

SEQ ID NO: 2906798 - RNA, 19 nt, Artificial Sequence
  Description of Artificial Sequence: Synthetic oligonucleotide
ucucagggcuucguugggc

SEQ ID NO: 2906799 - RNA, 19 nt, Artificial Sequence
  Description of Artificial Sequence: Synthetic oligonucleotide
uaccauguggcagguggca

SEQ ID NO: 2906800 - RNA, 19 nt, Artificial Sequence
  Description of Artificial Sequence: Synthetic oligonucleotide
cagcaguaaaugccuuggc

SEQ ID NO: 2906801 - RNA, 19 nt, Artificial Sequence
  Description of Artificial Sequence: Synthetic oligonucleotide
uggcuccaaaggcaccggc

SEQ ID NO: 2906802 - RNA, 19 nt, Artificial Sequence
  Description of Artificial Sequence: Synthetic oligonucleotide
aggcagaucuguaccaugu

SEQ ID NO: 2906803 - RNA, 19 nt, Artificial Sequence
  Description of Artificial Sequence: Synthetic oligonucleotide
agaggcucugcagcagccg

SEQ ID NO: 2906804 - RNA, 19 nt, Artificial Sequence
  Description of Artificial Sequence: Synthetic oligonucleotide
gcagacagaggcucugcag

SEQ ID NO: 2906805 - RNA, 19 nt, Artificial Sequence
  Description of Artificial Sequence: Synthetic oligonucleotide
uaaaggcacccagggccgg

SEQ ID NO: 2906806 - RNA, 19 nt, Artificial Sequence
  Description of Artificial Sequence: Synthetic oligonucleotide
cugcugggacucuuuccgg

SEQ ID NO: 2906807 - RNA, 19 nt, Artificial Sequence
  Description of Artificial Sequence: Synthetic oligonucleotide
ccagcaguaaaugccuugg

SEQ ID NO: 2906808 - RNA, 19 nt, Artificial Sequence
  Description of Artificial Sequence: Synthetic oligonucleotide
cuguccuucucggucuggg

SEQ ID NO: 2906809 - RNA, 19 nt, Artificial Sequence
  Description of Artificial Sequence: Synthetic oligonucleotide
gcuagacaccuucuuggcc

SEQ ID NO: 2906810 - RNA, 19 nt, Artificial Sequence
  Description of Artificial Sequence: Synthetic oligonucleotide
ugcccggaguccgagugag

SEQ ID NO: 2906811 - RNA, 19 nt, Artificial Sequence
  Description of Artificial Sequence: Synthetic oligonucleotide
ucgucaggguucaggcaga

SEQ ID NO: 2906812 - RNA, 19 nt, Artificial Sequence
  Description of Artificial Sequence: Synthetic oligonucleotide
caggcagaucuguaccaug

SEQ ID NO: 2906813 - RNA, 19 nt, Artificial Sequence
  Description of Artificial Sequence: Synthetic oligonucleotide
ccgacuaucucgucgucag

SEQ ID NO: 2906814 - RNA, 19 nt, Artificial Sequence
  Description of Artificial Sequence: Synthetic oligonucleotide
gacagaggcucugcagcag

SEQ ID NO: 2906815 - RNA, 19 nt, Artificial Sequence
  Description of Artificial Sequence: Synthetic oligonucleotide
ugggcugcccaaugugcca

SEQ ID NO: 2906816 - RNA, 19 nt, Artificial Sequence
  Description of Artificial Sequence: Synthetic oligonucleotide
agcagccgcagcugggucu

SEQ ID NO: 2906817 - RNA, 19 nt, Artificial Sequence
  Description of Artificial Sequence: Synthetic oligonucleotide
ccugguggccagcagacag

SEQ ID NO: 2906818 - RNA, 19 nt, Artificial Sequence
  Description of Artificial Sequence: Synthetic oligonucleotide
acccuggcuccaaaggcac

SEQ ID NO: 2906819 - RNA, 19 nt, Artificial Sequence
  Description of Artificial Sequence: Synthetic oligonucleotide
gaguugcuaucagucacca

SEQ ID NO: 2906820 - RNA, 19 nt, Artificial Sequence
  Description of Artificial Sequence: Synthetic oligonucleotide
ugaccccaggugcuguccu

SEQ ID NO: 2906821 - RNA, 19 nt, Artificial Sequence
  Description of Artificial Sequence: Synthetic oligonucleotide
ggcuagacaccuucuuggc

SEQ ID NO: 2906822 - RNA, 19 nt, Artificial Sequence
  Description of Artificial Sequence: Synthetic oligonucleotide
uguaggccugugccauggc

SEQ ID NO: 2906823 - RNA, 19 nt, Artificial Sequence
  Description of Artificial Sequence: Synthetic oligonucleotide
ucagggcuucguugggcug

SEQ ID NO: 2906824 - RNA, 19 nt, Artificial Sequence
  Description of Artificial Sequence: Synthetic oligonucleotide
cugugccauggccagcaag

SEQ ID NO: 2906825 - RNA, 19 nt, Artificial Sequence
  Description of Artificial Sequence: Synthetic oligonucleotide
ucaggcagaucuguaccau

SEQ ID NO: 2906826 - RNA, 19 nt, Artificial Sequence
  Description of Artificial Sequence: Synthetic oligonucleotide
caggguucaggcagaucug

SEQ ID NO: 2906827 - RNA, 19 nt, Artificial Sequence
  Description of Artificial Sequence: Synthetic oligonucleotide
aaggcacccagggccgguc

SEQ ID NO: 2906828 - RNA, 19 nt, Artificial Sequence
  Description of Artificial Sequence: Synthetic oligonucleotide
ggcaguaguuaaacccugg

SEQ ID NO: 2906829 - RNA, 19 nt, Artificial Sequence
  Description of Artificial Sequence: Synthetic oligonucleotide
cggcuagacaccuucuugg

SEQ ID NO: 2906830 - RNA, 19 nt, Artificial Sequence
  Description of Artificial Sequence: Synthetic oligonucleotide
acuccgugcugcugggacu

SEQ ID NO: 2906831 - RNA, 19 nt, Artificial Sequence
  Description of Artificial Sequence: Synthetic oligonucleotide
uucucggucugggccaucu

SEQ ID NO: 2906832 - RNA, 19 nt, Artificial Sequence
  Description of Artificial Sequence: Synthetic oligonucleotide
cucuuuccggcuggcagag

SEQ ID NO: 2906833 - RNA, 19 nt, Artificial Sequence
  Description of Artificial Sequence: Synthetic oligonucleotide
ucuguaccauguggcaggu

SEQ ID NO: 2906834 - RNA, 19 nt, Artificial Sequence
  Description of Artificial Sequence: Synthetic oligonucleotide
cagggcuucguugggcugc

SEQ ID NO: 2906835 - RNA, 19 nt, Artificial Sequence
  Description of Artificial Sequence: Synthetic oligonucleotide
caguaaaugccuuggcagu

SEQ ID NO: 2906836 - RNA, 19 nt, Artificial Sequence
  Description of Artificial Sequence: Synthetic oligonucleotide
cagaaaucucagggcuucg

SEQ ID NO: 2906837 - RNA, 19 nt, Artificial Sequence
  Description of Artificial Sequence: Synthetic oligonucleotide
aaaugccuuggcaguaguu

SEQ ID NO: 2906838 - RNA, 19 nt, Artificial Sequence
  Description of Artificial Sequence: Synthetic oligonucleotide
cugcagugcguacuccgug

SEQ ID NO: 2906839 - RNA, 19 nt, Artificial Sequence
  Description of Artificial Sequence: Synthetic oligonucleotide
aggguucaggcagaucugu

SEQ ID NO: 2906840 - RNA, 19 nt, Artificial Sequence
  Description of Artificial Sequence: Synthetic oligonucleotide
aauucccgcaggagcuucu

SEQ ID NO: 2906841 - RNA, 19 nt, Artificial Sequence
  Description of Artificial Sequence: Synthetic oligonucleotide
agcugggucugcccggagu

SEQ ID NO: 2906842 - RNA, 19 nt, Artificial Sequence
  Description of Artificial Sequence: Synthetic oligonucleotide
gaaaucucagggcuucguu

SEQ ID NO: 2906843 - RNA, 19 nt, Artificial Sequence
  Description of Artificial Sequence: Synthetic oligonucleotide
ccaggugcuguccuuucgg

SEQ ID NO: 2906844 - RNA, 19 nt, Artificial Sequence
  Description of Artificial Sequence: Synthetic oligonucleotide
cauguggcagguggcaauc

SEQ ID NO: 2906845 - RNA, 19 nt, Artificial Sequence
  Description of Artificial Sequence: Synthetic oligonucleotide
caguaguuaaacccuggcu

SEQ ID NO: 2906846 - RNA, 19 nt, Artificial Sequence
  Description of Artificial Sequence: Synthetic oligonucleotide
guaccauguggcagguggc

SEQ ID NO: 2906847 - RNA, 19 nt, Artificial Sequence
  Description of Artificial Sequence: Synthetic oligonucleotide
gcucucaaagaccucucca

SEQ ID NO: 2906848 - RNA, 19 nt, Artificial Sequence
  Description of Artificial Sequence: Synthetic oligonucleotide
ggcucucaaagaccucucc

SEQ ID NO: 2906849 - RNA, 19 nt, Artificial Sequence
  Description of Artificial Sequence: Synthetic oligonucleotide
accgacuaucucgucguca

SEQ ID NO: 2906850 - RNA, 19 nt, Artificial Sequence
  Description of Artificial Sequence: Synthetic oligonucleotide
agggcuucguugggcugcc

SEQ ID NO: 2906851 - RNA, 19 nt, Artificial Sequence
  Description of Artificial Sequence: Synthetic oligonucleotide
gaauucccgcaggagcuuc

SEQ ID NO: 2906852 - RNA, 19 nt, Artificial Sequence
  Description of Artificial Sequence: Synthetic oligonucleotide
caggagcuucucugcagug

SEQ ID NO: 2906853 - RNA, 19 nt, Artificial Sequence
  Description of Artificial Sequence: Synthetic oligonucleotide
ccuuggcaguaguuaaacc

SEQ ID NO: 2906854 - RNA, 19 nt, Artificial Sequence
  Description of Artificial Sequence: Synthetic oligonucleotide
guuaaacccuggcuccaaa

SEQ ID NO: 2906855 - RNA, 19 nt, Artificial Sequence
  Description of Artificial Sequence: Synthetic oligonucleotide
gccagcaguaaaugccuug

SEQ ID NO: 2906856 - RNA, 19 nt, Artificial Sequence
  Description of Artificial Sequence: Synthetic oligonucleotide
guuugccuucucccuggug

SEQ ID NO: 2906857 - RNA, 19 nt, Artificial Sequence
  Description of Artificial Sequence: Synthetic oligonucleotide
ggugcuguccuuucgggcu

SEQ ID NO: 2906858 - RNA, 19 nt, Artificial Sequence
  Description of Artificial Sequence: Synthetic oligonucleotide
ccuggcuccaaaggcaccg

SEQ ID NO: 2906859 - RNA, 19 nt, Artificial Sequence
  Description of Artificial Sequence: Synthetic oligonucleotide
ggcagaucuguaccaugug

SEQ ID NO: 2906860 - RNA, 19 nt, Artificial Sequence
  Description of Artificial Sequence: Synthetic oligonucleotide
aaaggcacccagggccggu

SEQ ID NO: 2906861 - RNA, 19 nt, Artificial Sequence
  Description of Artificial Sequence: Synthetic oligonucleotide
uucucccugguggccagca

SEQ ID NO: 2906862 - RNA, 19 nt, Artificial Sequence
  Description of Artificial Sequence: Synthetic oligonucleotide
cugggccaucucgauaaag

SEQ ID NO: 2906863 - RNA, 19 nt, Artificial Sequence
  Description of Artificial Sequence: Synthetic oligonucleotide
ccgagugaggguagaauuc

SEQ ID NO: 2906864 - RNA, 19 nt, Artificial Sequence
  Description of Artificial Sequence: Synthetic oligonucleotide
aguuaaacccuggcuccaa

SEQ ID NO: 2906865 - RNA, 19 nt, Artificial Sequence
  Description of Artificial Sequence: Synthetic oligonucleotide
accggcuagacaccuucuu

SEQ ID NO: 2906866 - RNA, 19 nt, Artificial Sequence
  Description of Artificial Sequence: Synthetic oligonucleotide
cccggaguccgagugaggg

SEQ ID NO: 2906867 - RNA, 19 nt, Artificial Sequence
  Description of Artificial Sequence: Synthetic oligonucleotide
cugcccaaugugccagcag

SEQ ID NO: 2906868 - RNA, 19 nt, Artificial Sequence
  Description of Artificial Sequence: Synthetic oligonucleotide
aggcucucaaagaccucuc

SEQ ID NO: 2906869 - RNA, 19 nt, Artificial Sequence
  Description of Artificial Sequence: Synthetic oligonucleotide
ggucucuacguuugccuuc

SEQ ID NO: 2906870 - RNA, 19 nt, Artificial Sequence
  Description of Artificial Sequence: Synthetic oligonucleotide
caaucugaccccaggugcu

SEQ ID NO: 2906871 - RNA, 19 nt, Artificial Sequence
  Description of Artificial Sequence: Synthetic oligonucleotide
agccgcagcugggucugcc

SEQ ID NO: 2906872 - RNA, 19 nt, Artificial Sequence
  Description of Artificial Sequence: Synthetic oligonucleotide
guggcagguggcaaucuga

SEQ ID NO: 2906873 - RNA, 19 nt, Artificial Sequence
  Description of Artificial Sequence: Synthetic oligonucleotide
aucucgucgucaggguuca

SEQ ID NO: 2906874 - RNA, 19 nt, Artificial Sequence
  Description of Artificial Sequence: Synthetic oligonucleotide
auggccagcaaggcaggga

SEQ ID NO: 2906875 - RNA, 19 nt, Artificial Sequence
  Description of Artificial Sequence: Synthetic oligonucleotide
uucgggcuuuguucagaaa

SEQ ID NO: 2906876 - RNA, 19 nt, Artificial Sequence
  Description of Artificial Sequence: Synthetic oligonucleotide
cauggccagcaaggcaggg

SEQ ID NO: 2906877 - RNA, 19 nt, Artificial Sequence
  Description of Artificial Sequence: Synthetic oligonucleotide
ucugggccaucucgauaaa

SEQ ID NO: 2906878 - RNA, 19 nt, Artificial Sequence
  Description of Artificial Sequence: Synthetic oligonucleotide
cuacguuugccuucucccu

SEQ ID NO: 2906879 - RNA, 19 nt, Artificial Sequence
  Description of Artificial Sequence: Synthetic oligonucleotide
ggccaucucgauaaaggca

SEQ ID NO: 2906880 - RNA, 19 nt, Artificial Sequence
  Description of Artificial Sequence: Synthetic oligonucleotide
ggcagguggcaaucugacc

SEQ ID NO: 2906881 - RNA, 19 nt, Artificial Sequence
  Description of Artificial Sequence: Synthetic oligonucleotide
acccagggccggucucuac

SEQ ID NO: 2906882 - RNA, 19 nt, Artificial Sequence
  Description of Artificial Sequence: Synthetic oligonucleotide
cugaccccaggugcugucc

SEQ ID NO: 2906883 - RNA, 19 nt, Artificial Sequence
  Description of Artificial Sequence: Synthetic oligonucleotide
gcagggauggcuguccuuc

SEQ ID NO: 2906884 - RNA, 19 nt, Artificial Sequence
  Description of Artificial Sequence: Synthetic oligonucleotide
ggguagaauucccgcagga

SEQ ID NO: 2906885 - RNA, 19 nt, Artificial Sequence
  Description of Artificial Sequence: Synthetic oligonucleotide
cgagugaggguagaauucc

SEQ ID NO: 2906886 - RNA, 19 nt, Artificial Sequence
  Description of Artificial Sequence: Synthetic oligonucleotide
agaccucuccaccgacuau

SEQ ID NO: 2906887 - RNA, 19 nt, Artificial Sequence
  Description of Artificial Sequence: Synthetic oligonucleotide
cuggcuccaaaggcaccgg

SEQ ID NO: 2906888 - RNA, 19 nt, Artificial Sequence
  Description of Artificial Sequence: Synthetic oligonucleotide
gcuggcagaguugcuauca

SEQ ID NO: 2906889 - RNA, 19 nt, Artificial Sequence
  Description of Artificial Sequence: Synthetic oligonucleotide
uaucagucaccaggcucuc

SEQ ID NO: 2906890 - RNA, 19 nt, Artificial Sequence
  Description of Artificial Sequence: Synthetic oligonucleotide
gcugggucugcccggaguc

SEQ ID NO: 2906891 - RNA, 19 nt, Artificial Sequence
  Description of Artificial Sequence: Synthetic oligonucleotide
cuuucgggcuuuguucaga

SEQ ID NO: 2906892 - RNA, 19 nt, Artificial Sequence
  Description of Artificial Sequence: Synthetic oligonucleotide
ugccuucucccugguggcc

SEQ ID NO: 2906893 - RNA, 19 nt, Artificial Sequence
  Description of Artificial Sequence: Synthetic oligonucleotide
gugccauggccagcaaggc

SEQ ID NO: 2906894 - RNA, 19 nt, Artificial Sequence
  Description of Artificial Sequence: Synthetic oligonucleotide
cccagggccggucucuacg

SEQ ID NO: 2906895 - RNA, 19 nt, Artificial Sequence
  Description of Artificial Sequence: Synthetic oligonucleotide
cagugcguacuccgugcug

SEQ ID NO: 2906896 - RNA, 19 nt, Artificial Sequence
  Description of Artificial Sequence: Synthetic oligonucleotide
cgauaaaggcacccagggc

SEQ ID NO: 2906897 - RNA, 19 nt, Artificial Sequence
  Description of Artificial Sequence: Synthetic oligonucleotide
ccggcuagacaccuucuug

SEQ ID NO: 2906898 - RNA, 19 nt, Artificial Sequence
  Description of Artificial Sequence: Synthetic oligonucleotide
gccuuggcaguaguuaaac

SEQ ID NO: 2906899 - RNA, 19 nt, Artificial Sequence
  Description of Artificial Sequence: Synthetic oligonucleotide
gcaccggcuagacaccuuc

SEQ ID NO: 2906900 - RNA, 19 nt, Artificial Sequence
  Description of Artificial Sequence: Synthetic oligonucleotide
caaggcagggauggcuguc

SEQ ID NO: 2906901 - RNA, 19 nt, Artificial Sequence
  Description of Artificial Sequence: Synthetic oligonucleotide
cccgcaggagcuucucugc

SEQ ID NO: 2906902 - RNA, 19 nt, Artificial Sequence
  Description of Artificial Sequence: Synthetic oligonucleotide
agaauucccgcaggagcuu

SEQ ID NO: 2906903 - RNA, 19 nt, Artificial Sequence
  Description of Artificial Sequence: Synthetic oligonucleotide
accauguggcagguggcaa

SEQ ID NO: 2906904 - RNA, 19 nt, Artificial Sequence
  Description of Artificial Sequence: Synthetic oligonucleotide
ccaucucgauaaaggcacc

SEQ ID NO: 2906905 - RNA, 19 nt, Artificial Sequence
  Description of Artificial Sequence: Synthetic oligonucleotide
ggcuuuguucagaaaucuc

SEQ ID NO: 2906906 - RNA, 19 nt, Artificial Sequence
  Description of Artificial Sequence: Synthetic oligonucleotide
accucuccaccgacuaucu

SEQ ID NO: 2906907 - RNA, 19 nt, Artificial Sequence
  Description of Artificial Sequence: Synthetic oligonucleotide
cuuuccggcuggcagaguu

SEQ ID NO: 2906908 - RNA, 19 nt, Artificial Sequence
  Description of Artificial Sequence: Synthetic oligonucleotide
caaaggcaccggcuagaca

SEQ ID NO: 2906909 - RNA, 19 nt, Artificial Sequence
  Description of Artificial Sequence: Synthetic oligonucleotide
cugggucugcccggagucc

SEQ ID NO: 2906910 - RNA, 19 nt, Artificial Sequence
  Description of Artificial Sequence: Synthetic oligonucleotide
cucagggcuucguugggcu

SEQ ID NO: 2906911 - RNA, 19 nt, Artificial Sequence
  Description of Artificial Sequence: Synthetic oligonucleotide
aucugaccccaggugcugu

SEQ ID NO: 2906912 - RNA, 19 nt, Artificial Sequence
  Description of Artificial Sequence: Synthetic oligonucleotide
uccggcuggcagaguugcu

SEQ ID NO: 2906913 - RNA, 19 nt, Artificial Sequence
  Description of Artificial Sequence: Synthetic oligonucleotide
gugccagcaguaaaugccu

SEQ ID NO: 2906914 - RNA, 19 nt, Artificial Sequence
  Description of Artificial Sequence: Synthetic oligonucleotide
gcuccaaaggcaccggcua

SEQ ID NO: 2906915 - RNA, 19 nt, Artificial Sequence
  Description of Artificial Sequence: Synthetic oligonucleotide
aguccgagugaggguagaa

SEQ ID NO: 2906916 - RNA, 19 nt, Artificial Sequence
  Description of Artificial Sequence: Synthetic oligonucleotide
ggcuucguugggcugccca

SEQ ID NO: 2906917 - RNA, 19 nt, Artificial Sequence
  Description of Artificial Sequence: Synthetic oligonucleotide
gcuucucugcagugcguac

SEQ ID NO: 2906918 - RNA, 19 nt, Artificial Sequence
  Description of Artificial Sequence: Synthetic oligonucleotide
auguggcagguggcaaucu

SEQ ID NO: 2906919 - RNA, 19 nt, Artificial Sequence
  Description of Artificial Sequence: Synthetic oligonucleotide
gucucuacguuugccuucu

SEQ ID NO: 2906920 - RNA, 19 nt, Artificial Sequence
  Description of Artificial Sequence: Synthetic oligonucleotide
cgggcuuuguucagaaauc

SEQ ID NO: 2906921 - RNA, 19 nt, Artificial Sequence
  Description of Artificial Sequence: Synthetic oligonucleotide
ccauggccagcaaggcagg

SEQ ID NO: 2906922 - RNA, 19 nt, Artificial Sequence
  Description of Artificial Sequence: Synthetic oligonucleotide
agguggcaaucugacccca

SEQ ID NO: 2906923 - RNA, 19 nt, Artificial Sequence
  Description of Artificial Sequence: Synthetic oligonucleotide
cccaggugcuguccuuucg

SEQ ID NO: 2906924 - RNA, 19 nt, Artificial Sequence
  Description of Artificial Sequence: Synthetic oligonucleotide
ucucuacguuugccuucuc

SEQ ID NO: 2906925 - RNA, 19 nt, Artificial Sequence
  Description of Artificial Sequence: Synthetic oligonucleotide
aucagucaccaggcucuca

SEQ ID NO: 2906926 - RNA, 19 nt, Artificial Sequence
  Description of Artificial Sequence: Synthetic oligonucleotide
ccuuucgggcuuuguucag

SEQ ID NO: 2906927 - RNA, 19 nt, Artificial Sequence
  Description of Artificial Sequence: Synthetic oligonucleotide
aggcacccagggccggucu

SEQ ID NO: 2906928 - RNA, 19 nt, Artificial Sequence
  Description of Artificial Sequence: Synthetic oligonucleotide
cuucucugcagugcguacu

SEQ ID NO: 2906929 - RNA, 19 nt, Artificial Sequence
  Description of Artificial Sequence: Synthetic oligonucleotide
aggcaccggcuagacaccu

SEQ ID NO: 2906930 - RNA, 19 nt, Artificial Sequence
  Description of Artificial Sequence: Synthetic oligonucleotide
cguugggcugcccaaugug

SEQ ID NO: 2906931 - RNA, 19 nt, Artificial Sequence
  Description of Artificial Sequence: Synthetic oligonucleotide
gaguccgagugaggguaga

SEQ ID NO: 2906932 - RNA, 19 nt, Artificial Sequence
  Description of Artificial Sequence: Synthetic oligonucleotide
ggaguccgagugaggguag

SEQ ID NO: 2906933 - RNA, 19 nt, Artificial Sequence
  Description of Artificial Sequence: Synthetic oligonucleotide
ccgcagcugggucugcccg

SEQ ID NO: 2906934 - RNA, 19 nt, Artificial Sequence
  Description of Artificial Sequence: Synthetic oligonucleotide
gcuucguugggcugcccaa

SEQ ID NO: 2906935 - RNA, 19 nt, Artificial Sequence
  Description of Artificial Sequence: Synthetic oligonucleotide
cguacuccgugcugcuggg

SEQ ID NO: 2906936 - RNA, 19 nt, Artificial Sequence
  Description of Artificial Sequence: Synthetic oligonucleotide
cuaucucgucgucaggguu

SEQ ID NO: 2906937 - RNA, 19 nt, Artificial Sequence
  Description of Artificial Sequence: Synthetic oligonucleotide
gggcuuuguucagaaaucu

SEQ ID NO: 2906938 - RNA, 19 nt, Artificial Sequence
  Description of Artificial Sequence: Synthetic oligonucleotide
ccaaaggcaccggcuagac

SEQ ID NO: 2906939 - RNA, 19 nt, Artificial Sequence
  Description of Artificial Sequence: Synthetic oligonucleotide
cgcaggagcuucucugcag

SEQ ID NO: 2906940 - RNA, 19 nt, Artificial Sequence
  Description of Artificial Sequence: Synthetic oligonucleotide
caccgacuaucucgucguc

SEQ ID NO: 2906941 - RNA, 19 nt, Artificial Sequence
  Description of Artificial Sequence: Synthetic oligonucleotide
cagucaccaggcucucaaa

SEQ ID NO: 2906942 - RNA, 19 nt, Artificial Sequence
  Description of Artificial Sequence: Synthetic oligonucleotide
gccggucucuacguuugcc

SEQ ID NO: 2906943 - RNA, 19 nt, Artificial Sequence
  Description of Artificial Sequence: Synthetic oligonucleotide
cagcagccgcagcuggguc

SEQ ID NO: 2906944 - RNA, 19 nt, Artificial Sequence
  Description of Artificial Sequence: Synthetic oligonucleotide
ucuuuccggcuggcagagu

SEQ ID NO: 2906945 - RNA, 19 nt, Artificial Sequence
  Description of Artificial Sequence: Synthetic oligonucleotide
cuucucccugguggccagc

SEQ ID NO: 2906946 - RNA, 19 nt, Artificial Sequence
  Description of Artificial Sequence: Synthetic oligonucleotide
ggcuguccuucucggucug

SEQ ID NO: 2906947 - RNA, 19 nt, Artificial Sequence
  Description of Artificial Sequence: Synthetic oligonucleotide
gccgcagcugggucugccc

SEQ ID NO: 2906948 - RNA, 19 nt, Artificial Sequence
  Description of Artificial Sequence: Synthetic oligonucleotide
ccuucucccugguggccag

SEQ ID NO: 2906949 - RNA, 19 nt, Artificial Sequence
  Description of Artificial Sequence: Synthetic oligonucleotide
gccugugccauggccagca

SEQ ID NO: 2906950 - RNA, 19 nt, Artificial Sequence
  Description of Artificial Sequence: Synthetic oligonucleotide
cuccaccgacuaucucguc

SEQ ID NO: 2906951 - RNA, 19 nt, Artificial Sequence
  Description of Artificial Sequence: Synthetic oligonucleotide
gcagccgcagcugggucug

SEQ ID NO: 2906952 - RNA, 19 nt, Artificial Sequence
  Description of Artificial Sequence: Synthetic oligonucleotide
accccaggugcuguccuuu

SEQ ID NO: 2906953 - RNA, 19 nt, Artificial Sequence
  Description of Artificial Sequence: Synthetic oligonucleotide
ggcugcccaaugugccagc

SEQ ID NO: 2906954 - RNA, 19 nt, Artificial Sequence
  Description of Artificial Sequence: Synthetic oligonucleotide
gguggccagcagacagagg

SEQ ID NO: 2906955 - RNA, 19 nt, Artificial Sequence
  Description of Artificial Sequence: Synthetic oligonucleotide
cuguaccauguggcaggug

SEQ ID NO: 2906956 - RNA, 19 nt, Artificial Sequence
  Description of Artificial Sequence: Synthetic oligonucleotide
gucaggguucaggcagauc

SEQ ID NO: 2906957 - RNA, 19 nt, Artificial Sequence
  Description of Artificial Sequence: Synthetic oligonucleotide
ggucugcccggaguccgag

SEQ ID NO: 2906958 - RNA, 19 nt, Artificial Sequence
  Description of Artificial Sequence: Synthetic oligonucleotide
gcuguccuucucggucugg

SEQ ID NO: 2906959 - RNA, 19 nt, Artificial Sequence
  Description of Artificial Sequence: Synthetic oligonucleotide
ggcuggcagaguugcuauc

SEQ ID NO: 2906960 - RNA, 19 nt, Artificial Sequence
  Description of Artificial Sequence: Synthetic oligonucleotide
cagcaaggcagggauggcu

SEQ ID NO: 2906961 - RNA, 19 nt, Artificial Sequence
  Description of Artificial Sequence: Synthetic oligonucleotide
cugcccggaguccgaguga

SEQ ID NO: 2906962 - RNA, 19 nt, Artificial Sequence
  Description of Artificial Sequence: Synthetic oligonucleotide
ucucgucgucaggguucag

SEQ ID NO: 2906963 - RNA, 19 nt, Artificial Sequence
  Description of Artificial Sequence: Synthetic oligonucleotide
guccgagugaggguagaau

SEQ ID NO: 2906964 - RNA, 19 nt, Artificial Sequence
  Description of Artificial Sequence: Synthetic oligonucleotide
cgacuaucucgucgucagg

SEQ ID NO: 2906965 - RNA, 19 nt, Artificial Sequence
  Description of Artificial Sequence: Synthetic oligonucleotide
ugcuguccuuucgggcuuu

SEQ ID NO: 2906966 - RNA, 19 nt, Artificial Sequence
  Description of Artificial Sequence: Synthetic oligonucleotide
gggacucuuuccggcuggc

SEQ ID NO: 2906967 - RNA, 19 nt, Artificial Sequence
  Description of Artificial Sequence: Synthetic oligonucleotide
cgcagcugggucugcccgg

SEQ ID NO: 2906968 - RNA, 19 nt, Artificial Sequence
  Description of Artificial Sequence: Synthetic oligonucleotide
cccuggcuccaaaggcacc

SEQ ID NO: 2906969 - RNA, 19 nt, Artificial Sequence
  Description of Artificial Sequence: Synthetic oligonucleotide
ccaccgacuaucucgucgu

SEQ ID NO: 2906970 - RNA, 19 nt, Artificial Sequence
  Description of Artificial Sequence: Synthetic oligonucleotide
cagcugggucugcccggag

SEQ ID NO: 2906971 - RNA, 19 nt, Artificial Sequence
  Description of Artificial Sequence: Synthetic oligonucleotide
uccgugcugcugggacucu

SEQ ID NO: 2906972 - RNA, 19 nt, Artificial Sequence
  Description of Artificial Sequence: Synthetic oligonucleotide
ggccggucucuacguuugc

SEQ ID NO: 2906973 - RNA, 19 nt, Artificial Sequence
  Description of Artificial Sequence: Synthetic oligonucleotide
gugcguacuccgugcugcu

SEQ ID NO: 2906974 - RNA, 19 nt, Artificial Sequence
  Description of Artificial Sequence: Synthetic oligonucleotide
gccuucucccugguggcca

SEQ ID NO: 2906975 - RNA, 19 nt, Artificial Sequence
  Description of Artificial Sequence: Synthetic oligonucleotide
guacuccgugcugcuggga

SEQ ID NO: 2906976 - RNA, 19 nt, Artificial Sequence
  Description of Artificial Sequence: Synthetic oligonucleotide
cagggauggcuguccuucu

SEQ ID NO: 2906977 - RNA, 19 nt, Artificial Sequence
  Description of Artificial Sequence: Synthetic oligonucleotide
ccagcaaggcagggauggc

SEQ ID NO: 2906978 - RNA, 19 nt, Artificial Sequence
  Description of Artificial Sequence: Synthetic oligonucleotide
ggcuccaaaggcaccggcu

SEQ ID NO: 2906979 - RNA, 19 nt, Artificial Sequence
  Description of Artificial Sequence: Synthetic oligonucleotide
ccggucucuacguuugccu

SEQ ID NO: 2906980 - RNA, 19 nt, Artificial Sequence
  Description of Artificial Sequence: Synthetic oligonucleotide
ggcacccagggccggucuc

SEQ ID NO: 2906981 - RNA, 19 nt, Artificial Sequence
  Description of Artificial Sequence: Synthetic oligonucleotide
ccaggcucucaaagaccuc

SEQ ID NO: 2906982 - RNA, 19 nt, Artificial Sequence
  Description of Artificial Sequence: Synthetic oligonucleotide
gcagugcguacuccgugcu

SEQ ID NO: 2906983 - RNA, 19 nt, Artificial Sequence
  Description of Artificial Sequence: Synthetic oligonucleotide
cccaaugugccagcaguaa

SEQ ID NO: 2906984 - RNA, 19 nt, Artificial Sequence
  Description of Artificial Sequence: Synthetic oligonucleotide
gcaaggcagggauggcugu

SEQ ID NO: 2906985 - RNA, 19 nt, Artificial Sequence
  Description of Artificial Sequence: Synthetic oligonucleotide
gcugcccaaugugccagca

SEQ ID NO: 2906986 - RNA, 19 nt, Artificial Sequence
  Description of Artificial Sequence: Synthetic oligonucleotide
ggacucuuuccggcuggca

SEQ ID NO: 2906987 - RNA, 19 nt, Artificial Sequence
  Description of Artificial Sequence: Synthetic oligonucleotide
caccggcuagacaccuucu

SEQ ID NO: 2906988 - RNA, 19 nt, Artificial Sequence
  Description of Artificial Sequence: Synthetic oligonucleotide
gugcuguccuuucgggcuu

SEQ ID NO: 2906989 - RNA, 19 nt, Artificial Sequence
  Description of Artificial Sequence: Synthetic oligonucleotide
cuucguugggcugcccaau

SEQ ID NO: 2906990 - RNA, 19 nt, Artificial Sequence
  Description of Artificial Sequence: Synthetic oligonucleotide
gaccccaggugcuguccuu

SEQ ID NO: 2906991 - RNA, 19 nt, Artificial Sequence
  Description of Artificial Sequence: Synthetic oligonucleotide
ccucuccaccgacuaucuc

SEQ ID NO: 2906992 - RNA, 19 nt, Artificial Sequence
  Description of Artificial Sequence: Synthetic oligonucleotide
ggguucaggcagaucugua

SEQ ID NO: 2906993 - RNA, 19 nt, Artificial Sequence
  Description of Artificial Sequence: Synthetic oligonucleotide
gcccaaugugccagcagua

SEQ ID NO: 2906994 - RNA, 19 nt, Artificial Sequence
  Description of Artificial Sequence: Synthetic oligonucleotide
gucugcccggaguccgagu

SEQ ID NO: 2906995 - RNA, 19 nt, Artificial Sequence
  Description of Artificial Sequence: Synthetic oligonucleotide
cuucucggucugggccauc

SEQ ID NO: 2906996 - RNA, 19 nt, Artificial Sequence
  Description of Artificial Sequence: Synthetic oligonucleotide
gcuguccuuucgggcuuug

SEQ ID NO: 2906997 - RNA, 19 nt, Artificial Sequence
  Description of Artificial Sequence: Synthetic oligonucleotide
ccgcaggagcuucucugca

SEQ ID NO: 2906998 - RNA, 19 nt, Artificial Sequence
  Description of Artificial Sequence: Synthetic oligonucleotide
cgucgucaggguucaggca

SEQ ID NO: 2906999 - RNA, 19 nt, Artificial Sequence
  Description of Artificial Sequence: Synthetic oligonucleotide
gcagcagccgcagcugggu

SEQ ID NO: 2907000 - RNA, 19 nt, Artificial Sequence
  Description of Artificial Sequence: Synthetic oligonucleotide
gcccggaguccgagugagg

SEQ ID NO: 2907001 - RNA, 19 nt, Artificial Sequence
  Description of Artificial Sequence: Synthetic oligonucleotide
ccauguggcagguggcaau

SEQ ID NO: 2907002 - RNA, 19 nt, Artificial Sequence
  Description of Artificial Sequence: Synthetic oligonucleotide
cggaguccgagugagggua

SEQ ID NO: 2907003 - RNA, 19 nt, Artificial Sequence
  Description of Artificial Sequence: Synthetic oligonucleotide
ggccugugccauggccagc

SEQ ID NO: 2907004 - RNA, 19 nt, Artificial Sequence
  Description of Artificial Sequence: Synthetic oligonucleotide
ccggcuggcagaguugcua

SEQ ID NO: 2907005 - RNA, 19 nt, Artificial Sequence
  Description of Artificial Sequence: Synthetic oligonucleotide
ccagggccggucucuacgu

SEQ ID NO: 2907006 - RNA, 19 nt, Artificial Sequence
  Description of Artificial Sequence: Synthetic oligonucleotide
gggucugcccggaguccga

SEQ ID NO: 2907007 - RNA, 19 nt, Artificial Sequence
  Description of Artificial Sequence: Synthetic oligonucleotide
ggcagggauggcuguccuu

SEQ ID NO: 2907008 - RNA, 19 nt, Artificial Sequence
  Description of Artificial Sequence: Synthetic oligonucleotide
cacccagggccggucucua

SEQ ID NO: 2907009 - RNA, 19 nt, Artificial Sequence
  Description of Artificial Sequence: Synthetic oligonucleotide
gcacccagggccggucucu

SEQ ID NO: 2907010 - RNA, 19 nt, Artificial Sequence
  Description of Artificial Sequence: Synthetic oligonucleotide
ccggaguccgagugagggu

SEQ ID NO: 2907011 - RNA, 19 nt, Artificial Sequence
  Description of Artificial Sequence: Synthetic oligonucleotide
gggcuucguugggcugccc

SEQ ID NO: 2907012 - RNA, 19 nt, Artificial Sequence
  Description of Artificial Sequence: Synthetic oligonucleotide
cggucucuacguuugccuu

SEQ ID NO: 2907013 - RNA, 19 nt, Artificial Sequence
  Description of Artificial Sequence: Synthetic oligonucleotide
ccugugccauggccagcaa

SEQ ID NO: 2907014 - RNA, 19 nt, Artificial Sequence
  Description of Artificial Sequence: Synthetic oligonucleotide
cccugguggccagcagaca

SEQ ID NO: 2907015 - RNA, 19 nt, Artificial Sequence
  Description of Artificial Sequence: Synthetic oligonucleotide
cgugcugcugggacucuuu

SEQ ID NO: 2907016 - RNA, 19 nt, Artificial Sequence
  Description of Artificial Sequence: Synthetic oligonucleotide
ggcaccggcuagacaccuu

SEQ ID NO: 2907017 - RNA, 19 nt, Artificial Sequence
  Description of Artificial Sequence: Synthetic oligonucleotide
ccuucucggucugggccau

SEQ ID NO: 2907018 - RNA, 19 nt, Artificial Sequence
  Description of Artificial Sequence: Synthetic oligonucleotide
aauaaaaucacaguauugc

SEQ ID NO: 2907019 - RNA, 19 nt, Artificial Sequence
  Description of Artificial Sequence: Synthetic oligonucleotide
gaaacuaucauacaaagag

SEQ ID NO: 2907020 - RNA, 19 nt, Artificial Sequence
  Description of Artificial Sequence: Synthetic oligonucleotide
aauauaauuucucuucccc

SEQ ID NO: 2907021 - RNA, 19 nt, Artificial Sequence
  Description of Artificial Sequence: Synthetic oligonucleotide
aauacaucauuucaagagc

SEQ ID NO: 2907022 - RNA, 19 nt, Artificial Sequence
  Description of Artificial Sequence: Synthetic oligonucleotide
aacuucuaaaacuuaauac

SEQ ID NO: 2907023 - RNA, 19 nt, Artificial Sequence
  Description of Artificial Sequence: Synthetic oligonucleotide
agauaaucuauucucaggc

SEQ ID NO: 2907024 - RNA, 19 nt, Artificial Sequence
  Description of Artificial Sequence: Synthetic oligonucleotide
aaauuuauugaacgacucc

SEQ ID NO: 2907025 - RNA, 19 nt, Artificial Sequence
  Description of Artificial Sequence: Synthetic oligonucleotide
uaauacaucauuucaagag

SEQ ID NO: 2907026 - RNA, 19 nt, Artificial Sequence
  Description of Artificial Sequence: Synthetic oligonucleotide
ucaguuucuaauaaaauca

SEQ ID NO: 2907027 - RNA, 19 nt, Artificial Sequence
  Description of Artificial Sequence: Synthetic oligonucleotide
gaauuuacagcuuuuauac

SEQ ID NO: 2907028 - RNA, 19 nt, Artificial Sequence
  Description of Artificial Sequence: Synthetic oligonucleotide
aauuuauugaacgacuccg

SEQ ID NO: 2907029 - RNA, 19 nt, Artificial Sequence
  Description of Artificial Sequence: Synthetic oligonucleotide
ucuaaaacuuaauacauca

SEQ ID NO: 2907030 - RNA, 19 nt, Artificial Sequence
  Description of Artificial Sequence: Synthetic oligonucleotide
uaaaaucacaguauugccg

SEQ ID NO: 2907031 - RNA, 19 nt, Artificial Sequence
  Description of Artificial Sequence: Synthetic oligonucleotide
uucucuaucauuuuccuag

SEQ ID NO: 2907032 - RNA, 19 nt, Artificial Sequence
  Description of Artificial Sequence: Synthetic oligonucleotide
aaacuuaauacaucauuuc

SEQ ID NO: 2907033 - RNA, 19 nt, Artificial Sequence
  Description of Artificial Sequence: Synthetic oligonucleotide
auaaaaucacaguauugcc

SEQ ID NO: 2907034 - RNA, 19 nt, Artificial Sequence
  Description of Artificial Sequence: Synthetic oligonucleotide
uuuauugcuaucuuucucc

SEQ ID NO: 2907035 - RNA, 19 nt, Artificial Sequence
  Description of Artificial Sequence: Synthetic oligonucleotide
auuaucaacuucuaaaacu

SEQ ID NO: 2907036 - RNA, 19 nt, Artificial Sequence
  Description of Artificial Sequence: Synthetic oligonucleotide
aaaaucacaguauugccgu

SEQ ID NO: 2907037 - RNA, 19 nt, Artificial Sequence
  Description of Artificial Sequence: Synthetic oligonucleotide
uguccuuuaaccuugcuug

SEQ ID NO: 2907038 - RNA, 19 nt, Artificial Sequence
  Description of Artificial Sequence: Synthetic oligonucleotide
uuaaauuuauugaacgacu

SEQ ID NO: 2907039 - RNA, 19 nt, Artificial Sequence
  Description of Artificial Sequence: Synthetic oligonucleotide
aacuaucauacaaagaguc

SEQ ID NO: 2907040 - RNA, 19 nt, Artificial Sequence
  Description of Artificial Sequence: Synthetic oligonucleotide
aacuuaauacaucauuuca

SEQ ID NO: 2907041 - RNA, 19 nt, Artificial Sequence
  Description of Artificial Sequence: Synthetic oligonucleotide
ucuaauaaaaucacaguau

SEQ ID NO: 2907042 - RNA, 19 nt, Artificial Sequence
  Description of Artificial Sequence: Synthetic oligonucleotide
auugccguuaaauuuauug

SEQ ID NO: 2907043 - RNA, 19 nt, Artificial Sequence
  Description of Artificial Sequence: Synthetic oligonucleotide
uucuaauaaaaucacagua

SEQ ID NO: 2907044 - RNA, 19 nt, Artificial Sequence
  Description of Artificial Sequence: Synthetic oligonucleotide
cuuaauacaucauuucaag

SEQ ID NO: 2907045 - RNA, 19 nt, Artificial Sequence
  Description of Artificial Sequence: Synthetic oligonucleotide
guuucuaauaaaaucacag

SEQ ID NO: 2907046 - RNA, 19 nt, Artificial Sequence
  Description of Artificial Sequence: Synthetic oligonucleotide
auuucaagagcauggcgcc

SEQ ID NO: 2907047 - RNA, 19 nt, Artificial Sequence
  Description of Artificial Sequence: Synthetic oligonucleotide
cauacaaagagucacucag

SEQ ID NO: 2907048 - RNA, 19 nt, Artificial Sequence
  Description of Artificial Sequence: Synthetic oligonucleotide
ucuaucauuuuccuagugc

SEQ ID NO: 2907049 - RNA, 19 nt, Artificial Sequence
  Description of Artificial Sequence: Synthetic oligonucleotide
uuuauugaacgacuccggg

SEQ ID NO: 2907050 - RNA, 19 nt, Artificial Sequence
  Description of Artificial Sequence: Synthetic oligonucleotide
aaagugcaaacauugagaa

SEQ ID NO: 2907051 - RNA, 19 nt, Artificial Sequence
  Description of Artificial Sequence: Synthetic oligonucleotide
uuuauacaaauacucaaaa

SEQ ID NO: 2907052 - RNA, 19 nt, Artificial Sequence
  Description of Artificial Sequence: Synthetic oligonucleotide
cauuucaagagcauggcgc

SEQ ID NO: 2907053 - RNA, 19 nt, Artificial Sequence
  Description of Artificial Sequence: Synthetic oligonucleotide
ugaugaagcaucuauauuu

SEQ ID NO: 2907054 - RNA, 19 nt, Artificial Sequence
  Description of Artificial Sequence: Synthetic oligonucleotide
gagaaacuaucauacaaag

SEQ ID NO: 2907055 - RNA, 19 nt, Artificial Sequence
  Description of Artificial Sequence: Synthetic oligonucleotide
uuucagauaaucuauucuc

SEQ ID NO: 2907056 - RNA, 19 nt, Artificial Sequence
  Description of Artificial Sequence: Synthetic oligonucleotide
uacaaagagucacucagag

SEQ ID NO: 2907057 - RNA, 19 nt, Artificial Sequence
  Description of Artificial Sequence: Synthetic oligonucleotide
agaggagaaacuaucauac

SEQ ID NO: 2907058 - RNA, 19 nt, Artificial Sequence
  Description of Artificial Sequence: Synthetic oligonucleotide
uauugaacgacuccgggga

SEQ ID NO: 2907059 - RNA, 19 nt, Artificial Sequence
  Description of Artificial Sequence: Synthetic oligonucleotide
uaaaacuuaauacaucauu

SEQ ID NO: 2907060 - RNA, 19 nt, Artificial Sequence
  Description of Artificial Sequence: Synthetic oligonucleotide
uuauugaacgacuccgggg

SEQ ID NO: 2907061 - RNA, 19 nt, Artificial Sequence
  Description of Artificial Sequence: Synthetic oligonucleotide
uuccuuuuguccuuuaacc

SEQ ID NO: 2907062 - RNA, 19 nt, Artificial Sequence
  Description of Artificial Sequence: Synthetic oligonucleotide
ucaggcuacacagagaacc

SEQ ID NO: 2907063 - RNA, 19 nt, Artificial Sequence
  Description of Artificial Sequence: Synthetic oligonucleotide
ugagaauucucuaucauuu

SEQ ID NO: 2907064 - RNA, 19 nt, Artificial Sequence
  Description of Artificial Sequence: Synthetic oligonucleotide
agaauucucuaucauuuuc

SEQ ID NO: 2907065 - RNA, 19 nt, Artificial Sequence
  Description of Artificial Sequence: Synthetic oligonucleotide
guucaggucgcacugaggg

SEQ ID NO: 2907066 - RNA, 19 nt, Artificial Sequence
  Description of Artificial Sequence: Synthetic oligonucleotide
cuauucucaggcuacacag

SEQ ID NO: 2907067 - RNA, 19 nt, Artificial Sequence
  Description of Artificial Sequence: Synthetic oligonucleotide
uuaucaacuucuaaaacuu

SEQ ID NO: 2907068 - RNA, 19 nt, Artificial Sequence
  Description of Artificial Sequence: Synthetic oligonucleotide
aaaagugcaaacauugaga

SEQ ID NO: 2907069 - RNA, 19 nt, Artificial Sequence
  Description of Artificial Sequence: Synthetic oligonucleotide
cucaguuucuaauaaaauc

SEQ ID NO: 2907070 - RNA, 19 nt, Artificial Sequence
  Description of Artificial Sequence: Synthetic oligonucleotide
aucauuuuccuagugcacc

SEQ ID NO: 2907071 - RNA, 19 nt, Artificial Sequence
  Description of Artificial Sequence: Synthetic oligonucleotide
agcuuuuauacaaauacuc

SEQ ID NO: 2907072 - RNA, 19 nt, Artificial Sequence
  Description of Artificial Sequence: Synthetic oligonucleotide
aagagcauggcgccaacuc

SEQ ID NO: 2907073 - RNA, 19 nt, Artificial Sequence
  Description of Artificial Sequence: Synthetic oligonucleotide
caaauauaauuucucuucc

SEQ ID NO: 2907074 - RNA, 19 nt, Artificial Sequence
  Description of Artificial Sequence: Synthetic oligonucleotide
acauugagaauucucuauc

SEQ ID NO: 2907075 - RNA, 19 nt, Artificial Sequence
  Description of Artificial Sequence: Synthetic oligonucleotide
auuuacagcuuuuauacaa

SEQ ID NO: 2907076 - RNA, 19 nt, Artificial Sequence
  Description of Artificial Sequence: Synthetic oligonucleotide
uaaauuuauugaacgacuc

SEQ ID NO: 2907077 - RNA, 19 nt, Artificial Sequence
  Description of Artificial Sequence: Synthetic oligonucleotide
ucagauaaucuauucucag

SEQ ID NO: 2907078 - RNA, 19 nt, Artificial Sequence
  Description of Artificial Sequence: Synthetic oligonucleotide
aaaacuuaauacaucauuu

SEQ ID NO: 2907079 - RNA, 19 nt, Artificial Sequence
  Description of Artificial Sequence: Synthetic oligonucleotide
ucauuucaagagcauggcg

SEQ ID NO: 2907080 - RNA, 19 nt, Artificial Sequence
  Description of Artificial Sequence: Synthetic oligonucleotide
uauuaucaacuucuaaaac

SEQ ID NO: 2907081 - RNA, 19 nt, Artificial Sequence
  Description of Artificial Sequence: Synthetic oligonucleotide
aacauugagaauucucuau

SEQ ID NO: 2907082 - RNA, 19 nt, Artificial Sequence
  Description of Artificial Sequence: Synthetic oligonucleotide
guuaaauuuauugaacgac

SEQ ID NO: 2907083 - RNA, 19 nt, Artificial Sequence
  Description of Artificial Sequence: Synthetic oligonucleotide
aauucucuaucauuuuccu

SEQ ID NO: 2907084 - RNA, 19 nt, Artificial Sequence
  Description of Artificial Sequence: Synthetic oligonucleotide
uucagauaaucuauucuca

SEQ ID NO: 2907085 - RNA, 19 nt, Artificial Sequence
  Description of Artificial Sequence: Synthetic oligonucleotide
aguuacuugaugaagcauc

SEQ ID NO: 2907086 - RNA, 19 nt, Artificial Sequence
  Description of Artificial Sequence: Synthetic oligonucleotide
agugcaaacauugagaauu

SEQ ID NO: 2907087 - RNA, 19 nt, Artificial Sequence
  Description of Artificial Sequence: Synthetic oligonucleotide
uuaauacaucauuucaaga

SEQ ID NO: 2907088 - RNA, 19 nt, Artificial Sequence
  Description of Artificial Sequence: Synthetic oligonucleotide
uucucaguuucuaauaaaa

SEQ ID NO: 2907089 - RNA, 19 nt, Artificial Sequence
  Description of Artificial Sequence: Synthetic oligonucleotide
uugacuugcacaagaggag

SEQ ID NO: 2907090 - RNA, 19 nt, Artificial Sequence
  Description of Artificial Sequence: Synthetic oligonucleotide
uuuaaccuugcuuggagac

SEQ ID NO: 2907091 - RNA, 19 nt, Artificial Sequence
  Description of Artificial Sequence: Synthetic oligonucleotide
aagagucacucagagacuc

SEQ ID NO: 2907092 - RNA, 19 nt, Artificial Sequence
  Description of Artificial Sequence: Synthetic oligonucleotide
cuugacuugcacaagagga

SEQ ID NO: 2907093 - RNA, 19 nt, Artificial Sequence
  Description of Artificial Sequence: Synthetic oligonucleotide
agaauuuacagcuuuuaua

SEQ ID NO: 2907094 - RNA, 19 nt, Artificial Sequence
  Description of Artificial Sequence: Synthetic oligonucleotide
uaaucuauucucaggcuac

SEQ ID NO: 2907095 - RNA, 19 nt, Artificial Sequence
  Description of Artificial Sequence: Synthetic oligonucleotide
gaauucucuaucauuuucc

SEQ ID NO: 2907096 - RNA, 19 nt, Artificial Sequence
  Description of Artificial Sequence: Synthetic oligonucleotide
cagauaaucuauucucagg

SEQ ID NO: 2907097 - RNA, 19 nt, Artificial Sequence
  Description of Artificial Sequence: Synthetic oligonucleotide
ucuauucucaggcuacaca

SEQ ID NO: 2907098 - RNA, 19 nt, Artificial Sequence
  Description of Artificial Sequence: Synthetic oligonucleotide
auucucaggcuacacagag

SEQ ID NO: 2907099 - RNA, 19 nt, Artificial Sequence
  Description of Artificial Sequence: Synthetic oligonucleotide
aauuuacagcuuuuauaca

SEQ ID NO: 2907100 - RNA, 19 nt, Artificial Sequence
  Description of Artificial Sequence: Synthetic oligonucleotide
uuuuauugcuaucuuucuc

SEQ ID NO: 2907101 - RNA, 19 nt, Artificial Sequence
  Description of Artificial Sequence: Synthetic oligonucleotide
cuaucauacaaagagucac

SEQ ID NO: 2907102 - RNA, 19 nt, Artificial Sequence
  Description of Artificial Sequence: Synthetic oligonucleotide
uugccguuaaauuuauuga

SEQ ID NO: 2907103 - RNA, 19 nt, Artificial Sequence
  Description of Artificial Sequence: Synthetic oligonucleotide
uacuugaugaagcaucuau

SEQ ID NO: 2907104 - RNA, 19 nt, Artificial Sequence
  Description of Artificial Sequence: Synthetic oligonucleotide
cuuucucuuccuuuugucc

SEQ ID NO: 2907105 - RNA, 19 nt, Artificial Sequence
  Description of Artificial Sequence: Synthetic oligonucleotide
aggagaaacuaucauacaa

SEQ ID NO: 2907106 - RNA, 19 nt, Artificial Sequence
  Description of Artificial Sequence: Synthetic oligonucleotide
aucauuucaagagcauggc

SEQ ID NO: 2907107 - RNA, 19 nt, Artificial Sequence
  Description of Artificial Sequence: Synthetic oligonucleotide
uucuaaaacuuaauacauc

SEQ ID NO: 2907108 - RNA, 19 nt, Artificial Sequence
  Description of Artificial Sequence: Synthetic oligonucleotide
uaucauacaaagagucacu

SEQ ID NO: 2907109 - RNA, 19 nt, Artificial Sequence
  Description of Artificial Sequence: Synthetic oligonucleotide
cuaucauuuuccuagugca

SEQ ID NO: 2907110 - RNA, 19 nt, Artificial Sequence
  Description of Artificial Sequence: Synthetic oligonucleotide
cuuuuguccuuuaaccuug

SEQ ID NO: 2907111 - RNA, 19 nt, Artificial Sequence
  Description of Artificial Sequence: Synthetic oligonucleotide
uuuacagcuuuuauacaaa

SEQ ID NO: 2907112 - RNA, 19 nt, Artificial Sequence
  Description of Artificial Sequence: Synthetic oligonucleotide
aaacauugagaauucucua

SEQ ID NO: 2907113 - RNA, 19 nt, Artificial Sequence
  Description of Artificial Sequence: Synthetic oligonucleotide
uuggagacuucucaguuuc

SEQ ID NO: 2907114 - RNA, 19 nt, Artificial Sequence
  Description of Artificial Sequence: Synthetic oligonucleotide
uuauugcuaucuuucuccc

SEQ ID NO: 2907115 - RNA, 19 nt, Artificial Sequence
  Description of Artificial Sequence: Synthetic oligonucleotide
ucaacuucuaaaacuuaau

SEQ ID NO: 2907116 - RNA, 19 nt, Artificial Sequence
  Description of Artificial Sequence: Synthetic oligonucleotide
auaaucuauucucaggcua

SEQ ID NO: 2907117 - RNA, 19 nt, Artificial Sequence
  Description of Artificial Sequence: Synthetic oligonucleotide
uccuuuuguccuuuaaccu

SEQ ID NO: 2907118 - RNA, 19 nt, Artificial Sequence
  Description of Artificial Sequence: Synthetic oligonucleotide
ugccguuaaauuuauugaa

SEQ ID NO: 2907119 - RNA, 19 nt, Artificial Sequence
  Description of Artificial Sequence: Synthetic oligonucleotide
aaacuaucauacaaagagu

SEQ ID NO: 2907120 - RNA, 19 nt, Artificial Sequence
  Description of Artificial Sequence: Synthetic oligonucleotide
aucauacaaagagucacuc

SEQ ID NO: 2907121 - RNA, 19 nt, Artificial Sequence
  Description of Artificial Sequence: Synthetic oligonucleotide
caguuucuaauaaaaucac

SEQ ID NO: 2907122 - RNA, 19 nt, Artificial Sequence
  Description of Artificial Sequence: Synthetic oligonucleotide
cacaagaggagaaacuauc

SEQ ID NO: 2907123 - RNA, 19 nt, Artificial Sequence
  Description of Artificial Sequence: Synthetic oligonucleotide
auuuauugaacgacuccgg

SEQ ID NO: 2907124 - RNA, 19 nt, Artificial Sequence
  Description of Artificial Sequence: Synthetic oligonucleotide
ucucaguuucuaauaaaau

SEQ ID NO: 2907125 - RNA, 19 nt, Artificial Sequence
  Description of Artificial Sequence: Synthetic oligonucleotide
ggaaauuucagauaaucua

SEQ ID NO: 2907126 - RNA, 19 nt, Artificial Sequence
  Description of Artificial Sequence: Synthetic oligonucleotide
uagccgaguuacuugauga

SEQ ID NO: 2907127 - RNA, 19 nt, Artificial Sequence
  Description of Artificial Sequence: Synthetic oligonucleotide
ccguuaaauuuauugaacg

SEQ ID NO: 2907128 - RNA, 19 nt, Artificial Sequence
  Description of Artificial Sequence: Synthetic oligonucleotide
ugaggggugcuccucuagg

SEQ ID NO: 2907129 - RNA, 19 nt, Artificial Sequence
  Description of Artificial Sequence: Synthetic oligonucleotide
uaucauuuuccuagugcac

SEQ ID NO: 2907130 - RNA, 19 nt, Artificial Sequence
  Description of Artificial Sequence: Synthetic oligonucleotide
uccucuaggccucauugga

SEQ ID NO: 2907131 - RNA, 19 nt, Artificial Sequence
  Description of Artificial Sequence: Synthetic oligonucleotide
uguugucuccgccaggccu

SEQ ID NO: 2907132 - RNA, 19 nt, Artificial Sequence
  Description of Artificial Sequence: Synthetic oligonucleotide
uugagaauucucuaucauu

SEQ ID NO: 2907133 - RNA, 19 nt, Artificial Sequence
  Description of Artificial Sequence: Synthetic oligonucleotide
gucacucagagacuccacg

SEQ ID NO: 2907134 - RNA, 19 nt, Artificial Sequence
  Description of Artificial Sequence: Synthetic oligonucleotide
caaacauugagaauucucu

SEQ ID NO: 2907135 - RNA, 19 nt, Artificial Sequence
  Description of Artificial Sequence: Synthetic oligonucleotide
cucuaggccucauuggagc

SEQ ID NO: 2907136 - RNA, 19 nt, Artificial Sequence
  Description of Artificial Sequence: Synthetic oligonucleotide
uagugcaccguguucaggu

SEQ ID NO: 2907137 - RNA, 19 nt, Artificial Sequence
  Description of Artificial Sequence: Synthetic oligonucleotide
acaguauugccguuaaauu

SEQ ID NO: 2907138 - RNA, 19 nt, Artificial Sequence
  Description of Artificial Sequence: Synthetic oligonucleotide
acucagagacuccacguug

SEQ ID NO: 2907139 - RNA, 19 nt, Artificial Sequence
  Description of Artificial Sequence: Synthetic oligonucleotide
auugagaauucucuaucau

SEQ ID NO: 2907140 - RNA, 19 nt, Artificial Sequence
  Description of Artificial Sequence: Synthetic oligonucleotide
uugcacaagaggagaaacu

SEQ ID NO: 2907141 - RNA, 19 nt, Artificial Sequence
  Description of Artificial Sequence: Synthetic oligonucleotide
uugcuuggagacuucucag

SEQ ID NO: 2907142 - RNA, 19 nt, Artificial Sequence
  Description of Artificial Sequence: Synthetic oligonucleotide
uuguccuuuaaccuugcuu

SEQ ID NO: 2907143 - RNA, 19 nt, Artificial Sequence
  Description of Artificial Sequence: Synthetic oligonucleotide
acuucucaguuucuaauaa

SEQ ID NO: 2907144 - RNA, 19 nt, Artificial Sequence
  Description of Artificial Sequence: Synthetic oligonucleotide
acuuaauacaucauuucaa

SEQ ID NO: 2907145 - RNA, 19 nt, Artificial Sequence
  Description of Artificial Sequence: Synthetic oligonucleotide
uuuuccuagugcaccgugu

SEQ ID NO: 2907146 - RNA, 19 nt, Artificial Sequence
  Description of Artificial Sequence: Synthetic oligonucleotide
uccuagugcaccguguuca

SEQ ID NO: 2907147 - RNA, 19 nt, Artificial Sequence
  Description of Artificial Sequence: Synthetic oligonucleotide
uauucucaggcuacacaga

SEQ ID NO: 2907148 - RNA, 19 nt, Artificial Sequence
  Description of Artificial Sequence: Synthetic oligonucleotide
uguucaggucgcacugagg

SEQ ID NO: 2907149 - RNA, 19 nt, Artificial Sequence
  Description of Artificial Sequence: Synthetic oligonucleotide
uuacagcuuuuauacaaau

SEQ ID NO: 2907150 - RNA, 19 nt, Artificial Sequence
  Description of Artificial Sequence: Synthetic oligonucleotide
acaucauuucaagagcaug

SEQ ID NO: 2907151 - RNA, 19 nt, Artificial Sequence
  Description of Artificial Sequence: Synthetic oligonucleotide
ucacucagagacuccacgu

SEQ ID NO: 2907152 - RNA, 19 nt, Artificial Sequence
  Description of Artificial Sequence: Synthetic oligonucleotide
uacagcuuuuauacaaaua

SEQ ID NO: 2907153 - RNA, 19 nt, Artificial Sequence
  Description of Artificial Sequence: Synthetic oligonucleotide
ugcacaagaggagaaacua

SEQ ID NO: 2907154 - RNA, 19 nt, Artificial Sequence
  Description of Artificial Sequence: Synthetic oligonucleotide
uauugcuaucuuucucccc

SEQ ID NO: 2907155 - RNA, 19 nt, Artificial Sequence
  Description of Artificial Sequence: Synthetic oligonucleotide
aguauugccguuaaauuua

SEQ ID NO: 2907156 - RNA, 19 nt, Artificial Sequence
  Description of Artificial Sequence: Synthetic oligonucleotide
uugaugaagcaucuauauu

SEQ ID NO: 2907157 - RNA, 19 nt, Artificial Sequence
  Description of Artificial Sequence: Synthetic oligonucleotide
auuuuccuagugcaccgug

SEQ ID NO: 2907158 - RNA, 19 nt, Artificial Sequence
  Description of Artificial Sequence: Synthetic oligonucleotide
uucaggucgcacugagggg

SEQ ID NO: 2907159 - RNA, 19 nt, Artificial Sequence
  Description of Artificial Sequence: Synthetic oligonucleotide
aaauuucagauaaucuauu

SEQ ID NO: 2907160 - RNA, 19 nt, Artificial Sequence
  Description of Artificial Sequence: Synthetic oligonucleotide
cauugagaauucucuauca

SEQ ID NO: 2907161 - RNA, 19 nt, Artificial Sequence
  Description of Artificial Sequence: Synthetic oligonucleotide
ucuaggccucauuggagcc

SEQ ID NO: 2907162 - RNA, 19 nt, Artificial Sequence
  Description of Artificial Sequence: Synthetic oligonucleotide
agacuucucaguuucuaau

SEQ ID NO: 2907163 - RNA, 19 nt, Artificial Sequence
  Description of Artificial Sequence: Synthetic oligonucleotide
uuugccuuucucuuccuuu

SEQ ID NO: 2907164 - RNA, 19 nt, Artificial Sequence
  Description of Artificial Sequence: Synthetic oligonucleotide
guuguugucuccgccaggc

SEQ ID NO: 2907165 - RNA, 19 nt, Artificial Sequence
  Description of Artificial Sequence: Synthetic oligonucleotide
ugacuugcacaagaggaga

SEQ ID NO: 2907166 - RNA, 19 nt, Artificial Sequence
  Description of Artificial Sequence: Synthetic oligonucleotide
ucaggucgcacugaggggu

SEQ ID NO: 2907167 - RNA, 19 nt, Artificial Sequence
  Description of Artificial Sequence: Synthetic oligonucleotide
guccuuuaaccuugcuugg

SEQ ID NO: 2907168 - RNA, 19 nt, Artificial Sequence
  Description of Artificial Sequence: Synthetic oligonucleotide
agagcauggcgccaacucu

SEQ ID NO: 2907169 - RNA, 19 nt, Artificial Sequence
  Description of Artificial Sequence: Synthetic oligonucleotide
uaucaacuucuaaaacuua

SEQ ID NO: 2907170 - RNA, 19 nt, Artificial Sequence
  Description of Artificial Sequence: Synthetic oligonucleotide
aagugcaaacauugagaau

SEQ ID NO: 2907171 - RNA, 19 nt, Artificial Sequence
  Description of Artificial Sequence: Synthetic oligonucleotide
cuacaaauauaauuucucu

SEQ ID NO: 2907172 - RNA, 19 nt, Artificial Sequence
  Description of Artificial Sequence: Synthetic oligonucleotide
acaaagagucacucagaga

SEQ ID NO: 2907173 - RNA, 19 nt, Artificial Sequence
  Description of Artificial Sequence: Synthetic oligonucleotide
caggcuacacagagaaccc

SEQ ID NO: 2907174 - RNA, 19 nt, Artificial Sequence
  Description of Artificial Sequence: Synthetic oligonucleotide
aguuucuaauaaaaucaca

SEQ ID NO: 2907175 - RNA, 19 nt, Artificial Sequence
  Description of Artificial Sequence: Synthetic oligonucleotide
gauaaucuauucucaggcu

SEQ ID NO: 2907176 - RNA, 19 nt, Artificial Sequence
  Description of Artificial Sequence: Synthetic oligonucleotide
acuaucauacaaagaguca

SEQ ID NO: 2907177 - RNA, 19 nt, Artificial Sequence
  Description of Artificial Sequence: Synthetic oligonucleotide
aucaacuucuaaaacuuaa

SEQ ID NO: 2907178 - RNA, 19 nt, Artificial Sequence
  Description of Artificial Sequence: Synthetic oligonucleotide
ucucuaucauuuuccuagu

SEQ ID NO: 2907179 - RNA, 19 nt, Artificial Sequence
  Description of Artificial Sequence: Synthetic oligonucleotide
ugcaccguguucaggucgc

SEQ ID NO: 2907180 - RNA, 19 nt, Artificial Sequence
  Description of Artificial Sequence: Synthetic oligonucleotide
cauuggagccuugacuugc

SEQ ID NO: 2907181 - RNA, 19 nt, Artificial Sequence
  Description of Artificial Sequence: Synthetic oligonucleotide
aacgacuccggggaaauuu

SEQ ID NO: 2907182 - RNA, 19 nt, Artificial Sequence
  Description of Artificial Sequence: Synthetic oligonucleotide
ucuuccuuuuguccuuuaa

SEQ ID NO: 2907183 - RNA, 19 nt, Artificial Sequence
  Description of Artificial Sequence: Synthetic oligonucleotide
ucuccgccaggccuagccg

SEQ ID NO: 2907184 - RNA, 19 nt, Artificial Sequence
  Description of Artificial Sequence: Synthetic oligonucleotide
uuuccuagugcaccguguu

SEQ ID NO: 2907185 - RNA, 19 nt, Artificial Sequence
  Description of Artificial Sequence: Synthetic oligonucleotide
aaucuauucucaggcuaca

SEQ ID NO: 2907186 - RNA, 19 nt, Artificial Sequence
  Description of Artificial Sequence: Synthetic oligonucleotide
uggagccuugacuugcaca

SEQ ID NO: 2907187 - RNA, 19 nt, Artificial Sequence
  Description of Artificial Sequence: Synthetic oligonucleotide
ccgaguuacuugaugaagc

SEQ ID NO: 2907188 - RNA, 19 nt, Artificial Sequence
  Description of Artificial Sequence: Synthetic oligonucleotide
agccuugacuugcacaaga

SEQ ID NO: 2907189 - RNA, 19 nt, Artificial Sequence
  Description of Artificial Sequence: Synthetic oligonucleotide
cuccucuaggccucauugg

SEQ ID NO: 2907190 - RNA, 19 nt, Artificial Sequence
  Description of Artificial Sequence: Synthetic oligonucleotide
aucuauucucaggcuacac

SEQ ID NO: 2907191 - RNA, 19 nt, Artificial Sequence
  Description of Artificial Sequence: Synthetic oligonucleotide
cuaauaaaaucacaguauu

SEQ ID NO: 2907192 - RNA, 19 nt, Artificial Sequence
  Description of Artificial Sequence: Synthetic oligonucleotide
uuaaccuugcuuggagacu

SEQ ID NO: 2907193 - RNA, 19 nt, Artificial Sequence
  Description of Artificial Sequence: Synthetic oligonucleotide
acguuguugucuccgccag

SEQ ID NO: 2907194 - RNA, 19 nt, Artificial Sequence
  Description of Artificial Sequence: Synthetic oligonucleotide
aaucacaguauugccguua

SEQ ID NO: 2907195 - RNA, 19 nt, Artificial Sequence
  Description of Artificial Sequence: Synthetic oligonucleotide
gacuucucaguuucuaaua

SEQ ID NO: 2907196 - RNA, 19 nt, Artificial Sequence
  Description of Artificial Sequence: Synthetic oligonucleotide
aaagagucacucagagacu

SEQ ID NO: 2907197 - RNA, 19 nt, Artificial Sequence
  Description of Artificial Sequence: Synthetic oligonucleotide
cuugaugaagcaucuauau

SEQ ID NO: 2907198 - RNA, 19 nt, Artificial Sequence
  Description of Artificial Sequence: Synthetic oligonucleotide
gaggggugcuccucuaggc

SEQ ID NO: 2907199 - RNA, 19 nt, Artificial Sequence
  Description of Artificial Sequence: Synthetic oligonucleotide
acuccggggaaauuucaga

SEQ ID NO: 2907200 - RNA, 19 nt, Artificial Sequence
  Description of Artificial Sequence: Synthetic oligonucleotide
caacuucuaaaacuuaaua

SEQ ID NO: 2907201 - RNA, 19 nt, Artificial Sequence
  Description of Artificial Sequence: Synthetic oligonucleotide
cuagccgaguuacuugaug

SEQ ID NO: 2907202 - RNA, 19 nt, Artificial Sequence
  Description of Artificial Sequence: Synthetic oligonucleotide
accguguucaggucgcacu

SEQ ID NO: 2907203 - RNA, 19 nt, Artificial Sequence
  Description of Artificial Sequence: Synthetic oligonucleotide
uucucaggcuacacagaga

SEQ ID NO: 2907204 - RNA, 19 nt, Artificial Sequence
  Description of Artificial Sequence: Synthetic oligonucleotide
gugcaccguguucaggucg

SEQ ID NO: 2907205 - RNA, 19 nt, Artificial Sequence
  Description of Artificial Sequence: Synthetic oligonucleotide
agugcaccguguucagguc

SEQ ID NO: 2907206 - RNA, 19 nt, Artificial Sequence
  Description of Artificial Sequence: Synthetic oligonucleotide
cuuuaaccuugcuuggaga

SEQ ID NO: 2907207 - RNA, 19 nt, Artificial Sequence
  Description of Artificial Sequence: Synthetic oligonucleotide
gaggagaaacuaucauaca

SEQ ID NO: 2907208 - RNA, 19 nt, Artificial Sequence
  Description of Artificial Sequence: Synthetic oligonucleotide
uaaccuugcuuggagacuu

SEQ ID NO: 2907209 - RNA, 19 nt, Artificial Sequence
  Description of Artificial Sequence: Synthetic oligonucleotide
aucacaguauugccguuaa

SEQ ID NO: 2907210 - RNA, 19 nt, Artificial Sequence
  Description of Artificial Sequence: Synthetic oligonucleotide
gagacuucucaguuucuaa

SEQ ID NO: 2907211 - RNA, 19 nt, Artificial Sequence
  Description of Artificial Sequence: Synthetic oligonucleotide
gcuuuuauacaaauacuca

SEQ ID NO: 2907212 - RNA, 19 nt, Artificial Sequence
  Description of Artificial Sequence: Synthetic oligonucleotide
guguucaggucgcacugag

SEQ ID NO: 2907213 - RNA, 19 nt, Artificial Sequence
  Description of Artificial Sequence: Synthetic oligonucleotide
uccacguuguugucuccgc

SEQ ID NO: 2907214 - RNA, 19 nt, Artificial Sequence
  Description of Artificial Sequence: Synthetic oligonucleotide
uuuguccuuuaaccuugcu

SEQ ID NO: 2907215 - RNA, 19 nt, Artificial Sequence
  Description of Artificial Sequence: Synthetic oligonucleotide
agagucacucagagacucc

SEQ ID NO: 2907216 - RNA, 19 nt, Artificial Sequence
  Description of Artificial Sequence: Synthetic oligonucleotide
uucaagagcauggcgccaa

SEQ ID NO: 2907217 - RNA, 19 nt, Artificial Sequence
  Description of Artificial Sequence: Synthetic oligonucleotide
cucuaucauuuuccuagug

SEQ ID NO: 2907218 - RNA, 19 nt, Artificial Sequence
  Description of Artificial Sequence: Synthetic oligonucleotide
uccuuuaaccuugcuugga

SEQ ID NO: 2907219 - RNA, 19 nt, Artificial Sequence
  Description of Artificial Sequence: Synthetic oligonucleotide
ggagccuugacuugcacaa

SEQ ID NO: 2907220 - RNA, 19 nt, Artificial Sequence
  Description of Artificial Sequence: Synthetic oligonucleotide
ggggaaauuucagauaauc

SEQ ID NO: 2907221 - RNA, 19 nt, Artificial Sequence
  Description of Artificial Sequence: Synthetic oligonucleotide
auucucuaucauuuuccua

SEQ ID NO: 2907222 - RNA, 19 nt, Artificial Sequence
  Description of Artificial Sequence: Synthetic oligonucleotide
gacuccggggaaauuucag

SEQ ID NO: 2907223 - RNA, 19 nt, Artificial Sequence
  Description of Artificial Sequence: Synthetic oligonucleotide
gucuccgccaggccuagcc

SEQ ID NO: 2907224 - RNA, 19 nt, Artificial Sequence
  Description of Artificial Sequence: Synthetic oligonucleotide
gcuccucuaggccucauug

SEQ ID NO: 2907225 - RNA, 19 nt, Artificial Sequence
  Description of Artificial Sequence: Synthetic oligonucleotide
auacaaagagucacucaga

SEQ ID NO: 2907226 - RNA, 19 nt, Artificial Sequence
  Description of Artificial Sequence: Synthetic oligonucleotide
ugcaaacauugagaauucu

SEQ ID NO: 2907227 - RNA, 19 nt, Artificial Sequence
  Description of Artificial Sequence: Synthetic oligonucleotide
ggagaaacuaucauacaaa

SEQ ID NO: 2907228 - RNA, 19 nt, Artificial Sequence
  Description of Artificial Sequence: Synthetic oligonucleotide
uccggggaaauuucagaua

SEQ ID NO: 2907229 - RNA, 19 nt, Artificial Sequence
  Description of Artificial Sequence: Synthetic oligonucleotide
uuguugucuccgccaggcc

SEQ ID NO: 2907230 - RNA, 19 nt, Artificial Sequence
  Description of Artificial Sequence: Synthetic oligonucleotide
ccuuuaaccuugcuuggag

SEQ ID NO: 2907231 - RNA, 19 nt, Artificial Sequence
  Description of Artificial Sequence: Synthetic oligonucleotide
gagucacucagagacucca

SEQ ID NO: 2907232 - RNA, 19 nt, Artificial Sequence
  Description of Artificial Sequence: Synthetic oligonucleotide
uuccuagugcaccguguuc

SEQ ID NO: 2907233 - RNA, 19 nt, Artificial Sequence
  Description of Artificial Sequence: Synthetic oligonucleotide
ccuugacuugcacaagagg

SEQ ID NO: 2907234 - RNA, 19 nt, Artificial Sequence
  Description of Artificial Sequence: Synthetic oligonucleotide
cuccacguuguugucuccg

SEQ ID NO: 2907235 - RNA, 19 nt, Artificial Sequence
  Description of Artificial Sequence: Synthetic oligonucleotide
acuugaugaagcaucuaua

SEQ ID NO: 2907236 - RNA, 19 nt, Artificial Sequence
  Description of Artificial Sequence: Synthetic oligonucleotide
cuucucaguuucuaauaaa

SEQ ID NO: 2907237 - RNA, 19 nt, Artificial Sequence
  Description of Artificial Sequence: Synthetic oligonucleotide
ugaacgacuccggggaaau

SEQ ID NO: 2907238 - RNA, 19 nt, Artificial Sequence
  Description of Artificial Sequence: Synthetic oligonucleotide
uuucaagagcauggcgcca

SEQ ID NO: 2907239 - RNA, 19 nt, Artificial Sequence
  Description of Artificial Sequence: Synthetic oligonucleotide
gcaaacauugagaauucuc

SEQ ID NO: 2907240 - RNA, 19 nt, Artificial Sequence
  Description of Artificial Sequence: Synthetic oligonucleotide
uccgccaggccuagccgag

SEQ ID NO: 2907241 - RNA, 19 nt, Artificial Sequence
  Description of Artificial Sequence: Synthetic oligonucleotide
uucucuuccuuuuguccuu

SEQ ID NO: 2907242 - RNA, 19 nt, Artificial Sequence
  Description of Artificial Sequence: Synthetic oligonucleotide
guuacuugaugaagcaucu

SEQ ID NO: 2907243 - RNA, 19 nt, Artificial Sequence
  Description of Artificial Sequence: Synthetic oligonucleotide
agucacucagagacuccac

SEQ ID NO: 2907244 - RNA, 19 nt, Artificial Sequence
  Description of Artificial Sequence: Synthetic oligonucleotide
ucaagagcauggcgccaac

SEQ ID NO: 2907245 - RNA, 19 nt, Artificial Sequence
  Description of Artificial Sequence: Synthetic oligonucleotide
acgacuccggggaaauuuc

SEQ ID NO: 2907246 - RNA, 19 nt, Artificial Sequence
  Description of Artificial Sequence: Synthetic oligonucleotide
caguauugccguuaaauuu

SEQ ID NO: 2907247 - RNA, 19 nt, Artificial Sequence
  Description of Artificial Sequence: Synthetic oligonucleotide
uggagacuucucaguuucu

SEQ ID NO: 2907248 - RNA, 19 nt, Artificial Sequence
  Description of Artificial Sequence: Synthetic oligonucleotide
gccguuaaauuuauugaac

SEQ ID NO: 2907249 - RNA, 19 nt, Artificial Sequence
  Description of Artificial Sequence: Synthetic oligonucleotide
agccgaguuacuugaugaa

SEQ ID NO: 2907250 - RNA, 19 nt, Artificial Sequence
  Description of Artificial Sequence: Synthetic oligonucleotide
cagcuuuuauacaaauacu

SEQ ID NO: 2907251 - RNA, 19 nt, Artificial Sequence
  Description of Artificial Sequence: Synthetic oligonucleotide
cuaaaacuuaauacaucau

SEQ ID NO: 2907252 - RNA, 19 nt, Artificial Sequence
  Description of Artificial Sequence: Synthetic oligonucleotide
auugaacgacuccggggaa

SEQ ID NO: 2907253 - RNA, 19 nt, Artificial Sequence
  Description of Artificial Sequence: Synthetic oligonucleotide
cacaguauugccguuaaau

SEQ ID NO: 2907254 - RNA, 19 nt, Artificial Sequence
  Description of Artificial Sequence: Synthetic oligonucleotide
uugaacgacuccggggaaa

SEQ ID NO: 2907255 - RNA, 19 nt, Artificial Sequence
  Description of Artificial Sequence: Synthetic oligonucleotide
uuggagccuugacuugcac

SEQ ID NO: 2907256 - RNA, 19 nt, Artificial Sequence
  Description of Artificial Sequence: Synthetic oligonucleotide
cuagugcaccguguucagg

SEQ ID NO: 2907257 - RNA, 19 nt, Artificial Sequence
  Description of Artificial Sequence: Synthetic oligonucleotide
acuugcacaagaggagaaa

SEQ ID NO: 2907258 - RNA, 19 nt, Artificial Sequence
  Description of Artificial Sequence: Synthetic oligonucleotide
cguuaaauuuauugaacga

SEQ ID NO: 2907259 - RNA, 19 nt, Artificial Sequence
  Description of Artificial Sequence: Synthetic oligonucleotide
cugaggggugcuccucuag

SEQ ID NO: 2907260 - RNA, 19 nt, Artificial Sequence
  Description of Artificial Sequence: Synthetic oligonucleotide
ucacaguauugccguuaaa

SEQ ID NO: 2907261 - RNA, 19 nt, Artificial Sequence
  Description of Artificial Sequence: Synthetic oligonucleotide
gccgaguuacuugaugaag

SEQ ID NO: 2907262 - RNA, 19 nt, Artificial Sequence
  Description of Artificial Sequence: Synthetic oligonucleotide
ucgcacugaggggugcucc

SEQ ID NO: 2907263 - RNA, 19 nt, Artificial Sequence
  Description of Artificial Sequence: Synthetic oligonucleotide
aaccuugcuuggagacuuc

SEQ ID NO: 2907264 - RNA, 19 nt, Artificial Sequence
  Description of Artificial Sequence: Synthetic oligonucleotide
gugcaaacauugagaauuc

SEQ ID NO: 2907265 - RNA, 19 nt, Artificial Sequence
  Description of Artificial Sequence: Synthetic oligonucleotide
uauugccguuaaauuuauu

SEQ ID NO: 2907266 - RNA, 19 nt, Artificial Sequence
  Description of Artificial Sequence: Synthetic oligonucleotide
agacuccacguuguugucu

SEQ ID NO: 2907267 - RNA, 19 nt, Artificial Sequence
  Description of Artificial Sequence: Synthetic oligonucleotide
gacuugcacaagaggagaa

SEQ ID NO: 2907268 - RNA, 19 nt, Artificial Sequence
  Description of Artificial Sequence: Synthetic oligonucleotide
gagaauucucuaucauuuu

SEQ ID NO: 2907269 - RNA, 19 nt, Artificial Sequence
  Description of Artificial Sequence: Synthetic oligonucleotide
uuacuugaugaagcaucua

SEQ ID NO: 2907270 - RNA, 19 nt, Artificial Sequence
  Description of Artificial Sequence: Synthetic oligonucleotide
cagaauuuacagcuuuuau

SEQ ID NO: 2907271 - RNA, 19 nt, Artificial Sequence
  Description of Artificial Sequence: Synthetic oligonucleotide
gggaaauuucagauaaucu

SEQ ID NO: 2907272 - RNA, 19 nt, Artificial Sequence
  Description of Artificial Sequence: Synthetic oligonucleotide
caagaggagaaacuaucau

SEQ ID NO: 2907273 - RNA, 19 nt, Artificial Sequence
  Description of Artificial Sequence: Synthetic oligonucleotide
gagccuugacuugcacaag

SEQ ID NO: 2907274 - RNA, 19 nt, Artificial Sequence
  Description of Artificial Sequence: Synthetic oligonucleotide
ggccuagccgaguuacuug

SEQ ID NO: 2907275 - RNA, 19 nt, Artificial Sequence
  Description of Artificial Sequence: Synthetic oligonucleotide
ccucuaggccucauuggag

SEQ ID NO: 2907276 - RNA, 19 nt, Artificial Sequence
  Description of Artificial Sequence: Synthetic oligonucleotide
cucagagacuccacguugu

SEQ ID NO: 2907277 - RNA, 19 nt, Artificial Sequence
  Description of Artificial Sequence: Synthetic oligonucleotide
ccggggaaauuucagauaa

SEQ ID NO: 2907278 - RNA, 19 nt, Artificial Sequence
  Description of Artificial Sequence: Synthetic oligonucleotide
ccccuacaaauauaauuuc

SEQ ID NO: 2907279 - RNA, 19 nt, Artificial Sequence
  Description of Artificial Sequence: Synthetic oligonucleotide
aggucgcacugaggggugc

SEQ ID NO: 2907280 - RNA, 19 nt, Artificial Sequence
  Description of Artificial Sequence: Synthetic oligonucleotide
auuggagccuugacuugca

SEQ ID NO: 2907281 - RNA, 19 nt, Artificial Sequence
  Description of Artificial Sequence: Synthetic oligonucleotide
gccuagccgaguuacuuga

SEQ ID NO: 2907282 - RNA, 19 nt, Artificial Sequence
  Description of Artificial Sequence: Synthetic oligonucleotide
accuugcuuggagacuucu

SEQ ID NO: 2907283 - RNA, 19 nt, Artificial Sequence
  Description of Artificial Sequence: Synthetic oligonucleotide
ugcuccucuaggccucauu

SEQ ID NO: 2907284 - RNA, 19 nt, Artificial Sequence
  Description of Artificial Sequence: Synthetic oligonucleotide
cuccggggaaauuucagau

SEQ ID NO: 2907285 - RNA, 19 nt, Artificial Sequence
  Description of Artificial Sequence: Synthetic oligonucleotide
uaggccucauuggagccuu

SEQ ID NO: 2907286 - RNA, 19 nt, Artificial Sequence
  Description of Artificial Sequence: Synthetic oligonucleotide
uugucuccgccaggccuag

SEQ ID NO: 2907287 - RNA, 19 nt, Artificial Sequence
  Description of Artificial Sequence: Synthetic oligonucleotide
gccuugacuugcacaagag

SEQ ID NO: 2907288 - RNA, 19 nt, Artificial Sequence
  Description of Artificial Sequence: Synthetic oligonucleotide
caggucgcacugaggggug

SEQ ID NO: 2907289 - RNA, 19 nt, Artificial Sequence
  Description of Artificial Sequence: Synthetic oligonucleotide
aggccuagccgaguuacuu

SEQ ID NO: 2907290 - RNA, 19 nt, Artificial Sequence
  Description of Artificial Sequence: Synthetic oligonucleotide
gaguuacuugaugaagcau

SEQ ID NO: 2907291 - RNA, 19 nt, Artificial Sequence
  Description of Artificial Sequence: Synthetic oligonucleotide
ccuagugcaccguguucag

SEQ ID NO: 2907292 - RNA, 19 nt, Artificial Sequence
  Description of Artificial Sequence: Synthetic oligonucleotide
acugaggggugcuccucua

SEQ ID NO: 2907293 - RNA, 19 nt, Artificial Sequence
  Description of Artificial Sequence: Synthetic oligonucleotide
guugucuccgccaggccua

SEQ ID NO: 2907294 - RNA, 19 nt, Artificial Sequence
  Description of Artificial Sequence: Synthetic oligonucleotide
cccuacaaauauaauuucu

SEQ ID NO: 2907295 - RNA, 19 nt, Artificial Sequence
  Description of Artificial Sequence: Synthetic oligonucleotide
cuccgccaggccuagccga

SEQ ID NO: 2907296 - RNA, 19 nt, Artificial Sequence
  Description of Artificial Sequence: Synthetic oligonucleotide
cgaguuacuugaugaagca

SEQ ID NO: 2907297 - RNA, 19 nt, Artificial Sequence
  Description of Artificial Sequence: Synthetic oligonucleotide
cuuggagacuucucaguuu

SEQ ID NO: 2907298 - RNA, 19 nt, Artificial Sequence
  Description of Artificial Sequence: Synthetic oligonucleotide
ccguguucaggucgcacug

SEQ ID NO: 2907299 - RNA, 19 nt, Artificial Sequence
  Description of Artificial Sequence: Synthetic oligonucleotide
ccacguuguugucuccgcc

SEQ ID NO: 2907300 - RNA, 19 nt, Artificial Sequence
  Description of Artificial Sequence: Synthetic oligonucleotide
gccucauuggagccuugac

SEQ ID NO: 2907301 - RNA, 19 nt, Artificial Sequence
  Description of Artificial Sequence: Synthetic oligonucleotide
ccaggccuagccgaguuac

SEQ ID NO: 2907302 - RNA, 19 nt, Artificial Sequence
  Description of Artificial Sequence: Synthetic oligonucleotide
ccuugcuuggagacuucuc

SEQ ID NO: 2907303 - RNA, 19 nt, Artificial Sequence
  Description of Artificial Sequence: Synthetic oligonucleotide
ggagacuucucaguuucua

SEQ ID NO: 2907304 - RNA, 19 nt, Artificial Sequence
  Description of Artificial Sequence: Synthetic oligonucleotide
caccguguucaggucgcac

SEQ ID NO: 2907305 - RNA, 19 nt, Artificial Sequence
  Description of Artificial Sequence: Synthetic oligonucleotide
ccucauuggagccuugacu

SEQ ID NO: 2907306 - RNA, 19 nt, Artificial Sequence
  Description of Artificial Sequence: Synthetic oligonucleotide
guauugccguuaaauuuau

SEQ ID NO: 2907307 - RNA, 19 nt, Artificial Sequence
  Description of Artificial Sequence: Synthetic oligonucleotide
gagcauggcgccaacucuu

SEQ ID NO: 2907308 - RNA, 19 nt, Artificial Sequence
  Description of Artificial Sequence: Synthetic oligonucleotide
gcuuggagacuucucaguu

SEQ ID NO: 2907309 - RNA, 19 nt, Artificial Sequence
  Description of Artificial Sequence: Synthetic oligonucleotide
ccuuuuguccuuuaaccuu

SEQ ID NO: 2907310 - RNA, 19 nt, Artificial Sequence
  Description of Artificial Sequence: Synthetic oligonucleotide
ccagaauuuacagcuuuua

SEQ ID NO: 2907311 - RNA, 19 nt, Artificial Sequence
  Description of Artificial Sequence: Synthetic oligonucleotide
ggggugcuccucuaggccu

SEQ ID NO: 2907312 - RNA, 19 nt, Artificial Sequence
  Description of Artificial Sequence: Synthetic oligonucleotide
agcauggcgccaacucuuu

SEQ ID NO: 2907313 - RNA, 19 nt, Artificial Sequence
  Description of Artificial Sequence: Synthetic oligonucleotide
gccuuucucuuccuuuugu

SEQ ID NO: 2907314 - RNA, 19 nt, Artificial Sequence
  Description of Artificial Sequence: Synthetic oligonucleotide
cguuguugucuccgccagg

SEQ ID NO: 2907315 - RNA, 19 nt, Artificial Sequence
  Description of Artificial Sequence: Synthetic oligonucleotide
cacugaggggugcuccucu

SEQ ID NO: 2907316 - RNA, 19 nt, Artificial Sequence
  Description of Artificial Sequence: Synthetic oligonucleotide
gucgcacugaggggugcuc

SEQ ID NO: 2907317 - RNA, 19 nt, Artificial Sequence
  Description of Artificial Sequence: Synthetic oligonucleotide
cuaggccucauuggagccu

SEQ ID NO: 2907318 - RNA, 19 nt, Artificial Sequence
  Description of Artificial Sequence: Synthetic oligonucleotide
ugucuccgccaggccuagc

SEQ ID NO: 2907319 - RNA, 19 nt, Artificial Sequence
  Description of Artificial Sequence: Synthetic oligonucleotide
gcacaagaggagaaacuau

SEQ ID NO: 2907320 - RNA, 19 nt, Artificial Sequence
  Description of Artificial Sequence: Synthetic oligonucleotide
caagagcauggcgccaacu

SEQ ID NO: 2907321 - RNA, 19 nt, Artificial Sequence
  Description of Artificial Sequence: Synthetic oligonucleotide
ggccucauuggagccuuga

SEQ ID NO: 2907322 - RNA, 19 nt, Artificial Sequence
  Description of Artificial Sequence: Synthetic oligonucleotide
gggugcuccucuaggccuc

SEQ ID NO: 2907323 - RNA, 19 nt, Artificial Sequence
  Description of Artificial Sequence: Synthetic oligonucleotide
caggccuagccgaguuacu

SEQ ID NO: 2907324 - RNA, 19 nt, Artificial Sequence
  Description of Artificial Sequence: Synthetic oligonucleotide
gcacugaggggugcuccuc

SEQ ID NO: 2907325 - RNA, 19 nt, Artificial Sequence
  Description of Artificial Sequence: Synthetic oligonucleotide
cgacuccggggaaauuuca

SEQ ID NO: 2907326 - RNA, 19 nt, Artificial Sequence
  Description of Artificial Sequence: Synthetic oligonucleotide
aggccucauuggagccuug

SEQ ID NO: 2907327 - RNA, 19 nt, Artificial Sequence
  Description of Artificial Sequence: Synthetic oligonucleotide
cccagaauuuacagcuuuu

SEQ ID NO: 2907328 - RNA, 19 nt, Artificial Sequence
  Description of Artificial Sequence: Synthetic oligonucleotide
gaacgacuccggggaaauu

SEQ ID NO: 2907329 - RNA, 19 nt, Artificial Sequence
  Description of Artificial Sequence: Synthetic oligonucleotide
ccccagaauuuacagcuuu

SEQ ID NO: 2907330 - RNA, 19 nt, Artificial Sequence
  Description of Artificial Sequence: Synthetic oligonucleotide
gccaggccuagccgaguua

SEQ ID NO: 2907331 - RNA, 19 nt, Artificial Sequence
  Description of Artificial Sequence: Synthetic oligonucleotide
ggucgcacugaggggugcu

SEQ ID NO: 2907332 - RNA, 19 nt, Artificial Sequence
  Description of Artificial Sequence: Synthetic oligonucleotide
cguguucaggucgcacuga

SEQ ID NO: 2907333 - RNA, 19 nt, Artificial Sequence
  Description of Artificial Sequence: Synthetic oligonucleotide
ccuagccgaguuacuugau

SEQ ID NO: 2907334 - RNA, 19 nt, Artificial Sequence
  Description of Artificial Sequence: Synthetic oligonucleotide
gcaccguguucaggucgca

SEQ ID NO: 2907335 - RNA, 19 nt, Artificial Sequence
  Description of Artificial Sequence: Synthetic oligonucleotide
gcauggcgccaacucuuuu

SEQ ID NO: 2907336 - RNA, 19 nt, Artificial Sequence
  Description of Artificial Sequence: Synthetic oligonucleotide
cgcacugaggggugcuccu

SEQ ID NO: 2907337 - RNA, 19 nt, Artificial Sequence
  Description of Artificial Sequence: Synthetic oligonucleotide
cggggaaauuucagauaau

SEQ ID NO: 2907338 - RNA, 19 nt, Artificial Sequence
  Description of Artificial Sequence: Synthetic oligonucleotide
gugcuccucuaggccucau

SEQ ID NO: 2907339 - RNA, 19 nt, Artificial Sequence
  Description of Artificial Sequence: Synthetic oligonucleotide
cgccaggccuagccgaguu

SEQ ID NO: 2907340 - RNA, 19 nt, Artificial Sequence
  Description of Artificial Sequence: Synthetic oligonucleotide
ccgccaggccuagccgagu

SEQ ID NO: 2907341 - RNA, 19 nt, Artificial Sequence
  Description of Artificial Sequence: Synthetic oligonucleotide
uauauuucagcuaugaagg

SEQ ID NO: 2907342 - RNA, 19 nt, Artificial Sequence
  Description of Artificial Sequence: Synthetic oligonucleotide
acuucuuuaagauauaugg

SEQ ID NO: 2907343 - RNA, 19 nt, Artificial Sequence
  Description of Artificial Sequence: Synthetic oligonucleotide
aauggaggagaucacaucc

SEQ ID NO: 2907344 - RNA, 19 nt, Artificial Sequence
  Description of Artificial Sequence: Synthetic oligonucleotide
aacaguuuuauauuucagc

SEQ ID NO: 2907345 - RNA, 19 nt, Artificial Sequence
  Description of Artificial Sequence: Synthetic oligonucleotide
uucuuuaagauauauggcg

SEQ ID NO: 2907346 - RNA, 19 nt, Artificial Sequence
  Description of Artificial Sequence: Synthetic oligonucleotide
uccaucaacacucacagag

SEQ ID NO: 2907347 - RNA, 19 nt, Artificial Sequence
  Description of Artificial Sequence: Synthetic oligonucleotide
auuuaaucagucuuacacc

SEQ ID NO: 2907348 - RNA, 19 nt, Artificial Sequence
  Description of Artificial Sequence: Synthetic oligonucleotide
uuuauguccauuuaaucag

SEQ ID NO: 2907349 - RNA, 19 nt, Artificial Sequence
  Description of Artificial Sequence: Synthetic oligonucleotide
uuuuauguccauuuaauca

SEQ ID NO: 2907350 - RNA, 19 nt, Artificial Sequence
  Description of Artificial Sequence: Synthetic oligonucleotide
cauuuaaucagucuuacac

SEQ ID NO: 2907351 - RNA, 19 nt, Artificial Sequence
  Description of Artificial Sequence: Synthetic oligonucleotide
agcuaugaaggucaguucc

SEQ ID NO: 2907352 - RNA, 19 nt, Artificial Sequence
  Description of Artificial Sequence: Synthetic oligonucleotide
aagacuaucuuucugcacu

SEQ ID NO: 2907353 - RNA, 19 nt, Artificial Sequence
  Description of Artificial Sequence: Synthetic oligonucleotide
uuuguucuuaacaaguaga

SEQ ID NO: 2907354 - RNA, 19 nt, Artificial Sequence
  Description of Artificial Sequence: Synthetic oligonucleotide
ucaacacucacagaggugg

SEQ ID NO: 2907355 - RNA, 19 nt, Artificial Sequence
  Description of Artificial Sequence: Synthetic oligonucleotide
uuuaaucagucuuacaccu

SEQ ID NO: 2907356 - RNA, 19 nt, Artificial Sequence
  Description of Artificial Sequence: Synthetic oligonucleotide
uccaacuucuuuaagauau

SEQ ID NO: 2907357 - RNA, 19 nt, Artificial Sequence
  Description of Artificial Sequence: Synthetic oligonucleotide
aagauauauggcgugacuc

SEQ ID NO: 2907358 - RNA, 19 nt, Artificial Sequence
  Description of Artificial Sequence: Synthetic oligonucleotide
acaguuuuauauuucagcu

SEQ ID NO: 2907359 - RNA, 19 nt, Artificial Sequence
  Description of Artificial Sequence: Synthetic oligonucleotide
aaggucaguucccaaggcc

SEQ ID NO: 2907360 - RNA, 19 nt, Artificial Sequence
  Description of Artificial Sequence: Synthetic oligonucleotide
aguuuuauauuucagcuau

SEQ ID NO: 2907361 - RNA, 19 nt, Artificial Sequence
  Description of Artificial Sequence: Synthetic oligonucleotide
uuguucuuaacaaguagag

SEQ ID NO: 2907362 - RNA, 19 nt, Artificial Sequence
  Description of Artificial Sequence: Synthetic oligonucleotide
ucuuacaccuuucugggcc

SEQ ID NO: 2907363 - RNA, 19 nt, Artificial Sequence
  Description of Artificial Sequence: Synthetic oligonucleotide
aacauugcggcucucucuc

SEQ ID NO: 2907364 - RNA, 19 nt, Artificial Sequence
  Description of Artificial Sequence: Synthetic oligonucleotide
agagguggcucucacaggc

SEQ ID NO: 2907365 - RNA, 19 nt, Artificial Sequence
  Description of Artificial Sequence: Synthetic oligonucleotide
uucuuaacaaguagaguag

SEQ ID NO: 2907366 - RNA, 19 nt, Artificial Sequence
  Description of Artificial Sequence: Synthetic oligonucleotide
acuaucuuucugcacuucc

SEQ ID NO: 2907367 - RNA, 19 nt, Artificial Sequence
  Description of Artificial Sequence: Synthetic oligonucleotide
agauauauggcgugacucg

SEQ ID NO: 2907368 - RNA, 19 nt, Artificial Sequence
  Description of Artificial Sequence: Synthetic oligonucleotide
ucuuuaagauauauggcgu

SEQ ID NO: 2907369 - RNA, 19 nt, Artificial Sequence
  Description of Artificial Sequence: Synthetic oligonucleotide
ugaaggucaguucccaagg

SEQ ID NO: 2907370 - RNA, 19 nt, Artificial Sequence
  Description of Artificial Sequence: Synthetic oligonucleotide
cagucuuacaccuuucugg

SEQ ID NO: 2907371 - RNA, 19 nt, Artificial Sequence
  Description of Artificial Sequence: Synthetic oligonucleotide
uucccaaacaguuuuauau

SEQ ID NO: 2907372 - RNA, 19 nt, Artificial Sequence
  Description of Artificial Sequence: Synthetic oligonucleotide
gaucccaaucuucauaugc

SEQ ID NO: 2907373 - RNA, 19 nt, Artificial Sequence
  Description of Artificial Sequence: Synthetic oligonucleotide
acguagaugaggaaguucc

SEQ ID NO: 2907374 - RNA, 19 nt, Artificial Sequence
  Description of Artificial Sequence: Synthetic oligonucleotide
agaaacugucaccagguuc

SEQ ID NO: 2907375 - RNA, 19 nt, Artificial Sequence
  Description of Artificial Sequence: Synthetic oligonucleotide
agucuuacaccuuucuggg

SEQ ID NO: 2907376 - RNA, 19 nt, Artificial Sequence
  Description of Artificial Sequence: Synthetic oligonucleotide
uuuuauauuucagcuauga

SEQ ID NO: 2907377 - RNA, 19 nt, Artificial Sequence
  Description of Artificial Sequence: Synthetic oligonucleotide
cacaagacuaucuuucugc

SEQ ID NO: 2907378 - RNA, 19 nt, Artificial Sequence
  Description of Artificial Sequence: Synthetic oligonucleotide
guucuuaacaaguagagua

SEQ ID NO: 2907379 - RNA, 19 nt, Artificial Sequence
  Description of Artificial Sequence: Synthetic oligonucleotide
cuucuuuaagauauauggc

SEQ ID NO: 2907380 - RNA, 19 nt, Artificial Sequence
  Description of Artificial Sequence: Synthetic oligonucleotide
uucugcacuucccaaacag

SEQ ID NO: 2907381 - RNA, 19 nt, Artificial Sequence
  Description of Artificial Sequence: Synthetic oligonucleotide
gaugaggaaguuccgaaug

SEQ ID NO: 2907382 - RNA, 19 nt, Artificial Sequence
  Description of Artificial Sequence: Synthetic oligonucleotide
ucgggauccagcuucggcg

SEQ ID NO: 2907383 - RNA, 19 nt, Artificial Sequence
  Description of Artificial Sequence: Synthetic oligonucleotide
uguccauuuaaucagucuu

SEQ ID NO: 2907384 - RNA, 19 nt, Artificial Sequence
  Description of Artificial Sequence: Synthetic oligonucleotide
uauggcgugacucgcagca

SEQ ID NO: 2907385 - RNA, 19 nt, Artificial Sequence
  Description of Artificial Sequence: Synthetic oligonucleotide
agcagggccacguagauga

SEQ ID NO: 2907386 - RNA, 19 nt, Artificial Sequence
  Description of Artificial Sequence: Synthetic oligonucleotide
uucuucaugccaugcaucc

SEQ ID NO: 2907387 - RNA, 19 nt, Artificial Sequence
  Description of Artificial Sequence: Synthetic oligonucleotide
aggagaaacugucaccagg

SEQ ID NO: 2907388 - RNA, 19 nt, Artificial Sequence
  Description of Artificial Sequence: Synthetic oligonucleotide
cuuuguucuuaacaaguag

SEQ ID NO: 2907389 - RNA, 19 nt, Artificial Sequence
  Description of Artificial Sequence: Synthetic oligonucleotide
uuccguuucaucuccucgg

SEQ ID NO: 2907390 - RNA, 19 nt, Artificial Sequence
  Description of Artificial Sequence: Synthetic oligonucleotide
aggaggagaaacugucacc

SEQ ID NO: 2907391 - RNA, 19 nt, Artificial Sequence
  Description of Artificial Sequence: Synthetic oligonucleotide
uuuauauuucagcuaugaa

SEQ ID NO: 2907392 - RNA, 19 nt, Artificial Sequence
  Description of Artificial Sequence: Synthetic oligonucleotide
uuccgaauggaggagauca

SEQ ID NO: 2907393 - RNA, 19 nt, Artificial Sequence
  Description of Artificial Sequence: Synthetic oligonucleotide
uauauggcgugacucgcag

SEQ ID NO: 2907394 - RNA, 19 nt, Artificial Sequence
  Description of Artificial Sequence: Synthetic oligonucleotide
gaggagaucacauccucgc

SEQ ID NO: 2907395 - RNA, 19 nt, Artificial Sequence
  Description of Artificial Sequence: Synthetic oligonucleotide
augaggaaguuccgaaugg

SEQ ID NO: 2907396 - RNA, 19 nt, Artificial Sequence
  Description of Artificial Sequence: Synthetic oligonucleotide
auccaugugaucccaaucu

SEQ ID NO: 2907397 - RNA, 19 nt, Artificial Sequence
  Description of Artificial Sequence: Synthetic oligonucleotide
ucauaugcuguccaacuuc

SEQ ID NO: 2907398 - RNA, 19 nt, Artificial Sequence
  Description of Artificial Sequence: Synthetic oligonucleotide
gucaccagguucuucaugc

SEQ ID NO: 2907399 - RNA, 19 nt, Artificial Sequence
  Description of Artificial Sequence: Synthetic oligonucleotide
cuuuaagauauauggcgug

SEQ ID NO: 2907400 - RNA, 19 nt, Artificial Sequence
  Description of Artificial Sequence: Synthetic oligonucleotide
uguccaacuucuuuaagau

SEQ ID NO: 2907401 - RNA, 19 nt, Artificial Sequence
  Description of Artificial Sequence: Synthetic oligonucleotide
uuuaagauauauggcguga

SEQ ID NO: 2907402 - RNA, 19 nt, Artificial Sequence
  Description of Artificial Sequence: Synthetic oligonucleotide
augaaggucaguucccaag

SEQ ID NO: 2907403 - RNA, 19 nt, Artificial Sequence
  Description of Artificial Sequence: Synthetic oligonucleotide
uaucuuucugcacuuccca

SEQ ID NO: 2907404 - RNA, 19 nt, Artificial Sequence
  Description of Artificial Sequence: Synthetic oligonucleotide
ucugggccaauucaucugc

SEQ ID NO: 2907405 - RNA, 19 nt, Artificial Sequence
  Description of Artificial Sequence: Synthetic oligonucleotide
ucagucuuacaccuuucug

SEQ ID NO: 2907406 - RNA, 19 nt, Artificial Sequence
  Description of Artificial Sequence: Synthetic oligonucleotide
ucucacaggcccaagggac

SEQ ID NO: 2907407 - RNA, 19 nt, Artificial Sequence
  Description of Artificial Sequence: Synthetic oligonucleotide
uaagauauauggcgugacu

SEQ ID NO: 2907408 - RNA, 19 nt, Artificial Sequence
  Description of Artificial Sequence: Synthetic oligonucleotide
ucagcuaugaaggucaguu

SEQ ID NO: 2907409 - RNA, 19 nt, Artificial Sequence
  Description of Artificial Sequence: Synthetic oligonucleotide
aaacaguuuuauauuucag

SEQ ID NO: 2907410 - RNA, 19 nt, Artificial Sequence
  Description of Artificial Sequence: Synthetic oligonucleotide
auuucagcuaugaagguca

SEQ ID NO: 2907411 - RNA, 19 nt, Artificial Sequence
  Description of Artificial Sequence: Synthetic oligonucleotide
cuaucuuucugcacuuccc

SEQ ID NO: 2907412 - RNA, 19 nt, Artificial Sequence
  Description of Artificial Sequence: Synthetic oligonucleotide
ucgauccggaacauugcgg

SEQ ID NO: 2907413 - RNA, 19 nt, Artificial Sequence
  Description of Artificial Sequence: Synthetic oligonucleotide
uaaucagucuuacaccuuu

SEQ ID NO: 2907414 - RNA, 19 nt, Artificial Sequence
  Description of Artificial Sequence: Synthetic oligonucleotide
caaacaguuuuauauuuca

SEQ ID NO: 2907415 - RNA, 19 nt, Artificial Sequence
  Description of Artificial Sequence: Synthetic oligonucleotide
uuaacaaguagaguaguuu

SEQ ID NO: 2907416 - RNA, 19 nt, Artificial Sequence
  Description of Artificial Sequence: Synthetic oligonucleotide
aacuucuuuaagauauaug

SEQ ID NO: 2907417 - RNA, 19 nt, Artificial Sequence
  Description of Artificial Sequence: Synthetic oligonucleotide
aggucaguucccaaggccc

SEQ ID NO: 2907418 - RNA, 19 nt, Artificial Sequence
  Description of Artificial Sequence: Synthetic oligonucleotide
uuucugggccaauucaucu

SEQ ID NO: 2907419 - RNA, 19 nt, Artificial Sequence
  Description of Artificial Sequence: Synthetic oligonucleotide
uuauguccauuuaaucagu

SEQ ID NO: 2907420 - RNA, 19 nt, Artificial Sequence
  Description of Artificial Sequence: Synthetic oligonucleotide
uucccaaggcccaacuuug

SEQ ID NO: 2907421 - RNA, 19 nt, Artificial Sequence
  Description of Artificial Sequence: Synthetic oligonucleotide
gauauauggcgugacucgc

SEQ ID NO: 2907422 - RNA, 19 nt, Artificial Sequence
  Description of Artificial Sequence: Synthetic oligonucleotide
ugugaucccaaucuucaua

SEQ ID NO: 2907423 - RNA, 19 nt, Artificial Sequence
  Description of Artificial Sequence: Synthetic oligonucleotide
aggaaguuccgaauggagg

SEQ ID NO: 2907424 - RNA, 19 nt, Artificial Sequence
  Description of Artificial Sequence: Synthetic oligonucleotide
augccaugcauccauguga

SEQ ID NO: 2907425 - RNA, 19 nt, Artificial Sequence
  Description of Artificial Sequence: Synthetic oligonucleotide
uagaugaggaaguuccgaa

SEQ ID NO: 2907426 - RNA, 19 nt, Artificial Sequence
  Description of Artificial Sequence: Synthetic oligonucleotide
caugcauccaugugauccc

SEQ ID NO: 2907427 - RNA, 19 nt, Artificial Sequence
  Description of Artificial Sequence: Synthetic oligonucleotide
cuuccguuucaucuccucg

SEQ ID NO: 2907428 - RNA, 19 nt, Artificial Sequence
  Description of Artificial Sequence: Synthetic oligonucleotide
acaagacuaucuuucugca

SEQ ID NO: 2907429 - RNA, 19 nt, Artificial Sequence
  Description of Artificial Sequence: Synthetic oligonucleotide
gacacaccagaccacaaga

SEQ ID NO: 2907430 - RNA, 19 nt, Artificial Sequence
  Description of Artificial Sequence: Synthetic oligonucleotide
uuaagauauauggcgugac

SEQ ID NO: 2907431 - RNA, 19 nt, Artificial Sequence
  Description of Artificial Sequence: Synthetic oligonucleotide
caugugaucccaaucuuca

SEQ ID NO: 2907432 - RNA, 19 nt, Artificial Sequence
  Description of Artificial Sequence: Synthetic oligonucleotide
gaaacugucaccagguucu

SEQ ID NO: 2907433 - RNA, 19 nt, Artificial Sequence
  Description of Artificial Sequence: Synthetic oligonucleotide
uauuucagcuaugaagguc

SEQ ID NO: 2907434 - RNA, 19 nt, Artificial Sequence
  Description of Artificial Sequence: Synthetic oligonucleotide
uuucaucuccucgggaucc

SEQ ID NO: 2907435 - RNA, 19 nt, Artificial Sequence
  Description of Artificial Sequence: Synthetic oligonucleotide
cuuucugcacuucccaaac

SEQ ID NO: 2907436 - RNA, 19 nt, Artificial Sequence
  Description of Artificial Sequence: Synthetic oligonucleotide
ucuuaacaaguagaguagu

SEQ ID NO: 2907437 - RNA, 19 nt, Artificial Sequence
  Description of Artificial Sequence: Synthetic oligonucleotide
uguucuuaacaaguagagu

SEQ ID NO: 2907438 - RNA, 19 nt, Artificial Sequence
  Description of Artificial Sequence: Synthetic oligonucleotide
caagggacacaccagacca

SEQ ID NO: 2907439 - RNA, 19 nt, Artificial Sequence
  Description of Artificial Sequence: Synthetic oligonucleotide
uauguccauuuaaucaguc

SEQ ID NO: 2907440 - RNA, 19 nt, Artificial Sequence
  Description of Artificial Sequence: Synthetic oligonucleotide
agacccucgauccggaaca

SEQ ID NO: 2907441 - RNA, 19 nt, Artificial Sequence
  Description of Artificial Sequence: Synthetic oligonucleotide
uccauuuaaucagucuuac

SEQ ID NO: 2907442 - RNA, 19 nt, Artificial Sequence
  Description of Artificial Sequence: Synthetic oligonucleotide
gaccacaagacuaucuuuc

SEQ ID NO: 2907443 - RNA, 19 nt, Artificial Sequence
  Description of Artificial Sequence: Synthetic oligonucleotide
cucgauccggaacauugcg

SEQ ID NO: 2907444 - RNA, 19 nt, Artificial Sequence
  Description of Artificial Sequence: Synthetic oligonucleotide
uggcgugacucgcagcagg

SEQ ID NO: 2907445 - RNA, 19 nt, Artificial Sequence
  Description of Artificial Sequence: Synthetic oligonucleotide
ucuccaaagccugcaggcg

SEQ ID NO: 2907446 - RNA, 19 nt, Artificial Sequence
  Description of Artificial Sequence: Synthetic oligonucleotide
ucuucauaugcuguccaac

SEQ ID NO: 2907447 - RNA, 19 nt, Artificial Sequence
  Description of Artificial Sequence: Synthetic oligonucleotide
ucugcacuucccaaacagu

SEQ ID NO: 2907448 - RNA, 19 nt, Artificial Sequence
  Description of Artificial Sequence: Synthetic oligonucleotide
aggagaucacauccucgcg

SEQ ID NO: 2907449 - RNA, 19 nt, Artificial Sequence
  Description of Artificial Sequence: Synthetic oligonucleotide
acauccucgcgcaucuucc

SEQ ID NO: 2907450 - RNA, 19 nt, Artificial Sequence
  Description of Artificial Sequence: Synthetic oligonucleotide
auauuucagcuaugaaggu

SEQ ID NO: 2907451 - RNA, 19 nt, Artificial Sequence
  Description of Artificial Sequence: Synthetic oligonucleotide
gagaucacauccucgcgca

SEQ ID NO: 2907452 - RNA, 19 nt, Artificial Sequence
  Description of Artificial Sequence: Synthetic oligonucleotide
auguccauuuaaucagucu

SEQ ID NO: 2907453 - RNA, 19 nt, Artificial Sequence
  Description of Artificial Sequence: Synthetic oligonucleotide
gaggaaguuccgaauggag

SEQ ID NO: 2907454 - RNA, 19 nt, Artificial Sequence
  Description of Artificial Sequence: Synthetic oligonucleotide
auauggcgugacucgcagc

SEQ ID NO: 2907455 - RNA, 19 nt, Artificial Sequence
  Description of Artificial Sequence: Synthetic oligonucleotide
ggaaguuccgaauggagga

SEQ ID NO: 2907456 - RNA, 19 nt, Artificial Sequence
  Description of Artificial Sequence: Synthetic oligonucleotide
gaauggaggagaucacauc

SEQ ID NO: 2907457 - RNA, 19 nt, Artificial Sequence
  Description of Artificial Sequence: Synthetic oligonucleotide
aaucagucuuacaccuuuc

SEQ ID NO: 2907458 - RNA, 19 nt, Artificial Sequence
  Description of Artificial Sequence: Synthetic oligonucleotide
caaucuucauaugcugucc

SEQ ID NO: 2907459 - RNA, 19 nt, Artificial Sequence
  Description of Artificial Sequence: Synthetic oligonucleotide
uucugggccaauucaucug

SEQ ID NO: 2907460 - RNA, 19 nt, Artificial Sequence
  Description of Artificial Sequence: Synthetic oligonucleotide
aucagucuuacaccuuucu

SEQ ID NO: 2907461 - RNA, 19 nt, Artificial Sequence
  Description of Artificial Sequence: Synthetic oligonucleotide
caucuuccguuucaucucc

SEQ ID NO: 2907462 - RNA, 19 nt, Artificial Sequence
  Description of Artificial Sequence: Synthetic oligonucleotide
uucauaugcuguccaacuu

SEQ ID NO: 2907463 - RNA, 19 nt, Artificial Sequence
  Description of Artificial Sequence: Synthetic oligonucleotide
gacaggaggagaaacuguc

SEQ ID NO: 2907464 - RNA, 19 nt, Artificial Sequence
  Description of Artificial Sequence: Synthetic oligonucleotide
aucacauccucgcgcaucu

SEQ ID NO: 2907465 - RNA, 19 nt, Artificial Sequence
  Description of Artificial Sequence: Synthetic oligonucleotide
ucccaaacaguuuuauauu

SEQ ID NO: 2907466 - RNA, 19 nt, Artificial Sequence
  Description of Artificial Sequence: Synthetic oligonucleotide
aggcccaagggacacacca

SEQ ID NO: 2907467 - RNA, 19 nt, Artificial Sequence
  Description of Artificial Sequence: Synthetic oligonucleotide
uuucagcuaugaaggucag

SEQ ID NO: 2907468 - RNA, 19 nt, Artificial Sequence
  Description of Artificial Sequence: Synthetic oligonucleotide
accuuucugggccaauuca

SEQ ID NO: 2907469 - RNA, 19 nt, Artificial Sequence
  Description of Artificial Sequence: Synthetic oligonucleotide
accacaagacuaucuuucu

SEQ ID NO: 2907470 - RNA, 19 nt, Artificial Sequence
  Description of Artificial Sequence: Synthetic oligonucleotide
ccaugcauccaugugaucc

SEQ ID NO: 2907471 - RNA, 19 nt, Artificial Sequence
  Description of Artificial Sequence: Synthetic oligonucleotide
ugaggaaguuccgaaugga

SEQ ID NO: 2907472 - RNA, 19 nt, Artificial Sequence
  Description of Artificial Sequence: Synthetic oligonucleotide
ugccaugcauccaugugau

SEQ ID NO: 2907473 - RNA, 19 nt, Artificial Sequence
  Description of Artificial Sequence: Synthetic oligonucleotide
aucuccucgggauccagcu

SEQ ID NO: 2907474 - RNA, 19 nt, Artificial Sequence
  Description of Artificial Sequence: Synthetic oligonucleotide
agaugaggaaguuccgaau

SEQ ID NO: 2907475 - RNA, 19 nt, Artificial Sequence
  Description of Artificial Sequence: Synthetic oligonucleotide
ugcagacaggaggagaaac

SEQ ID NO: 2907476 - RNA, 19 nt, Artificial Sequence
  Description of Artificial Sequence: Synthetic oligonucleotide
ugggccaauucaucugcag

SEQ ID NO: 2907477 - RNA, 19 nt, Artificial Sequence
  Description of Artificial Sequence: Synthetic oligonucleotide
caagacuaucuuucugcac

SEQ ID NO: 2907478 - RNA, 19 nt, Artificial Sequence
  Description of Artificial Sequence: Synthetic oligonucleotide
acacaccagaccacaagac

SEQ ID NO: 2907479 - RNA, 19 nt, Artificial Sequence
  Description of Artificial Sequence: Synthetic oligonucleotide
acacucacagagguggcuc

SEQ ID NO: 2907480 - RNA, 19 nt, Artificial Sequence
  Description of Artificial Sequence: Synthetic oligonucleotide
ggccaauucaucugcagac

SEQ ID NO: 2907481 - RNA, 19 nt, Artificial Sequence
  Description of Artificial Sequence: Synthetic oligonucleotide
gaggagaaacugucaccag

SEQ ID NO: 2907482 - RNA, 19 nt, Artificial Sequence
  Description of Artificial Sequence: Synthetic oligonucleotide
uuaaucagucuuacaccuu

SEQ ID NO: 2907483 - RNA, 19 nt, Artificial Sequence
  Description of Artificial Sequence: Synthetic oligonucleotide
caugccaugcauccaugug

SEQ ID NO: 2907484 - RNA, 19 nt, Artificial Sequence
  Description of Artificial Sequence: Synthetic oligonucleotide
acauugcggcucucucucc

SEQ ID NO: 2907485 - RNA, 19 nt, Artificial Sequence
  Description of Artificial Sequence: Synthetic oligonucleotide
uccagcuucggcgcgagac

SEQ ID NO: 2907486 - RNA, 19 nt, Artificial Sequence
  Description of Artificial Sequence: Synthetic oligonucleotide
auccggaacauugcggcuc

SEQ ID NO: 2907487 - RNA, 19 nt, Artificial Sequence
  Description of Artificial Sequence: Synthetic oligonucleotide
cagacaggaggagaaacug

SEQ ID NO: 2907488 - RNA, 19 nt, Artificial Sequence
  Description of Artificial Sequence: Synthetic oligonucleotide
aagggacacaccagaccac

SEQ ID NO: 2907489 - RNA, 19 nt, Artificial Sequence
  Description of Artificial Sequence: Synthetic oligonucleotide
ucaugccaugcauccaugu

SEQ ID NO: 2907490 - RNA, 19 nt, Artificial Sequence
  Description of Artificial Sequence: Synthetic oligonucleotide
ugcacuucccaaacaguuu

SEQ ID NO: 2907491 - RNA, 19 nt, Artificial Sequence
  Description of Artificial Sequence: Synthetic oligonucleotide
ugcggcucucucuccaaag

SEQ ID NO: 2907492 - RNA, 19 nt, Artificial Sequence
  Description of Artificial Sequence: Synthetic oligonucleotide
uaugaaggucaguucccaa

SEQ ID NO: 2907493 - RNA, 19 nt, Artificial Sequence
  Description of Artificial Sequence: Synthetic oligonucleotide
aacacucacagagguggcu

SEQ ID NO: 2907494 - RNA, 19 nt, Artificial Sequence
  Description of Artificial Sequence: Synthetic oligonucleotide
ugcuguccaacuucuuuaa

SEQ ID NO: 2907495 - RNA, 19 nt, Artificial Sequence
  Description of Artificial Sequence: Synthetic oligonucleotide
gagacccucgauccggaac

SEQ ID NO: 2907496 - RNA, 19 nt, Artificial Sequence
  Description of Artificial Sequence: Synthetic oligonucleotide
uccaugugaucccaaucuu

SEQ ID NO: 2907497 - RNA, 19 nt, Artificial Sequence
  Description of Artificial Sequence: Synthetic oligonucleotide
uccucgggauccagcuucg

SEQ ID NO: 2907498 - RNA, 19 nt, Artificial Sequence
  Description of Artificial Sequence: Synthetic oligonucleotide
ucgcagcagggccacguag

SEQ ID NO: 2907499 - RNA, 19 nt, Artificial Sequence
  Description of Artificial Sequence: Synthetic oligonucleotide
aggcgcugcacccugcucu

SEQ ID NO: 2907500 - RNA, 19 nt, Artificial Sequence
  Description of Artificial Sequence: Synthetic oligonucleotide
ggaggagaaacugucacca

SEQ ID NO: 2907501 - RNA, 19 nt, Artificial Sequence
  Description of Artificial Sequence: Synthetic oligonucleotide
aucccaaucuucauaugcu

SEQ ID NO: 2907502 - RNA, 19 nt, Artificial Sequence
  Description of Artificial Sequence: Synthetic oligonucleotide
cauccaugugaucccaauc

SEQ ID NO: 2907503 - RNA, 19 nt, Artificial Sequence
  Description of Artificial Sequence: Synthetic oligonucleotide
ugaucccaaucuucauaug

SEQ ID NO: 2907504 - RNA, 19 nt, Artificial Sequence
  Description of Artificial Sequence: Synthetic oligonucleotide
gcucucacaggcccaaggg

SEQ ID NO: 2907505 - RNA, 19 nt, Artificial Sequence
  Description of Artificial Sequence: Synthetic oligonucleotide
guuucaucuccucgggauc

SEQ ID NO: 2907506 - RNA, 19 nt, Artificial Sequence
  Description of Artificial Sequence: Synthetic oligonucleotide
cuccucgggauccagcuuc

SEQ ID NO: 2907507 - RNA, 19 nt, Artificial Sequence
  Description of Artificial Sequence: Synthetic oligonucleotide
ucaccagguucuucaugcc

SEQ ID NO: 2907508 - RNA, 19 nt, Artificial Sequence
  Description of Artificial Sequence: Synthetic oligonucleotide
uccgaauggaggagaucac

SEQ ID NO: 2907509 - RNA, 19 nt, Artificial Sequence
  Description of Artificial Sequence: Synthetic oligonucleotide
agaccacaagacuaucuuu

SEQ ID NO: 2907510 - RNA, 19 nt, Artificial Sequence
  Description of Artificial Sequence: Synthetic oligonucleotide
cuucauaugcuguccaacu

SEQ ID NO: 2907511 - RNA, 19 nt, Artificial Sequence
  Description of Artificial Sequence: Synthetic oligonucleotide
agccugcaggcgcugcacc

SEQ ID NO: 2907512 - RNA, 19 nt, Artificial Sequence
  Description of Artificial Sequence: Synthetic oligonucleotide
uccggaacauugcggcucu

SEQ ID NO: 2907513 - RNA, 19 nt, Artificial Sequence
  Description of Artificial Sequence: Synthetic oligonucleotide
cucgggauccagcuucggc

SEQ ID NO: 2907514 - RNA, 19 nt, Artificial Sequence
  Description of Artificial Sequence: Synthetic oligonucleotide
ggcgcgagacccucgaucc

SEQ ID NO: 2907515 - RNA, 19 nt, Artificial Sequence
  Description of Artificial Sequence: Synthetic oligonucleotide
ccaucaacacucacagagg

SEQ ID NO: 2907516 - RNA, 19 nt, Artificial Sequence
  Description of Artificial Sequence: Synthetic oligonucleotide
guuuuauauuucagcuaug

SEQ ID NO: 2907517 - RNA, 19 nt, Artificial Sequence
  Description of Artificial Sequence: Synthetic oligonucleotide
ccaauucaucugcagacag

SEQ ID NO: 2907518 - RNA, 19 nt, Artificial Sequence
  Description of Artificial Sequence: Synthetic oligonucleotide
guagaugaggaaguuccga

SEQ ID NO: 2907519 - RNA, 19 nt, Artificial Sequence
  Description of Artificial Sequence: Synthetic oligonucleotide
aucuucauaugcuguccaa

SEQ ID NO: 2907520 - RNA, 19 nt, Artificial Sequence
  Description of Artificial Sequence: Synthetic oligonucleotide
ucacagagguggcucucac

SEQ ID NO: 2907521 - RNA, 19 nt, Artificial Sequence
  Description of Artificial Sequence: Synthetic oligonucleotide
ggacacaccagaccacaag

SEQ ID NO: 2907522 - RNA, 19 nt, Artificial Sequence
  Description of Artificial Sequence: Synthetic oligonucleotide
acaccagaccacaagacua

SEQ ID NO: 2907523 - RNA, 19 nt, Artificial Sequence
  Description of Artificial Sequence: Synthetic oligonucleotide
gugaucccaaucuucauau

SEQ ID NO: 2907524 - RNA, 19 nt, Artificial Sequence
  Description of Artificial Sequence: Synthetic oligonucleotide
ccaaacaguuuuauauuuc

SEQ ID NO: 2907525 - RNA, 19 nt, Artificial Sequence
  Description of Artificial Sequence: Synthetic oligonucleotide
gaucacauccucgcgcauc

SEQ ID NO: 2907526 - RNA, 19 nt, Artificial Sequence
  Description of Artificial Sequence: Synthetic oligonucleotide
caacacucacagagguggc

SEQ ID NO: 2907527 - RNA, 19 nt, Artificial Sequence
  Description of Artificial Sequence: Synthetic oligonucleotide
gaacauugcggcucucucu

SEQ ID NO: 2907528 - RNA, 19 nt, Artificial Sequence
  Description of Artificial Sequence: Synthetic oligonucleotide
ccaaucuucauaugcuguc

SEQ ID NO: 2907529 - RNA, 19 nt, Artificial Sequence
  Description of Artificial Sequence: Synthetic oligonucleotide
ucgcgcaucuuccguuuca

SEQ ID NO: 2907530 - RNA, 19 nt, Artificial Sequence
  Description of Artificial Sequence: Synthetic oligonucleotide
agacuaucuuucugcacuu

SEQ ID NO: 2907531 - RNA, 19 nt, Artificial Sequence
  Description of Artificial Sequence: Synthetic oligonucleotide
cucucucuccaaagccugc

SEQ ID NO: 2907532 - RNA, 19 nt, Artificial Sequence
  Description of Artificial Sequence: Synthetic oligonucleotide
gucuuacaccuuucugggc

SEQ ID NO: 2907533 - RNA, 19 nt, Artificial Sequence
  Description of Artificial Sequence: Synthetic oligonucleotide
caucuccucgggauccagc

SEQ ID NO: 2907534 - RNA, 19 nt, Artificial Sequence
  Description of Artificial Sequence: Synthetic oligonucleotide
cauaugcuguccaacuucu

SEQ ID NO: 2907535 - RNA, 19 nt, Artificial Sequence
  Description of Artificial Sequence: Synthetic oligonucleotide
cacauccucgcgcaucuuc

SEQ ID NO: 2907536 - RNA, 19 nt, Artificial Sequence
  Description of Artificial Sequence: Synthetic oligonucleotide
uucggcgcgagacccucga

SEQ ID NO: 2907537 - RNA, 19 nt, Artificial Sequence
  Description of Artificial Sequence: Synthetic oligonucleotide
ggccacguagaugaggaag

SEQ ID NO: 2907538 - RNA, 19 nt, Artificial Sequence
  Description of Artificial Sequence: Synthetic oligonucleotide
cccucgauccggaacauug

SEQ ID NO: 2907539 - RNA, 19 nt, Artificial Sequence
  Description of Artificial Sequence: Synthetic oligonucleotide
caucaacacucacagaggu

SEQ ID NO: 2907540 - RNA, 19 nt, Artificial Sequence
  Description of Artificial Sequence: Synthetic oligonucleotide
caaggcccaacuuuguucu

SEQ ID NO: 2907541 - RNA, 19 nt, Artificial Sequence
  Description of Artificial Sequence: Synthetic oligonucleotide
cucucuccaaagccugcag

SEQ ID NO: 2907542 - RNA, 19 nt, Artificial Sequence
  Description of Artificial Sequence: Synthetic oligonucleotide
cagcuaugaaggucaguuc

SEQ ID NO: 2907543 - RNA, 19 nt, Artificial Sequence
  Description of Artificial Sequence: Synthetic oligonucleotide
aucaacacucacagaggug

SEQ ID NO: 2907544 - RNA, 19 nt, Artificial Sequence
  Description of Artificial Sequence: Synthetic oligonucleotide
cccaacuuuguucuuaaca

SEQ ID NO: 2907545 - RNA, 19 nt, Artificial Sequence
  Description of Artificial Sequence: Synthetic oligonucleotide
cgauccggaacauugcggc

SEQ ID NO: 2907546 - RNA, 19 nt, Artificial Sequence
  Description of Artificial Sequence: Synthetic oligonucleotide
ggcucucacaggcccaagg

SEQ ID NO: 2907547 - RNA, 19 nt, Artificial Sequence
  Description of Artificial Sequence: Synthetic oligonucleotide
cuuacaccuuucugggcca

SEQ ID NO: 2907548 - RNA, 19 nt, Artificial Sequence
  Description of Artificial Sequence: Synthetic oligonucleotide
acuucccaaacaguuuuau

SEQ ID NO: 2907549 - RNA, 19 nt, Artificial Sequence
  Description of Artificial Sequence: Synthetic oligonucleotide
guucuucaugccaugcauc

SEQ ID NO: 2907550 - RNA, 19 nt, Artificial Sequence
  Description of Artificial Sequence: Synthetic oligonucleotide
auauauggcgugacucgca

SEQ ID NO: 2907551 - RNA, 19 nt, Artificial Sequence
  Description of Artificial Sequence: Synthetic oligonucleotide
agggacacaccagaccaca

SEQ ID NO: 2907552 - RNA, 19 nt, Artificial Sequence
  Description of Artificial Sequence: Synthetic oligonucleotide
ccaagggacacaccagacc

SEQ ID NO: 2907553 - RNA, 19 nt, Artificial Sequence
  Description of Artificial Sequence: Synthetic oligonucleotide
gcuaugaaggucaguuccc

SEQ ID NO: 2907554 - RNA, 19 nt, Artificial Sequence
  Description of Artificial Sequence: Synthetic oligonucleotide
augugaucccaaucuucau

SEQ ID NO: 2907555 - RNA, 19 nt, Artificial Sequence
  Description of Artificial Sequence: Synthetic oligonucleotide
accagaccacaagacuauc

SEQ ID NO: 2907556 - RNA, 19 nt, Artificial Sequence
  Description of Artificial Sequence: Synthetic oligonucleotide
cuaugaaggucaguuccca

SEQ ID NO: 2907557 - RNA, 19 nt, Artificial Sequence
  Description of Artificial Sequence: Synthetic oligonucleotide
accagguucuucaugccau

SEQ ID NO: 2907558 - RNA, 19 nt, Artificial Sequence
  Description of Artificial Sequence: Synthetic oligonucleotide
ggaacauugcggcucucuc

SEQ ID NO: 2907559 - RNA, 19 nt, Artificial Sequence
  Description of Artificial Sequence: Synthetic oligonucleotide
acaggaggagaaacuguca

SEQ ID NO: 2907560 - RNA, 19 nt, Artificial Sequence
  Description of Artificial Sequence: Synthetic oligonucleotide
caccuuucugggccaauuc

SEQ ID NO: 2907561 - RNA, 19 nt, Artificial Sequence
  Description of Artificial Sequence: Synthetic oligonucleotide
ccaaggcccaacuuuguuc

SEQ ID NO: 2907562 - RNA, 19 nt, Artificial Sequence
  Description of Artificial Sequence: Synthetic oligonucleotide
ugcauccaugugaucccaa

SEQ ID NO: 2907563 - RNA, 19 nt, Artificial Sequence
  Description of Artificial Sequence: Synthetic oligonucleotide
auucaucugcagacaggag

SEQ ID NO: 2907564 - RNA, 19 nt, Artificial Sequence
  Description of Artificial Sequence: Synthetic oligonucleotide
ucacaggcccaagggacac

SEQ ID NO: 2907565 - RNA, 19 nt, Artificial Sequence
  Description of Artificial Sequence: Synthetic oligonucleotide
auggaggagaucacauccu

SEQ ID NO: 2907566 - RNA, 19 nt, Artificial Sequence
  Description of Artificial Sequence: Synthetic oligonucleotide
gcaucuuccguuucaucuc

SEQ ID NO: 2907567 - RNA, 19 nt, Artificial Sequence
  Description of Artificial Sequence: Synthetic oligonucleotide
acucacagagguggcucuc

SEQ ID NO: 2907568 - RNA, 19 nt, Artificial Sequence
  Description of Artificial Sequence: Synthetic oligonucleotide
cuuaacaaguagaguaguu

SEQ ID NO: 2907569 - RNA, 19 nt, Artificial Sequence
  Description of Artificial Sequence: Synthetic oligonucleotide
acccugcucuccuccagug

SEQ ID NO: 2907570 - RNA, 19 nt, Artificial Sequence
  Description of Artificial Sequence: Synthetic oligonucleotide
ccaugugaucccaaucuuc

SEQ ID NO: 2907571 - RNA, 19 nt, Artificial Sequence
  Description of Artificial Sequence: Synthetic oligonucleotide
cucacaggcccaagggaca

SEQ ID NO: 2907572 - RNA, 19 nt, Artificial Sequence
  Description of Artificial Sequence: Synthetic oligonucleotide
guccauuuaaucagucuua

SEQ ID NO: 2907573 - RNA, 19 nt, Artificial Sequence
  Description of Artificial Sequence: Synthetic oligonucleotide
ugcacccugcucuccucca

SEQ ID NO: 2907574 - RNA, 19 nt, Artificial Sequence
  Description of Artificial Sequence: Synthetic oligonucleotide
cugcacccugcucuccucc

SEQ ID NO: 2907575 - RNA, 19 nt, Artificial Sequence
  Description of Artificial Sequence: Synthetic oligonucleotide
uucagcuaugaaggucagu

SEQ ID NO: 2907576 - RNA, 19 nt, Artificial Sequence
  Description of Artificial Sequence: Synthetic oligonucleotide
ucaguucccaaggcccaac

SEQ ID NO: 2907577 - RNA, 19 nt, Artificial Sequence
  Description of Artificial Sequence: Synthetic oligonucleotide
cagcuucggcgcgagaccc

SEQ ID NO: 2907578 - RNA, 19 nt, Artificial Sequence
  Description of Artificial Sequence: Synthetic oligonucleotide
auccucgcgcaucuuccgu

SEQ ID NO: 2907579 - RNA, 19 nt, Artificial Sequence
  Description of Artificial Sequence: Synthetic oligonucleotide
cuucccaaacaguuuuaua

SEQ ID NO: 2907580 - RNA, 19 nt, Artificial Sequence
  Description of Artificial Sequence: Synthetic oligonucleotide
gauccagcuucggcgcgag

SEQ ID NO: 2907581 - RNA, 19 nt, Artificial Sequence
  Description of Artificial Sequence: Synthetic oligonucleotide
gggccaauucaucugcaga

SEQ ID NO: 2907582 - RNA, 19 nt, Artificial Sequence
  Description of Artificial Sequence: Synthetic oligonucleotide
auugcggcucucucuccaa

SEQ ID NO: 2907583 - RNA, 19 nt, Artificial Sequence
  Description of Artificial Sequence: Synthetic oligonucleotide
cauugcggcucucucucca

SEQ ID NO: 2907584 - RNA, 19 nt, Artificial Sequence
  Description of Artificial Sequence: Synthetic oligonucleotide
caccagguucuucaugcca

SEQ ID NO: 2907585 - RNA, 19 nt, Artificial Sequence
  Description of Artificial Sequence: Synthetic oligonucleotide
gcuguccaacuucuuuaag

SEQ ID NO: 2907586 - RNA, 19 nt, Artificial Sequence
  Description of Artificial Sequence: Synthetic oligonucleotide
uucaucuccucgggaucca

SEQ ID NO: 2907587 - RNA, 19 nt, Artificial Sequence
  Description of Artificial Sequence: Synthetic oligonucleotide
cacaccagaccacaagacu

SEQ ID NO: 2907588 - RNA, 19 nt, Artificial Sequence
  Description of Artificial Sequence: Synthetic oligonucleotide
uugcggcucucucuccaaa

SEQ ID NO: 2907589 - RNA, 19 nt, Artificial Sequence
  Description of Artificial Sequence: Synthetic oligonucleotide
uccucgcgcaucuuccguu

SEQ ID NO: 2907590 - RNA, 19 nt, Artificial Sequence
  Description of Artificial Sequence: Synthetic oligonucleotide
guccaacuucuuuaagaua

SEQ ID NO: 2907591 - RNA, 19 nt, Artificial Sequence
  Description of Artificial Sequence: Synthetic oligonucleotide
gagguggcucucacaggcc

SEQ ID NO: 2907592 - RNA, 19 nt, Artificial Sequence
  Description of Artificial Sequence: Synthetic oligonucleotide
cugcacuucccaaacaguu

SEQ ID NO: 2907593 - RNA, 19 nt, Artificial Sequence
  Description of Artificial Sequence: Synthetic oligonucleotide
cgugacucgcagcagggcc

SEQ ID NO: 2907594 - RNA, 19 nt, Artificial Sequence
  Description of Artificial Sequence: Synthetic oligonucleotide
acucgcagcagggccacgu

SEQ ID NO: 2907595 - RNA, 19 nt, Artificial Sequence
  Description of Artificial Sequence: Synthetic oligonucleotide
ccucgauccggaacauugc

SEQ ID NO: 2907596 - RNA, 19 nt, Artificial Sequence
  Description of Artificial Sequence: Synthetic oligonucleotide
gguucuucaugccaugcau

SEQ ID NO: 2907597 - RNA, 19 nt, Artificial Sequence
  Description of Artificial Sequence: Synthetic oligonucleotide
ggagaaacugucaccaggu

SEQ ID NO: 2907598 - RNA, 19 nt, Artificial Sequence
  Description of Artificial Sequence: Synthetic oligonucleotide
cuucggcgcgagacccucg

SEQ ID NO: 2907599 - RNA, 19 nt, Artificial Sequence
  Description of Artificial Sequence: Synthetic oligonucleotide
ugcaggcgcugcacccugc

SEQ ID NO: 2907600 - RNA, 19 nt, Artificial Sequence
  Description of Artificial Sequence: Synthetic oligonucleotide
ucuccucgggauccagcuu

SEQ ID NO: 2907601 - RNA, 19 nt, Artificial Sequence
  Description of Artificial Sequence: Synthetic oligonucleotide
gcggcucucucuccaaagc

SEQ ID NO: 2907602 - RNA, 19 nt, Artificial Sequence
  Description of Artificial Sequence: Synthetic oligonucleotide
ugacucgcagcagggccac

SEQ ID NO: 2907603 - RNA, 19 nt, Artificial Sequence
  Description of Artificial Sequence: Synthetic oligonucleotide
gauccggaacauugcggcu

SEQ ID NO: 2907604 - RNA, 19 nt, Artificial Sequence
  Description of Artificial Sequence: Synthetic oligonucleotide
aaggcccaacuuuguucuu

SEQ ID NO: 2907605 - RNA, 19 nt, Artificial Sequence
  Description of Artificial Sequence: Synthetic oligonucleotide
gugacucgcagcagggcca

SEQ ID NO: 2907606 - RNA, 19 nt, Artificial Sequence
  Description of Artificial Sequence: Synthetic oligonucleotide
augcauccaugugauccca

SEQ ID NO: 2907607 - RNA, 19 nt, Artificial Sequence
  Description of Artificial Sequence: Synthetic oligonucleotide
agaucacauccucgcgcau

SEQ ID NO: 2907608 - RNA, 19 nt, Artificial Sequence
  Description of Artificial Sequence: Synthetic oligonucleotide
ggcgugacucgcagcaggg

SEQ ID NO: 2907609 - RNA, 19 nt, Artificial Sequence
  Description of Artificial Sequence: Synthetic oligonucleotide
aaacugucaccagguucuu

SEQ ID NO: 2907610 - RNA, 19 nt, Artificial Sequence
  Description of Artificial Sequence: Synthetic oligonucleotide
cagaccacaagacuaucuu

SEQ ID NO: 2907611 - RNA, 19 nt, Artificial Sequence
  Description of Artificial Sequence: Synthetic oligonucleotide
acaccuuucugggccaauu

SEQ ID NO: 2907612 - RNA, 19 nt, Artificial Sequence
  Description of Artificial Sequence: Synthetic oligonucleotide
gggauccagcuucggcgcg

SEQ ID NO: 2907613 - RNA, 19 nt, Artificial Sequence
  Description of Artificial Sequence: Synthetic oligonucleotide
auggcgugacucgcagcag

SEQ ID NO: 2907614 - RNA, 19 nt, Artificial Sequence
  Description of Artificial Sequence: Synthetic oligonucleotide
ccagcuucggcgcgagacc

SEQ ID NO: 2907615 - RNA, 19 nt, Artificial Sequence
  Description of Artificial Sequence: Synthetic oligonucleotide
gcccaagggacacaccaga

SEQ ID NO: 2907616 - RNA, 19 nt, Artificial Sequence
  Description of Artificial Sequence: Synthetic oligonucleotide
cccaagggacacaccagac

SEQ ID NO: 2907617 - RNA, 19 nt, Artificial Sequence
  Description of Artificial Sequence: Synthetic oligonucleotide
caacuucuuuaagauauau

SEQ ID NO: 2907618 - RNA, 19 nt, Artificial Sequence
  Description of Artificial Sequence: Synthetic oligonucleotide
guuccgaauggaggagauc

SEQ ID NO: 2907619 - RNA, 19 nt, Artificial Sequence
  Description of Artificial Sequence: Synthetic oligonucleotide
ccauuuaaucagucuuaca

SEQ ID NO: 2907620 - RNA, 19 nt, Artificial Sequence
  Description of Artificial Sequence: Synthetic oligonucleotide
cugggccaauucaucugca

SEQ ID NO: 2907621 - RNA, 19 nt, Artificial Sequence
  Description of Artificial Sequence: Synthetic oligonucleotide
aggcccaacuuuguucuua

SEQ ID NO: 2907622 - RNA, 19 nt, Artificial Sequence
  Description of Artificial Sequence: Synthetic oligonucleotide
gagaaacugucaccagguu

SEQ ID NO: 2907623 - RNA, 19 nt, Artificial Sequence
  Description of Artificial Sequence: Synthetic oligonucleotide
cugcaggcgcugcacccug

SEQ ID NO: 2907624 - RNA, 19 nt, Artificial Sequence
  Description of Artificial Sequence: Synthetic oligonucleotide
caggcccaagggacacacc

SEQ ID NO: 2907625 - RNA, 19 nt, Artificial Sequence
  Description of Artificial Sequence: Synthetic oligonucleotide
gccaauucaucugcagaca

SEQ ID NO: 2907626 - RNA, 19 nt, Artificial Sequence
  Description of Artificial Sequence: Synthetic oligonucleotide
cucacagagguggcucuca

SEQ ID NO: 2907627 - RNA, 19 nt, Artificial Sequence
  Description of Artificial Sequence: Synthetic oligonucleotide
cucgcgcaucuuccguuuc

SEQ ID NO: 2907628 - RNA, 19 nt, Artificial Sequence
  Description of Artificial Sequence: Synthetic oligonucleotide
caccagaccacaagacuau

SEQ ID NO: 2907629 - RNA, 19 nt, Artificial Sequence
  Description of Artificial Sequence: Synthetic oligonucleotide
uacaccuuucugggccaau

SEQ ID NO: 2907630 - RNA, 19 nt, Artificial Sequence
  Description of Artificial Sequence: Synthetic oligonucleotide
cacuucccaaacaguuuua

SEQ ID NO: 2907631 - RNA, 19 nt, Artificial Sequence
  Description of Artificial Sequence: Synthetic oligonucleotide
cggcucucucuccaaagcc

SEQ ID NO: 2907632 - RNA, 19 nt, Artificial Sequence
  Description of Artificial Sequence: Synthetic oligonucleotide
ggucaguucccaaggccca

SEQ ID NO: 2907633 - RNA, 19 nt, Artificial Sequence
  Description of Artificial Sequence: Synthetic oligonucleotide
ggcccaacuuuguucuuaa

SEQ ID NO: 2907634 - RNA, 19 nt, Artificial Sequence
  Description of Artificial Sequence: Synthetic oligonucleotide
gcacuucccaaacaguuuu

SEQ ID NO: 2907635 - RNA, 19 nt, Artificial Sequence
  Description of Artificial Sequence: Synthetic oligonucleotide
ggcccaagggacacaccag

SEQ ID NO: 2907636 - RNA, 19 nt, Artificial Sequence
  Description of Artificial Sequence: Synthetic oligonucleotide
cgggauccagcuucggcgc

SEQ ID NO: 2907637 - RNA, 19 nt, Artificial Sequence
  Description of Artificial Sequence: Synthetic oligonucleotide
cagcagggccacguagaug

SEQ ID NO: 2907638 - RNA, 19 nt, Artificial Sequence
  Description of Artificial Sequence: Synthetic oligonucleotide
cccugcucuccuccagugg

SEQ ID NO: 2907639 - RNA, 19 nt, Artificial Sequence
  Description of Artificial Sequence: Synthetic oligonucleotide
cacucacagagguggcucu

SEQ ID NO: 2907640 - RNA, 19 nt, Artificial Sequence
  Description of Artificial Sequence: Synthetic oligonucleotide
cccaaacaguuuuauauuu

SEQ ID NO: 2907641 - RNA, 19 nt, Artificial Sequence
  Description of Artificial Sequence: Synthetic oligonucleotide
auaugcuguccaacuucuu

SEQ ID NO: 2907642 - RNA, 19 nt, Artificial Sequence
  Description of Artificial Sequence: Synthetic oligonucleotide
gccacguagaugaggaagu

SEQ ID NO: 2907643 - RNA, 19 nt, Artificial Sequence
  Description of Artificial Sequence: Synthetic oligonucleotide
gcagacaggaggagaaacu

SEQ ID NO: 2907644 - RNA, 19 nt, Artificial Sequence
  Description of Artificial Sequence: Synthetic oligonucleotide
ucggcgcgagacccucgau

SEQ ID NO: 2907645 - RNA, 19 nt, Artificial Sequence
  Description of Artificial Sequence: Synthetic oligonucleotide
gacucgcagcagggccacg

SEQ ID NO: 2907646 - RNA, 19 nt, Artificial Sequence
  Description of Artificial Sequence: Synthetic oligonucleotide
cgcgagacccucgauccgg

SEQ ID NO: 2907647 - RNA, 19 nt, Artificial Sequence
  Description of Artificial Sequence: Synthetic oligonucleotide
gcgcgagacccucgauccg

SEQ ID NO: 2907648 - RNA, 19 nt, Artificial Sequence
  Description of Artificial Sequence: Synthetic oligonucleotide
gucaguucccaaggcccaa

SEQ ID NO: 2907649 - RNA, 19 nt, Artificial Sequence
  Description of Artificial Sequence: Synthetic oligonucleotide
ccgaauggaggagaucaca

SEQ ID NO: 2907650 - RNA, 19 nt, Artificial Sequence
  Description of Artificial Sequence: Synthetic oligonucleotide
guggcucucacaggcccaa

SEQ ID NO: 2907651 - RNA, 19 nt, Artificial Sequence
  Description of Artificial Sequence: Synthetic oligonucleotide
caggcgcugcacccugcuc

SEQ ID NO: 2907652 - RNA, 19 nt, Artificial Sequence
  Description of Artificial Sequence: Synthetic oligonucleotide
ccagaccacaagacuaucu

SEQ ID NO: 2907653 - RNA, 19 nt, Artificial Sequence
  Description of Artificial Sequence: Synthetic oligonucleotide
ggcgcugcacccugcucuc

SEQ ID NO: 2907654 - RNA, 19 nt, Artificial Sequence
  Description of Artificial Sequence: Synthetic oligonucleotide
ccaacuucuuuaagauaua

SEQ ID NO: 2907655 - RNA, 19 nt, Artificial Sequence
  Description of Artificial Sequence: Synthetic oligonucleotide
gcauccaugugaucccaau

SEQ ID NO: 2907656 - RNA, 19 nt, Artificial Sequence
  Description of Artificial Sequence: Synthetic oligonucleotide
gcccaacuuuguucuuaac

SEQ ID NO: 2907657 - RNA, 19 nt, Artificial Sequence
  Description of Artificial Sequence: Synthetic oligonucleotide
caguucccaaggcccaacu

SEQ ID NO: 2907658 - RNA, 19 nt, Artificial Sequence
  Description of Artificial Sequence: Synthetic oligonucleotide
cguuucaucuccucgggau

SEQ ID NO: 2907659 - RNA, 19 nt, Artificial Sequence
  Description of Artificial Sequence: Synthetic oligonucleotide
agcuucggcgcgagacccu

SEQ ID NO: 2907660 - RNA, 19 nt, Artificial Sequence
  Description of Artificial Sequence: Synthetic oligonucleotide
cugcagacaggaggagaaa

SEQ ID NO: 2907661 - RNA, 19 nt, Artificial Sequence
  Description of Artificial Sequence: Synthetic oligonucleotide
ggauccagcuucggcgcga

SEQ ID NO: 2907662 - RNA, 19 nt, Artificial Sequence
  Description of Artificial Sequence: Synthetic oligonucleotide
gcgcaucuuccguuucauc

SEQ ID NO: 2907663 - RNA, 19 nt, Artificial Sequence
  Description of Artificial Sequence: Synthetic oligonucleotide
gcugcacccugcucuccuc

SEQ ID NO: 2907664 - RNA, 19 nt, Artificial Sequence
  Description of Artificial Sequence: Synthetic oligonucleotide
cgaauggaggagaucacau

SEQ ID NO: 2907665 - RNA, 19 nt, Artificial Sequence
  Description of Artificial Sequence: Synthetic oligonucleotide
gcgugacucgcagcagggc

SEQ ID NO: 2907666 - RNA, 19 nt, Artificial Sequence
  Description of Artificial Sequence: Synthetic oligonucleotide
cugucaccagguucuucau

SEQ ID NO: 2907667 - RNA, 19 nt, Artificial Sequence
  Description of Artificial Sequence: Synthetic oligonucleotide
cucgcagcagggccacgua

SEQ ID NO: 2907668 - RNA, 19 nt, Artificial Sequence
  Description of Artificial Sequence: Synthetic oligonucleotide
cgcagcagggccacguaga

SEQ ID NO: 2907669 - RNA, 19 nt, Artificial Sequence
  Description of Artificial Sequence: Synthetic oligonucleotide
gcuucggcgcgagacccuc

SEQ ID NO: 2907670 - RNA, 19 nt, Artificial Sequence
  Description of Artificial Sequence: Synthetic oligonucleotide
cacccugcucuccuccagu

SEQ ID NO: 2907671 - RNA, 19 nt, Artificial Sequence
  Description of Artificial Sequence: Synthetic oligonucleotide
gccaugcauccaugugauc

SEQ ID NO: 2907672 - RNA, 19 nt, Artificial Sequence
  Description of Artificial Sequence: Synthetic oligonucleotide
acccucgauccggaacauu

SEQ ID NO: 2907673 - RNA, 19 nt, Artificial Sequence
  Description of Artificial Sequence: Synthetic oligonucleotide
cacaggcccaagggacaca

SEQ ID NO: 2907674 - RNA, 19 nt, Artificial Sequence
  Description of Artificial Sequence: Synthetic oligonucleotide
gggacacaccagaccacaa

SEQ ID NO: 2907675 - RNA, 19 nt, Artificial Sequence
  Description of Artificial Sequence: Synthetic oligonucleotide
cggcgcgagacccucgauc

SEQ ID NO: 2907676 - RNA, 19 nt, Artificial Sequence
  Description of Artificial Sequence: Synthetic oligonucleotide
gcagcagggccacguagau

SEQ ID NO: 2907677 - RNA, 19 nt, Artificial Sequence
  Description of Artificial Sequence: Synthetic oligonucleotide
ccguuucaucuccucggga

SEQ ID NO: 2907678 - RNA, 19 nt, Artificial Sequence
  Description of Artificial Sequence: Synthetic oligonucleotide
ccucgggauccagcuucgg

SEQ ID NO: 2907679 - RNA, 19 nt, Artificial Sequence
  Description of Artificial Sequence: Synthetic oligonucleotide
gacccucgauccggaacau

SEQ ID NO: 2907680 - RNA, 19 nt, Artificial Sequence
  Description of Artificial Sequence: Synthetic oligonucleotide
gcgagacccucgauccgga

SEQ ID NO: 2907681 - RNA, 19 nt, Artificial Sequence
  Description of Artificial Sequence: Synthetic oligonucleotide
gcaggcgcugcacccugcu

SEQ ID NO: 2907682 - RNA, 19 nt, Artificial Sequence
  Description of Artificial Sequence: Synthetic oligonucleotide
gcgcugcacccugcucucc

SEQ ID NO: 2907683 - RNA, 19 nt, Artificial Sequence
  Description of Artificial Sequence: Synthetic oligonucleotide
cccaaggcccaacuuuguu

SEQ ID NO: 2907684 - RNA, 19 nt, Artificial Sequence
  Description of Artificial Sequence: Synthetic oligonucleotide
ccugcaggcgcugcacccu

SEQ ID NO: 2907685 - RNA, 19 nt, Artificial Sequence
  Description of Artificial Sequence: Synthetic oligonucleotide
ccucgcgcaucuuccguuu

SEQ ID NO: 2907686 - RNA, 19 nt, Artificial Sequence
  Description of Artificial Sequence: Synthetic oligonucleotide
cggaacauugcggcucucu

SEQ ID NO: 2907687 - RNA, 19 nt, Artificial Sequence
  Description of Artificial Sequence: Synthetic oligonucleotide
cgagacccucgauccggaa

SEQ ID NO: 2907688 - RNA, 19 nt, Artificial Sequence
  Description of Artificial Sequence: Synthetic oligonucleotide
ccggaacauugcggcucuc

SEQ ID NO: 2907689 - RNA, 19 nt, Artificial Sequence
  Description of Artificial Sequence: Synthetic oligonucleotide
cgcugcacccugcucuccu

SEQ ID NO: 2907690 - RNA, 19 nt, Artificial Sequence
  Description of Artificial Sequence: Synthetic oligonucleotide
cgcgcaucuuccguuucau

SEQ ID NO: 2907691 - RNA, 19 nt, Artificial Sequence
  Description of Artificial Sequence: Synthetic oligonucleotide
aaacagaccaaacagaaag

SEQ ID NO: 2907692 - RNA, 19 nt, Artificial Sequence
  Description of Artificial Sequence: Synthetic oligonucleotide
accacuaaaacauacgugc

SEQ ID NO: 2907693 - RNA, 19 nt, Artificial Sequence
  Description of Artificial Sequence: Synthetic oligonucleotide
aaggagaauacauacgagc

SEQ ID NO: 2907694 - RNA, 19 nt, Artificial Sequence
  Description of Artificial Sequence: Synthetic oligonucleotide
aaaacauacgugccaaugg

SEQ ID NO: 2907695 - RNA, 19 nt, Artificial Sequence
  Description of Artificial Sequence: Synthetic oligonucleotide
ucuuucaugccaacgaugg

SEQ ID NO: 2907696 - RNA, 19 nt, Artificial Sequence
  Description of Artificial Sequence: Synthetic oligonucleotide
ucagguacugcaaacagag

SEQ ID NO: 2907697 - RNA, 19 nt, Artificial Sequence
  Description of Artificial Sequence: Synthetic oligonucleotide
ugauauuuagcucuucgag

SEQ ID NO: 2907698 - RNA, 19 nt, Artificial Sequence
  Description of Artificial Sequence: Synthetic oligonucleotide
aaagaagaagaugaagagg

SEQ ID NO: 2907699 - RNA, 19 nt, Artificial Sequence
  Description of Artificial Sequence: Synthetic oligonucleotide
uccguugagcauuagaagg

SEQ ID NO: 2907700 - RNA, 19 nt, Artificial Sequence
  Description of Artificial Sequence: Synthetic oligonucleotide
auacauacgagccauaggu

SEQ ID NO: 2907701 - RNA, 19 nt, Artificial Sequence
  Description of Artificial Sequence: Synthetic oligonucleotide
aauggaagcauaugcccac

SEQ ID NO: 2907702 - RNA, 19 nt, Artificial Sequence
  Description of Artificial Sequence: Synthetic oligonucleotide
aacagaaagacagacacca

SEQ ID NO: 2907703 - RNA, 19 nt, Artificial Sequence
  Description of Artificial Sequence: Synthetic oligonucleotide
gauauuuagcucuucgagc

SEQ ID NO: 2907704 - RNA, 19 nt, Artificial Sequence
  Description of Artificial Sequence: Synthetic oligonucleotide
uuacaaaacagaccaaaca

SEQ ID NO: 2907705 - RNA, 19 nt, Artificial Sequence
  Description of Artificial Sequence: Synthetic oligonucleotide
augaagaggagacagagca

SEQ ID NO: 2907706 - RNA, 19 nt, Artificial Sequence
  Description of Artificial Sequence: Synthetic oligonucleotide
aauacauacgagccauagg

SEQ ID NO: 2907707 - RNA, 19 nt, Artificial Sequence
  Description of Artificial Sequence: Synthetic oligonucleotide
agugauauuuagcucuucg

SEQ ID NO: 2907708 - RNA, 19 nt, Artificial Sequence
  Description of Artificial Sequence: Synthetic oligonucleotide
agguacugcaaacagagag

SEQ ID NO: 2907709 - RNA, 19 nt, Artificial Sequence
  Description of Artificial Sequence: Synthetic oligonucleotide
auauuuagcucuucgagcu

SEQ ID NO: 2907710 - RNA, 19 nt, Artificial Sequence
  Description of Artificial Sequence: Synthetic oligonucleotide
aacagagagucugaggugg

SEQ ID NO: 2907711 - RNA, 19 nt, Artificial Sequence
  Description of Artificial Sequence: Synthetic oligonucleotide
gaaacugaagugcaaggcc

SEQ ID NO: 2907712 - RNA, 19 nt, Artificial Sequence
  Description of Artificial Sequence: Synthetic oligonucleotide
aggagaauacauacgagcc

SEQ ID NO: 2907713 - RNA, 19 nt, Artificial Sequence
  Description of Artificial Sequence: Synthetic oligonucleotide
ucuucgagcuuccugagca

SEQ ID NO: 2907714 - RNA, 19 nt, Artificial Sequence
  Description of Artificial Sequence: Synthetic oligonucleotide
agacagacaccacuaaaac

SEQ ID NO: 2907715 - RNA, 19 nt, Artificial Sequence
  Description of Artificial Sequence: Synthetic oligonucleotide
aaacauacgugccaaugga

SEQ ID NO: 2907716 - RNA, 19 nt, Artificial Sequence
  Description of Artificial Sequence: Synthetic oligonucleotide
aaagucaggcucugugugg

SEQ ID NO: 2907717 - RNA, 19 nt, Artificial Sequence
  Description of Artificial Sequence: Synthetic oligonucleotide
ugccaauggaagcauaugc

SEQ ID NO: 2907718 - RNA, 19 nt, Artificial Sequence
  Description of Artificial Sequence: Synthetic oligonucleotide
caggaaggcacccaaagcg

SEQ ID NO: 2907719 - RNA, 19 nt, Artificial Sequence
  Description of Artificial Sequence: Synthetic oligonucleotide
gaagcauaugcccacagca

SEQ ID NO: 2907720 - RNA, 19 nt, Artificial Sequence
  Description of Artificial Sequence: Synthetic oligonucleotide
ucugagguggcuucagagg

SEQ ID NO: 2907721 - RNA, 19 nt, Artificial Sequence
  Description of Artificial Sequence: Synthetic oligonucleotide
aauuuagccagcaggggag

SEQ ID NO: 2907722 - RNA, 19 nt, Artificial Sequence
  Description of Artificial Sequence: Synthetic oligonucleotide
aaacagaaagacagacacc

SEQ ID NO: 2907723 - RNA, 19 nt, Artificial Sequence
  Description of Artificial Sequence: Synthetic oligonucleotide
auuagaaggucaaagucag

SEQ ID NO: 2907724 - RNA, 19 nt, Artificial Sequence
  Description of Artificial Sequence: Synthetic oligonucleotide
accaaacagaaagacagac

SEQ ID NO: 2907725 - RNA, 19 nt, Artificial Sequence
  Description of Artificial Sequence: Synthetic oligonucleotide
uaaaacauacgugccaaug

SEQ ID NO: 2907726 - RNA, 19 nt, Artificial Sequence
  Description of Artificial Sequence: Synthetic oligonucleotide
ugugguucugaguggaugc

SEQ ID NO: 2907727 - RNA, 19 nt, Artificial Sequence
  Description of Artificial Sequence: Synthetic oligonucleotide
cauuagaaggucaaaguca

SEQ ID NO: 2907728 - RNA, 19 nt, Artificial Sequence
  Description of Artificial Sequence: Synthetic oligonucleotide
acagaccaaacagaaagac

SEQ ID NO: 2907729 - RNA, 19 nt, Artificial Sequence
  Description of Artificial Sequence: Synthetic oligonucleotide
acugcaaacagagagucug

SEQ ID NO: 2907730 - RNA, 19 nt, Artificial Sequence
  Description of Artificial Sequence: Synthetic oligonucleotide
agcauuagaaggucaaagu

SEQ ID NO: 2907731 - RNA, 19 nt, Artificial Sequence
  Description of Artificial Sequence: Synthetic oligonucleotide
acauacgagccauagguca

SEQ ID NO: 2907732 - RNA, 19 nt, Artificial Sequence
  Description of Artificial Sequence: Synthetic oligonucleotide
gaauacauacgagccauag

SEQ ID NO: 2907733 - RNA, 19 nt, Artificial Sequence
  Description of Artificial Sequence: Synthetic oligonucleotide
acagacaccacuaaaacau

SEQ ID NO: 2907734 - RNA, 19 nt, Artificial Sequence
  Description of Artificial Sequence: Synthetic oligonucleotide
augcugauguuccccaggc

SEQ ID NO: 2907735 - RNA, 19 nt, Artificial Sequence
  Description of Artificial Sequence: Synthetic oligonucleotide
aaacagagagucugaggug

SEQ ID NO: 2907736 - RNA, 19 nt, Artificial Sequence
  Description of Artificial Sequence: Synthetic oligonucleotide
gaaggucaaagucaggcuc

SEQ ID NO: 2907737 - RNA, 19 nt, Artificial Sequence
  Description of Artificial Sequence: Synthetic oligonucleotide
acaccacuaaaacauacgu

SEQ ID NO: 2907738 - RNA, 19 nt, Artificial Sequence
  Description of Artificial Sequence: Synthetic oligonucleotide
uuucaugccaacgaugggu

SEQ ID NO: 2907739 - RNA, 19 nt, Artificial Sequence
  Description of Artificial Sequence: Synthetic oligonucleotide
aaggcacccaaagcgaaac

SEQ ID NO: 2907740 - RNA, 19 nt, Artificial Sequence
  Description of Artificial Sequence: Synthetic oligonucleotide
uucaugccaacgaugggug

SEQ ID NO: 2907741 - RNA, 19 nt, Artificial Sequence
  Description of Artificial Sequence: Synthetic oligonucleotide
ucagaggauccguugagca

SEQ ID NO: 2907742 - RNA, 19 nt, Artificial Sequence
  Description of Artificial Sequence: Synthetic oligonucleotide
cauacgugccaauggaagc

SEQ ID NO: 2907743 - RNA, 19 nt, Artificial Sequence
  Description of Artificial Sequence: Synthetic oligonucleotide
gagcauuagaaggucaaag

SEQ ID NO: 2907744 - RNA, 19 nt, Artificial Sequence
  Description of Artificial Sequence: Synthetic oligonucleotide
gaugcugauguuccccagg

SEQ ID NO: 2907745 - RNA, 19 nt, Artificial Sequence
  Description of Artificial Sequence: Synthetic oligonucleotide
gacaccacuaaaacauacg

SEQ ID NO: 2907746 - RNA, 19 nt, Artificial Sequence
  Description of Artificial Sequence: Synthetic oligonucleotide
aaacugaagugcaaggccu

SEQ ID NO: 2907747 - RNA, 19 nt, Artificial Sequence
  Description of Artificial Sequence: Synthetic oligonucleotide
ugcaaggccugcaugugag

SEQ ID NO: 2907748 - RNA, 19 nt, Artificial Sequence
  Description of Artificial Sequence: Synthetic oligonucleotide
caaaacagaccaaacagaa

SEQ ID NO: 2907749 - RNA, 19 nt, Artificial Sequence
  Description of Artificial Sequence: Synthetic oligonucleotide
aaggccugcaugugagggg

SEQ ID NO: 2907750 - RNA, 19 nt, Artificial Sequence
  Description of Artificial Sequence: Synthetic oligonucleotide
agcucuucgagcuuccuga

SEQ ID NO: 2907751 - RNA, 19 nt, Artificial Sequence
  Description of Artificial Sequence: Synthetic oligonucleotide
gucaaagucaggcucugug

SEQ ID NO: 2907752 - RNA, 19 nt, Artificial Sequence
  Description of Artificial Sequence: Synthetic oligonucleotide
uugagcauuagaaggucaa

SEQ ID NO: 2907753 - RNA, 19 nt, Artificial Sequence
  Description of Artificial Sequence: Synthetic oligonucleotide
ggccaauuuagccagcagg

SEQ ID NO: 2907754 - RNA, 19 nt, Artificial Sequence
  Description of Artificial Sequence: Synthetic oligonucleotide
ucugugugguucugagugg

SEQ ID NO: 2907755 - RNA, 19 nt, Artificial Sequence
  Description of Artificial Sequence: Synthetic oligonucleotide
auccguugagcauuagaag

SEQ ID NO: 2907756 - RNA, 19 nt, Artificial Sequence
  Description of Artificial Sequence: Synthetic oligonucleotide
gacagacaccacuaaaaca

SEQ ID NO: 2907757 - RNA, 19 nt, Artificial Sequence
  Description of Artificial Sequence: Synthetic oligonucleotide
caaacagagagucugaggu

SEQ ID NO: 2907758 - RNA, 19 nt, Artificial Sequence
  Description of Artificial Sequence: Synthetic oligonucleotide
aguggaugcugauguuccc

SEQ ID NO: 2907759 - RNA, 19 nt, Artificial Sequence
  Description of Artificial Sequence: Synthetic oligonucleotide
gauccguugagcauuagaa

SEQ ID NO: 2907760 - RNA, 19 nt, Artificial Sequence
  Description of Artificial Sequence: Synthetic oligonucleotide
gaaggagaauacauacgag

SEQ ID NO: 2907761 - RNA, 19 nt, Artificial Sequence
  Description of Artificial Sequence: Synthetic oligonucleotide
caaagucaggcucugugug

SEQ ID NO: 2907762 - RNA, 19 nt, Artificial Sequence
  Description of Artificial Sequence: Synthetic oligonucleotide
aagcauaugcccacagcag

SEQ ID NO: 2907763 - RNA, 19 nt, Artificial Sequence
  Description of Artificial Sequence: Synthetic oligonucleotide
uaugcccacagcagguuca

SEQ ID NO: 2907764 - RNA, 19 nt, Artificial Sequence
  Description of Artificial Sequence: Synthetic oligonucleotide
agaggagacagagcagggc

SEQ ID NO: 2907765 - RNA, 19 nt, Artificial Sequence
  Description of Artificial Sequence: Synthetic oligonucleotide
agacaccacuaaaacauac

SEQ ID NO: 2907766 - RNA, 19 nt, Artificial Sequence
  Description of Artificial Sequence: Synthetic oligonucleotide
acuaaaacauacgugccaa

SEQ ID NO: 2907767 - RNA, 19 nt, Artificial Sequence
  Description of Artificial Sequence: Synthetic oligonucleotide
gugaggggcuccuucaucc

SEQ ID NO: 2907768 - RNA, 19 nt, Artificial Sequence
  Description of Artificial Sequence: Synthetic oligonucleotide
acauacgugccaauggaag

SEQ ID NO: 2907769 - RNA, 19 nt, Artificial Sequence
  Description of Artificial Sequence: Synthetic oligonucleotide
auaugcccacagcagguuc

SEQ ID NO: 2907770 - RNA, 19 nt, Artificial Sequence
  Description of Artificial Sequence: Synthetic oligonucleotide
caccacuaaaacauacgug

SEQ ID NO: 2907771 - RNA, 19 nt, Artificial Sequence
  Description of Artificial Sequence: Synthetic oligonucleotide
uuuagcucuucgagcuucc

SEQ ID NO: 2907772 - RNA, 19 nt, Artificial Sequence
  Description of Artificial Sequence: Synthetic oligonucleotide
agcagguucauguccucag

SEQ ID NO: 2907773 - RNA, 19 nt, Artificial Sequence
  Description of Artificial Sequence: Synthetic oligonucleotide
gucugagguggcuucagag

SEQ ID NO: 2907774 - RNA, 19 nt, Artificial Sequence
  Description of Artificial Sequence: Synthetic oligonucleotide
agcgaaacugaagugcaag

SEQ ID NO: 2907775 - RNA, 19 nt, Artificial Sequence
  Description of Artificial Sequence: Synthetic oligonucleotide
agccauaggucaccucggc

SEQ ID NO: 2907776 - RNA, 19 nt, Artificial Sequence
  Description of Artificial Sequence: Synthetic oligonucleotide
ggcgaaggagaauacauac

SEQ ID NO: 2907777 - RNA, 19 nt, Artificial Sequence
  Description of Artificial Sequence: Synthetic oligonucleotide
gaguggaugcugauguucc

SEQ ID NO: 2907778 - RNA, 19 nt, Artificial Sequence
  Description of Artificial Sequence: Synthetic oligonucleotide
ccaauggaagcauaugccc

SEQ ID NO: 2907779 - RNA, 19 nt, Artificial Sequence
  Description of Artificial Sequence: Synthetic oligonucleotide
uggaagcauaugcccacag

SEQ ID NO: 2907780 - RNA, 19 nt, Artificial Sequence
  Description of Artificial Sequence: Synthetic oligonucleotide
cauaggucaccucggcucc

SEQ ID NO: 2907781 - RNA, 19 nt, Artificial Sequence
  Description of Artificial Sequence: Synthetic oligonucleotide
aacagaccaaacagaaaga

SEQ ID NO: 2907782 - RNA, 19 nt, Artificial Sequence
  Description of Artificial Sequence: Synthetic oligonucleotide
uccccaggccaauuuagcc

SEQ ID NO: 2907783 - RNA, 19 nt, Artificial Sequence
  Description of Artificial Sequence: Synthetic oligonucleotide
uacauacgagccauagguc

SEQ ID NO: 2907784 - RNA, 19 nt, Artificial Sequence
  Description of Artificial Sequence: Synthetic oligonucleotide
ugcaaacagagagucugag

SEQ ID NO: 2907785 - RNA, 19 nt, Artificial Sequence
  Description of Artificial Sequence: Synthetic oligonucleotide
gugauauuuagcucuucga

SEQ ID NO: 2907786 - RNA, 19 nt, Artificial Sequence
  Description of Artificial Sequence: Synthetic oligonucleotide
gccaauuuagccagcaggg

SEQ ID NO: 2907787 - RNA, 19 nt, Artificial Sequence
  Description of Artificial Sequence: Synthetic oligonucleotide
cauacgagccauaggucac

SEQ ID NO: 2907788 - RNA, 19 nt, Artificial Sequence
  Description of Artificial Sequence: Synthetic oligonucleotide
caauuuagccagcagggga

SEQ ID NO: 2907789 - RNA, 19 nt, Artificial Sequence
  Description of Artificial Sequence: Synthetic oligonucleotide
aagaggagacagagcaggg

SEQ ID NO: 2907790 - RNA, 19 nt, Artificial Sequence
  Description of Artificial Sequence: Synthetic oligonucleotide
aaggucaaagucaggcucu

SEQ ID NO: 2907791 - RNA, 19 nt, Artificial Sequence
  Description of Artificial Sequence: Synthetic oligonucleotide
gagcuuccugagcagauac

SEQ ID NO: 2907792 - RNA, 19 nt, Artificial Sequence
  Description of Artificial Sequence: Synthetic oligonucleotide
ugagcagauacuguggcuu

SEQ ID NO: 2907793 - RNA, 19 nt, Artificial Sequence
  Description of Artificial Sequence: Synthetic oligonucleotide
acugaagugcaaggccugc

SEQ ID NO: 2907794 - RNA, 19 nt, Artificial Sequence
  Description of Artificial Sequence: Synthetic oligonucleotide
gcauuagaaggucaaaguc

SEQ ID NO: 2907795 - RNA, 19 nt, Artificial Sequence
  Description of Artificial Sequence: Synthetic oligonucleotide
gguucauguccucagguac

SEQ ID NO: 2907796 - RNA, 19 nt, Artificial Sequence
  Description of Artificial Sequence: Synthetic oligonucleotide
auuuagccagcaggggagc

SEQ ID NO: 2907797 - RNA, 19 nt, Artificial Sequence
  Description of Artificial Sequence: Synthetic oligonucleotide
caauggaagcauaugccca

SEQ ID NO: 2907798 - RNA, 19 nt, Artificial Sequence
  Description of Artificial Sequence: Synthetic oligonucleotide
aggccugcaugugaggggc

SEQ ID NO: 2907799 - RNA, 19 nt, Artificial Sequence
  Description of Artificial Sequence: Synthetic oligonucleotide
cuucagaggauccguugag

SEQ ID NO: 2907800 - RNA, 19 nt, Artificial Sequence
  Description of Artificial Sequence: Synthetic oligonucleotide
auacgagccauaggucacc

SEQ ID NO: 2907801 - RNA, 19 nt, Artificial Sequence
  Description of Artificial Sequence: Synthetic oligonucleotide
aaaacagaccaaacagaaa

SEQ ID NO: 2907802 - RNA, 19 nt, Artificial Sequence
  Description of Artificial Sequence: Synthetic oligonucleotide
uuccccaggccaauuuagc

SEQ ID NO: 2907803 - RNA, 19 nt, Artificial Sequence
  Description of Artificial Sequence: Synthetic oligonucleotide
ucaugccaacgaugggugg

SEQ ID NO: 2907804 - RNA, 19 nt, Artificial Sequence
  Description of Artificial Sequence: Synthetic oligonucleotide
cuuucaugccaacgauggg

SEQ ID NO: 2907805 - RNA, 19 nt, Artificial Sequence
  Description of Artificial Sequence: Synthetic oligonucleotide
ugaguggaugcugauguuc

SEQ ID NO: 2907806 - RNA, 19 nt, Artificial Sequence
  Description of Artificial Sequence: Synthetic oligonucleotide
uagcucuucgagcuuccug

SEQ ID NO: 2907807 - RNA, 19 nt, Artificial Sequence
  Description of Artificial Sequence: Synthetic oligonucleotide
gcaaacagagagucugagg

SEQ ID NO: 2907808 - RNA, 19 nt, Artificial Sequence
  Description of Artificial Sequence: Synthetic oligonucleotide
uguccucagguacugcaaa

SEQ ID NO: 2907809 - RNA, 19 nt, Artificial Sequence
  Description of Artificial Sequence: Synthetic oligonucleotide
uucagaggauccguugagc

SEQ ID NO: 2907810 - RNA, 19 nt, Artificial Sequence
  Description of Artificial Sequence: Synthetic oligonucleotide
gacagagcagggcccagug

SEQ ID NO: 2907811 - RNA, 19 nt, Artificial Sequence
  Description of Artificial Sequence: Synthetic oligonucleotide
guacugcaaacagagaguc

SEQ ID NO: 2907812 - RNA, 19 nt, Artificial Sequence
  Description of Artificial Sequence: Synthetic oligonucleotide
aagucaggcucuguguggu

SEQ ID NO: 2907813 - RNA, 19 nt, Artificial Sequence
  Description of Artificial Sequence: Synthetic oligonucleotide
cacuaaaacauacgugcca

SEQ ID NO: 2907814 - RNA, 19 nt, Artificial Sequence
  Description of Artificial Sequence: Synthetic oligonucleotide
auacgugccaauggaagca

SEQ ID NO: 2907815 - RNA, 19 nt, Artificial Sequence
  Description of Artificial Sequence: Synthetic oligonucleotide
agaaagacagacaccacua

SEQ ID NO: 2907816 - RNA, 19 nt, Artificial Sequence
  Description of Artificial Sequence: Synthetic oligonucleotide
gaaagacagacaccacuaa

SEQ ID NO: 2907817 - RNA, 19 nt, Artificial Sequence
  Description of Artificial Sequence: Synthetic oligonucleotide
uucauguccucagguacug

SEQ ID NO: 2907818 - RNA, 19 nt, Artificial Sequence
  Description of Artificial Sequence: Synthetic oligonucleotide
gcgaaacugaagugcaagg

SEQ ID NO: 2907819 - RNA, 19 nt, Artificial Sequence
  Description of Artificial Sequence: Synthetic oligonucleotide
uccucagguacugcaaaca

SEQ ID NO: 2907820 - RNA, 19 nt, Artificial Sequence
  Description of Artificial Sequence: Synthetic oligonucleotide
cugagguggcuucagagga

SEQ ID NO: 2907821 - RNA, 19 nt, Artificial Sequence
  Description of Artificial Sequence: Synthetic oligonucleotide
aggagacagagcagggccc

SEQ ID NO: 2907822 - RNA, 19 nt, Artificial Sequence
  Description of Artificial Sequence: Synthetic oligonucleotide
aacugaagugcaaggccug

SEQ ID NO: 2907823 - RNA, 19 nt, Artificial Sequence
  Description of Artificial Sequence: Synthetic oligonucleotide
uuuuccugccuugagcuuu

SEQ ID NO: 2907824 - RNA, 19 nt, Artificial Sequence
  Description of Artificial Sequence: Synthetic oligonucleotide
uucugaguggaugcugaug

SEQ ID NO: 2907825 - RNA, 19 nt, Artificial Sequence
  Description of Artificial Sequence: Synthetic oligonucleotide
aacauacgugccaauggaa

SEQ ID NO: 2907826 - RNA, 19 nt, Artificial Sequence
  Description of Artificial Sequence: Synthetic oligonucleotide
uggcgaaggagaauacaua

SEQ ID NO: 2907827 - RNA, 19 nt, Artificial Sequence
  Description of Artificial Sequence: Synthetic oligonucleotide
uacugcaaacagagagucu

SEQ ID NO: 2907828 - RNA, 19 nt, Artificial Sequence
  Description of Artificial Sequence: Synthetic oligonucleotide
uguuccccaggccaauuua

SEQ ID NO: 2907829 - RNA, 19 nt, Artificial Sequence
  Description of Artificial Sequence: Synthetic oligonucleotide
cauguccucagguacugca

SEQ ID NO: 2907830 - RNA, 19 nt, Artificial Sequence
  Description of Artificial Sequence: Synthetic oligonucleotide
cgagccauaggucaccucg

SEQ ID NO: 2907831 - RNA, 19 nt, Artificial Sequence
  Description of Artificial Sequence: Synthetic oligonucleotide
acagaaagacagacaccac

SEQ ID NO: 2907832 - RNA, 19 nt, Artificial Sequence
  Description of Artificial Sequence: Synthetic oligonucleotide
gagaauacauacgagccau

SEQ ID NO: 2907833 - RNA, 19 nt, Artificial Sequence
  Description of Artificial Sequence: Synthetic oligonucleotide
ugugaggggcuccuucauc

SEQ ID NO: 2907834 - RNA, 19 nt, Artificial Sequence
  Description of Artificial Sequence: Synthetic oligonucleotide
ggagaauacauacgagcca

SEQ ID NO: 2907835 - RNA, 19 nt, Artificial Sequence
  Description of Artificial Sequence: Synthetic oligonucleotide
agaggauccguugagcauu

SEQ ID NO: 2907836 - RNA, 19 nt, Artificial Sequence
  Description of Artificial Sequence: Synthetic oligonucleotide
ucaggcucugugugguucu

SEQ ID NO: 2907837 - RNA, 19 nt, Artificial Sequence
  Description of Artificial Sequence: Synthetic oligonucleotide
agggcccagugauauuuag

SEQ ID NO: 2907838 - RNA, 19 nt, Artificial Sequence
  Description of Artificial Sequence: Synthetic oligonucleotide
gagccauaggucaccucgg

SEQ ID NO: 2907839 - RNA, 19 nt, Artificial Sequence
  Description of Artificial Sequence: Synthetic oligonucleotide
acagcagguucauguccuc

SEQ ID NO: 2907840 - RNA, 19 nt, Artificial Sequence
  Description of Artificial Sequence: Synthetic oligonucleotide
ccacuaaaacauacgugcc

SEQ ID NO: 2907841 - RNA, 19 nt, Artificial Sequence
  Description of Artificial Sequence: Synthetic oligonucleotide
acagagagucugagguggc

SEQ ID NO: 2907842 - RNA, 19 nt, Artificial Sequence
  Description of Artificial Sequence: Synthetic oligonucleotide
guuccccaggccaauuuag

SEQ ID NO: 2907843 - RNA, 19 nt, Artificial Sequence
  Description of Artificial Sequence: Synthetic oligonucleotide
cucagguacugcaaacaga

SEQ ID NO: 2907844 - RNA, 19 nt, Artificial Sequence
  Description of Artificial Sequence: Synthetic oligonucleotide
uauuuagcucuucgagcuu

SEQ ID NO: 2907845 - RNA, 19 nt, Artificial Sequence
  Description of Artificial Sequence: Synthetic oligonucleotide
ggaagcauaugcccacagc

SEQ ID NO: 2907846 - RNA, 19 nt, Artificial Sequence
  Description of Artificial Sequence: Synthetic oligonucleotide
gccaauggaagcauaugcc

SEQ ID NO: 2907847 - RNA, 19 nt, Artificial Sequence
  Description of Artificial Sequence: Synthetic oligonucleotide
uuuagccagcaggggagcc

SEQ ID NO: 2907848 - RNA, 19 nt, Artificial Sequence
  Description of Artificial Sequence: Synthetic oligonucleotide
gaggggcuccuucaucccc

SEQ ID NO: 2907849 - RNA, 19 nt, Artificial Sequence
  Description of Artificial Sequence: Synthetic oligonucleotide
ugaggggcuccuucauccc

SEQ ID NO: 2907850 - RNA, 19 nt, Artificial Sequence
  Description of Artificial Sequence: Synthetic oligonucleotide
cagaaagacagacaccacu

SEQ ID NO: 2907851 - RNA, 19 nt, Artificial Sequence
  Description of Artificial Sequence: Synthetic oligonucleotide
aacgaugggugguggcgaa

SEQ ID NO: 2907852 - RNA, 19 nt, Artificial Sequence
  Description of Artificial Sequence: Synthetic oligonucleotide
ucgagcuuccugagcagau

SEQ ID NO: 2907853 - RNA, 19 nt, Artificial Sequence
  Description of Artificial Sequence: Synthetic oligonucleotide
ccauaggucaccucggcuc

SEQ ID NO: 2907854 - RNA, 19 nt, Artificial Sequence
  Description of Artificial Sequence: Synthetic oligonucleotide
uuagccagcaggggagcca

SEQ ID NO: 2907855 - RNA, 19 nt, Artificial Sequence
  Description of Artificial Sequence: Synthetic oligonucleotide
uucgagcuuccugagcaga

SEQ ID NO: 2907856 - RNA, 19 nt, Artificial Sequence
  Description of Artificial Sequence: Synthetic oligonucleotide
guggaugcugauguucccc

SEQ ID NO: 2907857 - RNA, 19 nt, Artificial Sequence
  Description of Artificial Sequence: Synthetic oligonucleotide
gccaggaaggcacccaaag

SEQ ID NO: 2907858 - RNA, 19 nt, Artificial Sequence
  Description of Artificial Sequence: Synthetic oligonucleotide
caugugaggggcuccuuca

SEQ ID NO: 2907859 - RNA, 19 nt, Artificial Sequence
  Description of Artificial Sequence: Synthetic oligonucleotide
agguucauguccucaggua

SEQ ID NO: 2907860 - RNA, 19 nt, Artificial Sequence
  Description of Artificial Sequence: Synthetic oligonucleotide
aggccaauuuagccagcag

SEQ ID NO: 2907861 - RNA, 19 nt, Artificial Sequence
  Description of Artificial Sequence: Synthetic oligonucleotide
ccccaaagauccaagauga

SEQ ID NO: 2907862 - RNA, 19 nt, Artificial Sequence
  Description of Artificial Sequence: Synthetic oligonucleotide
cuucgagcuuccugagcag

SEQ ID NO: 2907863 - RNA, 19 nt, Artificial Sequence
  Description of Artificial Sequence: Synthetic oligonucleotide
ugagguggcuucagaggau

SEQ ID NO: 2907864 - RNA, 19 nt, Artificial Sequence
  Description of Artificial Sequence: Synthetic oligonucleotide
augggugguggcgaaggag

SEQ ID NO: 2907865 - RNA, 19 nt, Artificial Sequence
  Description of Artificial Sequence: Synthetic oligonucleotide
gugugguucugaguggaug

SEQ ID NO: 2907866 - RNA, 19 nt, Artificial Sequence
  Description of Artificial Sequence: Synthetic oligonucleotide
gcgaaggagaauacauacg

SEQ ID NO: 2907867 - RNA, 19 nt, Artificial Sequence
  Description of Artificial Sequence: Synthetic oligonucleotide
cgaaggagaauacauacga

SEQ ID NO: 2907868 - RNA, 19 nt, Artificial Sequence
  Description of Artificial Sequence: Synthetic oligonucleotide
cucuucgagcuuccugagc

SEQ ID NO: 2907869 - RNA, 19 nt, Artificial Sequence
  Description of Artificial Sequence: Synthetic oligonucleotide
guugagcauuagaagguca

SEQ ID NO: 2907870 - RNA, 19 nt, Artificial Sequence
  Description of Artificial Sequence: Synthetic oligonucleotide
agugcaaggccugcaugug

SEQ ID NO: 2907871 - RNA, 19 nt, Artificial Sequence
  Description of Artificial Sequence: Synthetic oligonucleotide
aggaaggcacccaaagcga

SEQ ID NO: 2907872 - RNA, 19 nt, Artificial Sequence
  Description of Artificial Sequence: Synthetic oligonucleotide
acccaaagcgaaacugaag

SEQ ID NO: 2907873 - RNA, 19 nt, Artificial Sequence
  Description of Artificial Sequence: Synthetic oligonucleotide
ggcccagugauauuuagcu

SEQ ID NO: 2907874 - RNA, 19 nt, Artificial Sequence
  Description of Artificial Sequence: Synthetic oligonucleotide
ggcucugugugguucugag

SEQ ID NO: 2907875 - RNA, 19 nt, Artificial Sequence
  Description of Artificial Sequence: Synthetic oligonucleotide
guccucagguacugcaaac

SEQ ID NO: 2907876 - RNA, 19 nt, Artificial Sequence
  Description of Artificial Sequence: Synthetic oligonucleotide
gguggcuucagaggauccg

SEQ ID NO: 2907877 - RNA, 19 nt, Artificial Sequence
  Description of Artificial Sequence: Synthetic oligonucleotide
agguggcuucagaggaucc

SEQ ID NO: 2907878 - RNA, 19 nt, Artificial Sequence
  Description of Artificial Sequence: Synthetic oligonucleotide
gaccaaacagaaagacaga

SEQ ID NO: 2907879 - RNA, 19 nt, Artificial Sequence
  Description of Artificial Sequence: Synthetic oligonucleotide
ccucagguacugcaaacag

SEQ ID NO: 2907880 - RNA, 19 nt, Artificial Sequence
  Description of Artificial Sequence: Synthetic oligonucleotide
ggcacccaaagcgaaacug

SEQ ID NO: 2907881 - RNA, 19 nt, Artificial Sequence
  Description of Artificial Sequence: Synthetic oligonucleotide
ugguggcgaaggagaauac

SEQ ID NO: 2907882 - RNA, 19 nt, Artificial Sequence
  Description of Artificial Sequence: Synthetic oligonucleotide
ugugugguucugaguggau

SEQ ID NO: 2907883 - RNA, 19 nt, Artificial Sequence
  Description of Artificial Sequence: Synthetic oligonucleotide
ugccaacgauggguggugg

SEQ ID NO: 2907884 - RNA, 19 nt, Artificial Sequence
  Description of Artificial Sequence: Synthetic oligonucleotide
gagguggcuucagaggauc

SEQ ID NO: 2907885 - RNA, 19 nt, Artificial Sequence
  Description of Artificial Sequence: Synthetic oligonucleotide
ggcuucagaggauccguug

SEQ ID NO: 2907886 - RNA, 19 nt, Artificial Sequence
  Description of Artificial Sequence: Synthetic oligonucleotide
uuuccugccuugagcuuuu

SEQ ID NO: 2907887 - RNA, 19 nt, Artificial Sequence
  Description of Artificial Sequence: Synthetic oligonucleotide
gaugggugguggcgaagga

SEQ ID NO: 2907888 - RNA, 19 nt, Artificial Sequence
  Description of Artificial Sequence: Synthetic oligonucleotide
gugguggcgaaggagaaua

SEQ ID NO: 2907889 - RNA, 19 nt, Artificial Sequence
  Description of Artificial Sequence: Synthetic oligonucleotide
gugccaauggaagcauaug

SEQ ID NO: 2907890 - RNA, 19 nt, Artificial Sequence
  Description of Artificial Sequence: Synthetic oligonucleotide
ccaauuuagccagcagggg

SEQ ID NO: 2907891 - RNA, 19 nt, Artificial Sequence
  Description of Artificial Sequence: Synthetic oligonucleotide
cgaaacugaagugcaaggc

SEQ ID NO: 2907892 - RNA, 19 nt, Artificial Sequence
  Description of Artificial Sequence: Synthetic oligonucleotide
ccaaacagaaagacagaca

SEQ ID NO: 2907893 - RNA, 19 nt, Artificial Sequence
  Description of Artificial Sequence: Synthetic oligonucleotide
caccucggcuccaacauaa

SEQ ID NO: 2907894 - RNA, 19 nt, Artificial Sequence
  Description of Artificial Sequence: Synthetic oligonucleotide
ucauguccucagguacugc

SEQ ID NO: 2907895 - RNA, 19 nt, Artificial Sequence
  Description of Artificial Sequence: Synthetic oligonucleotide
ccaacgaugggugguggcg

SEQ ID NO: 2907896 - RNA, 19 nt, Artificial Sequence
  Description of Artificial Sequence: Synthetic oligonucleotide
acgagccauaggucaccuc

SEQ ID NO: 2907897 - RNA, 19 nt, Artificial Sequence
  Description of Artificial Sequence: Synthetic oligonucleotide
cccagugauauuuagcucu

SEQ ID NO: 2907898 - RNA, 19 nt, Artificial Sequence
  Description of Artificial Sequence: Synthetic oligonucleotide
ggauccguugagcauuaga

SEQ ID NO: 2907899 - RNA, 19 nt, Artificial Sequence
  Description of Artificial Sequence: Synthetic oligonucleotide
cacccaaagcgaaacugaa

SEQ ID NO: 2907900 - RNA, 19 nt, Artificial Sequence
  Description of Artificial Sequence: Synthetic oligonucleotide
ucaccucggcuccaacaua

SEQ ID NO: 2907901 - RNA, 19 nt, Artificial Sequence
  Description of Artificial Sequence: Synthetic oligonucleotide
cugcaaacagagagucuga

SEQ ID NO: 2907902 - RNA, 19 nt, Artificial Sequence
  Description of Artificial Sequence: Synthetic oligonucleotide
augccaacgauggguggug

SEQ ID NO: 2907903 - RNA, 19 nt, Artificial Sequence
  Description of Artificial Sequence: Synthetic oligonucleotide
uacgagccauaggucaccu

SEQ ID NO: 2907904 - RNA, 19 nt, Artificial Sequence
  Description of Artificial Sequence: Synthetic oligonucleotide
aggucaccucggcuccaac

SEQ ID NO: 2907905 - RNA, 19 nt, Artificial Sequence
  Description of Artificial Sequence: Synthetic oligonucleotide
auguuccccaggccaauuu

SEQ ID NO: 2907906 - RNA, 19 nt, Artificial Sequence
  Description of Artificial Sequence: Synthetic oligonucleotide
uacgugccaauggaagcau

SEQ ID NO: 2907907 - RNA, 19 nt, Artificial Sequence
  Description of Artificial Sequence: Synthetic oligonucleotide
cacagcagguucauguccu

SEQ ID NO: 2907908 - RNA, 19 nt, Artificial Sequence
  Description of Artificial Sequence: Synthetic oligonucleotide
augugaggggcuccuucau

SEQ ID NO: 2907909 - RNA, 19 nt, Artificial Sequence
  Description of Artificial Sequence: Synthetic oligonucleotide
gguucugaguggaugcuga

SEQ ID NO: 2907910 - RNA, 19 nt, Artificial Sequence
  Description of Artificial Sequence: Synthetic oligonucleotide
uggcuucagaggauccguu

SEQ ID NO: 2907911 - RNA, 19 nt, Artificial Sequence
  Description of Artificial Sequence: Synthetic oligonucleotide
agagucugagguggcuuca

SEQ ID NO: 2907912 - RNA, 19 nt, Artificial Sequence
  Description of Artificial Sequence: Synthetic oligonucleotide
aggcacccaaagcgaaacu

SEQ ID NO: 2907913 - RNA, 19 nt, Artificial Sequence
  Description of Artificial Sequence: Synthetic oligonucleotide
gugcaaggccugcauguga

SEQ ID NO: 2907914 - RNA, 19 nt, Artificial Sequence
  Description of Artificial Sequence: Synthetic oligonucleotide
aggucaaagucaggcucug

SEQ ID NO: 2907915 - RNA, 19 nt, Artificial Sequence
  Description of Artificial Sequence: Synthetic oligonucleotide
gucaggcucugugugguuc

SEQ ID NO: 2907916 - RNA, 19 nt, Artificial Sequence
  Description of Artificial Sequence: Synthetic oligonucleotide
gaaggcacccaaagcgaaa

SEQ ID NO: 2907917 - RNA, 19 nt, Artificial Sequence
  Description of Artificial Sequence: Synthetic oligonucleotide
ugauguuccccaggccaau

SEQ ID NO: 2907918 - RNA, 19 nt, Artificial Sequence
  Description of Artificial Sequence: Synthetic oligonucleotide
guggcgaaggagaauacau

SEQ ID NO: 2907919 - RNA, 19 nt, Artificial Sequence
  Description of Artificial Sequence: Synthetic oligonucleotide
cugugugguucugagugga

SEQ ID NO: 2907920 - RNA, 19 nt, Artificial Sequence
  Description of Artificial Sequence: Synthetic oligonucleotide
gguacugcaaacagagagu

SEQ ID NO: 2907921 - RNA, 19 nt, Artificial Sequence
  Description of Artificial Sequence: Synthetic oligonucleotide
guucauguccucagguacu

SEQ ID NO: 2907922 - RNA, 19 nt, Artificial Sequence
  Description of Artificial Sequence: Synthetic oligonucleotide
gagacagagcagggcccag

SEQ ID NO: 2907923 - RNA, 19 nt, Artificial Sequence
  Description of Artificial Sequence: Synthetic oligonucleotide
cagagcagggcccagugau

SEQ ID NO: 2907924 - RNA, 19 nt, Artificial Sequence
  Description of Artificial Sequence: Synthetic oligonucleotide
agacagagcagggcccagu

SEQ ID NO: 2907925 - RNA, 19 nt, Artificial Sequence
  Description of Artificial Sequence: Synthetic oligonucleotide
cagacaccacuaaaacaua

SEQ ID NO: 2907926 - RNA, 19 nt, Artificial Sequence
  Description of Artificial Sequence: Synthetic oligonucleotide
gcaugugaggggcuccuuc

SEQ ID NO: 2907927 - RNA, 19 nt, Artificial Sequence
  Description of Artificial Sequence: Synthetic oligonucleotide
auguccucagguacugcaa

SEQ ID NO: 2907928 - RNA, 19 nt, Artificial Sequence
  Description of Artificial Sequence: Synthetic oligonucleotide
gcacccaaagcgaaacuga

SEQ ID NO: 2907929 - RNA, 19 nt, Artificial Sequence
  Description of Artificial Sequence: Synthetic oligonucleotide
cccaaagauccaagaugag

SEQ ID NO: 2907930 - RNA, 19 nt, Artificial Sequence
  Description of Artificial Sequence: Synthetic oligonucleotide
cagguacugcaaacagaga

SEQ ID NO: 2907931 - RNA, 19 nt, Artificial Sequence
  Description of Artificial Sequence: Synthetic oligonucleotide
caacgaugggugguggcga

SEQ ID NO: 2907932 - RNA, 19 nt, Artificial Sequence
  Description of Artificial Sequence: Synthetic oligonucleotide
cuaaaacauacgugccaau

SEQ ID NO: 2907933 - RNA, 19 nt, Artificial Sequence
  Description of Artificial Sequence: Synthetic oligonucleotide
gguggcgaaggagaauaca

SEQ ID NO: 2907934 - RNA, 19 nt, Artificial Sequence
  Description of Artificial Sequence: Synthetic oligonucleotide
cugaagugcaaggccugca

SEQ ID NO: 2907935 - RNA, 19 nt, Artificial Sequence
  Description of Artificial Sequence: Synthetic oligonucleotide
gggcccagugauauuuagc

SEQ ID NO: 2907936 - RNA, 19 nt, Artificial Sequence
  Description of Artificial Sequence: Synthetic oligonucleotide
cagugauauuuagcucuuc

SEQ ID NO: 2907937 - RNA, 19 nt, Artificial Sequence
  Description of Artificial Sequence: Synthetic oligonucleotide
caggccaauuuagccagca

SEQ ID NO: 2907938 - RNA, 19 nt, Artificial Sequence
  Description of Artificial Sequence: Synthetic oligonucleotide
acgaugggugguggcgaag

SEQ ID NO: 2907939 - RNA, 19 nt, Artificial Sequence
  Description of Artificial Sequence: Synthetic oligonucleotide
gccaacgaugggugguggc

SEQ ID NO: 2907940 - RNA, 19 nt, Artificial Sequence
  Description of Artificial Sequence: Synthetic oligonucleotide
agcagauacuguggcuuuu

SEQ ID NO: 2907941 - RNA, 19 nt, Artificial Sequence
  Description of Artificial Sequence: Synthetic oligonucleotide
uaggucaccucggcuccaa

SEQ ID NO: 2907942 - RNA, 19 nt, Artificial Sequence
  Description of Artificial Sequence: Synthetic oligonucleotide
gcccagugauauuuagcuc

SEQ ID NO: 2907943 - RNA, 19 nt, Artificial Sequence
  Description of Artificial Sequence: Synthetic oligonucleotide
caugccaacgauggguggu

SEQ ID NO: 2907944 - RNA, 19 nt, Artificial Sequence
  Description of Artificial Sequence: Synthetic oligonucleotide
gagcagauacuguggcuuu

SEQ ID NO: 2907945 - RNA, 19 nt, Artificial Sequence
  Description of Artificial Sequence: Synthetic oligonucleotide
ccccaggccaauuuagcca

SEQ ID NO: 2907946 - RNA, 19 nt, Artificial Sequence
  Description of Artificial Sequence: Synthetic oligonucleotide
ggagacagagcagggccca

SEQ ID NO: 2907947 - RNA, 19 nt, Artificial Sequence
  Description of Artificial Sequence: Synthetic oligonucleotide
gagcagggcccagugauau

SEQ ID NO: 2907948 - RNA, 19 nt, Artificial Sequence
  Description of Artificial Sequence: Synthetic oligonucleotide
auaggucaccucggcucca

SEQ ID NO: 2907949 - RNA, 19 nt, Artificial Sequence
  Description of Artificial Sequence: Synthetic oligonucleotide
cgaugggugguggcgaagg

SEQ ID NO: 2907950 - RNA, 19 nt, Artificial Sequence
  Description of Artificial Sequence: Synthetic oligonucleotide
ggaaggcacccaaagcgaa

SEQ ID NO: 2907951 - RNA, 19 nt, Artificial Sequence
  Description of Artificial Sequence: Synthetic oligonucleotide
agucaggcucugugugguu

SEQ ID NO: 2907952 - RNA, 19 nt, Artificial Sequence
  Description of Artificial Sequence: Synthetic oligonucleotide
gaggauccguugagcauua

SEQ ID NO: 2907953 - RNA, 19 nt, Artificial Sequence
  Description of Artificial Sequence: Synthetic oligonucleotide
cagaggauccguugagcau

SEQ ID NO: 2907954 - RNA, 19 nt, Artificial Sequence
  Description of Artificial Sequence: Synthetic oligonucleotide
cagcagguucauguccuca

SEQ ID NO: 2907955 - RNA, 19 nt, Artificial Sequence
  Description of Artificial Sequence: Synthetic oligonucleotide
ugcccacagcagguucaug

SEQ ID NO: 2907956 - RNA, 19 nt, Artificial Sequence
  Description of Artificial Sequence: Synthetic oligonucleotide
aggcucugugugguucuga

SEQ ID NO: 2907957 - RNA, 19 nt, Artificial Sequence
  Description of Artificial Sequence: Synthetic oligonucleotide
aggauccguugagcauuag

SEQ ID NO: 2907958 - RNA, 19 nt, Artificial Sequence
  Description of Artificial Sequence: Synthetic oligonucleotide
agcagggcccagugauauu

SEQ ID NO: 2907959 - RNA, 19 nt, Artificial Sequence
  Description of Artificial Sequence: Synthetic oligonucleotide
ccguugagcauuagaaggu

SEQ ID NO: 2907960 - RNA, 19 nt, Artificial Sequence
  Description of Artificial Sequence: Synthetic oligonucleotide
guucugaguggaugcugau

SEQ ID NO: 2907961 - RNA, 19 nt, Artificial Sequence
  Description of Artificial Sequence: Synthetic oligonucleotide
augcccacagcagguucau

SEQ ID NO: 2907962 - RNA, 19 nt, Artificial Sequence
  Description of Artificial Sequence: Synthetic oligonucleotide
caggggagccaggaaggca

SEQ ID NO: 2907963 - RNA, 19 nt, Artificial Sequence
  Description of Artificial Sequence: Synthetic oligonucleotide
agagcagggcccagugaua

SEQ ID NO: 2907964 - RNA, 19 nt, Artificial Sequence
  Description of Artificial Sequence: Synthetic oligonucleotide
cguugagcauuagaagguc

SEQ ID NO: 2907965 - RNA, 19 nt, Artificial Sequence
  Description of Artificial Sequence: Synthetic oligonucleotide
ugcaugugaggggcuccuu

SEQ ID NO: 2907966 - RNA, 19 nt, Artificial Sequence
  Description of Artificial Sequence: Synthetic oligonucleotide
caggcucugugugguucug

SEQ ID NO: 2907967 - RNA, 19 nt, Artificial Sequence
  Description of Artificial Sequence: Synthetic oligonucleotide
gcaggggagccaggaaggc

SEQ ID NO: 2907968 - RNA, 19 nt, Artificial Sequence
  Description of Artificial Sequence: Synthetic oligonucleotide
gcauaugcccacagcaggu

SEQ ID NO: 2907969 - RNA, 19 nt, Artificial Sequence
  Description of Artificial Sequence: Synthetic oligonucleotide
gggagccaggaaggcaccc

SEQ ID NO: 2907970 - RNA, 19 nt, Artificial Sequence
  Description of Artificial Sequence: Synthetic oligonucleotide
ccaggccaauuuagccagc

SEQ ID NO: 2907971 - RNA, 19 nt, Artificial Sequence
  Description of Artificial Sequence: Synthetic oligonucleotide
agccaggaaggcacccaaa

SEQ ID NO: 2907972 - RNA, 19 nt, Artificial Sequence
  Description of Artificial Sequence: Synthetic oligonucleotide
gauguuccccaggccaauu

SEQ ID NO: 2907973 - RNA, 19 nt, Artificial Sequence
  Description of Artificial Sequence: Synthetic oligonucleotide
cagggcccagugauauuua

SEQ ID NO: 2907974 - RNA, 19 nt, Artificial Sequence
  Description of Artificial Sequence: Synthetic oligonucleotide
gccauaggucaccucggcu

SEQ ID NO: 2907975 - RNA, 19 nt, Artificial Sequence
  Description of Artificial Sequence: Synthetic oligonucleotide
ccucggcuccaacauaaaa

SEQ ID NO: 2907976 - RNA, 19 nt, Artificial Sequence
  Description of Artificial Sequence: Synthetic oligonucleotide
ggggagccaggaaggcacc

SEQ ID NO: 2907977 - RNA, 19 nt, Artificial Sequence
  Description of Artificial Sequence: Synthetic oligonucleotide
cauaugcccacagcagguu

SEQ ID NO: 2907978 - RNA, 19 nt, Artificial Sequence
  Description of Artificial Sequence: Synthetic oligonucleotide
acgugccaauggaagcaua

SEQ ID NO: 2907979 - RNA, 19 nt, Artificial Sequence
  Description of Artificial Sequence: Synthetic oligonucleotide
accucggcuccaacauaaa

SEQ ID NO: 2907980 - RNA, 19 nt, Artificial Sequence
  Description of Artificial Sequence: Synthetic oligonucleotide
gcagggcccagugauauuu

SEQ ID NO: 2907981 - RNA, 19 nt, Artificial Sequence
  Description of Artificial Sequence: Synthetic oligonucleotide
cagagagucugagguggcu

SEQ ID NO: 2907982 - RNA, 19 nt, Artificial Sequence
  Description of Artificial Sequence: Synthetic oligonucleotide
cugaguggaugcugauguu

SEQ ID NO: 2907983 - RNA, 19 nt, Artificial Sequence
  Description of Artificial Sequence: Synthetic oligonucleotide
gggugguggcgaaggagaa

SEQ ID NO: 2907984 - RNA, 19 nt, Artificial Sequence
  Description of Artificial Sequence: Synthetic oligonucleotide
cugcaugugaggggcuccu

SEQ ID NO: 2907985 - RNA, 19 nt, Artificial Sequence
  Description of Artificial Sequence: Synthetic oligonucleotide
cgugccaauggaagcauau

SEQ ID NO: 2907986 - RNA, 19 nt, Artificial Sequence
  Description of Artificial Sequence: Synthetic oligonucleotide
ccagugauauuuagcucuu

SEQ ID NO: 2907987 - RNA, 19 nt, Artificial Sequence
  Description of Artificial Sequence: Synthetic oligonucleotide
ggucaaagucaggcucugu

SEQ ID NO: 2907988 - RNA, 19 nt, Artificial Sequence
  Description of Artificial Sequence: Synthetic oligonucleotide
ggugguggcgaaggagaau

SEQ ID NO: 2907989 - RNA, 19 nt, Artificial Sequence
  Description of Artificial Sequence: Synthetic oligonucleotide
cgagcuuccugagcagaua

SEQ ID NO: 2907990 - RNA, 19 nt, Artificial Sequence
  Description of Artificial Sequence: Synthetic oligonucleotide
ggccugcaugugaggggcu

SEQ ID NO: 2907991 - RNA, 19 nt, Artificial Sequence
  Description of Artificial Sequence: Synthetic oligonucleotide
aauuacauggaagagaagc

SEQ ID NO: 2907992 - RNA, 19 nt, Artificial Sequence
  Description of Artificial Sequence: Synthetic oligonucleotide
gaucaguuuauucagaugg

SEQ ID NO: 2907993 - RNA, 19 nt, Artificial Sequence
  Description of Artificial Sequence: Synthetic oligonucleotide
aaacaaaugguucaaaacu

SEQ ID NO: 2907994 - RNA, 19 nt, Artificial Sequence
  Description of Artificial Sequence: Synthetic oligonucleotide
cuauuaaagaguuuguggg

SEQ ID NO: 2907995 - RNA, 19 nt, Artificial Sequence
  Description of Artificial Sequence: Synthetic oligonucleotide
aacuacaaggaacuucucc

SEQ ID NO: 2907996 - RNA, 19 nt, Artificial Sequence
  Description of Artificial Sequence: Synthetic oligonucleotide
aaugguucaaaacuacaag

SEQ ID NO: 2907997 - RNA, 19 nt, Artificial Sequence
  Description of Artificial Sequence: Synthetic oligonucleotide
ggaauugcuaauuacaugg

SEQ ID NO: 2907998 - RNA, 19 nt, Artificial Sequence
  Description of Artificial Sequence: Synthetic oligonucleotide
aaggaacuucuccugaugc

SEQ ID NO: 2907999 - RNA, 19 nt, Artificial Sequence
  Description of Artificial Sequence: Synthetic oligonucleotide
acuucaaccuauuaaagag

SEQ ID NO: 2908000 - RNA, 19 nt, Artificial Sequence
  Description of Artificial Sequence: Synthetic oligonucleotide
aucacaaagcucuagccgc

SEQ ID NO: 2908001 - RNA, 19 nt, Artificial Sequence
  Description of Artificial Sequence: Synthetic oligonucleotide
cagaauacacauuagaaac

SEQ ID NO: 2908002 - RNA, 19 nt, Artificial Sequence
  Description of Artificial Sequence: Synthetic oligonucleotide
uucaaaacuacaaggaacu

SEQ ID NO: 2908003 - RNA, 19 nt, Artificial Sequence
  Description of Artificial Sequence: Synthetic oligonucleotide
acuaucacaaagcucuagc

SEQ ID NO: 2908004 - RNA, 19 nt, Artificial Sequence
  Description of Artificial Sequence: Synthetic oligonucleotide
uaucacaaagcucuagccg

SEQ ID NO: 2908005 - RNA, 19 nt, Artificial Sequence
  Description of Artificial Sequence: Synthetic oligonucleotide
caugcaagaagucaaagag

SEQ ID NO: 2908006 - RNA, 19 nt, Artificial Sequence
  Description of Artificial Sequence: Synthetic oligonucleotide
augguucaaaacuacaagg

SEQ ID NO: 2908007 - RNA, 19 nt, Artificial Sequence
  Description of Artificial Sequence: Synthetic oligonucleotide
cuugccauaaucauugaag

SEQ ID NO: 2908008 - RNA, 19 nt, Artificial Sequence
  Description of Artificial Sequence: Synthetic oligonucleotide
auuaaagaguuugugggcc

SEQ ID NO: 2908009 - RNA, 19 nt, Artificial Sequence
  Description of Artificial Sequence: Synthetic oligonucleotide
auuagaaacaaaugguuca

SEQ ID NO: 2908010 - RNA, 19 nt, Artificial Sequence
  Description of Artificial Sequence: Synthetic oligonucleotide
aaaacuacaaggaacuucu

SEQ ID NO: 2908011 - RNA, 19 nt, Artificial Sequence
  Description of Artificial Sequence: Synthetic oligonucleotide
ucugugaucgggaagacac

SEQ ID NO: 2908012 - RNA, 19 nt, Artificial Sequence
  Description of Artificial Sequence: Synthetic oligonucleotide
auaaucauugaaguucucc

SEQ ID NO: 2908013 - RNA, 19 nt, Artificial Sequence
  Description of Artificial Sequence: Synthetic oligonucleotide
uucagaucaguuuauucag

SEQ ID NO: 2908014 - RNA, 19 nt, Artificial Sequence
  Description of Artificial Sequence: Synthetic oligonucleotide
uuuuguucagaucaguuua

SEQ ID NO: 2908015 - RNA, 19 nt, Artificial Sequence
  Description of Artificial Sequence: Synthetic oligonucleotide
acaguggucacgugcaugc

SEQ ID NO: 2908016 - RNA, 19 nt, Artificial Sequence
  Description of Artificial Sequence: Synthetic oligonucleotide
uggaagagaagcuacuugc

SEQ ID NO: 2908017 - RNA, 19 nt, Artificial Sequence
  Description of Artificial Sequence: Synthetic oligonucleotide
uaaucauugaaguucucca

SEQ ID NO: 2908018 - RNA, 19 nt, Artificial Sequence
  Description of Artificial Sequence: Synthetic oligonucleotide
caagaagucaaagagcucc

SEQ ID NO: 2908019 - RNA, 19 nt, Artificial Sequence
  Description of Artificial Sequence: Synthetic oligonucleotide
cuacuugccauaaucauug

SEQ ID NO: 2908020 - RNA, 19 nt, Artificial Sequence
  Description of Artificial Sequence: Synthetic oligonucleotide
gaguuugugggccacacag

SEQ ID NO: 2908021 - RNA, 19 nt, Artificial Sequence
  Description of Artificial Sequence: Synthetic oligonucleotide
uugcuaauuacauggaaga

SEQ ID NO: 2908022 - RNA, 19 nt, Artificial Sequence
  Description of Artificial Sequence: Synthetic oligonucleotide
uauuaaagaguuugugggc

SEQ ID NO: 2908023 - RNA, 19 nt, Artificial Sequence
  Description of Artificial Sequence: Synthetic oligonucleotide
acuacaaggaacuucuccu

SEQ ID NO: 2908024 - RNA, 19 nt, Artificial Sequence
  Description of Artificial Sequence: Synthetic oligonucleotide
ugugcaguuacuucaaccu

SEQ ID NO: 2908025 - RNA, 19 nt, Artificial Sequence
  Description of Artificial Sequence: Synthetic oligonucleotide
uccagaauacacauuagaa

SEQ ID NO: 2908026 - RNA, 19 nt, Artificial Sequence
  Description of Artificial Sequence: Synthetic oligonucleotide
ugguucaaaacuacaagga

SEQ ID NO: 2908027 - RNA, 19 nt, Artificial Sequence
  Description of Artificial Sequence: Synthetic oligonucleotide
uuacuucaaccuauuaaag

SEQ ID NO: 2908028 - RNA, 19 nt, Artificial Sequence
  Description of Artificial Sequence: Synthetic oligonucleotide
agauggaauugcuaauuac

SEQ ID NO: 2908029 - RNA, 19 nt, Artificial Sequence
  Description of Artificial Sequence: Synthetic oligonucleotide
uucuccagaauacacauua

SEQ ID NO: 2908030 - RNA, 19 nt, Artificial Sequence
  Description of Artificial Sequence: Synthetic oligonucleotide
acgacuaucacaaagcucu

SEQ ID NO: 2908031 - RNA, 19 nt, Artificial Sequence
  Description of Artificial Sequence: Synthetic oligonucleotide
guuacuucaaccuauuaaa

SEQ ID NO: 2908032 - RNA, 19 nt, Artificial Sequence
  Description of Artificial Sequence: Synthetic oligonucleotide
uguacaauccucuucuguc

SEQ ID NO: 2908033 - RNA, 19 nt, Artificial Sequence
  Description of Artificial Sequence: Synthetic oligonucleotide
aguuuauucagauggaauu

SEQ ID NO: 2908034 - RNA, 19 nt, Artificial Sequence
  Description of Artificial Sequence: Synthetic oligonucleotide
aagucaaagagcuccucug

SEQ ID NO: 2908035 - RNA, 19 nt, Artificial Sequence
  Description of Artificial Sequence: Synthetic oligonucleotide
cuaauuacauggaagagaa

SEQ ID NO: 2908036 - RNA, 19 nt, Artificial Sequence
  Description of Artificial Sequence: Synthetic oligonucleotide
gaagcuacuugccauaauc

SEQ ID NO: 2908037 - RNA, 19 nt, Artificial Sequence
  Description of Artificial Sequence: Synthetic oligonucleotide
cauuagaaacaaaugguuc

SEQ ID NO: 2908038 - RNA, 19 nt, Artificial Sequence
  Description of Artificial Sequence: Synthetic oligonucleotide
ucacauugcucucucacug

SEQ ID NO: 2908039 - RNA, 19 nt, Artificial Sequence
  Description of Artificial Sequence: Synthetic oligonucleotide
ugaucgggaagacacacga

SEQ ID NO: 2908040 - RNA, 19 nt, Artificial Sequence
  Description of Artificial Sequence: Synthetic oligonucleotide
aguuacuucaaccuauuaa

SEQ ID NO: 2908041 - RNA, 19 nt, Artificial Sequence
  Description of Artificial Sequence: Synthetic oligonucleotide
aagcaucuucuguucgucc

SEQ ID NO: 2908042 - RNA, 19 nt, Artificial Sequence
  Description of Artificial Sequence: Synthetic oligonucleotide
uacuucaaccuauuaaaga

SEQ ID NO: 2908043 - RNA, 19 nt, Artificial Sequence
  Description of Artificial Sequence: Synthetic oligonucleotide
auugaaguucuccagaaua

SEQ ID NO: 2908044 - RNA, 19 nt, Artificial Sequence
  Description of Artificial Sequence: Synthetic oligonucleotide
auucagauggaauugcuaa

SEQ ID NO: 2908045 - RNA, 19 nt, Artificial Sequence
  Description of Artificial Sequence: Synthetic oligonucleotide
uuuauucagauggaauugc

SEQ ID NO: 2908046 - RNA, 19 nt, Artificial Sequence
  Description of Artificial Sequence: Synthetic oligonucleotide
aauugcuaauuacauggaa

SEQ ID NO: 2908047 - RNA, 19 nt, Artificial Sequence
  Description of Artificial Sequence: Synthetic oligonucleotide
caaccuauuaaagaguuug

SEQ ID NO: 2908048 - RNA, 19 nt, Artificial Sequence
  Description of Artificial Sequence: Synthetic oligonucleotide
ccuauuaaagaguuugugg

SEQ ID NO: 2908049 - RNA, 19 nt, Artificial Sequence
  Description of Artificial Sequence: Synthetic oligonucleotide
ucucucacuguuguuaggg

SEQ ID NO: 2908050 - RNA, 19 nt, Artificial Sequence
  Description of Artificial Sequence: Synthetic oligonucleotide
cuaucacaaagcucuagcc

SEQ ID NO: 2908051 - RNA, 19 nt, Artificial Sequence
  Description of Artificial Sequence: Synthetic oligonucleotide
cacacgacuaucacaaagc

SEQ ID NO: 2908052 - RNA, 19 nt, Artificial Sequence
  Description of Artificial Sequence: Synthetic oligonucleotide
ucuucugucugugaucggg

SEQ ID NO: 2908053 - RNA, 19 nt, Artificial Sequence
  Description of Artificial Sequence: Synthetic oligonucleotide
uugccauaaucauugaagu

SEQ ID NO: 2908054 - RNA, 19 nt, Artificial Sequence
  Description of Artificial Sequence: Synthetic oligonucleotide
aagagaagcuacuugccau

SEQ ID NO: 2908055 - RNA, 19 nt, Artificial Sequence
  Description of Artificial Sequence: Synthetic oligonucleotide
aagacacacgacuaucaca

SEQ ID NO: 2908056 - RNA, 19 nt, Artificial Sequence
  Description of Artificial Sequence: Synthetic oligonucleotide
gauggaauugcuaauuaca

SEQ ID NO: 2908057 - RNA, 19 nt, Artificial Sequence
  Description of Artificial Sequence: Synthetic oligonucleotide
ucacgugcaugcaagaagu

SEQ ID NO: 2908058 - RNA, 19 nt, Artificial Sequence
  Description of Artificial Sequence: Synthetic oligonucleotide
uacauggaagagaagcuac

SEQ ID NO: 2908059 - RNA, 19 nt, Artificial Sequence
  Description of Artificial Sequence: Synthetic oligonucleotide
aggaacuucuccugaugcc

SEQ ID NO: 2908060 - RNA, 19 nt, Artificial Sequence
  Description of Artificial Sequence: Synthetic oligonucleotide
agaaacaaaugguucaaaa

SEQ ID NO: 2908061 - RNA, 19 nt, Artificial Sequence
  Description of Artificial Sequence: Synthetic oligonucleotide
acacacgacuaucacaaag

SEQ ID NO: 2908062 - RNA, 19 nt, Artificial Sequence
  Description of Artificial Sequence: Synthetic oligonucleotide
uucaaccuauuaaagaguu

SEQ ID NO: 2908063 - RNA, 19 nt, Artificial Sequence
  Description of Artificial Sequence: Synthetic oligonucleotide
gaucugugcaguuacuuca

SEQ ID NO: 2908064 - RNA, 19 nt, Artificial Sequence
  Description of Artificial Sequence: Synthetic oligonucleotide
aaaugguucaaaacuacaa

SEQ ID NO: 2908065 - RNA, 19 nt, Artificial Sequence
  Description of Artificial Sequence: Synthetic oligonucleotide
uccucuagucccaugucag

SEQ ID NO: 2908066 - RNA, 19 nt, Artificial Sequence
  Description of Artificial Sequence: Synthetic oligonucleotide
uggaauugcuaauuacaug

SEQ ID NO: 2908067 - RNA, 19 nt, Artificial Sequence
  Description of Artificial Sequence: Synthetic oligonucleotide
guucaaaacuacaaggaac

SEQ ID NO: 2908068 - RNA, 19 nt, Artificial Sequence
  Description of Artificial Sequence: Synthetic oligonucleotide
aucgggaagacacacgacu

SEQ ID NO: 2908069 - RNA, 19 nt, Artificial Sequence
  Description of Artificial Sequence: Synthetic oligonucleotide
uuauucagauggaauugcu

SEQ ID NO: 2908070 - RNA, 19 nt, Artificial Sequence
  Description of Artificial Sequence: Synthetic oligonucleotide
aagaguuugugggccacac

SEQ ID NO: 2908071 - RNA, 19 nt, Artificial Sequence
  Description of Artificial Sequence: Synthetic oligonucleotide
augcaagaagucaaagagc

SEQ ID NO: 2908072 - RNA, 19 nt, Artificial Sequence
  Description of Artificial Sequence: Synthetic oligonucleotide
guuuauucagauggaauug

SEQ ID NO: 2908073 - RNA, 19 nt, Artificial Sequence
  Description of Artificial Sequence: Synthetic oligonucleotide
aucauugaaguucuccaga

SEQ ID NO: 2908074 - RNA, 19 nt, Artificial Sequence
  Description of Artificial Sequence: Synthetic oligonucleotide
aguucuccagaauacacau

SEQ ID NO: 2908075 - RNA, 19 nt, Artificial Sequence
  Description of Artificial Sequence: Synthetic oligonucleotide
uguucagaucaguuuauuc

SEQ ID NO: 2908076 - RNA, 19 nt, Artificial Sequence
  Description of Artificial Sequence: Synthetic oligonucleotide
uugugggccacacaguggu

SEQ ID NO: 2908077 - RNA, 19 nt, Artificial Sequence
  Description of Artificial Sequence: Synthetic oligonucleotide
auugcucucucacuguugu

SEQ ID NO: 2908078 - RNA, 19 nt, Artificial Sequence
  Description of Artificial Sequence: Synthetic oligonucleotide
ugcaguuacuucaaccuau

SEQ ID NO: 2908079 - RNA, 19 nt, Artificial Sequence
  Description of Artificial Sequence: Synthetic oligonucleotide
ucuucuguucguccucuag

SEQ ID NO: 2908080 - RNA, 19 nt, Artificial Sequence
  Description of Artificial Sequence: Synthetic oligonucleotide
cuguucguccucuaguccc

SEQ ID NO: 2908081 - RNA, 19 nt, Artificial Sequence
  Description of Artificial Sequence: Synthetic oligonucleotide
acaaagcucuagccgcucc

SEQ ID NO: 2908082 - RNA, 19 nt, Artificial Sequence
  Description of Artificial Sequence: Synthetic oligonucleotide
guuugugggccacacagug

SEQ ID NO: 2908083 - RNA, 19 nt, Artificial Sequence
  Description of Artificial Sequence: Synthetic oligonucleotide
ucauugaaguucuccagaa

SEQ ID NO: 2908084 - RNA, 19 nt, Artificial Sequence
  Description of Artificial Sequence: Synthetic oligonucleotide
uacaaggaacuucuccuga

SEQ ID NO: 2908085 - RNA, 19 nt, Artificial Sequence
  Description of Artificial Sequence: Synthetic oligonucleotide
auggaagagaagcuacuug

SEQ ID NO: 2908086 - RNA, 19 nt, Artificial Sequence
  Description of Artificial Sequence: Synthetic oligonucleotide
uacacacuucuccaacugc

SEQ ID NO: 2908087 - RNA, 19 nt, Artificial Sequence
  Description of Artificial Sequence: Synthetic oligonucleotide
ucuccugaugcccugugac

SEQ ID NO: 2908088 - RNA, 19 nt, Artificial Sequence
  Description of Artificial Sequence: Synthetic oligonucleotide
uuaaagaguuugugggcca

SEQ ID NO: 2908089 - RNA, 19 nt, Artificial Sequence
  Description of Artificial Sequence: Synthetic oligonucleotide
agagcuccucuguacaauc

SEQ ID NO: 2908090 - RNA, 19 nt, Artificial Sequence
  Description of Artificial Sequence: Synthetic oligonucleotide
cuuuacacacuucuccaac

SEQ ID NO: 2908091 - RNA, 19 nt, Artificial Sequence
  Description of Artificial Sequence: Synthetic oligonucleotide
gaagagaagcuacuugcca

SEQ ID NO: 2908092 - RNA, 19 nt, Artificial Sequence
  Description of Artificial Sequence: Synthetic oligonucleotide
cugugcaguuacuucaacc

SEQ ID NO: 2908093 - RNA, 19 nt, Artificial Sequence
  Description of Artificial Sequence: Synthetic oligonucleotide
uacaauccucuucugucug

SEQ ID NO: 2908094 - RNA, 19 nt, Artificial Sequence
  Description of Artificial Sequence: Synthetic oligonucleotide
agguggaugaucugugcag

SEQ ID NO: 2908095 - RNA, 19 nt, Artificial Sequence
  Description of Artificial Sequence: Synthetic oligonucleotide
ugcuaauuacauggaagag

SEQ ID NO: 2908096 - RNA, 19 nt, Artificial Sequence
  Description of Artificial Sequence: Synthetic oligonucleotide
ucagaucaguuuauucaga

SEQ ID NO: 2908097 - RNA, 19 nt, Artificial Sequence
  Description of Artificial Sequence: Synthetic oligonucleotide
gucacgugcaugcaagaag

SEQ ID NO: 2908098 - RNA, 19 nt, Artificial Sequence
  Description of Artificial Sequence: Synthetic oligonucleotide
uauucagauggaauugcua

SEQ ID NO: 2908099 - RNA, 19 nt, Artificial Sequence
  Description of Artificial Sequence: Synthetic oligonucleotide
gaauacacauuagaaacaa

SEQ ID NO: 2908100 - RNA, 19 nt, Artificial Sequence
  Description of Artificial Sequence: Synthetic oligonucleotide
uuagaaacaaaugguucaa

SEQ ID NO: 2908101 - RNA, 19 nt, Artificial Sequence
  Description of Artificial Sequence: Synthetic oligonucleotide
uccgguaagcaucuucugu

SEQ ID NO: 2908102 - RNA, 19 nt, Artificial Sequence
  Description of Artificial Sequence: Synthetic oligonucleotide
ucuguucguccucuagucc

SEQ ID NO: 2908103 - RNA, 19 nt, Artificial Sequence
  Description of Artificial Sequence: Synthetic oligonucleotide
ucuccagaauacacauuag

SEQ ID NO: 2908104 - RNA, 19 nt, Artificial Sequence
  Description of Artificial Sequence: Synthetic oligonucleotide
agaucaguuuauucagaug

SEQ ID NO: 2908105 - RNA, 19 nt, Artificial Sequence
  Description of Artificial Sequence: Synthetic oligonucleotide
aaagcucuagccgcucccg

SEQ ID NO: 2908106 - RNA, 19 nt, Artificial Sequence
  Description of Artificial Sequence: Synthetic oligonucleotide
gaaguucuccagaauacac

SEQ ID NO: 2908107 - RNA, 19 nt, Artificial Sequence
  Description of Artificial Sequence: Synthetic oligonucleotide
uccaacugcucacauugcu

SEQ ID NO: 2908108 - RNA, 19 nt, Artificial Sequence
  Description of Artificial Sequence: Synthetic oligonucleotide
uuuguucagaucaguuuau

SEQ ID NO: 2908109 - RNA, 19 nt, Artificial Sequence
  Description of Artificial Sequence: Synthetic oligonucleotide
auuacauggaagagaagcu

SEQ ID NO: 2908110 - RNA, 19 nt, Artificial Sequence
  Description of Artificial Sequence: Synthetic oligonucleotide
ugcccugugacaaggcuga

SEQ ID NO: 2908111 - RNA, 19 nt, Artificial Sequence
  Description of Artificial Sequence: Synthetic oligonucleotide
ugaucugugcaguuacuuc

SEQ ID NO: 2908112 - RNA, 19 nt, Artificial Sequence
  Description of Artificial Sequence: Synthetic oligonucleotide
aaguucuccagaauacaca

SEQ ID NO: 2908113 - RNA, 19 nt, Artificial Sequence
  Description of Artificial Sequence: Synthetic oligonucleotide
aacugcucacauugcucuc

SEQ ID NO: 2908114 - RNA, 19 nt, Artificial Sequence
  Description of Artificial Sequence: Synthetic oligonucleotide
agacacacgacuaucacaa

SEQ ID NO: 2908115 - RNA, 19 nt, Artificial Sequence
  Description of Artificial Sequence: Synthetic oligonucleotide
uaauuacauggaagagaag

SEQ ID NO: 2908116 - RNA, 19 nt, Artificial Sequence
  Description of Artificial Sequence: Synthetic oligonucleotide
uccacuaauucuuccuccu

SEQ ID NO: 2908117 - RNA, 19 nt, Artificial Sequence
  Description of Artificial Sequence: Synthetic oligonucleotide
uccucuuuggggucuccgg

SEQ ID NO: 2908118 - RNA, 19 nt, Artificial Sequence
  Description of Artificial Sequence: Synthetic oligonucleotide
aaagagcuccucuguacaa

SEQ ID NO: 2908119 - RNA, 19 nt, Artificial Sequence
  Description of Artificial Sequence: Synthetic oligonucleotide
acaaggcugagguggauga

SEQ ID NO: 2908120 - RNA, 19 nt, Artificial Sequence
  Description of Artificial Sequence: Synthetic oligonucleotide
uucuguucguccucuaguc

SEQ ID NO: 2908121 - RNA, 19 nt, Artificial Sequence
  Description of Artificial Sequence: Synthetic oligonucleotide
accuauuaaagaguuugug

SEQ ID NO: 2908122 - RNA, 19 nt, Artificial Sequence
  Description of Artificial Sequence: Synthetic oligonucleotide
ucguccucuagucccaugu

SEQ ID NO: 2908123 - RNA, 19 nt, Artificial Sequence
  Description of Artificial Sequence: Synthetic oligonucleotide
agaauacacauuagaaaca

SEQ ID NO: 2908124 - RNA, 19 nt, Artificial Sequence
  Description of Artificial Sequence: Synthetic oligonucleotide
aagcuacuugccauaauca

SEQ ID NO: 2908125 - RNA, 19 nt, Artificial Sequence
  Description of Artificial Sequence: Synthetic oligonucleotide
acacgacuaucacaaagcu

SEQ ID NO: 2908126 - RNA, 19 nt, Artificial Sequence
  Description of Artificial Sequence: Synthetic oligonucleotide
cuacaaggaacuucuccug

SEQ ID NO: 2908127 - RNA, 19 nt, Artificial Sequence
  Description of Artificial Sequence: Synthetic oligonucleotide
ucaguuuauucagauggaa

SEQ ID NO: 2908128 - RNA, 19 nt, Artificial Sequence
  Description of Artificial Sequence: Synthetic oligonucleotide
ugugaucgggaagacacac

SEQ ID NO: 2908129 - RNA, 19 nt, Artificial Sequence
  Description of Artificial Sequence: Synthetic oligonucleotide
acauuagaaacaaaugguu

SEQ ID NO: 2908130 - RNA, 19 nt, Artificial Sequence
  Description of Artificial Sequence: Synthetic oligonucleotide
gguaagcaucuucuguucg

SEQ ID NO: 2908131 - RNA, 19 nt, Artificial Sequence
  Description of Artificial Sequence: Synthetic oligonucleotide
gccauaaucauugaaguuc

SEQ ID NO: 2908132 - RNA, 19 nt, Artificial Sequence
  Description of Artificial Sequence: Synthetic oligonucleotide
ugagguggaugaucugugc

SEQ ID NO: 2908133 - RNA, 19 nt, Artificial Sequence
  Description of Artificial Sequence: Synthetic oligonucleotide
uucagauggaauugcuaau

SEQ ID NO: 2908134 - RNA, 19 nt, Artificial Sequence
  Description of Artificial Sequence: Synthetic oligonucleotide
caaaugguucaaaacuaca

SEQ ID NO: 2908135 - RNA, 19 nt, Artificial Sequence
  Description of Artificial Sequence: Synthetic oligonucleotide
uuacauggaagagaagcua

SEQ ID NO: 2908136 - RNA, 19 nt, Artificial Sequence
  Description of Artificial Sequence: Synthetic oligonucleotide
ucagauggaauugcuaauu

SEQ ID NO: 2908137 - RNA, 19 nt, Artificial Sequence
  Description of Artificial Sequence: Synthetic oligonucleotide
ggccuuuacacacuucucc

SEQ ID NO: 2908138 - RNA, 19 nt, Artificial Sequence
  Description of Artificial Sequence: Synthetic oligonucleotide
agcuacuugccauaaucau

SEQ ID NO: 2908139 - RNA, 19 nt, Artificial Sequence
  Description of Artificial Sequence: Synthetic oligonucleotide
guccacuaauucuuccucc

SEQ ID NO: 2908140 - RNA, 19 nt, Artificial Sequence
  Description of Artificial Sequence: Synthetic oligonucleotide
cucucacuguuguuagggg

SEQ ID NO: 2908141 - RNA, 19 nt, Artificial Sequence
  Description of Artificial Sequence: Synthetic oligonucleotide
aaccuauuaaagaguuugu

SEQ ID NO: 2908142 - RNA, 19 nt, Artificial Sequence
  Description of Artificial Sequence: Synthetic oligonucleotide
ucacaaagcucuagccgcu

SEQ ID NO: 2908143 - RNA, 19 nt, Artificial Sequence
  Description of Artificial Sequence: Synthetic oligonucleotide
uguucguccucuaguccca

SEQ ID NO: 2908144 - RNA, 19 nt, Artificial Sequence
  Description of Artificial Sequence: Synthetic oligonucleotide
auggaauugcuaauuacau

SEQ ID NO: 2908145 - RNA, 19 nt, Artificial Sequence
  Description of Artificial Sequence: Synthetic oligonucleotide
aauccucuucugucuguga

SEQ ID NO: 2908146 - RNA, 19 nt, Artificial Sequence
  Description of Artificial Sequence: Synthetic oligonucleotide
gacuaucacaaagcucuag

SEQ ID NO: 2908147 - RNA, 19 nt, Artificial Sequence
  Description of Artificial Sequence: Synthetic oligonucleotide
cuuuggggucuccggaucc

SEQ ID NO: 2908148 - RNA, 19 nt, Artificial Sequence
  Description of Artificial Sequence: Synthetic oligonucleotide
gaagucaaagagcuccucu

SEQ ID NO: 2908149 - RNA, 19 nt, Artificial Sequence
  Description of Artificial Sequence: Synthetic oligonucleotide
ucuguacaauccucuucug

SEQ ID NO: 2908150 - RNA, 19 nt, Artificial Sequence
  Description of Artificial Sequence: Synthetic oligonucleotide
cugagguggaugaucugug

SEQ ID NO: 2908151 - RNA, 19 nt, Artificial Sequence
  Description of Artificial Sequence: Synthetic oligonucleotide
gagguggaugaucugugca

SEQ ID NO: 2908152 - RNA, 19 nt, Artificial Sequence
  Description of Artificial Sequence: Synthetic oligonucleotide
aagaagucaaagagcuccu

SEQ ID NO: 2908153 - RNA, 19 nt, Artificial Sequence
  Description of Artificial Sequence: Synthetic oligonucleotide
ucgggaagacacacgacua

SEQ ID NO: 2908154 - RNA, 19 nt, Artificial Sequence
  Description of Artificial Sequence: Synthetic oligonucleotide
caaagcucuagccgcuccc

SEQ ID NO: 2908155 - RNA, 19 nt, Artificial Sequence
  Description of Artificial Sequence: Synthetic oligonucleotide
gcuaauuacauggaagaga

SEQ ID NO: 2908156 - RNA, 19 nt, Artificial Sequence
  Description of Artificial Sequence: Synthetic oligonucleotide
cuccagaauacacauuaga

SEQ ID NO: 2908157 - RNA, 19 nt, Artificial Sequence
  Description of Artificial Sequence: Synthetic oligonucleotide
caaggaacuucuccugaug

SEQ ID NO: 2908158 - RNA, 19 nt, Artificial Sequence
  Description of Artificial Sequence: Synthetic oligonucleotide
acuugccauaaucauugaa

SEQ ID NO: 2908159 - RNA, 19 nt, Artificial Sequence
  Description of Artificial Sequence: Synthetic oligonucleotide
aaacuacaaggaacuucuc

SEQ ID NO: 2908160 - RNA, 19 nt, Artificial Sequence
  Description of Artificial Sequence: Synthetic oligonucleotide
ggaugaucugugcaguuac

SEQ ID NO: 2908161 - RNA, 19 nt, Artificial Sequence
  Description of Artificial Sequence: Synthetic oligonucleotide
uuuggggucuccggauccg

SEQ ID NO: 2908162 - RNA, 19 nt, Artificial Sequence
  Description of Artificial Sequence: Synthetic oligonucleotide
cacgacuaucacaaagcuc

SEQ ID NO: 2908163 - RNA, 19 nt, Artificial Sequence
  Description of Artificial Sequence: Synthetic oligonucleotide
acaaggaacuucuccugau

SEQ ID NO: 2908164 - RNA, 19 nt, Artificial Sequence
  Description of Artificial Sequence: Synthetic oligonucleotide
ugccauaaucauugaaguu

SEQ ID NO: 2908165 - RNA, 19 nt, Artificial Sequence
  Description of Artificial Sequence: Synthetic oligonucleotide
ugcucucucacuguuguua

SEQ ID NO: 2908166 - RNA, 19 nt, Artificial Sequence
  Description of Artificial Sequence: Synthetic oligonucleotide
ggaacuucuccugaugccc

SEQ ID NO: 2908167 - RNA, 19 nt, Artificial Sequence
  Description of Artificial Sequence: Synthetic oligonucleotide
ucaaccuauuaaagaguuu

SEQ ID NO: 2908168 - RNA, 19 nt, Artificial Sequence
  Description of Artificial Sequence: Synthetic oligonucleotide
gguucaaaacuacaaggaa

SEQ ID NO: 2908169 - RNA, 19 nt, Artificial Sequence
  Description of Artificial Sequence: Synthetic oligonucleotide
agcuccucuguacaauccu

SEQ ID NO: 2908170 - RNA, 19 nt, Artificial Sequence
  Description of Artificial Sequence: Synthetic oligonucleotide
caaagagcuccucuguaca

SEQ ID NO: 2908171 - RNA, 19 nt, Artificial Sequence
  Description of Artificial Sequence: Synthetic oligonucleotide
ucuuuggggucuccggauc

SEQ ID NO: 2908172 - RNA, 19 nt, Artificial Sequence
  Description of Artificial Sequence: Synthetic oligonucleotide
uaagcaucuucuguucguc

SEQ ID NO: 2908173 - RNA, 19 nt, Artificial Sequence
  Description of Artificial Sequence: Synthetic oligonucleotide
uccugaugcccugugacaa

SEQ ID NO: 2908174 - RNA, 19 nt, Artificial Sequence
  Description of Artificial Sequence: Synthetic oligonucleotide
cugaugcccugugacaagg

SEQ ID NO: 2908175 - RNA, 19 nt, Artificial Sequence
  Description of Artificial Sequence: Synthetic oligonucleotide
agagaagcuacuugccaua

SEQ ID NO: 2908176 - RNA, 19 nt, Artificial Sequence
  Description of Artificial Sequence: Synthetic oligonucleotide
gaauugcuaauuacaugga

SEQ ID NO: 2908177 - RNA, 19 nt, Artificial Sequence
  Description of Artificial Sequence: Synthetic oligonucleotide
ucugugcaguuacuucaac

SEQ ID NO: 2908178 - RNA, 19 nt, Artificial Sequence
  Description of Artificial Sequence: Synthetic oligonucleotide
cacuucuccaacugcucac

SEQ ID NO: 2908179 - RNA, 19 nt, Artificial Sequence
  Description of Artificial Sequence: Synthetic oligonucleotide
cacacaguggucacgugca

SEQ ID NO: 2908180 - RNA, 19 nt, Artificial Sequence
  Description of Artificial Sequence: Synthetic oligonucleotide
uaaagaguuugugggccac

SEQ ID NO: 2908181 - RNA, 19 nt, Artificial Sequence
  Description of Artificial Sequence: Synthetic oligonucleotide
guggucacgugcaugcaag

SEQ ID NO: 2908182 - RNA, 19 nt, Artificial Sequence
  Description of Artificial Sequence: Synthetic oligonucleotide
cauugcucucucacuguug

SEQ ID NO: 2908183 - RNA, 19 nt, Artificial Sequence
  Description of Artificial Sequence: Synthetic oligonucleotide
ugaugcccugugacaaggc

SEQ ID NO: 2908184 - RNA, 19 nt, Artificial Sequence
  Description of Artificial Sequence: Synthetic oligonucleotide
aaagaguuugugggccaca

SEQ ID NO: 2908185 - RNA, 19 nt, Artificial Sequence
  Description of Artificial Sequence: Synthetic oligonucleotide
cucccgggccuuuacacac

SEQ ID NO: 2908186 - RNA, 19 nt, Artificial Sequence
  Description of Artificial Sequence: Synthetic oligonucleotide
uagaaacaaaugguucaaa

SEQ ID NO: 2908187 - RNA, 19 nt, Artificial Sequence
  Description of Artificial Sequence: Synthetic oligonucleotide
cugucugugaucgggaaga

SEQ ID NO: 2908188 - RNA, 19 nt, Artificial Sequence
  Description of Artificial Sequence: Synthetic oligonucleotide
uuccucuuuggggucuccg

SEQ ID NO: 2908189 - RNA, 19 nt, Artificial Sequence
  Description of Artificial Sequence: Synthetic oligonucleotide
ccucuucugucugugaucg

SEQ ID NO: 2908190 - RNA, 19 nt, Artificial Sequence
  Description of Artificial Sequence: Synthetic oligonucleotide
uccucuucugucugugauc

SEQ ID NO: 2908191 - RNA, 19 nt, Artificial Sequence
  Description of Artificial Sequence: Synthetic oligonucleotide
aagagcuccucuguacaau

SEQ ID NO: 2908192 - RNA, 19 nt, Artificial Sequence
  Description of Artificial Sequence: Synthetic oligonucleotide
acaauccucuucugucugu

SEQ ID NO: 2908193 - RNA, 19 nt, Artificial Sequence
  Description of Artificial Sequence: Synthetic oligonucleotide
acgugcaugcaagaaguca

SEQ ID NO: 2908194 - RNA, 19 nt, Artificial Sequence
  Description of Artificial Sequence: Synthetic oligonucleotide
aguggucacgugcaugcaa

SEQ ID NO: 2908195 - RNA, 19 nt, Artificial Sequence
  Description of Artificial Sequence: Synthetic oligonucleotide
ccagaauacacauuagaaa

SEQ ID NO: 2908196 - RNA, 19 nt, Artificial Sequence
  Description of Artificial Sequence: Synthetic oligonucleotide
uucugucugugaucgggaa

SEQ ID NO: 2908197 - RNA, 19 nt, Artificial Sequence
  Description of Artificial Sequence: Synthetic oligonucleotide
gauccgguaagcaucuucu

SEQ ID NO: 2908198 - RNA, 19 nt, Artificial Sequence
  Description of Artificial Sequence: Synthetic oligonucleotide
gcaugcaagaagucaaaga

SEQ ID NO: 2908199 - RNA, 19 nt, Artificial Sequence
  Description of Artificial Sequence: Synthetic oligonucleotide
cucucucacuguuguuagg

SEQ ID NO: 2908200 - RNA, 19 nt, Artificial Sequence
  Description of Artificial Sequence: Synthetic oligonucleotide
guccucuagucccauguca

SEQ ID NO: 2908201 - RNA, 19 nt, Artificial Sequence
  Description of Artificial Sequence: Synthetic oligonucleotide
ggaagagaagcuacuugcc

SEQ ID NO: 2908202 - RNA, 19 nt, Artificial Sequence
  Description of Artificial Sequence: Synthetic oligonucleotide
cuucaaccuauuaaagagu

SEQ ID NO: 2908203 - RNA, 19 nt, Artificial Sequence
  Description of Artificial Sequence: Synthetic oligonucleotide
acauugcucucucacuguu

SEQ ID NO: 2908204 - RNA, 19 nt, Artificial Sequence
  Description of Artificial Sequence: Synthetic oligonucleotide
auccgguaagcaucuucug

SEQ ID NO: 2908205 - RNA, 19 nt, Artificial Sequence
  Description of Artificial Sequence: Synthetic oligonucleotide
gcucacauugcucucucac

SEQ ID NO: 2908206 - RNA, 19 nt, Artificial Sequence
  Description of Artificial Sequence: Synthetic oligonucleotide
gugaucgggaagacacacg

SEQ ID NO: 2908207 - RNA, 19 nt, Artificial Sequence
  Description of Artificial Sequence: Synthetic oligonucleotide
cauaaucauugaaguucuc

SEQ ID NO: 2908208 - RNA, 19 nt, Artificial Sequence
  Description of Artificial Sequence: Synthetic oligonucleotide
acugcucacauugcucucu

SEQ ID NO: 2908209 - RNA, 19 nt, Artificial Sequence
  Description of Artificial Sequence: Synthetic oligonucleotide
guacaauccucuucugucu

SEQ ID NO: 2908210 - RNA, 19 nt, Artificial Sequence
  Description of Artificial Sequence: Synthetic oligonucleotide
gcucucucacuguuguuag

SEQ ID NO: 2908211 - RNA, 19 nt, Artificial Sequence
  Description of Artificial Sequence: Synthetic oligonucleotide
agaguuugugggccacaca

SEQ ID NO: 2908212 - RNA, 19 nt, Artificial Sequence
  Description of Artificial Sequence: Synthetic oligonucleotide
uggaugaucugugcaguua

SEQ ID NO: 2908213 - RNA, 19 nt, Artificial Sequence
  Description of Artificial Sequence: Synthetic oligonucleotide
ucaaaacuacaaggaacuu

SEQ ID NO: 2908214 - RNA, 19 nt, Artificial Sequence
  Description of Artificial Sequence: Synthetic oligonucleotide
acauggaagagaagcuacu

SEQ ID NO: 2908215 - RNA, 19 nt, Artificial Sequence
  Description of Artificial Sequence: Synthetic oligonucleotide
cuccaacugcucacauugc

SEQ ID NO: 2908216 - RNA, 19 nt, Artificial Sequence
  Description of Artificial Sequence: Synthetic oligonucleotide
augaucugugcaguuacuu

SEQ ID NO: 2908217 - RNA, 19 nt, Artificial Sequence
  Description of Artificial Sequence: Synthetic oligonucleotide
uacuugccauaaucauuga

SEQ ID NO: 2908218 - RNA, 19 nt, Artificial Sequence
  Description of Artificial Sequence: Synthetic oligonucleotide
caauccucuucugucugug

SEQ ID NO: 2908219 - RNA, 19 nt, Artificial Sequence
  Description of Artificial Sequence: Synthetic oligonucleotide
gagcuccucuguacaaucc

SEQ ID NO: 2908220 - RNA, 19 nt, Artificial Sequence
  Description of Artificial Sequence: Synthetic oligonucleotide
guaagcaucuucuguucgu

SEQ ID NO: 2908221 - RNA, 19 nt, Artificial Sequence
  Description of Artificial Sequence: Synthetic oligonucleotide
uggucacgugcaugcaaga

SEQ ID NO: 2908222 - RNA, 19 nt, Artificial Sequence
  Description of Artificial Sequence: Synthetic oligonucleotide
uucuccaacugcucacauu

SEQ ID NO: 2908223 - RNA, 19 nt, Artificial Sequence
  Description of Artificial Sequence: Synthetic oligonucleotide
cuucugucugugaucggga

SEQ ID NO: 2908224 - RNA, 19 nt, Artificial Sequence
  Description of Artificial Sequence: Synthetic oligonucleotide
ucuccggauccgguaagca

SEQ ID NO: 2908225 - RNA, 19 nt, Artificial Sequence
  Description of Artificial Sequence: Synthetic oligonucleotide
uuggggucuccggauccgg

SEQ ID NO: 2908226 - RNA, 19 nt, Artificial Sequence
  Description of Artificial Sequence: Synthetic oligonucleotide
gguccacuaauucuuccuc

SEQ ID NO: 2908227 - RNA, 19 nt, Artificial Sequence
  Description of Artificial Sequence: Synthetic oligonucleotide
ccacacaguggucacgugc

SEQ ID NO: 2908228 - RNA, 19 nt, Artificial Sequence
  Description of Artificial Sequence: Synthetic oligonucleotide
augcccugugacaaggcug

SEQ ID NO: 2908229 - RNA, 19 nt, Artificial Sequence
  Description of Artificial Sequence: Synthetic oligonucleotide
cacuaauucuuccuccucu

SEQ ID NO: 2908230 - RNA, 19 nt, Artificial Sequence
  Description of Artificial Sequence: Synthetic oligonucleotide
uccucuguacaauccucuu

SEQ ID NO: 2908231 - RNA, 19 nt, Artificial Sequence
  Description of Artificial Sequence: Synthetic oligonucleotide
cucuagucccaugucagga

SEQ ID NO: 2908232 - RNA, 19 nt, Artificial Sequence
  Description of Artificial Sequence: Synthetic oligonucleotide
agaagcuacuugccauaau

SEQ ID NO: 2908233 - RNA, 19 nt, Artificial Sequence
  Description of Artificial Sequence: Synthetic oligonucleotide
gaugcccugugacaaggcu

SEQ ID NO: 2908234 - RNA, 19 nt, Artificial Sequence
  Description of Artificial Sequence: Synthetic oligonucleotide
gccuuuacacacuucucca

SEQ ID NO: 2908235 - RNA, 19 nt, Artificial Sequence
  Description of Artificial Sequence: Synthetic oligonucleotide
aggcugagguggaugaucu

SEQ ID NO: 2908236 - RNA, 19 nt, Artificial Sequence
  Description of Artificial Sequence: Synthetic oligonucleotide
gucaaagagcuccucugua

SEQ ID NO: 2908237 - RNA, 19 nt, Artificial Sequence
  Description of Artificial Sequence: Synthetic oligonucleotide
ggaagacacacgacuauca

SEQ ID NO: 2908238 - RNA, 19 nt, Artificial Sequence
  Description of Artificial Sequence: Synthetic oligonucleotide
caguuuauucagauggaau

SEQ ID NO: 2908239 - RNA, 19 nt, Artificial Sequence
  Description of Artificial Sequence: Synthetic oligonucleotide
uuguucagaucaguuuauu

SEQ ID NO: 2908240 - RNA, 19 nt, Artificial Sequence
  Description of Artificial Sequence: Synthetic oligonucleotide
ugcucacauugcucucuca

SEQ ID NO: 2908241 - RNA, 19 nt, Artificial Sequence
  Description of Artificial Sequence: Synthetic oligonucleotide
gaucgggaagacacacgac

SEQ ID NO: 2908242 - RNA, 19 nt, Artificial Sequence
  Description of Artificial Sequence: Synthetic oligonucleotide
cagauggaauugcuaauua

SEQ ID NO: 2908243 - RNA, 19 nt, Artificial Sequence
  Description of Artificial Sequence: Synthetic oligonucleotide
ggauccgguaagcaucuuc

SEQ ID NO: 2908244 - RNA, 19 nt, Artificial Sequence
  Description of Artificial Sequence: Synthetic oligonucleotide
cagaucaguuuauucagau

SEQ ID NO: 2908245 - RNA, 19 nt, Artificial Sequence
  Description of Artificial Sequence: Synthetic oligonucleotide
ccaacugcucacauugcuc

SEQ ID NO: 2908246 - RNA, 19 nt, Artificial Sequence
  Description of Artificial Sequence: Synthetic oligonucleotide
uucguccucuagucccaug

SEQ ID NO: 2908247 - RNA, 19 nt, Artificial Sequence
  Description of Artificial Sequence: Synthetic oligonucleotide
cucuucugucugugaucgg

SEQ ID NO: 2908248 - RNA, 19 nt, Artificial Sequence
  Description of Artificial Sequence: Synthetic oligonucleotide
cacaguggucacgugcaug

SEQ ID NO: 2908249 - RNA, 19 nt, Artificial Sequence
  Description of Artificial Sequence: Synthetic oligonucleotide
aguuugugggccacacagu

SEQ ID NO: 2908250 - RNA, 19 nt, Artificial Sequence
  Description of Artificial Sequence: Synthetic oligonucleotide
cuucuccugaugcccugug

SEQ ID NO: 2908251 - RNA, 19 nt, Artificial Sequence
  Description of Artificial Sequence: Synthetic oligonucleotide
gagaagcuacuugccauaa

SEQ ID NO: 2908252 - RNA, 19 nt, Artificial Sequence
  Description of Artificial Sequence: Synthetic oligonucleotide
cuucuguucguccucuagu

SEQ ID NO: 2908253 - RNA, 19 nt, Artificial Sequence
  Description of Artificial Sequence: Synthetic oligonucleotide
cugugacaaggcugaggug

SEQ ID NO: 2908254 - RNA, 19 nt, Artificial Sequence
  Description of Artificial Sequence: Synthetic oligonucleotide
cuccugaugcccugugaca

SEQ ID NO: 2908255 - RNA, 19 nt, Artificial Sequence
  Description of Artificial Sequence: Synthetic oligonucleotide
uggggucuccggauccggu

SEQ ID NO: 2908256 - RNA, 19 nt, Artificial Sequence
  Description of Artificial Sequence: Synthetic oligonucleotide
cucacauugcucucucacu

SEQ ID NO: 2908257 - RNA, 19 nt, Artificial Sequence
  Description of Artificial Sequence: Synthetic oligonucleotide
ugucugugaucgggaagac

SEQ ID NO: 2908258 - RNA, 19 nt, Artificial Sequence
  Description of Artificial Sequence: Synthetic oligonucleotide
gugcaguuacuucaaccua

SEQ ID NO: 2908259 - RNA, 19 nt, Artificial Sequence
  Description of Artificial Sequence: Synthetic oligonucleotide
cacgugcaugcaagaaguc

SEQ ID NO: 2908260 - RNA, 19 nt, Artificial Sequence
  Description of Artificial Sequence: Synthetic oligonucleotide
cucuagccgcucccgggcc

SEQ ID NO: 2908261 - RNA, 19 nt, Artificial Sequence
  Description of Artificial Sequence: Synthetic oligonucleotide
ccucuagucccaugucagg

SEQ ID NO: 2908262 - RNA, 19 nt, Artificial Sequence
  Description of Artificial Sequence: Synthetic oligonucleotide
ccucuucuuccucuuuggg

SEQ ID NO: 2908263 - RNA, 19 nt, Artificial Sequence
  Description of Artificial Sequence: Synthetic oligonucleotide
cuguacaauccucuucugu

SEQ ID NO: 2908264 - RNA, 19 nt, Artificial Sequence
  Description of Artificial Sequence: Synthetic oligonucleotide
cugcucacauugcucucuc

SEQ ID NO: 2908265 - RNA, 19 nt, Artificial Sequence
  Description of Artificial Sequence: Synthetic oligonucleotide
ccugugacaaggcugaggu

SEQ ID NO: 2908266 - RNA, 19 nt, Artificial Sequence
  Description of Artificial Sequence: Synthetic oligonucleotide
ccauaaucauugaaguucu

SEQ ID NO: 2908267 - RNA, 19 nt, Artificial Sequence
  Description of Artificial Sequence: Synthetic oligonucleotide
cugugaucgggaagacaca

SEQ ID NO: 2908268 - RNA, 19 nt, Artificial Sequence
  Description of Artificial Sequence: Synthetic oligonucleotide
aucugugcaguuacuucaa

SEQ ID NO: 2908269 - RNA, 19 nt, Artificial Sequence
  Description of Artificial Sequence: Synthetic oligonucleotide
ugugggccacacagugguc

SEQ ID NO: 2908270 - RNA, 19 nt, Artificial Sequence
  Description of Artificial Sequence: Synthetic oligonucleotide
gcucuagccgcucccgggc

SEQ ID NO: 2908271 - RNA, 19 nt, Artificial Sequence
  Description of Artificial Sequence: Synthetic oligonucleotide
ucccgggccuuuacacacu

SEQ ID NO: 2908272 - RNA, 19 nt, Artificial Sequence
  Description of Artificial Sequence: Synthetic oligonucleotide
gacacacgacuaucacaaa

SEQ ID NO: 2908273 - RNA, 19 nt, Artificial Sequence
  Description of Artificial Sequence: Synthetic oligonucleotide
gaacuucuccugaugcccu

SEQ ID NO: 2908274 - RNA, 19 nt, Artificial Sequence
  Description of Artificial Sequence: Synthetic oligonucleotide
gucuccggauccgguaagc

SEQ ID NO: 2908275 - RNA, 19 nt, Artificial Sequence
  Description of Artificial Sequence: Synthetic oligonucleotide
acacaguggucacgugcau

SEQ ID NO: 2908276 - RNA, 19 nt, Artificial Sequence
  Description of Artificial Sequence: Synthetic oligonucleotide
gaugaucugugcaguuacu

SEQ ID NO: 2908277 - RNA, 19 nt, Artificial Sequence
  Description of Artificial Sequence: Synthetic oligonucleotide
cgugcaugcaagaagucaa

SEQ ID NO: 2908278 - RNA, 19 nt, Artificial Sequence
  Description of Artificial Sequence: Synthetic oligonucleotide
ggucuccggauccgguaag

SEQ ID NO: 2908279 - RNA, 19 nt, Artificial Sequence
  Description of Artificial Sequence: Synthetic oligonucleotide
ucuuccucuuuggggucuc

SEQ ID NO: 2908280 - RNA, 19 nt, Artificial Sequence
  Description of Artificial Sequence: Synthetic oligonucleotide
cacaaagcucuagccgcuc

SEQ ID NO: 2908281 - RNA, 19 nt, Artificial Sequence
  Description of Artificial Sequence: Synthetic oligonucleotide
cacauugcucucucacugu

SEQ ID NO: 2908282 - RNA, 19 nt, Artificial Sequence
  Description of Artificial Sequence: Synthetic oligonucleotide
caguuacuucaaccuauua

SEQ ID NO: 2908283 - RNA, 19 nt, Artificial Sequence
  Description of Artificial Sequence: Synthetic oligonucleotide
cauugaaguucuccagaau

SEQ ID NO: 2908284 - RNA, 19 nt, Artificial Sequence
  Description of Artificial Sequence: Synthetic oligonucleotide
ggguccacuaauucuuccu

SEQ ID NO: 2908285 - RNA, 19 nt, Artificial Sequence
  Description of Artificial Sequence: Synthetic oligonucleotide
uugcucucucacuguuguu

SEQ ID NO: 2908286 - RNA, 19 nt, Artificial Sequence
  Description of Artificial Sequence: Synthetic oligonucleotide
gugcaugcaagaagucaaa

SEQ ID NO: 2908287 - RNA, 19 nt, Artificial Sequence
  Description of Artificial Sequence: Synthetic oligonucleotide
ugacaaggcugagguggau

SEQ ID NO: 2908288 - RNA, 19 nt, Artificial Sequence
  Description of Artificial Sequence: Synthetic oligonucleotide
aucuucuguucguccucua

SEQ ID NO: 2908289 - RNA, 19 nt, Artificial Sequence
  Description of Artificial Sequence: Synthetic oligonucleotide
gcugagguggaugaucugu

SEQ ID NO: 2908290 - RNA, 19 nt, Artificial Sequence
  Description of Artificial Sequence: Synthetic oligonucleotide
ccacuaauucuuccuccuc

SEQ ID NO: 2908291 - RNA, 19 nt, Artificial Sequence
  Description of Artificial Sequence: Synthetic oligonucleotide
ccuuuacacacuucuccaa

SEQ ID NO: 2908292 - RNA, 19 nt, Artificial Sequence
  Description of Artificial Sequence: Synthetic oligonucleotide
cccugugacaaggcugagg

SEQ ID NO: 2908293 - RNA, 19 nt, Artificial Sequence
  Description of Artificial Sequence: Synthetic oligonucleotide
cauggaagagaagcuacuu

SEQ ID NO: 2908294 - RNA, 19 nt, Artificial Sequence
  Description of Artificial Sequence: Synthetic oligonucleotide
gguggaugaucugugcagu

SEQ ID NO: 2908295 - RNA, 19 nt, Artificial Sequence
  Description of Artificial Sequence: Synthetic oligonucleotide
cucuuuggggucuccggau

SEQ ID NO: 2908296 - RNA, 19 nt, Artificial Sequence
  Description of Artificial Sequence: Synthetic oligonucleotide
gcaagaagucaaagagcuc

SEQ ID NO: 2908297 - RNA, 19 nt, Artificial Sequence
  Description of Artificial Sequence: Synthetic oligonucleotide
gcuccucuguacaauccuc

SEQ ID NO: 2908298 - RNA, 19 nt, Artificial Sequence
  Description of Artificial Sequence: Synthetic oligonucleotide
cgguaagcaucuucuguuc

SEQ ID NO: 2908299 - RNA, 19 nt, Artificial Sequence
  Description of Artificial Sequence: Synthetic oligonucleotide
ggcugagguggaugaucug

SEQ ID NO: 2908300 - RNA, 19 nt, Artificial Sequence
  Description of Artificial Sequence: Synthetic oligonucleotide
ccucuuuggggucuccgga

SEQ ID NO: 2908301 - RNA, 19 nt, Artificial Sequence
  Description of Artificial Sequence: Synthetic oligonucleotide
ggucacgugcaugcaagaa

SEQ ID NO: 2908302 - RNA, 19 nt, Artificial Sequence
  Description of Artificial Sequence: Synthetic oligonucleotide
gggucuccggauccgguaa

SEQ ID NO: 2908303 - RNA, 19 nt, Artificial Sequence
  Description of Artificial Sequence: Synthetic oligonucleotide
gcuacuugccauaaucauu

SEQ ID NO: 2908304 - RNA, 19 nt, Artificial Sequence
  Description of Artificial Sequence: Synthetic oligonucleotide
gcucccgggccuuuacaca

SEQ ID NO: 2908305 - RNA, 19 nt, Artificial Sequence
  Description of Artificial Sequence: Synthetic oligonucleotide
cuccggauccgguaagcau

SEQ ID NO: 2908306 - RNA, 19 nt, Artificial Sequence
  Description of Artificial Sequence: Synthetic oligonucleotide
guggaugaucugugcaguu

SEQ ID NO: 2908307 - RNA, 19 nt, Artificial Sequence
  Description of Artificial Sequence: Synthetic oligonucleotide
gggccacacaguggucacg

SEQ ID NO: 2908308 - RNA, 19 nt, Artificial Sequence
  Description of Artificial Sequence: Synthetic oligonucleotide
gggccuuuacacacuucuc

SEQ ID NO: 2908309 - RNA, 19 nt, Artificial Sequence
  Description of Artificial Sequence: Synthetic oligonucleotide
cgcucccgggccuuuacac

SEQ ID NO: 2908310 - RNA, 19 nt, Artificial Sequence
  Description of Artificial Sequence: Synthetic oligonucleotide
cuucuccaacugcucacau

SEQ ID NO: 2908311 - RNA, 19 nt, Artificial Sequence
  Description of Artificial Sequence: Synthetic oligonucleotide
ccgguaagcaucuucuguu

SEQ ID NO: 2908312 - RNA, 19 nt, Artificial Sequence
  Description of Artificial Sequence: Synthetic oligonucleotide
gccacacaguggucacgug

SEQ ID NO: 2908313 - RNA, 19 nt, Artificial Sequence
  Description of Artificial Sequence: Synthetic oligonucleotide
ggggucuccggauccggua

SEQ ID NO: 2908314 - RNA, 19 nt, Artificial Sequence
  Description of Artificial Sequence: Synthetic oligonucleotide
ggccacacaguggucacgu

SEQ ID NO: 2908315 - RNA, 19 nt, Artificial Sequence
  Description of Artificial Sequence: Synthetic oligonucleotide
caguggucacgugcaugca

SEQ ID NO: 2908316 - RNA, 19 nt, Artificial Sequence
  Description of Artificial Sequence: Synthetic oligonucleotide
cgggccuuuacacacuucu

SEQ ID NO: 2908317 - RNA, 19 nt, Artificial Sequence
  Description of Artificial Sequence: Synthetic oligonucleotide
cguccucuagucccauguc

SEQ ID NO: 2908318 - RNA, 19 nt, Artificial Sequence
  Description of Artificial Sequence: Synthetic oligonucleotide
gccgcucccgggccuuuac

SEQ ID NO: 2908319 - RNA, 19 nt, Artificial Sequence
  Description of Artificial Sequence: Synthetic oligonucleotide
gcaguuacuucaaccuauu

SEQ ID NO: 2908320 - RNA, 19 nt, Artificial Sequence
  Description of Artificial Sequence: Synthetic oligonucleotide
ccggauccgguaagcaucu

SEQ ID NO: 2908321 - RNA, 19 nt, Artificial Sequence
  Description of Artificial Sequence: Synthetic oligonucleotide
caaggcugagguggaugau

SEQ ID NO: 2908322 - RNA, 19 nt, Artificial Sequence
  Description of Artificial Sequence: Synthetic oligonucleotide
ccgggccuuuacacacuuc

SEQ ID NO: 2908323 - RNA, 19 nt, Artificial Sequence
  Description of Artificial Sequence: Synthetic oligonucleotide
gcccugugacaaggcugag

SEQ ID NO: 2908324 - RNA, 19 nt, Artificial Sequence
  Description of Artificial Sequence: Synthetic oligonucleotide
uagccgcucccgggccuuu

SEQ ID NO: 2908325 - RNA, 19 nt, Artificial Sequence
  Description of Artificial Sequence: Synthetic oligonucleotide
cgacuaucacaaagcucua

SEQ ID NO: 2908326 - RNA, 19 nt, Artificial Sequence
  Description of Artificial Sequence: Synthetic oligonucleotide
agccgcucccgggccuuua

SEQ ID NO: 2908327 - RNA, 19 nt, Artificial Sequence
  Description of Artificial Sequence: Synthetic oligonucleotide
cgggaagacacacgacuau

SEQ ID NO: 2908328 - RNA, 19 nt, Artificial Sequence
  Description of Artificial Sequence: Synthetic oligonucleotide
ccgcucccgggccuuuaca

SEQ ID NO: 2908329 - RNA, 19 nt, Artificial Sequence
  Description of Artificial Sequence: Synthetic oligonucleotide
cccgggccuuuacacacuu

SEQ ID NO: 2908330 - RNA, 19 nt, Artificial Sequence
  Description of Artificial Sequence: Synthetic oligonucleotide
cggauccgguaagcaucuu

SEQ ID NO: 2908331 - RNA, 19 nt, Artificial Sequence
  Description of Artificial Sequence: Synthetic oligonucleotide
aguacuuaaguucagagca

SEQ ID NO: 2908332 - RNA, 19 nt, Artificial Sequence
  Description of Artificial Sequence: Synthetic oligonucleotide
aucucugacauccaguucc

SEQ ID NO: 2908333 - RNA, 19 nt, Artificial Sequence
  Description of Artificial Sequence: Synthetic oligonucleotide
acaaagaguacuuaaguuc

SEQ ID NO: 2908334 - RNA, 19 nt, Artificial Sequence
  Description of Artificial Sequence: Synthetic oligonucleotide
uacacuuugaagcucuggg

SEQ ID NO: 2908335 - RNA, 19 nt, Artificial Sequence
  Description of Artificial Sequence: Synthetic oligonucleotide
auuacacaccagcacaucc

SEQ ID NO: 2908336 - RNA, 19 nt, Artificial Sequence
  Description of Artificial Sequence: Synthetic oligonucleotide
guggcauacacuuugaagc

SEQ ID NO: 2908337 - RNA, 19 nt, Artificial Sequence
  Description of Artificial Sequence: Synthetic oligonucleotide
aaccgcauccagcucaugc

SEQ ID NO: 2908338 - RNA, 19 nt, Artificial Sequence
  Description of Artificial Sequence: Synthetic oligonucleotide
ucugcagggagccaggcgg

SEQ ID NO: 2908339 - RNA, 19 nt, Artificial Sequence
  Description of Artificial Sequence: Synthetic oligonucleotide
uaaugagcacuacugugcg

SEQ ID NO: 2908340 - RNA, 19 nt, Artificial Sequence
  Description of Artificial Sequence: Synthetic oligonucleotide
ugacaaagaguacuuaagu

SEQ ID NO: 2908341 - RNA, 19 nt, Artificial Sequence
  Description of Artificial Sequence: Synthetic oligonucleotide
uguggcauacacuuugaag

SEQ ID NO: 2908342 - RNA, 19 nt, Artificial Sequence
  Description of Artificial Sequence: Synthetic oligonucleotide
agaguacuuaaguucagag

SEQ ID NO: 2908343 - RNA, 19 nt, Artificial Sequence
  Description of Artificial Sequence: Synthetic oligonucleotide
uucacauccagcacggcgc

SEQ ID NO: 2908344 - RNA, 19 nt, Artificial Sequence
  Description of Artificial Sequence: Synthetic oligonucleotide
accacauucacauccagca

SEQ ID NO: 2908345 - RNA, 19 nt, Artificial Sequence
  Description of Artificial Sequence: Synthetic oligonucleotide
aguuccaaugucugcaggg

SEQ ID NO: 2908346 - RNA, 19 nt, Artificial Sequence
  Description of Artificial Sequence: Synthetic oligonucleotide
ucugggaugggucggaagc

SEQ ID NO: 2908347 - RNA, 19 nt, Artificial Sequence
  Description of Artificial Sequence: Synthetic oligonucleotide
cacauucacauccagcacg

SEQ ID NO: 2908348 - RNA, 19 nt, Artificial Sequence
  Description of Artificial Sequence: Synthetic oligonucleotide
cagacgaacagccaagugc

SEQ ID NO: 2908349 - RNA, 19 nt, Artificial Sequence
  Description of Artificial Sequence: Synthetic oligonucleotide
caucaaaccuccuacacuc

SEQ ID NO: 2908350 - RNA, 19 nt, Artificial Sequence
  Description of Artificial Sequence: Synthetic oligonucleotide
aaccgucccgaccacauuc

SEQ ID NO: 2908351 - RNA, 19 nt, Artificial Sequence
  Description of Artificial Sequence: Synthetic oligonucleotide
gaguacuuaaguucagagc

SEQ ID NO: 2908352 - RNA, 19 nt, Artificial Sequence
  Description of Artificial Sequence: Synthetic oligonucleotide
aacagccaagugcaggccg

SEQ ID NO: 2908353 - RNA, 19 nt, Artificial Sequence
  Description of Artificial Sequence: Synthetic oligonucleotide
gaagcucugggaugggucg

SEQ ID NO: 2908354 - RNA, 19 nt, Artificial Sequence
  Description of Artificial Sequence: Synthetic oligonucleotide
aaaccuccuacacucgcag

SEQ ID NO: 2908355 - RNA, 19 nt, Artificial Sequence
  Description of Artificial Sequence: Synthetic oligonucleotide
uccggcauuacacaccagc

SEQ ID NO: 2908356 - RNA, 19 nt, Artificial Sequence
  Description of Artificial Sequence: Synthetic oligonucleotide
aaugucugcagggagccag

SEQ ID NO: 2908357 - RNA, 19 nt, Artificial Sequence
  Description of Artificial Sequence: Synthetic oligonucleotide
caaagaguacuuaaguuca

SEQ ID NO: 2908358 - RNA, 19 nt, Artificial Sequence
  Description of Artificial Sequence: Synthetic oligonucleotide
ugggucggaagccagacga

SEQ ID NO: 2908359 - RNA, 19 nt, Artificial Sequence
  Description of Artificial Sequence: Synthetic oligonucleotide
uacacucgcagucacuagc

SEQ ID NO: 2908360 - RNA, 19 nt, Artificial Sequence
  Description of Artificial Sequence: Synthetic oligonucleotide
guaaugagcacuacugugc

SEQ ID NO: 2908361 - RNA, 19 nt, Artificial Sequence
  Description of Artificial Sequence: Synthetic oligonucleotide
ugugcgguccaugacaaag

SEQ ID NO: 2908362 - RNA, 19 nt, Artificial Sequence
  Description of Artificial Sequence: Synthetic oligonucleotide
cuuugaagcucugggaugg

SEQ ID NO: 2908363 - RNA, 19 nt, Artificial Sequence
  Description of Artificial Sequence: Synthetic oligonucleotide
aaugagcacuacugugcgg

SEQ ID NO: 2908364 - RNA, 19 nt, Artificial Sequence
  Description of Artificial Sequence: Synthetic oligonucleotide
uuacacaccagcacaucca

SEQ ID NO: 2908365 - RNA, 19 nt, Artificial Sequence
  Description of Artificial Sequence: Synthetic oligonucleotide
ucaugucuggcagaaaggc

SEQ ID NO: 2908366 - RNA, 19 nt, Artificial Sequence
  Description of Artificial Sequence: Synthetic oligonucleotide
ugaaucucugacauccagu

SEQ ID NO: 2908367 - RNA, 19 nt, Artificial Sequence
  Description of Artificial Sequence: Synthetic oligonucleotide
uacugugcgguccaugaca

SEQ ID NO: 2908368 - RNA, 19 nt, Artificial Sequence
  Description of Artificial Sequence: Synthetic oligonucleotide
ucggaagccagacgaacag

SEQ ID NO: 2908369 - RNA, 19 nt, Artificial Sequence
  Description of Artificial Sequence: Synthetic oligonucleotide
ucaaaccuccuacacucgc

SEQ ID NO: 2908370 - RNA, 19 nt, Artificial Sequence
  Description of Artificial Sequence: Synthetic oligonucleotide
accuccuacacucgcaguc

SEQ ID NO: 2908371 - RNA, 19 nt, Artificial Sequence
  Description of Artificial Sequence: Synthetic oligonucleotide
uccaguggcccgaacaggc

SEQ ID NO: 2908372 - RNA, 19 nt, Artificial Sequence
  Description of Artificial Sequence: Synthetic oligonucleotide
cucgcagucacuagcacac

SEQ ID NO: 2908373 - RNA, 19 nt, Artificial Sequence
  Description of Artificial Sequence: Synthetic oligonucleotide
agaaaggccugcagcaucc

SEQ ID NO: 2908374 - RNA, 19 nt, Artificial Sequence
  Description of Artificial Sequence: Synthetic oligonucleotide
gucacuagcacacgcccgg

SEQ ID NO: 2908375 - RNA, 19 nt, Artificial Sequence
  Description of Artificial Sequence: Synthetic oligonucleotide
gguaaugagcacuacugug

SEQ ID NO: 2908376 - RNA, 19 nt, Artificial Sequence
  Description of Artificial Sequence: Synthetic oligonucleotide
gauucugaaucucugacau

SEQ ID NO: 2908377 - RNA, 19 nt, Artificial Sequence
  Description of Artificial Sequence: Synthetic oligonucleotide
uucaggucccucagugugg

SEQ ID NO: 2908378 - RNA, 19 nt, Artificial Sequence
  Description of Artificial Sequence: Synthetic oligonucleotide
uccaguuccaaugucugca

SEQ ID NO: 2908379 - RNA, 19 nt, Artificial Sequence
  Description of Artificial Sequence: Synthetic oligonucleotide
accgcauccagcucaugcg

SEQ ID NO: 2908380 - RNA, 19 nt, Artificial Sequence
  Description of Artificial Sequence: Synthetic oligonucleotide
acuacugugcgguccauga

SEQ ID NO: 2908381 - RNA, 19 nt, Artificial Sequence
  Description of Artificial Sequence: Synthetic oligonucleotide
auuccggaggagcagccgg

SEQ ID NO: 2908382 - RNA, 19 nt, Artificial Sequence
  Description of Artificial Sequence: Synthetic oligonucleotide
uuccaaugucugcagggag

SEQ ID NO: 2908383 - RNA, 19 nt, Artificial Sequence
  Description of Artificial Sequence: Synthetic oligonucleotide
auccaguuccaaugucugc

SEQ ID NO: 2908384 - RNA, 19 nt, Artificial Sequence
  Description of Artificial Sequence: Synthetic oligonucleotide
ugcgguccaugacaaagag

SEQ ID NO: 2908385 - RNA, 19 nt, Artificial Sequence
  Description of Artificial Sequence: Synthetic oligonucleotide
acuuugaagcucugggaug

SEQ ID NO: 2908386 - RNA, 19 nt, Artificial Sequence
  Description of Artificial Sequence: Synthetic oligonucleotide
ugugccuucaggucccuca

SEQ ID NO: 2908387 - RNA, 19 nt, Artificial Sequence
  Description of Artificial Sequence: Synthetic oligonucleotide
ugcagcauccgaaccgucc

SEQ ID NO: 2908388 - RNA, 19 nt, Artificial Sequence
  Description of Artificial Sequence: Synthetic oligonucleotide
ugacauccaguuccaaugu

SEQ ID NO: 2908389 - RNA, 19 nt, Artificial Sequence
  Description of Artificial Sequence: Synthetic oligonucleotide
ucccugugccuucaggucc

SEQ ID NO: 2908390 - RNA, 19 nt, Artificial Sequence
  Description of Artificial Sequence: Synthetic oligonucleotide
aagccagacgaacagccaa

SEQ ID NO: 2908391 - RNA, 19 nt, Artificial Sequence
  Description of Artificial Sequence: Synthetic oligonucleotide
auccacgcgacccucgguc

SEQ ID NO: 2908392 - RNA, 19 nt, Artificial Sequence
  Description of Artificial Sequence: Synthetic oligonucleotide
caugucuggcagaaaggcc

SEQ ID NO: 2908393 - RNA, 19 nt, Artificial Sequence
  Description of Artificial Sequence: Synthetic oligonucleotide
ugaagcucugggauggguc

SEQ ID NO: 2908394 - RNA, 19 nt, Artificial Sequence
  Description of Artificial Sequence: Synthetic oligonucleotide
aagaguacuuaaguucaga

SEQ ID NO: 2908395 - RNA, 19 nt, Artificial Sequence
  Description of Artificial Sequence: Synthetic oligonucleotide
uccaugacaaagaguacuu

SEQ ID NO: 2908396 - RNA, 19 nt, Artificial Sequence
  Description of Artificial Sequence: Synthetic oligonucleotide
caugacaaagaguacuuaa

SEQ ID NO: 2908397 - RNA, 19 nt, Artificial Sequence
  Description of Artificial Sequence: Synthetic oligonucleotide
aaagaguacuuaaguucag

SEQ ID NO: 2908398 - RNA, 19 nt, Artificial Sequence
  Description of Artificial Sequence: Synthetic oligonucleotide
acauucacauccagcacgg

SEQ ID NO: 2908399 - RNA, 19 nt, Artificial Sequence
  Description of Artificial Sequence: Synthetic oligonucleotide
agcucaugcgccuccagug

SEQ ID NO: 2908400 - RNA, 19 nt, Artificial Sequence
  Description of Artificial Sequence: Synthetic oligonucleotide
acacuuugaagcucuggga

SEQ ID NO: 2908401 - RNA, 19 nt, Artificial Sequence
  Description of Artificial Sequence: Synthetic oligonucleotide
agacgaacagccaagugca

SEQ ID NO: 2908402 - RNA, 19 nt, Artificial Sequence
  Description of Artificial Sequence: Synthetic oligonucleotide
cauccaguuccaaugucug

SEQ ID NO: 2908403 - RNA, 19 nt, Artificial Sequence
  Description of Artificial Sequence: Synthetic oligonucleotide
cugaaucucugacauccag

SEQ ID NO: 2908404 - RNA, 19 nt, Artificial Sequence
  Description of Artificial Sequence: Synthetic oligonucleotide
auccgaaccgucccgacca

SEQ ID NO: 2908405 - RNA, 19 nt, Artificial Sequence
  Description of Artificial Sequence: Synthetic oligonucleotide
auucugaaucucugacauc

SEQ ID NO: 2908406 - RNA, 19 nt, Artificial Sequence
  Description of Artificial Sequence: Synthetic oligonucleotide
augucuggcagaaaggccu

SEQ ID NO: 2908407 - RNA, 19 nt, Artificial Sequence
  Description of Artificial Sequence: Synthetic oligonucleotide
augagcacuacugugcggu

SEQ ID NO: 2908408 - RNA, 19 nt, Artificial Sequence
  Description of Artificial Sequence: Synthetic oligonucleotide
cagucacuagcacacgccc

SEQ ID NO: 2908409 - RNA, 19 nt, Artificial Sequence
  Description of Artificial Sequence: Synthetic oligonucleotide
caacaguggucccugugcc

SEQ ID NO: 2908410 - RNA, 19 nt, Artificial Sequence
  Description of Artificial Sequence: Synthetic oligonucleotide
gacccucggucacacaugc

SEQ ID NO: 2908411 - RNA, 19 nt, Artificial Sequence
  Description of Artificial Sequence: Synthetic oligonucleotide
auacacuuugaagcucugg

SEQ ID NO: 2908412 - RNA, 19 nt, Artificial Sequence
  Description of Artificial Sequence: Synthetic oligonucleotide
uccaacaguggucccugug

SEQ ID NO: 2908413 - RNA, 19 nt, Artificial Sequence
  Description of Artificial Sequence: Synthetic oligonucleotide
gacaaagaguacuuaaguu

SEQ ID NO: 2908414 - RNA, 19 nt, Artificial Sequence
  Description of Artificial Sequence: Synthetic oligonucleotide
aacaguggucccugugccu

SEQ ID NO: 2908415 - RNA, 19 nt, Artificial Sequence
  Description of Artificial Sequence: Synthetic oligonucleotide
ucugaaucucugacaucca

SEQ ID NO: 2908416 - RNA, 19 nt, Artificial Sequence
  Description of Artificial Sequence: Synthetic oligonucleotide
acucgcagucacuagcaca

SEQ ID NO: 2908417 - RNA, 19 nt, Artificial Sequence
  Description of Artificial Sequence: Synthetic oligonucleotide
acuagcacacgcccggagu

SEQ ID NO: 2908418 - RNA, 19 nt, Artificial Sequence
  Description of Artificial Sequence: Synthetic oligonucleotide
aggagcagccgguaaugag

SEQ ID NO: 2908419 - RNA, 19 nt, Artificial Sequence
  Description of Artificial Sequence: Synthetic oligonucleotide
aguggcgccucuucauguc

SEQ ID NO: 2908420 - RNA, 19 nt, Artificial Sequence
  Description of Artificial Sequence: Synthetic oligonucleotide
ucucugacauccaguucca

SEQ ID NO: 2908421 - RNA, 19 nt, Artificial Sequence
  Description of Artificial Sequence: Synthetic oligonucleotide
cucggucacacaugccugg

SEQ ID NO: 2908422 - RNA, 19 nt, Artificial Sequence
  Description of Artificial Sequence: Synthetic oligonucleotide
cuagcacacgcccggagug

SEQ ID NO: 2908423 - RNA, 19 nt, Artificial Sequence
  Description of Artificial Sequence: Synthetic oligonucleotide
cacggauucugaaucucug

SEQ ID NO: 2908424 - RNA, 19 nt, Artificial Sequence
  Description of Artificial Sequence: Synthetic oligonucleotide
ucacauccagcacggcgcc

SEQ ID NO: 2908425 - RNA, 19 nt, Artificial Sequence
  Description of Artificial Sequence: Synthetic oligonucleotide
ugucuggcagaaaggccug

SEQ ID NO: 2908426 - RNA, 19 nt, Artificial Sequence
  Description of Artificial Sequence: Synthetic oligonucleotide
aggccgauuccggaggagc

SEQ ID NO: 2908427 - RNA, 19 nt, Artificial Sequence
  Description of Artificial Sequence: Synthetic oligonucleotide
aaaggccugcagcauccga

SEQ ID NO: 2908428 - RNA, 19 nt, Artificial Sequence
  Description of Artificial Sequence: Synthetic oligonucleotide
gaaucucugacauccaguu

SEQ ID NO: 2908429 - RNA, 19 nt, Artificial Sequence
  Description of Artificial Sequence: Synthetic oligonucleotide
acggauucugaaucucuga

SEQ ID NO: 2908430 - RNA, 19 nt, Artificial Sequence
  Description of Artificial Sequence: Synthetic oligonucleotide
gaccacauucacauccagc

SEQ ID NO: 2908431 - RNA, 19 nt, Artificial Sequence
  Description of Artificial Sequence: Synthetic oligonucleotide
acauccacgcgacccucgg

SEQ ID NO: 2908432 - RNA, 19 nt, Artificial Sequence
  Description of Artificial Sequence: Synthetic oligonucleotide
cacggcgccaaccgcaucc

SEQ ID NO: 2908433 - RNA, 19 nt, Artificial Sequence
  Description of Artificial Sequence: Synthetic oligonucleotide
ucaugcgccuccaguggcc

SEQ ID NO: 2908434 - RNA, 19 nt, Artificial Sequence
  Description of Artificial Sequence: Synthetic oligonucleotide
acaccagcacauccacgcg

SEQ ID NO: 2908435 - RNA, 19 nt, Artificial Sequence
  Description of Artificial Sequence: Synthetic oligonucleotide
uggucccugugccuucagg

SEQ ID NO: 2908436 - RNA, 19 nt, Artificial Sequence
  Description of Artificial Sequence: Synthetic oligonucleotide
ccgguaaugagcacuacug

SEQ ID NO: 2908437 - RNA, 19 nt, Artificial Sequence
  Description of Artificial Sequence: Synthetic oligonucleotide
aagugcaggccgauuccgg

SEQ ID NO: 2908438 - RNA, 19 nt, Artificial Sequence
  Description of Artificial Sequence: Synthetic oligonucleotide
agcacuacugugcggucca

SEQ ID NO: 2908439 - RNA, 19 nt, Artificial Sequence
  Description of Artificial Sequence: Synthetic oligonucleotide
ggaagccagacgaacagcc

SEQ ID NO: 2908440 - RNA, 19 nt, Artificial Sequence
  Description of Artificial Sequence: Synthetic oligonucleotide
cugccuccaacaguggucc

SEQ ID NO: 2908441 - RNA, 19 nt, Artificial Sequence
  Description of Artificial Sequence: Synthetic oligonucleotide
gucacacaugccugggcag

SEQ ID NO: 2908442 - RNA, 19 nt, Artificial Sequence
  Description of Artificial Sequence: Synthetic oligonucleotide
accagcacauccacgcgac

SEQ ID NO: 2908443 - RNA, 19 nt, Artificial Sequence
  Description of Artificial Sequence: Synthetic oligonucleotide
agugcaggccgauuccgga

SEQ ID NO: 2908444 - RNA, 19 nt, Artificial Sequence
  Description of Artificial Sequence: Synthetic oligonucleotide
gaugggucggaagccagac

SEQ ID NO: 2908445 - RNA, 19 nt, Artificial Sequence
  Description of Artificial Sequence: Synthetic oligonucleotide
gauuccggaggagcagccg

SEQ ID NO: 2908446 - RNA, 19 nt, Artificial Sequence
  Description of Artificial Sequence: Synthetic oligonucleotide
cccgaccacauucacaucc

SEQ ID NO: 2908447 - RNA, 19 nt, Artificial Sequence
  Description of Artificial Sequence: Synthetic oligonucleotide
agcacauccacgcgacccu

SEQ ID NO: 2908448 - RNA, 19 nt, Artificial Sequence
  Description of Artificial Sequence: Synthetic oligonucleotide
cagcacauccacgcgaccc

SEQ ID NO: 2908449 - RNA, 19 nt, Artificial Sequence
  Description of Artificial Sequence: Synthetic oligonucleotide
caggcgggcauccucgagc

SEQ ID NO: 2908450 - RNA, 19 nt, Artificial Sequence
  Description of Artificial Sequence: Synthetic oligonucleotide
uuugaagcucugggauggg

SEQ ID NO: 2908451 - RNA, 19 nt, Artificial Sequence
  Description of Artificial Sequence: Synthetic oligonucleotide
caagugcaggccgauuccg

SEQ ID NO: 2908452 - RNA, 19 nt, Artificial Sequence
  Description of Artificial Sequence: Synthetic oligonucleotide
ggcagaaaggccugcagca

SEQ ID NO: 2908453 - RNA, 19 nt, Artificial Sequence
  Description of Artificial Sequence: Synthetic oligonucleotide
agucacuagcacacgcccg

SEQ ID NO: 2908454 - RNA, 19 nt, Artificial Sequence
  Description of Artificial Sequence: Synthetic oligonucleotide
aagcucugggaugggucgg

SEQ ID NO: 2908455 - RNA, 19 nt, Artificial Sequence
  Description of Artificial Sequence: Synthetic oligonucleotide
ucaggucccucaguguggc

SEQ ID NO: 2908456 - RNA, 19 nt, Artificial Sequence
  Description of Artificial Sequence: Synthetic oligonucleotide
gacauccaguuccaauguc

SEQ ID NO: 2908457 - RNA, 19 nt, Artificial Sequence
  Description of Artificial Sequence: Synthetic oligonucleotide
gccucuucaugucuggcag

SEQ ID NO: 2908458 - RNA, 19 nt, Artificial Sequence
  Description of Artificial Sequence: Synthetic oligonucleotide
augggucggaagccagacg

SEQ ID NO: 2908459 - RNA, 19 nt, Artificial Sequence
  Description of Artificial Sequence: Synthetic oligonucleotide
cucaugcgccuccaguggc

SEQ ID NO: 2908460 - RNA, 19 nt, Artificial Sequence
  Description of Artificial Sequence: Synthetic oligonucleotide
cauccgaaccgucccgacc

SEQ ID NO: 2908461 - RNA, 19 nt, Artificial Sequence
  Description of Artificial Sequence: Synthetic oligonucleotide
aguggcccgaacaggcccc

SEQ ID NO: 2908462 - RNA, 19 nt, Artificial Sequence
  Description of Artificial Sequence: Synthetic oligonucleotide
aaccuccuacacucgcagu

SEQ ID NO: 2908463 - RNA, 19 nt, Artificial Sequence
  Description of Artificial Sequence: Synthetic oligonucleotide
ggauucugaaucucugaca

SEQ ID NO: 2908464 - RNA, 19 nt, Artificial Sequence
  Description of Artificial Sequence: Synthetic oligonucleotide
cagaaaggccugcagcauc

SEQ ID NO: 2908465 - RNA, 19 nt, Artificial Sequence
  Description of Artificial Sequence: Synthetic oligonucleotide
gccugcagcauccgaaccg

SEQ ID NO: 2908466 - RNA, 19 nt, Artificial Sequence
  Description of Artificial Sequence: Synthetic oligonucleotide
cuacacucgcagucacuag

SEQ ID NO: 2908467 - RNA, 19 nt, Artificial Sequence
  Description of Artificial Sequence: Synthetic oligonucleotide
aaggccugcagcauccgaa

SEQ ID NO: 2908468 - RNA, 19 nt, Artificial Sequence
  Description of Artificial Sequence: Synthetic oligonucleotide
aucaaaccuccuacacucg

SEQ ID NO: 2908469 - RNA, 19 nt, Artificial Sequence
  Description of Artificial Sequence: Synthetic oligonucleotide
ccaacaguggucccugugc

SEQ ID NO: 2908470 - RNA, 19 nt, Artificial Sequence
  Description of Artificial Sequence: Synthetic oligonucleotide
agcacacgcccggaguggc

SEQ ID NO: 2908471 - RNA, 19 nt, Artificial Sequence
  Description of Artificial Sequence: Synthetic oligonucleotide
cuggcagaaaggccugcag

SEQ ID NO: 2908472 - RNA, 19 nt, Artificial Sequence
  Description of Artificial Sequence: Synthetic oligonucleotide
ucggucacacaugccuggg

SEQ ID NO: 2908473 - RNA, 19 nt, Artificial Sequence
  Description of Artificial Sequence: Synthetic oligonucleotide
caguggcccgaacaggccc

SEQ ID NO: 2908474 - RNA, 19 nt, Artificial Sequence
  Description of Artificial Sequence: Synthetic oligonucleotide
ucuggcagaaaggccugca

SEQ ID NO: 2908475 - RNA, 19 nt, Artificial Sequence
  Description of Artificial Sequence: Synthetic oligonucleotide
gucugcagggagccaggcg

SEQ ID NO: 2908476 - RNA, 19 nt, Artificial Sequence
  Description of Artificial Sequence: Synthetic oligonucleotide
cauacacuuugaagcucug

SEQ ID NO: 2908477 - RNA, 19 nt, Artificial Sequence
  Description of Artificial Sequence: Synthetic oligonucleotide
uagcacacgcccggagugg

SEQ ID NO: 2908478 - RNA, 19 nt, Artificial Sequence
  Description of Artificial Sequence: Synthetic oligonucleotide
gucccgaccacauucacau

SEQ ID NO: 2908479 - RNA, 19 nt, Artificial Sequence
  Description of Artificial Sequence: Synthetic oligonucleotide
caaaccuccuacacucgca

SEQ ID NO: 2908480 - RNA, 19 nt, Artificial Sequence
  Description of Artificial Sequence: Synthetic oligonucleotide
cacauccacgcgacccucg

SEQ ID NO: 2908481 - RNA, 19 nt, Artificial Sequence
  Description of Artificial Sequence: Synthetic oligonucleotide
gagcacuacugugcggucc

SEQ ID NO: 2908482 - RNA, 19 nt, Artificial Sequence
  Description of Artificial Sequence: Synthetic oligonucleotide
cgaacagccaagugcaggc

SEQ ID NO: 2908483 - RNA, 19 nt, Artificial Sequence
  Description of Artificial Sequence: Synthetic oligonucleotide
uccuacacucgcagucacu

SEQ ID NO: 2908484 - RNA, 19 nt, Artificial Sequence
  Description of Artificial Sequence: Synthetic oligonucleotide
uggcgccucuucaugucug

SEQ ID NO: 2908485 - RNA, 19 nt, Artificial Sequence
  Description of Artificial Sequence: Synthetic oligonucleotide
gaacagccaagugcaggcc

SEQ ID NO: 2908486 - RNA, 19 nt, Artificial Sequence
  Description of Artificial Sequence: Synthetic oligonucleotide
gugcaggccgauuccggag

SEQ ID NO: 2908487 - RNA, 19 nt, Artificial Sequence
  Description of Artificial Sequence: Synthetic oligonucleotide
gcucaugcgccuccagugg

SEQ ID NO: 2908488 - RNA, 19 nt, Artificial Sequence
  Description of Artificial Sequence: Synthetic oligonucleotide
auccagcacggcgccaacc

SEQ ID NO: 2908489 - RNA, 19 nt, Artificial Sequence
  Description of Artificial Sequence: Synthetic oligonucleotide
gcagcauccgaaccguccc

SEQ ID NO: 2908490 - RNA, 19 nt, Artificial Sequence
  Description of Artificial Sequence: Synthetic oligonucleotide
gagcagccgguaaugagca

SEQ ID NO: 2908491 - RNA, 19 nt, Artificial Sequence
  Description of Artificial Sequence: Synthetic oligonucleotide
guuccaaugucugcaggga

SEQ ID NO: 2908492 - RNA, 19 nt, Artificial Sequence
  Description of Artificial Sequence: Synthetic oligonucleotide
uccacgcgacccucgguca

SEQ ID NO: 2908493 - RNA, 19 nt, Artificial Sequence
  Description of Artificial Sequence: Synthetic oligonucleotide
guccaugacaaagaguacu

SEQ ID NO: 2908494 - RNA, 19 nt, Artificial Sequence
  Description of Artificial Sequence: Synthetic oligonucleotide
ugggcagcggccacggauu

SEQ ID NO: 2908495 - RNA, 19 nt, Artificial Sequence
  Description of Artificial Sequence: Synthetic oligonucleotide
uugaagcucugggaugggu

SEQ ID NO: 2908496 - RNA, 19 nt, Artificial Sequence
  Description of Artificial Sequence: Synthetic oligonucleotide
uuccggaggagcagccggu

SEQ ID NO: 2908497 - RNA, 19 nt, Artificial Sequence
  Description of Artificial Sequence: Synthetic oligonucleotide
cacacaugccugggcagcg

SEQ ID NO: 2908498 - RNA, 19 nt, Artificial Sequence
  Description of Artificial Sequence: Synthetic oligonucleotide
cucugggaugggucggaag

SEQ ID NO: 2908499 - RNA, 19 nt, Artificial Sequence
  Description of Artificial Sequence: Synthetic oligonucleotide
cugggaugggucggaagcc

SEQ ID NO: 2908500 - RNA, 19 nt, Artificial Sequence
  Description of Artificial Sequence: Synthetic oligonucleotide
cacaugccugggcagcggc

SEQ ID NO: 2908501 - RNA, 19 nt, Artificial Sequence
  Description of Artificial Sequence: Synthetic oligonucleotide
acaugccugggcagcggcc

SEQ ID NO: 2908502 - RNA, 19 nt, Artificial Sequence
  Description of Artificial Sequence: Synthetic oligonucleotide
agccagacgaacagccaag

SEQ ID NO: 2908503 - RNA, 19 nt, Artificial Sequence
  Description of Artificial Sequence: Synthetic oligonucleotide
cgguccaugacaaagagua

SEQ ID NO: 2908504 - RNA, 19 nt, Artificial Sequence
  Description of Artificial Sequence: Synthetic oligonucleotide
acacgcccggaguggcgcc

SEQ ID NO: 2908505 - RNA, 19 nt, Artificial Sequence
  Description of Artificial Sequence: Synthetic oligonucleotide
cuacugugcgguccaugac

SEQ ID NO: 2908506 - RNA, 19 nt, Artificial Sequence
  Description of Artificial Sequence: Synthetic oligonucleotide
agccaggcgggcauccucg

SEQ ID NO: 2908507 - RNA, 19 nt, Artificial Sequence
  Description of Artificial Sequence: Synthetic oligonucleotide
cagcauccgaaccgucccg

SEQ ID NO: 2908508 - RNA, 19 nt, Artificial Sequence
  Description of Artificial Sequence: Synthetic oligonucleotide
acacucgcagucacuagca

SEQ ID NO: 2908509 - RNA, 19 nt, Artificial Sequence
  Description of Artificial Sequence: Synthetic oligonucleotide
cacuuugaagcucugggau

SEQ ID NO: 2908510 - RNA, 19 nt, Artificial Sequence
  Description of Artificial Sequence: Synthetic oligonucleotide
agcagccgguaaugagcac

SEQ ID NO: 2908511 - RNA, 19 nt, Artificial Sequence
  Description of Artificial Sequence: Synthetic oligonucleotide
gccaagugcaggccgauuc

SEQ ID NO: 2908512 - RNA, 19 nt, Artificial Sequence
  Description of Artificial Sequence: Synthetic oligonucleotide
gaagccagacgaacagcca

SEQ ID NO: 2908513 - RNA, 19 nt, Artificial Sequence
  Description of Artificial Sequence: Synthetic oligonucleotide
aacaggccccguccggcau

SEQ ID NO: 2908514 - RNA, 19 nt, Artificial Sequence
  Description of Artificial Sequence: Synthetic oligonucleotide
auccucgagcccgggcugc

SEQ ID NO: 2908515 - RNA, 19 nt, Artificial Sequence
  Description of Artificial Sequence: Synthetic oligonucleotide
cuccaguggcccgaacagg

SEQ ID NO: 2908516 - RNA, 19 nt, Artificial Sequence
  Description of Artificial Sequence: Synthetic oligonucleotide
cuccuacacucgcagucac

SEQ ID NO: 2908517 - RNA, 19 nt, Artificial Sequence
  Description of Artificial Sequence: Synthetic oligonucleotide
gucccugugccuucagguc

SEQ ID NO: 2908518 - RNA, 19 nt, Artificial Sequence
  Description of Artificial Sequence: Synthetic oligonucleotide
cacuagcacacgcccggag

SEQ ID NO: 2908519 - RNA, 19 nt, Artificial Sequence
  Description of Artificial Sequence: Synthetic oligonucleotide
ggaguggcgccucuucaug

SEQ ID NO: 2908520 - RNA, 19 nt, Artificial Sequence
  Description of Artificial Sequence: Synthetic oligonucleotide
gucggaagccagacgaaca

SEQ ID NO: 2908521 - RNA, 19 nt, Artificial Sequence
  Description of Artificial Sequence: Synthetic oligonucleotide
ugagcacuacugugcgguc

SEQ ID NO: 2908522 - RNA, 19 nt, Artificial Sequence
  Description of Artificial Sequence: Synthetic oligonucleotide
gccaaccgcauccagcuca

SEQ ID NO: 2908523 - RNA, 19 nt, Artificial Sequence
  Description of Artificial Sequence: Synthetic oligonucleotide
acugugcgguccaugacaa

SEQ ID NO: 2908524 - RNA, 19 nt, Artificial Sequence
  Description of Artificial Sequence: Synthetic oligonucleotide
aggucccucaguguggcau

SEQ ID NO: 2908525 - RNA, 19 nt, Artificial Sequence
  Description of Artificial Sequence: Synthetic oligonucleotide
ccaagugcaggccgauucc

SEQ ID NO: 2908526 - RNA, 19 nt, Artificial Sequence
  Description of Artificial Sequence: Synthetic oligonucleotide
gcgggcauccucgagcccg

SEQ ID NO: 2908527 - RNA, 19 nt, Artificial Sequence
  Description of Artificial Sequence: Synthetic oligonucleotide
acaguggucccugugccuu

SEQ ID NO: 2908528 - RNA, 19 nt, Artificial Sequence
  Description of Artificial Sequence: Synthetic oligonucleotide
augucugcagggagccagg

SEQ ID NO: 2908529 - RNA, 19 nt, Artificial Sequence
  Description of Artificial Sequence: Synthetic oligonucleotide
gcagucacuagcacacgcc

SEQ ID NO: 2908530 - RNA, 19 nt, Artificial Sequence
  Description of Artificial Sequence: Synthetic oligonucleotide
augccugggcagcggccac

SEQ ID NO: 2908531 - RNA, 19 nt, Artificial Sequence
  Description of Artificial Sequence: Synthetic oligonucleotide
caugcgccuccaguggccc

SEQ ID NO: 2908532 - RNA, 19 nt, Artificial Sequence
  Description of Artificial Sequence: Synthetic oligonucleotide
gaacaggccccguccggca

SEQ ID NO: 2908533 - RNA, 19 nt, Artificial Sequence
  Description of Artificial Sequence: Synthetic oligonucleotide
acacaugccugggcagcgg

SEQ ID NO: 2908534 - RNA, 19 nt, Artificial Sequence
  Description of Artificial Sequence: Synthetic oligonucleotide
ccuccaguggcccgaacag

SEQ ID NO: 2908535 - RNA, 19 nt, Artificial Sequence
  Description of Artificial Sequence: Synthetic oligonucleotide
ugccuucaggucccucagu

SEQ ID NO: 2908536 - RNA, 19 nt, Artificial Sequence
  Description of Artificial Sequence: Synthetic oligonucleotide
cacacgcccggaguggcgc

SEQ ID NO: 2908537 - RNA, 19 nt, Artificial Sequence
  Description of Artificial Sequence: Synthetic oligonucleotide
acauccagcacggcgccaa

SEQ ID NO: 2908538 - RNA, 19 nt, Artificial Sequence
  Description of Artificial Sequence: Synthetic oligonucleotide
ccaguuccaaugucugcag

SEQ ID NO: 2908539 - RNA, 19 nt, Artificial Sequence
  Description of Artificial Sequence: Synthetic oligonucleotide
cauccucgagcccgggcug

SEQ ID NO: 2908540 - RNA, 19 nt, Artificial Sequence
  Description of Artificial Sequence: Synthetic oligonucleotide
cacucgcagucacuagcac

SEQ ID NO: 2908541 - RNA, 19 nt, Artificial Sequence
  Description of Artificial Sequence: Synthetic oligonucleotide
cggauucugaaucucugac

SEQ ID NO: 2908542 - RNA, 19 nt, Artificial Sequence
  Description of Artificial Sequence: Synthetic oligonucleotide
acagccaagugcaggccga

SEQ ID NO: 2908543 - RNA, 19 nt, Artificial Sequence
  Description of Artificial Sequence: Synthetic oligonucleotide
caccagcacauccacgcga

SEQ ID NO: 2908544 - RNA, 19 nt, Artificial Sequence
  Description of Artificial Sequence: Synthetic oligonucleotide
ggaggagcagccgguaaug

SEQ ID NO: 2908545 - RNA, 19 nt, Artificial Sequence
  Description of Artificial Sequence: Synthetic oligonucleotide
ucgagcccgggcugccucc

SEQ ID NO: 2908546 - RNA, 19 nt, Artificial Sequence
  Description of Artificial Sequence: Synthetic oligonucleotide
agcauccgaaccgucccga

SEQ ID NO: 2908547 - RNA, 19 nt, Artificial Sequence
  Description of Artificial Sequence: Synthetic oligonucleotide
cgggcugccuccaacagug

SEQ ID NO: 2908548 - RNA, 19 nt, Artificial Sequence
  Description of Artificial Sequence: Synthetic oligonucleotide
ucacuagcacacgcccgga

SEQ ID NO: 2908549 - RNA, 19 nt, Artificial Sequence
  Description of Artificial Sequence: Synthetic oligonucleotide
gagccaggcgggcauccuc

SEQ ID NO: 2908550 - RNA, 19 nt, Artificial Sequence
  Description of Artificial Sequence: Synthetic oligonucleotide
gaggagcagccgguaauga

SEQ ID NO: 2908551 - RNA, 19 nt, Artificial Sequence
  Description of Artificial Sequence: Synthetic oligonucleotide
ucuucaugucuggcagaaa

SEQ ID NO: 2908552 - RNA, 19 nt, Artificial Sequence
  Description of Artificial Sequence: Synthetic oligonucleotide
cagcacggcgccaaccgca

SEQ ID NO: 2908553 - RNA, 19 nt, Artificial Sequence
  Description of Artificial Sequence: Synthetic oligonucleotide
ugcgccuccaguggcccga

SEQ ID NO: 2908554 - RNA, 19 nt, Artificial Sequence
  Description of Artificial Sequence: Synthetic oligonucleotide
ugccugggcagcggccacg

SEQ ID NO: 2908555 - RNA, 19 nt, Artificial Sequence
  Description of Artificial Sequence: Synthetic oligonucleotide
gaguggcgccucuucaugu

SEQ ID NO: 2908556 - RNA, 19 nt, Artificial Sequence
  Description of Artificial Sequence: Synthetic oligonucleotide
agccgguaaugagcacuac

SEQ ID NO: 2908557 - RNA, 19 nt, Artificial Sequence
  Description of Artificial Sequence: Synthetic oligonucleotide
uccgaaccgucccgaccac

SEQ ID NO: 2908558 - RNA, 19 nt, Artificial Sequence
  Description of Artificial Sequence: Synthetic oligonucleotide
cauucacauccagcacggc

SEQ ID NO: 2908559 - RNA, 19 nt, Artificial Sequence
  Description of Artificial Sequence: Synthetic oligonucleotide
augcgccuccaguggcccg

SEQ ID NO: 2908560 - RNA, 19 nt, Artificial Sequence
  Description of Artificial Sequence: Synthetic oligonucleotide
ggucggaagccagacgaac

SEQ ID NO: 2908561 - RNA, 19 nt, Artificial Sequence
  Description of Artificial Sequence: Synthetic oligonucleotide
agcggccacggauucugaa

SEQ ID NO: 2908562 - RNA, 19 nt, Artificial Sequence
  Description of Artificial Sequence: Synthetic oligonucleotide
ggucccugugccuucaggu

SEQ ID NO: 2908563 - RNA, 19 nt, Artificial Sequence
  Description of Artificial Sequence: Synthetic oligonucleotide
gugcgguccaugacaaaga

SEQ ID NO: 2908564 - RNA, 19 nt, Artificial Sequence
  Description of Artificial Sequence: Synthetic oligonucleotide
cacuacugugcgguccaug

SEQ ID NO: 2908565 - RNA, 19 nt, Artificial Sequence
  Description of Artificial Sequence: Synthetic oligonucleotide
acgcgacccucggucacac

SEQ ID NO: 2908566 - RNA, 19 nt, Artificial Sequence
  Description of Artificial Sequence: Synthetic oligonucleotide
ccacauucacauccagcac

SEQ ID NO: 2908567 - RNA, 19 nt, Artificial Sequence
  Description of Artificial Sequence: Synthetic oligonucleotide
ccucggucacacaugccug

SEQ ID NO: 2908568 - RNA, 19 nt, Artificial Sequence
  Description of Artificial Sequence: Synthetic oligonucleotide
ccgcauccagcucaugcgc

SEQ ID NO: 2908569 - RNA, 19 nt, Artificial Sequence
  Description of Artificial Sequence: Synthetic oligonucleotide
gcagcggccacggauucug

SEQ ID NO: 2908570 - RNA, 19 nt, Artificial Sequence
  Description of Artificial Sequence: Synthetic oligonucleotide
caugccugggcagcggcca

SEQ ID NO: 2908571 - RNA, 19 nt, Artificial Sequence
  Description of Artificial Sequence: Synthetic oligonucleotide
ugccuccaacagugguccc

SEQ ID NO: 2908572 - RNA, 19 nt, Artificial Sequence
  Description of Artificial Sequence: Synthetic oligonucleotide
ggcgccaaccgcauccagc

SEQ ID NO: 2908573 - RNA, 19 nt, Artificial Sequence
  Description of Artificial Sequence: Synthetic oligonucleotide
ccguccggcauuacacacc

SEQ ID NO: 2908574 - RNA, 19 nt, Artificial Sequence
  Description of Artificial Sequence: Synthetic oligonucleotide
ggcauacacuuugaagcuc

SEQ ID NO: 2908575 - RNA, 19 nt, Artificial Sequence
  Description of Artificial Sequence: Synthetic oligonucleotide
aguggucccugugccuuca

SEQ ID NO: 2908576 - RNA, 19 nt, Artificial Sequence
  Description of Artificial Sequence: Synthetic oligonucleotide
gccuccaguggcccgaaca

SEQ ID NO: 2908577 - RNA, 19 nt, Artificial Sequence
  Description of Artificial Sequence: Synthetic oligonucleotide
ccggcauuacacaccagca

SEQ ID NO: 2908578 - RNA, 19 nt, Artificial Sequence
  Description of Artificial Sequence: Synthetic oligonucleotide
gcccgaacaggccccgucc

SEQ ID NO: 2908579 - RNA, 19 nt, Artificial Sequence
  Description of Artificial Sequence: Synthetic oligonucleotide
acccucggucacacaugcc

SEQ ID NO: 2908580 - RNA, 19 nt, Artificial Sequence
  Description of Artificial Sequence: Synthetic oligonucleotide
gcauacacuuugaagcucu

SEQ ID NO: 2908581 - RNA, 19 nt, Artificial Sequence
  Description of Artificial Sequence: Synthetic oligonucleotide
ccagacgaacagccaagug

SEQ ID NO: 2908582 - RNA, 19 nt, Artificial Sequence
  Description of Artificial Sequence: Synthetic oligonucleotide
accgucccgaccacauuca

SEQ ID NO: 2908583 - RNA, 19 nt, Artificial Sequence
  Description of Artificial Sequence: Synthetic oligonucleotide
gcugccuccaacagugguc

SEQ ID NO: 2908584 - RNA, 19 nt, Artificial Sequence
  Description of Artificial Sequence: Synthetic oligonucleotide
cgcagucacuagcacacgc

SEQ ID NO: 2908585 - RNA, 19 nt, Artificial Sequence
  Description of Artificial Sequence: Synthetic oligonucleotide
cucgagcccgggcugccuc

SEQ ID NO: 2908586 - RNA, 19 nt, Artificial Sequence
  Description of Artificial Sequence: Synthetic oligonucleotide
ggccugcagcauccgaacc

SEQ ID NO: 2908587 - RNA, 19 nt, Artificial Sequence
  Description of Artificial Sequence: Synthetic oligonucleotide
cagccgguaaugagcacua

SEQ ID NO: 2908588 - RNA, 19 nt, Artificial Sequence
  Description of Artificial Sequence: Synthetic oligonucleotide
cccugugccuucagguccc

SEQ ID NO: 2908589 - RNA, 19 nt, Artificial Sequence
  Description of Artificial Sequence: Synthetic oligonucleotide
gguccaugacaaagaguac

SEQ ID NO: 2908590 - RNA, 19 nt, Artificial Sequence
  Description of Artificial Sequence: Synthetic oligonucleotide
cauccagcucaugcgccuc

SEQ ID NO: 2908591 - RNA, 19 nt, Artificial Sequence
  Description of Artificial Sequence: Synthetic oligonucleotide
ccaguggcccgaacaggcc

SEQ ID NO: 2908592 - RNA, 19 nt, Artificial Sequence
  Description of Artificial Sequence: Synthetic oligonucleotide
agcucugggaugggucgga

SEQ ID NO: 2908593 - RNA, 19 nt, Artificial Sequence
  Description of Artificial Sequence: Synthetic oligonucleotide
gucuggcagaaaggccugc

SEQ ID NO: 2908594 - RNA, 19 nt, Artificial Sequence
  Description of Artificial Sequence: Synthetic oligonucleotide
cccguccggcauuacacac

SEQ ID NO: 2908595 - RNA, 19 nt, Artificial Sequence
  Description of Artificial Sequence: Synthetic oligonucleotide
gggaugggucggaagccag

SEQ ID NO: 2908596 - RNA, 19 nt, Artificial Sequence
  Description of Artificial Sequence: Synthetic oligonucleotide
cccgaacaggccccguccg

SEQ ID NO: 2908597 - RNA, 19 nt, Artificial Sequence
  Description of Artificial Sequence: Synthetic oligonucleotide
ggcauccucgagcccgggc

SEQ ID NO: 2908598 - RNA, 19 nt, Artificial Sequence
  Description of Artificial Sequence: Synthetic oligonucleotide
cggcauuacacaccagcac

SEQ ID NO: 2908599 - RNA, 19 nt, Artificial Sequence
  Description of Artificial Sequence: Synthetic oligonucleotide
gcauccucgagcccgggcu

SEQ ID NO: 2908600 - RNA, 19 nt, Artificial Sequence
  Description of Artificial Sequence: Synthetic oligonucleotide
ucccgaccacauucacauc

SEQ ID NO: 2908601 - RNA, 19 nt, Artificial Sequence
  Description of Artificial Sequence: Synthetic oligonucleotide
cugcagcauccgaaccguc

SEQ ID NO: 2908602 - RNA, 19 nt, Artificial Sequence
  Description of Artificial Sequence: Synthetic oligonucleotide
uccucgagcccgggcugcc

SEQ ID NO: 2908603 - RNA, 19 nt, Artificial Sequence
  Description of Artificial Sequence: Synthetic oligonucleotide
agggagccaggcgggcauc

SEQ ID NO: 2908604 - RNA, 19 nt, Artificial Sequence
  Description of Artificial Sequence: Synthetic oligonucleotide
ccgauuccggaggagcagc

SEQ ID NO: 2908605 - RNA, 19 nt, Artificial Sequence
  Description of Artificial Sequence: Synthetic oligonucleotide
cgcauccagcucaugcgcc

SEQ ID NO: 2908606 - RNA, 19 nt, Artificial Sequence
  Description of Artificial Sequence: Synthetic oligonucleotide
gccgauuccggaggagcag

SEQ ID NO: 2908607 - RNA, 19 nt, Artificial Sequence
  Description of Artificial Sequence: Synthetic oligonucleotide
gccccguccggcauuacac

SEQ ID NO: 2908608 - RNA, 19 nt, Artificial Sequence
  Description of Artificial Sequence: Synthetic oligonucleotide
guggcccgaacaggccccg

SEQ ID NO: 2908609 - RNA, 19 nt, Artificial Sequence
  Description of Artificial Sequence: Synthetic oligonucleotide
gucccucaguguggcauac

SEQ ID NO: 2908610 - RNA, 19 nt, Artificial Sequence
  Description of Artificial Sequence: Synthetic oligonucleotide
gccgguaaugagcacuacu

SEQ ID NO: 2908611 - RNA, 19 nt, Artificial Sequence
  Description of Artificial Sequence: Synthetic oligonucleotide
ccgaacaggccccguccgg

SEQ ID NO: 2908612 - RNA, 19 nt, Artificial Sequence
  Description of Artificial Sequence: Synthetic oligonucleotide
uccggaggagcagccggua

SEQ ID NO: 2908613 - RNA, 19 nt, Artificial Sequence
  Description of Artificial Sequence: Synthetic oligonucleotide
acaggccccguccggcauu

SEQ ID NO: 2908614 - RNA, 19 nt, Artificial Sequence
  Description of Artificial Sequence: Synthetic oligonucleotide
gcgccaaccgcauccagcu

SEQ ID NO: 2908615 - RNA, 19 nt, Artificial Sequence
  Description of Artificial Sequence: Synthetic oligonucleotide
ccuccaacaguggucccug

SEQ ID NO: 2908616 - RNA, 19 nt, Artificial Sequence
  Description of Artificial Sequence: Synthetic oligonucleotide
caggccgauuccggaggag

SEQ ID NO: 2908617 - RNA, 19 nt, Artificial Sequence
  Description of Artificial Sequence: Synthetic oligonucleotide
ccuacacucgcagucacua

SEQ ID NO: 2908618 - RNA, 19 nt, Artificial Sequence
  Description of Artificial Sequence: Synthetic oligonucleotide
guggcgccucuucaugucu

SEQ ID NO: 2908619 - RNA, 19 nt, Artificial Sequence
  Description of Artificial Sequence: Synthetic oligonucleotide
cgauuccggaggagcagcc

SEQ ID NO: 2908620 - RNA, 19 nt, Artificial Sequence
  Description of Artificial Sequence: Synthetic oligonucleotide
cggccacggauucugaauc

SEQ ID NO: 2908621 - RNA, 19 nt, Artificial Sequence
  Description of Artificial Sequence: Synthetic oligonucleotide
cugggcagcggccacggau

SEQ ID NO: 2908622 - RNA, 19 nt, Artificial Sequence
  Description of Artificial Sequence: Synthetic oligonucleotide
gcagccgguaaugagcacu

SEQ ID NO: 2908623 - RNA, 19 nt, Artificial Sequence
  Description of Artificial Sequence: Synthetic oligonucleotide
gcauccgaaccgucccgac

SEQ ID NO: 2908624 - RNA, 19 nt, Artificial Sequence
  Description of Artificial Sequence: Synthetic oligonucleotide
cccucggucacacaugccu

SEQ ID NO: 2908625 - RNA, 19 nt, Artificial Sequence
  Description of Artificial Sequence: Synthetic oligonucleotide
ccagcacggcgccaaccgc

SEQ ID NO: 2908626 - RNA, 19 nt, Artificial Sequence
  Description of Artificial Sequence: Synthetic oligonucleotide
cagcucaugcgccuccagu

SEQ ID NO: 2908627 - RNA, 19 nt, Artificial Sequence
  Description of Artificial Sequence: Synthetic oligonucleotide
ccgaccacauucacaucca

SEQ ID NO: 2908628 - RNA, 19 nt, Artificial Sequence
  Description of Artificial Sequence: Synthetic oligonucleotide
gccacggauucugaaucuc

SEQ ID NO: 2908629 - RNA, 19 nt, Artificial Sequence
  Description of Artificial Sequence: Synthetic oligonucleotide
acggcgccaaccgcaucca

SEQ ID NO: 2908630 - RNA, 19 nt, Artificial Sequence
  Description of Artificial Sequence: Synthetic oligonucleotide
agcacggcgccaaccgcau

SEQ ID NO: 2908631 - RNA, 19 nt, Artificial Sequence
  Description of Artificial Sequence: Synthetic oligonucleotide
gcgacccucggucacacau

SEQ ID NO: 2908632 - RNA, 19 nt, Artificial Sequence
  Description of Artificial Sequence: Synthetic oligonucleotide
ggccgauuccggaggagca

SEQ ID NO: 2908633 - RNA, 19 nt, Artificial Sequence
  Description of Artificial Sequence: Synthetic oligonucleotide
cguccggcauuacacacca

SEQ ID NO: 2908634 - RNA, 19 nt, Artificial Sequence
  Description of Artificial Sequence: Synthetic oligonucleotide
cgaacaggccccguccggc

SEQ ID NO: 2908635 - RNA, 19 nt, Artificial Sequence
  Description of Artificial Sequence: Synthetic oligonucleotide
gccugggcagcggccacgg

SEQ ID NO: 2908636 - RNA, 19 nt, Artificial Sequence
  Description of Artificial Sequence: Synthetic oligonucleotide
ggucccucaguguggcaua

SEQ ID NO: 2908637 - RNA, 19 nt, Artificial Sequence
  Description of Artificial Sequence: Synthetic oligonucleotide
ggcccgaacaggccccguc

SEQ ID NO: 2908638 - RNA, 19 nt, Artificial Sequence
  Description of Artificial Sequence: Synthetic oligonucleotide
cgaccacauucacauccag

SEQ ID NO: 2908639 - RNA, 19 nt, Artificial Sequence
  Description of Artificial Sequence: Synthetic oligonucleotide
ccagcacauccacgcgacc

SEQ ID NO: 2908640 - RNA, 19 nt, Artificial Sequence
  Description of Artificial Sequence: Synthetic oligonucleotide
caaugucugcagggagcca

SEQ ID NO: 2908641 - RNA, 19 nt, Artificial Sequence
  Description of Artificial Sequence: Synthetic oligonucleotide
gcauccagcucaugcgccu

SEQ ID NO: 2908642 - RNA, 19 nt, Artificial Sequence
  Description of Artificial Sequence: Synthetic oligonucleotide
ggccccguccggcauuaca

SEQ ID NO: 2908643 - RNA, 19 nt, Artificial Sequence
  Description of Artificial Sequence: Synthetic oligonucleotide
acgcccggaguggcgccuc

SEQ ID NO: 2908644 - RNA, 19 nt, Artificial Sequence
  Description of Artificial Sequence: Synthetic oligonucleotide
ggccacggauucugaaucu

SEQ ID NO: 2908645 - RNA, 19 nt, Artificial Sequence
  Description of Artificial Sequence: Synthetic oligonucleotide
gcaggccgauuccggagga

SEQ ID NO: 2908646 - RNA, 19 nt, Artificial Sequence
  Description of Artificial Sequence: Synthetic oligonucleotide
ggcugccuccaacaguggu

SEQ ID NO: 2908647 - RNA, 19 nt, Artificial Sequence
  Description of Artificial Sequence: Synthetic oligonucleotide
ccuccuacacucgcaguca

SEQ ID NO: 2908648 - RNA, 19 nt, Artificial Sequence
  Description of Artificial Sequence: Synthetic oligonucleotide
gggagccaggcgggcaucc

SEQ ID NO: 2908649 - RNA, 19 nt, Artificial Sequence
  Description of Artificial Sequence: Synthetic oligonucleotide
gaaccgucccgaccacauu

SEQ ID NO: 2908650 - RNA, 19 nt, Artificial Sequence
  Description of Artificial Sequence: Synthetic oligonucleotide
ccucuucaugucuggcaga

SEQ ID NO: 2908651 - RNA, 19 nt, Artificial Sequence
  Description of Artificial Sequence: Synthetic oligonucleotide
cggaagccagacgaacagc

SEQ ID NO: 2908652 - RNA, 19 nt, Artificial Sequence
  Description of Artificial Sequence: Synthetic oligonucleotide
cgacccucggucacacaug

SEQ ID NO: 2908653 - RNA, 19 nt, Artificial Sequence
  Description of Artificial Sequence: Synthetic oligonucleotide
cacgcgacccucggucaca

SEQ ID NO: 2908654 - RNA, 19 nt, Artificial Sequence
  Description of Artificial Sequence: Synthetic oligonucleotide
gcacacgcccggaguggcg

SEQ ID NO: 2908655 - RNA, 19 nt, Artificial Sequence
  Description of Artificial Sequence: Synthetic oligonucleotide
agccaagugcaggccgauu

SEQ ID NO: 2908656 - RNA, 19 nt, Artificial Sequence
  Description of Artificial Sequence: Synthetic oligonucleotide
ccacggauucugaaucucu

SEQ ID NO: 2908657 - RNA, 19 nt, Artificial Sequence
  Description of Artificial Sequence: Synthetic oligonucleotide
guccggcauuacacaccag

SEQ ID NO: 2908658 - RNA, 19 nt, Artificial Sequence
  Description of Artificial Sequence: Synthetic oligonucleotide
ccaggcgggcauccucgag

SEQ ID NO: 2908659 - RNA, 19 nt, Artificial Sequence
  Description of Artificial Sequence: Synthetic oligonucleotide
cggucacacaugccugggc

SEQ ID NO: 2908660 - RNA, 19 nt, Artificial Sequence
  Description of Artificial Sequence: Synthetic oligonucleotide
caaccgcauccagcucaug

SEQ ID NO: 2908661 - RNA, 19 nt, Artificial Sequence
  Description of Artificial Sequence: Synthetic oligonucleotide
cgccucuucaugucuggca

SEQ ID NO: 2908662 - RNA, 19 nt, Artificial Sequence
  Description of Artificial Sequence: Synthetic oligonucleotide
cugugcgguccaugacaaa

SEQ ID NO: 2908663 - RNA, 19 nt, Artificial Sequence
  Description of Artificial Sequence: Synthetic oligonucleotide
cccggaguggcgccucuuc

SEQ ID NO: 2908664 - RNA, 19 nt, Artificial Sequence
  Description of Artificial Sequence: Synthetic oligonucleotide
gcggccacggauucugaau

SEQ ID NO: 2908665 - RNA, 19 nt, Artificial Sequence
  Description of Artificial Sequence: Synthetic oligonucleotide
cugugccuucaggucccuc

SEQ ID NO: 2908666 - RNA, 19 nt, Artificial Sequence
  Description of Artificial Sequence: Synthetic oligonucleotide
ccacgcgacccucggucac

SEQ ID NO: 2908667 - RNA, 19 nt, Artificial Sequence
  Description of Artificial Sequence: Synthetic oligonucleotide
gggcagcggccacggauuc

SEQ ID NO: 2908668 - RNA, 19 nt, Artificial Sequence
  Description of Artificial Sequence: Synthetic oligonucleotide
cgucccgaccacauucaca

SEQ ID NO: 2908669 - RNA, 19 nt, Artificial Sequence
  Description of Artificial Sequence: Synthetic oligonucleotide
ccaugacaaagaguacuua

SEQ ID NO: 2908670 - RNA, 19 nt, Artificial Sequence
  Description of Artificial Sequence: Synthetic oligonucleotide
cgggcauccucgagcccgg

SEQ ID NO: 2908671 - RNA, 19 nt, Artificial Sequence
  Description of Artificial Sequence: Synthetic oligonucleotide
gcacauccacgcgacccuc

SEQ ID NO: 2908672 - RNA, 19 nt, Artificial Sequence
  Description of Artificial Sequence: Synthetic oligonucleotide
cagggagccaggcgggcau

SEQ ID NO: 2908673 - RNA, 19 nt, Artificial Sequence
  Description of Artificial Sequence: Synthetic oligonucleotide
ggcgggcauccucgagccc

SEQ ID NO: 2908674 - RNA, 19 nt, Artificial Sequence
  Description of Artificial Sequence: Synthetic oligonucleotide
caggucccucaguguggca

SEQ ID NO: 2908675 - RNA, 19 nt, Artificial Sequence
  Description of Artificial Sequence: Synthetic oligonucleotide
cagcggccacggauucuga

SEQ ID NO: 2908676 - RNA, 19 nt, Artificial Sequence
  Description of Artificial Sequence: Synthetic oligonucleotide
ccgucccgaccacauucac

SEQ ID NO: 2908677 - RNA, 19 nt, Artificial Sequence
  Description of Artificial Sequence: Synthetic oligonucleotide
ccggaguggcgccucuuca

SEQ ID NO: 2908678 - RNA, 19 nt, Artificial Sequence
  Description of Artificial Sequence: Synthetic oligonucleotide
cacauccagcacggcgcca

SEQ ID NO: 2908679 - RNA, 19 nt, Artificial Sequence
  Description of Artificial Sequence: Synthetic oligonucleotide
uggcccgaacaggccccgu

SEQ ID NO: 2908680 - RNA, 19 nt, Artificial Sequence
  Description of Artificial Sequence: Synthetic oligonucleotide
cgguaaugagcacuacugu

SEQ ID NO: 2908681 - RNA, 19 nt, Artificial Sequence
  Description of Artificial Sequence: Synthetic oligonucleotide
cauccacgcgacccucggu

SEQ ID NO: 2908682 - RNA, 19 nt, Artificial Sequence
  Description of Artificial Sequence: Synthetic oligonucleotide
ccccguccggcauuacaca

SEQ ID NO: 2908683 - RNA, 19 nt, Artificial Sequence
  Description of Artificial Sequence: Synthetic oligonucleotide
gcagggagccaggcgggca

SEQ ID NO: 2908684 - RNA, 19 nt, Artificial Sequence
  Description of Artificial Sequence: Synthetic oligonucleotide
gccagacgaacagccaagu

SEQ ID NO: 2908685 - RNA, 19 nt, Artificial Sequence
  Description of Artificial Sequence: Synthetic oligonucleotide
aggccccguccggcauuac

SEQ ID NO: 2908686 - RNA, 19 nt, Artificial Sequence
  Description of Artificial Sequence: Synthetic oligonucleotide
gggucggaagccagacgaa

SEQ ID NO: 2908687 - RNA, 19 nt, Artificial Sequence
  Description of Artificial Sequence: Synthetic oligonucleotide
gccuccaacaguggucccu

SEQ ID NO: 2908688 - RNA, 19 nt, Artificial Sequence
  Description of Artificial Sequence: Synthetic oligonucleotide
cuccaacaguggucccugu

SEQ ID NO: 2908689 - RNA, 19 nt, Artificial Sequence
  Description of Artificial Sequence: Synthetic oligonucleotide
gagcccgggcugccuccaa

SEQ ID NO: 2908690 - RNA, 19 nt, Artificial Sequence
  Description of Artificial Sequence: Synthetic oligonucleotide
ccugcagcauccgaaccgu

SEQ ID NO: 2908691 - RNA, 19 nt, Artificial Sequence
  Description of Artificial Sequence: Synthetic oligonucleotide
gccaggcgggcauccucga

SEQ ID NO: 2908692 - RNA, 19 nt, Artificial Sequence
  Description of Artificial Sequence: Synthetic oligonucleotide
gggcauccucgagcccggg

SEQ ID NO: 2908693 - RNA, 19 nt, Artificial Sequence
  Description of Artificial Sequence: Synthetic oligonucleotide
gcgguccaugacaaagagu

SEQ ID NO: 2908694 - RNA, 19 nt, Artificial Sequence
  Description of Artificial Sequence: Synthetic oligonucleotide
cgaaccgucccgaccacau

SEQ ID NO: 2908695 - RNA, 19 nt, Artificial Sequence
  Description of Artificial Sequence: Synthetic oligonucleotide
caggccccguccggcauua

SEQ ID NO: 2908696 - RNA, 19 nt, Artificial Sequence
  Description of Artificial Sequence: Synthetic oligonucleotide
ccggaggagcagccgguaa

SEQ ID NO: 2908697 - RNA, 19 nt, Artificial Sequence
  Description of Artificial Sequence: Synthetic oligonucleotide
gcucugggaugggucggaa

SEQ ID NO: 2908698 - RNA, 19 nt, Artificial Sequence
  Description of Artificial Sequence: Synthetic oligonucleotide
ccaaccgcauccagcucau

SEQ ID NO: 2908699 - RNA, 19 nt, Artificial Sequence
  Description of Artificial Sequence: Synthetic oligonucleotide
gcacggcgccaaccgcauc

SEQ ID NO: 2908700 - RNA, 19 nt, Artificial Sequence
  Description of Artificial Sequence: Synthetic oligonucleotide
cagccaagugcaggccgau

SEQ ID NO: 2908701 - RNA, 19 nt, Artificial Sequence
  Description of Artificial Sequence: Synthetic oligonucleotide
ccgaaccgucccgaccaca

SEQ ID NO: 2908702 - RNA, 19 nt, Artificial Sequence
  Description of Artificial Sequence: Synthetic oligonucleotide
ccgggcugccuccaacagu

SEQ ID NO: 2908703 - RNA, 19 nt, Artificial Sequence
  Description of Artificial Sequence: Synthetic oligonucleotide
ggagccaggcgggcauccu

SEQ ID NO: 2908704 - RNA, 19 nt, Artificial Sequence
  Description of Artificial Sequence: Synthetic oligonucleotide
cggaggagcagccgguaau

SEQ ID NO: 2908705 - RNA, 19 nt, Artificial Sequence
  Description of Artificial Sequence: Synthetic oligonucleotide
cggcgccaaccgcauccag

SEQ ID NO: 2908706 - RNA, 19 nt, Artificial Sequence
  Description of Artificial Sequence: Synthetic oligonucleotide
cacgcccggaguggcgccu

SEQ ID NO: 2908707 - RNA, 19 nt, Artificial Sequence
  Description of Artificial Sequence: Synthetic oligonucleotide
cgccaaccgcauccagcuc

SEQ ID NO: 2908708 - RNA, 19 nt, Artificial Sequence
  Description of Artificial Sequence: Synthetic oligonucleotide
ggcagcggccacggauucu

SEQ ID NO: 2908709 - RNA, 19 nt, Artificial Sequence
  Description of Artificial Sequence: Synthetic oligonucleotide
cggaguggcgccucuucau

SEQ ID NO: 2908710 - RNA, 19 nt, Artificial Sequence
  Description of Artificial Sequence: Synthetic oligonucleotide
gcacuacugugcgguccau

SEQ ID NO: 2908711 - RNA, 19 nt, Artificial Sequence
  Description of Artificial Sequence: Synthetic oligonucleotide
cgccuccaguggcccgaac

SEQ ID NO: 2908712 - RNA, 19 nt, Artificial Sequence
  Description of Artificial Sequence: Synthetic oligonucleotide
gcgccuccaguggcccgaa

SEQ ID NO: 2908713 - RNA, 19 nt, Artificial Sequence
  Description of Artificial Sequence: Synthetic oligonucleotide
cgcgacccucggucacaca

SEQ ID NO: 2908714 - RNA, 19 nt, Artificial Sequence
  Description of Artificial Sequence: Synthetic oligonucleotide
ccucgagcccgggcugccu

SEQ ID NO: 2908715 - RNA, 19 nt, Artificial Sequence
  Description of Artificial Sequence: Synthetic oligonucleotide
gcccggaguggcgccucuu

SEQ ID NO: 2908716 - RNA, 19 nt, Artificial Sequence
  Description of Artificial Sequence: Synthetic oligonucleotide
cgcccggaguggcgccucu

SEQ ID NO: 2908717 - RNA, 19 nt, Artificial Sequence
  Description of Artificial Sequence: Synthetic oligonucleotide
aaaaggagcugcuugguuc

SEQ ID NO: 2908718 - RNA, 19 nt, Artificial Sequence
  Description of Artificial Sequence: Synthetic oligonucleotide
auauacauuguccacacag

SEQ ID NO: 2908719 - RNA, 19 nt, Artificial Sequence
  Description of Artificial Sequence: Synthetic oligonucleotide
ucuuucaccccauaugugg

SEQ ID NO: 2908720 - RNA, 19 nt, Artificial Sequence
  Description of Artificial Sequence: Synthetic oligonucleotide
auauguggucucuacaggc

SEQ ID NO: 2908721 - RNA, 19 nt, Artificial Sequence
  Description of Artificial Sequence: Synthetic oligonucleotide
uauacauuguccacacagg

SEQ ID NO: 2908722 - RNA, 19 nt, Artificial Sequence
  Description of Artificial Sequence: Synthetic oligonucleotide
uccccuugcagcuugaggg

SEQ ID NO: 2908723 - RNA, 19 nt, Artificial Sequence
  Description of Artificial Sequence: Synthetic oligonucleotide
gaugggacaucuuucaccc

SEQ ID NO: 2908724 - RNA, 19 nt, Artificial Sequence
  Description of Artificial Sequence: Synthetic oligonucleotide
aucagguccaaucagcauc

SEQ ID NO: 2908725 - RNA, 19 nt, Artificial Sequence
  Description of Artificial Sequence: Synthetic oligonucleotide
uguauauacauuguccaca

SEQ ID NO: 2908726 - RNA, 19 nt, Artificial Sequence
  Description of Artificial Sequence: Synthetic oligonucleotide
agcagguguauauacauug

SEQ ID NO: 2908727 - RNA, 19 nt, Artificial Sequence
  Description of Artificial Sequence: Synthetic oligonucleotide
uggaaaaggagcugcuugg

SEQ ID NO: 2908728 - RNA, 19 nt, Artificial Sequence
  Description of Artificial Sequence: Synthetic oligonucleotide
acauuguccacacagggca

SEQ ID NO: 2908729 - RNA, 19 nt, Artificial Sequence
  Description of Artificial Sequence: Synthetic oligonucleotide
uuggaaaaggagcugcuug

SEQ ID NO: 2908730 - RNA, 19 nt, Artificial Sequence
  Description of Artificial Sequence: Synthetic oligonucleotide
agguguauauacauugucc

SEQ ID NO: 2908731 - RNA, 19 nt, Artificial Sequence
  Description of Artificial Sequence: Synthetic oligonucleotide
cuuucgaagaccucccgcg

SEQ ID NO: 2908732 - RNA, 19 nt, Artificial Sequence
  Description of Artificial Sequence: Synthetic oligonucleotide
guaucagucggccaucagg

SEQ ID NO: 2908733 - RNA, 19 nt, Artificial Sequence
  Description of Artificial Sequence: Synthetic oligonucleotide
uaucagucggccaucaggu

SEQ ID NO: 2908734 - RNA, 19 nt, Artificial Sequence
  Description of Artificial Sequence: Synthetic oligonucleotide
aagaccucccgcgaguagc

SEQ ID NO: 2908735 - RNA, 19 nt, Artificial Sequence
  Description of Artificial Sequence: Synthetic oligonucleotide
ugaugggacaucuuucacc

SEQ ID NO: 2908736 - RNA, 19 nt, Artificial Sequence
  Description of Artificial Sequence: Synthetic oligonucleotide
aagcgaugggagcuguccc

SEQ ID NO: 2908737 - RNA, 19 nt, Artificial Sequence
  Description of Artificial Sequence: Synthetic oligonucleotide
acaucuuucaccccauaug

SEQ ID NO: 2908738 - RNA, 19 nt, Artificial Sequence
  Description of Artificial Sequence: Synthetic oligonucleotide
aucugcagaucucacacag

SEQ ID NO: 2908739 - RNA, 19 nt, Artificial Sequence
  Description of Artificial Sequence: Synthetic oligonucleotide
ucagucggccaucaggucc

SEQ ID NO: 2908740 - RNA, 19 nt, Artificial Sequence
  Description of Artificial Sequence: Synthetic oligonucleotide
aaaggagcugcuugguucu

SEQ ID NO: 2908741 - RNA, 19 nt, Artificial Sequence
  Description of Artificial Sequence: Synthetic oligonucleotide
uccggcagguggaugaugg

SEQ ID NO: 2908742 - RNA, 19 nt, Artificial Sequence
  Description of Artificial Sequence: Synthetic oligonucleotide
uauguggucucuacaggcc

SEQ ID NO: 2908743 - RNA, 19 nt, Artificial Sequence
  Description of Artificial Sequence: Synthetic oligonucleotide
uacauuguccacacagggc

SEQ ID NO: 2908744 - RNA, 19 nt, Artificial Sequence
  Description of Artificial Sequence: Synthetic oligonucleotide
gaugaugggacaucuuuca

SEQ ID NO: 2908745 - RNA, 19 nt, Artificial Sequence
  Description of Artificial Sequence: Synthetic oligonucleotide
augagcaagcgaugggagc

SEQ ID NO: 2908746 - RNA, 19 nt, Artificial Sequence
  Description of Artificial Sequence: Synthetic oligonucleotide
gucucuacaggccugggcc

SEQ ID NO: 2908747 - RNA, 19 nt, Artificial Sequence
  Description of Artificial Sequence: Synthetic oligonucleotide
uugguucuuucgaagaccu

SEQ ID NO: 2908748 - RNA, 19 nt, Artificial Sequence
  Description of Artificial Sequence: Synthetic oligonucleotide
guauauacauuguccacac

SEQ ID NO: 2908749 - RNA, 19 nt, Artificial Sequence
  Description of Artificial Sequence: Synthetic oligonucleotide
ugggacaucuuucacccca

SEQ ID NO: 2908750 - RNA, 19 nt, Artificial Sequence
  Description of Artificial Sequence: Synthetic oligonucleotide
ucuuucgaagaccucccgc

SEQ ID NO: 2908751 - RNA, 19 nt, Artificial Sequence
  Description of Artificial Sequence: Synthetic oligonucleotide
uccaaucagcaucuguccc

SEQ ID NO: 2908752 - RNA, 19 nt, Artificial Sequence
  Description of Artificial Sequence: Synthetic oligonucleotide
ucagguccaaucagcaucu

SEQ ID NO: 2908753 - RNA, 19 nt, Artificial Sequence
  Description of Artificial Sequence: Synthetic oligonucleotide
uccacacagggcacggucg

SEQ ID NO: 2908754 - RNA, 19 nt, Artificial Sequence
  Description of Artificial Sequence: Synthetic oligonucleotide
ucgcacuggcugcagaccg

SEQ ID NO: 2908755 - RNA, 19 nt, Artificial Sequence
  Description of Artificial Sequence: Synthetic oligonucleotide
uggaugaugggacaucuuu

SEQ ID NO: 2908756 - RNA, 19 nt, Artificial Sequence
  Description of Artificial Sequence: Synthetic oligonucleotide
gguguauauacauugucca

SEQ ID NO: 2908757 - RNA, 19 nt, Artificial Sequence
  Description of Artificial Sequence: Synthetic oligonucleotide
cucucucgggcccacaugg

SEQ ID NO: 2908758 - RNA, 19 nt, Artificial Sequence
  Description of Artificial Sequence: Synthetic oligonucleotide
aggcagaccagcuucugag

SEQ ID NO: 2908759 - RNA, 19 nt, Artificial Sequence
  Description of Artificial Sequence: Synthetic oligonucleotide
gcagaucucacacaggaug

SEQ ID NO: 2908760 - RNA, 19 nt, Artificial Sequence
  Description of Artificial Sequence: Synthetic oligonucleotide
augaugggacaucuuucac

SEQ ID NO: 2908761 - RNA, 19 nt, Artificial Sequence
  Description of Artificial Sequence: Synthetic oligonucleotide
agcuucugaggccugagcu

SEQ ID NO: 2908762 - RNA, 19 nt, Artificial Sequence
  Description of Artificial Sequence: Synthetic oligonucleotide
uucuuucgaagaccucccg

SEQ ID NO: 2908763 - RNA, 19 nt, Artificial Sequence
  Description of Artificial Sequence: Synthetic oligonucleotide
ugggcgaacaccccgcggc

SEQ ID NO: 2908764 - RNA, 19 nt, Artificial Sequence
  Description of Artificial Sequence: Synthetic oligonucleotide
ugagcaagcgaugggagcu

SEQ ID NO: 2908765 - RNA, 19 nt, Artificial Sequence
  Description of Artificial Sequence: Synthetic oligonucleotide
ugggcaccguaucagucgg

SEQ ID NO: 2908766 - RNA, 19 nt, Artificial Sequence
  Description of Artificial Sequence: Synthetic oligonucleotide
gaugggagcugucccaggc

SEQ ID NO: 2908767 - RNA, 19 nt, Artificial Sequence
  Description of Artificial Sequence: Synthetic oligonucleotide
uucgaagaccucccgcgag

SEQ ID NO: 2908768 - RNA, 19 nt, Artificial Sequence
  Description of Artificial Sequence: Synthetic oligonucleotide
ugcuugguucuuucgaaga

SEQ ID NO: 2908769 - RNA, 19 nt, Artificial Sequence
  Description of Artificial Sequence: Synthetic oligonucleotide
auggaccuugagcugcagc

SEQ ID NO: 2908770 - RNA, 19 nt, Artificial Sequence
  Description of Artificial Sequence: Synthetic oligonucleotide
gaccuugagcugcagcggg

SEQ ID NO: 2908771 - RNA, 19 nt, Artificial Sequence
  Description of Artificial Sequence: Synthetic oligonucleotide
cuugguucuuucgaagacc

SEQ ID NO: 2908772 - RNA, 19 nt, Artificial Sequence
  Description of Artificial Sequence: Synthetic oligonucleotide
ugagcugggcaccguauca

SEQ ID NO: 2908773 - RNA, 19 nt, Artificial Sequence
  Description of Artificial Sequence: Synthetic oligonucleotide
cuucugaggccugagcugg

SEQ ID NO: 2908774 - RNA, 19 nt, Artificial Sequence
  Description of Artificial Sequence: Synthetic oligonucleotide
gaugagcaagcgaugggag

SEQ ID NO: 2908775 - RNA, 19 nt, Artificial Sequence
  Description of Artificial Sequence: Synthetic oligonucleotide
cugggcaccguaucagucg

SEQ ID NO: 2908776 - RNA, 19 nt, Artificial Sequence
  Description of Artificial Sequence: Synthetic oligonucleotide
gguucuuucgaagaccucc

SEQ ID NO: 2908777 - RNA, 19 nt, Artificial Sequence
  Description of Artificial Sequence: Synthetic oligonucleotide
uccccgaacgggcagcucc

SEQ ID NO: 2908778 - RNA, 19 nt, Artificial Sequence
  Description of Artificial Sequence: Synthetic oligonucleotide
aggaugagcaagcgauggg

SEQ ID NO: 2908779 - RNA, 19 nt, Artificial Sequence
  Description of Artificial Sequence: Synthetic oligonucleotide
ucucgggcccacauggacc

SEQ ID NO: 2908780 - RNA, 19 nt, Artificial Sequence
  Description of Artificial Sequence: Synthetic oligonucleotide
guguauauacauuguccac

SEQ ID NO: 2908781 - RNA, 19 nt, Artificial Sequence
  Description of Artificial Sequence: Synthetic oligonucleotide
ucggccaucagguccaauc

SEQ ID NO: 2908782 - RNA, 19 nt, Artificial Sequence
  Description of Artificial Sequence: Synthetic oligonucleotide
guccaaucagcaucugucc

SEQ ID NO: 2908783 - RNA, 19 nt, Artificial Sequence
  Description of Artificial Sequence: Synthetic oligonucleotide
ccauauguggucucuacag

SEQ ID NO: 2908784 - RNA, 19 nt, Artificial Sequence
  Description of Artificial Sequence: Synthetic oligonucleotide
uagcgcugggcgaacaccc

SEQ ID NO: 2908785 - RNA, 19 nt, Artificial Sequence
  Description of Artificial Sequence: Synthetic oligonucleotide
uauauacauuguccacaca

SEQ ID NO: 2908786 - RNA, 19 nt, Artificial Sequence
  Description of Artificial Sequence: Synthetic oligonucleotide
aucagcaucuguccccuug

SEQ ID NO: 2908787 - RNA, 19 nt, Artificial Sequence
  Description of Artificial Sequence: Synthetic oligonucleotide
uuucgaagaccucccgcga

SEQ ID NO: 2908788 - RNA, 19 nt, Artificial Sequence
  Description of Artificial Sequence: Synthetic oligonucleotide
caggaugagcaagcgaugg

SEQ ID NO: 2908789 - RNA, 19 nt, Artificial Sequence
  Description of Artificial Sequence: Synthetic oligonucleotide
ucuguccccuugcagcuug

SEQ ID NO: 2908790 - RNA, 19 nt, Artificial Sequence
  Description of Artificial Sequence: Synthetic oligonucleotide
uccgcuucggcauggcagc

SEQ ID NO: 2908791 - RNA, 19 nt, Artificial Sequence
  Description of Artificial Sequence: Synthetic oligonucleotide
cuccgcuucggcauggcag

SEQ ID NO: 2908792 - RNA, 19 nt, Artificial Sequence
  Description of Artificial Sequence: Synthetic oligonucleotide
gcaucuguccccuugcagc

SEQ ID NO: 2908793 - RNA, 19 nt, Artificial Sequence
  Description of Artificial Sequence: Synthetic oligonucleotide
uguggucucuacaggccug

SEQ ID NO: 2908794 - RNA, 19 nt, Artificial Sequence
  Description of Artificial Sequence: Synthetic oligonucleotide
ugagcugcagcggggaagc

SEQ ID NO: 2908795 - RNA, 19 nt, Artificial Sequence
  Description of Artificial Sequence: Synthetic oligonucleotide
cugcagaucucacacagga

SEQ ID NO: 2908796 - RNA, 19 nt, Artificial Sequence
  Description of Artificial Sequence: Synthetic oligonucleotide
agaccgccuucccaucugc

SEQ ID NO: 2908797 - RNA, 19 nt, Artificial Sequence
  Description of Artificial Sequence: Synthetic oligonucleotide
gaucucacacaggaugagc

SEQ ID NO: 2908798 - RNA, 19 nt, Artificial Sequence
  Description of Artificial Sequence: Synthetic oligonucleotide
cagguguauauacauuguc

SEQ ID NO: 2908799 - RNA, 19 nt, Artificial Sequence
  Description of Artificial Sequence: Synthetic oligonucleotide
agcaucuguccccuugcag

SEQ ID NO: 2908800 - RNA, 19 nt, Artificial Sequence
  Description of Artificial Sequence: Synthetic oligonucleotide
agcugcuugguucuuucga

SEQ ID NO: 2908801 - RNA, 19 nt, Artificial Sequence
  Description of Artificial Sequence: Synthetic oligonucleotide
ucucuacaggccugggccc

SEQ ID NO: 2908802 - RNA, 19 nt, Artificial Sequence
  Description of Artificial Sequence: Synthetic oligonucleotide
auuguccacacagggcacg

SEQ ID NO: 2908803 - RNA, 19 nt, Artificial Sequence
  Description of Artificial Sequence: Synthetic oligonucleotide
cucacacaggaugagcaag

SEQ ID NO: 2908804 - RNA, 19 nt, Artificial Sequence
  Description of Artificial Sequence: Synthetic oligonucleotide
auggcagcggguaccaaac

SEQ ID NO: 2908805 - RNA, 19 nt, Artificial Sequence
  Description of Artificial Sequence: Synthetic oligonucleotide
caagcgaugggagcugucc

SEQ ID NO: 2908806 - RNA, 19 nt, Artificial Sequence
  Description of Artificial Sequence: Synthetic oligonucleotide
gaagcguccccgaacgggc

SEQ ID NO: 2908807 - RNA, 19 nt, Artificial Sequence
  Description of Artificial Sequence: Synthetic oligonucleotide
auguggucucuacaggccu

SEQ ID NO: 2908808 - RNA, 19 nt, Artificial Sequence
  Description of Artificial Sequence: Synthetic oligonucleotide
accaggccaggcuucagug

SEQ ID NO: 2908809 - RNA, 19 nt, Artificial Sequence
  Description of Artificial Sequence: Synthetic oligonucleotide
uucccaucugcagaucuca

SEQ ID NO: 2908810 - RNA, 19 nt, Artificial Sequence
  Description of Artificial Sequence: Synthetic oligonucleotide
gacuccggcagguggauga

SEQ ID NO: 2908811 - RNA, 19 nt, Artificial Sequence
  Description of Artificial Sequence: Synthetic oligonucleotide
cugcuugguucuuucgaag

SEQ ID NO: 2908812 - RNA, 19 nt, Artificial Sequence
  Description of Artificial Sequence: Synthetic oligonucleotide
ucgaagaccucccgcgagu

SEQ ID NO: 2908813 - RNA, 19 nt, Artificial Sequence
  Description of Artificial Sequence: Synthetic oligonucleotide
ucucacacaggaugagcaa

SEQ ID NO: 2908814 - RNA, 19 nt, Artificial Sequence
  Description of Artificial Sequence: Synthetic oligonucleotide
aacaccccgcggcucagcu

SEQ ID NO: 2908815 - RNA, 19 nt, Artificial Sequence
  Description of Artificial Sequence: Synthetic oligonucleotide
ggggaagcguccccgaacg

SEQ ID NO: 2908816 - RNA, 19 nt, Artificial Sequence
  Description of Artificial Sequence: Synthetic oligonucleotide
cagugacuccggcaggugg

SEQ ID NO: 2908817 - RNA, 19 nt, Artificial Sequence
  Description of Artificial Sequence: Synthetic oligonucleotide
guucuuucgaagaccuccc

SEQ ID NO: 2908818 - RNA, 19 nt, Artificial Sequence
  Description of Artificial Sequence: Synthetic oligonucleotide
ugaggccugagcugggcac

SEQ ID NO: 2908819 - RNA, 19 nt, Artificial Sequence
  Description of Artificial Sequence: Synthetic oligonucleotide
cacaggaugagcaagcgau

SEQ ID NO: 2908820 - RNA, 19 nt, Artificial Sequence
  Description of Artificial Sequence: Synthetic oligonucleotide
ccaucugcagaucucacac

SEQ ID NO: 2908821 - RNA, 19 nt, Artificial Sequence
  Description of Artificial Sequence: Synthetic oligonucleotide
caggcuucagugacuccgg

SEQ ID NO: 2908822 - RNA, 19 nt, Artificial Sequence
  Description of Artificial Sequence: Synthetic oligonucleotide
caggccaggcuucagugac

SEQ ID NO: 2908823 - RNA, 19 nt, Artificial Sequence
  Description of Artificial Sequence: Synthetic oligonucleotide
gagcugcuugguucuuucg

SEQ ID NO: 2908824 - RNA, 19 nt, Artificial Sequence
  Description of Artificial Sequence: Synthetic oligonucleotide
accgccuucccaucugcag

SEQ ID NO: 2908825 - RNA, 19 nt, Artificial Sequence
  Description of Artificial Sequence: Synthetic oligonucleotide
ugucccaggcagaccagcu

SEQ ID NO: 2908826 - RNA, 19 nt, Artificial Sequence
  Description of Artificial Sequence: Synthetic oligonucleotide
uucaccccauauguggucu

SEQ ID NO: 2908827 - RNA, 19 nt, Artificial Sequence
  Description of Artificial Sequence: Synthetic oligonucleotide
aggcuucagugacuccggc

SEQ ID NO: 2908828 - RNA, 19 nt, Artificial Sequence
  Description of Artificial Sequence: Synthetic oligonucleotide
uuguccacacagggcacgg

SEQ ID NO: 2908829 - RNA, 19 nt, Artificial Sequence
  Description of Artificial Sequence: Synthetic oligonucleotide
uucagugacuccggcaggu

SEQ ID NO: 2908830 - RNA, 19 nt, Artificial Sequence
  Description of Artificial Sequence: Synthetic oligonucleotide
ccaaucagcaucugucccc

SEQ ID NO: 2908831 - RNA, 19 nt, Artificial Sequence
  Description of Artificial Sequence: Synthetic oligonucleotide
uuucaccccauaugugguc

SEQ ID NO: 2908832 - RNA, 19 nt, Artificial Sequence
  Description of Artificial Sequence: Synthetic oligonucleotide
aucagucggccaucagguc

SEQ ID NO: 2908833 - RNA, 19 nt, Artificial Sequence
  Description of Artificial Sequence: Synthetic oligonucleotide
cuucagugacuccggcagg

SEQ ID NO: 2908834 - RNA, 19 nt, Artificial Sequence
  Description of Artificial Sequence: Synthetic oligonucleotide
gguccaaucagcaucuguc

SEQ ID NO: 2908835 - RNA, 19 nt, Artificial Sequence
  Description of Artificial Sequence: Synthetic oligonucleotide
ggcacggucgcacuggcug

SEQ ID NO: 2908836 - RNA, 19 nt, Artificial Sequence
  Description of Artificial Sequence: Synthetic oligonucleotide
agguccaaucagcaucugu

SEQ ID NO: 2908837 - RNA, 19 nt, Artificial Sequence
  Description of Artificial Sequence: Synthetic oligonucleotide
cacacaggaugagcaagcg

SEQ ID NO: 2908838 - RNA, 19 nt, Artificial Sequence
  Description of Artificial Sequence: Synthetic oligonucleotide
acacaggaugagcaagcga

SEQ ID NO: 2908839 - RNA, 19 nt, Artificial Sequence
  Description of Artificial Sequence: Synthetic oligonucleotide
gaagaccucccgcgaguag

SEQ ID NO: 2908840 - RNA, 19 nt, Artificial Sequence
  Description of Artificial Sequence: Synthetic oligonucleotide
guccccuugcagcuugagg

SEQ ID NO: 2908841 - RNA, 19 nt, Artificial Sequence
  Description of Artificial Sequence: Synthetic oligonucleotide
acacagggcacggucgcac

SEQ ID NO: 2908842 - RNA, 19 nt, Artificial Sequence
  Description of Artificial Sequence: Synthetic oligonucleotide
agcgaugggagcuguccca

SEQ ID NO: 2908843 - RNA, 19 nt, Artificial Sequence
  Description of Artificial Sequence: Synthetic oligonucleotide
aacgggcagcuccgcuucg

SEQ ID NO: 2908844 - RNA, 19 nt, Artificial Sequence
  Description of Artificial Sequence: Synthetic oligonucleotide
ugcagaucucacacaggau

SEQ ID NO: 2908845 - RNA, 19 nt, Artificial Sequence
  Description of Artificial Sequence: Synthetic oligonucleotide
aggccaagggcaccgccag

SEQ ID NO: 2908846 - RNA, 19 nt, Artificial Sequence
  Description of Artificial Sequence: Synthetic oligonucleotide
agggcacggucgcacuggc

SEQ ID NO: 2908847 - RNA, 19 nt, Artificial Sequence
  Description of Artificial Sequence: Synthetic oligonucleotide
agaccagcuucugaggccu

SEQ ID NO: 2908848 - RNA, 19 nt, Artificial Sequence
  Description of Artificial Sequence: Synthetic oligonucleotide
cauuguccacacagggcac

SEQ ID NO: 2908849 - RNA, 19 nt, Artificial Sequence
  Description of Artificial Sequence: Synthetic oligonucleotide
gcagaccagcuucugaggc

SEQ ID NO: 2908850 - RNA, 19 nt, Artificial Sequence
  Description of Artificial Sequence: Synthetic oligonucleotide
ggaagcguccccgaacggg

SEQ ID NO: 2908851 - RNA, 19 nt, Artificial Sequence
  Description of Artificial Sequence: Synthetic oligonucleotide
ccaggcuucagugacuccg

SEQ ID NO: 2908852 - RNA, 19 nt, Artificial Sequence
  Description of Artificial Sequence: Synthetic oligonucleotide
cuucccaucugcagaucuc

SEQ ID NO: 2908853 - RNA, 19 nt, Artificial Sequence
  Description of Artificial Sequence: Synthetic oligonucleotide
gaacgggcagcuccgcuuc

SEQ ID NO: 2908854 - RNA, 19 nt, Artificial Sequence
  Description of Artificial Sequence: Synthetic oligonucleotide
gacaucuuucaccccauau

SEQ ID NO: 2908855 - RNA, 19 nt, Artificial Sequence
  Description of Artificial Sequence: Synthetic oligonucleotide
gagcugggcaccguaucag

SEQ ID NO: 2908856 - RNA, 19 nt, Artificial Sequence
  Description of Artificial Sequence: Synthetic oligonucleotide
ggcagaccagcuucugagg

SEQ ID NO: 2908857 - RNA, 19 nt, Artificial Sequence
  Description of Artificial Sequence: Synthetic oligonucleotide
agccccagcagguguauau

SEQ ID NO: 2908858 - RNA, 19 nt, Artificial Sequence
  Description of Artificial Sequence: Synthetic oligonucleotide
ugggccccuuggaaaagga

SEQ ID NO: 2908859 - RNA, 19 nt, Artificial Sequence
  Description of Artificial Sequence: Synthetic oligonucleotide
ggccccuuggaaaaggagc

SEQ ID NO: 2908860 - RNA, 19 nt, Artificial Sequence
  Description of Artificial Sequence: Synthetic oligonucleotide
agguggaugaugggacauc

SEQ ID NO: 2908861 - RNA, 19 nt, Artificial Sequence
  Description of Artificial Sequence: Synthetic oligonucleotide
uucggcauggcagcgggua

SEQ ID NO: 2908862 - RNA, 19 nt, Artificial Sequence
  Description of Artificial Sequence: Synthetic oligonucleotide
cucucgggcccacauggac

SEQ ID NO: 2908863 - RNA, 19 nt, Artificial Sequence
  Description of Artificial Sequence: Synthetic oligonucleotide
gcuucggcauggcagcggg

SEQ ID NO: 2908864 - RNA, 19 nt, Artificial Sequence
  Description of Artificial Sequence: Synthetic oligonucleotide
gcuugguucuuucgaagac

SEQ ID NO: 2908865 - RNA, 19 nt, Artificial Sequence
  Description of Artificial Sequence: Synthetic oligonucleotide
guggucucuacaggccugg

SEQ ID NO: 2908866 - RNA, 19 nt, Artificial Sequence
  Description of Artificial Sequence: Synthetic oligonucleotide
aucuuucaccccauaugug

SEQ ID NO: 2908867 - RNA, 19 nt, Artificial Sequence
  Description of Artificial Sequence: Synthetic oligonucleotide
gcuucugaggccugagcug

SEQ ID NO: 2908868 - RNA, 19 nt, Artificial Sequence
  Description of Artificial Sequence: Synthetic oligonucleotide
ucccaucugcagaucucac

SEQ ID NO: 2908869 - RNA, 19 nt, Artificial Sequence
  Description of Artificial Sequence: Synthetic oligonucleotide
guccacacagggcacgguc

SEQ ID NO: 2908870 - RNA, 19 nt, Artificial Sequence
  Description of Artificial Sequence: Synthetic oligonucleotide
agugacuccggcaggugga

SEQ ID NO: 2908871 - RNA, 19 nt, Artificial Sequence
  Description of Artificial Sequence: Synthetic oligonucleotide
agaccucccgcgaguagcg

SEQ ID NO: 2908872 - RNA, 19 nt, Artificial Sequence
  Description of Artificial Sequence: Synthetic oligonucleotide
ggaugagcaagcgauggga

SEQ ID NO: 2908873 - RNA, 19 nt, Artificial Sequence
  Description of Artificial Sequence: Synthetic oligonucleotide
ucggcauggcagcggguac

SEQ ID NO: 2908874 - RNA, 19 nt, Artificial Sequence
  Description of Artificial Sequence: Synthetic oligonucleotide
cuugcagcuugaggggccc

SEQ ID NO: 2908875 - RNA, 19 nt, Artificial Sequence
  Description of Artificial Sequence: Synthetic oligonucleotide
acagggcacggucgcacug

SEQ ID NO: 2908876 - RNA, 19 nt, Artificial Sequence
  Description of Artificial Sequence: Synthetic oligonucleotide
agcugggcaccguaucagu

SEQ ID NO: 2908877 - RNA, 19 nt, Artificial Sequence
  Description of Artificial Sequence: Synthetic oligonucleotide
acaggaugagcaagcgaug

SEQ ID NO: 2908878 - RNA, 19 nt, Artificial Sequence
  Description of Artificial Sequence: Synthetic oligonucleotide
ucucucgggcccacaugga

SEQ ID NO: 2908879 - RNA, 19 nt, Artificial Sequence
  Description of Artificial Sequence: Synthetic oligonucleotide
cauggcagcggguaccaaa

SEQ ID NO: 2908880 - RNA, 19 nt, Artificial Sequence
  Description of Artificial Sequence: Synthetic oligonucleotide
ggcagcggguaccaaacac

SEQ ID NO: 2908881 - RNA, 19 nt, Artificial Sequence
  Description of Artificial Sequence: Synthetic oligonucleotide
acuggcugcagaccgccuu

SEQ ID NO: 2908882 - RNA, 19 nt, Artificial Sequence
  Description of Artificial Sequence: Synthetic oligonucleotide
cugagcugggcaccguauc

SEQ ID NO: 2908883 - RNA, 19 nt, Artificial Sequence
  Description of Artificial Sequence: Synthetic oligonucleotide
accguaucagucggccauc

SEQ ID NO: 2908884 - RNA, 19 nt, Artificial Sequence
  Description of Artificial Sequence: Synthetic oligonucleotide
ucagugacuccggcaggug

SEQ ID NO: 2908885 - RNA, 19 nt, Artificial Sequence
  Description of Artificial Sequence: Synthetic oligonucleotide
ggucucuacaggccugggc

SEQ ID NO: 2908886 - RNA, 19 nt, Artificial Sequence
  Description of Artificial Sequence: Synthetic oligonucleotide
ggccaucagguccaaucag

SEQ ID NO: 2908887 - RNA, 19 nt, Artificial Sequence
  Description of Artificial Sequence: Synthetic oligonucleotide
gaggccugagcugggcacc

SEQ ID NO: 2908888 - RNA, 19 nt, Artificial Sequence
  Description of Artificial Sequence: Synthetic oligonucleotide
cuuucaccccauauguggu

SEQ ID NO: 2908889 - RNA, 19 nt, Artificial Sequence
  Description of Artificial Sequence: Synthetic oligonucleotide
ggaugaugggacaucuuuc

SEQ ID NO: 2908890 - RNA, 19 nt, Artificial Sequence
  Description of Artificial Sequence: Synthetic oligonucleotide
cagcuucugaggccugagc

SEQ ID NO: 2908891 - RNA, 19 nt, Artificial Sequence
  Description of Artificial Sequence: Synthetic oligonucleotide
accucccgcgaguagcgcu

SEQ ID NO: 2908892 - RNA, 19 nt, Artificial Sequence
  Description of Artificial Sequence: Synthetic oligonucleotide
uggcagcggguaccaaaca

SEQ ID NO: 2908893 - RNA, 19 nt, Artificial Sequence
  Description of Artificial Sequence: Synthetic oligonucleotide
ugguucuuucgaagaccuc

SEQ ID NO: 2908894 - RNA, 19 nt, Artificial Sequence
  Description of Artificial Sequence: Synthetic oligonucleotide
cucuacaggccugggcccc

SEQ ID NO: 2908895 - RNA, 19 nt, Artificial Sequence
  Description of Artificial Sequence: Synthetic oligonucleotide
gccaucagguccaaucagc

SEQ ID NO: 2908896 - RNA, 19 nt, Artificial Sequence
  Description of Artificial Sequence: Synthetic oligonucleotide
gaaaaggagcugcuugguu

SEQ ID NO: 2908897 - RNA, 19 nt, Artificial Sequence
  Description of Artificial Sequence: Synthetic oligonucleotide
agcguccccgaacgggcag

SEQ ID NO: 2908898 - RNA, 19 nt, Artificial Sequence
  Description of Artificial Sequence: Synthetic oligonucleotide
cagucggccaucaggucca

SEQ ID NO: 2908899 - RNA, 19 nt, Artificial Sequence
  Description of Artificial Sequence: Synthetic oligonucleotide
ggaccuugagcugcagcgg

SEQ ID NO: 2908900 - RNA, 19 nt, Artificial Sequence
  Description of Artificial Sequence: Synthetic oligonucleotide
cagggcacggucgcacugg

SEQ ID NO: 2908901 - RNA, 19 nt, Artificial Sequence
  Description of Artificial Sequence: Synthetic oligonucleotide
ugcagcggggaagcguccc

SEQ ID NO: 2908902 - RNA, 19 nt, Artificial Sequence
  Description of Artificial Sequence: Synthetic oligonucleotide
cugggccccuuggaaaagg

SEQ ID NO: 2908903 - RNA, 19 nt, Artificial Sequence
  Description of Artificial Sequence: Synthetic oligonucleotide
ggucgcacuggcugcagac

SEQ ID NO: 2908904 - RNA, 19 nt, Artificial Sequence
  Description of Artificial Sequence: Synthetic oligonucleotide
caucugcagaucucacaca

SEQ ID NO: 2908905 - RNA, 19 nt, Artificial Sequence
  Description of Artificial Sequence: Synthetic oligonucleotide
agcgcugggcgaacacccc

SEQ ID NO: 2908906 - RNA, 19 nt, Artificial Sequence
  Description of Artificial Sequence: Synthetic oligonucleotide
agcucucucgggcccacau

SEQ ID NO: 2908907 - RNA, 19 nt, Artificial Sequence
  Description of Artificial Sequence: Synthetic oligonucleotide
cuggcugcagaccgccuuc

SEQ ID NO: 2908908 - RNA, 19 nt, Artificial Sequence
  Description of Artificial Sequence: Synthetic oligonucleotide
cccuuggaaaaggagcugc

SEQ ID NO: 2908909 - RNA, 19 nt, Artificial Sequence
  Description of Artificial Sequence: Synthetic oligonucleotide
cugggcgaacaccccgcgg

SEQ ID NO: 2908910 - RNA, 19 nt, Artificial Sequence
  Description of Artificial Sequence: Synthetic oligonucleotide
ggcaccguaucagucggcc

SEQ ID NO: 2908911 - RNA, 19 nt, Artificial Sequence
  Description of Artificial Sequence: Synthetic oligonucleotide
ggcucagcucucucgggcc

SEQ ID NO: 2908912 - RNA, 19 nt, Artificial Sequence
  Description of Artificial Sequence: Synthetic oligonucleotide
caccgccagccccagcagg

SEQ ID NO: 2908913 - RNA, 19 nt, Artificial Sequence
  Description of Artificial Sequence: Synthetic oligonucleotide
gagcaagcgaugggagcug

SEQ ID NO: 2908914 - RNA, 19 nt, Artificial Sequence
  Description of Artificial Sequence: Synthetic oligonucleotide
ggagcugcuugguucuuuc

SEQ ID NO: 2908915 - RNA, 19 nt, Artificial Sequence
  Description of Artificial Sequence: Synthetic oligonucleotide
uguccccuugcagcuugag

SEQ ID NO: 2908916 - RNA, 19 nt, Artificial Sequence
  Description of Artificial Sequence: Synthetic oligonucleotide
acaccccgcggcucagcuc

SEQ ID NO: 2908917 - RNA, 19 nt, Artificial Sequence
  Description of Artificial Sequence: Synthetic oligonucleotide
gucgcacuggcugcagacc

SEQ ID NO: 2908918 - RNA, 19 nt, Artificial Sequence
  Description of Artificial Sequence: Synthetic oligonucleotide
gcugcuugguucuuucgaa

SEQ ID NO: 2908919 - RNA, 19 nt, Artificial Sequence
  Description of Artificial Sequence: Synthetic oligonucleotide
ucaccccauauguggucuc

SEQ ID NO: 2908920 - RNA, 19 nt, Artificial Sequence
  Description of Artificial Sequence: Synthetic oligonucleotide
ugcagaccgccuucccauc

SEQ ID NO: 2908921 - RNA, 19 nt, Artificial Sequence
  Description of Artificial Sequence: Synthetic oligonucleotide
gccaagggcaccgccagcc

SEQ ID NO: 2908922 - RNA, 19 nt, Artificial Sequence
  Description of Artificial Sequence: Synthetic oligonucleotide
cagaccgccuucccaucug

SEQ ID NO: 2908923 - RNA, 19 nt, Artificial Sequence
  Description of Artificial Sequence: Synthetic oligonucleotide
ccgcgaguagcgcugggcg

SEQ ID NO: 2908924 - RNA, 19 nt, Artificial Sequence
  Description of Artificial Sequence: Synthetic oligonucleotide
ccaucagguccaaucagca

SEQ ID NO: 2908925 - RNA, 19 nt, Artificial Sequence
  Description of Artificial Sequence: Synthetic oligonucleotide
agcugcagcggggaagcgu

SEQ ID NO: 2908926 - RNA, 19 nt, Artificial Sequence
  Description of Artificial Sequence: Synthetic oligonucleotide
caucuguccccuugcagcu

SEQ ID NO: 2908927 - RNA, 19 nt, Artificial Sequence
  Description of Artificial Sequence: Synthetic oligonucleotide
uacaggccugggccccuug

SEQ ID NO: 2908928 - RNA, 19 nt, Artificial Sequence
  Description of Artificial Sequence: Synthetic oligonucleotide
ccuugcagcuugaggggcc

SEQ ID NO: 2908929 - RNA, 19 nt, Artificial Sequence
  Description of Artificial Sequence: Synthetic oligonucleotide
ccccuugcagcuugagggg

SEQ ID NO: 2908930 - RNA, 19 nt, Artificial Sequence
  Description of Artificial Sequence: Synthetic oligonucleotide
aggccugggccccuuggaa

SEQ ID NO: 2908931 - RNA, 19 nt, Artificial Sequence
  Description of Artificial Sequence: Synthetic oligonucleotide
ucccgcgaguagcgcuggg

SEQ ID NO: 2908932 - RNA, 19 nt, Artificial Sequence
  Description of Artificial Sequence: Synthetic oligonucleotide
aggccugagcugggcaccg

SEQ ID NO: 2908933 - RNA, 19 nt, Artificial Sequence
  Description of Artificial Sequence: Synthetic oligonucleotide
aaucagcaucuguccccuu

SEQ ID NO: 2908934 - RNA, 19 nt, Artificial Sequence
  Description of Artificial Sequence: Synthetic oligonucleotide
cagcggggaagcguccccg

SEQ ID NO: 2908935 - RNA, 19 nt, Artificial Sequence
  Description of Artificial Sequence: Synthetic oligonucleotide
uggcugcagaccgccuucc

SEQ ID NO: 2908936 - RNA, 19 nt, Artificial Sequence
  Description of Artificial Sequence: Synthetic oligonucleotide
caggcagaccagcuucuga

SEQ ID NO: 2908937 - RNA, 19 nt, Artificial Sequence
  Description of Artificial Sequence: Synthetic oligonucleotide
agcaagcgaugggagcugu

SEQ ID NO: 2908938 - RNA, 19 nt, Artificial Sequence
  Description of Artificial Sequence: Synthetic oligonucleotide
agcuccgcuucggcauggc

SEQ ID NO: 2908939 - RNA, 19 nt, Artificial Sequence
  Description of Artificial Sequence: Synthetic oligonucleotide
ccccagcagguguauauac

SEQ ID NO: 2908940 - RNA, 19 nt, Artificial Sequence
  Description of Artificial Sequence: Synthetic oligonucleotide
ucuacaggccugggccccu

SEQ ID NO: 2908941 - RNA, 19 nt, Artificial Sequence
  Description of Artificial Sequence: Synthetic oligonucleotide
agcggggaagcguccccga

SEQ ID NO: 2908942 - RNA, 19 nt, Artificial Sequence
  Description of Artificial Sequence: Synthetic oligonucleotide
ugacuccggcagguggaug

SEQ ID NO: 2908943 - RNA, 19 nt, Artificial Sequence
  Description of Artificial Sequence: Synthetic oligonucleotide
gcugggcgaacaccccgcg

SEQ ID NO: 2908944 - RNA, 19 nt, Artificial Sequence
  Description of Artificial Sequence: Synthetic oligonucleotide
aagcguccccgaacgggca

SEQ ID NO: 2908945 - RNA, 19 nt, Artificial Sequence
  Description of Artificial Sequence: Synthetic oligonucleotide
uguccacacagggcacggu

SEQ ID NO: 2908946 - RNA, 19 nt, Artificial Sequence
  Description of Artificial Sequence: Synthetic oligonucleotide
gcugcagaccgccuuccca

SEQ ID NO: 2908947 - RNA, 19 nt, Artificial Sequence
  Description of Artificial Sequence: Synthetic oligonucleotide
acauggaccuugagcugca

SEQ ID NO: 2908948 - RNA, 19 nt, Artificial Sequence
  Description of Artificial Sequence: Synthetic oligonucleotide
ccccauauguggucucuac

SEQ ID NO: 2908949 - RNA, 19 nt, Artificial Sequence
  Description of Artificial Sequence: Synthetic oligonucleotide
gcgcugggcgaacaccccg

SEQ ID NO: 2908950 - RNA, 19 nt, Artificial Sequence
  Description of Artificial Sequence: Synthetic oligonucleotide
cugcagcggggaagcgucc

SEQ ID NO: 2908951 - RNA, 19 nt, Artificial Sequence
  Description of Artificial Sequence: Synthetic oligonucleotide
gggaagcguccccgaacgg

SEQ ID NO: 2908952 - RNA, 19 nt, Artificial Sequence
  Description of Artificial Sequence: Synthetic oligonucleotide
accagcuucugaggccuga

SEQ ID NO: 2908953 - RNA, 19 nt, Artificial Sequence
  Description of Artificial Sequence: Synthetic oligonucleotide
ccacacagggcacggucgc

SEQ ID NO: 2908954 - RNA, 19 nt, Artificial Sequence
  Description of Artificial Sequence: Synthetic oligonucleotide
gcugcagcggggaagcguc

SEQ ID NO: 2908955 - RNA, 19 nt, Artificial Sequence
  Description of Artificial Sequence: Synthetic oligonucleotide
caccguaucagucggccau

SEQ ID NO: 2908956 - RNA, 19 nt, Artificial Sequence
  Description of Artificial Sequence: Synthetic oligonucleotide
cucgggcccacauggaccu

SEQ ID NO: 2908957 - RNA, 19 nt, Artificial Sequence
  Description of Artificial Sequence: Synthetic oligonucleotide
gcucagcucucucgggccc

SEQ ID NO: 2908958 - RNA, 19 nt, Artificial Sequence
  Description of Artificial Sequence: Synthetic oligonucleotide
gguggaugaugggacaucu

SEQ ID NO: 2908959 - RNA, 19 nt, Artificial Sequence
  Description of Artificial Sequence: Synthetic oligonucleotide
gcacggucgcacuggcugc

SEQ ID NO: 2908960 - RNA, 19 nt, Artificial Sequence
  Description of Artificial Sequence: Synthetic oligonucleotide
ucagcucucucgggcccac

SEQ ID NO: 2908961 - RNA, 19 nt, Artificial Sequence
  Description of Artificial Sequence: Synthetic oligonucleotide
ccacauggaccuugagcug

SEQ ID NO: 2908962 - RNA, 19 nt, Artificial Sequence
  Description of Artificial Sequence: Synthetic oligonucleotide
caaucagcaucuguccccu

SEQ ID NO: 2908963 - RNA, 19 nt, Artificial Sequence
  Description of Artificial Sequence: Synthetic oligonucleotide
cugcagaccgccuucccau

SEQ ID NO: 2908964 - RNA, 19 nt, Artificial Sequence
  Description of Artificial Sequence: Synthetic oligonucleotide
cauggaccuugagcugcag

SEQ ID NO: 2908965 - RNA, 19 nt, Artificial Sequence
  Description of Artificial Sequence: Synthetic oligonucleotide
gcgaugggagcugucccag

SEQ ID NO: 2908966 - RNA, 19 nt, Artificial Sequence
  Description of Artificial Sequence: Synthetic oligonucleotide
caccccgcggcucagcucu

SEQ ID NO: 2908967 - RNA, 19 nt, Artificial Sequence
  Description of Artificial Sequence: Synthetic oligonucleotide
gaacaccccgcggcucagc

SEQ ID NO: 2908968 - RNA, 19 nt, Artificial Sequence
  Description of Artificial Sequence: Synthetic oligonucleotide
cccauauguggucucuaca

SEQ ID NO: 2908969 - RNA, 19 nt, Artificial Sequence
  Description of Artificial Sequence: Synthetic oligonucleotide
uugcagcuugaggggcccc

SEQ ID NO: 2908970 - RNA, 19 nt, Artificial Sequence
  Description of Artificial Sequence: Synthetic oligonucleotide
gcucucucgggcccacaug

SEQ ID NO: 2908971 - RNA, 19 nt, Artificial Sequence
  Description of Artificial Sequence: Synthetic oligonucleotide
gagcugcagcggggaagcg

SEQ ID NO: 2908972 - RNA, 19 nt, Artificial Sequence
  Description of Artificial Sequence: Synthetic oligonucleotide
cccaucugcagaucucaca

SEQ ID NO: 2908973 - RNA, 19 nt, Artificial Sequence
  Description of Artificial Sequence: Synthetic oligonucleotide
cgcggcucagcucucucgg

SEQ ID NO: 2908974 - RNA, 19 nt, Artificial Sequence
  Description of Artificial Sequence: Synthetic oligonucleotide
cuugagcugcagcggggaa

SEQ ID NO: 2908975 - RNA, 19 nt, Artificial Sequence
  Description of Artificial Sequence: Synthetic oligonucleotide
cccagcagguguauauaca

SEQ ID NO: 2908976 - RNA, 19 nt, Artificial Sequence
  Description of Artificial Sequence: Synthetic oligonucleotide
gcggcucagcucucucggg

SEQ ID NO: 2908977 - RNA, 19 nt, Artificial Sequence
  Description of Artificial Sequence: Synthetic oligonucleotide
caucagguccaaucagcau

SEQ ID NO: 2908978 - RNA, 19 nt, Artificial Sequence
  Description of Artificial Sequence: Synthetic oligonucleotide
gcacuggcugcagaccgcc

SEQ ID NO: 2908979 - RNA, 19 nt, Artificial Sequence
  Description of Artificial Sequence: Synthetic oligonucleotide
ccagcagguguauauacau

SEQ ID NO: 2908980 - RNA, 19 nt, Artificial Sequence
  Description of Artificial Sequence: Synthetic oligonucleotide
cucccgcgaguagcgcugg

SEQ ID NO: 2908981 - RNA, 19 nt, Artificial Sequence
  Description of Artificial Sequence: Synthetic oligonucleotide
ccccgaacgggcagcuccg

SEQ ID NO: 2908982 - RNA, 19 nt, Artificial Sequence
  Description of Artificial Sequence: Synthetic oligonucleotide
gaccucccgcgaguagcgc

SEQ ID NO: 2908983 - RNA, 19 nt, Artificial Sequence
  Description of Artificial Sequence: Synthetic oligonucleotide
gggccccuuggaaaaggag

SEQ ID NO: 2908984 - RNA, 19 nt, Artificial Sequence
  Description of Artificial Sequence: Synthetic oligonucleotide
aaggagcugcuugguucuu

SEQ ID NO: 2908985 - RNA, 19 nt, Artificial Sequence
  Description of Artificial Sequence: Synthetic oligonucleotide
gcagcuccgcuucggcaug

SEQ ID NO: 2908986 - RNA, 19 nt, Artificial Sequence
  Description of Artificial Sequence: Synthetic oligonucleotide
gcgaacaccccgcggcuca

SEQ ID NO: 2908987 - RNA, 19 nt, Artificial Sequence
  Description of Artificial Sequence: Synthetic oligonucleotide
ccucccgcgaguagcgcug

SEQ ID NO: 2908988 - RNA, 19 nt, Artificial Sequence
  Description of Artificial Sequence: Synthetic oligonucleotide
cagcuccgcuucggcaugg

SEQ ID NO: 2908989 - RNA, 19 nt, Artificial Sequence
  Description of Artificial Sequence: Synthetic oligonucleotide
ggccaggcuucagugacuc

SEQ ID NO: 2908990 - RNA, 19 nt, Artificial Sequence
  Description of Artificial Sequence: Synthetic oligonucleotide
gcagcggggaagcgucccc

SEQ ID NO: 2908991 - RNA, 19 nt, Artificial Sequence
  Description of Artificial Sequence: Synthetic oligonucleotide
aggagcugcuugguucuuu

SEQ ID NO: 2908992 - RNA, 19 nt, Artificial Sequence
  Description of Artificial Sequence: Synthetic oligonucleotide
ggaaaaggagcugcuuggu

SEQ ID NO: 2908993 - RNA, 19 nt, Artificial Sequence
  Description of Artificial Sequence: Synthetic oligonucleotide
gaccgccuucccaucugca

SEQ ID NO: 2908994 - RNA, 19 nt, Artificial Sequence
  Description of Artificial Sequence: Synthetic oligonucleotide
ccgcggcucagcucucucg

SEQ ID NO: 2908995 - RNA, 19 nt, Artificial Sequence
  Description of Artificial Sequence: Synthetic oligonucleotide
ggcagcuccgcuucggcau

SEQ ID NO: 2908996 - RNA, 19 nt, Artificial Sequence
  Description of Artificial Sequence: Synthetic oligonucleotide
ggcugcagaccgccuuccc

SEQ ID NO: 2908997 - RNA, 19 nt, Artificial Sequence
  Description of Artificial Sequence: Synthetic oligonucleotide
cuuggaaaaggagcugcuu

SEQ ID NO: 2908998 - RNA, 19 nt, Artificial Sequence
  Description of Artificial Sequence: Synthetic oligonucleotide
cuccggcagguggaugaug

SEQ ID NO: 2908999 - RNA, 19 nt, Artificial Sequence
  Description of Artificial Sequence: Synthetic oligonucleotide
acggucgcacuggcugcag

SEQ ID NO: 2909000 - RNA, 19 nt, Artificial Sequence
  Description of Artificial Sequence: Synthetic oligonucleotide
ccggcagguggaugauggg

SEQ ID NO: 2909001 - RNA, 19 nt, Artificial Sequence
  Description of Artificial Sequence: Synthetic oligonucleotide
cccuugcagcuugaggggc

SEQ ID NO: 2909002 - RNA, 19 nt, Artificial Sequence
  Description of Artificial Sequence: Synthetic oligonucleotide
ccaagggcaccgccagccc

SEQ ID NO: 2909003 - RNA, 19 nt, Artificial Sequence
  Description of Artificial Sequence: Synthetic oligonucleotide
gccugggccccuuggaaaa

SEQ ID NO: 2909004 - RNA, 19 nt, Artificial Sequence
  Description of Artificial Sequence: Synthetic oligonucleotide
gcagguguauauacauugu

SEQ ID NO: 2909005 - RNA, 19 nt, Artificial Sequence
  Description of Artificial Sequence: Synthetic oligonucleotide
ggccugggccccuuggaaa

SEQ ID NO: 2909006 - RNA, 19 nt, Artificial Sequence
  Description of Artificial Sequence: Synthetic oligonucleotide
gccccuuggaaaaggagcu

SEQ ID NO: 2909007 - RNA, 19 nt, Artificial Sequence
  Description of Artificial Sequence: Synthetic oligonucleotide
accccauauguggucucua

SEQ ID NO: 2909008 - RNA, 19 nt, Artificial Sequence
  Description of Artificial Sequence: Synthetic oligonucleotide
gcaccguaucagucggcca

SEQ ID NO: 2909009 - RNA, 19 nt, Artificial Sequence
  Description of Artificial Sequence: Synthetic oligonucleotide
aggccaggcuucagugacu

SEQ ID NO: 2909010 - RNA, 19 nt, Artificial Sequence
  Description of Artificial Sequence: Synthetic oligonucleotide
cagcagguguauauacauu

SEQ ID NO: 2909011 - RNA, 19 nt, Artificial Sequence
  Description of Artificial Sequence: Synthetic oligonucleotide
acuccggcagguggaugau

SEQ ID NO: 2909012 - RNA, 19 nt, Artificial Sequence
  Description of Artificial Sequence: Synthetic oligonucleotide
cggcucagcucucucgggc

SEQ ID NO: 2909013 - RNA, 19 nt, Artificial Sequence
  Description of Artificial Sequence: Synthetic oligonucleotide
gggcagcuccgcuucggca

SEQ ID NO: 2909014 - RNA, 19 nt, Artificial Sequence
  Description of Artificial Sequence: Synthetic oligonucleotide
cucagcucucucgggccca

SEQ ID NO: 2909015 - RNA, 19 nt, Artificial Sequence
  Description of Artificial Sequence: Synthetic oligonucleotide
ggcccacauggaccuugag

SEQ ID NO: 2909016 - RNA, 19 nt, Artificial Sequence
  Description of Artificial Sequence: Synthetic oligonucleotide
cagguccaaucagcaucug

SEQ ID NO: 2909017 - RNA, 19 nt, Artificial Sequence
  Description of Artificial Sequence: Synthetic oligonucleotide
caccaggccaggcuucagu

SEQ ID NO: 2909018 - RNA, 19 nt, Artificial Sequence
  Description of Artificial Sequence: Synthetic oligonucleotide
ccgccuucccaucugcaga

SEQ ID NO: 2909019 - RNA, 19 nt, Artificial Sequence
  Description of Artificial Sequence: Synthetic oligonucleotide
cguaucagucggccaucag

SEQ ID NO: 2909020 - RNA, 19 nt, Artificial Sequence
  Description of Artificial Sequence: Synthetic oligonucleotide
gcgaguagcgcugggcgaa

SEQ ID NO: 2909021 - RNA, 19 nt, Artificial Sequence
  Description of Artificial Sequence: Synthetic oligonucleotide
cgcugggcgaacaccccgc

SEQ ID NO: 2909022 - RNA, 19 nt, Artificial Sequence
  Description of Artificial Sequence: Synthetic oligonucleotide
cccgcgaguagcgcugggc

SEQ ID NO: 2909023 - RNA, 19 nt, Artificial Sequence
  Description of Artificial Sequence: Synthetic oligonucleotide
aucuguccccuugcagcuu

SEQ ID NO: 2909024 - RNA, 19 nt, Artificial Sequence
  Description of Artificial Sequence: Synthetic oligonucleotide
cgaugggagcugucccagg

SEQ ID NO: 2909025 - RNA, 19 nt, Artificial Sequence
  Description of Artificial Sequence: Synthetic oligonucleotide
cacggucgcacuggcugca

SEQ ID NO: 2909026 - RNA, 19 nt, Artificial Sequence
  Description of Artificial Sequence: Synthetic oligonucleotide
cacacagggcacggucgca

SEQ ID NO: 2909027 - RNA, 19 nt, Artificial Sequence
  Description of Artificial Sequence: Synthetic oligonucleotide
ggccaagggcaccgccagc

SEQ ID NO: 2909028 - RNA, 19 nt, Artificial Sequence
  Description of Artificial Sequence: Synthetic oligonucleotide
gccaggcuucagugacucc

SEQ ID NO: 2909029 - RNA, 19 nt, Artificial Sequence
  Description of Artificial Sequence: Synthetic oligonucleotide
ccuuggaaaaggagcugcu

SEQ ID NO: 2909030 - RNA, 19 nt, Artificial Sequence
  Description of Artificial Sequence: Synthetic oligonucleotide
ccaggccaggcuucaguga

SEQ ID NO: 2909031 - RNA, 19 nt, Artificial Sequence
  Description of Artificial Sequence: Synthetic oligonucleotide
cgcacuggcugcagaccgc

SEQ ID NO: 2909032 - RNA, 19 nt, Artificial Sequence
  Description of Artificial Sequence: Synthetic oligonucleotide
cuguccccuugcagcuuga

SEQ ID NO: 2909033 - RNA, 19 nt, Artificial Sequence
  Description of Artificial Sequence: Synthetic oligonucleotide
cacagggcacggucgcacu

SEQ ID NO: 2909034 - RNA, 19 nt, Artificial Sequence
  Description of Artificial Sequence: Synthetic oligonucleotide
ggacaucuuucaccccaua

SEQ ID NO: 2909035 - RNA, 19 nt, Artificial Sequence
  Description of Artificial Sequence: Synthetic oligonucleotide
cggccaucagguccaauca

SEQ ID NO: 2909036 - RNA, 19 nt, Artificial Sequence
  Description of Artificial Sequence: Synthetic oligonucleotide
cggggaagcguccccgaac

SEQ ID NO: 2909037 - RNA, 19 nt, Artificial Sequence
  Description of Artificial Sequence: Synthetic oligonucleotide
cagguggaugaugggacau

SEQ ID NO: 2909038 - RNA, 19 nt, Artificial Sequence
  Description of Artificial Sequence: Synthetic oligonucleotide
gcuccgcuucggcauggca

SEQ ID NO: 2909039 - RNA, 19 nt, Artificial Sequence
  Description of Artificial Sequence: Synthetic oligonucleotide
gucccaggcagaccagcuu

SEQ ID NO: 2909040 - RNA, 19 nt, Artificial Sequence
  Description of Artificial Sequence: Synthetic oligonucleotide
gcagaccgccuucccaucu

SEQ ID NO: 2909041 - RNA, 19 nt, Artificial Sequence
  Description of Artificial Sequence: Synthetic oligonucleotide
ccccuuggaaaaggagcug

SEQ ID NO: 2909042 - RNA, 19 nt, Artificial Sequence
  Description of Artificial Sequence: Synthetic oligonucleotide
ccugggccccuuggaaaag

SEQ ID NO: 2909043 - RNA, 19 nt, Artificial Sequence
  Description of Artificial Sequence: Synthetic oligonucleotide
ccaggcagaccagcuucug

SEQ ID NO: 2909044 - RNA, 19 nt, Artificial Sequence
  Description of Artificial Sequence: Synthetic oligonucleotide
caccccauauguggucucu

SEQ ID NO: 2909045 - RNA, 19 nt, Artificial Sequence
  Description of Artificial Sequence: Synthetic oligonucleotide
cggcauggcagcggguacc

SEQ ID NO: 2909046 - RNA, 19 nt, Artificial Sequence
  Description of Artificial Sequence: Synthetic oligonucleotide
ggcgaacaccccgcggcuc

SEQ ID NO: 2909047 - RNA, 19 nt, Artificial Sequence
  Description of Artificial Sequence: Synthetic oligonucleotide
gcguccccgaacgggcagc

SEQ ID NO: 2909048 - RNA, 19 nt, Artificial Sequence
  Description of Artificial Sequence: Synthetic oligonucleotide
gccugagcugggcaccgua

SEQ ID NO: 2909049 - RNA, 19 nt, Artificial Sequence
  Description of Artificial Sequence: Synthetic oligonucleotide
gcaagcgaugggagcuguc

SEQ ID NO: 2909050 - RNA, 19 nt, Artificial Sequence
  Description of Artificial Sequence: Synthetic oligonucleotide
gggcaccguaucagucggc

SEQ ID NO: 2909051 - RNA, 19 nt, Artificial Sequence
  Description of Artificial Sequence: Synthetic oligonucleotide
ccccaccaggccaggcuuc

SEQ ID NO: 2909052 - RNA, 19 nt, Artificial Sequence
  Description of Artificial Sequence: Synthetic oligonucleotide
cuucggcauggcagcgggu

SEQ ID NO: 2909053 - RNA, 19 nt, Artificial Sequence
  Description of Artificial Sequence: Synthetic oligonucleotide
cgcuucggcauggcagcgg

SEQ ID NO: 2909054 - RNA, 19 nt, Artificial Sequence
  Description of Artificial Sequence: Synthetic oligonucleotide
gugacuccggcagguggau

SEQ ID NO: 2909055 - RNA, 19 nt, Artificial Sequence
  Description of Artificial Sequence: Synthetic oligonucleotide
guggaugaugggacaucuu

SEQ ID NO: 2909056 - RNA, 19 nt, Artificial Sequence
  Description of Artificial Sequence: Synthetic oligonucleotide
ccgcuucggcauggcagcg

SEQ ID NO: 2909057 - RNA, 19 nt, Artificial Sequence
  Description of Artificial Sequence: Synthetic oligonucleotide
agucggccaucagguccaa

SEQ ID NO: 2909058 - RNA, 19 nt, Artificial Sequence
  Description of Artificial Sequence: Synthetic oligonucleotide
gggcgaacaccccgcggcu

SEQ ID NO: 2909059 - RNA, 19 nt, Artificial Sequence
  Description of Artificial Sequence: Synthetic oligonucleotide
gcggggaagcguccccgaa

SEQ ID NO: 2909060 - RNA, 19 nt, Artificial Sequence
  Description of Artificial Sequence: Synthetic oligonucleotide
cgcgaguagcgcugggcga

SEQ ID NO: 2909061 - RNA, 19 nt, Artificial Sequence
  Description of Artificial Sequence: Synthetic oligonucleotide
ccguaucagucggccauca

SEQ ID NO: 2909062 - RNA, 19 nt, Artificial Sequence
  Description of Artificial Sequence: Synthetic oligonucleotide
gggacaucuuucaccccau

SEQ ID NO: 2909063 - RNA, 19 nt, Artificial Sequence
  Description of Artificial Sequence: Synthetic oligonucleotide
gccccagcagguguauaua

SEQ ID NO: 2909064 - RNA, 19 nt, Artificial Sequence
  Description of Artificial Sequence: Synthetic oligonucleotide
guccccgaacgggcagcuc

SEQ ID NO: 2909065 - RNA, 19 nt, Artificial Sequence
  Description of Artificial Sequence: Synthetic oligonucleotide
cgggcccacauggaccuug

SEQ ID NO: 2909066 - RNA, 19 nt, Artificial Sequence
  Description of Artificial Sequence: Synthetic oligonucleotide
ccugagcugggcaccguau

SEQ ID NO: 2909067 - RNA, 19 nt, Artificial Sequence
  Description of Artificial Sequence: Synthetic oligonucleotide
cccgaacgggcagcuccgc

SEQ ID NO: 2909068 - RNA, 19 nt, Artificial Sequence
  Description of Artificial Sequence: Synthetic oligonucleotide
cccaggcagaccagcuucu

SEQ ID NO: 2909069 - RNA, 19 nt, Artificial Sequence
  Description of Artificial Sequence: Synthetic oligonucleotide
ucgggcccacauggaccuu

SEQ ID NO: 2909070 - RNA, 19 nt, Artificial Sequence
  Description of Artificial Sequence: Synthetic oligonucleotide
cccgcggcucagcucucuc

SEQ ID NO: 2909071 - RNA, 19 nt, Artificial Sequence
  Description of Artificial Sequence: Synthetic oligonucleotide
gccuucccaucugcagauc

SEQ ID NO: 2909072 - RNA, 19 nt, Artificial Sequence
  Description of Artificial Sequence: Synthetic oligonucleotide
cccaccaggccaggcuuca

SEQ ID NO: 2909073 - RNA, 19 nt, Artificial Sequence
  Description of Artificial Sequence: Synthetic oligonucleotide
cgaguagcgcugggcgaac

SEQ ID NO: 2909074 - RNA, 19 nt, Artificial Sequence
  Description of Artificial Sequence: Synthetic oligonucleotide
cgaacaccccgcggcucag

SEQ ID NO: 2909075 - RNA, 19 nt, Artificial Sequence
  Description of Artificial Sequence: Synthetic oligonucleotide
ccgccagccccagcaggug

SEQ ID NO: 2909076 - RNA, 19 nt, Artificial Sequence
  Description of Artificial Sequence: Synthetic oligonucleotide
cagcucucucgggcccaca

SEQ ID NO: 2909077 - RNA, 19 nt, Artificial Sequence
  Description of Artificial Sequence: Synthetic oligonucleotide
cgaacgggcagcuccgcuu

SEQ ID NO: 2909078 - RNA, 19 nt, Artificial Sequence
  Description of Artificial Sequence: Synthetic oligonucleotide
cagccccagcagguguaua

SEQ ID NO: 2909079 - RNA, 19 nt, Artificial Sequence
  Description of Artificial Sequence: Synthetic oligonucleotide
cgaagaccucccgcgagua

SEQ ID NO: 2909080 - RNA, 19 nt, Artificial Sequence
  Description of Artificial Sequence: Synthetic oligonucleotide
cgccuucccaucugcagau

SEQ ID NO: 2909081 - RNA, 19 nt, Artificial Sequence
  Description of Artificial Sequence: Synthetic oligonucleotide
ccgaacgggcagcuccgcu

SEQ ID NO: 2909082 - RNA, 19 nt, Artificial Sequence
  Description of Artificial Sequence: Synthetic oligonucleotide
gcauggcagcggguaccaa

SEQ ID NO: 2909083 - RNA, 19 nt, Artificial Sequence
  Description of Artificial Sequence: Synthetic oligonucleotide
cggucgcacuggcugcaga

SEQ ID NO: 2909084 - RNA, 19 nt, Artificial Sequence
  Description of Artificial Sequence: Synthetic oligonucleotide
gucggccaucagguccaau

SEQ ID NO: 2909085 - RNA, 19 nt, Artificial Sequence
  Description of Artificial Sequence: Synthetic oligonucleotide
gggcacggucgcacuggcu

SEQ ID NO: 2909086 - RNA, 19 nt, Artificial Sequence
  Description of Artificial Sequence: Synthetic oligonucleotide
cguccccgaacgggcagcu

SEQ ID NO: 2909087 - RNA, 19 nt, Artificial Sequence
  Description of Artificial Sequence: Synthetic oligonucleotide
aauauuaucagacucuucc

SEQ ID NO: 2909088 - RNA, 19 nt, Artificial Sequence
  Description of Artificial Sequence: Synthetic oligonucleotide
aauaaauauaaacaaugug

SEQ ID NO: 2909089 - RNA, 19 nt, Artificial Sequence
  Description of Artificial Sequence: Synthetic oligonucleotide
uguguuaaaauaaauauaa

SEQ ID NO: 2909090 - RNA, 19 nt, Artificial Sequence
  Description of Artificial Sequence: Synthetic oligonucleotide
aaguaauucauacuuaucu

SEQ ID NO: 2909091 - RNA, 19 nt, Artificial Sequence
  Description of Artificial Sequence: Synthetic oligonucleotide
ucauacuuaucuaaaacgg

SEQ ID NO: 2909092 - RNA, 19 nt, Artificial Sequence
  Description of Artificial Sequence: Synthetic oligonucleotide
uucauacuuaucuaaaacg

SEQ ID NO: 2909093 - RNA, 19 nt, Artificial Sequence
  Description of Artificial Sequence: Synthetic oligonucleotide
uuuguguuaaaauaaauau

SEQ ID NO: 2909094 - RNA, 19 nt, Artificial Sequence
  Description of Artificial Sequence: Synthetic oligonucleotide
uucuggaaaaucuauagag

SEQ ID NO: 2909095 - RNA, 19 nt, Artificial Sequence
  Description of Artificial Sequence: Synthetic oligonucleotide
auaaauauaaacaaugugu

SEQ ID NO: 2909096 - RNA, 19 nt, Artificial Sequence
  Description of Artificial Sequence: Synthetic oligonucleotide
ugcacuacaacucucacug

SEQ ID NO: 2909097 - RNA, 19 nt, Artificial Sequence
  Description of Artificial Sequence: Synthetic oligonucleotide
gagaaaaucaucuauuuca

SEQ ID NO: 2909098 - RNA, 19 nt, Artificial Sequence
  Description of Artificial Sequence: Synthetic oligonucleotide
uaaauauaaacaauguguc

SEQ ID NO: 2909099 - RNA, 19 nt, Artificial Sequence
  Description of Artificial Sequence: Synthetic oligonucleotide
auucauacuuaucuaaaac

SEQ ID NO: 2909100 - RNA, 19 nt, Artificial Sequence
  Description of Artificial Sequence: Synthetic oligonucleotide
uuuucuggaaaaucuauag

SEQ ID NO: 2909101 - RNA, 19 nt, Artificial Sequence
  Description of Artificial Sequence: Synthetic oligonucleotide
ucuggaaaaucuauagagg

SEQ ID NO: 2909102 - RNA, 19 nt, Artificial Sequence
  Description of Artificial Sequence: Synthetic oligonucleotide
uuguauaaguaauucauac

SEQ ID NO: 2909103 - RNA, 19 nt, Artificial Sequence
  Description of Artificial Sequence: Synthetic oligonucleotide
aaauauaaacaaugugucu

SEQ ID NO: 2909104 - RNA, 19 nt, Artificial Sequence
  Description of Artificial Sequence: Synthetic oligonucleotide
aaaacgguuugccuuuugg

SEQ ID NO: 2909105 - RNA, 19 nt, Artificial Sequence
  Description of Artificial Sequence: Synthetic oligonucleotide
aauauaaacaaugugucuu

SEQ ID NO: 2909106 - RNA, 19 nt, Artificial Sequence
  Description of Artificial Sequence: Synthetic oligonucleotide
aaaucuauagaggagcaug

SEQ ID NO: 2909107 - RNA, 19 nt, Artificial Sequence
  Description of Artificial Sequence: Synthetic oligonucleotide
aaugugucuuaauuuuggg

SEQ ID NO: 2909108 - RNA, 19 nt, Artificial Sequence
  Description of Artificial Sequence: Synthetic oligonucleotide
agaaauuuguguuaaaaua

SEQ ID NO: 2909109 - RNA, 19 nt, Artificial Sequence
  Description of Artificial Sequence: Synthetic oligonucleotide
aaauaaauauaaacaaugu

SEQ ID NO: 2909110 - RNA, 19 nt, Artificial Sequence
  Description of Artificial Sequence: Synthetic oligonucleotide
uaaacaaugugucuuaauu

SEQ ID NO: 2909111 - RNA, 19 nt, Artificial Sequence
  Description of Artificial Sequence: Synthetic oligonucleotide
cuugauucauguuuucugg

SEQ ID NO: 2909112 - RNA, 19 nt, Artificial Sequence
  Description of Artificial Sequence: Synthetic oligonucleotide
aaagguagacuucauuugu

SEQ ID NO: 2909113 - RNA, 19 nt, Artificial Sequence
  Description of Artificial Sequence: Synthetic oligonucleotide
aauuguucucuuuuccuug

SEQ ID NO: 2909114 - RNA, 19 nt, Artificial Sequence
  Description of Artificial Sequence: Synthetic oligonucleotide
aacaaugugucuuaauuuu

SEQ ID NO: 2909115 - RNA, 19 nt, Artificial Sequence
  Description of Artificial Sequence: Synthetic oligonucleotide
ugcaucuucuuuucaaagg

SEQ ID NO: 2909116 - RNA, 19 nt, Artificial Sequence
  Description of Artificial Sequence: Synthetic oligonucleotide
aggagcaugaaauuggcug

SEQ ID NO: 2909117 - RNA, 19 nt, Artificial Sequence
  Description of Artificial Sequence: Synthetic oligonucleotide
ucuuucuugauucauguuu

SEQ ID NO: 2909118 - RNA, 19 nt, Artificial Sequence
  Description of Artificial Sequence: Synthetic oligonucleotide
uuucaaucuugccuguagg

SEQ ID NO: 2909119 - RNA, 19 nt, Artificial Sequence
  Description of Artificial Sequence: Synthetic oligonucleotide
ucuugauucauguuuucug

SEQ ID NO: 2909120 - RNA, 19 nt, Artificial Sequence
  Description of Artificial Sequence: Synthetic oligonucleotide
uuaucuaaaacgguuugcc

SEQ ID NO: 2909121 - RNA, 19 nt, Artificial Sequence
  Description of Artificial Sequence: Synthetic oligonucleotide
caagcugugcuccaaaagg

SEQ ID NO: 2909122 - RNA, 19 nt, Artificial Sequence
  Description of Artificial Sequence: Synthetic oligonucleotide
ugugucuuaauuuuggguu

SEQ ID NO: 2909123 - RNA, 19 nt, Artificial Sequence
  Description of Artificial Sequence: Synthetic oligonucleotide
aauucauacuuaucuaaaa

SEQ ID NO: 2909124 - RNA, 19 nt, Artificial Sequence
  Description of Artificial Sequence: Synthetic oligonucleotide
uucuuuagcucuucuacag

SEQ ID NO: 2909125 - RNA, 19 nt, Artificial Sequence
  Description of Artificial Sequence: Synthetic oligonucleotide
uguauaaguaauucauacu

SEQ ID NO: 2909126 - RNA, 19 nt, Artificial Sequence
  Description of Artificial Sequence: Synthetic oligonucleotide
uggaaaaucuauagaggag

SEQ ID NO: 2909127 - RNA, 19 nt, Artificial Sequence
  Description of Artificial Sequence: Synthetic oligonucleotide
ucaaagguagacuucauuu

SEQ ID NO: 2909128 - RNA, 19 nt, Artificial Sequence
  Description of Artificial Sequence: Synthetic oligonucleotide
ugugcagcuacuuucaauc

SEQ ID NO: 2909129 - RNA, 19 nt, Artificial Sequence
  Description of Artificial Sequence: Synthetic oligonucleotide
cuacuuucaaucuugccug

SEQ ID NO: 2909130 - RNA, 19 nt, Artificial Sequence
  Description of Artificial Sequence: Synthetic oligonucleotide
auaaguaauucauacuuau

SEQ ID NO: 2909131 - RNA, 19 nt, Artificial Sequence
  Description of Artificial Sequence: Synthetic oligonucleotide
caaugugucuuaauuuugg

SEQ ID NO: 2909132 - RNA, 19 nt, Artificial Sequence
  Description of Artificial Sequence: Synthetic oligonucleotide
uuuucaaagguagacuuca

SEQ ID NO: 2909133 - RNA, 19 nt, Artificial Sequence
  Description of Artificial Sequence: Synthetic oligonucleotide
cuugcuaauuccucaauac

SEQ ID NO: 2909134 - RNA, 19 nt, Artificial Sequence
  Description of Artificial Sequence: Synthetic oligonucleotide
auugcaaucaccuggugaa

SEQ ID NO: 2909135 - RNA, 19 nt, Artificial Sequence
  Description of Artificial Sequence: Synthetic oligonucleotide
guucucuuuuccuugaagc

SEQ ID NO: 2909136 - RNA, 19 nt, Artificial Sequence
  Description of Artificial Sequence: Synthetic oligonucleotide
uuuucuugcuaauuccuca

SEQ ID NO: 2909137 - RNA, 19 nt, Artificial Sequence
  Description of Artificial Sequence: Synthetic oligonucleotide
uuucuuucuugauucaugu

SEQ ID NO: 2909138 - RNA, 19 nt, Artificial Sequence
  Description of Artificial Sequence: Synthetic oligonucleotide
uuguguuaaaauaaauaua

SEQ ID NO: 2909139 - RNA, 19 nt, Artificial Sequence
  Description of Artificial Sequence: Synthetic oligonucleotide
uaauucauacuuaucuaaa

SEQ ID NO: 2909140 - RNA, 19 nt, Artificial Sequence
  Description of Artificial Sequence: Synthetic oligonucleotide
uuaauuuuggguucccuau

SEQ ID NO: 2909141 - RNA, 19 nt, Artificial Sequence
  Description of Artificial Sequence: Synthetic oligonucleotide
gaagcuacugagaaaauca

SEQ ID NO: 2909142 - RNA, 19 nt, Artificial Sequence
  Description of Artificial Sequence: Synthetic oligonucleotide
uuucuggaaaaucuauaga

SEQ ID NO: 2909143 - RNA, 19 nt, Artificial Sequence
  Description of Artificial Sequence: Synthetic oligonucleotide
auuuguauaaguaauucau

SEQ ID NO: 2909144 - RNA, 19 nt, Artificial Sequence
  Description of Artificial Sequence: Synthetic oligonucleotide
cucggcaauauuaucagac

SEQ ID NO: 2909145 - RNA, 19 nt, Artificial Sequence
  Description of Artificial Sequence: Synthetic oligonucleotide
ucucacugaguucauguug

SEQ ID NO: 2909146 - RNA, 19 nt, Artificial Sequence
  Description of Artificial Sequence: Synthetic oligonucleotide
uugguuuccaagcugugcu

SEQ ID NO: 2909147 - RNA, 19 nt, Artificial Sequence
  Description of Artificial Sequence: Synthetic oligonucleotide
ugaagcuucucuucuuuag

SEQ ID NO: 2909148 - RNA, 19 nt, Artificial Sequence
  Description of Artificial Sequence: Synthetic oligonucleotide
gugcauugcaaucaccugg

SEQ ID NO: 2909149 - RNA, 19 nt, Artificial Sequence
  Description of Artificial Sequence: Synthetic oligonucleotide
aaucaucuauuucaguuuu

SEQ ID NO: 2909150 - RNA, 19 nt, Artificial Sequence
  Description of Artificial Sequence: Synthetic oligonucleotide
ucuuuucaaagguagacuu

SEQ ID NO: 2909151 - RNA, 19 nt, Artificial Sequence
  Description of Artificial Sequence: Synthetic oligonucleotide
aaauuguucucuuuuccuu

SEQ ID NO: 2909152 - RNA, 19 nt, Artificial Sequence
  Description of Artificial Sequence: Synthetic oligonucleotide
uauaaguaauucauacuua

SEQ ID NO: 2909153 - RNA, 19 nt, Artificial Sequence
  Description of Artificial Sequence: Synthetic oligonucleotide
uauuaucagacucuuccuc

SEQ ID NO: 2909154 - RNA, 19 nt, Artificial Sequence
  Description of Artificial Sequence: Synthetic oligonucleotide
auuaucagacucuuccuca

SEQ ID NO: 2909155 - RNA, 19 nt, Artificial Sequence
  Description of Artificial Sequence: Synthetic oligonucleotide
uuuguauaaguaauucaua

SEQ ID NO: 2909156 - RNA, 19 nt, Artificial Sequence
  Description of Artificial Sequence: Synthetic oligonucleotide
ugagaaaaucaucuauuuc

SEQ ID NO: 2909157 - RNA, 19 nt, Artificial Sequence
  Description of Artificial Sequence: Synthetic oligonucleotide
uuagcucuucuacaguggc

SEQ ID NO: 2909158 - RNA, 19 nt, Artificial Sequence
  Description of Artificial Sequence: Synthetic oligonucleotide
ucuauagaggagcaugaaa

SEQ ID NO: 2909159 - RNA, 19 nt, Artificial Sequence
  Description of Artificial Sequence: Synthetic oligonucleotide
cuuuagcucuucuacagug

SEQ ID NO: 2909160 - RNA, 19 nt, Artificial Sequence
  Description of Artificial Sequence: Synthetic oligonucleotide
ugcuaauuccucaauacuu

SEQ ID NO: 2909161 - RNA, 19 nt, Artificial Sequence
  Description of Artificial Sequence: Synthetic oligonucleotide
acaacucucacugaguuca

SEQ ID NO: 2909162 - RNA, 19 nt, Artificial Sequence
  Description of Artificial Sequence: Synthetic oligonucleotide
uacugagaaaaucaucuau

SEQ ID NO: 2909163 - RNA, 19 nt, Artificial Sequence
  Description of Artificial Sequence: Synthetic oligonucleotide
uucauguugucuuugcauc

SEQ ID NO: 2909164 - RNA, 19 nt, Artificial Sequence
  Description of Artificial Sequence: Synthetic oligonucleotide
acuuaucuaaaacgguuug

SEQ ID NO: 2909165 - RNA, 19 nt, Artificial Sequence
  Description of Artificial Sequence: Synthetic oligonucleotide
aaacgguuugccuuuuggu

SEQ ID NO: 2909166 - RNA, 19 nt, Artificial Sequence
  Description of Artificial Sequence: Synthetic oligonucleotide
aauccucggcaauauuauc

SEQ ID NO: 2909167 - RNA, 19 nt, Artificial Sequence
  Description of Artificial Sequence: Synthetic oligonucleotide
ugaaauuggcugugcauug

SEQ ID NO: 2909168 - RNA, 19 nt, Artificial Sequence
  Description of Artificial Sequence: Synthetic oligonucleotide
cuggaaaaucuauagagga

SEQ ID NO: 2909169 - RNA, 19 nt, Artificial Sequence
  Description of Artificial Sequence: Synthetic oligonucleotide
uucccuauuucuuucuuga

SEQ ID NO: 2909170 - RNA, 19 nt, Artificial Sequence
  Description of Artificial Sequence: Synthetic oligonucleotide
uguuuucuggaaaaucuau

SEQ ID NO: 2909171 - RNA, 19 nt, Artificial Sequence
  Description of Artificial Sequence: Synthetic oligonucleotide
guagacuucauuuguauaa

SEQ ID NO: 2909172 - RNA, 19 nt, Artificial Sequence
  Description of Artificial Sequence: Synthetic oligonucleotide
ucauuuguauaaguaauuc

SEQ ID NO: 2909173 - RNA, 19 nt, Artificial Sequence
  Description of Artificial Sequence: Synthetic oligonucleotide
uguucucuuuuccuugaag

SEQ ID NO: 2909174 - RNA, 19 nt, Artificial Sequence
  Description of Artificial Sequence: Synthetic oligonucleotide
caaagguagacuucauuug

SEQ ID NO: 2909175 - RNA, 19 nt, Artificial Sequence
  Description of Artificial Sequence: Synthetic oligonucleotide
ucagaaauuuguguuaaaa

SEQ ID NO: 2909176 - RNA, 19 nt, Artificial Sequence
  Description of Artificial Sequence: Synthetic oligonucleotide
uuuuggguucccuauuucu

SEQ ID NO: 2909177 - RNA, 19 nt, Artificial Sequence
  Description of Artificial Sequence: Synthetic oligonucleotide
uuucccuccaagaaauccu

SEQ ID NO: 2909178 - RNA, 19 nt, Artificial Sequence
  Description of Artificial Sequence: Synthetic oligonucleotide
agaaaaucaucuauuucag

SEQ ID NO: 2909179 - RNA, 19 nt, Artificial Sequence
  Description of Artificial Sequence: Synthetic oligonucleotide
uccuugaagcuacugagaa

SEQ ID NO: 2909180 - RNA, 19 nt, Artificial Sequence
  Description of Artificial Sequence: Synthetic oligonucleotide
ggaaaaucuauagaggagc

SEQ ID NO: 2909181 - RNA, 19 nt, Artificial Sequence
  Description of Artificial Sequence: Synthetic oligonucleotide
gaagcuucucuucuuuagc

SEQ ID NO: 2909182 - RNA, 19 nt, Artificial Sequence
  Description of Artificial Sequence: Synthetic oligonucleotide
uuuucccuccaagaaaucc

SEQ ID NO: 2909183 - RNA, 19 nt, Artificial Sequence
  Description of Artificial Sequence: Synthetic oligonucleotide
uucuacaguggcaaauugu

SEQ ID NO: 2909184 - RNA, 19 nt, Artificial Sequence
  Description of Artificial Sequence: Synthetic oligonucleotide
aauuuuggguucccuauuu

SEQ ID NO: 2909185 - RNA, 19 nt, Artificial Sequence
  Description of Artificial Sequence: Synthetic oligonucleotide
aaauuuguguuaaaauaaa

SEQ ID NO: 2909186 - RNA, 19 nt, Artificial Sequence
  Description of Artificial Sequence: Synthetic oligonucleotide
uugcuaauuccucaauacu

SEQ ID NO: 2909187 - RNA, 19 nt, Artificial Sequence
  Description of Artificial Sequence: Synthetic oligonucleotide
uuaucagacucuuccucag

SEQ ID NO: 2909188 - RNA, 19 nt, Artificial Sequence
  Description of Artificial Sequence: Synthetic oligonucleotide
guaauucauacuuaucuaa

SEQ ID NO: 2909189 - RNA, 19 nt, Artificial Sequence
  Description of Artificial Sequence: Synthetic oligonucleotide
uugcaucuucuuuucaaag

SEQ ID NO: 2909190 - RNA, 19 nt, Artificial Sequence
  Description of Artificial Sequence: Synthetic oligonucleotide
uugccuuuugguuuccaag

SEQ ID NO: 2909191 - RNA, 19 nt, Artificial Sequence
  Description of Artificial Sequence: Synthetic oligonucleotide
uucucuuuuccuugaagcu

SEQ ID NO: 2909192 - RNA, 19 nt, Artificial Sequence
  Description of Artificial Sequence: Synthetic oligonucleotide
aaauuggcugugcauugca

SEQ ID NO: 2909193 - RNA, 19 nt, Artificial Sequence
  Description of Artificial Sequence: Synthetic oligonucleotide
aguaauucauacuuaucua

SEQ ID NO: 2909194 - RNA, 19 nt, Artificial Sequence
  Description of Artificial Sequence: Synthetic oligonucleotide
uaaguaauucauacuuauc

SEQ ID NO: 2909195 - RNA, 19 nt, Artificial Sequence
  Description of Artificial Sequence: Synthetic oligonucleotide
ucuucuuuucaaagguaga

SEQ ID NO: 2909196 - RNA, 19 nt, Artificial Sequence
  Description of Artificial Sequence: Synthetic oligonucleotide
guauaaguaauucauacuu

SEQ ID NO: 2909197 - RNA, 19 nt, Artificial Sequence
  Description of Artificial Sequence: Synthetic oligonucleotide
aucuaaaacgguuugccuu

SEQ ID NO: 2909198 - RNA, 19 nt, Artificial Sequence
  Description of Artificial Sequence: Synthetic oligonucleotide
aaucaccuggugaagcuuc

SEQ ID NO: 2909199 - RNA, 19 nt, Artificial Sequence
  Description of Artificial Sequence: Synthetic oligonucleotide
ucaaucuugccuguagggc

SEQ ID NO: 2909200 - RNA, 19 nt, Artificial Sequence
  Description of Artificial Sequence: Synthetic oligonucleotide
ucaugugcagcuacuuuca

SEQ ID NO: 2909201 - RNA, 19 nt, Artificial Sequence
  Description of Artificial Sequence: Synthetic oligonucleotide
agcuacuuucaaucuugcc

SEQ ID NO: 2909202 - RNA, 19 nt, Artificial Sequence
  Description of Artificial Sequence: Synthetic oligonucleotide
auagaggagcaugaaauug

SEQ ID NO: 2909203 - RNA, 19 nt, Artificial Sequence
  Description of Artificial Sequence: Synthetic oligonucleotide
uuugcaucuucuuuucaaa

SEQ ID NO: 2909204 - RNA, 19 nt, Artificial Sequence
  Description of Artificial Sequence: Synthetic oligonucleotide
aauuuguguuaaaauaaau

SEQ ID NO: 2909205 - RNA, 19 nt, Artificial Sequence
  Description of Artificial Sequence: Synthetic oligonucleotide
cuuucaaucuugccuguag

SEQ ID NO: 2909206 - RNA, 19 nt, Artificial Sequence
  Description of Artificial Sequence: Synthetic oligonucleotide
aucuucuuuucaaagguag

SEQ ID NO: 2909207 - RNA, 19 nt, Artificial Sequence
  Description of Artificial Sequence: Synthetic oligonucleotide
uccucggcaauauuaucag

SEQ ID NO: 2909208 - RNA, 19 nt, Artificial Sequence
  Description of Artificial Sequence: Synthetic oligonucleotide
aaucuauagaggagcauga

SEQ ID NO: 2909209 - RNA, 19 nt, Artificial Sequence
  Description of Artificial Sequence: Synthetic oligonucleotide
uaucuaaaacgguuugccu

SEQ ID NO: 2909210 - RNA, 19 nt, Artificial Sequence
  Description of Artificial Sequence: Synthetic oligonucleotide
auuuguguuaaaauaaaua

SEQ ID NO: 2909211 - RNA, 19 nt, Artificial Sequence
  Description of Artificial Sequence: Synthetic oligonucleotide
cuucuuuucaaagguagac

SEQ ID NO: 2909212 - RNA, 19 nt, Artificial Sequence
  Description of Artificial Sequence: Synthetic oligonucleotide
ucuaaaacgguuugccuuu

SEQ ID NO: 2909213 - RNA, 19 nt, Artificial Sequence
  Description of Artificial Sequence: Synthetic oligonucleotide
auuucagaaauuuguguua

SEQ ID NO: 2909214 - RNA, 19 nt, Artificial Sequence
  Description of Artificial Sequence: Synthetic oligonucleotide
cauuuguauaaguaauuca

SEQ ID NO: 2909215 - RNA, 19 nt, Artificial Sequence
  Description of Artificial Sequence: Synthetic oligonucleotide
ugucuuugcaucuucuuuu

SEQ ID NO: 2909216 - RNA, 19 nt, Artificial Sequence
  Description of Artificial Sequence: Synthetic oligonucleotide
ugcauugcaaucaccuggu

SEQ ID NO: 2909217 - RNA, 19 nt, Artificial Sequence
  Description of Artificial Sequence: Synthetic oligonucleotide
uacuuaucuaaaacgguuu

SEQ ID NO: 2909218 - RNA, 19 nt, Artificial Sequence
  Description of Artificial Sequence: Synthetic oligonucleotide
auuuuggguucccuauuuc

SEQ ID NO: 2909219 - RNA, 19 nt, Artificial Sequence
  Description of Artificial Sequence: Synthetic oligonucleotide
cuuaucuaaaacgguuugc

SEQ ID NO: 2909220 - RNA, 19 nt, Artificial Sequence
  Description of Artificial Sequence: Synthetic oligonucleotide
auucauguuuucuggaaaa

SEQ ID NO: 2909221 - RNA, 19 nt, Artificial Sequence
  Description of Artificial Sequence: Synthetic oligonucleotide
ccuauuucuuucuugauuc

SEQ ID NO: 2909222 - RNA, 19 nt, Artificial Sequence
  Description of Artificial Sequence: Synthetic oligonucleotide
uagacuucauuuguauaag

SEQ ID NO: 2909223 - RNA, 19 nt, Artificial Sequence
  Description of Artificial Sequence: Synthetic oligonucleotide
acucucacugaguucaugu

SEQ ID NO: 2909224 - RNA, 19 nt, Artificial Sequence
  Description of Artificial Sequence: Synthetic oligonucleotide
ucuugcuaauuccucaaua

SEQ ID NO: 2909225 - RNA, 19 nt, Artificial Sequence
  Description of Artificial Sequence: Synthetic oligonucleotide
ugauucauguuuucuggaa

SEQ ID NO: 2909226 - RNA, 19 nt, Artificial Sequence
  Description of Artificial Sequence: Synthetic oligonucleotide
augugucuuaauuuugggu

SEQ ID NO: 2909227 - RNA, 19 nt, Artificial Sequence
  Description of Artificial Sequence: Synthetic oligonucleotide
auauaaacaaugugucuua

SEQ ID NO: 2909228 - RNA, 19 nt, Artificial Sequence
  Description of Artificial Sequence: Synthetic oligonucleotide
acaguggcaaauuguucuc

SEQ ID NO: 2909229 - RNA, 19 nt, Artificial Sequence
  Description of Artificial Sequence: Synthetic oligonucleotide
cacuacaacucucacugag

SEQ ID NO: 2909230 - RNA, 19 nt, Artificial Sequence
  Description of Artificial Sequence: Synthetic oligonucleotide
uugauucauguuuucugga

SEQ ID NO: 2909231 - RNA, 19 nt, Artificial Sequence
  Description of Artificial Sequence: Synthetic oligonucleotide
uuucagaaauuuguguuaa

SEQ ID NO: 2909232 - RNA, 19 nt, Artificial Sequence
  Description of Artificial Sequence: Synthetic oligonucleotide
uucuuuucaaagguagacu

SEQ ID NO: 2909233 - RNA, 19 nt, Artificial Sequence
  Description of Artificial Sequence: Synthetic oligonucleotide
uugccuguagggcacuugc

SEQ ID NO: 2909234 - RNA, 19 nt, Artificial Sequence
  Description of Artificial Sequence: Synthetic oligonucleotide
uuugguuuccaagcugugc

SEQ ID NO: 2909235 - RNA, 19 nt, Artificial Sequence
  Description of Artificial Sequence: Synthetic oligonucleotide
ugugcauugcaaucaccug

SEQ ID NO: 2909236 - RNA, 19 nt, Artificial Sequence
  Description of Artificial Sequence: Synthetic oligonucleotide
ucauguugucuuugcaucu

SEQ ID NO: 2909237 - RNA, 19 nt, Artificial Sequence
  Description of Artificial Sequence: Synthetic oligonucleotide
uccaagaaauccucggcaa

SEQ ID NO: 2909238 - RNA, 19 nt, Artificial Sequence
  Description of Artificial Sequence: Synthetic oligonucleotide
cauguuuucuggaaaaucu

SEQ ID NO: 2909239 - RNA, 19 nt, Artificial Sequence
  Description of Artificial Sequence: Synthetic oligonucleotide
uauagaggagcaugaaauu

SEQ ID NO: 2909240 - RNA, 19 nt, Artificial Sequence
  Description of Artificial Sequence: Synthetic oligonucleotide
uuccucagcuucaugugca

SEQ ID NO: 2909241 - RNA, 19 nt, Artificial Sequence
  Description of Artificial Sequence: Synthetic oligonucleotide
gauucauguuuucuggaaa

SEQ ID NO: 2909242 - RNA, 19 nt, Artificial Sequence
  Description of Artificial Sequence: Synthetic oligonucleotide
ugaagcuacugagaaaauc

SEQ ID NO: 2909243 - RNA, 19 nt, Artificial Sequence
  Description of Artificial Sequence: Synthetic oligonucleotide
cuauagaggagcaugaaau

SEQ ID NO: 2909244 - RNA, 19 nt, Artificial Sequence
  Description of Artificial Sequence: Synthetic oligonucleotide
uuucuugcuaauuccucaa

SEQ ID NO: 2909245 - RNA, 19 nt, Artificial Sequence
  Description of Artificial Sequence: Synthetic oligonucleotide
cuuuucaaagguagacuuc

SEQ ID NO: 2909246 - RNA, 19 nt, Artificial Sequence
  Description of Artificial Sequence: Synthetic oligonucleotide
aaauccucggcaauauuau

SEQ ID NO: 2909247 - RNA, 19 nt, Artificial Sequence
  Description of Artificial Sequence: Synthetic oligonucleotide
ucggcaauauuaucagacu

SEQ ID NO: 2909248 - RNA, 19 nt, Artificial Sequence
  Description of Artificial Sequence: Synthetic oligonucleotide
gaaaaucuauagaggagca

SEQ ID NO: 2909249 - RNA, 19 nt, Artificial Sequence
  Description of Artificial Sequence: Synthetic oligonucleotide
uuuggguucccuauuucuu

SEQ ID NO: 2909250 - RNA, 19 nt, Artificial Sequence
  Description of Artificial Sequence: Synthetic oligonucleotide
uguugucuuugcaucuucu

SEQ ID NO: 2909251 - RNA, 19 nt, Artificial Sequence
  Description of Artificial Sequence: Synthetic oligonucleotide
ugucuuaauuuuggguucc

SEQ ID NO: 2909252 - RNA, 19 nt, Artificial Sequence
  Description of Artificial Sequence: Synthetic oligonucleotide
auuucuuucuugauucaug

SEQ ID NO: 2909253 - RNA, 19 nt, Artificial Sequence
  Description of Artificial Sequence: Synthetic oligonucleotide
ucauguuuucuggaaaauc

SEQ ID NO: 2909254 - RNA, 19 nt, Artificial Sequence
  Description of Artificial Sequence: Synthetic oligonucleotide
gaguucauguugucuuugc

SEQ ID NO: 2909255 - RNA, 19 nt, Artificial Sequence
  Description of Artificial Sequence: Synthetic oligonucleotide
gaaauccucggcaauauua

SEQ ID NO: 2909256 - RNA, 19 nt, Artificial Sequence
  Description of Artificial Sequence: Synthetic oligonucleotide
auuguucucuuuuccuuga

SEQ ID NO: 2909257 - RNA, 19 nt, Artificial Sequence
  Description of Artificial Sequence: Synthetic oligonucleotide
uuuugguuuccaagcugug

SEQ ID NO: 2909258 - RNA, 19 nt, Artificial Sequence
  Description of Artificial Sequence: Synthetic oligonucleotide
auguugucuuugcaucuuc

SEQ ID NO: 2909259 - RNA, 19 nt, Artificial Sequence
  Description of Artificial Sequence: Synthetic oligonucleotide
uaucagacucuuccucagc

SEQ ID NO: 2909260 - RNA, 19 nt, Artificial Sequence
  Description of Artificial Sequence: Synthetic oligonucleotide
uucuugauucauguuuucu

SEQ ID NO: 2909261 - RNA, 19 nt, Artificial Sequence
  Description of Artificial Sequence: Synthetic oligonucleotide
ugcaaucaccuggugaagc

SEQ ID NO: 2909262 - RNA, 19 nt, Artificial Sequence
  Description of Artificial Sequence: Synthetic oligonucleotide
caaucuugccuguagggca

SEQ ID NO: 2909263 - RNA, 19 nt, Artificial Sequence
  Description of Artificial Sequence: Synthetic oligonucleotide
aguucauguugucuuugca

SEQ ID NO: 2909264 - RNA, 19 nt, Artificial Sequence
  Description of Artificial Sequence: Synthetic oligonucleotide
aaaaucuauagaggagcau

SEQ ID NO: 2909265 - RNA, 19 nt, Artificial Sequence
  Description of Artificial Sequence: Synthetic oligonucleotide
agcaugaaauuggcugugc

SEQ ID NO: 2909266 - RNA, 19 nt, Artificial Sequence
  Description of Artificial Sequence: Synthetic oligonucleotide
auacuuaucuaaaacgguu

SEQ ID NO: 2909267 - RNA, 19 nt, Artificial Sequence
  Description of Artificial Sequence: Synthetic oligonucleotide
aagaaauccucggcaauau

SEQ ID NO: 2909268 - RNA, 19 nt, Artificial Sequence
  Description of Artificial Sequence: Synthetic oligonucleotide
ucccuccaagaaauccucg

SEQ ID NO: 2909269 - RNA, 19 nt, Artificial Sequence
  Description of Artificial Sequence: Synthetic oligonucleotide
augaaauuggcugugcauu

SEQ ID NO: 2909270 - RNA, 19 nt, Artificial Sequence
  Description of Artificial Sequence: Synthetic oligonucleotide
auuggcugugcauugcaau

SEQ ID NO: 2909271 - RNA, 19 nt, Artificial Sequence
  Description of Artificial Sequence: Synthetic oligonucleotide
uugcacuacaacucucacu

SEQ ID NO: 2909272 - RNA, 19 nt, Artificial Sequence
  Description of Artificial Sequence: Synthetic oligonucleotide
agacuucauuuguauaagu

SEQ ID NO: 2909273 - RNA, 19 nt, Artificial Sequence
  Description of Artificial Sequence: Synthetic oligonucleotide
ucuuugcaucuucuuuuca

SEQ ID NO: 2909274 - RNA, 19 nt, Artificial Sequence
  Description of Artificial Sequence: Synthetic oligonucleotide
uaauuuuggguucccuauu

SEQ ID NO: 2909275 - RNA, 19 nt, Artificial Sequence
  Description of Artificial Sequence: Synthetic oligonucleotide
agggcacuugcacuacaac

SEQ ID NO: 2909276 - RNA, 19 nt, Artificial Sequence
  Description of Artificial Sequence: Synthetic oligonucleotide
cuuaauuuuggguucccua

SEQ ID NO: 2909277 - RNA, 19 nt, Artificial Sequence
  Description of Artificial Sequence: Synthetic oligonucleotide
guucccuauuucuuucuug

SEQ ID NO: 2909278 - RNA, 19 nt, Artificial Sequence
  Description of Artificial Sequence: Synthetic oligonucleotide
gaaauuggcugugcauugc

SEQ ID NO: 2909279 - RNA, 19 nt, Artificial Sequence
  Description of Artificial Sequence: Synthetic oligonucleotide
gcuacuuucaaucuugccu

SEQ ID NO: 2909280 - RNA, 19 nt, Artificial Sequence
  Description of Artificial Sequence: Synthetic oligonucleotide
uauuucuuucuugauucau

SEQ ID NO: 2909281 - RNA, 19 nt, Artificial Sequence
  Description of Artificial Sequence: Synthetic oligonucleotide
uuugccuuuugguuuccaa

SEQ ID NO: 2909282 - RNA, 19 nt, Artificial Sequence
  Description of Artificial Sequence: Synthetic oligonucleotide
gugucuuaauuuuggguuc

SEQ ID NO: 2909283 - RNA, 19 nt, Artificial Sequence
  Description of Artificial Sequence: Synthetic oligonucleotide
ucucuuuuccuugaagcua

SEQ ID NO: 2909284 - RNA, 19 nt, Artificial Sequence
  Description of Artificial Sequence: Synthetic oligonucleotide
uaaaacgguuugccuuuug

SEQ ID NO: 2909285 - RNA, 19 nt, Artificial Sequence
  Description of Artificial Sequence: Synthetic oligonucleotide
agcuacugagaaaaucauc

SEQ ID NO: 2909286 - RNA, 19 nt, Artificial Sequence
  Description of Artificial Sequence: Synthetic oligonucleotide
cuuugcaucuucuuuucaa

SEQ ID NO: 2909287 - RNA, 19 nt, Artificial Sequence
  Description of Artificial Sequence: Synthetic oligonucleotide
acugagaaaaucaucuauu

SEQ ID NO: 2909288 - RNA, 19 nt, Artificial Sequence
  Description of Artificial Sequence: Synthetic oligonucleotide
acaaugugucuuaauuuug

SEQ ID NO: 2909289 - RNA, 19 nt, Artificial Sequence
  Description of Artificial Sequence: Synthetic oligonucleotide
auccucggcaauauuauca

SEQ ID NO: 2909290 - RNA, 19 nt, Artificial Sequence
  Description of Artificial Sequence: Synthetic oligonucleotide
cuucuacaguggcaaauug

SEQ ID NO: 2909291 - RNA, 19 nt, Artificial Sequence
  Description of Artificial Sequence: Synthetic oligonucleotide
cauugcaaucaccugguga

SEQ ID NO: 2909292 - RNA, 19 nt, Artificial Sequence
  Description of Artificial Sequence: Synthetic oligonucleotide
ugaguucauguugucuuug

SEQ ID NO: 2909293 - RNA, 19 nt, Artificial Sequence
  Description of Artificial Sequence: Synthetic oligonucleotide
uucccuccaagaaauccuc

SEQ ID NO: 2909294 - RNA, 19 nt, Artificial Sequence
  Description of Artificial Sequence: Synthetic oligonucleotide
uuucuugauucauguuuuc

SEQ ID NO: 2909295 - RNA, 19 nt, Artificial Sequence
  Description of Artificial Sequence: Synthetic oligonucleotide
gacuucauuuguauaagua

SEQ ID NO: 2909296 - RNA, 19 nt, Artificial Sequence
  Description of Artificial Sequence: Synthetic oligonucleotide
ugcagcuacuuucaaucuu

SEQ ID NO: 2909297 - RNA, 19 nt, Artificial Sequence
  Description of Artificial Sequence: Synthetic oligonucleotide
cauuucagaaauuuguguu

SEQ ID NO: 2909298 - RNA, 19 nt, Artificial Sequence
  Description of Artificial Sequence: Synthetic oligonucleotide
caauauuaucagacucuuc

SEQ ID NO: 2909299 - RNA, 19 nt, Artificial Sequence
  Description of Artificial Sequence: Synthetic oligonucleotide
ucuucuacaguggcaaauu

SEQ ID NO: 2909300 - RNA, 19 nt, Artificial Sequence
  Description of Artificial Sequence: Synthetic oligonucleotide
cuuuugguuuccaagcugu

SEQ ID NO: 2909301 - RNA, 19 nt, Artificial Sequence
  Description of Artificial Sequence: Synthetic oligonucleotide
cuugcacuacaacucucac

SEQ ID NO: 2909302 - RNA, 19 nt, Artificial Sequence
  Description of Artificial Sequence: Synthetic oligonucleotide
cauacuuaucuaaaacggu

SEQ ID NO: 2909303 - RNA, 19 nt, Artificial Sequence
  Description of Artificial Sequence: Synthetic oligonucleotide
uuggguucccuauuucuuu

SEQ ID NO: 2909304 - RNA, 19 nt, Artificial Sequence
  Description of Artificial Sequence: Synthetic oligonucleotide
agcucuucuacaguggcaa

SEQ ID NO: 2909305 - RNA, 19 nt, Artificial Sequence
  Description of Artificial Sequence: Synthetic oligonucleotide
uacaacucucacugaguuc

SEQ ID NO: 2909306 - RNA, 19 nt, Artificial Sequence
  Description of Artificial Sequence: Synthetic oligonucleotide
uuucaaagguagacuucau

SEQ ID NO: 2909307 - RNA, 19 nt, Artificial Sequence
  Description of Artificial Sequence: Synthetic oligonucleotide
gcuacugagaaaaucaucu

SEQ ID NO: 2909308 - RNA, 19 nt, Artificial Sequence
  Description of Artificial Sequence: Synthetic oligonucleotide
cuccaagaaauccucggca

SEQ ID NO: 2909309 - RNA, 19 nt, Artificial Sequence
  Description of Artificial Sequence: Synthetic oligonucleotide
gaaaaucaucuauuucagu

SEQ ID NO: 2909310 - RNA, 19 nt, Artificial Sequence
  Description of Artificial Sequence: Synthetic oligonucleotide
uagcucuucuacaguggca

SEQ ID NO: 2909311 - RNA, 19 nt, Artificial Sequence
  Description of Artificial Sequence: Synthetic oligonucleotide
uucuugcuaauuccucaau

SEQ ID NO: 2909312 - RNA, 19 nt, Artificial Sequence
  Description of Artificial Sequence: Synthetic oligonucleotide
ggcauuucagaaauuugug

SEQ ID NO: 2909313 - RNA, 19 nt, Artificial Sequence
  Description of Artificial Sequence: Synthetic oligonucleotide
uucauguuuucuggaaaau

SEQ ID NO: 2909314 - RNA, 19 nt, Artificial Sequence
  Description of Artificial Sequence: Synthetic oligonucleotide
uucagaaauuuguguuaaa

SEQ ID NO: 2909315 - RNA, 19 nt, Artificial Sequence
  Description of Artificial Sequence: Synthetic oligonucleotide
aagcuacugagaaaaucau

SEQ ID NO: 2909316 - RNA, 19 nt, Artificial Sequence
  Description of Artificial Sequence: Synthetic oligonucleotide
acuugcacuacaacucuca

SEQ ID NO: 2909317 - RNA, 19 nt, Artificial Sequence
  Description of Artificial Sequence: Synthetic oligonucleotide
uagggcacuugcacuacaa

SEQ ID NO: 2909318 - RNA, 19 nt, Artificial Sequence
  Description of Artificial Sequence: Synthetic oligonucleotide
gucuuugcaucuucuuuuc

SEQ ID NO: 2909319 - RNA, 19 nt, Artificial Sequence
  Description of Artificial Sequence: Synthetic oligonucleotide
uacuuucaaucuugccugu

SEQ ID NO: 2909320 - RNA, 19 nt, Artificial Sequence
  Description of Artificial Sequence: Synthetic oligonucleotide
uggguucccuauuucuuuc

SEQ ID NO: 2909321 - RNA, 19 nt, Artificial Sequence
  Description of Artificial Sequence: Synthetic oligonucleotide
acuacaacucucacugagu

SEQ ID NO: 2909322 - RNA, 19 nt, Artificial Sequence
  Description of Artificial Sequence: Synthetic oligonucleotide
uccaagcugugcuccaaaa

SEQ ID NO: 2909323 - RNA, 19 nt, Artificial Sequence
  Description of Artificial Sequence: Synthetic oligonucleotide
aguggcaaauuguucucuu

SEQ ID NO: 2909324 - RNA, 19 nt, Artificial Sequence
  Description of Artificial Sequence: Synthetic oligonucleotide
cagcuacuuucaaucuugc

SEQ ID NO: 2909325 - RNA, 19 nt, Artificial Sequence
  Description of Artificial Sequence: Synthetic oligonucleotide
augugcagcuacuuucaau

SEQ ID NO: 2909326 - RNA, 19 nt, Artificial Sequence
  Description of Artificial Sequence: Synthetic oligonucleotide
gcagcuacuuucaaucuug

SEQ ID NO: 2909327 - RNA, 19 nt, Artificial Sequence
  Description of Artificial Sequence: Synthetic oligonucleotide
ggcaaauuguucucuuuuc

SEQ ID NO: 2909328 - RNA, 19 nt, Artificial Sequence
  Description of Artificial Sequence: Synthetic oligonucleotide
cucacugaguucauguugu

SEQ ID NO: 2909329 - RNA, 19 nt, Artificial Sequence
  Description of Artificial Sequence: Synthetic oligonucleotide
gagcaugaaauuggcugug

SEQ ID NO: 2909330 - RNA, 19 nt, Artificial Sequence
  Description of Artificial Sequence: Synthetic oligonucleotide
ugcuccaaaaggagauuuu

SEQ ID NO: 2909331 - RNA, 19 nt, Artificial Sequence
  Description of Artificial Sequence: Synthetic oligonucleotide
cuauuucuuucuugauuca

SEQ ID NO: 2909332 - RNA, 19 nt, Artificial Sequence
  Description of Artificial Sequence: Synthetic oligonucleotide
agcugugcuccaaaaggag

SEQ ID NO: 2909333 - RNA, 19 nt, Artificial Sequence
  Description of Artificial Sequence: Synthetic oligonucleotide
uugaagcuacugagaaaau

SEQ ID NO: 2909334 - RNA, 19 nt, Artificial Sequence
  Description of Artificial Sequence: Synthetic oligonucleotide
aagguagacuucauuugua

SEQ ID NO: 2909335 - RNA, 19 nt, Artificial Sequence
  Description of Artificial Sequence: Synthetic oligonucleotide
ggcacuugcacuacaacuc

SEQ ID NO: 2909336 - RNA, 19 nt, Artificial Sequence
  Description of Artificial Sequence: Synthetic oligonucleotide
uucuuucuugauucauguu

SEQ ID NO: 2909337 - RNA, 19 nt, Artificial Sequence
  Description of Artificial Sequence: Synthetic oligonucleotide
uugcaaucaccuggugaag

SEQ ID NO: 2909338 - RNA, 19 nt, Artificial Sequence
  Description of Artificial Sequence: Synthetic oligonucleotide
aauuggcugugcauugcaa

SEQ ID NO: 2909339 - RNA, 19 nt, Artificial Sequence
  Description of Artificial Sequence: Synthetic oligonucleotide
uuguucucuuuuccuugaa

SEQ ID NO: 2909340 - RNA, 19 nt, Artificial Sequence
  Description of Artificial Sequence: Synthetic oligonucleotide
guguuaaaauaaauauaaa

SEQ ID NO: 2909341 - RNA, 19 nt, Artificial Sequence
  Description of Artificial Sequence: Synthetic oligonucleotide
guuuucuggaaaaucuaua

SEQ ID NO: 2909342 - RNA, 19 nt, Artificial Sequence
  Description of Artificial Sequence: Synthetic oligonucleotide
uuccaagcugugcuccaaa

SEQ ID NO: 2909343 - RNA, 19 nt, Artificial Sequence
  Description of Artificial Sequence: Synthetic oligonucleotide
cuuucuugauucauguuuu

SEQ ID NO: 2909344 - RNA, 19 nt, Artificial Sequence
  Description of Artificial Sequence: Synthetic oligonucleotide
cuuuuccuugaagcuacug

SEQ ID NO: 2909345 - RNA, 19 nt, Artificial Sequence
  Description of Artificial Sequence: Synthetic oligonucleotide
ugguuuccaagcugugcuc

SEQ ID NO: 2909346 - RNA, 19 nt, Artificial Sequence
  Description of Artificial Sequence: Synthetic oligonucleotide
ugccuguagggcacuugca

SEQ ID NO: 2909347 - RNA, 19 nt, Artificial Sequence
  Description of Artificial Sequence: Synthetic oligonucleotide
gguuuccaagcugugcucc

SEQ ID NO: 2909348 - RNA, 19 nt, Artificial Sequence
  Description of Artificial Sequence: Synthetic oligonucleotide
ucccuauuucuuucuugau

SEQ ID NO: 2909349 - RNA, 19 nt, Artificial Sequence
  Description of Artificial Sequence: Synthetic oligonucleotide
gcaucuucuuuucaaaggu

SEQ ID NO: 2909350 - RNA, 19 nt, Artificial Sequence
  Description of Artificial Sequence: Synthetic oligonucleotide
accuggugaagcuucucuu

SEQ ID NO: 2909351 - RNA, 19 nt, Artificial Sequence
  Description of Artificial Sequence: Synthetic oligonucleotide
cugagaaaaucaucuauuu

SEQ ID NO: 2909352 - RNA, 19 nt, Artificial Sequence
  Description of Artificial Sequence: Synthetic oligonucleotide
uguagggcacuugcacuac

SEQ ID NO: 2909353 - RNA, 19 nt, Artificial Sequence
  Description of Artificial Sequence: Synthetic oligonucleotide
agaaauccucggcaauauu

SEQ ID NO: 2909354 - RNA, 19 nt, Artificial Sequence
  Description of Artificial Sequence: Synthetic oligonucleotide
ccuccaagaaauccucggc

SEQ ID NO: 2909355 - RNA, 19 nt, Artificial Sequence
  Description of Artificial Sequence: Synthetic oligonucleotide
cagcuucaugugcagcuac

SEQ ID NO: 2909356 - RNA, 19 nt, Artificial Sequence
  Description of Artificial Sequence: Synthetic oligonucleotide
cuacugagaaaaucaucua

SEQ ID NO: 2909357 - RNA, 19 nt, Artificial Sequence
  Description of Artificial Sequence: Synthetic oligonucleotide
gcauuucagaaauuugugu

SEQ ID NO: 2909358 - RNA, 19 nt, Artificial Sequence
  Description of Artificial Sequence: Synthetic oligonucleotide
caugaaauuggcugugcau

SEQ ID NO: 2909359 - RNA, 19 nt, Artificial Sequence
  Description of Artificial Sequence: Synthetic oligonucleotide
ggagcaugaaauuggcugu

SEQ ID NO: 2909360 - RNA, 19 nt, Artificial Sequence
  Description of Artificial Sequence: Synthetic oligonucleotide
caucuucuuuucaaaggua

SEQ ID NO: 2909361 - RNA, 19 nt, Artificial Sequence
  Description of Artificial Sequence: Synthetic oligonucleotide
cacuugcacuacaacucuc

SEQ ID NO: 2909362 - RNA, 19 nt, Artificial Sequence
  Description of Artificial Sequence: Synthetic oligonucleotide
guuuccaagcugugcucca

SEQ ID NO: 2909363 - RNA, 19 nt, Artificial Sequence
  Description of Artificial Sequence: Synthetic oligonucleotide
caagaaauccucggcaaua

SEQ ID NO: 2909364 - RNA, 19 nt, Artificial Sequence
  Description of Artificial Sequence: Synthetic oligonucleotide
ccaagcugugcuccaaaag

SEQ ID NO: 2909365 - RNA, 19 nt, Artificial Sequence
  Description of Artificial Sequence: Synthetic oligonucleotide
aucuauagaggagcaugaa

SEQ ID NO: 2909366 - RNA, 19 nt, Artificial Sequence
  Description of Artificial Sequence: Synthetic oligonucleotide
cuguagggcacuugcacua

SEQ ID NO: 2909367 - RNA, 19 nt, Artificial Sequence
  Description of Artificial Sequence: Synthetic oligonucleotide
ucagcuucaugugcagcua

SEQ ID NO: 2909368 - RNA, 19 nt, Artificial Sequence
  Description of Artificial Sequence: Synthetic oligonucleotide
ggcaauauuaucagacucu

SEQ ID NO: 2909369 - RNA, 19 nt, Artificial Sequence
  Description of Artificial Sequence: Synthetic oligonucleotide
gucuuaauuuuggguuccc

SEQ ID NO: 2909370 - RNA, 19 nt, Artificial Sequence
  Description of Artificial Sequence: Synthetic oligonucleotide
ccuuuugguuuccaagcug

SEQ ID NO: 2909371 - RNA, 19 nt, Artificial Sequence
  Description of Artificial Sequence: Synthetic oligonucleotide
uggugaagcuucucuucuu

SEQ ID NO: 2909372 - RNA, 19 nt, Artificial Sequence
  Description of Artificial Sequence: Synthetic oligonucleotide
gguagacuucauuuguaua

SEQ ID NO: 2909373 - RNA, 19 nt, Artificial Sequence
  Description of Artificial Sequence: Synthetic oligonucleotide
gcaugaaauuggcugugca

SEQ ID NO: 2909374 - RNA, 19 nt, Artificial Sequence
  Description of Artificial Sequence: Synthetic oligonucleotide
ccuggugaagcuucucuuc

SEQ ID NO: 2909375 - RNA, 19 nt, Artificial Sequence
  Description of Artificial Sequence: Synthetic oligonucleotide
cugugcuccaaaaggagau

SEQ ID NO: 2909376 - RNA, 19 nt, Artificial Sequence
  Description of Artificial Sequence: Synthetic oligonucleotide
ugugcuccaaaaggagauu

SEQ ID NO: 2909377 - RNA, 19 nt, Artificial Sequence
  Description of Artificial Sequence: Synthetic oligonucleotide
cuacaacucucacugaguu

SEQ ID NO: 2909378 - RNA, 19 nt, Artificial Sequence
  Description of Artificial Sequence: Synthetic oligonucleotide
cuugccuguagggcacuug

SEQ ID NO: 2909379 - RNA, 19 nt, Artificial Sequence
  Description of Artificial Sequence: Synthetic oligonucleotide
gggcacuugcacuacaacu

SEQ ID NO: 2909380 - RNA, 19 nt, Artificial Sequence
  Description of Artificial Sequence: Synthetic oligonucleotide
cuaauuccucaauacuuuu

SEQ ID NO: 2909381 - RNA, 19 nt, Artificial Sequence
  Description of Artificial Sequence: Synthetic oligonucleotide
gugaagcuucucuucuuua

SEQ ID NO: 2909382 - RNA, 19 nt, Artificial Sequence
  Description of Artificial Sequence: Synthetic oligonucleotide
agcuucaugugcagcuacu

SEQ ID NO: 2909383 - RNA, 19 nt, Artificial Sequence
  Description of Artificial Sequence: Synthetic oligonucleotide
cuggugaagcuucucuucu

SEQ ID NO: 2909384 - RNA, 19 nt, Artificial Sequence
  Description of Artificial Sequence: Synthetic oligonucleotide
guagggcacuugcacuaca

SEQ ID NO: 2909385 - RNA, 19 nt, Artificial Sequence
  Description of Artificial Sequence: Synthetic oligonucleotide
acuuucaaucuugccugua

SEQ ID NO: 2909386 - RNA, 19 nt, Artificial Sequence
  Description of Artificial Sequence: Synthetic oligonucleotide
gcugugcuccaaaaggaga

SEQ ID NO: 2909387 - RNA, 19 nt, Artificial Sequence
  Description of Artificial Sequence: Synthetic oligonucleotide
gugcagcuacuuucaaucu

SEQ ID NO: 2909388 - RNA, 19 nt, Artificial Sequence
  Description of Artificial Sequence: Synthetic oligonucleotide
ucaccuggugaagcuucuc

SEQ ID NO: 2909389 - RNA, 19 nt, Artificial Sequence
  Description of Artificial Sequence: Synthetic oligonucleotide
gcaaucaccuggugaagcu

SEQ ID NO: 2909390 - RNA, 19 nt, Artificial Sequence
  Description of Artificial Sequence: Synthetic oligonucleotide
gcuaauuccucaauacuuu

SEQ ID NO: 2909391 - RNA, 19 nt, Artificial Sequence
  Description of Artificial Sequence: Synthetic oligonucleotide
gaggagcaugaaauuggcu

SEQ ID NO: 2909392 - RNA, 19 nt, Artificial Sequence
  Description of Artificial Sequence: Synthetic oligonucleotide
caccuggugaagcuucucu

SEQ ID NO: 2909393 - RNA, 19 nt, Artificial Sequence
  Description of Artificial Sequence: Synthetic oligonucleotide
caugugcagcuacuuucaa

SEQ ID NO: 2909394 - RNA, 19 nt, Artificial Sequence
  Description of Artificial Sequence: Synthetic oligonucleotide
cuucaugugcagcuacuuu

SEQ ID NO: 2909395 - RNA, 19 nt, Artificial Sequence
  Description of Artificial Sequence: Synthetic oligonucleotide
gcugugcauugcaaucacc

SEQ ID NO: 2909396 - RNA, 19 nt, Artificial Sequence
  Description of Artificial Sequence: Synthetic oligonucleotide
gcauugcaaucaccuggug

SEQ ID NO: 2909397 - RNA, 19 nt, Artificial Sequence
  Description of Artificial Sequence: Synthetic oligonucleotide
gcacuugcacuacaacucu

SEQ ID NO: 2909398 - RNA, 19 nt, Artificial Sequence
  Description of Artificial Sequence: Synthetic oligonucleotide
ggugaagcuucucuucuuu

SEQ ID NO: 2909399 - RNA, 19 nt, Artificial Sequence
  Description of Artificial Sequence: Synthetic oligonucleotide
cacugaguucauguugucu

SEQ ID NO: 2909400 - RNA, 19 nt, Artificial Sequence
  Description of Artificial Sequence: Synthetic oligonucleotide
gcaauauuaucagacucuu

SEQ ID NO: 2909401 - RNA, 19 nt, Artificial Sequence
  Description of Artificial Sequence: Synthetic oligonucleotide
cucuucuacaguggcaaau

SEQ ID NO: 2909402 - RNA, 19 nt, Artificial Sequence
  Description of Artificial Sequence: Synthetic oligonucleotide
guuugccuuuugguuucca

SEQ ID NO: 2909403 - RNA, 19 nt, Artificial Sequence
  Description of Artificial Sequence: Synthetic oligonucleotide
cugaguucauguugucuuu

SEQ ID NO: 2909404 - RNA, 19 nt, Artificial Sequence
  Description of Artificial Sequence: Synthetic oligonucleotide
cucucacugaguucauguu

SEQ ID NO: 2909405 - RNA, 19 nt, Artificial Sequence
  Description of Artificial Sequence: Synthetic oligonucleotide
gugcuccaaaaggagauuu

SEQ ID NO: 2909406 - RNA, 19 nt, Artificial Sequence
  Description of Artificial Sequence: Synthetic oligonucleotide
ucuugccuguagggcacuu

SEQ ID NO: 2909407 - RNA, 19 nt, Artificial Sequence
  Description of Artificial Sequence: Synthetic oligonucleotide
ccuugaagcuacugagaaa

SEQ ID NO: 2909408 - RNA, 19 nt, Artificial Sequence
  Description of Artificial Sequence: Synthetic oligonucleotide
aucuugccuguagggcacu

SEQ ID NO: 2909409 - RNA, 19 nt, Artificial Sequence
  Description of Artificial Sequence: Synthetic oligonucleotide
gacucuuccucagcuucau

SEQ ID NO: 2909410 - RNA, 19 nt, Artificial Sequence
  Description of Artificial Sequence: Synthetic oligonucleotide
gcacuacaacucucacuga

SEQ ID NO: 2909411 - RNA, 19 nt, Artificial Sequence
  Description of Artificial Sequence: Synthetic oligonucleotide
caguggcaaauuguucucu

SEQ ID NO: 2909412 - RNA, 19 nt, Artificial Sequence
  Description of Artificial Sequence: Synthetic oligonucleotide
cauguugucuuugcaucuu

SEQ ID NO: 2909413 - RNA, 19 nt, Artificial Sequence
  Description of Artificial Sequence: Synthetic oligonucleotide
ccucggcaauauuaucaga

SEQ ID NO: 2909414 - RNA, 19 nt, Artificial Sequence
  Description of Artificial Sequence: Synthetic oligonucleotide
ggguucccuauuucuuucu

SEQ ID NO: 2909415 - RNA, 19 nt, Artificial Sequence
  Description of Artificial Sequence: Synthetic oligonucleotide
gcucuucuacaguggcaaa

SEQ ID NO: 2909416 - RNA, 19 nt, Artificial Sequence
  Description of Artificial Sequence: Synthetic oligonucleotide
gguucccuauuucuuucuu

SEQ ID NO: 2909417 - RNA, 19 nt, Artificial Sequence
  Description of Artificial Sequence: Synthetic oligonucleotide
caaucaccuggugaagcuu

SEQ ID NO: 2909418 - RNA, 19 nt, Artificial Sequence
  Description of Artificial Sequence: Synthetic oligonucleotide
ccaagaaauccucggcaau

SEQ ID NO: 2909419 - RNA, 19 nt, Artificial Sequence
  Description of Artificial Sequence: Synthetic oligonucleotide
cuaaaacgguuugccuuuu

SEQ ID NO: 2909420 - RNA, 19 nt, Artificial Sequence
  Description of Artificial Sequence: Synthetic oligonucleotide
caacucucacugaguucau

SEQ ID NO: 2909421 - RNA, 19 nt, Artificial Sequence
  Description of Artificial Sequence: Synthetic oligonucleotide
gcuucaugugcagcuacuu

SEQ ID NO: 2909422 - RNA, 19 nt, Artificial Sequence
  Description of Artificial Sequence: Synthetic oligonucleotide
uucuugagaggaaaggugg

SEQ ID NO: 2909423 - RNA, 19 nt, Artificial Sequence
  Description of Artificial Sequence: Synthetic oligonucleotide
aucgauguucaucagggcc

SEQ ID NO: 2909424 - RNA, 19 nt, Artificial Sequence
  Description of Artificial Sequence: Synthetic oligonucleotide
aaguuuuaccacaauuucc

SEQ ID NO: 2909425 - RNA, 19 nt, Artificial Sequence
  Description of Artificial Sequence: Synthetic oligonucleotide
uucaauucuuguaaguaug

SEQ ID NO: 2909426 - RNA, 19 nt, Artificial Sequence
  Description of Artificial Sequence: Synthetic oligonucleotide
aacaauguucgguaguuga

SEQ ID NO: 2909427 - RNA, 19 nt, Artificial Sequence
  Description of Artificial Sequence: Synthetic oligonucleotide
ucaaguuuuaccacaauuu

SEQ ID NO: 2909428 - RNA, 19 nt, Artificial Sequence
  Description of Artificial Sequence: Synthetic oligonucleotide
ucauccucgguaaacaaug

SEQ ID NO: 2909429 - RNA, 19 nt, Artificial Sequence
  Description of Artificial Sequence: Synthetic oligonucleotide
uuuuaccacaauuuccucc

SEQ ID NO: 2909430 - RNA, 19 nt, Artificial Sequence
  Description of Artificial Sequence: Synthetic oligonucleotide
uucaagugcagucucaagu

SEQ ID NO: 2909431 - RNA, 19 nt, Artificial Sequence
  Description of Artificial Sequence: Synthetic oligonucleotide
ucuacauuguugaugucug

SEQ ID NO: 2909432 - RNA, 19 nt, Artificial Sequence
  Description of Artificial Sequence: Synthetic oligonucleotide
ugucauacuguucccacag

SEQ ID NO: 2909433 - RNA, 19 nt, Artificial Sequence
  Description of Artificial Sequence: Synthetic oligonucleotide
aauucuuguaaguaugcuu

SEQ ID NO: 2909434 - RNA, 19 nt, Artificial Sequence
  Description of Artificial Sequence: Synthetic oligonucleotide
uuuaccacaauuuccuccu

SEQ ID NO: 2909435 - RNA, 19 nt, Artificial Sequence
  Description of Artificial Sequence: Synthetic oligonucleotide
ucuucauccuccaauggca

SEQ ID NO: 2909436 - RNA, 19 nt, Artificial Sequence
  Description of Artificial Sequence: Synthetic oligonucleotide
aauguucgguaguugaaca

SEQ ID NO: 2909437 - RNA, 19 nt, Artificial Sequence
  Description of Artificial Sequence: Synthetic oligonucleotide
ucaauucuuguaaguaugc

SEQ ID NO: 2909438 - RNA, 19 nt, Artificial Sequence
  Description of Artificial Sequence: Synthetic oligonucleotide
uuccuuuucacugucauac

SEQ ID NO: 2909439 - RNA, 19 nt, Artificial Sequence
  Description of Artificial Sequence: Synthetic oligonucleotide
aagcuguucaagugcaguc

SEQ ID NO: 2909440 - RNA, 19 nt, Artificial Sequence
  Description of Artificial Sequence: Synthetic oligonucleotide
auacuguucccacagcuuc

SEQ ID NO: 2909441 - RNA, 19 nt, Artificial Sequence
  Description of Artificial Sequence: Synthetic oligonucleotide
acauuguugaugucuggac

SEQ ID NO: 2909442 - RNA, 19 nt, Artificial Sequence
  Description of Artificial Sequence: Synthetic oligonucleotide
uggcaguucugccacaggg

SEQ ID NO: 2909443 - RNA, 19 nt, Artificial Sequence
  Description of Artificial Sequence: Synthetic oligonucleotide
ucaauuagcuccuggauuu

SEQ ID NO: 2909444 - RNA, 19 nt, Artificial Sequence
  Description of Artificial Sequence: Synthetic oligonucleotide
aauuagcuccuggauuugc

SEQ ID NO: 2909445 - RNA, 19 nt, Artificial Sequence
  Description of Artificial Sequence: Synthetic oligonucleotide
acagcuucugcacgaaugg

SEQ ID NO: 2909446 - RNA, 19 nt, Artificial Sequence
  Description of Artificial Sequence: Synthetic oligonucleotide
gaacauuucuacauuguug

SEQ ID NO: 2909447 - RNA, 19 nt, Artificial Sequence
  Description of Artificial Sequence: Synthetic oligonucleotide
acacgcaucuucgauaggc

SEQ ID NO: 2909448 - RNA, 19 nt, Artificial Sequence
  Description of Artificial Sequence: Synthetic oligonucleotide
uuuggugucugcuauccga

SEQ ID NO: 2909449 - RNA, 19 nt, Artificial Sequence
  Description of Artificial Sequence: Synthetic oligonucleotide
acugucauacuguucccac

SEQ ID NO: 2909450 - RNA, 19 nt, Artificial Sequence
  Description of Artificial Sequence: Synthetic oligonucleotide
guaugcuuccuuuucacug

SEQ ID NO: 2909451 - RNA, 19 nt, Artificial Sequence
  Description of Artificial Sequence: Synthetic oligonucleotide
ucauacuguucccacagcu

SEQ ID NO: 2909452 - RNA, 19 nt, Artificial Sequence
  Description of Artificial Sequence: Synthetic oligonucleotide
uccucgguaaacaauguuc

SEQ ID NO: 2909453 - RNA, 19 nt, Artificial Sequence
  Description of Artificial Sequence: Synthetic oligonucleotide
ucgauguucaucagggcca

SEQ ID NO: 2909454 - RNA, 19 nt, Artificial Sequence
  Description of Artificial Sequence: Synthetic oligonucleotide
aaguccuacacguuuuggu

SEQ ID NO: 2909455 - RNA, 19 nt, Artificial Sequence
  Description of Artificial Sequence: Synthetic oligonucleotide
uccgaagcuguucaagugc

SEQ ID NO: 2909456 - RNA, 19 nt, Artificial Sequence
  Description of Artificial Sequence: Synthetic oligonucleotide
uaguugaacauuucuacau

SEQ ID NO: 2909457 - RNA, 19 nt, Artificial Sequence
  Description of Artificial Sequence: Synthetic oligonucleotide
uucuacauuguugaugucu

SEQ ID NO: 2909458 - RNA, 19 nt, Artificial Sequence
  Description of Artificial Sequence: Synthetic oligonucleotide
agugucugcuuguccaagc

SEQ ID NO: 2909459 - RNA, 19 nt, Artificial Sequence
  Description of Artificial Sequence: Synthetic oligonucleotide
caaguuuuaccacaauuuc

SEQ ID NO: 2909460 - RNA, 19 nt, Artificial Sequence
  Description of Artificial Sequence: Synthetic oligonucleotide
cuucuugagaggaaaggug

SEQ ID NO: 2909461 - RNA, 19 nt, Artificial Sequence
  Description of Artificial Sequence: Synthetic oligonucleotide
gauaggcucaccucaucag

SEQ ID NO: 2909462 - RNA, 19 nt, Artificial Sequence
  Description of Artificial Sequence: Synthetic oligonucleotide
ugccacagggagcugaaag

SEQ ID NO: 2909463 - RNA, 19 nt, Artificial Sequence
  Description of Artificial Sequence: Synthetic oligonucleotide
ugaugucuggacuccagcc

SEQ ID NO: 2909464 - RNA, 19 nt, Artificial Sequence
  Description of Artificial Sequence: Synthetic oligonucleotide
aguccuacacguuuuggug

SEQ ID NO: 2909465 - RNA, 19 nt, Artificial Sequence
  Description of Artificial Sequence: Synthetic oligonucleotide
gguaguugaacauuucuac

SEQ ID NO: 2909466 - RNA, 19 nt, Artificial Sequence
  Description of Artificial Sequence: Synthetic oligonucleotide
cucagguaaguacacagug

SEQ ID NO: 2909467 - RNA, 19 nt, Artificial Sequence
  Description of Artificial Sequence: Synthetic oligonucleotide
gaauggcucgcuuugcccc

SEQ ID NO: 2909468 - RNA, 19 nt, Artificial Sequence
  Description of Artificial Sequence: Synthetic oligonucleotide
ugcagucucaaguuuuacc

SEQ ID NO: 2909469 - RNA, 19 nt, Artificial Sequence
  Description of Artificial Sequence: Synthetic oligonucleotide
ucagguaaguacacagugu

SEQ ID NO: 2909470 - RNA, 19 nt, Artificial Sequence
  Description of Artificial Sequence: Synthetic oligonucleotide
cacaauuuccuccugcuuc

SEQ ID NO: 2909471 - RNA, 19 nt, Artificial Sequence
  Description of Artificial Sequence: Synthetic oligonucleotide
ucgguaguugaacauuucu

SEQ ID NO: 2909472 - RNA, 19 nt, Artificial Sequence
  Description of Artificial Sequence: Synthetic oligonucleotide
uguucaucagggccacacg

SEQ ID NO: 2909473 - RNA, 19 nt, Artificial Sequence
  Description of Artificial Sequence: Synthetic oligonucleotide
acgaauggcucgcuuugcc

SEQ ID NO: 2909474 - RNA, 19 nt, Artificial Sequence
  Description of Artificial Sequence: Synthetic oligonucleotide
uccaauggcaguucugcca

SEQ ID NO: 2909475 - RNA, 19 nt, Artificial Sequence
  Description of Artificial Sequence: Synthetic oligonucleotide
caccucaucagugagcucc

SEQ ID NO: 2909476 - RNA, 19 nt, Artificial Sequence
  Description of Artificial Sequence: Synthetic oligonucleotide
uccuucuugagaggaaagg

SEQ ID NO: 2909477 - RNA, 19 nt, Artificial Sequence
  Description of Artificial Sequence: Synthetic oligonucleotide
ugcuauccgaagcuguuca

SEQ ID NO: 2909478 - RNA, 19 nt, Artificial Sequence
  Description of Artificial Sequence: Synthetic oligonucleotide
agucucaaguuuuaccaca

SEQ ID NO: 2909479 - RNA, 19 nt, Artificial Sequence
  Description of Artificial Sequence: Synthetic oligonucleotide
cucuucauccuccaauggc

SEQ ID NO: 2909480 - RNA, 19 nt, Artificial Sequence
  Description of Artificial Sequence: Synthetic oligonucleotide
ggaucgauguucaucaggg

SEQ ID NO: 2909481 - RNA, 19 nt, Artificial Sequence
  Description of Artificial Sequence: Synthetic oligonucleotide
uauccgaagcuguucaagu

SEQ ID NO: 2909482 - RNA, 19 nt, Artificial Sequence
  Description of Artificial Sequence: Synthetic oligonucleotide
aguacacagugucugcuug

SEQ ID NO: 2909483 - RNA, 19 nt, Artificial Sequence
  Description of Artificial Sequence: Synthetic oligonucleotide
ugaaaggccuggcucaggu

SEQ ID NO: 2909484 - RNA, 19 nt, Artificial Sequence
  Description of Artificial Sequence: Synthetic oligonucleotide
cagguaaguacacaguguc

SEQ ID NO: 2909485 - RNA, 19 nt, Artificial Sequence
  Description of Artificial Sequence: Synthetic oligonucleotide
auguucaucagggccacac

SEQ ID NO: 2909486 - RNA, 19 nt, Artificial Sequence
  Description of Artificial Sequence: Synthetic oligonucleotide
uuuuggugucugcuauccg

SEQ ID NO: 2909487 - RNA, 19 nt, Artificial Sequence
  Description of Artificial Sequence: Synthetic oligonucleotide
guucaucagggccacacgc

SEQ ID NO: 2909488 - RNA, 19 nt, Artificial Sequence
  Description of Artificial Sequence: Synthetic oligonucleotide
gucugcuuguccaagcugg

SEQ ID NO: 2909489 - RNA, 19 nt, Artificial Sequence
  Description of Artificial Sequence: Synthetic oligonucleotide
uugaugucuggacuccagc

SEQ ID NO: 2909490 - RNA, 19 nt, Artificial Sequence
  Description of Artificial Sequence: Synthetic oligonucleotide
ucaagugcagucucaaguu

SEQ ID NO: 2909491 - RNA, 19 nt, Artificial Sequence
  Description of Artificial Sequence: Synthetic oligonucleotide
guaaguaugcuuccuuuuc

SEQ ID NO: 2909492 - RNA, 19 nt, Artificial Sequence
  Description of Artificial Sequence: Synthetic oligonucleotide
uacauuguugaugucugga

SEQ ID NO: 2909493 - RNA, 19 nt, Artificial Sequence
  Description of Artificial Sequence: Synthetic oligonucleotide
ucgguaaacaauguucggu

SEQ ID NO: 2909494 - RNA, 19 nt, Artificial Sequence
  Description of Artificial Sequence: Synthetic oligonucleotide
aauggcaguucugccacag

SEQ ID NO: 2909495 - RNA, 19 nt, Artificial Sequence
  Description of Artificial Sequence: Synthetic oligonucleotide
uuugcucuuccuucuugag

SEQ ID NO: 2909496 - RNA, 19 nt, Artificial Sequence
  Description of Artificial Sequence: Synthetic oligonucleotide
uaggcucaccucaucagug

SEQ ID NO: 2909497 - RNA, 19 nt, Artificial Sequence
  Description of Artificial Sequence: Synthetic oligonucleotide
uccaagcugggaucgaugu

SEQ ID NO: 2909498 - RNA, 19 nt, Artificial Sequence
  Description of Artificial Sequence: Synthetic oligonucleotide
aguucugccacagggagcu

SEQ ID NO: 2909499 - RNA, 19 nt, Artificial Sequence
  Description of Artificial Sequence: Synthetic oligonucleotide
cuggauuugcucuuccuuc

SEQ ID NO: 2909500 - RNA, 19 nt, Artificial Sequence
  Description of Artificial Sequence: Synthetic oligonucleotide
uguucccacagcuucugca

SEQ ID NO: 2909501 - RNA, 19 nt, Artificial Sequence
  Description of Artificial Sequence: Synthetic oligonucleotide
uucaucagggccacacgca

SEQ ID NO: 2909502 - RNA, 19 nt, Artificial Sequence
  Description of Artificial Sequence: Synthetic oligonucleotide
ucugcuuguccaagcuggg

SEQ ID NO: 2909503 - RNA, 19 nt, Artificial Sequence
  Description of Artificial Sequence: Synthetic oligonucleotide
guaaguacacagugucugc

SEQ ID NO: 2909504 - RNA, 19 nt, Artificial Sequence
  Description of Artificial Sequence: Synthetic oligonucleotide
auuugcucuuccuucuuga

SEQ ID NO: 2909505 - RNA, 19 nt, Artificial Sequence
  Description of Artificial Sequence: Synthetic oligonucleotide
guaguugaacauuucuaca

SEQ ID NO: 2909506 - RNA, 19 nt, Artificial Sequence
  Description of Artificial Sequence: Synthetic oligonucleotide
cugggaucgauguucauca

SEQ ID NO: 2909507 - RNA, 19 nt, Artificial Sequence
  Description of Artificial Sequence: Synthetic oligonucleotide
cacagcuucugcacgaaug

SEQ ID NO: 2909508 - RNA, 19 nt, Artificial Sequence
  Description of Artificial Sequence: Synthetic oligonucleotide
uaaacaauguucgguaguu

SEQ ID NO: 2909509 - RNA, 19 nt, Artificial Sequence
  Description of Artificial Sequence: Synthetic oligonucleotide
uuccuucuugagaggaaag

SEQ ID NO: 2909510 - RNA, 19 nt, Artificial Sequence
  Description of Artificial Sequence: Synthetic oligonucleotide
ucuugagaggaaagguggu

SEQ ID NO: 2909511 - RNA, 19 nt, Artificial Sequence
  Description of Artificial Sequence: Synthetic oligonucleotide
agcuugcugguucuggcuc

SEQ ID NO: 2909512 - RNA, 19 nt, Artificial Sequence
  Description of Artificial Sequence: Synthetic oligonucleotide
gguaaguacacagugucug

SEQ ID NO: 2909513 - RNA, 19 nt, Artificial Sequence
  Description of Artificial Sequence: Synthetic oligonucleotide
uguaaguaugcuuccuuuu

SEQ ID NO: 2909514 - RNA, 19 nt, Artificial Sequence
  Description of Artificial Sequence: Synthetic oligonucleotide
ccucgguaaacaauguucg

SEQ ID NO: 2909515 - RNA, 19 nt, Artificial Sequence
  Description of Artificial Sequence: Synthetic oligonucleotide
aucagggccacacgcaucu

SEQ ID NO: 2909516 - RNA, 19 nt, Artificial Sequence
  Description of Artificial Sequence: Synthetic oligonucleotide
uucccacagcuucugcacg

SEQ ID NO: 2909517 - RNA, 19 nt, Artificial Sequence
  Description of Artificial Sequence: Synthetic oligonucleotide
aucuucgauaggcucaccu

SEQ ID NO: 2909518 - RNA, 19 nt, Artificial Sequence
  Description of Artificial Sequence: Synthetic oligonucleotide
uggauuugcucuuccuucu

SEQ ID NO: 2909519 - RNA, 19 nt, Artificial Sequence
  Description of Artificial Sequence: Synthetic oligonucleotide
guuuuggugucugcuaucc

SEQ ID NO: 2909520 - RNA, 19 nt, Artificial Sequence
  Description of Artificial Sequence: Synthetic oligonucleotide
cucaucagugagcuccugg

SEQ ID NO: 2909521 - RNA, 19 nt, Artificial Sequence
  Description of Artificial Sequence: Synthetic oligonucleotide
ucuucgauaggcucaccuc

SEQ ID NO: 2909522 - RNA, 19 nt, Artificial Sequence
  Description of Artificial Sequence: Synthetic oligonucleotide
cuagcuugcugguucuggc

SEQ ID NO: 2909523 - RNA, 19 nt, Artificial Sequence
  Description of Artificial Sequence: Synthetic oligonucleotide
cuuguccaagcugggaucg

SEQ ID NO: 2909524 - RNA, 19 nt, Artificial Sequence
  Description of Artificial Sequence: Synthetic oligonucleotide
gguaaacaauguucgguag

SEQ ID NO: 2909525 - RNA, 19 nt, Artificial Sequence
  Description of Artificial Sequence: Synthetic oligonucleotide
agcugaaaggccuggcuca

SEQ ID NO: 2909526 - RNA, 19 nt, Artificial Sequence
  Description of Artificial Sequence: Synthetic oligonucleotide
auaggcucaccucaucagu

SEQ ID NO: 2909527 - RNA, 19 nt, Artificial Sequence
  Description of Artificial Sequence: Synthetic oligonucleotide
cucgguaaacaauguucgg

SEQ ID NO: 2909528 - RNA, 19 nt, Artificial Sequence
  Description of Artificial Sequence: Synthetic oligonucleotide
aaacaauguucgguaguug

SEQ ID NO: 2909529 - RNA, 19 nt, Artificial Sequence
  Description of Artificial Sequence: Synthetic oligonucleotide
ugucugcuuguccaagcug

SEQ ID NO: 2909530 - RNA, 19 nt, Artificial Sequence
  Description of Artificial Sequence: Synthetic oligonucleotide
gcagucucaaguuuuacca

SEQ ID NO: 2909531 - RNA, 19 nt, Artificial Sequence
  Description of Artificial Sequence: Synthetic oligonucleotide
uuguaaguaugcuuccuuu

SEQ ID NO: 2909532 - RNA, 19 nt, Artificial Sequence
  Description of Artificial Sequence: Synthetic oligonucleotide
aguugaacauuucuacauu

SEQ ID NO: 2909533 - RNA, 19 nt, Artificial Sequence
  Description of Artificial Sequence: Synthetic oligonucleotide
augucuggacuccagccug

SEQ ID NO: 2909534 - RNA, 19 nt, Artificial Sequence
  Description of Artificial Sequence: Synthetic oligonucleotide
gaaguccuacacguuuugg

SEQ ID NO: 2909535 - RNA, 19 nt, Artificial Sequence
  Description of Artificial Sequence: Synthetic oligonucleotide
uaaguacacagugucugcu

SEQ ID NO: 2909536 - RNA, 19 nt, Artificial Sequence
  Description of Artificial Sequence: Synthetic oligonucleotide
ggcucagguaaguacacag

SEQ ID NO: 2909537 - RNA, 19 nt, Artificial Sequence
  Description of Artificial Sequence: Synthetic oligonucleotide
acgcaucuucgauaggcuc

SEQ ID NO: 2909538 - RNA, 19 nt, Artificial Sequence
  Description of Artificial Sequence: Synthetic oligonucleotide
cuacauuguugaugucugg

SEQ ID NO: 2909539 - RNA, 19 nt, Artificial Sequence
  Description of Artificial Sequence: Synthetic oligonucleotide
aauggcucgcuuugccccu

SEQ ID NO: 2909540 - RNA, 19 nt, Artificial Sequence
  Description of Artificial Sequence: Synthetic oligonucleotide
auccgaagcuguucaagug

SEQ ID NO: 2909541 - RNA, 19 nt, Artificial Sequence
  Description of Artificial Sequence: Synthetic oligonucleotide
uuggugucugcuauccgaa

SEQ ID NO: 2909542 - RNA, 19 nt, Artificial Sequence
  Description of Artificial Sequence: Synthetic oligonucleotide
cuucgauaggcucaccuca

SEQ ID NO: 2909543 - RNA, 19 nt, Artificial Sequence
  Description of Artificial Sequence: Synthetic oligonucleotide
ucagugagcuccuggccca

SEQ ID NO: 2909544 - RNA, 19 nt, Artificial Sequence
  Description of Artificial Sequence: Synthetic oligonucleotide
uccuccuucaauucuugua

SEQ ID NO: 2909545 - RNA, 19 nt, Artificial Sequence
  Description of Artificial Sequence: Synthetic oligonucleotide
caauguucgguaguugaac

SEQ ID NO: 2909546 - RNA, 19 nt, Artificial Sequence
  Description of Artificial Sequence: Synthetic oligonucleotide
gaucgauguucaucagggc

SEQ ID NO: 2909547 - RNA, 19 nt, Artificial Sequence
  Description of Artificial Sequence: Synthetic oligonucleotide
aaguacacagugucugcuu

SEQ ID NO: 2909548 - RNA, 19 nt, Artificial Sequence
  Description of Artificial Sequence: Synthetic oligonucleotide
uuagcuccuggauuugcuc

SEQ ID NO: 2909549 - RNA, 19 nt, Artificial Sequence
  Description of Artificial Sequence: Synthetic oligonucleotide
uagcuccuggauuugcucu

SEQ ID NO: 2909550 - RNA, 19 nt, Artificial Sequence
  Description of Artificial Sequence: Synthetic oligonucleotide
cacagugucugcuugucca

SEQ ID NO: 2909551 - RNA, 19 nt, Artificial Sequence
  Description of Artificial Sequence: Synthetic oligonucleotide
uugccccuccucauccucg

SEQ ID NO: 2909552 - RNA, 19 nt, Artificial Sequence
  Description of Artificial Sequence: Synthetic oligonucleotide
ucaucagggccacacgcau

SEQ ID NO: 2909553 - RNA, 19 nt, Artificial Sequence
  Description of Artificial Sequence: Synthetic oligonucleotide
cuucugcacgaauggcucg

SEQ ID NO: 2909554 - RNA, 19 nt, Artificial Sequence
  Description of Artificial Sequence: Synthetic oligonucleotide
ucuuguaaguaugcuuccu

SEQ ID NO: 2909555 - RNA, 19 nt, Artificial Sequence
  Description of Artificial Sequence: Synthetic oligonucleotide
cuauccgaagcuguucaag

SEQ ID NO: 2909556 - RNA, 19 nt, Artificial Sequence
  Description of Artificial Sequence: Synthetic oligonucleotide
gaggaaagguggucuugag

SEQ ID NO: 2909557 - RNA, 19 nt, Artificial Sequence
  Description of Artificial Sequence: Synthetic oligonucleotide
uuguugaugucuggacucc

SEQ ID NO: 2909558 - RNA, 19 nt, Artificial Sequence
  Description of Artificial Sequence: Synthetic oligonucleotide
gggaucgauguucaucagg

SEQ ID NO: 2909559 - RNA, 19 nt, Artificial Sequence
  Description of Artificial Sequence: Synthetic oligonucleotide
guucccacagcuucugcac

SEQ ID NO: 2909560 - RNA, 19 nt, Artificial Sequence
  Description of Artificial Sequence: Synthetic oligonucleotide
ugguucuggcucucgaagu

SEQ ID NO: 2909561 - RNA, 19 nt, Artificial Sequence
  Description of Artificial Sequence: Synthetic oligonucleotide
ucugcuauccgaagcuguu

SEQ ID NO: 2909562 - RNA, 19 nt, Artificial Sequence
  Description of Artificial Sequence: Synthetic oligonucleotide
cacagggagcugaaaggcc

SEQ ID NO: 2909563 - RNA, 19 nt, Artificial Sequence
  Description of Artificial Sequence: Synthetic oligonucleotide
uccucauccucgguaaaca

SEQ ID NO: 2909564 - RNA, 19 nt, Artificial Sequence
  Description of Artificial Sequence: Synthetic oligonucleotide
uguucaagugcagucucaa

SEQ ID NO: 2909565 - RNA, 19 nt, Artificial Sequence
  Description of Artificial Sequence: Synthetic oligonucleotide
uacuguucccacagcuucu

SEQ ID NO: 2909566 - RNA, 19 nt, Artificial Sequence
  Description of Artificial Sequence: Synthetic oligonucleotide
ggugucugcuauccgaagc

SEQ ID NO: 2909567 - RNA, 19 nt, Artificial Sequence
  Description of Artificial Sequence: Synthetic oligonucleotide
uucuggcucucgaaguccu

SEQ ID NO: 2909568 - RNA, 19 nt, Artificial Sequence
  Description of Artificial Sequence: Synthetic oligonucleotide
gccacagggagcugaaagg

SEQ ID NO: 2909569 - RNA, 19 nt, Artificial Sequence
  Description of Artificial Sequence: Synthetic oligonucleotide
cagucucaaguuuuaccac

SEQ ID NO: 2909570 - RNA, 19 nt, Artificial Sequence
  Description of Artificial Sequence: Synthetic oligonucleotide
guucaagugcagucucaag

SEQ ID NO: 2909571 - RNA, 19 nt, Artificial Sequence
  Description of Artificial Sequence: Synthetic oligonucleotide
uacacguuuuggugucugc

SEQ ID NO: 2909572 - RNA, 19 nt, Artificial Sequence
  Description of Artificial Sequence: Synthetic oligonucleotide
uccuacacguuuugguguc

SEQ ID NO: 2909573 - RNA, 19 nt, Artificial Sequence
  Description of Artificial Sequence: Synthetic oligonucleotide
acguuuuggugucugcuau

SEQ ID NO: 2909574 - RNA, 19 nt, Artificial Sequence
  Description of Artificial Sequence: Synthetic oligonucleotide
ucuuccuucuugagaggaa

SEQ ID NO: 2909575 - RNA, 19 nt, Artificial Sequence
  Description of Artificial Sequence: Synthetic oligonucleotide
gcaguucugccacagggag

SEQ ID NO: 2909576 - RNA, 19 nt, Artificial Sequence
  Description of Artificial Sequence: Synthetic oligonucleotide
uguucgguaguugaacauu

SEQ ID NO: 2909577 - RNA, 19 nt, Artificial Sequence
  Description of Artificial Sequence: Synthetic oligonucleotide
ucacugucauacuguuccc

SEQ ID NO: 2909578 - RNA, 19 nt, Artificial Sequence
  Description of Artificial Sequence: Synthetic oligonucleotide
uucgauaggcucaccucau

SEQ ID NO: 2909579 - RNA, 19 nt, Artificial Sequence
  Description of Artificial Sequence: Synthetic oligonucleotide
ucgaaguccuacacguuuu

SEQ ID NO: 2909580 - RNA, 19 nt, Artificial Sequence
  Description of Artificial Sequence: Synthetic oligonucleotide
agaggaaagguggucuuga

SEQ ID NO: 2909581 - RNA, 19 nt, Artificial Sequence
  Description of Artificial Sequence: Synthetic oligonucleotide
ugucuggacuccagccugc

SEQ ID NO: 2909582 - RNA, 19 nt, Artificial Sequence
  Description of Artificial Sequence: Synthetic oligonucleotide
ugcacgaauggcucgcuuu

SEQ ID NO: 2909583 - RNA, 19 nt, Artificial Sequence
  Description of Artificial Sequence: Synthetic oligonucleotide
uucgguaguugaacauuuc

SEQ ID NO: 2909584 - RNA, 19 nt, Artificial Sequence
  Description of Artificial Sequence: Synthetic oligonucleotide
uccuccaauggcaguucug

SEQ ID NO: 2909585 - RNA, 19 nt, Artificial Sequence
  Description of Artificial Sequence: Synthetic oligonucleotide
uucugcacgaauggcucgc

SEQ ID NO: 2909586 - RNA, 19 nt, Artificial Sequence
  Description of Artificial Sequence: Synthetic oligonucleotide
cuuuucacugucauacugu

SEQ ID NO: 2909587 - RNA, 19 nt, Artificial Sequence
  Description of Artificial Sequence: Synthetic oligonucleotide
guaaacaauguucgguagu

SEQ ID NO: 2909588 - RNA, 19 nt, Artificial Sequence
  Description of Artificial Sequence: Synthetic oligonucleotide
cuccaauggcaguucugcc

SEQ ID NO: 2909589 - RNA, 19 nt, Artificial Sequence
  Description of Artificial Sequence: Synthetic oligonucleotide
auguucgguaguugaacau

SEQ ID NO: 2909590 - RNA, 19 nt, Artificial Sequence
  Description of Artificial Sequence: Synthetic oligonucleotide
uuaccacaauuuccuccug

SEQ ID NO: 2909591 - RNA, 19 nt, Artificial Sequence
  Description of Artificial Sequence: Synthetic oligonucleotide
gaugucuggacuccagccu

SEQ ID NO: 2909592 - RNA, 19 nt, Artificial Sequence
  Description of Artificial Sequence: Synthetic oligonucleotide
guuuuaccacaauuuccuc

SEQ ID NO: 2909593 - RNA, 19 nt, Artificial Sequence
  Description of Artificial Sequence: Synthetic oligonucleotide
cucucgaaguccuacacgu

SEQ ID NO: 2909594 - RNA, 19 nt, Artificial Sequence
  Description of Artificial Sequence: Synthetic oligonucleotide
agggccacacgcaucuucg

SEQ ID NO: 2909595 - RNA, 19 nt, Artificial Sequence
  Description of Artificial Sequence: Synthetic oligonucleotide
agcuguucaagugcagucu

SEQ ID NO: 2909596 - RNA, 19 nt, Artificial Sequence
  Description of Artificial Sequence: Synthetic oligonucleotide
uggacuccagccugcugcc

SEQ ID NO: 2909597 - RNA, 19 nt, Artificial Sequence
  Description of Artificial Sequence: Synthetic oligonucleotide
uccuuuucacugucauacu

SEQ ID NO: 2909598 - RNA, 19 nt, Artificial Sequence
  Description of Artificial Sequence: Synthetic oligonucleotide
guugaugucuggacuccag

SEQ ID NO: 2909599 - RNA, 19 nt, Artificial Sequence
  Description of Artificial Sequence: Synthetic oligonucleotide
aagugcagucucaaguuuu

SEQ ID NO: 2909600 - RNA, 19 nt, Artificial Sequence
  Description of Artificial Sequence: Synthetic oligonucleotide
cuugagaggaaaggugguc

SEQ ID NO: 2909601 - RNA, 19 nt, Artificial Sequence
  Description of Artificial Sequence: Synthetic oligonucleotide
ucucaaguuuuaccacaau

SEQ ID NO: 2909602 - RNA, 19 nt, Artificial Sequence
  Description of Artificial Sequence: Synthetic oligonucleotide
acagggagcugaaaggccu

SEQ ID NO: 2909603 - RNA, 19 nt, Artificial Sequence
  Description of Artificial Sequence: Synthetic oligonucleotide
ugagaggaaagguggucuu

SEQ ID NO: 2909604 - RNA, 19 nt, Artificial Sequence
  Description of Artificial Sequence: Synthetic oligonucleotide
ucccacagcuucugcacga

SEQ ID NO: 2909605 - RNA, 19 nt, Artificial Sequence
  Description of Artificial Sequence: Synthetic oligonucleotide
uggugucugcuauccgaag

SEQ ID NO: 2909606 - RNA, 19 nt, Artificial Sequence
  Description of Artificial Sequence: Synthetic oligonucleotide
cuucaauucuuguaaguau

SEQ ID NO: 2909607 - RNA, 19 nt, Artificial Sequence
  Description of Artificial Sequence: Synthetic oligonucleotide
uuugccccuccucauccuc

SEQ ID NO: 2909608 - RNA, 19 nt, Artificial Sequence
  Description of Artificial Sequence: Synthetic oligonucleotide
uagcuugcugguucuggcu

SEQ ID NO: 2909609 - RNA, 19 nt, Artificial Sequence
  Description of Artificial Sequence: Synthetic oligonucleotide
cucgcuuugccccuccuca

SEQ ID NO: 2909610 - RNA, 19 nt, Artificial Sequence
  Description of Artificial Sequence: Synthetic oligonucleotide
gagaggaaagguggucuug

SEQ ID NO: 2909611 - RNA, 19 nt, Artificial Sequence
  Description of Artificial Sequence: Synthetic oligonucleotide
ugucugcuauccgaagcug

SEQ ID NO: 2909612 - RNA, 19 nt, Artificial Sequence
  Description of Artificial Sequence: Synthetic oligonucleotide
gauccuccuucaauucuug

SEQ ID NO: 2909613 - RNA, 19 nt, Artificial Sequence
  Description of Artificial Sequence: Synthetic oligonucleotide
ugcugguucuggcucucga

SEQ ID NO: 2909614 - RNA, 19 nt, Artificial Sequence
  Description of Artificial Sequence: Synthetic oligonucleotide
cuggcucagguaaguacac

SEQ ID NO: 2909615 - RNA, 19 nt, Artificial Sequence
  Description of Artificial Sequence: Synthetic oligonucleotide
auggcaguucugccacagg

SEQ ID NO: 2909616 - RNA, 19 nt, Artificial Sequence
  Description of Artificial Sequence: Synthetic oligonucleotide
uccuggauuugcucuuccu

SEQ ID NO: 2909617 - RNA, 19 nt, Artificial Sequence
  Description of Artificial Sequence: Synthetic oligonucleotide
acauuucuacauuguugau

SEQ ID NO: 2909618 - RNA, 19 nt, Artificial Sequence
  Description of Artificial Sequence: Synthetic oligonucleotide
gcucucgaaguccuacacg

SEQ ID NO: 2909619 - RNA, 19 nt, Artificial Sequence
  Description of Artificial Sequence: Synthetic oligonucleotide
acacguuuuggugucugcu

SEQ ID NO: 2909620 - RNA, 19 nt, Artificial Sequence
  Description of Artificial Sequence: Synthetic oligonucleotide
ccuuuucacugucauacug

SEQ ID NO: 2909621 - RNA, 19 nt, Artificial Sequence
  Description of Artificial Sequence: Synthetic oligonucleotide
ccacacgcaucuucgauag

SEQ ID NO: 2909622 - RNA, 19 nt, Artificial Sequence
  Description of Artificial Sequence: Synthetic oligonucleotide
uucugccacagggagcuga

SEQ ID NO: 2909623 - RNA, 19 nt, Artificial Sequence
  Description of Artificial Sequence: Synthetic oligonucleotide
uguugaugucuggacucca

SEQ ID NO: 2909624 - RNA, 19 nt, Artificial Sequence
  Description of Artificial Sequence: Synthetic oligonucleotide
ugccccuccucauccucgg

SEQ ID NO: 2909625 - RNA, 19 nt, Artificial Sequence
  Description of Artificial Sequence: Synthetic oligonucleotide
ugggaucgauguucaucag

SEQ ID NO: 2909626 - RNA, 19 nt, Artificial Sequence
  Description of Artificial Sequence: Synthetic oligonucleotide
gucauacuguucccacagc

SEQ ID NO: 2909627 - RNA, 19 nt, Artificial Sequence
  Description of Artificial Sequence: Synthetic oligonucleotide
cauuguugaugucuggacu

SEQ ID NO: 2909628 - RNA, 19 nt, Artificial Sequence
  Description of Artificial Sequence: Synthetic oligonucleotide
aggcucaccucaucaguga

SEQ ID NO: 2909629 - RNA, 19 nt, Artificial Sequence
  Description of Artificial Sequence: Synthetic oligonucleotide
uacacagugucugcuuguc

SEQ ID NO: 2909630 - RNA, 19 nt, Artificial Sequence
  Description of Artificial Sequence: Synthetic oligonucleotide
uggcucucgaaguccuaca

SEQ ID NO: 2909631 - RNA, 19 nt, Artificial Sequence
  Description of Artificial Sequence: Synthetic oligonucleotide
ucgauaggcucaccucauc

SEQ ID NO: 2909632 - RNA, 19 nt, Artificial Sequence
  Description of Artificial Sequence: Synthetic oligonucleotide
gacuccagccugcugccuc

SEQ ID NO: 2909633 - RNA, 19 nt, Artificial Sequence
  Description of Artificial Sequence: Synthetic oligonucleotide
ccaauggcaguucugccac

SEQ ID NO: 2909634 - RNA, 19 nt, Artificial Sequence
  Description of Artificial Sequence: Synthetic oligonucleotide
acaauguucgguaguugaa

SEQ ID NO: 2909635 - RNA, 19 nt, Artificial Sequence
  Description of Artificial Sequence: Synthetic oligonucleotide
aagcugggaucgauguuca

SEQ ID NO: 2909636 - RNA, 19 nt, Artificial Sequence
  Description of Artificial Sequence: Synthetic oligonucleotide
gcuuugccccuccucaucc

SEQ ID NO: 2909637 - RNA, 19 nt, Artificial Sequence
  Description of Artificial Sequence: Synthetic oligonucleotide
uggcccagauccuccuuca

SEQ ID NO: 2909638 - RNA, 19 nt, Artificial Sequence
  Description of Artificial Sequence: Synthetic oligonucleotide
cucaaguuuuaccacaauu

SEQ ID NO: 2909639 - RNA, 19 nt, Artificial Sequence
  Description of Artificial Sequence: Synthetic oligonucleotide
gaagcuguucaagugcagu

SEQ ID NO: 2909640 - RNA, 19 nt, Artificial Sequence
  Description of Artificial Sequence: Synthetic oligonucleotide
auccucgguaaacaauguu

SEQ ID NO: 2909641 - RNA, 19 nt, Artificial Sequence
  Description of Artificial Sequence: Synthetic oligonucleotide
ucucgaaguccuacacguu

SEQ ID NO: 2909642 - RNA, 19 nt, Artificial Sequence
  Description of Artificial Sequence: Synthetic oligonucleotide
gcacgaauggcucgcuuug

SEQ ID NO: 2909643 - RNA, 19 nt, Artificial Sequence
  Description of Artificial Sequence: Synthetic oligonucleotide
auccuccuucaauucuugu

SEQ ID NO: 2909644 - RNA, 19 nt, Artificial Sequence
  Description of Artificial Sequence: Synthetic oligonucleotide
cuggcucucgaaguccuac

SEQ ID NO: 2909645 - RNA, 19 nt, Artificial Sequence
  Description of Artificial Sequence: Synthetic oligonucleotide
cugucauacuguucccaca

SEQ ID NO: 2909646 - RNA, 19 nt, Artificial Sequence
  Description of Artificial Sequence: Synthetic oligonucleotide
uuucuacauuguugauguc

SEQ ID NO: 2909647 - RNA, 19 nt, Artificial Sequence
  Description of Artificial Sequence: Synthetic oligonucleotide
gguucuggcucucgaaguc

SEQ ID NO: 2909648 - RNA, 19 nt, Artificial Sequence
  Description of Artificial Sequence: Synthetic oligonucleotide
cuacacguuuuggugucug

SEQ ID NO: 2909649 - RNA, 19 nt, Artificial Sequence
  Description of Artificial Sequence: Synthetic oligonucleotide
cuccucauccucgguaaac

SEQ ID NO: 2909650 - RNA, 19 nt, Artificial Sequence
  Description of Artificial Sequence: Synthetic oligonucleotide
cucaauuagcuccuggauu

SEQ ID NO: 2909651 - RNA, 19 nt, Artificial Sequence
  Description of Artificial Sequence: Synthetic oligonucleotide
agggagcugaaaggccugg

SEQ ID NO: 2909652 - RNA, 19 nt, Artificial Sequence
  Description of Artificial Sequence: Synthetic oligonucleotide
acuccagccugcugccuca

SEQ ID NO: 2909653 - RNA, 19 nt, Artificial Sequence
  Description of Artificial Sequence: Synthetic oligonucleotide
cucuuccuucuugagagga

SEQ ID NO: 2909654 - RNA, 19 nt, Artificial Sequence
  Description of Artificial Sequence: Synthetic oligonucleotide
cuggcccagauccuccuuc

SEQ ID NO: 2909655 - RNA, 19 nt, Artificial Sequence
  Description of Artificial Sequence: Synthetic oligonucleotide
cuccuggauuugcucuucc

SEQ ID NO: 2909656 - RNA, 19 nt, Artificial Sequence
  Description of Artificial Sequence: Synthetic oligonucleotide
agauccuccuucaauucuu

SEQ ID NO: 2909657 - RNA, 19 nt, Artificial Sequence
  Description of Artificial Sequence: Synthetic oligonucleotide
gccucaauuagcuccugga

SEQ ID NO: 2909658 - RNA, 19 nt, Artificial Sequence
  Description of Artificial Sequence: Synthetic oligonucleotide
guccuacacguuuuggugu

SEQ ID NO: 2909659 - RNA, 19 nt, Artificial Sequence
  Description of Artificial Sequence: Synthetic oligonucleotide
uguccaagcugggaucgau

SEQ ID NO: 2909660 - RNA, 19 nt, Artificial Sequence
  Description of Artificial Sequence: Synthetic oligonucleotide
ggcucaccucaucagugag

SEQ ID NO: 2909661 - RNA, 19 nt, Artificial Sequence
  Description of Artificial Sequence: Synthetic oligonucleotide
cuuccuucuugagaggaaa

SEQ ID NO: 2909662 - RNA, 19 nt, Artificial Sequence
  Description of Artificial Sequence: Synthetic oligonucleotide
cuguucaagugcagucuca

SEQ ID NO: 2909663 - RNA, 19 nt, Artificial Sequence
  Description of Artificial Sequence: Synthetic oligonucleotide
ccuggcucagguaaguaca

SEQ ID NO: 2909664 - RNA, 19 nt, Artificial Sequence
  Description of Artificial Sequence: Synthetic oligonucleotide
cucaccucaucagugagcu

SEQ ID NO: 2909665 - RNA, 19 nt, Artificial Sequence
  Description of Artificial Sequence: Synthetic oligonucleotide
ccuccuucaauucuuguaa

SEQ ID NO: 2909666 - RNA, 19 nt, Artificial Sequence
  Description of Artificial Sequence: Synthetic oligonucleotide
caauuagcuccuggauuug

SEQ ID NO: 2909667 - RNA, 19 nt, Artificial Sequence
  Description of Artificial Sequence: Synthetic oligonucleotide
cagggagcugaaaggccug

SEQ ID NO: 2909668 - RNA, 19 nt, Artificial Sequence
  Description of Artificial Sequence: Synthetic oligonucleotide
gcuguucaagugcagucuc

SEQ ID NO: 2909669 - RNA, 19 nt, Artificial Sequence
  Description of Artificial Sequence: Synthetic oligonucleotide
caucagggccacacgcauc

SEQ ID NO: 2909670 - RNA, 19 nt, Artificial Sequence
  Description of Artificial Sequence: Synthetic oligonucleotide
ccacagggagcugaaaggc

SEQ ID NO: 2909671 - RNA, 19 nt, Artificial Sequence
  Description of Artificial Sequence: Synthetic oligonucleotide
cacgaauggcucgcuuugc

SEQ ID NO: 2909672 - RNA, 19 nt, Artificial Sequence
  Description of Artificial Sequence: Synthetic oligonucleotide
uggcucagguaaguacaca

SEQ ID NO: 2909673 - RNA, 19 nt, Artificial Sequence
  Description of Artificial Sequence: Synthetic oligonucleotide
gucucaaguuuuaccacaa

SEQ ID NO: 2909674 - RNA, 19 nt, Artificial Sequence
  Description of Artificial Sequence: Synthetic oligonucleotide
cagcuucugcacgaauggc

SEQ ID NO: 2909675 - RNA, 19 nt, Artificial Sequence
  Description of Artificial Sequence: Synthetic oligonucleotide
ggcucucgaaguccuacac

SEQ ID NO: 2909676 - RNA, 19 nt, Artificial Sequence
  Description of Artificial Sequence: Synthetic oligonucleotide
cagggccacacgcaucuuc

SEQ ID NO: 2909677 - RNA, 19 nt, Artificial Sequence
  Description of Artificial Sequence: Synthetic oligonucleotide
cuguucccacagcuucugc

SEQ ID NO: 2909678 - RNA, 19 nt, Artificial Sequence
  Description of Artificial Sequence: Synthetic oligonucleotide
cacguuuuggugucugcua

SEQ ID NO: 2909679 - RNA, 19 nt, Artificial Sequence
  Description of Artificial Sequence: Synthetic oligonucleotide
cuuguaaguaugcuuccuu

SEQ ID NO: 2909680 - RNA, 19 nt, Artificial Sequence
  Description of Artificial Sequence: Synthetic oligonucleotide
agugcagucucaaguuuua

SEQ ID NO: 2909681 - RNA, 19 nt, Artificial Sequence
  Description of Artificial Sequence: Synthetic oligonucleotide
gcuuguccaagcugggauc

SEQ ID NO: 2909682 - RNA, 19 nt, Artificial Sequence
  Description of Artificial Sequence: Synthetic oligonucleotide
cagugucugcuuguccaag

SEQ ID NO: 2909683 - RNA, 19 nt, Artificial Sequence
  Description of Artificial Sequence: Synthetic oligonucleotide
uccuggcccagauccuccu

SEQ ID NO: 2909684 - RNA, 19 nt, Artificial Sequence
  Description of Artificial Sequence: Synthetic oligonucleotide
cugaaaggccuggcucagg

SEQ ID NO: 2909685 - RNA, 19 nt, Artificial Sequence
  Description of Artificial Sequence: Synthetic oligonucleotide
gcugggaucgauguucauc

SEQ ID NO: 2909686 - RNA, 19 nt, Artificial Sequence
  Description of Artificial Sequence: Synthetic oligonucleotide
gccuggcucagguaaguac

SEQ ID NO: 2909687 - RNA, 19 nt, Artificial Sequence
  Description of Artificial Sequence: Synthetic oligonucleotide
ucugcacgaauggcucgcu

SEQ ID NO: 2909688 - RNA, 19 nt, Artificial Sequence
  Description of Artificial Sequence: Synthetic oligonucleotide
guccaagcugggaucgaug

SEQ ID NO: 2909689 - RNA, 19 nt, Artificial Sequence
  Description of Artificial Sequence: Synthetic oligonucleotide
cuuccuuuucacugucaua

SEQ ID NO: 2909690 - RNA, 19 nt, Artificial Sequence
  Description of Artificial Sequence: Synthetic oligonucleotide
ccagauccuccuucaauuc

SEQ ID NO: 2909691 - RNA, 19 nt, Artificial Sequence
  Description of Artificial Sequence: Synthetic oligonucleotide
cacacgcaucuucgauagg

SEQ ID NO: 2909692 - RNA, 19 nt, Artificial Sequence
  Description of Artificial Sequence: Synthetic oligonucleotide
gcucuuccuucuugagagg

SEQ ID NO: 2909693 - RNA, 19 nt, Artificial Sequence
  Description of Artificial Sequence: Synthetic oligonucleotide
cugcuauccgaagcuguuc

SEQ ID NO: 2909694 - RNA, 19 nt, Artificial Sequence
  Description of Artificial Sequence: Synthetic oligonucleotide
cgaauggcucgcuuugccc

SEQ ID NO: 2909695 - RNA, 19 nt, Artificial Sequence
  Description of Artificial Sequence: Synthetic oligonucleotide
ucgcuuugccccuccucau

SEQ ID NO: 2909696 - RNA, 19 nt, Artificial Sequence
  Description of Artificial Sequence: Synthetic oligonucleotide
gaaaggccuggcucaggua

SEQ ID NO: 2909697 - RNA, 19 nt, Artificial Sequence
  Description of Artificial Sequence: Synthetic oligonucleotide
ucuggcucucgaaguccua

SEQ ID NO: 2909698 - RNA, 19 nt, Artificial Sequence
  Description of Artificial Sequence: Synthetic oligonucleotide
caauucuuguaaguaugcu

SEQ ID NO: 2909699 - RNA, 19 nt, Artificial Sequence
  Description of Artificial Sequence: Synthetic oligonucleotide
cucgaaguccuacacguuu

SEQ ID NO: 2909700 - RNA, 19 nt, Artificial Sequence
  Description of Artificial Sequence: Synthetic oligonucleotide
cagccugcugccucaauua

SEQ ID NO: 2909701 - RNA, 19 nt, Artificial Sequence
  Description of Artificial Sequence: Synthetic oligonucleotide
cucauccucgguaaacaau

SEQ ID NO: 2909702 - RNA, 19 nt, Artificial Sequence
  Description of Artificial Sequence: Synthetic oligonucleotide
guacacagugucugcuugu

SEQ ID NO: 2909703 - RNA, 19 nt, Artificial Sequence
  Description of Artificial Sequence: Synthetic oligonucleotide
cauacuguucccacagcuu

SEQ ID NO: 2909704 - RNA, 19 nt, Artificial Sequence
  Description of Artificial Sequence: Synthetic oligonucleotide
cacugucauacuguuccca

SEQ ID NO: 2909705 - RNA, 19 nt, Artificial Sequence
  Description of Artificial Sequence: Synthetic oligonucleotide
gugucugcuuguccaagcu

SEQ ID NO: 2909706 - RNA, 19 nt, Artificial Sequence
  Description of Artificial Sequence: Synthetic oligonucleotide
cagauccuccuucaauucu

SEQ ID NO: 2909707 - RNA, 19 nt, Artificial Sequence
  Description of Artificial Sequence: Synthetic oligonucleotide
uuguccaagcugggaucga

SEQ ID NO: 2909708 - RNA, 19 nt, Artificial Sequence
  Description of Artificial Sequence: Synthetic oligonucleotide
ccugcugccucaauuagcu

SEQ ID NO: 2909709 - RNA, 19 nt, Artificial Sequence
  Description of Artificial Sequence: Synthetic oligonucleotide
gcaucuucgauaggcucac

SEQ ID NO: 2909710 - RNA, 19 nt, Artificial Sequence
  Description of Artificial Sequence: Synthetic oligonucleotide
uggcucgcuuugccccucc

SEQ ID NO: 2909711 - RNA, 19 nt, Artificial Sequence
  Description of Artificial Sequence: Synthetic oligonucleotide
gugcagucucaaguuuuac

SEQ ID NO: 2909712 - RNA, 19 nt, Artificial Sequence
  Description of Artificial Sequence: Synthetic oligonucleotide
cuugcugguucuggcucuc

SEQ ID NO: 2909713 - RNA, 19 nt, Artificial Sequence
  Description of Artificial Sequence: Synthetic oligonucleotide
ccgaagcuguucaagugca

SEQ ID NO: 2909714 - RNA, 19 nt, Artificial Sequence
  Description of Artificial Sequence: Synthetic oligonucleotide
cacgcaucuucgauaggcu

SEQ ID NO: 2909715 - RNA, 19 nt, Artificial Sequence
  Description of Artificial Sequence: Synthetic oligonucleotide
guucgguaguugaacauuu

SEQ ID NO: 2909716 - RNA, 19 nt, Artificial Sequence
  Description of Artificial Sequence: Synthetic oligonucleotide
gcucaccucaucagugagc

SEQ ID NO: 2909717 - RNA, 19 nt, Artificial Sequence
  Description of Artificial Sequence: Synthetic oligonucleotide
ucaccucaucagugagcuc

SEQ ID NO: 2909718 - RNA, 19 nt, Artificial Sequence
  Description of Artificial Sequence: Synthetic oligonucleotide
cugcugccucaauuagcuc

SEQ ID NO: 2909719 - RNA, 19 nt, Artificial Sequence
  Description of Artificial Sequence: Synthetic oligonucleotide
cauccucgguaaacaaugu

SEQ ID NO: 2909720 - RNA, 19 nt, Artificial Sequence
  Description of Artificial Sequence: Synthetic oligonucleotide
ggcaguucugccacaggga

SEQ ID NO: 2909721 - RNA, 19 nt, Artificial Sequence
  Description of Artificial Sequence: Synthetic oligonucleotide
caauuuccuccugcuucuc

SEQ ID NO: 2909722 - RNA, 19 nt, Artificial Sequence
  Description of Artificial Sequence: Synthetic oligonucleotide
cgcaucuucgauaggcuca

SEQ ID NO: 2909723 - RNA, 19 nt, Artificial Sequence
  Description of Artificial Sequence: Synthetic oligonucleotide
auggcucgcuuugccccuc

SEQ ID NO: 2909724 - RNA, 19 nt, Artificial Sequence
  Description of Artificial Sequence: Synthetic oligonucleotide
gccacacgcaucuucgaua

SEQ ID NO: 2909725 - RNA, 19 nt, Artificial Sequence
  Description of Artificial Sequence: Synthetic oligonucleotide
gucugcuauccgaagcugu

SEQ ID NO: 2909726 - RNA, 19 nt, Artificial Sequence
  Description of Artificial Sequence: Synthetic oligonucleotide
caucuucgauaggcucacc

SEQ ID NO: 2909727 - RNA, 19 nt, Artificial Sequence
  Description of Artificial Sequence: Synthetic oligonucleotide
cgguaaacaauguucggua

SEQ ID NO: 2909728 - RNA, 19 nt, Artificial Sequence
  Description of Artificial Sequence: Synthetic oligonucleotide
gccugcugccucaauuagc

SEQ ID NO: 2909729 - RNA, 19 nt, Artificial Sequence
  Description of Artificial Sequence: Synthetic oligonucleotide
caauggcaguucugccaca

SEQ ID NO: 2909730 - RNA, 19 nt, Artificial Sequence
  Description of Artificial Sequence: Synthetic oligonucleotide
cgauaggcucaccucauca

SEQ ID NO: 2909731 - RNA, 19 nt, Artificial Sequence
  Description of Artificial Sequence: Synthetic oligonucleotide
uccagccugcugccucaau

SEQ ID NO: 2909732 - RNA, 19 nt, Artificial Sequence
  Description of Artificial Sequence: Synthetic oligonucleotide
caagugcagucucaaguuu

SEQ ID NO: 2909733 - RNA, 19 nt, Artificial Sequence
  Description of Artificial Sequence: Synthetic oligonucleotide
gauguucaucagggccaca

SEQ ID NO: 2909734 - RNA, 19 nt, Artificial Sequence
  Description of Artificial Sequence: Synthetic oligonucleotide
agcugggaucgauguucau

SEQ ID NO: 2909735 - RNA, 19 nt, Artificial Sequence
  Description of Artificial Sequence: Synthetic oligonucleotide
cgaaguccuacacguuuug

SEQ ID NO: 2909736 - RNA, 19 nt, Artificial Sequence
  Description of Artificial Sequence: Synthetic oligonucleotide
cugcuuguccaagcuggga

SEQ ID NO: 2909737 - RNA, 19 nt, Artificial Sequence
  Description of Artificial Sequence: Synthetic oligonucleotide
cgguaguugaacauuucua

SEQ ID NO: 2909738 - RNA, 19 nt, Artificial Sequence
  Description of Artificial Sequence: Synthetic oligonucleotide
ccuucuugagaggaaaggu

SEQ ID NO: 2909739 - RNA, 19 nt, Artificial Sequence
  Description of Artificial Sequence: Synthetic oligonucleotide
gcuauccgaagcuguucaa

SEQ ID NO: 2909740 - RNA, 19 nt, Artificial Sequence
  Description of Artificial Sequence: Synthetic oligonucleotide
cgaagcuguucaagugcag

SEQ ID NO: 2909741 - RNA, 19 nt, Artificial Sequence
  Description of Artificial Sequence: Synthetic oligonucleotide
cagugagcuccuggcccag

SEQ ID NO: 2909742 - RNA, 19 nt, Artificial Sequence
  Description of Artificial Sequence: Synthetic oligonucleotide
cguuuuggugucugcuauc

SEQ ID NO: 2909743 - RNA, 19 nt, Artificial Sequence
  Description of Artificial Sequence: Synthetic oligonucleotide
gcucgcuuugccccuccuc

SEQ ID NO: 2909744 - RNA, 19 nt, Artificial Sequence
  Description of Artificial Sequence: Synthetic oligonucleotide
cccagauccuccuucaauu

SEQ ID NO: 2909745 - RNA, 19 nt, Artificial Sequence
  Description of Artificial Sequence: Synthetic oligonucleotide
gugagcuccuggcccagau

SEQ ID NO: 2909746 - RNA, 19 nt, Artificial Sequence
  Description of Artificial Sequence: Synthetic oligonucleotide
cuuugccccuccucauccu

SEQ ID NO: 2909747 - RNA, 19 nt, Artificial Sequence
  Description of Artificial Sequence: Synthetic oligonucleotide
ccucauccucgguaaacaa

SEQ ID NO: 2909748 - RNA, 19 nt, Artificial Sequence
  Description of Artificial Sequence: Synthetic oligonucleotide
gcuugcugguucuggcucu

SEQ ID NO: 2909749 - RNA, 19 nt, Artificial Sequence
  Description of Artificial Sequence: Synthetic oligonucleotide
cugccucaauuagcuccug

SEQ ID NO: 2909750 - RNA, 19 nt, Artificial Sequence
  Description of Artificial Sequence: Synthetic oligonucleotide
gcucagguaaguacacagu

SEQ ID NO: 2909751 - RNA, 19 nt, Artificial Sequence
  Description of Artificial Sequence: Synthetic oligonucleotide
cccuccucauccucgguaa

SEQ ID NO: 2909752 - RNA, 19 nt, Artificial Sequence
  Description of Artificial Sequence: Synthetic oligonucleotide
ccucaauuagcuccuggau

SEQ ID NO: 2909753 - RNA, 19 nt, Artificial Sequence
  Description of Artificial Sequence: Synthetic oligonucleotide
gcuccuggcccagauccuc

SEQ ID NO: 2909754 - RNA, 19 nt, Artificial Sequence
  Description of Artificial Sequence: Synthetic oligonucleotide
cgauguucaucagggccac

SEQ ID NO: 2909755 - RNA, 19 nt, Artificial Sequence
  Description of Artificial Sequence: Synthetic oligonucleotide
gggccacacgcaucuucga

SEQ ID NO: 2909756 - RNA, 19 nt, Artificial Sequence
  Description of Artificial Sequence: Synthetic oligonucleotide
ggccacacgcaucuucgau

SEQ ID NO: 2909757 - RNA, 19 nt, Artificial Sequence
  Description of Artificial Sequence: Synthetic oligonucleotide
guucugccacagggagcug

SEQ ID NO: 2909758 - RNA, 19 nt, Artificial Sequence
  Description of Artificial Sequence: Synthetic oligonucleotide
gcccagauccuccuucaau

SEQ ID NO: 2909759 - RNA, 19 nt, Artificial Sequence
  Description of Artificial Sequence: Synthetic oligonucleotide
ggauuugcucuuccuucuu

SEQ ID NO: 2909760 - RNA, 19 nt, Artificial Sequence
  Description of Artificial Sequence: Synthetic oligonucleotide
ucagggccacacgcaucuu

SEQ ID NO: 2909761 - RNA, 19 nt, Artificial Sequence
  Description of Artificial Sequence: Synthetic oligonucleotide
cgcuuugccccuccucauc

SEQ ID NO: 2909762 - RNA, 19 nt, Artificial Sequence
  Description of Artificial Sequence: Synthetic oligonucleotide
gucuggacuccagccugcu

SEQ ID NO: 2909763 - RNA, 19 nt, Artificial Sequence
  Description of Artificial Sequence: Synthetic oligonucleotide
ggcccagauccuccuucaa

SEQ ID NO: 2909764 - RNA, 19 nt, Artificial Sequence
  Description of Artificial Sequence: Synthetic oligonucleotide
ccagccugcugccucaauu

SEQ ID NO: 2909765 - RNA, 19 nt, Artificial Sequence
  Description of Artificial Sequence: Synthetic oligonucleotide
cugccacagggagcugaaa

SEQ ID NO: 2909766 - RNA, 19 nt, Artificial Sequence
  Description of Artificial Sequence: Synthetic oligonucleotide
cugcacgaauggcucgcuu

SEQ ID NO: 2909767 - RNA, 19 nt, Artificial Sequence
  Description of Artificial Sequence: Synthetic oligonucleotide
ccuccucauccucgguaaa

SEQ ID NO: 2909768 - RNA, 19 nt, Artificial Sequence
  Description of Artificial Sequence: Synthetic oligonucleotide
cuccagccugcugccucaa

SEQ ID NO: 2909769 - RNA, 19 nt, Artificial Sequence
  Description of Artificial Sequence: Synthetic oligonucleotide
cccacagcuucugcacgaa

SEQ ID NO: 2909770 - RNA, 19 nt, Artificial Sequence
  Description of Artificial Sequence: Synthetic oligonucleotide
ccaagcugggaucgauguu

SEQ ID NO: 2909771 - RNA, 19 nt, Artificial Sequence
  Description of Artificial Sequence: Synthetic oligonucleotide
ggcucgcuuugccccuccu

SEQ ID NO: 2909772 - RNA, 19 nt, Artificial Sequence
  Description of Artificial Sequence: Synthetic oligonucleotide
ccuacacguuuuggugucu

SEQ ID NO: 2909773 - RNA, 19 nt, Artificial Sequence
  Description of Artificial Sequence: Synthetic oligonucleotide
ccacagcuucugcacgaau

SEQ ID NO: 2909774 - RNA, 19 nt, Artificial Sequence
  Description of Artificial Sequence: Synthetic oligonucleotide
ccuggcccagauccuccuu

SEQ ID NO: 2909775 - RNA, 19 nt, Artificial Sequence
  Description of Artificial Sequence: Synthetic oligonucleotide
augaucaugaucuucuucc

SEQ ID NO: 2909776 - RNA, 19 nt, Artificial Sequence
  Description of Artificial Sequence: Synthetic oligonucleotide
aaugcccagaaucacacag

SEQ ID NO: 2909777 - RNA, 19 nt, Artificial Sequence
  Description of Artificial Sequence: Synthetic oligonucleotide
aucaugaucuucuuccugc

SEQ ID NO: 2909778 - RNA, 19 nt, Artificial Sequence
  Description of Artificial Sequence: Synthetic oligonucleotide
cacaagaucaugcacacgg

SEQ ID NO: 2909779 - RNA, 19 nt, Artificial Sequence
  Description of Artificial Sequence: Synthetic oligonucleotide
cuuggugucagacacagcc

SEQ ID NO: 2909780 - RNA, 19 nt, Artificial Sequence
  Description of Artificial Sequence: Synthetic oligonucleotide
gaugacaaugcccagaauc

SEQ ID NO: 2909781 - RNA, 19 nt, Artificial Sequence
  Description of Artificial Sequence: Synthetic oligonucleotide
agaucaugcacacggacac

SEQ ID NO: 2909782 - RNA, 19 nt, Artificial Sequence
  Description of Artificial Sequence: Synthetic oligonucleotide
ugggaugggaggaaaaggg

SEQ ID NO: 2909783 - RNA, 19 nt, Artificial Sequence
  Description of Artificial Sequence: Synthetic oligonucleotide
uuugcucugguacuugacg

SEQ ID NO: 2909784 - RNA, 19 nt, Artificial Sequence
  Description of Artificial Sequence: Synthetic oligonucleotide
ugucacaagaucaugcaca

SEQ ID NO: 2909785 - RNA, 19 nt, Artificial Sequence
  Description of Artificial Sequence: Synthetic oligonucleotide
uccacauuguacucgaucc

SEQ ID NO: 2909786 - RNA, 19 nt, Artificial Sequence
  Description of Artificial Sequence: Synthetic oligonucleotide
aaugaugaucaugaucuuc

SEQ ID NO: 2909787 - RNA, 19 nt, Artificial Sequence
  Description of Artificial Sequence: Synthetic oligonucleotide
uguacagacacacacuguc

SEQ ID NO: 2909788 - RNA, 19 nt, Artificial Sequence
  Description of Artificial Sequence: Synthetic oligonucleotide
uacuugacggccuucuugg

SEQ ID NO: 2909789 - RNA, 19 nt, Artificial Sequence
  Description of Artificial Sequence: Synthetic oligonucleotide
augaucuucuuccugcgcg

SEQ ID NO: 2909790 - RNA, 19 nt, Artificial Sequence
  Description of Artificial Sequence: Synthetic oligonucleotide
agaaucacacagcaaauga

SEQ ID NO: 2909791 - RNA, 19 nt, Artificial Sequence
  Description of Artificial Sequence: Synthetic oligonucleotide
aaucacacagcaaaugaug

SEQ ID NO: 2909792 - RNA, 19 nt, Artificial Sequence
  Description of Artificial Sequence: Synthetic oligonucleotide
ccugguuugauccugaucc

SEQ ID NO: 2909793 - RNA, 19 nt, Artificial Sequence
  Description of Artificial Sequence: Synthetic oligonucleotide
uuccacguaguccacggcg

SEQ ID NO: 2909794 - RNA, 19 nt, Artificial Sequence
  Description of Artificial Sequence: Synthetic oligonucleotide
agggcucccagccagaagg

SEQ ID NO: 2909795 - RNA, 19 nt, Artificial Sequence
  Description of Artificial Sequence: Synthetic oligonucleotide
uccucaaggagacccaucc

SEQ ID NO: 2909796 - RNA, 19 nt, Artificial Sequence
  Description of Artificial Sequence: Synthetic oligonucleotide
gaaaagggcucccagccag

SEQ ID NO: 2909797 - RNA, 19 nt, Artificial Sequence
  Description of Artificial Sequence: Synthetic oligonucleotide
uugcucugguacuugacgg

SEQ ID NO: 2909798 - RNA, 19 nt, Artificial Sequence
  Description of Artificial Sequence: Synthetic oligonucleotide
aggagacccauccagagug

SEQ ID NO: 2909799 - RNA, 19 nt, Artificial Sequence
  Description of Artificial Sequence: Synthetic oligonucleotide
ucagacacagcccuuucca

SEQ ID NO: 2909800 - RNA, 19 nt, Artificial Sequence
  Description of Artificial Sequence: Synthetic oligonucleotide
ugucuauccaaagaugccc

SEQ ID NO: 2909801 - RNA, 19 nt, Artificial Sequence
  Description of Artificial Sequence: Synthetic oligonucleotide
aggcgcagcagccaggggc

SEQ ID NO: 2909802 - RNA, 19 nt, Artificial Sequence
  Description of Artificial Sequence: Synthetic oligonucleotide
uuguacucgauccugucaa

SEQ ID NO: 2909803 - RNA, 19 nt, Artificial Sequence
  Description of Artificial Sequence: Synthetic oligonucleotide
agcagugugggaugggagg

SEQ ID NO: 2909804 - RNA, 19 nt, Artificial Sequence
  Description of Artificial Sequence: Synthetic oligonucleotide
uacagacacacacugucac

SEQ ID NO: 2909805 - RNA, 19 nt, Artificial Sequence
  Description of Artificial Sequence: Synthetic oligonucleotide
cucaaggagacccauccag

SEQ ID NO: 2909806 - RNA, 19 nt, Artificial Sequence
  Description of Artificial Sequence: Synthetic oligonucleotide
agacacagcccuuuccacg

SEQ ID NO: 2909807 - RNA, 19 nt, Artificial Sequence
  Description of Artificial Sequence: Synthetic oligonucleotide
cagcaaaugaugaucauga

SEQ ID NO: 2909808 - RNA, 19 nt, Artificial Sequence
  Description of Artificial Sequence: Synthetic oligonucleotide
cacugucacaagaucaugc

SEQ ID NO: 2909809 - RNA, 19 nt, Artificial Sequence
  Description of Artificial Sequence: Synthetic oligonucleotide
cuuuccacguaguccacgg

SEQ ID NO: 2909810 - RNA, 19 nt, Artificial Sequence
  Description of Artificial Sequence: Synthetic oligonucleotide
acaaugcccagaaucacac

SEQ ID NO: 2909811 - RNA, 19 nt, Artificial Sequence
  Description of Artificial Sequence: Synthetic oligonucleotide
uucuuggugucagacacag

SEQ ID NO: 2909812 - RNA, 19 nt, Artificial Sequence
  Description of Artificial Sequence: Synthetic oligonucleotide
agaguggagaggugguugg

SEQ ID NO: 2909813 - RNA, 19 nt, Artificial Sequence
  Description of Artificial Sequence: Synthetic oligonucleotide
uguuccacauuguacucga

SEQ ID NO: 2909814 - RNA, 19 nt, Artificial Sequence
  Description of Artificial Sequence: Synthetic oligonucleotide
ucaaggagacccauccaga

SEQ ID NO: 2909815 - RNA, 19 nt, Artificial Sequence
  Description of Artificial Sequence: Synthetic oligonucleotide
ugcccagaaucacacagca

SEQ ID NO: 2909816 - RNA, 19 nt, Artificial Sequence
  Description of Artificial Sequence: Synthetic oligonucleotide
acugucacaagaucaugca

SEQ ID NO: 2909817 - RNA, 19 nt, Artificial Sequence
  Description of Artificial Sequence: Synthetic oligonucleotide
uugacggccuucuuggugu

SEQ ID NO: 2909818 - RNA, 19 nt, Artificial Sequence
  Description of Artificial Sequence: Synthetic oligonucleotide
aagaucaugcacacggaca

SEQ ID NO: 2909819 - RNA, 19 nt, Artificial Sequence
  Description of Artificial Sequence: Synthetic oligonucleotide
cuccuguacagacacacac

SEQ ID NO: 2909820 - RNA, 19 nt, Artificial Sequence
  Description of Artificial Sequence: Synthetic oligonucleotide
uggugucuauccaaagaug

SEQ ID NO: 2909821 - RNA, 19 nt, Artificial Sequence
  Description of Artificial Sequence: Synthetic oligonucleotide
aucaugcacacggacacgg

SEQ ID NO: 2909822 - RNA, 19 nt, Artificial Sequence
  Description of Artificial Sequence: Synthetic oligonucleotide
gaugaucaugaucuucuuc

SEQ ID NO: 2909823 - RNA, 19 nt, Artificial Sequence
  Description of Artificial Sequence: Synthetic oligonucleotide
gaggaaaagggcucccagc

SEQ ID NO: 2909824 - RNA, 19 nt, Artificial Sequence
  Description of Artificial Sequence: Synthetic oligonucleotide
gggaacgggagccucaugg

SEQ ID NO: 2909825 - RNA, 19 nt, Artificial Sequence
  Description of Artificial Sequence: Synthetic oligonucleotide
auuguacucgauccuguca

SEQ ID NO: 2909826 - RNA, 19 nt, Artificial Sequence
  Description of Artificial Sequence: Synthetic oligonucleotide
agaaggcagggguagggag

SEQ ID NO: 2909827 - RNA, 19 nt, Artificial Sequence
  Description of Artificial Sequence: Synthetic oligonucleotide
ggugucuauccaaagaugc

SEQ ID NO: 2909828 - RNA, 19 nt, Artificial Sequence
  Description of Artificial Sequence: Synthetic oligonucleotide
ugugggaugggaggaaaag

SEQ ID NO: 2909829 - RNA, 19 nt, Artificial Sequence
  Description of Artificial Sequence: Synthetic oligonucleotide
uuccacauuguacucgauc

SEQ ID NO: 2909830 - RNA, 19 nt, Artificial Sequence
  Description of Artificial Sequence: Synthetic oligonucleotide
caaggagacccauccagag

SEQ ID NO: 2909831 - RNA, 19 nt, Artificial Sequence
  Description of Artificial Sequence: Synthetic oligonucleotide
agggcaacccagcuaggcg

SEQ ID NO: 2909832 - RNA, 19 nt, Artificial Sequence
  Description of Artificial Sequence: Synthetic oligonucleotide
uuggugucagacacagccc

SEQ ID NO: 2909833 - RNA, 19 nt, Artificial Sequence
  Description of Artificial Sequence: Synthetic oligonucleotide
aaggagacccauccagagu

SEQ ID NO: 2909834 - RNA, 19 nt, Artificial Sequence
  Description of Artificial Sequence: Synthetic oligonucleotide
gacacacacugucacaaga

SEQ ID NO: 2909835 - RNA, 19 nt, Artificial Sequence
  Description of Artificial Sequence: Synthetic oligonucleotide
augacaaugcccagaauca

SEQ ID NO: 2909836 - RNA, 19 nt, Artificial Sequence
  Description of Artificial Sequence: Synthetic oligonucleotide
ugaucuucuuccugcgcgc

SEQ ID NO: 2909837 - RNA, 19 nt, Artificial Sequence
  Description of Artificial Sequence: Synthetic oligonucleotide
uccuguacagacacacacu

SEQ ID NO: 2909838 - RNA, 19 nt, Artificial Sequence
  Description of Artificial Sequence: Synthetic oligonucleotide
gucacaagaucaugcacac

SEQ ID NO: 2909839 - RNA, 19 nt, Artificial Sequence
  Description of Artificial Sequence: Synthetic oligonucleotide
guacuugacggccuucuug

SEQ ID NO: 2909840 - RNA, 19 nt, Artificial Sequence
  Description of Artificial Sequence: Synthetic oligonucleotide
auccagaguggagaggugg

SEQ ID NO: 2909841 - RNA, 19 nt, Artificial Sequence
  Description of Artificial Sequence: Synthetic oligonucleotide
aacgggagccucauggcag

SEQ ID NO: 2909842 - RNA, 19 nt, Artificial Sequence
  Description of Artificial Sequence: Synthetic oligonucleotide
caagaucaugcacacggac

SEQ ID NO: 2909843 - RNA, 19 nt, Artificial Sequence
  Description of Artificial Sequence: Synthetic oligonucleotide
ugaucaugaucuucuuccu

SEQ ID NO: 2909844 - RNA, 19 nt, Artificial Sequence
  Description of Artificial Sequence: Synthetic oligonucleotide
cacacagcaaaugaugauc

SEQ ID NO: 2909845 - RNA, 19 nt, Artificial Sequence
  Description of Artificial Sequence: Synthetic oligonucleotide
gggagggcaacccagcuag

SEQ ID NO: 2909846 - RNA, 19 nt, Artificial Sequence
  Description of Artificial Sequence: Synthetic oligonucleotide
ucuuccugcgcgcuuugcu

SEQ ID NO: 2909847 - RNA, 19 nt, Artificial Sequence
  Description of Artificial Sequence: Synthetic oligonucleotide
ucugccuccuguacagaca

SEQ ID NO: 2909848 - RNA, 19 nt, Artificial Sequence
  Description of Artificial Sequence: Synthetic oligonucleotide
cacggcguguuccacauug

SEQ ID NO: 2909849 - RNA, 19 nt, Artificial Sequence
  Description of Artificial Sequence: Synthetic oligonucleotide
ggagccucauggcagagag

SEQ ID NO: 2909850 - RNA, 19 nt, Artificial Sequence
  Description of Artificial Sequence: Synthetic oligonucleotide
ugcucugguacuugacggc

SEQ ID NO: 2909851 - RNA, 19 nt, Artificial Sequence
  Description of Artificial Sequence: Synthetic oligonucleotide
aaaugaugaucaugaucuu

SEQ ID NO: 2909852 - RNA, 19 nt, Artificial Sequence
  Description of Artificial Sequence: Synthetic oligonucleotide
acacacugucacaagauca

SEQ ID NO: 2909853 - RNA, 19 nt, Artificial Sequence
  Description of Artificial Sequence: Synthetic oligonucleotide
uuugauccugauccugcuc

SEQ ID NO: 2909854 - RNA, 19 nt, Artificial Sequence
  Description of Artificial Sequence: Synthetic oligonucleotide
gugggaugggaggaaaagg

SEQ ID NO: 2909855 - RNA, 19 nt, Artificial Sequence
  Description of Artificial Sequence: Synthetic oligonucleotide
acacagcaaaugaugauca

SEQ ID NO: 2909856 - RNA, 19 nt, Artificial Sequence
  Description of Artificial Sequence: Synthetic oligonucleotide
ccuucuuggugucagacac

SEQ ID NO: 2909857 - RNA, 19 nt, Artificial Sequence
  Description of Artificial Sequence: Synthetic oligonucleotide
gaugggaggaaaagggcuc

SEQ ID NO: 2909858 - RNA, 19 nt, Artificial Sequence
  Description of Artificial Sequence: Synthetic oligonucleotide
gucuauccaaagaugcccc

SEQ ID NO: 2909859 - RNA, 19 nt, Artificial Sequence
  Description of Artificial Sequence: Synthetic oligonucleotide
acggacacggcuuggggca

SEQ ID NO: 2909860 - RNA, 19 nt, Artificial Sequence
  Description of Artificial Sequence: Synthetic oligonucleotide
aacccagcuaggcgcagca

SEQ ID NO: 2909861 - RNA, 19 nt, Artificial Sequence
  Description of Artificial Sequence: Synthetic oligonucleotide
cagaaucacacagcaaaug

SEQ ID NO: 2909862 - RNA, 19 nt, Artificial Sequence
  Description of Artificial Sequence: Synthetic oligonucleotide
cugucacaagaucaugcac

SEQ ID NO: 2909863 - RNA, 19 nt, Artificial Sequence
  Description of Artificial Sequence: Synthetic oligonucleotide
gauccugcuccccucucug

SEQ ID NO: 2909864 - RNA, 19 nt, Artificial Sequence
  Description of Artificial Sequence: Synthetic oligonucleotide
cuugacggccuucuuggug

SEQ ID NO: 2909865 - RNA, 19 nt, Artificial Sequence
  Description of Artificial Sequence: Synthetic oligonucleotide
uccagaguggagagguggu

SEQ ID NO: 2909866 - RNA, 19 nt, Artificial Sequence
  Description of Artificial Sequence: Synthetic oligonucleotide
cacauuguacucgauccug

SEQ ID NO: 2909867 - RNA, 19 nt, Artificial Sequence
  Description of Artificial Sequence: Synthetic oligonucleotide
guguuccacauuguacucg

SEQ ID NO: 2909868 - RNA, 19 nt, Artificial Sequence
  Description of Artificial Sequence: Synthetic oligonucleotide
cucccagccagaaggcagg

SEQ ID NO: 2909869 - RNA, 19 nt, Artificial Sequence
  Description of Artificial Sequence: Synthetic oligonucleotide
guggagaggugguuggggc

SEQ ID NO: 2909870 - RNA, 19 nt, Artificial Sequence
  Description of Artificial Sequence: Synthetic oligonucleotide
cucauggcagagagggagc

SEQ ID NO: 2909871 - RNA, 19 nt, Artificial Sequence
  Description of Artificial Sequence: Synthetic oligonucleotide
cacggacacggcuuggggc

SEQ ID NO: 2909872 - RNA, 19 nt, Artificial Sequence
  Description of Artificial Sequence: Synthetic oligonucleotide
uguccccagccccuccugg

SEQ ID NO: 2909873 - RNA, 19 nt, Artificial Sequence
  Description of Artificial Sequence: Synthetic oligonucleotide
ugauccugauccugcuccc

SEQ ID NO: 2909874 - RNA, 19 nt, Artificial Sequence
  Description of Artificial Sequence: Synthetic oligonucleotide
acacggacacggcuugggg

SEQ ID NO: 2909875 - RNA, 19 nt, Artificial Sequence
  Description of Artificial Sequence: Synthetic oligonucleotide
aggugguuggggcuggugu

SEQ ID NO: 2909876 - RNA, 19 nt, Artificial Sequence
  Description of Artificial Sequence: Synthetic oligonucleotide
gacaaugcccagaaucaca

SEQ ID NO: 2909877 - RNA, 19 nt, Artificial Sequence
  Description of Artificial Sequence: Synthetic oligonucleotide
agagggagcagugugggau

SEQ ID NO: 2909878 - RNA, 19 nt, Artificial Sequence
  Description of Artificial Sequence: Synthetic oligonucleotide
agggguagggagggcaacc

SEQ ID NO: 2909879 - RNA, 19 nt, Artificial Sequence
  Description of Artificial Sequence: Synthetic oligonucleotide
cuuugcucugguacuugac

SEQ ID NO: 2909880 - RNA, 19 nt, Artificial Sequence
  Description of Artificial Sequence: Synthetic oligonucleotide
uuuccacguaguccacggc

SEQ ID NO: 2909881 - RNA, 19 nt, Artificial Sequence
  Description of Artificial Sequence: Synthetic oligonucleotide
ccuguacagacacacacug

SEQ ID NO: 2909882 - RNA, 19 nt, Artificial Sequence
  Description of Artificial Sequence: Synthetic oligonucleotide
ugauccugcuccccucucu

SEQ ID NO: 2909883 - RNA, 19 nt, Artificial Sequence
  Description of Artificial Sequence: Synthetic oligonucleotide
gaucaugcacacggacacg

SEQ ID NO: 2909884 - RNA, 19 nt, Artificial Sequence
  Description of Artificial Sequence: Synthetic oligonucleotide
ugguuugauccugauccug

SEQ ID NO: 2909885 - RNA, 19 nt, Artificial Sequence
  Description of Artificial Sequence: Synthetic oligonucleotide
agcuaggcgcagcagccag

SEQ ID NO: 2909886 - RNA, 19 nt, Artificial Sequence
  Description of Artificial Sequence: Synthetic oligonucleotide
cacacacugucacaagauc

SEQ ID NO: 2909887 - RNA, 19 nt, Artificial Sequence
  Description of Artificial Sequence: Synthetic oligonucleotide
ucacaagaucaugcacacg

SEQ ID NO: 2909888 - RNA, 19 nt, Artificial Sequence
  Description of Artificial Sequence: Synthetic oligonucleotide
cauuguacucgauccuguc

SEQ ID NO: 2909889 - RNA, 19 nt, Artificial Sequence
  Description of Artificial Sequence: Synthetic oligonucleotide
gaacgggagccucauggca

SEQ ID NO: 2909890 - RNA, 19 nt, Artificial Sequence
  Description of Artificial Sequence: Synthetic oligonucleotide
ugacaaugcccagaaucac

SEQ ID NO: 2909891 - RNA, 19 nt, Artificial Sequence
  Description of Artificial Sequence: Synthetic oligonucleotide
acccauccagaguggagag

SEQ ID NO: 2909892 - RNA, 19 nt, Artificial Sequence
  Description of Artificial Sequence: Synthetic oligonucleotide
gacccauccagaguggaga

SEQ ID NO: 2909893 - RNA, 19 nt, Artificial Sequence
  Description of Artificial Sequence: Synthetic oligonucleotide
gugucuauccaaagaugcc

SEQ ID NO: 2909894 - RNA, 19 nt, Artificial Sequence
  Description of Artificial Sequence: Synthetic oligonucleotide
aagggcucccagccagaag

SEQ ID NO: 2909895 - RNA, 19 nt, Artificial Sequence
  Description of Artificial Sequence: Synthetic oligonucleotide
cuuccugcgcgcuuugcuc

SEQ ID NO: 2909896 - RNA, 19 nt, Artificial Sequence
  Description of Artificial Sequence: Synthetic oligonucleotide
ggaggaaaagggcucccag

SEQ ID NO: 2909897 - RNA, 19 nt, Artificial Sequence
  Description of Artificial Sequence: Synthetic oligonucleotide
cucugccuccuguacagac

SEQ ID NO: 2909898 - RNA, 19 nt, Artificial Sequence
  Description of Artificial Sequence: Synthetic oligonucleotide
cacggcuuggggcagggug

SEQ ID NO: 2909899 - RNA, 19 nt, Artificial Sequence
  Description of Artificial Sequence: Synthetic oligonucleotide
cuaggcgcagcagccaggg

SEQ ID NO: 2909900 - RNA, 19 nt, Artificial Sequence
  Description of Artificial Sequence: Synthetic oligonucleotide
gagggagcagugugggaug

SEQ ID NO: 2909901 - RNA, 19 nt, Artificial Sequence
  Description of Artificial Sequence: Synthetic oligonucleotide
guggaggcgaugacaaugc

SEQ ID NO: 2909902 - RNA, 19 nt, Artificial Sequence
  Description of Artificial Sequence: Synthetic oligonucleotide
uccugguuugauccugauc

SEQ ID NO: 2909903 - RNA, 19 nt, Artificial Sequence
  Description of Artificial Sequence: Synthetic oligonucleotide
uuccugcgcgcuuugcucu

SEQ ID NO: 2909904 - RNA, 19 nt, Artificial Sequence
  Description of Artificial Sequence: Synthetic oligonucleotide
uggagaggugguuggggcu

SEQ ID NO: 2909905 - RNA, 19 nt, Artificial Sequence
  Description of Artificial Sequence: Synthetic oligonucleotide
gguggaggcgaugacaaug

SEQ ID NO: 2909906 - RNA, 19 nt, Artificial Sequence
  Description of Artificial Sequence: Synthetic oligonucleotide
ucauggcagagagggagca

SEQ ID NO: 2909907 - RNA, 19 nt, Artificial Sequence
  Description of Artificial Sequence: Synthetic oligonucleotide
gguuugauccugauccugc

SEQ ID NO: 2909908 - RNA, 19 nt, Artificial Sequence
  Description of Artificial Sequence: Synthetic oligonucleotide
cuugcccacacugacccug

SEQ ID NO: 2909909 - RNA, 19 nt, Artificial Sequence
  Description of Artificial Sequence: Synthetic oligonucleotide
gcagagagggagcagugug

SEQ ID NO: 2909910 - RNA, 19 nt, Artificial Sequence
  Description of Artificial Sequence: Synthetic oligonucleotide
uagggagggcaacccagcu

SEQ ID NO: 2909911 - RNA, 19 nt, Artificial Sequence
  Description of Artificial Sequence: Synthetic oligonucleotide
uggaggcgaugacaaugcc

SEQ ID NO: 2909912 - RNA, 19 nt, Artificial Sequence
  Description of Artificial Sequence: Synthetic oligonucleotide
gagggcaacccagcuaggc

SEQ ID NO: 2909913 - RNA, 19 nt, Artificial Sequence
  Description of Artificial Sequence: Synthetic oligonucleotide
uaguccacggcguguucca

SEQ ID NO: 2909914 - RNA, 19 nt, Artificial Sequence
  Description of Artificial Sequence: Synthetic oligonucleotide
cccagaaucacacagcaaa

SEQ ID NO: 2909915 - RNA, 19 nt, Artificial Sequence
  Description of Artificial Sequence: Synthetic oligonucleotide
gguggugggaacgggagcc

SEQ ID NO: 2909916 - RNA, 19 nt, Artificial Sequence
  Description of Artificial Sequence: Synthetic oligonucleotide
agccccuccugguuugauc

SEQ ID NO: 2909917 - RNA, 19 nt, Artificial Sequence
  Description of Artificial Sequence: Synthetic oligonucleotide
gacacagcccuuuccacgu

SEQ ID NO: 2909918 - RNA, 19 nt, Artificial Sequence
  Description of Artificial Sequence: Synthetic oligonucleotide
ugucagacacagcccuuuc

SEQ ID NO: 2909919 - RNA, 19 nt, Artificial Sequence
  Description of Artificial Sequence: Synthetic oligonucleotide
gggcaacccagcuaggcgc

SEQ ID NO: 2909920 - RNA, 19 nt, Artificial Sequence
  Description of Artificial Sequence: Synthetic oligonucleotide
cagacacagcccuuuccac

SEQ ID NO: 2909921 - RNA, 19 nt, Artificial Sequence
  Description of Artificial Sequence: Synthetic oligonucleotide
cccacacugacccuguccc

SEQ ID NO: 2909922 - RNA, 19 nt, Artificial Sequence
  Description of Artificial Sequence: Synthetic oligonucleotide
ugaugaucaugaucuucuu

SEQ ID NO: 2909923 - RNA, 19 nt, Artificial Sequence
  Description of Artificial Sequence: Synthetic oligonucleotide
agccagaaggcagggguag

SEQ ID NO: 2909924 - RNA, 19 nt, Artificial Sequence
  Description of Artificial Sequence: Synthetic oligonucleotide
uccacggcguguuccacau

SEQ ID NO: 2909925 - RNA, 19 nt, Artificial Sequence
  Description of Artificial Sequence: Synthetic oligonucleotide
ucuuggugucagacacagc

SEQ ID NO: 2909926 - RNA, 19 nt, Artificial Sequence
  Description of Artificial Sequence: Synthetic oligonucleotide
uggggcuggugucuaucca

SEQ ID NO: 2909927 - RNA, 19 nt, Artificial Sequence
  Description of Artificial Sequence: Synthetic oligonucleotide
acggcuuggggcagggugg

SEQ ID NO: 2909928 - RNA, 19 nt, Artificial Sequence
  Description of Artificial Sequence: Synthetic oligonucleotide
gguagggagggcaacccag

SEQ ID NO: 2909929 - RNA, 19 nt, Artificial Sequence
  Description of Artificial Sequence: Synthetic oligonucleotide
uguacucgauccugucaau

SEQ ID NO: 2909930 - RNA, 19 nt, Artificial Sequence
  Description of Artificial Sequence: Synthetic oligonucleotide
acauuguacucgauccugu

SEQ ID NO: 2909931 - RNA, 19 nt, Artificial Sequence
  Description of Artificial Sequence: Synthetic oligonucleotide
cacagcccuuuccacguag

SEQ ID NO: 2909932 - RNA, 19 nt, Artificial Sequence
  Description of Artificial Sequence: Synthetic oligonucleotide
gaaucacacagcaaaugau

SEQ ID NO: 2909933 - RNA, 19 nt, Artificial Sequence
  Description of Artificial Sequence: Synthetic oligonucleotide
acacugacccuguccccag

SEQ ID NO: 2909934 - RNA, 19 nt, Artificial Sequence
  Description of Artificial Sequence: Synthetic oligonucleotide
ccucauggcagagagggag

SEQ ID NO: 2909935 - RNA, 19 nt, Artificial Sequence
  Description of Artificial Sequence: Synthetic oligonucleotide
gccccuccugguuugaucc

SEQ ID NO: 2909936 - RNA, 19 nt, Artificial Sequence
  Description of Artificial Sequence: Synthetic oligonucleotide
gcuggugucuauccaaaga

SEQ ID NO: 2909937 - RNA, 19 nt, Artificial Sequence
  Description of Artificial Sequence: Synthetic oligonucleotide
cuggugucuauccaaagau

SEQ ID NO: 2909938 - RNA, 19 nt, Artificial Sequence
  Description of Artificial Sequence: Synthetic oligonucleotide
ggaacgggagccucauggc

SEQ ID NO: 2909939 - RNA, 19 nt, Artificial Sequence
  Description of Artificial Sequence: Synthetic oligonucleotide
uccccucucugccuccugu

SEQ ID NO: 2909940 - RNA, 19 nt, Artificial Sequence
  Description of Artificial Sequence: Synthetic oligonucleotide
gauccugauccugcucccc

SEQ ID NO: 2909941 - RNA, 19 nt, Artificial Sequence
  Description of Artificial Sequence: Synthetic oligonucleotide
cacacggacacggcuuggg

SEQ ID NO: 2909942 - RNA, 19 nt, Artificial Sequence
  Description of Artificial Sequence: Synthetic oligonucleotide
acacacacugucacaagau

SEQ ID NO: 2909943 - RNA, 19 nt, Artificial Sequence
  Description of Artificial Sequence: Synthetic oligonucleotide
ggaggcgaugacaaugccc

SEQ ID NO: 2909944 - RNA, 19 nt, Artificial Sequence
  Description of Artificial Sequence: Synthetic oligonucleotide
guacagacacacacuguca

SEQ ID NO: 2909945 - RNA, 19 nt, Artificial Sequence
  Description of Artificial Sequence: Synthetic oligonucleotide
agggagcagugugggaugg

SEQ ID NO: 2909946 - RNA, 19 nt, Artificial Sequence
  Description of Artificial Sequence: Synthetic oligonucleotide
ccagcuaggcgcagcagcc

SEQ ID NO: 2909947 - RNA, 19 nt, Artificial Sequence
  Description of Artificial Sequence: Synthetic oligonucleotide
acggccuucuuggugucag

SEQ ID NO: 2909948 - RNA, 19 nt, Artificial Sequence
  Description of Artificial Sequence: Synthetic oligonucleotide
aaagggcucccagccagaa

SEQ ID NO: 2909949 - RNA, 19 nt, Artificial Sequence
  Description of Artificial Sequence: Synthetic oligonucleotide
guagggagggcaacccagc

SEQ ID NO: 2909950 - RNA, 19 nt, Artificial Sequence
  Description of Artificial Sequence: Synthetic oligonucleotide
acaagaucaugcacacgga

SEQ ID NO: 2909951 - RNA, 19 nt, Artificial Sequence
  Description of Artificial Sequence: Synthetic oligonucleotide
aggguggugggaacgggag

SEQ ID NO: 2909952 - RNA, 19 nt, Artificial Sequence
  Description of Artificial Sequence: Synthetic oligonucleotide
aaaagggcucccagccaga

SEQ ID NO: 2909953 - RNA, 19 nt, Artificial Sequence
  Description of Artificial Sequence: Synthetic oligonucleotide
gccaggggccuccucaagg

SEQ ID NO: 2909954 - RNA, 19 nt, Artificial Sequence
  Description of Artificial Sequence: Synthetic oligonucleotide
gcuuggggcaggguggugg

SEQ ID NO: 2909955 - RNA, 19 nt, Artificial Sequence
  Description of Artificial Sequence: Synthetic oligonucleotide
gcguguuccacauuguacu

SEQ ID NO: 2909956 - RNA, 19 nt, Artificial Sequence
  Description of Artificial Sequence: Synthetic oligonucleotide
gacacggcuuggggcaggg

SEQ ID NO: 2909957 - RNA, 19 nt, Artificial Sequence
  Description of Artificial Sequence: Synthetic oligonucleotide
gggaugggaggaaaagggc

SEQ ID NO: 2909958 - RNA, 19 nt, Artificial Sequence
  Description of Artificial Sequence: Synthetic oligonucleotide
agacccauccagaguggag

SEQ ID NO: 2909959 - RNA, 19 nt, Artificial Sequence
  Description of Artificial Sequence: Synthetic oligonucleotide
ggccuccucaaggagaccc

SEQ ID NO: 2909960 - RNA, 19 nt, Artificial Sequence
  Description of Artificial Sequence: Synthetic oligonucleotide
acuugacggccuucuuggu

SEQ ID NO: 2909961 - RNA, 19 nt, Artificial Sequence
  Description of Artificial Sequence: Synthetic oligonucleotide
uccugauccugcuccccuc

SEQ ID NO: 2909962 - RNA, 19 nt, Artificial Sequence
  Description of Artificial Sequence: Synthetic oligonucleotide
ugggaggaaaagggcuccc

SEQ ID NO: 2909963 - RNA, 19 nt, Artificial Sequence
  Description of Artificial Sequence: Synthetic oligonucleotide
uaggcgcagcagccagggg

SEQ ID NO: 2909964 - RNA, 19 nt, Artificial Sequence
  Description of Artificial Sequence: Synthetic oligonucleotide
ggcguguuccacauuguac

SEQ ID NO: 2909965 - RNA, 19 nt, Artificial Sequence
  Description of Artificial Sequence: Synthetic oligonucleotide
cauccagaguggagaggug

SEQ ID NO: 2909966 - RNA, 19 nt, Artificial Sequence
  Description of Artificial Sequence: Synthetic oligonucleotide
acgggagccucauggcaga

SEQ ID NO: 2909967 - RNA, 19 nt, Artificial Sequence
  Description of Artificial Sequence: Synthetic oligonucleotide
cuucuuggugucagacaca

SEQ ID NO: 2909968 - RNA, 19 nt, Artificial Sequence
  Description of Artificial Sequence: Synthetic oligonucleotide
guuugauccugauccugcu

SEQ ID NO: 2909969 - RNA, 19 nt, Artificial Sequence
  Description of Artificial Sequence: Synthetic oligonucleotide
ucccagccagaaggcaggg

SEQ ID NO: 2909970 - RNA, 19 nt, Artificial Sequence
  Description of Artificial Sequence: Synthetic oligonucleotide
cacacugucacaagaucau

SEQ ID NO: 2909971 - RNA, 19 nt, Artificial Sequence
  Description of Artificial Sequence: Synthetic oligonucleotide
cccagcuaggcgcagcagc

SEQ ID NO: 2909972 - RNA, 19 nt, Artificial Sequence
  Description of Artificial Sequence: Synthetic oligonucleotide
agugugggaugggaggaaa

SEQ ID NO: 2909973 - RNA, 19 nt, Artificial Sequence
  Description of Artificial Sequence: Synthetic oligonucleotide
ggugguuggggcugguguc

SEQ ID NO: 2909974 - RNA, 19 nt, Artificial Sequence
  Description of Artificial Sequence: Synthetic oligonucleotide
aggcgaugacaaugcccag

SEQ ID NO: 2909975 - RNA, 19 nt, Artificial Sequence
  Description of Artificial Sequence: Synthetic oligonucleotide
ggcuggugucuauccaaag

SEQ ID NO: 2909976 - RNA, 19 nt, Artificial Sequence
  Description of Artificial Sequence: Synthetic oligonucleotide
cauggcagagagggagcag

SEQ ID NO: 2909977 - RNA, 19 nt, Artificial Sequence
  Description of Artificial Sequence: Synthetic oligonucleotide
uccugcgcgcuuugcucug

SEQ ID NO: 2909978 - RNA, 19 nt, Artificial Sequence
  Description of Artificial Sequence: Synthetic oligonucleotide
gcgaugacaaugcccagaa

SEQ ID NO: 2909979 - RNA, 19 nt, Artificial Sequence
  Description of Artificial Sequence: Synthetic oligonucleotide
gccuccuguacagacacac

SEQ ID NO: 2909980 - RNA, 19 nt, Artificial Sequence
  Description of Artificial Sequence: Synthetic oligonucleotide
gcgcgcuuugcucugguac

SEQ ID NO: 2909981 - RNA, 19 nt, Artificial Sequence
  Description of Artificial Sequence: Synthetic oligonucleotide
gcucugguacuugacggcc

SEQ ID NO: 2909982 - RNA, 19 nt, Artificial Sequence
  Description of Artificial Sequence: Synthetic oligonucleotide
aguccacggcguguuccac

SEQ ID NO: 2909983 - RNA, 19 nt, Artificial Sequence
  Description of Artificial Sequence: Synthetic oligonucleotide
ggagaggugguuggggcug

SEQ ID NO: 2909984 - RNA, 19 nt, Artificial Sequence
  Description of Artificial Sequence: Synthetic oligonucleotide
gagacccauccagagugga

SEQ ID NO: 2909985 - RNA, 19 nt, Artificial Sequence
  Description of Artificial Sequence: Synthetic oligonucleotide
ugggaacgggagccucaug

SEQ ID NO: 2909986 - RNA, 19 nt, Artificial Sequence
  Description of Artificial Sequence: Synthetic oligonucleotide
cacacugacccugucccca

SEQ ID NO: 2909987 - RNA, 19 nt, Artificial Sequence
  Description of Artificial Sequence: Synthetic oligonucleotide
agggagggcaacccagcua

SEQ ID NO: 2909988 - RNA, 19 nt, Artificial Sequence
  Description of Artificial Sequence: Synthetic oligonucleotide
caggggccuccucaaggag

SEQ ID NO: 2909989 - RNA, 19 nt, Artificial Sequence
  Description of Artificial Sequence: Synthetic oligonucleotide
uucuuccugcgcgcuuugc

SEQ ID NO: 2909990 - RNA, 19 nt, Artificial Sequence
  Description of Artificial Sequence: Synthetic oligonucleotide
cagcccuuuccacguaguc

SEQ ID NO: 2909991 - RNA, 19 nt, Artificial Sequence
  Description of Artificial Sequence: Synthetic oligonucleotide
caugcacacggacacggcu

SEQ ID NO: 2909992 - RNA, 19 nt, Artificial Sequence
  Description of Artificial Sequence: Synthetic oligonucleotide
ccagaaggcagggguaggg

SEQ ID NO: 2909993 - RNA, 19 nt, Artificial Sequence
  Description of Artificial Sequence: Synthetic oligonucleotide
caggguggugggaacggga

SEQ ID NO: 2909994 - RNA, 19 nt, Artificial Sequence
  Description of Artificial Sequence: Synthetic oligonucleotide
agccaggggccuccucaag

SEQ ID NO: 2909995 - RNA, 19 nt, Artificial Sequence
  Description of Artificial Sequence: Synthetic oligonucleotide
caaugcccagaaucacaca

SEQ ID NO: 2909996 - RNA, 19 nt, Artificial Sequence
  Description of Artificial Sequence: Synthetic oligonucleotide
guuggggcuggugucuauc

SEQ ID NO: 2909997 - RNA, 19 nt, Artificial Sequence
  Description of Artificial Sequence: Synthetic oligonucleotide
ggagacccauccagagugg

SEQ ID NO: 2909998 - RNA, 19 nt, Artificial Sequence
  Description of Artificial Sequence: Synthetic oligonucleotide
caacccagcuaggcgcagc

SEQ ID NO: 2909999 - RNA, 19 nt, Artificial Sequence
  Description of Artificial Sequence: Synthetic oligonucleotide
gcuuugcucugguacuuga

SEQ ID NO: 2910000 - RNA, 19 nt, Artificial Sequence
  Description of Artificial Sequence: Synthetic oligonucleotide
gcccacacugacccugucc

SEQ ID NO: 2910001 - RNA, 19 nt, Artificial Sequence
  Description of Artificial Sequence: Synthetic oligonucleotide
ugcuccccucucugccucc

SEQ ID NO: 2910002 - RNA, 19 nt, Artificial Sequence
  Description of Artificial Sequence: Synthetic oligonucleotide
guccacggcguguuccaca

SEQ ID NO: 2910003 - RNA, 19 nt, Artificial Sequence
  Description of Artificial Sequence: Synthetic oligonucleotide
agcagccaggggccuccuc

SEQ ID NO: 2910004 - RNA, 19 nt, Artificial Sequence
  Description of Artificial Sequence: Synthetic oligonucleotide
augcacacggacacggcuu

SEQ ID NO: 2910005 - RNA, 19 nt, Artificial Sequence
  Description of Artificial Sequence: Synthetic oligonucleotide
ucucugccuccuguacaga

SEQ ID NO: 2910006 - RNA, 19 nt, Artificial Sequence
  Description of Artificial Sequence: Synthetic oligonucleotide
ggcgcagcagccaggggcc

SEQ ID NO: 2910007 - RNA, 19 nt, Artificial Sequence
  Description of Artificial Sequence: Synthetic oligonucleotide
ugguggaggcgaugacaau

SEQ ID NO: 2910008 - RNA, 19 nt, Artificial Sequence
  Description of Artificial Sequence: Synthetic oligonucleotide
uccccagccccuccugguu

SEQ ID NO: 2910009 - RNA, 19 nt, Artificial Sequence
  Description of Artificial Sequence: Synthetic oligonucleotide
ggagcagugugggauggga

SEQ ID NO: 2910010 - RNA, 19 nt, Artificial Sequence
  Description of Artificial Sequence: Synthetic oligonucleotide
cacugacccuguccccagc

SEQ ID NO: 2910011 - RNA, 19 nt, Artificial Sequence
  Description of Artificial Sequence: Synthetic oligonucleotide
ugacggccuucuugguguc

SEQ ID NO: 2910012 - RNA, 19 nt, Artificial Sequence
  Description of Artificial Sequence: Synthetic oligonucleotide
ggggcuggugucuauccaa

SEQ ID NO: 2910013 - RNA, 19 nt, Artificial Sequence
  Description of Artificial Sequence: Synthetic oligonucleotide
cuguacagacacacacugu

SEQ ID NO: 2910014 - RNA, 19 nt, Artificial Sequence
  Description of Artificial Sequence: Synthetic oligonucleotide
ggccuucuuggugucagac

SEQ ID NO: 2910015 - RNA, 19 nt, Artificial Sequence
  Description of Artificial Sequence: Synthetic oligonucleotide
acguaguccacggcguguu

SEQ ID NO: 2910016 - RNA, 19 nt, Artificial Sequence
  Description of Artificial Sequence: Synthetic oligonucleotide
cugauccugcuccccucuc

SEQ ID NO: 2910017 - RNA, 19 nt, Artificial Sequence
  Description of Artificial Sequence: Synthetic oligonucleotide
ccuuuccacguaguccacg

SEQ ID NO: 2910018 - RNA, 19 nt, Artificial Sequence
  Description of Artificial Sequence: Synthetic oligonucleotide
cugcuccccucucugccuc

SEQ ID NO: 2910019 - RNA, 19 nt, Artificial Sequence
  Description of Artificial Sequence: Synthetic oligonucleotide
gccuucuuggugucagaca

SEQ ID NO: 2910020 - RNA, 19 nt, Artificial Sequence
  Description of Artificial Sequence: Synthetic oligonucleotide
cagaaggcagggguaggga

SEQ ID NO: 2910021 - RNA, 19 nt, Artificial Sequence
  Description of Artificial Sequence: Synthetic oligonucleotide
ggggccuccucaaggagac

SEQ ID NO: 2910022 - RNA, 19 nt, Artificial Sequence
  Description of Artificial Sequence: Synthetic oligonucleotide
gggguagggagggcaaccc

SEQ ID NO: 2910023 - RNA, 19 nt, Artificial Sequence
  Description of Artificial Sequence: Synthetic oligonucleotide
gcagugugggaugggagga

SEQ ID NO: 2910024 - RNA, 19 nt, Artificial Sequence
  Description of Artificial Sequence: Synthetic oligonucleotide
gaucuucuuccugcgcgcu

SEQ ID NO: 2910025 - RNA, 19 nt, Artificial Sequence
  Description of Artificial Sequence: Synthetic oligonucleotide
gggcaggguggugggaacg

SEQ ID NO: 2910026 - RNA, 19 nt, Artificial Sequence
  Description of Artificial Sequence: Synthetic oligonucleotide
ugcgcgcuuugcucuggua

SEQ ID NO: 2910027 - RNA, 19 nt, Artificial Sequence
  Description of Artificial Sequence: Synthetic oligonucleotide
cuguccccagccccuccug

SEQ ID NO: 2910028 - RNA, 19 nt, Artificial Sequence
  Description of Artificial Sequence: Synthetic oligonucleotide
cagggguagggagggcaac

SEQ ID NO: 2910029 - RNA, 19 nt, Artificial Sequence
  Description of Artificial Sequence: Synthetic oligonucleotide
cguguuccacauuguacuc

SEQ ID NO: 2910030 - RNA, 19 nt, Artificial Sequence
  Description of Artificial Sequence: Synthetic oligonucleotide
gcuaggcgcagcagccagg

SEQ ID NO: 2910031 - RNA, 19 nt, Artificial Sequence
  Description of Artificial Sequence: Synthetic oligonucleotide
gccagaaggcagggguagg

SEQ ID NO: 2910032 - RNA, 19 nt, Artificial Sequence
  Description of Artificial Sequence: Synthetic oligonucleotide
ggcagggguagggagggca

SEQ ID NO: 2910033 - RNA, 19 nt, Artificial Sequence
  Description of Artificial Sequence: Synthetic oligonucleotide
cugguacuugacggccuuc

SEQ ID NO: 2910034 - RNA, 19 nt, Artificial Sequence
  Description of Artificial Sequence: Synthetic oligonucleotide
ccacacugacccugucccc

SEQ ID NO: 2910035 - RNA, 19 nt, Artificial Sequence
  Description of Artificial Sequence: Synthetic oligonucleotide
cagccagaaggcaggggua

SEQ ID NO: 2910036 - RNA, 19 nt, Artificial Sequence
  Description of Artificial Sequence: Synthetic oligonucleotide
acccagcuaggcgcagcag

SEQ ID NO: 2910037 - RNA, 19 nt, Artificial Sequence
  Description of Artificial Sequence: Synthetic oligonucleotide
ggguagggagggcaaccca

SEQ ID NO: 2910038 - RNA, 19 nt, Artificial Sequence
  Description of Artificial Sequence: Synthetic oligonucleotide
gugugggaugggaggaaaa

SEQ ID NO: 2910039 - RNA, 19 nt, Artificial Sequence
  Description of Artificial Sequence: Synthetic oligonucleotide
acccuguccccagccccuc

SEQ ID NO: 2910040 - RNA, 19 nt, Artificial Sequence
  Description of Artificial Sequence: Synthetic oligonucleotide
cacagcaaaugaugaucau

SEQ ID NO: 2910041 - RNA, 19 nt, Artificial Sequence
  Description of Artificial Sequence: Synthetic oligonucleotide
acacagcccuuuccacgua

SEQ ID NO: 2910042 - RNA, 19 nt, Artificial Sequence
  Description of Artificial Sequence: Synthetic oligonucleotide
acggcguguuccacauugu

SEQ ID NO: 2910043 - RNA, 19 nt, Artificial Sequence
  Description of Artificial Sequence: Synthetic oligonucleotide
ccaggggccuccucaagga

SEQ ID NO: 2910044 - RNA, 19 nt, Artificial Sequence
  Description of Artificial Sequence: Synthetic oligonucleotide
ccauccagaguggagaggu

SEQ ID NO: 2910045 - RNA, 19 nt, Artificial Sequence
  Description of Artificial Sequence: Synthetic oligonucleotide
gggagcagugugggauggg

SEQ ID NO: 2910046 - RNA, 19 nt, Artificial Sequence
  Description of Artificial Sequence: Synthetic oligonucleotide
cccucucugccuccuguac

SEQ ID NO: 2910047 - RNA, 19 nt, Artificial Sequence
  Description of Artificial Sequence: Synthetic oligonucleotide
gggaggaaaagggcuccca

SEQ ID NO: 2910048 - RNA, 19 nt, Artificial Sequence
  Description of Artificial Sequence: Synthetic oligonucleotide
cccauccagaguggagagg

SEQ ID NO: 2910049 - RNA, 19 nt, Artificial Sequence
  Description of Artificial Sequence: Synthetic oligonucleotide
ggagggcaacccagcuagg

SEQ ID NO: 2910050 - RNA, 19 nt, Artificial Sequence
  Description of Artificial Sequence: Synthetic oligonucleotide
gacggccuucuugguguca

SEQ ID NO: 2910051 - RNA, 19 nt, Artificial Sequence
  Description of Artificial Sequence: Synthetic oligonucleotide
ccacguaguccacggcgug

SEQ ID NO: 2910052 - RNA, 19 nt, Artificial Sequence
  Description of Artificial Sequence: Synthetic oligonucleotide
gugguuggggcuggugucu

SEQ ID NO: 2910053 - RNA, 19 nt, Artificial Sequence
  Description of Artificial Sequence: Synthetic oligonucleotide
ggcaacccagcuaggcgca

SEQ ID NO: 2910054 - RNA, 19 nt, Artificial Sequence
  Description of Artificial Sequence: Synthetic oligonucleotide
ccagaaucacacagcaaau

SEQ ID NO: 2910055 - RNA, 19 nt, Artificial Sequence
  Description of Artificial Sequence: Synthetic oligonucleotide
ccgaugguggaggcgauga

SEQ ID NO: 2910056 - RNA, 19 nt, Artificial Sequence
  Description of Artificial Sequence: Synthetic oligonucleotide
gugucagacacagcccuuu

SEQ ID NO: 2910057 - RNA, 19 nt, Artificial Sequence
  Description of Artificial Sequence: Synthetic oligonucleotide
ggacacggcuuggggcagg

SEQ ID NO: 2910058 - RNA, 19 nt, Artificial Sequence
  Description of Artificial Sequence: Synthetic oligonucleotide
gacccuguccccagccccu

SEQ ID NO: 2910059 - RNA, 19 nt, Artificial Sequence
  Description of Artificial Sequence: Synthetic oligonucleotide
agaggugguuggggcuggu

SEQ ID NO: 2910060 - RNA, 19 nt, Artificial Sequence
  Description of Artificial Sequence: Synthetic oligonucleotide
ccuccuguacagacacaca

SEQ ID NO: 2910061 - RNA, 19 nt, Artificial Sequence
  Description of Artificial Sequence: Synthetic oligonucleotide
gcacacggacacggcuugg

SEQ ID NO: 2910062 - RNA, 19 nt, Artificial Sequence
  Description of Artificial Sequence: Synthetic oligonucleotide
gggcucccagccagaaggc

SEQ ID NO: 2910063 - RNA, 19 nt, Artificial Sequence
  Description of Artificial Sequence: Synthetic oligonucleotide
ccucaaggagacccaucca

SEQ ID NO: 2910064 - RNA, 19 nt, Artificial Sequence
  Description of Artificial Sequence: Synthetic oligonucleotide
cccuccugguuugauccug

SEQ ID NO: 2910065 - RNA, 19 nt, Artificial Sequence
  Description of Artificial Sequence: Synthetic oligonucleotide
ccuccugguuugauccuga

SEQ ID NO: 2910066 - RNA, 19 nt, Artificial Sequence
  Description of Artificial Sequence: Synthetic oligonucleotide
cccagccccuccugguuug

SEQ ID NO: 2910067 - RNA, 19 nt, Artificial Sequence
  Description of Artificial Sequence: Synthetic oligonucleotide
cagcuaggcgcagcagcca

SEQ ID NO: 2910068 - RNA, 19 nt, Artificial Sequence
  Description of Artificial Sequence: Synthetic oligonucleotide
cagugugggaugggaggaa

SEQ ID NO: 2910069 - RNA, 19 nt, Artificial Sequence
  Description of Artificial Sequence: Synthetic oligonucleotide
gggcuggugucuauccaaa

SEQ ID NO: 2910070 - RNA, 19 nt, Artificial Sequence
  Description of Artificial Sequence: Synthetic oligonucleotide
cacguaguccacggcgugu

SEQ ID NO: 2910071 - RNA, 19 nt, Artificial Sequence
  Description of Artificial Sequence: Synthetic oligonucleotide
gcaacccagcuaggcgcag

SEQ ID NO: 2910072 - RNA, 19 nt, Artificial Sequence
  Description of Artificial Sequence: Synthetic oligonucleotide
ccacauuguacucgauccu

SEQ ID NO: 2910073 - RNA, 19 nt, Artificial Sequence
  Description of Artificial Sequence: Synthetic oligonucleotide
cccuuuccacguaguccac

SEQ ID NO: 2910074 - RNA, 19 nt, Artificial Sequence
  Description of Artificial Sequence: Synthetic oligonucleotide
ggcucccagccagaaggca

SEQ ID NO: 2910075 - RNA, 19 nt, Artificial Sequence
  Description of Artificial Sequence: Synthetic oligonucleotide
cccagccagaaggcagggg

SEQ ID NO: 2910076 - RNA, 19 nt, Artificial Sequence
  Description of Artificial Sequence: Synthetic oligonucleotide
gguacuugacggccuucuu

SEQ ID NO: 2910077 - RNA, 19 nt, Artificial Sequence
  Description of Artificial Sequence: Synthetic oligonucleotide
acacggcuuggggcagggu

SEQ ID NO: 2910078 - RNA, 19 nt, Artificial Sequence
  Description of Artificial Sequence: Synthetic oligonucleotide
ccugcgcgcuuugcucugg

SEQ ID NO: 2910079 - RNA, 19 nt, Artificial Sequence
  Description of Artificial Sequence: Synthetic oligonucleotide
gccuccucaaggagaccca

SEQ ID NO: 2910080 - RNA, 19 nt, Artificial Sequence
  Description of Artificial Sequence: Synthetic oligonucleotide
gcagggguagggagggcaa

SEQ ID NO: 2910081 - RNA, 19 nt, Artificial Sequence
  Description of Artificial Sequence: Synthetic oligonucleotide
gugggaacgggagccucau

SEQ ID NO: 2910082 - RNA, 19 nt, Artificial Sequence
  Description of Artificial Sequence: Synthetic oligonucleotide
cuccugguuugauccugau

SEQ ID NO: 2910083 - RNA, 19 nt, Artificial Sequence
  Description of Artificial Sequence: Synthetic oligonucleotide
guuccacauuguacucgau

SEQ ID NO: 2910084 - RNA, 19 nt, Artificial Sequence
  Description of Artificial Sequence: Synthetic oligonucleotide
cccuguccccagccccucc

SEQ ID NO: 2910085 - RNA, 19 nt, Artificial Sequence
  Description of Artificial Sequence: Synthetic oligonucleotide
gcccagaaucacacagcaa

SEQ ID NO: 2910086 - RNA, 19 nt, Artificial Sequence
  Description of Artificial Sequence: Synthetic oligonucleotide
ccugauccugcuccccucu

SEQ ID NO: 2910087 - RNA, 19 nt, Artificial Sequence
  Description of Artificial Sequence: Synthetic oligonucleotide
cguaguccacggcguguuc

SEQ ID NO: 2910088 - RNA, 19 nt, Artificial Sequence
  Description of Artificial Sequence: Synthetic oligonucleotide
cccgaugguggaggcgaug

SEQ ID NO: 2910089 - RNA, 19 nt, Artificial Sequence
  Description of Artificial Sequence: Synthetic oligonucleotide
cgcgcuuugcucugguacu

SEQ ID NO: 2910090 - RNA, 19 nt, Artificial Sequence
  Description of Artificial Sequence: Synthetic oligonucleotide
gccucauggcagagaggga

SEQ ID NO: 2910091 - RNA, 19 nt, Artificial Sequence
  Description of Artificial Sequence: Synthetic oligonucleotide
gggccuccucaaggagacc

SEQ ID NO: 2910092 - RNA, 19 nt, Artificial Sequence
  Description of Artificial Sequence: Synthetic oligonucleotide
cugcgcgcuuugcucuggu

SEQ ID NO: 2910093 - RNA, 19 nt, Artificial Sequence
  Description of Artificial Sequence: Synthetic oligonucleotide
ggugucagacacagcccuu

SEQ ID NO: 2910094 - RNA, 19 nt, Artificial Sequence
  Description of Artificial Sequence: Synthetic oligonucleotide
cggcguguuccacauugua

SEQ ID NO: 2910095 - RNA, 19 nt, Artificial Sequence
  Description of Artificial Sequence: Synthetic oligonucleotide
cggacacggcuuggggcag

SEQ ID NO: 2910096 - RNA, 19 nt, Artificial Sequence
  Description of Artificial Sequence: Synthetic oligonucleotide
ccuguccccagccccuccu

SEQ ID NO: 2910097 - RNA, 19 nt, Artificial Sequence
  Description of Artificial Sequence: Synthetic oligonucleotide
gcgcuuugcucugguacuu

SEQ ID NO: 2910098 - RNA, 19 nt, Artificial Sequence
  Description of Artificial Sequence: Synthetic oligonucleotide
ccuccucaaggagacccau

SEQ ID NO: 2910099 - RNA, 19 nt, Artificial Sequence
  Description of Artificial Sequence: Synthetic oligonucleotide
ccccuccugguuugauccu

SEQ ID NO: 2910100 - RNA, 19 nt, Artificial Sequence
  Description of Artificial Sequence: Synthetic oligonucleotide
cgcagcagccaggggccuc

SEQ ID NO: 2910101 - RNA, 19 nt, Artificial Sequence
  Description of Artificial Sequence: Synthetic oligonucleotide
cggccuucuuggugucaga

SEQ ID NO: 2910102 - RNA, 19 nt, Artificial Sequence
  Description of Artificial Sequence: Synthetic oligonucleotide
ccagccccuccugguuuga

SEQ ID NO: 2910103 - RNA, 19 nt, Artificial Sequence
  Description of Artificial Sequence: Synthetic oligonucleotide
cagccccuccugguuugau

SEQ ID NO: 2910104 - RNA, 19 nt, Artificial Sequence
  Description of Artificial Sequence: Synthetic oligonucleotide
cgaugacaaugcccagaau

SEQ ID NO: 2910105 - RNA, 19 nt, Artificial Sequence
  Description of Artificial Sequence: Synthetic oligonucleotide
ccccgaugguggaggcgau

SEQ ID NO: 2910106 - RNA, 19 nt, Artificial Sequence
  Description of Artificial Sequence: Synthetic oligonucleotide
gcgcagcagccaggggccu

SEQ ID NO: 2910107 - RNA, 19 nt, Artificial Sequence
  Description of Artificial Sequence: Synthetic oligonucleotide
ccacggcguguuccacauu

SEQ ID NO: 2910108 - RNA, 19 nt, Artificial Sequence
  Description of Artificial Sequence: Synthetic oligonucleotide
aauuguaccacuuuggggu

SEQ ID NO: 2910109 - RNA, 19 nt, Artificial Sequence
  Description of Artificial Sequence: Synthetic oligonucleotide
ugaaagauuucuuugaaag

SEQ ID NO: 2910110 - RNA, 19 nt, Artificial Sequence
  Description of Artificial Sequence: Synthetic oligonucleotide
aaagaagucuuccagucgg

SEQ ID NO: 2910111 - RNA, 19 nt, Artificial Sequence
  Description of Artificial Sequence: Synthetic oligonucleotide
uaaauucagauucuucugg

SEQ ID NO: 2910112 - RNA, 19 nt, Artificial Sequence
  Description of Artificial Sequence: Synthetic oligonucleotide
uggugaauuagacugaaag

SEQ ID NO: 2910113 - RNA, 19 nt, Artificial Sequence
  Description of Artificial Sequence: Synthetic oligonucleotide
aaagauuucuuugaaagug

SEQ ID NO: 2910114 - RNA, 19 nt, Artificial Sequence
  Description of Artificial Sequence: Synthetic oligonucleotide
ucaguaucaccacugaagg

SEQ ID NO: 2910115 - RNA, 19 nt, Artificial Sequence
  Description of Artificial Sequence: Synthetic oligonucleotide
uucaguaucaccacugaag

SEQ ID NO: 2910116 - RNA, 19 nt, Artificial Sequence
  Description of Artificial Sequence: Synthetic oligonucleotide
guugcuguguauuagagug

SEQ ID NO: 2910117 - RNA, 19 nt, Artificial Sequence
  Description of Artificial Sequence: Synthetic oligonucleotide
aagguugggacugaaagac

SEQ ID NO: 2910118 - RNA, 19 nt, Artificial Sequence
  Description of Artificial Sequence: Synthetic oligonucleotide
cuuguuuugcaguaaagcc

SEQ ID NO: 2910119 - RNA, 19 nt, Artificial Sequence
  Description of Artificial Sequence: Synthetic oligonucleotide
ucaauuguaccacuuuggg

SEQ ID NO: 2910120 - RNA, 19 nt, Artificial Sequence
  Description of Artificial Sequence: Synthetic oligonucleotide
uuugggguugcucagcugg

SEQ ID NO: 2910121 - RNA, 19 nt, Artificial Sequence
  Description of Artificial Sequence: Synthetic oligonucleotide
cuucuggugaauuagacug

SEQ ID NO: 2910122 - RNA, 19 nt, Artificial Sequence
  Description of Artificial Sequence: Synthetic oligonucleotide
uucaauuguaccacuuugg

SEQ ID NO: 2910123 - RNA, 19 nt, Artificial Sequence
  Description of Artificial Sequence: Synthetic oligonucleotide
auaaagacgaggcaacuag

SEQ ID NO: 2910124 - RNA, 19 nt, Artificial Sequence
  Description of Artificial Sequence: Synthetic oligonucleotide
uguugugacuaucucgugg

SEQ ID NO: 2910125 - RNA, 19 nt, Artificial Sequence
  Description of Artificial Sequence: Synthetic oligonucleotide
acaaagaagucuuccaguc

SEQ ID NO: 2910126 - RNA, 19 nt, Artificial Sequence
  Description of Artificial Sequence: Synthetic oligonucleotide
uuucaauuguaccacuuug

SEQ ID NO: 2910127 - RNA, 19 nt, Artificial Sequence
  Description of Artificial Sequence: Synthetic oligonucleotide
acugaaagaccacugcugg

SEQ ID NO: 2910128 - RNA, 19 nt, Artificial Sequence
  Description of Artificial Sequence: Synthetic oligonucleotide
auagacaaagaagucuucc

SEQ ID NO: 2910129 - RNA, 19 nt, Artificial Sequence
  Description of Artificial Sequence: Synthetic oligonucleotide
uguuuugcaguaaagcccu

SEQ ID NO: 2910130 - RNA, 19 nt, Artificial Sequence
  Description of Artificial Sequence: Synthetic oligonucleotide
agacuuguuauuaucuucc

SEQ ID NO: 2910131 - RNA, 19 nt, Artificial Sequence
  Description of Artificial Sequence: Synthetic oligonucleotide
uuuuguugccccaugcuug

SEQ ID NO: 2910132 - RNA, 19 nt, Artificial Sequence
  Description of Artificial Sequence: Synthetic oligonucleotide
ugggagcuaauaaagacga

SEQ ID NO: 2910133 - RNA, 19 nt, Artificial Sequence
  Description of Artificial Sequence: Synthetic oligonucleotide
uaguguugugacuaucucg

SEQ ID NO: 2910134 - RNA, 19 nt, Artificial Sequence
  Description of Artificial Sequence: Synthetic oligonucleotide
aagacgaggcaacuagggg

SEQ ID NO: 2910135 - RNA, 19 nt, Artificial Sequence
  Description of Artificial Sequence: Synthetic oligonucleotide
aaauucagauucuucuggu

SEQ ID NO: 2910136 - RNA, 19 nt, Artificial Sequence
  Description of Artificial Sequence: Synthetic oligonucleotide
aguaucaccacugaaggug

SEQ ID NO: 2910137 - RNA, 19 nt, Artificial Sequence
  Description of Artificial Sequence: Synthetic oligonucleotide
auuagaguggaauucagua

SEQ ID NO: 2910138 - RNA, 19 nt, Artificial Sequence
  Description of Artificial Sequence: Synthetic oligonucleotide
cuaauaaagacgaggcaac

SEQ ID NO: 2910139 - RNA, 19 nt, Artificial Sequence
  Description of Artificial Sequence: Synthetic oligonucleotide
uagaguggaauucaguauc

SEQ ID NO: 2910140 - RNA, 19 nt, Artificial Sequence
  Description of Artificial Sequence: Synthetic oligonucleotide
uaaagacgaggcaacuagg

SEQ ID NO: 2910141 - RNA, 19 nt, Artificial Sequence
  Description of Artificial Sequence: Synthetic oligonucleotide
aaagacgaggcaacuaggg

SEQ ID NO: 2910142 - RNA, 19 nt, Artificial Sequence
  Description of Artificial Sequence: Synthetic oligonucleotide
agacaaagaagucuuccag

SEQ ID NO: 2910143 - RNA, 19 nt, Artificial Sequence
  Description of Artificial Sequence: Synthetic oligonucleotide
aaagaccacugcugggagc

SEQ ID NO: 2910144 - RNA, 19 nt, Artificial Sequence
  Description of Artificial Sequence: Synthetic oligonucleotide
aauucagauucuucuggug

SEQ ID NO: 2910145 - RNA, 19 nt, Artificial Sequence
  Description of Artificial Sequence: Synthetic oligonucleotide
ucagguuuugauuuucugu

SEQ ID NO: 2910146 - RNA, 19 nt, Artificial Sequence
  Description of Artificial Sequence: Synthetic oligonucleotide
uauuaucuuccuuugcaca

SEQ ID NO: 2910147 - RNA, 19 nt, Artificial Sequence
  Description of Artificial Sequence: Synthetic oligonucleotide
uaucuuccuuugcacaugg

SEQ ID NO: 2910148 - RNA, 19 nt, Artificial Sequence
  Description of Artificial Sequence: Synthetic oligonucleotide
ucggguuugagguggaucc

SEQ ID NO: 2910149 - RNA, 19 nt, Artificial Sequence
  Description of Artificial Sequence: Synthetic oligonucleotide
cugggagcuaauaaagacg

SEQ ID NO: 2910150 - RNA, 19 nt, Artificial Sequence
  Description of Artificial Sequence: Synthetic oligonucleotide
cuuugaaagugucuucucc

SEQ ID NO: 2910151 - RNA, 19 nt, Artificial Sequence
  Description of Artificial Sequence: Synthetic oligonucleotide
uguauuagaguggaauuca

SEQ ID NO: 2910152 - RNA, 19 nt, Artificial Sequence
  Description of Artificial Sequence: Synthetic oligonucleotide
guaaauucagauucuucug

SEQ ID NO: 2910153 - RNA, 19 nt, Artificial Sequence
  Description of Artificial Sequence: Synthetic oligonucleotide
auucagauucuucugguga

SEQ ID NO: 2910154 - RNA, 19 nt, Artificial Sequence
  Description of Artificial Sequence: Synthetic oligonucleotide
aauucaguaucaccacuga

SEQ ID NO: 2910155 - RNA, 19 nt, Artificial Sequence
  Description of Artificial Sequence: Synthetic oligonucleotide
gagcuaauaaagacgaggc

SEQ ID NO: 2910156 - RNA, 19 nt, Artificial Sequence
  Description of Artificial Sequence: Synthetic oligonucleotide
gauucuucuggugaauuag

SEQ ID NO: 2910157 - RNA, 19 nt, Artificial Sequence
  Description of Artificial Sequence: Synthetic oligonucleotide
caauuguaccacuuugggg

SEQ ID NO: 2910158 - RNA, 19 nt, Artificial Sequence
  Description of Artificial Sequence: Synthetic oligonucleotide
uugagguggauccugugug

SEQ ID NO: 2910159 - RNA, 19 nt, Artificial Sequence
  Description of Artificial Sequence: Synthetic oligonucleotide
ucugcaucuuguuuggcug

SEQ ID NO: 2910160 - RNA, 19 nt, Artificial Sequence
  Description of Artificial Sequence: Synthetic oligonucleotide
agacugaaagauuucuuug

SEQ ID NO: 2910161 - RNA, 19 nt, Artificial Sequence
  Description of Artificial Sequence: Synthetic oligonucleotide
uccagacuuguuauuaucu

SEQ ID NO: 2910162 - RNA, 19 nt, Artificial Sequence
  Description of Artificial Sequence: Synthetic oligonucleotide
aauuagacugaaagauuuc

SEQ ID NO: 2910163 - RNA, 19 nt, Artificial Sequence
  Description of Artificial Sequence: Synthetic oligonucleotide
guugugacuaucucguggc

SEQ ID NO: 2910164 - RNA, 19 nt, Artificial Sequence
  Description of Artificial Sequence: Synthetic oligonucleotide
ggaagguugggacugaaag

SEQ ID NO: 2910165 - RNA, 19 nt, Artificial Sequence
  Description of Artificial Sequence: Synthetic oligonucleotide
uugaaagugucuucuccag

SEQ ID NO: 2910166 - RNA, 19 nt, Artificial Sequence
  Description of Artificial Sequence: Synthetic oligonucleotide
uuguuauuaucuuccuuug

SEQ ID NO: 2910167 - RNA, 19 nt, Artificial Sequence
  Description of Artificial Sequence: Synthetic oligonucleotide
uggauagacaaagaagucu

SEQ ID NO: 2910168 - RNA, 19 nt, Artificial Sequence
  Description of Artificial Sequence: Synthetic oligonucleotide
uauuagaguggaauucagu

SEQ ID NO: 2910169 - RNA, 19 nt, Artificial Sequence
  Description of Artificial Sequence: Synthetic oligonucleotide
uuugagguggauccugugu

SEQ ID NO: 2910170 - RNA, 19 nt, Artificial Sequence
  Description of Artificial Sequence: Synthetic oligonucleotide
uagacaaagaagucuucca

SEQ ID NO: 2910171 - RNA, 19 nt, Artificial Sequence
  Description of Artificial Sequence: Synthetic oligonucleotide
uuccagucggguuugaggu

SEQ ID NO: 2910172 - RNA, 19 nt, Artificial Sequence
  Description of Artificial Sequence: Synthetic oligonucleotide
ugaauuagacugaaagauu

SEQ ID NO: 2910173 - RNA, 19 nt, Artificial Sequence
  Description of Artificial Sequence: Synthetic oligonucleotide
ucuuccuuugcacauggau

SEQ ID NO: 2910174 - RNA, 19 nt, Artificial Sequence
  Description of Artificial Sequence: Synthetic oligonucleotide
ucuuguuuggcugacuacu

SEQ ID NO: 2910175 - RNA, 19 nt, Artificial Sequence
  Description of Artificial Sequence: Synthetic oligonucleotide
gaauucaguaucaccacug

SEQ ID NO: 2910176 - RNA, 19 nt, Artificial Sequence
  Description of Artificial Sequence: Synthetic oligonucleotide
accacuuugggguugcuca

SEQ ID NO: 2910177 - RNA, 19 nt, Artificial Sequence
  Description of Artificial Sequence: Synthetic oligonucleotide
agacgaggcaacuagggga

SEQ ID NO: 2910178 - RNA, 19 nt, Artificial Sequence
  Description of Artificial Sequence: Synthetic oligonucleotide
auuaucuuccuuugcacau

SEQ ID NO: 2910179 - RNA, 19 nt, Artificial Sequence
  Description of Artificial Sequence: Synthetic oligonucleotide
ggagcuaauaaagacgagg

SEQ ID NO: 2910180 - RNA, 19 nt, Artificial Sequence
  Description of Artificial Sequence: Synthetic oligonucleotide
gacugaaagauuucuuuga

SEQ ID NO: 2910181 - RNA, 19 nt, Artificial Sequence
  Description of Artificial Sequence: Synthetic oligonucleotide
uguguauuagaguggaauu

SEQ ID NO: 2910182 - RNA, 19 nt, Artificial Sequence
  Description of Artificial Sequence: Synthetic oligonucleotide
uuagaguggaauucaguau

SEQ ID NO: 2910183 - RNA, 19 nt, Artificial Sequence
  Description of Artificial Sequence: Synthetic oligonucleotide
uaucucguggccacucagg

SEQ ID NO: 2910184 - RNA, 19 nt, Artificial Sequence
  Description of Artificial Sequence: Synthetic oligonucleotide
uagacugaaagauuucuuu

SEQ ID NO: 2910185 - RNA, 19 nt, Artificial Sequence
  Description of Artificial Sequence: Synthetic oligonucleotide
auuagacugaaagauuucu

SEQ ID NO: 2910186 - RNA, 19 nt, Artificial Sequence
  Description of Artificial Sequence: Synthetic oligonucleotide
cuuccagucggguuugagg

SEQ ID NO: 2910187 - RNA, 19 nt, Artificial Sequence
  Description of Artificial Sequence: Synthetic oligonucleotide
guggaauucaguaucacca

SEQ ID NO: 2910188 - RNA, 19 nt, Artificial Sequence
  Description of Artificial Sequence: Synthetic oligonucleotide
ugcucagcuggauagacaa

SEQ ID NO: 2910189 - RNA, 19 nt, Artificial Sequence
  Description of Artificial Sequence: Synthetic oligonucleotide
uuccuuugcacauggauua

SEQ ID NO: 2910190 - RNA, 19 nt, Artificial Sequence
  Description of Artificial Sequence: Synthetic oligonucleotide
ucuguugcuguguauuaga

SEQ ID NO: 2910191 - RNA, 19 nt, Artificial Sequence
  Description of Artificial Sequence: Synthetic oligonucleotide
uuuucaauuguaccacuuu

SEQ ID NO: 2910192 - RNA, 19 nt, Artificial Sequence
  Description of Artificial Sequence: Synthetic oligonucleotide
caaagaagucuuccagucg

SEQ ID NO: 2910193 - RNA, 19 nt, Artificial Sequence
  Description of Artificial Sequence: Synthetic oligonucleotide
uucuucuggugaauuagac

SEQ ID NO: 2910194 - RNA, 19 nt, Artificial Sequence
  Description of Artificial Sequence: Synthetic oligonucleotide
aguguugugacuaucucgu

SEQ ID NO: 2910195 - RNA, 19 nt, Artificial Sequence
  Description of Artificial Sequence: Synthetic oligonucleotide
aagauuucuuugaaagugu

SEQ ID NO: 2910196 - RNA, 19 nt, Artificial Sequence
  Description of Artificial Sequence: Synthetic oligonucleotide
uugcuguguauuagagugg

SEQ ID NO: 2910197 - RNA, 19 nt, Artificial Sequence
  Description of Artificial Sequence: Synthetic oligonucleotide
aacuaggggagacccagga

SEQ ID NO: 2910198 - RNA, 19 nt, Artificial Sequence
  Description of Artificial Sequence: Synthetic oligonucleotide
ugaagguggaggcauuggu

SEQ ID NO: 2910199 - RNA, 19 nt, Artificial Sequence
  Description of Artificial Sequence: Synthetic oligonucleotide
ugcacuguaaauucagauu

SEQ ID NO: 2910200 - RNA, 19 nt, Artificial Sequence
  Description of Artificial Sequence: Synthetic oligonucleotide
ugagguggauccugugugg

SEQ ID NO: 2910201 - RNA, 19 nt, Artificial Sequence
  Description of Artificial Sequence: Synthetic oligonucleotide
gcaguaaagcccuggaggg

SEQ ID NO: 2910202 - RNA, 19 nt, Artificial Sequence
  Description of Artificial Sequence: Synthetic oligonucleotide
aaagugucuucuccagacu

SEQ ID NO: 2910203 - RNA, 19 nt, Artificial Sequence
  Description of Artificial Sequence: Synthetic oligonucleotide
aucuuguuuggcugacuac

SEQ ID NO: 2910204 - RNA, 19 nt, Artificial Sequence
  Description of Artificial Sequence: Synthetic oligonucleotide
gcacuguaaauucagauuc

SEQ ID NO: 2910205 - RNA, 19 nt, Artificial Sequence
  Description of Artificial Sequence: Synthetic oligonucleotide
cucagcuggauagacaaag

SEQ ID NO: 2910206 - RNA, 19 nt, Artificial Sequence
  Description of Artificial Sequence: Synthetic oligonucleotide
ugcuuguuuugcaguaaag

SEQ ID NO: 2910207 - RNA, 19 nt, Artificial Sequence
  Description of Artificial Sequence: Synthetic oligonucleotide
agacccaggagcuugcacu

SEQ ID NO: 2910208 - RNA, 19 nt, Artificial Sequence
  Description of Artificial Sequence: Synthetic oligonucleotide
aagaccacugcugggagcu

SEQ ID NO: 2910209 - RNA, 19 nt, Artificial Sequence
  Description of Artificial Sequence: Synthetic oligonucleotide
acugcugggagcuaauaaa

SEQ ID NO: 2910210 - RNA, 19 nt, Artificial Sequence
  Description of Artificial Sequence: Synthetic oligonucleotide
ugaaagugucuucuccaga

SEQ ID NO: 2910211 - RNA, 19 nt, Artificial Sequence
  Description of Artificial Sequence: Synthetic oligonucleotide
augucugcaucuuguuugg

SEQ ID NO: 2910212 - RNA, 19 nt, Artificial Sequence
  Description of Artificial Sequence: Synthetic oligonucleotide
gaagguugggacugaaaga

SEQ ID NO: 2910213 - RNA, 19 nt, Artificial Sequence
  Description of Artificial Sequence: Synthetic oligonucleotide
uuagacugaaagauuucuu

SEQ ID NO: 2910214 - RNA, 19 nt, Artificial Sequence
  Description of Artificial Sequence: Synthetic oligonucleotide
uuuggcugacuacuguccu

SEQ ID NO: 2910215 - RNA, 19 nt, Artificial Sequence
  Description of Artificial Sequence: Synthetic oligonucleotide
uguguggaugucugcaucu

SEQ ID NO: 2910216 - RNA, 19 nt, Artificial Sequence
  Description of Artificial Sequence: Synthetic oligonucleotide
gaaagaccacugcugggag

SEQ ID NO: 2910217 - RNA, 19 nt, Artificial Sequence
  Description of Artificial Sequence: Synthetic oligonucleotide
agcuggauagacaaagaag

SEQ ID NO: 2910218 - RNA, 19 nt, Artificial Sequence
  Description of Artificial Sequence: Synthetic oligonucleotide
cugcugggagcuaauaaag

SEQ ID NO: 2910219 - RNA, 19 nt, Artificial Sequence
  Description of Artificial Sequence: Synthetic oligonucleotide
auuggugcugaggaguggg

SEQ ID NO: 2910220 - RNA, 19 nt, Artificial Sequence
  Description of Artificial Sequence: Synthetic oligonucleotide
uugcacuguaaauucagau

SEQ ID NO: 2910221 - RNA, 19 nt, Artificial Sequence
  Description of Artificial Sequence: Synthetic oligonucleotide
uggaauucaguaucaccac

SEQ ID NO: 2910222 - RNA, 19 nt, Artificial Sequence
  Description of Artificial Sequence: Synthetic oligonucleotide
gacugaaagaccacugcug

SEQ ID NO: 2910223 - RNA, 19 nt, Artificial Sequence
  Description of Artificial Sequence: Synthetic oligonucleotide
aauaaagacgaggcaacua

SEQ ID NO: 2910224 - RNA, 19 nt, Artificial Sequence
  Description of Artificial Sequence: Synthetic oligonucleotide
cagacuuguuauuaucuuc

SEQ ID NO: 2910225 - RNA, 19 nt, Artificial Sequence
  Description of Artificial Sequence: Synthetic oligonucleotide
agauuucuuugaaaguguc

SEQ ID NO: 2910226 - RNA, 19 nt, Artificial Sequence
  Description of Artificial Sequence: Synthetic oligonucleotide
uguuuggcugacuacuguc

SEQ ID NO: 2910227 - RNA, 19 nt, Artificial Sequence
  Description of Artificial Sequence: Synthetic oligonucleotide
aggcaacuaggggagaccc

SEQ ID NO: 2910228 - RNA, 19 nt, Artificial Sequence
  Description of Artificial Sequence: Synthetic oligonucleotide
uuguccagggcuaguguug

SEQ ID NO: 2910229 - RNA, 19 nt, Artificial Sequence
  Description of Artificial Sequence: Synthetic oligonucleotide
uguugcuguguauuagagu

SEQ ID NO: 2910230 - RNA, 19 nt, Artificial Sequence
  Description of Artificial Sequence: Synthetic oligonucleotide
uguggaugucugcaucuug

SEQ ID NO: 2910231 - RNA, 19 nt, Artificial Sequence
  Description of Artificial Sequence: Synthetic oligonucleotide
gaaagauuucuuugaaagu

SEQ ID NO: 2910232 - RNA, 19 nt, Artificial Sequence
  Description of Artificial Sequence: Synthetic oligonucleotide
agcuaauaaagacgaggca

SEQ ID NO: 2910233 - RNA, 19 nt, Artificial Sequence
  Description of Artificial Sequence: Synthetic oligonucleotide
gagcuugcacuguaaauuc

SEQ ID NO: 2910234 - RNA, 19 nt, Artificial Sequence
  Description of Artificial Sequence: Synthetic oligonucleotide
ggugaauuagacugaaaga

SEQ ID NO: 2910235 - RNA, 19 nt, Artificial Sequence
  Description of Artificial Sequence: Synthetic oligonucleotide
cuguaaauucagauucuuc

SEQ ID NO: 2910236 - RNA, 19 nt, Artificial Sequence
  Description of Artificial Sequence: Synthetic oligonucleotide
ucagcuggauagacaaaga

SEQ ID NO: 2910237 - RNA, 19 nt, Artificial Sequence
  Description of Artificial Sequence: Synthetic oligonucleotide
ugcugggagcuaauaaaga

SEQ ID NO: 2910238 - RNA, 19 nt, Artificial Sequence
  Description of Artificial Sequence: Synthetic oligonucleotide
uucuggugaauuagacuga

SEQ ID NO: 2910239 - RNA, 19 nt, Artificial Sequence
  Description of Artificial Sequence: Synthetic oligonucleotide
cuuguuauuaucuuccuuu

SEQ ID NO: 2910240 - RNA, 19 nt, Artificial Sequence
  Description of Artificial Sequence: Synthetic oligonucleotide
guaucaccacugaaggugg

SEQ ID NO: 2910241 - RNA, 19 nt, Artificial Sequence
  Description of Artificial Sequence: Synthetic oligonucleotide
cuguugcuguguauuagag

SEQ ID NO: 2910242 - RNA, 19 nt, Artificial Sequence
  Description of Artificial Sequence: Synthetic oligonucleotide
uuuguugccccaugcuugu

SEQ ID NO: 2910243 - RNA, 19 nt, Artificial Sequence
  Description of Artificial Sequence: Synthetic oligonucleotide
gacgaggcaacuaggggag

SEQ ID NO: 2910244 - RNA, 19 nt, Artificial Sequence
  Description of Artificial Sequence: Synthetic oligonucleotide
uguuuguccagggcuagug

SEQ ID NO: 2910245 - RNA, 19 nt, Artificial Sequence
  Description of Artificial Sequence: Synthetic oligonucleotide
uacuguccuggcuuguuug

SEQ ID NO: 2910246 - RNA, 19 nt, Artificial Sequence
  Description of Artificial Sequence: Synthetic oligonucleotide
cuuguuuggcugacuacug

SEQ ID NO: 2910247 - RNA, 19 nt, Artificial Sequence
  Description of Artificial Sequence: Synthetic oligonucleotide
gugaauuagacugaaagau

SEQ ID NO: 2910248 - RNA, 19 nt, Artificial Sequence
  Description of Artificial Sequence: Synthetic oligonucleotide
gaagguggaggcauuggug

SEQ ID NO: 2910249 - RNA, 19 nt, Artificial Sequence
  Description of Artificial Sequence: Synthetic oligonucleotide
cugaaagaccacugcuggg

SEQ ID NO: 2910250 - RNA, 19 nt, Artificial Sequence
  Description of Artificial Sequence: Synthetic oligonucleotide
ugcuguguauuagagugga

SEQ ID NO: 2910251 - RNA, 19 nt, Artificial Sequence
  Description of Artificial Sequence: Synthetic oligonucleotide
uucuguugcuguguauuag

SEQ ID NO: 2910252 - RNA, 19 nt, Artificial Sequence
  Description of Artificial Sequence: Synthetic oligonucleotide
uuguuuggcugacuacugu

SEQ ID NO: 2910253 - RNA, 19 nt, Artificial Sequence
  Description of Artificial Sequence: Synthetic oligonucleotide
cuggauagacaaagaaguc

SEQ ID NO: 2910254 - RNA, 19 nt, Artificial Sequence
  Description of Artificial Sequence: Synthetic oligonucleotide
ucuuugaaagugucuucuc

SEQ ID NO: 2910255 - RNA, 19 nt, Artificial Sequence
  Description of Artificial Sequence: Synthetic oligonucleotide
ugauuuucuguugcugugu

SEQ ID NO: 2910256 - RNA, 19 nt, Artificial Sequence
  Description of Artificial Sequence: Synthetic oligonucleotide
gaauuagacugaaagauuu

SEQ ID NO: 2910257 - RNA, 19 nt, Artificial Sequence
  Description of Artificial Sequence: Synthetic oligonucleotide
aagaagucuuccagucggg

SEQ ID NO: 2910258 - RNA, 19 nt, Artificial Sequence
  Description of Artificial Sequence: Synthetic oligonucleotide
uuaucuuccuuugcacaug

SEQ ID NO: 2910259 - RNA, 19 nt, Artificial Sequence
  Description of Artificial Sequence: Synthetic oligonucleotide
uaggggagacccaggagcu

SEQ ID NO: 2910260 - RNA, 19 nt, Artificial Sequence
  Description of Artificial Sequence: Synthetic oligonucleotide
ugcacauggauuagauuuu

SEQ ID NO: 2910261 - RNA, 19 nt, Artificial Sequence
  Description of Artificial Sequence: Synthetic oligonucleotide
uuuguccagggcuaguguu

SEQ ID NO: 2910262 - RNA, 19 nt, Artificial Sequence
  Description of Artificial Sequence: Synthetic oligonucleotide
gugacuaucucguggccac

SEQ ID NO: 2910263 - RNA, 19 nt, Artificial Sequence
  Description of Artificial Sequence: Synthetic oligonucleotide
gcuuguuuugcaguaaagc

SEQ ID NO: 2910264 - RNA, 19 nt, Artificial Sequence
  Description of Artificial Sequence: Synthetic oligonucleotide
cucagguuuugauuuucug

SEQ ID NO: 2910265 - RNA, 19 nt, Artificial Sequence
  Description of Artificial Sequence: Synthetic oligonucleotide
gcuaauaaagacgaggcaa

SEQ ID NO: 2910266 - RNA, 19 nt, Artificial Sequence
  Description of Artificial Sequence: Synthetic oligonucleotide
guauuagaguggaauucag

SEQ ID NO: 2910267 - RNA, 19 nt, Artificial Sequence
  Description of Artificial Sequence: Synthetic oligonucleotide
gauccuguguggaugucug

SEQ ID NO: 2910268 - RNA, 19 nt, Artificial Sequence
  Description of Artificial Sequence: Synthetic oligonucleotide
guguauuagaguggaauuc

SEQ ID NO: 2910269 - RNA, 19 nt, Artificial Sequence
  Description of Artificial Sequence: Synthetic oligonucleotide
caccacugaagguggaggc

SEQ ID NO: 2910270 - RNA, 19 nt, Artificial Sequence
  Description of Artificial Sequence: Synthetic oligonucleotide
uaaagcccuggagggaagg

SEQ ID NO: 2910271 - RNA, 19 nt, Artificial Sequence
  Description of Artificial Sequence: Synthetic oligonucleotide
cuggcuuguuuguccaggg

SEQ ID NO: 2910272 - RNA, 19 nt, Artificial Sequence
  Description of Artificial Sequence: Synthetic oligonucleotide
guuuggcugacuacugucc

SEQ ID NO: 2910273 - RNA, 19 nt, Artificial Sequence
  Description of Artificial Sequence: Synthetic oligonucleotide
gcugggagcuaauaaagac

SEQ ID NO: 2910274 - RNA, 19 nt, Artificial Sequence
  Description of Artificial Sequence: Synthetic oligonucleotide
uuucuguugcuguguauua

SEQ ID NO: 2910275 - RNA, 19 nt, Artificial Sequence
  Description of Artificial Sequence: Synthetic oligonucleotide
cuaguguugugacuaucuc

SEQ ID NO: 2910276 - RNA, 19 nt, Artificial Sequence
  Description of Artificial Sequence: Synthetic oligonucleotide
acuuugggguugcucagcu

SEQ ID NO: 2910277 - RNA, 19 nt, Artificial Sequence
  Description of Artificial Sequence: Synthetic oligonucleotide
aucucguggccacucaggu

SEQ ID NO: 2910278 - RNA, 19 nt, Artificial Sequence
  Description of Artificial Sequence: Synthetic oligonucleotide
uucuccagacuuguuauua

SEQ ID NO: 2910279 - RNA, 19 nt, Artificial Sequence
  Description of Artificial Sequence: Synthetic oligonucleotide
uccuguguggaugucugca

SEQ ID NO: 2910280 - RNA, 19 nt, Artificial Sequence
  Description of Artificial Sequence: Synthetic oligonucleotide
ugacuacuguccuggcuug

SEQ ID NO: 2910281 - RNA, 19 nt, Artificial Sequence
  Description of Artificial Sequence: Synthetic oligonucleotide
auucaguaucaccacugaa

SEQ ID NO: 2910282 - RNA, 19 nt, Artificial Sequence
  Description of Artificial Sequence: Synthetic oligonucleotide
uugugacuaucucguggcc

SEQ ID NO: 2910283 - RNA, 19 nt, Artificial Sequence
  Description of Artificial Sequence: Synthetic oligonucleotide
auccuguguggaugucugc

SEQ ID NO: 2910284 - RNA, 19 nt, Artificial Sequence
  Description of Artificial Sequence: Synthetic oligonucleotide
gacccaggagcuugcacug

SEQ ID NO: 2910285 - RNA, 19 nt, Artificial Sequence
  Description of Artificial Sequence: Synthetic oligonucleotide
uuugcacauggauuagauu

SEQ ID NO: 2910286 - RNA, 19 nt, Artificial Sequence
  Description of Artificial Sequence: Synthetic oligonucleotide
aguaaagcccuggagggaa

SEQ ID NO: 2910287 - RNA, 19 nt, Artificial Sequence
  Description of Artificial Sequence: Synthetic oligonucleotide
acuuguuauuaucuuccuu

SEQ ID NO: 2910288 - RNA, 19 nt, Artificial Sequence
  Description of Artificial Sequence: Synthetic oligonucleotide
agauucuucuggugaauua

SEQ ID NO: 2910289 - RNA, 19 nt, Artificial Sequence
  Description of Artificial Sequence: Synthetic oligonucleotide
ucuggugaauuagacugaa

SEQ ID NO: 2910290 - RNA, 19 nt, Artificial Sequence
  Description of Artificial Sequence: Synthetic oligonucleotide
ggguugcucagcuggauag

SEQ ID NO: 2910291 - RNA, 19 nt, Artificial Sequence
  Description of Artificial Sequence: Synthetic oligonucleotide
uggagggaagguugggacu

SEQ ID NO: 2910292 - RNA, 19 nt, Artificial Sequence
  Description of Artificial Sequence: Synthetic oligonucleotide
uugggacugaaagaccacu

SEQ ID NO: 2910293 - RNA, 19 nt, Artificial Sequence
  Description of Artificial Sequence: Synthetic oligonucleotide
uguaccacuuugggguugc

SEQ ID NO: 2910294 - RNA, 19 nt, Artificial Sequence
  Description of Artificial Sequence: Synthetic oligonucleotide
gauagacaaagaagucuuc

SEQ ID NO: 2910295 - RNA, 19 nt, Artificial Sequence
  Description of Artificial Sequence: Synthetic oligonucleotide
ucuccagacuuguuauuau

SEQ ID NO: 2910296 - RNA, 19 nt, Artificial Sequence
  Description of Artificial Sequence: Synthetic oligonucleotide
cuccagacuuguuauuauc

SEQ ID NO: 2910297 - RNA, 19 nt, Artificial Sequence
  Description of Artificial Sequence: Synthetic oligonucleotide
uugcucagcuggauagaca

SEQ ID NO: 2910298 - RNA, 19 nt, Artificial Sequence
  Description of Artificial Sequence: Synthetic oligonucleotide
cuaucucguggccacucag

SEQ ID NO: 2910299 - RNA, 19 nt, Artificial Sequence
  Description of Artificial Sequence: Synthetic oligonucleotide
gcuggauagacaaagaagu

SEQ ID NO: 2910300 - RNA, 19 nt, Artificial Sequence
  Description of Artificial Sequence: Synthetic oligonucleotide
aggagcuugcacuguaaau

SEQ ID NO: 2910301 - RNA, 19 nt, Artificial Sequence
  Description of Artificial Sequence: Synthetic oligonucleotide
uggcuuguuuguccagggc

SEQ ID NO: 2910302 - RNA, 19 nt, Artificial Sequence
  Description of Artificial Sequence: Synthetic oligonucleotide
ugccccaugcuuguuuugc

SEQ ID NO: 2910303 - RNA, 19 nt, Artificial Sequence
  Description of Artificial Sequence: Synthetic oligonucleotide
agguugggacugaaagacc

SEQ ID NO: 2910304 - RNA, 19 nt, Artificial Sequence
  Description of Artificial Sequence: Synthetic oligonucleotide
augcuuguuuugcaguaaa

SEQ ID NO: 2910305 - RNA, 19 nt, Artificial Sequence
  Description of Artificial Sequence: Synthetic oligonucleotide
agggcuaguguugugacua

SEQ ID NO: 2910306 - RNA, 19 nt, Artificial Sequence
  Description of Artificial Sequence: Synthetic oligonucleotide
uguugccccaugcuuguuu

SEQ ID NO: 2910307 - RNA, 19 nt, Artificial Sequence
  Description of Artificial Sequence: Synthetic oligonucleotide
cuugcacuguaaauucaga

SEQ ID NO: 2910308 - RNA, 19 nt, Artificial Sequence
  Description of Artificial Sequence: Synthetic oligonucleotide
acuguaaauucagauucuu

SEQ ID NO: 2910309 - RNA, 19 nt, Artificial Sequence
  Description of Artificial Sequence: Synthetic oligonucleotide
gucuucuccagacuuguua

SEQ ID NO: 2910310 - RNA, 19 nt, Artificial Sequence
  Description of Artificial Sequence: Synthetic oligonucleotide
cuuguuuguccagggcuag

SEQ ID NO: 2910311 - RNA, 19 nt, Artificial Sequence
  Description of Artificial Sequence: Synthetic oligonucleotide
auuuucuguugcuguguau

SEQ ID NO: 2910312 - RNA, 19 nt, Artificial Sequence
  Description of Artificial Sequence: Synthetic oligonucleotide
agaguggaauucaguauca

SEQ ID NO: 2910313 - RNA, 19 nt, Artificial Sequence
  Description of Artificial Sequence: Synthetic oligonucleotide
guuugagguggauccugug

SEQ ID NO: 2910314 - RNA, 19 nt, Artificial Sequence
  Description of Artificial Sequence: Synthetic oligonucleotide
acuaucucguggccacuca

SEQ ID NO: 2910315 - RNA, 19 nt, Artificial Sequence
  Description of Artificial Sequence: Synthetic oligonucleotide
agugucuucuccagacuug

SEQ ID NO: 2910316 - RNA, 19 nt, Artificial Sequence
  Description of Artificial Sequence: Synthetic oligonucleotide
gcaacuaggggagacccag

SEQ ID NO: 2910317 - RNA, 19 nt, Artificial Sequence
  Description of Artificial Sequence: Synthetic oligonucleotide
aucaccacugaagguggag

SEQ ID NO: 2910318 - RNA, 19 nt, Artificial Sequence
  Description of Artificial Sequence: Synthetic oligonucleotide
uccuuugcacauggauuag

SEQ ID NO: 2910319 - RNA, 19 nt, Artificial Sequence
  Description of Artificial Sequence: Synthetic oligonucleotide
cugaagguggaggcauugg

SEQ ID NO: 2910320 - RNA, 19 nt, Artificial Sequence
  Description of Artificial Sequence: Synthetic oligonucleotide
acugaagguggaggcauug

SEQ ID NO: 2910321 - RNA, 19 nt, Artificial Sequence
  Description of Artificial Sequence: Synthetic oligonucleotide
ucuuccagucggguuugag

SEQ ID NO: 2910322 - RNA, 19 nt, Artificial Sequence
  Description of Artificial Sequence: Synthetic oligonucleotide
uccagucggguuugaggug

SEQ ID NO: 2910323 - RNA, 19 nt, Artificial Sequence
  Description of Artificial Sequence: Synthetic oligonucleotide
caacuaggggagacccagg

SEQ ID NO: 2910324 - RNA, 19 nt, Artificial Sequence
  Description of Artificial Sequence: Synthetic oligonucleotide
uaucaccacugaaggugga

SEQ ID NO: 2910325 - RNA, 19 nt, Artificial Sequence
  Description of Artificial Sequence: Synthetic oligonucleotide
uggcuuuuguugccccaug

SEQ ID NO: 2910326 - RNA, 19 nt, Artificial Sequence
  Description of Artificial Sequence: Synthetic oligonucleotide
guugcucagcuggauagac

SEQ ID NO: 2910327 - RNA, 19 nt, Artificial Sequence
  Description of Artificial Sequence: Synthetic oligonucleotide
gcuugcacuguaaauucag

SEQ ID NO: 2910328 - RNA, 19 nt, Artificial Sequence
  Description of Artificial Sequence: Synthetic oligonucleotide
uugggguugcucagcugga

SEQ ID NO: 2910329 - RNA, 19 nt, Artificial Sequence
  Description of Artificial Sequence: Synthetic oligonucleotide
aggcauuggugcugaggag

SEQ ID NO: 2910330 - RNA, 19 nt, Artificial Sequence
  Description of Artificial Sequence: Synthetic oligonucleotide
auuguaccacuuugggguu

SEQ ID NO: 2910331 - RNA, 19 nt, Artificial Sequence
  Description of Artificial Sequence: Synthetic oligonucleotide
gaggcaacuaggggagacc

SEQ ID NO: 2910332 - RNA, 19 nt, Artificial Sequence
  Description of Artificial Sequence: Synthetic oligonucleotide
gguugggacugaaagacca

SEQ ID NO: 2910333 - RNA, 19 nt, Artificial Sequence
  Description of Artificial Sequence: Synthetic oligonucleotide
cuguguggaugucugcauc

SEQ ID NO: 2910334 - RNA, 19 nt, Artificial Sequence
  Description of Artificial Sequence: Synthetic oligonucleotide
uguccagggcuaguguugu

SEQ ID NO: 2910335 - RNA, 19 nt, Artificial Sequence
  Description of Artificial Sequence: Synthetic oligonucleotide
aaagcccuggagggaaggu

SEQ ID NO: 2910336 - RNA, 19 nt, Artificial Sequence
  Description of Artificial Sequence: Synthetic oligonucleotide
cagguuuugauuuucuguu

SEQ ID NO: 2910337 - RNA, 19 nt, Artificial Sequence
  Description of Artificial Sequence: Synthetic oligonucleotide
agaagucuuccagucgggu

SEQ ID NO: 2910338 - RNA, 19 nt, Artificial Sequence
  Description of Artificial Sequence: Synthetic oligonucleotide
caucuuguuuggcugacua

SEQ ID NO: 2910339 - RNA, 19 nt, Artificial Sequence
  Description of Artificial Sequence: Synthetic oligonucleotide
gguggauccuguguggaug

SEQ ID NO: 2910340 - RNA, 19 nt, Artificial Sequence
  Description of Artificial Sequence: Synthetic oligonucleotide
gagacccaggagcuugcac

SEQ ID NO: 2910341 - RNA, 19 nt, Artificial Sequence
  Description of Artificial Sequence: Synthetic oligonucleotide
ggcuuuuguugccccaugc

SEQ ID NO: 2910342 - RNA, 19 nt, Artificial Sequence
  Description of Artificial Sequence: Synthetic oligonucleotide
ggagggaagguugggacug

SEQ ID NO: 2910343 - RNA, 19 nt, Artificial Sequence
  Description of Artificial Sequence: Synthetic oligonucleotide
uggaugucugcaucuuguu

SEQ ID NO: 2910344 - RNA, 19 nt, Artificial Sequence
  Description of Artificial Sequence: Synthetic oligonucleotide
gacuuguuauuaucuuccu

SEQ ID NO: 2910345 - RNA, 19 nt, Artificial Sequence
  Description of Artificial Sequence: Synthetic oligonucleotide
cuuccuuugcacauggauu

SEQ ID NO: 2910346 - RNA, 19 nt, Artificial Sequence
  Description of Artificial Sequence: Synthetic oligonucleotide
ugcaucuuguuuggcugac

SEQ ID NO: 2910347 - RNA, 19 nt, Artificial Sequence
  Description of Artificial Sequence: Synthetic oligonucleotide
cagcuggauagacaaagaa

SEQ ID NO: 2910348 - RNA, 19 nt, Artificial Sequence
  Description of Artificial Sequence: Synthetic oligonucleotide
cuuugcacauggauuagau

SEQ ID NO: 2910349 - RNA, 19 nt, Artificial Sequence
  Description of Artificial Sequence: Synthetic oligonucleotide
uggccacucagguuuugau

SEQ ID NO: 2910350 - RNA, 19 nt, Artificial Sequence
  Description of Artificial Sequence: Synthetic oligonucleotide
uuguaccacuuugggguug

SEQ ID NO: 2910351 - RNA, 19 nt, Artificial Sequence
  Description of Artificial Sequence: Synthetic oligonucleotide
uuggcuuuuguugccccau

SEQ ID NO: 2910352 - RNA, 19 nt, Artificial Sequence
  Description of Artificial Sequence: Synthetic oligonucleotide
gucugcaucuuguuuggcu

SEQ ID NO: 2910353 - RNA, 19 nt, Artificial Sequence
  Description of Artificial Sequence: Synthetic oligonucleotide
guguugugacuaucucgug

SEQ ID NO: 2910354 - RNA, 19 nt, Artificial Sequence
  Description of Artificial Sequence: Synthetic oligonucleotide
guuggcuuuuguugcccca

SEQ ID NO: 2910355 - RNA, 19 nt, Artificial Sequence
  Description of Artificial Sequence: Synthetic oligonucleotide
cauuggugcugaggagugg

SEQ ID NO: 2910356 - RNA, 19 nt, Artificial Sequence
  Description of Artificial Sequence: Synthetic oligonucleotide
cuuugggguugcucagcug

SEQ ID NO: 2910357 - RNA, 19 nt, Artificial Sequence
  Description of Artificial Sequence: Synthetic oligonucleotide
gacuaucucguggccacuc

SEQ ID NO: 2910358 - RNA, 19 nt, Artificial Sequence
  Description of Artificial Sequence: Synthetic oligonucleotide
cuguguauuagaguggaau

SEQ ID NO: 2910359 - RNA, 19 nt, Artificial Sequence
  Description of Artificial Sequence: Synthetic oligonucleotide
acucagguuuugauuuucu

SEQ ID NO: 2910360 - RNA, 19 nt, Artificial Sequence
  Description of Artificial Sequence: Synthetic oligonucleotide
accacugaagguggaggca

SEQ ID NO: 2910361 - RNA, 19 nt, Artificial Sequence
  Description of Artificial Sequence: Synthetic oligonucleotide
cugacuacuguccuggcuu

SEQ ID NO: 2910362 - RNA, 19 nt, Artificial Sequence
  Description of Artificial Sequence: Synthetic oligonucleotide
ccagucggguuugaggugg

SEQ ID NO: 2910363 - RNA, 19 nt, Artificial Sequence
  Description of Artificial Sequence: Synthetic oligonucleotide
cucguggccacucagguuu

SEQ ID NO: 2910364 - RNA, 19 nt, Artificial Sequence
  Description of Artificial Sequence: Synthetic oligonucleotide
agucuuccagucggguuug

SEQ ID NO: 2910365 - RNA, 19 nt, Artificial Sequence
  Description of Artificial Sequence: Synthetic oligonucleotide
gaagucuuccagucggguu

SEQ ID NO: 2910366 - RNA, 19 nt, Artificial Sequence
  Description of Artificial Sequence: Synthetic oligonucleotide
cacucagguuuugauuuuc

SEQ ID NO: 2910367 - RNA, 19 nt, Artificial Sequence
  Description of Artificial Sequence: Synthetic oligonucleotide
guaaagcccuggagggaag

SEQ ID NO: 2910368 - RNA, 19 nt, Artificial Sequence
  Description of Artificial Sequence: Synthetic oligonucleotide
cugcaucuuguuuggcuga

SEQ ID NO: 2910369 - RNA, 19 nt, Artificial Sequence
  Description of Artificial Sequence: Synthetic oligonucleotide
ugucugcaucuuguuuggc

SEQ ID NO: 2910370 - RNA, 19 nt, Artificial Sequence
  Description of Artificial Sequence: Synthetic oligonucleotide
cuuuuguugccccaugcuu

SEQ ID NO: 2910371 - RNA, 19 nt, Artificial Sequence
  Description of Artificial Sequence: Synthetic oligonucleotide
uugccccaugcuuguuuug

SEQ ID NO: 2910372 - RNA, 19 nt, Artificial Sequence
  Description of Artificial Sequence: Synthetic oligonucleotide
aagcccuggagggaagguu

SEQ ID NO: 2910373 - RNA, 19 nt, Artificial Sequence
  Description of Artificial Sequence: Synthetic oligonucleotide
gagguggauccugugugga

SEQ ID NO: 2910374 - RNA, 19 nt, Artificial Sequence
  Description of Artificial Sequence: Synthetic oligonucleotide
cacugcugggagcuaauaa

SEQ ID NO: 2910375 - RNA, 19 nt, Artificial Sequence
  Description of Artificial Sequence: Synthetic oligonucleotide
agcuugcacuguaaauuca

SEQ ID NO: 2910376 - RNA, 19 nt, Artificial Sequence
  Description of Artificial Sequence: Synthetic oligonucleotide
ggacugaaagaccacugcu

SEQ ID NO: 2910377 - RNA, 19 nt, Artificial Sequence
  Description of Artificial Sequence: Synthetic oligonucleotide
uaccacuuugggguugcuc

SEQ ID NO: 2910378 - RNA, 19 nt, Artificial Sequence
  Description of Artificial Sequence: Synthetic oligonucleotide
agguggauccuguguggau

SEQ ID NO: 2910379 - RNA, 19 nt, Artificial Sequence
  Description of Artificial Sequence: Synthetic oligonucleotide
ggaauucaguaucaccacu

SEQ ID NO: 2910380 - RNA, 19 nt, Artificial Sequence
  Description of Artificial Sequence: Synthetic oligonucleotide
ucucguggccacucagguu

SEQ ID NO: 2910381 - RNA, 19 nt, Artificial Sequence
  Description of Artificial Sequence: Synthetic oligonucleotide
cacuguaaauucagauucu

SEQ ID NO: 2910382 - RNA, 19 nt, Artificial Sequence
  Description of Artificial Sequence: Synthetic oligonucleotide
uuguuuguccagggcuagu

SEQ ID NO: 2910383 - RNA, 19 nt, Artificial Sequence
  Description of Artificial Sequence: Synthetic oligonucleotide
ugucuucuccagacuuguu

SEQ ID NO: 2910384 - RNA, 19 nt, Artificial Sequence
  Description of Artificial Sequence: Synthetic oligonucleotide
ggauagacaaagaagucuu

SEQ ID NO: 2910385 - RNA, 19 nt, Artificial Sequence
  Description of Artificial Sequence: Synthetic oligonucleotide
gucggguuugagguggauc

SEQ ID NO: 2910386 - RNA, 19 nt, Artificial Sequence
  Description of Artificial Sequence: Synthetic oligonucleotide
guggaugucugcaucuugu

SEQ ID NO: 2910387 - RNA, 19 nt, Artificial Sequence
  Description of Artificial Sequence: Synthetic oligonucleotide
guuuguccagggcuagugu

SEQ ID NO: 2910388 - RNA, 19 nt, Artificial Sequence
  Description of Artificial Sequence: Synthetic oligonucleotide
ggagcuugcacuguaaauu

SEQ ID NO: 2910389 - RNA, 19 nt, Artificial Sequence
  Description of Artificial Sequence: Synthetic oligonucleotide
ccuggcuuguuuguccagg

SEQ ID NO: 2910390 - RNA, 19 nt, Artificial Sequence
  Description of Artificial Sequence: Synthetic oligonucleotide
ugcugaggaguggguauuc

SEQ ID NO: 2910391 - RNA, 19 nt, Artificial Sequence
  Description of Artificial Sequence: Synthetic oligonucleotide
gccacucagguuuugauuu

SEQ ID NO: 2910392 - RNA, 19 nt, Artificial Sequence
  Description of Artificial Sequence: Synthetic oligonucleotide
ggggagacccaggagcuug

SEQ ID NO: 2910393 - RNA, 19 nt, Artificial Sequence
  Description of Artificial Sequence: Synthetic oligonucleotide
ccccaugcuuguuuugcag

SEQ ID NO: 2910394 - RNA, 19 nt, Artificial Sequence
  Description of Artificial Sequence: Synthetic oligonucleotide
acuacuguccuggcuuguu

SEQ ID NO: 2910395 - RNA, 19 nt, Artificial Sequence
  Description of Artificial Sequence: Synthetic oligonucleotide
guggauccuguguggaugu

SEQ ID NO: 2910396 - RNA, 19 nt, Artificial Sequence
  Description of Artificial Sequence: Synthetic oligonucleotide
ugacuaucucguggccacu

SEQ ID NO: 2910397 - RNA, 19 nt, Artificial Sequence
  Description of Artificial Sequence: Synthetic oligonucleotide
ggguuugagguggauccug

SEQ ID NO: 2910398 - RNA, 19 nt, Artificial Sequence
  Description of Artificial Sequence: Synthetic oligonucleotide
caggagcuugcacuguaaa

SEQ ID NO: 2910399 - RNA, 19 nt, Artificial Sequence
  Description of Artificial Sequence: Synthetic oligonucleotide
ccagggcuaguguugugac

SEQ ID NO: 2910400 - RNA, 19 nt, Artificial Sequence
  Description of Artificial Sequence: Synthetic oligonucleotide
gcuaguguugugacuaucu

SEQ ID NO: 2910401 - RNA, 19 nt, Artificial Sequence
  Description of Artificial Sequence: Synthetic oligonucleotide
caugcuuguuuugcaguaa

SEQ ID NO: 2910402 - RNA, 19 nt, Artificial Sequence
  Description of Artificial Sequence: Synthetic oligonucleotide
ccacuuugggguugcucag

SEQ ID NO: 2910403 - RNA, 19 nt, Artificial Sequence
  Description of Artificial Sequence: Synthetic oligonucleotide
guuuugcaguaaagcccug

SEQ ID NO: 2910404 - RNA, 19 nt, Artificial Sequence
  Description of Artificial Sequence: Synthetic oligonucleotide
cuggugaauuagacugaaa

SEQ ID NO: 2910405 - RNA, 19 nt, Artificial Sequence
  Description of Artificial Sequence: Synthetic oligonucleotide
gaccacugcugggagcuaa

SEQ ID NO: 2910406 - RNA, 19 nt, Artificial Sequence
  Description of Artificial Sequence: Synthetic oligonucleotide
gugucuucuccagacuugu

SEQ ID NO: 2910407 - RNA, 19 nt, Artificial Sequence
  Description of Artificial Sequence: Synthetic oligonucleotide
gggagcuaauaaagacgag

SEQ ID NO: 2910408 - RNA, 19 nt, Artificial Sequence
  Description of Artificial Sequence: Synthetic oligonucleotide
ugggguugcucagcuggau

SEQ ID NO: 2910409 - RNA, 19 nt, Artificial Sequence
  Description of Artificial Sequence: Synthetic oligonucleotide
caguaucaccacugaaggu

SEQ ID NO: 2910410 - RNA, 19 nt, Artificial Sequence
  Description of Artificial Sequence: Synthetic oligonucleotide
gcuuuuguugccccaugcu

SEQ ID NO: 2910411 - RNA, 19 nt, Artificial Sequence
  Description of Artificial Sequence: Synthetic oligonucleotide
caguaaagcccuggaggga

SEQ ID NO: 2910412 - RNA, 19 nt, Artificial Sequence
  Description of Artificial Sequence: Synthetic oligonucleotide
guugccccaugcuuguuuu

SEQ ID NO: 2910413 - RNA, 19 nt, Artificial Sequence
  Description of Artificial Sequence: Synthetic oligonucleotide
ggugcugaggaguggguau

SEQ ID NO: 2910414 - RNA, 19 nt, Artificial Sequence
  Description of Artificial Sequence: Synthetic oligonucleotide
guggccacucagguuuuga

SEQ ID NO: 2910415 - RNA, 19 nt, Artificial Sequence
  Description of Artificial Sequence: Synthetic oligonucleotide
gcuuguuuguccagggcua

SEQ ID NO: 2910416 - RNA, 19 nt, Artificial Sequence
  Description of Artificial Sequence: Synthetic oligonucleotide
gagggaagguugggacuga

SEQ ID NO: 2910417 - RNA, 19 nt, Artificial Sequence
  Description of Artificial Sequence: Synthetic oligonucleotide
uggauccuguguggauguc

SEQ ID NO: 2910418 - RNA, 19 nt, Artificial Sequence
  Description of Artificial Sequence: Synthetic oligonucleotide
ccaugcuuguuuugcagua

SEQ ID NO: 2910419 - RNA, 19 nt, Artificial Sequence
  Description of Artificial Sequence: Synthetic oligonucleotide
agggaagguugggacugaa

SEQ ID NO: 2910420 - RNA, 19 nt, Artificial Sequence
  Description of Artificial Sequence: Synthetic oligonucleotide
aucuuccuuugcacaugga

SEQ ID NO: 2910421 - RNA, 19 nt, Artificial Sequence
  Description of Artificial Sequence: Synthetic oligonucleotide
ggaugucugcaucuuguuu

SEQ ID NO: 2910422 - RNA, 19 nt, Artificial Sequence
  Description of Artificial Sequence: Synthetic oligonucleotide
gguugcucagcuggauaga

SEQ ID NO: 2910423 - RNA, 19 nt, Artificial Sequence
  Description of Artificial Sequence: Synthetic oligonucleotide
gcccuggagggaagguugg

SEQ ID NO: 2910424 - RNA, 19 nt, Artificial Sequence
  Description of Artificial Sequence: Synthetic oligonucleotide
gcugacuacuguccuggcu

SEQ ID NO: 2910425 - RNA, 19 nt, Artificial Sequence
  Description of Artificial Sequence: Synthetic oligonucleotide
ggcuaguguugugacuauc

SEQ ID NO: 2910426 - RNA, 19 nt, Artificial Sequence
  Description of Artificial Sequence: Synthetic oligonucleotide
gggguugcucagcuggaua

SEQ ID NO: 2910427 - RNA, 19 nt, Artificial Sequence
  Description of Artificial Sequence: Synthetic oligonucleotide
gccccaugcuuguuuugca

SEQ ID NO: 2910428 - RNA, 19 nt, Artificial Sequence
  Description of Artificial Sequence: Synthetic oligonucleotide
gggagacccaggagcuugc

SEQ ID NO: 2910429 - RNA, 19 nt, Artificial Sequence
  Description of Artificial Sequence: Synthetic oligonucleotide
accacugcugggagcuaau

SEQ ID NO: 2910430 - RNA, 19 nt, Artificial Sequence
  Description of Artificial Sequence: Synthetic oligonucleotide
acgaggcaacuaggggaga

SEQ ID NO: 2910431 - RNA, 19 nt, Artificial Sequence
  Description of Artificial Sequence: Synthetic oligonucleotide
cuucuccagacuuguuauu

SEQ ID NO: 2910432 - RNA, 19 nt, Artificial Sequence
  Description of Artificial Sequence: Synthetic oligonucleotide
gguuugagguggauccugu

SEQ ID NO: 2910433 - RNA, 19 nt, Artificial Sequence
  Description of Artificial Sequence: Synthetic oligonucleotide
cagggcuaguguugugacu

SEQ ID NO: 2910434 - RNA, 19 nt, Artificial Sequence
  Description of Artificial Sequence: Synthetic oligonucleotide
agucggguuugagguggau

SEQ ID NO: 2910435 - RNA, 19 nt, Artificial Sequence
  Description of Artificial Sequence: Synthetic oligonucleotide
cuacuguccuggcuuguuu

SEQ ID NO: 2910436 - RNA, 19 nt, Artificial Sequence
  Description of Artificial Sequence: Synthetic oligonucleotide
ggccacucagguuuugauu

SEQ ID NO: 2910437 - RNA, 19 nt, Artificial Sequence
  Description of Artificial Sequence: Synthetic oligonucleotide
cagucggguuugaggugga

SEQ ID NO: 2910438 - RNA, 19 nt, Artificial Sequence
  Description of Artificial Sequence: Synthetic oligonucleotide
cgaggcaacuaggggagac

SEQ ID NO: 2910439 - RNA, 19 nt, Artificial Sequence
  Description of Artificial Sequence: Synthetic oligonucleotide
ccuuugcacauggauuaga

SEQ ID NO: 2910440 - RNA, 19 nt, Artificial Sequence
  Description of Artificial Sequence: Synthetic oligonucleotide
ggcaacuaggggagaccca

SEQ ID NO: 2910441 - RNA, 19 nt, Artificial Sequence
  Description of Artificial Sequence: Synthetic oligonucleotide
ccuggagggaagguuggga

SEQ ID NO: 2910442 - RNA, 19 nt, Artificial Sequence
  Description of Artificial Sequence: Synthetic oligonucleotide
uuguugccccaugcuuguu

SEQ ID NO: 2910443 - RNA, 19 nt, Artificial Sequence
  Description of Artificial Sequence: Synthetic oligonucleotide
ccagacuuguuauuaucuu

SEQ ID NO: 2910444 - RNA, 19 nt, Artificial Sequence
  Description of Artificial Sequence: Synthetic oligonucleotide
cccaugcuuguuuugcagu

SEQ ID NO: 2910445 - RNA, 19 nt, Artificial Sequence
  Description of Artificial Sequence: Synthetic oligonucleotide
gggaagguugggacugaaa

SEQ ID NO: 2910446 - RNA, 19 nt, Artificial Sequence
  Description of Artificial Sequence: Synthetic oligonucleotide
cccuggagggaagguuggg

SEQ ID NO: 2910447 - RNA, 19 nt, Artificial Sequence
  Description of Artificial Sequence: Synthetic oligonucleotide
aggggagacccaggagcuu

SEQ ID NO: 2910448 - RNA, 19 nt, Artificial Sequence
  Description of Artificial Sequence: Synthetic oligonucleotide
ccaggagcuugcacuguaa

SEQ ID NO: 2910449 - RNA, 19 nt, Artificial Sequence
  Description of Artificial Sequence: Synthetic oligonucleotide
ggagacccaggagcuugca

SEQ ID NO: 2910450 - RNA, 19 nt, Artificial Sequence
  Description of Artificial Sequence: Synthetic oligonucleotide
gcuguguauuagaguggaa

SEQ ID NO: 2910451 - RNA, 19 nt, Artificial Sequence
  Description of Artificial Sequence: Synthetic oligonucleotide
gugcugaggaguggguauu

SEQ ID NO: 2910452 - RNA, 19 nt, Artificial Sequence
  Description of Artificial Sequence: Synthetic oligonucleotide
ccuguguggaugucugcau

SEQ ID NO: 2910453 - RNA, 19 nt, Artificial Sequence
  Description of Artificial Sequence: Synthetic oligonucleotide
agaccacugcugggagcua

SEQ ID NO: 2910454 - RNA, 19 nt, Artificial Sequence
  Description of Artificial Sequence: Synthetic oligonucleotide
cccaggagcuugcacugua

SEQ ID NO: 2910455 - RNA, 19 nt, Artificial Sequence
  Description of Artificial Sequence: Synthetic oligonucleotide
gcucagcuggauagacaaa

SEQ ID NO: 2910456 - RNA, 19 nt, Artificial Sequence
  Description of Artificial Sequence: Synthetic oligonucleotide
ccacugaagguggaggcau

SEQ ID NO: 2910457 - RNA, 19 nt, Artificial Sequence
  Description of Artificial Sequence: Synthetic oligonucleotide
gggcuaguguugugacuau

SEQ ID NO: 2910458 - RNA, 19 nt, Artificial Sequence
  Description of Artificial Sequence: Synthetic oligonucleotide
gcaucuuguuuggcugacu

SEQ ID NO: 2910459 - RNA, 19 nt, Artificial Sequence
  Description of Artificial Sequence: Synthetic oligonucleotide
guaccacuuugggguugcu

SEQ ID NO: 2910460 - RNA, 19 nt, Artificial Sequence
  Description of Artificial Sequence: Synthetic oligonucleotide
ccacucagguuuugauuuu

SEQ ID NO: 2910461 - RNA, 19 nt, Artificial Sequence
  Description of Artificial Sequence: Synthetic oligonucleotide
cguggccacucagguuuug

SEQ ID NO: 2910462 - RNA, 19 nt, Artificial Sequence
  Description of Artificial Sequence: Synthetic oligonucleotide
ccacugcugggagcuaaua

SEQ ID NO: 2910463 - RNA, 19 nt, Artificial Sequence
  Description of Artificial Sequence: Synthetic oligonucleotide
cggguuugagguggauccu

SEQ ID NO: 2910464 - RNA, 19 nt, Artificial Sequence
  Description of Artificial Sequence: Synthetic oligonucleotide
auuauuuuaacuuaaaagg

SEQ ID NO: 2910465 - RNA, 19 nt, Artificial Sequence
  Description of Artificial Sequence: Synthetic oligonucleotide
aauauaaucuaucacagag

SEQ ID NO: 2910466 - RNA, 19 nt, Artificial Sequence
  Description of Artificial Sequence: Synthetic oligonucleotide
aaauacuucauuugguugc

SEQ ID NO: 2910467 - RNA, 19 nt, Artificial Sequence
  Description of Artificial Sequence: Synthetic oligonucleotide
uaaucuaucacagagauag

SEQ ID NO: 2910468 - RNA, 19 nt, Artificial Sequence
  Description of Artificial Sequence: Synthetic oligonucleotide
uaugcaauuagaaauacag

SEQ ID NO: 2910469 - RNA, 19 nt, Artificial Sequence
  Description of Artificial Sequence: Synthetic oligonucleotide
aagaccauguaauauaagg

SEQ ID NO: 2910470 - RNA, 19 nt, Artificial Sequence
  Description of Artificial Sequence: Synthetic oligonucleotide
auaaauauaaucuaucaca

SEQ ID NO: 2910471 - RNA, 19 nt, Artificial Sequence
  Description of Artificial Sequence: Synthetic oligonucleotide
aaggaaaguaccgaaaucc

SEQ ID NO: 2910472 - RNA, 19 nt, Artificial Sequence
  Description of Artificial Sequence: Synthetic oligonucleotide
auaaugaucaaguaguguc

SEQ ID NO: 2910473 - RNA, 19 nt, Artificial Sequence
  Description of Artificial Sequence: Synthetic oligonucleotide
uaaaacaaaucaaauauca

SEQ ID NO: 2910474 - RNA, 19 nt, Artificial Sequence
  Description of Artificial Sequence: Synthetic oligonucleotide
accaauauauauuauguac

SEQ ID NO: 2910475 - RNA, 19 nt, Artificial Sequence
  Description of Artificial Sequence: Synthetic oligonucleotide
ucaaauaucaauagauuag

SEQ ID NO: 2910476 - RNA, 19 nt, Artificial Sequence
  Description of Artificial Sequence: Synthetic oligonucleotide
uaaauaugcaauuagaaau

SEQ ID NO: 2910477 - RNA, 19 nt, Artificial Sequence
  Description of Artificial Sequence: Synthetic oligonucleotide
uaaauauaaucuaucacag

SEQ ID NO: 2910478 - RNA, 19 nt, Artificial Sequence
  Description of Artificial Sequence: Synthetic oligonucleotide
uugacaaaauuaaauaugc

SEQ ID NO: 2910479 - RNA, 19 nt, Artificial Sequence
  Description of Artificial Sequence: Synthetic oligonucleotide
acagauucaacucaugaac

SEQ ID NO: 2910480 - RNA, 19 nt, Artificial Sequence
  Description of Artificial Sequence: Synthetic oligonucleotide
aaauuacauuuacagauuc

SEQ ID NO: 2910481 - RNA, 19 nt, Artificial Sequence
  Description of Artificial Sequence: Synthetic oligonucleotide
aacuuaaaaggaaaguacc

SEQ ID NO: 2910482 - RNA, 19 nt, Artificial Sequence
  Description of Artificial Sequence: Synthetic oligonucleotide
uguaauauaagguuucaug

SEQ ID NO: 2910483 - RNA, 19 nt, Artificial Sequence
  Description of Artificial Sequence: Synthetic oligonucleotide
uagauuaggauaaauauaa

SEQ ID NO: 2910484 - RNA, 19 nt, Artificial Sequence
  Description of Artificial Sequence: Synthetic oligonucleotide
aaacaaaucaaauaucaau

SEQ ID NO: 2910485 - RNA, 19 nt, Artificial Sequence
  Description of Artificial Sequence: Synthetic oligonucleotide
acauauuuucauuauguac

SEQ ID NO: 2910486 - RNA, 19 nt, Artificial Sequence
  Description of Artificial Sequence: Synthetic oligonucleotide
uugcaaauuacauuuacag

SEQ ID NO: 2910487 - RNA, 19 nt, Artificial Sequence
  Description of Artificial Sequence: Synthetic oligonucleotide
caaguagugucaaagaagg

SEQ ID NO: 2910488 - RNA, 19 nt, Artificial Sequence
  Description of Artificial Sequence: Synthetic oligonucleotide
aauaucaauagauuaggau

SEQ ID NO: 2910489 - RNA, 19 nt, Artificial Sequence
  Description of Artificial Sequence: Synthetic oligonucleotide
aaauacacuugacauaaug

SEQ ID NO: 2910490 - RNA, 19 nt, Artificial Sequence
  Description of Artificial Sequence: Synthetic oligonucleotide
uacauuuacagauucaacu

SEQ ID NO: 2910491 - RNA, 19 nt, Artificial Sequence
  Description of Artificial Sequence: Synthetic oligonucleotide
ugacauaaugaucaaguag

SEQ ID NO: 2910492 - RNA, 19 nt, Artificial Sequence
  Description of Artificial Sequence: Synthetic oligonucleotide
aguaccgaaauccagguag

SEQ ID NO: 2910493 - RNA, 19 nt, Artificial Sequence
  Description of Artificial Sequence: Synthetic oligonucleotide
auuaggauaaauauaaucu

SEQ ID NO: 2910494 - RNA, 19 nt, Artificial Sequence
  Description of Artificial Sequence: Synthetic oligonucleotide
aauauugguuccuucaccu

SEQ ID NO: 2910495 - RNA, 19 nt, Artificial Sequence
  Description of Artificial Sequence: Synthetic oligonucleotide
uaaccaauauauauuaugu

SEQ ID NO: 2910496 - RNA, 19 nt, Artificial Sequence
  Description of Artificial Sequence: Synthetic oligonucleotide
aaaauuuucuaaccaauau

SEQ ID NO: 2910497 - RNA, 19 nt, Artificial Sequence
  Description of Artificial Sequence: Synthetic oligonucleotide
ugcaauuagaaauacagau

SEQ ID NO: 2910498 - RNA, 19 nt, Artificial Sequence
  Description of Artificial Sequence: Synthetic oligonucleotide
uauaaucuaucacagagau

SEQ ID NO: 2910499 - RNA, 19 nt, Artificial Sequence
  Description of Artificial Sequence: Synthetic oligonucleotide
aaaucaaauaucaauagau

SEQ ID NO: 2910500 - RNA, 19 nt, Artificial Sequence
  Description of Artificial Sequence: Synthetic oligonucleotide
ucaaguagugucaaagaag

SEQ ID NO: 2910501 - RNA, 19 nt, Artificial Sequence
  Description of Artificial Sequence: Synthetic oligonucleotide
gauaaauauaaucuaucac

SEQ ID NO: 2910502 - RNA, 19 nt, Artificial Sequence
  Description of Artificial Sequence: Synthetic oligonucleotide
uauguacaagucaauauug

SEQ ID NO: 2910503 - RNA, 19 nt, Artificial Sequence
  Description of Artificial Sequence: Synthetic oligonucleotide
acauuuacagauucaacuc

SEQ ID NO: 2910504 - RNA, 19 nt, Artificial Sequence
  Description of Artificial Sequence: Synthetic oligonucleotide
uaacuuaaaaggaaaguac

SEQ ID NO: 2910505 - RNA, 19 nt, Artificial Sequence
  Description of Artificial Sequence: Synthetic oligonucleotide
ugaacauuucucaauguug

SEQ ID NO: 2910506 - RNA, 19 nt, Artificial Sequence
  Description of Artificial Sequence: Synthetic oligonucleotide
aauaugcaauuagaaauac

SEQ ID NO: 2910507 - RNA, 19 nt, Artificial Sequence
  Description of Artificial Sequence: Synthetic oligonucleotide
aaaggaaaguaccgaaauc

SEQ ID NO: 2910508 - RNA, 19 nt, Artificial Sequence
  Description of Artificial Sequence: Synthetic oligonucleotide
uucauuauguacaagucaa

SEQ ID NO: 2910509 - RNA, 19 nt, Artificial Sequence
  Description of Artificial Sequence: Synthetic oligonucleotide
gauuaggauaaauauaauc

SEQ ID NO: 2910510 - RNA, 19 nt, Artificial Sequence
  Description of Artificial Sequence: Synthetic oligonucleotide
acaaaucaaauaucaauag

SEQ ID NO: 2910511 - RNA, 19 nt, Artificial Sequence
  Description of Artificial Sequence: Synthetic oligonucleotide
auaucaauagauuaggaua

SEQ ID NO: 2910512 - RNA, 19 nt, Artificial Sequence
  Description of Artificial Sequence: Synthetic oligonucleotide
uaucaauagauuaggauaa

SEQ ID NO: 2910513 - RNA, 19 nt, Artificial Sequence
  Description of Artificial Sequence: Synthetic oligonucleotide
uauuuuaacuuaaaaggaa

SEQ ID NO: 2910514 - RNA, 19 nt, Artificial Sequence
  Description of Artificial Sequence: Synthetic oligonucleotide
auagaauuucuuucaauag

SEQ ID NO: 2910515 - RNA, 19 nt, Artificial Sequence
  Description of Artificial Sequence: Synthetic oligonucleotide
uccucuaccagacaccagg

SEQ ID NO: 2910516 - RNA, 19 nt, Artificial Sequence
  Description of Artificial Sequence: Synthetic oligonucleotide
aaaaggaaaguaccgaaau

SEQ ID NO: 2910517 - RNA, 19 nt, Artificial Sequence
  Description of Artificial Sequence: Synthetic oligonucleotide
gaacauuucucaauguugg

SEQ ID NO: 2910518 - RNA, 19 nt, Artificial Sequence
  Description of Artificial Sequence: Synthetic oligonucleotide
ucaugaacauuucucaaug

SEQ ID NO: 2910519 - RNA, 19 nt, Artificial Sequence
  Description of Artificial Sequence: Synthetic oligonucleotide
cuaaccaauauauauuaug

SEQ ID NO: 2910520 - RNA, 19 nt, Artificial Sequence
  Description of Artificial Sequence: Synthetic oligonucleotide
aacucaugaacauuucuca

SEQ ID NO: 2910521 - RNA, 19 nt, Artificial Sequence
  Description of Artificial Sequence: Synthetic oligonucleotide
agaaauacagauuauuuua

SEQ ID NO: 2910522 - RNA, 19 nt, Artificial Sequence
  Description of Artificial Sequence: Synthetic oligonucleotide
uagaauuucuuucaauaga

SEQ ID NO: 2910523 - RNA, 19 nt, Artificial Sequence
  Description of Artificial Sequence: Synthetic oligonucleotide
ucuuaaaacaaaucaaaua

SEQ ID NO: 2910524 - RNA, 19 nt, Artificial Sequence
  Description of Artificial Sequence: Synthetic oligonucleotide
aaauuuucuaaccaauaua

SEQ ID NO: 2910525 - RNA, 19 nt, Artificial Sequence
  Description of Artificial Sequence: Synthetic oligonucleotide
gaaaguaccgaaauccagg

SEQ ID NO: 2910526 - RNA, 19 nt, Artificial Sequence
  Description of Artificial Sequence: Synthetic oligonucleotide
uuagaaauacagauuauuu

SEQ ID NO: 2910527 - RNA, 19 nt, Artificial Sequence
  Description of Artificial Sequence: Synthetic oligonucleotide
uacaagucaauauugguuc

SEQ ID NO: 2910528 - RNA, 19 nt, Artificial Sequence
  Description of Artificial Sequence: Synthetic oligonucleotide
uauauacacacauauuuuc

SEQ ID NO: 2910529 - RNA, 19 nt, Artificial Sequence
  Description of Artificial Sequence: Synthetic oligonucleotide
uuucaauagacaauacuaa

SEQ ID NO: 2910530 - RNA, 19 nt, Artificial Sequence
  Description of Artificial Sequence: Synthetic oligonucleotide
uaaauacuucauuugguug

SEQ ID NO: 2910531 - RNA, 19 nt, Artificial Sequence
  Description of Artificial Sequence: Synthetic oligonucleotide
uguugguugacaaaauuaa

SEQ ID NO: 2910532 - RNA, 19 nt, Artificial Sequence
  Description of Artificial Sequence: Synthetic oligonucleotide
caaauaucaauagauuagg

SEQ ID NO: 2910533 - RNA, 19 nt, Artificial Sequence
  Description of Artificial Sequence: Synthetic oligonucleotide
uuacagauucaacucauga

SEQ ID NO: 2910534 - RNA, 19 nt, Artificial Sequence
  Description of Artificial Sequence: Synthetic oligonucleotide
uuauguacaagucaauauu

SEQ ID NO: 2910535 - RNA, 19 nt, Artificial Sequence
  Description of Artificial Sequence: Synthetic oligonucleotide
ucuuucaauagacaauacu

SEQ ID NO: 2910536 - RNA, 19 nt, Artificial Sequence
  Description of Artificial Sequence: Synthetic oligonucleotide
uugguugcaaauuacauuu

SEQ ID NO: 2910537 - RNA, 19 nt, Artificial Sequence
  Description of Artificial Sequence: Synthetic oligonucleotide
gauagaauuucuuucaaua

SEQ ID NO: 2910538 - RNA, 19 nt, Artificial Sequence
  Description of Artificial Sequence: Synthetic oligonucleotide
ugaucaaguagugucaaag

SEQ ID NO: 2910539 - RNA, 19 nt, Artificial Sequence
  Description of Artificial Sequence: Synthetic oligonucleotide
aacaaaucaaauaucaaua

SEQ ID NO: 2910540 - RNA, 19 nt, Artificial Sequence
  Description of Artificial Sequence: Synthetic oligonucleotide
guacucuuaaaacaaauca

SEQ ID NO: 2910541 - RNA, 19 nt, Artificial Sequence
  Description of Artificial Sequence: Synthetic oligonucleotide
cuuaaaacaaaucaaauau

SEQ ID NO: 2910542 - RNA, 19 nt, Artificial Sequence
  Description of Artificial Sequence: Synthetic oligonucleotide
aucaaauaucaauagauua

SEQ ID NO: 2910543 - RNA, 19 nt, Artificial Sequence
  Description of Artificial Sequence: Synthetic oligonucleotide
agagauagaauuucuuuca

SEQ ID NO: 2910544 - RNA, 19 nt, Artificial Sequence
  Description of Artificial Sequence: Synthetic oligonucleotide
aauacacuugacauaauga

SEQ ID NO: 2910545 - RNA, 19 nt, Artificial Sequence
  Description of Artificial Sequence: Synthetic oligonucleotide
uacucuuaaaacaaaucaa

SEQ ID NO: 2910546 - RNA, 19 nt, Artificial Sequence
  Description of Artificial Sequence: Synthetic oligonucleotide
auacagauuauuuuaacuu

SEQ ID NO: 2910547 - RNA, 19 nt, Artificial Sequence
  Description of Artificial Sequence: Synthetic oligonucleotide
ucuuugaagugccaucucc

SEQ ID NO: 2910548 - RNA, 19 nt, Artificial Sequence
  Description of Artificial Sequence: Synthetic oligonucleotide
uuaaaaggaaaguaccgaa

SEQ ID NO: 2910549 - RNA, 19 nt, Artificial Sequence
  Description of Artificial Sequence: Synthetic oligonucleotide
uuuucauuauguacaaguc

SEQ ID NO: 2910550 - RNA, 19 nt, Artificial Sequence
  Description of Artificial Sequence: Synthetic oligonucleotide
cauuucucaauguugguug

SEQ ID NO: 2910551 - RNA, 19 nt, Artificial Sequence
  Description of Artificial Sequence: Synthetic oligonucleotide
aaauauaaucuaucacaga

SEQ ID NO: 2910552 - RNA, 19 nt, Artificial Sequence
  Description of Artificial Sequence: Synthetic oligonucleotide
aaaguaccgaaauccaggu

SEQ ID NO: 2910553 - RNA, 19 nt, Artificial Sequence
  Description of Artificial Sequence: Synthetic oligonucleotide
uaaugaucaaguaguguca

SEQ ID NO: 2910554 - RNA, 19 nt, Artificial Sequence
  Description of Artificial Sequence: Synthetic oligonucleotide
aaaauuaaauaugcaauua

SEQ ID NO: 2910555 - RNA, 19 nt, Artificial Sequence
  Description of Artificial Sequence: Synthetic oligonucleotide
cuuucaauagacaauacua

SEQ ID NO: 2910556 - RNA, 19 nt, Artificial Sequence
  Description of Artificial Sequence: Synthetic oligonucleotide
uuucuaaccaauauauauu

SEQ ID NO: 2910557 - RNA, 19 nt, Artificial Sequence
  Description of Artificial Sequence: Synthetic oligonucleotide
uccagguagcuuauuaugc

SEQ ID NO: 2910558 - RNA, 19 nt, Artificial Sequence
  Description of Artificial Sequence: Synthetic oligonucleotide
uaggauaaauauaaucuau

SEQ ID NO: 2910559 - RNA, 19 nt, Artificial Sequence
  Description of Artificial Sequence: Synthetic oligonucleotide
uagcuuauuaugcuuaaaa

SEQ ID NO: 2910560 - RNA, 19 nt, Artificial Sequence
  Description of Artificial Sequence: Synthetic oligonucleotide
uucuguacucuuaaaacaa

SEQ ID NO: 2910561 - RNA, 19 nt, Artificial Sequence
  Description of Artificial Sequence: Synthetic oligonucleotide
acaaaauuaaauaugcaau

SEQ ID NO: 2910562 - RNA, 19 nt, Artificial Sequence
  Description of Artificial Sequence: Synthetic oligonucleotide
uguacucuuaaaacaaauc

SEQ ID NO: 2910563 - RNA, 19 nt, Artificial Sequence
  Description of Artificial Sequence: Synthetic oligonucleotide
agugccaucuccuuuccuc

SEQ ID NO: 2910564 - RNA, 19 nt, Artificial Sequence
  Description of Artificial Sequence: Synthetic oligonucleotide
ugcaaauuacauuuacaga

SEQ ID NO: 2910565 - RNA, 19 nt, Artificial Sequence
  Description of Artificial Sequence: Synthetic oligonucleotide
uucuaaccaauauauauua

SEQ ID NO: 2910566 - RNA, 19 nt, Artificial Sequence
  Description of Artificial Sequence: Synthetic oligonucleotide
uuucaugucuuugaagugc

SEQ ID NO: 2910567 - RNA, 19 nt, Artificial Sequence
  Description of Artificial Sequence: Synthetic oligonucleotide
acuuaaaaggaaaguaccg

SEQ ID NO: 2910568 - RNA, 19 nt, Artificial Sequence
  Description of Artificial Sequence: Synthetic oligonucleotide
uaauauaagguuucauguc

SEQ ID NO: 2910569 - RNA, 19 nt, Artificial Sequence
  Description of Artificial Sequence: Synthetic oligonucleotide
ucaauguugguugacaaaa

SEQ ID NO: 2910570 - RNA, 19 nt, Artificial Sequence
  Description of Artificial Sequence: Synthetic oligonucleotide
uucaauagacaauacuaaa

SEQ ID NO: 2910571 - RNA, 19 nt, Artificial Sequence
  Description of Artificial Sequence: Synthetic oligonucleotide
uguacaagucaauauuggu

SEQ ID NO: 2910572 - RNA, 19 nt, Artificial Sequence
  Description of Artificial Sequence: Synthetic oligonucleotide
auacacuugacauaaugau

SEQ ID NO: 2910573 - RNA, 19 nt, Artificial Sequence
  Description of Artificial Sequence: Synthetic oligonucleotide
ucaauauugguuccuucac

SEQ ID NO: 2910574 - RNA, 19 nt, Artificial Sequence
  Description of Artificial Sequence: Synthetic oligonucleotide
uagaaauacagauuauuuu

SEQ ID NO: 2910575 - RNA, 19 nt, Artificial Sequence
  Description of Artificial Sequence: Synthetic oligonucleotide
caauuagaaauacagauua

SEQ ID NO: 2910576 - RNA, 19 nt, Artificial Sequence
  Description of Artificial Sequence: Synthetic oligonucleotide
uuucuuucaauagacaaua

SEQ ID NO: 2910577 - RNA, 19 nt, Artificial Sequence
  Description of Artificial Sequence: Synthetic oligonucleotide
ugguugacaaaauuaaaua

SEQ ID NO: 2910578 - RNA, 19 nt, Artificial Sequence
  Description of Artificial Sequence: Synthetic oligonucleotide
guaauauaagguuucaugu

SEQ ID NO: 2910579 - RNA, 19 nt, Artificial Sequence
  Description of Artificial Sequence: Synthetic oligonucleotide
acacuugacauaaugauca

SEQ ID NO: 2910580 - RNA, 19 nt, Artificial Sequence
  Description of Artificial Sequence: Synthetic oligonucleotide
auuaaauaugcaauuagaa

SEQ ID NO: 2910581 - RNA, 19 nt, Artificial Sequence
  Description of Artificial Sequence: Synthetic oligonucleotide
aauguugguugacaaaauu

SEQ ID NO: 2910582 - RNA, 19 nt, Artificial Sequence
  Description of Artificial Sequence: Synthetic oligonucleotide
uaaaaggaaaguaccgaaa

SEQ ID NO: 2910583 - RNA, 19 nt, Artificial Sequence
  Description of Artificial Sequence: Synthetic oligonucleotide
aucacagagauagaauuuc

SEQ ID NO: 2910584 - RNA, 19 nt, Artificial Sequence
  Description of Artificial Sequence: Synthetic oligonucleotide
gacauaaugaucaaguagu

SEQ ID NO: 2910585 - RNA, 19 nt, Artificial Sequence
  Description of Artificial Sequence: Synthetic oligonucleotide
ugacaaaauuaaauaugca

SEQ ID NO: 2910586 - RNA, 19 nt, Artificial Sequence
  Description of Artificial Sequence: Synthetic oligonucleotide
uacagauuauuuuaacuua

SEQ ID NO: 2910587 - RNA, 19 nt, Artificial Sequence
  Description of Artificial Sequence: Synthetic oligonucleotide
uucauuugguugcaaauua

SEQ ID NO: 2910588 - RNA, 19 nt, Artificial Sequence
  Description of Artificial Sequence: Synthetic oligonucleotide
uacacuugacauaaugauc

SEQ ID NO: 2910589 - RNA, 19 nt, Artificial Sequence
  Description of Artificial Sequence: Synthetic oligonucleotide
aggauaaauauaaucuauc

SEQ ID NO: 2910590 - RNA, 19 nt, Artificial Sequence
  Description of Artificial Sequence: Synthetic oligonucleotide
uacacacauauuuucauua

SEQ ID NO: 2910591 - RNA, 19 nt, Artificial Sequence
  Description of Artificial Sequence: Synthetic oligonucleotide
cagagauagaauuucuuuc

SEQ ID NO: 2910592 - RNA, 19 nt, Artificial Sequence
  Description of Artificial Sequence: Synthetic oligonucleotide
ucuaucacagagauagaau

SEQ ID NO: 2910593 - RNA, 19 nt, Artificial Sequence
  Description of Artificial Sequence: Synthetic oligonucleotide
uuacauuuacagauucaac

SEQ ID NO: 2910594 - RNA, 19 nt, Artificial Sequence
  Description of Artificial Sequence: Synthetic oligonucleotide
ucaacucaugaacauuucu

SEQ ID NO: 2910595 - RNA, 19 nt, Artificial Sequence
  Description of Artificial Sequence: Synthetic oligonucleotide
aaauaugcaauuagaaaua

SEQ ID NO: 2910596 - RNA, 19 nt, Artificial Sequence
  Description of Artificial Sequence: Synthetic oligonucleotide
uauacacacauauuuucau

SEQ ID NO: 2910597 - RNA, 19 nt, Artificial Sequence
  Description of Artificial Sequence: Synthetic oligonucleotide
auuacauuuacagauucaa

SEQ ID NO: 2910598 - RNA, 19 nt, Artificial Sequence
  Description of Artificial Sequence: Synthetic oligonucleotide
aaauccagguagcuuauua

SEQ ID NO: 2910599 - RNA, 19 nt, Artificial Sequence
  Description of Artificial Sequence: Synthetic oligonucleotide
uacagauucaacucaugaa

SEQ ID NO: 2910600 - RNA, 19 nt, Artificial Sequence
  Description of Artificial Sequence: Synthetic oligonucleotide
ucuccuuuccucuaccaga

SEQ ID NO: 2910601 - RNA, 19 nt, Artificial Sequence
  Description of Artificial Sequence: Synthetic oligonucleotide
aaccaauauauauuaugua

SEQ ID NO: 2910602 - RNA, 19 nt, Artificial Sequence
  Description of Artificial Sequence: Synthetic oligonucleotide
aucaaguagugucaaagaa

SEQ ID NO: 2910603 - RNA, 19 nt, Artificial Sequence
  Description of Artificial Sequence: Synthetic oligonucleotide
guucuguacucuuaaaaca

SEQ ID NO: 2910604 - RNA, 19 nt, Artificial Sequence
  Description of Artificial Sequence: Synthetic oligonucleotide
caacucaugaacauuucuc

SEQ ID NO: 2910605 - RNA, 19 nt, Artificial Sequence
  Description of Artificial Sequence: Synthetic oligonucleotide
uuuacagauucaacucaug

SEQ ID NO: 2910606 - RNA, 19 nt, Artificial Sequence
  Description of Artificial Sequence: Synthetic oligonucleotide
aaucaaauaucaauagauu

SEQ ID NO: 2910607 - RNA, 19 nt, Artificial Sequence
  Description of Artificial Sequence: Synthetic oligonucleotide
ggauaaauauaaucuauca

SEQ ID NO: 2910608 - RNA, 19 nt, Artificial Sequence
  Description of Artificial Sequence: Synthetic oligonucleotide
acacauauuuucauuaugu

SEQ ID NO: 2910609 - RNA, 19 nt, Artificial Sequence
  Description of Artificial Sequence: Synthetic oligonucleotide
cuugacauaaugaucaagu

SEQ ID NO: 2910610 - RNA, 19 nt, Artificial Sequence
  Description of Artificial Sequence: Synthetic oligonucleotide
aaauaucaauagauuagga

SEQ ID NO: 2910611 - RNA, 19 nt, Artificial Sequence
  Description of Artificial Sequence: Synthetic oligonucleotide
uccaagaccauguaauaua

SEQ ID NO: 2910612 - RNA, 19 nt, Artificial Sequence
  Description of Artificial Sequence: Synthetic oligonucleotide
augucuuugaagugccauc

SEQ ID NO: 2910613 - RNA, 19 nt, Artificial Sequence
  Description of Artificial Sequence: Synthetic oligonucleotide
ugaagugccaucuccuuuc

SEQ ID NO: 2910614 - RNA, 19 nt, Artificial Sequence
  Description of Artificial Sequence: Synthetic oligonucleotide
aacauccaagaccauguaa

SEQ ID NO: 2910615 - RNA, 19 nt, Artificial Sequence
  Description of Artificial Sequence: Synthetic oligonucleotide
caauauugguuccuucacc

SEQ ID NO: 2910616 - RNA, 19 nt, Artificial Sequence
  Description of Artificial Sequence: Synthetic oligonucleotide
auccagguagcuuauuaug

SEQ ID NO: 2910617 - RNA, 19 nt, Artificial Sequence
  Description of Artificial Sequence: Synthetic oligonucleotide
auuagaaauacagauuauu

SEQ ID NO: 2910618 - RNA, 19 nt, Artificial Sequence
  Description of Artificial Sequence: Synthetic oligonucleotide
gaucaaguagugucaaaga

SEQ ID NO: 2910619 - RNA, 19 nt, Artificial Sequence
  Description of Artificial Sequence: Synthetic oligonucleotide
gucaauauugguuccuuca

SEQ ID NO: 2910620 - RNA, 19 nt, Artificial Sequence
  Description of Artificial Sequence: Synthetic oligonucleotide
aauuacauuuacagauuca

SEQ ID NO: 2910621 - RNA, 19 nt, Artificial Sequence
  Description of Artificial Sequence: Synthetic oligonucleotide
auuuuaacuuaaaaggaaa

SEQ ID NO: 2910622 - RNA, 19 nt, Artificial Sequence
  Description of Artificial Sequence: Synthetic oligonucleotide
agucaauauugguuccuuc

SEQ ID NO: 2910623 - RNA, 19 nt, Artificial Sequence
  Description of Artificial Sequence: Synthetic oligonucleotide
aacauuucucaauguuggu

SEQ ID NO: 2910624 - RNA, 19 nt, Artificial Sequence
  Description of Artificial Sequence: Synthetic oligonucleotide
gcaaauuacauuuacagau

SEQ ID NO: 2910625 - RNA, 19 nt, Artificial Sequence
  Description of Artificial Sequence: Synthetic oligonucleotide
aagguuucaugucuuugaa

SEQ ID NO: 2910626 - RNA, 19 nt, Artificial Sequence
  Description of Artificial Sequence: Synthetic oligonucleotide
auguacaagucaauauugg

SEQ ID NO: 2910627 - RNA, 19 nt, Artificial Sequence
  Description of Artificial Sequence: Synthetic oligonucleotide
aauacuucauuugguugca

SEQ ID NO: 2910628 - RNA, 19 nt, Artificial Sequence
  Description of Artificial Sequence: Synthetic oligonucleotide
uaucacagagauagaauuu

SEQ ID NO: 2910629 - RNA, 19 nt, Artificial Sequence
  Description of Artificial Sequence: Synthetic oligonucleotide
caauagauuaggauaaaua

SEQ ID NO: 2910630 - RNA, 19 nt, Artificial Sequence
  Description of Artificial Sequence: Synthetic oligonucleotide
ugucuuugaagugccaucu

SEQ ID NO: 2910631 - RNA, 19 nt, Artificial Sequence
  Description of Artificial Sequence: Synthetic oligonucleotide
caaaucaaauaucaauaga

SEQ ID NO: 2910632 - RNA, 19 nt, Artificial Sequence
  Description of Artificial Sequence: Synthetic oligonucleotide
acuucauuugguugcaaau

SEQ ID NO: 2910633 - RNA, 19 nt, Artificial Sequence
  Description of Artificial Sequence: Synthetic oligonucleotide
acucuuaaaacaaaucaaa

SEQ ID NO: 2910634 - RNA, 19 nt, Artificial Sequence
  Description of Artificial Sequence: Synthetic oligonucleotide
cuuuccucuaccagacacc

SEQ ID NO: 2910635 - RNA, 19 nt, Artificial Sequence
  Description of Artificial Sequence: Synthetic oligonucleotide
augaacauuucucaauguu

SEQ ID NO: 2910636 - RNA, 19 nt, Artificial Sequence
  Description of Artificial Sequence: Synthetic oligonucleotide
ucuguacucuuaaaacaaa

SEQ ID NO: 2910637 - RNA, 19 nt, Artificial Sequence
  Description of Artificial Sequence: Synthetic oligonucleotide
ucuaaccaauauauauuau

SEQ ID NO: 2910638 - RNA, 19 nt, Artificial Sequence
  Description of Artificial Sequence: Synthetic oligonucleotide
auauacacacauauuuuca

SEQ ID NO: 2910639 - RNA, 19 nt, Artificial Sequence
  Description of Artificial Sequence: Synthetic oligonucleotide
aaugaucaaguagugucaa

SEQ ID NO: 2910640 - RNA, 19 nt, Artificial Sequence
  Description of Artificial Sequence: Synthetic oligonucleotide
ucucaauguugguugacaa

SEQ ID NO: 2910641 - RNA, 19 nt, Artificial Sequence
  Description of Artificial Sequence: Synthetic oligonucleotide
uugacauaaugaucaagua

SEQ ID NO: 2910642 - RNA, 19 nt, Artificial Sequence
  Description of Artificial Sequence: Synthetic oligonucleotide
uagugucaaagaaggaaaa

SEQ ID NO: 2910643 - RNA, 19 nt, Artificial Sequence
  Description of Artificial Sequence: Synthetic oligonucleotide
cauuuacagauucaacuca

SEQ ID NO: 2910644 - RNA, 19 nt, Artificial Sequence
  Description of Artificial Sequence: Synthetic oligonucleotide
uuuccucuaccagacacca

SEQ ID NO: 2910645 - RNA, 19 nt, Artificial Sequence
  Description of Artificial Sequence: Synthetic oligonucleotide
agauucaacucaugaacau

SEQ ID NO: 2910646 - RNA, 19 nt, Artificial Sequence
  Description of Artificial Sequence: Synthetic oligonucleotide
agauagaauuucuuucaau

SEQ ID NO: 2910647 - RNA, 19 nt, Artificial Sequence
  Description of Artificial Sequence: Synthetic oligonucleotide
agaccauguaauauaaggu

SEQ ID NO: 2910648 - RNA, 19 nt, Artificial Sequence
  Description of Artificial Sequence: Synthetic oligonucleotide
cacacauauuuucauuaug

SEQ ID NO: 2910649 - RNA, 19 nt, Artificial Sequence
  Description of Artificial Sequence: Synthetic oligonucleotide
agguuucaugucuuugaag

SEQ ID NO: 2910650 - RNA, 19 nt, Artificial Sequence
  Description of Artificial Sequence: Synthetic oligonucleotide
cauuugguugcaaauuaca

SEQ ID NO: 2910651 - RNA, 19 nt, Artificial Sequence
  Description of Artificial Sequence: Synthetic oligonucleotide
acauccaagaccauguaau

SEQ ID NO: 2910652 - RNA, 19 nt, Artificial Sequence
  Description of Artificial Sequence: Synthetic oligonucleotide
ucaauagauuaggauaaau

SEQ ID NO: 2910653 - RNA, 19 nt, Artificial Sequence
  Description of Artificial Sequence: Synthetic oligonucleotide
auauaaucuaucacagaga

SEQ ID NO: 2910654 - RNA, 19 nt, Artificial Sequence
  Description of Artificial Sequence: Synthetic oligonucleotide
aucuccuuuccucuaccag

SEQ ID NO: 2910655 - RNA, 19 nt, Artificial Sequence
  Description of Artificial Sequence: Synthetic oligonucleotide
aauuagaaauacagauuau

SEQ ID NO: 2910656 - RNA, 19 nt, Artificial Sequence
  Description of Artificial Sequence: Synthetic oligonucleotide
uucucaauguugguugaca

SEQ ID NO: 2910657 - RNA, 19 nt, Artificial Sequence
  Description of Artificial Sequence: Synthetic oligonucleotide
uucuuucaauagacaauac

SEQ ID NO: 2910658 - RNA, 19 nt, Artificial Sequence
  Description of Artificial Sequence: Synthetic oligonucleotide
auuucuuucaauagacaau

SEQ ID NO: 2910659 - RNA, 19 nt, Artificial Sequence
  Description of Artificial Sequence: Synthetic oligonucleotide
ucauuauguacaagucaau

SEQ ID NO: 2910660 - RNA, 19 nt, Artificial Sequence
  Description of Artificial Sequence: Synthetic oligonucleotide
cagauucaacucaugaaca

SEQ ID NO: 2910661 - RNA, 19 nt, Artificial Sequence
  Description of Artificial Sequence: Synthetic oligonucleotide
auaagguuucaugucuuug

SEQ ID NO: 2910662 - RNA, 19 nt, Artificial Sequence
  Description of Artificial Sequence: Synthetic oligonucleotide
ccaauauauauuauguaca

SEQ ID NO: 2910663 - RNA, 19 nt, Artificial Sequence
  Description of Artificial Sequence: Synthetic oligonucleotide
auuucucaauguugguuga

SEQ ID NO: 2910664 - RNA, 19 nt, Artificial Sequence
  Description of Artificial Sequence: Synthetic oligonucleotide
aucuaucacagagauagaa

SEQ ID NO: 2910665 - RNA, 19 nt, Artificial Sequence
  Description of Artificial Sequence: Synthetic oligonucleotide
auacacacauauuuucauu

SEQ ID NO: 2910666 - RNA, 19 nt, Artificial Sequence
  Description of Artificial Sequence: Synthetic oligonucleotide
caaaauuaaauaugcaauu

SEQ ID NO: 2910667 - RNA, 19 nt, Artificial Sequence
  Description of Artificial Sequence: Synthetic oligonucleotide
uucaacucaugaacauuuc

SEQ ID NO: 2910668 - RNA, 19 nt, Artificial Sequence
  Description of Artificial Sequence: Synthetic oligonucleotide
cuccuuuccucuaccagac

SEQ ID NO: 2910669 - RNA, 19 nt, Artificial Sequence
  Description of Artificial Sequence: Synthetic oligonucleotide
gaccauguaauauaagguu

SEQ ID NO: 2910670 - RNA, 19 nt, Artificial Sequence
  Description of Artificial Sequence: Synthetic oligonucleotide
guagugucaaagaaggaaa

SEQ ID NO: 2910671 - RNA, 19 nt, Artificial Sequence
  Description of Artificial Sequence: Synthetic oligonucleotide
acacacauauuuucauuau

SEQ ID NO: 2910672 - RNA, 19 nt, Artificial Sequence
  Description of Artificial Sequence: Synthetic oligonucleotide
acucaugaacauuucucaa

SEQ ID NO: 2910673 - RNA, 19 nt, Artificial Sequence
  Description of Artificial Sequence: Synthetic oligonucleotide
ccagacaccaggcacacag

SEQ ID NO: 2910674 - RNA, 19 nt, Artificial Sequence
  Description of Artificial Sequence: Synthetic oligonucleotide
gguugcaaauuacauuuac

SEQ ID NO: 2910675 - RNA, 19 nt, Artificial Sequence
  Description of Artificial Sequence: Synthetic oligonucleotide
caagaccauguaauauaag

SEQ ID NO: 2910676 - RNA, 19 nt, Artificial Sequence
  Description of Artificial Sequence: Synthetic oligonucleotide
acagauuauuuuaacuuaa

SEQ ID NO: 2910677 - RNA, 19 nt, Artificial Sequence
  Description of Artificial Sequence: Synthetic oligonucleotide
uauaagguuucaugucuuu

SEQ ID NO: 2910678 - RNA, 19 nt, Artificial Sequence
  Description of Artificial Sequence: Synthetic oligonucleotide
gagauagaauuucuuucaa

SEQ ID NO: 2910679 - RNA, 19 nt, Artificial Sequence
  Description of Artificial Sequence: Synthetic oligonucleotide
guugcaaauuacauuuaca

SEQ ID NO: 2910680 - RNA, 19 nt, Artificial Sequence
  Description of Artificial Sequence: Synthetic oligonucleotide
acauaaugaucaaguagug

SEQ ID NO: 2910681 - RNA, 19 nt, Artificial Sequence
  Description of Artificial Sequence: Synthetic oligonucleotide
uuugaagugccaucuccuu

SEQ ID NO: 2910682 - RNA, 19 nt, Artificial Sequence
  Description of Artificial Sequence: Synthetic oligonucleotide
aaacauccaagaccaugua

SEQ ID NO: 2910683 - RNA, 19 nt, Artificial Sequence
  Description of Artificial Sequence: Synthetic oligonucleotide
uugaagugccaucuccuuu

SEQ ID NO: 2910684 - RNA, 19 nt, Artificial Sequence
  Description of Artificial Sequence: Synthetic oligonucleotide
auuuacagauucaacucau

SEQ ID NO: 2910685 - RNA, 19 nt, Artificial Sequence
  Description of Artificial Sequence: Synthetic oligonucleotide
cuaucacagagauagaauu

SEQ ID NO: 2910686 - RNA, 19 nt, Artificial Sequence
  Description of Artificial Sequence: Synthetic oligonucleotide
auguugguugacaaaauua

SEQ ID NO: 2910687 - RNA, 19 nt, Artificial Sequence
  Description of Artificial Sequence: Synthetic oligonucleotide
accauguaauauaagguuu

SEQ ID NO: 2910688 - RNA, 19 nt, Artificial Sequence
  Description of Artificial Sequence: Synthetic oligonucleotide
gguugacaaaauuaaauau

SEQ ID NO: 2910689 - RNA, 19 nt, Artificial Sequence
  Description of Artificial Sequence: Synthetic oligonucleotide
ggaaaguaccgaaauccag

SEQ ID NO: 2910690 - RNA, 19 nt, Artificial Sequence
  Description of Artificial Sequence: Synthetic oligonucleotide
augcaauuagaaauacaga

SEQ ID NO: 2910691 - RNA, 19 nt, Artificial Sequence
  Description of Artificial Sequence: Synthetic oligonucleotide
acauuucucaauguugguu

SEQ ID NO: 2910692 - RNA, 19 nt, Artificial Sequence
  Description of Artificial Sequence: Synthetic oligonucleotide
auaugcaauuagaaauaca

SEQ ID NO: 2910693 - RNA, 19 nt, Artificial Sequence
  Description of Artificial Sequence: Synthetic oligonucleotide
ccauguaauauaagguuuc

SEQ ID NO: 2910694 - RNA, 19 nt, Artificial Sequence
  Description of Artificial Sequence: Synthetic oligonucleotide
cuaccagacaccaggcaca

SEQ ID NO: 2910695 - RNA, 19 nt, Artificial Sequence
  Description of Artificial Sequence: Synthetic oligonucleotide
aggaaaguaccgaaaucca

SEQ ID NO: 2910696 - RNA, 19 nt, Artificial Sequence
  Description of Artificial Sequence: Synthetic oligonucleotide
aagucaauauugguuccuu

SEQ ID NO: 2910697 - RNA, 19 nt, Artificial Sequence
  Description of Artificial Sequence: Synthetic oligonucleotide
cauuauguacaagucaaua

SEQ ID NO: 2910698 - RNA, 19 nt, Artificial Sequence
  Description of Artificial Sequence: Synthetic oligonucleotide
ucaugucuuugaagugcca

SEQ ID NO: 2910699 - RNA, 19 nt, Artificial Sequence
  Description of Artificial Sequence: Synthetic oligonucleotide
cacauauuuucauuaugua

SEQ ID NO: 2910700 - RNA, 19 nt, Artificial Sequence
  Description of Artificial Sequence: Synthetic oligonucleotide
aaguaccgaaauccaggua

SEQ ID NO: 2910701 - RNA, 19 nt, Artificial Sequence
  Description of Artificial Sequence: Synthetic oligonucleotide
auccaagaccauguaauau

SEQ ID NO: 2910702 - RNA, 19 nt, Artificial Sequence
  Description of Artificial Sequence: Synthetic oligonucleotide
uuucucaauguugguugac

SEQ ID NO: 2910703 - RNA, 19 nt, Artificial Sequence
  Description of Artificial Sequence: Synthetic oligonucleotide
aaguagugucaaagaagga

SEQ ID NO: 2910704 - RNA, 19 nt, Artificial Sequence
  Description of Artificial Sequence: Synthetic oligonucleotide
auguaauauaagguuucau

SEQ ID NO: 2910705 - RNA, 19 nt, Artificial Sequence
  Description of Artificial Sequence: Synthetic oligonucleotide
ccuuuccucuaccagacac

SEQ ID NO: 2910706 - RNA, 19 nt, Artificial Sequence
  Description of Artificial Sequence: Synthetic oligonucleotide
ugguuccuucaccuuuucu

SEQ ID NO: 2910707 - RNA, 19 nt, Artificial Sequence
  Description of Artificial Sequence: Synthetic oligonucleotide
cauguaauauaagguuuca

SEQ ID NO: 2910708 - RNA, 19 nt, Artificial Sequence
  Description of Artificial Sequence: Synthetic oligonucleotide
cagacaccaggcacacagg

SEQ ID NO: 2910709 - RNA, 19 nt, Artificial Sequence
  Description of Artificial Sequence: Synthetic oligonucleotide
cuuugaagugccaucuccu

SEQ ID NO: 2910710 - RNA, 19 nt, Artificial Sequence
  Description of Artificial Sequence: Synthetic oligonucleotide
guaccgaaauccagguagc

SEQ ID NO: 2910711 - RNA, 19 nt, Artificial Sequence
  Description of Artificial Sequence: Synthetic oligonucleotide
ugguugcaaauuacauuua

SEQ ID NO: 2910712 - RNA, 19 nt, Artificial Sequence
  Description of Artificial Sequence: Synthetic oligonucleotide
uuccucuaccagacaccag

SEQ ID NO: 2910713 - RNA, 19 nt, Artificial Sequence
  Description of Artificial Sequence: Synthetic oligonucleotide
auuuucuaaccaauauaua

SEQ ID NO: 2910714 - RNA, 19 nt, Artificial Sequence
  Description of Artificial Sequence: Synthetic oligonucleotide
aaucuaucacagagauaga

SEQ ID NO: 2910715 - RNA, 19 nt, Artificial Sequence
  Description of Artificial Sequence: Synthetic oligonucleotide
cucaauguugguugacaaa

SEQ ID NO: 2910716 - RNA, 19 nt, Artificial Sequence
  Description of Artificial Sequence: Synthetic oligonucleotide
aagugccaucuccuuuccu

SEQ ID NO: 2910717 - RNA, 19 nt, Artificial Sequence
  Description of Artificial Sequence: Synthetic oligonucleotide
augaucaaguagugucaaa

SEQ ID NO: 2910718 - RNA, 19 nt, Artificial Sequence
  Description of Artificial Sequence: Synthetic oligonucleotide
auauaagguuucaugucuu

SEQ ID NO: 2910719 - RNA, 19 nt, Artificial Sequence
  Description of Artificial Sequence: Synthetic oligonucleotide
guacaagucaauauugguu

SEQ ID NO: 2910720 - RNA, 19 nt, Artificial Sequence
  Description of Artificial Sequence: Synthetic oligonucleotide
caaauuacauuuacagauu

SEQ ID NO: 2910721 - RNA, 19 nt, Artificial Sequence
  Description of Artificial Sequence: Synthetic oligonucleotide
aaaauacacuugacauaau

SEQ ID NO: 2910722 - RNA, 19 nt, Artificial Sequence
  Description of Artificial Sequence: Synthetic oligonucleotide
cucaugaacauuucucaau

SEQ ID NO: 2910723 - RNA, 19 nt, Artificial Sequence
  Description of Artificial Sequence: Synthetic oligonucleotide
uuccuucaccuuuucuuuu

SEQ ID NO: 2910724 - RNA, 19 nt, Artificial Sequence
  Description of Artificial Sequence: Synthetic oligonucleotide
agauuaggauaaauauaau

SEQ ID NO: 2910725 - RNA, 19 nt, Artificial Sequence
  Description of Artificial Sequence: Synthetic oligonucleotide
uaccgaaauccagguagcu

SEQ ID NO: 2910726 - RNA, 19 nt, Artificial Sequence
  Description of Artificial Sequence: Synthetic oligonucleotide
aucaauagauuaggauaaa

SEQ ID NO: 2910727 - RNA, 19 nt, Artificial Sequence
  Description of Artificial Sequence: Synthetic oligonucleotide
uccuuuccucuaccagaca

SEQ ID NO: 2910728 - RNA, 19 nt, Artificial Sequence
  Description of Artificial Sequence: Synthetic oligonucleotide
cauccaagaccauguaaua

SEQ ID NO: 2910729 - RNA, 19 nt, Artificial Sequence
  Description of Artificial Sequence: Synthetic oligonucleotide
agguagcuuauuaugcuua

SEQ ID NO: 2910730 - RNA, 19 nt, Artificial Sequence
  Description of Artificial Sequence: Synthetic oligonucleotide
cauaaugaucaaguagugu

SEQ ID NO: 2910731 - RNA, 19 nt, Artificial Sequence
  Description of Artificial Sequence: Synthetic oligonucleotide
uaccagacaccaggcacac

SEQ ID NO: 2910732 - RNA, 19 nt, Artificial Sequence
  Description of Artificial Sequence: Synthetic oligonucleotide
cuguacucuuaaaacaaau

SEQ ID NO: 2910733 - RNA, 19 nt, Artificial Sequence
  Description of Artificial Sequence: Synthetic oligonucleotide
uugguuccuucaccuuuuc

SEQ ID NO: 2910734 - RNA, 19 nt, Artificial Sequence
  Description of Artificial Sequence: Synthetic oligonucleotide
caugaacauuucucaaugu

SEQ ID NO: 2910735 - RNA, 19 nt, Artificial Sequence
  Description of Artificial Sequence: Synthetic oligonucleotide
gucuuugaagugccaucuc

SEQ ID NO: 2910736 - RNA, 19 nt, Artificial Sequence
  Description of Artificial Sequence: Synthetic oligonucleotide
gguagcuuauuaugcuuaa

SEQ ID NO: 2910737 - RNA, 19 nt, Artificial Sequence
  Description of Artificial Sequence: Synthetic oligonucleotide
caucuccuuuccucuacca

SEQ ID NO: 2910738 - RNA, 19 nt, Artificial Sequence
  Description of Artificial Sequence: Synthetic oligonucleotide
ccgaaauccagguagcuua

SEQ ID NO: 2910739 - RNA, 19 nt, Artificial Sequence
  Description of Artificial Sequence: Synthetic oligonucleotide
accgaaauccagguagcuu

SEQ ID NO: 2910740 - RNA, 19 nt, Artificial Sequence
  Description of Artificial Sequence: Synthetic oligonucleotide
ccaagaccauguaauauaa

SEQ ID NO: 2910741 - RNA, 19 nt, Artificial Sequence
  Description of Artificial Sequence: Synthetic oligonucleotide
auaaucuaucacagagaua

SEQ ID NO: 2910742 - RNA, 19 nt, Artificial Sequence
  Description of Artificial Sequence: Synthetic oligonucleotide
cuucaccuuuucuuuuaaa

SEQ ID NO: 2910743 - RNA, 19 nt, Artificial Sequence
  Description of Artificial Sequence: Synthetic oligonucleotide
ccucuaccagacaccaggc

SEQ ID NO: 2910744 - RNA, 19 nt, Artificial Sequence
  Description of Artificial Sequence: Synthetic oligonucleotide
cucuaccagacaccaggca

SEQ ID NO: 2910745 - RNA, 19 nt, Artificial Sequence
  Description of Artificial Sequence: Synthetic oligonucleotide
cuucauuugguugcaaauu

SEQ ID NO: 2910746 - RNA, 19 nt, Artificial Sequence
  Description of Artificial Sequence: Synthetic oligonucleotide
guagcuuauuaugcuuaaa

SEQ ID NO: 2910747 - RNA, 19 nt, Artificial Sequence
  Description of Artificial Sequence: Synthetic oligonucleotide
ugccaucuccuuuccucua

SEQ ID NO: 2910748 - RNA, 19 nt, Artificial Sequence
  Description of Artificial Sequence: Synthetic oligonucleotide
cacuugacauaaugaucaa

SEQ ID NO: 2910749 - RNA, 19 nt, Artificial Sequence
  Description of Artificial Sequence: Synthetic oligonucleotide
gugccaucuccuuuccucu

SEQ ID NO: 2910750 - RNA, 19 nt, Artificial Sequence
  Description of Artificial Sequence: Synthetic oligonucleotide
caauguugguugacaaaau

SEQ ID NO: 2910751 - RNA, 19 nt, Artificial Sequence
  Description of Artificial Sequence: Synthetic oligonucleotide
ccaucuccuuuccucuacc

SEQ ID NO: 2910752 - RNA, 19 nt, Artificial Sequence
  Description of Artificial Sequence: Synthetic oligonucleotide
gccaucuccuuuccucuac

SEQ ID NO: 2910753 - RNA, 19 nt, Artificial Sequence
  Description of Artificial Sequence: Synthetic oligonucleotide
caugucuuugaagugccau

SEQ ID NO: 2910754 - RNA, 19 nt, Artificial Sequence
  Description of Artificial Sequence: Synthetic oligonucleotide
caagucaauauugguuccu

SEQ ID NO: 2910755 - RNA, 19 nt, Artificial Sequence
  Description of Artificial Sequence: Synthetic oligonucleotide
ccagguagcuuauuaugcu

SEQ ID NO: 2910756 - RNA, 19 nt, Artificial Sequence
  Description of Artificial Sequence: Synthetic oligonucleotide
gaaauccagguagcuuauu

SEQ ID NO: 2910757 - RNA, 19 nt, Artificial Sequence
  Description of Artificial Sequence: Synthetic oligonucleotide
accagacaccaggcacaca

SEQ ID NO: 2910758 - RNA, 19 nt, Artificial Sequence
  Description of Artificial Sequence: Synthetic oligonucleotide
cgaaauccagguagcuuau

SEQ ID NO: 2910759 - RNA, 19 nt, Artificial Sequence
  Description of Artificial Sequence: Synthetic oligonucleotide
  modified_base (2)..(2): a, c, u, g, unknown or other
unuuauauuauuauuuaag

SEQ ID NO: 2910760 - RNA, 19 nt, Artificial Sequence
  Description of Artificial Sequence: Synthetic oligonucleotide
uuugucaccagaaugaagc

SEQ ID NO: 2910761 - RNA, 19 nt, Artificial Sequence
  Description of Artificial Sequence: Synthetic oligonucleotide
  modified_base (5)..(5): a, c, u, g, unknown or other
  modified_base (9)..(9): a, c, u, g, unknown or other
  modified_base (13)..(13): a, c, u, g, unknown or other
uuuunuuunuuunuuauau

SEQ ID NO: 2910762 - RNA, 19 nt, Artificial Sequence
  Description of Artificial Sequence: Synthetic oligonucleotide
uuauuauuuaagcuucugg

SEQ ID NO: 2910763 - RNA, 19 nt, Artificial Sequence
  Description of Artificial Sequence: Synthetic oligonucleotide
aaauguaagcuguuggcgg

SEQ ID NO: 2910764 - RNA, 19 nt, Artificial Sequence
  Description of Artificial Sequence: Synthetic oligonucleotide
uauauuauuauuuaagcuu

SEQ ID NO: 2910765 - RNA, 19 nt, Artificial Sequence
  Description of Artificial Sequence: Synthetic oligonucleotide
  modified_base (3)..(3): a, c, u, g, unknown or other
  modified_base (7)..(7): a, c, u, g, unknown or other
  modified_base (11)..(11): a, c, u, g, unknown or other
uunuuunuuunuuauauua

SEQ ID NO: 2910766 - RNA, 19 nt, Artificial Sequence
  Description of Artificial Sequence: Synthetic oligonucleotide
uauuauuuaagcuucuggu

SEQ ID NO: 2910767 - RNA, 19 nt, Artificial Sequence
  Description of Artificial Sequence: Synthetic oligonucleotide
  modified_base (3)..(3): a, c, u, g, unknown or other
  modified_base (7)..(7): a, c, u, g, unknown or other
uunuuunuuauauuauuau

SEQ ID NO: 2910768 - RNA, 19 nt, Artificial Sequence
  Description of Artificial Sequence: Synthetic oligonucleotide
  modified_base (4)..(4): a, c, u, g, unknown or other
  modified_base (8)..(8): a, c, u, g, unknown or other
uuunuuunuuauauuauua

SEQ ID NO: 2910769 - RNA, 19 nt, Artificial Sequence
  Description of Artificial Sequence: Synthetic oligonucleotide
uuauauuauuauuuaagcu

SEQ ID NO: 2910770 - RNA, 19 nt, Artificial Sequence
  Description of Artificial Sequence: Synthetic oligonucleotide
uuauuuaagcuucuggugu

SEQ ID NO: 2910771 - RNA, 19 nt, Artificial Sequence
  Description of Artificial Sequence: Synthetic oligonucleotide
  modified_base (2)..(2): a, c, u, g, unknown or other
  modified_base (6)..(6): a, c, u, g, unknown or other
  modified_base (10)..(10): a, c, u, g, unknown or other
unuuunuuunuuauauuau

SEQ ID NO: 2910772 - RNA, 19 nt, Artificial Sequence
  Description of Artificial Sequence: Synthetic oligonucleotide
  modified_base (4)..(4): a, c, u, g, unknown or other
uuunuuauauuauuauuua

SEQ ID NO: 2910773 - RNA, 19 nt, Artificial Sequence
  Description of Artificial Sequence: Synthetic oligonucleotide
ugugcguacugccugaagg

SEQ ID NO: 2910774 - RNA, 19 nt, Artificial Sequence
  Description of Artificial Sequence: Synthetic oligonucleotide
agaaugaagccucugaugu

SEQ ID NO: 2910775 - RNA, 19 nt, Artificial Sequence
  Description of Artificial Sequence: Synthetic oligonucleotide
ucugaugaaauguaagcug

SEQ ID NO: 2910776 - RNA, 19 nt, Artificial Sequence
  Description of Artificial Sequence: Synthetic oligonucleotide
auauuauuauuuaagcuuc

SEQ ID NO: 2910777 - RNA, 19 nt, Artificial Sequence
  Description of Artificial Sequence: Synthetic oligonucleotide
auuauuuaagcuucuggug

SEQ ID NO: 2910778 - RNA, 19 nt, Artificial Sequence
  Description of Artificial Sequence: Synthetic oligonucleotide
augaaauguaagcuguugg

SEQ ID NO: 2910779 - RNA, 19 nt, Artificial Sequence
  Description of Artificial Sequence: Synthetic oligonucleotide
ugaaauguaagcuguuggc

SEQ ID NO: 2910780 - RNA, 19 nt, Artificial Sequence
  Description of Artificial Sequence: Synthetic oligonucleotide
acucguaggguuucuaccc

SEQ ID NO: 2910781 - RNA, 19 nt, Artificial Sequence
  Description of Artificial Sequence: Synthetic oligonucleotide
gaaauguaagcuguuggcg

SEQ ID NO: 2910782 - RNA, 19 nt, Artificial Sequence
  Description of Artificial Sequence: Synthetic oligonucleotide
aaagccaucccacacugcu

SEQ ID NO: 2910783 - RNA, 19 nt, Artificial Sequence
  Description of Artificial Sequence: Synthetic oligonucleotide
aggguuucuacccaaaaug

SEQ ID NO: 2910784 - RNA, 19 nt, Artificial Sequence
  Description of Artificial Sequence: Synthetic oligonucleotide
  modified_base (3)..(3): a, c, u, g, unknown or other
uunuuauauuauuauuuaa

SEQ ID NO: 2910785 - RNA, 19 nt, Artificial Sequence
  Description of Artificial Sequence: Synthetic oligonucleotide
  modified_base (2)..(2): a, c, u, g, unknown or other
  modified_base (6)..(6): a, c, u, g, unknown or other
unuuunuuauauuauuauu

SEQ ID NO: 2910786 - RNA, 19 nt, Artificial Sequence
  Description of Artificial Sequence: Synthetic oligonucleotide
caaaauggauucucgggcg

SEQ ID NO: 2910787 - RNA, 19 nt, Artificial Sequence
  Description of Artificial Sequence: Synthetic oligonucleotide
accgcugugagucuuuugg

SEQ ID NO: 2910788 - RNA, 19 nt, Artificial Sequence
  Description of Artificial Sequence: Synthetic oligonucleotide
aaugaagccucugaugucu

SEQ ID NO: 2910789 - RNA, 19 nt, Artificial Sequence
  Description of Artificial Sequence: Synthetic oligonucleotide
aauguaagcuguuggcgga

SEQ ID NO: 2910790 - RNA, 19 nt, Artificial Sequence
  Description of Artificial Sequence: Synthetic oligonucleotide
uuuuggugugcucuaaggu

SEQ ID NO: 2910791 - RNA, 19 nt, Artificial Sequence
  Description of Artificial Sequence: Synthetic oligonucleotide
agucaucacacucguaggg

SEQ ID NO: 2910792 - RNA, 19 nt, Artificial Sequence
  Description of Artificial Sequence: Synthetic oligonucleotide
acuccuuacaggcguaugg

SEQ ID NO: 2910793 - RNA, 19 nt, Artificial Sequence
  Description of Artificial Sequence: Synthetic oligonucleotide
uguccccguacccugaagg

SEQ ID NO: 2910794 - RNA, 19 nt, Artificial Sequence
  Description of Artificial Sequence: Synthetic oligonucleotide
cuuuuggugugcucuaagg

SEQ ID NO: 2910795 - RNA, 19 nt, Artificial Sequence
  Description of Artificial Sequence: Synthetic oligonucleotide
  modified_base (4)..(4): a, c, u, g, unknown or other
  modified_base (8)..(8): a, c, u, g, unknown or other
  modified_base (12)..(12): a, c, u, g, unknown or other
uuunuuunuuunuuauauu

SEQ ID NO: 2910796 - RNA, 19 nt, Artificial Sequence
  Description of Artificial Sequence: Synthetic oligonucleotide
gaaaagccaucccacacug

SEQ ID NO: 2910797 - RNA, 19 nt, Artificial Sequence
  Description of Artificial Sequence: Synthetic oligonucleotide
uuuggugugcucuaagguc

SEQ ID NO: 2910798 - RNA, 19 nt, Artificial Sequence
  Description of Artificial Sequence: Synthetic oligonucleotide
acccugaaggccuugccgc

SEQ ID NO: 2910799 - RNA, 19 nt, Artificial Sequence
  Description of Artificial Sequence: Synthetic oligonucleotide
aggcguauggcuucucacc

SEQ ID NO: 2910800 - RNA, 19 nt, Artificial Sequence
  Description of Artificial Sequence: Synthetic oligonucleotide
uacccaaaauggauucucg

SEQ ID NO: 2910801 - RNA, 19 nt, Artificial Sequence
  Description of Artificial Sequence: Synthetic oligonucleotide
acacgcauagggcuucucc

SEQ ID NO: 2910802 - RNA, 19 nt, Artificial Sequence
  Description of Artificial Sequence: Synthetic oligonucleotide
uuggugugcucuaaggucu

SEQ ID NO: 2910803 - RNA, 19 nt, Artificial Sequence
  Description of Artificial Sequence: Synthetic oligonucleotide
ugugcagucugccgaaaag

SEQ ID NO: 2910804 - RNA, 19 nt, Artificial Sequence
  Description of Artificial Sequence: Synthetic oligonucleotide
gacucgaaaggcuuuacca

SEQ ID NO: 2910805 - RNA, 19 nt, Artificial Sequence
  Description of Artificial Sequence: Synthetic oligonucleotide
aaggugugcagucugccga

SEQ ID NO: 2910806 - RNA, 19 nt, Artificial Sequence
  Description of Artificial Sequence: Synthetic oligonucleotide
ugcagucugccgaaaagcc

SEQ ID NO: 2910807 - RNA, 19 nt, Artificial Sequence
  Description of Artificial Sequence: Synthetic oligonucleotide
ugaauucucugaugaaaug

SEQ ID NO: 2910808 - RNA, 19 nt, Artificial Sequence
  Description of Artificial Sequence: Synthetic oligonucleotide
uauuauuauuuaagcuucu

SEQ ID NO: 2910809 - RNA, 19 nt, Artificial Sequence
  Description of Artificial Sequence: Synthetic oligonucleotide
uacccugaaggccuugccg

SEQ ID NO: 2910810 - RNA, 19 nt, Artificial Sequence
  Description of Artificial Sequence: Synthetic oligonucleotide
gaugaaauguaagcuguug

SEQ ID NO: 2910811 - RNA, 19 nt, Artificial Sequence
  Description of Artificial Sequence: Synthetic oligonucleotide
aaaauggauucucgggcgu

SEQ ID NO: 2910812 - RNA, 19 nt, Artificial Sequence
  Description of Artificial Sequence: Synthetic oligonucleotide
aacgcuuccccacacuccu

SEQ ID NO: 2910813 - RNA, 19 nt, Artificial Sequence
  Description of Artificial Sequence: Synthetic oligonucleotide
uaaggugugcagucugccg

SEQ ID NO: 2910814 - RNA, 19 nt, Artificial Sequence
  Description of Artificial Sequence: Synthetic oligonucleotide
uguggauccucugauggag

SEQ ID NO: 2910815 - RNA, 19 nt, Artificial Sequence
  Description of Artificial Sequence: Synthetic oligonucleotide
uguuggcggacucgaaagg

SEQ ID NO: 2910816 - RNA, 19 nt, Artificial Sequence
  Description of Artificial Sequence: Synthetic oligonucleotide
acccaaaauggauucucgg

SEQ ID NO: 2910817 - RNA, 19 nt, Artificial Sequence
  Description of Artificial Sequence: Synthetic oligonucleotide
ucuuuuggugugcucuaag

SEQ ID NO: 2910818 - RNA, 19 nt, Artificial Sequence
  Description of Artificial Sequence: Synthetic oligonucleotide
aagcuucuggugucgagug

SEQ ID NO: 2910819 - RNA, 19 nt, Artificial Sequence
  Description of Artificial Sequence: Synthetic oligonucleotide
aauggauucucgggcgugg

SEQ ID NO: 2910820 - RNA, 19 nt, Artificial Sequence
  Description of Artificial Sequence: Synthetic oligonucleotide
acgcauagggcuucucccc

SEQ ID NO: 2910821 - RNA, 19 nt, Artificial Sequence
  Description of Artificial Sequence: Synthetic oligonucleotide
auggagagucagcuguccc

SEQ ID NO: 2910822 - RNA, 19 nt, Artificial Sequence
  Description of Artificial Sequence: Synthetic oligonucleotide
uauuuaagcuucugguguc

SEQ ID NO: 2910823 - RNA, 19 nt, Artificial Sequence
  Description of Artificial Sequence: Synthetic oligonucleotide
uuucuacccaaaauggauu

SEQ ID NO: 2910824 - RNA, 19 nt, Artificial Sequence
  Description of Artificial Sequence: Synthetic oligonucleotide
auuauuauuuaagcuucug

SEQ ID NO: 2910825 - RNA, 19 nt, Artificial Sequence
  Description of Artificial Sequence: Synthetic oligonucleotide
agugaggugugcguacugc

SEQ ID NO: 2910826 - RNA, 19 nt, Artificial Sequence
  Description of Artificial Sequence: Synthetic oligonucleotide
uucuacccaaaauggauuc

SEQ ID NO: 2910827 - RNA, 19 nt, Artificial Sequence
  Description of Artificial Sequence: Synthetic oligonucleotide
cauccauagggcuucucgc

SEQ ID NO: 2910828 - RNA, 19 nt, Artificial Sequence
  Description of Artificial Sequence: Synthetic oligonucleotide
gauccucugauggagaguc

SEQ ID NO: 2910829 - RNA, 19 nt, Artificial Sequence
  Description of Artificial Sequence: Synthetic oligonucleotide
ugugcucuaaggucugggc

SEQ ID NO: 2910830 - RNA, 19 nt, Artificial Sequence
  Description of Artificial Sequence: Synthetic oligonucleotide
ugccgcacuccuuacaggc

SEQ ID NO: 2910831 - RNA, 19 nt, Artificial Sequence
  Description of Artificial Sequence: Synthetic oligonucleotide
uggagagucagcugucccc

SEQ ID NO: 2910832 - RNA, 19 nt, Artificial Sequence
  Description of Artificial Sequence: Synthetic oligonucleotide
uuaagcuucuggugucgag

SEQ ID NO: 2910833 - RNA, 19 nt, Artificial Sequence
  Description of Artificial Sequence: Synthetic oligonucleotide
ucuaaggucugggccauag

SEQ ID NO: 2910834 - RNA, 19 nt, Artificial Sequence
  Description of Artificial Sequence: Synthetic oligonucleotide
ccaaaauggauucucgggc

SEQ ID NO: 2910835 - RNA, 19 nt, Artificial Sequence
  Description of Artificial Sequence: Synthetic oligonucleotide
aauucucugaugaaaugua

SEQ ID NO: 2910836 - RNA, 19 nt, Artificial Sequence
  Description of Artificial Sequence: Synthetic oligonucleotide
cuguuggcggacucgaaag

SEQ ID NO: 2910837 - RNA, 19 nt, Artificial Sequence
  Description of Artificial Sequence: Synthetic oligonucleotide
uaggguuucuacccaaaau

SEQ ID NO: 2910838 - RNA, 19 nt, Artificial Sequence
  Description of Artificial Sequence: Synthetic oligonucleotide
uaagcuguuggcggacucg

SEQ ID NO: 2910839 - RNA, 19 nt, Artificial Sequence
  Description of Artificial Sequence: Synthetic oligonucleotide
auuuaagcuucuggugucg

SEQ ID NO: 2910840 - RNA, 19 nt, Artificial Sequence
  Description of Artificial Sequence: Synthetic oligonucleotide
acugccugaaggcccuccc

SEQ ID NO: 2910841 - RNA, 19 nt, Artificial Sequence
  Description of Artificial Sequence: Synthetic oligonucleotide
cacgcauagggcuucuccc

SEQ ID NO: 2910842 - RNA, 19 nt, Artificial Sequence
  Description of Artificial Sequence: Synthetic oligonucleotide
aggucugggccauagguga

SEQ ID NO: 2910843 - RNA, 19 nt, Artificial Sequence
  Description of Artificial Sequence: Synthetic oligonucleotide
cacucguaggguuucuacc

SEQ ID NO: 2910844 - RNA, 19 nt, Artificial Sequence
  Description of Artificial Sequence: Synthetic oligonucleotide
ucugauggagagucagcug

SEQ ID NO: 2910845 - RNA, 19 nt, Artificial Sequence
  Description of Artificial Sequence: Synthetic oligonucleotide
ucugccgaaaagccauccc

SEQ ID NO: 2910846 - RNA, 19 nt, Artificial Sequence
  Description of Artificial Sequence: Synthetic oligonucleotide
uugucaccagaaugaagcc

SEQ ID NO: 2910847 - RNA, 19 nt, Artificial Sequence
  Description of Artificial Sequence: Synthetic oligonucleotide
aaaagccaucccacacugc

SEQ ID NO: 2910848 - RNA, 19 nt, Artificial Sequence
  Description of Artificial Sequence: Synthetic oligonucleotide
cagucaucacacucguagg

SEQ ID NO: 2910849 - RNA, 19 nt, Artificial Sequence
  Description of Artificial Sequence: Synthetic oligonucleotide
ugccgaaaagccaucccac

SEQ ID NO: 2910850 - RNA, 19 nt, Artificial Sequence
  Description of Artificial Sequence: Synthetic oligonucleotide
uaagcuucuggugucgagu

SEQ ID NO: 2910851 - RNA, 19 nt, Artificial Sequence
  Description of Artificial Sequence: Synthetic oligonucleotide
uccucugauggagagucag

SEQ ID NO: 2910852 - RNA, 19 nt, Artificial Sequence
  Description of Artificial Sequence: Synthetic oligonucleotide
ugcuuacauccauagggcu

SEQ ID NO: 2910853 - RNA, 19 nt, Artificial Sequence
  Description of Artificial Sequence: Synthetic oligonucleotide
ggguuucuacccaaaaugg

SEQ ID NO: 2910854 - RNA, 19 nt, Artificial Sequence
  Description of Artificial Sequence: Synthetic oligonucleotide
gaauucucugaugaaaugu

SEQ ID NO: 2910855 - RNA, 19 nt, Artificial Sequence
  Description of Artificial Sequence: Synthetic oligonucleotide
aaauggauucucgggcgug

SEQ ID NO: 2910856 - RNA, 19 nt, Artificial Sequence
  Description of Artificial Sequence: Synthetic oligonucleotide
ggcuuuaccacagucauca

SEQ ID NO: 2910857 - RNA, 19 nt, Artificial Sequence
  Description of Artificial Sequence: Synthetic oligonucleotide
ucugggccauaggugaacg

SEQ ID NO: 2910858 - RNA, 19 nt, Artificial Sequence
  Description of Artificial Sequence: Synthetic oligonucleotide
ggcguauggcuucucaccg

SEQ ID NO: 2910859 - RNA, 19 nt, Artificial Sequence
  Description of Artificial Sequence: Synthetic oligonucleotide
uaggugaacgcuuccccac

SEQ ID NO: 2910860 - RNA, 19 nt, Artificial Sequence
  Description of Artificial Sequence: Synthetic oligonucleotide
cuuuaccacagucaucaca

SEQ ID NO: 2910861 - RNA, 19 nt, Artificial Sequence
  Description of Artificial Sequence: Synthetic oligonucleotide
uuggcggacucgaaaggcu

SEQ ID NO: 2910862 - RNA, 19 nt, Artificial Sequence
  Description of Artificial Sequence: Synthetic oligonucleotide
gugcguacugccugaaggc

SEQ ID NO: 2910863 - RNA, 19 nt, Artificial Sequence
  Description of Artificial Sequence: Synthetic oligonucleotide
uccuuacaggcguauggcu

SEQ ID NO: 2910864 - RNA, 19 nt, Artificial Sequence
  Description of Artificial Sequence: Synthetic oligonucleotide
gucaccagaaugaagccuc

SEQ ID NO: 2910865 - RNA, 19 nt, Artificial Sequence
  Description of Artificial Sequence: Synthetic oligonucleotide
ugggccauaggugaacgcu

SEQ ID NO: 2910866 - RNA, 19 nt, Artificial Sequence
  Description of Artificial Sequence: Synthetic oligonucleotide
cugaugaaauguaagcugu

SEQ ID NO: 2910867 - RNA, 19 nt, Artificial Sequence
  Description of Artificial Sequence: Synthetic oligonucleotide
ugucaccagaaugaagccu

SEQ ID NO: 2910868 - RNA, 19 nt, Artificial Sequence
  Description of Artificial Sequence: Synthetic oligonucleotide
gaaugaagccucugauguc

SEQ ID NO: 2910869 - RNA, 19 nt, Artificial Sequence
  Description of Artificial Sequence: Synthetic oligonucleotide
ugaugaaauguaagcuguu

SEQ ID NO: 2910870 - RNA, 19 nt, Artificial Sequence
  Description of Artificial Sequence: Synthetic oligonucleotide
uacgguuugucaccagaau

SEQ ID NO: 2910871 - RNA, 19 nt, Artificial Sequence
  Description of Artificial Sequence: Synthetic oligonucleotide
gauggagagucagcugucc

SEQ ID NO: 2910872 - RNA, 19 nt, Artificial Sequence
  Description of Artificial Sequence: Synthetic oligonucleotide
ugccugaaggcccucccac

SEQ ID NO: 2910873 - RNA, 19 nt, Artificial Sequence
  Description of Artificial Sequence: Synthetic oligonucleotide
cuaaggugugcagucugcc

SEQ ID NO: 2910874 - RNA, 19 nt, Artificial Sequence
  Description of Artificial Sequence: Synthetic oligonucleotide
uggauucucgggcguggag

SEQ ID NO: 2910875 - RNA, 19 nt, Artificial Sequence
  Description of Artificial Sequence: Synthetic oligonucleotide
ugucugcuaaggugugcag

SEQ ID NO: 2910876 - RNA, 19 nt, Artificial Sequence
  Description of Artificial Sequence: Synthetic oligonucleotide
ucagcuguccccguacccu

SEQ ID NO: 2910877 - RNA, 19 nt, Artificial Sequence
  Description of Artificial Sequence: Synthetic oligonucleotide
gugaggugugcguacugcc

SEQ ID NO: 2910878 - RNA, 19 nt, Artificial Sequence
  Description of Artificial Sequence: Synthetic oligonucleotide
uuuacacgcauagggcuuc

SEQ ID NO: 2910879 - RNA, 19 nt, Artificial Sequence
  Description of Artificial Sequence: Synthetic oligonucleotide
uuuaagcuucuggugucga

SEQ ID NO: 2910880 - RNA, 19 nt, Artificial Sequence
  Description of Artificial Sequence: Synthetic oligonucleotide
cuccuuacaggcguauggc

SEQ ID NO: 2910881 - RNA, 19 nt, Artificial Sequence
  Description of Artificial Sequence: Synthetic oligonucleotide
ugucgagugaggugugcgu

SEQ ID NO: 2910882 - RNA, 19 nt, Artificial Sequence
  Description of Artificial Sequence: Synthetic oligonucleotide
guuugucaccagaaugaag

SEQ ID NO: 2910883 - RNA, 19 nt, Artificial Sequence
  Description of Artificial Sequence: Synthetic oligonucleotide
cuacccaaaauggauucuc

SEQ ID NO: 2910884 - RNA, 19 nt, Artificial Sequence
  Description of Artificial Sequence: Synthetic oligonucleotide
ugaagccucugaugucugc

SEQ ID NO: 2910885 - RNA, 19 nt, Artificial Sequence
  Description of Artificial Sequence: Synthetic oligonucleotide
ugauggagagucagcuguc

SEQ ID NO: 2910886 - RNA, 19 nt, Artificial Sequence
  Description of Artificial Sequence: Synthetic oligonucleotide
guuggcggacucgaaaggc

SEQ ID NO: 2910887 - RNA, 19 nt, Artificial Sequence
  Description of Artificial Sequence: Synthetic oligonucleotide
ugcguacugccugaaggcc

SEQ ID NO: 2910888 - RNA, 19 nt, Artificial Sequence
  Description of Artificial Sequence: Synthetic oligonucleotide
cuaaggucugggccauagg

SEQ ID NO: 2910889 - RNA, 19 nt, Artificial Sequence
  Description of Artificial Sequence: Synthetic oligonucleotide
uugccgcacuccuuacagg

SEQ ID NO: 2910890 - RNA, 19 nt, Artificial Sequence
  Description of Artificial Sequence: Synthetic oligonucleotide
cauacgguuugucaccaga

SEQ ID NO: 2910891 - RNA, 19 nt, Artificial Sequence
  Description of Artificial Sequence: Synthetic oligonucleotide
ucgagugaggugugcguac

SEQ ID NO: 2910892 - RNA, 19 nt, Artificial Sequence
  Description of Artificial Sequence: Synthetic oligonucleotide
augucugcuaaggugugca

SEQ ID NO: 2910893 - RNA, 19 nt, Artificial Sequence
  Description of Artificial Sequence: Synthetic oligonucleotide
auguaagcuguuggcggac

SEQ ID NO: 2910894 - RNA, 19 nt, Artificial Sequence
  Description of Artificial Sequence: Synthetic oligonucleotide
cugauggagagucagcugu

SEQ ID NO: 2910895 - RNA, 19 nt, Artificial Sequence
  Description of Artificial Sequence: Synthetic oligonucleotide
gaacgcuuccccacacucc

SEQ ID NO: 2910896 - RNA, 19 nt, Artificial Sequence
  Description of Artificial Sequence: Synthetic oligonucleotide
gaugucugcuaaggugugc

SEQ ID NO: 2910897 - RNA, 19 nt, Artificial Sequence
  Description of Artificial Sequence: Synthetic oligonucleotide
acaggcguauggcuucuca

SEQ ID NO: 2910898 - RNA, 19 nt, Artificial Sequence
  Description of Artificial Sequence: Synthetic oligonucleotide
aagcuguuggcggacucga

SEQ ID NO: 2910899 - RNA, 19 nt, Artificial Sequence
  Description of Artificial Sequence: Synthetic oligonucleotide
gagucuuuuggugugcucu

SEQ ID NO: 2910900 - RNA, 19 nt, Artificial Sequence
  Description of Artificial Sequence: Synthetic oligonucleotide
uccuuacacucauacgguu

SEQ ID NO: 2910901 - RNA, 19 nt, Artificial Sequence
  Description of Artificial Sequence: Synthetic oligonucleotide
gugucgagugaggugugcg

SEQ ID NO: 2910902 - RNA, 19 nt, Artificial Sequence
  Description of Artificial Sequence: Synthetic oligonucleotide
agccaucccacacugcuua

SEQ ID NO: 2910903 - RNA, 19 nt, Artificial Sequence
  Description of Artificial Sequence: Synthetic oligonucleotide
ccucccacauucuuuacac

SEQ ID NO: 2910904 - RNA, 19 nt, Artificial Sequence
  Description of Artificial Sequence: Synthetic oligonucleotide
cugccgaaaagccauccca

SEQ ID NO: 2910905 - RNA, 19 nt, Artificial Sequence
  Description of Artificial Sequence: Synthetic oligonucleotide
caggcguauggcuucucac

SEQ ID NO: 2910906 - RNA, 19 nt, Artificial Sequence
  Description of Artificial Sequence: Synthetic oligonucleotide
uggugugcucuaaggucug

SEQ ID NO: 2910907 - RNA, 19 nt, Artificial Sequence
  Description of Artificial Sequence: Synthetic oligonucleotide
uccccguacccugaaggcc

SEQ ID NO: 2910908 - RNA, 19 nt, Artificial Sequence
  Description of Artificial Sequence: Synthetic oligonucleotide
gugugcucuaaggucuggg

SEQ ID NO: 2910909 - RNA, 19 nt, Artificial Sequence
  Description of Artificial Sequence: Synthetic oligonucleotide
guccccguacccugaaggc

SEQ ID NO: 2910910 - RNA, 19 nt, Artificial Sequence
  Description of Artificial Sequence: Synthetic oligonucleotide
uuaccacagucaucacacu

SEQ ID NO: 2910911 - RNA, 19 nt, Artificial Sequence
  Description of Artificial Sequence: Synthetic oligonucleotide
ggacucgaaaggcuuuacc

SEQ ID NO: 2910912 - RNA, 19 nt, Artificial Sequence
  Description of Artificial Sequence: Synthetic oligonucleotide
ugagucuuuuggugugcuc

SEQ ID NO: 2910913 - RNA, 19 nt, Artificial Sequence
  Description of Artificial Sequence: Synthetic oligonucleotide
ucguaggguuucuacccaa

SEQ ID NO: 2910914 - RNA, 19 nt, Artificial Sequence
  Description of Artificial Sequence: Synthetic oligonucleotide
agucuuuuggugugcucua

SEQ ID NO: 2910915 - RNA, 19 nt, Artificial Sequence
  Description of Artificial Sequence: Synthetic oligonucleotide
cucugaugaaauguaagcu

SEQ ID NO: 2910916 - RNA, 19 nt, Artificial Sequence
  Description of Artificial Sequence: Synthetic oligonucleotide
gagugaggugugcguacug

SEQ ID NO: 2910917 - RNA, 19 nt, Artificial Sequence
  Description of Artificial Sequence: Synthetic oligonucleotide
gcuucuggugucgagugag

SEQ ID NO: 2910918 - RNA, 19 nt, Artificial Sequence
  Description of Artificial Sequence: Synthetic oligonucleotide
gucagcuguccccguaccc

SEQ ID NO: 2910919 - RNA, 19 nt, Artificial Sequence
  Description of Artificial Sequence: Synthetic oligonucleotide
aggugaacgcuuccccaca

SEQ ID NO: 2910920 - RNA, 19 nt, Artificial Sequence
  Description of Artificial Sequence: Synthetic oligonucleotide
guaggguuucuacccaaaa

SEQ ID NO: 2910921 - RNA, 19 nt, Artificial Sequence
  Description of Artificial Sequence: Synthetic oligonucleotide
auacgguuugucaccagaa

SEQ ID NO: 2910922 - RNA, 19 nt, Artificial Sequence
  Description of Artificial Sequence: Synthetic oligonucleotide
agccucugaugucugcuaa

SEQ ID NO: 2910923 - RNA, 19 nt, Artificial Sequence
  Description of Artificial Sequence: Synthetic oligonucleotide
uggcggacucgaaaggcuu

SEQ ID NO: 2910924 - RNA, 19 nt, Artificial Sequence
  Description of Artificial Sequence: Synthetic oligonucleotide
uccccacacuccuuacacu

SEQ ID NO: 2910925 - RNA, 19 nt, Artificial Sequence
  Description of Artificial Sequence: Synthetic oligonucleotide
guaagcuguuggcggacuc

SEQ ID NO: 2910926 - RNA, 19 nt, Artificial Sequence
  Description of Artificial Sequence: Synthetic oligonucleotide
gguuucuacccaaaaugga

SEQ ID NO: 2910927 - RNA, 19 nt, Artificial Sequence
  Description of Artificial Sequence: Synthetic oligonucleotide
cugggccauaggugaacgc

SEQ ID NO: 2910928 - RNA, 19 nt, Artificial Sequence
  Description of Artificial Sequence: Synthetic oligonucleotide
aggugugcguacugccuga

SEQ ID NO: 2910929 - RNA, 19 nt, Artificial Sequence
  Description of Artificial Sequence: Synthetic oligonucleotide
uggugucgagugaggugug

SEQ ID NO: 2910930 - RNA, 19 nt, Artificial Sequence
  Description of Artificial Sequence: Synthetic oligonucleotide
agcuucuggugucgaguga

SEQ ID NO: 2910931 - RNA, 19 nt, Artificial Sequence
  Description of Artificial Sequence: Synthetic oligonucleotide
ccgaaaagccaucccacac

SEQ ID NO: 2910932 - RNA, 19 nt, Artificial Sequence
  Description of Artificial Sequence: Synthetic oligonucleotide
gucugccgaaaagccaucc

SEQ ID NO: 2910933 - RNA, 19 nt, Artificial Sequence
  Description of Artificial Sequence: Synthetic oligonucleotide
gugugcguacugccugaag

SEQ ID NO: 2910934 - RNA, 19 nt, Artificial Sequence
  Description of Artificial Sequence: Synthetic oligonucleotide
aggugugcagucugccgaa

SEQ ID NO: 2910935 - RNA, 19 nt, Artificial Sequence
  Description of Artificial Sequence: Synthetic oligonucleotide
uucucaccgcugugagucu

SEQ ID NO: 2910936 - RNA, 19 nt, Artificial Sequence
  Description of Artificial Sequence: Synthetic oligonucleotide
gaagccucugaugucugcu

SEQ ID NO: 2910937 - RNA, 19 nt, Artificial Sequence
  Description of Artificial Sequence: Synthetic oligonucleotide
uacugccugaaggcccucc

SEQ ID NO: 2910938 - RNA, 19 nt, Artificial Sequence
  Description of Artificial Sequence: Synthetic oligonucleotide
agagucagcuguccccgua

SEQ ID NO: 2910939 - RNA, 19 nt, Artificial Sequence
  Description of Artificial Sequence: Synthetic oligonucleotide
aggcuuuaccacagucauc

SEQ ID NO: 2910940 - RNA, 19 nt, Artificial Sequence
  Description of Artificial Sequence: Synthetic oligonucleotide
cagucugccgaaaagccau

SEQ ID NO: 2910941 - RNA, 19 nt, Artificial Sequence
  Description of Artificial Sequence: Synthetic oligonucleotide
cucugauggagagucagcu

SEQ ID NO: 2910942 - RNA, 19 nt, Artificial Sequence
  Description of Artificial Sequence: Synthetic oligonucleotide
cgguuugucaccagaauga

SEQ ID NO: 2910943 - RNA, 19 nt, Artificial Sequence
  Description of Artificial Sequence: Synthetic oligonucleotide
ccauaggugaacgcuuccc

SEQ ID NO: 2910944 - RNA, 19 nt, Artificial Sequence
  Description of Artificial Sequence: Synthetic oligonucleotide
agucugccgaaaagccauc

SEQ ID NO: 2910945 - RNA, 19 nt, Artificial Sequence
  Description of Artificial Sequence: Synthetic oligonucleotide
gcuaaggugugcagucugc

SEQ ID NO: 2910946 - RNA, 19 nt, Artificial Sequence
  Description of Artificial Sequence: Synthetic oligonucleotide
cuuuacacgcauagggcuu

SEQ ID NO: 2910947 - RNA, 19 nt, Artificial Sequence
  Description of Artificial Sequence: Synthetic oligonucleotide
ggugaacgcuuccccacac

SEQ ID NO: 2910948 - RNA, 19 nt, Artificial Sequence
  Description of Artificial Sequence: Synthetic oligonucleotide
gccucugaugucugcuaag

SEQ ID NO: 2910949 - RNA, 19 nt, Artificial Sequence
  Description of Artificial Sequence: Synthetic oligonucleotide
ccucugauggagagucagc

SEQ ID NO: 2910950 - RNA, 19 nt, Artificial Sequence
  Description of Artificial Sequence: Synthetic oligonucleotide
uuacacgcauagggcuucu

SEQ ID NO: 2910951 - RNA, 19 nt, Artificial Sequence
  Description of Artificial Sequence: Synthetic oligonucleotide
cacuccuuacaggcguaug

SEQ ID NO: 2910952 - RNA, 19 nt, Artificial Sequence
  Description of Artificial Sequence: Synthetic oligonucleotide
gcuguuggcggacucgaaa

SEQ ID NO: 2910953 - RNA, 19 nt, Artificial Sequence
  Description of Artificial Sequence: Synthetic oligonucleotide
gccauaggugaacgcuucc

SEQ ID NO: 2910954 - RNA, 19 nt, Artificial Sequence
  Description of Artificial Sequence: Synthetic oligonucleotide
ucacacucguaggguuucu

SEQ ID NO: 2910955 - RNA, 19 nt, Artificial Sequence
  Description of Artificial Sequence: Synthetic oligonucleotide
aagccaucccacacugcuu

SEQ ID NO: 2910956 - RNA, 19 nt, Artificial Sequence
  Description of Artificial Sequence: Synthetic oligonucleotide
gccgaaaagccaucccaca

SEQ ID NO: 2910957 - RNA, 19 nt, Artificial Sequence
  Description of Artificial Sequence: Synthetic oligonucleotide
gugugcagucugccgaaaa

SEQ ID NO: 2910958 - RNA, 19 nt, Artificial Sequence
  Description of Artificial Sequence: Synthetic oligonucleotide
auggauucucgggcgugga

SEQ ID NO: 2910959 - RNA, 19 nt, Artificial Sequence
  Description of Artificial Sequence: Synthetic oligonucleotide
gucugggccauaggugaac

SEQ ID NO: 2910960 - RNA, 19 nt, Artificial Sequence
  Description of Artificial Sequence: Synthetic oligonucleotide
gcguacugccugaaggccc

SEQ ID NO: 2910961 - RNA, 19 nt, Artificial Sequence
  Description of Artificial Sequence: Synthetic oligonucleotide
caccagaaugaagccucug

SEQ ID NO: 2910962 - RNA, 19 nt, Artificial Sequence
  Description of Artificial Sequence: Synthetic oligonucleotide
cuguccccguacccugaag

SEQ ID NO: 2910963 - RNA, 19 nt, Artificial Sequence
  Description of Artificial Sequence: Synthetic oligonucleotide
caucccacacugcuuacau

SEQ ID NO: 2910964 - RNA, 19 nt, Artificial Sequence
  Description of Artificial Sequence: Synthetic oligonucleotide
guggauccucugauggaga

SEQ ID NO: 2910965 - RNA, 19 nt, Artificial Sequence
  Description of Artificial Sequence: Synthetic oligonucleotide
caccgcugugagucuuuug

SEQ ID NO: 2910966 - RNA, 19 nt, Artificial Sequence
  Description of Artificial Sequence: Synthetic oligonucleotide
ggugugcucuaaggucugg

SEQ ID NO: 2910967 - RNA, 19 nt, Artificial Sequence
  Description of Artificial Sequence: Synthetic oligonucleotide
gucgagugaggugugcgua

SEQ ID NO: 2910968 - RNA, 19 nt, Artificial Sequence
  Description of Artificial Sequence: Synthetic oligonucleotide
ucucaccgcugugagucuu

SEQ ID NO: 2910969 - RNA, 19 nt, Artificial Sequence
  Description of Artificial Sequence: Synthetic oligonucleotide
gucugcuaaggugugcagu

SEQ ID NO: 2910970 - RNA, 19 nt, Artificial Sequence
  Description of Artificial Sequence: Synthetic oligonucleotide
gcagucugccgaaaagcca

SEQ ID NO: 2910971 - RNA, 19 nt, Artificial Sequence
  Description of Artificial Sequence: Synthetic oligonucleotide
ggugucgagugaggugugc

SEQ ID NO: 2910972 - RNA, 19 nt, Artificial Sequence
  Description of Artificial Sequence: Synthetic oligonucleotide
gucuuuuggugugcucuaa

SEQ ID NO: 2910973 - RNA, 19 nt, Artificial Sequence
  Description of Artificial Sequence: Synthetic oligonucleotide
cugccugaaggcccuccca

SEQ ID NO: 2910974 - RNA, 19 nt, Artificial Sequence
  Description of Artificial Sequence: Synthetic oligonucleotide
gccgcacuccuuacaggcg

SEQ ID NO: 2910975 - RNA, 19 nt, Artificial Sequence
  Description of Artificial Sequence: Synthetic oligonucleotide
ggauucucgggcguggagu

SEQ ID NO: 2910976 - RNA, 19 nt, Artificial Sequence
  Description of Artificial Sequence: Synthetic oligonucleotide
ggccauaggugaacgcuuc

SEQ ID NO: 2910977 - RNA, 19 nt, Artificial Sequence
  Description of Artificial Sequence: Synthetic oligonucleotide
ucaccgcugugagucuuuu

SEQ ID NO: 2910978 - RNA, 19 nt, Artificial Sequence
  Description of Artificial Sequence: Synthetic oligonucleotide
gcuuuaccacagucaucac

SEQ ID NO: 2910979 - RNA, 19 nt, Artificial Sequence
  Description of Artificial Sequence: Synthetic oligonucleotide
gugaacgcuuccccacacu

SEQ ID NO: 2910980 - RNA, 19 nt, Artificial Sequence
  Description of Artificial Sequence: Synthetic oligonucleotide
ggccuugccgcacuccuua

SEQ ID NO: 2910981 - RNA, 19 nt, Artificial Sequence
  Description of Artificial Sequence: Synthetic oligonucleotide
gugagucuuuuggugugcu

SEQ ID NO: 2910982 - RNA, 19 nt, Artificial Sequence
  Description of Artificial Sequence: Synthetic oligonucleotide
auccucugauggagaguca

SEQ ID NO: 2910983 - RNA, 19 nt, Artificial Sequence
  Description of Artificial Sequence: Synthetic oligonucleotide
ccagaaugaagccucugau

SEQ ID NO: 2910984 - RNA, 19 nt, Artificial Sequence
  Description of Artificial Sequence: Synthetic oligonucleotide
uacaggcguauggcuucuc

SEQ ID NO: 2910985 - RNA, 19 nt, Artificial Sequence
  Description of Artificial Sequence: Synthetic oligonucleotide
gagagucagcuguccccgu

SEQ ID NO: 2910986 - RNA, 19 nt, Artificial Sequence
  Description of Artificial Sequence: Synthetic oligonucleotide
agcuguccccguacccuga

SEQ ID NO: 2910987 - RNA, 19 nt, Artificial Sequence
  Description of Artificial Sequence: Synthetic oligonucleotide
gcuuacauccauagggcuu

SEQ ID NO: 2910988 - RNA, 19 nt, Artificial Sequence
  Description of Artificial Sequence: Synthetic oligonucleotide
ccuuacaggcguauggcuu

SEQ ID NO: 2910989 - RNA, 19 nt, Artificial Sequence
  Description of Artificial Sequence: Synthetic oligonucleotide
gccaucccacacugcuuac

SEQ ID NO: 2910990 - RNA, 19 nt, Artificial Sequence
  Description of Artificial Sequence: Synthetic oligonucleotide
cgaaaagccaucccacacu

SEQ ID NO: 2910991 - RNA, 19 nt, Artificial Sequence
  Description of Artificial Sequence: Synthetic oligonucleotide
agcuguuggcggacucgaa

SEQ ID NO: 2910992 - RNA, 19 nt, Artificial Sequence
  Description of Artificial Sequence: Synthetic oligonucleotide
gccuugccgcacuccuuac

SEQ ID NO: 2910993 - RNA, 19 nt, Artificial Sequence
  Description of Artificial Sequence: Synthetic oligonucleotide
ccccguacccugaaggccu

SEQ ID NO: 2910994 - RNA, 19 nt, Artificial Sequence
  Description of Artificial Sequence: Synthetic oligonucleotide
cguaggguuucuacccaaa

SEQ ID NO: 2910995 - RNA, 19 nt, Artificial Sequence
  Description of Artificial Sequence: Synthetic oligonucleotide
ggucugggccauaggugaa

SEQ ID NO: 2910996 - RNA, 19 nt, Artificial Sequence
  Description of Artificial Sequence: Synthetic oligonucleotide
gcuguccccguacccugaa

SEQ ID NO: 2910997 - RNA, 19 nt, Artificial Sequence
  Description of Artificial Sequence: Synthetic oligonucleotide
ggugugcguacugccugaa

SEQ ID NO: 2910998 - RNA, 19 nt, Artificial Sequence
  Description of Artificial Sequence: Synthetic oligonucleotide
aggccuugccgcacuccuu

SEQ ID NO: 2910999 - RNA, 19 nt, Artificial Sequence
  Description of Artificial Sequence: Synthetic oligonucleotide
cucaccgcugugagucuuu

SEQ ID NO: 2911000 - RNA, 19 nt, Artificial Sequence
  Description of Artificial Sequence: Synthetic oligonucleotide
guacugccugaaggcccuc

SEQ ID NO: 2911001 - RNA, 19 nt, Artificial Sequence
  Description of Artificial Sequence: Synthetic oligonucleotide
cguacugccugaaggcccu

SEQ ID NO: 2911002 - RNA, 19 nt, Artificial Sequence
  Description of Artificial Sequence: Synthetic oligonucleotide
gcggacucgaaaggcuuua

SEQ ID NO: 2911003 - RNA, 19 nt, Artificial Sequence
  Description of Artificial Sequence: Synthetic oligonucleotide
ggugugcagucugccgaaa

SEQ ID NO: 2911004 - RNA, 19 nt, Artificial Sequence
  Description of Artificial Sequence: Synthetic oligonucleotide
ccgcacuccuuacaggcgu

SEQ ID NO: 2911005 - RNA, 19 nt, Artificial Sequence
  Description of Artificial Sequence: Synthetic oligonucleotide
cggacucgaaaggcuuuac

SEQ ID NO: 2911006 - RNA, 19 nt, Artificial Sequence
  Description of Artificial Sequence: Synthetic oligonucleotide
gggccauaggugaacgcuu

SEQ ID NO: 2911007 - RNA, 19 nt, Artificial Sequence
  Description of Artificial Sequence: Synthetic oligonucleotide
ccgcugugagucuuuuggu

SEQ ID NO: 2911008 - RNA, 19 nt, Artificial Sequence
  Description of Artificial Sequence: Synthetic oligonucleotide
acgcuuccccacacuccuu

SEQ ID NO: 2911009 - RNA, 19 nt, Artificial Sequence
  Description of Artificial Sequence: Synthetic oligonucleotide
gcucuaaggucugggccau

SEQ ID NO: 2911010 - RNA, 19 nt, Artificial Sequence
  Description of Artificial Sequence: Synthetic oligonucleotide
cgcuuccccacacuccuua

SEQ ID NO: 2911011 - RNA, 19 nt, Artificial Sequence
  Description of Artificial Sequence: Synthetic oligonucleotide
cucuaaggucugggccaua

SEQ ID NO: 2911012 - RNA, 19 nt, Artificial Sequence
  Description of Artificial Sequence: Synthetic oligonucleotide
ggcggacucgaaaggcuuu

SEQ ID NO: 2911013 - RNA, 19 nt, Artificial Sequence
  Description of Artificial Sequence: Synthetic oligonucleotide
gcacuccuuacaggcguau

SEQ ID NO: 2911014 - RNA, 19 nt, Artificial Sequence
  Description of Artificial Sequence: Synthetic oligonucleotide
ccguacccugaaggccuug

SEQ ID NO: 2911015 - RNA, 19 nt, Artificial Sequence
  Description of Artificial Sequence: Synthetic oligonucleotide
cgcacuccuuacaggcgua

SEQ ID NO: 2911016 - RNA, 19 nt, Artificial Sequence
  Description of Artificial Sequence: Synthetic oligonucleotide
cgagugaggugugcguacu

SEQ ID NO: 2911017 - RNA, 19 nt, Artificial Sequence
  Description of Artificial Sequence: Synthetic oligonucleotide
cccguacccugaaggccuu

SEQ ID NO: 2911018 - RNA, 19 nt, Artificial Sequence
  Description of Artificial Sequence: Synthetic oligonucleotide
  modified_base (1)..(1): a, c, u, g, unknown or other
nuuauauuauuauuuaagc

SEQ ID NO: 2911019 - RNA, 19 nt, Artificial Sequence
  Description of Artificial Sequence: Synthetic oligonucleotide
  modified_base (1)..(1): a, c, u, g, unknown or other
  modified_base (5)..(5): a, c, u, g, unknown or other
  modified_base (9)..(9): a, c, u, g, unknown or other
nuuunuuunuuauauuauu

SEQ ID NO: 2911020 - RNA, 19 nt, Artificial Sequence
  Description of Artificial Sequence: Synthetic oligonucleotide
  modified_base (1)..(1): a, c, u, g, unknown or other
  modified_base (5)..(5): a, c, u, g, unknown or other
nuuunuuauauuauuauuu

SEQ ID NO: 2911021 - RNA, 19 nt, Artificial Sequence
  Description of Artificial Sequence: Synthetic oligonucleotide
aaauaaggccacuaaaagg

SEQ ID NO: 2911022 - RNA, 19 nt, Artificial Sequence
  Description of Artificial Sequence: Synthetic oligonucleotide
acugcuuaacuauaguacc

SEQ ID NO: 2911023 - RNA, 19 nt, Artificial Sequence
  Description of Artificial Sequence: Synthetic oligonucleotide
uauaguaccugcuucagcc

SEQ ID NO: 2911024 - RNA, 19 nt, Artificial Sequence
  Description of Artificial Sequence: Synthetic oligonucleotide
agggauuacaaccugguac

SEQ ID NO: 2911025 - RNA, 19 nt, Artificial Sequence
  Description of Artificial Sequence: Synthetic oligonucleotide
acaaccugguaccaaaagc

SEQ ID NO: 2911026 - RNA, 19 nt, Artificial Sequence
  Description of Artificial Sequence: Synthetic oligonucleotide
guaagaaccgcagugaggg

SEQ ID NO: 2911027 - RNA, 19 nt, Artificial Sequence
  Description of Artificial Sequence: Synthetic oligonucleotide
caaccugguaccaaaagcg

SEQ ID NO: 2911028 - RNA, 19 nt, Artificial Sequence
  Description of Artificial Sequence: Synthetic oligonucleotide
acaagcugguccuagacuc

SEQ ID NO: 2911029 - RNA, 19 nt, Artificial Sequence
  Description of Artificial Sequence: Synthetic oligonucleotide
uugguaaggaacauugggc

SEQ ID NO: 2911030 - RNA, 19 nt, Artificial Sequence
  Description of Artificial Sequence: Synthetic oligonucleotide
cuugguaaggaacauuggg

SEQ ID NO: 2911031 - RNA, 19 nt, Artificial Sequence
  Description of Artificial Sequence: Synthetic oligonucleotide
cauucguugacacagcagc

SEQ ID NO: 2911032 - RNA, 19 nt, Artificial Sequence
  Description of Artificial Sequence: Synthetic oligonucleotide
uacugcuuaacuauaguac

SEQ ID NO: 2911033 - RNA, 19 nt, Artificial Sequence
  Description of Artificial Sequence: Synthetic oligonucleotide
uaaacacuugguaaggaac

SEQ ID NO: 2911034 - RNA, 19 nt, Artificial Sequence
  Description of Artificial Sequence: Synthetic oligonucleotide
aagaaccgcagugaggggc

SEQ ID NO: 2911035 - RNA, 19 nt, Artificial Sequence
  Description of Artificial Sequence: Synthetic oligonucleotide
acuucauucguugacacag

SEQ ID NO: 2911036 - RNA, 19 nt, Artificial Sequence
  Description of Artificial Sequence: Synthetic oligonucleotide
aacuauaguaccugcuuca

SEQ ID NO: 2911037 - RNA, 19 nt, Artificial Sequence
  Description of Artificial Sequence: Synthetic oligonucleotide
accuguucuccacaaaggc

SEQ ID NO: 2911038 - RNA, 19 nt, Artificial Sequence
  Description of Artificial Sequence: Synthetic oligonucleotide
uucaggucuggcuugagcc

SEQ ID NO: 2911039 - RNA, 19 nt, Artificial Sequence
  Description of Artificial Sequence: Synthetic oligonucleotide
agcacaacccaaauaaggc

SEQ ID NO: 2911040 - RNA, 19 nt, Artificial Sequence
  Description of Artificial Sequence: Synthetic oligonucleotide
agcgaugccagccagcagg

SEQ ID NO: 2911041 - RNA, 19 nt, Artificial Sequence
  Description of Artificial Sequence: Synthetic oligonucleotide
uaccuaaacacuugguaag

SEQ ID NO: 2911042 - RNA, 19 nt, Artificial Sequence
  Description of Artificial Sequence: Synthetic oligonucleotide
cuaggagaccacaagcugg

SEQ ID NO: 2911043 - RNA, 19 nt, Artificial Sequence
  Description of Artificial Sequence: Synthetic oligonucleotide
aucagaggccagcacaacc

SEQ ID NO: 2911044 - RNA, 19 nt, Artificial Sequence
  Description of Artificial Sequence: Synthetic oligonucleotide
aguauuuccagcaacugug

SEQ ID NO: 2911045 - RNA, 19 nt, Artificial Sequence
  Description of Artificial Sequence: Synthetic oligonucleotide
uuaacuauaguaccugcuu

SEQ ID NO: 2911046 - RNA, 19 nt, Artificial Sequence
  Description of Artificial Sequence: Synthetic oligonucleotide
agacucacucaguauuucc

SEQ ID NO: 2911047 - RNA, 19 nt, Artificial Sequence
  Description of Artificial Sequence: Synthetic oligonucleotide
ugguccuagacucacucag

SEQ ID NO: 2911048 - RNA, 19 nt, Artificial Sequence
  Description of Artificial Sequence: Synthetic oligonucleotide
ucuggcuugagccacucca

SEQ ID NO: 2911049 - RNA, 19 nt, Artificial Sequence
  Description of Artificial Sequence: Synthetic oligonucleotide
ugguaaggaacauugggcu

SEQ ID NO: 2911050 - RNA, 19 nt, Artificial Sequence
  Description of Artificial Sequence: Synthetic oligonucleotide
ucagaggccagcacaaccc

SEQ ID NO: 2911051 - RNA, 19 nt, Artificial Sequence
  Description of Artificial Sequence: Synthetic oligonucleotide
accaaaagcgaugccagcc

SEQ ID NO: 2911052 - RNA, 19 nt, Artificial Sequence
  Description of Artificial Sequence: Synthetic oligonucleotide
auccuuggccaccucaugc

SEQ ID NO: 2911053 - RNA, 19 nt, Artificial Sequence
  Description of Artificial Sequence: Synthetic oligonucleotide
aggcccuguaccuaaacac

SEQ ID NO: 2911054 - RNA, 19 nt, Artificial Sequence
  Description of Artificial Sequence: Synthetic oligonucleotide
auuuccagcaacugugcag

SEQ ID NO: 2911055 - RNA, 19 nt, Artificial Sequence
  Description of Artificial Sequence: Synthetic oligonucleotide
cagcacaacccaaauaagg

SEQ ID NO: 2911056 - RNA, 19 nt, Artificial Sequence
  Description of Artificial Sequence: Synthetic oligonucleotide
guguccagggauuacaacc

SEQ ID NO: 2911057 - RNA, 19 nt, Artificial Sequence
  Description of Artificial Sequence: Synthetic oligonucleotide
cacuugguaaggaacauug

SEQ ID NO: 2911058 - RNA, 19 nt, Artificial Sequence
  Description of Artificial Sequence: Synthetic oligonucleotide
aagcuguuggcggaagugc

SEQ ID NO: 2911059 - RNA, 19 nt, Artificial Sequence
  Description of Artificial Sequence: Synthetic oligonucleotide
acucaguauuuccagcaac

SEQ ID NO: 2911060 - RNA, 19 nt, Artificial Sequence
  Description of Artificial Sequence: Synthetic oligonucleotide
uuuacugcuuaacuauagu

SEQ ID NO: 2911061 - RNA, 19 nt, Artificial Sequence
  Description of Artificial Sequence: Synthetic oligonucleotide
acugugcagacacagcauc

SEQ ID NO: 2911062 - RNA, 19 nt, Artificial Sequence
  Description of Artificial Sequence: Synthetic oligonucleotide
cacuaaaaggcacugggug

SEQ ID NO: 2911063 - RNA, 19 nt, Artificial Sequence
  Description of Artificial Sequence: Synthetic oligonucleotide
auaguaccugcuucagccc

SEQ ID NO: 2911064 - RNA, 19 nt, Artificial Sequence
  Description of Artificial Sequence: Synthetic oligonucleotide
ucacucaguauuuccagca

SEQ ID NO: 2911065 - RNA, 19 nt, Artificial Sequence
  Description of Artificial Sequence: Synthetic oligonucleotide
uaacuauaguaccugcuuc

SEQ ID NO: 2911066 - RNA, 19 nt, Artificial Sequence
  Description of Artificial Sequence: Synthetic oligonucleotide
aaacacuugguaaggaaca

SEQ ID NO: 2911067 - RNA, 19 nt, Artificial Sequence
  Description of Artificial Sequence: Synthetic oligonucleotide
uccagggauuacaaccugg

SEQ ID NO: 2911068 - RNA, 19 nt, Artificial Sequence
  Description of Artificial Sequence: Synthetic oligonucleotide
uacaaccugguaccaaaag

SEQ ID NO: 2911069 - RNA, 19 nt, Artificial Sequence
  Description of Artificial Sequence: Synthetic oligonucleotide
uuacugcuuaacuauagua

SEQ ID NO: 2911070 - RNA, 19 nt, Artificial Sequence
  Description of Artificial Sequence: Synthetic oligonucleotide
aaaggcgugacugcccuuc

SEQ ID NO: 2911071 - RNA, 19 nt, Artificial Sequence
  Description of Artificial Sequence: Synthetic oligonucleotide
auuacaaccugguaccaaa

SEQ ID NO: 2911072 - RNA, 19 nt, Artificial Sequence
  Description of Artificial Sequence: Synthetic oligonucleotide
uguccagggauuacaaccu

SEQ ID NO: 2911073 - RNA, 19 nt, Artificial Sequence
  Description of Artificial Sequence: Synthetic oligonucleotide
ucauucguugacacagcag

SEQ ID NO: 2911074 - RNA, 19 nt, Artificial Sequence
  Description of Artificial Sequence: Synthetic oligonucleotide
cuugagccacuccacagcg

SEQ ID NO: 2911075 - RNA, 19 nt, Artificial Sequence
  Description of Artificial Sequence: Synthetic oligonucleotide
uucauucguugacacagca

SEQ ID NO: 2911076 - RNA, 19 nt, Artificial Sequence
  Description of Artificial Sequence: Synthetic oligonucleotide
gggauuacaaccugguacc

SEQ ID NO: 2911077 - RNA, 19 nt, Artificial Sequence
  Description of Artificial Sequence: Synthetic oligonucleotide
ucguugacacagcagcugc

SEQ ID NO: 2911078 - RNA, 19 nt, Artificial Sequence
  Description of Artificial Sequence: Synthetic oligonucleotide
aaaagcgaugccagccagc

SEQ ID NO: 2911079 - RNA, 19 nt, Artificial Sequence
  Description of Artificial Sequence: Synthetic oligonucleotide
ugagccacuccacagcgac

SEQ ID NO: 2911080 - RNA, 19 nt, Artificial Sequence
  Description of Artificial Sequence: Synthetic oligonucleotide
uacuuggcugcccucuggg

SEQ ID NO: 2911081 - RNA, 19 nt, Artificial Sequence
  Description of Artificial Sequence: Synthetic oligonucleotide
aaagcgaugccagccagca

SEQ ID NO: 2911082 - RNA, 19 nt, Artificial Sequence
  Description of Artificial Sequence: Synthetic oligonucleotide
guaccuaaacacuugguaa

SEQ ID NO: 2911083 - RNA, 19 nt, Artificial Sequence
  Description of Artificial Sequence: Synthetic oligonucleotide
guaaggaacauugggcugc

SEQ ID NO: 2911084 - RNA, 19 nt, Artificial Sequence
  Description of Artificial Sequence: Synthetic oligonucleotide
gccacuaaaaggcacuggg

SEQ ID NO: 2911085 - RNA, 19 nt, Artificial Sequence
  Description of Artificial Sequence: Synthetic oligonucleotide
cuuggcugcccucugggcg

SEQ ID NO: 2911086 - RNA, 19 nt, Artificial Sequence
  Description of Artificial Sequence: Synthetic oligonucleotide
ugcuuaacuauaguaccug

SEQ ID NO: 2911087 - RNA, 19 nt, Artificial Sequence
  Description of Artificial Sequence: Synthetic oligonucleotide
uauuuccagcaacugugca

SEQ ID NO: 2911088 - RNA, 19 nt, Artificial Sequence
  Description of Artificial Sequence: Synthetic oligonucleotide
aacuucauucguugacaca

SEQ ID NO: 2911089 - RNA, 19 nt, Artificial Sequence
  Description of Artificial Sequence: Synthetic oligonucleotide
uaaggccacuaaaaggcac

SEQ ID NO: 2911090 - RNA, 19 nt, Artificial Sequence
  Description of Artificial Sequence: Synthetic oligonucleotide
aacauugggcugcccaacu

SEQ ID NO: 2911091 - RNA, 19 nt, Artificial Sequence
  Description of Artificial Sequence: Synthetic oligonucleotide
uccacaaaggcgugacugc

SEQ ID NO: 2911092 - RNA, 19 nt, Artificial Sequence
  Description of Artificial Sequence: Synthetic oligonucleotide
guuuacugcuuaacuauag

SEQ ID NO: 2911093 - RNA, 19 nt, Artificial Sequence
  Description of Artificial Sequence: Synthetic oligonucleotide
ugcuucagcccuaggagac

SEQ ID NO: 2911094 - RNA, 19 nt, Artificial Sequence
  Description of Artificial Sequence: Synthetic oligonucleotide
ugcccaacuucauucguug

SEQ ID NO: 2911095 - RNA, 19 nt, Artificial Sequence
  Description of Artificial Sequence: Synthetic oligonucleotide
guaccaaaagcgaugccag

SEQ ID NO: 2911096 - RNA, 19 nt, Artificial Sequence
  Description of Artificial Sequence: Synthetic oligonucleotide
acagcgaccuguucuccac

SEQ ID NO: 2911097 - RNA, 19 nt, Artificial Sequence
  Description of Artificial Sequence: Synthetic oligonucleotide
aaaggcacuggguguccag

SEQ ID NO: 2911098 - RNA, 19 nt, Artificial Sequence
  Description of Artificial Sequence: Synthetic oligonucleotide
agcaacugugcagacacag

SEQ ID NO: 2911099 - RNA, 19 nt, Artificial Sequence
  Description of Artificial Sequence: Synthetic oligonucleotide
cacaacccaaauaaggcca

SEQ ID NO: 2911100 - RNA, 19 nt, Artificial Sequence
  Description of Artificial Sequence: Synthetic oligonucleotide
uaggagaccacaagcuggu

SEQ ID NO: 2911101 - RNA, 19 nt, Artificial Sequence
  Description of Artificial Sequence: Synthetic oligonucleotide
ucaguauuuccagcaacug

SEQ ID NO: 2911102 - RNA, 19 nt, Artificial Sequence
  Description of Artificial Sequence: Synthetic oligonucleotide
aggaacauugggcugccca

SEQ ID NO: 2911103 - RNA, 19 nt, Artificial Sequence
  Description of Artificial Sequence: Synthetic oligonucleotide
agcccgagccccuugggac

SEQ ID NO: 2911104 - RNA, 19 nt, Artificial Sequence
  Description of Artificial Sequence: Synthetic oligonucleotide
gaccuguucuccacaaagg

SEQ ID NO: 2911105 - RNA, 19 nt, Artificial Sequence
  Description of Artificial Sequence: Synthetic oligonucleotide
accuaaacacuugguaagg

SEQ ID NO: 2911106 - RNA, 19 nt, Artificial Sequence
  Description of Artificial Sequence: Synthetic oligonucleotide
cucacucaguauuuccagc

SEQ ID NO: 2911107 - RNA, 19 nt, Artificial Sequence
  Description of Artificial Sequence: Synthetic oligonucleotide
accucaugcccauccugcc

SEQ ID NO: 2911108 - RNA, 19 nt, Artificial Sequence
  Description of Artificial Sequence: Synthetic oligonucleotide
cuauaguaccugcuucagc

SEQ ID NO: 2911109 - RNA, 19 nt, Artificial Sequence
  Description of Artificial Sequence: Synthetic oligonucleotide
aaucagaggccagcacaac

SEQ ID NO: 2911110 - RNA, 19 nt, Artificial Sequence
  Description of Artificial Sequence: Synthetic oligonucleotide
ugaggggcccgcaagcugu

SEQ ID NO: 2911111 - RNA, 19 nt, Artificial Sequence
  Description of Artificial Sequence: Synthetic oligonucleotide
ugcccauccugccaaucag

SEQ ID NO: 2911112 - RNA, 19 nt, Artificial Sequence
  Description of Artificial Sequence: Synthetic oligonucleotide
aagcugguccuagacucac

SEQ ID NO: 2911113 - RNA, 19 nt, Artificial Sequence
  Description of Artificial Sequence: Synthetic oligonucleotide
caacuucauucguugacac

SEQ ID NO: 2911114 - RNA, 19 nt, Artificial Sequence
  Description of Artificial Sequence: Synthetic oligonucleotide
uccuuggccaccucaugcc

SEQ ID NO: 2911115 - RNA, 19 nt, Artificial Sequence
  Description of Artificial Sequence: Synthetic oligonucleotide
uaguaccugcuucagcccu

SEQ ID NO: 2911116 - RNA, 19 nt, Artificial Sequence
  Description of Artificial Sequence: Synthetic oligonucleotide
acaaaggcgugacugcccu

SEQ ID NO: 2911117 - RNA, 19 nt, Artificial Sequence
  Description of Artificial Sequence: Synthetic oligonucleotide
caacugugcagacacagca

SEQ ID NO: 2911118 - RNA, 19 nt, Artificial Sequence
  Description of Artificial Sequence: Synthetic oligonucleotide
caccucaugcccauccugc

SEQ ID NO: 2911119 - RNA, 19 nt, Artificial Sequence
  Description of Artificial Sequence: Synthetic oligonucleotide
uucguugacacagcagcug

SEQ ID NO: 2911120 - RNA, 19 nt, Artificial Sequence
  Description of Artificial Sequence: Synthetic oligonucleotide
agaaccgcagugaggggcc

SEQ ID NO: 2911121 - RNA, 19 nt, Artificial Sequence
  Description of Artificial Sequence: Synthetic oligonucleotide
acuauaguaccugcuucag

SEQ ID NO: 2911122 - RNA, 19 nt, Artificial Sequence
  Description of Artificial Sequence: Synthetic oligonucleotide
cugugcagacacagcaucc

SEQ ID NO: 2911123 - RNA, 19 nt, Artificial Sequence
  Description of Artificial Sequence: Synthetic oligonucleotide
cuccacaaaggcgugacug

SEQ ID NO: 2911124 - RNA, 19 nt, Artificial Sequence
  Description of Artificial Sequence: Synthetic oligonucleotide
cugguaccaaaagcgaugc

SEQ ID NO: 2911125 - RNA, 19 nt, Artificial Sequence
  Description of Artificial Sequence: Synthetic oligonucleotide
cuaaaaggcacuggguguc

SEQ ID NO: 2911126 - RNA, 19 nt, Artificial Sequence
  Description of Artificial Sequence: Synthetic oligonucleotide
cucugggcuacuuggcugc

SEQ ID NO: 2911127 - RNA, 19 nt, Artificial Sequence
  Description of Artificial Sequence: Synthetic oligonucleotide
cuaaacacuugguaaggaa

SEQ ID NO: 2911128 - RNA, 19 nt, Artificial Sequence
  Description of Artificial Sequence: Synthetic oligonucleotide
uaagaaccgcagugagggg

SEQ ID NO: 2911129 - RNA, 19 nt, Artificial Sequence
  Description of Artificial Sequence: Synthetic oligonucleotide
ucaggucuggcuugagcca

SEQ ID NO: 2911130 - RNA, 19 nt, Artificial Sequence
  Description of Artificial Sequence: Synthetic oligonucleotide
ugcagagcagcccgagccc

SEQ ID NO: 2911131 - RNA, 19 nt, Artificial Sequence
  Description of Artificial Sequence: Synthetic oligonucleotide
cuucauucguugacacagc

SEQ ID NO: 2911132 - RNA, 19 nt, Artificial Sequence
  Description of Artificial Sequence: Synthetic oligonucleotide
uuacaaccugguaccaaaa

SEQ ID NO: 2911133 - RNA, 19 nt, Artificial Sequence
  Description of Artificial Sequence: Synthetic oligonucleotide
aaggccacuaaaaggcacu

SEQ ID NO: 2911134 - RNA, 19 nt, Artificial Sequence
  Description of Artificial Sequence: Synthetic oligonucleotide
gccagcacaacccaaauaa

SEQ ID NO: 2911135 - RNA, 19 nt, Artificial Sequence
  Description of Artificial Sequence: Synthetic oligonucleotide
caaaagcgaugccagccag

SEQ ID NO: 2911136 - RNA, 19 nt, Artificial Sequence
  Description of Artificial Sequence: Synthetic oligonucleotide
ugggacccuagccuguccc

SEQ ID NO: 2911137 - RNA, 19 nt, Artificial Sequence
  Description of Artificial Sequence: Synthetic oligonucleotide
gguaccaaaagcgaugcca

SEQ ID NO: 2911138 - RNA, 19 nt, Artificial Sequence
  Description of Artificial Sequence: Synthetic oligonucleotide
guugacacagcagcugcag

SEQ ID NO: 2911139 - RNA, 19 nt, Artificial Sequence
  Description of Artificial Sequence: Synthetic oligonucleotide
acaacccaaauaaggccac

SEQ ID NO: 2911140 - RNA, 19 nt, Artificial Sequence
  Description of Artificial Sequence: Synthetic oligonucleotide
ccuguucuccacaaaggcg

SEQ ID NO: 2911141 - RNA, 19 nt, Artificial Sequence
  Description of Artificial Sequence: Synthetic oligonucleotide
acuugguaaggaacauugg

SEQ ID NO: 2911142 - RNA, 19 nt, Artificial Sequence
  Description of Artificial Sequence: Synthetic oligonucleotide
ggagaccacaagcuggucc

SEQ ID NO: 2911143 - RNA, 19 nt, Artificial Sequence
  Description of Artificial Sequence: Synthetic oligonucleotide
ugugcagacacagcauccu

SEQ ID NO: 2911144 - RNA, 19 nt, Artificial Sequence
  Description of Artificial Sequence: Synthetic oligonucleotide
cuucaggucuggcuugagc

SEQ ID NO: 2911145 - RNA, 19 nt, Artificial Sequence
  Description of Artificial Sequence: Synthetic oligonucleotide
uugacacagcagcugcaga

SEQ ID NO: 2911146 - RNA, 19 nt, Artificial Sequence
  Description of Artificial Sequence: Synthetic oligonucleotide
ugggcuacuuggcugcccu

SEQ ID NO: 2911147 - RNA, 19 nt, Artificial Sequence
  Description of Artificial Sequence: Synthetic oligonucleotide
agcccuaggagaccacaag

SEQ ID NO: 2911148 - RNA, 19 nt, Artificial Sequence
  Description of Artificial Sequence: Synthetic oligonucleotide
uuggcggaagugcugcuuc

SEQ ID NO: 2911149 - RNA, 19 nt, Artificial Sequence
  Description of Artificial Sequence: Synthetic oligonucleotide
cacaaaggcgugacugccc

SEQ ID NO: 2911150 - RNA, 19 nt, Artificial Sequence
  Description of Artificial Sequence: Synthetic oligonucleotide
ugcucugggcuacuuggcu

SEQ ID NO: 2911151 - RNA, 19 nt, Artificial Sequence
  Description of Artificial Sequence: Synthetic oligonucleotide
agcagcugcagagcagccc

SEQ ID NO: 2911152 - RNA, 19 nt, Artificial Sequence
  Description of Artificial Sequence: Synthetic oligonucleotide
uccacagcgaccuguucuc

SEQ ID NO: 2911153 - RNA, 19 nt, Artificial Sequence
  Description of Artificial Sequence: Synthetic oligonucleotide
gaagugcugcuucaggucu

SEQ ID NO: 2911154 - RNA, 19 nt, Artificial Sequence
  Description of Artificial Sequence: Synthetic oligonucleotide
aaccugguaccaaaagcga

SEQ ID NO: 2911155 - RNA, 19 nt, Artificial Sequence
  Description of Artificial Sequence: Synthetic oligonucleotide
gacucacucaguauuucca

SEQ ID NO: 2911156 - RNA, 19 nt, Artificial Sequence
  Description of Artificial Sequence: Synthetic oligonucleotide
aacacuugguaaggaacau

SEQ ID NO: 2911157 - RNA, 19 nt, Artificial Sequence
  Description of Artificial Sequence: Synthetic oligonucleotide
uaccaaaagcgaugccagc

SEQ ID NO: 2911158 - RNA, 19 nt, Artificial Sequence
  Description of Artificial Sequence: Synthetic oligonucleotide
gguaaggaacauugggcug

SEQ ID NO: 2911159 - RNA, 19 nt, Artificial Sequence
  Description of Artificial Sequence: Synthetic oligonucleotide
gacacagcagcugcagagc

SEQ ID NO: 2911160 - RNA, 19 nt, Artificial Sequence
  Description of Artificial Sequence: Synthetic oligonucleotide
cuguucuccacaaaggcgu

SEQ ID NO: 2911161 - RNA, 19 nt, Artificial Sequence
  Description of Artificial Sequence: Synthetic oligonucleotide
cugggcguaagaaccgcag

SEQ ID NO: 2911162 - RNA, 19 nt, Artificial Sequence
  Description of Artificial Sequence: Synthetic oligonucleotide
ccugcucugggcuacuugg

SEQ ID NO: 2911163 - RNA, 19 nt, Artificial Sequence
  Description of Artificial Sequence: Synthetic oligonucleotide
agccccuugggacccuagc

SEQ ID NO: 2911164 - RNA, 19 nt, Artificial Sequence
  Description of Artificial Sequence: Synthetic oligonucleotide
ucugggcguaagaaccgca

SEQ ID NO: 2911165 - RNA, 19 nt, Artificial Sequence
  Description of Artificial Sequence: Synthetic oligonucleotide
guauuuccagcaacugugc

SEQ ID NO: 2911166 - RNA, 19 nt, Artificial Sequence
  Description of Artificial Sequence: Synthetic oligonucleotide
gcuuaacuauaguaccugc

SEQ ID NO: 2911167 - RNA, 19 nt, Artificial Sequence
  Description of Artificial Sequence: Synthetic oligonucleotide
aggcacuggguguccaggg

SEQ ID NO: 2911168 - RNA, 19 nt, Artificial Sequence
  Description of Artificial Sequence: Synthetic oligonucleotide
gagaccacaagcugguccu

SEQ ID NO: 2911169 - RNA, 19 nt, Artificial Sequence
  Description of Artificial Sequence: Synthetic oligonucleotide
cauugggcugcccaacuuc

SEQ ID NO: 2911170 - RNA, 19 nt, Artificial Sequence
  Description of Artificial Sequence: Synthetic oligonucleotide
uucuccacaaaggcgugac

SEQ ID NO: 2911171 - RNA, 19 nt, Artificial Sequence
  Description of Artificial Sequence: Synthetic oligonucleotide
agcauccuuggccaccuca

SEQ ID NO: 2911172 - RNA, 19 nt, Artificial Sequence
  Description of Artificial Sequence: Synthetic oligonucleotide
cuuaacuauaguaccugcu

SEQ ID NO: 2911173 - RNA, 19 nt, Artificial Sequence
  Description of Artificial Sequence: Synthetic oligonucleotide
ccaaauaaggccacuaaaa

SEQ ID NO: 2911174 - RNA, 19 nt, Artificial Sequence
  Description of Artificial Sequence: Synthetic oligonucleotide
ccuguaccuaaacacuugg

SEQ ID NO: 2911175 - RNA, 19 nt, Artificial Sequence
  Description of Artificial Sequence: Synthetic oligonucleotide
cccucugggcguaagaacc

SEQ ID NO: 2911176 - RNA, 19 nt, Artificial Sequence
  Description of Artificial Sequence: Synthetic oligonucleotide
acccaaauaaggccacuaa

SEQ ID NO: 2911177 - RNA, 19 nt, Artificial Sequence
  Description of Artificial Sequence: Synthetic oligonucleotide
ugggcguaagaaccgcagu

SEQ ID NO: 2911178 - RNA, 19 nt, Artificial Sequence
  Description of Artificial Sequence: Synthetic oligonucleotide
uggcuugagccacuccaca

SEQ ID NO: 2911179 - RNA, 19 nt, Artificial Sequence
  Description of Artificial Sequence: Synthetic oligonucleotide
uaaaaggcacugggugucc

SEQ ID NO: 2911180 - RNA, 19 nt, Artificial Sequence
  Description of Artificial Sequence: Synthetic oligonucleotide
augcccauccugccaauca

SEQ ID NO: 2911181 - RNA, 19 nt, Artificial Sequence
  Description of Artificial Sequence: Synthetic oligonucleotide
ccugcuucagcccuaggag

SEQ ID NO: 2911182 - RNA, 19 nt, Artificial Sequence
  Description of Artificial Sequence: Synthetic oligonucleotide
uagccugucccugcucugg

SEQ ID NO: 2911183 - RNA, 19 nt, Artificial Sequence
  Description of Artificial Sequence: Synthetic oligonucleotide
uggguguccagggauuaca

SEQ ID NO: 2911184 - RNA, 19 nt, Artificial Sequence
  Description of Artificial Sequence: Synthetic oligonucleotide
aacccaaauaaggccacua

SEQ ID NO: 2911185 - RNA, 19 nt, Artificial Sequence
  Description of Artificial Sequence: Synthetic oligonucleotide
caagcuguuggcggaagug

SEQ ID NO: 2911186 - RNA, 19 nt, Artificial Sequence
  Description of Artificial Sequence: Synthetic oligonucleotide
uccuagacucacucaguau

SEQ ID NO: 2911187 - RNA, 19 nt, Artificial Sequence
  Description of Artificial Sequence: Synthetic oligonucleotide
cucaguauuuccagcaacu

SEQ ID NO: 2911188 - RNA, 19 nt, Artificial Sequence
  Description of Artificial Sequence: Synthetic oligonucleotide
cuguuggcggaagugcugc

SEQ ID NO: 2911189 - RNA, 19 nt, Artificial Sequence
  Description of Artificial Sequence: Synthetic oligonucleotide
uuggcugcccucugggcgu

SEQ ID NO: 2911190 - RNA, 19 nt, Artificial Sequence
  Description of Artificial Sequence: Synthetic oligonucleotide
uaaggaacauugggcugcc

SEQ ID NO: 2911191 - RNA, 19 nt, Artificial Sequence
  Description of Artificial Sequence: Synthetic oligonucleotide
ccugguaccaaaagcgaug

SEQ ID NO: 2911192 - RNA, 19 nt, Artificial Sequence
  Description of Artificial Sequence: Synthetic oligonucleotide
caaucagaggccagcacaa

SEQ ID NO: 2911193 - RNA, 19 nt, Artificial Sequence
  Description of Artificial Sequence: Synthetic oligonucleotide
aaggaacauugggcugccc

SEQ ID NO: 2911194 - RNA, 19 nt, Artificial Sequence
  Description of Artificial Sequence: Synthetic oligonucleotide
cuggcuugagccacuccac

SEQ ID NO: 2911195 - RNA, 19 nt, Artificial Sequence
  Description of Artificial Sequence: Synthetic oligonucleotide
aaaaggcacugggugucca

SEQ ID NO: 2911196 - RNA, 19 nt, Artificial Sequence
  Description of Artificial Sequence: Synthetic oligonucleotide
agccacuccacagcgaccu

SEQ ID NO: 2911197 - RNA, 19 nt, Artificial Sequence
  Description of Artificial Sequence: Synthetic oligonucleotide
ugguaccaaaagcgaugcc

SEQ ID NO: 2911198 - RNA, 19 nt, Artificial Sequence
  Description of Artificial Sequence: Synthetic oligonucleotide
gggcguaagaaccgcagug

SEQ ID NO: 2911199 - RNA, 19 nt, Artificial Sequence
  Description of Artificial Sequence: Synthetic oligonucleotide
aagcgaugccagccagcag

SEQ ID NO: 2911200 - RNA, 19 nt, Artificial Sequence
  Description of Artificial Sequence: Synthetic oligonucleotide
agugcugcuucaggucugg

SEQ ID NO: 2911201 - RNA, 19 nt, Artificial Sequence
  Description of Artificial Sequence: Synthetic oligonucleotide
gacccuagccugucccugc

SEQ ID NO: 2911202 - RNA, 19 nt, Artificial Sequence
  Description of Artificial Sequence: Synthetic oligonucleotide
ucagcccuaggagaccaca

SEQ ID NO: 2911203 - RNA, 19 nt, Artificial Sequence
  Description of Artificial Sequence: Synthetic oligonucleotide
gaacauugggcugcccaac

SEQ ID NO: 2911204 - RNA, 19 nt, Artificial Sequence
  Description of Artificial Sequence: Synthetic oligonucleotide
aacugugcagacacagcau

SEQ ID NO: 2911205 - RNA, 19 nt, Artificial Sequence
  Description of Artificial Sequence: Synthetic oligonucleotide
auaaggccacuaaaaggca

SEQ ID NO: 2911206 - RNA, 19 nt, Artificial Sequence
  Description of Artificial Sequence: Synthetic oligonucleotide
uagacucacucaguauuuc

SEQ ID NO: 2911207 - RNA, 19 nt, Artificial Sequence
  Description of Artificial Sequence: Synthetic oligonucleotide
ucuccacaaaggcgugacu

SEQ ID NO: 2911208 - RNA, 19 nt, Artificial Sequence
  Description of Artificial Sequence: Synthetic oligonucleotide
ggcuugagccacuccacag

SEQ ID NO: 2911209 - RNA, 19 nt, Artificial Sequence
  Description of Artificial Sequence: Synthetic oligonucleotide
gauuacaaccugguaccaa

SEQ ID NO: 2911210 - RNA, 19 nt, Artificial Sequence
  Description of Artificial Sequence: Synthetic oligonucleotide
gcuugagccacuccacagc

SEQ ID NO: 2911211 - RNA, 19 nt, Artificial Sequence
  Description of Artificial Sequence: Synthetic oligonucleotide
gaccacaagcugguccuag

SEQ ID NO: 2911212 - RNA, 19 nt, Artificial Sequence
  Description of Artificial Sequence: Synthetic oligonucleotide
cagugaggggcccgcaagc

SEQ ID NO: 2911213 - RNA, 19 nt, Artificial Sequence
  Description of Artificial Sequence: Synthetic oligonucleotide
auucguugacacagcagcu

SEQ ID NO: 2911214 - RNA, 19 nt, Artificial Sequence
  Description of Artificial Sequence: Synthetic oligonucleotide
gcguaagaaccgcagugag

SEQ ID NO: 2911215 - RNA, 19 nt, Artificial Sequence
  Description of Artificial Sequence: Synthetic oligonucleotide
agccugucccugcucuggg

SEQ ID NO: 2911216 - RNA, 19 nt, Artificial Sequence
  Description of Artificial Sequence: Synthetic oligonucleotide
uugagccacuccacagcga

SEQ ID NO: 2911217 - RNA, 19 nt, Artificial Sequence
  Description of Artificial Sequence: Synthetic oligonucleotide
auugggcugcccaacuuca

SEQ ID NO: 2911218 - RNA, 19 nt, Artificial Sequence
  Description of Artificial Sequence: Synthetic oligonucleotide
auccugccaaucagaggcc

SEQ ID NO: 2911219 - RNA, 19 nt, Artificial Sequence
  Description of Artificial Sequence: Synthetic oligonucleotide
aaggcgugacugcccuucu

SEQ ID NO: 2911220 - RNA, 19 nt, Artificial Sequence
  Description of Artificial Sequence: Synthetic oligonucleotide
gcccuaggagaccacaagc

SEQ ID NO: 2911221 - RNA, 19 nt, Artificial Sequence
  Description of Artificial Sequence: Synthetic oligonucleotide
ggcugcccaacuucauucg

SEQ ID NO: 2911222 - RNA, 19 nt, Artificial Sequence
  Description of Artificial Sequence: Synthetic oligonucleotide
acuccacagcgaccuguuc

SEQ ID NO: 2911223 - RNA, 19 nt, Artificial Sequence
  Description of Artificial Sequence: Synthetic oligonucleotide
accacaagcugguccuaga

SEQ ID NO: 2911224 - RNA, 19 nt, Artificial Sequence
  Description of Artificial Sequence: Synthetic oligonucleotide
ccuaggagaccacaagcug

SEQ ID NO: 2911225 - RNA, 19 nt, Artificial Sequence
  Description of Artificial Sequence: Synthetic oligonucleotide
cugcuucagcccuaggaga

SEQ ID NO: 2911226 - RNA, 19 nt, Artificial Sequence
  Description of Artificial Sequence: Synthetic oligonucleotide
uugggacccuagccugucc

SEQ ID NO: 2911227 - RNA, 19 nt, Artificial Sequence
  Description of Artificial Sequence: Synthetic oligonucleotide
ugggcugcccaacuucauu

SEQ ID NO: 2911228 - RNA, 19 nt, Artificial Sequence
  Description of Artificial Sequence: Synthetic oligonucleotide
aagugcugcuucaggucug

SEQ ID NO: 2911229 - RNA, 19 nt, Artificial Sequence
  Description of Artificial Sequence: Synthetic oligonucleotide
cguaagaaccgcagugagg

SEQ ID NO: 2911230 - RNA, 19 nt, Artificial Sequence
  Description of Artificial Sequence: Synthetic oligonucleotide
ccaaucagaggccagcaca

SEQ ID NO: 2911231 - RNA, 19 nt, Artificial Sequence
  Description of Artificial Sequence: Synthetic oligonucleotide
accgcagugaggggcccgc

SEQ ID NO: 2911232 - RNA, 19 nt, Artificial Sequence
  Description of Artificial Sequence: Synthetic oligonucleotide
cacagcauccuuggccacc

SEQ ID NO: 2911233 - RNA, 19 nt, Artificial Sequence
  Description of Artificial Sequence: Synthetic oligonucleotide
uccugccaaucagaggcca

SEQ ID NO: 2911234 - RNA, 19 nt, Artificial Sequence
  Description of Artificial Sequence: Synthetic oligonucleotide
guccuagacucacucagua

SEQ ID NO: 2911235 - RNA, 19 nt, Artificial Sequence
  Description of Artificial Sequence: Synthetic oligonucleotide
cugcuuaacuauaguaccu

SEQ ID NO: 2911236 - RNA, 19 nt, Artificial Sequence
  Description of Artificial Sequence: Synthetic oligonucleotide
guccagggauuacaaccug

SEQ ID NO: 2911237 - RNA, 19 nt, Artificial Sequence
  Description of Artificial Sequence: Synthetic oligonucleotide
cccaacuucauucguugac

SEQ ID NO: 2911238 - RNA, 19 nt, Artificial Sequence
  Description of Artificial Sequence: Synthetic oligonucleotide
ggguuuacugcuuaacuau

SEQ ID NO: 2911239 - RNA, 19 nt, Artificial Sequence
  Description of Artificial Sequence: Synthetic oligonucleotide
ggcgugacugcccuucuac

SEQ ID NO: 2911240 - RNA, 19 nt, Artificial Sequence
  Description of Artificial Sequence: Synthetic oligonucleotide
ugcccucugggcguaagaa

SEQ ID NO: 2911241 - RNA, 19 nt, Artificial Sequence
  Description of Artificial Sequence: Synthetic oligonucleotide
aaccgcagugaggggcccg

SEQ ID NO: 2911242 - RNA, 19 nt, Artificial Sequence
  Description of Artificial Sequence: Synthetic oligonucleotide
agcgaccuguucuccacaa

SEQ ID NO: 2911243 - RNA, 19 nt, Artificial Sequence
  Description of Artificial Sequence: Synthetic oligonucleotide
cauccuuggccaccucaug

SEQ ID NO: 2911244 - RNA, 19 nt, Artificial Sequence
  Description of Artificial Sequence: Synthetic oligonucleotide
cccauccugccaaucagag

SEQ ID NO: 2911245 - RNA, 19 nt, Artificial Sequence
  Description of Artificial Sequence: Synthetic oligonucleotide
cucaugcccauccugccaa

SEQ ID NO: 2911246 - RNA, 19 nt, Artificial Sequence
  Description of Artificial Sequence: Synthetic oligonucleotide
cgaccuguucuccacaaag

SEQ ID NO: 2911247 - RNA, 19 nt, Artificial Sequence
  Description of Artificial Sequence: Synthetic oligonucleotide
ccagcacaacccaaauaag

SEQ ID NO: 2911248 - RNA, 19 nt, Artificial Sequence
  Description of Artificial Sequence: Synthetic oligonucleotide
gcugguccuagacucacuc

SEQ ID NO: 2911249 - RNA, 19 nt, Artificial Sequence
  Description of Artificial Sequence: Synthetic oligonucleotide
cuuggccaccucaugccca

SEQ ID NO: 2911250 - RNA, 19 nt, Artificial Sequence
  Description of Artificial Sequence: Synthetic oligonucleotide
cuagccugucccugcucug

SEQ ID NO: 2911251 - RNA, 19 nt, Artificial Sequence
  Description of Artificial Sequence: Synthetic oligonucleotide
ggaacauugggcugcccaa

SEQ ID NO: 2911252 - RNA, 19 nt, Artificial Sequence
  Description of Artificial Sequence: Synthetic oligonucleotide
agcuguuggcggaagugcu

SEQ ID NO: 2911253 - RNA, 19 nt, Artificial Sequence
  Description of Artificial Sequence: Synthetic oligonucleotide
uguuggcggaagugcugcu

SEQ ID NO: 2911254 - RNA, 19 nt, Artificial Sequence
  Description of Artificial Sequence: Synthetic oligonucleotide
agugaggggcccgcaagcu

SEQ ID NO: 2911255 - RNA, 19 nt, Artificial Sequence
  Description of Artificial Sequence: Synthetic oligonucleotide
acauugggcugcccaacuu

SEQ ID NO: 2911256 - RNA, 19 nt, Artificial Sequence
  Description of Artificial Sequence: Synthetic oligonucleotide
caggucuggcuugagccac

SEQ ID NO: 2911257 - RNA, 19 nt, Artificial Sequence
  Description of Artificial Sequence: Synthetic oligonucleotide
gcucugggcuacuuggcug

SEQ ID NO: 2911258 - RNA, 19 nt, Artificial Sequence
  Description of Artificial Sequence: Synthetic oligonucleotide
gcagugaggggcccgcaag

SEQ ID NO: 2911259 - RNA, 19 nt, Artificial Sequence
  Description of Artificial Sequence: Synthetic oligonucleotide
cucugggcguaagaaccgc

SEQ ID NO: 2911260 - RNA, 19 nt, Artificial Sequence
  Description of Artificial Sequence: Synthetic oligonucleotide
gggcugcccaacuucauuc

SEQ ID NO: 2911261 - RNA, 19 nt, Artificial Sequence
  Description of Artificial Sequence: Synthetic oligonucleotide
caagcugguccuagacuca

SEQ ID NO: 2911262 - RNA, 19 nt, Artificial Sequence
  Description of Artificial Sequence: Synthetic oligonucleotide
ggggcccgcaagcuguugg

SEQ ID NO: 2911263 - RNA, 19 nt, Artificial Sequence
  Description of Artificial Sequence: Synthetic oligonucleotide
gguguccagggauuacaac

SEQ ID NO: 2911264 - RNA, 19 nt, Artificial Sequence
  Description of Artificial Sequence: Synthetic oligonucleotide
accugguaccaaaagcgau

SEQ ID NO: 2911265 - RNA, 19 nt, Artificial Sequence
  Description of Artificial Sequence: Synthetic oligonucleotide
caggcccuguaccuaaaca

SEQ ID NO: 2911266 - RNA, 19 nt, Artificial Sequence
  Description of Artificial Sequence: Synthetic oligonucleotide
ccucugggcguaagaaccg

SEQ ID NO: 2911267 - RNA, 19 nt, Artificial Sequence
  Description of Artificial Sequence: Synthetic oligonucleotide
gcccgcaagcuguuggcgg

SEQ ID NO: 2911268 - RNA, 19 nt, Artificial Sequence
  Description of Artificial Sequence: Synthetic oligonucleotide
ugucccugcucugggcuac

SEQ ID NO: 2911269 - RNA, 19 nt, Artificial Sequence
  Description of Artificial Sequence: Synthetic oligonucleotide
gaggccagcacaacccaaa

SEQ ID NO: 2911270 - RNA, 19 nt, Artificial Sequence
  Description of Artificial Sequence: Synthetic oligonucleotide
uucagcccuaggagaccac

SEQ ID NO: 2911271 - RNA, 19 nt, Artificial Sequence
  Description of Artificial Sequence: Synthetic oligonucleotide
ccauccugccaaucagagg

SEQ ID NO: 2911272 - RNA, 19 nt, Artificial Sequence
  Description of Artificial Sequence: Synthetic oligonucleotide
ggccaccucaugcccaucc

SEQ ID NO: 2911273 - RNA, 19 nt, Artificial Sequence
  Description of Artificial Sequence: Synthetic oligonucleotide
cuccacagcgaccuguucu

SEQ ID NO: 2911274 - RNA, 19 nt, Artificial Sequence
  Description of Artificial Sequence: Synthetic oligonucleotide
aggccagcacaacccaaau

SEQ ID NO: 2911275 - RNA, 19 nt, Artificial Sequence
  Description of Artificial Sequence: Synthetic oligonucleotide
uugggcugcccaacuucau

SEQ ID NO: 2911276 - RNA, 19 nt, Artificial Sequence
  Description of Artificial Sequence: Synthetic oligonucleotide
cugguccuagacucacuca

SEQ ID NO: 2911277 - RNA, 19 nt, Artificial Sequence
  Description of Artificial Sequence: Synthetic oligonucleotide
cuucagcccuaggagacca

SEQ ID NO: 2911278 - RNA, 19 nt, Artificial Sequence
  Description of Artificial Sequence: Synthetic oligonucleotide
cuagacucacucaguauuu

SEQ ID NO: 2911279 - RNA, 19 nt, Artificial Sequence
  Description of Artificial Sequence: Synthetic oligonucleotide
ggcguaagaaccgcaguga

SEQ ID NO: 2911280 - RNA, 19 nt, Artificial Sequence
  Description of Artificial Sequence: Synthetic oligonucleotide
gccccuugggacccuagcc

SEQ ID NO: 2911281 - RNA, 19 nt, Artificial Sequence
  Description of Artificial Sequence: Synthetic oligonucleotide
cacagcgaccuguucucca

SEQ ID NO: 2911282 - RNA, 19 nt, Artificial Sequence
  Description of Artificial Sequence: Synthetic oligonucleotide
ucugggcuacuuggcugcc

SEQ ID NO: 2911283 - RNA, 19 nt, Artificial Sequence
  Description of Artificial Sequence: Synthetic oligonucleotide
cccuguaccuaaacacuug

SEQ ID NO: 2911284 - RNA, 19 nt, Artificial Sequence
  Description of Artificial Sequence: Synthetic oligonucleotide
ggccacuaaaaggcacugg

SEQ ID NO: 2911285 - RNA, 19 nt, Artificial Sequence
  Description of Artificial Sequence: Synthetic oligonucleotide
ccacaaaggcgugacugcc

SEQ ID NO: 2911286 - RNA, 19 nt, Artificial Sequence
  Description of Artificial Sequence: Synthetic oligonucleotide
gcaacugugcagacacagc

SEQ ID NO: 2911287 - RNA, 19 nt, Artificial Sequence
  Description of Artificial Sequence: Synthetic oligonucleotide
aggagaccacaagcugguc

SEQ ID NO: 2911288 - RNA, 19 nt, Artificial Sequence
  Description of Artificial Sequence: Synthetic oligonucleotide
cuugggacccuagccuguc

SEQ ID NO: 2911289 - RNA, 19 nt, Artificial Sequence
  Description of Artificial Sequence: Synthetic oligonucleotide
cccaaauaaggccacuaaa

SEQ ID NO: 2911290 - RNA, 19 nt, Artificial Sequence
  Description of Artificial Sequence: Synthetic oligonucleotide
cacaagcugguccuagacu

SEQ ID NO: 2911291 - RNA, 19 nt, Artificial Sequence
  Description of Artificial Sequence: Synthetic oligonucleotide
acccuagccugucccugcu

SEQ ID NO: 2911292 - RNA, 19 nt, Artificial Sequence
  Description of Artificial Sequence: Synthetic oligonucleotide
cagaggccagcacaaccca

SEQ ID NO: 2911293 - RNA, 19 nt, Artificial Sequence
  Description of Artificial Sequence: Synthetic oligonucleotide
ccaacuucauucguugaca

SEQ ID NO: 2911294 - RNA, 19 nt, Artificial Sequence
  Description of Artificial Sequence: Synthetic oligonucleotide
gcgugacugcccuucuacc

SEQ ID NO: 2911295 - RNA, 19 nt, Artificial Sequence
  Description of Artificial Sequence: Synthetic oligonucleotide
cuguaccuaaacacuuggu

SEQ ID NO: 2911296 - RNA, 19 nt, Artificial Sequence
  Description of Artificial Sequence: Synthetic oligonucleotide
gagccacuccacagcgacc

SEQ ID NO: 2911297 - RNA, 19 nt, Artificial Sequence
  Description of Artificial Sequence: Synthetic oligonucleotide
gucuggcuugagccacucc

SEQ ID NO: 2911298 - RNA, 19 nt, Artificial Sequence
  Description of Artificial Sequence: Synthetic oligonucleotide
ccaaaagcgaugccagcca

SEQ ID NO: 2911299 - RNA, 19 nt, Artificial Sequence
  Description of Artificial Sequence: Synthetic oligonucleotide
acuggguguccagggauua

SEQ ID NO: 2911300 - RNA, 19 nt, Artificial Sequence
  Description of Artificial Sequence: Synthetic oligonucleotide
ucaugcccauccugccaau

SEQ ID NO: 2911301 - RNA, 19 nt, Artificial Sequence
  Description of Artificial Sequence: Synthetic oligonucleotide
cccuugggacccuagccug

SEQ ID NO: 2911302 - RNA, 19 nt, Artificial Sequence
  Description of Artificial Sequence: Synthetic oligonucleotide
gguuuacugcuuaacuaua

SEQ ID NO: 2911303 - RNA, 19 nt, Artificial Sequence
  Description of Artificial Sequence: Synthetic oligonucleotide
ccugccaaucagaggccag

SEQ ID NO: 2911304 - RNA, 19 nt, Artificial Sequence
  Description of Artificial Sequence: Synthetic oligonucleotide
caugcccauccugccaauc

SEQ ID NO: 2911305 - RNA, 19 nt, Artificial Sequence
  Description of Artificial Sequence: Synthetic oligonucleotide
gccaaucagaggccagcac

SEQ ID NO: 2911306 - RNA, 19 nt, Artificial Sequence
  Description of Artificial Sequence: Synthetic oligonucleotide
gaaccgcagugaggggccc

SEQ ID NO: 2911307 - RNA, 19 nt, Artificial Sequence
  Description of Artificial Sequence: Synthetic oligonucleotide
gcccucugggcguaagaac

SEQ ID NO: 2911308 - RNA, 19 nt, Artificial Sequence
  Description of Artificial Sequence: Synthetic oligonucleotide
ccuagacucacucaguauu

SEQ ID NO: 2911309 - RNA, 19 nt, Artificial Sequence
  Description of Artificial Sequence: Synthetic oligonucleotide
cugggcuacuuggcugccc

SEQ ID NO: 2911310 - RNA, 19 nt, Artificial Sequence
  Description of Artificial Sequence: Synthetic oligonucleotide
cuggguguccagggauuac

SEQ ID NO: 2911311 - RNA, 19 nt, Artificial Sequence
  Description of Artificial Sequence: Synthetic oligonucleotide
cagggauuacaaccuggua

SEQ ID NO: 2911312 - RNA, 19 nt, Artificial Sequence
  Description of Artificial Sequence: Synthetic oligonucleotide
gcuguuggcggaagugcug

SEQ ID NO: 2911313 - RNA, 19 nt, Artificial Sequence
  Description of Artificial Sequence: Synthetic oligonucleotide
ggcggaagugcugcuucag

SEQ ID NO: 2911314 - RNA, 19 nt, Artificial Sequence
  Description of Artificial Sequence: Synthetic oligonucleotide
ggauuacaaccugguacca

SEQ ID NO: 2911315 - RNA, 19 nt, Artificial Sequence
  Description of Artificial Sequence: Synthetic oligonucleotide
cagcccuaggagaccacaa

SEQ ID NO: 2911316 - RNA, 19 nt, Artificial Sequence
  Description of Artificial Sequence: Synthetic oligonucleotide
gggcccgcaagcuguuggc

SEQ ID NO: 2911317 - RNA, 19 nt, Artificial Sequence
  Description of Artificial Sequence: Synthetic oligonucleotide
aguaccugcuucagcccua

SEQ ID NO: 2911318 - RNA, 19 nt, Artificial Sequence
  Description of Artificial Sequence: Synthetic oligonucleotide
ccuaaacacuugguaagga

SEQ ID NO: 2911319 - RNA, 19 nt, Artificial Sequence
  Description of Artificial Sequence: Synthetic oligonucleotide
cagcaggcccuguaccuaa

SEQ ID NO: 2911320 - RNA, 19 nt, Artificial Sequence
  Description of Artificial Sequence: Synthetic oligonucleotide
ggcccgcaagcuguuggcg

SEQ ID NO: 2911321 - RNA, 19 nt, Artificial Sequence
  Description of Artificial Sequence: Synthetic oligonucleotide
agaggccagcacaacccaa

SEQ ID NO: 2911322 - RNA, 19 nt, Artificial Sequence
  Description of Artificial Sequence: Synthetic oligonucleotide
ccaccucaugcccauccug

SEQ ID NO: 2911323 - RNA, 19 nt, Artificial Sequence
  Description of Artificial Sequence: Synthetic oligonucleotide
ggcacuggguguccaggga

SEQ ID NO: 2911324 - RNA, 19 nt, Artificial Sequence
  Description of Artificial Sequence: Synthetic oligonucleotide
ggacccuagccugucccug

SEQ ID NO: 2911325 - RNA, 19 nt, Artificial Sequence
  Description of Artificial Sequence: Synthetic oligonucleotide
gcuucagcccuaggagacc

SEQ ID NO: 2911326 - RNA, 19 nt, Artificial Sequence
  Description of Artificial Sequence: Synthetic oligonucleotide
gcccgagccccuugggacc

SEQ ID NO: 2911327 - RNA, 19 nt, Artificial Sequence
  Description of Artificial Sequence: Synthetic oligonucleotide
cagcccgagccccuuggga

SEQ ID NO: 2911328 - RNA, 19 nt, Artificial Sequence
  Description of Artificial Sequence: Synthetic oligonucleotide
gcaggcccuguaccuaaac

SEQ ID NO: 2911329 - RNA, 19 nt, Artificial Sequence
  Description of Artificial Sequence: Synthetic oligonucleotide
cccuaggagaccacaagcu

SEQ ID NO: 2911330 - RNA, 19 nt, Artificial Sequence
  Description of Artificial Sequence: Synthetic oligonucleotide
gagccccuugggacccuag

SEQ ID NO: 2911331 - RNA, 19 nt, Artificial Sequence
  Description of Artificial Sequence: Synthetic oligonucleotide
agcugguccuagacucacu

SEQ ID NO: 2911332 - RNA, 19 nt, Artificial Sequence
  Description of Artificial Sequence: Synthetic oligonucleotide
cagcaacugugcagacaca

SEQ ID NO: 2911333 - RNA, 19 nt, Artificial Sequence
  Description of Artificial Sequence: Synthetic oligonucleotide
ccagggauuacaaccuggu

SEQ ID NO: 2911334 - RNA, 19 nt, Artificial Sequence
  Description of Artificial Sequence: Synthetic oligonucleotide
aggcgugacugcccuucua

SEQ ID NO: 2911335 - RNA, 19 nt, Artificial Sequence
  Description of Artificial Sequence: Synthetic oligonucleotide
gcccaacuucauucguuga

SEQ ID NO: 2911336 - RNA, 19 nt, Artificial Sequence
  Description of Artificial Sequence: Synthetic oligonucleotide
ggcccuguaccuaaacacu

SEQ ID NO: 2911337 - RNA, 19 nt, Artificial Sequence
  Description of Artificial Sequence: Synthetic oligonucleotide
cagcgaccuguucuccaca

SEQ ID NO: 2911338 - RNA, 19 nt, Artificial Sequence
  Description of Artificial Sequence: Synthetic oligonucleotide
cugcccaacuucauucguu

SEQ ID NO: 2911339 - RNA, 19 nt, Artificial Sequence
  Description of Artificial Sequence: Synthetic oligonucleotide
cugcccucugggcguaaga

SEQ ID NO: 2911340 - RNA, 19 nt, Artificial Sequence
  Description of Artificial Sequence: Synthetic oligonucleotide
gccugucccugcucugggc

SEQ ID NO: 2911341 - RNA, 19 nt, Artificial Sequence
  Description of Artificial Sequence: Synthetic oligonucleotide
ggccagcacaacccaaaua

SEQ ID NO: 2911342 - RNA, 19 nt, Artificial Sequence
  Description of Artificial Sequence: Synthetic oligonucleotide
ccacuaaaaggcacugggu

SEQ ID NO: 2911343 - RNA, 19 nt, Artificial Sequence
  Description of Artificial Sequence: Synthetic oligonucleotide
aggucuggcuugagccacu

SEQ ID NO: 2911344 - RNA, 19 nt, Artificial Sequence
  Description of Artificial Sequence: Synthetic oligonucleotide
cugucccugcucugggcua

SEQ ID NO: 2911345 - RNA, 19 nt, Artificial Sequence
  Description of Artificial Sequence: Synthetic oligonucleotide
gugcagacacagcauccuu

SEQ ID NO: 2911346 - RNA, 19 nt, Artificial Sequence
  Description of Artificial Sequence: Synthetic oligonucleotide
ccucaugcccauccugcca

SEQ ID NO: 2911347 - RNA, 19 nt, Artificial Sequence
  Description of Artificial Sequence: Synthetic oligonucleotide
ggguguccagggauuacaa

SEQ ID NO: 2911348 - RNA, 19 nt, Artificial Sequence
  Description of Artificial Sequence: Synthetic oligonucleotide
agagcagcccgagccccuu

SEQ ID NO: 2911349 - RNA, 19 nt, Artificial Sequence
  Description of Artificial Sequence: Synthetic oligonucleotide
cccugcucugggcuacuug

SEQ ID NO: 2911350 - RNA, 19 nt, Artificial Sequence
  Description of Artificial Sequence: Synthetic oligonucleotide
agaccacaagcugguccua

SEQ ID NO: 2911351 - RNA, 19 nt, Artificial Sequence
  Description of Artificial Sequence: Synthetic oligonucleotide
cccgcaagcuguuggcgga

SEQ ID NO: 2911352 - RNA, 19 nt, Artificial Sequence
  Description of Artificial Sequence: Synthetic oligonucleotide
ggcuacuuggcugcccucu

SEQ ID NO: 2911353 - RNA, 19 nt, Artificial Sequence
  Description of Artificial Sequence: Synthetic oligonucleotide
gcugcccaacuucauucgu

SEQ ID NO: 2911354 - RNA, 19 nt, Artificial Sequence
  Description of Artificial Sequence: Synthetic oligonucleotide
gcacuggguguccagggau

SEQ ID NO: 2911355 - RNA, 19 nt, Artificial Sequence
  Description of Artificial Sequence: Synthetic oligonucleotide
gcuucaggucuggcuugag

SEQ ID NO: 2911356 - RNA, 19 nt, Artificial Sequence
  Description of Artificial Sequence: Synthetic oligonucleotide
gcaagcuguuggcggaagu

SEQ ID NO: 2911357 - RNA, 19 nt, Artificial Sequence
  Description of Artificial Sequence: Synthetic oligonucleotide
cacuggguguccagggauu

SEQ ID NO: 2911358 - RNA, 19 nt, Artificial Sequence
  Description of Artificial Sequence: Synthetic oligonucleotide
gcccauccugccaaucaga

SEQ ID NO: 2911359 - RNA, 19 nt, Artificial Sequence
  Description of Artificial Sequence: Synthetic oligonucleotide
gguccuagacucacucagu

SEQ ID NO: 2911360 - RNA, 19 nt, Artificial Sequence
  Description of Artificial Sequence: Synthetic oligonucleotide
ccacagcgaccuguucucc

SEQ ID NO: 2911361 - RNA, 19 nt, Artificial Sequence
  Description of Artificial Sequence: Synthetic oligonucleotide
aggggcccgcaagcuguug

SEQ ID NO: 2911362 - RNA, 19 nt, Artificial Sequence
  Description of Artificial Sequence: Synthetic oligonucleotide
cacuccacagcgaccuguu

SEQ ID NO: 2911363 - RNA, 19 nt, Artificial Sequence
  Description of Artificial Sequence: Synthetic oligonucleotide
guuggcggaagugcugcuu

SEQ ID NO: 2911364 - RNA, 19 nt, Artificial Sequence
  Description of Artificial Sequence: Synthetic oligonucleotide
ggucuggcuugagccacuc

SEQ ID NO: 2911365 - RNA, 19 nt, Artificial Sequence
  Description of Artificial Sequence: Synthetic oligonucleotide
cggaagugcugcuucaggu

SEQ ID NO: 2911366 - RNA, 19 nt, Artificial Sequence
  Description of Artificial Sequence: Synthetic oligonucleotide
cguugacacagcagcugca

SEQ ID NO: 2911367 - RNA, 19 nt, Artificial Sequence
  Description of Artificial Sequence: Synthetic oligonucleotide
gcugcccucugggcguaag

SEQ ID NO: 2911368 - RNA, 19 nt, Artificial Sequence
  Description of Artificial Sequence: Synthetic oligonucleotide
caacccaaauaaggccacu

SEQ ID NO: 2911369 - RNA, 19 nt, Artificial Sequence
  Description of Artificial Sequence: Synthetic oligonucleotide
agcaggcccuguaccuaaa

SEQ ID NO: 2911370 - RNA, 19 nt, Artificial Sequence
  Description of Artificial Sequence: Synthetic oligonucleotide
gggacccuagccugucccu

SEQ ID NO: 2911371 - RNA, 19 nt, Artificial Sequence
  Description of Artificial Sequence: Synthetic oligonucleotide
ucccugcucugggcuacuu

SEQ ID NO: 2911372 - RNA, 19 nt, Artificial Sequence
  Description of Artificial Sequence: Synthetic oligonucleotide
gccacuccacagcgaccug

SEQ ID NO: 2911373 - RNA, 19 nt, Artificial Sequence
  Description of Artificial Sequence: Synthetic oligonucleotide
cccgagccccuugggaccc

SEQ ID NO: 2911374 - RNA, 19 nt, Artificial Sequence
  Description of Artificial Sequence: Synthetic oligonucleotide
gcgaccuguucuccacaaa

SEQ ID NO: 2911375 - RNA, 19 nt, Artificial Sequence
  Description of Artificial Sequence: Synthetic oligonucleotide
ccugucccugcucugggcu

SEQ ID NO: 2911376 - RNA, 19 nt, Artificial Sequence
  Description of Artificial Sequence: Synthetic oligonucleotide
gggcuacuuggcugcccuc

SEQ ID NO: 2911377 - RNA, 19 nt, Artificial Sequence
  Description of Artificial Sequence: Synthetic oligonucleotide
ccccuugggacccuagccu

SEQ ID NO: 2911378 - RNA, 19 nt, Artificial Sequence
  Description of Artificial Sequence: Synthetic oligonucleotide
uggcugcccucugggcgua

SEQ ID NO: 2911379 - RNA, 19 nt, Artificial Sequence
  Description of Artificial Sequence: Synthetic oligonucleotide
gcccuguaccuaaacacuu

SEQ ID NO: 2911380 - RNA, 19 nt, Artificial Sequence
  Description of Artificial Sequence: Synthetic oligonucleotide
cgcaagcuguuggcggaag

SEQ ID NO: 2911381 - RNA, 19 nt, Artificial Sequence
  Description of Artificial Sequence: Synthetic oligonucleotide
caaaggcgugacugcccuu

SEQ ID NO: 2911382 - RNA, 19 nt, Artificial Sequence
  Description of Artificial Sequence: Synthetic oligonucleotide
ccuugggacccuagccugu

SEQ ID NO: 2911383 - RNA, 19 nt, Artificial Sequence
  Description of Artificial Sequence: Synthetic oligonucleotide
ccagcaggcccuguaccua

SEQ ID NO: 2911384 - RNA, 19 nt, Artificial Sequence
  Description of Artificial Sequence: Synthetic oligonucleotide
cgaugccagccagcaggcc

SEQ ID NO: 2911385 - RNA, 19 nt, Artificial Sequence
  Description of Artificial Sequence: Synthetic oligonucleotide
ccacuccacagcgaccugu

SEQ ID NO: 2911386 - RNA, 19 nt, Artificial Sequence
  Description of Artificial Sequence: Synthetic oligonucleotide
gaggggcccgcaagcuguu

SEQ ID NO: 2911387 - RNA, 19 nt, Artificial Sequence
  Description of Artificial Sequence: Synthetic oligonucleotide
cgcagugaggggcccgcaa

SEQ ID NO: 2911388 - RNA, 19 nt, Artificial Sequence
  Description of Artificial Sequence: Synthetic oligonucleotide
ccgcaagcuguuggcggaa

SEQ ID NO: 2911389 - RNA, 19 nt, Artificial Sequence
  Description of Artificial Sequence: Synthetic oligonucleotide
ccgcagugaggggcccgca

SEQ ID NO: 2911390 - RNA, 19 nt, Artificial Sequence
  Description of Artificial Sequence: Synthetic oligonucleotide
ggcugcccucugggcguaa

SEQ ID NO: 2911391 - RNA, 19 nt, Artificial Sequence
  Description of Artificial Sequence: Synthetic oligonucleotide
cgagccccuugggacccua

SEQ ID NO: 2911392 - RNA, 19 nt, Artificial Sequence
  Description of Artificial Sequence: Synthetic oligonucleotide
ccgagccccuugggacccu

SEQ ID NO: 2911393 - RNA, 19 nt, Artificial Sequence
  Description of Artificial Sequence: Synthetic oligonucleotide
auaaauaagacuuucuuac

SEQ ID NO: 2911394 - RNA, 19 nt, Artificial Sequence
  Description of Artificial Sequence: Synthetic oligonucleotide
uuuauaagaaggaagaacc

SEQ ID NO: 2911395 - RNA, 19 nt, Artificial Sequence
  Description of Artificial Sequence: Synthetic oligonucleotide
auaaaauacucucugaccc

SEQ ID NO: 2911396 - RNA, 19 nt, Artificial Sequence
  Description of Artificial Sequence: Synthetic oligonucleotide
aacaccucaagucucaugc

SEQ ID NO: 2911397 - RNA, 19 nt, Artificial Sequence
  Description of Artificial Sequence: Synthetic oligonucleotide
ugcaauaaaauccagaggu

SEQ ID NO: 2911398 - RNA, 19 nt, Artificial Sequence
  Description of Artificial Sequence: Synthetic oligonucleotide
ucuucuuucuuucaguucg

SEQ ID NO: 2911399 - RNA, 19 nt, Artificial Sequence
  Description of Artificial Sequence: Synthetic oligonucleotide
aaucccauuaauuucauca

SEQ ID NO: 2911400 - RNA, 19 nt, Artificial Sequence
  Description of Artificial Sequence: Synthetic oligonucleotide
uauuaaauacaaaauauaa

SEQ ID NO: 2911401 - RNA, 19 nt, Artificial Sequence
  Description of Artificial Sequence: Synthetic oligonucleotide
auauaaaauacucucugac

SEQ ID NO: 2911402 - RNA, 19 nt, Artificial Sequence
  Description of Artificial Sequence: Synthetic oligonucleotide
agucaaaggaggcaaaucc

SEQ ID NO: 2911403 - RNA, 19 nt, Artificial Sequence
  Description of Artificial Sequence: Synthetic oligonucleotide
gaaggaagaaccaagaucc

SEQ ID NO: 2911404 - RNA, 19 nt, Artificial Sequence
  Description of Artificial Sequence: Synthetic oligonucleotide
aaaguaaguacacugggug

SEQ ID NO: 2911405 - RNA, 19 nt, Artificial Sequence
  Description of Artificial Sequence: Synthetic oligonucleotide
uucugagacacauuuaugg

SEQ ID NO: 2911406 - RNA, 19 nt, Artificial Sequence
  Description of Artificial Sequence: Synthetic oligonucleotide
caaaauauaaaauacucuc

SEQ ID NO: 2911407 - RNA, 19 nt, Artificial Sequence
  Description of Artificial Sequence: Synthetic oligonucleotide
uuuaguuucuuucuucucc

SEQ ID NO: 2911408 - RNA, 19 nt, Artificial Sequence
  Description of Artificial Sequence: Synthetic oligonucleotide
uacaaaauauaaaauacuc

SEQ ID NO: 2911409 - RNA, 19 nt, Artificial Sequence
  Description of Artificial Sequence: Synthetic oligonucleotide
uuacuuuauaagaaggaag

SEQ ID NO: 2911410 - RNA, 19 nt, Artificial Sequence
  Description of Artificial Sequence: Synthetic oligonucleotide
uguuuuacccuccaaaucu

SEQ ID NO: 2911411 - RNA, 19 nt, Artificial Sequence
  Description of Artificial Sequence: Synthetic oligonucleotide
caugcaauaaaauccagag

SEQ ID NO: 2911412 - RNA, 19 nt, Artificial Sequence
  Description of Artificial Sequence: Synthetic oligonucleotide
uucuuacuuuauaagaagg

SEQ ID NO: 2911413 - RNA, 19 nt, Artificial Sequence
  Description of Artificial Sequence: Synthetic oligonucleotide
gagauguggaucuaugucg

SEQ ID NO: 2911414 - RNA, 19 nt, Artificial Sequence
  Description of Artificial Sequence: Synthetic oligonucleotide
uauaaaauacucucugacc

SEQ ID NO: 2911415 - RNA, 19 nt, Artificial Sequence
  Description of Artificial Sequence: Synthetic oligonucleotide
acacauuuauggcauaggc

SEQ ID NO: 2911416 - RNA, 19 nt, Artificial Sequence
  Description of Artificial Sequence: Synthetic oligonucleotide
uacucucugacccagauga

SEQ ID NO: 2911417 - RNA, 19 nt, Artificial Sequence
  Description of Artificial Sequence: Synthetic oligonucleotide
aauauaaaauacucucuga

SEQ ID NO: 2911418 - RNA, 19 nt, Artificial Sequence
  Description of Artificial Sequence: Synthetic oligonucleotide
uguugaauccgccuuuucg

SEQ ID NO: 2911419 - RNA, 19 nt, Artificial Sequence
  Description of Artificial Sequence: Synthetic oligonucleotide
agucucaugcaauaaaauc

SEQ ID NO: 2911420 - RNA, 19 nt, Artificial Sequence
  Description of Artificial Sequence: Synthetic oligonucleotide
acauuuauggcauaggcau

SEQ ID NO: 2911421 - RNA, 19 nt, Artificial Sequence
  Description of Artificial Sequence: Synthetic oligonucleotide
uuucuuacuuuauaagaag

SEQ ID NO: 2911422 - RNA, 19 nt, Artificial Sequence
  Description of Artificial Sequence: Synthetic oligonucleotide
aaucugacguucuuugcuc

SEQ ID NO: 2911423 - RNA, 19 nt, Artificial Sequence
  Description of Artificial Sequence: Synthetic oligonucleotide
uuucgauucauguacugcc

SEQ ID NO: 2911424 - RNA, 19 nt, Artificial Sequence
  Description of Artificial Sequence: Synthetic oligonucleotide
aaauccagaggucuguuga

SEQ ID NO: 2911425 - RNA, 19 nt, Artificial Sequence
  Description of Artificial Sequence: Synthetic oligonucleotide
aaaauauaaaauacucucu

SEQ ID NO: 2911426 - RNA, 19 nt, Artificial Sequence
  Description of Artificial Sequence: Synthetic oligonucleotide
ucucugacccagaugaagg

SEQ ID NO: 2911427 - RNA, 19 nt, Artificial Sequence
  Description of Artificial Sequence: Synthetic oligonucleotide
ucuuacuuuauaagaagga

SEQ ID NO: 2911428 - RNA, 19 nt, Artificial Sequence
  Description of Artificial Sequence: Synthetic oligonucleotide
agguguauuaaauacaaaa

SEQ ID NO: 2911429 - RNA, 19 nt, Artificial Sequence
  Description of Artificial Sequence: Synthetic oligonucleotide
acuuucuuacuuuauaaga

SEQ ID NO: 2911430 - RNA, 19 nt, Artificial Sequence
  Description of Artificial Sequence: Synthetic oligonucleotide
caucauuucuauuucuucc

SEQ ID NO: 2911431 - RNA, 19 nt, Artificial Sequence
  Description of Artificial Sequence: Synthetic oligonucleotide
ucucaugcaauaaaaucca

SEQ ID NO: 2911432 - RNA, 19 nt, Artificial Sequence
  Description of Artificial Sequence: Synthetic oligonucleotide
aaauaagacuuucuuacuu

SEQ ID NO: 2911433 - RNA, 19 nt, Artificial Sequence
  Description of Artificial Sequence: Synthetic oligonucleotide
aaaucuuccucaguaaucu

SEQ ID NO: 2911434 - RNA, 19 nt, Artificial Sequence
  Description of Artificial Sequence: Synthetic oligonucleotide
uuucaguucgagaagggga

SEQ ID NO: 2911435 - RNA, 19 nt, Artificial Sequence
  Description of Artificial Sequence: Synthetic oligonucleotide
aguaaucugacguucuuug

SEQ ID NO: 2911436 - RNA, 19 nt, Artificial Sequence
  Description of Artificial Sequence: Synthetic oligonucleotide
ugagguguauuaaauacaa

SEQ ID NO: 2911437 - RNA, 19 nt, Artificial Sequence
  Description of Artificial Sequence: Synthetic oligonucleotide
ucuucugagacacauuuau

SEQ ID NO: 2911438 - RNA, 19 nt, Artificial Sequence
  Description of Artificial Sequence: Synthetic oligonucleotide
gucucaugcaauaaaaucc

SEQ ID NO: 2911439 - RNA, 19 nt, Artificial Sequence
  Description of Artificial Sequence: Synthetic oligonucleotide
aauaagacuuucuuacuuu

SEQ ID NO: 2911440 - RNA, 19 nt, Artificial Sequence
  Description of Artificial Sequence: Synthetic oligonucleotide
uaagaaggaagaaccaaga

SEQ ID NO: 2911441 - RNA, 19 nt, Artificial Sequence
  Description of Artificial Sequence: Synthetic oligonucleotide
uuaauuucaucauuucuau

SEQ ID NO: 2911442 - RNA, 19 nt, Artificial Sequence
  Description of Artificial Sequence: Synthetic oligonucleotide
uuauaagaaggaagaacca

SEQ ID NO: 2911443 - RNA, 19 nt, Artificial Sequence
  Description of Artificial Sequence: Synthetic oligonucleotide
auuuacagagccauccacc

SEQ ID NO: 2911444 - RNA, 19 nt, Artificial Sequence
  Description of Artificial Sequence: Synthetic oligonucleotide
cuuucuuucaguucgagaa

SEQ ID NO: 2911445 - RNA, 19 nt, Artificial Sequence
  Description of Artificial Sequence: Synthetic oligonucleotide
gacuuucuuacuuuauaag

SEQ ID NO: 2911446 - RNA, 19 nt, Artificial Sequence
  Description of Artificial Sequence: Synthetic oligonucleotide
cuuuauaagaaggaagaac

SEQ ID NO: 2911447 - RNA, 19 nt, Artificial Sequence
  Description of Artificial Sequence: Synthetic oligonucleotide
aguuucuuucuucuccucg

SEQ ID NO: 2911448 - RNA, 19 nt, Artificial Sequence
  Description of Artificial Sequence: Synthetic oligonucleotide
ucaaaggaggcaaauccca

SEQ ID NO: 2911449 - RNA, 19 nt, Artificial Sequence
  Description of Artificial Sequence: Synthetic oligonucleotide
uuccucaguaaucugacgu

SEQ ID NO: 2911450 - RNA, 19 nt, Artificial Sequence
  Description of Artificial Sequence: Synthetic oligonucleotide
gaggaaauccuccaacacc

SEQ ID NO: 2911451 - RNA, 19 nt, Artificial Sequence
  Description of Artificial Sequence: Synthetic oligonucleotide
uaaucugacguucuuugcu

SEQ ID NO: 2911452 - RNA, 19 nt, Artificial Sequence
  Description of Artificial Sequence: Synthetic oligonucleotide
ucugagacacauuuauggc

SEQ ID NO: 2911453 - RNA, 19 nt, Artificial Sequence
  Description of Artificial Sequence: Synthetic oligonucleotide
ucaugcaauaaaauccaga

SEQ ID NO: 2911454 - RNA, 19 nt, Artificial Sequence
  Description of Artificial Sequence: Synthetic oligonucleotide
ggcauaggcauuuacagag

SEQ ID NO: 2911455 - RNA, 19 nt, Artificial Sequence
  Description of Artificial Sequence: Synthetic oligonucleotide
agaaccaagauccuguuuu

SEQ ID NO: 2911456 - RNA, 19 nt, Artificial Sequence
  Description of Artificial Sequence: Synthetic oligonucleotide
accuucuucccuuuugugg

SEQ ID NO: 2911457 - RNA, 19 nt, Artificial Sequence
  Description of Artificial Sequence: Synthetic oligonucleotide
aauaaaauccagaggucug

SEQ ID NO: 2911458 - RNA, 19 nt, Artificial Sequence
  Description of Artificial Sequence: Synthetic oligonucleotide
aaaauacucucugacccag

SEQ ID NO: 2911459 - RNA, 19 nt, Artificial Sequence
  Description of Artificial Sequence: Synthetic oligonucleotide
uugagguguauuaaauaca

SEQ ID NO: 2911460 - RNA, 19 nt, Artificial Sequence
  Description of Artificial Sequence: Synthetic oligonucleotide
uucuuucaguucgagaagg

SEQ ID NO: 2911461 - RNA, 19 nt, Artificial Sequence
  Description of Artificial Sequence: Synthetic oligonucleotide
augcaauaaaauccagagg

SEQ ID NO: 2911462 - RNA, 19 nt, Artificial Sequence
  Description of Artificial Sequence: Synthetic oligonucleotide
aaguaaguacacugggugu

SEQ ID NO: 2911463 - RNA, 19 nt, Artificial Sequence
  Description of Artificial Sequence: Synthetic oligonucleotide
uucgagaaggggaaggaga

SEQ ID NO: 2911464 - RNA, 19 nt, Artificial Sequence
  Description of Artificial Sequence: Synthetic oligonucleotide
uuuacccuccaaaucuucc

SEQ ID NO: 2911465 - RNA, 19 nt, Artificial Sequence
  Description of Artificial Sequence: Synthetic oligonucleotide
uuuacagagccauccaccu

SEQ ID NO: 2911466 - RNA, 19 nt, Artificial Sequence
  Description of Artificial Sequence: Synthetic oligonucleotide
agagccauccaccuucuuc

SEQ ID NO: 2911467 - RNA, 19 nt, Artificial Sequence
  Description of Artificial Sequence: Synthetic oligonucleotide
ugagacacauuuauggcau

SEQ ID NO: 2911468 - RNA, 19 nt, Artificial Sequence
  Description of Artificial Sequence: Synthetic oligonucleotide
auaagaaggaagaaccaag

SEQ ID NO: 2911469 - RNA, 19 nt, Artificial Sequence
  Description of Artificial Sequence: Synthetic oligonucleotide
auuaauuucaucauuucua

SEQ ID NO: 2911470 - RNA, 19 nt, Artificial Sequence
  Description of Artificial Sequence: Synthetic oligonucleotide
uguacuuccucuucugaga

SEQ ID NO: 2911471 - RNA, 19 nt, Artificial Sequence
  Description of Artificial Sequence: Synthetic oligonucleotide
auguacugccuguacuucc

SEQ ID NO: 2911472 - RNA, 19 nt, Artificial Sequence
  Description of Artificial Sequence: Synthetic oligonucleotide
gagccauccaccuucuucc

SEQ ID NO: 2911473 - RNA, 19 nt, Artificial Sequence
  Description of Artificial Sequence: Synthetic oligonucleotide
cugggugucauaaauaaga

SEQ ID NO: 2911474 - RNA, 19 nt, Artificial Sequence
  Description of Artificial Sequence: Synthetic oligonucleotide
ucuuucaguucgagaaggg

SEQ ID NO: 2911475 - RNA, 19 nt, Artificial Sequence
  Description of Artificial Sequence: Synthetic oligonucleotide
ucuaugucgccucggagac

SEQ ID NO: 2911476 - RNA, 19 nt, Artificial Sequence
  Description of Artificial Sequence: Synthetic oligonucleotide
uaaaauacucucugaccca

SEQ ID NO: 2911477 - RNA, 19 nt, Artificial Sequence
  Description of Artificial Sequence: Synthetic oligonucleotide
aaaucccauuaauuucauc

SEQ ID NO: 2911478 - RNA, 19 nt, Artificial Sequence
  Description of Artificial Sequence: Synthetic oligonucleotide
aguaaguacacuggguguc

SEQ ID NO: 2911479 - RNA, 19 nt, Artificial Sequence
  Description of Artificial Sequence: Synthetic oligonucleotide
aagacuuucuuacuuuaua

SEQ ID NO: 2911480 - RNA, 19 nt, Artificial Sequence
  Description of Artificial Sequence: Synthetic oligonucleotide
uuaguuucuuucuucuccu

SEQ ID NO: 2911481 - RNA, 19 nt, Artificial Sequence
  Description of Artificial Sequence: Synthetic oligonucleotide
aucauuucuauuucuuccu

SEQ ID NO: 2911482 - RNA, 19 nt, Artificial Sequence
  Description of Artificial Sequence: Synthetic oligonucleotide
aauacucucugacccagau

SEQ ID NO: 2911483 - RNA, 19 nt, Artificial Sequence
  Description of Artificial Sequence: Synthetic oligonucleotide
uauaagaaggaagaaccaa

SEQ ID NO: 2911484 - RNA, 19 nt, Artificial Sequence
  Description of Artificial Sequence: Synthetic oligonucleotide
ucaagucucaugcaauaaa

SEQ ID NO: 2911485 - RNA, 19 nt, Artificial Sequence
  Description of Artificial Sequence: Synthetic oligonucleotide
cuuuuguggagucaaagga

SEQ ID NO: 2911486 - RNA, 19 nt, Artificial Sequence
  Description of Artificial Sequence: Synthetic oligonucleotide
uuuucgauucauguacugc

SEQ ID NO: 2911487 - RNA, 19 nt, Artificial Sequence
  Description of Artificial Sequence: Synthetic oligonucleotide
cuuucuuacuuuauaagaa

SEQ ID NO: 2911488 - RNA, 19 nt, Artificial Sequence
  Description of Artificial Sequence: Synthetic oligonucleotide
cauaggcauuuacagagcc

SEQ ID NO: 2911489 - RNA, 19 nt, Artificial Sequence
  Description of Artificial Sequence: Synthetic oligonucleotide
aauccuccaacaccucaag

SEQ ID NO: 2911490 - RNA, 19 nt, Artificial Sequence
  Description of Artificial Sequence: Synthetic oligonucleotide
uguuuugagguguauuaaa

SEQ ID NO: 2911491 - RNA, 19 nt, Artificial Sequence
  Description of Artificial Sequence: Synthetic oligonucleotide
uucauguacugccuguacu

SEQ ID NO: 2911492 - RNA, 19 nt, Artificial Sequence
  Description of Artificial Sequence: Synthetic oligonucleotide
agauguggaucuaugucgc

SEQ ID NO: 2911493 - RNA, 19 nt, Artificial Sequence
  Description of Artificial Sequence: Synthetic oligonucleotide
uucaguucgagaaggggaa

SEQ ID NO: 2911494 - RNA, 19 nt, Artificial Sequence
  Description of Artificial Sequence: Synthetic oligonucleotide
uacacugggugucauaaau

SEQ ID NO: 2911495 - RNA, 19 nt, Artificial Sequence
  Description of Artificial Sequence: Synthetic oligonucleotide
aucuaugucgccucggaga

SEQ ID NO: 2911496 - RNA, 19 nt, Artificial Sequence
  Description of Artificial Sequence: Synthetic oligonucleotide
accaagauccuguuuugag

SEQ ID NO: 2911497 - RNA, 19 nt, Artificial Sequence
  Description of Artificial Sequence: Synthetic oligonucleotide
uuuugagguguauuaaaua

SEQ ID NO: 2911498 - RNA, 19 nt, Artificial Sequence
  Description of Artificial Sequence: Synthetic oligonucleotide
ucuuccucaguaaucugac

SEQ ID NO: 2911499 - RNA, 19 nt, Artificial Sequence
  Description of Artificial Sequence: Synthetic oligonucleotide
agacuuucuuacuuuauaa

SEQ ID NO: 2911500 - RNA, 19 nt, Artificial Sequence
  Description of Artificial Sequence: Synthetic oligonucleotide
uuucuauuucuuccucuug

SEQ ID NO: 2911501 - RNA, 19 nt, Artificial Sequence
  Description of Artificial Sequence: Synthetic oligonucleotide
gaauccgccuuuucgauuc

SEQ ID NO: 2911502 - RNA, 19 nt, Artificial Sequence
  Description of Artificial Sequence: Synthetic oligonucleotide
aaggaggcaaaucccauua

SEQ ID NO: 2911503 - RNA, 19 nt, Artificial Sequence
  Description of Artificial Sequence: Synthetic oligonucleotide
ugggugucauaaauaagac

SEQ ID NO: 2911504 - RNA, 19 nt, Artificial Sequence
  Description of Artificial Sequence: Synthetic oligonucleotide
gaaggggaaggagaugugg

SEQ ID NO: 2911505 - RNA, 19 nt, Artificial Sequence
  Description of Artificial Sequence: Synthetic oligonucleotide
guugaauccgccuuuucga

SEQ ID NO: 2911506 - RNA, 19 nt, Artificial Sequence
  Description of Artificial Sequence: Synthetic oligonucleotide
caaaucuuccucaguaauc

SEQ ID NO: 2911507 - RNA, 19 nt, Artificial Sequence
  Description of Artificial Sequence: Synthetic oligonucleotide
guucuuugcucuuuguuuc

SEQ ID NO: 2911508 - RNA, 19 nt, Artificial Sequence
  Description of Artificial Sequence: Synthetic oligonucleotide
ugucauaaauaagacuuuc

SEQ ID NO: 2911509 - RNA, 19 nt, Artificial Sequence
  Description of Artificial Sequence: Synthetic oligonucleotide
gacacauuuauggcauagg

SEQ ID NO: 2911510 - RNA, 19 nt, Artificial Sequence
  Description of Artificial Sequence: Synthetic oligonucleotide
aggaaauccuccaacaccu

SEQ ID NO: 2911511 - RNA, 19 nt, Artificial Sequence
  Description of Artificial Sequence: Synthetic oligonucleotide
ucugacccagaugaagggg

SEQ ID NO: 2911512 - RNA, 19 nt, Artificial Sequence
  Description of Artificial Sequence: Synthetic oligonucleotide
cuuucaguucgagaagggg

SEQ ID NO: 2911513 - RNA, 19 nt, Artificial Sequence
  Description of Artificial Sequence: Synthetic oligonucleotide
uucgauucauguacugccu

SEQ ID NO: 2911514 - RNA, 19 nt, Artificial Sequence
  Description of Artificial Sequence: Synthetic oligonucleotide
uguacugccuguacuuccu

SEQ ID NO: 2911515 - RNA, 19 nt, Artificial Sequence
  Description of Artificial Sequence: Synthetic oligonucleotide
ucgauucauguacugccug

SEQ ID NO: 2911516 - RNA, 19 nt, Artificial Sequence
  Description of Artificial Sequence: Synthetic oligonucleotide
cauuuacagagccauccac

SEQ ID NO: 2911517 - RNA, 19 nt, Artificial Sequence
  Description of Artificial Sequence: Synthetic oligonucleotide
uaggcauuuacagagccau

SEQ ID NO: 2911518 - RNA, 19 nt, Artificial Sequence
  Description of Artificial Sequence: Synthetic oligonucleotide
uaugucgccucggagaccu

SEQ ID NO: 2911519 - RNA, 19 nt, Artificial Sequence
  Description of Artificial Sequence: Synthetic oligonucleotide
auaagacuuucuuacuuua

SEQ ID NO: 2911520 - RNA, 19 nt, Artificial Sequence
  Description of Artificial Sequence: Synthetic oligonucleotide
ucgagaaggggaaggagau

SEQ ID NO: 2911521 - RNA, 19 nt, Artificial Sequence
  Description of Artificial Sequence: Synthetic oligonucleotide
gaaauccuccaacaccuca

SEQ ID NO: 2911522 - RNA, 19 nt, Artificial Sequence
  Description of Artificial Sequence: Synthetic oligonucleotide
gaaccaagauccuguuuug

SEQ ID NO: 2911523 - RNA, 19 nt, Artificial Sequence
  Description of Artificial Sequence: Synthetic oligonucleotide
uccaacaccucaagucuca

SEQ ID NO: 2911524 - RNA, 19 nt, Artificial Sequence
  Description of Artificial Sequence: Synthetic oligonucleotide
aaaggaggcaaaucccauu

SEQ ID NO: 2911525 - RNA, 19 nt, Artificial Sequence
  Description of Artificial Sequence: Synthetic oligonucleotide
uaagacuuucuuacuuuau

SEQ ID NO: 2911526 - RNA, 19 nt, Artificial Sequence
  Description of Artificial Sequence: Synthetic oligonucleotide
aagauccuguuuugaggug

SEQ ID NO: 2911527 - RNA, 19 nt, Artificial Sequence
  Description of Artificial Sequence: Synthetic oligonucleotide
uuauggcauaggcauuuac

SEQ ID NO: 2911528 - RNA, 19 nt, Artificial Sequence
  Description of Artificial Sequence: Synthetic oligonucleotide
uuacccuccaaaucuuccu

SEQ ID NO: 2911529 - RNA, 19 nt, Artificial Sequence
  Description of Artificial Sequence: Synthetic oligonucleotide
gaucuaugucgccucggag

SEQ ID NO: 2911530 - RNA, 19 nt, Artificial Sequence
  Description of Artificial Sequence: Synthetic oligonucleotide
auaaaauccagaggucugu

SEQ ID NO: 2911531 - RNA, 19 nt, Artificial Sequence
  Description of Artificial Sequence: Synthetic oligonucleotide
cugagacacauuuauggca

SEQ ID NO: 2911532 - RNA, 19 nt, Artificial Sequence
  Description of Artificial Sequence: Synthetic oligonucleotide
guaaucugacguucuuugc

SEQ ID NO: 2911533 - RNA, 19 nt, Artificial Sequence
  Description of Artificial Sequence: Synthetic oligonucleotide
cacauuuauggcauaggca

SEQ ID NO: 2911534 - RNA, 19 nt, Artificial Sequence
  Description of Artificial Sequence: Synthetic oligonucleotide
cucugacccagaugaaggg

SEQ ID NO: 2911535 - RNA, 19 nt, Artificial Sequence
  Description of Artificial Sequence: Synthetic oligonucleotide
gccuuuucgauucauguac

SEQ ID NO: 2911536 - RNA, 19 nt, Artificial Sequence
  Description of Artificial Sequence: Synthetic oligonucleotide
cuuuucgauucauguacug

SEQ ID NO: 2911537 - RNA, 19 nt, Artificial Sequence
  Description of Artificial Sequence: Synthetic oligonucleotide
cuuacuuuauaagaaggaa

SEQ ID NO: 2911538 - RNA, 19 nt, Artificial Sequence
  Description of Artificial Sequence: Synthetic oligonucleotide
uuuuacccuccaaaucuuc

SEQ ID NO: 2911539 - RNA, 19 nt, Artificial Sequence
  Description of Artificial Sequence: Synthetic oligonucleotide
ccuuuuguggagucaaagg

SEQ ID NO: 2911540 - RNA, 19 nt, Artificial Sequence
  Description of Artificial Sequence: Synthetic oligonucleotide
aauccagaggucuguugaa

SEQ ID NO: 2911541 - RNA, 19 nt, Artificial Sequence
  Description of Artificial Sequence: Synthetic oligonucleotide
uuugcucuuuguuucuuua

SEQ ID NO: 2911542 - RNA, 19 nt, Artificial Sequence
  Description of Artificial Sequence: Synthetic oligonucleotide
aggagauguggaucuaugu

SEQ ID NO: 2911543 - RNA, 19 nt, Artificial Sequence
  Description of Artificial Sequence: Synthetic oligonucleotide
agacacauuuauggcauag

SEQ ID NO: 2911544 - RNA, 19 nt, Artificial Sequence
  Description of Artificial Sequence: Synthetic oligonucleotide
cuucugagacacauuuaug

SEQ ID NO: 2911545 - RNA, 19 nt, Artificial Sequence
  Description of Artificial Sequence: Synthetic oligonucleotide
gucaaaggaggcaaauccc

SEQ ID NO: 2911546 - RNA, 19 nt, Artificial Sequence
  Description of Artificial Sequence: Synthetic oligonucleotide
aguacacugggugucauaa

SEQ ID NO: 2911547 - RNA, 19 nt, Artificial Sequence
  Description of Artificial Sequence: Synthetic oligonucleotide
aucccauuaauuucaucau

SEQ ID NO: 2911548 - RNA, 19 nt, Artificial Sequence
  Description of Artificial Sequence: Synthetic oligonucleotide
caagucucaugcaauaaaa

SEQ ID NO: 2911549 - RNA, 19 nt, Artificial Sequence
  Description of Artificial Sequence: Synthetic oligonucleotide
uguggaucuaugucgccuc

SEQ ID NO: 2911550 - RNA, 19 nt, Artificial Sequence
  Description of Artificial Sequence: Synthetic oligonucleotide
aaggagauguggaucuaug

SEQ ID NO: 2911551 - RNA, 19 nt, Artificial Sequence
  Description of Artificial Sequence: Synthetic oligonucleotide
ggcauuuacagagccaucc

SEQ ID NO: 2911552 - RNA, 19 nt, Artificial Sequence
  Description of Artificial Sequence: Synthetic oligonucleotide
uccucuuguuuuacccucc

SEQ ID NO: 2911553 - RNA, 19 nt, Artificial Sequence
  Description of Artificial Sequence: Synthetic oligonucleotide
cuuuaguuucuuucuucuc

SEQ ID NO: 2911554 - RNA, 19 nt, Artificial Sequence
  Description of Artificial Sequence: Synthetic oligonucleotide
uuccucuuguuuuacccuc

SEQ ID NO: 2911555 - RNA, 19 nt, Artificial Sequence
  Description of Artificial Sequence: Synthetic oligonucleotide
cucaugcaauaaaauccag

SEQ ID NO: 2911556 - RNA, 19 nt, Artificial Sequence
  Description of Artificial Sequence: Synthetic oligonucleotide
ggcaaaucccauuaauuuc

SEQ ID NO: 2911557 - RNA, 19 nt, Artificial Sequence
  Description of Artificial Sequence: Synthetic oligonucleotide
ggugucauaaauaagacuu

SEQ ID NO: 2911558 - RNA, 19 nt, Artificial Sequence
  Description of Artificial Sequence: Synthetic oligonucleotide
uccagaggucuguugaauc

SEQ ID NO: 2911559 - RNA, 19 nt, Artificial Sequence
  Description of Artificial Sequence: Synthetic oligonucleotide
agaggucuguugaauccgc

SEQ ID NO: 2911560 - RNA, 19 nt, Artificial Sequence
  Description of Artificial Sequence: Synthetic oligonucleotide
uuucuuucuucuccucguc

SEQ ID NO: 2911561 - RNA, 19 nt, Artificial Sequence
  Description of Artificial Sequence: Synthetic oligonucleotide
ucccauuaauuucaucauu

SEQ ID NO: 2911562 - RNA, 19 nt, Artificial Sequence
  Description of Artificial Sequence: Synthetic oligonucleotide
auuuauggcauaggcauuu

SEQ ID NO: 2911563 - RNA, 19 nt, Artificial Sequence
  Description of Artificial Sequence: Synthetic oligonucleotide
aaauccuccaacaccucaa

SEQ ID NO: 2911564 - RNA, 19 nt, Artificial Sequence
  Description of Artificial Sequence: Synthetic oligonucleotide
cuuccucaguaaucugacg

SEQ ID NO: 2911565 - RNA, 19 nt, Artificial Sequence
  Description of Artificial Sequence: Synthetic oligonucleotide
aagucucaugcaauaaaau

SEQ ID NO: 2911566 - RNA, 19 nt, Artificial Sequence
  Description of Artificial Sequence: Synthetic oligonucleotide
aaggggaaggagaugugga

SEQ ID NO: 2911567 - RNA, 19 nt, Artificial Sequence
  Description of Artificial Sequence: Synthetic oligonucleotide
ggagauguggaucuauguc

SEQ ID NO: 2911568 - RNA, 19 nt, Artificial Sequence
  Description of Artificial Sequence: Synthetic oligonucleotide
uugaauccgccuuuucgau

SEQ ID NO: 2911569 - RNA, 19 nt, Artificial Sequence
  Description of Artificial Sequence: Synthetic oligonucleotide
gauguggaucuaugucgcc

SEQ ID NO: 2911570 - RNA, 19 nt, Artificial Sequence
  Description of Artificial Sequence: Synthetic oligonucleotide
aagaaccaagauccuguuu

SEQ ID NO: 2911571 - RNA, 19 nt, Artificial Sequence
  Description of Artificial Sequence: Synthetic oligonucleotide
uccgccuuuucgauucaug

SEQ ID NO: 2911572 - RNA, 19 nt, Artificial Sequence
  Description of Artificial Sequence: Synthetic oligonucleotide
uucuuugcucuuuguuucu

SEQ ID NO: 2911573 - RNA, 19 nt, Artificial Sequence
  Description of Artificial Sequence: Synthetic oligonucleotide
ucaguaaucugacguucuu

SEQ ID NO: 2911574 - RNA, 19 nt, Artificial Sequence
  Description of Artificial Sequence: Synthetic oligonucleotide
aggaagaaccaagauccug

SEQ ID NO: 2911575 - RNA, 19 nt, Artificial Sequence
  Description of Artificial Sequence: Synthetic oligonucleotide
agauccuguuuugaggugu

SEQ ID NO: 2911576 - RNA, 19 nt, Artificial Sequence
  Description of Artificial Sequence: Synthetic oligonucleotide
gagaaggggaaggagaugu

SEQ ID NO: 2911577 - RNA, 19 nt, Artificial Sequence
  Description of Artificial Sequence: Synthetic oligonucleotide
agccauccaccuucuuccc

SEQ ID NO: 2911578 - RNA, 19 nt, Artificial Sequence
  Description of Artificial Sequence: Synthetic oligonucleotide
cacugggugucauaaauaa

SEQ ID NO: 2911579 - RNA, 19 nt, Artificial Sequence
  Description of Artificial Sequence: Synthetic oligonucleotide
acuuuauaagaaggaagaa

SEQ ID NO: 2911580 - RNA, 19 nt, Artificial Sequence
  Description of Artificial Sequence: Synthetic oligonucleotide
uaauuucaucauuucuauu

SEQ ID NO: 2911581 - RNA, 19 nt, Artificial Sequence
  Description of Artificial Sequence: Synthetic oligonucleotide
aggucuguugaauccgccu

SEQ ID NO: 2911582 - RNA, 19 nt, Artificial Sequence
  Description of Artificial Sequence: Synthetic oligonucleotide
cucucugacccagaugaag

SEQ ID NO: 2911583 - RNA, 19 nt, Artificial Sequence
  Description of Artificial Sequence: Synthetic oligonucleotide
uacccuccaaaucuuccuc

SEQ ID NO: 2911584 - RNA, 19 nt, Artificial Sequence
  Description of Artificial Sequence: Synthetic oligonucleotide
ugccuguacuuccucuucu

SEQ ID NO: 2911585 - RNA, 19 nt, Artificial Sequence
  Description of Artificial Sequence: Synthetic oligonucleotide
auacucucugacccagaug

SEQ ID NO: 2911586 - RNA, 19 nt, Artificial Sequence
  Description of Artificial Sequence: Synthetic oligonucleotide
cucgucucuucuuucuuuc

SEQ ID NO: 2911587 - RNA, 19 nt, Artificial Sequence
  Description of Artificial Sequence: Synthetic oligonucleotide
aaccaagauccuguuuuga

SEQ ID NO: 2911588 - RNA, 19 nt, Artificial Sequence
  Description of Artificial Sequence: Synthetic oligonucleotide
gcaaaucccauuaauuuca

SEQ ID NO: 2911589 - RNA, 19 nt, Artificial Sequence
  Description of Artificial Sequence: Synthetic oligonucleotide
uucuccucgucucuucuuu

SEQ ID NO: 2911590 - RNA, 19 nt, Artificial Sequence
  Description of Artificial Sequence: Synthetic oligonucleotide
caguucgagaaggggaagg

SEQ ID NO: 2911591 - RNA, 19 nt, Artificial Sequence
  Description of Artificial Sequence: Synthetic oligonucleotide
uccucaguaaucugacguu

SEQ ID NO: 2911592 - RNA, 19 nt, Artificial Sequence
  Description of Artificial Sequence: Synthetic oligonucleotide
caauaaaauccagaggucu

SEQ ID NO: 2911593 - RNA, 19 nt, Artificial Sequence
  Description of Artificial Sequence: Synthetic oligonucleotide
aucugacguucuuugcucu

SEQ ID NO: 2911594 - RNA, 19 nt, Artificial Sequence
  Description of Artificial Sequence: Synthetic oligonucleotide
uggaucuaugucgccucgg

SEQ ID NO: 2911595 - RNA, 19 nt, Artificial Sequence
  Description of Artificial Sequence: Synthetic oligonucleotide
ugucgccucggagaccugg

SEQ ID NO: 2911596 - RNA, 19 nt, Artificial Sequence
  Description of Artificial Sequence: Synthetic oligonucleotide
guggaucuaugucgccucg

SEQ ID NO: 2911597 - RNA, 19 nt, Artificial Sequence
  Description of Artificial Sequence: Synthetic oligonucleotide
ccagaggucuguugaaucc

SEQ ID NO: 2911598 - RNA, 19 nt, Artificial Sequence
  Description of Artificial Sequence: Synthetic oligonucleotide
auguggaucuaugucgccu

SEQ ID NO: 2911599 - RNA, 19 nt, Artificial Sequence
  Description of Artificial Sequence: Synthetic oligonucleotide
gagucaaaggaggcaaauc

SEQ ID NO: 2911600 - RNA, 19 nt, Artificial Sequence
  Description of Artificial Sequence: Synthetic oligonucleotide
ggaggaaauccuccaacac

SEQ ID NO: 2911601 - RNA, 19 nt, Artificial Sequence
  Description of Artificial Sequence: Synthetic oligonucleotide
ucaguucgagaaggggaag

SEQ ID NO: 2911602 - RNA, 19 nt, Artificial Sequence
  Description of Artificial Sequence: Synthetic oligonucleotide
aguucgagaaggggaagga

SEQ ID NO: 2911603 - RNA, 19 nt, Artificial Sequence
  Description of Artificial Sequence: Synthetic oligonucleotide
acugggugucauaaauaag

SEQ ID NO: 2911604 - RNA, 19 nt, Artificial Sequence
  Description of Artificial Sequence: Synthetic oligonucleotide
guucgagaaggggaaggag

SEQ ID NO: 2911605 - RNA, 19 nt, Artificial Sequence
  Description of Artificial Sequence: Synthetic oligonucleotide
ucuucccuuuuguggaguc

SEQ ID NO: 2911606 - RNA, 19 nt, Artificial Sequence
  Description of Artificial Sequence: Synthetic oligonucleotide
ucgucucuucuuucuuuca

SEQ ID NO: 2911607 - RNA, 19 nt, Artificial Sequence
  Description of Artificial Sequence: Synthetic oligonucleotide
acguucuuugcucuuuguu

SEQ ID NO: 2911608 - RNA, 19 nt, Artificial Sequence
  Description of Artificial Sequence: Synthetic oligonucleotide
guuucuuucuucuccucgu

SEQ ID NO: 2911609 - RNA, 19 nt, Artificial Sequence
  Description of Artificial Sequence: Synthetic oligonucleotide
aggggaaggagauguggau

SEQ ID NO: 2911610 - RNA, 19 nt, Artificial Sequence
  Description of Artificial Sequence: Synthetic oligonucleotide
uacuuccucuucugagaca

SEQ ID NO: 2911611 - RNA, 19 nt, Artificial Sequence
  Description of Artificial Sequence: Synthetic oligonucleotide
cuccaacaccucaagucuc

SEQ ID NO: 2911612 - RNA, 19 nt, Artificial Sequence
  Description of Artificial Sequence: Synthetic oligonucleotide
ugaauccgccuuuucgauu

SEQ ID NO: 2911613 - RNA, 19 nt, Artificial Sequence
  Description of Artificial Sequence: Synthetic oligonucleotide
aaggaagaaccaagauccu

SEQ ID NO: 2911614 - RNA, 19 nt, Artificial Sequence
  Description of Artificial Sequence: Synthetic oligonucleotide
aaguacacugggugucaua

SEQ ID NO: 2911615 - RNA, 19 nt, Artificial Sequence
  Description of Artificial Sequence: Synthetic oligonucleotide
uaaaauccagaggucuguu

SEQ ID NO: 2911616 - RNA, 19 nt, Artificial Sequence
  Description of Artificial Sequence: Synthetic oligonucleotide
ccauuaauuucaucauuuc

SEQ ID NO: 2911617 - RNA, 19 nt, Artificial Sequence
  Description of Artificial Sequence: Synthetic oligonucleotide
caacaccucaagucucaug

SEQ ID NO: 2911618 - RNA, 19 nt, Artificial Sequence
  Description of Artificial Sequence: Synthetic oligonucleotide
acugccuguacuuccucuu

SEQ ID NO: 2911619 - RNA, 19 nt, Artificial Sequence
  Description of Artificial Sequence: Synthetic oligonucleotide
uaguuucuuucuucuccuc

SEQ ID NO: 2911620 - RNA, 19 nt, Artificial Sequence
  Description of Artificial Sequence: Synthetic oligonucleotide
acaccucaagucucaugca

SEQ ID NO: 2911621 - RNA, 19 nt, Artificial Sequence
  Description of Artificial Sequence: Synthetic oligonucleotide
auaggcauuuacagagcca

SEQ ID NO: 2911622 - RNA, 19 nt, Artificial Sequence
  Description of Artificial Sequence: Synthetic oligonucleotide
gggaggaaauccuccaaca

SEQ ID NO: 2911623 - RNA, 19 nt, Artificial Sequence
  Description of Artificial Sequence: Synthetic oligonucleotide
auccuccaacaccucaagu

SEQ ID NO: 2911624 - RNA, 19 nt, Artificial Sequence
  Description of Artificial Sequence: Synthetic oligonucleotide
aaauacucucugacccaga

SEQ ID NO: 2911625 - RNA, 19 nt, Artificial Sequence
  Description of Artificial Sequence: Synthetic oligonucleotide
aauccgccuuuucgauuca

SEQ ID NO: 2911626 - RNA, 19 nt, Artificial Sequence
  Description of Artificial Sequence: Synthetic oligonucleotide
uuacagagccauccaccuu

SEQ ID NO: 2911627 - RNA, 19 nt, Artificial Sequence
  Description of Artificial Sequence: Synthetic oligonucleotide
cauguacugccuguacuuc

SEQ ID NO: 2911628 - RNA, 19 nt, Artificial Sequence
  Description of Artificial Sequence: Synthetic oligonucleotide
caccuucuucccuuuugug

SEQ ID NO: 2911629 - RNA, 19 nt, Artificial Sequence
  Description of Artificial Sequence: Synthetic oligonucleotide
uccuguuuugagguguauu

SEQ ID NO: 2911630 - RNA, 19 nt, Artificial Sequence
  Description of Artificial Sequence: Synthetic oligonucleotide
guuuugagguguauuaaau

SEQ ID NO: 2911631 - RNA, 19 nt, Artificial Sequence
  Description of Artificial Sequence: Synthetic oligonucleotide
gauucauguacugccugua

SEQ ID NO: 2911632 - RNA, 19 nt, Artificial Sequence
  Description of Artificial Sequence: Synthetic oligonucleotide
guggagucaaaggaggcaa

SEQ ID NO: 2911633 - RNA, 19 nt, Artificial Sequence
  Description of Artificial Sequence: Synthetic oligonucleotide
gaggucuguugaauccgcc

SEQ ID NO: 2911634 - RNA, 19 nt, Artificial Sequence
  Description of Artificial Sequence: Synthetic oligonucleotide
guaaguacacuggguguca

SEQ ID NO: 2911635 - RNA, 19 nt, Artificial Sequence
  Description of Artificial Sequence: Synthetic oligonucleotide
ggggaggaaauccuccaac

SEQ ID NO: 2911636 - RNA, 19 nt, Artificial Sequence
  Description of Artificial Sequence: Synthetic oligonucleotide
ucugacguucuuugcucuu

SEQ ID NO: 2911637 - RNA, 19 nt, Artificial Sequence
  Description of Artificial Sequence: Synthetic oligonucleotide
ucuguugaauccgccuuuu

SEQ ID NO: 2911638 - RNA, 19 nt, Artificial Sequence
  Description of Artificial Sequence: Synthetic oligonucleotide
ggaagaaccaagauccugu

SEQ ID NO: 2911639 - RNA, 19 nt, Artificial Sequence
  Description of Artificial Sequence: Synthetic oligonucleotide
uuuauggcauaggcauuua

SEQ ID NO: 2911640 - RNA, 19 nt, Artificial Sequence
  Description of Artificial Sequence: Synthetic oligonucleotide
gaggcaaaucccauuaauu

SEQ ID NO: 2911641 - RNA, 19 nt, Artificial Sequence
  Description of Artificial Sequence: Synthetic oligonucleotide
gcaauaaaauccagagguc

SEQ ID NO: 2911642 - RNA, 19 nt, Artificial Sequence
  Description of Artificial Sequence: Synthetic oligonucleotide
aggaggcaaaucccauuaa

SEQ ID NO: 2911643 - RNA, 19 nt, Artificial Sequence
  Description of Artificial Sequence: Synthetic oligonucleotide
gggaaggagauguggaucu

SEQ ID NO: 2911644 - RNA, 19 nt, Artificial Sequence
  Description of Artificial Sequence: Synthetic oligonucleotide
ccuguuuugagguguauua

SEQ ID NO: 2911645 - RNA, 19 nt, Artificial Sequence
  Description of Artificial Sequence: Synthetic oligonucleotide
uccucuucugagacacauu

SEQ ID NO: 2911646 - RNA, 19 nt, Artificial Sequence
  Description of Artificial Sequence: Synthetic oligonucleotide
ggaucuaugucgccucgga

SEQ ID NO: 2911647 - RNA, 19 nt, Artificial Sequence
  Description of Artificial Sequence: Synthetic oligonucleotide
uaaguacacugggugucau

SEQ ID NO: 2911648 - RNA, 19 nt, Artificial Sequence
  Description of Artificial Sequence: Synthetic oligonucleotide
caccucaagucucaugcaa

SEQ ID NO: 2911649 - RNA, 19 nt, Artificial Sequence
  Description of Artificial Sequence: Synthetic oligonucleotide
cugccuguacuuccucuuc

SEQ ID NO: 2911650 - RNA, 19 nt, Artificial Sequence
  Description of Artificial Sequence: Synthetic oligonucleotide
cucaguaaucugacguucu

SEQ ID NO: 2911651 - RNA, 19 nt, Artificial Sequence
  Description of Artificial Sequence: Synthetic oligonucleotide
accucaagucucaugcaau

SEQ ID NO: 2911652 - RNA, 19 nt, Artificial Sequence
  Description of Artificial Sequence: Synthetic oligonucleotide
gcauuuacagagccaucca

SEQ ID NO: 2911653 - RNA, 19 nt, Artificial Sequence
  Description of Artificial Sequence: Synthetic oligonucleotide
ucuuugcucuuuguuucuu

SEQ ID NO: 2911654 - RNA, 19 nt, Artificial Sequence
  Description of Artificial Sequence: Synthetic oligonucleotide
cuguuuugagguguauuaa

SEQ ID NO: 2911655 - RNA, 19 nt, Artificial Sequence
  Description of Artificial Sequence: Synthetic oligonucleotide
cuuccucuuguuuuacccu

SEQ ID NO: 2911656 - RNA, 19 nt, Artificial Sequence
  Description of Artificial Sequence: Synthetic oligonucleotide
gagguguauuaaauacaaa

SEQ ID NO: 2911657 - RNA, 19 nt, Artificial Sequence
  Description of Artificial Sequence: Synthetic oligonucleotide
gaagaaccaagauccuguu

SEQ ID NO: 2911658 - RNA, 19 nt, Artificial Sequence
  Description of Artificial Sequence: Synthetic oligonucleotide
agaaggggaaggagaugug

SEQ ID NO: 2911659 - RNA, 19 nt, Artificial Sequence
  Description of Artificial Sequence: Synthetic oligonucleotide
aggcauuuacagagccauc

SEQ ID NO: 2911660 - RNA, 19 nt, Artificial Sequence
  Description of Artificial Sequence: Synthetic oligonucleotide
cuguugaauccgccuuuuc

SEQ ID NO: 2911661 - RNA, 19 nt, Artificial Sequence
  Description of Artificial Sequence: Synthetic oligonucleotide
auccagaggucuguugaau

SEQ ID NO: 2911662 - RNA, 19 nt, Artificial Sequence
  Description of Artificial Sequence: Synthetic oligonucleotide
cucaagucucaugcaauaa

SEQ ID NO: 2911663 - RNA, 19 nt, Artificial Sequence
  Description of Artificial Sequence: Synthetic oligonucleotide
cccuuuuguggagucaaag

SEQ ID NO: 2911664 - RNA, 19 nt, Artificial Sequence
  Description of Artificial Sequence: Synthetic oligonucleotide
acacugggugucauaaaua

SEQ ID NO: 2911665 - RNA, 19 nt, Artificial Sequence
  Description of Artificial Sequence: Synthetic oligonucleotide
gccuguacuuccucuucug

SEQ ID NO: 2911666 - RNA, 19 nt, Artificial Sequence
  Description of Artificial Sequence: Synthetic oligonucleotide
gggugucauaaauaagacu

SEQ ID NO: 2911667 - RNA, 19 nt, Artificial Sequence
  Description of Artificial Sequence: Synthetic oligonucleotide
gagacacauuuauggcaua

SEQ ID NO: 2911668 - RNA, 19 nt, Artificial Sequence
  Description of Artificial Sequence: Synthetic oligonucleotide
cccuccaaaucuuccucag

SEQ ID NO: 2911669 - RNA, 19 nt, Artificial Sequence
  Description of Artificial Sequence: Synthetic oligonucleotide
gcauaggcauuuacagagc

SEQ ID NO: 2911670 - RNA, 19 nt, Artificial Sequence
  Description of Artificial Sequence: Synthetic oligonucleotide
gaaggagauguggaucuau

SEQ ID NO: 2911671 - RNA, 19 nt, Artificial Sequence
  Description of Artificial Sequence: Synthetic oligonucleotide
gacguucuuugcucuuugu

SEQ ID NO: 2911672 - RNA, 19 nt, Artificial Sequence
  Description of Artificial Sequence: Synthetic oligonucleotide
caaaggaggcaaaucccau

SEQ ID NO: 2911673 - RNA, 19 nt, Artificial Sequence
  Description of Artificial Sequence: Synthetic oligonucleotide
cuaugucgccucggagacc

SEQ ID NO: 2911674 - RNA, 19 nt, Artificial Sequence
  Description of Artificial Sequence: Synthetic oligonucleotide
ccucaguaaucugacguuc

SEQ ID NO: 2911675 - RNA, 19 nt, Artificial Sequence
  Description of Artificial Sequence: Synthetic oligonucleotide
guacacugggugucauaaa

SEQ ID NO: 2911676 - RNA, 19 nt, Artificial Sequence
  Description of Artificial Sequence: Synthetic oligonucleotide
guacugccuguacuuccuc

SEQ ID NO: 2911677 - RNA, 19 nt, Artificial Sequence
  Description of Artificial Sequence: Synthetic oligonucleotide
gauccuguuuugaggugua

SEQ ID NO: 2911678 - RNA, 19 nt, Artificial Sequence
  Description of Artificial Sequence: Synthetic oligonucleotide
ggaggcaaaucccauuaau

SEQ ID NO: 2911679 - RNA, 19 nt, Artificial Sequence
  Description of Artificial Sequence: Synthetic oligonucleotide
cccauuaauuucaucauuu

SEQ ID NO: 2911680 - RNA, 19 nt, Artificial Sequence
  Description of Artificial Sequence: Synthetic oligonucleotide
cauuuauggcauaggcauu

SEQ ID NO: 2911681 - RNA, 19 nt, Artificial Sequence
  Description of Artificial Sequence: Synthetic oligonucleotide
caaaucccauuaauuucau

SEQ ID NO: 2911682 - RNA, 19 nt, Artificial Sequence
  Description of Artificial Sequence: Synthetic oligonucleotide
ccuccaacaccucaagucu

SEQ ID NO: 2911683 - RNA, 19 nt, Artificial Sequence
  Description of Artificial Sequence: Synthetic oligonucleotide
gugucauaaauaagacuuu

SEQ ID NO: 2911684 - RNA, 19 nt, Artificial Sequence
  Description of Artificial Sequence: Synthetic oligonucleotide
gucuguugaauccgccuuu

SEQ ID NO: 2911685 - RNA, 19 nt, Artificial Sequence
  Description of Artificial Sequence: Synthetic oligonucleotide
cuuugcucuuuguuucuuu

SEQ ID NO: 2911686 - RNA, 19 nt, Artificial Sequence
  Description of Artificial Sequence: Synthetic oligonucleotide
ggucuguugaauccgccuu

SEQ ID NO: 2911687 - RNA, 19 nt, Artificial Sequence
  Description of Artificial Sequence: Synthetic oligonucleotide
guuuuacccuccaaaucuu

SEQ ID NO: 2911688 - RNA, 19 nt, Artificial Sequence
  Description of Artificial Sequence: Synthetic oligonucleotide
ccucaagucucaugcaaua

SEQ ID NO: 2911689 - RNA, 19 nt, Artificial Sequence
  Description of Artificial Sequence: Synthetic oligonucleotide
ccuguacuuccucuucuga

SEQ ID NO: 2911690 - RNA, 19 nt, Artificial Sequence
  Description of Artificial Sequence: Synthetic oligonucleotide
auccuguuuugagguguau

SEQ ID NO: 2911691 - RNA, 19 nt, Artificial Sequence
  Description of Artificial Sequence: Synthetic oligonucleotide
ccucuucugagacacauuu

SEQ ID NO: 2911692 - RNA, 19 nt, Artificial Sequence
  Description of Artificial Sequence: Synthetic oligonucleotide
auccaccuucuucccuuuu

SEQ ID NO: 2911693 - RNA, 19 nt, Artificial Sequence
  Description of Artificial Sequence: Synthetic oligonucleotide
ggaaauccuccaacaccuc

SEQ ID NO: 2911694 - RNA, 19 nt, Artificial Sequence
  Description of Artificial Sequence: Synthetic oligonucleotide
acucucugacccagaugaa

SEQ ID NO: 2911695 - RNA, 19 nt, Artificial Sequence
  Description of Artificial Sequence: Synthetic oligonucleotide
ccuuuucgauucauguacu

SEQ ID NO: 2911696 - RNA, 19 nt, Artificial Sequence
  Description of Artificial Sequence: Synthetic oligonucleotide
ccgccuuuucgauucaugu

SEQ ID NO: 2911697 - RNA, 19 nt, Artificial Sequence
  Description of Artificial Sequence: Synthetic oligonucleotide
caguaaucugacguucuuu

SEQ ID NO: 2911698 - RNA, 19 nt, Artificial Sequence
  Description of Artificial Sequence: Synthetic oligonucleotide
cguucuuugcucuuuguuu

SEQ ID NO: 2911699 - RNA, 19 nt, Artificial Sequence
  Description of Artificial Sequence: Synthetic oligonucleotide
ggagucaaaggaggcaaau

SEQ ID NO: 2911700 - RNA, 19 nt, Artificial Sequence
  Description of Artificial Sequence: Synthetic oligonucleotide
auccgccuuuucgauucau

SEQ ID NO: 2911701 - RNA, 19 nt, Artificial Sequence
  Description of Artificial Sequence: Synthetic oligonucleotide
cgauucauguacugccugu

SEQ ID NO: 2911702 - RNA, 19 nt, Artificial Sequence
  Description of Artificial Sequence: Synthetic oligonucleotide
ggaaggagauguggaucua

SEQ ID NO: 2911703 - RNA, 19 nt, Artificial Sequence
  Description of Artificial Sequence: Synthetic oligonucleotide
cgagaaggggaaggagaug

SEQ ID NO: 2911704 - RNA, 19 nt, Artificial Sequence
  Description of Artificial Sequence: Synthetic oligonucleotide
cgccuuuucgauucaugua

SEQ ID NO: 2911705 - RNA, 19 nt, Artificial Sequence
  Description of Artificial Sequence: Synthetic oligonucleotide
ccauccaccuucuucccuu

SEQ ID NO: 2911706 - RNA, 19 nt, Artificial Sequence
  Description of Artificial Sequence: Synthetic oligonucleotide
gccauccaccuucuucccu

SEQ ID NO: 2911707 - RNA, 19 nt, Artificial Sequence
  Description of Artificial Sequence: Synthetic oligonucleotide
cauccaccuucuucccuuu

SEQ ID NO: 2911708 - RNA, 19 nt, Artificial Sequence
  Description of Artificial Sequence: Synthetic oligonucleotide
augucgccucggagaccug

SEQ ID NO: 2911709 - RNA, 19 nt, Artificial Sequence
  Description of Artificial Sequence: Synthetic oligonucleotide
ccucgucucuucuuucuuu

SEQ ID NO: 2911710 - RNA, 19 nt, Artificial Sequence
  Description of Artificial Sequence: Synthetic oligonucleotide
cagagccauccaccuucuu

SEQ ID NO: 2911711 - RNA, 19 nt, Artificial Sequence
  Description of Artificial Sequence: Synthetic oligonucleotide
ccaacaccucaagucucau

SEQ ID NO: 2911712 - RNA, 19 nt, Artificial Sequence
  Description of Artificial Sequence: Synthetic oligonucleotide
gauacauucaaauucagcc

SEQ ID NO: 2911713 - RNA, 19 nt, Artificial Sequence
  Description of Artificial Sequence: Synthetic oligonucleotide
agaucgguaagucaggugc

SEQ ID NO: 2911714 - RNA, 19 nt, Artificial Sequence
  Description of Artificial Sequence: Synthetic oligonucleotide
ugaaguugggccaaggugg

SEQ ID NO: 2911715 - RNA, 19 nt, Artificial Sequence
  Description of Artificial Sequence: Synthetic oligonucleotide
aacaguaaugguucccugc

SEQ ID NO: 2911716 - RNA, 19 nt, Artificial Sequence
  Description of Artificial Sequence: Synthetic oligonucleotide
aaugagaucaugugacccg

SEQ ID NO: 2911717 - RNA, 19 nt, Artificial Sequence
  Description of Artificial Sequence: Synthetic oligonucleotide
uacauucaaauucagccgg

SEQ ID NO: 2911718 - RNA, 19 nt, Artificial Sequence
  Description of Artificial Sequence: Synthetic oligonucleotide
gaagguaccaaugagauca

SEQ ID NO: 2911719 - RNA, 19 nt, Artificial Sequence
  Description of Artificial Sequence: Synthetic oligonucleotide
cuucccaucaccuuggcgg

SEQ ID NO: 2911720 - RNA, 19 nt, Artificial Sequence
  Description of Artificial Sequence: Synthetic oligonucleotide
auacauucaaauucagccg

SEQ ID NO: 2911721 - RNA, 19 nt, Artificial Sequence
  Description of Artificial Sequence: Synthetic oligonucleotide
cuagcuucuaccuccaugg

SEQ ID NO: 2911722 - RNA, 19 nt, Artificial Sequence
  Description of Artificial Sequence: Synthetic oligonucleotide
ugaagaggaaccgagaagc

SEQ ID NO: 2911723 - RNA, 19 nt, Artificial Sequence
  Description of Artificial Sequence: Synthetic oligonucleotide
aucagauuuuccuaggaag

SEQ ID NO: 2911724 - RNA, 19 nt, Artificial Sequence
  Description of Artificial Sequence: Synthetic oligonucleotide
cacaaucugaccuagggag

SEQ ID NO: 2911725 - RNA, 19 nt, Artificial Sequence
  Description of Artificial Sequence: Synthetic oligonucleotide
acaguaaugguucccugcc

SEQ ID NO: 2911726 - RNA, 19 nt, Artificial Sequence
  Description of Artificial Sequence: Synthetic oligonucleotide
gacacaaucugaccuaggg

SEQ ID NO: 2911727 - RNA, 19 nt, Artificial Sequence
  Description of Artificial Sequence: Synthetic oligonucleotide
uucaaauucagccgggacu

SEQ ID NO: 2911728 - RNA, 19 nt, Artificial Sequence
  Description of Artificial Sequence: Synthetic oligonucleotide
agaaaugcugaagaggaac

SEQ ID NO: 2911729 - RNA, 19 nt, Artificial Sequence
  Description of Artificial Sequence: Synthetic oligonucleotide
uguccuuuaacuccugagc

SEQ ID NO: 2911730 - RNA, 19 nt, Artificial Sequence
  Description of Artificial Sequence: Synthetic oligonucleotide
ucagauuuuccuaggaagu

SEQ ID NO: 2911731 - RNA, 19 nt, Artificial Sequence
  Description of Artificial Sequence: Synthetic oligonucleotide
aguaaugguucccugcccg

SEQ ID NO: 2911732 - RNA, 19 nt, Artificial Sequence
  Description of Artificial Sequence: Synthetic oligonucleotide
guuucuagcuucuaccucc

SEQ ID NO: 2911733 - RNA, 19 nt, Artificial Sequence
  Description of Artificial Sequence: Synthetic oligonucleotide
accaaugagaucaugugac

SEQ ID NO: 2911734 - RNA, 19 nt, Artificial Sequence
  Description of Artificial Sequence: Synthetic oligonucleotide
uguggaagguaccaaugag

SEQ ID NO: 2911735 - RNA, 19 nt, Artificial Sequence
  Description of Artificial Sequence: Synthetic oligonucleotide
agauuuuccuaggaagucc

SEQ ID NO: 2911736 - RNA, 19 nt, Artificial Sequence
  Description of Artificial Sequence: Synthetic oligonucleotide
aagaggaaccgagaagcgc

SEQ ID NO: 2911737 - RNA, 19 nt, Artificial Sequence
  Description of Artificial Sequence: Synthetic oligonucleotide
cuagggagcacucugcugc

SEQ ID NO: 2911738 - RNA, 19 nt, Artificial Sequence
  Description of Artificial Sequence: Synthetic oligonucleotide
uucagguuguucuugauua

SEQ ID NO: 2911739 - RNA, 19 nt, Artificial Sequence
  Description of Artificial Sequence: Synthetic oligonucleotide
uucaacaucaaggguagag

SEQ ID NO: 2911740 - RNA, 19 nt, Artificial Sequence
  Description of Artificial Sequence: Synthetic oligonucleotide
uagguuucuagcuucuacc

SEQ ID NO: 2911741 - RNA, 19 nt, Artificial Sequence
  Description of Artificial Sequence: Synthetic oligonucleotide
ucaaauucagccgggacug

SEQ ID NO: 2911742 - RNA, 19 nt, Artificial Sequence
  Description of Artificial Sequence: Synthetic oligonucleotide
ugacccgucacugucauag

SEQ ID NO: 2911743 - RNA, 19 nt, Artificial Sequence
  Description of Artificial Sequence: Synthetic oligonucleotide
uaagucaggugccacuucc

SEQ ID NO: 2911744 - RNA, 19 nt, Artificial Sequence
  Description of Artificial Sequence: Synthetic oligonucleotide
auucaaauucagccgggac

SEQ ID NO: 2911745 - RNA, 19 nt, Artificial Sequence
  Description of Artificial Sequence: Synthetic oligonucleotide
aaaugcugaagaggaaccg

SEQ ID NO: 2911746 - RNA, 19 nt, Artificial Sequence
  Description of Artificial Sequence: Synthetic oligonucleotide
gguggauacauucaaauuc

SEQ ID NO: 2911747 - RNA, 19 nt, Artificial Sequence
  Description of Artificial Sequence: Synthetic oligonucleotide
uggaagguaccaaugagau

SEQ ID NO: 2911748 - RNA, 19 nt, Artificial Sequence
  Description of Artificial Sequence: Synthetic oligonucleotide
uaccaaugagaucauguga

SEQ ID NO: 2911749 - RNA, 19 nt, Artificial Sequence
  Description of Artificial Sequence: Synthetic oligonucleotide
ucuagcuucuaccuccaug

SEQ ID NO: 2911750 - RNA, 19 nt, Artificial Sequence
  Description of Artificial Sequence: Synthetic oligonucleotide
auuaccucagaucgguaag

SEQ ID NO: 2911751 - RNA, 19 nt, Artificial Sequence
  Description of Artificial Sequence: Synthetic oligonucleotide
ucauaguccgagcagcgca

SEQ ID NO: 2911752 - RNA, 19 nt, Artificial Sequence
  Description of Artificial Sequence: Synthetic oligonucleotide
caaggguagagucaaaguc

SEQ ID NO: 2911753 - RNA, 19 nt, Artificial Sequence
  Description of Artificial Sequence: Synthetic oligonucleotide
ucuggcuggacacaaucug

SEQ ID NO: 2911754 - RNA, 19 nt, Artificial Sequence
  Description of Artificial Sequence: Synthetic oligonucleotide
ugucauaguccgagcagcg

SEQ ID NO: 2911755 - RNA, 19 nt, Artificial Sequence
  Description of Artificial Sequence: Synthetic oligonucleotide
ucaaagucuggcuggacac

SEQ ID NO: 2911756 - RNA, 19 nt, Artificial Sequence
  Description of Artificial Sequence: Synthetic oligonucleotide
aaggguagagucaaagucu

SEQ ID NO: 2911757 - RNA, 19 nt, Artificial Sequence
  Description of Artificial Sequence: Synthetic oligonucleotide
uaggaaguccuucuugucu

SEQ ID NO: 2911758 - RNA, 19 nt, Artificial Sequence
  Description of Artificial Sequence: Synthetic oligonucleotide
ucuugucuagguuucuagc

SEQ ID NO: 2911759 - RNA, 19 nt, Artificial Sequence
  Description of Artificial Sequence: Synthetic oligonucleotide
uucuugucuagguuucuag

SEQ ID NO: 2911760 - RNA, 19 nt, Artificial Sequence
  Description of Artificial Sequence: Synthetic oligonucleotide
aaggugguguggaagguac

SEQ ID NO: 2911761 - RNA, 19 nt, Artificial Sequence
  Description of Artificial Sequence: Synthetic oligonucleotide
gaaaugcugaagaggaacc

SEQ ID NO: 2911762 - RNA, 19 nt, Artificial Sequence
  Description of Artificial Sequence: Synthetic oligonucleotide
accuccaugguuacuaccc

SEQ ID NO: 2911763 - RNA, 19 nt, Artificial Sequence
  Description of Artificial Sequence: Synthetic oligonucleotide
uuguccuuuaacuccugag

SEQ ID NO: 2911764 - RNA, 19 nt, Artificial Sequence
  Description of Artificial Sequence: Synthetic oligonucleotide
uuccauguaggguucaggu

SEQ ID NO: 2911765 - RNA, 19 nt, Artificial Sequence
  Description of Artificial Sequence: Synthetic oligonucleotide
aagaacggaucagauuuuc

SEQ ID NO: 2911766 - RNA, 19 nt, Artificial Sequence
  Description of Artificial Sequence: Synthetic oligonucleotide
acggaucagauuuuccuag

SEQ ID NO: 2911767 - RNA, 19 nt, Artificial Sequence
  Description of Artificial Sequence: Synthetic oligonucleotide
accgcagaaaugcugaaga

SEQ ID NO: 2911768 - RNA, 19 nt, Artificial Sequence
  Description of Artificial Sequence: Synthetic oligonucleotide
ucaccuuggcggaagaacu

SEQ ID NO: 2911769 - RNA, 19 nt, Artificial Sequence
  Description of Artificial Sequence: Synthetic oligonucleotide
guaccaaugagaucaugug

SEQ ID NO: 2911770 - RNA, 19 nt, Artificial Sequence
  Description of Artificial Sequence: Synthetic oligonucleotide
agucuggcuggacacaauc

SEQ ID NO: 2911771 - RNA, 19 nt, Artificial Sequence
  Description of Artificial Sequence: Synthetic oligonucleotide
agaucaugugacccgucac

SEQ ID NO: 2911772 - RNA, 19 nt, Artificial Sequence
  Description of Artificial Sequence: Synthetic oligonucleotide
uuuccuaggaaguccuucu

SEQ ID NO: 2911773 - RNA, 19 nt, Artificial Sequence
  Description of Artificial Sequence: Synthetic oligonucleotide
aaacaguaaugguucccug

SEQ ID NO: 2911774 - RNA, 19 nt, Artificial Sequence
  Description of Artificial Sequence: Synthetic oligonucleotide
acugucauaguccgagcag

SEQ ID NO: 2911775 - RNA, 19 nt, Artificial Sequence
  Description of Artificial Sequence: Synthetic oligonucleotide
aaguccuucuugucuaggu

SEQ ID NO: 2911776 - RNA, 19 nt, Artificial Sequence
  Description of Artificial Sequence: Synthetic oligonucleotide
augguuacuacccgguugu

SEQ ID NO: 2911777 - RNA, 19 nt, Artificial Sequence
  Description of Artificial Sequence: Synthetic oligonucleotide
ucaaggguagagucaaagu

SEQ ID NO: 2911778 - RNA, 19 nt, Artificial Sequence
  Description of Artificial Sequence: Synthetic oligonucleotide
uugauuaccucagaucggu

SEQ ID NO: 2911779 - RNA, 19 nt, Artificial Sequence
  Description of Artificial Sequence: Synthetic oligonucleotide
aucaccuuggcggaagaac

SEQ ID NO: 2911780 - RNA, 19 nt, Artificial Sequence
  Description of Artificial Sequence: Synthetic oligonucleotide
aagaacuccaagaacggau

SEQ ID NO: 2911781 - RNA, 19 nt, Artificial Sequence
  Description of Artificial Sequence: Synthetic oligonucleotide
uggauacauucaaauucag

SEQ ID NO: 2911782 - RNA, 19 nt, Artificial Sequence
  Description of Artificial Sequence: Synthetic oligonucleotide
caacaucaaggguagaguc

SEQ ID NO: 2911783 - RNA, 19 nt, Artificial Sequence
  Description of Artificial Sequence: Synthetic oligonucleotide
ugaccuagggagcacucug

SEQ ID NO: 2911784 - RNA, 19 nt, Artificial Sequence
  Description of Artificial Sequence: Synthetic oligonucleotide
caaugagaucaugugaccc

SEQ ID NO: 2911785 - RNA, 19 nt, Artificial Sequence
  Description of Artificial Sequence: Synthetic oligonucleotide
aacggaucagauuuuccua

SEQ ID NO: 2911786 - RNA, 19 nt, Artificial Sequence
  Description of Artificial Sequence: Synthetic oligonucleotide
aaugcugaagaggaaccga

SEQ ID NO: 2911787 - RNA, 19 nt, Artificial Sequence
  Description of Artificial Sequence: Synthetic oligonucleotide
ucaacaucaaggguagagu

SEQ ID NO: 2911788 - RNA, 19 nt, Artificial Sequence
  Description of Artificial Sequence: Synthetic oligonucleotide
uccuaggaaguccuucuug

SEQ ID NO: 2911789 - RNA, 19 nt, Artificial Sequence
  Description of Artificial Sequence: Synthetic oligonucleotide
cggaagaacuccaagaacg

SEQ ID NO: 2911790 - RNA, 19 nt, Artificial Sequence
  Description of Artificial Sequence: Synthetic oligonucleotide
ugaaacaguaaugguuccc

SEQ ID NO: 2911791 - RNA, 19 nt, Artificial Sequence
  Description of Artificial Sequence: Synthetic oligonucleotide
uccuuuaacuccugagcug

SEQ ID NO: 2911792 - RNA, 19 nt, Artificial Sequence
  Description of Artificial Sequence: Synthetic oligonucleotide
gauuaccucagaucgguaa

SEQ ID NO: 2911793 - RNA, 19 nt, Artificial Sequence
  Description of Artificial Sequence: Synthetic oligonucleotide
agcgcuuccauguaggguu

SEQ ID NO: 2911794 - RNA, 19 nt, Artificial Sequence
  Description of Artificial Sequence: Synthetic oligonucleotide
cuagguuucuagcuucuac

SEQ ID NO: 2911795 - RNA, 19 nt, Artificial Sequence
  Description of Artificial Sequence: Synthetic oligonucleotide
aucaaggguagagucaaag

SEQ ID NO: 2911796 - RNA, 19 nt, Artificial Sequence
  Description of Artificial Sequence: Synthetic oligonucleotide
ugugcccagguccccaccg

SEQ ID NO: 2911797 - RNA, 19 nt, Artificial Sequence
  Description of Artificial Sequence: Synthetic oligonucleotide
aacaucaaggguagaguca

SEQ ID NO: 2911798 - RNA, 19 nt, Artificial Sequence
  Description of Artificial Sequence: Synthetic oligonucleotide
acaaucugaccuagggagc

SEQ ID NO: 2911799 - RNA, 19 nt, Artificial Sequence
  Description of Artificial Sequence: Synthetic oligonucleotide
uuggcggaagaacuccaag

SEQ ID NO: 2911800 - RNA, 19 nt, Artificial Sequence
  Description of Artificial Sequence: Synthetic oligonucleotide
cugagcugaaacaguaaug

SEQ ID NO: 2911801 - RNA, 19 nt, Artificial Sequence
  Description of Artificial Sequence: Synthetic oligonucleotide
gaagcgcuuccauguaggg

SEQ ID NO: 2911802 - RNA, 19 nt, Artificial Sequence
  Description of Artificial Sequence: Synthetic oligonucleotide
uaacuccugagcugaaaca

SEQ ID NO: 2911803 - RNA, 19 nt, Artificial Sequence
  Description of Artificial Sequence: Synthetic oligonucleotide
aacuccaagaacggaucag

SEQ ID NO: 2911804 - RNA, 19 nt, Artificial Sequence
  Description of Artificial Sequence: Synthetic oligonucleotide
caugguuacuacccgguug

SEQ ID NO: 2911805 - RNA, 19 nt, Artificial Sequence
  Description of Artificial Sequence: Synthetic oligonucleotide
ucuaccuccaugguuacua

SEQ ID NO: 2911806 - RNA, 19 nt, Artificial Sequence
  Description of Artificial Sequence: Synthetic oligonucleotide
agaacuccaagaacggauc

SEQ ID NO: 2911807 - RNA, 19 nt, Artificial Sequence
  Description of Artificial Sequence: Synthetic oligonucleotide
uccaugguuacuacccggu

SEQ ID NO: 2911808 - RNA, 19 nt, Artificial Sequence
  Description of Artificial Sequence: Synthetic oligonucleotide
uggcggaagaacuccaaga

SEQ ID NO: 2911809 - RNA, 19 nt, Artificial Sequence
  Description of Artificial Sequence: Synthetic oligonucleotide
ugucuagguuucuagcuuc

SEQ ID NO: 2911810 - RNA, 19 nt, Artificial Sequence
  Description of Artificial Sequence: Synthetic oligonucleotide
agaacggaucagauuuucc

SEQ ID NO: 2911811 - RNA, 19 nt, Artificial Sequence
  Description of Artificial Sequence: Synthetic oligonucleotide
cugaagaggaaccgagaag

SEQ ID NO: 2911812 - RNA, 19 nt, Artificial Sequence
  Description of Artificial Sequence: Synthetic oligonucleotide
gaagaggaaccgagaagcg

SEQ ID NO: 2911813 - RNA, 19 nt, Artificial Sequence
  Description of Artificial Sequence: Synthetic oligonucleotide
aaugguucccugcccggca

SEQ ID NO: 2911814 - RNA, 19 nt, Artificial Sequence
  Description of Artificial Sequence: Synthetic oligonucleotide
gagaagcgcuuccauguag

SEQ ID NO: 2911815 - RNA, 19 nt, Artificial Sequence
  Description of Artificial Sequence: Synthetic oligonucleotide
acacaaucugaccuaggga

SEQ ID NO: 2911816 - RNA, 19 nt, Artificial Sequence
  Description of Artificial Sequence: Synthetic oligonucleotide
aagucaggugccacuuccc

SEQ ID NO: 2911817 - RNA, 19 nt, Artificial Sequence
  Description of Artificial Sequence: Synthetic oligonucleotide
cucagaucgguaagucagg

SEQ ID NO: 2911818 - RNA, 19 nt, Artificial Sequence
  Description of Artificial Sequence: Synthetic oligonucleotide
gaucagauuuuccuaggaa

SEQ ID NO: 2911819 - RNA, 19 nt, Artificial Sequence
  Description of Artificial Sequence: Synthetic oligonucleotide
cccggcuucaacaucaagg

SEQ ID NO: 2911820 - RNA, 19 nt, Artificial Sequence
  Description of Artificial Sequence: Synthetic oligonucleotide
gaacggaucagauuuuccu

SEQ ID NO: 2911821 - RNA, 19 nt, Artificial Sequence
  Description of Artificial Sequence: Synthetic oligonucleotide
ccucagaucgguaagucag

SEQ ID NO: 2911822 - RNA, 19 nt, Artificial Sequence
  Description of Artificial Sequence: Synthetic oligonucleotide
ucaggugccacuucccauc

SEQ ID NO: 2911823 - RNA, 19 nt, Artificial Sequence
  Description of Artificial Sequence: Synthetic oligonucleotide
accuuggcggaagaacucc

SEQ ID NO: 2911824 - RNA, 19 nt, Artificial Sequence
  Description of Artificial Sequence: Synthetic oligonucleotide
uugucuagguuucuagcuu

SEQ ID NO: 2911825 - RNA, 19 nt, Artificial Sequence
  Description of Artificial Sequence: Synthetic oligonucleotide
cugaaacaguaaugguucc

SEQ ID NO: 2911826 - RNA, 19 nt, Artificial Sequence
  Description of Artificial Sequence: Synthetic oligonucleotide
guaaugguucccugcccgg

SEQ ID NO: 2911827 - RNA, 19 nt, Artificial Sequence
  Description of Artificial Sequence: Synthetic oligonucleotide
agaagcgcuuccauguagg

SEQ ID NO: 2911828 - RNA, 19 nt, Artificial Sequence
  Description of Artificial Sequence: Synthetic oligonucleotide
agaggaaccgagaagcgcu

SEQ ID NO: 2911829 - RNA, 19 nt, Artificial Sequence
  Description of Artificial Sequence: Synthetic oligonucleotide
uuuuccuaggaaguccuuc

SEQ ID NO: 2911830 - RNA, 19 nt, Artificial Sequence
  Description of Artificial Sequence: Synthetic oligonucleotide
ccauguaggguucagguug

SEQ ID NO: 2911831 - RNA, 19 nt, Artificial Sequence
  Description of Artificial Sequence: Synthetic oligonucleotide
cuccaugguuacuacccgg

SEQ ID NO: 2911832 - RNA, 19 nt, Artificial Sequence
  Description of Artificial Sequence: Synthetic oligonucleotide
uuucuagcuucuaccucca

SEQ ID NO: 2911833 - RNA, 19 nt, Artificial Sequence
  Description of Artificial Sequence: Synthetic oligonucleotide
gagaucaugugacccguca

SEQ ID NO: 2911834 - RNA, 19 nt, Artificial Sequence
  Description of Artificial Sequence: Synthetic oligonucleotide
gucaaagucuggcuggaca

SEQ ID NO: 2911835 - RNA, 19 nt, Artificial Sequence
  Description of Artificial Sequence: Synthetic oligonucleotide
uggcuggacacaaucugac

SEQ ID NO: 2911836 - RNA, 19 nt, Artificial Sequence
  Description of Artificial Sequence: Synthetic oligonucleotide
acccgguuguccuuuaacu

SEQ ID NO: 2911837 - RNA, 19 nt, Artificial Sequence
  Description of Artificial Sequence: Synthetic oligonucleotide
cugucauaguccgagcagc

SEQ ID NO: 2911838 - RNA, 19 nt, Artificial Sequence
  Description of Artificial Sequence: Synthetic oligonucleotide
aaucugaccuagggagcac

SEQ ID NO: 2911839 - RNA, 19 nt, Artificial Sequence
  Description of Artificial Sequence: Synthetic oligonucleotide
acccgucacugucauaguc

SEQ ID NO: 2911840 - RNA, 19 nt, Artificial Sequence
  Description of Artificial Sequence: Synthetic oligonucleotide
ccggcuucaacaucaaggg

SEQ ID NO: 2911841 - RNA, 19 nt, Artificial Sequence
  Description of Artificial Sequence: Synthetic oligonucleotide
aaauucagccgggacugcu

SEQ ID NO: 2911842 - RNA, 19 nt, Artificial Sequence
  Description of Artificial Sequence: Synthetic oligonucleotide
guaggguucagguuguucu

SEQ ID NO: 2911843 - RNA, 19 nt, Artificial Sequence
  Description of Artificial Sequence: Synthetic oligonucleotide
ugcugaagaggaaccgaga

SEQ ID NO: 2911844 - RNA, 19 nt, Artificial Sequence
  Description of Artificial Sequence: Synthetic oligonucleotide
caugugacccgucacuguc

SEQ ID NO: 2911845 - RNA, 19 nt, Artificial Sequence
  Description of Artificial Sequence: Synthetic oligonucleotide
gcugaaacaguaaugguuc

SEQ ID NO: 2911846 - RNA, 19 nt, Artificial Sequence
  Description of Artificial Sequence: Synthetic oligonucleotide
gcagaaaugcugaagagga

SEQ ID NO: 2911847 - RNA, 19 nt, Artificial Sequence
  Description of Artificial Sequence: Synthetic oligonucleotide
guuacuacccgguuguccu

SEQ ID NO: 2911848 - RNA, 19 nt, Artificial Sequence
  Description of Artificial Sequence: Synthetic oligonucleotide
uggacacaaucugaccuag

SEQ ID NO: 2911849 - RNA, 19 nt, Artificial Sequence
  Description of Artificial Sequence: Synthetic oligonucleotide
aaagucuggcuggacacaa

SEQ ID NO: 2911850 - RNA, 19 nt, Artificial Sequence
  Description of Artificial Sequence: Synthetic oligonucleotide
agcugaaacaguaaugguu

SEQ ID NO: 2911851 - RNA, 19 nt, Artificial Sequence
  Description of Artificial Sequence: Synthetic oligonucleotide
ggaagaacuccaagaacgg

SEQ ID NO: 2911852 - RNA, 19 nt, Artificial Sequence
  Description of Artificial Sequence: Synthetic oligonucleotide
acaucaaggguagagucaa

SEQ ID NO: 2911853 - RNA, 19 nt, Artificial Sequence
  Description of Artificial Sequence: Synthetic oligonucleotide
accgagaagcgcuuccaug

SEQ ID NO: 2911854 - RNA, 19 nt, Artificial Sequence
  Description of Artificial Sequence: Synthetic oligonucleotide
cuucccggcuucaacauca

SEQ ID NO: 2911855 - RNA, 19 nt, Artificial Sequence
  Description of Artificial Sequence: Synthetic oligonucleotide
auucagccgggacugcuug

SEQ ID NO: 2911856 - RNA, 19 nt, Artificial Sequence
  Description of Artificial Sequence: Synthetic oligonucleotide
aucaugugacccgucacug

SEQ ID NO: 2911857 - RNA, 19 nt, Artificial Sequence
  Description of Artificial Sequence: Synthetic oligonucleotide
uccaagaacggaucagauu

SEQ ID NO: 2911858 - RNA, 19 nt, Artificial Sequence
  Description of Artificial Sequence: Synthetic oligonucleotide
aggaaguccuucuugucua

SEQ ID NO: 2911859 - RNA, 19 nt, Artificial Sequence
  Description of Artificial Sequence: Synthetic oligonucleotide
gccaaggugguguggaagg

SEQ ID NO: 2911860 - RNA, 19 nt, Artificial Sequence
  Description of Artificial Sequence: Synthetic oligonucleotide
gaaacaguaaugguucccu

SEQ ID NO: 2911861 - RNA, 19 nt, Artificial Sequence
  Description of Artificial Sequence: Synthetic oligonucleotide
gaacuccaagaacggauca

SEQ ID NO: 2911862 - RNA, 19 nt, Artificial Sequence
  Description of Artificial Sequence: Synthetic oligonucleotide
cauaguccgagcagcgcac

SEQ ID NO: 2911863 - RNA, 19 nt, Artificial Sequence
  Description of Artificial Sequence: Synthetic oligonucleotide
gaaguccuucuugucuagg

SEQ ID NO: 2911864 - RNA, 19 nt, Artificial Sequence
  Description of Artificial Sequence: Synthetic oligonucleotide
acauucaaauucagccggg

SEQ ID NO: 2911865 - RNA, 19 nt, Artificial Sequence
  Description of Artificial Sequence: Synthetic oligonucleotide
gaucgguaagucaggugcc

SEQ ID NO: 2911866 - RNA, 19 nt, Artificial Sequence
  Description of Artificial Sequence: Synthetic oligonucleotide
acuccaagaacggaucaga

SEQ ID NO: 2911867 - RNA, 19 nt, Artificial Sequence
  Description of Artificial Sequence: Synthetic oligonucleotide
gaucaugugacccgucacu

SEQ ID NO: 2911868 - RNA, 19 nt, Artificial Sequence
  Description of Artificial Sequence: Synthetic oligonucleotide
ugguguggaagguaccaau

SEQ ID NO: 2911869 - RNA, 19 nt, Artificial Sequence
  Description of Artificial Sequence: Synthetic oligonucleotide
augcugaagaggaaccgag

SEQ ID NO: 2911870 - RNA, 19 nt, Artificial Sequence
  Description of Artificial Sequence: Synthetic oligonucleotide
ggauacauucaaauucagc

SEQ ID NO: 2911871 - RNA, 19 nt, Artificial Sequence
  Description of Artificial Sequence: Synthetic oligonucleotide
cuugucuagguuucuagcu

SEQ ID NO: 2911872 - RNA, 19 nt, Artificial Sequence
  Description of Artificial Sequence: Synthetic oligonucleotide
ucagaucgguaagucaggu

SEQ ID NO: 2911873 - RNA, 19 nt, Artificial Sequence
  Description of Artificial Sequence: Synthetic oligonucleotide
ggugccacuucccaucacc

SEQ ID NO: 2911874 - RNA, 19 nt, Artificial Sequence
  Description of Artificial Sequence: Synthetic oligonucleotide
agucaggugccacuuccca

SEQ ID NO: 2911875 - RNA, 19 nt, Artificial Sequence
  Description of Artificial Sequence: Synthetic oligonucleotide
uuaccucagaucgguaagu

SEQ ID NO: 2911876 - RNA, 19 nt, Artificial Sequence
  Description of Artificial Sequence: Synthetic oligonucleotide
cuuccauguaggguucagg

SEQ ID NO: 2911877 - RNA, 19 nt, Artificial Sequence
  Description of Artificial Sequence: Synthetic oligonucleotide
uacccgguuguccuuuaac

SEQ ID NO: 2911878 - RNA, 19 nt, Artificial Sequence
  Description of Artificial Sequence: Synthetic oligonucleotide
guguggaagguaccaauga

SEQ ID NO: 2911879 - RNA, 19 nt, Artificial Sequence
  Description of Artificial Sequence: Synthetic oligonucleotide
accucagaucgguaaguca

SEQ ID NO: 2911880 - RNA, 19 nt, Artificial Sequence
  Description of Artificial Sequence: Synthetic oligonucleotide
uaccuccaugguuacuacc

SEQ ID NO: 2911881 - RNA, 19 nt, Artificial Sequence
  Description of Artificial Sequence: Synthetic oligonucleotide
agccgggacugcuugaagu

SEQ ID NO: 2911882 - RNA, 19 nt, Artificial Sequence
  Description of Artificial Sequence: Synthetic oligonucleotide
cuaggaaguccuucuuguc

SEQ ID NO: 2911883 - RNA, 19 nt, Artificial Sequence
  Description of Artificial Sequence: Synthetic oligonucleotide
ccgguuguccuuuaacucc

SEQ ID NO: 2911884 - RNA, 19 nt, Artificial Sequence
  Description of Artificial Sequence: Synthetic oligonucleotide
uucccaucaccuuggcgga

SEQ ID NO: 2911885 - RNA, 19 nt, Artificial Sequence
  Description of Artificial Sequence: Synthetic oligonucleotide
aggguagagucaaagucug

SEQ ID NO: 2911886 - RNA, 19 nt, Artificial Sequence
  Description of Artificial Sequence: Synthetic oligonucleotide
ucaugugacccgucacugu

SEQ ID NO: 2911887 - RNA, 19 nt, Artificial Sequence
  Description of Artificial Sequence: Synthetic oligonucleotide
aggcuucccggcuucaaca

SEQ ID NO: 2911888 - RNA, 19 nt, Artificial Sequence
  Description of Artificial Sequence: Synthetic oligonucleotide
guccgagcagcgcaccugg

SEQ ID NO: 2911889 - RNA, 19 nt, Artificial Sequence
  Description of Artificial Sequence: Synthetic oligonucleotide
guccuuuaacuccugagcu

SEQ ID NO: 2911890 - RNA, 19 nt, Artificial Sequence
  Description of Artificial Sequence: Synthetic oligonucleotide
guggaagguaccaaugaga

SEQ ID NO: 2911891 - RNA, 19 nt, Artificial Sequence
  Description of Artificial Sequence: Synthetic oligonucleotide
auaguccgagcagcgcacc

SEQ ID NO: 2911892 - RNA, 19 nt, Artificial Sequence
  Description of Artificial Sequence: Synthetic oligonucleotide
ugugacccgucacugucau

SEQ ID NO: 2911893 - RNA, 19 nt, Artificial Sequence
  Description of Artificial Sequence: Synthetic oligonucleotide
uaaugguucccugcccggc

SEQ ID NO: 2911894 - RNA, 19 nt, Artificial Sequence
  Description of Artificial Sequence: Synthetic oligonucleotide
cagauuuuccuaggaaguc

SEQ ID NO: 2911895 - RNA, 19 nt, Artificial Sequence
  Description of Artificial Sequence: Synthetic oligonucleotide
ugcccggcaggcuucccgg

SEQ ID NO: 2911896 - RNA, 19 nt, Artificial Sequence
  Description of Artificial Sequence: Synthetic oligonucleotide
gaagaacuccaagaacgga

SEQ ID NO: 2911897 - RNA, 19 nt, Artificial Sequence
  Description of Artificial Sequence: Synthetic oligonucleotide
gcuucaacaucaaggguag

SEQ ID NO: 2911898 - RNA, 19 nt, Artificial Sequence
  Description of Artificial Sequence: Synthetic oligonucleotide
ucacugucauaguccgagc

SEQ ID NO: 2911899 - RNA, 19 nt, Artificial Sequence
  Description of Artificial Sequence: Synthetic oligonucleotide
agguuguucuugauuaccu

SEQ ID NO: 2911900 - RNA, 19 nt, Artificial Sequence
  Description of Artificial Sequence: Synthetic oligonucleotide
aaccgagaagcgcuuccau

SEQ ID NO: 2911901 - RNA, 19 nt, Artificial Sequence
  Description of Artificial Sequence: Synthetic oligonucleotide
ucugaccuagggagcacuc

SEQ ID NO: 2911902 - RNA, 19 nt, Artificial Sequence
  Description of Artificial Sequence: Synthetic oligonucleotide
caguaaugguucccugccc

SEQ ID NO: 2911903 - RNA, 19 nt, Artificial Sequence
  Description of Artificial Sequence: Synthetic oligonucleotide
uccugagcugaaacaguaa

SEQ ID NO: 2911904 - RNA, 19 nt, Artificial Sequence
  Description of Artificial Sequence: Synthetic oligonucleotide
uccauguaggguucagguu

SEQ ID NO: 2911905 - RNA, 19 nt, Artificial Sequence
  Description of Artificial Sequence: Synthetic oligonucleotide
ugcugccccuaagaagucg

SEQ ID NO: 2911906 - RNA, 19 nt, Artificial Sequence
  Description of Artificial Sequence: Synthetic oligonucleotide
gauuuuccuaggaaguccu

SEQ ID NO: 2911907 - RNA, 19 nt, Artificial Sequence
  Description of Artificial Sequence: Synthetic oligonucleotide
aagcgcuuccauguagggu

SEQ ID NO: 2911908 - RNA, 19 nt, Artificial Sequence
  Description of Artificial Sequence: Synthetic oligonucleotide
aguccuucuugucuagguu

SEQ ID NO: 2911909 - RNA, 19 nt, Artificial Sequence
  Description of Artificial Sequence: Synthetic oligonucleotide
augagaucaugugacccgu

SEQ ID NO: 2911910 - RNA, 19 nt, Artificial Sequence
  Description of Artificial Sequence: Synthetic oligonucleotide
agcuucuaccuccaugguu

SEQ ID NO: 2911911 - RNA, 19 nt, Artificial Sequence
  Description of Artificial Sequence: Synthetic oligonucleotide
accuagggagcacucugcu

SEQ ID NO: 2911912 - RNA, 19 nt, Artificial Sequence
  Description of Artificial Sequence: Synthetic oligonucleotide
ugccccuaagaagucguca

SEQ ID NO: 2911913 - RNA, 19 nt, Artificial Sequence
  Description of Artificial Sequence: Synthetic oligonucleotide
uguaggguucagguuguuc

SEQ ID NO: 2911914 - RNA, 19 nt, Artificial Sequence
  Description of Artificial Sequence: Synthetic oligonucleotide
accuggaugggugugccca

SEQ ID NO: 2911915 - RNA, 19 nt, Artificial Sequence
  Description of Artificial Sequence: Synthetic oligonucleotide
acucugcugccccuaagaa

SEQ ID NO: 2911916 - RNA, 19 nt, Artificial Sequence
  Description of Artificial Sequence: Synthetic oligonucleotide
cagaucgguaagucaggug

SEQ ID NO: 2911917 - RNA, 19 nt, Artificial Sequence
  Description of Artificial Sequence: Synthetic oligonucleotide
ugggccaagguggugugga

SEQ ID NO: 2911918 - RNA, 19 nt, Artificial Sequence
  Description of Artificial Sequence: Synthetic oligonucleotide
uagggagcacucugcugcc

SEQ ID NO: 2911919 - RNA, 19 nt, Artificial Sequence
  Description of Artificial Sequence: Synthetic oligonucleotide
cccgucacugucauagucc

SEQ ID NO: 2911920 - RNA, 19 nt, Artificial Sequence
  Description of Artificial Sequence: Synthetic oligonucleotide
ccaaugagaucaugugacc

SEQ ID NO: 2911921 - RNA, 19 nt, Artificial Sequence
  Description of Artificial Sequence: Synthetic oligonucleotide
cuggcuggacacaaucuga

SEQ ID NO: 2911922 - RNA, 19 nt, Artificial Sequence
  Description of Artificial Sequence: Synthetic oligonucleotide
cacugucauaguccgagca

SEQ ID NO: 2911923 - RNA, 19 nt, Artificial Sequence
  Description of Artificial Sequence: Synthetic oligonucleotide
agucaaagucuggcuggac

SEQ ID NO: 2911924 - RNA, 19 nt, Artificial Sequence
  Description of Artificial Sequence: Synthetic oligonucleotide
uggaugggugugcccaggu

SEQ ID NO: 2911925 - RNA, 19 nt, Artificial Sequence
  Description of Artificial Sequence: Synthetic oligonucleotide
augguucccugcccggcag

SEQ ID NO: 2911926 - RNA, 19 nt, Artificial Sequence
  Description of Artificial Sequence: Synthetic oligonucleotide
ggcuucaacaucaagggua

SEQ ID NO: 2911927 - RNA, 19 nt, Artificial Sequence
  Description of Artificial Sequence: Synthetic oligonucleotide
gaccuagggagcacucugc

SEQ ID NO: 2911928 - RNA, 19 nt, Artificial Sequence
  Description of Artificial Sequence: Synthetic oligonucleotide
cuaccuccaugguuacuac

SEQ ID NO: 2911929 - RNA, 19 nt, Artificial Sequence
  Description of Artificial Sequence: Synthetic oligonucleotide
ggaaccgagaagcgcuucc

SEQ ID NO: 2911930 - RNA, 19 nt, Artificial Sequence
  Description of Artificial Sequence: Synthetic oligonucleotide
ugguucccugcccggcagg

SEQ ID NO: 2911931 - RNA, 19 nt, Artificial Sequence
  Description of Artificial Sequence: Synthetic oligonucleotide
ccgucacugucauaguccg

SEQ ID NO: 2911932 - RNA, 19 nt, Artificial Sequence
  Description of Artificial Sequence: Synthetic oligonucleotide
ugauuaccucagaucggua

SEQ ID NO: 2911933 - RNA, 19 nt, Artificial Sequence
  Description of Artificial Sequence: Synthetic oligonucleotide
ugagaucaugugacccguc

SEQ ID NO: 2911934 - RNA, 19 nt, Artificial Sequence
  Description of Artificial Sequence: Synthetic oligonucleotide
gcugaagaggaaccgagaa

SEQ ID NO: 2911935 - RNA, 19 nt, Artificial Sequence
  Description of Artificial Sequence: Synthetic oligonucleotide
guuguccuuuaacuccuga

SEQ ID NO: 2911936 - RNA, 19 nt, Artificial Sequence
  Description of Artificial Sequence: Synthetic oligonucleotide
gguuguucuugauuaccuc

SEQ ID NO: 2911937 - RNA, 19 nt, Artificial Sequence
  Description of Artificial Sequence: Synthetic oligonucleotide
caaucugaccuagggagca

SEQ ID NO: 2911938 - RNA, 19 nt, Artificial Sequence
  Description of Artificial Sequence: Synthetic oligonucleotide
gguuacuacccgguugucc

SEQ ID NO: 2911939 - RNA, 19 nt, Artificial Sequence
  Description of Artificial Sequence: Synthetic oligonucleotide
ggcggaagaacuccaagaa

SEQ ID NO: 2911940 - RNA, 19 nt, Artificial Sequence
  Description of Artificial Sequence: Synthetic oligonucleotide
uagcuucuaccuccauggu

SEQ ID NO: 2911941 - RNA, 19 nt, Artificial Sequence
  Description of Artificial Sequence: Synthetic oligonucleotide
uaccucagaucgguaaguc

SEQ ID NO: 2911942 - RNA, 19 nt, Artificial Sequence
  Description of Artificial Sequence: Synthetic oligonucleotide
ucccggcuucaacaucaag

SEQ ID NO: 2911943 - RNA, 19 nt, Artificial Sequence
  Description of Artificial Sequence: Synthetic oligonucleotide
gcuggacacaaucugaccu

SEQ ID NO: 2911944 - RNA, 19 nt, Artificial Sequence
  Description of Artificial Sequence: Synthetic oligonucleotide
ggaucagauuuuccuagga

SEQ ID NO: 2911945 - RNA, 19 nt, Artificial Sequence
  Description of Artificial Sequence: Synthetic oligonucleotide
uaggguucagguuguucuu

SEQ ID NO: 2911946 - RNA, 19 nt, Artificial Sequence
  Description of Artificial Sequence: Synthetic oligonucleotide
aggguucagguuguucuug

SEQ ID NO: 2911947 - RNA, 19 nt, Artificial Sequence
  Description of Artificial Sequence: Synthetic oligonucleotide
ugcccagguccccaccgca

SEQ ID NO: 2911948 - RNA, 19 nt, Artificial Sequence
  Description of Artificial Sequence: Synthetic oligonucleotide
gguaccaaugagaucaugu

SEQ ID NO: 2911949 - RNA, 19 nt, Artificial Sequence
  Description of Artificial Sequence: Synthetic oligonucleotide
aauucagccgggacugcuu

SEQ ID NO: 2911950 - RNA, 19 nt, Artificial Sequence
  Description of Artificial Sequence: Synthetic oligonucleotide
ccaagaacggaucagauuu

SEQ ID NO: 2911951 - RNA, 19 nt, Artificial Sequence
  Description of Artificial Sequence: Synthetic oligonucleotide
gguuucuagcuucuaccuc

SEQ ID NO: 2911952 - RNA, 19 nt, Artificial Sequence
  Description of Artificial Sequence: Synthetic oligonucleotide
aggugguguggaagguacc

SEQ ID NO: 2911953 - RNA, 19 nt, Artificial Sequence
  Description of Artificial Sequence: Synthetic oligonucleotide
gcuucuaccuccaugguua

SEQ ID NO: 2911954 - RNA, 19 nt, Artificial Sequence
  Description of Artificial Sequence: Synthetic oligonucleotide
guugggccaagguggugug

SEQ ID NO: 2911955 - RNA, 19 nt, Artificial Sequence
  Description of Artificial Sequence: Synthetic oligonucleotide
uaguccgagcagcgcaccu

SEQ ID NO: 2911956 - RNA, 19 nt, Artificial Sequence
  Description of Artificial Sequence: Synthetic oligonucleotide
uucccugcccggcaggcuu

SEQ ID NO: 2911957 - RNA, 19 nt, Artificial Sequence
  Description of Artificial Sequence: Synthetic oligonucleotide
gucauaguccgagcagcgc

SEQ ID NO: 2911958 - RNA, 19 nt, Artificial Sequence
  Description of Artificial Sequence: Synthetic oligonucleotide
cagcgcaccuggaugggug

SEQ ID NO: 2911959 - RNA, 19 nt, Artificial Sequence
  Description of Artificial Sequence: Synthetic oligonucleotide
cacucugcugccccuaaga

SEQ ID NO: 2911960 - RNA, 19 nt, Artificial Sequence
  Description of Artificial Sequence: Synthetic oligonucleotide
cgcagaaaugcugaagagg

SEQ ID NO: 2911961 - RNA, 19 nt, Artificial Sequence
  Description of Artificial Sequence: Synthetic oligonucleotide
cuccugagcugaaacagua

SEQ ID NO: 2911962 - RNA, 19 nt, Artificial Sequence
  Description of Artificial Sequence: Synthetic oligonucleotide
agguccccaccgcagaaau

SEQ ID NO: 2911963 - RNA, 19 nt, Artificial Sequence
  Description of Artificial Sequence: Synthetic oligonucleotide
caccuuggcggaagaacuc

SEQ ID NO: 2911964 - RNA, 19 nt, Artificial Sequence
  Description of Artificial Sequence: Synthetic oligonucleotide
gaaccgagaagcgcuucca

SEQ ID NO: 2911965 - RNA, 19 nt, Artificial Sequence
  Description of Artificial Sequence: Synthetic oligonucleotide
guaagucaggugccacuuc

SEQ ID NO: 2911966 - RNA, 19 nt, Artificial Sequence
  Description of Artificial Sequence: Synthetic oligonucleotide
ucgguaagucaggugccac

SEQ ID NO: 2911967 - RNA, 19 nt, Artificial Sequence
  Description of Artificial Sequence: Synthetic oligonucleotide
aucgguaagucaggugcca

SEQ ID NO: 2911968 - RNA, 19 nt, Artificial Sequence
  Description of Artificial Sequence: Synthetic oligonucleotide
uucagccgggacugcuuga

SEQ ID NO: 2911969 - RNA, 19 nt, Artificial Sequence
  Description of Artificial Sequence: Synthetic oligonucleotide
caccgcagaaaugcugaag

SEQ ID NO: 2911970 - RNA, 19 nt, Artificial Sequence
  Description of Artificial Sequence: Synthetic oligonucleotide
cuugaaguugggccaaggu

SEQ ID NO: 2911971 - RNA, 19 nt, Artificial Sequence
  Description of Artificial Sequence: Synthetic oligonucleotide
ccacuucccaucaccuugg

SEQ ID NO: 2911972 - RNA, 19 nt, Artificial Sequence
  Description of Artificial Sequence: Synthetic oligonucleotide
gcggaagaacuccaagaac

SEQ ID NO: 2911973 - RNA, 19 nt, Artificial Sequence
  Description of Artificial Sequence: Synthetic oligonucleotide
cauucaaauucagccggga

SEQ ID NO: 2911974 - RNA, 19 nt, Artificial Sequence
  Description of Artificial Sequence: Synthetic oligonucleotide
caggcuucccggcuucaac

SEQ ID NO: 2911975 - RNA, 19 nt, Artificial Sequence
  Description of Artificial Sequence: Synthetic oligonucleotide
ucagccgggacugcuugaa

SEQ ID NO: 2911976 - RNA, 19 nt, Artificial Sequence
  Description of Artificial Sequence: Synthetic oligonucleotide
cugcccggcaggcuucccg

SEQ ID NO: 2911977 - RNA, 19 nt, Artificial Sequence
  Description of Artificial Sequence: Synthetic oligonucleotide
cuggacacaaucugaccua

SEQ ID NO: 2911978 - RNA, 19 nt, Artificial Sequence
  Description of Artificial Sequence: Synthetic oligonucleotide
aggaaccgagaagcgcuuc

SEQ ID NO: 2911979 - RNA, 19 nt, Artificial Sequence
  Description of Artificial Sequence: Synthetic oligonucleotide
uugggccaagguggugugg

SEQ ID NO: 2911980 - RNA, 19 nt, Artificial Sequence
  Description of Artificial Sequence: Synthetic oligonucleotide
aucugaccuagggagcacu

SEQ ID NO: 2911981 - RNA, 19 nt, Artificial Sequence
  Description of Artificial Sequence: Synthetic oligonucleotide
agggagcacucugcugccc

SEQ ID NO: 2911982 - RNA, 19 nt, Artificial Sequence
  Description of Artificial Sequence: Synthetic oligonucleotide
acuccugagcugaaacagu

SEQ ID NO: 2911983 - RNA, 19 nt, Artificial Sequence
  Description of Artificial Sequence: Synthetic oligonucleotide
aguccgagcagcgcaccug

SEQ ID NO: 2911984 - RNA, 19 nt, Artificial Sequence
  Description of Artificial Sequence: Synthetic oligonucleotide
agcgcaccuggaugggugu

SEQ ID NO: 2911985 - RNA, 19 nt, Artificial Sequence
  Description of Artificial Sequence: Synthetic oligonucleotide
ugcuugaaguugggccaag

SEQ ID NO: 2911986 - RNA, 19 nt, Artificial Sequence
  Description of Artificial Sequence: Synthetic oligonucleotide
ggaagguaccaaugagauc

SEQ ID NO: 2911987 - RNA, 19 nt, Artificial Sequence
  Description of Artificial Sequence: Synthetic oligonucleotide
uccccaccgcagaaaugcu

SEQ ID NO: 2911988 - RNA, 19 nt, Artificial Sequence
  Description of Artificial Sequence: Synthetic oligonucleotide
caaauucagccgggacugc

SEQ ID NO: 2911989 - RNA, 19 nt, Artificial Sequence
  Description of Artificial Sequence: Synthetic oligonucleotide
ccuccaugguuacuacccg

SEQ ID NO: 2911990 - RNA, 19 nt, Artificial Sequence
  Description of Artificial Sequence: Synthetic oligonucleotide
ccuuuaacuccugagcuga

SEQ ID NO: 2911991 - RNA, 19 nt, Artificial Sequence
  Description of Artificial Sequence: Synthetic oligonucleotide
gggagcacucugcugcccc

SEQ ID NO: 2911992 - RNA, 19 nt, Artificial Sequence
  Description of Artificial Sequence: Synthetic oligonucleotide
cagaaaugcugaagaggaa

SEQ ID NO: 2911993 - RNA, 19 nt, Artificial Sequence
  Description of Artificial Sequence: Synthetic oligonucleotide
ggugguguggaagguacca

SEQ ID NO: 2911994 - RNA, 19 nt, Artificial Sequence
  Description of Artificial Sequence: Synthetic oligonucleotide
cuuggcggaagaacuccaa

SEQ ID NO: 2911995 - RNA, 19 nt, Artificial Sequence
  Description of Artificial Sequence: Synthetic oligonucleotide
cccgguuguccuuuaacuc

SEQ ID NO: 2911996 - RNA, 19 nt, Artificial Sequence
  Description of Artificial Sequence: Synthetic oligonucleotide
uuacuacccgguuguccuu

SEQ ID NO: 2911997 - RNA, 19 nt, Artificial Sequence
  Description of Artificial Sequence: Synthetic oligonucleotide
ugccacuucccaucaccuu

SEQ ID NO: 2911998 - RNA, 19 nt, Artificial Sequence
  Description of Artificial Sequence: Synthetic oligonucleotide
agcagcgcaccuggauggg

SEQ ID NO: 2911999 - RNA, 19 nt, Artificial Sequence
  Description of Artificial Sequence: Synthetic oligonucleotide
uucuagcuucuaccuccau

SEQ ID NO: 2912000 - RNA, 19 nt, Artificial Sequence
  Description of Artificial Sequence: Synthetic oligonucleotide
gcuugaaguugggccaagg

SEQ ID NO: 2912001 - RNA, 19 nt, Artificial Sequence
  Description of Artificial Sequence: Synthetic oligonucleotide
cgggacugcuugaaguugg

SEQ ID NO: 2912002 - RNA, 19 nt, Artificial Sequence
  Description of Artificial Sequence: Synthetic oligonucleotide
aagguaccaaugagaucau

SEQ ID NO: 2912003 - RNA, 19 nt, Artificial Sequence
  Description of Artificial Sequence: Synthetic oligonucleotide
agguaccaaugagaucaug

SEQ ID NO: 2912004 - RNA, 19 nt, Artificial Sequence
  Description of Artificial Sequence: Synthetic oligonucleotide
ccgcagaaaugcugaagag

SEQ ID NO: 2912005 - RNA, 19 nt, Artificial Sequence
  Description of Artificial Sequence: Synthetic oligonucleotide
cauguaggguucagguugu

SEQ ID NO: 2912006 - RNA, 19 nt, Artificial Sequence
  Description of Artificial Sequence: Synthetic oligonucleotide
cggaucagauuuuccuagg

SEQ ID NO: 2912007 - RNA, 19 nt, Artificial Sequence
  Description of Artificial Sequence: Synthetic oligonucleotide
uucccggcuucaacaucaa

SEQ ID NO: 2912008 - RNA, 19 nt, Artificial Sequence
  Description of Artificial Sequence: Synthetic oligonucleotide
gaaguugggccaagguggu

SEQ ID NO: 2912009 - RNA, 19 nt, Artificial Sequence
  Description of Artificial Sequence: Synthetic oligonucleotide
ggguucagguuguucuuga

SEQ ID NO: 2912010 - RNA, 19 nt, Artificial Sequence
  Description of Artificial Sequence: Synthetic oligonucleotide
uacuacccgguuguccuuu

SEQ ID NO: 2912011 - RNA, 19 nt, Artificial Sequence
  Description of Artificial Sequence: Synthetic oligonucleotide
ggacacaaucugaccuagg

SEQ ID NO: 2912012 - RNA, 19 nt, Artificial Sequence
  Description of Artificial Sequence: Synthetic oligonucleotide
ggccaaggugguguggaag

SEQ ID NO: 2912013 - RNA, 19 nt, Artificial Sequence
  Description of Artificial Sequence: Synthetic oligonucleotide
augugacccgucacuguca

SEQ ID NO: 2912014 - RNA, 19 nt, Artificial Sequence
  Description of Artificial Sequence: Synthetic oligonucleotide
agcacucugcugccccuaa

SEQ ID NO: 2912015 - RNA, 19 nt, Artificial Sequence
  Description of Artificial Sequence: Synthetic oligonucleotide
caccuggaugggugugccc

SEQ ID NO: 2912016 - RNA, 19 nt, Artificial Sequence
  Description of Artificial Sequence: Synthetic oligonucleotide
uccgagcagcgcaccugga

SEQ ID NO: 2912017 - RNA, 19 nt, Artificial Sequence
  Description of Artificial Sequence: Synthetic oligonucleotide
ggguagagucaaagucugg

SEQ ID NO: 2912018 - RNA, 19 nt, Artificial Sequence
  Description of Artificial Sequence: Synthetic oligonucleotide
cccaccgcagaaaugcuga

SEQ ID NO: 2912019 - RNA, 19 nt, Artificial Sequence
  Description of Artificial Sequence: Synthetic oligonucleotide
gggacugcuugaaguuggg

SEQ ID NO: 2912020 - RNA, 19 nt, Artificial Sequence
  Description of Artificial Sequence: Synthetic oligonucleotide
cugccccuaagaagucguc

SEQ ID NO: 2912021 - RNA, 19 nt, Artificial Sequence
  Description of Artificial Sequence: Synthetic oligonucleotide
ccuagggagcacucugcug

SEQ ID NO: 2912022 - RNA, 19 nt, Artificial Sequence
  Description of Artificial Sequence: Synthetic oligonucleotide
ccuaggaaguccuucuugu

SEQ ID NO: 2912023 - RNA, 19 nt, Artificial Sequence
  Description of Artificial Sequence: Synthetic oligonucleotide
aagucuggcuggacacaau

SEQ ID NO: 2912024 - RNA, 19 nt, Artificial Sequence
  Description of Artificial Sequence: Synthetic oligonucleotide
gugcccagguccccaccgc

SEQ ID NO: 2912025 - RNA, 19 nt, Artificial Sequence
  Description of Artificial Sequence: Synthetic oligonucleotide
cagccgggacugcuugaag

SEQ ID NO: 2912026 - RNA, 19 nt, Artificial Sequence
  Description of Artificial Sequence: Synthetic oligonucleotide
cuucuugucuagguuucua

SEQ ID NO: 2912027 - RNA, 19 nt, Artificial Sequence
  Description of Artificial Sequence: Synthetic oligonucleotide
cgagcagcgcaccuggaug

SEQ ID NO: 2912028 - RNA, 19 nt, Artificial Sequence
  Description of Artificial Sequence: Synthetic oligonucleotide
ggacugcuugaaguugggc

SEQ ID NO: 2912029 - RNA, 19 nt, Artificial Sequence
  Description of Artificial Sequence: Synthetic oligonucleotide
cuccaagaacggaucagau

SEQ ID NO: 2912030 - RNA, 19 nt, Artificial Sequence
  Description of Artificial Sequence: Synthetic oligonucleotide
caggugccacuucccauca

SEQ ID NO: 2912031 - RNA, 19 nt, Artificial Sequence
  Description of Artificial Sequence: Synthetic oligonucleotide
gugugcccagguccccacc

SEQ ID NO: 2912032 - RNA, 19 nt, Artificial Sequence
  Description of Artificial Sequence: Synthetic oligonucleotide
gcuuccauguaggguucag

SEQ ID NO: 2912033 - RNA, 19 nt, Artificial Sequence
  Description of Artificial Sequence: Synthetic oligonucleotide
ucccugcccggcaggcuuc

SEQ ID NO: 2912034 - RNA, 19 nt, Artificial Sequence
  Description of Artificial Sequence: Synthetic oligonucleotide
acuacccgguuguccuuua

SEQ ID NO: 2912035 - RNA, 19 nt, Artificial Sequence
  Description of Artificial Sequence: Synthetic oligonucleotide
cugcugccccuaagaaguc

SEQ ID NO: 2912036 - RNA, 19 nt, Artificial Sequence
  Description of Artificial Sequence: Synthetic oligonucleotide
auuuuccuaggaaguccuu

SEQ ID NO: 2912037 - RNA, 19 nt, Artificial Sequence
  Description of Artificial Sequence: Synthetic oligonucleotide
ggaugggugugcccagguc

SEQ ID NO: 2912038 - RNA, 19 nt, Artificial Sequence
  Description of Artificial Sequence: Synthetic oligonucleotide
ccgagaagcgcuuccaugu

SEQ ID NO: 2912039 - RNA, 19 nt, Artificial Sequence
  Description of Artificial Sequence: Synthetic oligonucleotide
ugguuacuacccgguuguc

SEQ ID NO: 2912040 - RNA, 19 nt, Artificial Sequence
  Description of Artificial Sequence: Synthetic oligonucleotide
gugguguggaagguaccaa

SEQ ID NO: 2912041 - RNA, 19 nt, Artificial Sequence
  Description of Artificial Sequence: Synthetic oligonucleotide
gucaggugccacuucccau

SEQ ID NO: 2912042 - RNA, 19 nt, Artificial Sequence
  Description of Artificial Sequence: Synthetic oligonucleotide
ggguggauacauucaaauu

SEQ ID NO: 2912043 - RNA, 19 nt, Artificial Sequence
  Description of Artificial Sequence: Synthetic oligonucleotide
caaggugguguggaaggua

SEQ ID NO: 2912044 - RNA, 19 nt, Artificial Sequence
  Description of Artificial Sequence: Synthetic oligonucleotide
gucuggcuggacacaaucu

SEQ ID NO: 2912045 - RNA, 19 nt, Artificial Sequence
  Description of Artificial Sequence: Synthetic oligonucleotide
ggugugcccagguccccac

SEQ ID NO: 2912046 - RNA, 19 nt, Artificial Sequence
  Description of Artificial Sequence: Synthetic oligonucleotide
caagaacggaucagauuuu

SEQ ID NO: 2912047 - RNA, 19 nt, Artificial Sequence
  Description of Artificial Sequence: Synthetic oligonucleotide
caucaaggguagagucaaa

SEQ ID NO: 2912048 - RNA, 19 nt, Artificial Sequence
  Description of Artificial Sequence: Synthetic oligonucleotide
gguucccugcccggcaggc

SEQ ID NO: 2912049 - RNA, 19 nt, Artificial Sequence
  Description of Artificial Sequence: Synthetic oligonucleotide
ccccaccgcagaaaugcug

SEQ ID NO: 2912050 - RNA, 19 nt, Artificial Sequence
  Description of Artificial Sequence: Synthetic oligonucleotide
gcacucugcugccccuaag

SEQ ID NO: 2912051 - RNA, 19 nt, Artificial Sequence
  Description of Artificial Sequence: Synthetic oligonucleotide
gucuagguuucuagcuucu

SEQ ID NO: 2912052 - RNA, 19 nt, Artificial Sequence
  Description of Artificial Sequence: Synthetic oligonucleotide
ccugagcugaaacaguaau

SEQ ID NO: 2912053 - RNA, 19 nt, Artificial Sequence
  Description of Artificial Sequence: Synthetic oligonucleotide
cccaucaccuuggcggaag

SEQ ID NO: 2912054 - RNA, 19 nt, Artificial Sequence
  Description of Artificial Sequence: Synthetic oligonucleotide
gguuguccuuuaacuccug

SEQ ID NO: 2912055 - RNA, 19 nt, Artificial Sequence
  Description of Artificial Sequence: Synthetic oligonucleotide
gguaagucaggugccacuu

SEQ ID NO: 2912056 - RNA, 19 nt, Artificial Sequence
  Description of Artificial Sequence: Synthetic oligonucleotide
cugcuugaaguugggccaa

SEQ ID NO: 2912057 - RNA, 19 nt, Artificial Sequence
  Description of Artificial Sequence: Synthetic oligonucleotide
ucccaucaccuuggcggaa

SEQ ID NO: 2912058 - RNA, 19 nt, Artificial Sequence
  Description of Artificial Sequence: Synthetic oligonucleotide
cuucaacaucaaggguaga

SEQ ID NO: 2912059 - RNA, 19 nt, Artificial Sequence
  Description of Artificial Sequence: Synthetic oligonucleotide
gacccgucacugucauagu

SEQ ID NO: 2912060 - RNA, 19 nt, Artificial Sequence
  Description of Artificial Sequence: Synthetic oligonucleotide
gccccuaagaagucgucau

SEQ ID NO: 2912061 - RNA, 19 nt, Artificial Sequence
  Description of Artificial Sequence: Synthetic oligonucleotide
caucaccuuggcggaagaa

SEQ ID NO: 2912062 - RNA, 19 nt, Artificial Sequence
  Description of Artificial Sequence: Synthetic oligonucleotide
cuacccgguuguccuuuaa

SEQ ID NO: 2912063 - RNA, 19 nt, Artificial Sequence
  Description of Artificial Sequence: Synthetic oligonucleotide
ccgggacugcuugaaguug

SEQ ID NO: 2912064 - RNA, 19 nt, Artificial Sequence
  Description of Artificial Sequence: Synthetic oligonucleotide
cugaccuagggagcacucu

SEQ ID NO: 2912065 - RNA, 19 nt, Artificial Sequence
  Description of Artificial Sequence: Synthetic oligonucleotide
gagcacucugcugccccua

SEQ ID NO: 2912066 - RNA, 19 nt, Artificial Sequence
  Description of Artificial Sequence: Synthetic oligonucleotide
gaggaaccgagaagcgcuu

SEQ ID NO: 2912067 - RNA, 19 nt, Artificial Sequence
  Description of Artificial Sequence: Synthetic oligonucleotide
gcugccccuaagaagucgu

SEQ ID NO: 2912068 - RNA, 19 nt, Artificial Sequence
  Description of Artificial Sequence: Synthetic oligonucleotide
auguaggguucagguuguu

SEQ ID NO: 2912069 - RNA, 19 nt, Artificial Sequence
  Description of Artificial Sequence: Synthetic oligonucleotide
ggcuucccggcuucaacau

SEQ ID NO: 2912070 - RNA, 19 nt, Artificial Sequence
  Description of Artificial Sequence: Synthetic oligonucleotide
cagguccccaccgcagaaa

SEQ ID NO: 2912071 - RNA, 19 nt, Artificial Sequence
  Description of Artificial Sequence: Synthetic oligonucleotide
ggagcacucugcugccccu

SEQ ID NO: 2912072 - RNA, 19 nt, Artificial Sequence
  Description of Artificial Sequence: Synthetic oligonucleotide
gccgggacugcuugaaguu

SEQ ID NO: 2912073 - RNA, 19 nt, Artificial Sequence
  Description of Artificial Sequence: Synthetic oligonucleotide
gugacccgucacugucaua

SEQ ID NO: 2912074 - RNA, 19 nt, Artificial Sequence
  Description of Artificial Sequence: Synthetic oligonucleotide
ccaucaccuuggcggaaga

SEQ ID NO: 2912075 - RNA, 19 nt, Artificial Sequence
  Description of Artificial Sequence: Synthetic oligonucleotide
gggccaaggugguguggaa

SEQ ID NO: 2912076 - RNA, 19 nt, Artificial Sequence
  Description of Artificial Sequence: Synthetic oligonucleotide
gcccggcaggcuucccggc

SEQ ID NO: 2912077 - RNA, 19 nt, Artificial Sequence
  Description of Artificial Sequence: Synthetic oligonucleotide
gcgcuuccauguaggguuc

SEQ ID NO: 2912078 - RNA, 19 nt, Artificial Sequence
  Description of Artificial Sequence: Synthetic oligonucleotide
gcgcaccuggaugggugug

SEQ ID NO: 2912079 - RNA, 19 nt, Artificial Sequence
  Description of Artificial Sequence: Synthetic oligonucleotide
guucccugcccggcaggcu

SEQ ID NO: 2912080 - RNA, 19 nt, Artificial Sequence
  Description of Artificial Sequence: Synthetic oligonucleotide
ccagguccccaccgcagaa

SEQ ID NO: 2912081 - RNA, 19 nt, Artificial Sequence
  Description of Artificial Sequence: Synthetic oligonucleotide
ccaccgcagaaaugcugaa

SEQ ID NO: 2912082 - RNA, 19 nt, Artificial Sequence
  Description of Artificial Sequence: Synthetic oligonucleotide
cgguaagucaggugccacu

SEQ ID NO: 2912083 - RNA, 19 nt, Artificial Sequence
  Description of Artificial Sequence: Synthetic oligonucleotide
gcaggcuucccggcuucaa

SEQ ID NO: 2912084 - RNA, 19 nt, Artificial Sequence
  Description of Artificial Sequence: Synthetic oligonucleotide
cgagaagcgcuuccaugua

SEQ ID NO: 2912085 - RNA, 19 nt, Artificial Sequence
  Description of Artificial Sequence: Synthetic oligonucleotide
cgucacugucauaguccga

SEQ ID NO: 2912086 - RNA, 19 nt, Artificial Sequence
  Description of Artificial Sequence: Synthetic oligonucleotide
ccaugguuacuacccgguu

SEQ ID NO: 2912087 - RNA, 19 nt, Artificial Sequence
  Description of Artificial Sequence: Synthetic oligonucleotide
cccugcccggcaggcuucc

SEQ ID NO: 2912088 - RNA, 19 nt, Artificial Sequence
  Description of Artificial Sequence: Synthetic oligonucleotide
ccgagcagcgcaccuggau

SEQ ID NO: 2912089 - RNA, 19 nt, Artificial Sequence
  Description of Artificial Sequence: Synthetic oligonucleotide
gcagcgcaccuggaugggu

SEQ ID NO: 2912090 - RNA, 19 nt, Artificial Sequence
  Description of Artificial Sequence: Synthetic oligonucleotide
ccugcccggcaggcuuccc

SEQ ID NO: 2912091 - RNA, 19 nt, Artificial Sequence
  Description of Artificial Sequence: Synthetic oligonucleotide
cccggcaggcuucccggcu

SEQ ID NO: 2912092 - RNA, 19 nt, Artificial Sequence
  Description of Artificial Sequence: Synthetic oligonucleotide
ccggcaggcuucccggcuu

SEQ ID NO: 2912093 - RNA, 19 nt, Artificial Sequence
  Description of Artificial Sequence: Synthetic oligonucleotide
aaguuaauuaaaugggugg

SEQ ID NO: 2912094 - RNA, 19 nt, Artificial Sequence
  Description of Artificial Sequence: Synthetic oligonucleotide
guuuagaucucucaggagg

SEQ ID NO: 2912095 - RNA, 19 nt, Artificial Sequence
  Description of Artificial Sequence: Synthetic oligonucleotide
aaagcugccgcucgcaggc

SEQ ID NO: 2912096 - RNA, 19 nt, Artificial Sequence
  Description of Artificial Sequence: Synthetic oligonucleotide
aaugugguccugcagcagc

SEQ ID NO: 2912097 - RNA, 19 nt, Artificial Sequence
  Description of Artificial Sequence: Synthetic oligonucleotide
uuuagaucucucaggaggg

SEQ ID NO: 2912098 - RNA, 19 nt, Artificial Sequence
  Description of Artificial Sequence: Synthetic oligonucleotide
acaucuuuagaguuucucg

SEQ ID NO: 2912099 - RNA, 19 nt, Artificial Sequence
  Description of Artificial Sequence: Synthetic oligonucleotide
aguccucgaacauagaaag

SEQ ID NO: 2912100 - RNA, 19 nt, Artificial Sequence
  Description of Artificial Sequence: Synthetic oligonucleotide
aaaguuaauuaaaugggug

SEQ ID NO: 2912101 - RNA, 19 nt, Artificial Sequence
  Description of Artificial Sequence: Synthetic oligonucleotide
ugugaggcgguucaggucc

SEQ ID NO: 2912102 - RNA, 19 nt, Artificial Sequence
  Description of Artificial Sequence: Synthetic oligonucleotide
uguagcggccugaagaagg

SEQ ID NO: 2912103 - RNA, 19 nt, Artificial Sequence
  Description of Artificial Sequence: Synthetic oligonucleotide
uuccccagcacauagaaga

SEQ ID NO: 2912104 - RNA, 19 nt, Artificial Sequence
  Description of Artificial Sequence: Synthetic oligonucleotide
augucugggaucuugcugg

SEQ ID NO: 2912105 - RNA, 19 nt, Artificial Sequence
  Description of Artificial Sequence: Synthetic oligonucleotide
cuuguuuagaucucucagg

SEQ ID NO: 2912106 - RNA, 19 nt, Artificial Sequence
  Description of Artificial Sequence: Synthetic oligonucleotide
uuguuuagaucucucagga

SEQ ID NO: 2912107 - RNA, 19 nt, Artificial Sequence
  Description of Artificial Sequence: Synthetic oligonucleotide
aaaucgcuuggcuucauug

SEQ ID NO: 2912108 - RNA, 19 nt, Artificial Sequence
  Description of Artificial Sequence: Synthetic oligonucleotide
uagaguuucucgaagaaau

SEQ ID NO: 2912109 - RNA, 19 nt, Artificial Sequence
  Description of Artificial Sequence: Synthetic oligonucleotide
auuacucucccugugauuc

SEQ ID NO: 2912110 - RNA, 19 nt, Artificial Sequence
  Description of Artificial Sequence: Synthetic oligonucleotide
cauguuauuacucucccug

SEQ ID NO: 2912111 - RNA, 19 nt, Artificial Sequence
  Description of Artificial Sequence: Synthetic oligonucleotide
ugaagaaggagaagagucc

SEQ ID NO: 2912112 - RNA, 19 nt, Artificial Sequence
  Description of Artificial Sequence: Synthetic oligonucleotide
uuaauuaaaugggugggcc

SEQ ID NO: 2912113 - RNA, 19 nt, Artificial Sequence
  Description of Artificial Sequence: Synthetic oligonucleotide
gaacauagaaagcugccgc

SEQ ID NO: 2912114 - RNA, 19 nt, Artificial Sequence
  Description of Artificial Sequence: Synthetic oligonucleotide
gaagaaaucgcuuggcuuc

SEQ ID NO: 2912115 - RNA, 19 nt, Artificial Sequence
  Description of Artificial Sequence: Synthetic oligonucleotide
aguuaauuaaauggguggg

SEQ ID NO: 2912116 - RNA, 19 nt, Artificial Sequence
  Description of Artificial Sequence: Synthetic oligonucleotide
aaaaguuaauuaaaugggu

SEQ ID NO: 2912117 - RNA, 19 nt, Artificial Sequence
  Description of Artificial Sequence: Synthetic oligonucleotide
ugagguugugcucugggag

SEQ ID NO: 2912118 - RNA, 19 nt, Artificial Sequence
  Description of Artificial Sequence: Synthetic oligonucleotide
cugaagaaggagaagaguc

SEQ ID NO: 2912119 - RNA, 19 nt, Artificial Sequence
  Description of Artificial Sequence: Synthetic oligonucleotide
ucuuuagaguuucucgaag

SEQ ID NO: 2912120 - RNA, 19 nt, Artificial Sequence
  Description of Artificial Sequence: Synthetic oligonucleotide
aguacaagggagcaggcug

SEQ ID NO: 2912121 - RNA, 19 nt, Artificial Sequence
  Description of Artificial Sequence: Synthetic oligonucleotide
gaguuucucgaagaaaucg

SEQ ID NO: 2912122 - RNA, 19 nt, Artificial Sequence
  Description of Artificial Sequence: Synthetic oligonucleotide
agcacauagaagauguggc

SEQ ID NO: 2912123 - RNA, 19 nt, Artificial Sequence
  Description of Artificial Sequence: Synthetic oligonucleotide
ucucgaagaaaucgcuugg

SEQ ID NO: 2912124 - RNA, 19 nt, Artificial Sequence
  Description of Artificial Sequence: Synthetic oligonucleotide
aguucuggugcaucugugc

SEQ ID NO: 2912125 - RNA, 19 nt, Artificial Sequence
  Description of Artificial Sequence: Synthetic oligonucleotide
uucucgaagaaaucgcuug

SEQ ID NO: 2912126 - RNA, 19 nt, Artificial Sequence
  Description of Artificial Sequence: Synthetic oligonucleotide
aaaugggugggccaucugu

SEQ ID NO: 2912127 - RNA, 19 nt, Artificial Sequence
  Description of Artificial Sequence: Synthetic oligonucleotide
gaagaguccucgaacauag

SEQ ID NO: 2912128 - RNA, 19 nt, Artificial Sequence
  Description of Artificial Sequence: Synthetic oligonucleotide
aggagaagaguccucgaac

SEQ ID NO: 2912129 - RNA, 19 nt, Artificial Sequence
  Description of Artificial Sequence: Synthetic oligonucleotide
aguuucucgaagaaaucgc

SEQ ID NO: 2912130 - RNA, 19 nt, Artificial Sequence
  Description of Artificial Sequence: Synthetic oligonucleotide
aacauagaaagcugccgcu

SEQ ID NO: 2912131 - RNA, 19 nt, Artificial Sequence
  Description of Artificial Sequence: Synthetic oligonucleotide
uguuauuacucucccugug

SEQ ID NO: 2912132 - RNA, 19 nt, Artificial Sequence
  Description of Artificial Sequence: Synthetic oligonucleotide
auccauggcauucccacac

SEQ ID NO: 2912133 - RNA, 19 nt, Artificial Sequence
  Description of Artificial Sequence: Synthetic oligonucleotide
ucugcauucgacaucuuua

SEQ ID NO: 2912134 - RNA, 19 nt, Artificial Sequence
  Description of Artificial Sequence: Synthetic oligonucleotide
cuuggcuucauuguagcgg

SEQ ID NO: 2912135 - RNA, 19 nt, Artificial Sequence
  Description of Artificial Sequence: Synthetic oligonucleotide
uccucgaacauagaaagcu

SEQ ID NO: 2912136 - RNA, 19 nt, Artificial Sequence
  Description of Artificial Sequence: Synthetic oligonucleotide
ucuguccacguaaugaggu

SEQ ID NO: 2912137 - RNA, 19 nt, Artificial Sequence
  Description of Artificial Sequence: Synthetic oligonucleotide
ucgaacauagaaagcugcc

SEQ ID NO: 2912138 - RNA, 19 nt, Artificial Sequence
  Description of Artificial Sequence: Synthetic oligonucleotide
cucgaacauagaaagcugc

SEQ ID NO: 2912139 - RNA, 19 nt, Artificial Sequence
  Description of Artificial Sequence: Synthetic oligonucleotide
agaaggagaagaguccucg

SEQ ID NO: 2912140 - RNA, 19 nt, Artificial Sequence
  Description of Artificial Sequence: Synthetic oligonucleotide
aaucgcuuggcuucauugu

SEQ ID NO: 2912141 - RNA, 19 nt, Artificial Sequence
  Description of Artificial Sequence: Synthetic oligonucleotide
auagaaagcugccgcucgc

SEQ ID NO: 2912142 - RNA, 19 nt, Artificial Sequence
  Description of Artificial Sequence: Synthetic oligonucleotide
uuggcuucauuguagcggc

SEQ ID NO: 2912143 - RNA, 19 nt, Artificial Sequence
  Description of Artificial Sequence: Synthetic oligonucleotide
uggcccagcaguacaaggg

SEQ ID NO: 2912144 - RNA, 19 nt, Artificial Sequence
  Description of Artificial Sequence: Synthetic oligonucleotide
uaauuaaaugggugggcca

SEQ ID NO: 2912145 - RNA, 19 nt, Artificial Sequence
  Description of Artificial Sequence: Synthetic oligonucleotide
gaugaccacagcugcacag

SEQ ID NO: 2912146 - RNA, 19 nt, Artificial Sequence
  Description of Artificial Sequence: Synthetic oligonucleotide
gcauucgacaucuuuagag

SEQ ID NO: 2912147 - RNA, 19 nt, Artificial Sequence
  Description of Artificial Sequence: Synthetic oligonucleotide
cugugagaaguucuggugc

SEQ ID NO: 2912148 - RNA, 19 nt, Artificial Sequence
  Description of Artificial Sequence: Synthetic oligonucleotide
caucuguccacguaaugag

SEQ ID NO: 2912149 - RNA, 19 nt, Artificial Sequence
  Description of Artificial Sequence: Synthetic oligonucleotide
cauagaaagcugccgcucg

SEQ ID NO: 2912150 - RNA, 19 nt, Artificial Sequence
  Description of Artificial Sequence: Synthetic oligonucleotide
gagguugugcucugggagg

SEQ ID NO: 2912151 - RNA, 19 nt, Artificial Sequence
  Description of Artificial Sequence: Synthetic oligonucleotide
aauuaaaugggugggccau

SEQ ID NO: 2912152 - RNA, 19 nt, Artificial Sequence
  Description of Artificial Sequence: Synthetic oligonucleotide
cauuguagcggccugaaga

SEQ ID NO: 2912153 - RNA, 19 nt, Artificial Sequence
  Description of Artificial Sequence: Synthetic oligonucleotide
guucuggugcaucugugcg

SEQ ID NO: 2912154 - RNA, 19 nt, Artificial Sequence
  Description of Artificial Sequence: Synthetic oligonucleotide
uagaagauguggcccagca

SEQ ID NO: 2912155 - RNA, 19 nt, Artificial Sequence
  Description of Artificial Sequence: Synthetic oligonucleotide
caucugugcggccucaugg

SEQ ID NO: 2912156 - RNA, 19 nt, Artificial Sequence
  Description of Artificial Sequence: Synthetic oligonucleotide
uugcuggccagcugcaugg

SEQ ID NO: 2912157 - RNA, 19 nt, Artificial Sequence
  Description of Artificial Sequence: Synthetic oligonucleotide
ugugagaaguucuggugca

SEQ ID NO: 2912158 - RNA, 19 nt, Artificial Sequence
  Description of Artificial Sequence: Synthetic oligonucleotide
gaagauguggcccagcagu

SEQ ID NO: 2912159 - RNA, 19 nt, Artificial Sequence
  Description of Artificial Sequence: Synthetic oligonucleotide
accaccauguuauuacucu

SEQ ID NO: 2912160 - RNA, 19 nt, Artificial Sequence
  Description of Artificial Sequence: Synthetic oligonucleotide
uuauuacucucccugugau

SEQ ID NO: 2912161 - RNA, 19 nt, Artificial Sequence
  Description of Artificial Sequence: Synthetic oligonucleotide
aagggagcaggcugugagg

SEQ ID NO: 2912162 - RNA, 19 nt, Artificial Sequence
  Description of Artificial Sequence: Synthetic oligonucleotide
uguuuagaucucucaggag

SEQ ID NO: 2912163 - RNA, 19 nt, Artificial Sequence
  Description of Artificial Sequence: Synthetic oligonucleotide
gaggcugcaggccucaaug

SEQ ID NO: 2912164 - RNA, 19 nt, Artificial Sequence
  Description of Artificial Sequence: Synthetic oligonucleotide
caccauguuauuacucucc

SEQ ID NO: 2912165 - RNA, 19 nt, Artificial Sequence
  Description of Artificial Sequence: Synthetic oligonucleotide
aaugggugggccaucuguc

SEQ ID NO: 2912166 - RNA, 19 nt, Artificial Sequence
  Description of Artificial Sequence: Synthetic oligonucleotide
guuaauuaaaugggugggc

SEQ ID NO: 2912167 - RNA, 19 nt, Artificial Sequence
  Description of Artificial Sequence: Synthetic oligonucleotide
cacauagaagauguggccc

SEQ ID NO: 2912168 - RNA, 19 nt, Artificial Sequence
  Description of Artificial Sequence: Synthetic oligonucleotide
gaaagcugccgcucgcagg

SEQ ID NO: 2912169 - RNA, 19 nt, Artificial Sequence
  Description of Artificial Sequence: Synthetic oligonucleotide
ucgaagaaaucgcuuggcu

SEQ ID NO: 2912170 - RNA, 19 nt, Artificial Sequence
  Description of Artificial Sequence: Synthetic oligonucleotide
ucaaugugguccugcagca

SEQ ID NO: 2912171 - RNA, 19 nt, Artificial Sequence
  Description of Artificial Sequence: Synthetic oligonucleotide
accacagcugcacagacau

SEQ ID NO: 2912172 - RNA, 19 nt, Artificial Sequence
  Description of Artificial Sequence: Synthetic oligonucleotide
uucuggugcaucugugcgg

SEQ ID NO: 2912173 - RNA, 19 nt, Artificial Sequence
  Description of Artificial Sequence: Synthetic oligonucleotide
cugcauucgacaucuuuag

SEQ ID NO: 2912174 - RNA, 19 nt, Artificial Sequence
  Description of Artificial Sequence: Synthetic oligonucleotide
aaggagaagaguccucgaa

SEQ ID NO: 2912175 - RNA, 19 nt, Artificial Sequence
  Description of Artificial Sequence: Synthetic oligonucleotide
agggcugaugaccacagcu

SEQ ID NO: 2912176 - RNA, 19 nt, Artificial Sequence
  Description of Artificial Sequence: Synthetic oligonucleotide
cagcacauagaagaugugg

SEQ ID NO: 2912177 - RNA, 19 nt, Artificial Sequence
  Description of Artificial Sequence: Synthetic oligonucleotide
caucuuuagaguuucucga

SEQ ID NO: 2912178 - RNA, 19 nt, Artificial Sequence
  Description of Artificial Sequence: Synthetic oligonucleotide
auuguagcggccugaagaa

SEQ ID NO: 2912179 - RNA, 19 nt, Artificial Sequence
  Description of Artificial Sequence: Synthetic oligonucleotide
acagacaugucugggaucu

SEQ ID NO: 2912180 - RNA, 19 nt, Artificial Sequence
  Description of Artificial Sequence: Synthetic oligonucleotide
agaguccucgaacauagaa

SEQ ID NO: 2912181 - RNA, 19 nt, Artificial Sequence
  Description of Artificial Sequence: Synthetic oligonucleotide
augggugggccaucugucc

SEQ ID NO: 2912182 - RNA, 19 nt, Artificial Sequence
  Description of Artificial Sequence: Synthetic oligonucleotide
auggcauucccacacgccu

SEQ ID NO: 2912183 - RNA, 19 nt, Artificial Sequence
  Description of Artificial Sequence: Synthetic oligonucleotide
ugcacagacaugucuggga

SEQ ID NO: 2912184 - RNA, 19 nt, Artificial Sequence
  Description of Artificial Sequence: Synthetic oligonucleotide
guuauuacucucccuguga

SEQ ID NO: 2912185 - RNA, 19 nt, Artificial Sequence
  Description of Artificial Sequence: Synthetic oligonucleotide
caagggagcaggcugugag

SEQ ID NO: 2912186 - RNA, 19 nt, Artificial Sequence
  Description of Artificial Sequence: Synthetic oligonucleotide
aucugugcggccucauggg

SEQ ID NO: 2912187 - RNA, 19 nt, Artificial Sequence
  Description of Artificial Sequence: Synthetic oligonucleotide
uccucugcauucgacaucu

SEQ ID NO: 2912188 - RNA, 19 nt, Artificial Sequence
  Description of Artificial Sequence: Synthetic oligonucleotide
ugcugugagaaguucuggu

SEQ ID NO: 2912189 - RNA, 19 nt, Artificial Sequence
  Description of Artificial Sequence: Synthetic oligonucleotide
uguccacguaaugagguug

SEQ ID NO: 2912190 - RNA, 19 nt, Artificial Sequence
  Description of Artificial Sequence: Synthetic oligonucleotide
ucuggugcaucugugcggc

SEQ ID NO: 2912191 - RNA, 19 nt, Artificial Sequence
  Description of Artificial Sequence: Synthetic oligonucleotide
ugcauggcaggcaccacca

SEQ ID NO: 2912192 - RNA, 19 nt, Artificial Sequence
  Description of Artificial Sequence: Synthetic oligonucleotide
uuagaguuucucgaagaaa

SEQ ID NO: 2912193 - RNA, 19 nt, Artificial Sequence
  Description of Artificial Sequence: Synthetic oligonucleotide
acauagaaagcugccgcuc

SEQ ID NO: 2912194 - RNA, 19 nt, Artificial Sequence
  Description of Artificial Sequence: Synthetic oligonucleotide
gauuccccagcacauagaa

SEQ ID NO: 2912195 - RNA, 19 nt, Artificial Sequence
  Description of Artificial Sequence: Synthetic oligonucleotide
uccauggcauucccacacg

SEQ ID NO: 2912196 - RNA, 19 nt, Artificial Sequence
  Description of Artificial Sequence: Synthetic oligonucleotide
acguaaugagguugugcuc

SEQ ID NO: 2912197 - RNA, 19 nt, Artificial Sequence
  Description of Artificial Sequence: Synthetic oligonucleotide
auguuauuacucucccugu

SEQ ID NO: 2912198 - RNA, 19 nt, Artificial Sequence
  Description of Artificial Sequence: Synthetic oligonucleotide
agaagauguggcccagcag

SEQ ID NO: 2912199 - RNA, 19 nt, Artificial Sequence
  Description of Artificial Sequence: Synthetic oligonucleotide
caugucugggaucuugcug

SEQ ID NO: 2912200 - RNA, 19 nt, Artificial Sequence
  Description of Artificial Sequence: Synthetic oligonucleotide
aagaaggagaagaguccuc

SEQ ID NO: 2912201 - RNA, 19 nt, Artificial Sequence
  Description of Artificial Sequence: Synthetic oligonucleotide
cucaggagggcugaugacc

SEQ ID NO: 2912202 - RNA, 19 nt, Artificial Sequence
  Description of Artificial Sequence: Synthetic oligonucleotide
aucuuuagaguuucucgaa

SEQ ID NO: 2912203 - RNA, 19 nt, Artificial Sequence
  Description of Artificial Sequence: Synthetic oligonucleotide
uucgacaucuuuagaguuu

SEQ ID NO: 2912204 - RNA, 19 nt, Artificial Sequence
  Description of Artificial Sequence: Synthetic oligonucleotide
auucgacaucuuuagaguu

SEQ ID NO: 2912205 - RNA, 19 nt, Artificial Sequence
  Description of Artificial Sequence: Synthetic oligonucleotide
ucaugggcauccauggcau

SEQ ID NO: 2912206 - RNA, 19 nt, Artificial Sequence
  Description of Artificial Sequence: Synthetic oligonucleotide
uuucucgaagaaaucgcuu

SEQ ID NO: 2912207 - RNA, 19 nt, Artificial Sequence
  Description of Artificial Sequence: Synthetic oligonucleotide
uuaaaugggugggccaucu

SEQ ID NO: 2912208 - RNA, 19 nt, Artificial Sequence
  Description of Artificial Sequence: Synthetic oligonucleotide
uucagguccucugcauucg

SEQ ID NO: 2912209 - RNA, 19 nt, Artificial Sequence
  Description of Artificial Sequence: Synthetic oligonucleotide
gacaucuuuagaguuucuc

SEQ ID NO: 2912210 - RNA, 19 nt, Artificial Sequence
  Description of Artificial Sequence: Synthetic oligonucleotide
agaaagcugccgcucgcag

SEQ ID NO: 2912211 - RNA, 19 nt, Artificial Sequence
  Description of Artificial Sequence: Synthetic oligonucleotide
ucugugcggccucaugggc

SEQ ID NO: 2912212 - RNA, 19 nt, Artificial Sequence
  Description of Artificial Sequence: Synthetic oligonucleotide
agguugugcucugggaggc

SEQ ID NO: 2912213 - RNA, 19 nt, Artificial Sequence
  Description of Artificial Sequence: Synthetic oligonucleotide
gauguggcccagcaguaca

SEQ ID NO: 2912214 - RNA, 19 nt, Artificial Sequence
  Description of Artificial Sequence: Synthetic oligonucleotide
ugcauucgacaucuuuaga

SEQ ID NO: 2912215 - RNA, 19 nt, Artificial Sequence
  Description of Artificial Sequence: Synthetic oligonucleotide
auagaagauguggcccagc

SEQ ID NO: 2912216 - RNA, 19 nt, Artificial Sequence
  Description of Artificial Sequence: Synthetic oligonucleotide
agaguuucucgaagaaauc

SEQ ID NO: 2912217 - RNA, 19 nt, Artificial Sequence
  Description of Artificial Sequence: Synthetic oligonucleotide
ucauuguagcggccugaag

SEQ ID NO: 2912218 - RNA, 19 nt, Artificial Sequence
  Description of Artificial Sequence: Synthetic oligonucleotide
ucgacaucuuuagaguuuc

SEQ ID NO: 2912219 - RNA, 19 nt, Artificial Sequence
  Description of Artificial Sequence: Synthetic oligonucleotide
ggcaccaccauguuauuac

SEQ ID NO: 2912220 - RNA, 19 nt, Artificial Sequence
  Description of Artificial Sequence: Synthetic oligonucleotide
aagaaaucgcuuggcuuca

SEQ ID NO: 2912221 - RNA, 19 nt, Artificial Sequence
  Description of Artificial Sequence: Synthetic oligonucleotide
ccuuguuuagaucucucag

SEQ ID NO: 2912222 - RNA, 19 nt, Artificial Sequence
  Description of Artificial Sequence: Synthetic oligonucleotide
augggcauccauggcauuc

SEQ ID NO: 2912223 - RNA, 19 nt, Artificial Sequence
  Description of Artificial Sequence: Synthetic oligonucleotide
cucaugggcauccauggca

SEQ ID NO: 2912224 - RNA, 19 nt, Artificial Sequence
  Description of Artificial Sequence: Synthetic oligonucleotide
ggagaagaguccucgaaca

SEQ ID NO: 2912225 - RNA, 19 nt, Artificial Sequence
  Description of Artificial Sequence: Synthetic oligonucleotide
ugauuccccagcacauaga

SEQ ID NO: 2912226 - RNA, 19 nt, Artificial Sequence
  Description of Artificial Sequence: Synthetic oligonucleotide
cacguaaugagguugugcu

SEQ ID NO: 2912227 - RNA, 19 nt, Artificial Sequence
  Description of Artificial Sequence: Synthetic oligonucleotide
ugaccacagcugcacagac

SEQ ID NO: 2912228 - RNA, 19 nt, Artificial Sequence
  Description of Artificial Sequence: Synthetic oligonucleotide
cucccugugauuccccagc

SEQ ID NO: 2912229 - RNA, 19 nt, Artificial Sequence
  Description of Artificial Sequence: Synthetic oligonucleotide
gacaugucugggaucuugc

SEQ ID NO: 2912230 - RNA, 19 nt, Artificial Sequence
  Description of Artificial Sequence: Synthetic oligonucleotide
auuaaaugggugggccauc

SEQ ID NO: 2912231 - RNA, 19 nt, Artificial Sequence
  Description of Artificial Sequence: Synthetic oligonucleotide
agguccucugcauucgaca

SEQ ID NO: 2912232 - RNA, 19 nt, Artificial Sequence
  Description of Artificial Sequence: Synthetic oligonucleotide
gcacauagaagauguggcc

SEQ ID NO: 2912233 - RNA, 19 nt, Artificial Sequence
  Description of Artificial Sequence: Synthetic oligonucleotide
ugaugaccacagcugcaca

SEQ ID NO: 2912234 - RNA, 19 nt, Artificial Sequence
  Description of Artificial Sequence: Synthetic oligonucleotide
ucccacacgccuuguuuag

SEQ ID NO: 2912235 - RNA, 19 nt, Artificial Sequence
  Description of Artificial Sequence: Synthetic oligonucleotide
uuagaucucucaggagggc

SEQ ID NO: 2912236 - RNA, 19 nt, Artificial Sequence
  Description of Artificial Sequence: Synthetic oligonucleotide
cugcauggcaggcaccacc

SEQ ID NO: 2912237 - RNA, 19 nt, Artificial Sequence
  Description of Artificial Sequence: Synthetic oligonucleotide
gccucaugggcauccaugg

SEQ ID NO: 2912238 - RNA, 19 nt, Artificial Sequence
  Description of Artificial Sequence: Synthetic oligonucleotide
guggcccagcaguacaagg

SEQ ID NO: 2912239 - RNA, 19 nt, Artificial Sequence
  Description of Artificial Sequence: Synthetic oligonucleotide
cucgaagaaaucgcuuggc

SEQ ID NO: 2912240 - RNA, 19 nt, Artificial Sequence
  Description of Artificial Sequence: Synthetic oligonucleotide
guucagguccucugcauuc

SEQ ID NO: 2912241 - RNA, 19 nt, Artificial Sequence
  Description of Artificial Sequence: Synthetic oligonucleotide
uuacucucccugugauucc

SEQ ID NO: 2912242 - RNA, 19 nt, Artificial Sequence
  Description of Artificial Sequence: Synthetic oligonucleotide
cauggcaggcaccaccaug

SEQ ID NO: 2912243 - RNA, 19 nt, Artificial Sequence
  Description of Artificial Sequence: Synthetic oligonucleotide
cuugcuggccagcugcaug

SEQ ID NO: 2912244 - RNA, 19 nt, Artificial Sequence
  Description of Artificial Sequence: Synthetic oligonucleotide
cugaugaccacagcugcac

SEQ ID NO: 2912245 - RNA, 19 nt, Artificial Sequence
  Description of Artificial Sequence: Synthetic oligonucleotide
agcugcacagacaugucug

SEQ ID NO: 2912246 - RNA, 19 nt, Artificial Sequence
  Description of Artificial Sequence: Synthetic oligonucleotide
uagaucucucaggagggcu

SEQ ID NO: 2912247 - RNA, 19 nt, Artificial Sequence
  Description of Artificial Sequence: Synthetic oligonucleotide
aucuguccacguaaugagg

SEQ ID NO: 2912248 - RNA, 19 nt, Artificial Sequence
  Description of Artificial Sequence: Synthetic oligonucleotide
gcauccauggcauucccac

SEQ ID NO: 2912249 - RNA, 19 nt, Artificial Sequence
  Description of Artificial Sequence: Synthetic oligonucleotide
agacaugucugggaucuug

SEQ ID NO: 2912250 - RNA, 19 nt, Artificial Sequence
  Description of Artificial Sequence: Synthetic oligonucleotide
uaaaugggugggccaucug

SEQ ID NO: 2912251 - RNA, 19 nt, Artificial Sequence
  Description of Artificial Sequence: Synthetic oligonucleotide
uggccagcugcauggcagg

SEQ ID NO: 2912252 - RNA, 19 nt, Artificial Sequence
  Description of Artificial Sequence: Synthetic oligonucleotide
ugggugggccaucugucca

SEQ ID NO: 2912253 - RNA, 19 nt, Artificial Sequence
  Description of Artificial Sequence: Synthetic oligonucleotide
auucccacacgccuuguuu

SEQ ID NO: 2912254 - RNA, 19 nt, Artificial Sequence
  Description of Artificial Sequence: Synthetic oligonucleotide
gaagaaggagaagaguccu

SEQ ID NO: 2912255 - RNA, 19 nt, Artificial Sequence
  Description of Artificial Sequence: Synthetic oligonucleotide
gaaguucuggugcaucugu

SEQ ID NO: 2912256 - RNA, 19 nt, Artificial Sequence
  Description of Artificial Sequence: Synthetic oligonucleotide
aaguucuggugcaucugug

SEQ ID NO: 2912257 - RNA, 19 nt, Artificial Sequence
  Description of Artificial Sequence: Synthetic oligonucleotide
uucccacacgccuuguuua

SEQ ID NO: 2912258 - RNA, 19 nt, Artificial Sequence
  Description of Artificial Sequence: Synthetic oligonucleotide
gaguccucgaacauagaaa

SEQ ID NO: 2912259 - RNA, 19 nt, Artificial Sequence
  Description of Artificial Sequence: Synthetic oligonucleotide
agauguggcccagcaguac

SEQ ID NO: 2912260 - RNA, 19 nt, Artificial Sequence
  Description of Artificial Sequence: Synthetic oligonucleotide
cauucgacaucuuuagagu

SEQ ID NO: 2912261 - RNA, 19 nt, Artificial Sequence
  Description of Artificial Sequence: Synthetic oligonucleotide
guaaugagguugugcucug

SEQ ID NO: 2912262 - RNA, 19 nt, Artificial Sequence
  Description of Artificial Sequence: Synthetic oligonucleotide
cucucaggagggcugauga

SEQ ID NO: 2912263 - RNA, 19 nt, Artificial Sequence
  Description of Artificial Sequence: Synthetic oligonucleotide
auggcaggcaccaccaugu

SEQ ID NO: 2912264 - RNA, 19 nt, Artificial Sequence
  Description of Artificial Sequence: Synthetic oligonucleotide
acaugucugggaucuugcu

SEQ ID NO: 2912265 - RNA, 19 nt, Artificial Sequence
  Description of Artificial Sequence: Synthetic oligonucleotide
gagaaguucuggugcaucu

SEQ ID NO: 2912266 - RNA, 19 nt, Artificial Sequence
  Description of Artificial Sequence: Synthetic oligonucleotide
gaaggagaagaguccucga

SEQ ID NO: 2912267 - RNA, 19 nt, Artificial Sequence
  Description of Artificial Sequence: Synthetic oligonucleotide
ugagaaguucuggugcauc

SEQ ID NO: 2912268 - RNA, 19 nt, Artificial Sequence
  Description of Artificial Sequence: Synthetic oligonucleotide
uauuacucucccugugauu

SEQ ID NO: 2912269 - RNA, 19 nt, Artificial Sequence
  Description of Artificial Sequence: Synthetic oligonucleotide
aucgcuuggcuucauugua

SEQ ID NO: 2912270 - RNA, 19 nt, Artificial Sequence
  Description of Artificial Sequence: Synthetic oligonucleotide
ggcugaugaccacagcugc

SEQ ID NO: 2912271 - RNA, 19 nt, Artificial Sequence
  Description of Artificial Sequence: Synthetic oligonucleotide
ugggcauccauggcauucc

SEQ ID NO: 2912272 - RNA, 19 nt, Artificial Sequence
  Description of Artificial Sequence: Synthetic oligonucleotide
uugugcucugggaggcugc

SEQ ID NO: 2912273 - RNA, 19 nt, Artificial Sequence
  Description of Artificial Sequence: Synthetic oligonucleotide
gcugcacagacaugucugg

SEQ ID NO: 2912274 - RNA, 19 nt, Artificial Sequence
  Description of Artificial Sequence: Synthetic oligonucleotide
ucccugugauuccccagca

SEQ ID NO: 2912275 - RNA, 19 nt, Artificial Sequence
  Description of Artificial Sequence: Synthetic oligonucleotide
uacucucccugugauuccc

SEQ ID NO: 2912276 - RNA, 19 nt, Artificial Sequence
  Description of Artificial Sequence: Synthetic oligonucleotide
gcugcaggccucaaugugg

SEQ ID NO: 2912277 - RNA, 19 nt, Artificial Sequence
  Description of Artificial Sequence: Synthetic oligonucleotide
uucauuguagcggccugaa

SEQ ID NO: 2912278 - RNA, 19 nt, Artificial Sequence
  Description of Artificial Sequence: Synthetic oligonucleotide
ggagcaggcugugaggcgg

SEQ ID NO: 2912279 - RNA, 19 nt, Artificial Sequence
  Description of Artificial Sequence: Synthetic oligonucleotide
uagaaagcugccgcucgca

SEQ ID NO: 2912280 - RNA, 19 nt, Artificial Sequence
  Description of Artificial Sequence: Synthetic oligonucleotide
ucagguccucugcauucga

SEQ ID NO: 2912281 - RNA, 19 nt, Artificial Sequence
  Description of Artificial Sequence: Synthetic oligonucleotide
agaagaguccucgaacaua

SEQ ID NO: 2912282 - RNA, 19 nt, Artificial Sequence
  Description of Artificial Sequence: Synthetic oligonucleotide
ugucugggaucuugcuggc

SEQ ID NO: 2912283 - RNA, 19 nt, Artificial Sequence
  Description of Artificial Sequence: Synthetic oligonucleotide
agaucucucaggagggcug

SEQ ID NO: 2912284 - RNA, 19 nt, Artificial Sequence
  Description of Artificial Sequence: Synthetic oligonucleotide
uuguagcggccugaagaag

SEQ ID NO: 2912285 - RNA, 19 nt, Artificial Sequence
  Description of Artificial Sequence: Synthetic oligonucleotide
caccaccauguuauuacuc

SEQ ID NO: 2912286 - RNA, 19 nt, Artificial Sequence
  Description of Artificial Sequence: Synthetic oligonucleotide
ugugcggccucaugggcau

SEQ ID NO: 2912287 - RNA, 19 nt, Artificial Sequence
  Description of Artificial Sequence: Synthetic oligonucleotide
uguggcccagcaguacaag

SEQ ID NO: 2912288 - RNA, 19 nt, Artificial Sequence
  Description of Artificial Sequence: Synthetic oligonucleotide
cugcugugagaaguucugg

SEQ ID NO: 2912289 - RNA, 19 nt, Artificial Sequence
  Description of Artificial Sequence: Synthetic oligonucleotide
ucucucaggagggcugaug

SEQ ID NO: 2912290 - RNA, 19 nt, Artificial Sequence
  Description of Artificial Sequence: Synthetic oligonucleotide
cugcacagacaugucuggg

SEQ ID NO: 2912291 - RNA, 19 nt, Artificial Sequence
  Description of Artificial Sequence: Synthetic oligonucleotide
uccccagcacauagaagau

SEQ ID NO: 2912292 - RNA, 19 nt, Artificial Sequence
  Description of Artificial Sequence: Synthetic oligonucleotide
gugguccugcagcagcugc

SEQ ID NO: 2912293 - RNA, 19 nt, Artificial Sequence
  Description of Artificial Sequence: Synthetic oligonucleotide
gcaggccucaauguggucc

SEQ ID NO: 2912294 - RNA, 19 nt, Artificial Sequence
  Description of Artificial Sequence: Synthetic oligonucleotide
uggugcaucugugcggccu

SEQ ID NO: 2912295 - RNA, 19 nt, Artificial Sequence
  Description of Artificial Sequence: Synthetic oligonucleotide
ggccugaagaaggagaaga

SEQ ID NO: 2912296 - RNA, 19 nt, Artificial Sequence
  Description of Artificial Sequence: Synthetic oligonucleotide
ugugauuccccagcacaua

SEQ ID NO: 2912297 - RNA, 19 nt, Artificial Sequence
  Description of Artificial Sequence: Synthetic oligonucleotide
ugggccaucuguccacgua

SEQ ID NO: 2912298 - RNA, 19 nt, Artificial Sequence
  Description of Artificial Sequence: Synthetic oligonucleotide
cacagacaugucugggauc

SEQ ID NO: 2912299 - RNA, 19 nt, Artificial Sequence
  Description of Artificial Sequence: Synthetic oligonucleotide
aagauguggcccagcagua

SEQ ID NO: 2912300 - RNA, 19 nt, Artificial Sequence
  Description of Artificial Sequence: Synthetic oligonucleotide
guugugcucugggaggcug

SEQ ID NO: 2912301 - RNA, 19 nt, Artificial Sequence
  Description of Artificial Sequence: Synthetic oligonucleotide
cacagcugcacagacaugu

SEQ ID NO: 2912302 - RNA, 19 nt, Artificial Sequence
  Description of Artificial Sequence: Synthetic oligonucleotide
cgaacauagaaagcugccg

SEQ ID NO: 2912303 - RNA, 19 nt, Artificial Sequence
  Description of Artificial Sequence: Synthetic oligonucleotide
cccagcaguacaagggagc

SEQ ID NO: 2912304 - RNA, 19 nt, Artificial Sequence
  Description of Artificial Sequence: Synthetic oligonucleotide
uacaagggagcaggcugug

SEQ ID NO: 2912305 - RNA, 19 nt, Artificial Sequence
  Description of Artificial Sequence: Synthetic oligonucleotide
agcggccugaagaaggaga

SEQ ID NO: 2912306 - RNA, 19 nt, Artificial Sequence
  Description of Artificial Sequence: Synthetic oligonucleotide
ccucgaacauagaaagcug

SEQ ID NO: 2912307 - RNA, 19 nt, Artificial Sequence
  Description of Artificial Sequence: Synthetic oligonucleotide
guuucucgaagaaaucgcu

SEQ ID NO: 2912308 - RNA, 19 nt, Artificial Sequence
  Description of Artificial Sequence: Synthetic oligonucleotide
cugugaggcgguucagguc

SEQ ID NO: 2912309 - RNA, 19 nt, Artificial Sequence
  Description of Artificial Sequence: Synthetic oligonucleotide
aggcgguucagguccucug

SEQ ID NO: 2912310 - RNA, 19 nt, Artificial Sequence
  Description of Artificial Sequence: Synthetic oligonucleotide
agcugcugugagaaguucu

SEQ ID NO: 2912311 - RNA, 19 nt, Artificial Sequence
  Description of Artificial Sequence: Synthetic oligonucleotide
ugcggccucaugggcaucc

SEQ ID NO: 2912312 - RNA, 19 nt, Artificial Sequence
  Description of Artificial Sequence: Synthetic oligonucleotide
auuccccagcacauagaag

SEQ ID NO: 2912313 - RNA, 19 nt, Artificial Sequence
  Description of Artificial Sequence: Synthetic oligonucleotide
acagcugcacagacauguc

SEQ ID NO: 2912314 - RNA, 19 nt, Artificial Sequence
  Description of Artificial Sequence: Synthetic oligonucleotide
caggcugugaggcgguuca

SEQ ID NO: 2912315 - RNA, 19 nt, Artificial Sequence
  Description of Artificial Sequence: Synthetic oligonucleotide
cacgccuuguuuagaucuc

SEQ ID NO: 2912316 - RNA, 19 nt, Artificial Sequence
  Description of Artificial Sequence: Synthetic oligonucleotide
cagguccucugcauucgac

SEQ ID NO: 2912317 - RNA, 19 nt, Artificial Sequence
  Description of Artificial Sequence: Synthetic oligonucleotide
acucucccugugauucccc

SEQ ID NO: 2912318 - RNA, 19 nt, Artificial Sequence
  Description of Artificial Sequence: Synthetic oligonucleotide
agcugccgcucgcaggcag

SEQ ID NO: 2912319 - RNA, 19 nt, Artificial Sequence
  Description of Artificial Sequence: Synthetic oligonucleotide
cacacgccuuguuuagauc

SEQ ID NO: 2912320 - RNA, 19 nt, Artificial Sequence
  Description of Artificial Sequence: Synthetic oligonucleotide
gaucucucaggagggcuga

SEQ ID NO: 2912321 - RNA, 19 nt, Artificial Sequence
  Description of Artificial Sequence: Synthetic oligonucleotide
cucgcaggcagugugagcu

SEQ ID NO: 2912322 - RNA, 19 nt, Artificial Sequence
  Description of Artificial Sequence: Synthetic oligonucleotide
uggcuucauuguagcggcc

SEQ ID NO: 2912323 - RNA, 19 nt, Artificial Sequence
  Description of Artificial Sequence: Synthetic oligonucleotide
ggcugcaggccucaaugug

SEQ ID NO: 2912324 - RNA, 19 nt, Artificial Sequence
  Description of Artificial Sequence: Synthetic oligonucleotide
ugugcucugggaggcugca

SEQ ID NO: 2912325 - RNA, 19 nt, Artificial Sequence
  Description of Artificial Sequence: Synthetic oligonucleotide
ccugugauuccccagcaca

SEQ ID NO: 2912326 - RNA, 19 nt, Artificial Sequence
  Description of Artificial Sequence: Synthetic oligonucleotide
guccucgaacauagaaagc

SEQ ID NO: 2912327 - RNA, 19 nt, Artificial Sequence
  Description of Artificial Sequence: Synthetic oligonucleotide
uccacguaaugagguugug

SEQ ID NO: 2912328 - RNA, 19 nt, Artificial Sequence
  Description of Artificial Sequence: Synthetic oligonucleotide
gcugcugugagaaguucug

SEQ ID NO: 2912329 - RNA, 19 nt, Artificial Sequence
  Description of Artificial Sequence: Synthetic oligonucleotide
aggagggcugaugaccaca

SEQ ID NO: 2912330 - RNA, 19 nt, Artificial Sequence
  Description of Artificial Sequence: Synthetic oligonucleotide
ggcauucccacacgccuug

SEQ ID NO: 2912331 - RNA, 19 nt, Artificial Sequence
  Description of Artificial Sequence: Synthetic oligonucleotide
gagggcugaugaccacagc

SEQ ID NO: 2912332 - RNA, 19 nt, Artificial Sequence
  Description of Artificial Sequence: Synthetic oligonucleotide
gagaagaguccucgaacau

SEQ ID NO: 2912333 - RNA, 19 nt, Artificial Sequence
  Description of Artificial Sequence: Synthetic oligonucleotide
ggcgguucagguccucugc

SEQ ID NO: 2912334 - RNA, 19 nt, Artificial Sequence
  Description of Artificial Sequence: Synthetic oligonucleotide
ugugguccugcagcagcug

SEQ ID NO: 2912335 - RNA, 19 nt, Artificial Sequence
  Description of Artificial Sequence: Synthetic oligonucleotide
gcuucauuguagcggccug

SEQ ID NO: 2912336 - RNA, 19 nt, Artificial Sequence
  Description of Artificial Sequence: Synthetic oligonucleotide
cugugcggccucaugggca

SEQ ID NO: 2912337 - RNA, 19 nt, Artificial Sequence
  Description of Artificial Sequence: Synthetic oligonucleotide
gccuuguuuagaucucuca

SEQ ID NO: 2912338 - RNA, 19 nt, Artificial Sequence
  Description of Artificial Sequence: Synthetic oligonucleotide
cauccauggcauucccaca

SEQ ID NO: 2912339 - RNA, 19 nt, Artificial Sequence
  Description of Artificial Sequence: Synthetic oligonucleotide
ugggaucuugcuggccagc

SEQ ID NO: 2912340 - RNA, 19 nt, Artificial Sequence
  Description of Artificial Sequence: Synthetic oligonucleotide
gggcugaugaccacagcug

SEQ ID NO: 2912341 - RNA, 19 nt, Artificial Sequence
  Description of Artificial Sequence: Synthetic oligonucleotide
ucgcaggcagugugagcug

SEQ ID NO: 2912342 - RNA, 19 nt, Artificial Sequence
  Description of Artificial Sequence: Synthetic oligonucleotide
ccaucuguccacguaauga

SEQ ID NO: 2912343 - RNA, 19 nt, Artificial Sequence
  Description of Artificial Sequence: Synthetic oligonucleotide
uagcggccugaagaaggag

SEQ ID NO: 2912344 - RNA, 19 nt, Artificial Sequence
  Description of Artificial Sequence: Synthetic oligonucleotide
cuucauuguagcggccuga

SEQ ID NO: 2912345 - RNA, 19 nt, Artificial Sequence
  Description of Artificial Sequence: Synthetic oligonucleotide
acgccuuguuuagaucucu

SEQ ID NO: 2912346 - RNA, 19 nt, Artificial Sequence
  Description of Artificial Sequence: Synthetic oligonucleotide
ccacguaaugagguugugc

SEQ ID NO: 2912347 - RNA, 19 nt, Artificial Sequence
  Description of Artificial Sequence: Synthetic oligonucleotide
gggagcaggcugugaggcg

SEQ ID NO: 2912348 - RNA, 19 nt, Artificial Sequence
  Description of Artificial Sequence: Synthetic oligonucleotide
ggcugugaggcgguucagg

SEQ ID NO: 2912349 - RNA, 19 nt, Artificial Sequence
  Description of Artificial Sequence: Synthetic oligonucleotide
guagcggccugaagaagga

SEQ ID NO: 2912350 - RNA, 19 nt, Artificial Sequence
  Description of Artificial Sequence: Synthetic oligonucleotide
aagaguccucgaacauaga

SEQ ID NO: 2912351 - RNA, 19 nt, Artificial Sequence
  Description of Artificial Sequence: Synthetic oligonucleotide
ggccucaugggcauccaug

SEQ ID NO: 2912352 - RNA, 19 nt, Artificial Sequence
  Description of Artificial Sequence: Synthetic oligonucleotide
cagcaguacaagggagcag

SEQ ID NO: 2912353 - RNA, 19 nt, Artificial Sequence
  Description of Artificial Sequence: Synthetic oligonucleotide
ccaccauguuauuacucuc

SEQ ID NO: 2912354 - RNA, 19 nt, Artificial Sequence
  Description of Artificial Sequence: Synthetic oligonucleotide
gaccacagcugcacagaca

SEQ ID NO: 2912355 - RNA, 19 nt, Artificial Sequence
  Description of Artificial Sequence: Synthetic oligonucleotide
cccagcacauagaagaugu

SEQ ID NO: 2912356 - RNA, 19 nt, Artificial Sequence
  Description of Artificial Sequence: Synthetic oligonucleotide
gcucugggaggcugcaggc

SEQ ID NO: 2912357 - RNA, 19 nt, Artificial Sequence
  Description of Artificial Sequence: Synthetic oligonucleotide
cucucccugugauucccca

SEQ ID NO: 2912358 - RNA, 19 nt, Artificial Sequence
  Description of Artificial Sequence: Synthetic oligonucleotide
gccaucuguccacguaaug

SEQ ID NO: 2912359 - RNA, 19 nt, Artificial Sequence
  Description of Artificial Sequence: Synthetic oligonucleotide
guacaagggagcaggcugu

SEQ ID NO: 2912360 - RNA, 19 nt, Artificial Sequence
  Description of Artificial Sequence: Synthetic oligonucleotide
gcaggcaccaccauguuau

SEQ ID NO: 2912361 - RNA, 19 nt, Artificial Sequence
  Description of Artificial Sequence: Synthetic oligonucleotide
gccgcucgcaggcagugug

SEQ ID NO: 2912362 - RNA, 19 nt, Artificial Sequence
  Description of Artificial Sequence: Synthetic oligonucleotide
acaagggagcaggcuguga

SEQ ID NO: 2912363 - RNA, 19 nt, Artificial Sequence
  Description of Artificial Sequence: Synthetic oligonucleotide
cugugauuccccagcacau

SEQ ID NO: 2912364 - RNA, 19 nt, Artificial Sequence
  Description of Artificial Sequence: Synthetic oligonucleotide
gggccaucuguccacguaa

SEQ ID NO: 2912365 - RNA, 19 nt, Artificial Sequence
  Description of Artificial Sequence: Synthetic oligonucleotide
ggugggccaucuguccacg

SEQ ID NO: 2912366 - RNA, 19 nt, Artificial Sequence
  Description of Artificial Sequence: Synthetic oligonucleotide
gaaaucgcuuggcuucauu

SEQ ID NO: 2912367 - RNA, 19 nt, Artificial Sequence
  Description of Artificial Sequence: Synthetic oligonucleotide
caggagggcugaugaccac

SEQ ID NO: 2912368 - RNA, 19 nt, Artificial Sequence
  Description of Artificial Sequence: Synthetic oligonucleotide
cugggaggcugcaggccuc

SEQ ID NO: 2912369 - RNA, 19 nt, Artificial Sequence
  Description of Artificial Sequence: Synthetic oligonucleotide
cagcugcauggcaggcacc

SEQ ID NO: 2912370 - RNA, 19 nt, Artificial Sequence
  Description of Artificial Sequence: Synthetic oligonucleotide
cgcuuggcuucauuguagc

SEQ ID NO: 2912371 - RNA, 19 nt, Artificial Sequence
  Description of Artificial Sequence: Synthetic oligonucleotide
ggugcaucugugcggccuc

SEQ ID NO: 2912372 - RNA, 19 nt, Artificial Sequence
  Description of Artificial Sequence: Synthetic oligonucleotide
gcaucugugcggccucaug

SEQ ID NO: 2912373 - RNA, 19 nt, Artificial Sequence
  Description of Artificial Sequence: Synthetic oligonucleotide
gucugggaucuugcuggcc

SEQ ID NO: 2912374 - RNA, 19 nt, Artificial Sequence
  Description of Artificial Sequence: Synthetic oligonucleotide
cuggugcaucugugcggcc

SEQ ID NO: 2912375 - RNA, 19 nt, Artificial Sequence
  Description of Artificial Sequence: Synthetic oligonucleotide
ugcaggccucaaugugguc

SEQ ID NO: 2912376 - RNA, 19 nt, Artificial Sequence
  Description of Artificial Sequence: Synthetic oligonucleotide
cugcaggccucaauguggu

SEQ ID NO: 2912377 - RNA, 19 nt, Artificial Sequence
  Description of Artificial Sequence: Synthetic oligonucleotide
gggugggccaucuguccac

SEQ ID NO: 2912378 - RNA, 19 nt, Artificial Sequence
  Description of Artificial Sequence: Synthetic oligonucleotide
ccagcacauagaagaugug

SEQ ID NO: 2912379 - RNA, 19 nt, Artificial Sequence
  Description of Artificial Sequence: Synthetic oligonucleotide
cagcagcugcugugagaag

SEQ ID NO: 2912380 - RNA, 19 nt, Artificial Sequence
  Description of Artificial Sequence: Synthetic oligonucleotide
ccucaugggcauccauggc

SEQ ID NO: 2912381 - RNA, 19 nt, Artificial Sequence
  Description of Artificial Sequence: Synthetic oligonucleotide
auguggcccagcaguacaa

SEQ ID NO: 2912382 - RNA, 19 nt, Artificial Sequence
  Description of Artificial Sequence: Synthetic oligonucleotide
caggccucaaugugguccu

SEQ ID NO: 2912383 - RNA, 19 nt, Artificial Sequence
  Description of Artificial Sequence: Synthetic oligonucleotide
cagcugcacagacaugucu

SEQ ID NO: 2912384 - RNA, 19 nt, Artificial Sequence
  Description of Artificial Sequence: Synthetic oligonucleotide
gggcauccauggcauuccc

SEQ ID NO: 2912385 - RNA, 19 nt, Artificial Sequence
  Description of Artificial Sequence: Synthetic oligonucleotide
guccacguaaugagguugu

SEQ ID NO: 2912386 - RNA, 19 nt, Artificial Sequence
  Description of Artificial Sequence: Synthetic oligonucleotide
gguccucugcauucgacau

SEQ ID NO: 2912387 - RNA, 19 nt, Artificial Sequence
  Description of Artificial Sequence: Synthetic oligonucleotide
gcccagcaguacaagggag

SEQ ID NO: 2912388 - RNA, 19 nt, Artificial Sequence
  Description of Artificial Sequence: Synthetic oligonucleotide
uggcaggcaccaccauguu

SEQ ID NO: 2912389 - RNA, 19 nt, Artificial Sequence
  Description of Artificial Sequence: Synthetic oligonucleotide
cucugcauucgacaucuuu

SEQ ID NO: 2912390 - RNA, 19 nt, Artificial Sequence
  Description of Artificial Sequence: Synthetic oligonucleotide
gcacagacaugucugggau

SEQ ID NO: 2912391 - RNA, 19 nt, Artificial Sequence
  Description of Artificial Sequence: Synthetic oligonucleotide
ggccucaaugugguccugc

SEQ ID NO: 2912392 - RNA, 19 nt, Artificial Sequence
  Description of Artificial Sequence: Synthetic oligonucleotide
agaaaucgcuuggcuucau

SEQ ID NO: 2912393 - RNA, 19 nt, Artificial Sequence
  Description of Artificial Sequence: Synthetic oligonucleotide
ugcaucugugcggccucau

SEQ ID NO: 2912394 - RNA, 19 nt, Artificial Sequence
  Description of Artificial Sequence: Synthetic oligonucleotide
gcugaugaccacagcugca

SEQ ID NO: 2912395 - RNA, 19 nt, Artificial Sequence
  Description of Artificial Sequence: Synthetic oligonucleotide
ccagcaguacaagggagca

SEQ ID NO: 2912396 - RNA, 19 nt, Artificial Sequence
  Description of Artificial Sequence: Synthetic oligonucleotide
cguaaugagguugugcucu

SEQ ID NO: 2912397 - RNA, 19 nt, Artificial Sequence
  Description of Artificial Sequence: Synthetic oligonucleotide
aggcugugaggcgguucag

SEQ ID NO: 2912398 - RNA, 19 nt, Artificial Sequence
  Description of Artificial Sequence: Synthetic oligonucleotide
cugccgcucgcaggcagug

SEQ ID NO: 2912399 - RNA, 19 nt, Artificial Sequence
  Description of Artificial Sequence: Synthetic oligonucleotide
aagcugccgcucgcaggca

SEQ ID NO: 2912400 - RNA, 19 nt, Artificial Sequence
  Description of Artificial Sequence: Synthetic oligonucleotide
gugcucugggaggcugcag

SEQ ID NO: 2912401 - RNA, 19 nt, Artificial Sequence
  Description of Artificial Sequence: Synthetic oligonucleotide
gcucgcaggcagugugagc

SEQ ID NO: 2912402 - RNA, 19 nt, Artificial Sequence
  Description of Artificial Sequence: Synthetic oligonucleotide
gcggccugaagaaggagaa

SEQ ID NO: 2912403 - RNA, 19 nt, Artificial Sequence
  Description of Artificial Sequence: Synthetic oligonucleotide
gguucagguccucugcauu

SEQ ID NO: 2912404 - RNA, 19 nt, Artificial Sequence
  Description of Artificial Sequence: Synthetic oligonucleotide
ggcaggcaccaccauguua

SEQ ID NO: 2912405 - RNA, 19 nt, Artificial Sequence
  Description of Artificial Sequence: Synthetic oligonucleotide
ggcuucauuguagcggccu

SEQ ID NO: 2912406 - RNA, 19 nt, Artificial Sequence
  Description of Artificial Sequence: Synthetic oligonucleotide
ugaggcgguucagguccuc

SEQ ID NO: 2912407 - RNA, 19 nt, Artificial Sequence
  Description of Artificial Sequence: Synthetic oligonucleotide
ccccagcacauagaagaug

SEQ ID NO: 2912408 - RNA, 19 nt, Artificial Sequence
  Description of Artificial Sequence: Synthetic oligonucleotide
ccugaagaaggagaagagu

SEQ ID NO: 2912409 - RNA, 19 nt, Artificial Sequence
  Description of Artificial Sequence: Synthetic oligonucleotide
gcaccaccauguuauuacu

SEQ ID NO: 2912410 - RNA, 19 nt, Artificial Sequence
  Description of Artificial Sequence: Synthetic oligonucleotide
ggcauccauggcauuccca

SEQ ID NO: 2912411 - RNA, 19 nt, Artificial Sequence
  Description of Artificial Sequence: Synthetic oligonucleotide
cccugugauuccccagcac

SEQ ID NO: 2912412 - RNA, 19 nt, Artificial Sequence
  Description of Artificial Sequence: Synthetic oligonucleotide
gaggcgguucagguccucu

SEQ ID NO: 2912413 - RNA, 19 nt, Artificial Sequence
  Description of Artificial Sequence: Synthetic oligonucleotide
ugccgcucgcaggcagugu

SEQ ID NO: 2912414 - RNA, 19 nt, Artificial Sequence
  Description of Artificial Sequence: Synthetic oligonucleotide
cuguccacguaaugagguu

SEQ ID NO: 2912415 - RNA, 19 nt, Artificial Sequence
  Description of Artificial Sequence: Synthetic oligonucleotide
aucucucaggagggcugau

SEQ ID NO: 2912416 - RNA, 19 nt, Artificial Sequence
  Description of Artificial Sequence: Synthetic oligonucleotide
cgaagaaaucgcuuggcuu

SEQ ID NO: 2912417 - RNA, 19 nt, Artificial Sequence
  Description of Artificial Sequence: Synthetic oligonucleotide
gugagaaguucuggugcau

SEQ ID NO: 2912418 - RNA, 19 nt, Artificial Sequence
  Description of Artificial Sequence: Synthetic oligonucleotide
ccauguuauuacucucccu

SEQ ID NO: 2912419 - RNA, 19 nt, Artificial Sequence
  Description of Artificial Sequence: Synthetic oligonucleotide
gugcaucugugcggccuca

SEQ ID NO: 2912420 - RNA, 19 nt, Artificial Sequence
  Description of Artificial Sequence: Synthetic oligonucleotide
cgccuuguuuagaucucuc

SEQ ID NO: 2912421 - RNA, 19 nt, Artificial Sequence
  Description of Artificial Sequence: Synthetic oligonucleotide
ggccagcugcauggcaggc

SEQ ID NO: 2912422 - RNA, 19 nt, Artificial Sequence
  Description of Artificial Sequence: Synthetic oligonucleotide
ccacagcugcacagacaug

SEQ ID NO: 2912423 - RNA, 19 nt, Artificial Sequence
  Description of Artificial Sequence: Synthetic oligonucleotide
cauucccacacgccuuguu

SEQ ID NO: 2912424 - RNA, 19 nt, Artificial Sequence
  Description of Artificial Sequence: Synthetic oligonucleotide
gcaggcugugaggcgguuc

SEQ ID NO: 2912425 - RNA, 19 nt, Artificial Sequence
  Description of Artificial Sequence: Synthetic oligonucleotide
ccacacgccuuguuuagau

SEQ ID NO: 2912426 - RNA, 19 nt, Artificial Sequence
  Description of Artificial Sequence: Synthetic oligonucleotide
gagcaggcugugaggcggu

SEQ ID NO: 2912427 - RNA, 19 nt, Artificial Sequence
  Description of Artificial Sequence: Synthetic oligonucleotide
gugggccaucuguccacgu

SEQ ID NO: 2912428 - RNA, 19 nt, Artificial Sequence
  Description of Artificial Sequence: Synthetic oligonucleotide
agcaggcugugaggcgguu

SEQ ID NO: 2912429 - RNA, 19 nt, Artificial Sequence
  Description of Artificial Sequence: Synthetic oligonucleotide
ggaggcugcaggccucaau

SEQ ID NO: 2912430 - RNA, 19 nt, Artificial Sequence
  Description of Artificial Sequence: Synthetic oligonucleotide
cgcucgcaggcagugugag

SEQ ID NO: 2912431 - RNA, 19 nt, Artificial Sequence
  Description of Artificial Sequence: Synthetic oligonucleotide
caugggcauccauggcauu

SEQ ID NO: 2912432 - RNA, 19 nt, Artificial Sequence
  Description of Artificial Sequence: Synthetic oligonucleotide
ccgcucgcaggcaguguga

SEQ ID NO: 2912433 - RNA, 19 nt, Artificial Sequence
  Description of Artificial Sequence: Synthetic oligonucleotide
gugaggcgguucagguccu

SEQ ID NO: 2912434 - RNA, 19 nt, Artificial Sequence
  Description of Artificial Sequence: Synthetic oligonucleotide
cccacacgccuuguuuaga

SEQ ID NO: 2912435 - RNA, 19 nt, Artificial Sequence
  Description of Artificial Sequence: Synthetic oligonucleotide
ggccaucuguccacguaau

SEQ ID NO: 2912436 - RNA, 19 nt, Artificial Sequence
  Description of Artificial Sequence: Synthetic oligonucleotide
gguugugcucugggaggcu

SEQ ID NO: 2912437 - RNA, 19 nt, Artificial Sequence
  Description of Artificial Sequence: Synthetic oligonucleotide
caggcaccaccauguuauu

SEQ ID NO: 2912438 - RNA, 19 nt, Artificial Sequence
  Description of Artificial Sequence: Synthetic oligonucleotide
gugcggccucaugggcauc

SEQ ID NO: 2912439 - RNA, 19 nt, Artificial Sequence
  Description of Artificial Sequence: Synthetic oligonucleotide
gcugccgcucgcaggcagu

SEQ ID NO: 2912440 - RNA, 19 nt, Artificial Sequence
  Description of Artificial Sequence: Synthetic oligonucleotide
gcauucccacacgccuugu

SEQ ID NO: 2912441 - RNA, 19 nt, Artificial Sequence
  Description of Artificial Sequence: Synthetic oligonucleotide
cgacaucuuuagaguuucu

SEQ ID NO: 2912442 - RNA, 19 nt, Artificial Sequence
  Description of Artificial Sequence: Synthetic oligonucleotide
cgguucagguccucugcau

SEQ ID NO: 2912443 - RNA, 19 nt, Artificial Sequence
  Description of Artificial Sequence: Synthetic oligonucleotide
ccucugcauucgacaucuu

SEQ ID NO: 2912444 - RNA, 19 nt, Artificial Sequence
  Description of Artificial Sequence: Synthetic oligonucleotide
cggccucaugggcauccau

SEQ ID NO: 2912445 - RNA, 19 nt, Artificial Sequence
  Description of Artificial Sequence: Synthetic oligonucleotide
aacuugaucuguuucaaac

SEQ ID NO: 2912446 - RNA, 19 nt, Artificial Sequence
  Description of Artificial Sequence: Synthetic oligonucleotide
agauuuugcagacuguggc

SEQ ID NO: 2912447 - RNA, 19 nt, Artificial Sequence
  Description of Artificial Sequence: Synthetic oligonucleotide
agcgcuuucaaacagcugg

SEQ ID NO: 2912448 - RNA, 19 nt, Artificial Sequence
  Description of Artificial Sequence: Synthetic oligonucleotide
uuuggugugguucauaaac

SEQ ID NO: 2912449 - RNA, 19 nt, Artificial Sequence
  Description of Artificial Sequence: Synthetic oligonucleotide
ugguucauaaacuugacgu

SEQ ID NO: 2912450 - RNA, 19 nt, Artificial Sequence
  Description of Artificial Sequence: Synthetic oligonucleotide
uaauacaagucgcugagca

SEQ ID NO: 2912451 - RNA, 19 nt, Artificial Sequence
  Description of Artificial Sequence: Synthetic oligonucleotide
agaccuggcacacauaggg

SEQ ID NO: 2912452 - RNA, 19 nt, Artificial Sequence
  Description of Artificial Sequence: Synthetic oligonucleotide
acacauagggcauuucccc

SEQ ID NO: 2912453 - RNA, 19 nt, Artificial Sequence
  Description of Artificial Sequence: Synthetic oligonucleotide
aacgacaagucacagauuu

SEQ ID NO: 2912454 - RNA, 19 nt, Artificial Sequence
  Description of Artificial Sequence: Synthetic oligonucleotide
uaugcuguccguaauacaa

SEQ ID NO: 2912455 - RNA, 19 nt, Artificial Sequence
  Description of Artificial Sequence: Synthetic oligonucleotide
ucuguuucaaacgacaagu

SEQ ID NO: 2912456 - RNA, 19 nt, Artificial Sequence
  Description of Artificial Sequence: Synthetic oligonucleotide
uguacuuacagaccuggca

SEQ ID NO: 2912457 - RNA, 19 nt, Artificial Sequence
  Description of Artificial Sequence: Synthetic oligonucleotide
acuugaucuguuucaaacg

SEQ ID NO: 2912458 - RNA, 19 nt, Artificial Sequence
  Description of Artificial Sequence: Synthetic oligonucleotide
gauuuugcagacuguggcg

SEQ ID NO: 2912459 - RNA, 19 nt, Artificial Sequence
  Description of Artificial Sequence: Synthetic oligonucleotide
uguuucaaacgacaaguca

SEQ ID NO: 2912460 - RNA, 19 nt, Artificial Sequence
  Description of Artificial Sequence: Synthetic oligonucleotide
uagcaauguaggcaggugg

SEQ ID NO: 2912461 - RNA, 19 nt, Artificial Sequence
  Description of Artificial Sequence: Synthetic oligonucleotide
ugagcaacaacgucaagcu

SEQ ID NO: 2912462 - RNA, 19 nt, Artificial Sequence
  Description of Artificial Sequence: Synthetic oligonucleotide
acuugcuagacuugaaaag

SEQ ID NO: 2912463 - RNA, 19 nt, Artificial Sequence
  Description of Artificial Sequence: Synthetic oligonucleotide
ugaucuguuucaaacgaca

SEQ ID NO: 2912464 - RNA, 19 nt, Artificial Sequence
  Description of Artificial Sequence: Synthetic oligonucleotide
uuuuagcgcuuucaaacag

SEQ ID NO: 2912465 - RNA, 19 nt, Artificial Sequence
  Description of Artificial Sequence: Synthetic oligonucleotide
cuguccguaauacaagucg

SEQ ID NO: 2912466 - RNA, 19 nt, Artificial Sequence
  Description of Artificial Sequence: Synthetic oligonucleotide
gaucgugugagucuucugc

SEQ ID NO: 2912467 - RNA, 19 nt, Artificial Sequence
  Description of Artificial Sequence: Synthetic oligonucleotide
aagucgcugagcaacaacg

SEQ ID NO: 2912468 - RNA, 19 nt, Artificial Sequence
  Description of Artificial Sequence: Synthetic oligonucleotide
auacaagucgcugagcaac

SEQ ID NO: 2912469 - RNA, 19 nt, Artificial Sequence
  Description of Artificial Sequence: Synthetic oligonucleotide
uuucaaacgacaagucaca

SEQ ID NO: 2912470 - RNA, 19 nt, Artificial Sequence
  Description of Artificial Sequence: Synthetic oligonucleotide
aucuccuuuaugcuguccg

SEQ ID NO: 2912471 - RNA, 19 nt, Artificial Sequence
  Description of Artificial Sequence: Synthetic oligonucleotide
cuugcuagacuugaaaagc

SEQ ID NO: 2912472 - RNA, 19 nt, Artificial Sequence
  Description of Artificial Sequence: Synthetic oligonucleotide
acagaccuggcacacauag

SEQ ID NO: 2912473 - RNA, 19 nt, Artificial Sequence
  Description of Artificial Sequence: Synthetic oligonucleotide
ugaacugccgguagcaaug

SEQ ID NO: 2912474 - RNA, 19 nt, Artificial Sequence
  Description of Artificial Sequence: Synthetic oligonucleotide
agcaacaacgucaagcuuc

SEQ ID NO: 2912475 - RNA, 19 nt, Artificial Sequence
  Description of Artificial Sequence: Synthetic oligonucleotide
aauguaggcagguggugug

SEQ ID NO: 2912476 - RNA, 19 nt, Artificial Sequence
  Description of Artificial Sequence: Synthetic oligonucleotide
guuucaaacgacaagucac

SEQ ID NO: 2912477 - RNA, 19 nt, Artificial Sequence
  Description of Artificial Sequence: Synthetic oligonucleotide
agucacagauuuugcagac

SEQ ID NO: 2912478 - RNA, 19 nt, Artificial Sequence
  Description of Artificial Sequence: Synthetic oligonucleotide
uuuagcgcuuucaaacagc

SEQ ID NO: 2912479 - RNA, 19 nt, Artificial Sequence
  Description of Artificial Sequence: Synthetic oligonucleotide
uguccguaauacaagucgc

SEQ ID NO: 2912480 - RNA, 19 nt, Artificial Sequence
  Description of Artificial Sequence: Synthetic oligonucleotide
uguaggagaacuugaucug

SEQ ID NO: 2912481 - RNA, 19 nt, Artificial Sequence
  Description of Artificial Sequence: Synthetic oligonucleotide
cugcccaucuccuuuaugc

SEQ ID NO: 2912482 - RNA, 19 nt, Artificial Sequence
  Description of Artificial Sequence: Synthetic oligonucleotide
uuccuuucuuggaucaggg

SEQ ID NO: 2912483 - RNA, 19 nt, Artificial Sequence
  Description of Artificial Sequence: Synthetic oligonucleotide
uugcuagacuugaaaagcc

SEQ ID NO: 2912484 - RNA, 19 nt, Artificial Sequence
  Description of Artificial Sequence: Synthetic oligonucleotide
uugugguuguccuucaugu

SEQ ID NO: 2912485 - RNA, 19 nt, Artificial Sequence
  Description of Artificial Sequence: Synthetic oligonucleotide
uggcacuccagcuggaagg

SEQ ID NO: 2912486 - RNA, 19 nt, Artificial Sequence
  Description of Artificial Sequence: Synthetic oligonucleotide
cugagcaacaacgucaagc

SEQ ID NO: 2912487 - RNA, 19 nt, Artificial Sequence
  Description of Artificial Sequence: Synthetic oligonucleotide
guacuuacagaccuggcac

SEQ ID NO: 2912488 - RNA, 19 nt, Artificial Sequence
  Description of Artificial Sequence: Synthetic oligonucleotide
ucgcugagcaacaacguca

SEQ ID NO: 2912489 - RNA, 19 nt, Artificial Sequence
  Description of Artificial Sequence: Synthetic oligonucleotide
uuagcgcuuucaaacagcu

SEQ ID NO: 2912490 - RNA, 19 nt, Artificial Sequence
  Description of Artificial Sequence: Synthetic oligonucleotide
gagucuucugcucuggcug

SEQ ID NO: 2912491 - RNA, 19 nt, Artificial Sequence
  Description of Artificial Sequence: Synthetic oligonucleotide
auuuugcagacuguggcgg

SEQ ID NO: 2912492 - RNA, 19 nt, Artificial Sequence
  Description of Artificial Sequence: Synthetic oligonucleotide
cuuucaaacagcuggggca

SEQ ID NO: 2912493 - RNA, 19 nt, Artificial Sequence
  Description of Artificial Sequence: Synthetic oligonucleotide
ugcuagacuugaaaagccc

SEQ ID NO: 2912494 - RNA, 19 nt, Artificial Sequence
  Description of Artificial Sequence: Synthetic oligonucleotide
ugauguuuggugugguuca

SEQ ID NO: 2912495 - RNA, 19 nt, Artificial Sequence
  Description of Artificial Sequence: Synthetic oligonucleotide
ugugcuguaggagaacuug

SEQ ID NO: 2912496 - RNA, 19 nt, Artificial Sequence
  Description of Artificial Sequence: Synthetic oligonucleotide
cacacauagggcauuuccc

SEQ ID NO: 2912497 - RNA, 19 nt, Artificial Sequence
  Description of Artificial Sequence: Synthetic oligonucleotide
acaagucacagauuuugca

SEQ ID NO: 2912498 - RNA, 19 nt, Artificial Sequence
  Description of Artificial Sequence: Synthetic oligonucleotide
cuuucuuggaucagggguc

SEQ ID NO: 2912499 - RNA, 19 nt, Artificial Sequence
  Description of Artificial Sequence: Synthetic oligonucleotide
uuuaugcuguccguaauac

SEQ ID NO: 2912500 - RNA, 19 nt, Artificial Sequence
  Description of Artificial Sequence: Synthetic oligonucleotide
uugaagaucgugugagucu

SEQ ID NO: 2912501 - RNA, 19 nt, Artificial Sequence
  Description of Artificial Sequence: Synthetic oligonucleotide
gacguggcacuccagcugg

SEQ ID NO: 2912502 - RNA, 19 nt, Artificial Sequence
  Description of Artificial Sequence: Synthetic oligonucleotide
aacaacgucaagcuuccuu

SEQ ID NO: 2912503 - RNA, 19 nt, Artificial Sequence
  Description of Artificial Sequence: Synthetic oligonucleotide
gugguuguccuucaugugc

SEQ ID NO: 2912504 - RNA, 19 nt, Artificial Sequence
  Description of Artificial Sequence: Synthetic oligonucleotide
uguuuggugugguucauaa

SEQ ID NO: 2912505 - RNA, 19 nt, Artificial Sequence
  Description of Artificial Sequence: Synthetic oligonucleotide
cagauuuugcagacugugg

SEQ ID NO: 2912506 - RNA, 19 nt, Artificial Sequence
  Description of Artificial Sequence: Synthetic oligonucleotide
uuccacgugauguuuggug

SEQ ID NO: 2912507 - RNA, 19 nt, Artificial Sequence
  Description of Artificial Sequence: Synthetic oligonucleotide
gugguucauaaacuugacg

SEQ ID NO: 2912508 - RNA, 19 nt, Artificial Sequence
  Description of Artificial Sequence: Synthetic oligonucleotide
aauacaagucgcugagcaa

SEQ ID NO: 2912509 - RNA, 19 nt, Artificial Sequence
  Description of Artificial Sequence: Synthetic oligonucleotide
agucuucugcucuggcugc

SEQ ID NO: 2912510 - RNA, 19 nt, Artificial Sequence
  Description of Artificial Sequence: Synthetic oligonucleotide
ucaaacgacaagucacaga

SEQ ID NO: 2912511 - RNA, 19 nt, Artificial Sequence
  Description of Artificial Sequence: Synthetic oligonucleotide
aguuccacgugauguuugg

SEQ ID NO: 2912512 - RNA, 19 nt, Artificial Sequence
  Description of Artificial Sequence: Synthetic oligonucleotide
acagauuuugcagacugug

SEQ ID NO: 2912513 - RNA, 19 nt, Artificial Sequence
  Description of Artificial Sequence: Synthetic oligonucleotide
uggaucaggggucucuuga

SEQ ID NO: 2912514 - RNA, 19 nt, Artificial Sequence
  Description of Artificial Sequence: Synthetic oligonucleotide
acagcuggggcacuugaag

SEQ ID NO: 2912515 - RNA, 19 nt, Artificial Sequence
  Description of Artificial Sequence: Synthetic oligonucleotide
uuacagaccuggcacacau

SEQ ID NO: 2912516 - RNA, 19 nt, Artificial Sequence
  Description of Artificial Sequence: Synthetic oligonucleotide
uuuugcagacuguggcggg

SEQ ID NO: 2912517 - RNA, 19 nt, Artificial Sequence
  Description of Artificial Sequence: Synthetic oligonucleotide
cuugaucuguuucaaacga

SEQ ID NO: 2912518 - RNA, 19 nt, Artificial Sequence
  Description of Artificial Sequence: Synthetic oligonucleotide
ugacuugcuagacuugaaa

SEQ ID NO: 2912519 - RNA, 19 nt, Artificial Sequence
  Description of Artificial Sequence: Synthetic oligonucleotide
uccacgugauguuuggugu

SEQ ID NO: 2912520 - RNA, 19 nt, Artificial Sequence
  Description of Artificial Sequence: Synthetic oligonucleotide
aacgucaagcuuccuuucu

SEQ ID NO: 2912521 - RNA, 19 nt, Artificial Sequence
  Description of Artificial Sequence: Synthetic oligonucleotide
acaacgucaagcuuccuuu

SEQ ID NO: 2912522 - RNA, 19 nt, Artificial Sequence
  Description of Artificial Sequence: Synthetic oligonucleotide
uugaucuguuucaaacgac

SEQ ID NO: 2912523 - RNA, 19 nt, Artificial Sequence
  Description of Artificial Sequence: Synthetic oligonucleotide
cacuugaagaucgugugag

SEQ ID NO: 2912524 - RNA, 19 nt, Artificial Sequence
  Description of Artificial Sequence: Synthetic oligonucleotide
ucaagcuuccuuucuugga

SEQ ID NO: 2912525 - RNA, 19 nt, Artificial Sequence
  Description of Artificial Sequence: Synthetic oligonucleotide
gucaagcuuccuuucuugg

SEQ ID NO: 2912526 - RNA, 19 nt, Artificial Sequence
  Description of Artificial Sequence: Synthetic oligonucleotide
cacauagggcauuuccccg

SEQ ID NO: 2912527 - RNA, 19 nt, Artificial Sequence
  Description of Artificial Sequence: Synthetic oligonucleotide
gacuugcuagacuugaaaa

SEQ ID NO: 2912528 - RNA, 19 nt, Artificial Sequence
  Description of Artificial Sequence: Synthetic oligonucleotide
uucaugugcuguaggagaa

SEQ ID NO: 2912529 - RNA, 19 nt, Artificial Sequence
  Description of Artificial Sequence: Synthetic oligonucleotide
cugccgguagcaauguagg

SEQ ID NO: 2912530 - RNA, 19 nt, Artificial Sequence
  Description of Artificial Sequence: Synthetic oligonucleotide
uucauaaacuugacguuuu

SEQ ID NO: 2912531 - RNA, 19 nt, Artificial Sequence
  Description of Artificial Sequence: Synthetic oligonucleotide
uuucaaacagcuggggcac

SEQ ID NO: 2912532 - RNA, 19 nt, Artificial Sequence
  Description of Artificial Sequence: Synthetic oligonucleotide
ugugguucauaaacuugac

SEQ ID NO: 2912533 - RNA, 19 nt, Artificial Sequence
  Description of Artificial Sequence: Synthetic oligonucleotide
acuguggcgggguugggag

SEQ ID NO: 2912534 - RNA, 19 nt, Artificial Sequence
  Description of Artificial Sequence: Synthetic oligonucleotide
ugguuguccuucaugugcu

SEQ ID NO: 2912535 - RNA, 19 nt, Artificial Sequence
  Description of Artificial Sequence: Synthetic oligonucleotide
cuucaugugcuguaggaga

SEQ ID NO: 2912536 - RNA, 19 nt, Artificial Sequence
  Description of Artificial Sequence: Synthetic oligonucleotide
caaacgacaagucacagau

SEQ ID NO: 2912537 - RNA, 19 nt, Artificial Sequence
  Description of Artificial Sequence: Synthetic oligonucleotide
cuugaagaucgugugaguc

SEQ ID NO: 2912538 - RNA, 19 nt, Artificial Sequence
  Description of Artificial Sequence: Synthetic oligonucleotide
acuuacagaccuggcacac

SEQ ID NO: 2912539 - RNA, 19 nt, Artificial Sequence
  Description of Artificial Sequence: Synthetic oligonucleotide
uccuuucuuggaucagggg

SEQ ID NO: 2912540 - RNA, 19 nt, Artificial Sequence
  Description of Artificial Sequence: Synthetic oligonucleotide
aaacagcuggggcacuuga

SEQ ID NO: 2912541 - RNA, 19 nt, Artificial Sequence
  Description of Artificial Sequence: Synthetic oligonucleotide
uccguaauacaagucgcug

SEQ ID NO: 2912542 - RNA, 19 nt, Artificial Sequence
  Description of Artificial Sequence: Synthetic oligonucleotide
ucucuugacuugcuagacu

SEQ ID NO: 2912543 - RNA, 19 nt, Artificial Sequence
  Description of Artificial Sequence: Synthetic oligonucleotide
guugggagcggugugcacg

SEQ ID NO: 2912544 - RNA, 19 nt, Artificial Sequence
  Description of Artificial Sequence: Synthetic oligonucleotide
uucaaacgacaagucacag

SEQ ID NO: 2912545 - RNA, 19 nt, Artificial Sequence
  Description of Artificial Sequence: Synthetic oligonucleotide
uacuuacagaccuggcaca

SEQ ID NO: 2912546 - RNA, 19 nt, Artificial Sequence
  Description of Artificial Sequence: Synthetic oligonucleotide
ugagucuucugcucuggcu

SEQ ID NO: 2912547 - RNA, 19 nt, Artificial Sequence
  Description of Artificial Sequence: Synthetic oligonucleotide
uuaugcuguccguaauaca

SEQ ID NO: 2912548 - RNA, 19 nt, Artificial Sequence
  Description of Artificial Sequence: Synthetic oligonucleotide
uacaagucgcugagcaaca

SEQ ID NO: 2912549 - RNA, 19 nt, Artificial Sequence
  Description of Artificial Sequence: Synthetic oligonucleotide
ugcuguccguaauacaagu

SEQ ID NO: 2912550 - RNA, 19 nt, Artificial Sequence
  Description of Artificial Sequence: Synthetic oligonucleotide
ucuugacuugcuagacuug

SEQ ID NO: 2912551 - RNA, 19 nt, Artificial Sequence
  Description of Artificial Sequence: Synthetic oligonucleotide
cuugugguuguccuucaug

SEQ ID NO: 2912552 - RNA, 19 nt, Artificial Sequence
  Description of Artificial Sequence: Synthetic oligonucleotide
cugccucucaaguuccacg

SEQ ID NO: 2912553 - RNA, 19 nt, Artificial Sequence
  Description of Artificial Sequence: Synthetic oligonucleotide
gacaagucacagauuuugc

SEQ ID NO: 2912554 - RNA, 19 nt, Artificial Sequence
  Description of Artificial Sequence: Synthetic oligonucleotide
uguggcgggguugggagcg

SEQ ID NO: 2912555 - RNA, 19 nt, Artificial Sequence
  Description of Artificial Sequence: Synthetic oligonucleotide
ugccucucaaguuccacgu

SEQ ID NO: 2912556 - RNA, 19 nt, Artificial Sequence
  Description of Artificial Sequence: Synthetic oligonucleotide
aagaucgugugagucuucu

SEQ ID NO: 2912557 - RNA, 19 nt, Artificial Sequence
  Description of Artificial Sequence: Synthetic oligonucleotide
ugguguggcucucccagcc

SEQ ID NO: 2912558 - RNA, 19 nt, Artificial Sequence
  Description of Artificial Sequence: Synthetic oligonucleotide
ugugguuguccuucaugug

SEQ ID NO: 2912559 - RNA, 19 nt, Artificial Sequence
  Description of Artificial Sequence: Synthetic oligonucleotide
ugugagucuucugcucugg

SEQ ID NO: 2912560 - RNA, 19 nt, Artificial Sequence
  Description of Artificial Sequence: Synthetic oligonucleotide
ucaaguuccacgugauguu

SEQ ID NO: 2912561 - RNA, 19 nt, Artificial Sequence
  Description of Artificial Sequence: Synthetic oligonucleotide
uccuuuaugcuguccguaa

SEQ ID NO: 2912562 - RNA, 19 nt, Artificial Sequence
  Description of Artificial Sequence: Synthetic oligonucleotide
aucgugugagucuucugcu

SEQ ID NO: 2912563 - RNA, 19 nt, Artificial Sequence
  Description of Artificial Sequence: Synthetic oligonucleotide
ucucaaguuccacgugaug

SEQ ID NO: 2912564 - RNA, 19 nt, Artificial Sequence
  Description of Artificial Sequence: Synthetic oligonucleotide
uagggcauuuccccgggcu

SEQ ID NO: 2912565 - RNA, 19 nt, Artificial Sequence
  Description of Artificial Sequence: Synthetic oligonucleotide
ucaggggucucuugacuug

SEQ ID NO: 2912566 - RNA, 19 nt, Artificial Sequence
  Description of Artificial Sequence: Synthetic oligonucleotide
cuguuucaaacgacaaguc

SEQ ID NO: 2912567 - RNA, 19 nt, Artificial Sequence
  Description of Artificial Sequence: Synthetic oligonucleotide
uccccugccucucaaguuc

SEQ ID NO: 2912568 - RNA, 19 nt, Artificial Sequence
  Description of Artificial Sequence: Synthetic oligonucleotide
gugugguucauaaacuuga

SEQ ID NO: 2912569 - RNA, 19 nt, Artificial Sequence
  Description of Artificial Sequence: Synthetic oligonucleotide
ggcacuugaagaucgugug

SEQ ID NO: 2912570 - RNA, 19 nt, Artificial Sequence
  Description of Artificial Sequence: Synthetic oligonucleotide
uguccuucaugugcuguag

SEQ ID NO: 2912571 - RNA, 19 nt, Artificial Sequence
  Description of Artificial Sequence: Synthetic oligonucleotide
ugaagaucgugugagucuu

SEQ ID NO: 2912572 - RNA, 19 nt, Artificial Sequence
  Description of Artificial Sequence: Synthetic oligonucleotide
agcuuccuuucuuggauca

SEQ ID NO: 2912573 - RNA, 19 nt, Artificial Sequence
  Description of Artificial Sequence: Synthetic oligonucleotide
ucuccuuuaugcuguccgu

SEQ ID NO: 2912574 - RNA, 19 nt, Artificial Sequence
  Description of Artificial Sequence: Synthetic oligonucleotide
gucgacguggcacuccagc

SEQ ID NO: 2912575 - RNA, 19 nt, Artificial Sequence
  Description of Artificial Sequence: Synthetic oligonucleotide
uggugugguucauaaacuu

SEQ ID NO: 2912576 - RNA, 19 nt, Artificial Sequence
  Description of Artificial Sequence: Synthetic oligonucleotide
gaccuguacuuacagaccu

SEQ ID NO: 2912577 - RNA, 19 nt, Artificial Sequence
  Description of Artificial Sequence: Synthetic oligonucleotide
gaggugaacugccgguagc

SEQ ID NO: 2912578 - RNA, 19 nt, Artificial Sequence
  Description of Artificial Sequence: Synthetic oligonucleotide
cauagggcauuuccccggg

SEQ ID NO: 2912579 - RNA, 19 nt, Artificial Sequence
  Description of Artificial Sequence: Synthetic oligonucleotide
gugauguuuggugugguuc

SEQ ID NO: 2912580 - RNA, 19 nt, Artificial Sequence
  Description of Artificial Sequence: Synthetic oligonucleotide
gcuuucaaacagcuggggc

SEQ ID NO: 2912581 - RNA, 19 nt, Artificial Sequence
  Description of Artificial Sequence: Synthetic oligonucleotide
aaguuccacgugauguuug

SEQ ID NO: 2912582 - RNA, 19 nt, Artificial Sequence
  Description of Artificial Sequence: Synthetic oligonucleotide
gggucucuugacuugcuag

SEQ ID NO: 2912583 - RNA, 19 nt, Artificial Sequence
  Description of Artificial Sequence: Synthetic oligonucleotide
uugggagcggugugcacgc

SEQ ID NO: 2912584 - RNA, 19 nt, Artificial Sequence
  Description of Artificial Sequence: Synthetic oligonucleotide
auagggcauuuccccgggc

SEQ ID NO: 2912585 - RNA, 19 nt, Artificial Sequence
  Description of Artificial Sequence: Synthetic oligonucleotide
acuugaagaucgugugagu

SEQ ID NO: 2912586 - RNA, 19 nt, Artificial Sequence
  Description of Artificial Sequence: Synthetic oligonucleotide
ucuuggaucaggggucucu

SEQ ID NO: 2912587 - RNA, 19 nt, Artificial Sequence
  Description of Artificial Sequence: Synthetic oligonucleotide
ucgacguggcacuccagcu

SEQ ID NO: 2912588 - RNA, 19 nt, Artificial Sequence
  Description of Artificial Sequence: Synthetic oligonucleotide
uugacuugcuagacuugaa

SEQ ID NO: 2912589 - RNA, 19 nt, Artificial Sequence
  Description of Artificial Sequence: Synthetic oligonucleotide
ugcccaucuccuuuaugcu

SEQ ID NO: 2912590 - RNA, 19 nt, Artificial Sequence
  Description of Artificial Sequence: Synthetic oligonucleotide
aucaggggucucuugacuu

SEQ ID NO: 2912591 - RNA, 19 nt, Artificial Sequence
  Description of Artificial Sequence: Synthetic oligonucleotide
uaggagaacuugaucuguu

SEQ ID NO: 2912592 - RNA, 19 nt, Artificial Sequence
  Description of Artificial Sequence: Synthetic oligonucleotide
ggagaacuugaucuguuuc

SEQ ID NO: 2912593 - RNA, 19 nt, Artificial Sequence
  Description of Artificial Sequence: Synthetic oligonucleotide
cuguacuuacagaccuggc

SEQ ID NO: 2912594 - RNA, 19 nt, Artificial Sequence
  Description of Artificial Sequence: Synthetic oligonucleotide
cguaauacaagucgcugag

SEQ ID NO: 2912595 - RNA, 19 nt, Artificial Sequence
  Description of Artificial Sequence: Synthetic oligonucleotide
uuucuuggaucaggggucu

SEQ ID NO: 2912596 - RNA, 19 nt, Artificial Sequence
  Description of Artificial Sequence: Synthetic oligonucleotide
cacgugauguuuggugugg

SEQ ID NO: 2912597 - RNA, 19 nt, Artificial Sequence
  Description of Artificial Sequence: Synthetic oligonucleotide
ccgguagcaauguaggcag

SEQ ID NO: 2912598 - RNA, 19 nt, Artificial Sequence
  Description of Artificial Sequence: Synthetic oligonucleotide
agcggugugcacgcggucg

SEQ ID NO: 2912599 - RNA, 19 nt, Artificial Sequence
  Description of Artificial Sequence: Synthetic oligonucleotide
cuugacuugcuagacuuga

SEQ ID NO: 2912600 - RNA, 19 nt, Artificial Sequence
  Description of Artificial Sequence: Synthetic oligonucleotide
agcaauguaggcagguggu

SEQ ID NO: 2912601 - RNA, 19 nt, Artificial Sequence
  Description of Artificial Sequence: Synthetic oligonucleotide
gaucuguuucaaacgacaa

SEQ ID NO: 2912602 - RNA, 19 nt, Artificial Sequence
  Description of Artificial Sequence: Synthetic oligonucleotide
guccuucaugugcuguagg

SEQ ID NO: 2912603 - RNA, 19 nt, Artificial Sequence
  Description of Artificial Sequence: Synthetic oligonucleotide
guaauacaagucgcugagc

SEQ ID NO: 2912604 - RNA, 19 nt, Artificial Sequence
  Description of Artificial Sequence: Synthetic oligonucleotide
caagucgcugagcaacaac

SEQ ID NO: 2912605 - RNA, 19 nt, Artificial Sequence
  Description of Artificial Sequence: Synthetic oligonucleotide
agcuggggcacuugaagau

SEQ ID NO: 2912606 - RNA, 19 nt, Artificial Sequence
  Description of Artificial Sequence: Synthetic oligonucleotide
uuguccuucaugugcugua

SEQ ID NO: 2912607 - RNA, 19 nt, Artificial Sequence
  Description of Artificial Sequence: Synthetic oligonucleotide
cagaccuggcacacauagg

SEQ ID NO: 2912608 - RNA, 19 nt, Artificial Sequence
  Description of Artificial Sequence: Synthetic oligonucleotide
gcuagacuugaaaagcccc

SEQ ID NO: 2912609 - RNA, 19 nt, Artificial Sequence
  Description of Artificial Sequence: Synthetic oligonucleotide
uguaggcaggugguguggc

SEQ ID NO: 2912610 - RNA, 19 nt, Artificial Sequence
  Description of Artificial Sequence: Synthetic oligonucleotide
uuggaucaggggucucuug

SEQ ID NO: 2912611 - RNA, 19 nt, Artificial Sequence
  Description of Artificial Sequence: Synthetic oligonucleotide
guagcaauguaggcaggug

SEQ ID NO: 2912612 - RNA, 19 nt, Artificial Sequence
  Description of Artificial Sequence: Synthetic oligonucleotide
ugccgguagcaauguaggc

SEQ ID NO: 2912613 - RNA, 19 nt, Artificial Sequence
  Description of Artificial Sequence: Synthetic oligonucleotide
cucaaguuccacgugaugu

SEQ ID NO: 2912614 - RNA, 19 nt, Artificial Sequence
  Description of Artificial Sequence: Synthetic oligonucleotide
guggcacuccagcuggaag

SEQ ID NO: 2912615 - RNA, 19 nt, Artificial Sequence
  Description of Artificial Sequence: Synthetic oligonucleotide
ggugugguucauaaacuug

SEQ ID NO: 2912616 - RNA, 19 nt, Artificial Sequence
  Description of Artificial Sequence: Synthetic oligonucleotide
auguaggcagguggugugg

SEQ ID NO: 2912617 - RNA, 19 nt, Artificial Sequence
  Description of Artificial Sequence: Synthetic oligonucleotide
gaacuugaucuguuucaaa

SEQ ID NO: 2912618 - RNA, 19 nt, Artificial Sequence
  Description of Artificial Sequence: Synthetic oligonucleotide
cuuuaugcuguccguaaua

SEQ ID NO: 2912619 - RNA, 19 nt, Artificial Sequence
  Description of Artificial Sequence: Synthetic oligonucleotide
ccuguacuuacagaccugg

SEQ ID NO: 2912620 - RNA, 19 nt, Artificial Sequence
  Description of Artificial Sequence: Synthetic oligonucleotide
agaucgugugagucuucug

SEQ ID NO: 2912621 - RNA, 19 nt, Artificial Sequence
  Description of Artificial Sequence: Synthetic oligonucleotide
ucgugugagucuucugcuc

SEQ ID NO: 2912622 - RNA, 19 nt, Artificial Sequence
  Description of Artificial Sequence: Synthetic oligonucleotide
ucucccagccgucguuccc

SEQ ID NO: 2912623 - RNA, 19 nt, Artificial Sequence
  Description of Artificial Sequence: Synthetic oligonucleotide
gucgcugagcaacaacguc

SEQ ID NO: 2912624 - RNA, 19 nt, Artificial Sequence
  Description of Artificial Sequence: Synthetic oligonucleotide
uagcgcuuucaaacagcug

SEQ ID NO: 2912625 - RNA, 19 nt, Artificial Sequence
  Description of Artificial Sequence: Synthetic oligonucleotide
gugcacgcggucgacgugg

SEQ ID NO: 2912626 - RNA, 19 nt, Artificial Sequence
  Description of Artificial Sequence: Synthetic oligonucleotide
augcuguccguaauacaag

SEQ ID NO: 2912627 - RNA, 19 nt, Artificial Sequence
  Description of Artificial Sequence: Synthetic oligonucleotide
caacgucaagcuuccuuuc

SEQ ID NO: 2912628 - RNA, 19 nt, Artificial Sequence
  Description of Artificial Sequence: Synthetic oligonucleotide
ugugcacgcggucgacgug

SEQ ID NO: 2912629 - RNA, 19 nt, Artificial Sequence
  Description of Artificial Sequence: Synthetic oligonucleotide
gugugagucuucugcucug

SEQ ID NO: 2912630 - RNA, 19 nt, Artificial Sequence
  Description of Artificial Sequence: Synthetic oligonucleotide
ggucucuugacuugcuaga

SEQ ID NO: 2912631 - RNA, 19 nt, Artificial Sequence
  Description of Artificial Sequence: Synthetic oligonucleotide
aggugaacugccgguagca

SEQ ID NO: 2912632 - RNA, 19 nt, Artificial Sequence
  Description of Artificial Sequence: Synthetic oligonucleotide
cacgcggucgacguggcac

SEQ ID NO: 2912633 - RNA, 19 nt, Artificial Sequence
  Description of Artificial Sequence: Synthetic oligonucleotide
acgucaagcuuccuuucuu

SEQ ID NO: 2912634 - RNA, 19 nt, Artificial Sequence
  Description of Artificial Sequence: Synthetic oligonucleotide
ucaugugcuguaggagaac

SEQ ID NO: 2912635 - RNA, 19 nt, Artificial Sequence
  Description of Artificial Sequence: Synthetic oligonucleotide
gcaacaacgucaagcuucc

SEQ ID NO: 2912636 - RNA, 19 nt, Artificial Sequence
  Description of Artificial Sequence: Synthetic oligonucleotide
cucuugacuugcuagacuu

SEQ ID NO: 2912637 - RNA, 19 nt, Artificial Sequence
  Description of Artificial Sequence: Synthetic oligonucleotide
gugagucuucugcucuggc

SEQ ID NO: 2912638 - RNA, 19 nt, Artificial Sequence
  Description of Artificial Sequence: Synthetic oligonucleotide
uuccccgggcuugugguug

SEQ ID NO: 2912639 - RNA, 19 nt, Artificial Sequence
  Description of Artificial Sequence: Synthetic oligonucleotide
gaucaggggucucuugacu

SEQ ID NO: 2912640 - RNA, 19 nt, Artificial Sequence
  Description of Artificial Sequence: Synthetic oligonucleotide
guucauaaacuugacguuu

SEQ ID NO: 2912641 - RNA, 19 nt, Artificial Sequence
  Description of Artificial Sequence: Synthetic oligonucleotide
gcuguaggagaacuugauc

SEQ ID NO: 2912642 - RNA, 19 nt, Artificial Sequence
  Description of Artificial Sequence: Synthetic oligonucleotide
cagcuggggcacuugaaga

SEQ ID NO: 2912643 - RNA, 19 nt, Artificial Sequence
  Description of Artificial Sequence: Synthetic oligonucleotide
aggcaggugguguggcucu

SEQ ID NO: 2912644 - RNA, 19 nt, Artificial Sequence
  Description of Artificial Sequence: Synthetic oligonucleotide
caggggucucuugacuugc

SEQ ID NO: 2912645 - RNA, 19 nt, Artificial Sequence
  Description of Artificial Sequence: Synthetic oligonucleotide
agucgcugagcaacaacgu

SEQ ID NO: 2912646 - RNA, 19 nt, Artificial Sequence
  Description of Artificial Sequence: Synthetic oligonucleotide
ggcacuccagcuggaaggg

SEQ ID NO: 2912647 - RNA, 19 nt, Artificial Sequence
  Description of Artificial Sequence: Synthetic oligonucleotide
ggaucaggggucucuugac

SEQ ID NO: 2912648 - RNA, 19 nt, Artificial Sequence
  Description of Artificial Sequence: Synthetic oligonucleotide
aacagcuggggcacuugaa

SEQ ID NO: 2912649 - RNA, 19 nt, Artificial Sequence
  Description of Artificial Sequence: Synthetic oligonucleotide
gcccaucuccuuuaugcug

SEQ ID NO: 2912650 - RNA, 19 nt, Artificial Sequence
  Description of Artificial Sequence: Synthetic oligonucleotide
ucugcucuggcugcccauc

SEQ ID NO: 2912651 - RNA, 19 nt, Artificial Sequence
  Description of Artificial Sequence: Synthetic oligonucleotide
ucaaacagcuggggcacuu

SEQ ID NO: 2912652 - RNA, 19 nt, Artificial Sequence
  Description of Artificial Sequence: Synthetic oligonucleotide
cucucccagccgucguucc

SEQ ID NO: 2912653 - RNA, 19 nt, Artificial Sequence
  Description of Artificial Sequence: Synthetic oligonucleotide
caagcuuccuuucuuggau

SEQ ID NO: 2912654 - RNA, 19 nt, Artificial Sequence
  Description of Artificial Sequence: Synthetic oligonucleotide
uuccccugccucucaaguu

SEQ ID NO: 2912655 - RNA, 19 nt, Artificial Sequence
  Description of Artificial Sequence: Synthetic oligonucleotide
cucccagccgucguucccc

SEQ ID NO: 2912656 - RNA, 19 nt, Artificial Sequence
  Description of Artificial Sequence: Synthetic oligonucleotide
guuuggugugguucauaaa

SEQ ID NO: 2912657 - RNA, 19 nt, Artificial Sequence
  Description of Artificial Sequence: Synthetic oligonucleotide
gguguggcucucccagccg

SEQ ID NO: 2912658 - RNA, 19 nt, Artificial Sequence
  Description of Artificial Sequence: Synthetic oligonucleotide
ccuucaugugcuguaggag

SEQ ID NO: 2912659 - RNA, 19 nt, Artificial Sequence
  Description of Artificial Sequence: Synthetic oligonucleotide
guggcucucccagccgucg

SEQ ID NO: 2912660 - RNA, 19 nt, Artificial Sequence
  Description of Artificial Sequence: Synthetic oligonucleotide
ugcucuggcugcccaucuc

SEQ ID NO: 2912661 - RNA, 19 nt, Artificial Sequence
  Description of Artificial Sequence: Synthetic oligonucleotide
uggggcacuugaagaucgu

SEQ ID NO: 2912662 - RNA, 19 nt, Artificial Sequence
  Description of Artificial Sequence: Synthetic oligonucleotide
caaacagcuggggcacuug

SEQ ID NO: 2912663 - RNA, 19 nt, Artificial Sequence
  Description of Artificial Sequence: Synthetic oligonucleotide
agggcauuuccccgggcuu

SEQ ID NO: 2912664 - RNA, 19 nt, Artificial Sequence
  Description of Artificial Sequence: Synthetic oligonucleotide
ugcacgcggucgacguggc

SEQ ID NO: 2912665 - RNA, 19 nt, Artificial Sequence
  Description of Artificial Sequence: Synthetic oligonucleotide
guaggagaacuugaucugu

SEQ ID NO: 2912666 - RNA, 19 nt, Artificial Sequence
  Description of Artificial Sequence: Synthetic oligonucleotide
gugguguggcucucccagc

SEQ ID NO: 2912667 - RNA, 19 nt, Artificial Sequence
  Description of Artificial Sequence: Synthetic oligonucleotide
aaacgacaagucacagauu

SEQ ID NO: 2912668 - RNA, 19 nt, Artificial Sequence
  Description of Artificial Sequence: Synthetic oligonucleotide
uacagaccuggcacacaua

SEQ ID NO: 2912669 - RNA, 19 nt, Artificial Sequence
  Description of Artificial Sequence: Synthetic oligonucleotide
uugcagacuguggcggggu

SEQ ID NO: 2912670 - RNA, 19 nt, Artificial Sequence
  Description of Artificial Sequence: Synthetic oligonucleotide
ccuuucuuggaucaggggu

SEQ ID NO: 2912671 - RNA, 19 nt, Artificial Sequence
  Description of Artificial Sequence: Synthetic oligonucleotide
gggagcggugugcacgcgg

SEQ ID NO: 2912672 - RNA, 19 nt, Artificial Sequence
  Description of Artificial Sequence: Synthetic oligonucleotide
gcgcuuucaaacagcuggg

SEQ ID NO: 2912673 - RNA, 19 nt, Artificial Sequence
  Description of Artificial Sequence: Synthetic oligonucleotide
gccgguagcaauguaggca

SEQ ID NO: 2912674 - RNA, 19 nt, Artificial Sequence
  Description of Artificial Sequence: Synthetic oligonucleotide
acgcggucgacguggcacu

SEQ ID NO: 2912675 - RNA, 19 nt, Artificial Sequence
  Description of Artificial Sequence: Synthetic oligonucleotide
ccguaauacaagucgcuga

SEQ ID NO: 2912676 - RNA, 19 nt, Artificial Sequence
  Description of Artificial Sequence: Synthetic oligonucleotide
gugcuguaggagaacuuga

SEQ ID NO: 2912677 - RNA, 19 nt, Artificial Sequence
  Description of Artificial Sequence: Synthetic oligonucleotide
cuguggcgggguugggagc

SEQ ID NO: 2912678 - RNA, 19 nt, Artificial Sequence
  Description of Artificial Sequence: Synthetic oligonucleotide
aacugccgguagcaaugua

SEQ ID NO: 2912679 - RNA, 19 nt, Artificial Sequence
  Description of Artificial Sequence: Synthetic oligonucleotide
uucugcucuggcugcccau

SEQ ID NO: 2912680 - RNA, 19 nt, Artificial Sequence
  Description of Artificial Sequence: Synthetic oligonucleotide
gguucauaaacuugacguu

SEQ ID NO: 2912681 - RNA, 19 nt, Artificial Sequence
  Description of Artificial Sequence: Synthetic oligonucleotide
guuccccugccucucaagu

SEQ ID NO: 2912682 - RNA, 19 nt, Artificial Sequence
  Description of Artificial Sequence: Synthetic oligonucleotide
accuguacuuacagaccug

SEQ ID NO: 2912683 - RNA, 19 nt, Artificial Sequence
  Description of Artificial Sequence: Synthetic oligonucleotide
ggugccaauccauuuuccu

SEQ ID NO: 2912684 - RNA, 19 nt, Artificial Sequence
  Description of Artificial Sequence: Synthetic oligonucleotide
uucaaacagcuggggcacu

SEQ ID NO: 2912685 - RNA, 19 nt, Artificial Sequence
  Description of Artificial Sequence: Synthetic oligonucleotide
gcacuugaagaucguguga

SEQ ID NO: 2912686 - RNA, 19 nt, Artificial Sequence
  Description of Artificial Sequence: Synthetic oligonucleotide
ucguuccccugccucucaa

SEQ ID NO: 2912687 - RNA, 19 nt, Artificial Sequence
  Description of Artificial Sequence: Synthetic oligonucleotide
ggugugcacgcggucgacg

SEQ ID NO: 2912688 - RNA, 19 nt, Artificial Sequence
  Description of Artificial Sequence: Synthetic oligonucleotide
gacuguggcgggguuggga

SEQ ID NO: 2912689 - RNA, 19 nt, Artificial Sequence
  Description of Artificial Sequence: Synthetic oligonucleotide
gaagaucgugugagucuuc

SEQ ID NO: 2912690 - RNA, 19 nt, Artificial Sequence
  Description of Artificial Sequence: Synthetic oligonucleotide
gugaacugccgguagcaau

SEQ ID NO: 2912691 - RNA, 19 nt, Artificial Sequence
  Description of Artificial Sequence: Synthetic oligonucleotide
caauguaggcagguggugu

SEQ ID NO: 2912692 - RNA, 19 nt, Artificial Sequence
  Description of Artificial Sequence: Synthetic oligonucleotide
ccucucaaguuccacguga

SEQ ID NO: 2912693 - RNA, 19 nt, Artificial Sequence
  Description of Artificial Sequence: Synthetic oligonucleotide
ccagccgucguuccccugc

SEQ ID NO: 2912694 - RNA, 19 nt, Artificial Sequence
  Description of Artificial Sequence: Synthetic oligonucleotide
caugugcuguaggagaacu

SEQ ID NO: 2912695 - RNA, 19 nt, Artificial Sequence
  Description of Artificial Sequence: Synthetic oligonucleotide
gcaauguaggcagguggug

SEQ ID NO: 2912696 - RNA, 19 nt, Artificial Sequence
  Description of Artificial Sequence: Synthetic oligonucleotide
cgucaagcuuccuuucuug

SEQ ID NO: 2912697 - RNA, 19 nt, Artificial Sequence
  Description of Artificial Sequence: Synthetic oligonucleotide
uggcugcccaucuccuuua

SEQ ID NO: 2912698 - RNA, 19 nt, Artificial Sequence
  Description of Artificial Sequence: Synthetic oligonucleotide
cuuacagaccuggcacaca

SEQ ID NO: 2912699 - RNA, 19 nt, Artificial Sequence
  Description of Artificial Sequence: Synthetic oligonucleotide
ugcagacuguggcgggguu

SEQ ID NO: 2912700 - RNA, 19 nt, Artificial Sequence
  Description of Artificial Sequence: Synthetic oligonucleotide
ccacgugauguuuggugug

SEQ ID NO: 2912701 - RNA, 19 nt, Artificial Sequence
  Description of Artificial Sequence: Synthetic oligonucleotide
acgugauguuugguguggu

SEQ ID NO: 2912702 - RNA, 19 nt, Artificial Sequence
  Description of Artificial Sequence: Synthetic oligonucleotide
acaagucgcugagcaacaa

SEQ ID NO: 2912703 - RNA, 19 nt, Artificial Sequence
  Description of Artificial Sequence: Synthetic oligonucleotide
cuucugcucuggcugccca

SEQ ID NO: 2912704 - RNA, 19 nt, Artificial Sequence
  Description of Artificial Sequence: Synthetic oligonucleotide
cagccgucguuccccugcc

SEQ ID NO: 2912705 - RNA, 19 nt, Artificial Sequence
  Description of Artificial Sequence: Synthetic oligonucleotide
cacagauuuugcagacugu

SEQ ID NO: 2912706 - RNA, 19 nt, Artificial Sequence
  Description of Artificial Sequence: Synthetic oligonucleotide
gugugcacgcggucgacgu

SEQ ID NO: 2912707 - RNA, 19 nt, Artificial Sequence
  Description of Artificial Sequence: Synthetic oligonucleotide
guuguccuucaugugcugu

SEQ ID NO: 2912708 - RNA, 19 nt, Artificial Sequence
  Description of Artificial Sequence: Synthetic oligonucleotide
uggcacacauagggcauuu

SEQ ID NO: 2912709 - RNA, 19 nt, Artificial Sequence
  Description of Artificial Sequence: Synthetic oligonucleotide
guccguaauacaagucgcu

SEQ ID NO: 2912710 - RNA, 19 nt, Artificial Sequence
  Description of Artificial Sequence: Synthetic oligonucleotide
gggcuugugguuguccuuc

SEQ ID NO: 2912711 - RNA, 19 nt, Artificial Sequence
  Description of Artificial Sequence: Synthetic oligonucleotide
uccccgggcuugugguugu

SEQ ID NO: 2912712 - RNA, 19 nt, Artificial Sequence
  Description of Artificial Sequence: Synthetic oligonucleotide
cucucaaguuccacgugau

SEQ ID NO: 2912713 - RNA, 19 nt, Artificial Sequence
  Description of Artificial Sequence: Synthetic oligonucleotide
ucccagccgucguuccccu

SEQ ID NO: 2912714 - RNA, 19 nt, Artificial Sequence
  Description of Artificial Sequence: Synthetic oligonucleotide
gggcauuuccccgggcuug

SEQ ID NO: 2912715 - RNA, 19 nt, Artificial Sequence
  Description of Artificial Sequence: Synthetic oligonucleotide
auguuuggugugguucaua

SEQ ID NO: 2912716 - RNA, 19 nt, Artificial Sequence
  Description of Artificial Sequence: Synthetic oligonucleotide
gggguugggagcggugugc

SEQ ID NO: 2912717 - RNA, 19 nt, Artificial Sequence
  Description of Artificial Sequence: Synthetic oligonucleotide
ugggagcggugugcacgcg

SEQ ID NO: 2912718 - RNA, 19 nt, Artificial Sequence
  Description of Artificial Sequence: Synthetic oligonucleotide
ggggcacuugaagaucgug

SEQ ID NO: 2912719 - RNA, 19 nt, Artificial Sequence
  Description of Artificial Sequence: Synthetic oligonucleotide
gcuuccuuucuuggaucag

SEQ ID NO: 2912720 - RNA, 19 nt, Artificial Sequence
  Description of Artificial Sequence: Synthetic oligonucleotide
cuccuuuaugcuguccgua

SEQ ID NO: 2912721 - RNA, 19 nt, Artificial Sequence
  Description of Artificial Sequence: Synthetic oligonucleotide
gcuguccguaauacaaguc

SEQ ID NO: 2912722 - RNA, 19 nt, Artificial Sequence
  Description of Artificial Sequence: Synthetic oligonucleotide
gguagcaauguaggcaggu

SEQ ID NO: 2912723 - RNA, 19 nt, Artificial Sequence
  Description of Artificial Sequence: Synthetic oligonucleotide
acgacaagucacagauuuu

SEQ ID NO: 2912724 - RNA, 19 nt, Artificial Sequence
  Description of Artificial Sequence: Synthetic oligonucleotide
guguggcucucccagccgu

SEQ ID NO: 2912725 - RNA, 19 nt, Artificial Sequence
  Description of Artificial Sequence: Synthetic oligonucleotide
gccucucaaguuccacgug

SEQ ID NO: 2912726 - RNA, 19 nt, Artificial Sequence
  Description of Artificial Sequence: Synthetic oligonucleotide
gcugcccaucuccuuuaug

SEQ ID NO: 2912727 - RNA, 19 nt, Artificial Sequence
  Description of Artificial Sequence: Synthetic oligonucleotide
augugcuguaggagaacuu

SEQ ID NO: 2912728 - RNA, 19 nt, Artificial Sequence
  Description of Artificial Sequence: Synthetic oligonucleotide
gauguuuggugugguucau

SEQ ID NO: 2912729 - RNA, 19 nt, Artificial Sequence
  Description of Artificial Sequence: Synthetic oligonucleotide
gaacugccgguagcaaugu

SEQ ID NO: 2912730 - RNA, 19 nt, Artificial Sequence
  Description of Artificial Sequence: Synthetic oligonucleotide
agacuguggcgggguuggg

SEQ ID NO: 2912731 - RNA, 19 nt, Artificial Sequence
  Description of Artificial Sequence: Synthetic oligonucleotide
uucuuggaucaggggucuc

SEQ ID NO: 2912732 - RNA, 19 nt, Artificial Sequence
  Description of Artificial Sequence: Synthetic oligonucleotide
gagcggugugcacgcgguc

SEQ ID NO: 2912733 - RNA, 19 nt, Artificial Sequence
  Description of Artificial Sequence: Synthetic oligonucleotide
gagcaacaacgucaagcuu

SEQ ID NO: 2912734 - RNA, 19 nt, Artificial Sequence
  Description of Artificial Sequence: Synthetic oligonucleotide
gcagacuguggcgggguug

SEQ ID NO: 2912735 - RNA, 19 nt, Artificial Sequence
  Description of Artificial Sequence: Synthetic oligonucleotide
ccccugccucucaaguucc

SEQ ID NO: 2912736 - RNA, 19 nt, Artificial Sequence
  Description of Artificial Sequence: Synthetic oligonucleotide
cccaucuccuuuaugcugu

SEQ ID NO: 2912737 - RNA, 19 nt, Artificial Sequence
  Description of Artificial Sequence: Synthetic oligonucleotide
guaggcaggugguguggcu

SEQ ID NO: 2912738 - RNA, 19 nt, Artificial Sequence
  Description of Artificial Sequence: Synthetic oligonucleotide
gggcacuugaagaucgugu

SEQ ID NO: 2912739 - RNA, 19 nt, Artificial Sequence
  Description of Artificial Sequence: Synthetic oligonucleotide
gucacagauuuugcagacu

SEQ ID NO: 2912740 - RNA, 19 nt, Artificial Sequence
  Description of Artificial Sequence: Synthetic oligonucleotide
gccgucguuccccugccuc

SEQ ID NO: 2912741 - RNA, 19 nt, Artificial Sequence
  Description of Artificial Sequence: Synthetic oligonucleotide
gcuggggcacuugaagauc

SEQ ID NO: 2912742 - RNA, 19 nt, Artificial Sequence
  Description of Artificial Sequence: Synthetic oligonucleotide
gucguuccccugccucuca

SEQ ID NO: 2912743 - RNA, 19 nt, Artificial Sequence
  Description of Artificial Sequence: Synthetic oligonucleotide
gguugggagcggugugcac

SEQ ID NO: 2912744 - RNA, 19 nt, Artificial Sequence
  Description of Artificial Sequence: Synthetic oligonucleotide
cgcuuucaaacagcugggg

SEQ ID NO: 2912745 - RNA, 19 nt, Artificial Sequence
  Description of Artificial Sequence: Synthetic oligonucleotide
ggggaggugaacugccggu

SEQ ID NO: 2912746 - RNA, 19 nt, Artificial Sequence
  Description of Artificial Sequence: Synthetic oligonucleotide
cgacguggcacuccagcug

SEQ ID NO: 2912747 - RNA, 19 nt, Artificial Sequence
  Description of Artificial Sequence: Synthetic oligonucleotide
aggggucucuugacuugcu

SEQ ID NO: 2912748 - RNA, 19 nt, Artificial Sequence
  Description of Artificial Sequence: Synthetic oligonucleotide
agccgucguuccccugccu

SEQ ID NO: 2912749 - RNA, 19 nt, Artificial Sequence
  Description of Artificial Sequence: Synthetic oligonucleotide
gcacuccagcuggaagggg

SEQ ID NO: 2912750 - RNA, 19 nt, Artificial Sequence
  Description of Artificial Sequence: Synthetic oligonucleotide
caaguuccacgugauguuu

SEQ ID NO: 2912751 - RNA, 19 nt, Artificial Sequence
  Description of Artificial Sequence: Synthetic oligonucleotide
ggugaacugccgguagcaa

SEQ ID NO: 2912752 - RNA, 19 nt, Artificial Sequence
  Description of Artificial Sequence: Synthetic oligonucleotide
ccugccucucaaguuccac

SEQ ID NO: 2912753 - RNA, 19 nt, Artificial Sequence
  Description of Artificial Sequence: Synthetic oligonucleotide
guggcgggguugggagcgg

SEQ ID NO: 2912754 - RNA, 19 nt, Artificial Sequence
  Description of Artificial Sequence: Synthetic oligonucleotide
ggguugggagcggugugca

SEQ ID NO: 2912755 - RNA, 19 nt, Artificial Sequence
  Description of Artificial Sequence: Synthetic oligonucleotide
guuccacgugauguuuggu

SEQ ID NO: 2912756 - RNA, 19 nt, Artificial Sequence
  Description of Artificial Sequence: Synthetic oligonucleotide
cgguagcaauguaggcagg

SEQ ID NO: 2912757 - RNA, 19 nt, Artificial Sequence
  Description of Artificial Sequence: Synthetic oligonucleotide
gcggugugcacgcggucga

SEQ ID NO: 2912758 - RNA, 19 nt, Artificial Sequence
  Description of Artificial Sequence: Synthetic oligonucleotide
ccaucuccuuuaugcuguc

SEQ ID NO: 2912759 - RNA, 19 nt, Artificial Sequence
  Description of Artificial Sequence: Synthetic oligonucleotide
gggaggugaacugccggua

SEQ ID NO: 2912760 - RNA, 19 nt, Artificial Sequence
  Description of Artificial Sequence: Synthetic oligonucleotide
gcucucccagccgucguuc

SEQ ID NO: 2912761 - RNA, 19 nt, Artificial Sequence
  Description of Artificial Sequence: Synthetic oligonucleotide
cugcucuggcugcccaucu

SEQ ID NO: 2912762 - RNA, 19 nt, Artificial Sequence
  Description of Artificial Sequence: Synthetic oligonucleotide
ggucgacguggcacuccag

SEQ ID NO: 2912763 - RNA, 19 nt, Artificial Sequence
  Description of Artificial Sequence: Synthetic oligonucleotide
ccuggugccaauccauuuu

SEQ ID NO: 2912764 - RNA, 19 nt, Artificial Sequence
  Description of Artificial Sequence: Synthetic oligonucleotide
gcggucgacguggcacucc

SEQ ID NO: 2912765 - RNA, 19 nt, Artificial Sequence
  Description of Artificial Sequence: Synthetic oligonucleotide
ggagcggugugcacgcggu

SEQ ID NO: 2912766 - RNA, 19 nt, Artificial Sequence
  Description of Artificial Sequence: Synthetic oligonucleotide
cccgggcuugugguugucc

SEQ ID NO: 2912767 - RNA, 19 nt, Artificial Sequence
  Description of Artificial Sequence: Synthetic oligonucleotide
acguggcacuccagcugga

SEQ ID NO: 2912768 - RNA, 19 nt, Artificial Sequence
  Description of Artificial Sequence: Synthetic oligonucleotide
ccuuuaugcuguccguaau

SEQ ID NO: 2912769 - RNA, 19 nt, Artificial Sequence
  Description of Artificial Sequence: Synthetic oligonucleotide
ccuggcacacauagggcau

SEQ ID NO: 2912770 - RNA, 19 nt, Artificial Sequence
  Description of Artificial Sequence: Synthetic oligonucleotide
ggcgggguugggagcggug

SEQ ID NO: 2912771 - RNA, 19 nt, Artificial Sequence
  Description of Artificial Sequence: Synthetic oligonucleotide
gcauuuccccgggcuugug

SEQ ID NO: 2912772 - RNA, 19 nt, Artificial Sequence
  Description of Artificial Sequence: Synthetic oligonucleotide
ggcauuuccccgggcuugu

SEQ ID NO: 2912773 - RNA, 19 nt, Artificial Sequence
  Description of Artificial Sequence: Synthetic oligonucleotide
ccgggcuugugguuguccu

SEQ ID NO: 2912774 - RNA, 19 nt, Artificial Sequence
  Description of Artificial Sequence: Synthetic oligonucleotide
cuggcacacauagggcauu

SEQ ID NO: 2912775 - RNA, 19 nt, Artificial Sequence
  Description of Artificial Sequence: Synthetic oligonucleotide
cggucgacguggcacucca

SEQ ID NO: 2912776 - RNA, 19 nt, Artificial Sequence
  Description of Artificial Sequence: Synthetic oligonucleotide
gcgggguugggagcggugu

SEQ ID NO: 2912777 - RNA, 19 nt, Artificial Sequence
  Description of Artificial Sequence: Synthetic oligonucleotide
ccgucguuccccugccucu

SEQ ID NO: 2912778 - RNA, 19 nt, Artificial Sequence
  Description of Artificial Sequence: Synthetic oligonucleotide
cgucguuccccugccucuc

SEQ ID NO: 2912779 - RNA, 19 nt, Artificial Sequence
  Description of Artificial Sequence: Synthetic oligonucleotide
cccugccucucaaguucca

SEQ ID NO: 2912780 - RNA, 19 nt, Artificial Sequence
  Description of Artificial Sequence: Synthetic oligonucleotide
ggcucucccagccgucguu

SEQ ID NO: 2912781 - RNA, 19 nt, Artificial Sequence
  Description of Artificial Sequence: Synthetic oligonucleotide
gcacgcggucgacguggca

SEQ ID NO: 2912782 - RNA, 19 nt, Artificial Sequence
  Description of Artificial Sequence: Synthetic oligonucleotide
cccagccgucguuccccug

SEQ ID NO: 2912783 - RNA, 19 nt, Artificial Sequence
  Description of Artificial Sequence: Synthetic oligonucleotide
caacaacgucaagcuuccu

SEQ ID NO: 2912784 - RNA, 19 nt, Artificial Sequence
  Description of Artificial Sequence: Synthetic oligonucleotide
cccuggugccaauccauuu

SEQ ID NO: 2912785 - RNA, 19 nt, Artificial Sequence
  Description of Artificial Sequence: Synthetic oligonucleotide
cgugauguuuggugugguu

SEQ ID NO: 2912786 - RNA, 19 nt, Artificial Sequence
  Description of Artificial Sequence: Synthetic oligonucleotide
cggugugcacgcggucgac

SEQ ID NO: 2912787 - RNA, 19 nt, Artificial Sequence
  Description of Artificial Sequence: Synthetic oligonucleotide
ccccuggugccaauccauu

SEQ ID NO: 2912788 - RNA, 19 nt, Artificial Sequence
  Description of Artificial Sequence: Synthetic oligonucleotide
cgcggucgacguggcacuc

SEQ ID NO: 2912789 - RNA, 19 nt, Artificial Sequence
  Description of Artificial Sequence: Synthetic oligonucleotide
cgggcuugugguuguccuu

SEQ ID NO: 2912790 - RNA, 19 nt, Artificial Sequence
  Description of Artificial Sequence: Synthetic oligonucleotide
aaaacaaagggcuugggag

SEQ ID NO: 2912791 - RNA, 19 nt, Artificial Sequence
  Description of Artificial Sequence: Synthetic oligonucleotide
ucuuugaaaacaaagggcu

SEQ ID NO: 2912792 - RNA, 19 nt, Artificial Sequence
  Description of Artificial Sequence: Synthetic oligonucleotide
  modified_base (3)..(3): a, c, u, g, unknown or other
  modified_base (8)..(8): a, c, u, g, unknown or other
uunuaacngagcaugauga

SEQ ID NO: 2912793 - RNA, 19 nt, Artificial Sequence
  Description of Artificial Sequence: Synthetic oligonucleotide
aaacaaagggcuugggagg

SEQ ID NO: 2912794 - RNA, 19 nt, Artificial Sequence
  Description of Artificial Sequence: Synthetic oligonucleotide
caucuuugaaaacaaaggg

SEQ ID NO: 2912795 - RNA, 19 nt, Artificial Sequence
  Description of Artificial Sequence: Synthetic oligonucleotide
  modified_base (2)..(2): a, c, u, g, unknown or other
unugcuugcggcaauguag

SEQ ID NO: 2912796 - RNA, 19 nt, Artificial Sequence
  Description of Artificial Sequence: Synthetic oligonucleotide
  modified_base (9)..(9): a, c, u, g, unknown or other
  modified_base (14)..(14): a, c, u, g, unknown or other
ucaggguunuaacngagca

SEQ ID NO: 2912797 - RNA, 19 nt, Artificial Sequence
  Description of Artificial Sequence: Synthetic oligonucleotide
  modified_base (5)..(5): a, c, u, g, unknown or other
  modified_base (17)..(17): a, c, u, g, unknown or other
uaacngagcaugaugancu

SEQ ID NO: 2912798 - RNA, 19 nt, Artificial Sequence
  Description of Artificial Sequence: Synthetic oligonucleotide
aucuuugaaaacaaagggc

SEQ ID NO: 2912799 - RNA, 19 nt, Artificial Sequence
  Description of Artificial Sequence: Synthetic oligonucleotide
  modified_base (4)..(4): a, c, u, g, unknown or other
  modified_base (9)..(9): a, c, u, g, unknown or other
guunuaacngagcaugaug

SEQ ID NO: 2912800 - RNA, 19 nt, Artificial Sequence
  Description of Artificial Sequence: Synthetic oligonucleotide
  modified_base (7)..(7): a, c, u, g, unknown or other
  modified_base (12)..(12): a, c, u, g, unknown or other
aggguunuaacngagcaug

SEQ ID NO: 2912801 - RNA, 19 nt, Artificial Sequence
  Description of Artificial Sequence: Synthetic oligonucleotide
uuucacagcagcaggggcc

SEQ ID NO: 2912802 - RNA, 19 nt, Artificial Sequence
  Description of Artificial Sequence: Synthetic oligonucleotide
  modified_base (4)..(4): a, c, u, g, unknown or other
  modified_base (16)..(16): a, c, u, g, unknown or other
aacngagcaugaugancug

SEQ ID NO: 2912803 - RNA, 19 nt, Artificial Sequence
  Description of Artificial Sequence: Synthetic oligonucleotide
  modified_base (7)..(7): a, c, u, g, unknown or other
ugcggunuccauagccugg

SEQ ID NO: 2912804 - RNA, 19 nt, Artificial Sequence
  Description of Artificial Sequence: Synthetic oligonucleotide
  modified_base (9)..(9): a, c, u, g, unknown or other
caugaugancugcaugcgg

SEQ ID NO: 2912805 - RNA, 19 nt, Artificial Sequence
  Description of Artificial Sequence: Synthetic oligonucleotide
  modified_base (2)..(2): a, c, u, g, unknown or other
  modified_base (7)..(7): a, c, u, g, unknown or other
  modified_base (19)..(19): a, c, u, g, unknown or other
unuaacngagcaugaugan

SEQ ID NO: 2912806 - RNA, 19 nt, Artificial Sequence
  Description of Artificial Sequence: Synthetic oligonucleotide
uuuucacagcagcaggggc

SEQ ID NO: 2912807 - RNA, 19 nt, Artificial Sequence
  Description of Artificial Sequence: Synthetic oligonucleotide
  modified_base (9)..(9): a, c, u, g, unknown or other
cacagguunugcuugcggc

SEQ ID NO: 2912808 - RNA, 19 nt, Artificial Sequence
  Description of Artificial Sequence: Synthetic oligonucleotide
  modified_base (4)..(4): a, c, u, g, unknown or other
  modified_base (16)..(16): a, c, u, g, unknown or other
ugancugcaugcggunucc

SEQ ID NO: 2912809 - RNA, 19 nt, Artificial Sequence
  Description of Artificial Sequence: Synthetic oligonucleotide
  modified_base (5)..(5): a, c, u, g, unknown or other
  modified_base (17)..(17): a, c, u, g, unknown or other
augancugcaugcggunuc

SEQ ID NO: 2912810 - RNA, 19 nt, Artificial Sequence
  Description of Artificial Sequence: Synthetic oligonucleotide
  modified_base (3)..(3): a, c, u, g, unknown or other
  modified_base (15)..(15): a, c, u, g, unknown or other
acngagcaugaugancugc

SEQ ID NO: 2912811 - RNA, 19 nt, Artificial Sequence
  Description of Artificial Sequence: Synthetic oligonucleotide
  modified_base (2)..(2): a, c, u, g, unknown or other
  modified_base (14)..(14): a, c, u, g, unknown or other
ancugcaugcggunuccau

SEQ ID NO: 2912812 - RNA, 19 nt, Artificial Sequence
  Description of Artificial Sequence: Synthetic oligonucleotide
  modified_base (2)..(2): a, c, u, g, unknown or other
  modified_base (14)..(14): a, c, u, g, unknown or other
cngagcaugaugancugca

SEQ ID NO: 2912813 - RNA, 19 nt, Artificial Sequence
  Description of Artificial Sequence: Synthetic oligonucleotide
  modified_base (12)..(12): a, c, u, g, unknown or other
cugcaugcggunuccauag

SEQ ID NO: 2912814 - RNA, 19 nt, Artificial Sequence
  Description of Artificial Sequence: Synthetic oligonucleotide
cuugcggcaauguagcgca

SEQ ID NO: 2912815 - RNA, 19 nt, Artificial Sequence
  Description of Artificial Sequence: Synthetic oligonucleotide
  modified_base (8)..(8): a, c, u, g, unknown or other
acagguunugcuugcggca

SEQ ID NO: 2912816 - RNA, 19 nt, Artificial Sequence
  Description of Artificial Sequence: Synthetic oligonucleotide
  modified_base (10)..(10): a, c, u, g, unknown or other
gcaugcggunuccauagcc

SEQ ID NO: 2912817 - RNA, 19 nt, Artificial Sequence
  Description of Artificial Sequence: Synthetic oligonucleotide
  modified_base (3)..(3): a, c, u, g, unknown or other
uunugcuugcggcaaugua

SEQ ID NO: 2912818 - RNA, 19 nt, Artificial Sequence
  Description of Artificial Sequence: Synthetic oligonucleotide
  modified_base (7)..(7): a, c, u, g, unknown or other
  modified_base (19)..(19): a, c, u, g, unknown or other
ugaugancugcaugcggun

SEQ ID NO: 2912819 - RNA, 19 nt, Artificial Sequence
  Description of Artificial Sequence: Synthetic oligonucleotide
  modified_base (3)..(3): a, c, u, g, unknown or other
gunuccauagccugguucu

SEQ ID NO: 2912820 - RNA, 19 nt, Artificial Sequence
  Description of Artificial Sequence: Synthetic oligonucleotide
agcagcaggggccuacuug

SEQ ID NO: 2912821 - RNA, 19 nt, Artificial Sequence
  Description of Artificial Sequence: Synthetic oligonucleotide
  modified_base (8)..(8): a, c, u, g, unknown or other
augaugancugcaugcggu

SEQ ID NO: 2912822 - RNA, 19 nt, Artificial Sequence
  Description of Artificial Sequence: Synthetic oligonucleotide
  modified_base (8)..(8): a, c, u, g, unknown or other
augcggunuccauagccug

SEQ ID NO: 2912823 - RNA, 19 nt, Artificial Sequence
  Description of Artificial Sequence: Synthetic oligonucleotide
  modified_base (4)..(4): a, c, u, g, unknown or other
ggunuccauagccugguuc

SEQ ID NO: 2912824 - RNA, 19 nt, Artificial Sequence
  Description of Artificial Sequence: Synthetic oligonucleotide
ugcuugcggcaauguagcg

SEQ ID NO: 2912825 - RNA, 19 nt, Artificial Sequence
  Description of Artificial Sequence: Synthetic oligonucleotide
ugcggcaauguagcgcagg

SEQ ID NO: 2912826 - RNA, 19 nt, Artificial Sequence
  Description of Artificial Sequence: Synthetic oligonucleotide
gcggcuagucuucauguag

SEQ ID NO: 2912827 - RNA, 19 nt, Artificial Sequence
  Description of Artificial Sequence: Synthetic oligonucleotide
  modified_base (11)..(11): a, c, u, g, unknown or other
ugcaugcggunuccauagc

SEQ ID NO: 2912828 - RNA, 19 nt, Artificial Sequence
  Description of Artificial Sequence: Synthetic oligonucleotide
ggcuagucuucauguaggc

SEQ ID NO: 2912829 - RNA, 19 nt, Artificial Sequence
  Description of Artificial Sequence: Synthetic oligonucleotide
  modified_base (9)..(9): a, c, u, g, unknown or other
caugcggunuccauagccu

SEQ ID NO: 2912830 - RNA, 19 nt, Artificial Sequence
  Description of Artificial Sequence: Synthetic oligonucleotide
  modified_base (2)..(2): a, c, u, g, unknown or other
unuccauagccugguucuc

SEQ ID NO: 2912831 - RNA, 19 nt, Artificial Sequence
  Description of Artificial Sequence: Synthetic oligonucleotide
  modified_base (5)..(5): a, c, u, g, unknown or other
gguunugcuugcggcaaug

SEQ ID NO: 2912832 - RNA, 19 nt, Artificial Sequence
  Description of Artificial Sequence: Synthetic oligonucleotide
gcuugcggcaauguagcgc

SEQ ID NO: 2912833 - RNA, 19 nt, Artificial Sequence
  Description of Artificial Sequence: Synthetic oligonucleotide
cuuugaaaacaaagggcuu

SEQ ID NO: 2912834 - RNA, 19 nt, Artificial Sequence
  Description of Artificial Sequence: Synthetic oligonucleotide
  modified_base (6)..(6): a, c, u, g, unknown or other
  modified_base (18)..(18): a, c, u, g, unknown or other
gaugancugcaugcggunu

SEQ ID NO: 2912835 - RNA, 19 nt, Artificial Sequence
  Description of Artificial Sequence: Synthetic oligonucleotide
  modified_base (7)..(7): a, c, u, g, unknown or other
cagguunugcuugcggcaa

SEQ ID NO: 2912836 - RNA, 19 nt, Artificial Sequence
  Description of Artificial Sequence: Synthetic oligonucleotide
cggcuagucuucauguagg

SEQ ID NO: 2912837 - RNA, 19 nt, Artificial Sequence
  Description of Artificial Sequence: Synthetic oligonucleotide
  modified_base (6)..(6): a, c, u, g, unknown or other
agguunugcuugcggcaau

SEQ ID NO: 2912838 - RNA, 19 nt, Artificial Sequence
  Description of Artificial Sequence: Synthetic oligonucleotide
uugcggcaauguagcgcag

SEQ ID NO: 2912839 - RNA, 19 nt, Artificial Sequence
  Description of Artificial Sequence: Synthetic oligonucleotide
  modified_base (5)..(5): a, c, u, g, unknown or other
  modified_base (10)..(10): a, c, u, g, unknown or other
gguunuaacngagcaugau

SEQ ID NO: 2912840 - RNA, 19 nt, Artificial Sequence
  Description of Artificial Sequence: Synthetic oligonucleotide
agcggcuagucuucaugua

SEQ ID NO: 2912841 - RNA, 19 nt, Artificial Sequence
  Description of Artificial Sequence: Synthetic oligonucleotide
gugccaucuuugaaaacaa

SEQ ID NO: 2912842 - RNA, 19 nt, Artificial Sequence
  Description of Artificial Sequence: Synthetic oligonucleotide
cacagcagcaggggccuac

SEQ ID NO: 2912843 - RNA, 19 nt, Artificial Sequence
  Description of Artificial Sequence: Synthetic oligonucleotide
  modified_base (4)..(4): a, c, u, g, unknown or other
guunugcuugcggcaaugu

SEQ ID NO: 2912844 - RNA, 19 nt, Artificial Sequence
  Description of Artificial Sequence: Synthetic oligonucleotide
  modified_base (6)..(6): a, c, u, g, unknown or other
  modified_base (11)..(11): a, c, u, g, unknown or other
ggguunuaacngagcauga

SEQ ID NO: 2912845 - RNA, 19 nt, Artificial Sequence
  Description of Artificial Sequence: Synthetic oligonucleotide
  modified_base (8)..(8): a, c, u, g, unknown or other
  modified_base (13)..(13): a, c, u, g, unknown or other
caggguunuaacngagcau

SEQ ID NO: 2912846 - RNA, 19 nt, Artificial Sequence
  Description of Artificial Sequence: Synthetic oligonucleotide
gcagcaggggccuacuugu

SEQ ID NO: 2912847 - RNA, 19 nt, Artificial Sequence
  Description of Artificial Sequence: Synthetic oligonucleotide
  modified_base (3)..(3): a, c, u, g, unknown or other
  modified_base (15)..(15): a, c, u, g, unknown or other
gancugcaugcggunucca

SEQ ID NO: 2912848 - RNA, 19 nt, Artificial Sequence
  Description of Artificial Sequence: Synthetic oligonucleotide
gcuagucuucauguaggca

SEQ ID NO: 2912849 - RNA, 19 nt, Artificial Sequence
  Description of Artificial Sequence: Synthetic oligonucleotide
gcggcaauguagcgcagga

SEQ ID NO: 2912850 - RNA, 19 nt, Artificial Sequence
  Description of Artificial Sequence: Synthetic oligonucleotide
  modified_base (6)..(6): a, c, u, g, unknown or other
gcggunuccauagccuggu

SEQ ID NO: 2912851 - RNA, 19 nt, Artificial Sequence
  Description of Artificial Sequence: Synthetic oligonucleotide
  modified_base (5)..(5): a, c, u, g, unknown or other
cggunuccauagccugguu

SEQ ID NO: 2912852 - RNA, 19 nt, Artificial Sequence
  Description of Artificial Sequence: Synthetic oligonucleotide
  modified_base (1)..(1): a, c, u, g, unknown or other
  modified_base (6)..(6): a, c, u, g, unknown or other
  modified_base (18)..(18): a, c, u, g, unknown or other
nuaacngagcaugauganc

SEQ ID NO: 2912853 - RNA, 19 nt, Artificial Sequence
  Description of Artificial Sequence: Synthetic oligonucleotide
  modified_base (1)..(1): a, c, u, g, unknown or other
nugcuugcggcaauguagc

SEQ ID NO: 2912854 - RNA, 19 nt, Artificial Sequence
  Description of Artificial Sequence: Synthetic oligonucleotide
  modified_base (1)..(1): a, c, u, g, unknown or other
  modified_base (13)..(13): a, c, u, g, unknown or other
ncugcaugcggunuccaua

SEQ ID NO: 2912855 - RNA, 19 nt, Artificial Sequence
  Description of Artificial Sequence: Synthetic oligonucleotide
uuuaacuucagcauguuug

SEQ ID NO: 2912856 - RNA, 19 nt, Artificial Sequence
  Description of Artificial Sequence: Synthetic oligonucleotide
uuuaaucuuuucuuuaggg

SEQ ID NO: 2912857 - RNA, 19 nt, Artificial Sequence
  Description of Artificial Sequence: Synthetic oligonucleotide
uuaaucuuuucuuuagggg

SEQ ID NO: 2912858 - RNA, 19 nt, Artificial Sequence
  Description of Artificial Sequence: Synthetic oligonucleotide
aaaaccaauuauuuguugu

SEQ ID NO: 2912859 - RNA, 19 nt, Artificial Sequence
  Description of Artificial Sequence: Synthetic oligonucleotide
uuuggauuuagugaaacag

SEQ ID NO: 2912860 - RNA, 19 nt, Artificial Sequence
  Description of Artificial Sequence: Synthetic oligonucleotide
agagaugagcucuaaaauc

SEQ ID NO: 2912861 - RNA, 19 nt, Artificial Sequence
  Description of Artificial Sequence: Synthetic oligonucleotide
agugaaacagaaugucucc

SEQ ID NO: 2912862 - RNA, 19 nt, Artificial Sequence
  Description of Artificial Sequence: Synthetic oligonucleotide
ucuuuaaucuuuucuuuag

SEQ ID NO: 2912863 - RNA, 19 nt, Artificial Sequence
  Description of Artificial Sequence: Synthetic oligonucleotide
aauacugcugcugcauucc

SEQ ID NO: 2912864 - RNA, 19 nt, Artificial Sequence
  Description of Artificial Sequence: Synthetic oligonucleotide
gaaacagaaugucuccucg

SEQ ID NO: 2912865 - RNA, 19 nt, Artificial Sequence
  Description of Artificial Sequence: Synthetic oligonucleotide
aaucuuuucuuuaggggac

SEQ ID NO: 2912866 - RNA, 19 nt, Artificial Sequence
  Description of Artificial Sequence: Synthetic oligonucleotide
aauuauuuguuguuucuuu

SEQ ID NO: 2912867 - RNA, 19 nt, Artificial Sequence
  Description of Artificial Sequence: Synthetic oligonucleotide
ucuaaaaucuuuucuuuaa

SEQ ID NO: 2912868 - RNA, 19 nt, Artificial Sequence
  Description of Artificial Sequence: Synthetic oligonucleotide
uaaaaucuuuucuuuaauc

SEQ ID NO: 2912869 - RNA, 19 nt, Artificial Sequence
  Description of Artificial Sequence: Synthetic oligonucleotide
acauuuuaacuucagcaug

SEQ ID NO: 2912870 - RNA, 19 nt, Artificial Sequence
  Description of Artificial Sequence: Synthetic oligonucleotide
uuagugaaacagaaugucu

SEQ ID NO: 2912871 - RNA, 19 nt, Artificial Sequence
  Description of Artificial Sequence: Synthetic oligonucleotide
uggauuuagugaaacagaa

SEQ ID NO: 2912872 - RNA, 19 nt, Artificial Sequence
  Description of Artificial Sequence: Synthetic oligonucleotide
uuggauuuagugaaacaga

SEQ ID NO: 2912873 - RNA, 19 nt, Artificial Sequence
  Description of Artificial Sequence: Synthetic oligonucleotide
accaauuauuuguuguuuc

SEQ ID NO: 2912874 - RNA, 19 nt, Artificial Sequence
  Description of Artificial Sequence: Synthetic oligonucleotide
agcauguuuggauuuagug

SEQ ID NO: 2912875 - RNA, 19 nt, Artificial Sequence
  Description of Artificial Sequence: Synthetic oligonucleotide
uagugaaacagaaugucuc

SEQ ID NO: 2912876 - RNA, 19 nt, Artificial Sequence
  Description of Artificial Sequence: Synthetic oligonucleotide
uuuagugaaacagaauguc

SEQ ID NO: 2912877 - RNA, 19 nt, Artificial Sequence
  Description of Artificial Sequence: Synthetic oligonucleotide
cuuuaaucuuuucuuuagg

SEQ ID NO: 2912878 - RNA, 19 nt, Artificial Sequence
  Description of Artificial Sequence: Synthetic oligonucleotide
uuaggggacauuuuaacuu

SEQ ID NO: 2912879 - RNA, 19 nt, Artificial Sequence
  Description of Artificial Sequence: Synthetic oligonucleotide
aaaccaauuauuuguuguu

SEQ ID NO: 2912880 - RNA, 19 nt, Artificial Sequence
  Description of Artificial Sequence: Synthetic oligonucleotide
aacuucagcauguuuggau

SEQ ID NO: 2912881 - RNA, 19 nt, Artificial Sequence
  Description of Artificial Sequence: Synthetic oligonucleotide
cauguuuggauuuagugaa

SEQ ID NO: 2912882 - RNA, 19 nt, Artificial Sequence
  Description of Artificial Sequence: Synthetic oligonucleotide
ggacauuuuaacuucagca

SEQ ID NO: 2912883 - RNA, 19 nt, Artificial Sequence
  Description of Artificial Sequence: Synthetic oligonucleotide
cuuuaggggacauuuuaac

SEQ ID NO: 2912884 - RNA, 19 nt, Artificial Sequence
  Description of Artificial Sequence: Synthetic oligonucleotide
uucuuuaggggacauuuua

SEQ ID NO: 2912885 - RNA, 19 nt, Artificial Sequence
  Description of Artificial Sequence: Synthetic oligonucleotide
uuucuuuaaucuuuucuuu

SEQ ID NO: 2912886 - RNA, 19 nt, Artificial Sequence
  Description of Artificial Sequence: Synthetic oligonucleotide
ucuuuaggggacauuuuaa

SEQ ID NO: 2912887 - RNA, 19 nt, Artificial Sequence
  Description of Artificial Sequence: Synthetic oligonucleotide
agcucuaaaaucuuuucuu

SEQ ID NO: 2912888 - RNA, 19 nt, Artificial Sequence
  Description of Artificial Sequence: Synthetic oligonucleotide
aaacagaaugucuccucgu

SEQ ID NO: 2912889 - RNA, 19 nt, Artificial Sequence
  Description of Artificial Sequence: Synthetic oligonucleotide
acagaaugucuccucguag

SEQ ID NO: 2912890 - RNA, 19 nt, Artificial Sequence
  Description of Artificial Sequence: Synthetic oligonucleotide
uucuuuaaucuuuucuuua

SEQ ID NO: 2912891 - RNA, 19 nt, Artificial Sequence
  Description of Artificial Sequence: Synthetic oligonucleotide
auuuagugaaacagaaugu

SEQ ID NO: 2912892 - RNA, 19 nt, Artificial Sequence
  Description of Artificial Sequence: Synthetic oligonucleotide
ugaaacagaaugucuccuc

SEQ ID NO: 2912893 - RNA, 19 nt, Artificial Sequence
  Description of Artificial Sequence: Synthetic oligonucleotide
aacagaaugucuccucgua

SEQ ID NO: 2912894 - RNA, 19 nt, Artificial Sequence
  Description of Artificial Sequence: Synthetic oligonucleotide
ugagcucuaaaaucuuuuc

SEQ ID NO: 2912895 - RNA, 19 nt, Artificial Sequence
  Description of Artificial Sequence: Synthetic oligonucleotide
gacauuuuaacuucagcau

SEQ ID NO: 2912896 - RNA, 19 nt, Artificial Sequence
  Description of Artificial Sequence: Synthetic oligonucleotide
uguuuggauuuagugaaac

SEQ ID NO: 2912897 - RNA, 19 nt, Artificial Sequence
  Description of Artificial Sequence: Synthetic oligonucleotide
uaggggacauuuuaacuuc

SEQ ID NO: 2912898 - RNA, 19 nt, Artificial Sequence
  Description of Artificial Sequence: Synthetic oligonucleotide
gaauacugcugcugcauuc

SEQ ID NO: 2912899 - RNA, 19 nt, Artificial Sequence
  Description of Artificial Sequence: Synthetic oligonucleotide
aagaauacugcugcugcau

SEQ ID NO: 2912900 - RNA, 19 nt, Artificial Sequence
  Description of Artificial Sequence: Synthetic oligonucleotide
uuuuaacuucagcauguuu

SEQ ID NO: 2912901 - RNA, 19 nt, Artificial Sequence
  Description of Artificial Sequence: Synthetic oligonucleotide
acuucagcauguuuggauu

SEQ ID NO: 2912902 - RNA, 19 nt, Artificial Sequence
  Description of Artificial Sequence: Synthetic oligonucleotide
gcauguuuggauuuaguga

SEQ ID NO: 2912903 - RNA, 19 nt, Artificial Sequence
  Description of Artificial Sequence: Synthetic oligonucleotide
aaccaauuauuuguuguuu

SEQ ID NO: 2912904 - RNA, 19 nt, Artificial Sequence
  Description of Artificial Sequence: Synthetic oligonucleotide
ucagcauguuuggauuuag

SEQ ID NO: 2912905 - RNA, 19 nt, Artificial Sequence
  Description of Artificial Sequence: Synthetic oligonucleotide
ugcugcauuccacccauuc

SEQ ID NO: 2912906 - RNA, 19 nt, Artificial Sequence
  Description of Artificial Sequence: Synthetic oligonucleotide
ccaagaauacugcugcugc

SEQ ID NO: 2912907 - RNA, 19 nt, Artificial Sequence
  Description of Artificial Sequence: Synthetic oligonucleotide
guuuggauuuagugaaaca

SEQ ID NO: 2912908 - RNA, 19 nt, Artificial Sequence
  Description of Artificial Sequence: Synthetic oligonucleotide
gagagaugagcucuaaaau

SEQ ID NO: 2912909 - RNA, 19 nt, Artificial Sequence
  Description of Artificial Sequence: Synthetic oligonucleotide
cauuccacccauuccucug

SEQ ID NO: 2912910 - RNA, 19 nt, Artificial Sequence
  Description of Artificial Sequence: Synthetic oligonucleotide
uuucuuuaggggacauuuu

SEQ ID NO: 2912911 - RNA, 19 nt, Artificial Sequence
  Description of Artificial Sequence: Synthetic oligonucleotide
gagcucuaaaaucuuuucu

SEQ ID NO: 2912912 - RNA, 19 nt, Artificial Sequence
  Description of Artificial Sequence: Synthetic oligonucleotide
ugcugcugcauuccaccca

SEQ ID NO: 2912913 - RNA, 19 nt, Artificial Sequence
  Description of Artificial Sequence: Synthetic oligonucleotide
auuccacccauuccucugu

SEQ ID NO: 2912914 - RNA, 19 nt, Artificial Sequence
  Description of Artificial Sequence: Synthetic oligonucleotide
gggacauuuuaacuucagc

SEQ ID NO: 2912915 - RNA, 19 nt, Artificial Sequence
  Description of Artificial Sequence: Synthetic oligonucleotide
ugcauuccacccauuccuc

SEQ ID NO: 2912916 - RNA, 19 nt, Artificial Sequence
  Description of Artificial Sequence: Synthetic oligonucleotide
ucgagagaugagcucuaaa

SEQ ID NO: 2912917 - RNA, 19 nt, Artificial Sequence
  Description of Artificial Sequence: Synthetic oligonucleotide
uacugcugcugcauuccac

SEQ ID NO: 2912918 - RNA, 19 nt, Artificial Sequence
  Description of Artificial Sequence: Synthetic oligonucleotide
agaauacugcugcugcauu

SEQ ID NO: 2912919 - RNA, 19 nt, Artificial Sequence
  Description of Artificial Sequence: Synthetic oligonucleotide
caagaauacugcugcugca

SEQ ID NO: 2912920 - RNA, 19 nt, Artificial Sequence
  Description of Artificial Sequence: Synthetic oligonucleotide
uaacuucagcauguuugga

SEQ ID NO: 2912921 - RNA, 19 nt, Artificial Sequence
  Description of Artificial Sequence: Synthetic oligonucleotide
gcugcauuccacccauucc

SEQ ID NO: 2912922 - RNA, 19 nt, Artificial Sequence
  Description of Artificial Sequence: Synthetic oligonucleotide
uuccacccauuccucugug

SEQ ID NO: 2912923 - RNA, 19 nt, Artificial Sequence
  Description of Artificial Sequence: Synthetic oligonucleotide
augagcucuaaaaucuuuu

SEQ ID NO: 2912924 - RNA, 19 nt, Artificial Sequence
  Description of Artificial Sequence: Synthetic oligonucleotide
cugcugcugcauuccaccc

SEQ ID NO: 2912925 - RNA, 19 nt, Artificial Sequence
  Description of Artificial Sequence: Synthetic oligonucleotide
cugcauuccacccauuccu

SEQ ID NO: 2912926 - RNA, 19 nt, Artificial Sequence
  Description of Artificial Sequence: Synthetic oligonucleotide
cuaaaaucuuuucuuuaau

SEQ ID NO: 2912927 - RNA, 19 nt, Artificial Sequence
  Description of Artificial Sequence: Synthetic oligonucleotide
uucagcauguuuggauuua

SEQ ID NO: 2912928 - RNA, 19 nt, Artificial Sequence
  Description of Artificial Sequence: Synthetic oligonucleotide
auacugcugcugcauucca

SEQ ID NO: 2912929 - RNA, 19 nt, Artificial Sequence
  Description of Artificial Sequence: Synthetic oligonucleotide
aucuuuucuuuaggggaca

SEQ ID NO: 2912930 - RNA, 19 nt, Artificial Sequence
  Description of Artificial Sequence: Synthetic oligonucleotide
cgagagaugagcucuaaaa

SEQ ID NO: 2912931 - RNA, 19 nt, Artificial Sequence
  Description of Artificial Sequence: Synthetic oligonucleotide
agaugagcucuaaaaucuu

SEQ ID NO: 2912932 - RNA, 19 nt, Artificial Sequence
  Description of Artificial Sequence: Synthetic oligonucleotide
gaugagcucuaaaaucuuu

SEQ ID NO: 2912933 - RNA, 19 nt, Artificial Sequence
  Description of Artificial Sequence: Synthetic oligonucleotide
gugaaacagaaugucuccu

SEQ ID NO: 2912934 - RNA, 19 nt, Artificial Sequence
  Description of Artificial Sequence: Synthetic oligonucleotide
aggggacauuuuaacuuca

SEQ ID NO: 2912935 - RNA, 19 nt, Artificial Sequence
  Description of Artificial Sequence: Synthetic oligonucleotide
ggggacauuuuaacuucag

SEQ ID NO: 2912936 - RNA, 19 nt, Artificial Sequence
  Description of Artificial Sequence: Synthetic oligonucleotide
ccaauuauuuguuguuucu

SEQ ID NO: 2912937 - RNA, 19 nt, Artificial Sequence
  Description of Artificial Sequence: Synthetic oligonucleotide
auguuuggauuuagugaaa

SEQ ID NO: 2912938 - RNA, 19 nt, Artificial Sequence
  Description of Artificial Sequence: Synthetic oligonucleotide
caauuauuuguuguuucuu

SEQ ID NO: 2912939 - RNA, 19 nt, Artificial Sequence
  Description of Artificial Sequence: Synthetic oligonucleotide
cuucagcauguuuggauuu

SEQ ID NO: 2912940 - RNA, 19 nt, Artificial Sequence
  Description of Artificial Sequence: Synthetic oligonucleotide
cagcauguuuggauuuagu

SEQ ID NO: 2912941 - RNA, 19 nt, Artificial Sequence
  Description of Artificial Sequence: Synthetic oligonucleotide
ggauuuagugaaacagaau

SEQ ID NO: 2912942 - RNA, 19 nt, Artificial Sequence
  Description of Artificial Sequence: Synthetic oligonucleotide
gcauuccacccauuccucu

SEQ ID NO: 2912943 - RNA, 19 nt, Artificial Sequence
  Description of Artificial Sequence: Synthetic oligonucleotide
ccacccauuccucuguggu

SEQ ID NO: 2912944 - RNA, 19 nt, Artificial Sequence
  Description of Artificial Sequence: Synthetic oligonucleotide
cuuuucuuuaggggacauu

SEQ ID NO: 2912945 - RNA, 19 nt, Artificial Sequence
  Description of Artificial Sequence: Synthetic oligonucleotide
aaauagauguuauuggucc

SEQ ID NO: 2912946 - RNA, 19 nt, Artificial Sequence
  Description of Artificial Sequence: Synthetic oligonucleotide
ucuuauuagaaauagaugu

SEQ ID NO: 2912947 - RNA, 19 nt, Artificial Sequence
  Description of Artificial Sequence: Synthetic oligonucleotide
auaaccaggagccaagucc

SEQ ID NO: 2912948 - RNA, 19 nt, Artificial Sequence
  Description of Artificial Sequence: Synthetic oligonucleotide
agguugaugaccuugagcg

SEQ ID NO: 2912949 - RNA, 19 nt, Artificial Sequence
  Description of Artificial Sequence: Synthetic oligonucleotide
uuagaaauagauguuauug

SEQ ID NO: 2912950 - RNA, 19 nt, Artificial Sequence
  Description of Artificial Sequence: Synthetic oligonucleotide
gaagaagcgguucugaggg

SEQ ID NO: 2912951 - RNA, 19 nt, Artificial Sequence
  Description of Artificial Sequence: Synthetic oligonucleotide
guugaagugagacaggccg

SEQ ID NO: 2912952 - RNA, 19 nt, Artificial Sequence
  Description of Artificial Sequence: Synthetic oligonucleotide
uagaaauagauguuauugg

SEQ ID NO: 2912953 - RNA, 19 nt, Artificial Sequence
  Description of Artificial Sequence: Synthetic oligonucleotide
guccauauaacaaaguugg

SEQ ID NO: 2912954 - RNA, 19 nt, Artificial Sequence
  Description of Artificial Sequence: Synthetic oligonucleotide
uggcaaauaaccaggagcc

SEQ ID NO: 2912955 - RNA, 19 nt, Artificial Sequence
  Description of Artificial Sequence: Synthetic oligonucleotide
aguuggaauacccagguug

SEQ ID NO: 2912956 - RNA, 19 nt, Artificial Sequence
  Description of Artificial Sequence: Synthetic oligonucleotide
uguuauugguccauaacug

SEQ ID NO: 2912957 - RNA, 19 nt, Artificial Sequence
  Description of Artificial Sequence: Synthetic oligonucleotide
uucuuauuagaaauagaug

SEQ ID NO: 2912958 - RNA, 19 nt, Artificial Sequence
  Description of Artificial Sequence: Synthetic oligonucleotide
aauacccagguugaugacc

SEQ ID NO: 2912959 - RNA, 19 nt, Artificial Sequence
  Description of Artificial Sequence: Synthetic oligonucleotide
acaaaguuggaauacccag

SEQ ID NO: 2912960 - RNA, 19 nt, Artificial Sequence
  Description of Artificial Sequence: Synthetic oligonucleotide
aaaguuggaauacccaggu

SEQ ID NO: 2912961 - RNA, 19 nt, Artificial Sequence
  Description of Artificial Sequence: Synthetic oligonucleotide
agaaauagauguuauuggu

SEQ ID NO: 2912962 - RNA, 19 nt, Artificial Sequence
  Description of Artificial Sequence: Synthetic oligonucleotide
auguuauugguccauaacu

SEQ ID NO: 2912963 - RNA, 19 nt, Artificial Sequence
  Description of Artificial Sequence: Synthetic oligonucleotide
auaacaaaguuggaauacc

SEQ ID NO: 2912964 - RNA, 19 nt, Artificial Sequence
  Description of Artificial Sequence: Synthetic oligonucleotide
aacacgaccucgugggccc

SEQ ID NO: 2912965 - RNA, 19 nt, Artificial Sequence
  Description of Artificial Sequence: Synthetic oligonucleotide
aacugguaugaacagucuc

SEQ ID NO: 2912966 - RNA, 19 nt, Artificial Sequence
  Description of Artificial Sequence: Synthetic oligonucleotide
guuauugguccauaacugg

SEQ ID NO: 2912967 - RNA, 19 nt, Artificial Sequence
  Description of Artificial Sequence: Synthetic oligonucleotide
cuggcaaauaaccaggagc

SEQ ID NO: 2912968 - RNA, 19 nt, Artificial Sequence
  Description of Artificial Sequence: Synthetic oligonucleotide
ugaagaagcgguucugagg

SEQ ID NO: 2912969 - RNA, 19 nt, Artificial Sequence
  Description of Artificial Sequence: Synthetic oligonucleotide
uaacaaaguuggaauaccc

SEQ ID NO: 2912970 - RNA, 19 nt, Artificial Sequence
  Description of Artificial Sequence: Synthetic oligonucleotide
auaacugguaugaacaguc

SEQ ID NO: 2912971 - RNA, 19 nt, Artificial Sequence
  Description of Artificial Sequence: Synthetic oligonucleotide
aauaaccaggagccaaguc

SEQ ID NO: 2912972 - RNA, 19 nt, Artificial Sequence
  Description of Artificial Sequence: Synthetic oligonucleotide
uugaugaaggggaagcagc

SEQ ID NO: 2912973 - RNA, 19 nt, Artificial Sequence
  Description of Artificial Sequence: Synthetic oligonucleotide
aaguccauauaacaaaguu

SEQ ID NO: 2912974 - RNA, 19 nt, Artificial Sequence
  Description of Artificial Sequence: Synthetic oligonucleotide
uauaacaaaguuggaauac

SEQ ID NO: 2912975 - RNA, 19 nt, Artificial Sequence
  Description of Artificial Sequence: Synthetic oligonucleotide
gacucuggcaaauaaccag

SEQ ID NO: 2912976 - RNA, 19 nt, Artificial Sequence
  Description of Artificial Sequence: Synthetic oligonucleotide
uugagcgccgugaagaagc

SEQ ID NO: 2912977 - RNA, 19 nt, Artificial Sequence
  Description of Artificial Sequence: Synthetic oligonucleotide
caaaguuggaauacccagg

SEQ ID NO: 2912978 - RNA, 19 nt, Artificial Sequence
  Description of Artificial Sequence: Synthetic oligonucleotide
uauuagaaauagauguuau

SEQ ID NO: 2912979 - RNA, 19 nt, Artificial Sequence
  Description of Artificial Sequence: Synthetic oligonucleotide
agugguacuugaugaaggg

SEQ ID NO: 2912980 - RNA, 19 nt, Artificial Sequence
  Description of Artificial Sequence: Synthetic oligonucleotide
cuguagggcacgcagaagg

SEQ ID NO: 2912981 - RNA, 19 nt, Artificial Sequence
  Description of Artificial Sequence: Synthetic oligonucleotide
uuauugguccauaacuggu

SEQ ID NO: 2912982 - RNA, 19 nt, Artificial Sequence
  Description of Artificial Sequence: Synthetic oligonucleotide
agacaggccgaacuggucg

SEQ ID NO: 2912983 - RNA, 19 nt, Artificial Sequence
  Description of Artificial Sequence: Synthetic oligonucleotide
augaaggggaagcagccgg

SEQ ID NO: 2912984 - RNA, 19 nt, Artificial Sequence
  Description of Artificial Sequence: Synthetic oligonucleotide
aacuggucguuguggaccg

SEQ ID NO: 2912985 - RNA, 19 nt, Artificial Sequence
  Description of Artificial Sequence: Synthetic oligonucleotide
gauguuauugguccauaac

SEQ ID NO: 2912986 - RNA, 19 nt, Artificial Sequence
  Description of Artificial Sequence: Synthetic oligonucleotide
uuauuagaaauagauguua

SEQ ID NO: 2912987 - RNA, 19 nt, Artificial Sequence
  Description of Artificial Sequence: Synthetic oligonucleotide
ugaugaaggggaagcagcc

SEQ ID NO: 2912988 - RNA, 19 nt, Artificial Sequence
  Description of Artificial Sequence: Synthetic oligonucleotide
aagugagacaggccgaacu

SEQ ID NO: 2912989 - RNA, 19 nt, Artificial Sequence
  Description of Artificial Sequence: Synthetic oligonucleotide
aucuucuuauuagaaauag

SEQ ID NO: 2912990 - RNA, 19 nt, Artificial Sequence
  Description of Artificial Sequence: Synthetic oligonucleotide
uuguggaccgcgcuguagg

SEQ ID NO: 2912991 - RNA, 19 nt, Artificial Sequence
  Description of Artificial Sequence: Synthetic oligonucleotide
uaaccaggagccaagucca

SEQ ID NO: 2912992 - RNA, 19 nt, Artificial Sequence
  Description of Artificial Sequence: Synthetic oligonucleotide
ucuucuuauuagaaauaga

SEQ ID NO: 2912993 - RNA, 19 nt, Artificial Sequence
  Description of Artificial Sequence: Synthetic oligonucleotide
uagggcacgcagaaggagg

SEQ ID NO: 2912994 - RNA, 19 nt, Artificial Sequence
  Description of Artificial Sequence: Synthetic oligonucleotide
cagaaggagguccagugcg

SEQ ID NO: 2912995 - RNA, 19 nt, Artificial Sequence
  Description of Artificial Sequence: Synthetic oligonucleotide
ugugacucuggcaaauaac

SEQ ID NO: 2912996 - RNA, 19 nt, Artificial Sequence
  Description of Artificial Sequence: Synthetic oligonucleotide
ugcagcgucagcacuuccg

SEQ ID NO: 2912997 - RNA, 19 nt, Artificial Sequence
  Description of Artificial Sequence: Synthetic oligonucleotide
caaauaaccaggagccaag

SEQ ID NO: 2912998 - RNA, 19 nt, Artificial Sequence
  Description of Artificial Sequence: Synthetic oligonucleotide
uacuugaugaaggggaagc

SEQ ID NO: 2912999 - RNA, 19 nt, Artificial Sequence
  Description of Artificial Sequence: Synthetic oligonucleotide
agcgucagcacuuccgagg

SEQ ID NO: 2913000 - RNA, 19 nt, Artificial Sequence
  Description of Artificial Sequence: Synthetic oligonucleotide
gguaugaacagucucugug

SEQ ID NO: 2913001 - RNA, 19 nt, Artificial Sequence
  Description of Artificial Sequence: Synthetic oligonucleotide
auauaacaaaguuggaaua

SEQ ID NO: 2913002 - RNA, 19 nt, Artificial Sequence
  Description of Artificial Sequence: Synthetic oligonucleotide
aguccauauaacaaaguug

SEQ ID NO: 2913003 - RNA, 19 nt, Artificial Sequence
  Description of Artificial Sequence: Synthetic oligonucleotide
aggacgugguaguuggcgc

SEQ ID NO: 2913004 - RNA, 19 nt, Artificial Sequence
  Description of Artificial Sequence: Synthetic oligonucleotide
gaaauagauguuauugguc

SEQ ID NO: 2913005 - RNA, 19 nt, Artificial Sequence
  Description of Artificial Sequence: Synthetic oligonucleotide
cuucuuauuagaaauagau

SEQ ID NO: 2913006 - RNA, 19 nt, Artificial Sequence
  Description of Artificial Sequence: Synthetic oligonucleotide
gugacucuggcaaauaacc

SEQ ID NO: 2913007 - RNA, 19 nt, Artificial Sequence
  Description of Artificial Sequence: Synthetic oligonucleotide
cagugguacuugaugaagg

SEQ ID NO: 2913008 - RNA, 19 nt, Artificial Sequence
  Description of Artificial Sequence: Synthetic oligonucleotide
ucuggcaaauaaccaggag

SEQ ID NO: 2913009 - RNA, 19 nt, Artificial Sequence
  Description of Artificial Sequence: Synthetic oligonucleotide
ugguccauaacugguauga

SEQ ID NO: 2913010 - RNA, 19 nt, Artificial Sequence
  Description of Artificial Sequence: Synthetic oligonucleotide
aacaaaguuggaauaccca

SEQ ID NO: 2913011 - RNA, 19 nt, Artificial Sequence
  Description of Artificial Sequence: Synthetic oligonucleotide
agaagcgguucugaggggc

SEQ ID NO: 2913012 - RNA, 19 nt, Artificial Sequence
  Description of Artificial Sequence: Synthetic oligonucleotide
guugaugaccuugagcgcc

SEQ ID NO: 2913013 - RNA, 19 nt, Artificial Sequence
  Description of Artificial Sequence: Synthetic oligonucleotide
uugaugaccuugagcgccg

SEQ ID NO: 2913014 - RNA, 19 nt, Artificial Sequence
  Description of Artificial Sequence: Synthetic oligonucleotide
cauauaacaaaguuggaau

SEQ ID NO: 2913015 - RNA, 19 nt, Artificial Sequence
  Description of Artificial Sequence: Synthetic oligonucleotide
acagcaguagccgcaacac

SEQ ID NO: 2913016 - RNA, 19 nt, Artificial Sequence
  Description of Artificial Sequence: Synthetic oligonucleotide
auuagaaauagauguuauu

SEQ ID NO: 2913017 - RNA, 19 nt, Artificial Sequence
  Description of Artificial Sequence: Synthetic oligonucleotide
uaucuucuuauuagaaaua

SEQ ID NO: 2913018 - RNA, 19 nt, Artificial Sequence
  Description of Artificial Sequence: Synthetic oligonucleotide
ccuucuaucuucuuauuag

SEQ ID NO: 2913019 - RNA, 19 nt, Artificial Sequence
  Description of Artificial Sequence: Synthetic oligonucleotide
gaacuggucguuguggacc

SEQ ID NO: 2913020 - RNA, 19 nt, Artificial Sequence
  Description of Artificial Sequence: Synthetic oligonucleotide
acucuggcaaauaaccagg

SEQ ID NO: 2913021 - RNA, 19 nt, Artificial Sequence
  Description of Artificial Sequence: Synthetic oligonucleotide
uauugguccauaacuggua

SEQ ID NO: 2913022 - RNA, 19 nt, Artificial Sequence
  Description of Artificial Sequence: Synthetic oligonucleotide
gucucugugacucuggcaa

SEQ ID NO: 2913023 - RNA, 19 nt, Artificial Sequence
  Description of Artificial Sequence: Synthetic oligonucleotide
ugccaaggcgccuuggagc

SEQ ID NO: 2913024 - RNA, 19 nt, Artificial Sequence
  Description of Artificial Sequence: Synthetic oligonucleotide
guaugaacagucucuguga

SEQ ID NO: 2913025 - RNA, 19 nt, Artificial Sequence
  Description of Artificial Sequence: Synthetic oligonucleotide
gagcagugguacuugauga

SEQ ID NO: 2913026 - RNA, 19 nt, Artificial Sequence
  Description of Artificial Sequence: Synthetic oligonucleotide
ggaauacccagguugauga

SEQ ID NO: 2913027 - RNA, 19 nt, Artificial Sequence
  Description of Artificial Sequence: Synthetic oligonucleotide
aggggaagcagccggugcg

SEQ ID NO: 2913028 - RNA, 19 nt, Artificial Sequence
  Description of Artificial Sequence: Synthetic oligonucleotide
cuaucuucuuauuagaaau

SEQ ID NO: 2913029 - RNA, 19 nt, Artificial Sequence
  Description of Artificial Sequence: Synthetic oligonucleotide
acugguaugaacagucucu

SEQ ID NO: 2913030 - RNA, 19 nt, Artificial Sequence
  Description of Artificial Sequence: Synthetic oligonucleotide
uugaagugagacaggccga

SEQ ID NO: 2913031 - RNA, 19 nt, Artificial Sequence
  Description of Artificial Sequence: Synthetic oligonucleotide
gccaguugaagugagacag

SEQ ID NO: 2913032 - RNA, 19 nt, Artificial Sequence
  Description of Artificial Sequence: Synthetic oligonucleotide
cuugaugaaggggaagcag

SEQ ID NO: 2913033 - RNA, 19 nt, Artificial Sequence
  Description of Artificial Sequence: Synthetic oligonucleotide
ugagacaggccgaacuggu

SEQ ID NO: 2913034 - RNA, 19 nt, Artificial Sequence
  Description of Artificial Sequence: Synthetic oligonucleotide
aguugaagugagacaggcc

SEQ ID NO: 2913035 - RNA, 19 nt, Artificial Sequence
  Description of Artificial Sequence: Synthetic oligonucleotide
gaugaaggggaagcagccg

SEQ ID NO: 2913036 - RNA, 19 nt, Artificial Sequence
  Description of Artificial Sequence: Synthetic oligonucleotide
uccauauaacaaaguugga

SEQ ID NO: 2913037 - RNA, 19 nt, Artificial Sequence
  Description of Artificial Sequence: Synthetic oligonucleotide
aagaagcgguucugagggg

SEQ ID NO: 2913038 - RNA, 19 nt, Artificial Sequence
  Description of Artificial Sequence: Synthetic oligonucleotide
uggaauacccagguugaug

SEQ ID NO: 2913039 - RNA, 19 nt, Artificial Sequence
  Description of Artificial Sequence: Synthetic oligonucleotide
uguagggcacgcagaagga

SEQ ID NO: 2913040 - RNA, 19 nt, Artificial Sequence
  Description of Artificial Sequence: Synthetic oligonucleotide
guccauaacugguaugaac

SEQ ID NO: 2913041 - RNA, 19 nt, Artificial Sequence
  Description of Artificial Sequence: Synthetic oligonucleotide
gugaagaagcgguucugag

SEQ ID NO: 2913042 - RNA, 19 nt, Artificial Sequence
  Description of Artificial Sequence: Synthetic oligonucleotide
caguugaagugagacaggc

SEQ ID NO: 2913043 - RNA, 19 nt, Artificial Sequence
  Description of Artificial Sequence: Synthetic oligonucleotide
aacagucucugugacucug

SEQ ID NO: 2913044 - RNA, 19 nt, Artificial Sequence
  Description of Artificial Sequence: Synthetic oligonucleotide
aaauaaccaggagccaagu

SEQ ID NO: 2913045 - RNA, 19 nt, Artificial Sequence
  Description of Artificial Sequence: Synthetic oligonucleotide
uaacugguaugaacagucu

SEQ ID NO: 2913046 - RNA, 19 nt, Artificial Sequence
  Description of Artificial Sequence: Synthetic oligonucleotide
auugguccauaacugguau

SEQ ID NO: 2913047 - RNA, 19 nt, Artificial Sequence
  Description of Artificial Sequence: Synthetic oligonucleotide
uguggaccgcgcuguaggg

SEQ ID NO: 2913048 - RNA, 19 nt, Artificial Sequence
  Description of Artificial Sequence: Synthetic oligonucleotide
cuccgcagggccuccaugg

SEQ ID NO: 2913049 - RNA, 19 nt, Artificial Sequence
  Description of Artificial Sequence: Synthetic oligonucleotide
gaagcagccggugcgcagg

SEQ ID NO: 2913050 - RNA, 19 nt, Artificial Sequence
  Description of Artificial Sequence: Synthetic oligonucleotide
ugagcgccgugaagaagcg

SEQ ID NO: 2913051 - RNA, 19 nt, Artificial Sequence
  Description of Artificial Sequence: Synthetic oligonucleotide
ccaaguccauauaacaaag

SEQ ID NO: 2913052 - RNA, 19 nt, Artificial Sequence
  Description of Artificial Sequence: Synthetic oligonucleotide
uggaccgcgcuguagggca

SEQ ID NO: 2913053 - RNA, 19 nt, Artificial Sequence
  Description of Artificial Sequence: Synthetic oligonucleotide
agcaguagccgcaacacga

SEQ ID NO: 2913054 - RNA, 19 nt, Artificial Sequence
  Description of Artificial Sequence: Synthetic oligonucleotide
agauguuauugguccauaa

SEQ ID NO: 2913055 - RNA, 19 nt, Artificial Sequence
  Description of Artificial Sequence: Synthetic oligonucleotide
aggagccaaguccauauaa

SEQ ID NO: 2913056 - RNA, 19 nt, Artificial Sequence
  Description of Artificial Sequence: Synthetic oligonucleotide
ggagcagugguacuugaug

SEQ ID NO: 2913057 - RNA, 19 nt, Artificial Sequence
  Description of Artificial Sequence: Synthetic oligonucleotide
accuugagcgccgugaaga

SEQ ID NO: 2913058 - RNA, 19 nt, Artificial Sequence
  Description of Artificial Sequence: Synthetic oligonucleotide
ucagcacuuccgaggcgcg

SEQ ID NO: 2913059 - RNA, 19 nt, Artificial Sequence
  Description of Artificial Sequence: Synthetic oligonucleotide
guaguuggcgcccggcacc

SEQ ID NO: 2913060 - RNA, 19 nt, Artificial Sequence
  Description of Artificial Sequence: Synthetic oligonucleotide
guuggaauacccagguuga

SEQ ID NO: 2913061 - RNA, 19 nt, Artificial Sequence
  Description of Artificial Sequence: Synthetic oligonucleotide
ugaaggggaagcagccggu

SEQ ID NO: 2913062 - RNA, 19 nt, Artificial Sequence
  Description of Artificial Sequence: Synthetic oligonucleotide
caggacgugguaguuggcg

SEQ ID NO: 2913063 - RNA, 19 nt, Artificial Sequence
  Description of Artificial Sequence: Synthetic oligonucleotide
accuucuaucuucuuauua

SEQ ID NO: 2913064 - RNA, 19 nt, Artificial Sequence
  Description of Artificial Sequence: Synthetic oligonucleotide
uugguccauaacugguaug

SEQ ID NO: 2913065 - RNA, 19 nt, Artificial Sequence
  Description of Artificial Sequence: Synthetic oligonucleotide
gucagcacuuccgaggcgc

SEQ ID NO: 2913066 - RNA, 19 nt, Artificial Sequence
  Description of Artificial Sequence: Synthetic oligonucleotide
ugguaguuggcgcccggca

SEQ ID NO: 2913067 - RNA, 19 nt, Artificial Sequence
  Description of Artificial Sequence: Synthetic oligonucleotide
ugcaccaggugcagcguca

SEQ ID NO: 2913068 - RNA, 19 nt, Artificial Sequence
  Description of Artificial Sequence: Synthetic oligonucleotide
accggcacagcaguagccg

SEQ ID NO: 2913069 - RNA, 19 nt, Artificial Sequence
  Description of Artificial Sequence: Synthetic oligonucleotide
aaggagguccagugcggca

SEQ ID NO: 2913070 - RNA, 19 nt, Artificial Sequence
  Description of Artificial Sequence: Synthetic oligonucleotide
auacccagguugaugaccu

SEQ ID NO: 2913071 - RNA, 19 nt, Artificial Sequence
  Description of Artificial Sequence: Synthetic oligonucleotide
cugguaugaacagucucug

SEQ ID NO: 2913072 - RNA, 19 nt, Artificial Sequence
  Description of Artificial Sequence: Synthetic oligonucleotide
auagauguuauugguccau

SEQ ID NO: 2913073 - RNA, 19 nt, Artificial Sequence
  Description of Artificial Sequence: Synthetic oligonucleotide
cuuauuagaaauagauguu

SEQ ID NO: 2913074 - RNA, 19 nt, Artificial Sequence
  Description of Artificial Sequence: Synthetic oligonucleotide
accaggugcagcgucagca

SEQ ID NO: 2913075 - RNA, 19 nt, Artificial Sequence
  Description of Artificial Sequence: Synthetic oligonucleotide
ugaagugagacaggccgaa

SEQ ID NO: 2913076 - RNA, 19 nt, Artificial Sequence
  Description of Artificial Sequence: Synthetic oligonucleotide
uucugaggggccagguccu

SEQ ID NO: 2913077 - RNA, 19 nt, Artificial Sequence
  Description of Artificial Sequence: Synthetic oligonucleotide
ugaggggccagguccugcc

SEQ ID NO: 2913078 - RNA, 19 nt, Artificial Sequence
  Description of Artificial Sequence: Synthetic oligonucleotide
aguagccgcaacacgaccu

SEQ ID NO: 2913079 - RNA, 19 nt, Artificial Sequence
  Description of Artificial Sequence: Synthetic oligonucleotide
ucgugggcccuccgcaggg

SEQ ID NO: 2913080 - RNA, 19 nt, Artificial Sequence
  Description of Artificial Sequence: Synthetic oligonucleotide
agcacuuccgaggcgcggg

SEQ ID NO: 2913081 - RNA, 19 nt, Artificial Sequence
  Description of Artificial Sequence: Synthetic oligonucleotide
gaauacccagguugaugac

SEQ ID NO: 2913082 - RNA, 19 nt, Artificial Sequence
  Description of Artificial Sequence: Synthetic oligonucleotide
agaaggagguccagugcgg

SEQ ID NO: 2913083 - RNA, 19 nt, Artificial Sequence
  Description of Artificial Sequence: Synthetic oligonucleotide
augaccuugagcgccguga

SEQ ID NO: 2913084 - RNA, 19 nt, Artificial Sequence
  Description of Artificial Sequence: Synthetic oligonucleotide
ugaccuugagcgccgugaa

SEQ ID NO: 2913085 - RNA, 19 nt, Artificial Sequence
  Description of Artificial Sequence: Synthetic oligonucleotide
ugguaugaacagucucugu

SEQ ID NO: 2913086 - RNA, 19 nt, Artificial Sequence
  Description of Artificial Sequence: Synthetic oligonucleotide
aggagguccagugcggcag

SEQ ID NO: 2913087 - RNA, 19 nt, Artificial Sequence
  Description of Artificial Sequence: Synthetic oligonucleotide
agcagugguacuugaugaa

SEQ ID NO: 2913088 - RNA, 19 nt, Artificial Sequence
  Description of Artificial Sequence: Synthetic oligonucleotide
caacacgaccucgugggcc

SEQ ID NO: 2913089 - RNA, 19 nt, Artificial Sequence
  Description of Artificial Sequence: Synthetic oligonucleotide
gaaggagguccagugcggc

SEQ ID NO: 2913090 - RNA, 19 nt, Artificial Sequence
  Description of Artificial Sequence: Synthetic oligonucleotide
gaggcggcgcccaaggccc

SEQ ID NO: 2913091 - RNA, 19 nt, Artificial Sequence
  Description of Artificial Sequence: Synthetic oligonucleotide
cgcaacacgaccucguggg

SEQ ID NO: 2913092 - RNA, 19 nt, Artificial Sequence
  Description of Artificial Sequence: Synthetic oligonucleotide
agucucugugacucuggca

SEQ ID NO: 2913093 - RNA, 19 nt, Artificial Sequence
  Description of Artificial Sequence: Synthetic oligonucleotide
uccagugcggcaggcgccg

SEQ ID NO: 2913094 - RNA, 19 nt, Artificial Sequence
  Description of Artificial Sequence: Synthetic oligonucleotide
gucguuguggaccgcgcug

SEQ ID NO: 2913095 - RNA, 19 nt, Artificial Sequence
  Description of Artificial Sequence: Synthetic oligonucleotide
aaguuggaauacccagguu

SEQ ID NO: 2913096 - RNA, 19 nt, Artificial Sequence
  Description of Artificial Sequence: Synthetic oligonucleotide
guacuugaugaaggggaag

SEQ ID NO: 2913097 - RNA, 19 nt, Artificial Sequence
  Description of Artificial Sequence: Synthetic oligonucleotide
uuggagcagugguacuuga

SEQ ID NO: 2913098 - RNA, 19 nt, Artificial Sequence
  Description of Artificial Sequence: Synthetic oligonucleotide
agcgccgugaagaagcggu

SEQ ID NO: 2913099 - RNA, 19 nt, Artificial Sequence
  Description of Artificial Sequence: Synthetic oligonucleotide
cagcaguagccgcaacacg

SEQ ID NO: 2913100 - RNA, 19 nt, Artificial Sequence
  Description of Artificial Sequence: Synthetic oligonucleotide
cuuggagcagugguacuug

SEQ ID NO: 2913101 - RNA, 19 nt, Artificial Sequence
  Description of Artificial Sequence: Synthetic oligonucleotide
ccauaacugguaugaacag

SEQ ID NO: 2913102 - RNA, 19 nt, Artificial Sequence
  Description of Artificial Sequence: Synthetic oligonucleotide
agccaaguccauauaacaa

SEQ ID NO: 2913103 - RNA, 19 nt, Artificial Sequence
  Description of Artificial Sequence: Synthetic oligonucleotide
uaguuggcgcccggcaccg

SEQ ID NO: 2913104 - RNA, 19 nt, Artificial Sequence
  Description of Artificial Sequence: Synthetic oligonucleotide
cagucucugugacucuggc

SEQ ID NO: 2913105 - RNA, 19 nt, Artificial Sequence
  Description of Artificial Sequence: Synthetic oligonucleotide
cugccaaggcgccuuggag

SEQ ID NO: 2913106 - RNA, 19 nt, Artificial Sequence
  Description of Artificial Sequence: Synthetic oligonucleotide
uggucguuguggaccgcgc

SEQ ID NO: 2913107 - RNA, 19 nt, Artificial Sequence
  Description of Artificial Sequence: Synthetic oligonucleotide
aggaccggcacagcaguag

SEQ ID NO: 2913108 - RNA, 19 nt, Artificial Sequence
  Description of Artificial Sequence: Synthetic oligonucleotide
gccagguccugccaaggcg

SEQ ID NO: 2913109 - RNA, 19 nt, Artificial Sequence
  Description of Artificial Sequence: Synthetic oligonucleotide
guagggcacgcagaaggag

SEQ ID NO: 2913110 - RNA, 19 nt, Artificial Sequence
  Description of Artificial Sequence: Synthetic oligonucleotide
aggcgcggggcuucgggcg

SEQ ID NO: 2913111 - RNA, 19 nt, Artificial Sequence
  Description of Artificial Sequence: Synthetic oligonucleotide
gaagcgguucugaggggcc

SEQ ID NO: 2913112 - RNA, 19 nt, Artificial Sequence
  Description of Artificial Sequence: Synthetic oligonucleotide
gaccuugagcgccgugaag

SEQ ID NO: 2913113 - RNA, 19 nt, Artificial Sequence
  Description of Artificial Sequence: Synthetic oligonucleotide
acagucucugugacucugg

SEQ ID NO: 2913114 - RNA, 19 nt, Artificial Sequence
  Description of Artificial Sequence: Synthetic oligonucleotide
cuggucguuguggaccgcg

SEQ ID NO: 2913115 - RNA, 19 nt, Artificial Sequence
  Description of Artificial Sequence: Synthetic oligonucleotide
uggagcagugguacuugau

SEQ ID NO: 2913116 - RNA, 19 nt, Artificial Sequence
  Description of Artificial Sequence: Synthetic oligonucleotide
acuuccgaggcgcggggcu

SEQ ID NO: 2913117 - RNA, 19 nt, Artificial Sequence
  Description of Artificial Sequence: Synthetic oligonucleotide
gguugaugaccuugagcgc

SEQ ID NO: 2913118 - RNA, 19 nt, Artificial Sequence
  Description of Artificial Sequence: Synthetic oligonucleotide
ucguuguggaccgcgcugu

SEQ ID NO: 2913119 - RNA, 19 nt, Artificial Sequence
  Description of Artificial Sequence: Synthetic oligonucleotide
cacagcaguagccgcaaca

SEQ ID NO: 2913120 - RNA, 19 nt, Artificial Sequence
  Description of Artificial Sequence: Synthetic oligonucleotide
caguagccgcaacacgacc

SEQ ID NO: 2913121 - RNA, 19 nt, Artificial Sequence
  Description of Artificial Sequence: Synthetic oligonucleotide
gacgugguaguuggcgccc

SEQ ID NO: 2913122 - RNA, 19 nt, Artificial Sequence
  Description of Artificial Sequence: Synthetic oligonucleotide
gcagccggugcgcaggacg

SEQ ID NO: 2913123 - RNA, 19 nt, Artificial Sequence
  Description of Artificial Sequence: Synthetic oligonucleotide
gguccagugcggcaggcgc

SEQ ID NO: 2913124 - RNA, 19 nt, Artificial Sequence
  Description of Artificial Sequence: Synthetic oligonucleotide
gaaggggaagcagccggug

SEQ ID NO: 2913125 - RNA, 19 nt, Artificial Sequence
  Description of Artificial Sequence: Synthetic oligonucleotide
ucucugugacucuggcaaa

SEQ ID NO: 2913126 - RNA, 19 nt, Artificial Sequence
  Description of Artificial Sequence: Synthetic oligonucleotide
uccgcagggccuccauggc

SEQ ID NO: 2913127 - RNA, 19 nt, Artificial Sequence
  Description of Artificial Sequence: Synthetic oligonucleotide
gcagugguacuugaugaag

SEQ ID NO: 2913128 - RNA, 19 nt, Artificial Sequence
  Description of Artificial Sequence: Synthetic oligonucleotide
acccagguugaugaccuug

SEQ ID NO: 2913129 - RNA, 19 nt, Artificial Sequence
  Description of Artificial Sequence: Synthetic oligonucleotide
gcgcccaaggcccaggacc

SEQ ID NO: 2913130 - RNA, 19 nt, Artificial Sequence
  Description of Artificial Sequence: Synthetic oligonucleotide
accucgugggcccuccgca

SEQ ID NO: 2913131 - RNA, 19 nt, Artificial Sequence
  Description of Artificial Sequence: Synthetic oligonucleotide
cucuggcaaauaaccagga

SEQ ID NO: 2913132 - RNA, 19 nt, Artificial Sequence
  Description of Artificial Sequence: Synthetic oligonucleotide
uagauguuauugguccaua

SEQ ID NO: 2913133 - RNA, 19 nt, Artificial Sequence
  Description of Artificial Sequence: Synthetic oligonucleotide
ccagguccugccaaggcgc

SEQ ID NO: 2913134 - RNA, 19 nt, Artificial Sequence
  Description of Artificial Sequence: Synthetic oligonucleotide
gaugaccuugagcgccgug

SEQ ID NO: 2913135 - RNA, 19 nt, Artificial Sequence
  Description of Artificial Sequence: Synthetic oligonucleotide
cuugagcgccgugaagaag

SEQ ID NO: 2913136 - RNA, 19 nt, Artificial Sequence
  Description of Artificial Sequence: Synthetic oligonucleotide
gcagaaggagguccagugc

SEQ ID NO: 2913137 - RNA, 19 nt, Artificial Sequence
  Description of Artificial Sequence: Synthetic oligonucleotide
guagccgcaacacgaccuc

SEQ ID NO: 2913138 - RNA, 19 nt, Artificial Sequence
  Description of Artificial Sequence: Synthetic oligonucleotide
uagccgcaacacgaccucg

SEQ ID NO: 2913139 - RNA, 19 nt, Artificial Sequence
  Description of Artificial Sequence: Synthetic oligonucleotide
ggacgugguaguuggcgcc

SEQ ID NO: 2913140 - RNA, 19 nt, Artificial Sequence
  Description of Artificial Sequence: Synthetic oligonucleotide
ccauauaacaaaguuggaa

SEQ ID NO: 2913141 - RNA, 19 nt, Artificial Sequence
  Description of Artificial Sequence: Synthetic oligonucleotide
ggagccaaguccauauaac

SEQ ID NO: 2913142 - RNA, 19 nt, Artificial Sequence
  Description of Artificial Sequence: Synthetic oligonucleotide
cucgugggcccuccgcagg

SEQ ID NO: 2913143 - RNA, 19 nt, Artificial Sequence
  Description of Artificial Sequence: Synthetic oligonucleotide
guuguggaccgcgcuguag

SEQ ID NO: 2913144 - RNA, 19 nt, Artificial Sequence
  Description of Artificial Sequence: Synthetic oligonucleotide
gaggcgcggggcuucgggc

SEQ ID NO: 2913145 - RNA, 19 nt, Artificial Sequence
  Description of Artificial Sequence: Synthetic oligonucleotide
gguaguuggcgcccggcac

SEQ ID NO: 2913146 - RNA, 19 nt, Artificial Sequence
  Description of Artificial Sequence: Synthetic oligonucleotide
gcaaauaaccaggagccaa

SEQ ID NO: 2913147 - RNA, 19 nt, Artificial Sequence
  Description of Artificial Sequence: Synthetic oligonucleotide
gcaccggccaguugaagug

SEQ ID NO: 2913148 - RNA, 19 nt, Artificial Sequence
  Description of Artificial Sequence: Synthetic oligonucleotide
ggcacgcagaaggaggucc

SEQ ID NO: 2913149 - RNA, 19 nt, Artificial Sequence
  Description of Artificial Sequence: Synthetic oligonucleotide
cgcaggacgugguaguugg

SEQ ID NO: 2913150 - RNA, 19 nt, Artificial Sequence
  Description of Artificial Sequence: Synthetic oligonucleotide
gaccucgugggcccuccgc

SEQ ID NO: 2913151 - RNA, 19 nt, Artificial Sequence
  Description of Artificial Sequence: Synthetic oligonucleotide
guuggcgcccggcaccggc

SEQ ID NO: 2913152 - RNA, 19 nt, Artificial Sequence
  Description of Artificial Sequence: Synthetic oligonucleotide
ccaguugaagugagacagg

SEQ ID NO: 2913153 - RNA, 19 nt, Artificial Sequence
  Description of Artificial Sequence: Synthetic oligonucleotide
gcgucagcacuuccgaggc

SEQ ID NO: 2913154 - RNA, 19 nt, Artificial Sequence
  Description of Artificial Sequence: Synthetic oligonucleotide
ucugugacucuggcaaaua

SEQ ID NO: 2913155 - RNA, 19 nt, Artificial Sequence
  Description of Artificial Sequence: Synthetic oligonucleotide
gaccggcacagcaguagcc

SEQ ID NO: 2913156 - RNA, 19 nt, Artificial Sequence
  Description of Artificial Sequence: Synthetic oligonucleotide
uuggcgcccggcaccggcc

SEQ ID NO: 2913157 - RNA, 19 nt, Artificial Sequence
  Description of Artificial Sequence: Synthetic oligonucleotide
aggccgaacuggucguugu

SEQ ID NO: 2913158 - RNA, 19 nt, Artificial Sequence
  Description of Artificial Sequence: Synthetic oligonucleotide
gaagugagacaggccgaac

SEQ ID NO: 2913159 - RNA, 19 nt, Artificial Sequence
  Description of Artificial Sequence: Synthetic oligonucleotide
cugugacucuggcaaauaa

SEQ ID NO: 2913160 - RNA, 19 nt, Artificial Sequence
  Description of Artificial Sequence: Synthetic oligonucleotide
ggugcgcaggacgugguag

SEQ ID NO: 2913161 - RNA, 19 nt, Artificial Sequence
  Description of Artificial Sequence: Synthetic oligonucleotide
aagcagccggugcgcagga

SEQ ID NO: 2913162 - RNA, 19 nt, Artificial Sequence
  Description of Artificial Sequence: Synthetic oligonucleotide
gccgaacuggucguugugg

SEQ ID NO: 2913163 - RNA, 19 nt, Artificial Sequence
  Description of Artificial Sequence: Synthetic oligonucleotide
caaguccauauaacaaagu

SEQ ID NO: 2913164 - RNA, 19 nt, Artificial Sequence
  Description of Artificial Sequence: Synthetic oligonucleotide
aagcgguucugaggggcca

SEQ ID NO: 2913165 - RNA, 19 nt, Artificial Sequence
  Description of Artificial Sequence: Synthetic oligonucleotide
acgaccucgugggcccucc

SEQ ID NO: 2913166 - RNA, 19 nt, Artificial Sequence
  Description of Artificial Sequence: Synthetic oligonucleotide
cagcgucagcacuuccgag

SEQ ID NO: 2913167 - RNA, 19 nt, Artificial Sequence
  Description of Artificial Sequence: Synthetic oligonucleotide
cagguccugccaaggcgcc

SEQ ID NO: 2913168 - RNA, 19 nt, Artificial Sequence
  Description of Artificial Sequence: Synthetic oligonucleotide
uuggaauacccagguugau

SEQ ID NO: 2913169 - RNA, 19 nt, Artificial Sequence
  Description of Artificial Sequence: Synthetic oligonucleotide
ggaccggcacagcaguagc

SEQ ID NO: 2913170 - RNA, 19 nt, Artificial Sequence
  Description of Artificial Sequence: Synthetic oligonucleotide
cauaacugguaugaacagu

SEQ ID NO: 2913171 - RNA, 19 nt, Artificial Sequence
  Description of Artificial Sequence: Synthetic oligonucleotide
agguccagugcggcaggcg

SEQ ID NO: 2913172 - RNA, 19 nt, Artificial Sequence
  Description of Artificial Sequence: Synthetic oligonucleotide
ucgggcgggaggcggcgcc

SEQ ID NO: 2913173 - RNA, 19 nt, Artificial Sequence
  Description of Artificial Sequence: Synthetic oligonucleotide
gccaaggcgccuuggagca

SEQ ID NO: 2913174 - RNA, 19 nt, Artificial Sequence
  Description of Artificial Sequence: Synthetic oligonucleotide
agggcacgcagaaggaggu

SEQ ID NO: 2913175 - RNA, 19 nt, Artificial Sequence
  Description of Artificial Sequence: Synthetic oligonucleotide
gagacaggccgaacugguc

SEQ ID NO: 2913176 - RNA, 19 nt, Artificial Sequence
  Description of Artificial Sequence: Synthetic oligonucleotide
caaggcccaggaccggcac

SEQ ID NO: 2913177 - RNA, 19 nt, Artificial Sequence
  Description of Artificial Sequence: Synthetic oligonucleotide
ggaagcagccggugcgcag

SEQ ID NO: 2913178 - RNA, 19 nt, Artificial Sequence
  Description of Artificial Sequence: Synthetic oligonucleotide
uccugccaaggcgccuugg

SEQ ID NO: 2913179 - RNA, 19 nt, Artificial Sequence
  Description of Artificial Sequence: Synthetic oligonucleotide
gacaggccgaacuggucgu

SEQ ID NO: 2913180 - RNA, 19 nt, Artificial Sequence
  Description of Artificial Sequence: Synthetic oligonucleotide
gagcgccgugaagaagcgg

SEQ ID NO: 2913181 - RNA, 19 nt, Artificial Sequence
  Description of Artificial Sequence: Synthetic oligonucleotide
acuggucguuguggaccgc

SEQ ID NO: 2913182 - RNA, 19 nt, Artificial Sequence
  Description of Artificial Sequence: Synthetic oligonucleotide
ugcggcaggcgccgcugca

SEQ ID NO: 2913183 - RNA, 19 nt, Artificial Sequence
  Description of Artificial Sequence: Synthetic oligonucleotide
gcagcgucagcacuuccga

SEQ ID NO: 2913184 - RNA, 19 nt, Artificial Sequence
  Description of Artificial Sequence: Synthetic oligonucleotide
ugggcccuccgcagggccu

SEQ ID NO: 2913185 - RNA, 19 nt, Artificial Sequence
  Description of Artificial Sequence: Synthetic oligonucleotide
gguacuugaugaaggggaa

SEQ ID NO: 2913186 - RNA, 19 nt, Artificial Sequence
  Description of Artificial Sequence: Synthetic oligonucleotide
ggccaguugaagugagaca

SEQ ID NO: 2913187 - RNA, 19 nt, Artificial Sequence
  Description of Artificial Sequence: Synthetic oligonucleotide
gaccgcgcuguagggcacg

SEQ ID NO: 2913188 - RNA, 19 nt, Artificial Sequence
  Description of Artificial Sequence: Synthetic oligonucleotide
gugguaguuggcgcccggc

SEQ ID NO: 2913189 - RNA, 19 nt, Artificial Sequence
  Description of Artificial Sequence: Synthetic oligonucleotide
acgugguaguuggcgcccg

SEQ ID NO: 2913190 - RNA, 19 nt, Artificial Sequence
  Description of Artificial Sequence: Synthetic oligonucleotide
agcgguucugaggggccag

SEQ ID NO: 2913191 - RNA, 19 nt, Artificial Sequence
  Description of Artificial Sequence: Synthetic oligonucleotide
cugcaccaggugcagcguc

SEQ ID NO: 2913192 - RNA, 19 nt, Artificial Sequence
  Description of Artificial Sequence: Synthetic oligonucleotide
guggaccgcgcuguagggc

SEQ ID NO: 2913193 - RNA, 19 nt, Artificial Sequence
  Description of Artificial Sequence: Synthetic oligonucleotide
accgcgcuguagggcacgc

SEQ ID NO: 2913194 - RNA, 19 nt, Artificial Sequence
  Description of Artificial Sequence: Synthetic oligonucleotide
aggggccagguccugccaa

SEQ ID NO: 2913195 - RNA, 19 nt, Artificial Sequence
  Description of Artificial Sequence: Synthetic oligonucleotide
gugggcccuccgcagggcc

SEQ ID NO: 2913196 - RNA, 19 nt, Artificial Sequence
  Description of Artificial Sequence: Synthetic oligonucleotide
acgcagaaggagguccagu

SEQ ID NO: 2913197 - RNA, 19 nt, Artificial Sequence
  Description of Artificial Sequence: Synthetic oligonucleotide
accggccaguugaagugag

SEQ ID NO: 2913198 - RNA, 19 nt, Artificial Sequence
  Description of Artificial Sequence: Synthetic oligonucleotide
ccgcaacacgaccucgugg

SEQ ID NO: 2913199 - RNA, 19 nt, Artificial Sequence
  Description of Artificial Sequence: Synthetic oligonucleotide
cacgcagaaggagguccag

SEQ ID NO: 2913200 - RNA, 19 nt, Artificial Sequence
  Description of Artificial Sequence: Synthetic oligonucleotide
guccagugcggcaggcgcc

SEQ ID NO: 2913201 - RNA, 19 nt, Artificial Sequence
  Description of Artificial Sequence: Synthetic oligonucleotide
cuucgggcgggaggcggcg

SEQ ID NO: 2913202 - RNA, 19 nt, Artificial Sequence
  Description of Artificial Sequence: Synthetic oligonucleotide
gaacagucucugugacucu

SEQ ID NO: 2913203 - RNA, 19 nt, Artificial Sequence
  Description of Artificial Sequence: Synthetic oligonucleotide
caggcgccgcugcaccagg

SEQ ID NO: 2913204 - RNA, 19 nt, Artificial Sequence
  Description of Artificial Sequence: Synthetic oligonucleotide
cagcacuuccgaggcgcgg

SEQ ID NO: 2913205 - RNA, 19 nt, Artificial Sequence
  Description of Artificial Sequence: Synthetic oligonucleotide
ccaggugcagcgucagcac

SEQ ID NO: 2913206 - RNA, 19 nt, Artificial Sequence
  Description of Artificial Sequence: Synthetic oligonucleotide
caggccgaacuggucguug

SEQ ID NO: 2913207 - RNA, 19 nt, Artificial Sequence
  Description of Artificial Sequence: Synthetic oligonucleotide
uccgaggcgcggggcuucg

SEQ ID NO: 2913208 - RNA, 19 nt, Artificial Sequence
  Description of Artificial Sequence: Synthetic oligonucleotide
ggccagguccugccaaggc

SEQ ID NO: 2913209 - RNA, 19 nt, Artificial Sequence
  Description of Artificial Sequence: Synthetic oligonucleotide
ugaugaccuugagcgccgu

SEQ ID NO: 2913210 - RNA, 19 nt, Artificial Sequence
  Description of Artificial Sequence: Synthetic oligonucleotide
gcaacacgaccucgugggc

SEQ ID NO: 2913211 - RNA, 19 nt, Artificial Sequence
  Description of Artificial Sequence: Synthetic oligonucleotide
uggcgcccggcaccggcca

SEQ ID NO: 2913212 - RNA, 19 nt, Artificial Sequence
  Description of Artificial Sequence: Synthetic oligonucleotide
agccgcaacacgaccucgu

SEQ ID NO: 2913213 - RNA, 19 nt, Artificial Sequence
  Description of Artificial Sequence: Synthetic oligonucleotide
ggggccagguccugccaag

SEQ ID NO: 2913214 - RNA, 19 nt, Artificial Sequence
  Description of Artificial Sequence: Synthetic oligonucleotide
ggcaccggccaguugaagu

SEQ ID NO: 2913215 - RNA, 19 nt, Artificial Sequence
  Description of Artificial Sequence: Synthetic oligonucleotide
gcaguagccgcaacacgac

SEQ ID NO: 2913216 - RNA, 19 nt, Artificial Sequence
  Description of Artificial Sequence: Synthetic oligonucleotide
gcacuuccgaggcgcgggg

SEQ ID NO: 2913217 - RNA, 19 nt, Artificial Sequence
  Description of Artificial Sequence: Synthetic oligonucleotide
ggcaaauaaccaggagcca

SEQ ID NO: 2913218 - RNA, 19 nt, Artificial Sequence
  Description of Artificial Sequence: Synthetic oligonucleotide
ggcgccuuggagcaguggu

SEQ ID NO: 2913219 - RNA, 19 nt, Artificial Sequence
  Description of Artificial Sequence: Synthetic oligonucleotide
aggugcagcgucagcacuu

SEQ ID NO: 2913220 - RNA, 19 nt, Artificial Sequence
  Description of Artificial Sequence: Synthetic oligonucleotide
aaggcgccuuggagcagug

SEQ ID NO: 2913221 - RNA, 19 nt, Artificial Sequence
  Description of Artificial Sequence: Synthetic oligonucleotide
gccggugcgcaggacgugg

SEQ ID NO: 2913222 - RNA, 19 nt, Artificial Sequence
  Description of Artificial Sequence: Synthetic oligonucleotide
cgcgcuguagggcacgcag

SEQ ID NO: 2913223 - RNA, 19 nt, Artificial Sequence
  Description of Artificial Sequence: Synthetic oligonucleotide
aaccaggagccaaguccau

SEQ ID NO: 2913224 - RNA, 19 nt, Artificial Sequence
  Description of Artificial Sequence: Synthetic oligonucleotide
accaggagccaaguccaua

SEQ ID NO: 2913225 - RNA, 19 nt, Artificial Sequence
  Description of Artificial Sequence: Synthetic oligonucleotide
gaggggccagguccugcca

SEQ ID NO: 2913226 - RNA, 19 nt, Artificial Sequence
  Description of Artificial Sequence: Synthetic oligonucleotide
gcgccgcugcaccaggugc

SEQ ID NO: 2913227 - RNA, 19 nt, Artificial Sequence
  Description of Artificial Sequence: Synthetic oligonucleotide
ugcgcaggacgugguaguu

SEQ ID NO: 2913228 - RNA, 19 nt, Artificial Sequence
  Description of Artificial Sequence: Synthetic oligonucleotide
ggccgaacuggucguugug

SEQ ID NO: 2913229 - RNA, 19 nt, Artificial Sequence
  Description of Artificial Sequence: Synthetic oligonucleotide
gccgcaacacgaccucgug

SEQ ID NO: 2913230 - RNA, 19 nt, Artificial Sequence
  Description of Artificial Sequence: Synthetic oligonucleotide
cacuuccgaggcgcggggc

SEQ ID NO: 2913231 - RNA, 19 nt, Artificial Sequence
  Description of Artificial Sequence: Synthetic oligonucleotide
cccggcaccggccaguuga

SEQ ID NO: 2913232 - RNA, 19 nt, Artificial Sequence
  Description of Artificial Sequence: Synthetic oligonucleotide
ggcuucgggcgggaggcgg

SEQ ID NO: 2913233 - RNA, 19 nt, Artificial Sequence
  Description of Artificial Sequence: Synthetic oligonucleotide
gcuguagggcacgcagaag

SEQ ID NO: 2913234 - RNA, 19 nt, Artificial Sequence
  Description of Artificial Sequence: Synthetic oligonucleotide
ccggcacagcaguagccgc

SEQ ID NO: 2913235 - RNA, 19 nt, Artificial Sequence
  Description of Artificial Sequence: Synthetic oligonucleotide
ccgaacuggucguugugga

SEQ ID NO: 2913236 - RNA, 19 nt, Artificial Sequence
  Description of Artificial Sequence: Synthetic oligonucleotide
agcagccggugcgcaggac

SEQ ID NO: 2913237 - RNA, 19 nt, Artificial Sequence
  Description of Artificial Sequence: Synthetic oligonucleotide
aggcgccuuggagcagugg

SEQ ID NO: 2913238 - RNA, 19 nt, Artificial Sequence
  Description of Artificial Sequence: Synthetic oligonucleotide
cggccaguugaagugagac

SEQ ID NO: 2913239 - RNA, 19 nt, Artificial Sequence
  Description of Artificial Sequence: Synthetic oligonucleotide
gugcgcaggacgugguagu

SEQ ID NO: 2913240 - RNA, 19 nt, Artificial Sequence
  Description of Artificial Sequence: Synthetic oligonucleotide
gccgugaagaagcgguucu

SEQ ID NO: 2913241 - RNA, 19 nt, Artificial Sequence
  Description of Artificial Sequence: Synthetic oligonucleotide
ggcgccgcugcaccaggug

SEQ ID NO: 2913242 - RNA, 19 nt, Artificial Sequence
  Description of Artificial Sequence: Synthetic oligonucleotide
uuccgaggcgcggggcuuc

SEQ ID NO: 2913243 - RNA, 19 nt, Artificial Sequence
  Description of Artificial Sequence: Synthetic oligonucleotide
gggccagguccugccaagg

SEQ ID NO: 2913244 - RNA, 19 nt, Artificial Sequence
  Description of Artificial Sequence: Synthetic oligonucleotide
uacccagguugaugaccuu

SEQ ID NO: 2913245 - RNA, 19 nt, Artificial Sequence
  Description of Artificial Sequence: Synthetic oligonucleotide
ggugcagcgucagcacuuc

SEQ ID NO: 2913246 - RNA, 19 nt, Artificial Sequence
  Description of Artificial Sequence: Synthetic oligonucleotide
gcccaggaccggcacagca

SEQ ID NO: 2913247 - RNA, 19 nt, Artificial Sequence
  Description of Artificial Sequence: Synthetic oligonucleotide
ccucgugggcccuccgcag

SEQ ID NO: 2913248 - RNA, 19 nt, Artificial Sequence
  Description of Artificial Sequence: Synthetic oligonucleotide
uucgggcgggaggcggcgc

SEQ ID NO: 2913249 - RNA, 19 nt, Artificial Sequence
  Description of Artificial Sequence: Synthetic oligonucleotide
caccggccaguugaaguga

SEQ ID NO: 2913250 - RNA, 19 nt, Artificial Sequence
  Description of Artificial Sequence: Synthetic oligonucleotide
gguccauaacugguaugaa

SEQ ID NO: 2913251 - RNA, 19 nt, Artificial Sequence
  Description of Artificial Sequence: Synthetic oligonucleotide
ccaggagccaaguccauau

SEQ ID NO: 2913252 - RNA, 19 nt, Artificial Sequence
  Description of Artificial Sequence: Synthetic oligonucleotide
aguuggcgcccggcaccgg

SEQ ID NO: 2913253 - RNA, 19 nt, Artificial Sequence
  Description of Artificial Sequence: Synthetic oligonucleotide
caggagccaaguccauaua

SEQ ID NO: 2913254 - RNA, 19 nt, Artificial Sequence
  Description of Artificial Sequence: Synthetic oligonucleotide
agguccugccaaggcgccu

SEQ ID NO: 2913255 - RNA, 19 nt, Artificial Sequence
  Description of Artificial Sequence: Synthetic oligonucleotide
caggugcagcgucagcacu

SEQ ID NO: 2913256 - RNA, 19 nt, Artificial Sequence
  Description of Artificial Sequence: Synthetic oligonucleotide
gcaggcgccgcugcaccag

SEQ ID NO: 2913257 - RNA, 19 nt, Artificial Sequence
  Description of Artificial Sequence: Synthetic oligonucleotide
gggaggcggcgcccaaggc

SEQ ID NO: 2913258 - RNA, 19 nt, Artificial Sequence
  Description of Artificial Sequence: Synthetic oligonucleotide
gcgcaggacgugguaguug

SEQ ID NO: 2913259 - RNA, 19 nt, Artificial Sequence
  Description of Artificial Sequence: Synthetic oligonucleotide
cagccggugcgcaggacgu

SEQ ID NO: 2913260 - RNA, 19 nt, Artificial Sequence
  Description of Artificial Sequence: Synthetic oligonucleotide
cucugugacucuggcaaau

SEQ ID NO: 2913261 - RNA, 19 nt, Artificial Sequence
  Description of Artificial Sequence: Synthetic oligonucleotide
gcgguucugaggggccagg

SEQ ID NO: 2913262 - RNA, 19 nt, Artificial Sequence
  Description of Artificial Sequence: Synthetic oligonucleotide
ggucguuguggaccgcgcu

SEQ ID NO: 2913263 - RNA, 19 nt, Artificial Sequence
  Description of Artificial Sequence: Synthetic oligonucleotide
caaggcgccuuggagcagu

SEQ ID NO: 2913264 - RNA, 19 nt, Artificial Sequence
  Description of Artificial Sequence: Synthetic oligonucleotide
ccugccaaggcgccuugga

SEQ ID NO: 2913265 - RNA, 19 nt, Artificial Sequence
  Description of Artificial Sequence: Synthetic oligonucleotide
cgggaggcggcgcccaagg

SEQ ID NO: 2913266 - RNA, 19 nt, Artificial Sequence
  Description of Artificial Sequence: Synthetic oligonucleotide
ccuugagcgccgugaagaa

SEQ ID NO: 2913267 - RNA, 19 nt, Artificial Sequence
  Description of Artificial Sequence: Synthetic oligonucleotide
agccggugcgcaggacgug

SEQ ID NO: 2913268 - RNA, 19 nt, Artificial Sequence
  Description of Artificial Sequence: Synthetic oligonucleotide
cgugaagaagcgguucuga

SEQ ID NO: 2913269 - RNA, 19 nt, Artificial Sequence
  Description of Artificial Sequence: Synthetic oligonucleotide
acaggccgaacuggucguu

SEQ ID NO: 2913270 - RNA, 19 nt, Artificial Sequence
  Description of Artificial Sequence: Synthetic oligonucleotide
gcacgcagaaggaggucca

SEQ ID NO: 2913271 - RNA, 19 nt, Artificial Sequence
  Description of Artificial Sequence: Synthetic oligonucleotide
ggcacagcaguagccgcaa

SEQ ID NO: 2913272 - RNA, 19 nt, Artificial Sequence
  Description of Artificial Sequence: Synthetic oligonucleotide
gccgcugcaccaggugcag

SEQ ID NO: 2913273 - RNA, 19 nt, Artificial Sequence
  Description of Artificial Sequence: Synthetic oligonucleotide
gcuucgggcgggaggcggc

SEQ ID NO: 2913274 - RNA, 19 nt, Artificial Sequence
  Description of Artificial Sequence: Synthetic oligonucleotide
cgugguaguuggcgcccgg

SEQ ID NO: 2913275 - RNA, 19 nt, Artificial Sequence
  Description of Artificial Sequence: Synthetic oligonucleotide
ggcgcccaaggcccaggac

SEQ ID NO: 2913276 - RNA, 19 nt, Artificial Sequence
  Description of Artificial Sequence: Synthetic oligonucleotide
caggaccggcacagcagua

SEQ ID NO: 2913277 - RNA, 19 nt, Artificial Sequence
  Description of Artificial Sequence: Synthetic oligonucleotide
cgucagcacuuccgaggcg

SEQ ID NO: 2913278 - RNA, 19 nt, Artificial Sequence
  Description of Artificial Sequence: Synthetic oligonucleotide
ccuccgcagggccuccaug

SEQ ID NO: 2913279 - RNA, 19 nt, Artificial Sequence
  Description of Artificial Sequence: Synthetic oligonucleotide
ccaaggcccaggaccggca

SEQ ID NO: 2913280 - RNA, 19 nt, Artificial Sequence
  Description of Artificial Sequence: Synthetic oligonucleotide
acacgaccucgugggcccu

SEQ ID NO: 2913281 - RNA, 19 nt, Artificial Sequence
  Description of Artificial Sequence: Synthetic oligonucleotide
gcaggacgugguaguuggc

SEQ ID NO: 2913282 - RNA, 19 nt, Artificial Sequence
  Description of Artificial Sequence: Synthetic oligonucleotide
gggaagcagccggugcgca

SEQ ID NO: 2913283 - RNA, 19 nt, Artificial Sequence
  Description of Artificial Sequence: Synthetic oligonucleotide
cgcuguagggcacgcagaa

SEQ ID NO: 2913284 - RNA, 19 nt, Artificial Sequence
  Description of Artificial Sequence: Synthetic oligonucleotide
ccaggaccggcacagcagu

SEQ ID NO: 2913285 - RNA, 19 nt, Artificial Sequence
  Description of Artificial Sequence: Synthetic oligonucleotide
cacgaccucgugggcccuc

SEQ ID NO: 2913286 - RNA, 19 nt, Artificial Sequence
  Description of Artificial Sequence: Synthetic oligonucleotide
gcgcuguagggcacgcaga

SEQ ID NO: 2913287 - RNA, 19 nt, Artificial Sequence
  Description of Artificial Sequence: Synthetic oligonucleotide
ggcgcccggcaccggccag

SEQ ID NO: 2913288 - RNA, 19 nt, Artificial Sequence
  Description of Artificial Sequence: Synthetic oligonucleotide
gggcuucgggcgggaggcg

SEQ ID NO: 2913289 - RNA, 19 nt, Artificial Sequence
  Description of Artificial Sequence: Synthetic oligonucleotide
gcggcaggcgccgcugcac

SEQ ID NO: 2913290 - RNA, 19 nt, Artificial Sequence
  Description of Artificial Sequence: Synthetic oligonucleotide
cggcaggcgccgcugcacc

SEQ ID NO: 2913291 - RNA, 19 nt, Artificial Sequence
  Description of Artificial Sequence: Synthetic oligonucleotide
cgccgugaagaagcgguuc

SEQ ID NO: 2913292 - RNA, 19 nt, Artificial Sequence
  Description of Artificial Sequence: Synthetic oligonucleotide
ggaccgcgcuguagggcac

SEQ ID NO: 2913293 - RNA, 19 nt, Artificial Sequence
  Description of Artificial Sequence: Synthetic oligonucleotide
gcgggaggcggcgcccaag

SEQ ID NO: 2913294 - RNA, 19 nt, Artificial Sequence
  Description of Artificial Sequence: Synthetic oligonucleotide
gggcacgcagaaggagguc

SEQ ID NO: 2913295 - RNA, 19 nt, Artificial Sequence
  Description of Artificial Sequence: Synthetic oligonucleotide
gcggcgcccaaggcccagg

SEQ ID NO: 2913296 - RNA, 19 nt, Artificial Sequence
  Description of Artificial Sequence: Synthetic oligonucleotide
gccuuggagcagugguacu

SEQ ID NO: 2913297 - RNA, 19 nt, Artificial Sequence
  Description of Artificial Sequence: Synthetic oligonucleotide
ccggccaguugaagugaga

SEQ ID NO: 2913298 - RNA, 19 nt, Artificial Sequence
  Description of Artificial Sequence: Synthetic oligonucleotide
gcgccuuggagcaguggua

SEQ ID NO: 2913299 - RNA, 19 nt, Artificial Sequence
  Description of Artificial Sequence: Synthetic oligonucleotide
ccaaggcgccuuggagcag

SEQ ID NO: 2913300 - RNA, 19 nt, Artificial Sequence
  Description of Artificial Sequence: Synthetic oligonucleotide
cgccgcugcaccaggugca

SEQ ID NO: 2913301 - RNA, 19 nt, Artificial Sequence
  Description of Artificial Sequence: Synthetic oligonucleotide
gguccugccaaggcgccuu

SEQ ID NO: 2913302 - RNA, 19 nt, Artificial Sequence
  Description of Artificial Sequence: Synthetic oligonucleotide
ccuuggagcagugguacuu

SEQ ID NO: 2913303 - RNA, 19 nt, Artificial Sequence
  Description of Artificial Sequence: Synthetic oligonucleotide
ggcggcgcccaaggcccag

SEQ ID NO: 2913304 - RNA, 19 nt, Artificial Sequence
  Description of Artificial Sequence: Synthetic oligonucleotide
gggcccuccgcagggccuc

SEQ ID NO: 2913305 - RNA, 19 nt, Artificial Sequence
  Description of Artificial Sequence: Synthetic oligonucleotide
cagugcggcaggcgccgcu

SEQ ID NO: 2913306 - RNA, 19 nt, Artificial Sequence
  Description of Artificial Sequence: Synthetic oligonucleotide
gcugcaccaggugcagcgu

SEQ ID NO: 2913307 - RNA, 19 nt, Artificial Sequence
  Description of Artificial Sequence: Synthetic oligonucleotide
cgaccucgugggcccuccg

SEQ ID NO: 2913308 - RNA, 19 nt, Artificial Sequence
  Description of Artificial Sequence: Synthetic oligonucleotide
aggcggcgcccaaggccca

SEQ ID NO: 2913309 - RNA, 19 nt, Artificial Sequence
  Description of Artificial Sequence: Synthetic oligonucleotide
cuuccgaggcgcggggcuu

SEQ ID NO: 2913310 - RNA, 19 nt, Artificial Sequence
  Description of Artificial Sequence: Synthetic oligonucleotide
ccgcugcaccaggugcagc

SEQ ID NO: 2913311 - RNA, 19 nt, Artificial Sequence
  Description of Artificial Sequence: Synthetic oligonucleotide
cgugggcccuccgcagggc

SEQ ID NO: 2913312 - RNA, 19 nt, Artificial Sequence
  Description of Artificial Sequence: Synthetic oligonucleotide
ccagugcggcaggcgccgc

SEQ ID NO: 2913313 - RNA, 19 nt, Artificial Sequence
  Description of Artificial Sequence: Synthetic oligonucleotide
ccggcaccggccaguugaa

SEQ ID NO: 2913314 - RNA, 19 nt, Artificial Sequence
  Description of Artificial Sequence: Synthetic oligonucleotide
gcccggcaccggccaguug

SEQ ID NO: 2913315 - RNA, 19 nt, Artificial Sequence
  Description of Artificial Sequence: Synthetic oligonucleotide
ggcccuccgcagggccucc

SEQ ID NO: 2913316 - RNA, 19 nt, Artificial Sequence
  Description of Artificial Sequence: Synthetic oligonucleotide
ggcgggaggcggcgcccaa

SEQ ID NO: 2913317 - RNA, 19 nt, Artificial Sequence
  Description of Artificial Sequence: Synthetic oligonucleotide
ccgaggcgcggggcuucgg

SEQ ID NO: 2913318 - RNA, 19 nt, Artificial Sequence
  Description of Artificial Sequence: Synthetic oligonucleotide
cggcaccggccaguugaag

SEQ ID NO: 2913319 - RNA, 19 nt, Artificial Sequence
  Description of Artificial Sequence: Synthetic oligonucleotide
cgggcgggaggcggcgccc

SEQ ID NO: 2913320 - RNA, 19 nt, Artificial Sequence
  Description of Artificial Sequence: Synthetic oligonucleotide
cguuguggaccgcgcugua

SEQ ID NO: 2913321 - RNA, 19 nt, Artificial Sequence
  Description of Artificial Sequence: Synthetic oligonucleotide
ccggugcgcaggacguggu

SEQ ID NO: 2913322 - RNA, 19 nt, Artificial Sequence
  Description of Artificial Sequence: Synthetic oligonucleotide
gcgccgugaagaagcgguu

SEQ ID NO: 2913323 - RNA, 19 nt, Artificial Sequence
  Description of Artificial Sequence: Synthetic oligonucleotide
cggcgcccaaggcccagga

SEQ ID NO: 2913324 - RNA, 19 nt, Artificial Sequence
  Description of Artificial Sequence: Synthetic oligonucleotide
gcccuccgcagggccucca

SEQ ID NO: 2913325 - RNA, 19 nt, Artificial Sequence
  Description of Artificial Sequence: Synthetic oligonucleotide
cggugcgcaggacguggua

SEQ ID NO: 2913326 - RNA, 19 nt, Artificial Sequence
  Description of Artificial Sequence: Synthetic oligonucleotide
ccgcgcuguagggcacgca

SEQ ID NO: 2913327 - RNA, 19 nt, Artificial Sequence
  Description of Artificial Sequence: Synthetic oligonucleotide
gcgcccggcaccggccagu

SEQ ID NO: 2913328 - RNA, 19 nt, Artificial Sequence
  Description of Artificial Sequence: Synthetic oligonucleotide
cccuccgcagggccuccau

SEQ ID NO: 2913329 - RNA, 19 nt, Artificial Sequence
  Description of Artificial Sequence: Synthetic oligonucleotide
cgcggggcuucgggcggga

SEQ ID NO: 2913330 - RNA, 19 nt, Artificial Sequence
  Description of Artificial Sequence: Synthetic oligonucleotide
cgcccggcaccggccaguu

SEQ ID NO: 2913331 - RNA, 19 nt, Artificial Sequence
  Description of Artificial Sequence: Synthetic oligonucleotide
uuaaauguugaucauaagc

SEQ ID NO: 2913332 - RNA, 19 nt, Artificial Sequence
  Description of Artificial Sequence: Synthetic oligonucleotide
aaagucuccauuuuccuac

SEQ ID NO: 2913333 - RNA, 19 nt, Artificial Sequence
  Description of Artificial Sequence: Synthetic oligonucleotide
uaaauguugaucauaagca

SEQ ID NO: 2913334 - RNA, 19 nt, Artificial Sequence
  Description of Artificial Sequence: Synthetic oligonucleotide
ucaucaaucucuaucgucg

SEQ ID NO: 2913335 - RNA, 19 nt, Artificial Sequence
  Description of Artificial Sequence: Synthetic oligonucleotide
caaaugaacucuuugaggg

SEQ ID NO: 2913336 - RNA, 19 nt, Artificial Sequence
  Description of Artificial Sequence: Synthetic oligonucleotide
accauuuucugucucagcc

SEQ ID NO: 2913337 - RNA, 19 nt, Artificial Sequence
  Description of Artificial Sequence: Synthetic oligonucleotide
cauauuuaaauguugauca

SEQ ID NO: 2913338 - RNA, 19 nt, Artificial Sequence
  Description of Artificial Sequence: Synthetic oligonucleotide
aauucgcucauccaaacug

SEQ ID NO: 2913339 - RNA, 19 nt, Artificial Sequence
  Description of Artificial Sequence: Synthetic oligonucleotide
uauauaucucuucauaugu

SEQ ID NO: 2913340 - RNA, 19 nt, Artificial Sequence
  Description of Artificial Sequence: Synthetic oligonucleotide
acuaucagaauacacauga

SEQ ID NO: 2913341 - RNA, 19 nt, Artificial Sequence
  Description of Artificial Sequence: Synthetic oligonucleotide
ugauuuauauaucucuuca

SEQ ID NO: 2913342 - RNA, 19 nt, Artificial Sequence
  Description of Artificial Sequence: Synthetic oligonucleotide
aacaacaccaucuccccgg

SEQ ID NO: 2913343 - RNA, 19 nt, Artificial Sequence
  Description of Artificial Sequence: Synthetic oligonucleotide
uucuguacaucucaagagg

SEQ ID NO: 2913344 - RNA, 19 nt, Artificial Sequence
  Description of Artificial Sequence: Synthetic oligonucleotide
uaucagaauacacaugagc

SEQ ID NO: 2913345 - RNA, 19 nt, Artificial Sequence
  Description of Artificial Sequence: Synthetic oligonucleotide
auguaaucugccucgaagc

SEQ ID NO: 2913346 - RNA, 19 nt, Artificial Sequence
  Description of Artificial Sequence: Synthetic oligonucleotide
uuuguugauuuauauaucu

SEQ ID NO: 2913347 - RNA, 19 nt, Artificial Sequence
  Description of Artificial Sequence: Synthetic oligonucleotide
uagaacaacaccaucuccc

SEQ ID NO: 2913348 - RNA, 19 nt, Artificial Sequence
  Description of Artificial Sequence: Synthetic oligonucleotide
uguugauuuauauaucucu

SEQ ID NO: 2913349 - RNA, 19 nt, Artificial Sequence
  Description of Artificial Sequence: Synthetic oligonucleotide
aacaccaucuccccggacg

SEQ ID NO: 2913350 - RNA, 19 nt, Artificial Sequence
  Description of Artificial Sequence: Synthetic oligonucleotide
uccaaacugagccugauga

SEQ ID NO: 2913351 - RNA, 19 nt, Artificial Sequence
  Description of Artificial Sequence: Synthetic oligonucleotide
uccauuuuccuacacagga

SEQ ID NO: 2913352 - RNA, 19 nt, Artificial Sequence
  Description of Artificial Sequence: Synthetic oligonucleotide
uuauauaucucuucauaug

SEQ ID NO: 2913353 - RNA, 19 nt, Artificial Sequence
  Description of Artificial Sequence: Synthetic oligonucleotide
aagcauguaaucugccucg

SEQ ID NO: 2913354 - RNA, 19 nt, Artificial Sequence
  Description of Artificial Sequence: Synthetic oligonucleotide
uuuauauaucucuucauau

SEQ ID NO: 2913355 - RNA, 19 nt, Artificial Sequence
  Description of Artificial Sequence: Synthetic oligonucleotide
uccucuacgguauugguag

SEQ ID NO: 2913356 - RNA, 19 nt, Artificial Sequence
  Description of Artificial Sequence: Synthetic oligonucleotide
aagagcauggggauguucc

SEQ ID NO: 2913357 - RNA, 19 nt, Artificial Sequence
  Description of Artificial Sequence: Synthetic oligonucleotide
auacacaugagcuucucuc

SEQ ID NO: 2913358 - RNA, 19 nt, Artificial Sequence
  Description of Artificial Sequence: Synthetic oligonucleotide
ucuccauuuuccuacacag

SEQ ID NO: 2913359 - RNA, 19 nt, Artificial Sequence
  Description of Artificial Sequence: Synthetic oligonucleotide
ucauuucugacuaucagaa

SEQ ID NO: 2913360 - RNA, 19 nt, Artificial Sequence
  Description of Artificial Sequence: Synthetic oligonucleotide
uguucuguacaucucaaga

SEQ ID NO: 2913361 - RNA, 19 nt, Artificial Sequence
  Description of Artificial Sequence: Synthetic oligonucleotide
aacucuuugaggguggagg

SEQ ID NO: 2913362 - RNA, 19 nt, Artificial Sequence
  Description of Artificial Sequence: Synthetic oligonucleotide
uugaucauaagcauguaau

SEQ ID NO: 2913363 - RNA, 19 nt, Artificial Sequence
  Description of Artificial Sequence: Synthetic oligonucleotide
agaacaacaccaucucccc

SEQ ID NO: 2913364 - RNA, 19 nt, Artificial Sequence
  Description of Artificial Sequence: Synthetic oligonucleotide
uauaucucuucauaugucu

SEQ ID NO: 2913365 - RNA, 19 nt, Artificial Sequence
  Description of Artificial Sequence: Synthetic oligonucleotide
aucauaagcauguaaucug

SEQ ID NO: 2913366 - RNA, 19 nt, Artificial Sequence
  Description of Artificial Sequence: Synthetic oligonucleotide
ucauaagcauguaaucugc

SEQ ID NO: 2913367 - RNA, 19 nt, Artificial Sequence
  Description of Artificial Sequence: Synthetic oligonucleotide
acuagaacaacaccaucuc

SEQ ID NO: 2913368 - RNA, 19 nt, Artificial Sequence
  Description of Artificial Sequence: Synthetic oligonucleotide
ucucagccgacucucaacg

SEQ ID NO: 2913369 - RNA, 19 nt, Artificial Sequence
  Description of Artificial Sequence: Synthetic oligonucleotide
uccgccauguuucaaacgc

SEQ ID NO: 2913370 - RNA, 19 nt, Artificial Sequence
  Description of Artificial Sequence: Synthetic oligonucleotide
ucuguacaucucaagaggc

SEQ ID NO: 2913371 - RNA, 19 nt, Artificial Sequence
  Description of Artificial Sequence: Synthetic oligonucleotide
aaauguugaucauaagcau

SEQ ID NO: 2913372 - RNA, 19 nt, Artificial Sequence
  Description of Artificial Sequence: Synthetic oligonucleotide
uucauaugucucuucauca

SEQ ID NO: 2913373 - RNA, 19 nt, Artificial Sequence
  Description of Artificial Sequence: Synthetic oligonucleotide
auuucugacuaucagaaua

SEQ ID NO: 2913374 - RNA, 19 nt, Artificial Sequence
  Description of Artificial Sequence: Synthetic oligonucleotide
uuucugacuaucagaauac

SEQ ID NO: 2913375 - RNA, 19 nt, Artificial Sequence
  Description of Artificial Sequence: Synthetic oligonucleotide
aacuagaacaacaccaucu

SEQ ID NO: 2913376 - RNA, 19 nt, Artificial Sequence
  Description of Artificial Sequence: Synthetic oligonucleotide
cauuuuccuacacaggacc

SEQ ID NO: 2913377 - RNA, 19 nt, Artificial Sequence
  Description of Artificial Sequence: Synthetic oligonucleotide
aaugaacucuuugagggug

SEQ ID NO: 2913378 - RNA, 19 nt, Artificial Sequence
  Description of Artificial Sequence: Synthetic oligonucleotide
aauguugaucauaagcaug

SEQ ID NO: 2913379 - RNA, 19 nt, Artificial Sequence
  Description of Artificial Sequence: Synthetic oligonucleotide
ucuucuacgucucccagga

SEQ ID NO: 2913380 - RNA, 19 nt, Artificial Sequence
  Description of Artificial Sequence: Synthetic oligonucleotide
acugagccugaugagaucc

SEQ ID NO: 2913381 - RNA, 19 nt, Artificial Sequence
  Description of Artificial Sequence: Synthetic oligonucleotide
guuuuguugauuuauauau

SEQ ID NO: 2913382 - RNA, 19 nt, Artificial Sequence
  Description of Artificial Sequence: Synthetic oligonucleotide
cacauaaauucgcucaucc

SEQ ID NO: 2913383 - RNA, 19 nt, Artificial Sequence
  Description of Artificial Sequence: Synthetic oligonucleotide
uaaucugccucgaagcucu

SEQ ID NO: 2913384 - RNA, 19 nt, Artificial Sequence
  Description of Artificial Sequence: Synthetic oligonucleotide
aucucuaucgucgucacag

SEQ ID NO: 2913385 - RNA, 19 nt, Artificial Sequence
  Description of Artificial Sequence: Synthetic oligonucleotide
uaagcauguaaucugccuc

SEQ ID NO: 2913386 - RNA, 19 nt, Artificial Sequence
  Description of Artificial Sequence: Synthetic oligonucleotide
aucagaauacacaugagcu

SEQ ID NO: 2913387 - RNA, 19 nt, Artificial Sequence
  Description of Artificial Sequence: Synthetic oligonucleotide
agccugaugagauccaggg

SEQ ID NO: 2913388 - RNA, 19 nt, Artificial Sequence
  Description of Artificial Sequence: Synthetic oligonucleotide
cuguugcugaucuacgucg

SEQ ID NO: 2913389 - RNA, 19 nt, Artificial Sequence
  Description of Artificial Sequence: Synthetic oligonucleotide
ugacuaucagaauacacau

SEQ ID NO: 2913390 - RNA, 19 nt, Artificial Sequence
  Description of Artificial Sequence: Synthetic oligonucleotide
cauguaaucugccucgaag

SEQ ID NO: 2913391 - RNA, 19 nt, Artificial Sequence
  Description of Artificial Sequence: Synthetic oligonucleotide
ucugugaguguucuguaca

SEQ ID NO: 2913392 - RNA, 19 nt, Artificial Sequence
  Description of Artificial Sequence: Synthetic oligonucleotide
ucugccucgaagcucucgg

SEQ ID NO: 2913393 - RNA, 19 nt, Artificial Sequence
  Description of Artificial Sequence: Synthetic oligonucleotide
uuuaaauguugaucauaag

SEQ ID NO: 2913394 - RNA, 19 nt, Artificial Sequence
  Description of Artificial Sequence: Synthetic oligonucleotide
ucugacuaucagaauacac

SEQ ID NO: 2913395 - RNA, 19 nt, Artificial Sequence
  Description of Artificial Sequence: Synthetic oligonucleotide
ucuacgucucccaggauca

SEQ ID NO: 2913396 - RNA, 19 nt, Artificial Sequence
  Description of Artificial Sequence: Synthetic oligonucleotide
cugacuaucagaauacaca

SEQ ID NO: 2913397 - RNA, 19 nt, Artificial Sequence
  Description of Artificial Sequence: Synthetic oligonucleotide
augagcuucucucugugag

SEQ ID NO: 2913398 - RNA, 19 nt, Artificial Sequence
  Description of Artificial Sequence: Synthetic oligonucleotide
cuucacauaaauucgcuca

SEQ ID NO: 2913399 - RNA, 19 nt, Artificial Sequence
  Description of Artificial Sequence: Synthetic oligonucleotide
gaucauauuuaaauguuga

SEQ ID NO: 2913400 - RNA, 19 nt, Artificial Sequence
  Description of Artificial Sequence: Synthetic oligonucleotide
uugauuuauauaucucuuc

SEQ ID NO: 2913401 - RNA, 19 nt, Artificial Sequence
  Description of Artificial Sequence: Synthetic oligonucleotide
uuuuguugauuuauauauc

SEQ ID NO: 2913402 - RNA, 19 nt, Artificial Sequence
  Description of Artificial Sequence: Synthetic oligonucleotide
aaaugaacucuuugagggu

SEQ ID NO: 2913403 - RNA, 19 nt, Artificial Sequence
  Description of Artificial Sequence: Synthetic oligonucleotide
aauacacaugagcuucucu

SEQ ID NO: 2913404 - RNA, 19 nt, Artificial Sequence
  Description of Artificial Sequence: Synthetic oligonucleotide
ucucaagaggcaaagucuc

SEQ ID NO: 2913405 - RNA, 19 nt, Artificial Sequence
  Description of Artificial Sequence: Synthetic oligonucleotide
uguaaucugccucgaagcu

SEQ ID NO: 2913406 - RNA, 19 nt, Artificial Sequence
  Description of Artificial Sequence: Synthetic oligonucleotide
caucuucacauaaauucgc

SEQ ID NO: 2913407 - RNA, 19 nt, Artificial Sequence
  Description of Artificial Sequence: Synthetic oligonucleotide
auuuaaauguugaucauaa

SEQ ID NO: 2913408 - RNA, 19 nt, Artificial Sequence
  Description of Artificial Sequence: Synthetic oligonucleotide
ugaucauaagcauguaauc

SEQ ID NO: 2913409 - RNA, 19 nt, Artificial Sequence
  Description of Artificial Sequence: Synthetic oligonucleotide
aguuucuucuacgucuccc

SEQ ID NO: 2913410 - RNA, 19 nt, Artificial Sequence
  Description of Artificial Sequence: Synthetic oligonucleotide
gguauugguagucuguugc

SEQ ID NO: 2913411 - RNA, 19 nt, Artificial Sequence
  Description of Artificial Sequence: Synthetic oligonucleotide
ucaacggaggggcaacuag

SEQ ID NO: 2913412 - RNA, 19 nt, Artificial Sequence
  Description of Artificial Sequence: Synthetic oligonucleotide
ucaaucucuaucgucguca

SEQ ID NO: 2913413 - RNA, 19 nt, Artificial Sequence
  Description of Artificial Sequence: Synthetic oligonucleotide
acucuuugaggguggaggg

SEQ ID NO: 2913414 - RNA, 19 nt, Artificial Sequence
  Description of Artificial Sequence: Synthetic oligonucleotide
uucucaucuucacauaaau

SEQ ID NO: 2913415 - RNA, 19 nt, Artificial Sequence
  Description of Artificial Sequence: Synthetic oligonucleotide
uucuacgucucccaggauc

SEQ ID NO: 2913416 - RNA, 19 nt, Artificial Sequence
  Description of Artificial Sequence: Synthetic oligonucleotide
aaauucgcucauccaaacu

SEQ ID NO: 2913417 - RNA, 19 nt, Artificial Sequence
  Description of Artificial Sequence: Synthetic oligonucleotide
uaucucuucauaugucucu

SEQ ID NO: 2913418 - RNA, 19 nt, Artificial Sequence
  Description of Artificial Sequence: Synthetic oligonucleotide
ucguuucucaucuucacau

SEQ ID NO: 2913419 - RNA, 19 nt, Artificial Sequence
  Description of Artificial Sequence: Synthetic oligonucleotide
auaagcauguaaucugccu

SEQ ID NO: 2913420 - RNA, 19 nt, Artificial Sequence
  Description of Artificial Sequence: Synthetic oligonucleotide
gcaaaugaacucuuugagg

SEQ ID NO: 2913421 - RNA, 19 nt, Artificial Sequence
  Description of Artificial Sequence: Synthetic oligonucleotide
cauaaauucgcucauccaa

SEQ ID NO: 2913422 - RNA, 19 nt, Artificial Sequence
  Description of Artificial Sequence: Synthetic oligonucleotide
cuucauaugucucuucauc

SEQ ID NO: 2913423 - RNA, 19 nt, Artificial Sequence
  Description of Artificial Sequence: Synthetic oligonucleotide
caucucaagaggcaaaguc

SEQ ID NO: 2913424 - RNA, 19 nt, Artificial Sequence
  Description of Artificial Sequence: Synthetic oligonucleotide
ugcugaucuacgucguccg

SEQ ID NO: 2913425 - RNA, 19 nt, Artificial Sequence
  Description of Artificial Sequence: Synthetic oligonucleotide
uucuucuacgucucccagg

SEQ ID NO: 2913426 - RNA, 19 nt, Artificial Sequence
  Description of Artificial Sequence: Synthetic oligonucleotide
uucaucaaucucuaucguc

SEQ ID NO: 2913427 - RNA, 19 nt, Artificial Sequence
  Description of Artificial Sequence: Synthetic oligonucleotide
ucucggucguuucucaucu

SEQ ID NO: 2913428 - RNA, 19 nt, Artificial Sequence
  Description of Artificial Sequence: Synthetic oligonucleotide
cacaggaccauuuucuguc

SEQ ID NO: 2913429 - RNA, 19 nt, Artificial Sequence
  Description of Artificial Sequence: Synthetic oligonucleotide
uuguugauuuauauaucuc

SEQ ID NO: 2913430 - RNA, 19 nt, Artificial Sequence
  Description of Artificial Sequence: Synthetic oligonucleotide
uuucuucuacgucucccag

SEQ ID NO: 2913431 - RNA, 19 nt, Artificial Sequence
  Description of Artificial Sequence: Synthetic oligonucleotide
uaaauucgcucauccaaac

SEQ ID NO: 2913432 - RNA, 19 nt, Artificial Sequence
  Description of Artificial Sequence: Synthetic oligonucleotide
ccugaugagauccaggggc

SEQ ID NO: 2913433 - RNA, 19 nt, Artificial Sequence
  Description of Artificial Sequence: Synthetic oligonucleotide
ucuccccggacgaagagca

SEQ ID NO: 2913434 - RNA, 19 nt, Artificial Sequence
  Description of Artificial Sequence: Synthetic oligonucleotide
uacaucucaagaggcaaag

SEQ ID NO: 2913435 - RNA, 19 nt, Artificial Sequence
  Description of Artificial Sequence: Synthetic oligonucleotide
aucauauuuaaauguugau

SEQ ID NO: 2913436 - RNA, 19 nt, Artificial Sequence
  Description of Artificial Sequence: Synthetic oligonucleotide
cuagaacaacaccaucucc

SEQ ID NO: 2913437 - RNA, 19 nt, Artificial Sequence
  Description of Artificial Sequence: Synthetic oligonucleotide
uguuccguuuuguugauuu

SEQ ID NO: 2913438 - RNA, 19 nt, Artificial Sequence
  Description of Artificial Sequence: Synthetic oligonucleotide
uacacaugagcuucucucu

SEQ ID NO: 2913439 - RNA, 19 nt, Artificial Sequence
  Description of Artificial Sequence: Synthetic oligonucleotide
uucacauaaauucgcucau

SEQ ID NO: 2913440 - RNA, 19 nt, Artificial Sequence
  Description of Artificial Sequence: Synthetic oligonucleotide
cauaagcauguaaucugcc

SEQ ID NO: 2913441 - RNA, 19 nt, Artificial Sequence
  Description of Artificial Sequence: Synthetic oligonucleotide
ucuguugcugaucuacguc

SEQ ID NO: 2913442 - RNA, 19 nt, Artificial Sequence
  Description of Artificial Sequence: Synthetic oligonucleotide
aguuacucgcaaaugaacu

SEQ ID NO: 2913443 - RNA, 19 nt, Artificial Sequence
  Description of Artificial Sequence: Synthetic oligonucleotide
ucauaugucucuucaucaa

SEQ ID NO: 2913444 - RNA, 19 nt, Artificial Sequence
  Description of Artificial Sequence: Synthetic oligonucleotide
gucauuucugacuaucaga

SEQ ID NO: 2913445 - RNA, 19 nt, Artificial Sequence
  Description of Artificial Sequence: Synthetic oligonucleotide
uuacucgcaaaugaacucu

SEQ ID NO: 2913446 - RNA, 19 nt, Artificial Sequence
  Description of Artificial Sequence: Synthetic oligonucleotide
ucuucacauaaauucgcuc

SEQ ID NO: 2913447 - RNA, 19 nt, Artificial Sequence
  Description of Artificial Sequence: Synthetic oligonucleotide
ucucccaggaucauauuua

SEQ ID NO: 2913448 - RNA, 19 nt, Artificial Sequence
  Description of Artificial Sequence: Synthetic oligonucleotide
ucagaauacacaugagcuu

SEQ ID NO: 2913449 - RNA, 19 nt, Artificial Sequence
  Description of Artificial Sequence: Synthetic oligonucleotide
auauaucucuucauauguc

SEQ ID NO: 2913450 - RNA, 19 nt, Artificial Sequence
  Description of Artificial Sequence: Synthetic oligonucleotide
aacugagccugaugagauc

SEQ ID NO: 2913451 - RNA, 19 nt, Artificial Sequence
  Description of Artificial Sequence: Synthetic oligonucleotide
auguugaucauaagcaugu

SEQ ID NO: 2913452 - RNA, 19 nt, Artificial Sequence
  Description of Artificial Sequence: Synthetic oligonucleotide
uguacaucucaagaggcaa

SEQ ID NO: 2913453 - RNA, 19 nt, Artificial Sequence
  Description of Artificial Sequence: Synthetic oligonucleotide
uacacaggaccauuuucug

SEQ ID NO: 2913454 - RNA, 19 nt, Artificial Sequence
  Description of Artificial Sequence: Synthetic oligonucleotide
gaacaacaccaucuccccg

SEQ ID NO: 2913455 - RNA, 19 nt, Artificial Sequence
  Description of Artificial Sequence: Synthetic oligonucleotide
ucagccgacucucaacgga

SEQ ID NO: 2913456 - RNA, 19 nt, Artificial Sequence
  Description of Artificial Sequence: Synthetic oligonucleotide
ucuaucgucgucacaguuu

SEQ ID NO: 2913457 - RNA, 19 nt, Artificial Sequence
  Description of Artificial Sequence: Synthetic oligonucleotide
uacgguauugguagucugu

SEQ ID NO: 2913458 - RNA, 19 nt, Artificial Sequence
  Description of Artificial Sequence: Synthetic oligonucleotide
cuaucgucgucacaguuuc

SEQ ID NO: 2913459 - RNA, 19 nt, Artificial Sequence
  Description of Artificial Sequence: Synthetic oligonucleotide
gaucauaagcauguaaucu

SEQ ID NO: 2913460 - RNA, 19 nt, Artificial Sequence
  Description of Artificial Sequence: Synthetic oligonucleotide
guuacucgcaaaugaacuc

SEQ ID NO: 2913461 - RNA, 19 nt, Artificial Sequence
  Description of Artificial Sequence: Synthetic oligonucleotide
cuaucagaauacacaugag

SEQ ID NO: 2913462 - RNA, 19 nt, Artificial Sequence
  Description of Artificial Sequence: Synthetic oligonucleotide
uagucuguugcugaucuac

SEQ ID NO: 2913463 - RNA, 19 nt, Artificial Sequence
  Description of Artificial Sequence: Synthetic oligonucleotide
uucgcucauccaaacugag

SEQ ID NO: 2913464 - RNA, 19 nt, Artificial Sequence
  Description of Artificial Sequence: Synthetic oligonucleotide
agagcauggggauguuccg

SEQ ID NO: 2913465 - RNA, 19 nt, Artificial Sequence
  Description of Artificial Sequence: Synthetic oligonucleotide
cucgcaaaugaacucuuug

SEQ ID NO: 2913466 - RNA, 19 nt, Artificial Sequence
  Description of Artificial Sequence: Synthetic oligonucleotide
auaucucuucauaugucuc

SEQ ID NO: 2913467 - RNA, 19 nt, Artificial Sequence
  Description of Artificial Sequence: Synthetic oligonucleotide
agaggcaaagucuccauuu

SEQ ID NO: 2913468 - RNA, 19 nt, Artificial Sequence
  Description of Artificial Sequence: Synthetic oligonucleotide
ugaucuacgucguccgcca

SEQ ID NO: 2913469 - RNA, 19 nt, Artificial Sequence
  Description of Artificial Sequence: Synthetic oligonucleotide
gaguguucuguacaucuca

SEQ ID NO: 2913470 - RNA, 19 nt, Artificial Sequence
  Description of Artificial Sequence: Synthetic oligonucleotide
ggauguuccguuuuguuga

SEQ ID NO: 2913471 - RNA, 19 nt, Artificial Sequence
  Description of Artificial Sequence: Synthetic oligonucleotide
uauugguagucuguugcug

SEQ ID NO: 2913472 - RNA, 19 nt, Artificial Sequence
  Description of Artificial Sequence: Synthetic oligonucleotide
aucaaucucuaucgucguc

SEQ ID NO: 2913473 - RNA, 19 nt, Artificial Sequence
  Description of Artificial Sequence: Synthetic oligonucleotide
aucucaagaggcaaagucu

SEQ ID NO: 2913474 - RNA, 19 nt, Artificial Sequence
  Description of Artificial Sequence: Synthetic oligonucleotide
cuccauuuuccuacacagg

SEQ ID NO: 2913475 - RNA, 19 nt, Artificial Sequence
  Description of Artificial Sequence: Synthetic oligonucleotide
aaacugagccugaugagau

SEQ ID NO: 2913476 - RNA, 19 nt, Artificial Sequence
  Description of Artificial Sequence: Synthetic oligonucleotide
uugcugaucuacgucgucc

SEQ ID NO: 2913477 - RNA, 19 nt, Artificial Sequence
  Description of Artificial Sequence: Synthetic oligonucleotide
ggcaacuagaacaacacca

SEQ ID NO: 2913478 - RNA, 19 nt, Artificial Sequence
  Description of Artificial Sequence: Synthetic oligonucleotide
guugaucauaagcauguaa

SEQ ID NO: 2913479 - RNA, 19 nt, Artificial Sequence
  Description of Artificial Sequence: Synthetic oligonucleotide
acacaugagcuucucucug

SEQ ID NO: 2913480 - RNA, 19 nt, Artificial Sequence
  Description of Artificial Sequence: Synthetic oligonucleotide
gaugagauccaggggcucc

SEQ ID NO: 2913481 - RNA, 19 nt, Artificial Sequence
  Description of Artificial Sequence: Synthetic oligonucleotide
ggucauuucugacuaucag

SEQ ID NO: 2913482 - RNA, 19 nt, Artificial Sequence
  Description of Artificial Sequence: Synthetic oligonucleotide
uguugcugaucuacgucgu

SEQ ID NO: 2913483 - RNA, 19 nt, Artificial Sequence
  Description of Artificial Sequence: Synthetic oligonucleotide
ucuacgguauugguagucu

SEQ ID NO: 2913484 - RNA, 19 nt, Artificial Sequence
  Description of Artificial Sequence: Synthetic oligonucleotide
guuucucaucuucacauaa

SEQ ID NO: 2913485 - RNA, 19 nt, Artificial Sequence
  Description of Artificial Sequence: Synthetic oligonucleotide
cucaagaggcaaagucucc

SEQ ID NO: 2913486 - RNA, 19 nt, Artificial Sequence
  Description of Artificial Sequence: Synthetic oligonucleotide
uuuucugucucagccgacu

SEQ ID NO: 2913487 - RNA, 19 nt, Artificial Sequence
  Description of Artificial Sequence: Synthetic oligonucleotide
ucacaguuucuucuacguc

SEQ ID NO: 2913488 - RNA, 19 nt, Artificial Sequence
  Description of Artificial Sequence: Synthetic oligonucleotide
gagcuucucucugugagug

SEQ ID NO: 2913489 - RNA, 19 nt, Artificial Sequence
  Description of Artificial Sequence: Synthetic oligonucleotide
auaaauucgcucauccaaa

SEQ ID NO: 2913490 - RNA, 19 nt, Artificial Sequence
  Description of Artificial Sequence: Synthetic oligonucleotide
cauuuucugucucagccga

SEQ ID NO: 2913491 - RNA, 19 nt, Artificial Sequence
  Description of Artificial Sequence: Synthetic oligonucleotide
acaguuucuucuacgucuc

SEQ ID NO: 2913492 - RNA, 19 nt, Artificial Sequence
  Description of Artificial Sequence: Synthetic oligonucleotide
ugaguguucuguacaucuc

SEQ ID NO: 2913493 - RNA, 19 nt, Artificial Sequence
  Description of Artificial Sequence: Synthetic oligonucleotide
ucuacgucguccgccaugu

SEQ ID NO: 2913494 - RNA, 19 nt, Artificial Sequence
  Description of Artificial Sequence: Synthetic oligonucleotide
uccguuuuguugauuuaua

SEQ ID NO: 2913495 - RNA, 19 nt, Artificial Sequence
  Description of Artificial Sequence: Synthetic oligonucleotide
ucggucguuucucaucuuc

SEQ ID NO: 2913496 - RNA, 19 nt, Artificial Sequence
  Description of Artificial Sequence: Synthetic oligonucleotide
gggauguuccguuuuguug

SEQ ID NO: 2913497 - RNA, 19 nt, Artificial Sequence
  Description of Artificial Sequence: Synthetic oligonucleotide
cacaguuucuucuacgucu

SEQ ID NO: 2913498 - RNA, 19 nt, Artificial Sequence
  Description of Artificial Sequence: Synthetic oligonucleotide
uucugucucagccgacucu

SEQ ID NO: 2913499 - RNA, 19 nt, Artificial Sequence
  Description of Artificial Sequence: Synthetic oligonucleotide
ucgcucauccaaacugagc

SEQ ID NO: 2913500 - RNA, 19 nt, Artificial Sequence
  Description of Artificial Sequence: Synthetic oligonucleotide
ccaggaucauauuuaaaug

SEQ ID NO: 2913501 - RNA, 19 nt, Artificial Sequence
  Description of Artificial Sequence: Synthetic oligonucleotide
aagucuccauuuuccuaca

SEQ ID NO: 2913502 - RNA, 19 nt, Artificial Sequence
  Description of Artificial Sequence: Synthetic oligonucleotide
aagcucucggucguuucuc

SEQ ID NO: 2913503 - RNA, 19 nt, Artificial Sequence
  Description of Artificial Sequence: Synthetic oligonucleotide
agucuccauuuuccuacac

SEQ ID NO: 2913504 - RNA, 19 nt, Artificial Sequence
  Description of Artificial Sequence: Synthetic oligonucleotide
gacuaucagaauacacaug

SEQ ID NO: 2913505 - RNA, 19 nt, Artificial Sequence
  Description of Artificial Sequence: Synthetic oligonucleotide
aagaggcaaagucuccauu

SEQ ID NO: 2913506 - RNA, 19 nt, Artificial Sequence
  Description of Artificial Sequence: Synthetic oligonucleotide
ggaucauauuuaaauguug

SEQ ID NO: 2913507 - RNA, 19 nt, Artificial Sequence
  Description of Artificial Sequence: Synthetic oligonucleotide
ucauccaaacugagccuga

SEQ ID NO: 2913508 - RNA, 19 nt, Artificial Sequence
  Description of Artificial Sequence: Synthetic oligonucleotide
cgcucauccaaacugagcc

SEQ ID NO: 2913509 - RNA, 19 nt, Artificial Sequence
  Description of Artificial Sequence: Synthetic oligonucleotide
guguucuguacaucucaag

SEQ ID NO: 2913510 - RNA, 19 nt, Artificial Sequence
  Description of Artificial Sequence: Synthetic oligonucleotide
acgucguccgccauguuuc

SEQ ID NO: 2913511 - RNA, 19 nt, Artificial Sequence
  Description of Artificial Sequence: Synthetic oligonucleotide
ugagcuucucucugugagu

SEQ ID NO: 2913512 - RNA, 19 nt, Artificial Sequence
  Description of Artificial Sequence: Synthetic oligonucleotide
aaucucuaucgucgucaca

SEQ ID NO: 2913513 - RNA, 19 nt, Artificial Sequence
  Description of Artificial Sequence: Synthetic oligonucleotide
uuccguuuuguugauuuau

SEQ ID NO: 2913514 - RNA, 19 nt, Artificial Sequence
  Description of Artificial Sequence: Synthetic oligonucleotide
cugaucuacgucguccgcc

SEQ ID NO: 2913515 - RNA, 19 nt, Artificial Sequence
  Description of Artificial Sequence: Synthetic oligonucleotide
uacgucguccgccauguuu

SEQ ID NO: 2913516 - RNA, 19 nt, Artificial Sequence
  Description of Artificial Sequence: Synthetic oligonucleotide
gugaguguucuguacaucu

SEQ ID NO: 2913517 - RNA, 19 nt, Artificial Sequence
  Description of Artificial Sequence: Synthetic oligonucleotide
uuucugucucagccgacuc

SEQ ID NO: 2913518 - RNA, 19 nt, Artificial Sequence
  Description of Artificial Sequence: Synthetic oligonucleotide
acggaggggcaacuagaac

SEQ ID NO: 2913519 - RNA, 19 nt, Artificial Sequence
  Description of Artificial Sequence: Synthetic oligonucleotide
gaccauuuucugucucagc

SEQ ID NO: 2913520 - RNA, 19 nt, Artificial Sequence
  Description of Artificial Sequence: Synthetic oligonucleotide
ugagccugaugagauccag

SEQ ID NO: 2913521 - RNA, 19 nt, Artificial Sequence
  Description of Artificial Sequence: Synthetic oligonucleotide
cucugugaguguucuguac

SEQ ID NO: 2913522 - RNA, 19 nt, Artificial Sequence
  Description of Artificial Sequence: Synthetic oligonucleotide
cuacacaggaccauuuucu

SEQ ID NO: 2913523 - RNA, 19 nt, Artificial Sequence
  Description of Artificial Sequence: Synthetic oligonucleotide
aucuccccggacgaagagc

SEQ ID NO: 2913524 - RNA, 19 nt, Artificial Sequence
  Description of Artificial Sequence: Synthetic oligonucleotide
agucuguugcugaucuacg

SEQ ID NO: 2913525 - RNA, 19 nt, Artificial Sequence
  Description of Artificial Sequence: Synthetic oligonucleotide
caaucucuaucgucgucac

SEQ ID NO: 2913526 - RNA, 19 nt, Artificial Sequence
  Description of Artificial Sequence: Synthetic oligonucleotide
ccauuuucugucucagccg

SEQ ID NO: 2913527 - RNA, 19 nt, Artificial Sequence
  Description of Artificial Sequence: Synthetic oligonucleotide
cuacgguauugguagucug

SEQ ID NO: 2913528 - RNA, 19 nt, Artificial Sequence
  Description of Artificial Sequence: Synthetic oligonucleotide
caaacugagccugaugaga

SEQ ID NO: 2913529 - RNA, 19 nt, Artificial Sequence
  Description of Artificial Sequence: Synthetic oligonucleotide
ucgucacaguuucuucuac

SEQ ID NO: 2913530 - RNA, 19 nt, Artificial Sequence
  Description of Artificial Sequence: Synthetic oligonucleotide
uucucucugugaguguucu

SEQ ID NO: 2913531 - RNA, 19 nt, Artificial Sequence
  Description of Artificial Sequence: Synthetic oligonucleotide
ugaggguggagggaguccu

SEQ ID NO: 2913532 - RNA, 19 nt, Artificial Sequence
  Description of Artificial Sequence: Synthetic oligonucleotide
caacuagaacaacaccauc

SEQ ID NO: 2913533 - RNA, 19 nt, Artificial Sequence
  Description of Artificial Sequence: Synthetic oligonucleotide
uucugacuaucagaauaca

SEQ ID NO: 2913534 - RNA, 19 nt, Artificial Sequence
  Description of Artificial Sequence: Synthetic oligonucleotide
auggggauguuccguuuug

SEQ ID NO: 2913535 - RNA, 19 nt, Artificial Sequence
  Description of Artificial Sequence: Synthetic oligonucleotide
auccaaacugagccugaug

SEQ ID NO: 2913536 - RNA, 19 nt, Artificial Sequence
  Description of Artificial Sequence: Synthetic oligonucleotide
uuuuccuacacaggaccau

SEQ ID NO: 2913537 - RNA, 19 nt, Artificial Sequence
  Description of Artificial Sequence: Synthetic oligonucleotide
aucuacgucguccgccaug

SEQ ID NO: 2913538 - RNA, 19 nt, Artificial Sequence
  Description of Artificial Sequence: Synthetic oligonucleotide
acaccaucuccccggacga

SEQ ID NO: 2913539 - RNA, 19 nt, Artificial Sequence
  Description of Artificial Sequence: Synthetic oligonucleotide
aucuucacauaaauucgcu

SEQ ID NO: 2913540 - RNA, 19 nt, Artificial Sequence
  Description of Artificial Sequence: Synthetic oligonucleotide
gucuccauuuuccuacaca

SEQ ID NO: 2913541 - RNA, 19 nt, Artificial Sequence
  Description of Artificial Sequence: Synthetic oligonucleotide
cagccgacucucaacggag

SEQ ID NO: 2913542 - RNA, 19 nt, Artificial Sequence
  Description of Artificial Sequence: Synthetic oligonucleotide
gagccugaugagauccagg

SEQ ID NO: 2913543 - RNA, 19 nt, Artificial Sequence
  Description of Artificial Sequence: Synthetic oligonucleotide
ugucucagccgacucucaa

SEQ ID NO: 2913544 - RNA, 19 nt, Artificial Sequence
  Description of Artificial Sequence: Synthetic oligonucleotide
ucguccgccauguuucaaa

SEQ ID NO: 2913545 - RNA, 19 nt, Artificial Sequence
  Description of Artificial Sequence: Synthetic oligonucleotide
auuuuccuacacaggacca

SEQ ID NO: 2913546 - RNA, 19 nt, Artificial Sequence
  Description of Artificial Sequence: Synthetic oligonucleotide
ugccucgaagcucucgguc

SEQ ID NO: 2913547 - RNA, 19 nt, Artificial Sequence
  Description of Artificial Sequence: Synthetic oligonucleotide
auucgcucauccaaacuga

SEQ ID NO: 2913548 - RNA, 19 nt, Artificial Sequence
  Description of Artificial Sequence: Synthetic oligonucleotide
gccucgaagcucucggucg

SEQ ID NO: 2913549 - RNA, 19 nt, Artificial Sequence
  Description of Artificial Sequence: Synthetic oligonucleotide
gucguuucucaucuucaca

SEQ ID NO: 2913550 - RNA, 19 nt, Artificial Sequence
  Description of Artificial Sequence: Synthetic oligonucleotide
acaggaccauuuucugucu

SEQ ID NO: 2913551 - RNA, 19 nt, Artificial Sequence
  Description of Artificial Sequence: Synthetic oligonucleotide
aggggcaacuagaacaaca

SEQ ID NO: 2913552 - RNA, 19 nt, Artificial Sequence
  Description of Artificial Sequence: Synthetic oligonucleotide
uccuacacaggaccauuuu

SEQ ID NO: 2913553 - RNA, 19 nt, Artificial Sequence
  Description of Artificial Sequence: Synthetic oligonucleotide
ucacauaaauucgcucauc

SEQ ID NO: 2913554 - RNA, 19 nt, Artificial Sequence
  Description of Artificial Sequence: Synthetic oligonucleotide
cucagccgacucucaacgg

SEQ ID NO: 2913555 - RNA, 19 nt, Artificial Sequence
  Description of Artificial Sequence: Synthetic oligonucleotide
ucucuucauaugucucuuc

SEQ ID NO: 2913556 - RNA, 19 nt, Artificial Sequence
  Description of Artificial Sequence: Synthetic oligonucleotide
ucucuaucgucgucacagu

SEQ ID NO: 2913557 - RNA, 19 nt, Artificial Sequence
  Description of Artificial Sequence: Synthetic oligonucleotide
uuugaggguggagggaguc

SEQ ID NO: 2913558 - RNA, 19 nt, Artificial Sequence
  Description of Artificial Sequence: Synthetic oligonucleotide
gucacaguuucuucuacgu

SEQ ID NO: 2913559 - RNA, 19 nt, Artificial Sequence
  Description of Artificial Sequence: Synthetic oligonucleotide
guaaucugccucgaagcuc

SEQ ID NO: 2913560 - RNA, 19 nt, Artificial Sequence
  Description of Artificial Sequence: Synthetic oligonucleotide
uugguagucuguugcugau

SEQ ID NO: 2913561 - RNA, 19 nt, Artificial Sequence
  Description of Artificial Sequence: Synthetic oligonucleotide
uacucgcaaaugaacucuu

SEQ ID NO: 2913562 - RNA, 19 nt, Artificial Sequence
  Description of Artificial Sequence: Synthetic oligonucleotide
guccgccauguuucaaacg

SEQ ID NO: 2913563 - RNA, 19 nt, Artificial Sequence
  Description of Artificial Sequence: Synthetic oligonucleotide
cucucggucguuucucauc

SEQ ID NO: 2913564 - RNA, 19 nt, Artificial Sequence
  Description of Artificial Sequence: Synthetic oligonucleotide
aacggaggggcaacuagaa

SEQ ID NO: 2913565 - RNA, 19 nt, Artificial Sequence
  Description of Artificial Sequence: Synthetic oligonucleotide
uuccuacacaggaccauuu

SEQ ID NO: 2913566 - RNA, 19 nt, Artificial Sequence
  Description of Artificial Sequence: Synthetic oligonucleotide
gaguccucgggucauuucu

SEQ ID NO: 2913567 - RNA, 19 nt, Artificial Sequence
  Description of Artificial Sequence: Synthetic oligonucleotide
uuuccuacacaggaccauu

SEQ ID NO: 2913568 - RNA, 19 nt, Artificial Sequence
  Description of Artificial Sequence: Synthetic oligonucleotide
ucucugugaguguucugua

SEQ ID NO: 2913569 - RNA, 19 nt, Artificial Sequence
  Description of Artificial Sequence: Synthetic oligonucleotide
auuuucugucucagccgac

SEQ ID NO: 2913570 - RNA, 19 nt, Artificial Sequence
  Description of Artificial Sequence: Synthetic oligonucleotide
ugugaguguucuguacauc

SEQ ID NO: 2913571 - RNA, 19 nt, Artificial Sequence
  Description of Artificial Sequence: Synthetic oligonucleotide
aggguggagggaguccucg

SEQ ID NO: 2913572 - RNA, 19 nt, Artificial Sequence
  Description of Artificial Sequence: Synthetic oligonucleotide
uggagggaguccucggguc

SEQ ID NO: 2913573 - RNA, 19 nt, Artificial Sequence
  Description of Artificial Sequence: Synthetic oligonucleotide
ucgucgucacaguuucuuc

SEQ ID NO: 2913574 - RNA, 19 nt, Artificial Sequence
  Description of Artificial Sequence: Synthetic oligonucleotide
agaauacacaugagcuucu

SEQ ID NO: 2913575 - RNA, 19 nt, Artificial Sequence
  Description of Artificial Sequence: Synthetic oligonucleotide
gucucagccgacucucaac

SEQ ID NO: 2913576 - RNA, 19 nt, Artificial Sequence
  Description of Artificial Sequence: Synthetic oligonucleotide
accaucuccccggacgaag

SEQ ID NO: 2913577 - RNA, 19 nt, Artificial Sequence
  Description of Artificial Sequence: Synthetic oligonucleotide
gaauacacaugagcuucuc

SEQ ID NO: 2913578 - RNA, 19 nt, Artificial Sequence
  Description of Artificial Sequence: Synthetic oligonucleotide
gaacucuuugaggguggag

SEQ ID NO: 2913579 - RNA, 19 nt, Artificial Sequence
  Description of Artificial Sequence: Synthetic oligonucleotide
gguagucuguugcugaucu

SEQ ID NO: 2913580 - RNA, 19 nt, Artificial Sequence
  Description of Artificial Sequence: Synthetic oligonucleotide
uugaggguggagggagucc

SEQ ID NO: 2913581 - RNA, 19 nt, Artificial Sequence
  Description of Artificial Sequence: Synthetic oligonucleotide
agcauggggauguuccguu

SEQ ID NO: 2913582 - RNA, 19 nt, Artificial Sequence
  Description of Artificial Sequence: Synthetic oligonucleotide
uccccggacgaagagcaug

SEQ ID NO: 2913583 - RNA, 19 nt, Artificial Sequence
  Description of Artificial Sequence: Synthetic oligonucleotide
caaagucuccauuuuccua

SEQ ID NO: 2913584 - RNA, 19 nt, Artificial Sequence
  Description of Artificial Sequence: Synthetic oligonucleotide
acaacaccaucuccccgga

SEQ ID NO: 2913585 - RNA, 19 nt, Artificial Sequence
  Description of Artificial Sequence: Synthetic oligonucleotide
uccucgggucauuucugac

SEQ ID NO: 2913586 - RNA, 19 nt, Artificial Sequence
  Description of Artificial Sequence: Synthetic oligonucleotide
guugauuuauauaucucuu

SEQ ID NO: 2913587 - RNA, 19 nt, Artificial Sequence
  Description of Artificial Sequence: Synthetic oligonucleotide
caacggaggggcaacuaga

SEQ ID NO: 2913588 - RNA, 19 nt, Artificial Sequence
  Description of Artificial Sequence: Synthetic oligonucleotide
ggucguuucucaucuucac

SEQ ID NO: 2913589 - RNA, 19 nt, Artificial Sequence
  Description of Artificial Sequence: Synthetic oligonucleotide
aucgucgucacaguuucuu

SEQ ID NO: 2913590 - RNA, 19 nt, Artificial Sequence
  Description of Artificial Sequence: Synthetic oligonucleotide
cuucucucugugaguguuc

SEQ ID NO: 2913591 - RNA, 19 nt, Artificial Sequence
  Description of Artificial Sequence: Synthetic oligonucleotide
gggcaacuagaacaacacc

SEQ ID NO: 2913592 - RNA, 19 nt, Artificial Sequence
  Description of Artificial Sequence: Synthetic oligonucleotide
ccaaacugagccugaugag

SEQ ID NO: 2913593 - RNA, 19 nt, Artificial Sequence
  Description of Artificial Sequence: Synthetic oligonucleotide
cucgggucauuucugacua

SEQ ID NO: 2913594 - RNA, 19 nt, Artificial Sequence
  Description of Artificial Sequence: Synthetic oligonucleotide
ggggcaacuagaacaacac

SEQ ID NO: 2913595 - RNA, 19 nt, Artificial Sequence
  Description of Artificial Sequence: Synthetic oligonucleotide
guauugguagucuguugcu

SEQ ID NO: 2913596 - RNA, 19 nt, Artificial Sequence
  Description of Artificial Sequence: Synthetic oligonucleotide
aguguucuguacaucucaa

SEQ ID NO: 2913597 - RNA, 19 nt, Artificial Sequence
  Description of Artificial Sequence: Synthetic oligonucleotide
cucuacgguauugguaguc

SEQ ID NO: 2913598 - RNA, 19 nt, Artificial Sequence
  Description of Artificial Sequence: Synthetic oligonucleotide
ggaccauuuucugucucag

SEQ ID NO: 2913599 - RNA, 19 nt, Artificial Sequence
  Description of Artificial Sequence: Synthetic oligonucleotide
gaagagcauggggauguuc

SEQ ID NO: 2913600 - RNA, 19 nt, Artificial Sequence
  Description of Artificial Sequence: Synthetic oligonucleotide
agcucucggucguuucuca

SEQ ID NO: 2913601 - RNA, 19 nt, Artificial Sequence
  Description of Artificial Sequence: Synthetic oligonucleotide
gaagcucucggucguuucu

SEQ ID NO: 2913602 - RNA, 19 nt, Artificial Sequence
  Description of Artificial Sequence: Synthetic oligonucleotide
caguuucuucuacgucucc

SEQ ID NO: 2913603 - RNA, 19 nt, Artificial Sequence
  Description of Artificial Sequence: Synthetic oligonucleotide
ccuacacaggaccauuuuc

SEQ ID NO: 2913604 - RNA, 19 nt, Artificial Sequence
  Description of Artificial Sequence: Synthetic oligonucleotide
ggcuccucuacgguauugg

SEQ ID NO: 2913605 - RNA, 19 nt, Artificial Sequence
  Description of Artificial Sequence: Synthetic oligonucleotide
acaucucaagaggcaaagu

SEQ ID NO: 2913606 - RNA, 19 nt, Artificial Sequence
  Description of Artificial Sequence: Synthetic oligonucleotide
uguugaucauaagcaugua

SEQ ID NO: 2913607 - RNA, 19 nt, Artificial Sequence
  Description of Artificial Sequence: Synthetic oligonucleotide
gccgacucucaacggaggg

SEQ ID NO: 2913608 - RNA, 19 nt, Artificial Sequence
  Description of Artificial Sequence: Synthetic oligonucleotide
caucuccccggacgaagag

SEQ ID NO: 2913609 - RNA, 19 nt, Artificial Sequence
  Description of Artificial Sequence: Synthetic oligonucleotide
aucugccucgaagcucucg

SEQ ID NO: 2913610 - RNA, 19 nt, Artificial Sequence
  Description of Artificial Sequence: Synthetic oligonucleotide
aucucuucauaugucucuu

SEQ ID NO: 2913611 - RNA, 19 nt, Artificial Sequence
  Description of Artificial Sequence: Synthetic oligonucleotide
acgucucccaggaucauau

SEQ ID NO: 2913612 - RNA, 19 nt, Artificial Sequence
  Description of Artificial Sequence: Synthetic oligonucleotide
uaucgucgucacaguuucu

SEQ ID NO: 2913613 - RNA, 19 nt, Artificial Sequence
  Description of Artificial Sequence: Synthetic oligonucleotide
uggggauguuccguuuugu

SEQ ID NO: 2913614 - RNA, 19 nt, Artificial Sequence
  Description of Artificial Sequence: Synthetic oligonucleotide
guugcugaucuacgucguc

SEQ ID NO: 2913615 - RNA, 19 nt, Artificial Sequence
  Description of Artificial Sequence: Synthetic oligonucleotide
gucgucacaguuucuucua

SEQ ID NO: 2913616 - RNA, 19 nt, Artificial Sequence
  Description of Artificial Sequence: Synthetic oligonucleotide
acgguauugguagucuguu

SEQ ID NO: 2913617 - RNA, 19 nt, Artificial Sequence
  Description of Artificial Sequence: Synthetic oligonucleotide
cggaggggcaacuagaaca

SEQ ID NO: 2913618 - RNA, 19 nt, Artificial Sequence
  Description of Artificial Sequence: Synthetic oligonucleotide
cucucugugaguguucugu

SEQ ID NO: 2913619 - RNA, 19 nt, Artificial Sequence
  Description of Artificial Sequence: Synthetic oligonucleotide
cgucacaguuucuucuacg

SEQ ID NO: 2913620 - RNA, 19 nt, Artificial Sequence
  Description of Artificial Sequence: Synthetic oligonucleotide
cucucaacggaggggcaac

SEQ ID NO: 2913621 - RNA, 19 nt, Artificial Sequence
  Description of Artificial Sequence: Synthetic oligonucleotide
agcuucucucugugagugu

SEQ ID NO: 2913622 - RNA, 19 nt, Artificial Sequence
  Description of Artificial Sequence: Synthetic oligonucleotide
ugaugagauccaggggcuc

SEQ ID NO: 2913623 - RNA, 19 nt, Artificial Sequence
  Description of Artificial Sequence: Synthetic oligonucleotide
cauaugucucuucaucaau

SEQ ID NO: 2913624 - RNA, 19 nt, Artificial Sequence
  Description of Artificial Sequence: Synthetic oligonucleotide
agcauguaaucugccucga

SEQ ID NO: 2913625 - RNA, 19 nt, Artificial Sequence
  Description of Artificial Sequence: Synthetic oligonucleotide
ucucaacggaggggcaacu

SEQ ID NO: 2913626 - RNA, 19 nt, Artificial Sequence
  Description of Artificial Sequence: Synthetic oligonucleotide
aguccucgggucauuucug

SEQ ID NO: 2913627 - RNA, 19 nt, Artificial Sequence
  Description of Artificial Sequence: Synthetic oligonucleotide
ugguagucuguugcugauc

SEQ ID NO: 2913628 - RNA, 19 nt, Artificial Sequence
  Description of Artificial Sequence: Synthetic oligonucleotide
cuccucuacgguauuggua

SEQ ID NO: 2913629 - RNA, 19 nt, Artificial Sequence
  Description of Artificial Sequence: Synthetic oligonucleotide
ccccggacgaagagcaugg

SEQ ID NO: 2913630 - RNA, 19 nt, Artificial Sequence
  Description of Artificial Sequence: Synthetic oligonucleotide
augagauccaggggcuccu

SEQ ID NO: 2913631 - RNA, 19 nt, Artificial Sequence
  Description of Artificial Sequence: Synthetic oligonucleotide
agccgacucucaacggagg

SEQ ID NO: 2913632 - RNA, 19 nt, Artificial Sequence
  Description of Artificial Sequence: Synthetic oligonucleotide
ccggacgaagagcaugggg

SEQ ID NO: 2913633 - RNA, 19 nt, Artificial Sequence
  Description of Artificial Sequence: Synthetic oligonucleotide
gucuguugcugaucuacgu

SEQ ID NO: 2913634 - RNA, 19 nt, Artificial Sequence
  Description of Artificial Sequence: Synthetic oligonucleotide
cggacgaagagcaugggga

SEQ ID NO: 2913635 - RNA, 19 nt, Artificial Sequence
  Description of Artificial Sequence: Synthetic oligonucleotide
guacaucucaagaggcaaa

SEQ ID NO: 2913636 - RNA, 19 nt, Artificial Sequence
  Description of Artificial Sequence: Synthetic oligonucleotide
guccucgggucauuucuga

SEQ ID NO: 2913637 - RNA, 19 nt, Artificial Sequence
  Description of Artificial Sequence: Synthetic oligonucleotide
acucucaacggaggggcaa

SEQ ID NO: 2913638 - RNA, 19 nt, Artificial Sequence
  Description of Artificial Sequence: Synthetic oligonucleotide
gaggcaaagucuccauuuu

SEQ ID NO: 2913639 - RNA, 19 nt, Artificial Sequence
  Description of Artificial Sequence: Synthetic oligonucleotide
gucucccaggaucauauuu

SEQ ID NO: 2913640 - RNA, 19 nt, Artificial Sequence
  Description of Artificial Sequence: Synthetic oligonucleotide
guuccguuuuguugauuua

SEQ ID NO: 2913641 - RNA, 19 nt, Artificial Sequence
  Description of Artificial Sequence: Synthetic oligonucleotide
uacgucucccaggaucaua

SEQ ID NO: 2913642 - RNA, 19 nt, Artificial Sequence
  Description of Artificial Sequence: Synthetic oligonucleotide
aaucugccucgaagcucuc

SEQ ID NO: 2913643 - RNA, 19 nt, Artificial Sequence
  Description of Artificial Sequence: Synthetic oligonucleotide
caucaaucucuaucgucgu

SEQ ID NO: 2913644 - RNA, 19 nt, Artificial Sequence
  Description of Artificial Sequence: Synthetic oligonucleotide
gauguuccguuuuguugau

SEQ ID NO: 2913645 - RNA, 19 nt, Artificial Sequence
  Description of Artificial Sequence: Synthetic oligonucleotide
cuucaucaaucucuaucgu

SEQ ID NO: 2913646 - RNA, 19 nt, Artificial Sequence
  Description of Artificial Sequence: Synthetic oligonucleotide
cgacucucaacggaggggc

SEQ ID NO: 2913647 - RNA, 19 nt, Artificial Sequence
  Description of Artificial Sequence: Synthetic oligonucleotide
ggaggggcaacuagaacaa

SEQ ID NO: 2913648 - RNA, 19 nt, Artificial Sequence
  Description of Artificial Sequence: Synthetic oligonucleotide
gcugaucuacgucguccgc

SEQ ID NO: 2913649 - RNA, 19 nt, Artificial Sequence
  Description of Artificial Sequence: Synthetic oligonucleotide
ggagggaguccucggguca

SEQ ID NO: 2913650 - RNA, 19 nt, Artificial Sequence
  Description of Artificial Sequence: Synthetic oligonucleotide
cugagccugaugagaucca

SEQ ID NO: 2913651 - RNA, 19 nt, Artificial Sequence
  Description of Artificial Sequence: Synthetic oligonucleotide
gggucauuucugacuauca

SEQ ID NO: 2913652 - RNA, 19 nt, Artificial Sequence
  Description of Artificial Sequence: Synthetic oligonucleotide
ucgaagcucucggucguuu

SEQ ID NO: 2913653 - RNA, 19 nt, Artificial Sequence
  Description of Artificial Sequence: Synthetic oligonucleotide
gaggggcaacuagaacaac

SEQ ID NO: 2913654 - RNA, 19 nt, Artificial Sequence
  Description of Artificial Sequence: Synthetic oligonucleotide
aggggcuccucuacgguau

SEQ ID NO: 2913655 - RNA, 19 nt, Artificial Sequence
  Description of Artificial Sequence: Synthetic oligonucleotide
cguuuuguugauuuauaua

SEQ ID NO: 2913656 - RNA, 19 nt, Artificial Sequence
  Description of Artificial Sequence: Synthetic oligonucleotide
ucgggucauuucugacuau

SEQ ID NO: 2913657 - RNA, 19 nt, Artificial Sequence
  Description of Artificial Sequence: Synthetic oligonucleotide
cugugaguguucuguacau

SEQ ID NO: 2913658 - RNA, 19 nt, Artificial Sequence
  Description of Artificial Sequence: Synthetic oligonucleotide
cucuuugaggguggaggga

SEQ ID NO: 2913659 - RNA, 19 nt, Artificial Sequence
  Description of Artificial Sequence: Synthetic oligonucleotide
gagauccaggggcuccucu

SEQ ID NO: 2913660 - RNA, 19 nt, Artificial Sequence
  Description of Artificial Sequence: Synthetic oligonucleotide
ccgacucucaacggagggg

SEQ ID NO: 2913661 - RNA, 19 nt, Artificial Sequence
  Description of Artificial Sequence: Synthetic oligonucleotide
cauuucugacuaucagaau

SEQ ID NO: 2913662 - RNA, 19 nt, Artificial Sequence
  Description of Artificial Sequence: Synthetic oligonucleotide
caagaggcaaagucuccau

SEQ ID NO: 2913663 - RNA, 19 nt, Artificial Sequence
  Description of Artificial Sequence: Synthetic oligonucleotide
caacaccaucuccccggac

SEQ ID NO: 2913664 - RNA, 19 nt, Artificial Sequence
  Description of Artificial Sequence: Synthetic oligonucleotide
gcaacuagaacaacaccau

SEQ ID NO: 2913665 - RNA, 19 nt, Artificial Sequence
  Description of Artificial Sequence: Synthetic oligonucleotide
gacucucaacggaggggca

SEQ ID NO: 2913666 - RNA, 19 nt, Artificial Sequence
  Description of Artificial Sequence: Synthetic oligonucleotide
gagcauggggauguuccgu

SEQ ID NO: 2913667 - RNA, 19 nt, Artificial Sequence
  Description of Artificial Sequence: Synthetic oligonucleotide
acucgcaaaugaacucuuu

SEQ ID NO: 2913668 - RNA, 19 nt, Artificial Sequence
  Description of Artificial Sequence: Synthetic oligonucleotide
ggaguccucgggucauuuc

SEQ ID NO: 2913669 - RNA, 19 nt, Artificial Sequence
  Description of Artificial Sequence: Synthetic oligonucleotide
cugucucagccgacucuca

SEQ ID NO: 2913670 - RNA, 19 nt, Artificial Sequence
  Description of Artificial Sequence: Synthetic oligonucleotide
ggacgaagagcauggggau

SEQ ID NO: 2913671 - RNA, 19 nt, Artificial Sequence
  Description of Artificial Sequence: Synthetic oligonucleotide
cuuugaggguggagggagu

SEQ ID NO: 2913672 - RNA, 19 nt, Artificial Sequence
  Description of Artificial Sequence: Synthetic oligonucleotide
cguccgccauguuucaaac

SEQ ID NO: 2913673 - RNA, 19 nt, Artificial Sequence
  Description of Artificial Sequence: Synthetic oligonucleotide
cucuaucgucgucacaguu

SEQ ID NO: 2913674 - RNA, 19 nt, Artificial Sequence
  Description of Artificial Sequence: Synthetic oligonucleotide
gcucauccaaacugagccu

SEQ ID NO: 2913675 - RNA, 19 nt, Artificial Sequence
  Description of Artificial Sequence: Synthetic oligonucleotide
cgguauugguagucuguug

SEQ ID NO: 2913676 - RNA, 19 nt, Artificial Sequence
  Description of Artificial Sequence: Synthetic oligonucleotide
gaggguggagggaguccuc

SEQ ID NO: 2913677 - RNA, 19 nt, Artificial Sequence
  Description of Artificial Sequence: Synthetic oligonucleotide
cauggggauguuccguuuu

SEQ ID NO: 2913678 - RNA, 19 nt, Artificial Sequence
  Description of Artificial Sequence: Synthetic oligonucleotide
ccguuuuguugauuuauau

SEQ ID NO: 2913679 - RNA, 19 nt, Artificial Sequence
  Description of Artificial Sequence: Synthetic oligonucleotide
auguuccguuuuguugauu

SEQ ID NO: 2913680 - RNA, 19 nt, Artificial Sequence
  Description of Artificial Sequence: Synthetic oligonucleotide
ccaucuccccggacgaaga

SEQ ID NO: 2913681 - RNA, 19 nt, Artificial Sequence
  Description of Artificial Sequence: Synthetic oligonucleotide
cucaacggaggggcaacua

SEQ ID NO: 2913682 - RNA, 19 nt, Artificial Sequence
  Description of Artificial Sequence: Synthetic oligonucleotide
ccucgggucauuucugacu

SEQ ID NO: 2913683 - RNA, 19 nt, Artificial Sequence
  Description of Artificial Sequence: Synthetic oligonucleotide
cgggucauuucugacuauc

SEQ ID NO: 2913684 - RNA, 19 nt, Artificial Sequence
  Description of Artificial Sequence: Synthetic oligonucleotide
cgaagcucucggucguuuc

SEQ ID NO: 2913685 - RNA, 19 nt, Artificial Sequence
  Description of Artificial Sequence: Synthetic oligonucleotide
cggucguuucucaucuuca

SEQ ID NO: 2913686 - RNA, 19 nt, Artificial Sequence
  Description of Artificial Sequence: Synthetic oligonucleotide
gaucuacgucguccgccau

SEQ ID NO: 2913687 - RNA, 19 nt, Artificial Sequence
  Description of Artificial Sequence: Synthetic oligonucleotide
gcuccucuacgguauuggu

SEQ ID NO: 2913688 - RNA, 19 nt, Artificial Sequence
  Description of Artificial Sequence: Synthetic oligonucleotide
ggggauguuccguuuuguu

SEQ ID NO: 2913689 - RNA, 19 nt, Artificial Sequence
  Description of Artificial Sequence: Synthetic oligonucleotide
gggcuccucuacgguauug

SEQ ID NO: 2913690 - RNA, 19 nt, Artificial Sequence
  Description of Artificial Sequence: Synthetic oligonucleotide
gagggaguccucgggucau

SEQ ID NO: 2913691 - RNA, 19 nt, Artificial Sequence
  Description of Artificial Sequence: Synthetic oligonucleotide
cugccucgaagcucucggu

SEQ ID NO: 2913692 - RNA, 19 nt, Artificial Sequence
  Description of Artificial Sequence: Synthetic oligonucleotide
gcuucucucugugaguguu

SEQ ID NO: 2913693 - RNA, 19 nt, Artificial Sequence
  Description of Artificial Sequence: Synthetic oligonucleotide
cauccaaacugagccugau

SEQ ID NO: 2913694 - RNA, 19 nt, Artificial Sequence
  Description of Artificial Sequence: Synthetic oligonucleotide
cgucgucacaguuucuucu

SEQ ID NO: 2913695 - RNA, 19 nt, Artificial Sequence
  Description of Artificial Sequence: Synthetic oligonucleotide
gucguccgccauguuucaa

SEQ ID NO: 2913696 - RNA, 19 nt, Artificial Sequence
  Description of Artificial Sequence: Synthetic oligonucleotide
cguuucucaucuucacaua

SEQ ID NO: 2913697 - RNA, 19 nt, Artificial Sequence
  Description of Artificial Sequence: Synthetic oligonucleotide
cccggacgaagagcauggg

SEQ ID NO: 2913698 - RNA, 19 nt, Artificial Sequence
  Description of Artificial Sequence: Synthetic oligonucleotide
cuucuacgucucccaggau

SEQ ID NO: 2913699 - RNA, 19 nt, Artificial Sequence
  Description of Artificial Sequence: Synthetic oligonucleotide
caccaucuccccggacgaa

SEQ ID NO: 2913700 - RNA, 19 nt, Artificial Sequence
  Description of Artificial Sequence: Synthetic oligonucleotide
gcauggggauguuccguuu

SEQ ID NO: 2913701 - RNA, 19 nt, Artificial Sequence
  Description of Artificial Sequence: Synthetic oligonucleotide
ccucgaagcucucggucgu

SEQ ID NO: 2913702 - RNA, 19 nt, Artificial Sequence
  Description of Artificial Sequence: Synthetic oligonucleotide
gcucucggucguuucucau

SEQ ID NO: 2913703 - RNA, 19 nt, Artificial Sequence
  Description of Artificial Sequence: Synthetic oligonucleotide
cucggucguuucucaucuu

SEQ ID NO: 2913704 - RNA, 19 nt, Artificial Sequence
  Description of Artificial Sequence: Synthetic oligonucleotide
ccucuacgguauugguagu

SEQ ID NO: 2913705 - RNA, 19 nt, Artificial Sequence
  Description of Artificial Sequence: Synthetic oligonucleotide
cgucguccgccauguuuca

SEQ ID NO: 2913706 - RNA, 19 nt, Artificial Sequence
  Description of Artificial Sequence: Synthetic oligonucleotide
cuacgucucccaggaucau

SEQ ID NO: 2913707 - RNA, 19 nt, Artificial Sequence
  Description of Artificial Sequence: Synthetic oligonucleotide
cuccccggacgaagagcau

SEQ ID NO: 2913708 - RNA, 19 nt, Artificial Sequence
  Description of Artificial Sequence: Synthetic oligonucleotide
gggaguccucgggucauuu

SEQ ID NO: 2913709 - RNA, 19 nt, Artificial Sequence
  Description of Artificial Sequence: Synthetic oligonucleotide
cucgaagcucucggucguu

SEQ ID NO: 2913710 - RNA, 19 nt, Artificial Sequence
  Description of Artificial Sequence: Synthetic oligonucleotide
ggggcuccucuacgguauu

SEQ ID NO: 2913711 - RNA, 19 nt, Artificial Sequence
  Description of Artificial Sequence: Synthetic oligonucleotide
cuacgucguccgccauguu

SEQ ID NO: 2913712 - RNA, 19 nt, Artificial Sequence
  Description of Artificial Sequence: Synthetic oligonucleotide
cgucucccaggaucauauu

SEQ ID NO: 2913713 - RNA, 19 nt, Artificial Sequence
  Description of Artificial Sequence: Synthetic oligonucleotide
aaagauacuugacuuuagc

SEQ ID NO: 2913714 - RNA, 19 nt, Artificial Sequence
  Description of Artificial Sequence: Synthetic oligonucleotide
ucuauauuuccauaaauug

SEQ ID NO: 2913715 - RNA, 19 nt, Artificial Sequence
  Description of Artificial Sequence: Synthetic oligonucleotide
uauauuaacacaacuuccc

SEQ ID NO: 2913716 - RNA, 19 nt, Artificial Sequence
  Description of Artificial Sequence: Synthetic oligonucleotide
acauucaauauucugcacc

SEQ ID NO: 2913717 - RNA, 19 nt, Artificial Sequence
  Description of Artificial Sequence: Synthetic oligonucleotide
uuuuguuugaacaugaauu

SEQ ID NO: 2913718 - RNA, 19 nt, Artificial Sequence
  Description of Artificial Sequence: Synthetic oligonucleotide
auaaauuguucccagacag

SEQ ID NO: 2913719 - RNA, 19 nt, Artificial Sequence
  Description of Artificial Sequence: Synthetic oligonucleotide
gauauauuaacacaacuuc

SEQ ID NO: 2913720 - RNA, 19 nt, Artificial Sequence
  Description of Artificial Sequence: Synthetic oligonucleotide
uguauaaagauacuugacu

SEQ ID NO: 2913721 - RNA, 19 nt, Artificial Sequence
  Description of Artificial Sequence: Synthetic oligonucleotide
uguagauauauuaacacaa

SEQ ID NO: 2913722 - RNA, 19 nt, Artificial Sequence
  Description of Artificial Sequence: Synthetic oligonucleotide
aauaucuauauuuccauaa

SEQ ID NO: 2913723 - RNA, 19 nt, Artificial Sequence
  Description of Artificial Sequence: Synthetic oligonucleotide
ugacauaacaucuauggca

SEQ ID NO: 2913724 - RNA, 19 nt, Artificial Sequence
  Description of Artificial Sequence: Synthetic oligonucleotide
cucaagucaaaccugaggg

SEQ ID NO: 2913725 - RNA, 19 nt, Artificial Sequence
  Description of Artificial Sequence: Synthetic oligonucleotide
aacacaacuucccugaagu

SEQ ID NO: 2913726 - RNA, 19 nt, Artificial Sequence
  Description of Artificial Sequence: Synthetic oligonucleotide
aguacagaaaugaagacuc

SEQ ID NO: 2913727 - RNA, 19 nt, Artificial Sequence
  Description of Artificial Sequence: Synthetic oligonucleotide
ucuguauaaagauacuuga

SEQ ID NO: 2913728 - RNA, 19 nt, Artificial Sequence
  Description of Artificial Sequence: Synthetic oligonucleotide
auauauuaacacaacuucc

SEQ ID NO: 2913729 - RNA, 19 nt, Artificial Sequence
  Description of Artificial Sequence: Synthetic oligonucleotide
aucuauggcaccuugauga

SEQ ID NO: 2913730 - RNA, 19 nt, Artificial Sequence
  Description of Artificial Sequence: Synthetic oligonucleotide
uauauuuccauaaauuguu

SEQ ID NO: 2913731 - RNA, 19 nt, Artificial Sequence
  Description of Artificial Sequence: Synthetic oligonucleotide
ugaaguuuaucuacgguca

SEQ ID NO: 2913732 - RNA, 19 nt, Artificial Sequence
  Description of Artificial Sequence: Synthetic oligonucleotide
uucuacagcagucacauuc

SEQ ID NO: 2913733 - RNA, 19 nt, Artificial Sequence
  Description of Artificial Sequence: Synthetic oligonucleotide
ucuguagauauauuaacac

SEQ ID NO: 2913734 - RNA, 19 nt, Artificial Sequence
  Description of Artificial Sequence: Synthetic oligonucleotide
uuuaucuacggucacagua

SEQ ID NO: 2913735 - RNA, 19 nt, Artificial Sequence
  Description of Artificial Sequence: Synthetic oligonucleotide
cauucaauauucugcaccg

SEQ ID NO: 2913736 - RNA, 19 nt, Artificial Sequence
  Description of Artificial Sequence: Synthetic oligonucleotide
agacaguucacauugccuc

SEQ ID NO: 2913737 - RNA, 19 nt, Artificial Sequence
  Description of Artificial Sequence: Synthetic oligonucleotide
aagauacuugacuuuagca

SEQ ID NO: 2913738 - RNA, 19 nt, Artificial Sequence
  Description of Artificial Sequence: Synthetic oligonucleotide
accuugaugacuugaggcc

SEQ ID NO: 2913739 - RNA, 19 nt, Artificial Sequence
  Description of Artificial Sequence: Synthetic oligonucleotide
uucuguagauauauuaaca

SEQ ID NO: 2913740 - RNA, 19 nt, Artificial Sequence
  Description of Artificial Sequence: Synthetic oligonucleotide
gcugacauaacaucuaugg

SEQ ID NO: 2913741 - RNA, 19 nt, Artificial Sequence
  Description of Artificial Sequence: Synthetic oligonucleotide
ugcaugaauaucuauauuu

SEQ ID NO: 2913742 - RNA, 19 nt, Artificial Sequence
  Description of Artificial Sequence: Synthetic oligonucleotide
gaugucguccgacaggacg

SEQ ID NO: 2913743 - RNA, 19 nt, Artificial Sequence
  Description of Artificial Sequence: Synthetic oligonucleotide
uuuggcucuucacagacug

SEQ ID NO: 2913744 - RNA, 19 nt, Artificial Sequence
  Description of Artificial Sequence: Synthetic oligonucleotide
ucguacuccaaccugcagg

SEQ ID NO: 2913745 - RNA, 19 nt, Artificial Sequence
  Description of Artificial Sequence: Synthetic oligonucleotide
uagauauauuaacacaacu

SEQ ID NO: 2913746 - RNA, 19 nt, Artificial Sequence
  Description of Artificial Sequence: Synthetic oligonucleotide
uagacauccagaaguacag

SEQ ID NO: 2913747 - RNA, 19 nt, Artificial Sequence
  Description of Artificial Sequence: Synthetic oligonucleotide
uauuuccauaaauuguucc

SEQ ID NO: 2913748 - RNA, 19 nt, Artificial Sequence
  Description of Artificial Sequence: Synthetic oligonucleotide
caugaauaucuauauuucc

SEQ ID NO: 2913749 - RNA, 19 nt, Artificial Sequence
  Description of Artificial Sequence: Synthetic oligonucleotide
agacucuguauaaagauac

SEQ ID NO: 2913750 - RNA, 19 nt, Artificial Sequence
  Description of Artificial Sequence: Synthetic oligonucleotide
aauucuacagcagucacau

SEQ ID NO: 2913751 - RNA, 19 nt, Artificial Sequence
  Description of Artificial Sequence: Synthetic oligonucleotide
agaaguacagaaaugaaga

SEQ ID NO: 2913752 - RNA, 19 nt, Artificial Sequence
  Description of Artificial Sequence: Synthetic oligonucleotide
ucuucuguagauauauuaa

SEQ ID NO: 2913753 - RNA, 19 nt, Artificial Sequence
  Description of Artificial Sequence: Synthetic oligonucleotide
ucacauucaauauucugca

SEQ ID NO: 2913754 - RNA, 19 nt, Artificial Sequence
  Description of Artificial Sequence: Synthetic oligonucleotide
ucccagacaguucacauug

SEQ ID NO: 2913755 - RNA, 19 nt, Artificial Sequence
  Description of Artificial Sequence: Synthetic oligonucleotide
uuaucuacggucacaguac

SEQ ID NO: 2913756 - RNA, 19 nt, Artificial Sequence
  Description of Artificial Sequence: Synthetic oligonucleotide
augaagacucuguauaaag

SEQ ID NO: 2913757 - RNA, 19 nt, Artificial Sequence
  Description of Artificial Sequence: Synthetic oligonucleotide
uugacuuuagcauaccauc

SEQ ID NO: 2913758 - RNA, 19 nt, Artificial Sequence
  Description of Artificial Sequence: Synthetic oligonucleotide
uauuaacacaacuucccug

SEQ ID NO: 2913759 - RNA, 19 nt, Artificial Sequence
  Description of Artificial Sequence: Synthetic oligonucleotide
agauacuugacuuuagcau

SEQ ID NO: 2913760 - RNA, 19 nt, Artificial Sequence
  Description of Artificial Sequence: Synthetic oligonucleotide
uuuguuugaacaugaauuu

SEQ ID NO: 2913761 - RNA, 19 nt, Artificial Sequence
  Description of Artificial Sequence: Synthetic oligonucleotide
uccagaaguacagaaauga

SEQ ID NO: 2913762 - RNA, 19 nt, Artificial Sequence
  Description of Artificial Sequence: Synthetic oligonucleotide
cucuguauaaagauacuug

SEQ ID NO: 2913763 - RNA, 19 nt, Artificial Sequence
  Description of Artificial Sequence: Synthetic oligonucleotide
ugaagacucuguauaaaga

SEQ ID NO: 2913764 - RNA, 19 nt, Artificial Sequence
  Description of Artificial Sequence: Synthetic oligonucleotide
ucugcaccguuacagagcc

SEQ ID NO: 2913765 - RNA, 19 nt, Artificial Sequence
  Description of Artificial Sequence: Synthetic oligonucleotide
auuguucccagacaguuca

SEQ ID NO: 2913766 - RNA, 19 nt, Artificial Sequence
  Description of Artificial Sequence: Synthetic oligonucleotide
ucaagucaaaccugagggg

SEQ ID NO: 2913767 - RNA, 19 nt, Artificial Sequence
  Description of Artificial Sequence: Synthetic oligonucleotide
gucacauucaauauucugc

SEQ ID NO: 2913768 - RNA, 19 nt, Artificial Sequence
  Description of Artificial Sequence: Synthetic oligonucleotide
acuuuagcauaccaucuuc

SEQ ID NO: 2913769 - RNA, 19 nt, Artificial Sequence
  Description of Artificial Sequence: Synthetic oligonucleotide
aaguacagaaaugaagacu

SEQ ID NO: 2913770 - RNA, 19 nt, Artificial Sequence
  Description of Artificial Sequence: Synthetic oligonucleotide
cugaaguuuaucuacgguc

SEQ ID NO: 2913771 - RNA, 19 nt, Artificial Sequence
  Description of Artificial Sequence: Synthetic oligonucleotide
ugacucgauacucaaguca

SEQ ID NO: 2913772 - RNA, 19 nt, Artificial Sequence
  Description of Artificial Sequence: Synthetic oligonucleotide
acucaagucaaaccugagg

SEQ ID NO: 2913773 - RNA, 19 nt, Artificial Sequence
  Description of Artificial Sequence: Synthetic oligonucleotide
ugaauaucuauauuuccau

SEQ ID NO: 2913774 - RNA, 19 nt, Artificial Sequence
  Description of Artificial Sequence: Synthetic oligonucleotide
ugaugcaugaauaucuaua

SEQ ID NO: 2913775 - RNA, 19 nt, Artificial Sequence
  Description of Artificial Sequence: Synthetic oligonucleotide
uuugacgugaugcaugaau

SEQ ID NO: 2913776 - RNA, 19 nt, Artificial Sequence
  Description of Artificial Sequence: Synthetic oligonucleotide
acagcagucacauucaaua

SEQ ID NO: 2913777 - RNA, 19 nt, Artificial Sequence
  Description of Artificial Sequence: Synthetic oligonucleotide
gauccugaugacucgauac

SEQ ID NO: 2913778 - RNA, 19 nt, Artificial Sequence
  Description of Artificial Sequence: Synthetic oligonucleotide
uaucuauauuuccauaaau

SEQ ID NO: 2913779 - RNA, 19 nt, Artificial Sequence
  Description of Artificial Sequence: Synthetic oligonucleotide
auauucugcaccguuacag

SEQ ID NO: 2913780 - RNA, 19 nt, Artificial Sequence
  Description of Artificial Sequence: Synthetic oligonucleotide
uuuagcauaccaucuucug

SEQ ID NO: 2913781 - RNA, 19 nt, Artificial Sequence
  Description of Artificial Sequence: Synthetic oligonucleotide
uuagcauaccaucuucugu

SEQ ID NO: 2913782 - RNA, 19 nt, Artificial Sequence
  Description of Artificial Sequence: Synthetic oligonucleotide
cuucuguagauauauuaac

SEQ ID NO: 2913783 - RNA, 19 nt, Artificial Sequence
  Description of Artificial Sequence: Synthetic oligonucleotide
uaaagauacuugacuuuag

SEQ ID NO: 2913784 - RNA, 19 nt, Artificial Sequence
  Description of Artificial Sequence: Synthetic oligonucleotide
gacauaacaucuauggcac

SEQ ID NO: 2913785 - RNA, 19 nt, Artificial Sequence
  Description of Artificial Sequence: Synthetic oligonucleotide
aguacuuugacgugaugca

SEQ ID NO: 2913786 - RNA, 19 nt, Artificial Sequence
  Description of Artificial Sequence: Synthetic oligonucleotide
aaaccugaggggcgcgucc

SEQ ID NO: 2913787 - RNA, 19 nt, Artificial Sequence
  Description of Artificial Sequence: Synthetic oligonucleotide
caccuugaugacuugaggc

SEQ ID NO: 2913788 - RNA, 19 nt, Artificial Sequence
  Description of Artificial Sequence: Synthetic oligonucleotide
gauacuugacuuuagcaua

SEQ ID NO: 2913789 - RNA, 19 nt, Artificial Sequence
  Description of Artificial Sequence: Synthetic oligonucleotide
aguuuaucuacggucacag

SEQ ID NO: 2913790 - RNA, 19 nt, Artificial Sequence
  Description of Artificial Sequence: Synthetic oligonucleotide
ugacuuuagcauaccaucu

SEQ ID NO: 2913791 - RNA, 19 nt, Artificial Sequence
  Description of Artificial Sequence: Synthetic oligonucleotide
ucuacagcagucacauuca

SEQ ID NO: 2913792 - RNA, 19 nt, Artificial Sequence
  Description of Artificial Sequence: Synthetic oligonucleotide
acuucccugaaguuuaucu

SEQ ID NO: 2913793 - RNA, 19 nt, Artificial Sequence
  Description of Artificial Sequence: Synthetic oligonucleotide
uacuuugacgugaugcaug

SEQ ID NO: 2913794 - RNA, 19 nt, Artificial Sequence
  Description of Artificial Sequence: Synthetic oligonucleotide
uccuuuuguuugaacauga

SEQ ID NO: 2913795 - RNA, 19 nt, Artificial Sequence
  Description of Artificial Sequence: Synthetic oligonucleotide
auauuaacacaacuucccu

SEQ ID NO: 2913796 - RNA, 19 nt, Artificial Sequence
  Description of Artificial Sequence: Synthetic oligonucleotide
uucacauugccuccuuuug

SEQ ID NO: 2913797 - RNA, 19 nt, Artificial Sequence
  Description of Artificial Sequence: Synthetic oligonucleotide
gaaguacagaaaugaagac

SEQ ID NO: 2913798 - RNA, 19 nt, Artificial Sequence
  Description of Artificial Sequence: Synthetic oligonucleotide
uauaaagauacuugacuuu

SEQ ID NO: 2913799 - RNA, 19 nt, Artificial Sequence
  Description of Artificial Sequence: Synthetic oligonucleotide
gacugcaggaugcuggucc

SEQ ID NO: 2913800 - RNA, 19 nt, Artificial Sequence
  Description of Artificial Sequence: Synthetic oligonucleotide
ucaauucuacagcagucac

SEQ ID NO: 2913801 - RNA, 19 nt, Artificial Sequence
  Description of Artificial Sequence: Synthetic oligonucleotide
agucacauucaauauucug

SEQ ID NO: 2913802 - RNA, 19 nt, Artificial Sequence
  Description of Artificial Sequence: Synthetic oligonucleotide
agaaaugaagacucuguau

SEQ ID NO: 2913803 - RNA, 19 nt, Artificial Sequence
  Description of Artificial Sequence: Synthetic oligonucleotide
uuuccauaaauuguuccca

SEQ ID NO: 2913804 - RNA, 19 nt, Artificial Sequence
  Description of Artificial Sequence: Synthetic oligonucleotide
ucccugaaguuuaucuacg

SEQ ID NO: 2913805 - RNA, 19 nt, Artificial Sequence
  Description of Artificial Sequence: Synthetic oligonucleotide
aaauuguucccagacaguu

SEQ ID NO: 2913806 - RNA, 19 nt, Artificial Sequence
  Description of Artificial Sequence: Synthetic oligonucleotide
uuccauaaauuguucccag

SEQ ID NO: 2913807 - RNA, 19 nt, Artificial Sequence
  Description of Artificial Sequence: Synthetic oligonucleotide
caguacuuugacgugaugc

SEQ ID NO: 2913808 - RNA, 19 nt, Artificial Sequence
  Description of Artificial Sequence: Synthetic oligonucleotide
uucccugaaguuuaucuac

SEQ ID NO: 2913809 - RNA, 19 nt, Artificial Sequence
  Description of Artificial Sequence: Synthetic oligonucleotide
gaugacucgauacucaagu

SEQ ID NO: 2913810 - RNA, 19 nt, Artificial Sequence
  Description of Artificial Sequence: Synthetic oligonucleotide
uaacacaacuucccugaag

SEQ ID NO: 2913811 - RNA, 19 nt, Artificial Sequence
  Description of Artificial Sequence: Synthetic oligonucleotide
gauacucaagucaaaccug

SEQ ID NO: 2913812 - RNA, 19 nt, Artificial Sequence
  Description of Artificial Sequence: Synthetic oligonucleotide
cuguauaaagauacuugac

SEQ ID NO: 2913813 - RNA, 19 nt, Artificial Sequence
  Description of Artificial Sequence: Synthetic oligonucleotide
caagucaaaccugaggggc

SEQ ID NO: 2913814 - RNA, 19 nt, Artificial Sequence
  Description of Artificial Sequence: Synthetic oligonucleotide
aucuucuguagauauauua

SEQ ID NO: 2913815 - RNA, 19 nt, Artificial Sequence
  Description of Artificial Sequence: Synthetic oligonucleotide
aauauucugcaccguuaca

SEQ ID NO: 2913816 - RNA, 19 nt, Artificial Sequence
  Description of Artificial Sequence: Synthetic oligonucleotide
ugucaauucuacagcaguc

SEQ ID NO: 2913817 - RNA, 19 nt, Artificial Sequence
  Description of Artificial Sequence: Synthetic oligonucleotide
cuugaggccuuagacaucc

SEQ ID NO: 2913818 - RNA, 19 nt, Artificial Sequence
  Description of Artificial Sequence: Synthetic oligonucleotide
acggucacaguacuuugac

SEQ ID NO: 2913819 - RNA, 19 nt, Artificial Sequence
  Description of Artificial Sequence: Synthetic oligonucleotide
uauggcaccuugaugacuu

SEQ ID NO: 2913820 - RNA, 19 nt, Artificial Sequence
  Description of Artificial Sequence: Synthetic oligonucleotide
ucaauauucugcaccguua

SEQ ID NO: 2913821 - RNA, 19 nt, Artificial Sequence
  Description of Artificial Sequence: Synthetic oligonucleotide
uagcauaccaucuucugua

SEQ ID NO: 2913822 - RNA, 19 nt, Artificial Sequence
  Description of Artificial Sequence: Synthetic oligonucleotide
uucaauauucugcaccguu

SEQ ID NO: 2913823 - RNA, 19 nt, Artificial Sequence
  Description of Artificial Sequence: Synthetic oligonucleotide
uugacgugaugcaugaaua

SEQ ID NO: 2913824 - RNA, 19 nt, Artificial Sequence
  Description of Artificial Sequence: Synthetic oligonucleotide
aauuguucccagacaguuc

SEQ ID NO: 2913825 - RNA, 19 nt, Artificial Sequence
  Description of Artificial Sequence: Synthetic oligonucleotide
uaaauuguucccagacagu

SEQ ID NO: 2913826 - RNA, 19 nt, Artificial Sequence
  Description of Artificial Sequence: Synthetic oligonucleotide
cugacauaacaucuauggc

SEQ ID NO: 2913827 - RNA, 19 nt, Artificial Sequence
  Description of Artificial Sequence: Synthetic oligonucleotide
auaucuauauuuccauaaa

SEQ ID NO: 2913828 - RNA, 19 nt, Artificial Sequence
  Description of Artificial Sequence: Synthetic oligonucleotide
uacagaaaugaagacucug

SEQ ID NO: 2913829 - RNA, 19 nt, Artificial Sequence
  Description of Artificial Sequence: Synthetic oligonucleotide
aggacggccaccucccgcc

SEQ ID NO: 2913830 - RNA, 19 nt, Artificial Sequence
  Description of Artificial Sequence: Synthetic oligonucleotide
caauauucugcaccguuac

SEQ ID NO: 2913831 - RNA, 19 nt, Artificial Sequence
  Description of Artificial Sequence: Synthetic oligonucleotide
ugaggccuuagacauccag

SEQ ID NO: 2913832 - RNA, 19 nt, Artificial Sequence
  Description of Artificial Sequence: Synthetic oligonucleotide
auacuugacuuuagcauac

SEQ ID NO: 2913833 - RNA, 19 nt, Artificial Sequence
  Description of Artificial Sequence: Synthetic oligonucleotide
uucugcaccguuacagagc

SEQ ID NO: 2913834 - RNA, 19 nt, Artificial Sequence
  Description of Artificial Sequence: Synthetic oligonucleotide
agcuggcugacauaacauc

SEQ ID NO: 2913835 - RNA, 19 nt, Artificial Sequence
  Description of Artificial Sequence: Synthetic oligonucleotide
ugaugacucgauacucaag

SEQ ID NO: 2913836 - RNA, 19 nt, Artificial Sequence
  Description of Artificial Sequence: Synthetic oligonucleotide
ugcaccguuacagagccug

SEQ ID NO: 2913837 - RNA, 19 nt, Artificial Sequence
  Description of Artificial Sequence: Synthetic oligonucleotide
cuguagauauauuaacaca

SEQ ID NO: 2913838 - RNA, 19 nt, Artificial Sequence
  Description of Artificial Sequence: Synthetic oligonucleotide
gacaguucacauugccucc

SEQ ID NO: 2913839 - RNA, 19 nt, Artificial Sequence
  Description of Artificial Sequence: Synthetic oligonucleotide
cuauauuuccauaaauugu

SEQ ID NO: 2913840 - RNA, 19 nt, Artificial Sequence
  Description of Artificial Sequence: Synthetic oligonucleotide
aagucaaaccugaggggcg

SEQ ID NO: 2913841 - RNA, 19 nt, Artificial Sequence
  Description of Artificial Sequence: Synthetic oligonucleotide
gaugcaugaauaucuauau

SEQ ID NO: 2913842 - RNA, 19 nt, Artificial Sequence
  Description of Artificial Sequence: Synthetic oligonucleotide
auaaagauacuugacuuua

SEQ ID NO: 2913843 - RNA, 19 nt, Artificial Sequence
  Description of Artificial Sequence: Synthetic oligonucleotide
uaacaucuauggcaccuug

SEQ ID NO: 2913844 - RNA, 19 nt, Artificial Sequence
  Description of Artificial Sequence: Synthetic oligonucleotide
acuuugacgugaugcauga

SEQ ID NO: 2913845 - RNA, 19 nt, Artificial Sequence
  Description of Artificial Sequence: Synthetic oligonucleotide
gaagacucuguauaaagau

SEQ ID NO: 2913846 - RNA, 19 nt, Artificial Sequence
  Description of Artificial Sequence: Synthetic oligonucleotide
augacucgauacucaaguc

SEQ ID NO: 2913847 - RNA, 19 nt, Artificial Sequence
  Description of Artificial Sequence: Synthetic oligonucleotide
acaucuauggcaccuugau

SEQ ID NO: 2913848 - RNA, 19 nt, Artificial Sequence
  Description of Artificial Sequence: Synthetic oligonucleotide
guauaaagauacuugacuu

SEQ ID NO: 2913849 - RNA, 19 nt, Artificial Sequence
  Description of Artificial Sequence: Synthetic oligonucleotide
uuacagagccugauccuga

SEQ ID NO: 2913850 - RNA, 19 nt, Artificial Sequence
  Description of Artificial Sequence: Synthetic oligonucleotide
uccauaaauuguucccaga

SEQ ID NO: 2913851 - RNA, 19 nt, Artificial Sequence
  Description of Artificial Sequence: Synthetic oligonucleotide
guagauauauuaacacaac

SEQ ID NO: 2913852 - RNA, 19 nt, Artificial Sequence
  Description of Artificial Sequence: Synthetic oligonucleotide
agucaaaccugaggggcgc

SEQ ID NO: 2913853 - RNA, 19 nt, Artificial Sequence
  Description of Artificial Sequence: Synthetic oligonucleotide
cauugccuccuuuuguuug

SEQ ID NO: 2913854 - RNA, 19 nt, Artificial Sequence
  Description of Artificial Sequence: Synthetic oligonucleotide
accguuacagagccugauc

SEQ ID NO: 2913855 - RNA, 19 nt, Artificial Sequence
  Description of Artificial Sequence: Synthetic oligonucleotide
gaaguuuaucuacggucac

SEQ ID NO: 2913856 - RNA, 19 nt, Artificial Sequence
  Description of Artificial Sequence: Synthetic oligonucleotide
ucuacggucacaguacuuu

SEQ ID NO: 2913857 - RNA, 19 nt, Artificial Sequence
  Description of Artificial Sequence: Synthetic oligonucleotide
cauaaauuguucccagaca

SEQ ID NO: 2913858 - RNA, 19 nt, Artificial Sequence
  Description of Artificial Sequence: Synthetic oligonucleotide
uacucaagucaaaccugag

SEQ ID NO: 2913859 - RNA, 19 nt, Artificial Sequence
  Description of Artificial Sequence: Synthetic oligonucleotide
uaucuacggucacaguacu

SEQ ID NO: 2913860 - RNA, 19 nt, Artificial Sequence
  Description of Artificial Sequence: Synthetic oligonucleotide
acuugacuuuagcauacca

SEQ ID NO: 2913861 - RNA, 19 nt, Artificial Sequence
  Description of Artificial Sequence: Synthetic oligonucleotide
ucgaugucguccgacagga

SEQ ID NO: 2913862 - RNA, 19 nt, Artificial Sequence
  Description of Artificial Sequence: Synthetic oligonucleotide
gaugacuugaggccuuaga

SEQ ID NO: 2913863 - RNA, 19 nt, Artificial Sequence
  Description of Artificial Sequence: Synthetic oligonucleotide
acgugaugcaugaauaucu

SEQ ID NO: 2913864 - RNA, 19 nt, Artificial Sequence
  Description of Artificial Sequence: Synthetic oligonucleotide
gaauaucuauauuuccaua

SEQ ID NO: 2913865 - RNA, 19 nt, Artificial Sequence
  Description of Artificial Sequence: Synthetic oligonucleotide
aaguuuaucuacggucaca

SEQ ID NO: 2913866 - RNA, 19 nt, Artificial Sequence
  Description of Artificial Sequence: Synthetic oligonucleotide
agcggcgucguacuccaac

SEQ ID NO: 2913867 - RNA, 19 nt, Artificial Sequence
  Description of Artificial Sequence: Synthetic oligonucleotide
ucacaguacuuugacguga

SEQ ID NO: 2913868 - RNA, 19 nt, Artificial Sequence
  Description of Artificial Sequence: Synthetic oligonucleotide
gaugcugguccccugggca

SEQ ID NO: 2913869 - RNA, 19 nt, Artificial Sequence
  Description of Artificial Sequence: Synthetic oligonucleotide
cucgauacucaagucaaac

SEQ ID NO: 2913870 - RNA, 19 nt, Artificial Sequence
  Description of Artificial Sequence: Synthetic oligonucleotide
agcauaccaucuucuguag

SEQ ID NO: 2913871 - RNA, 19 nt, Artificial Sequence
  Description of Artificial Sequence: Synthetic oligonucleotide
gucgaugucguccgacagg

SEQ ID NO: 2913872 - RNA, 19 nt, Artificial Sequence
  Description of Artificial Sequence: Synthetic oligonucleotide
aggccuuagacauccagaa

SEQ ID NO: 2913873 - RNA, 19 nt, Artificial Sequence
  Description of Artificial Sequence: Synthetic oligonucleotide
agagccugauccugaugac

SEQ ID NO: 2913874 - RNA, 19 nt, Artificial Sequence
  Description of Artificial Sequence: Synthetic oligonucleotide
guuacagagccugauccug

SEQ ID NO: 2913875 - RNA, 19 nt, Artificial Sequence
  Description of Artificial Sequence: Synthetic oligonucleotide
uacggucacaguacuuuga

SEQ ID NO: 2913876 - RNA, 19 nt, Artificial Sequence
  Description of Artificial Sequence: Synthetic oligonucleotide
auccugaugacucgauacu

SEQ ID NO: 2913877 - RNA, 19 nt, Artificial Sequence
  Description of Artificial Sequence: Synthetic oligonucleotide
cagagccugauccugauga

SEQ ID NO: 2913878 - RNA, 19 nt, Artificial Sequence
  Description of Artificial Sequence: Synthetic oligonucleotide
agccugauccugaugacuc

SEQ ID NO: 2913879 - RNA, 19 nt, Artificial Sequence
  Description of Artificial Sequence: Synthetic oligonucleotide
ccauaaauuguucccagac

SEQ ID NO: 2913880 - RNA, 19 nt, Artificial Sequence
  Description of Artificial Sequence: Synthetic oligonucleotide
augucguccgacaggacgg

SEQ ID NO: 2913881 - RNA, 19 nt, Artificial Sequence
  Description of Artificial Sequence: Synthetic oligonucleotide
uggcucuucacagacugca

SEQ ID NO: 2913882 - RNA, 19 nt, Artificial Sequence
  Description of Artificial Sequence: Synthetic oligonucleotide
ugacgugaugcaugaauau

SEQ ID NO: 2913883 - RNA, 19 nt, Artificial Sequence
  Description of Artificial Sequence: Synthetic oligonucleotide
auugccuccuuuuguuuga

SEQ ID NO: 2913884 - RNA, 19 nt, Artificial Sequence
  Description of Artificial Sequence: Synthetic oligonucleotide
ucuauggcaccuugaugac

SEQ ID NO: 2913885 - RNA, 19 nt, Artificial Sequence
  Description of Artificial Sequence: Synthetic oligonucleotide
aagacucuguauaaagaua

SEQ ID NO: 2913886 - RNA, 19 nt, Artificial Sequence
  Description of Artificial Sequence: Synthetic oligonucleotide
agcagucacauucaauauu

SEQ ID NO: 2913887 - RNA, 19 nt, Artificial Sequence
  Description of Artificial Sequence: Synthetic oligonucleotide
gcagugucaauucuacagc

SEQ ID NO: 2913888 - RNA, 19 nt, Artificial Sequence
  Description of Artificial Sequence: Synthetic oligonucleotide
auacucaagucaaaccuga

SEQ ID NO: 2913889 - RNA, 19 nt, Artificial Sequence
  Description of Artificial Sequence: Synthetic oligonucleotide
gacucgauacucaagucaa

SEQ ID NO: 2913890 - RNA, 19 nt, Artificial Sequence
  Description of Artificial Sequence: Synthetic oligonucleotide
ggucacaguacuuugacgu

SEQ ID NO: 2913891 - RNA, 19 nt, Artificial Sequence
  Description of Artificial Sequence: Synthetic oligonucleotide
uuuuggcucuucacagacu

SEQ ID NO: 2913892 - RNA, 19 nt, Artificial Sequence
  Description of Artificial Sequence: Synthetic oligonucleotide
uuaacacaacuucccugaa

SEQ ID NO: 2913893 - RNA, 19 nt, Artificial Sequence
  Description of Artificial Sequence: Synthetic oligonucleotide
gucacaguacuuugacgug

SEQ ID NO: 2913894 - RNA, 19 nt, Artificial Sequence
  Description of Artificial Sequence: Synthetic oligonucleotide
agugucaauucuacagcag

SEQ ID NO: 2913895 - RNA, 19 nt, Artificial Sequence
  Description of Artificial Sequence: Synthetic oligonucleotide
gucaauucuacagcaguca

SEQ ID NO: 2913896 - RNA, 19 nt, Artificial Sequence
  Description of Artificial Sequence: Synthetic oligonucleotide
acucuguauaaagauacuu

SEQ ID NO: 2913897 - RNA, 19 nt, Artificial Sequence
  Description of Artificial Sequence: Synthetic oligonucleotide
gcucuucacagacugcagg

SEQ ID NO: 2913898 - RNA, 19 nt, Artificial Sequence
  Description of Artificial Sequence: Synthetic oligonucleotide
caucuauggcaccuugaug

SEQ ID NO: 2913899 - RNA, 19 nt, Artificial Sequence
  Description of Artificial Sequence: Synthetic oligonucleotide
gacgugaugcaugaauauc

SEQ ID NO: 2913900 - RNA, 19 nt, Artificial Sequence
  Description of Artificial Sequence: Synthetic oligonucleotide
uggcugacauaacaucuau

SEQ ID NO: 2913901 - RNA, 19 nt, Artificial Sequence
  Description of Artificial Sequence: Synthetic oligonucleotide
uacagcagucacauucaau

SEQ ID NO: 2913902 - RNA, 19 nt, Artificial Sequence
  Description of Artificial Sequence: Synthetic oligonucleotide
aacaucuauggcaccuuga

SEQ ID NO: 2913903 - RNA, 19 nt, Artificial Sequence
  Description of Artificial Sequence: Synthetic oligonucleotide
cuacggucacaguacuuug

SEQ ID NO: 2913904 - RNA, 19 nt, Artificial Sequence
  Description of Artificial Sequence: Synthetic oligonucleotide
cuuagacauccagaaguac

SEQ ID NO: 2913905 - RNA, 19 nt, Artificial Sequence
  Description of Artificial Sequence: Synthetic oligonucleotide
ccguuacagagccugaucc

SEQ ID NO: 2913906 - RNA, 19 nt, Artificial Sequence
  Description of Artificial Sequence: Synthetic oligonucleotide
ucguccgacaggacggcca

SEQ ID NO: 2913907 - RNA, 19 nt, Artificial Sequence
  Description of Artificial Sequence: Synthetic oligonucleotide
cagugucaauucuacagca

SEQ ID NO: 2913908 - RNA, 19 nt, Artificial Sequence
  Description of Artificial Sequence: Synthetic oligonucleotide
acaacuucccugaaguuua

SEQ ID NO: 2913909 - RNA, 19 nt, Artificial Sequence
  Description of Artificial Sequence: Synthetic oligonucleotide
ugauccugaugacucgaua

SEQ ID NO: 2913910 - RNA, 19 nt, Artificial Sequence
  Description of Artificial Sequence: Synthetic oligonucleotide
aacuucccugaaguuuauc

SEQ ID NO: 2913911 - RNA, 19 nt, Artificial Sequence
  Description of Artificial Sequence: Synthetic oligonucleotide
caauucuacagcagucaca

SEQ ID NO: 2913912 - RNA, 19 nt, Artificial Sequence
  Description of Artificial Sequence: Synthetic oligonucleotide
uuguuugaacaugaauuuu

SEQ ID NO: 2913913 - RNA, 19 nt, Artificial Sequence
  Description of Artificial Sequence: Synthetic oligonucleotide
gcagucacauucaauauuc

SEQ ID NO: 2913914 - RNA, 19 nt, Artificial Sequence
  Description of Artificial Sequence: Synthetic oligonucleotide
uccugaugacucgauacuc

SEQ ID NO: 2913915 - RNA, 19 nt, Artificial Sequence
  Description of Artificial Sequence: Synthetic oligonucleotide
gacaggacggccaccuccc

SEQ ID NO: 2913916 - RNA, 19 nt, Artificial Sequence
  Description of Artificial Sequence: Synthetic oligonucleotide
caggaugcugguccccugg

SEQ ID NO: 2913917 - RNA, 19 nt, Artificial Sequence
  Description of Artificial Sequence: Synthetic oligonucleotide
gccuuagacauccagaagu

SEQ ID NO: 2913918 - RNA, 19 nt, Artificial Sequence
  Description of Artificial Sequence: Synthetic oligonucleotide
cauaccaucuucuguagau

SEQ ID NO: 2913919 - RNA, 19 nt, Artificial Sequence
  Description of Artificial Sequence: Synthetic oligonucleotide
gugucaauucuacagcagu

SEQ ID NO: 2913920 - RNA, 19 nt, Artificial Sequence
  Description of Artificial Sequence: Synthetic oligonucleotide
gcaugaauaucuauauuuc

SEQ ID NO: 2913921 - RNA, 19 nt, Artificial Sequence
  Description of Artificial Sequence: Synthetic oligonucleotide
gaggccuuagacauccaga

SEQ ID NO: 2913922 - RNA, 19 nt, Artificial Sequence
  Description of Artificial Sequence: Synthetic oligonucleotide
cauccagaaguacagaaau

SEQ ID NO: 2913923 - RNA, 19 nt, Artificial Sequence
  Description of Artificial Sequence: Synthetic oligonucleotide
cuugacuuuagcauaccau

SEQ ID NO: 2913924 - RNA, 19 nt, Artificial Sequence
  Description of Artificial Sequence: Synthetic oligonucleotide
augcugguccccugggcag

SEQ ID NO: 2913925 - RNA, 19 nt, Artificial Sequence
  Description of Artificial Sequence: Synthetic oligonucleotide
augcaugaauaucuauauu

SEQ ID NO: 2913926 - RNA, 19 nt, Artificial Sequence
  Description of Artificial Sequence: Synthetic oligonucleotide
gcaccuugaugacuugagg

SEQ ID NO: 2913927 - RNA, 19 nt, Artificial Sequence
  Description of Artificial Sequence: Synthetic oligonucleotide
cagaaaugaagacucugua

SEQ ID NO: 2913928 - RNA, 19 nt, Artificial Sequence
  Description of Artificial Sequence: Synthetic oligonucleotide
uccgacaggacggccaccu

SEQ ID NO: 2913929 - RNA, 19 nt, Artificial Sequence
  Description of Artificial Sequence: Synthetic oligonucleotide
cuuuuguuugaacaugaau

SEQ ID NO: 2913930 - RNA, 19 nt, Artificial Sequence
  Description of Artificial Sequence: Synthetic oligonucleotide
cuuuagcauaccaucuucu

SEQ ID NO: 2913931 - RNA, 19 nt, Artificial Sequence
  Description of Artificial Sequence: Synthetic oligonucleotide
auccagaaguacagaaaug

SEQ ID NO: 2913932 - RNA, 19 nt, Artificial Sequence
  Description of Artificial Sequence: Synthetic oligonucleotide
cguacuccaaccugcaggc

SEQ ID NO: 2913933 - RNA, 19 nt, Artificial Sequence
  Description of Artificial Sequence: Synthetic oligonucleotide
uacuugacuuuagcauacc

SEQ ID NO: 2913934 - RNA, 19 nt, Artificial Sequence
  Description of Artificial Sequence: Synthetic oligonucleotide
uucccagacaguucacauu

SEQ ID NO: 2913935 - RNA, 19 nt, Artificial Sequence
  Description of Artificial Sequence: Synthetic oligonucleotide
acauccagaaguacagaaa

SEQ ID NO: 2913936 - RNA, 19 nt, Artificial Sequence
  Description of Artificial Sequence: Synthetic oligonucleotide
cuucccugaaguuuaucua

SEQ ID NO: 2913937 - RNA, 19 nt, Artificial Sequence
  Description of Artificial Sequence: Synthetic oligonucleotide
ccagacaguucacauugcc

SEQ ID NO: 2913938 - RNA, 19 nt, Artificial Sequence
  Description of Artificial Sequence: Synthetic oligonucleotide
cugaugacucgauacucaa

SEQ ID NO: 2913939 - RNA, 19 nt, Artificial Sequence
  Description of Artificial Sequence: Synthetic oligonucleotide
uacagagccugauccugau

SEQ ID NO: 2913940 - RNA, 19 nt, Artificial Sequence
  Description of Artificial Sequence: Synthetic oligonucleotide
acaguacuuugacgugaug

SEQ ID NO: 2913941 - RNA, 19 nt, Artificial Sequence
  Description of Artificial Sequence: Synthetic oligonucleotide
acagagccugauccugaug

SEQ ID NO: 2913942 - RNA, 19 nt, Artificial Sequence
  Description of Artificial Sequence: Synthetic oligonucleotide
gaggggcgcguccaccucc

SEQ ID NO: 2913943 - RNA, 19 nt, Artificial Sequence
  Description of Artificial Sequence: Synthetic oligonucleotide
ugaugacuugaggccuuag

SEQ ID NO: 2913944 - RNA, 19 nt, Artificial Sequence
  Description of Artificial Sequence: Synthetic oligonucleotide
ggucgaugucguccgacag

SEQ ID NO: 2913945 - RNA, 19 nt, Artificial Sequence
  Description of Artificial Sequence: Synthetic oligonucleotide
auucaauauucugcaccgu

SEQ ID NO: 2913946 - RNA, 19 nt, Artificial Sequence
  Description of Artificial Sequence: Synthetic oligonucleotide
cccugaaguuuaucuacgg

SEQ ID NO: 2913947 - RNA, 19 nt, Artificial Sequence
  Description of Artificial Sequence: Synthetic oligonucleotide
acauugccuccuuuuguuu

SEQ ID NO: 2913948 - RNA, 19 nt, Artificial Sequence
  Description of Artificial Sequence: Synthetic oligonucleotide
gucguacuccaaccugcag

SEQ ID NO: 2913949 - RNA, 19 nt, Artificial Sequence
  Description of Artificial Sequence: Synthetic oligonucleotide
ugcaggaugcugguccccu

SEQ ID NO: 2913950 - RNA, 19 nt, Artificial Sequence
  Description of Artificial Sequence: Synthetic oligonucleotide
gacuuuagcauaccaucuu

SEQ ID NO: 2913951 - RNA, 19 nt, Artificial Sequence
  Description of Artificial Sequence: Synthetic oligonucleotide
uuguucccagacaguucac

SEQ ID NO: 2913952 - RNA, 19 nt, Artificial Sequence
  Description of Artificial Sequence: Synthetic oligonucleotide
auaacaucuauggcaccuu

SEQ ID NO: 2913953 - RNA, 19 nt, Artificial Sequence
  Description of Artificial Sequence: Synthetic oligonucleotide
ggcaccuugaugacuugag

SEQ ID NO: 2913954 - RNA, 19 nt, Artificial Sequence
  Description of Artificial Sequence: Synthetic oligonucleotide
aaccugaggggcgcgucca

SEQ ID NO: 2913955 - RNA, 19 nt, Artificial Sequence
  Description of Artificial Sequence: Synthetic oligonucleotide
ggcgcguccaccuccacca

SEQ ID NO: 2913956 - RNA, 19 nt, Artificial Sequence
  Description of Artificial Sequence: Synthetic oligonucleotide
aguucacauugccuccuuu

SEQ ID NO: 2913957 - RNA, 19 nt, Artificial Sequence
  Description of Artificial Sequence: Synthetic oligonucleotide
acacaacuucccugaaguu

SEQ ID NO: 2913958 - RNA, 19 nt, Artificial Sequence
  Description of Artificial Sequence: Synthetic oligonucleotide
uggcaccuugaugacuuga

SEQ ID NO: 2913959 - RNA, 19 nt, Artificial Sequence
  Description of Artificial Sequence: Synthetic oligonucleotide
agacauccagaaguacaga

SEQ ID NO: 2913960 - RNA, 19 nt, Artificial Sequence
  Description of Artificial Sequence: Synthetic oligonucleotide
ucaaaccugaggggcgcgu

SEQ ID NO: 2913961 - RNA, 19 nt, Artificial Sequence
  Description of Artificial Sequence: Synthetic oligonucleotide
ggccuuagacauccagaag

SEQ ID NO: 2913962 - RNA, 19 nt, Artificial Sequence
  Description of Artificial Sequence: Synthetic oligonucleotide
acaggacggccaccucccg

SEQ ID NO: 2913963 - RNA, 19 nt, Artificial Sequence
  Description of Artificial Sequence: Synthetic oligonucleotide
cagacaguucacauugccu

SEQ ID NO: 2913964 - RNA, 19 nt, Artificial Sequence
  Description of Artificial Sequence: Synthetic oligonucleotide
ggcgucguacuccaaccug

SEQ ID NO: 2913965 - RNA, 19 nt, Artificial Sequence
  Description of Artificial Sequence: Synthetic oligonucleotide
acggccaccucccgccgag

SEQ ID NO: 2913966 - RNA, 19 nt, Artificial Sequence
  Description of Artificial Sequence: Synthetic oligonucleotide
cuggcugacauaacaucua

SEQ ID NO: 2913967 - RNA, 19 nt, Artificial Sequence
  Description of Artificial Sequence: Synthetic oligonucleotide
accugaggggcgcguccac

SEQ ID NO: 2913968 - RNA, 19 nt, Artificial Sequence
  Description of Artificial Sequence: Synthetic oligonucleotide
gccugauccugaugacucg

SEQ ID NO: 2913969 - RNA, 19 nt, Artificial Sequence
  Description of Artificial Sequence: Synthetic oligonucleotide
ugucguccgacaggacggc

SEQ ID NO: 2913970 - RNA, 19 nt, Artificial Sequence
  Description of Artificial Sequence: Synthetic oligonucleotide
caggacggccaccucccgc

SEQ ID NO: 2913971 - RNA, 19 nt, Artificial Sequence
  Description of Artificial Sequence: Synthetic oligonucleotide
gcguccaccuccaccaagg

SEQ ID NO: 2913972 - RNA, 19 nt, Artificial Sequence
  Description of Artificial Sequence: Synthetic oligonucleotide
ugccuccuuuuguuugaac

SEQ ID NO: 2913973 - RNA, 19 nt, Artificial Sequence
  Description of Artificial Sequence: Synthetic oligonucleotide
guucacauugccuccuuuu

SEQ ID NO: 2913974 - RNA, 19 nt, Artificial Sequence
  Description of Artificial Sequence: Synthetic oligonucleotide
gucaaaccugaggggcgcg

SEQ ID NO: 2913975 - RNA, 19 nt, Artificial Sequence
  Description of Artificial Sequence: Synthetic oligonucleotide
guucccagacaguucacau

SEQ ID NO: 2913976 - RNA, 19 nt, Artificial Sequence
  Description of Artificial Sequence: Synthetic oligonucleotide
ccugaugacucgauacuca

SEQ ID NO: 2913977 - RNA, 19 nt, Artificial Sequence
  Description of Artificial Sequence: Synthetic oligonucleotide
ugguccccugggcaguguc

SEQ ID NO: 2913978 - RNA, 19 nt, Artificial Sequence
  Description of Artificial Sequence: Synthetic oligonucleotide
auggcaccuugaugacuug

SEQ ID NO: 2913979 - RNA, 19 nt, Artificial Sequence
  Description of Artificial Sequence: Synthetic oligonucleotide
ccagcuggcugacauaaca

SEQ ID NO: 2913980 - RNA, 19 nt, Artificial Sequence
  Description of Artificial Sequence: Synthetic oligonucleotide
gcggcgucguacuccaacc

SEQ ID NO: 2913981 - RNA, 19 nt, Artificial Sequence
  Description of Artificial Sequence: Synthetic oligonucleotide
cgauacucaagucaaaccu

SEQ ID NO: 2913982 - RNA, 19 nt, Artificial Sequence
  Description of Artificial Sequence: Synthetic oligonucleotide
gacucuguauaaagauacu

SEQ ID NO: 2913983 - RNA, 19 nt, Artificial Sequence
  Description of Artificial Sequence: Synthetic oligonucleotide
gcgucguacuccaaccugc

SEQ ID NO: 2913984 - RNA, 19 nt, Artificial Sequence
  Description of Artificial Sequence: Synthetic oligonucleotide
ugaggggcgcguccaccuc

SEQ ID NO: 2913985 - RNA, 19 nt, Artificial Sequence
  Description of Artificial Sequence: Synthetic oligonucleotide
ggcugacauaacaucuaug

SEQ ID NO: 2913986 - RNA, 19 nt, Artificial Sequence
  Description of Artificial Sequence: Synthetic oligonucleotide
gugaugcaugaauaucuau

SEQ ID NO: 2913987 - RNA, 19 nt, Artificial Sequence
  Description of Artificial Sequence: Synthetic oligonucleotide
uugaugacuugaggccuua

SEQ ID NO: 2913988 - RNA, 19 nt, Artificial Sequence
  Description of Artificial Sequence: Synthetic oligonucleotide
cacauugccuccuuuuguu

SEQ ID NO: 2913989 - RNA, 19 nt, Artificial Sequence
  Description of Artificial Sequence: Synthetic oligonucleotide
caaaccugaggggcgcguc

SEQ ID NO: 2913990 - RNA, 19 nt, Artificial Sequence
  Description of Artificial Sequence: Synthetic oligonucleotide
ccagaaguacagaaaugaa

SEQ ID NO: 2913991 - RNA, 19 nt, Artificial Sequence
  Description of Artificial Sequence: Synthetic oligonucleotide
guuuaucuacggucacagu

SEQ ID NO: 2913992 - RNA, 19 nt, Artificial Sequence
  Description of Artificial Sequence: Synthetic oligonucleotide
cacaacuucccugaaguuu

SEQ ID NO: 2913993 - RNA, 19 nt, Artificial Sequence
  Description of Artificial Sequence: Synthetic oligonucleotide
ggccaccucccgccgagcg

SEQ ID NO: 2913994 - RNA, 19 nt, Artificial Sequence
  Description of Artificial Sequence: Synthetic oligonucleotide
cuacagcagucacauucaa

SEQ ID NO: 2913995 - RNA, 19 nt, Artificial Sequence
  Description of Artificial Sequence: Synthetic oligonucleotide
gcuggcugacauaacaucu

SEQ ID NO: 2913996 - RNA, 19 nt, Artificial Sequence
  Description of Artificial Sequence: Synthetic oligonucleotide
ccuuagacauccagaagua

SEQ ID NO: 2913997 - RNA, 19 nt, Artificial Sequence
  Description of Artificial Sequence: Synthetic oligonucleotide
gagccugauccugaugacu

SEQ ID NO: 2913998 - RNA, 19 nt, Artificial Sequence
  Description of Artificial Sequence: Synthetic oligonucleotide
cgacaggacggccaccucc

SEQ ID NO: 2913999 - RNA, 19 nt, Artificial Sequence
  Description of Artificial Sequence: Synthetic oligonucleotide
cggucacaguacuuugacg

SEQ ID NO: 2914000 - RNA, 19 nt, Artificial Sequence
  Description of Artificial Sequence: Synthetic oligonucleotide
gcauaccaucuucuguaga

SEQ ID NO: 2914001 - RNA, 19 nt, Artificial Sequence
  Description of Artificial Sequence: Synthetic oligonucleotide
auucuacagcagucacauu

SEQ ID NO: 2914002 - RNA, 19 nt, Artificial Sequence
  Description of Artificial Sequence: Synthetic oligonucleotide
gggucgaugucguccgaca

SEQ ID NO: 2914003 - RNA, 19 nt, Artificial Sequence
  Description of Artificial Sequence: Synthetic oligonucleotide
ggcucuucacagacugcag

SEQ ID NO: 2914004 - RNA, 19 nt, Artificial Sequence
  Description of Artificial Sequence: Synthetic oligonucleotide
uugccuccuuuuguuugaa

SEQ ID NO: 2914005 - RNA, 19 nt, Artificial Sequence
  Description of Artificial Sequence: Synthetic oligonucleotide
accaucuucuguagauaua

SEQ ID NO: 2914006 - RNA, 19 nt, Artificial Sequence
  Description of Artificial Sequence: Synthetic oligonucleotide
acucgauacucaagucaaa

SEQ ID NO: 2914007 - RNA, 19 nt, Artificial Sequence
  Description of Artificial Sequence: Synthetic oligonucleotide
guacagaaaugaagacucu

SEQ ID NO: 2914008 - RNA, 19 nt, Artificial Sequence
  Description of Artificial Sequence: Synthetic oligonucleotide
cacaguacuuugacgugau

SEQ ID NO: 2914009 - RNA, 19 nt, Artificial Sequence
  Description of Artificial Sequence: Synthetic oligonucleotide
cagcagucacauucaauau

SEQ ID NO: 2914010 - RNA, 19 nt, Artificial Sequence
  Description of Artificial Sequence: Synthetic oligonucleotide
cagucacauucaauauucu

SEQ ID NO: 2914011 - RNA, 19 nt, Artificial Sequence
  Description of Artificial Sequence: Synthetic oligonucleotide
cugcaggaugcuggucccc

SEQ ID NO: 2914012 - RNA, 19 nt, Artificial Sequence
  Description of Artificial Sequence: Synthetic oligonucleotide
cccagacaguucacauugc

SEQ ID NO: 2914013 - RNA, 19 nt, Artificial Sequence
  Description of Artificial Sequence: Synthetic oligonucleotide
cuugaugacuugaggccuu

SEQ ID NO: 2914014 - RNA, 19 nt, Artificial Sequence
  Description of Artificial Sequence: Synthetic oligonucleotide
cagcuggcugacauaacau

SEQ ID NO: 2914015 - RNA, 19 nt, Artificial Sequence
  Description of Artificial Sequence: Synthetic oligonucleotide
gggcgcguccaccuccacc

SEQ ID NO: 2914016 - RNA, 19 nt, Artificial Sequence
  Description of Artificial Sequence: Synthetic oligonucleotide
ccaucuucuguagauauau

SEQ ID NO: 2914017 - RNA, 19 nt, Artificial Sequence
  Description of Artificial Sequence: Synthetic oligonucleotide
ccaccuccaccaaggcccg

SEQ ID NO: 2914018 - RNA, 19 nt, Artificial Sequence
  Description of Artificial Sequence: Synthetic oligonucleotide
cucccgccgagcggcgucg

SEQ ID NO: 2914019 - RNA, 19 nt, Artificial Sequence
  Description of Artificial Sequence: Synthetic oligonucleotide
aucuacggucacaguacuu

SEQ ID NO: 2914020 - RNA, 19 nt, Artificial Sequence
  Description of Artificial Sequence: Synthetic oligonucleotide
gucguccgacaggacggcc

SEQ ID NO: 2914021 - RNA, 19 nt, Artificial Sequence
  Description of Artificial Sequence: Synthetic oligonucleotide
ccuuuuguuugaacaugaa

SEQ ID NO: 2914022 - RNA, 19 nt, Artificial Sequence
  Description of Artificial Sequence: Synthetic oligonucleotide
gggcagugucaauucuaca

SEQ ID NO: 2914023 - RNA, 19 nt, Artificial Sequence
  Description of Artificial Sequence: Synthetic oligonucleotide
gacggccaccucccgccga

SEQ ID NO: 2914024 - RNA, 19 nt, Artificial Sequence
  Description of Artificial Sequence: Synthetic oligonucleotide
cugaggggcgcguccaccu

SEQ ID NO: 2914025 - RNA, 19 nt, Artificial Sequence
  Description of Artificial Sequence: Synthetic oligonucleotide
gcaggaugcugguccccug

SEQ ID NO: 2914026 - RNA, 19 nt, Artificial Sequence
  Description of Artificial Sequence: Synthetic oligonucleotide
ccugaaguuuaucuacggu

SEQ ID NO: 2914027 - RNA, 19 nt, Artificial Sequence
  Description of Artificial Sequence: Synthetic oligonucleotide
guccccugggcagugucaa

SEQ ID NO: 2914028 - RNA, 19 nt, Artificial Sequence
  Description of Artificial Sequence: Synthetic oligonucleotide
cuauggcaccuugaugacu

SEQ ID NO: 2914029 - RNA, 19 nt, Artificial Sequence
  Description of Artificial Sequence: Synthetic oligonucleotide
uccccugggcagugucaau

SEQ ID NO: 2914030 - RNA, 19 nt, Artificial Sequence
  Description of Artificial Sequence: Synthetic oligonucleotide
caucuucuguagauauauu

SEQ ID NO: 2914031 - RNA, 19 nt, Artificial Sequence
  Description of Artificial Sequence: Synthetic oligonucleotide
caccucccgccgagcggcg

SEQ ID NO: 2914032 - RNA, 19 nt, Artificial Sequence
  Description of Artificial Sequence: Synthetic oligonucleotide
cugauccugaugacucgau

SEQ ID NO: 2914033 - RNA, 19 nt, Artificial Sequence
  Description of Artificial Sequence: Synthetic oligonucleotide
ccgagcggcgucguacucc

SEQ ID NO: 2914034 - RNA, 19 nt, Artificial Sequence
  Description of Artificial Sequence: Synthetic oligonucleotide
ggggucgaugucguccgac

SEQ ID NO: 2914035 - RNA, 19 nt, Artificial Sequence
  Description of Artificial Sequence: Synthetic oligonucleotide
ccugauccugaugacucga

SEQ ID NO: 2914036 - RNA, 19 nt, Artificial Sequence
  Description of Artificial Sequence: Synthetic oligonucleotide
cgugaugcaugaauaucua

SEQ ID NO: 2914037 - RNA, 19 nt, Artificial Sequence
  Description of Artificial Sequence: Synthetic oligonucleotide
cuuugacgugaugcaugaa

SEQ ID NO: 2914038 - RNA, 19 nt, Artificial Sequence
  Description of Artificial Sequence: Synthetic oligonucleotide
ccuugaugacuugaggccu

SEQ ID NO: 2914039 - RNA, 19 nt, Artificial Sequence
  Description of Artificial Sequence: Synthetic oligonucleotide
ccugaggggcgcguccacc

SEQ ID NO: 2914040 - RNA, 19 nt, Artificial Sequence
  Description of Artificial Sequence: Synthetic oligonucleotide
aggggcgcguccaccucca

SEQ ID NO: 2914041 - RNA, 19 nt, Artificial Sequence
  Description of Artificial Sequence: Synthetic oligonucleotide
guccgacaggacggccacc

SEQ ID NO: 2914042 - RNA, 19 nt, Artificial Sequence
  Description of Artificial Sequence: Synthetic oligonucleotide
cguccgacaggacggccac

SEQ ID NO: 2914043 - RNA, 19 nt, Artificial Sequence
  Description of Artificial Sequence: Synthetic oligonucleotide
gguccccugggcaguguca

SEQ ID NO: 2914044 - RNA, 19 nt, Artificial Sequence
  Description of Artificial Sequence: Synthetic oligonucleotide
cccagcuggcugacauaac

SEQ ID NO: 2914045 - RNA, 19 nt, Artificial Sequence
  Description of Artificial Sequence: Synthetic oligonucleotide
caacuucccugaaguuuau

SEQ ID NO: 2914046 - RNA, 19 nt, Artificial Sequence
  Description of Artificial Sequence: Synthetic oligonucleotide
caccuccaccaaggcccgg

SEQ ID NO: 2914047 - RNA, 19 nt, Artificial Sequence
  Description of Artificial Sequence: Synthetic oligonucleotide
cgucguacuccaaccugca

SEQ ID NO: 2914048 - RNA, 19 nt, Artificial Sequence
  Description of Artificial Sequence: Synthetic oligonucleotide
cgagcggcgucguacucca

SEQ ID NO: 2914049 - RNA, 19 nt, Artificial Sequence
  Description of Artificial Sequence: Synthetic oligonucleotide
cguuacagagccugauccu

SEQ ID NO: 2914050 - RNA, 19 nt, Artificial Sequence
  Description of Artificial Sequence: Synthetic oligonucleotide
ccgccgagcggcgucguac

SEQ ID NO: 2914051 - RNA, 19 nt, Artificial Sequence
  Description of Artificial Sequence: Synthetic oligonucleotide
cgcguccaccuccaccaag

SEQ ID NO: 2914052 - RNA, 19 nt, Artificial Sequence
  Description of Artificial Sequence: Synthetic oligonucleotide
caccguuacagagccugau

SEQ ID NO: 2914053 - RNA, 19 nt, Artificial Sequence
  Description of Artificial Sequence: Synthetic oligonucleotide
gcaccguuacagagccuga

SEQ ID NO: 2914054 - RNA, 19 nt, Artificial Sequence
  Description of Artificial Sequence: Synthetic oligonucleotide
accucccgccgagcggcgu

SEQ ID NO: 2914055 - RNA, 19 nt, Artificial Sequence
  Description of Artificial Sequence: Synthetic oligonucleotide
ucccgccgagcggcgucgu

SEQ ID NO: 2914056 - RNA, 19 nt, Artificial Sequence
  Description of Artificial Sequence: Synthetic oligonucleotide
ccucccgccgagcggcguc

SEQ ID NO: 2914057 - RNA, 19 nt, Artificial Sequence
  Description of Artificial Sequence: Synthetic oligonucleotide
cgaugucguccgacaggac

SEQ ID NO: 2914058 - RNA, 19 nt, Artificial Sequence
  Description of Artificial Sequence: Synthetic oligonucleotide
gccgagcggcgucguacuc

SEQ ID NO: 2914059 - RNA, 19 nt, Artificial Sequence
  Description of Artificial Sequence: Synthetic oligonucleotide
ccgacaggacggccaccuc

SEQ ID NO: 2914060 - RNA, 19 nt, Artificial Sequence
  Description of Artificial Sequence: Synthetic oligonucleotide
cugcaccguuacagagccu

SEQ ID NO: 2914061 - RNA, 19 nt, Artificial Sequence
  Description of Artificial Sequence: Synthetic oligonucleotide
ggggcgcguccaccuccac

SEQ ID NO: 2914062 - RNA, 19 nt, Artificial Sequence
  Description of Artificial Sequence: Synthetic oligonucleotide
gagcggcgucguacuccaa

SEQ ID NO: 2914063 - RNA, 19 nt, Artificial Sequence
  Description of Artificial Sequence: Synthetic oligonucleotide
gcgcguccaccuccaccaa

SEQ ID NO: 2914064 - RNA, 19 nt, Artificial Sequence
  Description of Artificial Sequence: Synthetic oligonucleotide
ccccugggcagugucaauu

SEQ ID NO: 2914065 - RNA, 19 nt, Artificial Sequence
  Description of Artificial Sequence: Synthetic oligonucleotide
cugguccccugggcagugu

SEQ ID NO: 2914066 - RNA, 19 nt, Artificial Sequence
  Description of Artificial Sequence: Synthetic oligonucleotide
cggcgucguacuccaaccu

SEQ ID NO: 2914067 - RNA, 19 nt, Artificial Sequence
  Description of Artificial Sequence: Synthetic oligonucleotide
cgccgagcggcgucguacu

SEQ ID NO: 2914068 - RNA, 19 nt, Artificial Sequence
  Description of Artificial Sequence: Synthetic oligonucleotide
cggccaccucccgccgagc

SEQ ID NO: 2914069 - RNA, 19 nt, Artificial Sequence
  Description of Artificial Sequence: Synthetic oligonucleotide
cccgccgagcggcgucgua

SEQ ID NO: 2914070 - RNA, 19 nt, Artificial Sequence
  Description of Artificial Sequence: Synthetic oligonucleotide
aaaaggaaaauuuaaaccc

SEQ ID NO: 2914071 - RNA, 19 nt, Artificial Sequence
  Description of Artificial Sequence: Synthetic oligonucleotide
uuaaauucuagaaagaagg

SEQ ID NO: 2914072 - RNA, 19 nt, Artificial Sequence
  Description of Artificial Sequence: Synthetic oligonucleotide
aaaauaucaaaccccaccc

SEQ ID NO: 2914073 - RNA, 19 nt, Artificial Sequence
  Description of Artificial Sequence: Synthetic oligonucleotide
auuaguaaaagccaaauuc

SEQ ID NO: 2914074 - RNA, 19 nt, Artificial Sequence
  Description of Artificial Sequence: Synthetic oligonucleotide
ucuaauuuuauuuaaauga

SEQ ID NO: 2914075 - RNA, 19 nt, Artificial Sequence
  Description of Artificial Sequence: Synthetic oligonucleotide
uuacacauaacaaagaaga

SEQ ID NO: 2914076 - RNA, 19 nt, Artificial Sequence
  Description of Artificial Sequence: Synthetic oligonucleotide
aaaauuuaaacccaaaguu

SEQ ID NO: 2914077 - RNA, 19 nt, Artificial Sequence
  Description of Artificial Sequence: Synthetic oligonucleotide
aaguuaauccuguuuaagc

SEQ ID NO: 2914078 - RNA, 19 nt, Artificial Sequence
  Description of Artificial Sequence: Synthetic oligonucleotide
uuuaaaugaguucacauca

SEQ ID NO: 2914079 - RNA, 19 nt, Artificial Sequence
  Description of Artificial Sequence: Synthetic oligonucleotide
aaagccaaauucuuuaagg

SEQ ID NO: 2914080 - RNA, 19 nt, Artificial Sequence
  Description of Artificial Sequence: Synthetic oligonucleotide
acauguaaaauaucaaacc

SEQ ID NO: 2914081 - RNA, 19 nt, Artificial Sequence
  Description of Artificial Sequence: Synthetic oligonucleotide
acaucuauuaguaaaagcc

SEQ ID NO: 2914082 - RNA, 19 nt, Artificial Sequence
  Description of Artificial Sequence: Synthetic oligonucleotide
aauucuuuaagguauauua

SEQ ID NO: 2914083 - RNA, 19 nt, Artificial Sequence
  Description of Artificial Sequence: Synthetic oligonucleotide
aauacaaaagcaacuaugg

SEQ ID NO: 2914084 - RNA, 19 nt, Artificial Sequence
  Description of Artificial Sequence: Synthetic oligonucleotide
aacaucuauuaguaaaagc

SEQ ID NO: 2914085 - RNA, 19 nt, Artificial Sequence
  Description of Artificial Sequence: Synthetic oligonucleotide
uuuuauuuaaaugaguuca

SEQ ID NO: 2914086 - RNA, 19 nt, Artificial Sequence
  Description of Artificial Sequence: Synthetic oligonucleotide
uauggaauuuuacagauca

SEQ ID NO: 2914087 - RNA, 19 nt, Artificial Sequence
  Description of Artificial Sequence: Synthetic oligonucleotide
uuuaagauuauucuaauuu

SEQ ID NO: 2914088 - RNA, 19 nt, Artificial Sequence
  Description of Artificial Sequence: Synthetic oligonucleotide
uaagacauguaaaauauca

SEQ ID NO: 2914089 - RNA, 19 nt, Artificial Sequence
  Description of Artificial Sequence: Synthetic oligonucleotide
aagucaaagagauacaggu

SEQ ID NO: 2914090 - RNA, 19 nt, Artificial Sequence
  Description of Artificial Sequence: Synthetic oligonucleotide
uagaaaacuauuaagacau

SEQ ID NO: 2914091 - RNA, 19 nt, Artificial Sequence
  Description of Artificial Sequence: Synthetic oligonucleotide
uaaaauaucaaaccccacc

SEQ ID NO: 2914092 - RNA, 19 nt, Artificial Sequence
  Description of Artificial Sequence: Synthetic oligonucleotide
aaugaguucacaucaaacu

SEQ ID NO: 2914093 - RNA, 19 nt, Artificial Sequence
  Description of Artificial Sequence: Synthetic oligonucleotide
aaucacacugggcagaggg

SEQ ID NO: 2914094 - RNA, 19 nt, Artificial Sequence
  Description of Artificial Sequence: Synthetic oligonucleotide
cuuacugugaaucacacug

SEQ ID NO: 2914095 - RNA, 19 nt, Artificial Sequence
  Description of Artificial Sequence: Synthetic oligonucleotide
uguaaaauaucaaacccca

SEQ ID NO: 2914096 - RNA, 19 nt, Artificial Sequence
  Description of Artificial Sequence: Synthetic oligonucleotide
uuacagaucagccuugggg

SEQ ID NO: 2914097 - RNA, 19 nt, Artificial Sequence
  Description of Artificial Sequence: Synthetic oligonucleotide
uuuaagguauauuaaauuc

SEQ ID NO: 2914098 - RNA, 19 nt, Artificial Sequence
  Description of Artificial Sequence: Synthetic oligonucleotide
auuuaaaugaguucacauc

SEQ ID NO: 2914099 - RNA, 19 nt, Artificial Sequence
  Description of Artificial Sequence: Synthetic oligonucleotide
uuaguaaaagccaaauucu

SEQ ID NO: 2914100 - RNA, 19 nt, Artificial Sequence
  Description of Artificial Sequence: Synthetic oligonucleotide
uucacaucaaacucaauag

SEQ ID NO: 2914101 - RNA, 19 nt, Artificial Sequence
  Description of Artificial Sequence: Synthetic oligonucleotide
aauucuagaaagaaggucu

SEQ ID NO: 2914102 - RNA, 19 nt, Artificial Sequence
  Description of Artificial Sequence: Synthetic oligonucleotide
aauuuuacagaucagccuu

SEQ ID NO: 2914103 - RNA, 19 nt, Artificial Sequence
  Description of Artificial Sequence: Synthetic oligonucleotide
aaacuauuaagacauguaa

SEQ ID NO: 2914104 - RNA, 19 nt, Artificial Sequence
  Description of Artificial Sequence: Synthetic oligonucleotide
uuaagguauauuaaauucu

SEQ ID NO: 2914105 - RNA, 19 nt, Artificial Sequence
  Description of Artificial Sequence: Synthetic oligonucleotide
aaauucuagaaagaagguc

SEQ ID NO: 2914106 - RNA, 19 nt, Artificial Sequence
  Description of Artificial Sequence: Synthetic oligonucleotide
cauaacaaagaagagaaag

SEQ ID NO: 2914107 - RNA, 19 nt, Artificial Sequence
  Description of Artificial Sequence: Synthetic oligonucleotide
uuaaacccaaaguuaaucc

SEQ ID NO: 2914108 - RNA, 19 nt, Artificial Sequence
  Description of Artificial Sequence: Synthetic oligonucleotide
uucuaauuuuauuuaaaug

SEQ ID NO: 2914109 - RNA, 19 nt, Artificial Sequence
  Description of Artificial Sequence: Synthetic oligonucleotide
aaauacaaaagcaacuaug

SEQ ID NO: 2914110 - RNA, 19 nt, Artificial Sequence
  Description of Artificial Sequence: Synthetic oligonucleotide
uacaaaagcaacuauggaa

SEQ ID NO: 2914111 - RNA, 19 nt, Artificial Sequence
  Description of Artificial Sequence: Synthetic oligonucleotide
acagccugaucuuagaggg

SEQ ID NO: 2914112 - RNA, 19 nt, Artificial Sequence
  Description of Artificial Sequence: Synthetic oligonucleotide
ucuuuacacagccugaucu

SEQ ID NO: 2914113 - RNA, 19 nt, Artificial Sequence
  Description of Artificial Sequence: Synthetic oligonucleotide
auguaaaauaucaaacccc

SEQ ID NO: 2914114 - RNA, 19 nt, Artificial Sequence
  Description of Artificial Sequence: Synthetic oligonucleotide
agaagagaaaggcagagca

SEQ ID NO: 2914115 - RNA, 19 nt, Artificial Sequence
  Description of Artificial Sequence: Synthetic oligonucleotide
uuaagcucuuuacacagcc

SEQ ID NO: 2914116 - RNA, 19 nt, Artificial Sequence
  Description of Artificial Sequence: Synthetic oligonucleotide
cuagaaagaaggucuaagg

SEQ ID NO: 2914117 - RNA, 19 nt, Artificial Sequence
  Description of Artificial Sequence: Synthetic oligonucleotide
aaaagccaaauucuuuaag

SEQ ID NO: 2914118 - RNA, 19 nt, Artificial Sequence
  Description of Artificial Sequence: Synthetic oligonucleotide
acuauuaagacauguaaaa

SEQ ID NO: 2914119 - RNA, 19 nt, Artificial Sequence
  Description of Artificial Sequence: Synthetic oligonucleotide
augaguucacaucaaacuc

SEQ ID NO: 2914120 - RNA, 19 nt, Artificial Sequence
  Description of Artificial Sequence: Synthetic oligonucleotide
agaaagaaggucuaaggcu

SEQ ID NO: 2914121 - RNA, 19 nt, Artificial Sequence
  Description of Artificial Sequence: Synthetic oligonucleotide
gucaaagagauacagguug

SEQ ID NO: 2914122 - RNA, 19 nt, Artificial Sequence
  Description of Artificial Sequence: Synthetic oligonucleotide
aacuauggaauuuuacaga

SEQ ID NO: 2914123 - RNA, 19 nt, Artificial Sequence
  Description of Artificial Sequence: Synthetic oligonucleotide
caacuauggaauuuuacag

SEQ ID NO: 2914124 - RNA, 19 nt, Artificial Sequence
  Description of Artificial Sequence: Synthetic oligonucleotide
ucuuacacauaacaaagaa

SEQ ID NO: 2914125 - RNA, 19 nt, Artificial Sequence
  Description of Artificial Sequence: Synthetic oligonucleotide
auaacaaagaagagaaagg

SEQ ID NO: 2914126 - RNA, 19 nt, Artificial Sequence
  Description of Artificial Sequence: Synthetic oligonucleotide
aguuaauccuguuuaagcu

SEQ ID NO: 2914127 - RNA, 19 nt, Artificial Sequence
  Description of Artificial Sequence: Synthetic oligonucleotide
guuuaagcucuuuacacag

SEQ ID NO: 2914128 - RNA, 19 nt, Artificial Sequence
  Description of Artificial Sequence: Synthetic oligonucleotide
gaaaauuuaaacccaaagu

SEQ ID NO: 2914129 - RNA, 19 nt, Artificial Sequence
  Description of Artificial Sequence: Synthetic oligonucleotide
uccagucuuacacauaaca

SEQ ID NO: 2914130 - RNA, 19 nt, Artificial Sequence
  Description of Artificial Sequence: Synthetic oligonucleotide
acaucaaacucaauagucc

SEQ ID NO: 2914131 - RNA, 19 nt, Artificial Sequence
  Description of Artificial Sequence: Synthetic oligonucleotide
aacucaauaguccagucuu

SEQ ID NO: 2914132 - RNA, 19 nt, Artificial Sequence
  Description of Artificial Sequence: Synthetic oligonucleotide
aauaucaaaccccacccaa

SEQ ID NO: 2914133 - RNA, 19 nt, Artificial Sequence
  Description of Artificial Sequence: Synthetic oligonucleotide
uaauuuuauuuaaaugagu

SEQ ID NO: 2914134 - RNA, 19 nt, Artificial Sequence
  Description of Artificial Sequence: Synthetic oligonucleotide
gauaacucaauuucuaaaa

SEQ ID NO: 2914135 - RNA, 19 nt, Artificial Sequence
  Description of Artificial Sequence: Synthetic oligonucleotide
cuuacacauaacaaagaag

SEQ ID NO: 2914136 - RNA, 19 nt, Artificial Sequence
  Description of Artificial Sequence: Synthetic oligonucleotide
aaaauacaaaagcaacuau

SEQ ID NO: 2914137 - RNA, 19 nt, Artificial Sequence
  Description of Artificial Sequence: Synthetic oligonucleotide
ugaguucacaucaaacuca

SEQ ID NO: 2914138 - RNA, 19 nt, Artificial Sequence
  Description of Artificial Sequence: Synthetic oligonucleotide
aagccaaauucuuuaaggu

SEQ ID NO: 2914139 - RNA, 19 nt, Artificial Sequence
  Description of Artificial Sequence: Synthetic oligonucleotide
aagcucuuuacacagccug

SEQ ID NO: 2914140 - RNA, 19 nt, Artificial Sequence
  Description of Artificial Sequence: Synthetic oligonucleotide
ucuuuaagguauauuaaau

SEQ ID NO: 2914141 - RNA, 19 nt, Artificial Sequence
  Description of Artificial Sequence: Synthetic oligonucleotide
uuuauuuaaaugaguucac

SEQ ID NO: 2914142 - RNA, 19 nt, Artificial Sequence
  Description of Artificial Sequence: Synthetic oligonucleotide
gacauguaaaauaucaaac

SEQ ID NO: 2914143 - RNA, 19 nt, Artificial Sequence
  Description of Artificial Sequence: Synthetic oligonucleotide
uauuuaaaugaguucacau

SEQ ID NO: 2914144 - RNA, 19 nt, Artificial Sequence
  Description of Artificial Sequence: Synthetic oligonucleotide
aaagagauacagguugcac

SEQ ID NO: 2914145 - RNA, 19 nt, Artificial Sequence
  Description of Artificial Sequence: Synthetic oligonucleotide
agguauauuaaauucuaga

SEQ ID NO: 2914146 - RNA, 19 nt, Artificial Sequence
  Description of Artificial Sequence: Synthetic oligonucleotide
aaaguuaauccuguuuaag

SEQ ID NO: 2914147 - RNA, 19 nt, Artificial Sequence
  Description of Artificial Sequence: Synthetic oligonucleotide
auuauucuaauuuuauuua

SEQ ID NO: 2914148 - RNA, 19 nt, Artificial Sequence
  Description of Artificial Sequence: Synthetic oligonucleotide
uggaauuuuacagaucagc

SEQ ID NO: 2914149 - RNA, 19 nt, Artificial Sequence
  Description of Artificial Sequence: Synthetic oligonucleotide
aauaguccagucuuacaca

SEQ ID NO: 2914150 - RNA, 19 nt, Artificial Sequence
  Description of Artificial Sequence: Synthetic oligonucleotide
ggaaaauuuaaacccaaag

SEQ ID NO: 2914151 - RNA, 19 nt, Artificial Sequence
  Description of Artificial Sequence: Synthetic oligonucleotide
guagaaaacuauuaagaca

SEQ ID NO: 2914152 - RNA, 19 nt, Artificial Sequence
  Description of Artificial Sequence: Synthetic oligonucleotide
aggguagaaaacuauuaag

SEQ ID NO: 2914153 - RNA, 19 nt, Artificial Sequence
  Description of Artificial Sequence: Synthetic oligonucleotide
caauaguccagucuuacac

SEQ ID NO: 2914154 - RNA, 19 nt, Artificial Sequence
  Description of Artificial Sequence: Synthetic oligonucleotide
uaaauucuagaaagaaggu

SEQ ID NO: 2914155 - RNA, 19 nt, Artificial Sequence
  Description of Artificial Sequence: Synthetic oligonucleotide
gauuauucuaauuuuauuu

SEQ ID NO: 2914156 - RNA, 19 nt, Artificial Sequence
  Description of Artificial Sequence: Synthetic oligonucleotide
uguuuaagcucuuuacaca

SEQ ID NO: 2914157 - RNA, 19 nt, Artificial Sequence
  Description of Artificial Sequence: Synthetic oligonucleotide
agaaaggcagagcagaagu

SEQ ID NO: 2914158 - RNA, 19 nt, Artificial Sequence
  Description of Artificial Sequence: Synthetic oligonucleotide
uacacauaacaaagaagag

SEQ ID NO: 2914159 - RNA, 19 nt, Artificial Sequence
  Description of Artificial Sequence: Synthetic oligonucleotide
uauucuaauuuuauuuaaa

SEQ ID NO: 2914160 - RNA, 19 nt, Artificial Sequence
  Description of Artificial Sequence: Synthetic oligonucleotide
uaagguauauuaaauucua

SEQ ID NO: 2914161 - RNA, 19 nt, Artificial Sequence
  Description of Artificial Sequence: Synthetic oligonucleotide
aaacucaauaguccagucu

SEQ ID NO: 2914162 - RNA, 19 nt, Artificial Sequence
  Description of Artificial Sequence: Synthetic oligonucleotide
uuucuucuaguucagcacu

SEQ ID NO: 2914163 - RNA, 19 nt, Artificial Sequence
  Description of Artificial Sequence: Synthetic oligonucleotide
uuacugugaaucacacugg

SEQ ID NO: 2914164 - RNA, 19 nt, Artificial Sequence
  Description of Artificial Sequence: Synthetic oligonucleotide
ucuagaaagaaggucuaag

SEQ ID NO: 2914165 - RNA, 19 nt, Artificial Sequence
  Description of Artificial Sequence: Synthetic oligonucleotide
uacugugaaucacacuggg

SEQ ID NO: 2914166 - RNA, 19 nt, Artificial Sequence
  Description of Artificial Sequence: Synthetic oligonucleotide
gaucuuagaggguagaaaa

SEQ ID NO: 2914167 - RNA, 19 nt, Artificial Sequence
  Description of Artificial Sequence: Synthetic oligonucleotide
uuauucuaauuuuauuuaa

SEQ ID NO: 2914168 - RNA, 19 nt, Artificial Sequence
  Description of Artificial Sequence: Synthetic oligonucleotide
cuguuuaagcucuuuacac

SEQ ID NO: 2914169 - RNA, 19 nt, Artificial Sequence
  Description of Artificial Sequence: Synthetic oligonucleotide
uacagaucagccuuggggu

SEQ ID NO: 2914170 - RNA, 19 nt, Artificial Sequence
  Description of Artificial Sequence: Synthetic oligonucleotide
ucaaagagauacagguugc

SEQ ID NO: 2914171 - RNA, 19 nt, Artificial Sequence
  Description of Artificial Sequence: Synthetic oligonucleotide
agucuuacacauaacaaag

SEQ ID NO: 2914172 - RNA, 19 nt, Artificial Sequence
  Description of Artificial Sequence: Synthetic oligonucleotide
ucaaaccccacccaaacau

SEQ ID NO: 2914173 - RNA, 19 nt, Artificial Sequence
  Description of Artificial Sequence: Synthetic oligonucleotide
aaaggaaaauuuaaaccca

SEQ ID NO: 2914174 - RNA, 19 nt, Artificial Sequence
  Description of Artificial Sequence: Synthetic oligonucleotide
acuauggaauuuuacagau

SEQ ID NO: 2914175 - RNA, 19 nt, Artificial Sequence
  Description of Artificial Sequence: Synthetic oligonucleotide
auacagguugcacagauaa

SEQ ID NO: 2914176 - RNA, 19 nt, Artificial Sequence
  Description of Artificial Sequence: Synthetic oligonucleotide
aaacaucuauuaguaaaag

SEQ ID NO: 2914177 - RNA, 19 nt, Artificial Sequence
  Description of Artificial Sequence: Synthetic oligonucleotide
aaauaucaaaccccaccca

SEQ ID NO: 2914178 - RNA, 19 nt, Artificial Sequence
  Description of Artificial Sequence: Synthetic oligonucleotide
uuuaaacccaaaguuaauc

SEQ ID NO: 2914179 - RNA, 19 nt, Artificial Sequence
  Description of Artificial Sequence: Synthetic oligonucleotide
uaaacccaaaguuaauccu

SEQ ID NO: 2914180 - RNA, 19 nt, Artificial Sequence
  Description of Artificial Sequence: Synthetic oligonucleotide
agaagucaaagagauacag

SEQ ID NO: 2914181 - RNA, 19 nt, Artificial Sequence
  Description of Artificial Sequence: Synthetic oligonucleotide
gaagucaaagagauacagg

SEQ ID NO: 2914182 - RNA, 19 nt, Artificial Sequence
  Description of Artificial Sequence: Synthetic oligonucleotide
gguagaaaacuauuaagac

SEQ ID NO: 2914183 - RNA, 19 nt, Artificial Sequence
  Description of Artificial Sequence: Synthetic oligonucleotide
ucuuagaggguagaaaacu

SEQ ID NO: 2914184 - RNA, 19 nt, Artificial Sequence
  Description of Artificial Sequence: Synthetic oligonucleotide
ucuauuaguaaaagccaaa

SEQ ID NO: 2914185 - RNA, 19 nt, Artificial Sequence
  Description of Artificial Sequence: Synthetic oligonucleotide
gguauauuaaauucuagaa

SEQ ID NO: 2914186 - RNA, 19 nt, Artificial Sequence
  Description of Artificial Sequence: Synthetic oligonucleotide
uaucaaaccccacccaaac

SEQ ID NO: 2914187 - RNA, 19 nt, Artificial Sequence
  Description of Artificial Sequence: Synthetic oligonucleotide
aaacccaaaguuaauccug

SEQ ID NO: 2914188 - RNA, 19 nt, Artificial Sequence
  Description of Artificial Sequence: Synthetic oligonucleotide
ucugcugugaccucgguuu

SEQ ID NO: 2914189 - RNA, 19 nt, Artificial Sequence
  Description of Artificial Sequence: Synthetic oligonucleotide
uucuaguucagcacucucu

SEQ ID NO: 2914190 - RNA, 19 nt, Artificial Sequence
  Description of Artificial Sequence: Synthetic oligonucleotide
aaaggcagagcagaaguca

SEQ ID NO: 2914191 - RNA, 19 nt, Artificial Sequence
  Description of Artificial Sequence: Synthetic oligonucleotide
aacuauuaagacauguaaa

SEQ ID NO: 2914192 - RNA, 19 nt, Artificial Sequence
  Description of Artificial Sequence: Synthetic oligonucleotide
uauuaguaaaagccaaauu

SEQ ID NO: 2914193 - RNA, 19 nt, Artificial Sequence
  Description of Artificial Sequence: Synthetic oligonucleotide
uuauuuaaaugaguucaca

SEQ ID NO: 2914194 - RNA, 19 nt, Artificial Sequence
  Description of Artificial Sequence: Synthetic oligonucleotide
uaaaugaguucacaucaaa

SEQ ID NO: 2914195 - RNA, 19 nt, Artificial Sequence
  Description of Artificial Sequence: Synthetic oligonucleotide
aaagaaggucuaaggcugc

SEQ ID NO: 2914196 - RNA, 19 nt, Artificial Sequence
  Description of Artificial Sequence: Synthetic oligonucleotide
acaaaagcaacuauggaau

SEQ ID NO: 2914197 - RNA, 19 nt, Artificial Sequence
  Description of Artificial Sequence: Synthetic oligonucleotide
acacauaacaaagaagaga

SEQ ID NO: 2914198 - RNA, 19 nt, Artificial Sequence
  Description of Artificial Sequence: Synthetic oligonucleotide
agauaacucaauuucuaaa

SEQ ID NO: 2914199 - RNA, 19 nt, Artificial Sequence
  Description of Artificial Sequence: Synthetic oligonucleotide
acagguugcacagauaacu

SEQ ID NO: 2914200 - RNA, 19 nt, Artificial Sequence
  Description of Artificial Sequence: Synthetic oligonucleotide
uuuacagaucagccuuggg

SEQ ID NO: 2914201 - RNA, 19 nt, Artificial Sequence
  Description of Artificial Sequence: Synthetic oligonucleotide
guucacaucaaacucaaua

SEQ ID NO: 2914202 - RNA, 19 nt, Artificial Sequence
  Description of Artificial Sequence: Synthetic oligonucleotide
uuagaggguagaaaacuau

SEQ ID NO: 2914203 - RNA, 19 nt, Artificial Sequence
  Description of Artificial Sequence: Synthetic oligonucleotide
cugugaaucacacugggca

SEQ ID NO: 2914204 - RNA, 19 nt, Artificial Sequence
  Description of Artificial Sequence: Synthetic oligonucleotide
gcagaagucaaagagauac

SEQ ID NO: 2914205 - RNA, 19 nt, Artificial Sequence
  Description of Artificial Sequence: Synthetic oligonucleotide
aagauuauucuaauuuuau

SEQ ID NO: 2914206 - RNA, 19 nt, Artificial Sequence
  Description of Artificial Sequence: Synthetic oligonucleotide
uccuguuuaagcucuuuac

SEQ ID NO: 2914207 - RNA, 19 nt, Artificial Sequence
  Description of Artificial Sequence: Synthetic oligonucleotide
guaaaagccaaauucuuua

SEQ ID NO: 2914208 - RNA, 19 nt, Artificial Sequence
  Description of Artificial Sequence: Synthetic oligonucleotide
uuuaagcucuuuacacagc

SEQ ID NO: 2914209 - RNA, 19 nt, Artificial Sequence
  Description of Artificial Sequence: Synthetic oligonucleotide
uuaaaugaguucacaucaa

SEQ ID NO: 2914210 - RNA, 19 nt, Artificial Sequence
  Description of Artificial Sequence: Synthetic oligonucleotide
aaaacuauuaagacaugua

SEQ ID NO: 2914211 - RNA, 19 nt, Artificial Sequence
  Description of Artificial Sequence: Synthetic oligonucleotide
uuacacagccugaucuuag

SEQ ID NO: 2914212 - RNA, 19 nt, Artificial Sequence
  Description of Artificial Sequence: Synthetic oligonucleotide
aguccagucuuacacauaa

SEQ ID NO: 2914213 - RNA, 19 nt, Artificial Sequence
  Description of Artificial Sequence: Synthetic oligonucleotide
caucuauuaguaaaagcca

SEQ ID NO: 2914214 - RNA, 19 nt, Artificial Sequence
  Description of Artificial Sequence: Synthetic oligonucleotide
aaagcaacuauggaauuuu

SEQ ID NO: 2914215 - RNA, 19 nt, Artificial Sequence
  Description of Artificial Sequence: Synthetic oligonucleotide
guuaauccuguuuaagcuc

SEQ ID NO: 2914216 - RNA, 19 nt, Artificial Sequence
  Description of Artificial Sequence: Synthetic oligonucleotide
uuaagacauguaaaauauc

SEQ ID NO: 2914217 - RNA, 19 nt, Artificial Sequence
  Description of Artificial Sequence: Synthetic oligonucleotide
aggguucugagcccaaggg

SEQ ID NO: 2914218 - RNA, 19 nt, Artificial Sequence
  Description of Artificial Sequence: Synthetic oligonucleotide
aagguauauuaaauucuag

SEQ ID NO: 2914219 - RNA, 19 nt, Artificial Sequence
  Description of Artificial Sequence: Synthetic oligonucleotide
uuuuacagaucagccuugg

SEQ ID NO: 2914220 - RNA, 19 nt, Artificial Sequence
  Description of Artificial Sequence: Synthetic oligonucleotide
uuuuaagauuauucuaauu

SEQ ID NO: 2914221 - RNA, 19 nt, Artificial Sequence
  Description of Artificial Sequence: Synthetic oligonucleotide
ucaaacucaauaguccagu

SEQ ID NO: 2914222 - RNA, 19 nt, Artificial Sequence
  Description of Artificial Sequence: Synthetic oligonucleotide
ggaauuuuacagaucagcc

SEQ ID NO: 2914223 - RNA, 19 nt, Artificial Sequence
  Description of Artificial Sequence: Synthetic oligonucleotide
auacaaaagcaacuaugga

SEQ ID NO: 2914224 - RNA, 19 nt, Artificial Sequence
  Description of Artificial Sequence: Synthetic oligonucleotide
uucuuacugugaaucacac

SEQ ID NO: 2914225 - RNA, 19 nt, Artificial Sequence
  Description of Artificial Sequence: Synthetic oligonucleotide
ucuaguucagcacucucuu

SEQ ID NO: 2914226 - RNA, 19 nt, Artificial Sequence
  Description of Artificial Sequence: Synthetic oligonucleotide
uaaaagccaaauucuuuaa

SEQ ID NO: 2914227 - RNA, 19 nt, Artificial Sequence
  Description of Artificial Sequence: Synthetic oligonucleotide
ugcacagauaacucaauuu

SEQ ID NO: 2914228 - RNA, 19 nt, Artificial Sequence
  Description of Artificial Sequence: Synthetic oligonucleotide
uaguaaaagccaaauucuu

SEQ ID NO: 2914229 - RNA, 19 nt, Artificial Sequence
  Description of Artificial Sequence: Synthetic oligonucleotide
agauuauucuaauuuuauu

SEQ ID NO: 2914230 - RNA, 19 nt, Artificial Sequence
  Description of Artificial Sequence: Synthetic oligonucleotide
gaauuuuacagaucagccu

SEQ ID NO: 2914231 - RNA, 19 nt, Artificial Sequence
  Description of Artificial Sequence: Synthetic oligonucleotide
ugugaccucgguuucuuac

SEQ ID NO: 2914232 - RNA, 19 nt, Artificial Sequence
  Description of Artificial Sequence: Synthetic oligonucleotide
gcaacuauggaauuuuaca

SEQ ID NO: 2914233 - RNA, 19 nt, Artificial Sequence
  Description of Artificial Sequence: Synthetic oligonucleotide
caaacaucuauuaguaaaa

SEQ ID NO: 2914234 - RNA, 19 nt, Artificial Sequence
  Description of Artificial Sequence: Synthetic oligonucleotide
gaggguagaaaacuauuaa

SEQ ID NO: 2914235 - RNA, 19 nt, Artificial Sequence
  Description of Artificial Sequence: Synthetic oligonucleotide
agcaacuauggaauuuuac

SEQ ID NO: 2914236 - RNA, 19 nt, Artificial Sequence
  Description of Artificial Sequence: Synthetic oligonucleotide
agauacagguugcacagau

SEQ ID NO: 2914237 - RNA, 19 nt, Artificial Sequence
  Description of Artificial Sequence: Synthetic oligonucleotide
ucaauaguccagucuuaca

SEQ ID NO: 2914238 - RNA, 19 nt, Artificial Sequence
  Description of Artificial Sequence: Synthetic oligonucleotide
caucaaacucaauagucca

SEQ ID NO: 2914239 - RNA, 19 nt, Artificial Sequence
  Description of Artificial Sequence: Synthetic oligonucleotide
gaagagaaaggcagagcag

SEQ ID NO: 2914240 - RNA, 19 nt, Artificial Sequence
  Description of Artificial Sequence: Synthetic oligonucleotide
auauuaaauucuagaaaga

SEQ ID NO: 2914241 - RNA, 19 nt, Artificial Sequence
  Description of Artificial Sequence: Synthetic oligonucleotide
auaguccagucuuacacau

SEQ ID NO: 2914242 - RNA, 19 nt, Artificial Sequence
  Description of Artificial Sequence: Synthetic oligonucleotide
aucuuagaggguagaaaac

SEQ ID NO: 2914243 - RNA, 19 nt, Artificial Sequence
  Description of Artificial Sequence: Synthetic oligonucleotide
aaauucuuuaagguauauu

SEQ ID NO: 2914244 - RNA, 19 nt, Artificial Sequence
  Description of Artificial Sequence: Synthetic oligonucleotide
gcacagauaacucaauuuc

SEQ ID NO: 2914245 - RNA, 19 nt, Artificial Sequence
  Description of Artificial Sequence: Synthetic oligonucleotide
gaaaacuauuaagacaugu

SEQ ID NO: 2914246 - RNA, 19 nt, Artificial Sequence
  Description of Artificial Sequence: Synthetic oligonucleotide
ugaucuuagaggguagaaa

SEQ ID NO: 2914247 - RNA, 19 nt, Artificial Sequence
  Description of Artificial Sequence: Synthetic oligonucleotide
ugaccucgguuucuuacug

SEQ ID NO: 2914248 - RNA, 19 nt, Artificial Sequence
  Description of Artificial Sequence: Synthetic oligonucleotide
cagucuuacacauaacaaa

SEQ ID NO: 2914249 - RNA, 19 nt, Artificial Sequence
  Description of Artificial Sequence: Synthetic oligonucleotide
uagaggguagaaaacuauu

SEQ ID NO: 2914250 - RNA, 19 nt, Artificial Sequence
  Description of Artificial Sequence: Synthetic oligonucleotide
aaggaaaauuuaaacccaa

SEQ ID NO: 2914251 - RNA, 19 nt, Artificial Sequence
  Description of Artificial Sequence: Synthetic oligonucleotide
gaaggucuaaggcugcuaa

SEQ ID NO: 2914252 - RNA, 19 nt, Artificial Sequence
  Description of Artificial Sequence: Synthetic oligonucleotide
acugugaaucacacugggc

SEQ ID NO: 2914253 - RNA, 19 nt, Artificial Sequence
  Description of Artificial Sequence: Synthetic oligonucleotide
aucagccuuggggugaggc

SEQ ID NO: 2914254 - RNA, 19 nt, Artificial Sequence
  Description of Artificial Sequence: Synthetic oligonucleotide
ugaaucacacugggcagag

SEQ ID NO: 2914255 - RNA, 19 nt, Artificial Sequence
  Description of Artificial Sequence: Synthetic oligonucleotide
cuuggggugaggcugcuuc

SEQ ID NO: 2914256 - RNA, 19 nt, Artificial Sequence
  Description of Artificial Sequence: Synthetic oligonucleotide
ggguagaaaacuauuaaga

SEQ ID NO: 2914257 - RNA, 19 nt, Artificial Sequence
  Description of Artificial Sequence: Synthetic oligonucleotide
guuucuuacugugaaucac

SEQ ID NO: 2914258 - RNA, 19 nt, Artificial Sequence
  Description of Artificial Sequence: Synthetic oligonucleotide
uucugagcccaagggaggg

SEQ ID NO: 2914259 - RNA, 19 nt, Artificial Sequence
  Description of Artificial Sequence: Synthetic oligonucleotide
agguugcacagauaacuca

SEQ ID NO: 2914260 - RNA, 19 nt, Artificial Sequence
  Description of Artificial Sequence: Synthetic oligonucleotide
gguucugagcccaagggag

SEQ ID NO: 2914261 - RNA, 19 nt, Artificial Sequence
  Description of Artificial Sequence: Synthetic oligonucleotide
aacccaaaguuaauccugu

SEQ ID NO: 2914262 - RNA, 19 nt, Artificial Sequence
  Description of Artificial Sequence: Synthetic oligonucleotide
ugcuucugcugugaccucg

SEQ ID NO: 2914263 - RNA, 19 nt, Artificial Sequence
  Description of Artificial Sequence: Synthetic oligonucleotide
accucgguuucuuacugug

SEQ ID NO: 2914264 - RNA, 19 nt, Artificial Sequence
  Description of Artificial Sequence: Synthetic oligonucleotide
ucuuacugugaaucacacu

SEQ ID NO: 2914265 - RNA, 19 nt, Artificial Sequence
  Description of Artificial Sequence: Synthetic oligonucleotide
uucuucuaguucagcacuc

SEQ ID NO: 2914266 - RNA, 19 nt, Artificial Sequence
  Description of Artificial Sequence: Synthetic oligonucleotide
uaagcucuuuacacagccu

SEQ ID NO: 2914267 - RNA, 19 nt, Artificial Sequence
  Description of Artificial Sequence: Synthetic oligonucleotide
aucuauuaguaaaagccaa

SEQ ID NO: 2914268 - RNA, 19 nt, Artificial Sequence
  Description of Artificial Sequence: Synthetic oligonucleotide
uugcacagauaacucaauu

SEQ ID NO: 2914269 - RNA, 19 nt, Artificial Sequence
  Description of Artificial Sequence: Synthetic oligonucleotide
aucaaacucaauaguccag

SEQ ID NO: 2914270 - RNA, 19 nt, Artificial Sequence
  Description of Artificial Sequence: Synthetic oligonucleotide
acagaucagccuuggggug

SEQ ID NO: 2914271 - RNA, 19 nt, Artificial Sequence
  Description of Artificial Sequence: Synthetic oligonucleotide
aguaaaagccaaauucuuu

SEQ ID NO: 2914272 - RNA, 19 nt, Artificial Sequence
  Description of Artificial Sequence: Synthetic oligonucleotide
cucaauaguccagucuuac

SEQ ID NO: 2914273 - RNA, 19 nt, Artificial Sequence
  Description of Artificial Sequence: Synthetic oligonucleotide
cuauggaauuuuacagauc

SEQ ID NO: 2914274 - RNA, 19 nt, Artificial Sequence
  Description of Artificial Sequence: Synthetic oligonucleotide
caaacucaauaguccaguc

SEQ ID NO: 2914275 - RNA, 19 nt, Artificial Sequence
  Description of Artificial Sequence: Synthetic oligonucleotide
cuuuaagguauauuaaauu

SEQ ID NO: 2914276 - RNA, 19 nt, Artificial Sequence
  Description of Artificial Sequence: Synthetic oligonucleotide
aucaaaccccacccaaaca

SEQ ID NO: 2914277 - RNA, 19 nt, Artificial Sequence
  Description of Artificial Sequence: Synthetic oligonucleotide
ugggcagaggguucugagc

SEQ ID NO: 2914278 - RNA, 19 nt, Artificial Sequence
  Description of Artificial Sequence: Synthetic oligonucleotide
gggcagaggguucugagcc

SEQ ID NO: 2914279 - RNA, 19 nt, Artificial Sequence
  Description of Artificial Sequence: Synthetic oligonucleotide
ccaaacaucuauuaguaaa

SEQ ID NO: 2914280 - RNA, 19 nt, Artificial Sequence
  Description of Artificial Sequence: Synthetic oligonucleotide
uacagguugcacagauaac

SEQ ID NO: 2914281 - RNA, 19 nt, Artificial Sequence
  Description of Artificial Sequence: Synthetic oligonucleotide
uuuacacagccugaucuua

SEQ ID NO: 2914282 - RNA, 19 nt, Artificial Sequence
  Description of Artificial Sequence: Synthetic oligonucleotide
cagguugcacagauaacuc

SEQ ID NO: 2914283 - RNA, 19 nt, Artificial Sequence
  Description of Artificial Sequence: Synthetic oligonucleotide
aaggucuaaggcugcuaaa

SEQ ID NO: 2914284 - RNA, 19 nt, Artificial Sequence
  Description of Artificial Sequence: Synthetic oligonucleotide
agggagggcuuucuucuag

SEQ ID NO: 2914285 - RNA, 19 nt, Artificial Sequence
  Description of Artificial Sequence: Synthetic oligonucleotide
cuuagaggguagaaaacua

SEQ ID NO: 2914286 - RNA, 19 nt, Artificial Sequence
  Description of Artificial Sequence: Synthetic oligonucleotide
acagauaacucaauuucua

SEQ ID NO: 2914287 - RNA, 19 nt, Artificial Sequence
  Description of Artificial Sequence: Synthetic oligonucleotide
cagauaacucaauuucuaa

SEQ ID NO: 2914288 - RNA, 19 nt, Artificial Sequence
  Description of Artificial Sequence: Synthetic oligonucleotide
auuuuacagaucagccuug

SEQ ID NO: 2914289 - RNA, 19 nt, Artificial Sequence
  Description of Artificial Sequence: Synthetic oligonucleotide
caaaguuaauccuguuuaa

SEQ ID NO: 2914290 - RNA, 19 nt, Artificial Sequence
  Description of Artificial Sequence: Synthetic oligonucleotide
ucuucuaguucagcacucu

SEQ ID NO: 2914291 - RNA, 19 nt, Artificial Sequence
  Description of Artificial Sequence: Synthetic oligonucleotide
ucagccuuggggugaggcu

SEQ ID NO: 2914292 - RNA, 19 nt, Artificial Sequence
  Description of Artificial Sequence: Synthetic oligonucleotide
guaaaauaucaaaccccac

SEQ ID NO: 2914293 - RNA, 19 nt, Artificial Sequence
  Description of Artificial Sequence: Synthetic oligonucleotide
gaaaggcagagcagaaguc

SEQ ID NO: 2914294 - RNA, 19 nt, Artificial Sequence
  Description of Artificial Sequence: Synthetic oligonucleotide
guucugagcccaagggagg

SEQ ID NO: 2914295 - RNA, 19 nt, Artificial Sequence
  Description of Artificial Sequence: Synthetic oligonucleotide
aggucuaaggcugcuaaaa

SEQ ID NO: 2914296 - RNA, 19 nt, Artificial Sequence
  Description of Artificial Sequence: Synthetic oligonucleotide
agaggguagaaaacuauua

SEQ ID NO: 2914297 - RNA, 19 nt, Artificial Sequence
  Description of Artificial Sequence: Synthetic oligonucleotide
cacccaaacaucuauuagu

SEQ ID NO: 2914298 - RNA, 19 nt, Artificial Sequence
  Description of Artificial Sequence: Synthetic oligonucleotide
aagaaggucuaaggcugcu

SEQ ID NO: 2914299 - RNA, 19 nt, Artificial Sequence
  Description of Artificial Sequence: Synthetic oligonucleotide
cugggcagaggguucugag

SEQ ID NO: 2914300 - RNA, 19 nt, Artificial Sequence
  Description of Artificial Sequence: Synthetic oligonucleotide
gguuucuuacugugaauca

SEQ ID NO: 2914301 - RNA, 19 nt, Artificial Sequence
  Description of Artificial Sequence: Synthetic oligonucleotide
uucuagaaagaaggucuaa

SEQ ID NO: 2914302 - RNA, 19 nt, Artificial Sequence
  Description of Artificial Sequence: Synthetic oligonucleotide
auccuguuuaagcucuuua

SEQ ID NO: 2914303 - RNA, 19 nt, Artificial Sequence
  Description of Artificial Sequence: Synthetic oligonucleotide
gagcagaagucaaagagau

SEQ ID NO: 2914304 - RNA, 19 nt, Artificial Sequence
  Description of Artificial Sequence: Synthetic oligonucleotide
cacagauaacucaauuucu

SEQ ID NO: 2914305 - RNA, 19 nt, Artificial Sequence
  Description of Artificial Sequence: Synthetic oligonucleotide
acccaaacaucuauuagua

SEQ ID NO: 2914306 - RNA, 19 nt, Artificial Sequence
  Description of Artificial Sequence: Synthetic oligonucleotide
cucgguuucuuacugugaa

SEQ ID NO: 2914307 - RNA, 19 nt, Artificial Sequence
  Description of Artificial Sequence: Synthetic oligonucleotide
gaguucacaucaaacucaa

SEQ ID NO: 2914308 - RNA, 19 nt, Artificial Sequence
  Description of Artificial Sequence: Synthetic oligonucleotide
auggaauuuuacagaucag

SEQ ID NO: 2914309 - RNA, 19 nt, Artificial Sequence
  Description of Artificial Sequence: Synthetic oligonucleotide
cuaguucagcacucucuuc

SEQ ID NO: 2914310 - RNA, 19 nt, Artificial Sequence
  Description of Artificial Sequence: Synthetic oligonucleotide
agaaaacuauuaagacaug

SEQ ID NO: 2914311 - RNA, 19 nt, Artificial Sequence
  Description of Artificial Sequence: Synthetic oligonucleotide
gucuuacacauaacaaaga

SEQ ID NO: 2914312 - RNA, 19 nt, Artificial Sequence
  Description of Artificial Sequence: Synthetic oligonucleotide
cucuuuacacagccugauc

SEQ ID NO: 2914313 - RNA, 19 nt, Artificial Sequence
  Description of Artificial Sequence: Synthetic oligonucleotide
uucugcugugaccucgguu

SEQ ID NO: 2914314 - RNA, 19 nt, Artificial Sequence
  Description of Artificial Sequence: Synthetic oligonucleotide
cagaagucaaagagauaca

SEQ ID NO: 2914315 - RNA, 19 nt, Artificial Sequence
  Description of Artificial Sequence: Synthetic oligonucleotide
auaucaaaccccacccaaa

SEQ ID NO: 2914316 - RNA, 19 nt, Artificial Sequence
  Description of Artificial Sequence: Synthetic oligonucleotide
ucgguuucuuacugugaau

SEQ ID NO: 2914317 - RNA, 19 nt, Artificial Sequence
  Description of Artificial Sequence: Synthetic oligonucleotide
aauccuguuuaagcucuuu

SEQ ID NO: 2914318 - RNA, 19 nt, Artificial Sequence
  Description of Artificial Sequence: Synthetic oligonucleotide
caagggagggcuuucuucu

SEQ ID NO: 2914319 - RNA, 19 nt, Artificial Sequence
  Description of Artificial Sequence: Synthetic oligonucleotide
accccacccaaacaucuau

SEQ ID NO: 2914320 - RNA, 19 nt, Artificial Sequence
  Description of Artificial Sequence: Synthetic oligonucleotide
aggaaaauuuaaacccaaa

SEQ ID NO: 2914321 - RNA, 19 nt, Artificial Sequence
  Description of Artificial Sequence: Synthetic oligonucleotide
ccuguuuaagcucuuuaca

SEQ ID NO: 2914322 - RNA, 19 nt, Artificial Sequence
  Description of Artificial Sequence: Synthetic oligonucleotide
cuauuaguaaaagccaaau

SEQ ID NO: 2914323 - RNA, 19 nt, Artificial Sequence
  Description of Artificial Sequence: Synthetic oligonucleotide
uuggggugaggcugcuucu

SEQ ID NO: 2914324 - RNA, 19 nt, Artificial Sequence
  Description of Artificial Sequence: Synthetic oligonucleotide
cuauuaagacauguaaaau

SEQ ID NO: 2914325 - RNA, 19 nt, Artificial Sequence
  Description of Artificial Sequence: Synthetic oligonucleotide
cagccuuggggugaggcug

SEQ ID NO: 2914326 - RNA, 19 nt, Artificial Sequence
  Description of Artificial Sequence: Synthetic oligonucleotide
agucaaagagauacagguu

SEQ ID NO: 2914327 - RNA, 19 nt, Artificial Sequence
  Description of Artificial Sequence: Synthetic oligonucleotide
auucuagaaagaaggucua

SEQ ID NO: 2914328 - RNA, 19 nt, Artificial Sequence
  Description of Artificial Sequence: Synthetic oligonucleotide
agccugaucuuagagggua

SEQ ID NO: 2914329 - RNA, 19 nt, Artificial Sequence
  Description of Artificial Sequence: Synthetic oligonucleotide
aagggagggcuuucuucua

SEQ ID NO: 2914330 - RNA, 19 nt, Artificial Sequence
  Description of Artificial Sequence: Synthetic oligonucleotide
gugaaucacacugggcaga

SEQ ID NO: 2914331 - RNA, 19 nt, Artificial Sequence
  Description of Artificial Sequence: Synthetic oligonucleotide
ccacccaaacaucuauuag

SEQ ID NO: 2914332 - RNA, 19 nt, Artificial Sequence
  Description of Artificial Sequence: Synthetic oligonucleotide
caaagagauacagguugca

SEQ ID NO: 2914333 - RNA, 19 nt, Artificial Sequence
  Description of Artificial Sequence: Synthetic oligonucleotide
gguugcacagauaacucaa

SEQ ID NO: 2914334 - RNA, 19 nt, Artificial Sequence
  Description of Artificial Sequence: Synthetic oligonucleotide
uaguccagucuuacacaua

SEQ ID NO: 2914335 - RNA, 19 nt, Artificial Sequence
  Description of Artificial Sequence: Synthetic oligonucleotide
agcucuuuacacagccuga

SEQ ID NO: 2914336 - RNA, 19 nt, Artificial Sequence
  Description of Artificial Sequence: Synthetic oligonucleotide
agaucagccuuggggugag

SEQ ID NO: 2914337 - RNA, 19 nt, Artificial Sequence
  Description of Artificial Sequence: Synthetic oligonucleotide
ccagucuuacacauaacaa

SEQ ID NO: 2914338 - RNA, 19 nt, Artificial Sequence
  Description of Artificial Sequence: Synthetic oligonucleotide
aagcaacuauggaauuuua

SEQ ID NO: 2914339 - RNA, 19 nt, Artificial Sequence
  Description of Artificial Sequence: Synthetic oligonucleotide
ccaagggagggcuuucuuc

SEQ ID NO: 2914340 - RNA, 19 nt, Artificial Sequence
  Description of Artificial Sequence: Synthetic oligonucleotide
ggguucugagcccaaggga

SEQ ID NO: 2914341 - RNA, 19 nt, Artificial Sequence
  Description of Artificial Sequence: Synthetic oligonucleotide
gauacagguugcacagaua

SEQ ID NO: 2914342 - RNA, 19 nt, Artificial Sequence
  Description of Artificial Sequence: Synthetic oligonucleotide
gugaccucgguuucuuacu

SEQ ID NO: 2914343 - RNA, 19 nt, Artificial Sequence
  Description of Artificial Sequence: Synthetic oligonucleotide
ugcugugaccucgguuucu

SEQ ID NO: 2914344 - RNA, 19 nt, Artificial Sequence
  Description of Artificial Sequence: Synthetic oligonucleotide
aucacacugggcagagggu

SEQ ID NO: 2914345 - RNA, 19 nt, Artificial Sequence
  Description of Artificial Sequence: Synthetic oligonucleotide
gagauacagguugcacaga

SEQ ID NO: 2914346 - RNA, 19 nt, Artificial Sequence
  Description of Artificial Sequence: Synthetic oligonucleotide
cugaucuuagaggguagaa

SEQ ID NO: 2914347 - RNA, 19 nt, Artificial Sequence
  Description of Artificial Sequence: Synthetic oligonucleotide
gaggcugcuucugcuguga

SEQ ID NO: 2914348 - RNA, 19 nt, Artificial Sequence
  Description of Artificial Sequence: Synthetic oligonucleotide
acccaaaguuaauccuguu

SEQ ID NO: 2914349 - RNA, 19 nt, Artificial Sequence
  Description of Artificial Sequence: Synthetic oligonucleotide
agaaggucuaaggcugcua

SEQ ID NO: 2914350 - RNA, 19 nt, Artificial Sequence
  Description of Artificial Sequence: Synthetic oligonucleotide
acugggcagaggguucuga

SEQ ID NO: 2914351 - RNA, 19 nt, Artificial Sequence
  Description of Artificial Sequence: Synthetic oligonucleotide
cgguuucuuacugugaauc

SEQ ID NO: 2914352 - RNA, 19 nt, Artificial Sequence
  Description of Artificial Sequence: Synthetic oligonucleotide
acucaauaguccagucuua

SEQ ID NO: 2914353 - RNA, 19 nt, Artificial Sequence
  Description of Artificial Sequence: Synthetic oligonucleotide
ggggugaggcugcuucugc

SEQ ID NO: 2914354 - RNA, 19 nt, Artificial Sequence
  Description of Artificial Sequence: Synthetic oligonucleotide
cugcugugaccucgguuuc

SEQ ID NO: 2914355 - RNA, 19 nt, Artificial Sequence
  Description of Artificial Sequence: Synthetic oligonucleotide
agcccaagggagggcuuuc

SEQ ID NO: 2914356 - RNA, 19 nt, Artificial Sequence
  Description of Artificial Sequence: Synthetic oligonucleotide
gcuucugcugugaccucgg

SEQ ID NO: 2914357 - RNA, 19 nt, Artificial Sequence
  Description of Artificial Sequence: Synthetic oligonucleotide
caaaagcaacuauggaauu

SEQ ID NO: 2914358 - RNA, 19 nt, Artificial Sequence
  Description of Artificial Sequence: Synthetic oligonucleotide
gaccucgguuucuuacugu

SEQ ID NO: 2914359 - RNA, 19 nt, Artificial Sequence
  Description of Artificial Sequence: Synthetic oligonucleotide
aaccccacccaaacaucua

SEQ ID NO: 2914360 - RNA, 19 nt, Artificial Sequence
  Description of Artificial Sequence: Synthetic oligonucleotide
gaucagccuuggggugagg

SEQ ID NO: 2914361 - RNA, 19 nt, Artificial Sequence
  Description of Artificial Sequence: Synthetic oligonucleotide
ccaaauucuuuaagguaua

SEQ ID NO: 2914362 - RNA, 19 nt, Artificial Sequence
  Description of Artificial Sequence: Synthetic oligonucleotide
ggcuuucuucuaguucagc

SEQ ID NO: 2914363 - RNA, 19 nt, Artificial Sequence
  Description of Artificial Sequence: Synthetic oligonucleotide
caaauucuuuaagguauau

SEQ ID NO: 2914364 - RNA, 19 nt, Artificial Sequence
  Description of Artificial Sequence: Synthetic oligonucleotide
guccagucuuacacauaac

SEQ ID NO: 2914365 - RNA, 19 nt, Artificial Sequence
  Description of Artificial Sequence: Synthetic oligonucleotide
agcagaagucaaagagaua

SEQ ID NO: 2914366 - RNA, 19 nt, Artificial Sequence
  Description of Artificial Sequence: Synthetic oligonucleotide
gccugaucuuagaggguag

SEQ ID NO: 2914367 - RNA, 19 nt, Artificial Sequence
  Description of Artificial Sequence: Synthetic oligonucleotide
aguucacaucaaacucaau

SEQ ID NO: 2914368 - RNA, 19 nt, Artificial Sequence
  Description of Artificial Sequence: Synthetic oligonucleotide
gcagaggguucugagccca

SEQ ID NO: 2914369 - RNA, 19 nt, Artificial Sequence
  Description of Artificial Sequence: Synthetic oligonucleotide
cccacccaaacaucuauua

SEQ ID NO: 2914370 - RNA, 19 nt, Artificial Sequence
  Description of Artificial Sequence: Synthetic oligonucleotide
cccaaacaucuauuaguaa

SEQ ID NO: 2914371 - RNA, 19 nt, Artificial Sequence
  Description of Artificial Sequence: Synthetic oligonucleotide
cugagcccaagggagggcu

SEQ ID NO: 2914372 - RNA, 19 nt, Artificial Sequence
  Description of Artificial Sequence: Synthetic oligonucleotide
ccugaucuuagaggguaga

SEQ ID NO: 2914373 - RNA, 19 nt, Artificial Sequence
  Description of Artificial Sequence: Synthetic oligonucleotide
cccaaaguuaauccuguuu

SEQ ID NO: 2914374 - RNA, 19 nt, Artificial Sequence
  Description of Artificial Sequence: Synthetic oligonucleotide
gggagggcuuucuucuagu

SEQ ID NO: 2914375 - RNA, 19 nt, Artificial Sequence
  Description of Artificial Sequence: Synthetic oligonucleotide
cacugggcagaggguucug

SEQ ID NO: 2914376 - RNA, 19 nt, Artificial Sequence
  Description of Artificial Sequence: Synthetic oligonucleotide
cugugaccucgguuucuua

SEQ ID NO: 2914377 - RNA, 19 nt, Artificial Sequence
  Description of Artificial Sequence: Synthetic oligonucleotide
cagccugaucuuagagggu

SEQ ID NO: 2914378 - RNA, 19 nt, Artificial Sequence
  Description of Artificial Sequence: Synthetic oligonucleotide
gcucuuuacacagccugau

SEQ ID NO: 2914379 - RNA, 19 nt, Artificial Sequence
  Description of Artificial Sequence: Synthetic oligonucleotide
ggagggcuuucuucuaguu

SEQ ID NO: 2914380 - RNA, 19 nt, Artificial Sequence
  Description of Artificial Sequence: Synthetic oligonucleotide
cuucugcugugaccucggu

SEQ ID NO: 2914381 - RNA, 19 nt, Artificial Sequence
  Description of Artificial Sequence: Synthetic oligonucleotide
gcugugaccucgguuucuu

SEQ ID NO: 2914382 - RNA, 19 nt, Artificial Sequence
  Description of Artificial Sequence: Synthetic oligonucleotide
ccccacccaaacaucuauu

SEQ ID NO: 2914383 - RNA, 19 nt, Artificial Sequence
  Description of Artificial Sequence: Synthetic oligonucleotide
gcccaagggagggcuuucu

SEQ ID NO: 2914384 - RNA, 19 nt, Artificial Sequence
  Description of Artificial Sequence: Synthetic oligonucleotide
ccuuggggugaggcugcuu

SEQ ID NO: 2914385 - RNA, 19 nt, Artificial Sequence
  Description of Artificial Sequence: Synthetic oligonucleotide
uuugaaaccagcuugauaa

SEQ ID NO: 2914386 - RNA, 19 nt, Artificial Sequence
  Description of Artificial Sequence: Synthetic oligonucleotide
ucugguguaaauuacuugg

SEQ ID NO: 2914387 - RNA, 19 nt, Artificial Sequence
  Description of Artificial Sequence: Synthetic oligonucleotide
aauuacuugggcucugugc

SEQ ID NO: 2914388 - RNA, 19 nt, Artificial Sequence
  Description of Artificial Sequence: Synthetic oligonucleotide
agauuguugagcuuguccc

SEQ ID NO: 2914389 - RNA, 19 nt, Artificial Sequence
  Description of Artificial Sequence: Synthetic oligonucleotide
aauaagcuuauaauugggc

SEQ ID NO: 2914390 - RNA, 19 nt, Artificial Sequence
  Description of Artificial Sequence: Synthetic oligonucleotide
guaauaagcuuauaauugg

SEQ ID NO: 2914391 - RNA, 19 nt, Artificial Sequence
  Description of Artificial Sequence: Synthetic oligonucleotide
acuaaguagcuccugaagg

SEQ ID NO: 2914392 - RNA, 19 nt, Artificial Sequence
  Description of Artificial Sequence: Synthetic oligonucleotide
ucuucagucucucagagac

SEQ ID NO: 2914393 - RNA, 19 nt, Artificial Sequence
  Description of Artificial Sequence: Synthetic oligonucleotide
uguuuaugcaucuucacca

SEQ ID NO: 2914394 - RNA, 19 nt, Artificial Sequence
  Description of Artificial Sequence: Synthetic oligonucleotide
uguagcuuugucaaacagg

SEQ ID NO: 2914395 - RNA, 19 nt, Artificial Sequence
  Description of Artificial Sequence: Synthetic oligonucleotide
uaauaagcuuauaauuggg

SEQ ID NO: 2914396 - RNA, 19 nt, Artificial Sequence
  Description of Artificial Sequence: Synthetic oligonucleotide
aaaccagcuugauaagccc

SEQ ID NO: 2914397 - RNA, 19 nt, Artificial Sequence
  Description of Artificial Sequence: Synthetic oligonucleotide
cuucuugucauccuuaggc

SEQ ID NO: 2914398 - RNA, 19 nt, Artificial Sequence
  Description of Artificial Sequence: Synthetic oligonucleotide
aacaggacuagauuguuga

SEQ ID NO: 2914399 - RNA, 19 nt, Artificial Sequence
  Description of Artificial Sequence: Synthetic oligonucleotide
aagcccuuuacuaaguagc

SEQ ID NO: 2914400 - RNA, 19 nt, Artificial Sequence
  Description of Artificial Sequence: Synthetic oligonucleotide
aguaauaagcuuauaauug

SEQ ID NO: 2914401 - RNA, 19 nt, Artificial Sequence
  Description of Artificial Sequence: Synthetic oligonucleotide
cuuauaauugggcacuucc

SEQ ID NO: 2914402 - RNA, 19 nt, Artificial Sequence
  Description of Artificial Sequence: Synthetic oligonucleotide
augcacagcugauugaacc

SEQ ID NO: 2914403 - RNA, 19 nt, Artificial Sequence
  Description of Artificial Sequence: Synthetic oligonucleotide
uuccuuacagaguuugucg

SEQ ID NO: 2914404 - RNA, 19 nt, Artificial Sequence
  Description of Artificial Sequence: Synthetic oligonucleotide
aaucuucagucucucagag

SEQ ID NO: 2914405 - RNA, 19 nt, Artificial Sequence
  Description of Artificial Sequence: Synthetic oligonucleotide
uuuacuaaguagcuccuga

SEQ ID NO: 2914406 - RNA, 19 nt, Artificial Sequence
  Description of Artificial Sequence: Synthetic oligonucleotide
ugauugaaccuguuuaugc

SEQ ID NO: 2914407 - RNA, 19 nt, Artificial Sequence
  Description of Artificial Sequence: Synthetic oligonucleotide
uggaguaauaagcuuauaa

SEQ ID NO: 2914408 - RNA, 19 nt, Artificial Sequence
  Description of Artificial Sequence: Synthetic oligonucleotide
uuaggcggcaugaugaagc

SEQ ID NO: 2914409 - RNA, 19 nt, Artificial Sequence
  Description of Artificial Sequence: Synthetic oligonucleotide
ucucagagaccacagcugg

SEQ ID NO: 2914410 - RNA, 19 nt, Artificial Sequence
  Description of Artificial Sequence: Synthetic oligonucleotide
gucaaacaggacuagauug

SEQ ID NO: 2914411 - RNA, 19 nt, Artificial Sequence
  Description of Artificial Sequence: Synthetic oligonucleotide
auaagcuuauaauugggca

SEQ ID NO: 2914412 - RNA, 19 nt, Artificial Sequence
  Description of Artificial Sequence: Synthetic oligonucleotide
cuaaguagcuccugaaggg

SEQ ID NO: 2914413 - RNA, 19 nt, Artificial Sequence
  Description of Artificial Sequence: Synthetic oligonucleotide
auuacuugggcucugugcu

SEQ ID NO: 2914414 - RNA, 19 nt, Artificial Sequence
  Description of Artificial Sequence: Synthetic oligonucleotide
uccagacuuauuuacuggg

SEQ ID NO: 2914415 - RNA, 19 nt, Artificial Sequence
  Description of Artificial Sequence: Synthetic oligonucleotide
uuaugcaucuucaccagca

SEQ ID NO: 2914416 - RNA, 19 nt, Artificial Sequence
  Description of Artificial Sequence: Synthetic oligonucleotide
cacagcuggaguaauaagc

SEQ ID NO: 2914417 - RNA, 19 nt, Artificial Sequence
  Description of Artificial Sequence: Synthetic oligonucleotide
ugauaagcccuuuacuaag

SEQ ID NO: 2914418 - RNA, 19 nt, Artificial Sequence
  Description of Artificial Sequence: Synthetic oligonucleotide
uaagcuuauaauugggcac

SEQ ID NO: 2914419 - RNA, 19 nt, Artificial Sequence
  Description of Artificial Sequence: Synthetic oligonucleotide
uagauuguugagcuugucc

SEQ ID NO: 2914420 - RNA, 19 nt, Artificial Sequence
  Description of Artificial Sequence: Synthetic oligonucleotide
ucuugucauccuuaggcgg

SEQ ID NO: 2914421 - RNA, 19 nt, Artificial Sequence
  Description of Artificial Sequence: Synthetic oligonucleotide
uucuugucauccuuaggcg

SEQ ID NO: 2914422 - RNA, 19 nt, Artificial Sequence
  Description of Artificial Sequence: Synthetic oligonucleotide
caugaugaagcucggagag

SEQ ID NO: 2914423 - RNA, 19 nt, Artificial Sequence
  Description of Artificial Sequence: Synthetic oligonucleotide
ucaaacaggacuagauugu

SEQ ID NO: 2914424 - RNA, 19 nt, Artificial Sequence
  Description of Artificial Sequence: Synthetic oligonucleotide
agcuugauaagcccuuuac

SEQ ID NO: 2914425 - RNA, 19 nt, Artificial Sequence
  Description of Artificial Sequence: Synthetic oligonucleotide
ucucucagagaccacagcu

SEQ ID NO: 2914426 - RNA, 19 nt, Artificial Sequence
  Description of Artificial Sequence: Synthetic oligonucleotide
uucuuugccgacuucccgg

SEQ ID NO: 2914427 - RNA, 19 nt, Artificial Sequence
  Description of Artificial Sequence: Synthetic oligonucleotide
gauuguugagcuugucccg

SEQ ID NO: 2914428 - RNA, 19 nt, Artificial Sequence
  Description of Artificial Sequence: Synthetic oligonucleotide
uacuaaguagcuccugaag

SEQ ID NO: 2914429 - RNA, 19 nt, Artificial Sequence
  Description of Artificial Sequence: Synthetic oligonucleotide
aggacuagauuguugagcu

SEQ ID NO: 2914430 - RNA, 19 nt, Artificial Sequence
  Description of Artificial Sequence: Synthetic oligonucleotide
uccuuaggcggcaugauga

SEQ ID NO: 2914431 - RNA, 19 nt, Artificial Sequence
  Description of Artificial Sequence: Synthetic oligonucleotide
uuauaauugggcacuuccu

SEQ ID NO: 2914432 - RNA, 19 nt, Artificial Sequence
  Description of Artificial Sequence: Synthetic oligonucleotide
cagaguuugucguauguag

SEQ ID NO: 2914433 - RNA, 19 nt, Artificial Sequence
  Description of Artificial Sequence: Synthetic oligonucleotide
ugguguaaauuacuugggc

SEQ ID NO: 2914434 - RNA, 19 nt, Artificial Sequence
  Description of Artificial Sequence: Synthetic oligonucleotide
ucguauguagcuuugucaa

SEQ ID NO: 2914435 - RNA, 19 nt, Artificial Sequence
  Description of Artificial Sequence: Synthetic oligonucleotide
gacuagauuguugagcuug

SEQ ID NO: 2914436 - RNA, 19 nt, Artificial Sequence
  Description of Artificial Sequence: Synthetic oligonucleotide
cuguuuaugcaucuucacc

SEQ ID NO: 2914437 - RNA, 19 nt, Artificial Sequence
  Description of Artificial Sequence: Synthetic oligonucleotide
gauugaaccuguuuaugca

SEQ ID NO: 2914438 - RNA, 19 nt, Artificial Sequence
  Description of Artificial Sequence: Synthetic oligonucleotide
uauaauugggcacuuccuu

SEQ ID NO: 2914439 - RNA, 19 nt, Artificial Sequence
  Description of Artificial Sequence: Synthetic oligonucleotide
uaagcccuuuacuaaguag

SEQ ID NO: 2914440 - RNA, 19 nt, Artificial Sequence
  Description of Artificial Sequence: Synthetic oligonucleotide
uugccuuuggaccacuucu

SEQ ID NO: 2914441 - RNA, 19 nt, Artificial Sequence
  Description of Artificial Sequence: Synthetic oligonucleotide
uugauaagcccuuuacuaa

SEQ ID NO: 2914442 - RNA, 19 nt, Artificial Sequence
  Description of Artificial Sequence: Synthetic oligonucleotide
uguuucugguguaaauuac

SEQ ID NO: 2914443 - RNA, 19 nt, Artificial Sequence
  Description of Artificial Sequence: Synthetic oligonucleotide
uuuuccaaaugcacagcug

SEQ ID NO: 2914444 - RNA, 19 nt, Artificial Sequence
  Description of Artificial Sequence: Synthetic oligonucleotide
uugucaaacaggacuagau

SEQ ID NO: 2914445 - RNA, 19 nt, Artificial Sequence
  Description of Artificial Sequence: Synthetic oligonucleotide
agacuuauuuacugggucu

SEQ ID NO: 2914446 - RNA, 19 nt, Artificial Sequence
  Description of Artificial Sequence: Synthetic oligonucleotide
gugcuuugaaaccagcuug

SEQ ID NO: 2914447 - RNA, 19 nt, Artificial Sequence
  Description of Artificial Sequence: Synthetic oligonucleotide
cuugucauccuuaggcggc

SEQ ID NO: 2914448 - RNA, 19 nt, Artificial Sequence
  Description of Artificial Sequence: Synthetic oligonucleotide
agaguuugucguauguagc

SEQ ID NO: 2914449 - RNA, 19 nt, Artificial Sequence
  Description of Artificial Sequence: Synthetic oligonucleotide
uucaccagcagcuggggca

SEQ ID NO: 2914450 - RNA, 19 nt, Artificial Sequence
  Description of Artificial Sequence: Synthetic oligonucleotide
aagcuuauaauugggcacu

SEQ ID NO: 2914451 - RNA, 19 nt, Artificial Sequence
  Description of Artificial Sequence: Synthetic oligonucleotide
uguauuuaauaaaguuuau

SEQ ID NO: 2914452 - RNA, 19 nt, Artificial Sequence
  Description of Artificial Sequence: Synthetic oligonucleotide
guagcuuugucaaacagga

SEQ ID NO: 2914453 - RNA, 19 nt, Artificial Sequence
  Description of Artificial Sequence: Synthetic oligonucleotide
cuugauaagcccuuuacua

SEQ ID NO: 2914454 - RNA, 19 nt, Artificial Sequence
  Description of Artificial Sequence: Synthetic oligonucleotide
uuuaugcaucuucaccagc

SEQ ID NO: 2914455 - RNA, 19 nt, Artificial Sequence
  Description of Artificial Sequence: Synthetic oligonucleotide
ugggcacuuccuuacagag

SEQ ID NO: 2914456 - RNA, 19 nt, Artificial Sequence
  Description of Artificial Sequence: Synthetic oligonucleotide
aaauuacuugggcucugug

SEQ ID NO: 2914457 - RNA, 19 nt, Artificial Sequence
  Description of Artificial Sequence: Synthetic oligonucleotide
uucugguguaaauuacuug

SEQ ID NO: 2914458 - RNA, 19 nt, Artificial Sequence
  Description of Artificial Sequence: Synthetic oligonucleotide
cugguguaaauuacuuggg

SEQ ID NO: 2914459 - RNA, 19 nt, Artificial Sequence
  Description of Artificial Sequence: Synthetic oligonucleotide
uaugcaucuucaccagcag

SEQ ID NO: 2914460 - RNA, 19 nt, Artificial Sequence
  Description of Artificial Sequence: Synthetic oligonucleotide
ugugcuuugaaaccagcuu

SEQ ID NO: 2914461 - RNA, 19 nt, Artificial Sequence
  Description of Artificial Sequence: Synthetic oligonucleotide
gaaccucgaaucuucaguc

SEQ ID NO: 2914462 - RNA, 19 nt, Artificial Sequence
  Description of Artificial Sequence: Synthetic oligonucleotide
aaaugcacagcugauugaa

SEQ ID NO: 2914463 - RNA, 19 nt, Artificial Sequence
  Description of Artificial Sequence: Synthetic oligonucleotide
ugcuuugaaaccagcuuga

SEQ ID NO: 2914464 - RNA, 19 nt, Artificial Sequence
  Description of Artificial Sequence: Synthetic oligonucleotide
uaauugggcacuuccuuac

SEQ ID NO: 2914465 - RNA, 19 nt, Artificial Sequence
  Description of Artificial Sequence: Synthetic oligonucleotide
guuuaugcaucuucaccag

SEQ ID NO: 2914466 - RNA, 19 nt, Artificial Sequence
  Description of Artificial Sequence: Synthetic oligonucleotide
accucgaaucuucagucuc

SEQ ID NO: 2914467 - RNA, 19 nt, Artificial Sequence
  Description of Artificial Sequence: Synthetic oligonucleotide
uucuucuugucauccuuag

SEQ ID NO: 2914468 - RNA, 19 nt, Artificial Sequence
  Description of Artificial Sequence: Synthetic oligonucleotide
uauuuacugggucuuuauc

SEQ ID NO: 2914469 - RNA, 19 nt, Artificial Sequence
  Description of Artificial Sequence: Synthetic oligonucleotide
agcugauugaaccuguuua

SEQ ID NO: 2914470 - RNA, 19 nt, Artificial Sequence
  Description of Artificial Sequence: Synthetic oligonucleotide
augaagcucggagaguggc

SEQ ID NO: 2914471 - RNA, 19 nt, Artificial Sequence
  Description of Artificial Sequence: Synthetic oligonucleotide
ucagagaccacagcuggag

SEQ ID NO: 2914472 - RNA, 19 nt, Artificial Sequence
  Description of Artificial Sequence: Synthetic oligonucleotide
uuugucguauguagcuuug

SEQ ID NO: 2914473 - RNA, 19 nt, Artificial Sequence
  Description of Artificial Sequence: Synthetic oligonucleotide
gaguaauaagcuuauaauu

SEQ ID NO: 2914474 - RNA, 19 nt, Artificial Sequence
  Description of Artificial Sequence: Synthetic oligonucleotide
uuucugguguaaauuacuu

SEQ ID NO: 2914475 - RNA, 19 nt, Artificial Sequence
  Description of Artificial Sequence: Synthetic oligonucleotide
auguagcuuugucaaacag

SEQ ID NO: 2914476 - RNA, 19 nt, Artificial Sequence
  Description of Artificial Sequence: Synthetic oligonucleotide
ugucaaacaggacuagauu

SEQ ID NO: 2914477 - RNA, 19 nt, Artificial Sequence
  Description of Artificial Sequence: Synthetic oligonucleotide
uacagaguuugucguaugu

SEQ ID NO: 2914478 - RNA, 19 nt, Artificial Sequence
  Description of Artificial Sequence: Synthetic oligonucleotide
gaacuuugccuuuggacca

SEQ ID NO: 2914479 - RNA, 19 nt, Artificial Sequence
  Description of Artificial Sequence: Synthetic oligonucleotide
cuuucuuugccgacuuccc

SEQ ID NO: 2914480 - RNA, 19 nt, Artificial Sequence
  Description of Artificial Sequence: Synthetic oligonucleotide
cccuuuacuaaguagcucc

SEQ ID NO: 2914481 - RNA, 19 nt, Artificial Sequence
  Description of Artificial Sequence: Synthetic oligonucleotide
uccuuacagaguuugucgu

SEQ ID NO: 2914482 - RNA, 19 nt, Artificial Sequence
  Description of Artificial Sequence: Synthetic oligonucleotide
gaaucuucagucucucaga

SEQ ID NO: 2914483 - RNA, 19 nt, Artificial Sequence
  Description of Artificial Sequence: Synthetic oligonucleotide
aaugcacagcugauugaac

SEQ ID NO: 2914484 - RNA, 19 nt, Artificial Sequence
  Description of Artificial Sequence: Synthetic oligonucleotide
auugggcacuuccuuacag

SEQ ID NO: 2914485 - RNA, 19 nt, Artificial Sequence
  Description of Artificial Sequence: Synthetic oligonucleotide
uaaguagcuccugaagggc

SEQ ID NO: 2914486 - RNA, 19 nt, Artificial Sequence
  Description of Artificial Sequence: Synthetic oligonucleotide
auugaaccuguuuaugcau

SEQ ID NO: 2914487 - RNA, 19 nt, Artificial Sequence
  Description of Artificial Sequence: Synthetic oligonucleotide
ugaaccuguuuaugcaucu

SEQ ID NO: 2914488 - RNA, 19 nt, Artificial Sequence
  Description of Artificial Sequence: Synthetic oligonucleotide
guauguagcuuugucaaac

SEQ ID NO: 2914489 - RNA, 19 nt, Artificial Sequence
  Description of Artificial Sequence: Synthetic oligonucleotide
uuauuuacugggucuuuau

SEQ ID NO: 2914490 - RNA, 19 nt, Artificial Sequence
  Description of Artificial Sequence: Synthetic oligonucleotide
uugaaaccagcuugauaag

SEQ ID NO: 2914491 - RNA, 19 nt, Artificial Sequence
  Description of Artificial Sequence: Synthetic oligonucleotide
caaggaaccucgaaucuuc

SEQ ID NO: 2914492 - RNA, 19 nt, Artificial Sequence
  Description of Artificial Sequence: Synthetic oligonucleotide
ugucguauguagcuuuguc

SEQ ID NO: 2914493 - RNA, 19 nt, Artificial Sequence
  Description of Artificial Sequence: Synthetic oligonucleotide
cgaacuuugccuuuggacc

SEQ ID NO: 2914494 - RNA, 19 nt, Artificial Sequence
  Description of Artificial Sequence: Synthetic oligonucleotide
ugcacagcugauugaaccu

SEQ ID NO: 2914495 - RNA, 19 nt, Artificial Sequence
  Description of Artificial Sequence: Synthetic oligonucleotide
uuacuaaguagcuccugaa

SEQ ID NO: 2914496 - RNA, 19 nt, Artificial Sequence
  Description of Artificial Sequence: Synthetic oligonucleotide
gucguauguagcuuuguca

SEQ ID NO: 2914497 - RNA, 19 nt, Artificial Sequence
  Description of Artificial Sequence: Synthetic oligonucleotide
auaauugggcacuuccuua

SEQ ID NO: 2914498 - RNA, 19 nt, Artificial Sequence
  Description of Artificial Sequence: Synthetic oligonucleotide
cuuuaucuuucuuugccga

SEQ ID NO: 2914499 - RNA, 19 nt, Artificial Sequence
  Description of Artificial Sequence: Synthetic oligonucleotide
ggcggcaugaugaagcucg

SEQ ID NO: 2914500 - RNA, 19 nt, Artificial Sequence
  Description of Artificial Sequence: Synthetic oligonucleotide
uuugucaaacaggacuaga

SEQ ID NO: 2914501 - RNA, 19 nt, Artificial Sequence
  Description of Artificial Sequence: Synthetic oligonucleotide
uguguuucugguguaaauu

SEQ ID NO: 2914502 - RNA, 19 nt, Artificial Sequence
  Description of Artificial Sequence: Synthetic oligonucleotide
ugggucuuuaucuuucuuu

SEQ ID NO: 2914503 - RNA, 19 nt, Artificial Sequence
  Description of Artificial Sequence: Synthetic oligonucleotide
ucugugcuuugaaaccagc

SEQ ID NO: 2914504 - RNA, 19 nt, Artificial Sequence
  Description of Artificial Sequence: Synthetic oligonucleotide
cagacuuauuuacuggguc

SEQ ID NO: 2914505 - RNA, 19 nt, Artificial Sequence
  Description of Artificial Sequence: Synthetic oligonucleotide
aaccucgaaucuucagucu

SEQ ID NO: 2914506 - RNA, 19 nt, Artificial Sequence
  Description of Artificial Sequence: Synthetic oligonucleotide
aauugggcacuuccuuaca

SEQ ID NO: 2914507 - RNA, 19 nt, Artificial Sequence
  Description of Artificial Sequence: Synthetic oligonucleotide
caggacuagauuguugagc

SEQ ID NO: 2914508 - RNA, 19 nt, Artificial Sequence
  Description of Artificial Sequence: Synthetic oligonucleotide
aaacaggacuagauuguug

SEQ ID NO: 2914509 - RNA, 19 nt, Artificial Sequence
  Description of Artificial Sequence: Synthetic oligonucleotide
acagcuggaguaauaagcu

SEQ ID NO: 2914510 - RNA, 19 nt, Artificial Sequence
  Description of Artificial Sequence: Synthetic oligonucleotide
uacugggucuuuaucuuuc

SEQ ID NO: 2914511 - RNA, 19 nt, Artificial Sequence
  Description of Artificial Sequence: Synthetic oligonucleotide
uuuggccuugccuccagac

SEQ ID NO: 2914512 - RNA, 19 nt, Artificial Sequence
  Description of Artificial Sequence: Synthetic oligonucleotide
ucauccuuaggcggcauga

SEQ ID NO: 2914513 - RNA, 19 nt, Artificial Sequence
  Description of Artificial Sequence: Synthetic oligonucleotide
aacuuugccuuuggaccac

SEQ ID NO: 2914514 - RNA, 19 nt, Artificial Sequence
  Description of Artificial Sequence: Synthetic oligonucleotide
cucucagagaccacagcug

SEQ ID NO: 2914515 - RNA, 19 nt, Artificial Sequence
  Description of Artificial Sequence: Synthetic oligonucleotide
aguggcgacgaccacugca

SEQ ID NO: 2914516 - RNA, 19 nt, Artificial Sequence
  Description of Artificial Sequence: Synthetic oligonucleotide
ucuuugccgacuucccggc

SEQ ID NO: 2914517 - RNA, 19 nt, Artificial Sequence
  Description of Artificial Sequence: Synthetic oligonucleotide
ugccuccagacuuauuuac

SEQ ID NO: 2914518 - RNA, 19 nt, Artificial Sequence
  Description of Artificial Sequence: Synthetic oligonucleotide
uggccaaggaaccucgaau

SEQ ID NO: 2914519 - RNA, 19 nt, Artificial Sequence
  Description of Artificial Sequence: Synthetic oligonucleotide
ccaaaugcacagcugauug

SEQ ID NO: 2914520 - RNA, 19 nt, Artificial Sequence
  Description of Artificial Sequence: Synthetic oligonucleotide
acaggacuagauuguugag

SEQ ID NO: 2914521 - RNA, 19 nt, Artificial Sequence
  Description of Artificial Sequence: Synthetic oligonucleotide
gaguuugucguauguagcu

SEQ ID NO: 2914522 - RNA, 19 nt, Artificial Sequence
  Description of Artificial Sequence: Synthetic oligonucleotide
uuacagaguuugucguaug

SEQ ID NO: 2914523 - RNA, 19 nt, Artificial Sequence
  Description of Artificial Sequence: Synthetic oligonucleotide
uaucuuucuuugccgacuu

SEQ ID NO: 2914524 - RNA, 19 nt, Artificial Sequence
  Description of Artificial Sequence: Synthetic oligonucleotide
uggccuugccuccagacuu

SEQ ID NO: 2914525 - RNA, 19 nt, Artificial Sequence
  Description of Artificial Sequence: Synthetic oligonucleotide
uuguguuucugguguaaau

SEQ ID NO: 2914526 - RNA, 19 nt, Artificial Sequence
  Description of Artificial Sequence: Synthetic oligonucleotide
ggcaucuccacccuuugug

SEQ ID NO: 2914527 - RNA, 19 nt, Artificial Sequence
  Description of Artificial Sequence: Synthetic oligonucleotide
agagaccacagcuggagua

SEQ ID NO: 2914528 - RNA, 19 nt, Artificial Sequence
  Description of Artificial Sequence: Synthetic oligonucleotide
auccuuaggcggcaugaug

SEQ ID NO: 2914529 - RNA, 19 nt, Artificial Sequence
  Description of Artificial Sequence: Synthetic oligonucleotide
aggaaccucgaaucuucag

SEQ ID NO: 2914530 - RNA, 19 nt, Artificial Sequence
  Description of Artificial Sequence: Synthetic oligonucleotide
uuugccgacuucccggcau

SEQ ID NO: 2914531 - RNA, 19 nt, Artificial Sequence
  Description of Artificial Sequence: Synthetic oligonucleotide
gaugaagcucggagagugg

SEQ ID NO: 2914532 - RNA, 19 nt, Artificial Sequence
  Description of Artificial Sequence: Synthetic oligonucleotide
guguuucugguguaaauua

SEQ ID NO: 2914533 - RNA, 19 nt, Artificial Sequence
  Description of Artificial Sequence: Synthetic oligonucleotide
uugagcuugucccgaacuu

SEQ ID NO: 2914534 - RNA, 19 nt, Artificial Sequence
  Description of Artificial Sequence: Synthetic oligonucleotide
ggaguaauaagcuuauaau

SEQ ID NO: 2914535 - RNA, 19 nt, Artificial Sequence
  Description of Artificial Sequence: Synthetic oligonucleotide
uuuguguuucugguguaaa

SEQ ID NO: 2914536 - RNA, 19 nt, Artificial Sequence
  Description of Artificial Sequence: Synthetic oligonucleotide
ucuucaccagcagcugggg

SEQ ID NO: 2914537 - RNA, 19 nt, Artificial Sequence
  Description of Artificial Sequence: Synthetic oligonucleotide
aaccagcuugauaagcccu

SEQ ID NO: 2914538 - RNA, 19 nt, Artificial Sequence
  Description of Artificial Sequence: Synthetic oligonucleotide
uuccaaaugcacagcugau

SEQ ID NO: 2914539 - RNA, 19 nt, Artificial Sequence
  Description of Artificial Sequence: Synthetic oligonucleotide
cugauugaaccuguuuaug

SEQ ID NO: 2914540 - RNA, 19 nt, Artificial Sequence
  Description of Artificial Sequence: Synthetic oligonucleotide
aaguagcuccugaagggcu

SEQ ID NO: 2914541 - RNA, 19 nt, Artificial Sequence
  Description of Artificial Sequence: Synthetic oligonucleotide
uucccggcaucuuucuucu

SEQ ID NO: 2914542 - RNA, 19 nt, Artificial Sequence
  Description of Artificial Sequence: Synthetic oligonucleotide
cacuuccuuacagaguuug

SEQ ID NO: 2914543 - RNA, 19 nt, Artificial Sequence
  Description of Artificial Sequence: Synthetic oligonucleotide
cucugugcuuugaaaccag

SEQ ID NO: 2914544 - RNA, 19 nt, Artificial Sequence
  Description of Artificial Sequence: Synthetic oligonucleotide
uguugagcuugucccgaac

SEQ ID NO: 2914545 - RNA, 19 nt, Artificial Sequence
  Description of Artificial Sequence: Synthetic oligonucleotide
gagcuugucccgaacuuug

SEQ ID NO: 2914546 - RNA, 19 nt, Artificial Sequence
  Description of Artificial Sequence: Synthetic oligonucleotide
gguguaaauuacuugggcu

SEQ ID NO: 2914547 - RNA, 19 nt, Artificial Sequence
  Description of Artificial Sequence: Synthetic oligonucleotide
ggcucugugcuuugaaacc

SEQ ID NO: 2914548 - RNA, 19 nt, Artificial Sequence
  Description of Artificial Sequence: Synthetic oligonucleotide
ucccgaacuuugccuuugg

SEQ ID NO: 2914549 - RNA, 19 nt, Artificial Sequence
  Description of Artificial Sequence: Synthetic oligonucleotide
cuucagucucucagagacc

SEQ ID NO: 2914550 - RNA, 19 nt, Artificial Sequence
  Description of Artificial Sequence: Synthetic oligonucleotide
auuguugagcuugucccga

SEQ ID NO: 2914551 - RNA, 19 nt, Artificial Sequence
  Description of Artificial Sequence: Synthetic oligonucleotide
ucggagaguggcgacgacc

SEQ ID NO: 2914552 - RNA, 19 nt, Artificial Sequence
  Description of Artificial Sequence: Synthetic oligonucleotide
cuuugucaaacaggacuag

SEQ ID NO: 2914553 - RNA, 19 nt, Artificial Sequence
  Description of Artificial Sequence: Synthetic oligonucleotide
cgaaucuucagucucucag

SEQ ID NO: 2914554 - RNA, 19 nt, Artificial Sequence
  Description of Artificial Sequence: Synthetic oligonucleotide
ggucuuuaucuuucuuugc

SEQ ID NO: 2914555 - RNA, 19 nt, Artificial Sequence
  Description of Artificial Sequence: Synthetic oligonucleotide
accuguuuaugcaucuuca

SEQ ID NO: 2914556 - RNA, 19 nt, Artificial Sequence
  Description of Artificial Sequence: Synthetic oligonucleotide
auaagcccuuuacuaagua

SEQ ID NO: 2914557 - RNA, 19 nt, Artificial Sequence
  Description of Artificial Sequence: Synthetic oligonucleotide
uugucccgaacuuugccuu

SEQ ID NO: 2914558 - RNA, 19 nt, Artificial Sequence
  Description of Artificial Sequence: Synthetic oligonucleotide
acccuuuguguuucuggug

SEQ ID NO: 2914559 - RNA, 19 nt, Artificial Sequence
  Description of Artificial Sequence: Synthetic oligonucleotide
guggcgacgaccacugcag

SEQ ID NO: 2914560 - RNA, 19 nt, Artificial Sequence
  Description of Artificial Sequence: Synthetic oligonucleotide
agcuggaguaauaagcuua

SEQ ID NO: 2914561 - RNA, 19 nt, Artificial Sequence
  Description of Artificial Sequence: Synthetic oligonucleotide
ucgaaucuucagucucuca

SEQ ID NO: 2914562 - RNA, 19 nt, Artificial Sequence
  Description of Artificial Sequence: Synthetic oligonucleotide
cuuuacuaaguagcuccug

SEQ ID NO: 2914563 - RNA, 19 nt, Artificial Sequence
  Description of Artificial Sequence: Synthetic oligonucleotide
uuacugggucuuuaucuuu

SEQ ID NO: 2914564 - RNA, 19 nt, Artificial Sequence
  Description of Artificial Sequence: Synthetic oligonucleotide
agaguggcgacgaccacug

SEQ ID NO: 2914565 - RNA, 19 nt, Artificial Sequence
  Description of Artificial Sequence: Synthetic oligonucleotide
ugggcucugugcuuugaaa

SEQ ID NO: 2914566 - RNA, 19 nt, Artificial Sequence
  Description of Artificial Sequence: Synthetic oligonucleotide
uaggcggcaugaugaagcu

SEQ ID NO: 2914567 - RNA, 19 nt, Artificial Sequence
  Description of Artificial Sequence: Synthetic oligonucleotide
uccaaaugcacagcugauu

SEQ ID NO: 2914568 - RNA, 19 nt, Artificial Sequence
  Description of Artificial Sequence: Synthetic oligonucleotide
agucucucagagaccacag

SEQ ID NO: 2914569 - RNA, 19 nt, Artificial Sequence
  Description of Artificial Sequence: Synthetic oligonucleotide
agcuugucccgaacuuugc

SEQ ID NO: 2914570 - RNA, 19 nt, Artificial Sequence
  Description of Artificial Sequence: Synthetic oligonucleotide
accacagcuggaguaauaa

SEQ ID NO: 2914571 - RNA, 19 nt, Artificial Sequence
  Description of Artificial Sequence: Synthetic oligonucleotide
uuuuggccuugccuccaga

SEQ ID NO: 2914572 - RNA, 19 nt, Artificial Sequence
  Description of Artificial Sequence: Synthetic oligonucleotide
cuugccuccagacuuauuu

SEQ ID NO: 2914573 - RNA, 19 nt, Artificial Sequence
  Description of Artificial Sequence: Synthetic oligonucleotide
gggcucugugcuuugaaac

SEQ ID NO: 2914574 - RNA, 19 nt, Artificial Sequence
  Description of Artificial Sequence: Synthetic oligonucleotide
ggccaaggaaccucgaauc

SEQ ID NO: 2914575 - RNA, 19 nt, Artificial Sequence
  Description of Artificial Sequence: Synthetic oligonucleotide
cugcccuggccaaggaacc

SEQ ID NO: 2914576 - RNA, 19 nt, Artificial Sequence
  Description of Artificial Sequence: Synthetic oligonucleotide
caaaugcacagcugauuga

SEQ ID NO: 2914577 - RNA, 19 nt, Artificial Sequence
  Description of Artificial Sequence: Synthetic oligonucleotide
agcuccugaagggcugccc

SEQ ID NO: 2914578 - RNA, 19 nt, Artificial Sequence
  Description of Artificial Sequence: Synthetic oligonucleotide
ugccuuuggaccacuucuu

SEQ ID NO: 2914579 - RNA, 19 nt, Artificial Sequence
  Description of Artificial Sequence: Synthetic oligonucleotide
uugccuccagacuuauuua

SEQ ID NO: 2914580 - RNA, 19 nt, Artificial Sequence
  Description of Artificial Sequence: Synthetic oligonucleotide
gucucucagagaccacagc

SEQ ID NO: 2914581 - RNA, 19 nt, Artificial Sequence
  Description of Artificial Sequence: Synthetic oligonucleotide
cuuaggcggcaugaugaag

SEQ ID NO: 2914582 - RNA, 19 nt, Artificial Sequence
  Description of Artificial Sequence: Synthetic oligonucleotide
uugggcucugugcuuugaa

SEQ ID NO: 2914583 - RNA, 19 nt, Artificial Sequence
  Description of Artificial Sequence: Synthetic oligonucleotide
guauuuaauaaaguuuauu

SEQ ID NO: 2914584 - RNA, 19 nt, Artificial Sequence
  Description of Artificial Sequence: Synthetic oligonucleotide
gcaugaugaagcucggaga

SEQ ID NO: 2914585 - RNA, 19 nt, Artificial Sequence
  Description of Artificial Sequence: Synthetic oligonucleotide
ugagcuugucccgaacuuu

SEQ ID NO: 2914586 - RNA, 19 nt, Artificial Sequence
  Description of Artificial Sequence: Synthetic oligonucleotide
aucuccacccuuuguguuu

SEQ ID NO: 2914587 - RNA, 19 nt, Artificial Sequence
  Description of Artificial Sequence: Synthetic oligonucleotide
aguagcuccugaagggcug

SEQ ID NO: 2914588 - RNA, 19 nt, Artificial Sequence
  Description of Artificial Sequence: Synthetic oligonucleotide
acuagauuguugagcuugu

SEQ ID NO: 2914589 - RNA, 19 nt, Artificial Sequence
  Description of Artificial Sequence: Synthetic oligonucleotide
agcucggagaguggcgacg

SEQ ID NO: 2914590 - RNA, 19 nt, Artificial Sequence
  Description of Artificial Sequence: Synthetic oligonucleotide
aaggaaccucgaaucuuca

SEQ ID NO: 2914591 - RNA, 19 nt, Artificial Sequence
  Description of Artificial Sequence: Synthetic oligonucleotide
ggaaccucgaaucuucagu

SEQ ID NO: 2914592 - RNA, 19 nt, Artificial Sequence
  Description of Artificial Sequence: Synthetic oligonucleotide
guugagcuugucccgaacu

SEQ ID NO: 2914593 - RNA, 19 nt, Artificial Sequence
  Description of Artificial Sequence: Synthetic oligonucleotide
ccacccuuuguguuucugg

SEQ ID NO: 2914594 - RNA, 19 nt, Artificial Sequence
  Description of Artificial Sequence: Synthetic oligonucleotide
uggggcaucuccacccuuu

SEQ ID NO: 2914595 - RNA, 19 nt, Artificial Sequence
  Description of Artificial Sequence: Synthetic oligonucleotide
acagaguuugucguaugua

SEQ ID NO: 2914596 - RNA, 19 nt, Artificial Sequence
  Description of Artificial Sequence: Synthetic oligonucleotide
agcccuuuacuaaguagcu

SEQ ID NO: 2914597 - RNA, 19 nt, Artificial Sequence
  Description of Artificial Sequence: Synthetic oligonucleotide
ccuguuuaugcaucuucac

SEQ ID NO: 2914598 - RNA, 19 nt, Artificial Sequence
  Description of Artificial Sequence: Synthetic oligonucleotide
cugaagggcugcccuggcc

SEQ ID NO: 2914599 - RNA, 19 nt, Artificial Sequence
  Description of Artificial Sequence: Synthetic oligonucleotide
uugucauccuuaggcggca

SEQ ID NO: 2914600 - RNA, 19 nt, Artificial Sequence
  Description of Artificial Sequence: Synthetic oligonucleotide
uuggaccacuucuucuuuu

SEQ ID NO: 2914601 - RNA, 19 nt, Artificial Sequence
  Description of Artificial Sequence: Synthetic oligonucleotide
cuugucccgaacuuugccu

SEQ ID NO: 2914602 - RNA, 19 nt, Artificial Sequence
  Description of Artificial Sequence: Synthetic oligonucleotide
guuucugguguaaauuacu

SEQ ID NO: 2914603 - RNA, 19 nt, Artificial Sequence
  Description of Artificial Sequence: Synthetic oligonucleotide
gauaagcccuuuacuaagu

SEQ ID NO: 2914604 - RNA, 19 nt, Artificial Sequence
  Description of Artificial Sequence: Synthetic oligonucleotide
ucuccacccuuuguguuuc

SEQ ID NO: 2914605 - RNA, 19 nt, Artificial Sequence
  Description of Artificial Sequence: Synthetic oligonucleotide
aguuugucguauguagcuu

SEQ ID NO: 2914606 - RNA, 19 nt, Artificial Sequence
  Description of Artificial Sequence: Synthetic oligonucleotide
gagaccacagcuggaguaa

SEQ ID NO: 2914607 - RNA, 19 nt, Artificial Sequence
  Description of Artificial Sequence: Synthetic oligonucleotide
uuguugagcuugucccgaa

SEQ ID NO: 2914608 - RNA, 19 nt, Artificial Sequence
  Description of Artificial Sequence: Synthetic oligonucleotide
gcuugucccgaacuuugcc

SEQ ID NO: 2914609 - RNA, 19 nt, Artificial Sequence
  Description of Artificial Sequence: Synthetic oligonucleotide
ucagucucucagagaccac

SEQ ID NO: 2914610 - RNA, 19 nt, Artificial Sequence
  Description of Artificial Sequence: Synthetic oligonucleotide
cuuauuuacugggucuuua

SEQ ID NO: 2914611 - RNA, 19 nt, Artificial Sequence
  Description of Artificial Sequence: Synthetic oligonucleotide
uugucguauguagcuuugu

SEQ ID NO: 2914612 - RNA, 19 nt, Artificial Sequence
  Description of Artificial Sequence: Synthetic oligonucleotide
ggcacuuccuuacagaguu

SEQ ID NO: 2914613 - RNA, 19 nt, Artificial Sequence
  Description of Artificial Sequence: Synthetic oligonucleotide
gucauccuuaggcggcaug

SEQ ID NO: 2914614 - RNA, 19 nt, Artificial Sequence
  Description of Artificial Sequence: Synthetic oligonucleotide
uuacuugggcucugugcuu

SEQ ID NO: 2914615 - RNA, 19 nt, Artificial Sequence
  Description of Artificial Sequence: Synthetic oligonucleotide
augaugaagcucggagagu

SEQ ID NO: 2914616 - RNA, 19 nt, Artificial Sequence
  Description of Artificial Sequence: Synthetic oligonucleotide
guuugucguauguagcuuu

SEQ ID NO: 2914617 - RNA, 19 nt, Artificial Sequence
  Description of Artificial Sequence: Synthetic oligonucleotide
uacuugggcucugugcuuu

SEQ ID NO: 2914618 - RNA, 19 nt, Artificial Sequence
  Description of Artificial Sequence: Synthetic oligonucleotide
cuuuggaccacuucuucuu

SEQ ID NO: 2914619 - RNA, 19 nt, Artificial Sequence
  Description of Artificial Sequence: Synthetic oligonucleotide
cuccugaagggcugcccug

SEQ ID NO: 2914620 - RNA, 19 nt, Artificial Sequence
  Description of Artificial Sequence: Synthetic oligonucleotide
ggcgacgaccacugcagcc

SEQ ID NO: 2914621 - RNA, 19 nt, Artificial Sequence
  Description of Artificial Sequence: Synthetic oligonucleotide
uugccgacuucccggcauc

SEQ ID NO: 2914622 - RNA, 19 nt, Artificial Sequence
  Description of Artificial Sequence: Synthetic oligonucleotide
uccacccuuuguguuucug

SEQ ID NO: 2914623 - RNA, 19 nt, Artificial Sequence
  Description of Artificial Sequence: Synthetic oligonucleotide
cagucucucagagaccaca

SEQ ID NO: 2914624 - RNA, 19 nt, Artificial Sequence
  Description of Artificial Sequence: Synthetic oligonucleotide
cuagauuguugagcuuguc

SEQ ID NO: 2914625 - RNA, 19 nt, Artificial Sequence
  Description of Artificial Sequence: Synthetic oligonucleotide
acuugggcucugugcuuug

SEQ ID NO: 2914626 - RNA, 19 nt, Artificial Sequence
  Description of Artificial Sequence: Synthetic oligonucleotide
acuuccuuacagaguuugu

SEQ ID NO: 2914627 - RNA, 19 nt, Artificial Sequence
  Description of Artificial Sequence: Synthetic oligonucleotide
acuuauuuacugggucuuu

SEQ ID NO: 2914628 - RNA, 19 nt, Artificial Sequence
  Description of Artificial Sequence: Synthetic oligonucleotide
guagcuccugaagggcugc

SEQ ID NO: 2914629 - RNA, 19 nt, Artificial Sequence
  Description of Artificial Sequence: Synthetic oligonucleotide
cugugcuuugaaaccagcu

SEQ ID NO: 2914630 - RNA, 19 nt, Artificial Sequence
  Description of Artificial Sequence: Synthetic oligonucleotide
gcuuugucaaacaggacua

SEQ ID NO: 2914631 - RNA, 19 nt, Artificial Sequence
  Description of Artificial Sequence: Synthetic oligonucleotide
gcuugauaagcccuuuacu

SEQ ID NO: 2914632 - RNA, 19 nt, Artificial Sequence
  Description of Artificial Sequence: Synthetic oligonucleotide
cuuacagaguuugucguau

SEQ ID NO: 2914633 - RNA, 19 nt, Artificial Sequence
  Description of Artificial Sequence: Synthetic oligonucleotide
gcugcccuggccaaggaac

SEQ ID NO: 2914634 - RNA, 19 nt, Artificial Sequence
  Description of Artificial Sequence: Synthetic oligonucleotide
aagggcugcccuggccaag

SEQ ID NO: 2914635 - RNA, 19 nt, Artificial Sequence
  Description of Artificial Sequence: Synthetic oligonucleotide
gacuuauuuacugggucuu

SEQ ID NO: 2914636 - RNA, 19 nt, Artificial Sequence
  Description of Artificial Sequence: Synthetic oligonucleotide
ugucccgaacuuugccuuu

SEQ ID NO: 2914637 - RNA, 19 nt, Artificial Sequence
  Description of Artificial Sequence: Synthetic oligonucleotide
gagaguggcgacgaccacu

SEQ ID NO: 2914638 - RNA, 19 nt, Artificial Sequence
  Description of Artificial Sequence: Synthetic oligonucleotide
cucagagaccacagcugga

SEQ ID NO: 2914639 - RNA, 19 nt, Artificial Sequence
  Description of Artificial Sequence: Synthetic oligonucleotide
cuuuguguuucugguguaa

SEQ ID NO: 2914640 - RNA, 19 nt, Artificial Sequence
  Description of Artificial Sequence: Synthetic oligonucleotide
cagcuggggcaucuccacc

SEQ ID NO: 2914641 - RNA, 19 nt, Artificial Sequence
  Description of Artificial Sequence: Synthetic oligonucleotide
gcugauugaaccuguuuau

SEQ ID NO: 2914642 - RNA, 19 nt, Artificial Sequence
  Description of Artificial Sequence: Synthetic oligonucleotide
cacccuuuguguuucuggu

SEQ ID NO: 2914643 - RNA, 19 nt, Artificial Sequence
  Description of Artificial Sequence: Synthetic oligonucleotide
ccacagcuggaguaauaag

SEQ ID NO: 2914644 - RNA, 19 nt, Artificial Sequence
  Description of Artificial Sequence: Synthetic oligonucleotide
gcacagcugauugaaccug

SEQ ID NO: 2914645 - RNA, 19 nt, Artificial Sequence
  Description of Artificial Sequence: Synthetic oligonucleotide
gucccgaacuuugccuuug

SEQ ID NO: 2914646 - RNA, 19 nt, Artificial Sequence
  Description of Artificial Sequence: Synthetic oligonucleotide
gcucugugcuuugaaacca

SEQ ID NO: 2914647 - RNA, 19 nt, Artificial Sequence
  Description of Artificial Sequence: Synthetic oligonucleotide
cccuggccaaggaaccucg

SEQ ID NO: 2914648 - RNA, 19 nt, Artificial Sequence
  Description of Artificial Sequence: Synthetic oligonucleotide
aggcggcaugaugaagcuc

SEQ ID NO: 2914649 - RNA, 19 nt, Artificial Sequence
  Description of Artificial Sequence: Synthetic oligonucleotide
cccggcaucuuucuucuuc

SEQ ID NO: 2914650 - RNA, 19 nt, Artificial Sequence
  Description of Artificial Sequence: Synthetic oligonucleotide
accagcuugauaagcccuu

SEQ ID NO: 2914651 - RNA, 19 nt, Artificial Sequence
  Description of Artificial Sequence: Synthetic oligonucleotide
gcagcuggggcaucuccac

SEQ ID NO: 2914652 - RNA, 19 nt, Artificial Sequence
  Description of Artificial Sequence: Synthetic oligonucleotide
agcuuauaauugggcacuu

SEQ ID NO: 2914653 - RNA, 19 nt, Artificial Sequence
  Description of Artificial Sequence: Synthetic oligonucleotide
ugcccuggccaaggaaccu

SEQ ID NO: 2914654 - RNA, 19 nt, Artificial Sequence
  Description of Artificial Sequence: Synthetic oligonucleotide
gccuuuggaccacuucuuc

SEQ ID NO: 2914655 - RNA, 19 nt, Artificial Sequence
  Description of Artificial Sequence: Synthetic oligonucleotide
cacagcugauugaaccugu

SEQ ID NO: 2914656 - RNA, 19 nt, Artificial Sequence
  Description of Artificial Sequence: Synthetic oligonucleotide
cuggccaaggaaccucgaa

SEQ ID NO: 2914657 - RNA, 19 nt, Artificial Sequence
  Description of Artificial Sequence: Synthetic oligonucleotide
uagcuccugaagggcugcc

SEQ ID NO: 2914658 - RNA, 19 nt, Artificial Sequence
  Description of Artificial Sequence: Synthetic oligonucleotide
ggggcaucuccacccuuug

SEQ ID NO: 2914659 - RNA, 19 nt, Artificial Sequence
  Description of Artificial Sequence: Synthetic oligonucleotide
gaguggcgacgaccacugc

SEQ ID NO: 2914660 - RNA, 19 nt, Artificial Sequence
  Description of Artificial Sequence: Synthetic oligonucleotide
agaccacagcuggaguaau

SEQ ID NO: 2914661 - RNA, 19 nt, Artificial Sequence
  Description of Artificial Sequence: Synthetic oligonucleotide
ugccgacuucccggcaucu

SEQ ID NO: 2914662 - RNA, 19 nt, Artificial Sequence
  Description of Artificial Sequence: Synthetic oligonucleotide
gcaucuccacccuuugugu

SEQ ID NO: 2914663 - RNA, 19 nt, Artificial Sequence
  Description of Artificial Sequence: Synthetic oligonucleotide
gcuuauaauugggcacuuc

SEQ ID NO: 2914664 - RNA, 19 nt, Artificial Sequence
  Description of Artificial Sequence: Synthetic oligonucleotide
ugucauccuuaggcggcau

SEQ ID NO: 2914665 - RNA, 19 nt, Artificial Sequence
  Description of Artificial Sequence: Synthetic oligonucleotide
cccuuuguguuucuggugu

SEQ ID NO: 2914666 - RNA, 19 nt, Artificial Sequence
  Description of Artificial Sequence: Synthetic oligonucleotide
cucggagaguggcgacgac

SEQ ID NO: 2914667 - RNA, 19 nt, Artificial Sequence
  Description of Artificial Sequence: Synthetic oligonucleotide
acagcugauugaaccuguu

SEQ ID NO: 2914668 - RNA, 19 nt, Artificial Sequence
  Description of Artificial Sequence: Synthetic oligonucleotide
gccaaggaaccucgaaucu

SEQ ID NO: 2914669 - RNA, 19 nt, Artificial Sequence
  Description of Artificial Sequence: Synthetic oligonucleotide
cuuugccgacuucccggca

SEQ ID NO: 2914670 - RNA, 19 nt, Artificial Sequence
  Description of Artificial Sequence: Synthetic oligonucleotide
cggagaguggcgacgacca

SEQ ID NO: 2914671 - RNA, 19 nt, Artificial Sequence
  Description of Artificial Sequence: Synthetic oligonucleotide
cagcuugauaagcccuuua

SEQ ID NO: 2914672 - RNA, 19 nt, Artificial Sequence
  Description of Artificial Sequence: Synthetic oligonucleotide
caaacaggacuagauuguu

SEQ ID NO: 2914673 - RNA, 19 nt, Artificial Sequence
  Description of Artificial Sequence: Synthetic oligonucleotide
ccuuacagaguuugucgua

SEQ ID NO: 2914674 - RNA, 19 nt, Artificial Sequence
  Description of Artificial Sequence: Synthetic oligonucleotide
ggagaguggcgacgaccac

SEQ ID NO: 2914675 - RNA, 19 nt, Artificial Sequence
  Description of Artificial Sequence: Synthetic oligonucleotide
gcccuuuacuaaguagcuc

SEQ ID NO: 2914676 - RNA, 19 nt, Artificial Sequence
  Description of Artificial Sequence: Synthetic oligonucleotide
ccagacuuauuuacugggu

SEQ ID NO: 2914677 - RNA, 19 nt, Artificial Sequence
  Description of Artificial Sequence: Synthetic oligonucleotide
cuugggcucugugcuuuga

SEQ ID NO: 2914678 - RNA, 19 nt, Artificial Sequence
  Description of Artificial Sequence: Synthetic oligonucleotide
ccuuuggaccacuucuucu

SEQ ID NO: 2914679 - RNA, 19 nt, Artificial Sequence
  Description of Artificial Sequence: Synthetic oligonucleotide
caucuccacccuuuguguu

SEQ ID NO: 2914680 - RNA, 19 nt, Artificial Sequence
  Description of Artificial Sequence: Synthetic oligonucleotide
gcuccugaagggcugcccu

SEQ ID NO: 2914681 - RNA, 19 nt, Artificial Sequence
  Description of Artificial Sequence: Synthetic oligonucleotide
ccugaagggcugcccuggc

SEQ ID NO: 2914682 - RNA, 19 nt, Artificial Sequence
  Description of Artificial Sequence: Synthetic oligonucleotide
gcggcaugaugaagcucgg

SEQ ID NO: 2914683 - RNA, 19 nt, Artificial Sequence
  Description of Artificial Sequence: Synthetic oligonucleotide
gcuggaguaauaagcuuau

SEQ ID NO: 2914684 - RNA, 19 nt, Artificial Sequence
  Description of Artificial Sequence: Synthetic oligonucleotide
cagagaccacagcuggagu

SEQ ID NO: 2914685 - RNA, 19 nt, Artificial Sequence
  Description of Artificial Sequence: Synthetic oligonucleotide
gaaccuguuuaugcaucuu

SEQ ID NO: 2914686 - RNA, 19 nt, Artificial Sequence
  Description of Artificial Sequence: Synthetic oligonucleotide
cgacuucccggcaucuuuc

SEQ ID NO: 2914687 - RNA, 19 nt, Artificial Sequence
  Description of Artificial Sequence: Synthetic oligonucleotide
ccuuuacuaaguagcuccu

SEQ ID NO: 2914688 - RNA, 19 nt, Artificial Sequence
  Description of Artificial Sequence: Synthetic oligonucleotide
cagcuggaguaauaagcuu

SEQ ID NO: 2914689 - RNA, 19 nt, Artificial Sequence
  Description of Artificial Sequence: Synthetic oligonucleotide
gcucggagaguggcgacga

SEQ ID NO: 2914690 - RNA, 19 nt, Artificial Sequence
  Description of Artificial Sequence: Synthetic oligonucleotide
cagcugauugaaccuguuu

SEQ ID NO: 2914691 - RNA, 19 nt, Artificial Sequence
  Description of Artificial Sequence: Synthetic oligonucleotide
ccuuaggcggcaugaugaa

SEQ ID NO: 2914692 - RNA, 19 nt, Artificial Sequence
  Description of Artificial Sequence: Synthetic oligonucleotide
cuggaguaauaagcuuaua

SEQ ID NO: 2914693 - RNA, 19 nt, Artificial Sequence
  Description of Artificial Sequence: Synthetic oligonucleotide
ccucgaaucuucagucucu

SEQ ID NO: 2914694 - RNA, 19 nt, Artificial Sequence
  Description of Artificial Sequence: Synthetic oligonucleotide
gcgacgaccacugcagccu

SEQ ID NO: 2914695 - RNA, 19 nt, Artificial Sequence
  Description of Artificial Sequence: Synthetic oligonucleotide
cguauguagcuuugucaaa

SEQ ID NO: 2914696 - RNA, 19 nt, Artificial Sequence
  Description of Artificial Sequence: Synthetic oligonucleotide
cugggucuuuaucuuucuu

SEQ ID NO: 2914697 - RNA, 19 nt, Artificial Sequence
  Description of Artificial Sequence: Synthetic oligonucleotide
gccuccagacuuauuuacu

SEQ ID NO: 2914698 - RNA, 19 nt, Artificial Sequence
  Description of Artificial Sequence: Synthetic oligonucleotide
ccggcaucuuucuucuucu

SEQ ID NO: 2914699 - RNA, 19 nt, Artificial Sequence
  Description of Artificial Sequence: Synthetic oligonucleotide
ucccggcaucuuucuucuu

SEQ ID NO: 2914700 - RNA, 19 nt, Artificial Sequence
  Description of Artificial Sequence: Synthetic oligonucleotide
ccuuuguguuucuggugua

SEQ ID NO: 2914701 - RNA, 19 nt, Artificial Sequence
  Description of Artificial Sequence: Synthetic oligonucleotide
cccgaacuuugccuuugga

SEQ ID NO: 2914702 - RNA, 19 nt, Artificial Sequence
  Description of Artificial Sequence: Synthetic oligonucleotide
cauccuuaggcggcaugau

SEQ ID NO: 2914703 - RNA, 19 nt, Artificial Sequence
  Description of Artificial Sequence: Synthetic oligonucleotide
gcccuggccaaggaaccuc

SEQ ID NO: 2914704 - RNA, 19 nt, Artificial Sequence
  Description of Artificial Sequence: Synthetic oligonucleotide
ggacuagauuguugagcuu

SEQ ID NO: 2914705 - RNA, 19 nt, Artificial Sequence
  Description of Artificial Sequence: Synthetic oligonucleotide
gcuuugaaaccagcuugau

SEQ ID NO: 2914706 - RNA, 19 nt, Artificial Sequence
  Description of Artificial Sequence: Synthetic oligonucleotide
gggcacuuccuuacagagu

SEQ ID NO: 2914707 - RNA, 19 nt, Artificial Sequence
  Description of Artificial Sequence: Synthetic oligonucleotide
gggcaucuccacccuuugu

SEQ ID NO: 2914708 - RNA, 19 nt, Artificial Sequence
  Description of Artificial Sequence: Synthetic oligonucleotide
ccuggccaaggaaccucga

SEQ ID NO: 2914709 - RNA, 19 nt, Artificial Sequence
  Description of Artificial Sequence: Synthetic oligonucleotide
ccaaggaaccucgaaucuu

SEQ ID NO: 2914710 - RNA, 19 nt, Artificial Sequence
  Description of Artificial Sequence: Synthetic oligonucleotide
cgacgaccacugcagccuc

SEQ ID NO: 2914711 - RNA, 19 nt, Artificial Sequence
  Description of Artificial Sequence: Synthetic oligonucleotide
ggccuugccuccagacuua

SEQ ID NO: 2914712 - RNA, 19 nt, Artificial Sequence
  Description of Artificial Sequence: Synthetic oligonucleotide
ccgacuucccggcaucuuu

SEQ ID NO: 2914713 - RNA, 19 nt, Artificial Sequence
  Description of Artificial Sequence: Synthetic oligonucleotide
gggcugcccuggccaagga

SEQ ID NO: 2914714 - RNA, 19 nt, Artificial Sequence
  Description of Artificial Sequence: Synthetic oligonucleotide
cuccacccuuuguguuucu

SEQ ID NO: 2914715 - RNA, 19 nt, Artificial Sequence
  Description of Artificial Sequence: Synthetic oligonucleotide
cuggggcaucuccacccuu

SEQ ID NO: 2914716 - RNA, 19 nt, Artificial Sequence
  Description of Artificial Sequence: Synthetic oligonucleotide
cggcaugaugaagcucgga

SEQ ID NO: 2914717 - RNA, 19 nt, Artificial Sequence
  Description of Artificial Sequence: Synthetic oligonucleotide
ccagcuugauaagcccuuu

SEQ ID NO: 2914718 - RNA, 19 nt, Artificial Sequence
  Description of Artificial Sequence: Synthetic oligonucleotide
gccuugccuccagacuuau

SEQ ID NO: 2914719 - RNA, 19 nt, Artificial Sequence
  Description of Artificial Sequence: Synthetic oligonucleotide
gcacuuccuuacagaguuu

SEQ ID NO: 2914720 - RNA, 19 nt, Artificial Sequence
  Description of Artificial Sequence: Synthetic oligonucleotide
ccuugccuccagacuuauu

SEQ ID NO: 2914721 - RNA, 19 nt, Artificial Sequence
  Description of Artificial Sequence: Synthetic oligonucleotide
gccgacuucccggcaucuu

SEQ ID NO: 2914722 - RNA, 19 nt, Artificial Sequence
  Description of Artificial Sequence: Synthetic oligonucleotide
aaaacuuucaugcaaggca

SEQ ID NO: 2914723 - RNA, 19 nt, Artificial Sequence
  Description of Artificial Sequence: Synthetic oligonucleotide
uaaaacaugucguaagugg

SEQ ID NO: 2914724 - RNA, 19 nt, Artificial Sequence
  Description of Artificial Sequence: Synthetic oligonucleotide
ucuuccuuuaccuugauga

SEQ ID NO: 2914725 - RNA, 19 nt, Artificial Sequence
  Description of Artificial Sequence: Synthetic oligonucleotide
ugaagcuuuacacuguagg

SEQ ID NO: 2914726 - RNA, 19 nt, Artificial Sequence
  Description of Artificial Sequence: Synthetic oligonucleotide
uggacuagaacacagguca

SEQ ID NO: 2914727 - RNA, 19 nt, Artificial Sequence
  Description of Artificial Sequence: Synthetic oligonucleotide
uguaaaacuuucaugcaag

SEQ ID NO: 2914728 - RNA, 19 nt, Artificial Sequence
  Description of Artificial Sequence: Synthetic oligonucleotide
acacauaacagauuuuggg

SEQ ID NO: 2914729 - RNA, 19 nt, Artificial Sequence
  Description of Artificial Sequence: Synthetic oligonucleotide
agcuuuacacuguaggagc

SEQ ID NO: 2914730 - RNA, 19 nt, Artificial Sequence
  Description of Artificial Sequence: Synthetic oligonucleotide
ucagagacgauguaaaacu

SEQ ID NO: 2914731 - RNA, 19 nt, Artificial Sequence
  Description of Artificial Sequence: Synthetic oligonucleotide
cacauaacagauuuugggg

SEQ ID NO: 2914732 - RNA, 19 nt, Artificial Sequence
  Description of Artificial Sequence: Synthetic oligonucleotide
aaaacaugucguaaguggg

SEQ ID NO: 2914733 - RNA, 19 nt, Artificial Sequence
  Description of Artificial Sequence: Synthetic oligonucleotide
uuuauguuggcacuguguc

SEQ ID NO: 2914734 - RNA, 19 nt, Artificial Sequence
  Description of Artificial Sequence: Synthetic oligonucleotide
ugugaauucuuccuuuacc

SEQ ID NO: 2914735 - RNA, 19 nt, Artificial Sequence
  Description of Artificial Sequence: Synthetic oligonucleotide
cauuguacaguccauacug

SEQ ID NO: 2914736 - RNA, 19 nt, Artificial Sequence
  Description of Artificial Sequence: Synthetic oligonucleotide
ucuuuuaagugaacguucc

SEQ ID NO: 2914737 - RNA, 19 nt, Artificial Sequence
  Description of Artificial Sequence: Synthetic oligonucleotide
ugcaaggcagccaugcugg

SEQ ID NO: 2914738 - RNA, 19 nt, Artificial Sequence
  Description of Artificial Sequence: Synthetic oligonucleotide
cuugaugacaucuugguga

SEQ ID NO: 2914739 - RNA, 19 nt, Artificial Sequence
  Description of Artificial Sequence: Synthetic oligonucleotide
gcuuccauaauucagagac

SEQ ID NO: 2914740 - RNA, 19 nt, Artificial Sequence
  Description of Artificial Sequence: Synthetic oligonucleotide
uuuaagugaacguuccugu

SEQ ID NO: 2914741 - RNA, 19 nt, Artificial Sequence
  Description of Artificial Sequence: Synthetic oligonucleotide
uguaaaacaugucguaagu

SEQ ID NO: 2914742 - RNA, 19 nt, Artificial Sequence
  Description of Artificial Sequence: Synthetic oligonucleotide
uaagugaacguuccuguag

SEQ ID NO: 2914743 - RNA, 19 nt, Artificial Sequence
  Description of Artificial Sequence: Synthetic oligonucleotide
ugacaucuuggugagaugg

SEQ ID NO: 2914744 - RNA, 19 nt, Artificial Sequence
  Description of Artificial Sequence: Synthetic oligonucleotide
aacguuccuguagugaagc

SEQ ID NO: 2914745 - RNA, 19 nt, Artificial Sequence
  Description of Artificial Sequence: Synthetic oligonucleotide
guagugaagcuuuacacug

SEQ ID NO: 2914746 - RNA, 19 nt, Artificial Sequence
  Description of Artificial Sequence: Synthetic oligonucleotide
  modified_base (3)..(3): a, c, u, g, unknown or other
cunacugugguucucauca

SEQ ID NO: 2914747 - RNA, 19 nt, Artificial Sequence
  Description of Artificial Sequence: Synthetic oligonucleotide
acaugcaucucuuuuaagu

SEQ ID NO: 2914748 - RNA, 19 nt, Artificial Sequence
  Description of Artificial Sequence: Synthetic oligonucleotide
auguaaaacaugucguaag

SEQ ID NO: 2914749 - RNA, 19 nt, Artificial Sequence
  Description of Artificial Sequence: Synthetic oligonucleotide
uguagugaagcuuuacacu

SEQ ID NO: 2914750 - RNA, 19 nt, Artificial Sequence
  Description of Artificial Sequence: Synthetic oligonucleotide
aaacuuucaugcaaggcag

SEQ ID NO: 2914751 - RNA, 19 nt, Artificial Sequence
  Description of Artificial Sequence: Synthetic oligonucleotide
uuuuaagugaacguuccug

SEQ ID NO: 2914752 - RNA, 19 nt, Artificial Sequence
  Description of Artificial Sequence: Synthetic oligonucleotide
gcucauguaaaacaugucg

SEQ ID NO: 2914753 - RNA, 19 nt, Artificial Sequence
  Description of Artificial Sequence: Synthetic oligonucleotide
uggucaacaguuuacggug

SEQ ID NO: 2914754 - RNA, 19 nt, Artificial Sequence
  Description of Artificial Sequence: Synthetic oligonucleotide
uuuggucaacaguuuacgg

SEQ ID NO: 2914755 - RNA, 19 nt, Artificial Sequence
  Description of Artificial Sequence: Synthetic oligonucleotide
aagcuuuacacuguaggag

SEQ ID NO: 2914756 - RNA, 19 nt, Artificial Sequence
  Description of Artificial Sequence: Synthetic oligonucleotide
cuuuugaagcucuucuugc

SEQ ID NO: 2914757 - RNA, 19 nt, Artificial Sequence
  Description of Artificial Sequence: Synthetic oligonucleotide
acauaacagauuuuggggu

SEQ ID NO: 2914758 - RNA, 19 nt, Artificial Sequence
  Description of Artificial Sequence: Synthetic oligonucleotide
ucuugcacacauaacagau

SEQ ID NO: 2914759 - RNA, 19 nt, Artificial Sequence
  Description of Artificial Sequence: Synthetic oligonucleotide
ugugcagacaugcaucucu

SEQ ID NO: 2914760 - RNA, 19 nt, Artificial Sequence
  Description of Artificial Sequence: Synthetic oligonucleotide
acugugaugugcucauccc

SEQ ID NO: 2914761 - RNA, 19 nt, Artificial Sequence
  Description of Artificial Sequence: Synthetic oligonucleotide
cgauguaaaacuuucaugc

SEQ ID NO: 2914762 - RNA, 19 nt, Artificial Sequence
  Description of Artificial Sequence: Synthetic oligonucleotide
ucuggacuagaacacaggu

SEQ ID NO: 2914763 - RNA, 19 nt, Artificial Sequence
  Description of Artificial Sequence: Synthetic oligonucleotide
uauguuggcacugugucug

SEQ ID NO: 2914764 - RNA, 19 nt, Artificial Sequence
  Description of Artificial Sequence: Synthetic oligonucleotide
uaccuugaugacaucuugg

SEQ ID NO: 2914765 - RNA, 19 nt, Artificial Sequence
  Description of Artificial Sequence: Synthetic oligonucleotide
ugugguucucaucaggccu

SEQ ID NO: 2914766 - RNA, 19 nt, Artificial Sequence
  Description of Artificial Sequence: Synthetic oligonucleotide
guaaaacuuucaugcaagg

SEQ ID NO: 2914767 - RNA, 19 nt, Artificial Sequence
  Description of Artificial Sequence: Synthetic oligonucleotide
uggggucuggacuagaaca

SEQ ID NO: 2914768 - RNA, 19 nt, Artificial Sequence
  Description of Artificial Sequence: Synthetic oligonucleotide
aagugaacguuccuguagu

SEQ ID NO: 2914769 - RNA, 19 nt, Artificial Sequence
  Description of Artificial Sequence: Synthetic oligonucleotide
cuguaggagcuuuugaagc

SEQ ID NO: 2914770 - RNA, 19 nt, Artificial Sequence
  Description of Artificial Sequence: Synthetic oligonucleotide
caugcaucucuuuuaagug

SEQ ID NO: 2914771 - RNA, 19 nt, Artificial Sequence
  Description of Artificial Sequence: Synthetic oligonucleotide
uagaacacaggucaccuuc

SEQ ID NO: 2914772 - RNA, 19 nt, Artificial Sequence
  Description of Artificial Sequence: Synthetic oligonucleotide
aacacaggucaccuucagg

SEQ ID NO: 2914773 - RNA, 19 nt, Artificial Sequence
  Description of Artificial Sequence: Synthetic oligonucleotide
uuggucaacaguuuacggu

SEQ ID NO: 2914774 - RNA, 19 nt, Artificial Sequence
  Description of Artificial Sequence: Synthetic oligonucleotide
acgauguaaaacuuucaug

SEQ ID NO: 2914775 - RNA, 19 nt, Artificial Sequence
  Description of Artificial Sequence: Synthetic oligonucleotide
agauuuuggggucuggacu

SEQ ID NO: 2914776 - RNA, 19 nt, Artificial Sequence
  Description of Artificial Sequence: Synthetic oligonucleotide
cuguagugaagcuuuacac

SEQ ID NO: 2914777 - RNA, 19 nt, Artificial Sequence
  Description of Artificial Sequence: Synthetic oligonucleotide
uugaugacaucuuggugag

SEQ ID NO: 2914778 - RNA, 19 nt, Artificial Sequence
  Description of Artificial Sequence: Synthetic oligonucleotide
uccuuuaccuugaugacau

SEQ ID NO: 2914779 - RNA, 19 nt, Artificial Sequence
  Description of Artificial Sequence: Synthetic oligonucleotide
uaaaacuuucaugcaaggc

SEQ ID NO: 2914780 - RNA, 19 nt, Artificial Sequence
  Description of Artificial Sequence: Synthetic oligonucleotide
cucugcuucgucgagaggg

SEQ ID NO: 2914781 - RNA, 19 nt, Artificial Sequence
  Description of Artificial Sequence: Synthetic oligonucleotide
uuaccuugaugacaucuug

SEQ ID NO: 2914782 - RNA, 19 nt, Artificial Sequence
  Description of Artificial Sequence: Synthetic oligonucleotide
uuucaugcaaggcagccau

SEQ ID NO: 2914783 - RNA, 19 nt, Artificial Sequence
  Description of Artificial Sequence: Synthetic oligonucleotide
aacaguuuacggugcaggu

SEQ ID NO: 2914784 - RNA, 19 nt, Artificial Sequence
  Description of Artificial Sequence: Synthetic oligonucleotide
gaagcuuuacacuguagga

SEQ ID NO: 2914785 - RNA, 19 nt, Artificial Sequence
  Description of Artificial Sequence: Synthetic oligonucleotide
ucuuuggucaacaguuuac

SEQ ID NO: 2914786 - RNA, 19 nt, Artificial Sequence
  Description of Artificial Sequence: Synthetic oligonucleotide
uucgcuucaccucacugug

SEQ ID NO: 2914787 - RNA, 19 nt, Artificial Sequence
  Description of Artificial Sequence: Synthetic oligonucleotide
ugcagguuuauguuggcac

SEQ ID NO: 2914788 - RNA, 19 nt, Artificial Sequence
  Description of Artificial Sequence: Synthetic oligonucleotide
acuuucaugcaaggcagcc

SEQ ID NO: 2914789 - RNA, 19 nt, Artificial Sequence
  Description of Artificial Sequence: Synthetic oligonucleotide
aauucagagacgauguaaa

SEQ ID NO: 2914790 - RNA, 19 nt, Artificial Sequence
  Description of Artificial Sequence: Synthetic oligonucleotide
uacuggcucauguaaaaca

SEQ ID NO: 2914791 - RNA, 19 nt, Artificial Sequence
  Description of Artificial Sequence: Synthetic oligonucleotide
ugaacguuccuguagugaa

SEQ ID NO: 2914792 - RNA, 19 nt, Artificial Sequence
  Description of Artificial Sequence: Synthetic oligonucleotide
  modified_base (11)..(11): a, c, u, g, unknown or other
ugagauggcunacuguggu

SEQ ID NO: 2914793 - RNA, 19 nt, Artificial Sequence
  Description of Artificial Sequence: Synthetic oligonucleotide
  modified_base (13)..(13): a, c, u, g, unknown or other
cucaucaggccunucacug

SEQ ID NO: 2914794 - RNA, 19 nt, Artificial Sequence
  Description of Artificial Sequence: Synthetic oligonucleotide
acugugguucucaucaggc

SEQ ID NO: 2914795 - RNA, 19 nt, Artificial Sequence
  Description of Artificial Sequence: Synthetic oligonucleotide
caucucuuuuaagugaacg

SEQ ID NO: 2914796 - RNA, 19 nt, Artificial Sequence
  Description of Artificial Sequence: Synthetic oligonucleotide
uuacggugcagguuuaugu

SEQ ID NO: 2914797 - RNA, 19 nt, Artificial Sequence
  Description of Artificial Sequence: Synthetic oligonucleotide
cacacauaacagauuuugg

SEQ ID NO: 2914798 - RNA, 19 nt, Artificial Sequence
  Description of Artificial Sequence: Synthetic oligonucleotide
  modified_base (9)..(9): a, c, u, g, unknown or other
agauggcunacugugguuc

SEQ ID NO: 2914799 - RNA, 19 nt, Artificial Sequence
  Description of Artificial Sequence: Synthetic oligonucleotide
aucucuuuuaagugaacgu

SEQ ID NO: 2914800 - RNA, 19 nt, Artificial Sequence
  Description of Artificial Sequence: Synthetic oligonucleotide
uguaggagcuuuugaagcu

SEQ ID NO: 2914801 - RNA, 19 nt, Artificial Sequence
  Description of Artificial Sequence: Synthetic oligonucleotide
gauguaaaacuuucaugca

SEQ ID NO: 2914802 - RNA, 19 nt, Artificial Sequence
  Description of Artificial Sequence: Synthetic oligonucleotide
uccauacuggcucauguaa

SEQ ID NO: 2914803 - RNA, 19 nt, Artificial Sequence
  Description of Artificial Sequence: Synthetic oligonucleotide
auguaaaacuuucaugcaa

SEQ ID NO: 2914804 - RNA, 19 nt, Artificial Sequence
  Description of Artificial Sequence: Synthetic oligonucleotide
cuuuggucaacaguuuacg

SEQ ID NO: 2914805 - RNA, 19 nt, Artificial Sequence
  Description of Artificial Sequence: Synthetic oligonucleotide
uucagagacgauguaaaac

SEQ ID NO: 2914806 - RNA, 19 nt, Artificial Sequence
  Description of Artificial Sequence: Synthetic oligonucleotide
cucuuuuaagugaacguuc

SEQ ID NO: 2914807 - RNA, 19 nt, Artificial Sequence
  Description of Artificial Sequence: Synthetic oligonucleotide
uuuucgcuucaccucacug

SEQ ID NO: 2914808 - RNA, 19 nt, Artificial Sequence
  Description of Artificial Sequence: Synthetic oligonucleotide
  modified_base (7)..(7): a, c, u, g, unknown or other
aggccunucacuguucauc

SEQ ID NO: 2914809 - RNA, 19 nt, Artificial Sequence
  Description of Artificial Sequence: Synthetic oligonucleotide
uuucgcuucaccucacugu

SEQ ID NO: 2914810 - RNA, 19 nt, Artificial Sequence
  Description of Artificial Sequence: Synthetic oligonucleotide
ucauguaaaacaugucgua

SEQ ID NO: 2914811 - RNA, 19 nt, Artificial Sequence
  Description of Artificial Sequence: Synthetic oligonucleotide
ucacuguucaucaggacuu

SEQ ID NO: 2914812 - RNA, 19 nt, Artificial Sequence
  Description of Artificial Sequence: Synthetic oligonucleotide
uuugagggcuuccauaauu

SEQ ID NO: 2914813 - RNA, 19 nt, Artificial Sequence
  Description of Artificial Sequence: Synthetic oligonucleotide
ugcaucucuuuuaagugaa

SEQ ID NO: 2914814 - RNA, 19 nt, Artificial Sequence
  Description of Artificial Sequence: Synthetic oligonucleotide
auugcagccggccacugug

SEQ ID NO: 2914815 - RNA, 19 nt, Artificial Sequence
  Description of Artificial Sequence: Synthetic oligonucleotide
  modified_base (15)..(15): a, c, u, g, unknown or other
uucucaucaggccunucac

SEQ ID NO: 2914816 - RNA, 19 nt, Artificial Sequence
  Description of Artificial Sequence: Synthetic oligonucleotide
cauaacagauuuugggguc

SEQ ID NO: 2914817 - RNA, 19 nt, Artificial Sequence
  Description of Artificial Sequence: Synthetic oligonucleotide
ucugcuucgucgagagggg

SEQ ID NO: 2914818 - RNA, 19 nt, Artificial Sequence
  Description of Artificial Sequence: Synthetic oligonucleotide
  modified_base (15)..(15): a, c, u, g, unknown or other
uuggugagauggcunacug

SEQ ID NO: 2914819 - RNA, 19 nt, Artificial Sequence
  Description of Artificial Sequence: Synthetic oligonucleotide
  modified_base (16)..(16): a, c, u, g, unknown or other
guucucaucaggccunuca

SEQ ID NO: 2914820 - RNA, 19 nt, Artificial Sequence
  Description of Artificial Sequence: Synthetic oligonucleotide
  modified_base (14)..(14): a, c, u, g, unknown or other
ucucaucaggccunucacu

SEQ ID NO: 2914821 - RNA, 19 nt, Artificial Sequence
  Description of Artificial Sequence: Synthetic oligonucleotide
uuuaccuugaugacaucuu

SEQ ID NO: 2914822 - RNA, 19 nt, Artificial Sequence
  Description of Artificial Sequence: Synthetic oligonucleotide
aauucuuccuuuaccuuga

SEQ ID NO: 2914823 - RNA, 19 nt, Artificial Sequence
  Description of Artificial Sequence: Synthetic oligonucleotide
uugagggcuuccauaauuc

SEQ ID NO: 2914824 - RNA, 19 nt, Artificial Sequence
  Description of Artificial Sequence: Synthetic oligonucleotide
aagcucuucuugcacacau

SEQ ID NO: 2914825 - RNA, 19 nt, Artificial Sequence
  Description of Artificial Sequence: Synthetic oligonucleotide
aacuuucaugcaaggcagc

SEQ ID NO: 2914826 - RNA, 19 nt, Artificial Sequence
  Description of Artificial Sequence: Synthetic oligonucleotide
  modified_base (9)..(9): a, c, u, g, unknown or other
ucaggccunucacuguuca

SEQ ID NO: 2914827 - RNA, 19 nt, Artificial Sequence
  Description of Artificial Sequence: Synthetic oligonucleotide
accuugaugacaucuuggu

SEQ ID NO: 2914828 - RNA, 19 nt, Artificial Sequence
  Description of Artificial Sequence: Synthetic oligonucleotide
ucucuuuuaagugaacguu

SEQ ID NO: 2914829 - RNA, 19 nt, Artificial Sequence
  Description of Artificial Sequence: Synthetic oligonucleotide
cauaauucagagacgaugu

SEQ ID NO: 2914830 - RNA, 19 nt, Artificial Sequence
  Description of Artificial Sequence: Synthetic oligonucleotide
aagugggaucugugaauuc

SEQ ID NO: 2914831 - RNA, 19 nt, Artificial Sequence
  Description of Artificial Sequence: Synthetic oligonucleotide
gagacgauguaaaacuuuc

SEQ ID NO: 2914832 - RNA, 19 nt, Artificial Sequence
  Description of Artificial Sequence: Synthetic oligonucleotide
cacugugaugugcucaucc

SEQ ID NO: 2914833 - RNA, 19 nt, Artificial Sequence
  Description of Artificial Sequence: Synthetic oligonucleotide
guaaaacaugucguaagug

SEQ ID NO: 2914834 - RNA, 19 nt, Artificial Sequence
  Description of Artificial Sequence: Synthetic oligonucleotide
augcaucucuuuuaaguga

SEQ ID NO: 2914835 - RNA, 19 nt, Artificial Sequence
  Description of Artificial Sequence: Synthetic oligonucleotide
caacaguuuacggugcagg

SEQ ID NO: 2914836 - RNA, 19 nt, Artificial Sequence
  Description of Artificial Sequence: Synthetic oligonucleotide
  modified_base (13)..(13): a, c, u, g, unknown or other
ggugagauggcunacugug

SEQ ID NO: 2914837 - RNA, 19 nt, Artificial Sequence
  Description of Artificial Sequence: Synthetic oligonucleotide
ugaagcucuucuugcacac

SEQ ID NO: 2914838 - RNA, 19 nt, Artificial Sequence
  Description of Artificial Sequence: Synthetic oligonucleotide
uuauguuggcacugugucu

SEQ ID NO: 2914839 - RNA, 19 nt, Artificial Sequence
  Description of Artificial Sequence: Synthetic oligonucleotide
aguccauacuggcucaugu

SEQ ID NO: 2914840 - RNA, 19 nt, Artificial Sequence
  Description of Artificial Sequence: Synthetic oligonucleotide
ucguaagugggaucuguga

SEQ ID NO: 2914841 - RNA, 19 nt, Artificial Sequence
  Description of Artificial Sequence: Synthetic oligonucleotide
augcaaggcagccaugcug

SEQ ID NO: 2914842 - RNA, 19 nt, Artificial Sequence
  Description of Artificial Sequence: Synthetic oligonucleotide
gauuuuggggucuggacua

SEQ ID NO: 2914843 - RNA, 19 nt, Artificial Sequence
  Description of Artificial Sequence: Synthetic oligonucleotide
acugugcagacaugcaucu

SEQ ID NO: 2914844 - RNA, 19 nt, Artificial Sequence
  Description of Artificial Sequence: Synthetic oligonucleotide
  modified_base (4)..(4): a, c, u, g, unknown or other
ccunucacuguucaucagg

SEQ ID NO: 2914845 - RNA, 19 nt, Artificial Sequence
  Description of Artificial Sequence: Synthetic oligonucleotide
aaacaugucguaaguggga

SEQ ID NO: 2914846 - RNA, 19 nt, Artificial Sequence
  Description of Artificial Sequence: Synthetic oligonucleotide
ugugucugucucugcuucg

SEQ ID NO: 2914847 - RNA, 19 nt, Artificial Sequence
  Description of Artificial Sequence: Synthetic oligonucleotide
auuguacaguccauacugg

SEQ ID NO: 2914848 - RNA, 19 nt, Artificial Sequence
  Description of Artificial Sequence: Synthetic oligonucleotide
  modified_base (3)..(3): a, c, u, g, unknown or other
cunucacuguucaucagga

SEQ ID NO: 2914849 - RNA, 19 nt, Artificial Sequence
  Description of Artificial Sequence: Synthetic oligonucleotide
  modified_base (14)..(14): a, c, u, g, unknown or other
uggugagauggcunacugu

SEQ ID NO: 2914850 - RNA, 19 nt, Artificial Sequence
  Description of Artificial Sequence: Synthetic oligonucleotide
cuuccuuuaccuugaugac

SEQ ID NO: 2914851 - RNA, 19 nt, Artificial Sequence
  Description of Artificial Sequence: Synthetic oligonucleotide
acuagaacacaggucaccu

SEQ ID NO: 2914852 - RNA, 19 nt, Artificial Sequence
  Description of Artificial Sequence: Synthetic oligonucleotide
auacuggcucauguaaaac

SEQ ID NO: 2914853 - RNA, 19 nt, Artificial Sequence
  Description of Artificial Sequence: Synthetic oligonucleotide
gagggcuuccauaauucag

SEQ ID NO: 2914854 - RNA, 19 nt, Artificial Sequence
  Description of Artificial Sequence: Synthetic oligonucleotide
cagauuuuggggucuggac

SEQ ID NO: 2914855 - RNA, 19 nt, Artificial Sequence
  Description of Artificial Sequence: Synthetic oligonucleotide
aacaugucguaagugggau

SEQ ID NO: 2914856 - RNA, 19 nt, Artificial Sequence
  Description of Artificial Sequence: Synthetic oligonucleotide
agugggaucugugaauucu

SEQ ID NO: 2914857 - RNA, 19 nt, Artificial Sequence
  Description of Artificial Sequence: Synthetic oligonucleotide
gacuagaacacaggucacc

SEQ ID NO: 2914858 - RNA, 19 nt, Artificial Sequence
  Description of Artificial Sequence: Synthetic oligonucleotide
agacaugcaucucuuuuaa

SEQ ID NO: 2914859 - RNA, 19 nt, Artificial Sequence
  Description of Artificial Sequence: Synthetic oligonucleotide
uacacuguaggagcuuuug

SEQ ID NO: 2914860 - RNA, 19 nt, Artificial Sequence
  Description of Artificial Sequence: Synthetic oligonucleotide
acaggucaccuucagggga

SEQ ID NO: 2914861 - RNA, 19 nt, Artificial Sequence
  Description of Artificial Sequence: Synthetic oligonucleotide
  modified_base (18)..(18): a, c, u, g, unknown or other
aucuuggugagauggcuna

SEQ ID NO: 2914862 - RNA, 19 nt, Artificial Sequence
  Description of Artificial Sequence: Synthetic oligonucleotide
uagugaagcuuuacacugu

SEQ ID NO: 2914863 - RNA, 19 nt, Artificial Sequence
  Description of Artificial Sequence: Synthetic oligonucleotide
gucucugcuucgucgagag

SEQ ID NO: 2914864 - RNA, 19 nt, Artificial Sequence
  Description of Artificial Sequence: Synthetic oligonucleotide
ugagggcuuccauaauuca

SEQ ID NO: 2914865 - RNA, 19 nt, Artificial Sequence
  Description of Artificial Sequence: Synthetic oligonucleotide
aacagauuuuggggucugg

SEQ ID NO: 2914866 - RNA, 19 nt, Artificial Sequence
  Description of Artificial Sequence: Synthetic oligonucleotide
uuuacggugcagguuuaug

SEQ ID NO: 2914867 - RNA, 19 nt, Artificial Sequence
  Description of Artificial Sequence: Synthetic oligonucleotide
uuaagugaacguuccugua

SEQ ID NO: 2914868 - RNA, 19 nt, Artificial Sequence
  Description of Artificial Sequence: Synthetic oligonucleotide
uuuggggucuggacuagaa

SEQ ID NO: 2914869 - RNA, 19 nt, Artificial Sequence
  Description of Artificial Sequence: Synthetic oligonucleotide
gacaugcaucucuuuuaag

SEQ ID NO: 2914870 - RNA, 19 nt, Artificial Sequence
  Description of Artificial Sequence: Synthetic oligonucleotide
cacugugcagacaugcauc

SEQ ID NO: 2914871 - RNA, 19 nt, Artificial Sequence
  Description of Artificial Sequence: Synthetic oligonucleotide
cacaggucaccuucagggg

SEQ ID NO: 2914872 - RNA, 19 nt, Artificial Sequence
  Description of Artificial Sequence: Synthetic oligonucleotide
acaugucguaagugggauc

SEQ ID NO: 2914873 - RNA, 19 nt, Artificial Sequence
  Description of Artificial Sequence: Synthetic oligonucleotide
cucauguaaaacaugucgu

SEQ ID NO: 2914874 - RNA, 19 nt, Artificial Sequence
  Description of Artificial Sequence: Synthetic oligonucleotide
gacgauguaaaacuuucau

SEQ ID NO: 2914875 - RNA, 19 nt, Artificial Sequence
  Description of Artificial Sequence: Synthetic oligonucleotide
ucaacaguuuacggugcag

SEQ ID NO: 2914876 - RNA, 19 nt, Artificial Sequence
  Description of Artificial Sequence: Synthetic oligonucleotide
  modified_base (2)..(2): a, c, u, g, unknown or other
unacugugguucucaucag

SEQ ID NO: 2914877 - RNA, 19 nt, Artificial Sequence
  Description of Artificial Sequence: Synthetic oligonucleotide
ucugugaauucuuccuuua

SEQ ID NO: 2914878 - RNA, 19 nt, Artificial Sequence
  Description of Artificial Sequence: Synthetic oligonucleotide
cuggacuagaacacagguc

SEQ ID NO: 2914879 - RNA, 19 nt, Artificial Sequence
  Description of Artificial Sequence: Synthetic oligonucleotide
gaacacaggucaccuucag

SEQ ID NO: 2914880 - RNA, 19 nt, Artificial Sequence
  Description of Artificial Sequence: Synthetic oligonucleotide
uaggagcuuuugaagcucu

SEQ ID NO: 2914881 - RNA, 19 nt, Artificial Sequence
  Description of Artificial Sequence: Synthetic oligonucleotide
gcacacauaacagauuuug

SEQ ID NO: 2914882 - RNA, 19 nt, Artificial Sequence
  Description of Artificial Sequence: Synthetic oligonucleotide
acggugcagguuuauguug

SEQ ID NO: 2914883 - RNA, 19 nt, Artificial Sequence
  Description of Artificial Sequence: Synthetic oligonucleotide
cugugguucucaucaggcc

SEQ ID NO: 2914884 - RNA, 19 nt, Artificial Sequence
  Description of Artificial Sequence: Synthetic oligonucleotide
uaagugggaucugugaauu

SEQ ID NO: 2914885 - RNA, 19 nt, Artificial Sequence
  Description of Artificial Sequence: Synthetic oligonucleotide
auaacagauuuuggggucu

SEQ ID NO: 2914886 - RNA, 19 nt, Artificial Sequence
  Description of Artificial Sequence: Synthetic oligonucleotide
ucaccuucaggggagaauu

SEQ ID NO: 2914887 - RNA, 19 nt, Artificial Sequence
  Description of Artificial Sequence: Synthetic oligonucleotide
gaugacaucuuggugagau

SEQ ID NO: 2914888 - RNA, 19 nt, Artificial Sequence
  Description of Artificial Sequence: Synthetic oligonucleotide
agugaacguuccuguagug

SEQ ID NO: 2914889 - RNA, 19 nt, Artificial Sequence
  Description of Artificial Sequence: Synthetic oligonucleotide
auucagagacgauguaaaa

SEQ ID NO: 2914890 - RNA, 19 nt, Artificial Sequence
  Description of Artificial Sequence: Synthetic oligonucleotide
  modified_base (2)..(2): a, c, u, g, unknown or other
unucacuguucaucaggac

SEQ ID NO: 2914891 - RNA, 19 nt, Artificial Sequence
  Description of Artificial Sequence: Synthetic oligonucleotide
uuuacacuguaggagcuuu

SEQ ID NO: 2914892 - RNA, 19 nt, Artificial Sequence
  Description of Artificial Sequence: Synthetic oligonucleotide
uuggggucuggacuagaac

SEQ ID NO: 2914893 - RNA, 19 nt, Artificial Sequence
  Description of Artificial Sequence: Synthetic oligonucleotide
ccauaauucagagacgaug

SEQ ID NO: 2914894 - RNA, 19 nt, Artificial Sequence
  Description of Artificial Sequence: Synthetic oligonucleotide
ugggaucugugaauucuuc

SEQ ID NO: 2914895 - RNA, 19 nt, Artificial Sequence
  Description of Artificial Sequence: Synthetic oligonucleotide
agugaagcuuuacacugua

SEQ ID NO: 2914896 - RNA, 19 nt, Artificial Sequence
  Description of Artificial Sequence: Synthetic oligonucleotide
  modified_base (12)..(12): a, c, u, g, unknown or other
ucaucaggccunucacugu

SEQ ID NO: 2914897 - RNA, 19 nt, Artificial Sequence
  Description of Artificial Sequence: Synthetic oligonucleotide
caggucaccuucaggggag

SEQ ID NO: 2914898 - RNA, 19 nt, Artificial Sequence
  Description of Artificial Sequence: Synthetic oligonucleotide
cacuguaggagcuuuugaa

SEQ ID NO: 2914899 - RNA, 19 nt, Artificial Sequence
  Description of Artificial Sequence: Synthetic oligonucleotide
agggcuuccauaauucaga

SEQ ID NO: 2914900 - RNA, 19 nt, Artificial Sequence
  Description of Artificial Sequence: Synthetic oligonucleotide
acacuguaggagcuuuuga

SEQ ID NO: 2914901 - RNA, 19 nt, Artificial Sequence
  Description of Artificial Sequence: Synthetic oligonucleotide
uacggugcagguuuauguu

SEQ ID NO: 2914902 - RNA, 19 nt, Artificial Sequence
  Description of Artificial Sequence: Synthetic oligonucleotide
ucaccucacugugaugugc

SEQ ID NO: 2914903 - RNA, 19 nt, Artificial Sequence
  Description of Artificial Sequence: Synthetic oligonucleotide
ugucguaagugggaucugu

SEQ ID NO: 2914904 - RNA, 19 nt, Artificial Sequence
  Description of Artificial Sequence: Synthetic oligonucleotide
  modified_base (12)..(12): a, c, u, g, unknown or other
gugagauggcunacugugg

SEQ ID NO: 2914905 - RNA, 19 nt, Artificial Sequence
  Description of Artificial Sequence: Synthetic oligonucleotide
auaauucagagacgaugua

SEQ ID NO: 2914906 - RNA, 19 nt, Artificial Sequence
  Description of Artificial Sequence: Synthetic oligonucleotide
cauacuggcucauguaaaa

SEQ ID NO: 2914907 - RNA, 19 nt, Artificial Sequence
  Description of Artificial Sequence: Synthetic oligonucleotide
gaacguuccuguagugaag

SEQ ID NO: 2914908 - RNA, 19 nt, Artificial Sequence
  Description of Artificial Sequence: Synthetic oligonucleotide
cuggcucauguaaaacaug

SEQ ID NO: 2914909 - RNA, 19 nt, Artificial Sequence
  Description of Artificial Sequence: Synthetic oligonucleotide
acaucuuggugagauggcu

SEQ ID NO: 2914910 - RNA, 19 nt, Artificial Sequence
  Description of Artificial Sequence: Synthetic oligonucleotide
uccauaauucagagacgau

SEQ ID NO: 2914911 - RNA, 19 nt, Artificial Sequence
  Description of Artificial Sequence: Synthetic oligonucleotide
cauguaaaacaugucguaa

SEQ ID NO: 2914912 - RNA, 19 nt, Artificial Sequence
  Description of Artificial Sequence: Synthetic oligonucleotide
gacaucuuggugagauggc

SEQ ID NO: 2914913 - RNA, 19 nt, Artificial Sequence
  Description of Artificial Sequence: Synthetic oligonucleotide
acuggcucauguaaaacau

SEQ ID NO: 2914914 - RNA, 19 nt, Artificial Sequence
  Description of Artificial Sequence: Synthetic oligonucleotide
gggaucugugaauucuucc

SEQ ID NO: 2914915 - RNA, 19 nt, Artificial Sequence
  Description of Artificial Sequence: Synthetic oligonucleotide
cucuucuugcacacauaac

SEQ ID NO: 2914916 - RNA, 19 nt, Artificial Sequence
  Description of Artificial Sequence: Synthetic oligonucleotide
acagauuuuggggucugga

SEQ ID NO: 2914917 - RNA, 19 nt, Artificial Sequence
  Description of Artificial Sequence: Synthetic oligonucleotide
gucuggacuagaacacagg

SEQ ID NO: 2914918 - RNA, 19 nt, Artificial Sequence
  Description of Artificial Sequence: Synthetic oligonucleotide
uuuugagggcuuccauaau

SEQ ID NO: 2914919 - RNA, 19 nt, Artificial Sequence
  Description of Artificial Sequence: Synthetic oligonucleotide
agcuuuugaagcucuucuu

SEQ ID NO: 2914920 - RNA, 19 nt, Artificial Sequence
  Description of Artificial Sequence: Synthetic oligonucleotide
uucaccucacugugaugug

SEQ ID NO: 2914921 - RNA, 19 nt, Artificial Sequence
  Description of Artificial Sequence: Synthetic oligonucleotide
augacaucuuggugagaug

SEQ ID NO: 2914922 - RNA, 19 nt, Artificial Sequence
  Description of Artificial Sequence: Synthetic oligonucleotide
  modified_base (7)..(7): a, c, u, g, unknown or other
auggcunacugugguucuc

SEQ ID NO: 2914923 - RNA, 19 nt, Artificial Sequence
  Description of Artificial Sequence: Synthetic oligonucleotide
ugcuucgucgagaggggaa

SEQ ID NO: 2914924 - RNA, 19 nt, Artificial Sequence
  Description of Artificial Sequence: Synthetic oligonucleotide
uucgucgagaggggaaggc

SEQ ID NO: 2914925 - RNA, 19 nt, Artificial Sequence
  Description of Artificial Sequence: Synthetic oligonucleotide
uucaugcaaggcagccaug

SEQ ID NO: 2914926 - RNA, 19 nt, Artificial Sequence
  Description of Artificial Sequence: Synthetic oligonucleotide
ucucugcuucgucgagagg

SEQ ID NO: 2914927 - RNA, 19 nt, Artificial Sequence
  Description of Artificial Sequence: Synthetic oligonucleotide
uaacagauuuuggggucug

SEQ ID NO: 2914928 - RNA, 19 nt, Artificial Sequence
  Description of Artificial Sequence: Synthetic oligonucleotide
gccauuguacaguccauac

SEQ ID NO: 2914929 - RNA, 19 nt, Artificial Sequence
  Description of Artificial Sequence: Synthetic oligonucleotide
  modified_base (6)..(6): a, c, u, g, unknown or other
uggcunacugugguucuca

SEQ ID NO: 2914930 - RNA, 19 nt, Artificial Sequence
  Description of Artificial Sequence: Synthetic oligonucleotide
  modified_base (10)..(10): a, c, u, g, unknown or other
aucaggccunucacuguuc

SEQ ID NO: 2914931 - RNA, 19 nt, Artificial Sequence
  Description of Artificial Sequence: Synthetic oligonucleotide
cagguuuauguuggcacug

SEQ ID NO: 2914932 - RNA, 19 nt, Artificial Sequence
  Description of Artificial Sequence: Synthetic oligonucleotide
caugucguaagugggaucu

SEQ ID NO: 2914933 - RNA, 19 nt, Artificial Sequence
  Description of Artificial Sequence: Synthetic oligonucleotide
agaggggaaggcagcauug

SEQ ID NO: 2914934 - RNA, 19 nt, Artificial Sequence
  Description of Artificial Sequence: Synthetic oligonucleotide
ugucucugcuucgucgaga

SEQ ID NO: 2914935 - RNA, 19 nt, Artificial Sequence
  Description of Artificial Sequence: Synthetic oligonucleotide
cagacaugcaucucuuuua

SEQ ID NO: 2914936 - RNA, 19 nt, Artificial Sequence
  Description of Artificial Sequence: Synthetic oligonucleotide
cuuuaccuugaugacaucu

SEQ ID NO: 2914937 - RNA, 19 nt, Artificial Sequence
  Description of Artificial Sequence: Synthetic oligonucleotide
ucgucgagaggggaaggca

SEQ ID NO: 2914938 - RNA, 19 nt, Artificial Sequence
  Description of Artificial Sequence: Synthetic oligonucleotide
gggcuuccauaauucagag

SEQ ID NO: 2914939 - RNA, 19 nt, Artificial Sequence
  Description of Artificial Sequence: Synthetic oligonucleotide
uugcagccggccacugugc

SEQ ID NO: 2914940 - RNA, 19 nt, Artificial Sequence
  Description of Artificial Sequence: Synthetic oligonucleotide
gguuuauguuggcacugug

SEQ ID NO: 2914941 - RNA, 19 nt, Artificial Sequence
  Description of Artificial Sequence: Synthetic oligonucleotide
ggucuggacuagaacacag

SEQ ID NO: 2914942 - RNA, 19 nt, Artificial Sequence
  Description of Artificial Sequence: Synthetic oligonucleotide
agagacgauguaaaacuuu

SEQ ID NO: 2914943 - RNA, 19 nt, Artificial Sequence
  Description of Artificial Sequence: Synthetic oligonucleotide
acugugucugucucugcuu

SEQ ID NO: 2914944 - RNA, 19 nt, Artificial Sequence
  Description of Artificial Sequence: Synthetic oligonucleotide
cagcauugcagccggccac

SEQ ID NO: 2914945 - RNA, 19 nt, Artificial Sequence
  Description of Artificial Sequence: Synthetic oligonucleotide
uccuguagugaagcuuuac

SEQ ID NO: 2914946 - RNA, 19 nt, Artificial Sequence
  Description of Artificial Sequence: Synthetic oligonucleotide
ggggaaggcagcauugcag

SEQ ID NO: 2914947 - RNA, 19 nt, Artificial Sequence
  Description of Artificial Sequence: Synthetic oligonucleotide
gucaacaguuuacggugca

SEQ ID NO: 2914948 - RNA, 19 nt, Artificial Sequence
  Description of Artificial Sequence: Synthetic oligonucleotide
agacgauguaaaacuuuca

SEQ ID NO: 2914949 - RNA, 19 nt, Artificial Sequence
  Description of Artificial Sequence: Synthetic oligonucleotide
gugaacguuccuguaguga

SEQ ID NO: 2914950 - RNA, 19 nt, Artificial Sequence
  Description of Artificial Sequence: Synthetic oligonucleotide
auuuuggggucuggacuag

SEQ ID NO: 2914951 - RNA, 19 nt, Artificial Sequence
  Description of Artificial Sequence: Synthetic oligonucleotide
ucgagaggggaaggcagca

SEQ ID NO: 2914952 - RNA, 19 nt, Artificial Sequence
  Description of Artificial Sequence: Synthetic oligonucleotide
ugucugucucugcuucguc

SEQ ID NO: 2914953 - RNA, 19 nt, Artificial Sequence
  Description of Artificial Sequence: Synthetic oligonucleotide
guuuauguuggcacugugu

SEQ ID NO: 2914954 - RNA, 19 nt, Artificial Sequence
  Description of Artificial Sequence: Synthetic oligonucleotide
gucguaagugggaucugug

SEQ ID NO: 2914955 - RNA, 19 nt, Artificial Sequence
  Description of Artificial Sequence: Synthetic oligonucleotide
  modified_base (6)..(6): a, c, u, g, unknown or other
ggccunucacuguucauca

SEQ ID NO: 2914956 - RNA, 19 nt, Artificial Sequence
  Description of Artificial Sequence: Synthetic oligonucleotide
gaucugugaauucuuccuu

SEQ ID NO: 2914957 - RNA, 19 nt, Artificial Sequence
  Description of Artificial Sequence: Synthetic oligonucleotide
guaagugggaucugugaau

SEQ ID NO: 2914958 - RNA, 19 nt, Artificial Sequence
  Description of Artificial Sequence: Synthetic oligonucleotide
  modified_base (8)..(8): a, c, u, g, unknown or other
gauggcunacugugguucu

SEQ ID NO: 2914959 - RNA, 19 nt, Artificial Sequence
  Description of Artificial Sequence: Synthetic oligonucleotide
guaggagcuuuugaagcuc

SEQ ID NO: 2914960 - RNA, 19 nt, Artificial Sequence
  Description of Artificial Sequence: Synthetic oligonucleotide
gugaagcuuuacacuguag

SEQ ID NO: 2914961 - RNA, 19 nt, Artificial Sequence
  Description of Artificial Sequence: Synthetic oligonucleotide
  modified_base (17)..(17): a, c, u, g, unknown or other
ucuuggugagauggcunac

SEQ ID NO: 2914962 - RNA, 19 nt, Artificial Sequence
  Description of Artificial Sequence: Synthetic oligonucleotide
ucgcuucaccucacuguga

SEQ ID NO: 2914963 - RNA, 19 nt, Artificial Sequence
  Description of Artificial Sequence: Synthetic oligonucleotide
agguuuauguuggcacugu

SEQ ID NO: 2914964 - RNA, 19 nt, Artificial Sequence
  Description of Artificial Sequence: Synthetic oligonucleotide
cuucgucgagaggggaagg

SEQ ID NO: 2914965 - RNA, 19 nt, Artificial Sequence
  Description of Artificial Sequence: Synthetic oligonucleotide
aggcagccaugcuggcccc

SEQ ID NO: 2914966 - RNA, 19 nt, Artificial Sequence
  Description of Artificial Sequence: Synthetic oligonucleotide
cuuucaugcaaggcagcca

SEQ ID NO: 2914967 - RNA, 19 nt, Artificial Sequence
  Description of Artificial Sequence: Synthetic oligonucleotide
uuuuggggucuggacuaga

SEQ ID NO: 2914968 - RNA, 19 nt, Artificial Sequence
  Description of Artificial Sequence: Synthetic oligonucleotide
  modified_base (19)..(19): a, c, u, g, unknown or other
caucuuggugagauggcun

SEQ ID NO: 2914969 - RNA, 19 nt, Artificial Sequence
  Description of Artificial Sequence: Synthetic oligonucleotide
acaguuuacggugcagguu

SEQ ID NO: 2914970 - RNA, 19 nt, Artificial Sequence
  Description of Artificial Sequence: Synthetic oligonucleotide
ccuugaugacaucuuggug

SEQ ID NO: 2914971 - RNA, 19 nt, Artificial Sequence
  Description of Artificial Sequence: Synthetic oligonucleotide
gucgagaggggaaggcagc

SEQ ID NO: 2914972 - RNA, 19 nt, Artificial Sequence
  Description of Artificial Sequence: Synthetic oligonucleotide
caguuuacggugcagguuu

SEQ ID NO: 2914973 - RNA, 19 nt, Artificial Sequence
  Description of Artificial Sequence: Synthetic oligonucleotide
ccuguagugaagcuuuaca

SEQ ID NO: 2914974 - RNA, 19 nt, Artificial Sequence
  Description of Artificial Sequence: Synthetic oligonucleotide
acguuccuguagugaagcu

SEQ ID NO: 2914975 - RNA, 19 nt, Artificial Sequence
  Description of Artificial Sequence: Synthetic oligonucleotide
ggccacugugcagacaugc

SEQ ID NO: 2914976 - RNA, 19 nt, Artificial Sequence
  Description of Artificial Sequence: Synthetic oligonucleotide
ugcagacaugcaucucuuu

SEQ ID NO: 2914977 - RNA, 19 nt, Artificial Sequence
  Description of Artificial Sequence: Synthetic oligonucleotide
guuggcacugugucugucu

SEQ ID NO: 2914978 - RNA, 19 nt, Artificial Sequence
  Description of Artificial Sequence: Synthetic oligonucleotide
  modified_base (16)..(16): a, c, u, g, unknown or other
cuuggugagauggcunacu

SEQ ID NO: 2914979 - RNA, 19 nt, Artificial Sequence
  Description of Artificial Sequence: Synthetic oligonucleotide
  modified_base (4)..(4): a, c, u, g, unknown or other
gcunacugugguucucauc

SEQ ID NO: 2914980 - RNA, 19 nt, Artificial Sequence
  Description of Artificial Sequence: Synthetic oligonucleotide
guuccuguagugaagcuuu

SEQ ID NO: 2914981 - RNA, 19 nt, Artificial Sequence
  Description of Artificial Sequence: Synthetic oligonucleotide
agcauugcagccggccacu

SEQ ID NO: 2914982 - RNA, 19 nt, Artificial Sequence
  Description of Artificial Sequence: Synthetic oligonucleotide
ggucaacaguuuacggugc

SEQ ID NO: 2914983 - RNA, 19 nt, Artificial Sequence
  Description of Artificial Sequence: Synthetic oligonucleotide
gcuucgucgagaggggaag

SEQ ID NO: 2914984 - RNA, 19 nt, Artificial Sequence
  Description of Artificial Sequence: Synthetic oligonucleotide
cuuuuaagugaacguuccu

SEQ ID NO: 2914985 - RNA, 19 nt, Artificial Sequence
  Description of Artificial Sequence: Synthetic oligonucleotide
auguuggcacugugucugu

SEQ ID NO: 2914986 - RNA, 19 nt, Artificial Sequence
  Description of Artificial Sequence: Synthetic oligonucleotide
ggugcagguuuauguuggc

SEQ ID NO: 2914987 - RNA, 19 nt, Artificial Sequence
  Description of Artificial Sequence: Synthetic oligonucleotide
  modified_base (10)..(10): a, c, u, g, unknown or other
gagauggcunacugugguu

SEQ ID NO: 2914988 - RNA, 19 nt, Artificial Sequence
  Description of Artificial Sequence: Synthetic oligonucleotide
guccauacuggcucaugua

SEQ ID NO: 2914989 - RNA, 19 nt, Artificial Sequence
  Description of Artificial Sequence: Synthetic oligonucleotide
gaagcucuucuugcacaca

SEQ ID NO: 2914990 - RNA, 19 nt, Artificial Sequence
  Description of Artificial Sequence: Synthetic oligonucleotide
ggggucuggacuagaacac

SEQ ID NO: 2914991 - RNA, 19 nt, Artificial Sequence
  Description of Artificial Sequence: Synthetic oligonucleotide
ggcagcauugcagccggcc

SEQ ID NO: 2914992 - RNA, 19 nt, Artificial Sequence
  Description of Artificial Sequence: Synthetic oligonucleotide
ugaugacaucuuggugaga

SEQ ID NO: 2914993 - RNA, 19 nt, Artificial Sequence
  Description of Artificial Sequence: Synthetic oligonucleotide
uguuggcacugugucuguc

SEQ ID NO: 2914994 - RNA, 19 nt, Artificial Sequence
  Description of Artificial Sequence: Synthetic oligonucleotide
  modified_base (5)..(5): a, c, u, g, unknown or other
gccunucacuguucaucag

SEQ ID NO: 2914995 - RNA, 19 nt, Artificial Sequence
  Description of Artificial Sequence: Synthetic oligonucleotide
cgucgagaggggaaggcag

SEQ ID NO: 2914996 - RNA, 19 nt, Artificial Sequence
  Description of Artificial Sequence: Synthetic oligonucleotide
agccggccacugugcagac

SEQ ID NO: 2914997 - RNA, 19 nt, Artificial Sequence
  Description of Artificial Sequence: Synthetic oligonucleotide
cccgccauuguacagucca

SEQ ID NO: 2914998 - RNA, 19 nt, Artificial Sequence
  Description of Artificial Sequence: Synthetic oligonucleotide
gugcagguuuauguuggca

SEQ ID NO: 2914999 - RNA, 19 nt, Artificial Sequence
  Description of Artificial Sequence: Synthetic oligonucleotide
cacugugucugucucugcu

SEQ ID NO: 2915000 - RNA, 19 nt, Artificial Sequence
  Description of Artificial Sequence: Synthetic oligonucleotide
gcagcauugcagccggcca

SEQ ID NO: 2915001 - RNA, 19 nt, Artificial Sequence
  Description of Artificial Sequence: Synthetic oligonucleotide
  modified_base (19)..(19): a, c, u, g, unknown or other
gugguucucaucaggccun

SEQ ID NO: 2915002 - RNA, 19 nt, Artificial Sequence
  Description of Artificial Sequence: Synthetic oligonucleotide
augucguaagugggaucug

SEQ ID NO: 2915003 - RNA, 19 nt, Artificial Sequence
  Description of Artificial Sequence: Synthetic oligonucleotide
cuugcacacauaacagauu

SEQ ID NO: 2915004 - RNA, 19 nt, Artificial Sequence
  Description of Artificial Sequence: Synthetic oligonucleotide
gcagguuuauguuggcacu

SEQ ID NO: 2915005 - RNA, 19 nt, Artificial Sequence
  Description of Artificial Sequence: Synthetic oligonucleotide
ggcuuccauaauucagaga

SEQ ID NO: 2915006 - RNA, 19 nt, Artificial Sequence
  Description of Artificial Sequence: Synthetic oligonucleotide
caguccauacuggcucaug

SEQ ID NO: 2915007 - RNA, 19 nt, Artificial Sequence
  Description of Artificial Sequence: Synthetic oligonucleotide
  modified_base (18)..(18): a, c, u, g, unknown or other
ugguucucaucaggccunu

SEQ ID NO: 2915008 - RNA, 19 nt, Artificial Sequence
  Description of Artificial Sequence: Synthetic oligonucleotide
acuguucaucaggacuuuu

SEQ ID NO: 2915009 - RNA, 19 nt, Artificial Sequence
  Description of Artificial Sequence: Synthetic oligonucleotide
caccucacugugaugugcu

SEQ ID NO: 2915010 - RNA, 19 nt, Artificial Sequence
  Description of Artificial Sequence: Synthetic oligonucleotide
cagccggccacugugcaga

SEQ ID NO: 2915011 - RNA, 19 nt, Artificial Sequence
  Description of Artificial Sequence: Synthetic oligonucleotide
ggcucauguaaaacauguc

SEQ ID NO: 2915012 - RNA, 19 nt, Artificial Sequence
  Description of Artificial Sequence: Synthetic oligonucleotide
cguaagugggaucugugaa

SEQ ID NO: 2915013 - RNA, 19 nt, Artificial Sequence
  Description of Artificial Sequence: Synthetic oligonucleotide
gcagacaugcaucucuuuu

SEQ ID NO: 2915014 - RNA, 19 nt, Artificial Sequence
  Description of Artificial Sequence: Synthetic oligonucleotide
ggacuagaacacaggucac

SEQ ID NO: 2915015 - RNA, 19 nt, Artificial Sequence
  Description of Artificial Sequence: Synthetic oligonucleotide
ccauacuggcucauguaaa

SEQ ID NO: 2915016 - RNA, 19 nt, Artificial Sequence
  Description of Artificial Sequence: Synthetic oligonucleotide
cagagacgauguaaaacuu

SEQ ID NO: 2915017 - RNA, 19 nt, Artificial Sequence
  Description of Artificial Sequence: Synthetic oligonucleotide
gcuucaccucacugugaug

SEQ ID NO: 2915018 - RNA, 19 nt, Artificial Sequence
  Description of Artificial Sequence: Synthetic oligonucleotide
gcagccggccacugugcag

SEQ ID NO: 2915019 - RNA, 19 nt, Artificial Sequence
  Description of Artificial Sequence: Synthetic oligonucleotide
cugugcagacaugcaucuc

SEQ ID NO: 2915020 - RNA, 19 nt, Artificial Sequence
  Description of Artificial Sequence: Synthetic oligonucleotide
acaguccauacuggcucau

SEQ ID NO: 2915021 - RNA, 19 nt, Artificial Sequence
  Description of Artificial Sequence: Synthetic oligonucleotide
  modified_base (11)..(11): a, c, u, g, unknown or other
caucaggccunucacuguu

SEQ ID NO: 2915022 - RNA, 19 nt, Artificial Sequence
  Description of Artificial Sequence: Synthetic oligonucleotide
aguuuacggugcagguuua

SEQ ID NO: 2915023 - RNA, 19 nt, Artificial Sequence
  Description of Artificial Sequence: Synthetic oligonucleotide
caugcaaggcagccaugcu

SEQ ID NO: 2915024 - RNA, 19 nt, Artificial Sequence
  Description of Artificial Sequence: Synthetic oligonucleotide
gcaaggcagccaugcuggc

SEQ ID NO: 2915025 - RNA, 19 nt, Artificial Sequence
  Description of Artificial Sequence: Synthetic oligonucleotide
gggucuggacuagaacaca

SEQ ID NO: 2915026 - RNA, 19 nt, Artificial Sequence
  Description of Artificial Sequence: Synthetic oligonucleotide
agcucuucuugcacacaua

SEQ ID NO: 2915027 - RNA, 19 nt, Artificial Sequence
  Description of Artificial Sequence: Synthetic oligonucleotide
gcaucucuuuuaagugaac

SEQ ID NO: 2915028 - RNA, 19 nt, Artificial Sequence
  Description of Artificial Sequence: Synthetic oligonucleotide
cuagaacacaggucaccuu

SEQ ID NO: 2915029 - RNA, 19 nt, Artificial Sequence
  Description of Artificial Sequence: Synthetic oligonucleotide
gugucugucucugcuucgu

SEQ ID NO: 2915030 - RNA, 19 nt, Artificial Sequence
  Description of Artificial Sequence: Synthetic oligonucleotide
aggcagcauugcagccggc

SEQ ID NO: 2915031 - RNA, 19 nt, Artificial Sequence
  Description of Artificial Sequence: Synthetic oligonucleotide
aggucaccuucaggggaga

SEQ ID NO: 2915032 - RNA, 19 nt, Artificial Sequence
  Description of Artificial Sequence: Synthetic oligonucleotide
ccucacugugaugugcuca

SEQ ID NO: 2915033 - RNA, 19 nt, Artificial Sequence
  Description of Artificial Sequence: Synthetic oligonucleotide
ccauuguacaguccauacu

SEQ ID NO: 2915034 - RNA, 19 nt, Artificial Sequence
  Description of Artificial Sequence: Synthetic oligonucleotide
cuuuacacuguaggagcuu

SEQ ID NO: 2915035 - RNA, 19 nt, Artificial Sequence
  Description of Artificial Sequence: Synthetic oligonucleotide
cugcuucgucgagagggga

SEQ ID NO: 2915036 - RNA, 19 nt, Artificial Sequence
  Description of Artificial Sequence: Synthetic oligonucleotide
gccacugugcagacaugca

SEQ ID NO: 2915037 - RNA, 19 nt, Artificial Sequence
  Description of Artificial Sequence: Synthetic oligonucleotide
gugggaucugugaauucuu

SEQ ID NO: 2915038 - RNA, 19 nt, Artificial Sequence
  Description of Artificial Sequence: Synthetic oligonucleotide
cauugcagccggccacugu

SEQ ID NO: 2915039 - RNA, 19 nt, Artificial Sequence
  Description of Artificial Sequence: Synthetic oligonucleotide
guuuacggugcagguuuau

SEQ ID NO: 2915040 - RNA, 19 nt, Artificial Sequence
  Description of Artificial Sequence: Synthetic oligonucleotide
ccuuuaccuugaugacauc

SEQ ID NO: 2915041 - RNA, 19 nt, Artificial Sequence
  Description of Artificial Sequence: Synthetic oligonucleotide
gugcagacaugcaucucuu

SEQ ID NO: 2915042 - RNA, 19 nt, Artificial Sequence
  Description of Artificial Sequence: Synthetic oligonucleotide
  modified_base (5)..(5): a, c, u, g, unknown or other
ggcunacugugguucucau

SEQ ID NO: 2915043 - RNA, 19 nt, Artificial Sequence
  Description of Artificial Sequence: Synthetic oligonucleotide
ccacugugcagacaugcau

SEQ ID NO: 2915044 - RNA, 19 nt, Artificial Sequence
  Description of Artificial Sequence: Synthetic oligonucleotide
gcauugcagccggccacug

SEQ ID NO: 2915045 - RNA, 19 nt, Artificial Sequence
  Description of Artificial Sequence: Synthetic oligonucleotide
ccggccacugugcagacau

SEQ ID NO: 2915046 - RNA, 19 nt, Artificial Sequence
  Description of Artificial Sequence: Synthetic oligonucleotide
  modified_base (8)..(8): a, c, u, g, unknown or other
caggccunucacuguucau

SEQ ID NO: 2915047 - RNA, 19 nt, Artificial Sequence
  Description of Artificial Sequence: Synthetic oligonucleotide
caccuucaggggagaauuu

SEQ ID NO: 2915048 - RNA, 19 nt, Artificial Sequence
  Description of Artificial Sequence: Synthetic oligonucleotide
  modified_base (17)..(17): a, c, u, g, unknown or other
gguucucaucaggccunuc

SEQ ID NO: 2915049 - RNA, 19 nt, Artificial Sequence
  Description of Artificial Sequence: Synthetic oligonucleotide
ccccgccauuguacagucc

SEQ ID NO: 2915050 - RNA, 19 nt, Artificial Sequence
  Description of Artificial Sequence: Synthetic oligonucleotide
cacuguucaucaggacuuu

SEQ ID NO: 2915051 - RNA, 19 nt, Artificial Sequence
  Description of Artificial Sequence: Synthetic oligonucleotide
cgcuucaccucacugugau

SEQ ID NO: 2915052 - RNA, 19 nt, Artificial Sequence
  Description of Artificial Sequence: Synthetic oligonucleotide
cgccauuguacaguccaua

SEQ ID NO: 2915053 - RNA, 19 nt, Artificial Sequence
  Description of Artificial Sequence: Synthetic oligonucleotide
cguuccuguagugaagcuu

SEQ ID NO: 2915054 - RNA, 19 nt, Artificial Sequence
  Description of Artificial Sequence: Synthetic oligonucleotide
cggccacugugcagacaug

SEQ ID NO: 2915055 - RNA, 19 nt, Artificial Sequence
  Description of Artificial Sequence: Synthetic oligonucleotide
ccgccauuguacaguccau

SEQ ID NO: 2915056 - RNA, 19 nt, Artificial Sequence
  Description of Artificial Sequence: Synthetic oligonucleotide
gccggccacugugcagaca

SEQ ID NO: 2915057 - RNA, 19 nt, Artificial Sequence
  Description of Artificial Sequence: Synthetic oligonucleotide
cgagaggggaaggcagcau

SEQ ID NO: 2915058 - RNA, 19 nt, Artificial Sequence
  Description of Artificial Sequence: Synthetic oligonucleotide
  modified_base (1)..(1): a, c, u, g, unknown or other
nacugugguucucaucagg

SEQ ID NO: 2915059 - RNA, 19 nt, Artificial Sequence
  Description of Artificial Sequence: Synthetic oligonucleotide
  modified_base (1)..(1): a, c, u, g, unknown or other
nucacuguucaucaggacu

SEQ ID NO: 2915060 - RNA, 19 nt, Artificial Sequence
  Description of Artificial Sequence: Synthetic oligonucleotide
auagaaacauacuagaugc

SEQ ID NO: 2915061 - RNA, 19 nt, Artificial Sequence
  Description of Artificial Sequence: Synthetic oligonucleotide
uuuacuuucaacuuugucc

SEQ ID NO: 2915062 - RNA, 19 nt, Artificial Sequence
  Description of Artificial Sequence: Synthetic oligonucleotide
aauacuugagcaccaaaac

SEQ ID NO: 2915063 - RNA, 19 nt, Artificial Sequence
  Description of Artificial Sequence: Synthetic oligonucleotide
uuagcagauacuuucauag

SEQ ID NO: 2915064 - RNA, 19 nt, Artificial Sequence
  Description of Artificial Sequence: Synthetic oligonucleotide
uuugugaucuguuagagga

SEQ ID NO: 2915065 - RNA, 19 nt, Artificial Sequence
  Description of Artificial Sequence: Synthetic oligonucleotide
uguuuuaucacaucacagg

SEQ ID NO: 2915066 - RNA, 19 nt, Artificial Sequence
  Description of Artificial Sequence: Synthetic oligonucleotide
gauagaaacauacuagaug

SEQ ID NO: 2915067 - RNA, 19 nt, Artificial Sequence
  Description of Artificial Sequence: Synthetic oligonucleotide
auuuacuugguaucaaugg

SEQ ID NO: 2915068 - RNA, 19 nt, Artificial Sequence
  Description of Artificial Sequence: Synthetic oligonucleotide
aaaagggaauacuugagca

SEQ ID NO: 2915069 - RNA, 19 nt, Artificial Sequence
  Description of Artificial Sequence: Synthetic oligonucleotide
ucaaauucaccucuaacug

SEQ ID NO: 2915070 - RNA, 19 nt, Artificial Sequence
  Description of Artificial Sequence: Synthetic oligonucleotide
aaauucaccucuaacugcc

SEQ ID NO: 2915071 - RNA, 19 nt, Artificial Sequence
  Description of Artificial Sequence: Synthetic oligonucleotide
aaaaguuucaagcugcaaa

SEQ ID NO: 2915072 - RNA, 19 nt, Artificial Sequence
  Description of Artificial Sequence: Synthetic oligonucleotide
aaagggaauacuugagcac

SEQ ID NO: 2915073 - RNA, 19 nt, Artificial Sequence
  Description of Artificial Sequence: Synthetic oligonucleotide
acugccugagcucacaugc

SEQ ID NO: 2915074 - RNA, 19 nt, Artificial Sequence
  Description of Artificial Sequence: Synthetic oligonucleotide
agaggauucagcuuaguuc

SEQ ID NO: 2915075 - RNA, 19 nt, Artificial Sequence
  Description of Artificial Sequence: Synthetic oligonucleotide
uacuugagcaccaaaacug

SEQ ID NO: 2915076 - RNA, 19 nt, Artificial Sequence
  Description of Artificial Sequence: Synthetic oligonucleotide
uuuaucacaucacaggccu

SEQ ID NO: 2915077 - RNA, 19 nt, Artificial Sequence
  Description of Artificial Sequence: Synthetic oligonucleotide
aagggaauacuugagcacc

SEQ ID NO: 2915078 - RNA, 19 nt, Artificial Sequence
  Description of Artificial Sequence: Synthetic oligonucleotide
uuacuuucaacuuugucca

SEQ ID NO: 2915079 - RNA, 19 nt, Artificial Sequence
  Description of Artificial Sequence: Synthetic oligonucleotide
ugcuguugcagcauaaagg

SEQ ID NO: 2915080 - RNA, 19 nt, Artificial Sequence
  Description of Artificial Sequence: Synthetic oligonucleotide
uuauuuacuuucaacuuug

SEQ ID NO: 2915081 - RNA, 19 nt, Artificial Sequence
  Description of Artificial Sequence: Synthetic oligonucleotide
aaacuguuuuaucacauca

SEQ ID NO: 2915082 - RNA, 19 nt, Artificial Sequence
  Description of Artificial Sequence: Synthetic oligonucleotide
uauagaacaaggcuagugu

SEQ ID NO: 2915083 - RNA, 19 nt, Artificial Sequence
  Description of Artificial Sequence: Synthetic oligonucleotide
aaggaaaaggucuacccug

SEQ ID NO: 2915084 - RNA, 19 nt, Artificial Sequence
  Description of Artificial Sequence: Synthetic oligonucleotide
ugcagcauaaaggaaaagg

SEQ ID NO: 2915085 - RNA, 19 nt, Artificial Sequence
  Description of Artificial Sequence: Synthetic oligonucleotide
aaaacuguuuuaucacauc

SEQ ID NO: 2915086 - RNA, 19 nt, Artificial Sequence
  Description of Artificial Sequence: Synthetic oligonucleotide
uacucuauagaacaaggcu

SEQ ID NO: 2915087 - RNA, 19 nt, Artificial Sequence
  Description of Artificial Sequence: Synthetic oligonucleotide
uaaaggaaaaggucuaccc

SEQ ID NO: 2915088 - RNA, 19 nt, Artificial Sequence
  Description of Artificial Sequence: Synthetic oligonucleotide
ucuagaaagugcuuacuag

SEQ ID NO: 2915089 - RNA, 19 nt, Artificial Sequence
  Description of Artificial Sequence: Synthetic oligonucleotide
ucuguuagaggauucagcu

SEQ ID NO: 2915090 - RNA, 19 nt, Artificial Sequence
  Description of Artificial Sequence: Synthetic oligonucleotide
uuuucauguuagcagauac

SEQ ID NO: 2915091 - RNA, 19 nt, Artificial Sequence
  Description of Artificial Sequence: Synthetic oligonucleotide
aacuuuguccauuuacuug

SEQ ID NO: 2915092 - RNA, 19 nt, Artificial Sequence
  Description of Artificial Sequence: Synthetic oligonucleotide
accaaaacuguuuuaucac

SEQ ID NO: 2915093 - RNA, 19 nt, Artificial Sequence
  Description of Artificial Sequence: Synthetic oligonucleotide
aaaaggucuacccuggaaa

SEQ ID NO: 2915094 - RNA, 19 nt, Artificial Sequence
  Description of Artificial Sequence: Synthetic oligonucleotide
cauacucuauagaacaagg

SEQ ID NO: 2915095 - RNA, 19 nt, Artificial Sequence
  Description of Artificial Sequence: Synthetic oligonucleotide
uggaaaaguuucaagcugc

SEQ ID NO: 2915096 - RNA, 19 nt, Artificial Sequence
  Description of Artificial Sequence: Synthetic oligonucleotide
guuuuaucacaucacaggc

SEQ ID NO: 2915097 - RNA, 19 nt, Artificial Sequence
  Description of Artificial Sequence: Synthetic oligonucleotide
uguuagaggauucagcuua

SEQ ID NO: 2915098 - RNA, 19 nt, Artificial Sequence
  Description of Artificial Sequence: Synthetic oligonucleotide
aaaggaaaaggucuacccu

SEQ ID NO: 2915099 - RNA, 19 nt, Artificial Sequence
  Description of Artificial Sequence: Synthetic oligonucleotide
uguugcagcauaaaggaaa

SEQ ID NO: 2915100 - RNA, 19 nt, Artificial Sequence
  Description of Artificial Sequence: Synthetic oligonucleotide
ucaacuuuguccauuuacu

SEQ ID NO: 2915101 - RNA, 19 nt, Artificial Sequence
  Description of Artificial Sequence: Synthetic oligonucleotide
gaaacauacuagaugcugg

SEQ ID NO: 2915102 - RNA, 19 nt, Artificial Sequence
  Description of Artificial Sequence: Synthetic oligonucleotide
uuuuaucacaucacaggcc

SEQ ID NO: 2915103 - RNA, 19 nt, Artificial Sequence
  Description of Artificial Sequence: Synthetic oligonucleotide
uuacuugguaucaauggca

SEQ ID NO: 2915104 - RNA, 19 nt, Artificial Sequence
  Description of Artificial Sequence: Synthetic oligonucleotide
uuucauagaagugugugug

SEQ ID NO: 2915105 - RNA, 19 nt, Artificial Sequence
  Description of Artificial Sequence: Synthetic oligonucleotide
aaggcuaguguguuguaag

SEQ ID NO: 2915106 - RNA, 19 nt, Artificial Sequence
  Description of Artificial Sequence: Synthetic oligonucleotide
uugguuugugaucuguuag

SEQ ID NO: 2915107 - RNA, 19 nt, Artificial Sequence
  Description of Artificial Sequence: Synthetic oligonucleotide
uugcuuuucauguuagcag

SEQ ID NO: 2915108 - RNA, 19 nt, Artificial Sequence
  Description of Artificial Sequence: Synthetic oligonucleotide
auaaaggaaaaggucuacc

SEQ ID NO: 2915109 - RNA, 19 nt, Artificial Sequence
  Description of Artificial Sequence: Synthetic oligonucleotide
aagugcuuacuagauuugc

SEQ ID NO: 2915110 - RNA, 19 nt, Artificial Sequence
  Description of Artificial Sequence: Synthetic oligonucleotide
uuugcuuuucauguuagca

SEQ ID NO: 2915111 - RNA, 19 nt, Artificial Sequence
  Description of Artificial Sequence: Synthetic oligonucleotide
uauggcucaggguugagug

SEQ ID NO: 2915112 - RNA, 19 nt, Artificial Sequence
  Description of Artificial Sequence: Synthetic oligonucleotide
acagauagaaacauacuag

SEQ ID NO: 2915113 - RNA, 19 nt, Artificial Sequence
  Description of Artificial Sequence: Synthetic oligonucleotide
cucuauagaacaaggcuag

SEQ ID NO: 2915114 - RNA, 19 nt, Artificial Sequence
  Description of Artificial Sequence: Synthetic oligonucleotide
ugcagcauacucuauagaa

SEQ ID NO: 2915115 - RNA, 19 nt, Artificial Sequence
  Description of Artificial Sequence: Synthetic oligonucleotide
gcugcaaaccucuagaaag

SEQ ID NO: 2915116 - RNA, 19 nt, Artificial Sequence
  Description of Artificial Sequence: Synthetic oligonucleotide
aaacauacuagaugcuggu

SEQ ID NO: 2915117 - RNA, 19 nt, Artificial Sequence
  Description of Artificial Sequence: Synthetic oligonucleotide
auuuacuuucaacuuuguc

SEQ ID NO: 2915118 - RNA, 19 nt, Artificial Sequence
  Description of Artificial Sequence: Synthetic oligonucleotide
aaguuucaagcugcaaacc

SEQ ID NO: 2915119 - RNA, 19 nt, Artificial Sequence
  Description of Artificial Sequence: Synthetic oligonucleotide
uucagcuuaguucucaaau

SEQ ID NO: 2915120 - RNA, 19 nt, Artificial Sequence
  Description of Artificial Sequence: Synthetic oligonucleotide
gacagaguauggcucaggg

SEQ ID NO: 2915121 - RNA, 19 nt, Artificial Sequence
  Description of Artificial Sequence: Synthetic oligonucleotide
acuguuuuaucacaucaca

SEQ ID NO: 2915122 - RNA, 19 nt, Artificial Sequence
  Description of Artificial Sequence: Synthetic oligonucleotide
auagaacaaggcuagugug

SEQ ID NO: 2915123 - RNA, 19 nt, Artificial Sequence
  Description of Artificial Sequence: Synthetic oligonucleotide
gauacuuucauagaagugu

SEQ ID NO: 2915124 - RNA, 19 nt, Artificial Sequence
  Description of Artificial Sequence: Synthetic oligonucleotide
uguaagggugcagagauac

SEQ ID NO: 2915125 - RNA, 19 nt, Artificial Sequence
  Description of Artificial Sequence: Synthetic oligonucleotide
acauacuagaugcugguga

SEQ ID NO: 2915126 - RNA, 19 nt, Artificial Sequence
  Description of Artificial Sequence: Synthetic oligonucleotide
agcauaaaggaaaaggucu

SEQ ID NO: 2915127 - RNA, 19 nt, Artificial Sequence
  Description of Artificial Sequence: Synthetic oligonucleotide
uuucaagcugcaaaccucu

SEQ ID NO: 2915128 - RNA, 19 nt, Artificial Sequence
  Description of Artificial Sequence: Synthetic oligonucleotide
ugcuuacuagauuugcugc

SEQ ID NO: 2915129 - RNA, 19 nt, Artificial Sequence
  Description of Artificial Sequence: Synthetic oligonucleotide
ugcuuuucauguuagcaga

SEQ ID NO: 2915130 - RNA, 19 nt, Artificial Sequence
  Description of Artificial Sequence: Synthetic oligonucleotide
caaauucaccucuaacugc

SEQ ID NO: 2915131 - RNA, 19 nt, Artificial Sequence
  Description of Artificial Sequence: Synthetic oligonucleotide
auacuugagcaccaaaacu

SEQ ID NO: 2915132 - RNA, 19 nt, Artificial Sequence
  Description of Artificial Sequence: Synthetic oligonucleotide
acaggccuuauuuacuuuc

SEQ ID NO: 2915133 - RNA, 19 nt, Artificial Sequence
  Description of Artificial Sequence: Synthetic oligonucleotide
ucuacccuggaaaaguuuc

SEQ ID NO: 2915134 - RNA, 19 nt, Artificial Sequence
  Description of Artificial Sequence: Synthetic oligonucleotide
ucaagcugcaaaccucuag

SEQ ID NO: 2915135 - RNA, 19 nt, Artificial Sequence
  Description of Artificial Sequence: Synthetic oligonucleotide
cuguuuuaucacaucacag

SEQ ID NO: 2915136 - RNA, 19 nt, Artificial Sequence
  Description of Artificial Sequence: Synthetic oligonucleotide
aguuucaagcugcaaaccu

SEQ ID NO: 2915137 - RNA, 19 nt, Artificial Sequence
  Description of Artificial Sequence: Synthetic oligonucleotide
auacucuauagaacaaggc

SEQ ID NO: 2915138 - RNA, 19 nt, Artificial Sequence
  Description of Artificial Sequence: Synthetic oligonucleotide
cauuuacuugguaucaaug

SEQ ID NO: 2915139 - RNA, 19 nt, Artificial Sequence
  Description of Artificial Sequence: Synthetic oligonucleotide
ucucaaauucaccucuaac

SEQ ID NO: 2915140 - RNA, 19 nt, Artificial Sequence
  Description of Artificial Sequence: Synthetic oligonucleotide
agaaacauacuagaugcug

SEQ ID NO: 2915141 - RNA, 19 nt, Artificial Sequence
  Description of Artificial Sequence: Synthetic oligonucleotide
uagaacaaggcuagugugu

SEQ ID NO: 2915142 - RNA, 19 nt, Artificial Sequence
  Description of Artificial Sequence: Synthetic oligonucleotide
ggugcagagauacacuacg

SEQ ID NO: 2915143 - RNA, 19 nt, Artificial Sequence
  Description of Artificial Sequence: Synthetic oligonucleotide
cauacuagaugcuggugag

SEQ ID NO: 2915144 - RNA, 19 nt, Artificial Sequence
  Description of Artificial Sequence: Synthetic oligonucleotide
uuucauguuagcagauacu

SEQ ID NO: 2915145 - RNA, 19 nt, Artificial Sequence
  Description of Artificial Sequence: Synthetic oligonucleotide
gaggauucagcuuaguucu

SEQ ID NO: 2915146 - RNA, 19 nt, Artificial Sequence
  Description of Artificial Sequence: Synthetic oligonucleotide
aaaggucuacccuggaaaa

SEQ ID NO: 2915147 - RNA, 19 nt, Artificial Sequence
  Description of Artificial Sequence: Synthetic oligonucleotide
agcagauacuuucauagaa

SEQ ID NO: 2915148 - RNA, 19 nt, Artificial Sequence
  Description of Artificial Sequence: Synthetic oligonucleotide
uacuugguaucaauggcac

SEQ ID NO: 2915149 - RNA, 19 nt, Artificial Sequence
  Description of Artificial Sequence: Synthetic oligonucleotide
aacaaggcuaguguguugu

SEQ ID NO: 2915150 - RNA, 19 nt, Artificial Sequence
  Description of Artificial Sequence: Synthetic oligonucleotide
accucuagaaagugcuuac

SEQ ID NO: 2915151 - RNA, 19 nt, Artificial Sequence
  Description of Artificial Sequence: Synthetic oligonucleotide
uuguccauuuacuugguau

SEQ ID NO: 2915152 - RNA, 19 nt, Artificial Sequence
  Description of Artificial Sequence: Synthetic oligonucleotide
uagaaagugcuuacuagau

SEQ ID NO: 2915153 - RNA, 19 nt, Artificial Sequence
  Description of Artificial Sequence: Synthetic oligonucleotide
uguguuguaagggugcaga

SEQ ID NO: 2915154 - RNA, 19 nt, Artificial Sequence
  Description of Artificial Sequence: Synthetic oligonucleotide
uaguguguuguaagggugc

SEQ ID NO: 2915155 - RNA, 19 nt, Artificial Sequence
  Description of Artificial Sequence: Synthetic oligonucleotide
aucuguuagaggauucagc

SEQ ID NO: 2915156 - RNA, 19 nt, Artificial Sequence
  Description of Artificial Sequence: Synthetic oligonucleotide
ucacaugcugcugucagag

SEQ ID NO: 2915157 - RNA, 19 nt, Artificial Sequence
  Description of Artificial Sequence: Synthetic oligonucleotide
cuagauuugcugcaguguc

SEQ ID NO: 2915158 - RNA, 19 nt, Artificial Sequence
  Description of Artificial Sequence: Synthetic oligonucleotide
cuagaaagugcuuacuaga

SEQ ID NO: 2915159 - RNA, 19 nt, Artificial Sequence
  Description of Artificial Sequence: Synthetic oligonucleotide
uguccauuuacuugguauc

SEQ ID NO: 2915160 - RNA, 19 nt, Artificial Sequence
  Description of Artificial Sequence: Synthetic oligonucleotide
uacuagauuugcugcagug

SEQ ID NO: 2915161 - RNA, 19 nt, Artificial Sequence
  Description of Artificial Sequence: Synthetic oligonucleotide
guuugugaucuguuagagg

SEQ ID NO: 2915162 - RNA, 19 nt, Artificial Sequence
  Description of Artificial Sequence: Synthetic oligonucleotide
ugguaucaauggcacaaag

SEQ ID NO: 2915163 - RNA, 19 nt, Artificial Sequence
  Description of Artificial Sequence: Synthetic oligonucleotide
cuggaaaaguuucaagcug

SEQ ID NO: 2915164 - RNA, 19 nt, Artificial Sequence
  Description of Artificial Sequence: Synthetic oligonucleotide
ugagcucacaugcugcugu

SEQ ID NO: 2915165 - RNA, 19 nt, Artificial Sequence
  Description of Artificial Sequence: Synthetic oligonucleotide
uaagggugcagagauacac

SEQ ID NO: 2915166 - RNA, 19 nt, Artificial Sequence
  Description of Artificial Sequence: Synthetic oligonucleotide
gaaagugcuuacuagauuu

SEQ ID NO: 2915167 - RNA, 19 nt, Artificial Sequence
  Description of Artificial Sequence: Synthetic oligonucleotide
acaugcugcugucagaggu

SEQ ID NO: 2915168 - RNA, 19 nt, Artificial Sequence
  Description of Artificial Sequence: Synthetic oligonucleotide
cagauagaaacauacuaga

SEQ ID NO: 2915169 - RNA, 19 nt, Artificial Sequence
  Description of Artificial Sequence: Synthetic oligonucleotide
ugaggacagaguauggcuc

SEQ ID NO: 2915170 - RNA, 19 nt, Artificial Sequence
  Description of Artificial Sequence: Synthetic oligonucleotide
ucauagaagugugugugug

SEQ ID NO: 2915171 - RNA, 19 nt, Artificial Sequence
  Description of Artificial Sequence: Synthetic oligonucleotide
uucauguuagcagauacuu

SEQ ID NO: 2915172 - RNA, 19 nt, Artificial Sequence
  Description of Artificial Sequence: Synthetic oligonucleotide
ugucagagguccuuccugc

SEQ ID NO: 2915173 - RNA, 19 nt, Artificial Sequence
  Description of Artificial Sequence: Synthetic oligonucleotide
caucacaggccuuauuuac

SEQ ID NO: 2915174 - RNA, 19 nt, Artificial Sequence
  Description of Artificial Sequence: Synthetic oligonucleotide
uacuagaugcuggugagga

SEQ ID NO: 2915175 - RNA, 19 nt, Artificial Sequence
  Description of Artificial Sequence: Synthetic oligonucleotide
ugugugugugugugggugg

SEQ ID NO: 2915176 - RNA, 19 nt, Artificial Sequence
  Description of Artificial Sequence: Synthetic oligonucleotide
cuaguguguuguaagggug

SEQ ID NO: 2915177 - RNA, 19 nt, Artificial Sequence
  Description of Artificial Sequence: Synthetic oligonucleotide
gugcuuacuagauuugcug

SEQ ID NO: 2915178 - RNA, 19 nt, Artificial Sequence
  Description of Artificial Sequence: Synthetic oligonucleotide
uaucaauggcacaaaguuu

SEQ ID NO: 2915179 - RNA, 19 nt, Artificial Sequence
  Description of Artificial Sequence: Synthetic oligonucleotide
cagcauaaaggaaaagguc

SEQ ID NO: 2915180 - RNA, 19 nt, Artificial Sequence
  Description of Artificial Sequence: Synthetic oligonucleotide
caccaaaacuguuuuauca

SEQ ID NO: 2915181 - RNA, 19 nt, Artificial Sequence
  Description of Artificial Sequence: Synthetic oligonucleotide
cagcauacucuauagaaca

SEQ ID NO: 2915182 - RNA, 19 nt, Artificial Sequence
  Description of Artificial Sequence: Synthetic oligonucleotide
cagagauacacuacgaaaa

SEQ ID NO: 2915183 - RNA, 19 nt, Artificial Sequence
  Description of Artificial Sequence: Synthetic oligonucleotide
ugcagugucuguugguuug

SEQ ID NO: 2915184 - RNA, 19 nt, Artificial Sequence
  Description of Artificial Sequence: Synthetic oligonucleotide
ugguuugugaucuguuaga

SEQ ID NO: 2915185 - RNA, 19 nt, Artificial Sequence
  Description of Artificial Sequence: Synthetic oligonucleotide
gaauacuugagcaccaaaa

SEQ ID NO: 2915186 - RNA, 19 nt, Artificial Sequence
  Description of Artificial Sequence: Synthetic oligonucleotide
cuauagaacaaggcuagug

SEQ ID NO: 2915187 - RNA, 19 nt, Artificial Sequence
  Description of Artificial Sequence: Synthetic oligonucleotide
ugcagagauacacuacgaa

SEQ ID NO: 2915188 - RNA, 19 nt, Artificial Sequence
  Description of Artificial Sequence: Synthetic oligonucleotide
auagaagugugugugugug

SEQ ID NO: 2915189 - RNA, 19 nt, Artificial Sequence
  Description of Artificial Sequence: Synthetic oligonucleotide
uuuugcuuuucauguuagc

SEQ ID NO: 2915190 - RNA, 19 nt, Artificial Sequence
  Description of Artificial Sequence: Synthetic oligonucleotide
ucagagguccuuccugcag

SEQ ID NO: 2915191 - RNA, 19 nt, Artificial Sequence
  Description of Artificial Sequence: Synthetic oligonucleotide
aucaauggcacaaaguuuu

SEQ ID NO: 2915192 - RNA, 19 nt, Artificial Sequence
  Description of Artificial Sequence: Synthetic oligonucleotide
uugagcaccaaaacuguuu

SEQ ID NO: 2915193 - RNA, 19 nt, Artificial Sequence
  Description of Artificial Sequence: Synthetic oligonucleotide
aagugugugugugugugug

SEQ ID NO: 2915194 - RNA, 19 nt, Artificial Sequence
  Description of Artificial Sequence: Synthetic oligonucleotide
guaucaauggcacaaaguu

SEQ ID NO: 2915195 - RNA, 19 nt, Artificial Sequence
  Description of Artificial Sequence: Synthetic oligonucleotide
ugagcaccaaaacuguuuu

SEQ ID NO: 2915196 - RNA, 19 nt, Artificial Sequence
  Description of Artificial Sequence: Synthetic oligonucleotide
agaagugugugugugugug

SEQ ID NO: 2915197 - RNA, 19 nt, Artificial Sequence
  Description of Artificial Sequence: Synthetic oligonucleotide
aggcuaguguguuguaagg

SEQ ID NO: 2915198 - RNA, 19 nt, Artificial Sequence
  Description of Artificial Sequence: Synthetic oligonucleotide
uucaccucuaacugccuga

SEQ ID NO: 2915199 - RNA, 19 nt, Artificial Sequence
  Description of Artificial Sequence: Synthetic oligonucleotide
ugugugugugugugugugg

SEQ ID NO: 2915200 - RNA, 19 nt, Artificial Sequence
  Description of Artificial Sequence: Synthetic oligonucleotide
gaucuguuagaggauucag

SEQ ID NO: 2915201 - RNA, 19 nt, Artificial Sequence
  Description of Artificial Sequence: Synthetic oligonucleotide
cagcuuaguucucaaauuc

SEQ ID NO: 2915202 - RNA, 19 nt, Artificial Sequence
  Description of Artificial Sequence: Synthetic oligonucleotide
uagaaacauacuagaugcu

SEQ ID NO: 2915203 - RNA, 19 nt, Artificial Sequence
  Description of Artificial Sequence: Synthetic oligonucleotide
ucagcuuaguucucaaauu

SEQ ID NO: 2915204 - RNA, 19 nt, Artificial Sequence
  Description of Artificial Sequence: Synthetic oligonucleotide
cuuacuagauuugcugcag

SEQ ID NO: 2915205 - RNA, 19 nt, Artificial Sequence
  Description of Artificial Sequence: Synthetic oligonucleotide
ugcuggugaggacagagua

SEQ ID NO: 2915206 - RNA, 19 nt, Artificial Sequence
  Description of Artificial Sequence: Synthetic oligonucleotide
acuagaugcuggugaggac

SEQ ID NO: 2915207 - RNA, 19 nt, Artificial Sequence
  Description of Artificial Sequence: Synthetic oligonucleotide
gcuguugcagcauaaagga

SEQ ID NO: 2915208 - RNA, 19 nt, Artificial Sequence
  Description of Artificial Sequence: Synthetic oligonucleotide
uauuuacuuucaacuuugu

SEQ ID NO: 2915209 - RNA, 19 nt, Artificial Sequence
  Description of Artificial Sequence: Synthetic oligonucleotide
uguuagcagauacuuucau

SEQ ID NO: 2915210 - RNA, 19 nt, Artificial Sequence
  Description of Artificial Sequence: Synthetic oligonucleotide
aacauacuagaugcuggug

SEQ ID NO: 2915211 - RNA, 19 nt, Artificial Sequence
  Description of Artificial Sequence: Synthetic oligonucleotide
aaagugcuuacuagauuug

SEQ ID NO: 2915212 - RNA, 19 nt, Artificial Sequence
  Description of Artificial Sequence: Synthetic oligonucleotide
uagaggauucagcuuaguu

SEQ ID NO: 2915213 - RNA, 19 nt, Artificial Sequence
  Description of Artificial Sequence: Synthetic oligonucleotide
auacuuucauagaagugug

SEQ ID NO: 2915214 - RNA, 19 nt, Artificial Sequence
  Description of Artificial Sequence: Synthetic oligonucleotide
uuacuagauuugcugcagu

SEQ ID NO: 2915215 - RNA, 19 nt, Artificial Sequence
  Description of Artificial Sequence: Synthetic oligonucleotide
uguuguaagggugcagaga

SEQ ID NO: 2915216 - RNA, 19 nt, Artificial Sequence
  Description of Artificial Sequence: Synthetic oligonucleotide
ucaggguugagugcuguug

SEQ ID NO: 2915217 - RNA, 19 nt, Artificial Sequence
  Description of Artificial Sequence: Synthetic oligonucleotide
acucuauagaacaaggcua

SEQ ID NO: 2915218 - RNA, 19 nt, Artificial Sequence
  Description of Artificial Sequence: Synthetic oligonucleotide
aaggucuacccuggaaaag

SEQ ID NO: 2915219 - RNA, 19 nt, Artificial Sequence
  Description of Artificial Sequence: Synthetic oligonucleotide
uggugaggacagaguaugg

SEQ ID NO: 2915220 - RNA, 19 nt, Artificial Sequence
  Description of Artificial Sequence: Synthetic oligonucleotide
agcaccaaaacuguuuuau

SEQ ID NO: 2915221 - RNA, 19 nt, Artificial Sequence
  Description of Artificial Sequence: Synthetic oligonucleotide
guuguaagggugcagagau

SEQ ID NO: 2915222 - RNA, 19 nt, Artificial Sequence
  Description of Artificial Sequence: Synthetic oligonucleotide
ugaucuguuagaggauuca

SEQ ID NO: 2915223 - RNA, 19 nt, Artificial Sequence
  Description of Artificial Sequence: Synthetic oligonucleotide
aacugccugagcucacaug

SEQ ID NO: 2915224 - RNA, 19 nt, Artificial Sequence
  Description of Artificial Sequence: Synthetic oligonucleotide
aagcugcaaaccucuagaa

SEQ ID NO: 2915225 - RNA, 19 nt, Artificial Sequence
  Description of Artificial Sequence: Synthetic oligonucleotide
gugcuguugcagcauaaag

SEQ ID NO: 2915226 - RNA, 19 nt, Artificial Sequence
  Description of Artificial Sequence: Synthetic oligonucleotide
uucucaaauucaccucuaa

SEQ ID NO: 2915227 - RNA, 19 nt, Artificial Sequence
  Description of Artificial Sequence: Synthetic oligonucleotide
aggaaaaggucuacccugg

SEQ ID NO: 2915228 - RNA, 19 nt, Artificial Sequence
  Description of Artificial Sequence: Synthetic oligonucleotide
caaaccucuagaaagugcu

SEQ ID NO: 2915229 - RNA, 19 nt, Artificial Sequence
  Description of Artificial Sequence: Synthetic oligonucleotide
cuugguaucaauggcacaa

SEQ ID NO: 2915230 - RNA, 19 nt, Artificial Sequence
  Description of Artificial Sequence: Synthetic oligonucleotide
cuggugaggacagaguaug

SEQ ID NO: 2915231 - RNA, 19 nt, Artificial Sequence
  Description of Artificial Sequence: Synthetic oligonucleotide
cauaaaggaaaaggucuac

SEQ ID NO: 2915232 - RNA, 19 nt, Artificial Sequence
  Description of Artificial Sequence: Synthetic oligonucleotide
uacuuucauagaagugugu

SEQ ID NO: 2915233 - RNA, 19 nt, Artificial Sequence
  Description of Artificial Sequence: Synthetic oligonucleotide
augcugcugucagaggucc

SEQ ID NO: 2915234 - RNA, 19 nt, Artificial Sequence
  Description of Artificial Sequence: Synthetic oligonucleotide
acuagauuugcugcagugu

SEQ ID NO: 2915235 - RNA, 19 nt, Artificial Sequence
  Description of Artificial Sequence: Synthetic oligonucleotide
auucaccucuaacugccug

SEQ ID NO: 2915236 - RNA, 19 nt, Artificial Sequence
  Description of Artificial Sequence: Synthetic oligonucleotide
caagcugcaaaccucuaga

SEQ ID NO: 2915237 - RNA, 19 nt, Artificial Sequence
  Description of Artificial Sequence: Synthetic oligonucleotide
uagcagauacuuucauaga

SEQ ID NO: 2915238 - RNA, 19 nt, Artificial Sequence
  Description of Artificial Sequence: Synthetic oligonucleotide
ucauguuagcagauacuuu

SEQ ID NO: 2915239 - RNA, 19 nt, Artificial Sequence
  Description of Artificial Sequence: Synthetic oligonucleotide
ugcaaaccucuagaaagug

SEQ ID NO: 2915240 - RNA, 19 nt, Artificial Sequence
  Description of Artificial Sequence: Synthetic oligonucleotide
agauacuuucauagaagug

SEQ ID NO: 2915241 - RNA, 19 nt, Artificial Sequence
  Description of Artificial Sequence: Synthetic oligonucleotide
guguguguguguguguggg

SEQ ID NO: 2915242 - RNA, 19 nt, Artificial Sequence
  Description of Artificial Sequence: Synthetic oligonucleotide
gaaaaggucuacccuggaa

SEQ ID NO: 2915243 - RNA, 19 nt, Artificial Sequence
  Description of Artificial Sequence: Synthetic oligonucleotide
gaggacagaguauggcuca

SEQ ID NO: 2915244 - RNA, 19 nt, Artificial Sequence
  Description of Artificial Sequence: Synthetic oligonucleotide
aaccucuagaaagugcuua

SEQ ID NO: 2915245 - RNA, 19 nt, Artificial Sequence
  Description of Artificial Sequence: Synthetic oligonucleotide
agaaagugcuuacuagauu

SEQ ID NO: 2915246 - RNA, 19 nt, Artificial Sequence
  Description of Artificial Sequence: Synthetic oligonucleotide
uccugcagcauacucuaua

SEQ ID NO: 2915247 - RNA, 19 nt, Artificial Sequence
  Description of Artificial Sequence: Synthetic oligonucleotide
cuagaugcuggugaggaca

SEQ ID NO: 2915248 - RNA, 19 nt, Artificial Sequence
  Description of Artificial Sequence: Synthetic oligonucleotide
agauagaaacauacuagau

SEQ ID NO: 2915249 - RNA, 19 nt, Artificial Sequence
  Description of Artificial Sequence: Synthetic oligonucleotide
ucacaggccuuauuuacuu

SEQ ID NO: 2915250 - RNA, 19 nt, Artificial Sequence
  Description of Artificial Sequence: Synthetic oligonucleotide
guguuguaagggugcagag

SEQ ID NO: 2915251 - RNA, 19 nt, Artificial Sequence
  Description of Artificial Sequence: Synthetic oligonucleotide
ugugaucuguuagaggauu

SEQ ID NO: 2915252 - RNA, 19 nt, Artificial Sequence
  Description of Artificial Sequence: Synthetic oligonucleotide
uguugguuugugaucuguu

SEQ ID NO: 2915253 - RNA, 19 nt, Artificial Sequence
  Description of Artificial Sequence: Synthetic oligonucleotide
acagaguauggcucagggu

SEQ ID NO: 2915254 - RNA, 19 nt, Artificial Sequence
  Description of Artificial Sequence: Synthetic oligonucleotide
uaucacaucacaggccuua

SEQ ID NO: 2915255 - RNA, 19 nt, Artificial Sequence
  Description of Artificial Sequence: Synthetic oligonucleotide
gguuugugaucuguuagag

SEQ ID NO: 2915256 - RNA, 19 nt, Artificial Sequence
  Description of Artificial Sequence: Synthetic oligonucleotide
agugucuguugguuuguga

SEQ ID NO: 2915257 - RNA, 19 nt, Artificial Sequence
  Description of Artificial Sequence: Synthetic oligonucleotide
ucaccucuaacugccugag

SEQ ID NO: 2915258 - RNA, 19 nt, Artificial Sequence
  Description of Artificial Sequence: Synthetic oligonucleotide
guuucaagcugcaaaccuc

SEQ ID NO: 2915259 - RNA, 19 nt, Artificial Sequence
  Description of Artificial Sequence: Synthetic oligonucleotide
gccuuauuuacuuucaacu

SEQ ID NO: 2915260 - RNA, 19 nt, Artificial Sequence
  Description of Artificial Sequence: Synthetic oligonucleotide
gcagauacuuucauagaag

SEQ ID NO: 2915261 - RNA, 19 nt, Artificial Sequence
  Description of Artificial Sequence: Synthetic oligonucleotide
gguugagugcuguugcagc

SEQ ID NO: 2915262 - RNA, 19 nt, Artificial Sequence
  Description of Artificial Sequence: Synthetic oligonucleotide
aggucuacccuggaaaagu

SEQ ID NO: 2915263 - RNA, 19 nt, Artificial Sequence
  Description of Artificial Sequence: Synthetic oligonucleotide
guugagugcuguugcagca

SEQ ID NO: 2915264 - RNA, 19 nt, Artificial Sequence
  Description of Artificial Sequence: Synthetic oligonucleotide
gaacaaggcuaguguguug

SEQ ID NO: 2915265 - RNA, 19 nt, Artificial Sequence
  Description of Artificial Sequence: Synthetic oligonucleotide
auacuagaugcuggugagg

SEQ ID NO: 2915266 - RNA, 19 nt, Artificial Sequence
  Description of Artificial Sequence: Synthetic oligonucleotide
guuagcagauacuuucaua

SEQ ID NO: 2915267 - RNA, 19 nt, Artificial Sequence
  Description of Artificial Sequence: Synthetic oligonucleotide
cuuauuuacuuucaacuuu

SEQ ID NO: 2915268 - RNA, 19 nt, Artificial Sequence
  Description of Artificial Sequence: Synthetic oligonucleotide
cagauacuuucauagaagu

SEQ ID NO: 2915269 - RNA, 19 nt, Artificial Sequence
  Description of Artificial Sequence: Synthetic oligonucleotide
agcugcaaaccucuagaaa

SEQ ID NO: 2915270 - RNA, 19 nt, Artificial Sequence
  Description of Artificial Sequence: Synthetic oligonucleotide
agugcuuacuagauuugcu

SEQ ID NO: 2915271 - RNA, 19 nt, Artificial Sequence
  Description of Artificial Sequence: Synthetic oligonucleotide
acaucacaggccuuauuua

SEQ ID NO: 2915272 - RNA, 19 nt, Artificial Sequence
  Description of Artificial Sequence: Synthetic oligonucleotide
uugugaucuguuagaggau

SEQ ID NO: 2915273 - RNA, 19 nt, Artificial Sequence
  Description of Artificial Sequence: Synthetic oligonucleotide
agggugcagagauacacua

SEQ ID NO: 2915274 - RNA, 19 nt, Artificial Sequence
  Description of Artificial Sequence: Synthetic oligonucleotide
agcuuaguucucaaauuca

SEQ ID NO: 2915275 - RNA, 19 nt, Artificial Sequence
  Description of Artificial Sequence: Synthetic oligonucleotide
aagggugcagagauacacu

SEQ ID NO: 2915276 - RNA, 19 nt, Artificial Sequence
  Description of Artificial Sequence: Synthetic oligonucleotide
acuugagcaccaaaacugu

SEQ ID NO: 2915277 - RNA, 19 nt, Artificial Sequence
  Description of Artificial Sequence: Synthetic oligonucleotide
uagaagugugugugugugu

SEQ ID NO: 2915278 - RNA, 19 nt, Artificial Sequence
  Description of Artificial Sequence: Synthetic oligonucleotide
cugucagagguccuuccug

SEQ ID NO: 2915279 - RNA, 19 nt, Artificial Sequence
  Description of Artificial Sequence: Synthetic oligonucleotide
uuuguccauuuacuuggua

SEQ ID NO: 2915280 - RNA, 19 nt, Artificial Sequence
  Description of Artificial Sequence: Synthetic oligonucleotide
guuagaggauucagcuuag

SEQ ID NO: 2915281 - RNA, 19 nt, Artificial Sequence
  Description of Artificial Sequence: Synthetic oligonucleotide
gauucagcuuaguucucaa

SEQ ID NO: 2915282 - RNA, 19 nt, Artificial Sequence
  Description of Artificial Sequence: Synthetic oligonucleotide
cagaguauggcucaggguu

SEQ ID NO: 2915283 - RNA, 19 nt, Artificial Sequence
  Description of Artificial Sequence: Synthetic oligonucleotide
ucuaacugccugagcucac

SEQ ID NO: 2915284 - RNA, 19 nt, Artificial Sequence
  Description of Artificial Sequence: Synthetic oligonucleotide
uccuuccugcagcauacuc

SEQ ID NO: 2915285 - RNA, 19 nt, Artificial Sequence
  Description of Artificial Sequence: Synthetic oligonucleotide
guugguuugugaucuguua

SEQ ID NO: 2915286 - RNA, 19 nt, Artificial Sequence
  Description of Artificial Sequence: Synthetic oligonucleotide
acuugguaucaauggcaca

SEQ ID NO: 2915287 - RNA, 19 nt, Artificial Sequence
  Description of Artificial Sequence: Synthetic oligonucleotide
ugugugugugugugugugu

SEQ ID NO: 2915288 - RNA, 19 nt, Artificial Sequence
  Description of Artificial Sequence: Synthetic oligonucleotide
gcauacucuauagaacaag

SEQ ID NO: 2915289 - RNA, 19 nt, Artificial Sequence
  Description of Artificial Sequence: Synthetic oligonucleotide
ccugcagcauacucuauag

SEQ ID NO: 2915290 - RNA, 19 nt, Artificial Sequence
  Description of Artificial Sequence: Synthetic oligonucleotide
gugugugugugugugggug

SEQ ID NO: 2915291 - RNA, 19 nt, Artificial Sequence
  Description of Artificial Sequence: Synthetic oligonucleotide
gcagagauacacuacgaaa

SEQ ID NO: 2915292 - RNA, 19 nt, Artificial Sequence
  Description of Artificial Sequence: Synthetic oligonucleotide
ggcuaguguguuguaaggg

SEQ ID NO: 2915293 - RNA, 19 nt, Artificial Sequence
  Description of Artificial Sequence: Synthetic oligonucleotide
agaacaaggcuaguguguu

SEQ ID NO: 2915294 - RNA, 19 nt, Artificial Sequence
  Description of Artificial Sequence: Synthetic oligonucleotide
caugcugcugucagagguc

SEQ ID NO: 2915295 - RNA, 19 nt, Artificial Sequence
  Description of Artificial Sequence: Synthetic oligonucleotide
uggcucaggguugagugcu

SEQ ID NO: 2915296 - RNA, 19 nt, Artificial Sequence
  Description of Artificial Sequence: Synthetic oligonucleotide
cuuucauagaagugugugu

SEQ ID NO: 2915297 - RNA, 19 nt, Artificial Sequence
  Description of Artificial Sequence: Synthetic oligonucleotide
ggccuuauuuacuuucaac

SEQ ID NO: 2915298 - RNA, 19 nt, Artificial Sequence
  Description of Artificial Sequence: Synthetic oligonucleotide
cucuagaaagugcuuacua

SEQ ID NO: 2915299 - RNA, 19 nt, Artificial Sequence
  Description of Artificial Sequence: Synthetic oligonucleotide
uccauuuacuugguaucaa

SEQ ID NO: 2915300 - RNA, 19 nt, Artificial Sequence
  Description of Artificial Sequence: Synthetic oligonucleotide
ucuauagaacaaggcuagu

SEQ ID NO: 2915301 - RNA, 19 nt, Artificial Sequence
  Description of Artificial Sequence: Synthetic oligonucleotide
agaguauggcucaggguug

SEQ ID NO: 2915302 - RNA, 19 nt, Artificial Sequence
  Description of Artificial Sequence: Synthetic oligonucleotide
ucuguugguuugugaucug

SEQ ID NO: 2915303 - RNA, 19 nt, Artificial Sequence
  Description of Artificial Sequence: Synthetic oligonucleotide
gugugugugugugugugug

SEQ ID NO: 2915304 - RNA, 19 nt, Artificial Sequence
  Description of Artificial Sequence: Synthetic oligonucleotide
auucagcuuaguucucaaa

SEQ ID NO: 2915305 - RNA, 19 nt, Artificial Sequence
  Description of Artificial Sequence: Synthetic oligonucleotide
agugugugugugugugugu

SEQ ID NO: 2915306 - RNA, 19 nt, Artificial Sequence
  Description of Artificial Sequence: Synthetic oligonucleotide
cuuccugcagcauacucua

SEQ ID NO: 2915307 - RNA, 19 nt, Artificial Sequence
  Description of Artificial Sequence: Synthetic oligonucleotide
uuucaacuuuguccauuua

SEQ ID NO: 2915308 - RNA, 19 nt, Artificial Sequence
  Description of Artificial Sequence: Synthetic oligonucleotide
gcuuaguucucaaauucac

SEQ ID NO: 2915309 - RNA, 19 nt, Artificial Sequence
  Description of Artificial Sequence: Synthetic oligonucleotide
gcucacaugcugcugucag

SEQ ID NO: 2915310 - RNA, 19 nt, Artificial Sequence
  Description of Artificial Sequence: Synthetic oligonucleotide
ugugugugugugugugggu

SEQ ID NO: 2915311 - RNA, 19 nt, Artificial Sequence
  Description of Artificial Sequence: Synthetic oligonucleotide
auguuagcagauacuuuca

SEQ ID NO: 2915312 - RNA, 19 nt, Artificial Sequence
  Description of Artificial Sequence: Synthetic oligonucleotide
gcuuacuagauuugcugca

SEQ ID NO: 2915313 - RNA, 19 nt, Artificial Sequence
  Description of Artificial Sequence: Synthetic oligonucleotide
guccauuuacuugguauca

SEQ ID NO: 2915314 - RNA, 19 nt, Artificial Sequence
  Description of Artificial Sequence: Synthetic oligonucleotide
uacccuggaaaaguuucaa

SEQ ID NO: 2915315 - RNA, 19 nt, Artificial Sequence
  Description of Artificial Sequence: Synthetic oligonucleotide
uaacugccugagcucacau

SEQ ID NO: 2915316 - RNA, 19 nt, Artificial Sequence
  Description of Artificial Sequence: Synthetic oligonucleotide
ugugugugugugggugggg

SEQ ID NO: 2915317 - RNA, 19 nt, Artificial Sequence
  Description of Artificial Sequence: Synthetic oligonucleotide
aguguguuguaagggugca

SEQ ID NO: 2915318 - RNA, 19 nt, Artificial Sequence
  Description of Artificial Sequence: Synthetic oligonucleotide
gaaaaguuucaagcugcaa

SEQ ID NO: 2915319 - RNA, 19 nt, Artificial Sequence
  Description of Artificial Sequence: Synthetic oligonucleotide
cacaugcugcugucagagg

SEQ ID NO: 2915320 - RNA, 19 nt, Artificial Sequence
  Description of Artificial Sequence: Synthetic oligonucleotide
auuugcugcagugucuguu

SEQ ID NO: 2915321 - RNA, 19 nt, Artificial Sequence
  Description of Artificial Sequence: Synthetic oligonucleotide
aauucaccucuaacugccu

SEQ ID NO: 2915322 - RNA, 19 nt, Artificial Sequence
  Description of Artificial Sequence: Synthetic oligonucleotide
cuacccuggaaaaguuuca

SEQ ID NO: 2915323 - RNA, 19 nt, Artificial Sequence
  Description of Artificial Sequence: Synthetic oligonucleotide
acuuucaacuuuguccauu

SEQ ID NO: 2915324 - RNA, 19 nt, Artificial Sequence
  Description of Artificial Sequence: Synthetic oligonucleotide
guguguguguguggguggg

SEQ ID NO: 2915325 - RNA, 19 nt, Artificial Sequence
  Description of Artificial Sequence: Synthetic oligonucleotide
uugguaucaauggcacaaa

SEQ ID NO: 2915326 - RNA, 19 nt, Artificial Sequence
  Description of Artificial Sequence: Synthetic oligonucleotide
gucuguugguuugugaucu

SEQ ID NO: 2915327 - RNA, 19 nt, Artificial Sequence
  Description of Artificial Sequence: Synthetic oligonucleotide
gugucuguugguuugugau

SEQ ID NO: 2915328 - RNA, 19 nt, Artificial Sequence
  Description of Artificial Sequence: Synthetic oligonucleotide
agguccuuccugcagcaua

SEQ ID NO: 2915329 - RNA, 19 nt, Artificial Sequence
  Description of Artificial Sequence: Synthetic oligonucleotide
gcagcauacucuauagaac

SEQ ID NO: 2915330 - RNA, 19 nt, Artificial Sequence
  Description of Artificial Sequence: Synthetic oligonucleotide
cucuaacugccugagcuca

SEQ ID NO: 2915331 - RNA, 19 nt, Artificial Sequence
  Description of Artificial Sequence: Synthetic oligonucleotide
ccaaaacuguuuuaucaca

SEQ ID NO: 2915332 - RNA, 19 nt, Artificial Sequence
  Description of Artificial Sequence: Synthetic oligonucleotide
uuagaggauucagcuuagu

SEQ ID NO: 2915333 - RNA, 19 nt, Artificial Sequence
  Description of Artificial Sequence: Synthetic oligonucleotide
gcaaaccucuagaaagugc

SEQ ID NO: 2915334 - RNA, 19 nt, Artificial Sequence
  Description of Artificial Sequence: Synthetic oligonucleotide
caggccuuauuuacuuuca

SEQ ID NO: 2915335 - RNA, 19 nt, Artificial Sequence
  Description of Artificial Sequence: Synthetic oligonucleotide
ugcugcagugucuguuggu

SEQ ID NO: 2915336 - RNA, 19 nt, Artificial Sequence
  Description of Artificial Sequence: Synthetic oligonucleotide
uuguaagggugcagagaua

SEQ ID NO: 2915337 - RNA, 19 nt, Artificial Sequence
  Description of Artificial Sequence: Synthetic oligonucleotide
cacaucacaggccuuauuu

SEQ ID NO: 2915338 - RNA, 19 nt, Artificial Sequence
  Description of Artificial Sequence: Synthetic oligonucleotide
uuaucacaucacaggccuu

SEQ ID NO: 2915339 - RNA, 19 nt, Artificial Sequence
  Description of Artificial Sequence: Synthetic oligonucleotide
uucaagcugcaaaccucua

SEQ ID NO: 2915340 - RNA, 19 nt, Artificial Sequence
  Description of Artificial Sequence: Synthetic oligonucleotide
aggccuuauuuacuuucaa

SEQ ID NO: 2915341 - RNA, 19 nt, Artificial Sequence
  Description of Artificial Sequence: Synthetic oligonucleotide
agugcuguugcagcauaaa

SEQ ID NO: 2915342 - RNA, 19 nt, Artificial Sequence
  Description of Artificial Sequence: Synthetic oligonucleotide
aaaccucuagaaagugcuu

SEQ ID NO: 2915343 - RNA, 19 nt, Artificial Sequence
  Description of Artificial Sequence: Synthetic oligonucleotide
ucacaucacaggccuuauu

SEQ ID NO: 2915344 - RNA, 19 nt, Artificial Sequence
  Description of Artificial Sequence: Synthetic oligonucleotide
uugagugcuguugcagcau

SEQ ID NO: 2915345 - RNA, 19 nt, Artificial Sequence
  Description of Artificial Sequence: Synthetic oligonucleotide
uacuuucaacuuuguccau

SEQ ID NO: 2915346 - RNA, 19 nt, Artificial Sequence
  Description of Artificial Sequence: Synthetic oligonucleotide
gcuaguguguuguaagggu

SEQ ID NO: 2915347 - RNA, 19 nt, Artificial Sequence
  Description of Artificial Sequence: Synthetic oligonucleotide
agggaauacuugagcacca

SEQ ID NO: 2915348 - RNA, 19 nt, Artificial Sequence
  Description of Artificial Sequence: Synthetic oligonucleotide
cauagaagugugugugugu

SEQ ID NO: 2915349 - RNA, 19 nt, Artificial Sequence
  Description of Artificial Sequence: Synthetic oligonucleotide
agcauacucuauagaacaa

SEQ ID NO: 2915350 - RNA, 19 nt, Artificial Sequence
  Description of Artificial Sequence: Synthetic oligonucleotide
cuuucaacuuuguccauuu

SEQ ID NO: 2915351 - RNA, 19 nt, Artificial Sequence
  Description of Artificial Sequence: Synthetic oligonucleotide
gugaucuguuagaggauuc

SEQ ID NO: 2915352 - RNA, 19 nt, Artificial Sequence
  Description of Artificial Sequence: Synthetic oligonucleotide
cugcaaaccucuagaaagu

SEQ ID NO: 2915353 - RNA, 19 nt, Artificial Sequence
  Description of Artificial Sequence: Synthetic oligonucleotide
gaguauggcucaggguuga

SEQ ID NO: 2915354 - RNA, 19 nt, Artificial Sequence
  Description of Artificial Sequence: Synthetic oligonucleotide
aggauucagcuuaguucuc

SEQ ID NO: 2915355 - RNA, 19 nt, Artificial Sequence
  Description of Artificial Sequence: Synthetic oligonucleotide
gagcucacaugcugcuguc

SEQ ID NO: 2915356 - RNA, 19 nt, Artificial Sequence
  Description of Artificial Sequence: Synthetic oligonucleotide
gcaccaaaacuguuuuauc

SEQ ID NO: 2915357 - RNA, 19 nt, Artificial Sequence
  Description of Artificial Sequence: Synthetic oligonucleotide
gaagugugugugugugugu

SEQ ID NO: 2915358 - RNA, 19 nt, Artificial Sequence
  Description of Artificial Sequence: Synthetic oligonucleotide
ggaauacuugagcaccaaa

SEQ ID NO: 2915359 - RNA, 19 nt, Artificial Sequence
  Description of Artificial Sequence: Synthetic oligonucleotide
guguguuguaagggugcag

SEQ ID NO: 2915360 - RNA, 19 nt, Artificial Sequence
  Description of Artificial Sequence: Synthetic oligonucleotide
ccuggaaaaguuucaagcu

SEQ ID NO: 2915361 - RNA, 19 nt, Artificial Sequence
  Description of Artificial Sequence: Synthetic oligonucleotide
cucacaugcugcugucaga

SEQ ID NO: 2915362 - RNA, 19 nt, Artificial Sequence
  Description of Artificial Sequence: Synthetic oligonucleotide
gguaucaauggcacaaagu

SEQ ID NO: 2915363 - RNA, 19 nt, Artificial Sequence
  Description of Artificial Sequence: Synthetic oligonucleotide
gguccuuccugcagcauac

SEQ ID NO: 2915364 - RNA, 19 nt, Artificial Sequence
  Description of Artificial Sequence: Synthetic oligonucleotide
gucagagguccuuccugca

SEQ ID NO: 2915365 - RNA, 19 nt, Artificial Sequence
  Description of Artificial Sequence: Synthetic oligonucleotide
ggaaaaguuucaagcugca

SEQ ID NO: 2915366 - RNA, 19 nt, Artificial Sequence
  Description of Artificial Sequence: Synthetic oligonucleotide
cuuuucauguuagcagaua

SEQ ID NO: 2915367 - RNA, 19 nt, Artificial Sequence
  Description of Artificial Sequence: Synthetic oligonucleotide
cuguugcagcauaaaggaa

SEQ ID NO: 2915368 - RNA, 19 nt, Artificial Sequence
  Description of Artificial Sequence: Synthetic oligonucleotide
ggauucagcuuaguucuca

SEQ ID NO: 2915369 - RNA, 19 nt, Artificial Sequence
  Description of Artificial Sequence: Synthetic oligonucleotide
gugcagagauacacuacga

SEQ ID NO: 2915370 - RNA, 19 nt, Artificial Sequence
  Description of Artificial Sequence: Synthetic oligonucleotide
caccucuaacugccugagc

SEQ ID NO: 2915371 - RNA, 19 nt, Artificial Sequence
  Description of Artificial Sequence: Synthetic oligonucleotide
aguauggcucaggguugag

SEQ ID NO: 2915372 - RNA, 19 nt, Artificial Sequence
  Description of Artificial Sequence: Synthetic oligonucleotide
cuaacugccugagcucaca

SEQ ID NO: 2915373 - RNA, 19 nt, Artificial Sequence
  Description of Artificial Sequence: Synthetic oligonucleotide
cugcagcauacucuauaga

SEQ ID NO: 2915374 - RNA, 19 nt, Artificial Sequence
  Description of Artificial Sequence: Synthetic oligonucleotide
ggacagaguauggcucagg

SEQ ID NO: 2915375 - RNA, 19 nt, Artificial Sequence
  Description of Artificial Sequence: Synthetic oligonucleotide
cugagcucacaugcugcug

SEQ ID NO: 2915376 - RNA, 19 nt, Artificial Sequence
  Description of Artificial Sequence: Synthetic oligonucleotide
gagcaccaaaacuguuuua

SEQ ID NO: 2915377 - RNA, 19 nt, Artificial Sequence
  Description of Artificial Sequence: Synthetic oligonucleotide
caaggcuaguguguuguaa

SEQ ID NO: 2915378 - RNA, 19 nt, Artificial Sequence
  Description of Artificial Sequence: Synthetic oligonucleotide
ugcugcugucagagguccu

SEQ ID NO: 2915379 - RNA, 19 nt, Artificial Sequence
  Description of Artificial Sequence: Synthetic oligonucleotide
acaaggcuaguguguugua

SEQ ID NO: 2915380 - RNA, 19 nt, Artificial Sequence
  Description of Artificial Sequence: Synthetic oligonucleotide
gcauaaaggaaaaggucua

SEQ ID NO: 2915381 - RNA, 19 nt, Artificial Sequence
  Description of Artificial Sequence: Synthetic oligonucleotide
aucacaucacaggccuuau

SEQ ID NO: 2915382 - RNA, 19 nt, Artificial Sequence
  Description of Artificial Sequence: Synthetic oligonucleotide
ccucuaacugccugagcuc

SEQ ID NO: 2915383 - RNA, 19 nt, Artificial Sequence
  Description of Artificial Sequence: Synthetic oligonucleotide
uuccugcagcauacucuau

SEQ ID NO: 2915384 - RNA, 19 nt, Artificial Sequence
  Description of Artificial Sequence: Synthetic oligonucleotide
agcucacaugcugcuguca

SEQ ID NO: 2915385 - RNA, 19 nt, Artificial Sequence
  Description of Artificial Sequence: Synthetic oligonucleotide
ggaaaaggucuacccugga

SEQ ID NO: 2915386 - RNA, 19 nt, Artificial Sequence
  Description of Artificial Sequence: Synthetic oligonucleotide
guaagggugcagagauaca

SEQ ID NO: 2915387 - RNA, 19 nt, Artificial Sequence
  Description of Artificial Sequence: Synthetic oligonucleotide
augcuggugaggacagagu

SEQ ID NO: 2915388 - RNA, 19 nt, Artificial Sequence
  Description of Artificial Sequence: Synthetic oligonucleotide
gccugagcucacaugcugc

SEQ ID NO: 2915389 - RNA, 19 nt, Artificial Sequence
  Description of Artificial Sequence: Synthetic oligonucleotide
cuuuguccauuuacuuggu

SEQ ID NO: 2915390 - RNA, 19 nt, Artificial Sequence
  Description of Artificial Sequence: Synthetic oligonucleotide
gagugcuguugcagcauaa

SEQ ID NO: 2915391 - RNA, 19 nt, Artificial Sequence
  Description of Artificial Sequence: Synthetic oligonucleotide
cugcugucagagguccuuc

SEQ ID NO: 2915392 - RNA, 19 nt, Artificial Sequence
  Description of Artificial Sequence: Synthetic oligonucleotide
gggugcagagauacacuac

SEQ ID NO: 2915393 - RNA, 19 nt, Artificial Sequence
  Description of Artificial Sequence: Synthetic oligonucleotide
cuguuagaggauucagcuu

SEQ ID NO: 2915394 - RNA, 19 nt, Artificial Sequence
  Description of Artificial Sequence: Synthetic oligonucleotide
cuugagcaccaaaacuguu

SEQ ID NO: 2915395 - RNA, 19 nt, Artificial Sequence
  Description of Artificial Sequence: Synthetic oligonucleotide
guauggcucaggguugagu

SEQ ID NO: 2915396 - RNA, 19 nt, Artificial Sequence
  Description of Artificial Sequence: Synthetic oligonucleotide
cuguugguuugugaucugu

SEQ ID NO: 2915397 - RNA, 19 nt, Artificial Sequence
  Description of Artificial Sequence: Synthetic oligonucleotide
gggaauacuugagcaccaa

SEQ ID NO: 2915398 - RNA, 19 nt, Artificial Sequence
  Description of Artificial Sequence: Synthetic oligonucleotide
cugccugagcucacaugcu

SEQ ID NO: 2915399 - RNA, 19 nt, Artificial Sequence
  Description of Artificial Sequence: Synthetic oligonucleotide
gucuacccuggaaaaguuu

SEQ ID NO: 2915400 - RNA, 19 nt, Artificial Sequence
  Description of Artificial Sequence: Synthetic oligonucleotide
gcuuuucauguuagcagau

SEQ ID NO: 2915401 - RNA, 19 nt, Artificial Sequence
  Description of Artificial Sequence: Synthetic oligonucleotide
gcugcagugucuguugguu

SEQ ID NO: 2915402 - RNA, 19 nt, Artificial Sequence
  Description of Artificial Sequence: Synthetic oligonucleotide
ccugagcucacaugcugcu

SEQ ID NO: 2915403 - RNA, 19 nt, Artificial Sequence
  Description of Artificial Sequence: Synthetic oligonucleotide
ggcucaggguugagugcug

SEQ ID NO: 2915404 - RNA, 19 nt, Artificial Sequence
  Description of Artificial Sequence: Synthetic oligonucleotide
gcuggugaggacagaguau

SEQ ID NO: 2915405 - RNA, 19 nt, Artificial Sequence
  Description of Artificial Sequence: Synthetic oligonucleotide
cucaggguugagugcuguu

SEQ ID NO: 2915406 - RNA, 19 nt, Artificial Sequence
  Description of Artificial Sequence: Synthetic oligonucleotide
ggucuacccuggaaaaguu

SEQ ID NO: 2915407 - RNA, 19 nt, Artificial Sequence
  Description of Artificial Sequence: Synthetic oligonucleotide
gcagugucuguugguuugu

SEQ ID NO: 2915408 - RNA, 19 nt, Artificial Sequence
  Description of Artificial Sequence: Synthetic oligonucleotide
ccucuagaaagugcuuacu

SEQ ID NO: 2915409 - RNA, 19 nt, Artificial Sequence
  Description of Artificial Sequence: Synthetic oligonucleotide
gagguccuuccugcagcau

SEQ ID NO: 2915410 - RNA, 19 nt, Artificial Sequence
  Description of Artificial Sequence: Synthetic oligonucleotide
guccuuccugcagcauacu

SEQ ID NO: 2915411 - RNA, 19 nt, Artificial Sequence
  Description of Artificial Sequence: Synthetic oligonucleotide
aacauuaucagcuugauga

SEQ ID NO: 2915412 - RNA, 19 nt, Artificial Sequence
  Description of Artificial Sequence: Synthetic oligonucleotide
uuuuaauuacgaaagaugu

SEQ ID NO: 2915413 - RNA, 19 nt, Artificial Sequence
  Description of Artificial Sequence: Synthetic oligonucleotide
cauuauaaaacuuggaagc

SEQ ID NO: 2915414 - RNA, 19 nt, Artificial Sequence
  Description of Artificial Sequence: Synthetic oligonucleotide
ucaauauugcuuaacaaag

SEQ ID NO: 2915415 - RNA, 19 nt, Artificial Sequence
  Description of Artificial Sequence: Synthetic oligonucleotide
aaugcugggaaccaucggc

SEQ ID NO: 2915416 - RNA, 19 nt, Artificial Sequence
  Description of Artificial Sequence: Synthetic oligonucleotide
uauugcuuaacaaaggacc

SEQ ID NO: 2915417 - RNA, 19 nt, Artificial Sequence
  Description of Artificial Sequence: Synthetic oligonucleotide
auuuccaucaaauugucuc

SEQ ID NO: 2915418 - RNA, 19 nt, Artificial Sequence
  Description of Artificial Sequence: Synthetic oligonucleotide
aaugaugcauuauaaaacu

SEQ ID NO: 2915419 - RNA, 19 nt, Artificial Sequence
  Description of Artificial Sequence: Synthetic oligonucleotide
aauauugcuuaacaaagga

SEQ ID NO: 2915420 - RNA, 19 nt, Artificial Sequence
  Description of Artificial Sequence: Synthetic oligonucleotide
gaagcuacuuuauacaaag

SEQ ID NO: 2915421 - RNA, 19 nt, Artificial Sequence
  Description of Artificial Sequence: Synthetic oligonucleotide
gaaagauguaaaaugaugc

SEQ ID NO: 2915422 - RNA, 19 nt, Artificial Sequence
  Description of Artificial Sequence: Synthetic oligonucleotide
uuacgaaagauguaaaaug

SEQ ID NO: 2915423 - RNA, 19 nt, Artificial Sequence
  Description of Artificial Sequence: Synthetic oligonucleotide
uuauuuguuucugagacag

SEQ ID NO: 2915424 - RNA, 19 nt, Artificial Sequence
  Description of Artificial Sequence: Synthetic oligonucleotide
ugaugcauuauaaaacuug

SEQ ID NO: 2915425 - RNA, 19 nt, Artificial Sequence
  Description of Artificial Sequence: Synthetic oligonucleotide
guuuauuuguuucugagac

SEQ ID NO: 2915426 - RNA, 19 nt, Artificial Sequence
  Description of Artificial Sequence: Synthetic oligonucleotide
ugcauuauaaaacuuggaa

SEQ ID NO: 2915427 - RNA, 19 nt, Artificial Sequence
  Description of Artificial Sequence: Synthetic oligonucleotide
agucugauuaguuacuggg

SEQ ID NO: 2915428 - RNA, 19 nt, Artificial Sequence
  Description of Artificial Sequence: Synthetic oligonucleotide
aaagauguaaaaugaugca

SEQ ID NO: 2915429 - RNA, 19 nt, Artificial Sequence
  Description of Artificial Sequence: Synthetic oligonucleotide
uguaaaaugaugcauuaua

SEQ ID NO: 2915430 - RNA, 19 nt, Artificial Sequence
  Description of Artificial Sequence: Synthetic oligonucleotide
uccacgaacauuaucagcu

SEQ ID NO: 2915431 - RNA, 19 nt, Artificial Sequence
  Description of Artificial Sequence: Synthetic oligonucleotide
uuaauuacgaaagauguaa

SEQ ID NO: 2915432 - RNA, 19 nt, Artificial Sequence
  Description of Artificial Sequence: Synthetic oligonucleotide
ugauuaguuacugggaugg

SEQ ID NO: 2915433 - RNA, 19 nt, Artificial Sequence
  Description of Artificial Sequence: Synthetic oligonucleotide
uucaauauugcuuaacaaa

SEQ ID NO: 2915434 - RNA, 19 nt, Artificial Sequence
  Description of Artificial Sequence: Synthetic oligonucleotide
uauaaaacuuggaagcuac

SEQ ID NO: 2915435 - RNA, 19 nt, Artificial Sequence
  Description of Artificial Sequence: Synthetic oligonucleotide
uacgaaagauguaaaauga

SEQ ID NO: 2915436 - RNA, 19 nt, Artificial Sequence
  Description of Artificial Sequence: Synthetic oligonucleotide
gaugcauuauaaaacuugg

SEQ ID NO: 2915437 - RNA, 19 nt, Artificial Sequence
  Description of Artificial Sequence: Synthetic oligonucleotide
uuuauacaaaguccaaucu

SEQ ID NO: 2915438 - RNA, 19 nt, Artificial Sequence
  Description of Artificial Sequence: Synthetic oligonucleotide
uuaguuacugggauggccc

SEQ ID NO: 2915439 - RNA, 19 nt, Artificial Sequence
  Description of Artificial Sequence: Synthetic oligonucleotide
ugugcugcuuuuaauuacg

SEQ ID NO: 2915440 - RNA, 19 nt, Artificial Sequence
  Description of Artificial Sequence: Synthetic oligonucleotide
cugcuuuuaauuacgaaag

SEQ ID NO: 2915441 - RNA, 19 nt, Artificial Sequence
  Description of Artificial Sequence: Synthetic oligonucleotide
aucggcacaaugcagagag

SEQ ID NO: 2915442 - RNA, 19 nt, Artificial Sequence
  Description of Artificial Sequence: Synthetic oligonucleotide
auuuguuucugagacaggg

SEQ ID NO: 2915443 - RNA, 19 nt, Artificial Sequence
  Description of Artificial Sequence: Synthetic oligonucleotide
cuuuauacaaaguccaauc

SEQ ID NO: 2915444 - RNA, 19 nt, Artificial Sequence
  Description of Artificial Sequence: Synthetic oligonucleotide
cuugaugaaaugauggcug

SEQ ID NO: 2915445 - RNA, 19 nt, Artificial Sequence
  Description of Artificial Sequence: Synthetic oligonucleotide
aauuacgaaagauguaaaa

SEQ ID NO: 2915446 - RNA, 19 nt, Artificial Sequence
  Description of Artificial Sequence: Synthetic oligonucleotide
uauacaaaguccaaucuuu

SEQ ID NO: 2915447 - RNA, 19 nt, Artificial Sequence
  Description of Artificial Sequence: Synthetic oligonucleotide
uuguuuauuuguuucugag

SEQ ID NO: 2915448 - RNA, 19 nt, Artificial Sequence
  Description of Artificial Sequence: Synthetic oligonucleotide
aucaaauugucucccuggc

SEQ ID NO: 2915449 - RNA, 19 nt, Artificial Sequence
  Description of Artificial Sequence: Synthetic oligonucleotide
cuuggaagcuacuuuauac

SEQ ID NO: 2915450 - RNA, 19 nt, Artificial Sequence
  Description of Artificial Sequence: Synthetic oligonucleotide
agcuugaugaaaugauggc

SEQ ID NO: 2915451 - RNA, 19 nt, Artificial Sequence
  Description of Artificial Sequence: Synthetic oligonucleotide
uuaacaaaggaccgggagu

SEQ ID NO: 2915452 - RNA, 19 nt, Artificial Sequence
  Description of Artificial Sequence: Synthetic oligonucleotide
ugaaaugauggcuggaacu

SEQ ID NO: 2915453 - RNA, 19 nt, Artificial Sequence
  Description of Artificial Sequence: Synthetic oligonucleotide
aguggaaaugcugggaacc

SEQ ID NO: 2915454 - RNA, 19 nt, Artificial Sequence
  Description of Artificial Sequence: Synthetic oligonucleotide
auuaguuacugggauggcc

SEQ ID NO: 2915455 - RNA, 19 nt, Artificial Sequence
  Description of Artificial Sequence: Synthetic oligonucleotide
aaaacuuggaagcuacuuu

SEQ ID NO: 2915456 - RNA, 19 nt, Artificial Sequence
  Description of Artificial Sequence: Synthetic oligonucleotide
caauauugcuuaacaaagg

SEQ ID NO: 2915457 - RNA, 19 nt, Artificial Sequence
  Description of Artificial Sequence: Synthetic oligonucleotide
aagucugauuaguuacugg

SEQ ID NO: 2915458 - RNA, 19 nt, Artificial Sequence
  Description of Artificial Sequence: Synthetic oligonucleotide
uaaaaugaugcauuauaaa

SEQ ID NO: 2915459 - RNA, 19 nt, Artificial Sequence
  Description of Artificial Sequence: Synthetic oligonucleotide
gcauuauaaaacuuggaag

SEQ ID NO: 2915460 - RNA, 19 nt, Artificial Sequence
  Description of Artificial Sequence: Synthetic oligonucleotide
cagcuugaugaaaugaugg

SEQ ID NO: 2915461 - RNA, 19 nt, Artificial Sequence
  Description of Artificial Sequence: Synthetic oligonucleotide
aaauugucucccuggcuuc

SEQ ID NO: 2915462 - RNA, 19 nt, Artificial Sequence
  Description of Artificial Sequence: Synthetic oligonucleotide
acuaaccauauugugcugc

SEQ ID NO: 2915463 - RNA, 19 nt, Artificial Sequence
  Description of Artificial Sequence: Synthetic oligonucleotide
aaacuuggaagcuacuuua

SEQ ID NO: 2915464 - RNA, 19 nt, Artificial Sequence
  Description of Artificial Sequence: Synthetic oligonucleotide
cuuaacaaaggaccgggag

SEQ ID NO: 2915465 - RNA, 19 nt, Artificial Sequence
  Description of Artificial Sequence: Synthetic oligonucleotide
ucugauuaguuacugggau

SEQ ID NO: 2915466 - RNA, 19 nt, Artificial Sequence
  Description of Artificial Sequence: Synthetic oligonucleotide
augaaaugauggcuggaac

SEQ ID NO: 2915467 - RNA, 19 nt, Artificial Sequence
  Description of Artificial Sequence: Synthetic oligonucleotide
uguuuauuuguuucugaga

SEQ ID NO: 2915468 - RNA, 19 nt, Artificial Sequence
  Description of Artificial Sequence: Synthetic oligonucleotide
caucaaauugucucccugg

SEQ ID NO: 2915469 - RNA, 19 nt, Artificial Sequence
  Description of Artificial Sequence: Synthetic oligonucleotide
ucagcuugaugaaaugaug

SEQ ID NO: 2915470 - RNA, 19 nt, Artificial Sequence
  Description of Artificial Sequence: Synthetic oligonucleotide
uuauacaaaguccaaucuu

SEQ ID NO: 2915471 - RNA, 19 nt, Artificial Sequence
  Description of Artificial Sequence: Synthetic oligonucleotide
auugcuuaacaaaggaccg

SEQ ID NO: 2915472 - RNA, 19 nt, Artificial Sequence
  Description of Artificial Sequence: Synthetic oligonucleotide
caaugcagagagcagauug

SEQ ID NO: 2915473 - RNA, 19 nt, Artificial Sequence
  Description of Artificial Sequence: Synthetic oligonucleotide
uuuguuuauuuguuucuga

SEQ ID NO: 2915474 - RNA, 19 nt, Artificial Sequence
  Description of Artificial Sequence: Synthetic oligonucleotide
uuucaauauugcuuaacaa

SEQ ID NO: 2915475 - RNA, 19 nt, Artificial Sequence
  Description of Artificial Sequence: Synthetic oligonucleotide
ugcuuaacaaaggaccggg

SEQ ID NO: 2915476 - RNA, 19 nt, Artificial Sequence
  Description of Artificial Sequence: Synthetic oligonucleotide
uuuaauuacgaaagaugua

SEQ ID NO: 2915477 - RNA, 19 nt, Artificial Sequence
  Description of Artificial Sequence: Synthetic oligonucleotide
cuacuuuauacaaagucca

SEQ ID NO: 2915478 - RNA, 19 nt, Artificial Sequence
  Description of Artificial Sequence: Synthetic oligonucleotide
aagauguaaaaugaugcau

SEQ ID NO: 2915479 - RNA, 19 nt, Artificial Sequence
  Description of Artificial Sequence: Synthetic oligonucleotide
auauugcuuaacaaaggac

SEQ ID NO: 2915480 - RNA, 19 nt, Artificial Sequence
  Description of Artificial Sequence: Synthetic oligonucleotide
uuuuguuuauuuguuucug

SEQ ID NO: 2915481 - RNA, 19 nt, Artificial Sequence
  Description of Artificial Sequence: Synthetic oligonucleotide
auuacgaaagauguaaaau

SEQ ID NO: 2915482 - RNA, 19 nt, Artificial Sequence
  Description of Artificial Sequence: Synthetic oligonucleotide
gaaaugcugggaaccaucg

SEQ ID NO: 2915483 - RNA, 19 nt, Artificial Sequence
  Description of Artificial Sequence: Synthetic oligonucleotide
aaaugcugggaaccaucgg

SEQ ID NO: 2915484 - RNA, 19 nt, Artificial Sequence
  Description of Artificial Sequence: Synthetic oligonucleotide
uuuauuuguuucugagaca

SEQ ID NO: 2915485 - RNA, 19 nt, Artificial Sequence
  Description of Artificial Sequence: Synthetic oligonucleotide
uccaaucuuucaauauugc

SEQ ID NO: 2915486 - RNA, 19 nt, Artificial Sequence
  Description of Artificial Sequence: Synthetic oligonucleotide
cuuucaauauugcuuaaca

SEQ ID NO: 2915487 - RNA, 19 nt, Artificial Sequence
  Description of Artificial Sequence: Synthetic oligonucleotide
gaguaauuggcugcaaaag

SEQ ID NO: 2915488 - RNA, 19 nt, Artificial Sequence
  Description of Artificial Sequence: Synthetic oligonucleotide
acaaaguccaaucuuucaa

SEQ ID NO: 2915489 - RNA, 19 nt, Artificial Sequence
  Description of Artificial Sequence: Synthetic oligonucleotide
aaaggaccgggaguuaggg

SEQ ID NO: 2915490 - RNA, 19 nt, Artificial Sequence
  Description of Artificial Sequence: Synthetic oligonucleotide
aaccauauugugcugcuuu

SEQ ID NO: 2915491 - RNA, 19 nt, Artificial Sequence
  Description of Artificial Sequence: Synthetic oligonucleotide
uaauuggcugcaaaaguau

SEQ ID NO: 2915492 - RNA, 19 nt, Artificial Sequence
  Description of Artificial Sequence: Synthetic oligonucleotide
aaaguccaaucuuucaaua

SEQ ID NO: 2915493 - RNA, 19 nt, Artificial Sequence
  Description of Artificial Sequence: Synthetic oligonucleotide
aaguccaaucuuucaauau

SEQ ID NO: 2915494 - RNA, 19 nt, Artificial Sequence
  Description of Artificial Sequence: Synthetic oligonucleotide
uuguuucugagacaggguu

SEQ ID NO: 2915495 - RNA, 19 nt, Artificial Sequence
  Description of Artificial Sequence: Synthetic oligonucleotide
ugggaagaguaauuggcug

SEQ ID NO: 2915496 - RNA, 19 nt, Artificial Sequence
  Description of Artificial Sequence: Synthetic oligonucleotide
gcuacuuuauacaaagucc

SEQ ID NO: 2915497 - RNA, 19 nt, Artificial Sequence
  Description of Artificial Sequence: Synthetic oligonucleotide
agaguaauuggcugcaaaa

SEQ ID NO: 2915498 - RNA, 19 nt, Artificial Sequence
  Description of Artificial Sequence: Synthetic oligonucleotide
uaauuacgaaagauguaaa

SEQ ID NO: 2915499 - RNA, 19 nt, Artificial Sequence
  Description of Artificial Sequence: Synthetic oligonucleotide
ucugagacaggguuucugu

SEQ ID NO: 2915500 - RNA, 19 nt, Artificial Sequence
  Description of Artificial Sequence: Synthetic oligonucleotide
aggaccgggaguuagggca

SEQ ID NO: 2915501 - RNA, 19 nt, Artificial Sequence
  Description of Artificial Sequence: Synthetic oligonucleotide
aagaguaauuggcugcaaa

SEQ ID NO: 2915502 - RNA, 19 nt, Artificial Sequence
  Description of Artificial Sequence: Synthetic oligonucleotide
auggcaggaagucugauua

SEQ ID NO: 2915503 - RNA, 19 nt, Artificial Sequence
  Description of Artificial Sequence: Synthetic oligonucleotide
ugggauggccccauccugg

SEQ ID NO: 2915504 - RNA, 19 nt, Artificial Sequence
  Description of Artificial Sequence: Synthetic oligonucleotide
gaaaugauggcuggaacuc

SEQ ID NO: 2915505 - RNA, 19 nt, Artificial Sequence
  Description of Artificial Sequence: Synthetic oligonucleotide
uauuuguuucugagacagg

SEQ ID NO: 2915506 - RNA, 19 nt, Artificial Sequence
  Description of Artificial Sequence: Synthetic oligonucleotide
gauggccccauccuggagc

SEQ ID NO: 2915507 - RNA, 19 nt, Artificial Sequence
  Description of Artificial Sequence: Synthetic oligonucleotide
gauguaaaaugaugcauua

SEQ ID NO: 2915508 - RNA, 19 nt, Artificial Sequence
  Description of Artificial Sequence: Synthetic oligonucleotide
uggaagcuacuuuauacaa

SEQ ID NO: 2915509 - RNA, 19 nt, Artificial Sequence
  Description of Artificial Sequence: Synthetic oligonucleotide
uuuguuucugagacagggu

SEQ ID NO: 2915510 - RNA, 19 nt, Artificial Sequence
  Description of Artificial Sequence: Synthetic oligonucleotide
uggagcaguggaaaugcug

SEQ ID NO: 2915511 - RNA, 19 nt, Artificial Sequence
  Description of Artificial Sequence: Synthetic oligonucleotide
uaucagcuugaugaaauga

SEQ ID NO: 2915512 - RNA, 19 nt, Artificial Sequence
  Description of Artificial Sequence: Synthetic oligonucleotide
ugcagagagcagauugugc

SEQ ID NO: 2915513 - RNA, 19 nt, Artificial Sequence
  Description of Artificial Sequence: Synthetic oligonucleotide
ucugccaggggcugggaag

SEQ ID NO: 2915514 - RNA, 19 nt, Artificial Sequence
  Description of Artificial Sequence: Synthetic oligonucleotide
guuagggcauggcaggaag

SEQ ID NO: 2915515 - RNA, 19 nt, Artificial Sequence
  Description of Artificial Sequence: Synthetic oligonucleotide
guaaaaugaugcauuauaa

SEQ ID NO: 2915516 - RNA, 19 nt, Artificial Sequence
  Description of Artificial Sequence: Synthetic oligonucleotide
uugcuuaacaaaggaccgg

SEQ ID NO: 2915517 - RNA, 19 nt, Artificial Sequence
  Description of Artificial Sequence: Synthetic oligonucleotide
gaaccaucggcacaaugca

SEQ ID NO: 2915518 - RNA, 19 nt, Artificial Sequence
  Description of Artificial Sequence: Synthetic oligonucleotide
aaugcagagagcagauugu

SEQ ID NO: 2915519 - RNA, 19 nt, Artificial Sequence
  Description of Artificial Sequence: Synthetic oligonucleotide
uuccacgaacauuaucagc

SEQ ID NO: 2915520 - RNA, 19 nt, Artificial Sequence
  Description of Artificial Sequence: Synthetic oligonucleotide
gguuccacgaacauuauca

SEQ ID NO: 2915521 - RNA, 19 nt, Artificial Sequence
  Description of Artificial Sequence: Synthetic oligonucleotide
ggagcaguggaaaugcugg

SEQ ID NO: 2915522 - RNA, 19 nt, Artificial Sequence
  Description of Artificial Sequence: Synthetic oligonucleotide
uuauaaaacuuggaagcua

SEQ ID NO: 2915523 - RNA, 19 nt, Artificial Sequence
  Description of Artificial Sequence: Synthetic oligonucleotide
cagaccuucggugaagggg

SEQ ID NO: 2915524 - RNA, 19 nt, Artificial Sequence
  Description of Artificial Sequence: Synthetic oligonucleotide
aaugauggcuggaacucug

SEQ ID NO: 2915525 - RNA, 19 nt, Artificial Sequence
  Description of Artificial Sequence: Synthetic oligonucleotide
uauuuccaucaaauugucu

SEQ ID NO: 2915526 - RNA, 19 nt, Artificial Sequence
  Description of Artificial Sequence: Synthetic oligonucleotide
uugugcugcuuuuaauuac

SEQ ID NO: 2915527 - RNA, 19 nt, Artificial Sequence
  Description of Artificial Sequence: Synthetic oligonucleotide
uacuuuauacaaaguccaa

SEQ ID NO: 2915528 - RNA, 19 nt, Artificial Sequence
  Description of Artificial Sequence: Synthetic oligonucleotide
cugauuaguuacugggaug

SEQ ID NO: 2915529 - RNA, 19 nt, Artificial Sequence
  Description of Artificial Sequence: Synthetic oligonucleotide
ugcugguuuuguuuauuug

SEQ ID NO: 2915530 - RNA, 19 nt, Artificial Sequence
  Description of Artificial Sequence: Synthetic oligonucleotide
ggaguuagggcauggcagg

SEQ ID NO: 2915531 - RNA, 19 nt, Artificial Sequence
  Description of Artificial Sequence: Synthetic oligonucleotide
auugugcugguuuuguuua

SEQ ID NO: 2915532 - RNA, 19 nt, Artificial Sequence
  Description of Artificial Sequence: Synthetic oligonucleotide
uaaaacuuggaagcuacuu

SEQ ID NO: 2915533 - RNA, 19 nt, Artificial Sequence
  Description of Artificial Sequence: Synthetic oligonucleotide
ucuccaccagcccauggug

SEQ ID NO: 2915534 - RNA, 19 nt, Artificial Sequence
  Description of Artificial Sequence: Synthetic oligonucleotide
auacaaaguccaaucuuuc

SEQ ID NO: 2915535 - RNA, 19 nt, Artificial Sequence
  Description of Artificial Sequence: Synthetic oligonucleotide
guuccacgaacauuaucag

SEQ ID NO: 2915536 - RNA, 19 nt, Artificial Sequence
  Description of Artificial Sequence: Synthetic oligonucleotide
ucuuucaauauugcuuaac

SEQ ID NO: 2915537 - RNA, 19 nt, Artificial Sequence
  Description of Artificial Sequence: Synthetic oligonucleotide
gcugcuuuuaauuacgaaa

SEQ ID NO: 2915538 - RNA, 19 nt, Artificial Sequence
  Description of Artificial Sequence: Synthetic oligonucleotide
guggaagcgguuccgggcg

SEQ ID NO: 2915539 - RNA, 19 nt, Artificial Sequence
  Description of Artificial Sequence: Synthetic oligonucleotide
ggaaccaucggcacaaugc

SEQ ID NO: 2915540 - RNA, 19 nt, Artificial Sequence
  Description of Artificial Sequence: Synthetic oligonucleotide
uaacaaaggaccgggaguu

SEQ ID NO: 2915541 - RNA, 19 nt, Artificial Sequence
  Description of Artificial Sequence: Synthetic oligonucleotide
guccaaucuuucaauauug

SEQ ID NO: 2915542 - RNA, 19 nt, Artificial Sequence
  Description of Artificial Sequence: Synthetic oligonucleotide
caugguggcggguuccacg

SEQ ID NO: 2915543 - RNA, 19 nt, Artificial Sequence
  Description of Artificial Sequence: Synthetic oligonucleotide
agauguaaaaugaugcauu

SEQ ID NO: 2915544 - RNA, 19 nt, Artificial Sequence
  Description of Artificial Sequence: Synthetic oligonucleotide
gaugaaaugauggcuggaa

SEQ ID NO: 2915545 - RNA, 19 nt, Artificial Sequence
  Description of Artificial Sequence: Synthetic oligonucleotide
ucuccccagaccuucggug

SEQ ID NO: 2915546 - RNA, 19 nt, Artificial Sequence
  Description of Artificial Sequence: Synthetic oligonucleotide
aaaugauggcuggaacucu

SEQ ID NO: 2915547 - RNA, 19 nt, Artificial Sequence
  Description of Artificial Sequence: Synthetic oligonucleotide
ucuguguguagcccuggcu

SEQ ID NO: 2915548 - RNA, 19 nt, Artificial Sequence
  Description of Artificial Sequence: Synthetic oligonucleotide
gagcaguggaaaugcuggg

SEQ ID NO: 2915549 - RNA, 19 nt, Artificial Sequence
  Description of Artificial Sequence: Synthetic oligonucleotide
acuuuauacaaaguccaau

SEQ ID NO: 2915550 - RNA, 19 nt, Artificial Sequence
  Description of Artificial Sequence: Synthetic oligonucleotide
uguuucugagacaggguuu

SEQ ID NO: 2915551 - RNA, 19 nt, Artificial Sequence
  Description of Artificial Sequence: Synthetic oligonucleotide
caaaggaccgggaguuagg

SEQ ID NO: 2915552 - RNA, 19 nt, Artificial Sequence
  Description of Artificial Sequence: Synthetic oligonucleotide
cugcaaaaguauuuccauc

SEQ ID NO: 2915553 - RNA, 19 nt, Artificial Sequence
  Description of Artificial Sequence: Synthetic oligonucleotide
uggaacucccucugccagg

SEQ ID NO: 2915554 - RNA, 19 nt, Artificial Sequence
  Description of Artificial Sequence: Synthetic oligonucleotide
acaaaggaccgggaguuag

SEQ ID NO: 2915555 - RNA, 19 nt, Artificial Sequence
  Description of Artificial Sequence: Synthetic oligonucleotide
acauuaucagcuugaugaa

SEQ ID NO: 2915556 - RNA, 19 nt, Artificial Sequence
  Description of Artificial Sequence: Synthetic oligonucleotide
gggaagaguaauuggcugc

SEQ ID NO: 2915557 - RNA, 19 nt, Artificial Sequence
  Description of Artificial Sequence: Synthetic oligonucleotide
uggcugcaaaaguauuucc

SEQ ID NO: 2915558 - RNA, 19 nt, Artificial Sequence
  Description of Artificial Sequence: Synthetic oligonucleotide
caaucuuucaauauugcuu

SEQ ID NO: 2915559 - RNA, 19 nt, Artificial Sequence
  Description of Artificial Sequence: Synthetic oligonucleotide
auauugugcugcuuuuaau

SEQ ID NO: 2915560 - RNA, 19 nt, Artificial Sequence
  Description of Artificial Sequence: Synthetic oligonucleotide
cgaaagauguaaaaugaug

SEQ ID NO: 2915561 - RNA, 19 nt, Artificial Sequence
  Description of Artificial Sequence: Synthetic oligonucleotide
guaauuggcugcaaaagua

SEQ ID NO: 2915562 - RNA, 19 nt, Artificial Sequence
  Description of Artificial Sequence: Synthetic oligonucleotide
uuagggcauggcaggaagu

SEQ ID NO: 2915563 - RNA, 19 nt, Artificial Sequence
  Description of Artificial Sequence: Synthetic oligonucleotide
uaguuacugggauggcccc

SEQ ID NO: 2915564 - RNA, 19 nt, Artificial Sequence
  Description of Artificial Sequence: Synthetic oligonucleotide
cacgaacauuaucagcuug

SEQ ID NO: 2915565 - RNA, 19 nt, Artificial Sequence
  Description of Artificial Sequence: Synthetic oligonucleotide
cuggaacucccucugccag

SEQ ID NO: 2915566 - RNA, 19 nt, Artificial Sequence
  Description of Artificial Sequence: Synthetic oligonucleotide
gcugggaagaguaauuggc

SEQ ID NO: 2915567 - RNA, 19 nt, Artificial Sequence
  Description of Artificial Sequence: Synthetic oligonucleotide
uguguguagcccuggcuau

SEQ ID NO: 2915568 - RNA, 19 nt, Artificial Sequence
  Description of Artificial Sequence: Synthetic oligonucleotide
aucagcuugaugaaaugau

SEQ ID NO: 2915569 - RNA, 19 nt, Artificial Sequence
  Description of Artificial Sequence: Synthetic oligonucleotide
cuccaccagcccauggugg

SEQ ID NO: 2915570 - RNA, 19 nt, Artificial Sequence
  Description of Artificial Sequence: Synthetic oligonucleotide
uccuggagcaguggaaaug

SEQ ID NO: 2915571 - RNA, 19 nt, Artificial Sequence
  Description of Artificial Sequence: Synthetic oligonucleotide
ugaugaaaugauggcugga

SEQ ID NO: 2915572 - RNA, 19 nt, Artificial Sequence
  Description of Artificial Sequence: Synthetic oligonucleotide
acgaacauuaucagcuuga

SEQ ID NO: 2915573 - RNA, 19 nt, Artificial Sequence
  Description of Artificial Sequence: Synthetic oligonucleotide
ugcugcuuuuaauuacgaa

SEQ ID NO: 2915574 - RNA, 19 nt, Artificial Sequence
  Description of Artificial Sequence: Synthetic oligonucleotide
cauauugugcugcuuuuaa

SEQ ID NO: 2915575 - RNA, 19 nt, Artificial Sequence
  Description of Artificial Sequence: Synthetic oligonucleotide
uacuaaccauauugugcug

SEQ ID NO: 2915576 - RNA, 19 nt, Artificial Sequence
  Description of Artificial Sequence: Synthetic oligonucleotide
gggaguuagggcauggcag

SEQ ID NO: 2915577 - RNA, 19 nt, Artificial Sequence
  Description of Artificial Sequence: Synthetic oligonucleotide
ggcugggaagaguaauugg

SEQ ID NO: 2915578 - RNA, 19 nt, Artificial Sequence
  Description of Artificial Sequence: Synthetic oligonucleotide
uugucucccuggcuucucc

SEQ ID NO: 2915579 - RNA, 19 nt, Artificial Sequence
  Description of Artificial Sequence: Synthetic oligonucleotide
aauugucucccuggcuucu

SEQ ID NO: 2915580 - RNA, 19 nt, Artificial Sequence
  Description of Artificial Sequence: Synthetic oligonucleotide
caaaaguauuuccaucaaa

SEQ ID NO: 2915581 - RNA, 19 nt, Artificial Sequence
  Description of Artificial Sequence: Synthetic oligonucleotide
aaccaucggcacaaugcag

SEQ ID NO: 2915582 - RNA, 19 nt, Artificial Sequence
  Description of Artificial Sequence: Synthetic oligonucleotide
cagagagcagauugugcug

SEQ ID NO: 2915583 - RNA, 19 nt, Artificial Sequence
  Description of Artificial Sequence: Synthetic oligonucleotide
uggcaggaagucugauuag

SEQ ID NO: 2915584 - RNA, 19 nt, Artificial Sequence
  Description of Artificial Sequence: Synthetic oligonucleotide
aauuggcugcaaaaguauu

SEQ ID NO: 2915585 - RNA, 19 nt, Artificial Sequence
  Description of Artificial Sequence: Synthetic oligonucleotide
gauugugcugguuuuguuu

SEQ ID NO: 2915586 - RNA, 19 nt, Artificial Sequence
  Description of Artificial Sequence: Synthetic oligonucleotide
ucucccuggcuucucccca

SEQ ID NO: 2915587 - RNA, 19 nt, Artificial Sequence
  Description of Artificial Sequence: Synthetic oligonucleotide
agcagauugugcugguuuu

SEQ ID NO: 2915588 - RNA, 19 nt, Artificial Sequence
  Description of Artificial Sequence: Synthetic oligonucleotide
augguggcggguuccacga

SEQ ID NO: 2915589 - RNA, 19 nt, Artificial Sequence
  Description of Artificial Sequence: Synthetic oligonucleotide
accaucggcacaaugcaga

SEQ ID NO: 2915590 - RNA, 19 nt, Artificial Sequence
  Description of Artificial Sequence: Synthetic oligonucleotide
gauuaguuacugggauggc

SEQ ID NO: 2915591 - RNA, 19 nt, Artificial Sequence
  Description of Artificial Sequence: Synthetic oligonucleotide
acuuggaagcuacuuuaua

SEQ ID NO: 2915592 - RNA, 19 nt, Artificial Sequence
  Description of Artificial Sequence: Synthetic oligonucleotide
aagcgguuccgggcgggcc

SEQ ID NO: 2915593 - RNA, 19 nt, Artificial Sequence
  Description of Artificial Sequence: Synthetic oligonucleotide
caguggaaaugcugggaac

SEQ ID NO: 2915594 - RNA, 19 nt, Artificial Sequence
  Description of Artificial Sequence: Synthetic oligonucleotide
gguggaagcgguuccgggc

SEQ ID NO: 2915595 - RNA, 19 nt, Artificial Sequence
  Description of Artificial Sequence: Synthetic oligonucleotide
aacuuggaagcuacuuuau

SEQ ID NO: 2915596 - RNA, 19 nt, Artificial Sequence
  Description of Artificial Sequence: Synthetic oligonucleotide
augcagagagcagauugug

SEQ ID NO: 2915597 - RNA, 19 nt, Artificial Sequence
  Description of Artificial Sequence: Synthetic oligonucleotide
auuggcugcaaaaguauuu

SEQ ID NO: 2915598 - RNA, 19 nt, Artificial Sequence
  Description of Artificial Sequence: Synthetic oligonucleotide
uucuccccagaccuucggu

SEQ ID NO: 2915599 - RNA, 19 nt, Artificial Sequence
  Description of Artificial Sequence: Synthetic oligonucleotide
acgaaagauguaaaaugau

SEQ ID NO: 2915600 - RNA, 19 nt, Artificial Sequence
  Description of Artificial Sequence: Synthetic oligonucleotide
ugucucccuggcuucuccc

SEQ ID NO: 2915601 - RNA, 19 nt, Artificial Sequence
  Description of Artificial Sequence: Synthetic oligonucleotide
gcugguuuuguuuauuugu

SEQ ID NO: 2915602 - RNA, 19 nt, Artificial Sequence
  Description of Artificial Sequence: Synthetic oligonucleotide
accauauugugcugcuuuu

SEQ ID NO: 2915603 - RNA, 19 nt, Artificial Sequence
  Description of Artificial Sequence: Synthetic oligonucleotide
uagggcauggcaggaaguc

SEQ ID NO: 2915604 - RNA, 19 nt, Artificial Sequence
  Description of Artificial Sequence: Synthetic oligonucleotide
auguaaaaugaugcauuau

SEQ ID NO: 2915605 - RNA, 19 nt, Artificial Sequence
  Description of Artificial Sequence: Synthetic oligonucleotide
aagcuacuuuauacaaagu

SEQ ID NO: 2915606 - RNA, 19 nt, Artificial Sequence
  Description of Artificial Sequence: Synthetic oligonucleotide
augcauuauaaaacuugga

SEQ ID NO: 2915607 - RNA, 19 nt, Artificial Sequence
  Description of Artificial Sequence: Synthetic oligonucleotide
caaauugucucccuggcuu

SEQ ID NO: 2915608 - RNA, 19 nt, Artificial Sequence
  Description of Artificial Sequence: Synthetic oligonucleotide
agcaguggaaaugcuggga

SEQ ID NO: 2915609 - RNA, 19 nt, Artificial Sequence
  Description of Artificial Sequence: Synthetic oligonucleotide
gucugauuaguuacuggga

SEQ ID NO: 2915610 - RNA, 19 nt, Artificial Sequence
  Description of Artificial Sequence: Synthetic oligonucleotide
ugcugggaaccaucggcac

SEQ ID NO: 2915611 - RNA, 19 nt, Artificial Sequence
  Description of Artificial Sequence: Synthetic oligonucleotide
cuucuccccagaccuucgg

SEQ ID NO: 2915612 - RNA, 19 nt, Artificial Sequence
  Description of Artificial Sequence: Synthetic oligonucleotide
cuguguguagcccuggcua

SEQ ID NO: 2915613 - RNA, 19 nt, Artificial Sequence
  Description of Artificial Sequence: Synthetic oligonucleotide
auaaaacuuggaagcuacu

SEQ ID NO: 2915614 - RNA, 19 nt, Artificial Sequence
  Description of Artificial Sequence: Synthetic oligonucleotide
cuggcuucuccccagaccu

SEQ ID NO: 2915615 - RNA, 19 nt, Artificial Sequence
  Description of Artificial Sequence: Synthetic oligonucleotide
auggccccauccuggagca

SEQ ID NO: 2915616 - RNA, 19 nt, Artificial Sequence
  Description of Artificial Sequence: Synthetic oligonucleotide
ggaacucccucugccaggg

SEQ ID NO: 2915617 - RNA, 19 nt, Artificial Sequence
  Description of Artificial Sequence: Synthetic oligonucleotide
aucuuucaauauugcuuaa

SEQ ID NO: 2915618 - RNA, 19 nt, Artificial Sequence
  Description of Artificial Sequence: Synthetic oligonucleotide
gcagagagcagauugugcu

SEQ ID NO: 2915619 - RNA, 19 nt, Artificial Sequence
  Description of Artificial Sequence: Synthetic oligonucleotide
cugggauggccccauccug

SEQ ID NO: 2915620 - RNA, 19 nt, Artificial Sequence
  Description of Artificial Sequence: Synthetic oligonucleotide
ccuggagcaguggaaaugc

SEQ ID NO: 2915621 - RNA, 19 nt, Artificial Sequence
  Description of Artificial Sequence: Synthetic oligonucleotide
agauugugcugguuuuguu

SEQ ID NO: 2915622 - RNA, 19 nt, Artificial Sequence
  Description of Artificial Sequence: Synthetic oligonucleotide
caaaguccaaucuuucaau

SEQ ID NO: 2915623 - RNA, 19 nt, Artificial Sequence
  Description of Artificial Sequence: Synthetic oligonucleotide
cugggaagaguaauuggcu

SEQ ID NO: 2915624 - RNA, 19 nt, Artificial Sequence
  Description of Artificial Sequence: Synthetic oligonucleotide
uuccgggcgggccucucca

SEQ ID NO: 2915625 - RNA, 19 nt, Artificial Sequence
  Description of Artificial Sequence: Synthetic oligonucleotide
gucucccuggcuucucccc

SEQ ID NO: 2915626 - RNA, 19 nt, Artificial Sequence
  Description of Artificial Sequence: Synthetic oligonucleotide
ucggcacaaugcagagagc

SEQ ID NO: 2915627 - RNA, 19 nt, Artificial Sequence
  Description of Artificial Sequence: Synthetic oligonucleotide
auugucucccuggcuucuc

SEQ ID NO: 2915628 - RNA, 19 nt, Artificial Sequence
  Description of Artificial Sequence: Synthetic oligonucleotide
augcugggaaccaucggca

SEQ ID NO: 2915629 - RNA, 19 nt, Artificial Sequence
  Description of Artificial Sequence: Synthetic oligonucleotide
ggcugcaaaaguauuucca

SEQ ID NO: 2915630 - RNA, 19 nt, Artificial Sequence
  Description of Artificial Sequence: Synthetic oligonucleotide
augaugcauuauaaaacuu

SEQ ID NO: 2915631 - RNA, 19 nt, Artificial Sequence
  Description of Artificial Sequence: Synthetic oligonucleotide
uggaaaugcugggaaccau

SEQ ID NO: 2915632 - RNA, 19 nt, Artificial Sequence
  Description of Artificial Sequence: Synthetic oligonucleotide
uugugcugguuuuguuuau

SEQ ID NO: 2915633 - RNA, 19 nt, Artificial Sequence
  Description of Artificial Sequence: Synthetic oligonucleotide
ggaagaguaauuggcugca

SEQ ID NO: 2915634 - RNA, 19 nt, Artificial Sequence
  Description of Artificial Sequence: Synthetic oligonucleotide
agcccaugguggcggguuc

SEQ ID NO: 2915635 - RNA, 19 nt, Artificial Sequence
  Description of Artificial Sequence: Synthetic oligonucleotide
ugugcugguuuuguuuauu

SEQ ID NO: 2915636 - RNA, 19 nt, Artificial Sequence
  Description of Artificial Sequence: Synthetic oligonucleotide
ggaaaugcugggaaccauc

SEQ ID NO: 2915637 - RNA, 19 nt, Artificial Sequence
  Description of Artificial Sequence: Synthetic oligonucleotide
cuaaccauauugugcugcu

SEQ ID NO: 2915638 - RNA, 19 nt, Artificial Sequence
  Description of Artificial Sequence: Synthetic oligonucleotide
ccaucaaauugucucccug

SEQ ID NO: 2915639 - RNA, 19 nt, Artificial Sequence
  Description of Artificial Sequence: Synthetic oligonucleotide
gagcagauugugcugguuu

SEQ ID NO: 2915640 - RNA, 19 nt, Artificial Sequence
  Description of Artificial Sequence: Synthetic oligonucleotide
cauuaucagcuugaugaaa

SEQ ID NO: 2915641 - RNA, 19 nt, Artificial Sequence
  Description of Artificial Sequence: Synthetic oligonucleotide
guggaaaugcugggaacca

SEQ ID NO: 2915642 - RNA, 19 nt, Artificial Sequence
  Description of Artificial Sequence: Synthetic oligonucleotide
agcgguuccgggcgggccu

SEQ ID NO: 2915643 - RNA, 19 nt, Artificial Sequence
  Description of Artificial Sequence: Synthetic oligonucleotide
cuccccagaccuucgguga

SEQ ID NO: 2915644 - RNA, 19 nt, Artificial Sequence
  Description of Artificial Sequence: Synthetic oligonucleotide
ggguggaagcgguuccggg

SEQ ID NO: 2915645 - RNA, 19 nt, Artificial Sequence
  Description of Artificial Sequence: Synthetic oligonucleotide
uccccagaccuucggugaa

SEQ ID NO: 2915646 - RNA, 19 nt, Artificial Sequence
  Description of Artificial Sequence: Synthetic oligonucleotide
auccuggagcaguggaaau

SEQ ID NO: 2915647 - RNA, 19 nt, Artificial Sequence
  Description of Artificial Sequence: Synthetic oligonucleotide
gcaaaaguauuuccaucaa

SEQ ID NO: 2915648 - RNA, 19 nt, Artificial Sequence
  Description of Artificial Sequence: Synthetic oligonucleotide
gcacaaugcagagagcaga

SEQ ID NO: 2915649 - RNA, 19 nt, Artificial Sequence
  Description of Artificial Sequence: Synthetic oligonucleotide
aguuacugggauggcccca

SEQ ID NO: 2915650 - RNA, 19 nt, Artificial Sequence
  Description of Artificial Sequence: Synthetic oligonucleotide
agggcauggcaggaagucu

SEQ ID NO: 2915651 - RNA, 19 nt, Artificial Sequence
  Description of Artificial Sequence: Synthetic oligonucleotide
gcuuuuaauuacgaaagau

SEQ ID NO: 2915652 - RNA, 19 nt, Artificial Sequence
  Description of Artificial Sequence: Synthetic oligonucleotide
aacaaaggaccgggaguua

SEQ ID NO: 2915653 - RNA, 19 nt, Artificial Sequence
  Description of Artificial Sequence: Synthetic oligonucleotide
cucccuggcuucuccccag

SEQ ID NO: 2915654 - RNA, 19 nt, Artificial Sequence
  Description of Artificial Sequence: Synthetic oligonucleotide
gaacucccucugccagggg

SEQ ID NO: 2915655 - RNA, 19 nt, Artificial Sequence
  Description of Artificial Sequence: Synthetic oligonucleotide
gcugcaaaaguauuuccau

SEQ ID NO: 2915656 - RNA, 19 nt, Artificial Sequence
  Description of Artificial Sequence: Synthetic oligonucleotide
gggcauggcaggaagucug

SEQ ID NO: 2915657 - RNA, 19 nt, Artificial Sequence
  Description of Artificial Sequence: Synthetic oligonucleotide
cauccuggagcaguggaaa

SEQ ID NO: 2915658 - RNA, 19 nt, Artificial Sequence
  Description of Artificial Sequence: Synthetic oligonucleotide
cugggaaccaucggcacaa

SEQ ID NO: 2915659 - RNA, 19 nt, Artificial Sequence
  Description of Artificial Sequence: Synthetic oligonucleotide
gcuugaugaaaugauggcu

SEQ ID NO: 2915660 - RNA, 19 nt, Artificial Sequence
  Description of Artificial Sequence: Synthetic oligonucleotide
accgggaguuagggcaugg

SEQ ID NO: 2915661 - RNA, 19 nt, Artificial Sequence
  Description of Artificial Sequence: Synthetic oligonucleotide
aguuagggcauggcaggaa

SEQ ID NO: 2915662 - RNA, 19 nt, Artificial Sequence
  Description of Artificial Sequence: Synthetic oligonucleotide
ccaucggcacaaugcagag

SEQ ID NO: 2915663 - RNA, 19 nt, Artificial Sequence
  Description of Artificial Sequence: Synthetic oligonucleotide
gggcugggaagaguaauug

SEQ ID NO: 2915664 - RNA, 19 nt, Artificial Sequence
  Description of Artificial Sequence: Synthetic oligonucleotide
gaguuagggcauggcagga

SEQ ID NO: 2915665 - RNA, 19 nt, Artificial Sequence
  Description of Artificial Sequence: Synthetic oligonucleotide
gguggcggguuccacgaac

SEQ ID NO: 2915666 - RNA, 19 nt, Artificial Sequence
  Description of Artificial Sequence: Synthetic oligonucleotide
gaagaguaauuggcugcaa

SEQ ID NO: 2915667 - RNA, 19 nt, Artificial Sequence
  Description of Artificial Sequence: Synthetic oligonucleotide
ccuggcuucuccccagacc

SEQ ID NO: 2915668 - RNA, 19 nt, Artificial Sequence
  Description of Artificial Sequence: Synthetic oligonucleotide
gggaaccaucggcacaaug

SEQ ID NO: 2915669 - RNA, 19 nt, Artificial Sequence
  Description of Artificial Sequence: Synthetic oligonucleotide
ggaagcuacuuuauacaaa

SEQ ID NO: 2915670 - RNA, 19 nt, Artificial Sequence
  Description of Artificial Sequence: Synthetic oligonucleotide
gcggguuccacgaacauua

SEQ ID NO: 2915671 - RNA, 19 nt, Artificial Sequence
  Description of Artificial Sequence: Synthetic oligonucleotide
aggggcugggaagaguaau

SEQ ID NO: 2915672 - RNA, 19 nt, Artificial Sequence
  Description of Artificial Sequence: Synthetic oligonucleotide
uaaccauauugugcugcuu

SEQ ID NO: 2915673 - RNA, 19 nt, Artificial Sequence
  Description of Artificial Sequence: Synthetic oligonucleotide
uggcggguuccacgaacau

SEQ ID NO: 2915674 - RNA, 19 nt, Artificial Sequence
  Description of Artificial Sequence: Synthetic oligonucleotide
gcagauugugcugguuuug

SEQ ID NO: 2915675 - RNA, 19 nt, Artificial Sequence
  Description of Artificial Sequence: Synthetic oligonucleotide
ccaaucuuucaauauugcu

SEQ ID NO: 2915676 - RNA, 19 nt, Artificial Sequence
  Description of Artificial Sequence: Synthetic oligonucleotide
uuacugggauggccccauc

SEQ ID NO: 2915677 - RNA, 19 nt, Artificial Sequence
  Description of Artificial Sequence: Synthetic oligonucleotide
acaaugcagagagcagauu

SEQ ID NO: 2915678 - RNA, 19 nt, Artificial Sequence
  Description of Artificial Sequence: Synthetic oligonucleotide
ucccucugccaggggcugg

SEQ ID NO: 2915679 - RNA, 19 nt, Artificial Sequence
  Description of Artificial Sequence: Synthetic oligonucleotide
gugcugcuuuuaauuacga

SEQ ID NO: 2915680 - RNA, 19 nt, Artificial Sequence
  Description of Artificial Sequence: Synthetic oligonucleotide
gcugggaaccaucggcaca

SEQ ID NO: 2915681 - RNA, 19 nt, Artificial Sequence
  Description of Artificial Sequence: Synthetic oligonucleotide
guggcggguuccacgaaca

SEQ ID NO: 2915682 - RNA, 19 nt, Artificial Sequence
  Description of Artificial Sequence: Synthetic oligonucleotide
ggguuccacgaacauuauc

SEQ ID NO: 2915683 - RNA, 19 nt, Artificial Sequence
  Description of Artificial Sequence: Synthetic oligonucleotide
cucuccaccagcccauggu

SEQ ID NO: 2915684 - RNA, 19 nt, Artificial Sequence
  Description of Artificial Sequence: Synthetic oligonucleotide
ccagaccuucggugaaggg

SEQ ID NO: 2915685 - RNA, 19 nt, Artificial Sequence
  Description of Artificial Sequence: Synthetic oligonucleotide
gagagcagauugugcuggu

SEQ ID NO: 2915686 - RNA, 19 nt, Artificial Sequence
  Description of Artificial Sequence: Synthetic oligonucleotide
agagcagauugugcugguu

SEQ ID NO: 2915687 - RNA, 19 nt, Artificial Sequence
  Description of Artificial Sequence: Synthetic oligonucleotide
gggguggaagcgguuccgg

SEQ ID NO: 2915688 - RNA, 19 nt, Artificial Sequence
  Description of Artificial Sequence: Synthetic oligonucleotide
cauggcaggaagucugauu

SEQ ID NO: 2915689 - RNA, 19 nt, Artificial Sequence
  Description of Artificial Sequence: Synthetic oligonucleotide
gugcugguuuuguuuauuu

SEQ ID NO: 2915690 - RNA, 19 nt, Artificial Sequence
  Description of Artificial Sequence: Synthetic oligonucleotide
ugccaggggcugggaagag

SEQ ID NO: 2915691 - RNA, 19 nt, Artificial Sequence
  Description of Artificial Sequence: Synthetic oligonucleotide
cccagaccuucggugaagg

SEQ ID NO: 2915692 - RNA, 19 nt, Artificial Sequence
  Description of Artificial Sequence: Synthetic oligonucleotide
gcuucuccccagaccuucg

SEQ ID NO: 2915693 - RNA, 19 nt, Artificial Sequence
  Description of Artificial Sequence: Synthetic oligonucleotide
cagauugugcugguuuugu

SEQ ID NO: 2915694 - RNA, 19 nt, Artificial Sequence
  Description of Artificial Sequence: Synthetic oligonucleotide
uggcuucuccccagaccuu

SEQ ID NO: 2915695 - RNA, 19 nt, Artificial Sequence
  Description of Artificial Sequence: Synthetic oligonucleotide
gggccucuccaccagccca

SEQ ID NO: 2915696 - RNA, 19 nt, Artificial Sequence
  Description of Artificial Sequence: Synthetic oligonucleotide
ccuggaacucccucugcca

SEQ ID NO: 2915697 - RNA, 19 nt, Artificial Sequence
  Description of Artificial Sequence: Synthetic oligonucleotide
ugguggcggguuccacgaa

SEQ ID NO: 2915698 - RNA, 19 nt, Artificial Sequence
  Description of Artificial Sequence: Synthetic oligonucleotide
gaccgggaguuagggcaug

SEQ ID NO: 2915699 - RNA, 19 nt, Artificial Sequence
  Description of Artificial Sequence: Synthetic oligonucleotide
ggcuucuccccagaccuuc

SEQ ID NO: 2915700 - RNA, 19 nt, Artificial Sequence
  Description of Artificial Sequence: Synthetic oligonucleotide
gcuuaacaaaggaccggga

SEQ ID NO: 2915701 - RNA, 19 nt, Artificial Sequence
  Description of Artificial Sequence: Synthetic oligonucleotide
uccgggcgggccucuccac

SEQ ID NO: 2915702 - RNA, 19 nt, Artificial Sequence
  Description of Artificial Sequence: Synthetic oligonucleotide
caucggcacaaugcagaga

SEQ ID NO: 2915703 - RNA, 19 nt, Artificial Sequence
  Description of Artificial Sequence: Synthetic oligonucleotide
guuacugggauggccccau

SEQ ID NO: 2915704 - RNA, 19 nt, Artificial Sequence
  Description of Artificial Sequence: Synthetic oligonucleotide
ccucuccaccagcccaugg

SEQ ID NO: 2915705 - RNA, 19 nt, Artificial Sequence
  Description of Artificial Sequence: Synthetic oligonucleotide
ccaggggcugggaagagua

SEQ ID NO: 2915706 - RNA, 19 nt, Artificial Sequence
  Description of Artificial Sequence: Synthetic oligonucleotide
cggcacaaugcagagagca

SEQ ID NO: 2915707 - RNA, 19 nt, Artificial Sequence
  Description of Artificial Sequence: Synthetic oligonucleotide
cucugccaggggcugggaa

SEQ ID NO: 2915708 - RNA, 19 nt, Artificial Sequence
  Description of Artificial Sequence: Synthetic oligonucleotide
cccauccuggagcagugga

SEQ ID NO: 2915709 - RNA, 19 nt, Artificial Sequence
  Description of Artificial Sequence: Synthetic oligonucleotide
ggcauggcaggaagucuga

SEQ ID NO: 2915710 - RNA, 19 nt, Artificial Sequence
  Description of Artificial Sequence: Synthetic oligonucleotide
ccauccuggagcaguggaa

SEQ ID NO: 2915711 - RNA, 19 nt, Artificial Sequence
  Description of Artificial Sequence: Synthetic oligonucleotide
cuggagcaguggaaaugcu

SEQ ID NO: 2915712 - RNA, 19 nt, Artificial Sequence
  Description of Artificial Sequence: Synthetic oligonucleotide
caggggcugggaagaguaa

SEQ ID NO: 2915713 - RNA, 19 nt, Artificial Sequence
  Description of Artificial Sequence: Synthetic oligonucleotide
cgggaguuagggcauggca

SEQ ID NO: 2915714 - RNA, 19 nt, Artificial Sequence
  Description of Artificial Sequence: Synthetic oligonucleotide
ccaccagcccaugguggcg

SEQ ID NO: 2915715 - RNA, 19 nt, Artificial Sequence
  Description of Artificial Sequence: Synthetic oligonucleotide
ggcgggccucuccaccagc

SEQ ID NO: 2915716 - RNA, 19 nt, Artificial Sequence
  Description of Artificial Sequence: Synthetic oligonucleotide
ugggaaccaucggcacaau

SEQ ID NO: 2915717 - RNA, 19 nt, Artificial Sequence
  Description of Artificial Sequence: Synthetic oligonucleotide
uggccccauccuggagcag

SEQ ID NO: 2915718 - RNA, 19 nt, Artificial Sequence
  Description of Artificial Sequence: Synthetic oligonucleotide
gcgggccucuccaccagcc

SEQ ID NO: 2915719 - RNA, 19 nt, Artificial Sequence
  Description of Artificial Sequence: Synthetic oligonucleotide
gcccaugguggcggguucc

SEQ ID NO: 2915720 - RNA, 19 nt, Artificial Sequence
  Description of Artificial Sequence: Synthetic oligonucleotide
ccgggaguuagggcauggc

SEQ ID NO: 2915721 - RNA, 19 nt, Artificial Sequence
  Description of Artificial Sequence: Synthetic oligonucleotide
gcaggaagucugauuaguu

SEQ ID NO: 2915722 - RNA, 19 nt, Artificial Sequence
  Description of Artificial Sequence: Synthetic oligonucleotide
ccgggcgggccucuccacc

SEQ ID NO: 2915723 - RNA, 19 nt, Artificial Sequence
  Description of Artificial Sequence: Synthetic oligonucleotide
ccauauugugcugcuuuua

SEQ ID NO: 2915724 - RNA, 19 nt, Artificial Sequence
  Description of Artificial Sequence: Synthetic oligonucleotide
ccccagaccuucggugaag

SEQ ID NO: 2915725 - RNA, 19 nt, Artificial Sequence
  Description of Artificial Sequence: Synthetic oligonucleotide
ggccccauccuggagcagu

SEQ ID NO: 2915726 - RNA, 19 nt, Artificial Sequence
  Description of Artificial Sequence: Synthetic oligonucleotide
ggggcugggaagaguaauu

SEQ ID NO: 2915727 - RNA, 19 nt, Artificial Sequence
  Description of Artificial Sequence: Synthetic oligonucleotide
ccaugguggcggguuccac

SEQ ID NO: 2915728 - RNA, 19 nt, Artificial Sequence
  Description of Artificial Sequence: Synthetic oligonucleotide
ccacgaacauuaucagcuu

SEQ ID NO: 2915729 - RNA, 19 nt, Artificial Sequence
  Description of Artificial Sequence: Synthetic oligonucleotide
ggcggguuccacgaacauu

SEQ ID NO: 2915730 - RNA, 19 nt, Artificial Sequence
  Description of Artificial Sequence: Synthetic oligonucleotide
ggaccgggaguuagggcau

SEQ ID NO: 2915731 - RNA, 19 nt, Artificial Sequence
  Description of Artificial Sequence: Synthetic oligonucleotide
cagcccaugguggcggguu

SEQ ID NO: 2915732 - RNA, 19 nt, Artificial Sequence
  Description of Artificial Sequence: Synthetic oligonucleotide
cgaacauuaucagcuugau

SEQ ID NO: 2915733 - RNA, 19 nt, Artificial Sequence
  Description of Artificial Sequence: Synthetic oligonucleotide
cgggcgggccucuccacca

SEQ ID NO: 2915734 - RNA, 19 nt, Artificial Sequence
  Description of Artificial Sequence: Synthetic oligonucleotide
ggccucuccaccagcccau

SEQ ID NO: 2915735 - RNA, 19 nt, Artificial Sequence
  Description of Artificial Sequence: Synthetic oligonucleotide
gguuccgggcgggccucuc

SEQ ID NO: 2915736 - RNA, 19 nt, Artificial Sequence
  Description of Artificial Sequence: Synthetic oligonucleotide
gcauggcaggaagucugau

SEQ ID NO: 2915737 - RNA, 19 nt, Artificial Sequence
  Description of Artificial Sequence: Synthetic oligonucleotide
gcgguuccgggcgggccuc

SEQ ID NO: 2915738 - RNA, 19 nt, Artificial Sequence
  Description of Artificial Sequence: Synthetic oligonucleotide
gccaggggcugggaagagu

SEQ ID NO: 2915739 - RNA, 19 nt, Artificial Sequence
  Description of Artificial Sequence: Synthetic oligonucleotide
cggguuccacgaacauuau

SEQ ID NO: 2915740 - RNA, 19 nt, Artificial Sequence
  Description of Artificial Sequence: Synthetic oligonucleotide
ccagcccaugguggcgggu

SEQ ID NO: 2915741 - RNA, 19 nt, Artificial Sequence
  Description of Artificial Sequence: Synthetic oligonucleotide
cgguuccgggcgggccucu

SEQ ID NO: 2915742 - RNA, 19 nt, Artificial Sequence
  Description of Artificial Sequence: Synthetic oligonucleotide
uuauauacaaaucauagac

SEQ ID NO: 2915743 - RNA, 19 nt, Artificial Sequence
  Description of Artificial Sequence: Synthetic oligonucleotide
ugucaaaugcacuugaucg

SEQ ID NO: 2915744 - RNA, 19 nt, Artificial Sequence
  Description of Artificial Sequence: Synthetic oligonucleotide
cauaauaaaucucauaugc

SEQ ID NO: 2915745 - RNA, 19 nt, Artificial Sequence
  Description of Artificial Sequence: Synthetic oligonucleotide
ucauaaaauggauucaucg

SEQ ID NO: 2915746 - RNA, 19 nt, Artificial Sequence
  Description of Artificial Sequence: Synthetic oligonucleotide
cauguuuucauccacaagg

SEQ ID NO: 2915747 - RNA, 19 nt, Artificial Sequence
  Description of Artificial Sequence: Synthetic oligonucleotide
aaacuuuauauacaaauca

SEQ ID NO: 2915748 - RNA, 19 nt, Artificial Sequence
  Description of Artificial Sequence: Synthetic oligonucleotide
uuaucuucaauauauagcu

SEQ ID NO: 2915749 - RNA, 19 nt, Artificial Sequence
  Description of Artificial Sequence: Synthetic oligonucleotide
uaauaaaucucauaugccc

SEQ ID NO: 2915750 - RNA, 19 nt, Artificial Sequence
  Description of Artificial Sequence: Synthetic oligonucleotide
uuauuagaaagccacaugu

SEQ ID NO: 2915751 - RNA, 19 nt, Artificial Sequence
  Description of Artificial Sequence: Synthetic oligonucleotide
uuuaaguacauguuauuag

SEQ ID NO: 2915752 - RNA, 19 nt, Artificial Sequence
  Description of Artificial Sequence: Synthetic oligonucleotide
auuaucuucaauauauagc

SEQ ID NO: 2915753 - RNA, 19 nt, Artificial Sequence
  Description of Artificial Sequence: Synthetic oligonucleotide
aauggauucaucgaaaacu

SEQ ID NO: 2915754 - RNA, 19 nt, Artificial Sequence
  Description of Artificial Sequence: Synthetic oligonucleotide
cuccauuuagcuuaaaagg

SEQ ID NO: 2915755 - RNA, 19 nt, Artificial Sequence
  Description of Artificial Sequence: Synthetic oligonucleotide
cuuuauuccaucuucuugc

SEQ ID NO: 2915756 - RNA, 19 nt, Artificial Sequence
  Description of Artificial Sequence: Synthetic oligonucleotide
agcauaauaaaucucauau

SEQ ID NO: 2915757 - RNA, 19 nt, Artificial Sequence
  Description of Artificial Sequence: Synthetic oligonucleotide
ugggccaacaauuacaaag

SEQ ID NO: 2915758 - RNA, 19 nt, Artificial Sequence
  Description of Artificial Sequence: Synthetic oligonucleotide
ucuccauuuagcuuaaaag

SEQ ID NO: 2915759 - RNA, 19 nt, Artificial Sequence
  Description of Artificial Sequence: Synthetic oligonucleotide
cauguuauuagaaagccac

SEQ ID NO: 2915760 - RNA, 19 nt, Artificial Sequence
  Description of Artificial Sequence: Synthetic oligonucleotide
aaauggauucaucgaaaac

SEQ ID NO: 2915761 - RNA, 19 nt, Artificial Sequence
  Description of Artificial Sequence: Synthetic oligonucleotide
auauacaaaucauagacau

SEQ ID NO: 2915762 - RNA, 19 nt, Artificial Sequence
  Description of Artificial Sequence: Synthetic oligonucleotide
auacaaaucauagacauca

SEQ ID NO: 2915763 - RNA, 19 nt, Artificial Sequence
  Description of Artificial Sequence: Synthetic oligonucleotide
aguucuuuauuccaucuuc

SEQ ID NO: 2915764 - RNA, 19 nt, Artificial Sequence
  Description of Artificial Sequence: Synthetic oligonucleotide
uauauacaaaucauagaca

SEQ ID NO: 2915765 - RNA, 19 nt, Artificial Sequence
  Description of Artificial Sequence: Synthetic oligonucleotide
uuuauauacaaaucauaga

SEQ ID NO: 2915766 - RNA, 19 nt, Artificial Sequence
  Description of Artificial Sequence: Synthetic oligonucleotide
aaagguguuucuuuccaag

SEQ ID NO: 2915767 - RNA, 19 nt, Artificial Sequence
  Description of Artificial Sequence: Synthetic oligonucleotide
uaaagaaguucuuuauucc

SEQ ID NO: 2915768 - RNA, 19 nt, Artificial Sequence
  Description of Artificial Sequence: Synthetic oligonucleotide
uccauuuagcuuaaaaggu

SEQ ID NO: 2915769 - RNA, 19 nt, Artificial Sequence
  Description of Artificial Sequence: Synthetic oligonucleotide
aaaucauagacaucaguaa

SEQ ID NO: 2915770 - RNA, 19 nt, Artificial Sequence
  Description of Artificial Sequence: Synthetic oligonucleotide
auaauaaaucucauaugcc

SEQ ID NO: 2915771 - RNA, 19 nt, Artificial Sequence
  Description of Artificial Sequence: Synthetic oligonucleotide
agcagcaugggcuaugaac

SEQ ID NO: 2915772 - RNA, 19 nt, Artificial Sequence
  Description of Artificial Sequence: Synthetic oligonucleotide
aaucauagacaucaguaaa

SEQ ID NO: 2915773 - RNA, 19 nt, Artificial Sequence
  Description of Artificial Sequence: Synthetic oligonucleotide
cauuaucuucaauauauag

SEQ ID NO: 2915774 - RNA, 19 nt, Artificial Sequence
  Description of Artificial Sequence: Synthetic oligonucleotide
uucaucgaaaacuuuauau

SEQ ID NO: 2915775 - RNA, 19 nt, Artificial Sequence
  Description of Artificial Sequence: Synthetic oligonucleotide
caucgaaaacuuuauauac

SEQ ID NO: 2915776 - RNA, 19 nt, Artificial Sequence
  Description of Artificial Sequence: Synthetic oligonucleotide
acaaaugccgauacaaacc

SEQ ID NO: 2915777 - RNA, 19 nt, Artificial Sequence
  Description of Artificial Sequence: Synthetic oligonucleotide
guaaagaaguucuuuauuc

SEQ ID NO: 2915778 - RNA, 19 nt, Artificial Sequence
  Description of Artificial Sequence: Synthetic oligonucleotide
uggauuaucauggugggcc

SEQ ID NO: 2915779 - RNA, 19 nt, Artificial Sequence
  Description of Artificial Sequence: Synthetic oligonucleotide
auaaaauggauucaucgaa

SEQ ID NO: 2915780 - RNA, 19 nt, Artificial Sequence
  Description of Artificial Sequence: Synthetic oligonucleotide
cauucauugaauuugucca

SEQ ID NO: 2915781 - RNA, 19 nt, Artificial Sequence
  Description of Artificial Sequence: Synthetic oligonucleotide
auucauugaauuuguccac

SEQ ID NO: 2915782 - RNA, 19 nt, Artificial Sequence
  Description of Artificial Sequence: Synthetic oligonucleotide
uugccucacaucaugaagc

SEQ ID NO: 2915783 - RNA, 19 nt, Artificial Sequence
  Description of Artificial Sequence: Synthetic oligonucleotide
ucgaaaacuuuauauacaa

SEQ ID NO: 2915784 - RNA, 19 nt, Artificial Sequence
  Description of Artificial Sequence: Synthetic oligonucleotide
aaaauggauucaucgaaaa

SEQ ID NO: 2915785 - RNA, 19 nt, Artificial Sequence
  Description of Artificial Sequence: Synthetic oligonucleotide
uacauguuauuagaaagcc

SEQ ID NO: 2915786 - RNA, 19 nt, Artificial Sequence
  Description of Artificial Sequence: Synthetic oligonucleotide
gacaaaugccgauacaaac

SEQ ID NO: 2915787 - RNA, 19 nt, Artificial Sequence
  Description of Artificial Sequence: Synthetic oligonucleotide
aaugcacuugaucguauug

SEQ ID NO: 2915788 - RNA, 19 nt, Artificial Sequence
  Description of Artificial Sequence: Synthetic oligonucleotide
aaggucaagagcagcaugg

SEQ ID NO: 2915789 - RNA, 19 nt, Artificial Sequence
  Description of Artificial Sequence: Synthetic oligonucleotide
uaaaagguguuucuuucca

SEQ ID NO: 2915790 - RNA, 19 nt, Artificial Sequence
  Description of Artificial Sequence: Synthetic oligonucleotide
uuaaaagguguuucuuucc

SEQ ID NO: 2915791 - RNA, 19 nt, Artificial Sequence
  Description of Artificial Sequence: Synthetic oligonucleotide
gaucguauuggagaauugg

SEQ ID NO: 2915792 - RNA, 19 nt, Artificial Sequence
  Description of Artificial Sequence: Synthetic oligonucleotide
ugggcuaugaacugguuca

SEQ ID NO: 2915793 - RNA, 19 nt, Artificial Sequence
  Description of Artificial Sequence: Synthetic oligonucleotide
cuuaaaagguguuucuuuc

SEQ ID NO: 2915794 - RNA, 19 nt, Artificial Sequence
  Description of Artificial Sequence: Synthetic oligonucleotide
ucucauaugcccugcagug

SEQ ID NO: 2915795 - RNA, 19 nt, Artificial Sequence
  Description of Artificial Sequence: Synthetic oligonucleotide
aaguacauguuauuagaaa

SEQ ID NO: 2915796 - RNA, 19 nt, Artificial Sequence
  Description of Artificial Sequence: Synthetic oligonucleotide
uuuucugucaaaugcacuu

SEQ ID NO: 2915797 - RNA, 19 nt, Artificial Sequence
  Description of Artificial Sequence: Synthetic oligonucleotide
aaucucauaugcccugcag

SEQ ID NO: 2915798 - RNA, 19 nt, Artificial Sequence
  Description of Artificial Sequence: Synthetic oligonucleotide
uaaaauggauucaucgaaa

SEQ ID NO: 2915799 - RNA, 19 nt, Artificial Sequence
  Description of Artificial Sequence: Synthetic oligonucleotide
ucaucgaaaacuuuauaua

SEQ ID NO: 2915800 - RNA, 19 nt, Artificial Sequence
  Description of Artificial Sequence: Synthetic oligonucleotide
uuuucauccacaaggucaa

SEQ ID NO: 2915801 - RNA, 19 nt, Artificial Sequence
  Description of Artificial Sequence: Synthetic oligonucleotide
uuagaaagccacauguuuu

SEQ ID NO: 2915802 - RNA, 19 nt, Artificial Sequence
  Description of Artificial Sequence: Synthetic oligonucleotide
uuuggauucugcuuuccca

SEQ ID NO: 2915803 - RNA, 19 nt, Artificial Sequence
  Description of Artificial Sequence: Synthetic oligonucleotide
ucaguaaagaaguucuuua

SEQ ID NO: 2915804 - RNA, 19 nt, Artificial Sequence
  Description of Artificial Sequence: Synthetic oligonucleotide
gauacaaaccauucauuga

SEQ ID NO: 2915805 - RNA, 19 nt, Artificial Sequence
  Description of Artificial Sequence: Synthetic oligonucleotide
acuggauuaucaugguggg

SEQ ID NO: 2915806 - RNA, 19 nt, Artificial Sequence
  Description of Artificial Sequence: Synthetic oligonucleotide
auuagaaagccacauguuu

SEQ ID NO: 2915807 - RNA, 19 nt, Artificial Sequence
  Description of Artificial Sequence: Synthetic oligonucleotide
uuuuaaguacauguuauua

SEQ ID NO: 2915808 - RNA, 19 nt, Artificial Sequence
  Description of Artificial Sequence: Synthetic oligonucleotide
guuucuuuccaagaaacug

SEQ ID NO: 2915809 - RNA, 19 nt, Artificial Sequence
  Description of Artificial Sequence: Synthetic oligonucleotide
uuagcuuaaaagguguuuc

SEQ ID NO: 2915810 - RNA, 19 nt, Artificial Sequence
  Description of Artificial Sequence: Synthetic oligonucleotide
ucguauuggagaauugggu

SEQ ID NO: 2915811 - RNA, 19 nt, Artificial Sequence
  Description of Artificial Sequence: Synthetic oligonucleotide
caaaucauagacaucagua

SEQ ID NO: 2915812 - RNA, 19 nt, Artificial Sequence
  Description of Artificial Sequence: Synthetic oligonucleotide
aacuuuauauacaaaucau

SEQ ID NO: 2915813 - RNA, 19 nt, Artificial Sequence
  Description of Artificial Sequence: Synthetic oligonucleotide
guuauuagaaagccacaug

SEQ ID NO: 2915814 - RNA, 19 nt, Artificial Sequence
  Description of Artificial Sequence: Synthetic oligonucleotide
cauaaaauggauucaucga

SEQ ID NO: 2915815 - RNA, 19 nt, Artificial Sequence
  Description of Artificial Sequence: Synthetic oligonucleotide
uuuauuccaucuucuugcc

SEQ ID NO: 2915816 - RNA, 19 nt, Artificial Sequence
  Description of Artificial Sequence: Synthetic oligonucleotide
guuuucauccacaagguca

SEQ ID NO: 2915817 - RNA, 19 nt, Artificial Sequence
  Description of Artificial Sequence: Synthetic oligonucleotide
acaucaguaaagaaguucu

SEQ ID NO: 2915818 - RNA, 19 nt, Artificial Sequence
  Description of Artificial Sequence: Synthetic oligonucleotide
aacugguucagauggcggu

SEQ ID NO: 2915819 - RNA, 19 nt, Artificial Sequence
  Description of Artificial Sequence: Synthetic oligonucleotide
ucauaugcccugcagugac

SEQ ID NO: 2915820 - RNA, 19 nt, Artificial Sequence
  Description of Artificial Sequence: Synthetic oligonucleotide
aagguguuucuuuccaaga

SEQ ID NO: 2915821 - RNA, 19 nt, Artificial Sequence
  Description of Artificial Sequence: Synthetic oligonucleotide
acaaaucauagacaucagu

SEQ ID NO: 2915822 - RNA, 19 nt, Artificial Sequence
  Description of Artificial Sequence: Synthetic oligonucleotide
gacauuaucuucaauauau

SEQ ID NO: 2915823 - RNA, 19 nt, Artificial Sequence
  Description of Artificial Sequence: Synthetic oligonucleotide
ccugcagugacaaaugccg

SEQ ID NO: 2915824 - RNA, 19 nt, Artificial Sequence
  Description of Artificial Sequence: Synthetic oligonucleotide
uguuauuagaaagccacau

SEQ ID NO: 2915825 - RNA, 19 nt, Artificial Sequence
  Description of Artificial Sequence: Synthetic oligonucleotide
uguuucuuuccaagaaacu

SEQ ID NO: 2915826 - RNA, 19 nt, Artificial Sequence
  Description of Artificial Sequence: Synthetic oligonucleotide
augggcuaugaacugguuc

SEQ ID NO: 2915827 - RNA, 19 nt, Artificial Sequence
  Description of Artificial Sequence: Synthetic oligonucleotide
guacauguuauuagaaagc

SEQ ID NO: 2915828 - RNA, 19 nt, Artificial Sequence
  Description of Artificial Sequence: Synthetic oligonucleotide
uauacaaaucauagacauc

SEQ ID NO: 2915829 - RNA, 19 nt, Artificial Sequence
  Description of Artificial Sequence: Synthetic oligonucleotide
aguaaagaaguucuuuauu

SEQ ID NO: 2915830 - RNA, 19 nt, Artificial Sequence
  Description of Artificial Sequence: Synthetic oligonucleotide
uucuccauuuagcuuaaaa

SEQ ID NO: 2915831 - RNA, 19 nt, Artificial Sequence
  Description of Artificial Sequence: Synthetic oligonucleotide
uacaaaucauagacaucag

SEQ ID NO: 2915832 - RNA, 19 nt, Artificial Sequence
  Description of Artificial Sequence: Synthetic oligonucleotide
acuuuucugucaaaugcac

SEQ ID NO: 2915833 - RNA, 19 nt, Artificial Sequence
  Description of Artificial Sequence: Synthetic oligonucleotide
aucguauuggagaauuggg

SEQ ID NO: 2915834 - RNA, 19 nt, Artificial Sequence
  Description of Artificial Sequence: Synthetic oligonucleotide
uucugucaaaugcacuuga

SEQ ID NO: 2915835 - RNA, 19 nt, Artificial Sequence
  Description of Artificial Sequence: Synthetic oligonucleotide
aagcauaauaaaucucaua

SEQ ID NO: 2915836 - RNA, 19 nt, Artificial Sequence
  Description of Artificial Sequence: Synthetic oligonucleotide
auccacaaggucaagagca

SEQ ID NO: 2915837 - RNA, 19 nt, Artificial Sequence
  Description of Artificial Sequence: Synthetic oligonucleotide
uagaaagccacauguuuuc

SEQ ID NO: 2915838 - RNA, 19 nt, Artificial Sequence
  Description of Artificial Sequence: Synthetic oligonucleotide
aaaagguguuucuuuccaa

SEQ ID NO: 2915839 - RNA, 19 nt, Artificial Sequence
  Description of Artificial Sequence: Synthetic oligonucleotide
uauuagaaagccacauguu

SEQ ID NO: 2915840 - RNA, 19 nt, Artificial Sequence
  Description of Artificial Sequence: Synthetic oligonucleotide
uauuggagaauuggguuca

SEQ ID NO: 2915841 - RNA, 19 nt, Artificial Sequence
  Description of Artificial Sequence: Synthetic oligonucleotide
augcacuugaucguauugg

SEQ ID NO: 2915842 - RNA, 19 nt, Artificial Sequence
  Description of Artificial Sequence: Synthetic oligonucleotide
uggugggccaacaauuaca

SEQ ID NO: 2915843 - RNA, 19 nt, Artificial Sequence
  Description of Artificial Sequence: Synthetic oligonucleotide
guauuggagaauuggguuc

SEQ ID NO: 2915844 - RNA, 19 nt, Artificial Sequence
  Description of Artificial Sequence: Synthetic oligonucleotide
ucauggugggccaacaauu

SEQ ID NO: 2915845 - RNA, 19 nt, Artificial Sequence
  Description of Artificial Sequence: Synthetic oligonucleotide
acaucaugaagcauaauaa

SEQ ID NO: 2915846 - RNA, 19 nt, Artificial Sequence
  Description of Artificial Sequence: Synthetic oligonucleotide
ugcacuugaucguauugga

SEQ ID NO: 2915847 - RNA, 19 nt, Artificial Sequence
  Description of Artificial Sequence: Synthetic oligonucleotide
ugacaaaugccgauacaaa

SEQ ID NO: 2915848 - RNA, 19 nt, Artificial Sequence
  Description of Artificial Sequence: Synthetic oligonucleotide
cacuugaucguauuggaga

SEQ ID NO: 2915849 - RNA, 19 nt, Artificial Sequence
  Description of Artificial Sequence: Synthetic oligonucleotide
ccauucauugaauuugucc

SEQ ID NO: 2915850 - RNA, 19 nt, Artificial Sequence
  Description of Artificial Sequence: Synthetic oligonucleotide
aucucauaugcccugcagu

SEQ ID NO: 2915851 - RNA, 19 nt, Artificial Sequence
  Description of Artificial Sequence: Synthetic oligonucleotide
acuugaucguauuggagaa

SEQ ID NO: 2915852 - RNA, 19 nt, Artificial Sequence
  Description of Artificial Sequence: Synthetic oligonucleotide
uccacaaggucaagagcag

SEQ ID NO: 2915853 - RNA, 19 nt, Artificial Sequence
  Description of Artificial Sequence: Synthetic oligonucleotide
guucagauggcggugauca

SEQ ID NO: 2915854 - RNA, 19 nt, Artificial Sequence
  Description of Artificial Sequence: Synthetic oligonucleotide
auuaucauggugggccaac

SEQ ID NO: 2915855 - RNA, 19 nt, Artificial Sequence
  Description of Artificial Sequence: Synthetic oligonucleotide
caaaugccgauacaaacca

SEQ ID NO: 2915856 - RNA, 19 nt, Artificial Sequence
  Description of Artificial Sequence: Synthetic oligonucleotide
aaaucucauaugcccugca

SEQ ID NO: 2915857 - RNA, 19 nt, Artificial Sequence
  Description of Artificial Sequence: Synthetic oligonucleotide
auggugggccaacaauuac

SEQ ID NO: 2915858 - RNA, 19 nt, Artificial Sequence
  Description of Artificial Sequence: Synthetic oligonucleotide
uaucuucaauauauagcuc

SEQ ID NO: 2915859 - RNA, 19 nt, Artificial Sequence
  Description of Artificial Sequence: Synthetic oligonucleotide
uagcuuaaaagguguuucu

SEQ ID NO: 2915860 - RNA, 19 nt, Artificial Sequence
  Description of Artificial Sequence: Synthetic oligonucleotide
uguuuucauccacaagguc

SEQ ID NO: 2915861 - RNA, 19 nt, Artificial Sequence
  Description of Artificial Sequence: Synthetic oligonucleotide
uggauucugcuuucccagg

SEQ ID NO: 2915862 - RNA, 19 nt, Artificial Sequence
  Description of Artificial Sequence: Synthetic oligonucleotide
ugaucguauuggagaauug

SEQ ID NO: 2915863 - RNA, 19 nt, Artificial Sequence
  Description of Artificial Sequence: Synthetic oligonucleotide
acaaaccauucauugaauu

SEQ ID NO: 2915864 - RNA, 19 nt, Artificial Sequence
  Description of Artificial Sequence: Synthetic oligonucleotide
uuucugucaaaugcacuug

SEQ ID NO: 2915865 - RNA, 19 nt, Artificial Sequence
  Description of Artificial Sequence: Synthetic oligonucleotide
uaaaucucauaugcccugc

SEQ ID NO: 2915866 - RNA, 19 nt, Artificial Sequence
  Description of Artificial Sequence: Synthetic oligonucleotide
uuuagcuuaaaagguguuu

SEQ ID NO: 2915867 - RNA, 19 nt, Artificial Sequence
  Description of Artificial Sequence: Synthetic oligonucleotide
aaugccgauacaaaccauu

SEQ ID NO: 2915868 - RNA, 19 nt, Artificial Sequence
  Description of Artificial Sequence: Synthetic oligonucleotide
gcauaauaaaucucauaug

SEQ ID NO: 2915869 - RNA, 19 nt, Artificial Sequence
  Description of Artificial Sequence: Synthetic oligonucleotide
ugccgauacaaaccauuca

SEQ ID NO: 2915870 - RNA, 19 nt, Artificial Sequence
  Description of Artificial Sequence: Synthetic oligonucleotide
aaaugcacuugaucguauu

SEQ ID NO: 2915871 - RNA, 19 nt, Artificial Sequence
  Description of Artificial Sequence: Synthetic oligonucleotide
gauucugcuuucccaggug

SEQ ID NO: 2915872 - RNA, 19 nt, Artificial Sequence
  Description of Artificial Sequence: Synthetic oligonucleotide
cugucaaaugcacuugauc

SEQ ID NO: 2915873 - RNA, 19 nt, Artificial Sequence
  Description of Artificial Sequence: Synthetic oligonucleotide
aucuuuggauucugcuuuc

SEQ ID NO: 2915874 - RNA, 19 nt, Artificial Sequence
  Description of Artificial Sequence: Synthetic oligonucleotide
aucgaaaacuuuauauaca

SEQ ID NO: 2915875 - RNA, 19 nt, Artificial Sequence
  Description of Artificial Sequence: Synthetic oligonucleotide
acuuuauauacaaaucaua

SEQ ID NO: 2915876 - RNA, 19 nt, Artificial Sequence
  Description of Artificial Sequence: Synthetic oligonucleotide
ucaaaugcacuugaucgua

SEQ ID NO: 2915877 - RNA, 19 nt, Artificial Sequence
  Description of Artificial Sequence: Synthetic oligonucleotide
caucaugaagcauaauaaa

SEQ ID NO: 2915878 - RNA, 19 nt, Artificial Sequence
  Description of Artificial Sequence: Synthetic oligonucleotide
aucauggugggccaacaau

SEQ ID NO: 2915879 - RNA, 19 nt, Artificial Sequence
  Description of Artificial Sequence: Synthetic oligonucleotide
uugaucguauuggagaauu

SEQ ID NO: 2915880 - RNA, 19 nt, Artificial Sequence
  Description of Artificial Sequence: Synthetic oligonucleotide
agguguuucuuuccaagaa

SEQ ID NO: 2915881 - RNA, 19 nt, Artificial Sequence
  Description of Artificial Sequence: Synthetic oligonucleotide
gugacaaaugccgauacaa

SEQ ID NO: 2915882 - RNA, 19 nt, Artificial Sequence
  Description of Artificial Sequence: Synthetic oligonucleotide
ucugucaaaugcacuugau

SEQ ID NO: 2915883 - RNA, 19 nt, Artificial Sequence
  Description of Artificial Sequence: Synthetic oligonucleotide
ugccucacaucaugaagca

SEQ ID NO: 2915884 - RNA, 19 nt, Artificial Sequence
  Description of Artificial Sequence: Synthetic oligonucleotide
cacaaggucaagagcagca

SEQ ID NO: 2915885 - RNA, 19 nt, Artificial Sequence
  Description of Artificial Sequence: Synthetic oligonucleotide
agcaugggcuaugaacugg

SEQ ID NO: 2915886 - RNA, 19 nt, Artificial Sequence
  Description of Artificial Sequence: Synthetic oligonucleotide
agugacaaaugccgauaca

SEQ ID NO: 2915887 - RNA, 19 nt, Artificial Sequence
  Description of Artificial Sequence: Synthetic oligonucleotide
ugcagugacaaaugccgau

SEQ ID NO: 2915888 - RNA, 19 nt, Artificial Sequence
  Description of Artificial Sequence: Synthetic oligonucleotide
uuuucuccauuuagcuuaa

SEQ ID NO: 2915889 - RNA, 19 nt, Artificial Sequence
  Description of Artificial Sequence: Synthetic oligonucleotide
ugcccugcagugacaaaug

SEQ ID NO: 2915890 - RNA, 19 nt, Artificial Sequence
  Description of Artificial Sequence: Synthetic oligonucleotide
augccgauacaaaccauuc

SEQ ID NO: 2915891 - RNA, 19 nt, Artificial Sequence
  Description of Artificial Sequence: Synthetic oligonucleotide
auggcggugaucaucuuug

SEQ ID NO: 2915892 - RNA, 19 nt, Artificial Sequence
  Description of Artificial Sequence: Synthetic oligonucleotide
cgauacaaaccauucauug

SEQ ID NO: 2915893 - RNA, 19 nt, Artificial Sequence
  Description of Artificial Sequence: Synthetic oligonucleotide
aucaguaaagaaguucuuu

SEQ ID NO: 2915894 - RNA, 19 nt, Artificial Sequence
  Description of Artificial Sequence: Synthetic oligonucleotide
caaggucaagagcagcaug

SEQ ID NO: 2915895 - RNA, 19 nt, Artificial Sequence
  Description of Artificial Sequence: Synthetic oligonucleotide
ugaucaucuuuggauucug

SEQ ID NO: 2915896 - RNA, 19 nt, Artificial Sequence
  Description of Artificial Sequence: Synthetic oligonucleotide
ucagauggcggugaucauc

SEQ ID NO: 2915897 - RNA, 19 nt, Artificial Sequence
  Description of Artificial Sequence: Synthetic oligonucleotide
cagugacaaaugccgauac

SEQ ID NO: 2915898 - RNA, 19 nt, Artificial Sequence
  Description of Artificial Sequence: Synthetic oligonucleotide
auucaucgaaaacuuuaua

SEQ ID NO: 2915899 - RNA, 19 nt, Artificial Sequence
  Description of Artificial Sequence: Synthetic oligonucleotide
uaucauggugggccaacaa

SEQ ID NO: 2915900 - RNA, 19 nt, Artificial Sequence
  Description of Artificial Sequence: Synthetic oligonucleotide
gaucaucuuuggauucugc

SEQ ID NO: 2915901 - RNA, 19 nt, Artificial Sequence
  Description of Artificial Sequence: Synthetic oligonucleotide
acauguuauuagaaagcca

SEQ ID NO: 2915902 - RNA, 19 nt, Artificial Sequence
  Description of Artificial Sequence: Synthetic oligonucleotide
uuaucauggugggccaaca

SEQ ID NO: 2915903 - RNA, 19 nt, Artificial Sequence
  Description of Artificial Sequence: Synthetic oligonucleotide
gucaagagcagcaugggcu

SEQ ID NO: 2915904 - RNA, 19 nt, Artificial Sequence
  Description of Artificial Sequence: Synthetic oligonucleotide
agccacauguuuucaucca

SEQ ID NO: 2915905 - RNA, 19 nt, Artificial Sequence
  Description of Artificial Sequence: Synthetic oligonucleotide
ccagacauuaucuucaaua

SEQ ID NO: 2915906 - RNA, 19 nt, Artificial Sequence
  Description of Artificial Sequence: Synthetic oligonucleotide
auggauucaucgaaaacuu

SEQ ID NO: 2915907 - RNA, 19 nt, Artificial Sequence
  Description of Artificial Sequence: Synthetic oligonucleotide
aagagcagcaugggcuaug

SEQ ID NO: 2915908 - RNA, 19 nt, Artificial Sequence
  Description of Artificial Sequence: Synthetic oligonucleotide
aggucaagagcagcauggg

SEQ ID NO: 2915909 - RNA, 19 nt, Artificial Sequence
  Description of Artificial Sequence: Synthetic oligonucleotide
uggauucaucgaaaacuuu

SEQ ID NO: 2915910 - RNA, 19 nt, Artificial Sequence
  Description of Artificial Sequence: Synthetic oligonucleotide
cucacaucaugaagcauaa

SEQ ID NO: 2915911 - RNA, 19 nt, Artificial Sequence
  Description of Artificial Sequence: Synthetic oligonucleotide
uggcggugaucaucuuugg

SEQ ID NO: 2915912 - RNA, 19 nt, Artificial Sequence
  Description of Artificial Sequence: Synthetic oligonucleotide
gauucaucgaaaacuuuau

SEQ ID NO: 2915913 - RNA, 19 nt, Artificial Sequence
  Description of Artificial Sequence: Synthetic oligonucleotide
ggugaucaucuuuggauuc

SEQ ID NO: 2915914 - RNA, 19 nt, Artificial Sequence
  Description of Artificial Sequence: Synthetic oligonucleotide
cacauguuuucauccacaa

SEQ ID NO: 2915915 - RNA, 19 nt, Artificial Sequence
  Description of Artificial Sequence: Synthetic oligonucleotide
auguuauuagaaagccaca

SEQ ID NO: 2915916 - RNA, 19 nt, Artificial Sequence
  Description of Artificial Sequence: Synthetic oligonucleotide
agaaagccacauguuuuca

SEQ ID NO: 2915917 - RNA, 19 nt, Artificial Sequence
  Description of Artificial Sequence: Synthetic oligonucleotide
ggucaagagcagcaugggc

SEQ ID NO: 2915918 - RNA, 19 nt, Artificial Sequence
  Description of Artificial Sequence: Synthetic oligonucleotide
ggauucaucgaaaacuuua

SEQ ID NO: 2915919 - RNA, 19 nt, Artificial Sequence
  Description of Artificial Sequence: Synthetic oligonucleotide
augcccugcagugacaaau

SEQ ID NO: 2915920 - RNA, 19 nt, Artificial Sequence
  Description of Artificial Sequence: Synthetic oligonucleotide
accauucauugaauuuguc

SEQ ID NO: 2915921 - RNA, 19 nt, Artificial Sequence
  Description of Artificial Sequence: Synthetic oligonucleotide
uccagacauuaucuucaau

SEQ ID NO: 2915922 - RNA, 19 nt, Artificial Sequence
  Description of Artificial Sequence: Synthetic oligonucleotide
agcuuaaaagguguuucuu

SEQ ID NO: 2915923 - RNA, 19 nt, Artificial Sequence
  Description of Artificial Sequence: Synthetic oligonucleotide
caucuucuugccucacauc

SEQ ID NO: 2915924 - RNA, 19 nt, Artificial Sequence
  Description of Artificial Sequence: Synthetic oligonucleotide
cuggauuaucauggugggc

SEQ ID NO: 2915925 - RNA, 19 nt, Artificial Sequence
  Description of Artificial Sequence: Synthetic oligonucleotide
auaugcccugcagugacaa

SEQ ID NO: 2915926 - RNA, 19 nt, Artificial Sequence
  Description of Artificial Sequence: Synthetic oligonucleotide
gaaagccacauguuuucau

SEQ ID NO: 2915927 - RNA, 19 nt, Artificial Sequence
  Description of Artificial Sequence: Synthetic oligonucleotide
cagcaugggcuaugaacug

SEQ ID NO: 2915928 - RNA, 19 nt, Artificial Sequence
  Description of Artificial Sequence: Synthetic oligonucleotide
gaagcauaauaaaucucau

SEQ ID NO: 2915929 - RNA, 19 nt, Artificial Sequence
  Description of Artificial Sequence: Synthetic oligonucleotide
aaaugccgauacaaaccau

SEQ ID NO: 2915930 - RNA, 19 nt, Artificial Sequence
  Description of Artificial Sequence: Synthetic oligonucleotide
cuuuucugucaaaugcacu

SEQ ID NO: 2915931 - RNA, 19 nt, Artificial Sequence
  Description of Artificial Sequence: Synthetic oligonucleotide
acaaggucaagagcagcau

SEQ ID NO: 2915932 - RNA, 19 nt, Artificial Sequence
  Description of Artificial Sequence: Synthetic oligonucleotide
acauuaucuucaauauaua

SEQ ID NO: 2915933 - RNA, 19 nt, Artificial Sequence
  Description of Artificial Sequence: Synthetic oligonucleotide
caguaaagaaguucuuuau

SEQ ID NO: 2915934 - RNA, 19 nt, Artificial Sequence
  Description of Artificial Sequence: Synthetic oligonucleotide
cauggugggccaacaauua

SEQ ID NO: 2915935 - RNA, 19 nt, Artificial Sequence
  Description of Artificial Sequence: Synthetic oligonucleotide
cagauggcggugaucaucu

SEQ ID NO: 2915936 - RNA, 19 nt, Artificial Sequence
  Description of Artificial Sequence: Synthetic oligonucleotide
agagcagcaugggcuauga

SEQ ID NO: 2915937 - RNA, 19 nt, Artificial Sequence
  Description of Artificial Sequence: Synthetic oligonucleotide
ccucacaucaugaagcaua

SEQ ID NO: 2915938 - RNA, 19 nt, Artificial Sequence
  Description of Artificial Sequence: Synthetic oligonucleotide
ggauuaucauggugggcca

SEQ ID NO: 2915939 - RNA, 19 nt, Artificial Sequence
  Description of Artificial Sequence: Synthetic oligonucleotide
gcagcaugggcuaugaacu

SEQ ID NO: 2915940 - RNA, 19 nt, Artificial Sequence
  Description of Artificial Sequence: Synthetic oligonucleotide
gccgauacaaaccauucau

SEQ ID NO: 2915941 - RNA, 19 nt, Artificial Sequence
  Description of Artificial Sequence: Synthetic oligonucleotide
cugcagugacaaaugccga

SEQ ID NO: 2915942 - RNA, 19 nt, Artificial Sequence
  Description of Artificial Sequence: Synthetic oligonucleotide
gauggcggugaucaucuuu

SEQ ID NO: 2915943 - RNA, 19 nt, Artificial Sequence
  Description of Artificial Sequence: Synthetic oligonucleotide
gcacuugaucguauuggag

SEQ ID NO: 2915944 - RNA, 19 nt, Artificial Sequence
  Description of Artificial Sequence: Synthetic oligonucleotide
ugguucagauggcggugau

SEQ ID NO: 2915945 - RNA, 19 nt, Artificial Sequence
  Description of Artificial Sequence: Synthetic oligonucleotide
gauuaucauggugggccaa

SEQ ID NO: 2915946 - RNA, 19 nt, Artificial Sequence
  Description of Artificial Sequence: Synthetic oligonucleotide
uucagauggcggugaucau

SEQ ID NO: 2915947 - RNA, 19 nt, Artificial Sequence
  Description of Artificial Sequence: Synthetic oligonucleotide
gcggugaucaucuuuggau

SEQ ID NO: 2915948 - RNA, 19 nt, Artificial Sequence
  Description of Artificial Sequence: Synthetic oligonucleotide
cucauaugcccugcaguga

SEQ ID NO: 2915949 - RNA, 19 nt, Artificial Sequence
  Description of Artificial Sequence: Synthetic oligonucleotide
gcuuaaaagguguuucuuu

SEQ ID NO: 2915950 - RNA, 19 nt, Artificial Sequence
  Description of Artificial Sequence: Synthetic oligonucleotide
uaugcccugcagugacaaa

SEQ ID NO: 2915951 - RNA, 19 nt, Artificial Sequence
  Description of Artificial Sequence: Synthetic oligonucleotide
uuggagaauuggguucaua

SEQ ID NO: 2915952 - RNA, 19 nt, Artificial Sequence
  Description of Artificial Sequence: Synthetic oligonucleotide
cauaugcccugcagugaca

SEQ ID NO: 2915953 - RNA, 19 nt, Artificial Sequence
  Description of Artificial Sequence: Synthetic oligonucleotide
ggugggccaacaauuacaa

SEQ ID NO: 2915954 - RNA, 19 nt, Artificial Sequence
  Description of Artificial Sequence: Synthetic oligonucleotide
gugaucaucuuuggauucu

SEQ ID NO: 2915955 - RNA, 19 nt, Artificial Sequence
  Description of Artificial Sequence: Synthetic oligonucleotide
ccacauguuuucauccaca

SEQ ID NO: 2915956 - RNA, 19 nt, Artificial Sequence
  Description of Artificial Sequence: Synthetic oligonucleotide
ucacaucaugaagcauaau

SEQ ID NO: 2915957 - RNA, 19 nt, Artificial Sequence
  Description of Artificial Sequence: Synthetic oligonucleotide
cugguucagauggcgguga

SEQ ID NO: 2915958 - RNA, 19 nt, Artificial Sequence
  Description of Artificial Sequence: Synthetic oligonucleotide
ggcggugaucaucuuugga

SEQ ID NO: 2915959 - RNA, 19 nt, Artificial Sequence
  Description of Artificial Sequence: Synthetic oligonucleotide
gggcuaugaacugguucag

SEQ ID NO: 2915960 - RNA, 19 nt, Artificial Sequence
  Description of Artificial Sequence: Synthetic oligonucleotide
ggauucugcuuucccaggu

SEQ ID NO: 2915961 - RNA, 19 nt, Artificial Sequence
  Description of Artificial Sequence: Synthetic oligonucleotide
ccacaaggucaagagcagc

SEQ ID NO: 2915962 - RNA, 19 nt, Artificial Sequence
  Description of Artificial Sequence: Synthetic oligonucleotide
caucaguaaagaaguucuu

SEQ ID NO: 2915963 - RNA, 19 nt, Artificial Sequence
  Description of Artificial Sequence: Synthetic oligonucleotide
gugggccaacaauuacaaa

SEQ ID NO: 2915964 - RNA, 19 nt, Artificial Sequence
  Description of Artificial Sequence: Synthetic oligonucleotide
uuucuccauuuagcuuaaa

SEQ ID NO: 2915965 - RNA, 19 nt, Artificial Sequence
  Description of Artificial Sequence: Synthetic oligonucleotide
gcagugacaaaugccgaua

SEQ ID NO: 2915966 - RNA, 19 nt, Artificial Sequence
  Description of Artificial Sequence: Synthetic oligonucleotide
cgaaaacuuuauauacaaa

SEQ ID NO: 2915967 - RNA, 19 nt, Artificial Sequence
  Description of Artificial Sequence: Synthetic oligonucleotide
cguauuggagaauuggguu

SEQ ID NO: 2915968 - RNA, 19 nt, Artificial Sequence
  Description of Artificial Sequence: Synthetic oligonucleotide
gagcagcaugggcuaugaa

SEQ ID NO: 2915969 - RNA, 19 nt, Artificial Sequence
  Description of Artificial Sequence: Synthetic oligonucleotide
agauggcggugaucaucuu

SEQ ID NO: 2915970 - RNA, 19 nt, Artificial Sequence
  Description of Artificial Sequence: Synthetic oligonucleotide
cuugaucguauuggagaau

SEQ ID NO: 2915971 - RNA, 19 nt, Artificial Sequence
  Description of Artificial Sequence: Synthetic oligonucleotide
ccaucuucuugccucacau

SEQ ID NO: 2915972 - RNA, 19 nt, Artificial Sequence
  Description of Artificial Sequence: Synthetic oligonucleotide
gcaugggcuaugaacuggu

SEQ ID NO: 2915973 - RNA, 19 nt, Artificial Sequence
  Description of Artificial Sequence: Synthetic oligonucleotide
ccgauacaaaccauucauu

SEQ ID NO: 2915974 - RNA, 19 nt, Artificial Sequence
  Description of Artificial Sequence: Synthetic oligonucleotide
cggugaucaucuuuggauu

SEQ ID NO: 2915975 - RNA, 19 nt, Artificial Sequence
  Description of Artificial Sequence: Synthetic oligonucleotide
caagagcagcaugggcuau

SEQ ID NO: 2915976 - RNA, 19 nt, Artificial Sequence
  Description of Artificial Sequence: Synthetic oligonucleotide
gccucacaucaugaagcau

SEQ ID NO: 2915977 - RNA, 19 nt, Artificial Sequence
  Description of Artificial Sequence: Synthetic oligonucleotide
uuauauauuaugaugaugg

SEQ ID NO: 2915978 - RNA, 19 nt, Artificial Sequence
  Description of Artificial Sequence: Synthetic oligonucleotide
uauauuaugaugauggccc

SEQ ID NO: 2915979 - RNA, 19 nt, Artificial Sequence
  Description of Artificial Sequence: Synthetic oligonucleotide
aaaauaauuauuuauuuau

SEQ ID NO: 2915980 - RNA, 19 nt, Artificial Sequence
  Description of Artificial Sequence: Synthetic oligonucleotide
uauuuauauauuaugauga

SEQ ID NO: 2915981 - RNA, 19 nt, Artificial Sequence
  Description of Artificial Sequence: Synthetic oligonucleotide
gauauuguaauguguaagg

SEQ ID NO: 2915982 - RNA, 19 nt, Artificial Sequence
  Description of Artificial Sequence: Synthetic oligonucleotide
uugucuucaacucagagca

SEQ ID NO: 2915983 - RNA, 19 nt, Artificial Sequence
  Description of Artificial Sequence: Synthetic oligonucleotide
uuauuuauauauuaugaug

SEQ ID NO: 2915984 - RNA, 19 nt, Artificial Sequence
  Description of Artificial Sequence: Synthetic oligonucleotide
ucaacucagagcaaaaggg

SEQ ID NO: 2915985 - RNA, 19 nt, Artificial Sequence
  Description of Artificial Sequence: Synthetic oligonucleotide
aauaauuauuuauuuauuu

SEQ ID NO: 2915986 - RNA, 19 nt, Artificial Sequence
  Description of Artificial Sequence: Synthetic oligonucleotide
uauuguaauguguaaggcg

SEQ ID NO: 2915987 - RNA, 19 nt, Artificial Sequence
  Description of Artificial Sequence: Synthetic oligonucleotide
aucuuuguggaacuggacc

SEQ ID NO: 2915988 - RNA, 19 nt, Artificial Sequence
  Description of Artificial Sequence: Synthetic oligonucleotide
ucagccaucacucaggccu

SEQ ID NO: 2915989 - RNA, 19 nt, Artificial Sequence
  Description of Artificial Sequence: Synthetic oligonucleotide
auauauuaugaugauggcc

SEQ ID NO: 2915990 - RNA, 19 nt, Artificial Sequence
  Description of Artificial Sequence: Synthetic oligonucleotide
aaagggaaggaguggaggg

SEQ ID NO: 2915991 - RNA, 19 nt, Artificial Sequence
  Description of Artificial Sequence: Synthetic oligonucleotide
uagacuaugugacacagga

SEQ ID NO: 2915992 - RNA, 19 nt, Artificial Sequence
  Description of Artificial Sequence: Synthetic oligonucleotide
cuuagugucaccucugggg

SEQ ID NO: 2915993 - RNA, 19 nt, Artificial Sequence
  Description of Artificial Sequence: Synthetic oligonucleotide
aagguucccagguaggaac

SEQ ID NO: 2915994 - RNA, 19 nt, Artificial Sequence
  Description of Artificial Sequence: Synthetic oligonucleotide
aaggcguaacaacuugucc

SEQ ID NO: 2915995 - RNA, 19 nt, Artificial Sequence
  Description of Artificial Sequence: Synthetic oligonucleotide
uaguuuacggccuagacua

SEQ ID NO: 2915996 - RNA, 19 nt, Artificial Sequence
  Description of Artificial Sequence: Synthetic oligonucleotide
uaacaacuuguccacaucc

SEQ ID NO: 2915997 - RNA, 19 nt, Artificial Sequence
  Description of Artificial Sequence: Synthetic oligonucleotide
uguguaaggcguaacaacu

SEQ ID NO: 2915998 - RNA, 19 nt, Artificial Sequence
  Description of Artificial Sequence: Synthetic oligonucleotide
ucugcuugcuaguuuacgg

SEQ ID NO: 2915999 - RNA, 19 nt, Artificial Sequence
  Description of Artificial Sequence: Synthetic oligonucleotide
aaccguuccugguuguugc

SEQ ID NO: 2916000 - RNA, 19 nt, Artificial Sequence
  Description of Artificial Sequence: Synthetic oligonucleotide
auauuguaauguguaaggc

SEQ ID NO: 2916001 - RNA, 19 nt, Artificial Sequence
  Description of Artificial Sequence: Synthetic oligonucleotide
auguguaaggcguaacaac

SEQ ID NO: 2916002 - RNA, 19 nt, Artificial Sequence
  Description of Artificial Sequence: Synthetic oligonucleotide
aaaagggaaggaguggagg

SEQ ID NO: 2916003 - RNA, 19 nt, Artificial Sequence
  Description of Artificial Sequence: Synthetic oligonucleotide
uaugaugauggcccuagcc

SEQ ID NO: 2916004 - RNA, 19 nt, Artificial Sequence
  Description of Artificial Sequence: Synthetic oligonucleotide
aucagggucccaaagaggc

SEQ ID NO: 2916005 - RNA, 19 nt, Artificial Sequence
  Description of Artificial Sequence: Synthetic oligonucleotide
uuuauauauuaugaugaug

SEQ ID NO: 2916006 - RNA, 19 nt, Artificial Sequence
  Description of Artificial Sequence: Synthetic oligonucleotide
cuugucuucaacucagagc

SEQ ID NO: 2916007 - RNA, 19 nt, Artificial Sequence
  Description of Artificial Sequence: Synthetic oligonucleotide
uauauauuaugaugauggc

SEQ ID NO: 2916008 - RNA, 19 nt, Artificial Sequence
  Description of Artificial Sequence: Synthetic oligonucleotide
uaauguguaaggcguaaca

SEQ ID NO: 2916009 - RNA, 19 nt, Artificial Sequence
  Description of Artificial Sequence: Synthetic oligonucleotide
uguaaggcguaacaacuug

SEQ ID NO: 2916010 - RNA, 19 nt, Artificial Sequence
  Description of Artificial Sequence: Synthetic oligonucleotide
acugcugacaggcuuagug

SEQ ID NO: 2916011 - RNA, 19 nt, Artificial Sequence
  Description of Artificial Sequence: Synthetic oligonucleotide
agauauuguaauguguaag

SEQ ID NO: 2916012 - RNA, 19 nt, Artificial Sequence
  Description of Artificial Sequence: Synthetic oligonucleotide
ucuuuguggaacuggaccu

SEQ ID NO: 2916013 - RNA, 19 nt, Artificial Sequence
  Description of Artificial Sequence: Synthetic oligonucleotide
uuagugucaccucugggga

SEQ ID NO: 2916014 - RNA, 19 nt, Artificial Sequence
  Description of Artificial Sequence: Synthetic oligonucleotide
auuguaauguguaaggcgu

SEQ ID NO: 2916015 - RNA, 19 nt, Artificial Sequence
  Description of Artificial Sequence: Synthetic oligonucleotide
acaucagggucccaaagag

SEQ ID NO: 2916016 - RNA, 19 nt, Artificial Sequence
  Description of Artificial Sequence: Synthetic oligonucleotide
aaggaguggaggguaaagg

SEQ ID NO: 2916017 - RNA, 19 nt, Artificial Sequence
  Description of Artificial Sequence: Synthetic oligonucleotide
gacuaugugacacaggacu

SEQ ID NO: 2916018 - RNA, 19 nt, Artificial Sequence
  Description of Artificial Sequence: Synthetic oligonucleotide
acacguaucuuuguggaac

SEQ ID NO: 2916019 - RNA, 19 nt, Artificial Sequence
  Description of Artificial Sequence: Synthetic oligonucleotide
gauacuugucuucaacuca

SEQ ID NO: 2916020 - RNA, 19 nt, Artificial Sequence
  Description of Artificial Sequence: Synthetic oligonucleotide
uaucucagccaucacucag

SEQ ID NO: 2916021 - RNA, 19 nt, Artificial Sequence
  Description of Artificial Sequence: Synthetic oligonucleotide
ugcagauauuguaaugugu

SEQ ID NO: 2916022 - RNA, 19 nt, Artificial Sequence
  Description of Artificial Sequence: Synthetic oligonucleotide
aaagaggcucuggagcagc

SEQ ID NO: 2916023 - RNA, 19 nt, Artificial Sequence
  Description of Artificial Sequence: Synthetic oligonucleotide
acaacuuguccacauccuc

SEQ ID NO: 2916024 - RNA, 19 nt, Artificial Sequence
  Description of Artificial Sequence: Synthetic oligonucleotide
ugauacuugucuucaacuc

SEQ ID NO: 2916025 - RNA, 19 nt, Artificial Sequence
  Description of Artificial Sequence: Synthetic oligonucleotide
auuuauauauuaugaugau

SEQ ID NO: 2916026 - RNA, 19 nt, Artificial Sequence
  Description of Artificial Sequence: Synthetic oligonucleotide
aggcguaacaacuugucca

SEQ ID NO: 2916027 - RNA, 19 nt, Artificial Sequence
  Description of Artificial Sequence: Synthetic oligonucleotide
gaggguaaagguucccagg

SEQ ID NO: 2916028 - RNA, 19 nt, Artificial Sequence
  Description of Artificial Sequence: Synthetic oligonucleotide
aacuuguccacauccuccu

SEQ ID NO: 2916029 - RNA, 19 nt, Artificial Sequence
  Description of Artificial Sequence: Synthetic oligonucleotide
uguugcagauauuguaaug

SEQ ID NO: 2916030 - RNA, 19 nt, Artificial Sequence
  Description of Artificial Sequence: Synthetic oligonucleotide
aauguguaaggcguaacaa

SEQ ID NO: 2916031 - RNA, 19 nt, Artificial Sequence
  Description of Artificial Sequence: Synthetic oligonucleotide
auuaugaugauggcccuag

SEQ ID NO: 2916032 - RNA, 19 nt, Artificial Sequence
  Description of Artificial Sequence: Synthetic oligonucleotide
gguaaagguucccagguag

SEQ ID NO: 2916033 - RNA, 19 nt, Artificial Sequence
  Description of Artificial Sequence: Synthetic oligonucleotide
caacuuguccacauccucc

SEQ ID NO: 2916034 - RNA, 19 nt, Artificial Sequence
  Description of Artificial Sequence: Synthetic oligonucleotide
accucuggggauuccagac

SEQ ID NO: 2916035 - RNA, 19 nt, Artificial Sequence
  Description of Artificial Sequence: Synthetic oligonucleotide
uuuacggccuagacuaugu

SEQ ID NO: 2916036 - RNA, 19 nt, Artificial Sequence
  Description of Artificial Sequence: Synthetic oligonucleotide
cagacacguaucuuugugg

SEQ ID NO: 2916037 - RNA, 19 nt, Artificial Sequence
  Description of Artificial Sequence: Synthetic oligonucleotide
uugcagauauuguaaugug

SEQ ID NO: 2916038 - RNA, 19 nt, Artificial Sequence
  Description of Artificial Sequence: Synthetic oligonucleotide
ugcuugcuaguuuacggcc

SEQ ID NO: 2916039 - RNA, 19 nt, Artificial Sequence
  Description of Artificial Sequence: Synthetic oligonucleotide
cuggaccuggacaucaggg

SEQ ID NO: 2916040 - RNA, 19 nt, Artificial Sequence
  Description of Artificial Sequence: Synthetic oligonucleotide
cucagagcaaaagggaagg

SEQ ID NO: 2916041 - RNA, 19 nt, Artificial Sequence
  Description of Artificial Sequence: Synthetic oligonucleotide
uccugguuguugcagauau

SEQ ID NO: 2916042 - RNA, 19 nt, Artificial Sequence
  Description of Artificial Sequence: Synthetic oligonucleotide
agacacguaucuuugugga

SEQ ID NO: 2916043 - RNA, 19 nt, Artificial Sequence
  Description of Artificial Sequence: Synthetic oligonucleotide
cugguuguugcagauauug

SEQ ID NO: 2916044 - RNA, 19 nt, Artificial Sequence
  Description of Artificial Sequence: Synthetic oligonucleotide
uggaacuggaccuggacau

SEQ ID NO: 2916045 - RNA, 19 nt, Artificial Sequence
  Description of Artificial Sequence: Synthetic oligonucleotide
acuguuugcgcugucuccg

SEQ ID NO: 2916046 - RNA, 19 nt, Artificial Sequence
  Description of Artificial Sequence: Synthetic oligonucleotide
uguaggucacuuuugugua

SEQ ID NO: 2916047 - RNA, 19 nt, Artificial Sequence
  Description of Artificial Sequence: Synthetic oligonucleotide
uuccagacacguaucuuug

SEQ ID NO: 2916048 - RNA, 19 nt, Artificial Sequence
  Description of Artificial Sequence: Synthetic oligonucleotide
acggccuagacuaugugac

SEQ ID NO: 2916049 - RNA, 19 nt, Artificial Sequence
  Description of Artificial Sequence: Synthetic oligonucleotide
uaaggcguaacaacuuguc

SEQ ID NO: 2916050 - RNA, 19 nt, Artificial Sequence
  Description of Artificial Sequence: Synthetic oligonucleotide
uucccagguaggaaccccg

SEQ ID NO: 2916051 - RNA, 19 nt, Artificial Sequence
  Description of Artificial Sequence: Synthetic oligonucleotide
aggaguggaggguaaaggu

SEQ ID NO: 2916052 - RNA, 19 nt, Artificial Sequence
  Description of Artificial Sequence: Synthetic oligonucleotide
aggguaaagguucccaggu

SEQ ID NO: 2916053 - RNA, 19 nt, Artificial Sequence
  Description of Artificial Sequence: Synthetic oligonucleotide
auuccagacacguaucuuu

SEQ ID NO: 2916054 - RNA, 19 nt, Artificial Sequence
  Description of Artificial Sequence: Synthetic oligonucleotide
cacaggacugcugacaggc

SEQ ID NO: 2916055 - RNA, 19 nt, Artificial Sequence
  Description of Artificial Sequence: Synthetic oligonucleotide
agcacuuggugauacuugu

SEQ ID NO: 2916056 - RNA, 19 nt, Artificial Sequence
  Description of Artificial Sequence: Synthetic oligonucleotide
agagcaaaagggaaggagu

SEQ ID NO: 2916057 - RNA, 19 nt, Artificial Sequence
  Description of Artificial Sequence: Synthetic oligonucleotide
cuuggugauacuugucuuc

SEQ ID NO: 2916058 - RNA, 19 nt, Artificial Sequence
  Description of Artificial Sequence: Synthetic oligonucleotide
auacuugucuucaacucag

SEQ ID NO: 2916059 - RNA, 19 nt, Artificial Sequence
  Description of Artificial Sequence: Synthetic oligonucleotide
acauccuccuggcuguagg

SEQ ID NO: 2916060 - RNA, 19 nt, Artificial Sequence
  Description of Artificial Sequence: Synthetic oligonucleotide
cugcuugcuaguuuacggc

SEQ ID NO: 2916061 - RNA, 19 nt, Artificial Sequence
  Description of Artificial Sequence: Synthetic oligonucleotide
uacggccuagacuauguga

SEQ ID NO: 2916062 - RNA, 19 nt, Artificial Sequence
  Description of Artificial Sequence: Synthetic oligonucleotide
gagcaaaagggaaggagug

SEQ ID NO: 2916063 - RNA, 19 nt, Artificial Sequence
  Description of Artificial Sequence: Synthetic oligonucleotide
ucucagccaucacucaggc

SEQ ID NO: 2916064 - RNA, 19 nt, Artificial Sequence
  Description of Artificial Sequence: Synthetic oligonucleotide
uguggaacuggaccuggac

SEQ ID NO: 2916065 - RNA, 19 nt, Artificial Sequence
  Description of Artificial Sequence: Synthetic oligonucleotide
uuggugauacuugucuuca

SEQ ID NO: 2916066 - RNA, 19 nt, Artificial Sequence
  Description of Artificial Sequence: Synthetic oligonucleotide
gacaucagggucccaaaga

SEQ ID NO: 2916067 - RNA, 19 nt, Artificial Sequence
  Description of Artificial Sequence: Synthetic oligonucleotide
uaucuuuguggaacuggac

SEQ ID NO: 2916068 - RNA, 19 nt, Artificial Sequence
  Description of Artificial Sequence: Synthetic oligonucleotide
agcaaaagggaaggagugg

SEQ ID NO: 2916069 - RNA, 19 nt, Artificial Sequence
  Description of Artificial Sequence: Synthetic oligonucleotide
ucuucaacucagagcaaaa

SEQ ID NO: 2916070 - RNA, 19 nt, Artificial Sequence
  Description of Artificial Sequence: Synthetic oligonucleotide
auauuaugaugauggcccu

SEQ ID NO: 2916071 - RNA, 19 nt, Artificial Sequence
  Description of Artificial Sequence: Synthetic oligonucleotide
cuagacuaugugacacagg

SEQ ID NO: 2916072 - RNA, 19 nt, Artificial Sequence
  Description of Artificial Sequence: Synthetic oligonucleotide
uaaagguucccagguagga

SEQ ID NO: 2916073 - RNA, 19 nt, Artificial Sequence
  Description of Artificial Sequence: Synthetic oligonucleotide
caucagggucccaaagagg

SEQ ID NO: 2916074 - RNA, 19 nt, Artificial Sequence
  Description of Artificial Sequence: Synthetic oligonucleotide
ucccaaagaggcucuggag

SEQ ID NO: 2916075 - RNA, 19 nt, Artificial Sequence
  Description of Artificial Sequence: Synthetic oligonucleotide
guaaagguucccagguagg

SEQ ID NO: 2916076 - RNA, 19 nt, Artificial Sequence
  Description of Artificial Sequence: Synthetic oligonucleotide
caaaagggaaggaguggag

SEQ ID NO: 2916077 - RNA, 19 nt, Artificial Sequence
  Description of Artificial Sequence: Synthetic oligonucleotide
uuguugcagauauuguaau

SEQ ID NO: 2916078 - RNA, 19 nt, Artificial Sequence
  Description of Artificial Sequence: Synthetic oligonucleotide
cagagcaaaagggaaggag

SEQ ID NO: 2916079 - RNA, 19 nt, Artificial Sequence
  Description of Artificial Sequence: Synthetic oligonucleotide
aggccugcacuguuugcgc

SEQ ID NO: 2916080 - RNA, 19 nt, Artificial Sequence
  Description of Artificial Sequence: Synthetic oligonucleotide
uccacauccuccuggcugu

SEQ ID NO: 2916081 - RNA, 19 nt, Artificial Sequence
  Description of Artificial Sequence: Synthetic oligonucleotide
guccacauccuccuggcug

SEQ ID NO: 2916082 - RNA, 19 nt, Artificial Sequence
  Description of Artificial Sequence: Synthetic oligonucleotide
aacaacuuguccacauccu

SEQ ID NO: 2916083 - RNA, 19 nt, Artificial Sequence
  Description of Artificial Sequence: Synthetic oligonucleotide
gaguggaggguaaagguuc

SEQ ID NO: 2916084 - RNA, 19 nt, Artificial Sequence
  Description of Artificial Sequence: Synthetic oligonucleotide
cuucaacucagagcaaaag

SEQ ID NO: 2916085 - RNA, 19 nt, Artificial Sequence
  Description of Artificial Sequence: Synthetic oligonucleotide
gaaggaguggaggguaaag

SEQ ID NO: 2916086 - RNA, 19 nt, Artificial Sequence
  Description of Artificial Sequence: Synthetic oligonucleotide
uguaauguguaaggcguaa

SEQ ID NO: 2916087 - RNA, 19 nt, Artificial Sequence
  Description of Artificial Sequence: Synthetic oligonucleotide
uggagcagcacuuggugau

SEQ ID NO: 2916088 - RNA, 19 nt, Artificial Sequence
  Description of Artificial Sequence: Synthetic oligonucleotide
ucuggggauuccagacacg

SEQ ID NO: 2916089 - RNA, 19 nt, Artificial Sequence
  Description of Artificial Sequence: Synthetic oligonucleotide
acucagagcaaaagggaag

SEQ ID NO: 2916090 - RNA, 19 nt, Artificial Sequence
  Description of Artificial Sequence: Synthetic oligonucleotide
ugcugacaggcuuaguguc

SEQ ID NO: 2916091 - RNA, 19 nt, Artificial Sequence
  Description of Artificial Sequence: Synthetic oligonucleotide
uggaccuggacaucagggu

SEQ ID NO: 2916092 - RNA, 19 nt, Artificial Sequence
  Description of Artificial Sequence: Synthetic oligonucleotide
guuguugcagauauuguaa

SEQ ID NO: 2916093 - RNA, 19 nt, Artificial Sequence
  Description of Artificial Sequence: Synthetic oligonucleotide
aguggaggguaaagguucc

SEQ ID NO: 2916094 - RNA, 19 nt, Artificial Sequence
  Description of Artificial Sequence: Synthetic oligonucleotide
uuugcgcugucuccgccgc

SEQ ID NO: 2916095 - RNA, 19 nt, Artificial Sequence
  Description of Artificial Sequence: Synthetic oligonucleotide
cucuggggauuccagacac

SEQ ID NO: 2916096 - RNA, 19 nt, Artificial Sequence
  Description of Artificial Sequence: Synthetic oligonucleotide
guuugcgcugucuccgccg

SEQ ID NO: 2916097 - RNA, 19 nt, Artificial Sequence
  Description of Artificial Sequence: Synthetic oligonucleotide
caacucagagcaaaaggga

SEQ ID NO: 2916098 - RNA, 19 nt, Artificial Sequence
  Description of Artificial Sequence: Synthetic oligonucleotide
uaugugacacaggacugcu

SEQ ID NO: 2916099 - RNA, 19 nt, Artificial Sequence
  Description of Artificial Sequence: Synthetic oligonucleotide
guugcagauauuguaaugu

SEQ ID NO: 2916100 - RNA, 19 nt, Artificial Sequence
  Description of Artificial Sequence: Synthetic oligonucleotide
uuaugaugauggcccuagc

SEQ ID NO: 2916101 - RNA, 19 nt, Artificial Sequence
  Description of Artificial Sequence: Synthetic oligonucleotide
aucucagccaucacucagg

SEQ ID NO: 2916102 - RNA, 19 nt, Artificial Sequence
  Description of Artificial Sequence: Synthetic oligonucleotide
acuaugugacacaggacug

SEQ ID NO: 2916103 - RNA, 19 nt, Artificial Sequence
  Description of Artificial Sequence: Synthetic oligonucleotide
guaggucacuuuuguguag

SEQ ID NO: 2916104 - RNA, 19 nt, Artificial Sequence
  Description of Artificial Sequence: Synthetic oligonucleotide
cuguaggucacuuuugugu

SEQ ID NO: 2916105 - RNA, 19 nt, Artificial Sequence
  Description of Artificial Sequence: Synthetic oligonucleotide
ggugauacuugucuucaac

SEQ ID NO: 2916106 - RNA, 19 nt, Artificial Sequence
  Description of Artificial Sequence: Synthetic oligonucleotide
cacuguuugcgcugucucc

SEQ ID NO: 2916107 - RNA, 19 nt, Artificial Sequence
  Description of Artificial Sequence: Synthetic oligonucleotide
gguaucucagccaucacuc

SEQ ID NO: 2916108 - RNA, 19 nt, Artificial Sequence
  Description of Artificial Sequence: Synthetic oligonucleotide
gaccuggacaucagggucc

SEQ ID NO: 2916109 - RNA, 19 nt, Artificial Sequence
  Description of Artificial Sequence: Synthetic oligonucleotide
aaagguucccagguaggaa

SEQ ID NO: 2916110 - RNA, 19 nt, Artificial Sequence
  Description of Artificial Sequence: Synthetic oligonucleotide
uuacggccuagacuaugug

SEQ ID NO: 2916111 - RNA, 19 nt, Artificial Sequence
  Description of Artificial Sequence: Synthetic oligonucleotide
caggccugcacuguuugcg

SEQ ID NO: 2916112 - RNA, 19 nt, Artificial Sequence
  Description of Artificial Sequence: Synthetic oligonucleotide
guaacaacuuguccacauc

SEQ ID NO: 2916113 - RNA, 19 nt, Artificial Sequence
  Description of Artificial Sequence: Synthetic oligonucleotide
cccaaagaggcucuggagc

SEQ ID NO: 2916114 - RNA, 19 nt, Artificial Sequence
  Description of Artificial Sequence: Synthetic oligonucleotide
uguuugcgcugucuccgcc

SEQ ID NO: 2916115 - RNA, 19 nt, Artificial Sequence
  Description of Artificial Sequence: Synthetic oligonucleotide
guaucuuuguggaacugga

SEQ ID NO: 2916116 - RNA, 19 nt, Artificial Sequence
  Description of Artificial Sequence: Synthetic oligonucleotide
ggaggguaaagguucccag

SEQ ID NO: 2916117 - RNA, 19 nt, Artificial Sequence
  Description of Artificial Sequence: Synthetic oligonucleotide
uuguaauguguaaggcgua

SEQ ID NO: 2916118 - RNA, 19 nt, Artificial Sequence
  Description of Artificial Sequence: Synthetic oligonucleotide
guggaacuggaccuggaca

SEQ ID NO: 2916119 - RNA, 19 nt, Artificial Sequence
  Description of Artificial Sequence: Synthetic oligonucleotide
gugauacuugucuucaacu

SEQ ID NO: 2916120 - RNA, 19 nt, Artificial Sequence
  Description of Artificial Sequence: Synthetic oligonucleotide
cagguaggaaccccgccag

SEQ ID NO: 2916121 - RNA, 19 nt, Artificial Sequence
  Description of Artificial Sequence: Synthetic oligonucleotide
agacuaugugacacaggac

SEQ ID NO: 2916122 - RNA, 19 nt, Artificial Sequence
  Description of Artificial Sequence: Synthetic oligonucleotide
uaggucacuuuuguguagu

SEQ ID NO: 2916123 - RNA, 19 nt, Artificial Sequence
  Description of Artificial Sequence: Synthetic oligonucleotide
uggcuguaggucacuuuug

SEQ ID NO: 2916124 - RNA, 19 nt, Artificial Sequence
  Description of Artificial Sequence: Synthetic oligonucleotide
cagcacuuggugauacuug

SEQ ID NO: 2916125 - RNA, 19 nt, Artificial Sequence
  Description of Artificial Sequence: Synthetic oligonucleotide
acuuggugauacuugucuu

SEQ ID NO: 2916126 - RNA, 19 nt, Artificial Sequence
  Description of Artificial Sequence: Synthetic oligonucleotide
uggaggguaaagguuccca

SEQ ID NO: 2916127 - RNA, 19 nt, Artificial Sequence
  Description of Artificial Sequence: Synthetic oligonucleotide
ucuccgccgcugcacagcc

SEQ ID NO: 2916128 - RNA, 19 nt, Artificial Sequence
  Description of Artificial Sequence: Synthetic oligonucleotide
gguuguugcagauauugua

SEQ ID NO: 2916129 - RNA, 19 nt, Artificial Sequence
  Description of Artificial Sequence: Synthetic oligonucleotide
cucugcuugcuaguuuacg

SEQ ID NO: 2916130 - RNA, 19 nt, Artificial Sequence
  Description of Artificial Sequence: Synthetic oligonucleotide
acacaggacugcugacagg

SEQ ID NO: 2916131 - RNA, 19 nt, Artificial Sequence
  Description of Artificial Sequence: Synthetic oligonucleotide
cuaguuuacggccuagacu

SEQ ID NO: 2916132 - RNA, 19 nt, Artificial Sequence
  Description of Artificial Sequence: Synthetic oligonucleotide
ggcguaacaacuuguccac

SEQ ID NO: 2916133 - RNA, 19 nt, Artificial Sequence
  Description of Artificial Sequence: Synthetic oligonucleotide
uccagacacguaucuuugu

SEQ ID NO: 2916134 - RNA, 19 nt, Artificial Sequence
  Description of Artificial Sequence: Synthetic oligonucleotide
ucagggucccaaagaggcu

SEQ ID NO: 2916135 - RNA, 19 nt, Artificial Sequence
  Description of Artificial Sequence: Synthetic oligonucleotide
gaacuggaccuggacauca

SEQ ID NO: 2916136 - RNA, 19 nt, Artificial Sequence
  Description of Artificial Sequence: Synthetic oligonucleotide
aaccccgccaggguaucuc

SEQ ID NO: 2916137 - RNA, 19 nt, Artificial Sequence
  Description of Artificial Sequence: Synthetic oligonucleotide
uaggaaccccgccagggua

SEQ ID NO: 2916138 - RNA, 19 nt, Artificial Sequence
  Description of Artificial Sequence: Synthetic oligonucleotide
cagauauuguaauguguaa

SEQ ID NO: 2916139 - RNA, 19 nt, Artificial Sequence
  Description of Artificial Sequence: Synthetic oligonucleotide
accuggacaucaggguccc

SEQ ID NO: 2916140 - RNA, 19 nt, Artificial Sequence
  Description of Artificial Sequence: Synthetic oligonucleotide
ucagagcaaaagggaagga

SEQ ID NO: 2916141 - RNA, 19 nt, Artificial Sequence
  Description of Artificial Sequence: Synthetic oligonucleotide
cuuuguggaacuggaccug

SEQ ID NO: 2916142 - RNA, 19 nt, Artificial Sequence
  Description of Artificial Sequence: Synthetic oligonucleotide
gcuaguuuacggccuagac

SEQ ID NO: 2916143 - RNA, 19 nt, Artificial Sequence
  Description of Artificial Sequence: Synthetic oligonucleotide
ggcuuagugucaccucugg

SEQ ID NO: 2916144 - RNA, 19 nt, Artificial Sequence
  Description of Artificial Sequence: Synthetic oligonucleotide
guaauguguaaggcguaac

SEQ ID NO: 2916145 - RNA, 19 nt, Artificial Sequence
  Description of Artificial Sequence: Synthetic oligonucleotide
uucccgcaaccguuccugg

SEQ ID NO: 2916146 - RNA, 19 nt, Artificial Sequence
  Description of Artificial Sequence: Synthetic oligonucleotide
gucccaaagaggcucugga

SEQ ID NO: 2916147 - RNA, 19 nt, Artificial Sequence
  Description of Artificial Sequence: Synthetic oligonucleotide
guuuacggccuagacuaug

SEQ ID NO: 2916148 - RNA, 19 nt, Artificial Sequence
  Description of Artificial Sequence: Synthetic oligonucleotide
ucccagguaggaaccccgc

SEQ ID NO: 2916149 - RNA, 19 nt, Artificial Sequence
  Description of Artificial Sequence: Synthetic oligonucleotide
ugcacuguuugcgcugucu

SEQ ID NO: 2916150 - RNA, 19 nt, Artificial Sequence
  Description of Artificial Sequence: Synthetic oligonucleotide
gcuuagugucaccucuggg

SEQ ID NO: 2916151 - RNA, 19 nt, Artificial Sequence
  Description of Artificial Sequence: Synthetic oligonucleotide
cucaggccugcacuguuug

SEQ ID NO: 2916152 - RNA, 19 nt, Artificial Sequence
  Description of Artificial Sequence: Synthetic oligonucleotide
uauuaugaugauggcccua

SEQ ID NO: 2916153 - RNA, 19 nt, Artificial Sequence
  Description of Artificial Sequence: Synthetic oligonucleotide
uggacaucagggucccaaa

SEQ ID NO: 2916154 - RNA, 19 nt, Artificial Sequence
  Description of Artificial Sequence: Synthetic oligonucleotide
cuucccgcaaccguuccug

SEQ ID NO: 2916155 - RNA, 19 nt, Artificial Sequence
  Description of Artificial Sequence: Synthetic oligonucleotide
ucaggccugcacuguuugc

SEQ ID NO: 2916156 - RNA, 19 nt, Artificial Sequence
  Description of Artificial Sequence: Synthetic oligonucleotide
ugcuaguuuacggccuaga

SEQ ID NO: 2916157 - RNA, 19 nt, Artificial Sequence
  Description of Artificial Sequence: Synthetic oligonucleotide
ggacaucagggucccaaag

SEQ ID NO: 2916158 - RNA, 19 nt, Artificial Sequence
  Description of Artificial Sequence: Synthetic oligonucleotide
gcagauauuguaaugugua

SEQ ID NO: 2916159 - RNA, 19 nt, Artificial Sequence
  Description of Artificial Sequence: Synthetic oligonucleotide
cacuuggugauacuugucu

SEQ ID NO: 2916160 - RNA, 19 nt, Artificial Sequence
  Description of Artificial Sequence: Synthetic oligonucleotide
aacuggaccuggacaucag

SEQ ID NO: 2916161 - RNA, 19 nt, Artificial Sequence
  Description of Artificial Sequence: Synthetic oligonucleotide
ccuagacuaugugacacag

SEQ ID NO: 2916162 - RNA, 19 nt, Artificial Sequence
  Description of Artificial Sequence: Synthetic oligonucleotide
gacacguaucuuuguggaa

SEQ ID NO: 2916163 - RNA, 19 nt, Artificial Sequence
  Description of Artificial Sequence: Synthetic oligonucleotide
guaucucagccaucacuca

SEQ ID NO: 2916164 - RNA, 19 nt, Artificial Sequence
  Description of Artificial Sequence: Synthetic oligonucleotide
ccuagccucugcuugcuag

SEQ ID NO: 2916165 - RNA, 19 nt, Artificial Sequence
  Description of Artificial Sequence: Synthetic oligonucleotide
gucuucaacucagagcaaa

SEQ ID NO: 2916166 - RNA, 19 nt, Artificial Sequence
  Description of Artificial Sequence: Synthetic oligonucleotide
cuguuugcgcugucuccgc

SEQ ID NO: 2916167 - RNA, 19 nt, Artificial Sequence
  Description of Artificial Sequence: Synthetic oligonucleotide
ugucuucaacucagagcaa

SEQ ID NO: 2916168 - RNA, 19 nt, Artificial Sequence
  Description of Artificial Sequence: Synthetic oligonucleotide
agaggcucuggagcagcac

SEQ ID NO: 2916169 - RNA, 19 nt, Artificial Sequence
  Description of Artificial Sequence: Synthetic oligonucleotide
auccuccuggcuguagguc

SEQ ID NO: 2916170 - RNA, 19 nt, Artificial Sequence
  Description of Artificial Sequence: Synthetic oligonucleotide
gcaaaagggaaggagugga

SEQ ID NO: 2916171 - RNA, 19 nt, Artificial Sequence
  Description of Artificial Sequence: Synthetic oligonucleotide
cagggucccaaagaggcuc

SEQ ID NO: 2916172 - RNA, 19 nt, Artificial Sequence
  Description of Artificial Sequence: Synthetic oligonucleotide
ggaccuggacaucaggguc

SEQ ID NO: 2916173 - RNA, 19 nt, Artificial Sequence
  Description of Artificial Sequence: Synthetic oligonucleotide
ccagacacguaucuuugug

SEQ ID NO: 2916174 - RNA, 19 nt, Artificial Sequence
  Description of Artificial Sequence: Synthetic oligonucleotide
gcuguaggucacuuuugug

SEQ ID NO: 2916175 - RNA, 19 nt, Artificial Sequence
  Description of Artificial Sequence: Synthetic oligonucleotide
uugcuaguuuacggccuag

SEQ ID NO: 2916176 - RNA, 19 nt, Artificial Sequence
  Description of Artificial Sequence: Synthetic oligonucleotide
cuggagcagcacuugguga

SEQ ID NO: 2916177 - RNA, 19 nt, Artificial Sequence
  Description of Artificial Sequence: Synthetic oligonucleotide
uggugauacuugucuucaa

SEQ ID NO: 2916178 - RNA, 19 nt, Artificial Sequence
  Description of Artificial Sequence: Synthetic oligonucleotide
ugcgcugucuccgccgcug

SEQ ID NO: 2916179 - RNA, 19 nt, Artificial Sequence
  Description of Artificial Sequence: Synthetic oligonucleotide
gaggcucuggagcagcacu

SEQ ID NO: 2916180 - RNA, 19 nt, Artificial Sequence
  Description of Artificial Sequence: Synthetic oligonucleotide
cguaucuuuguggaacugg

SEQ ID NO: 2916181 - RNA, 19 nt, Artificial Sequence
  Description of Artificial Sequence: Synthetic oligonucleotide
cucagccaucacucaggcc

SEQ ID NO: 2916182 - RNA, 19 nt, Artificial Sequence
  Description of Artificial Sequence: Synthetic oligonucleotide
gacaggcuuagugucaccu

SEQ ID NO: 2916183 - RNA, 19 nt, Artificial Sequence
  Description of Artificial Sequence: Synthetic oligonucleotide
guucccagguaggaacccc

SEQ ID NO: 2916184 - RNA, 19 nt, Artificial Sequence
  Description of Artificial Sequence: Synthetic oligonucleotide
uagugucaccucuggggau

SEQ ID NO: 2916185 - RNA, 19 nt, Artificial Sequence
  Description of Artificial Sequence: Synthetic oligonucleotide
gugacacaggacugcugac

SEQ ID NO: 2916186 - RNA, 19 nt, Artificial Sequence
  Description of Artificial Sequence: Synthetic oligonucleotide
ugauggcccuagccucugc

SEQ ID NO: 2916187 - RNA, 19 nt, Artificial Sequence
  Description of Artificial Sequence: Synthetic oligonucleotide
ggggauuccagacacguau

SEQ ID NO: 2916188 - RNA, 19 nt, Artificial Sequence
  Description of Artificial Sequence: Synthetic oligonucleotide
agugucaccucuggggauu

SEQ ID NO: 2916189 - RNA, 19 nt, Artificial Sequence
  Description of Artificial Sequence: Synthetic oligonucleotide
ggccuagacuaugugacac

SEQ ID NO: 2916190 - RNA, 19 nt, Artificial Sequence
  Description of Artificial Sequence: Synthetic oligonucleotide
uggggauuccagacacgua

SEQ ID NO: 2916191 - RNA, 19 nt, Artificial Sequence
  Description of Artificial Sequence: Synthetic oligonucleotide
agcagcacuuggugauacu

SEQ ID NO: 2916192 - RNA, 19 nt, Artificial Sequence
  Description of Artificial Sequence: Synthetic oligonucleotide
ccugcugcagggcuucccg

SEQ ID NO: 2916193 - RNA, 19 nt, Artificial Sequence
  Description of Artificial Sequence: Synthetic oligonucleotide
cagccaucacucaggccug

SEQ ID NO: 2916194 - RNA, 19 nt, Artificial Sequence
  Description of Artificial Sequence: Synthetic oligonucleotide
cugcugacaggcuuagugu

SEQ ID NO: 2916195 - RNA, 19 nt, Artificial Sequence
  Description of Artificial Sequence: Synthetic oligonucleotide
ucccgcaaccguuccuggu

SEQ ID NO: 2916196 - RNA, 19 nt, Artificial Sequence
  Description of Artificial Sequence: Synthetic oligonucleotide
caucacucaggccugcacu

SEQ ID NO: 2916197 - RNA, 19 nt, Artificial Sequence
  Description of Artificial Sequence: Synthetic oligonucleotide
acguaucuuuguggaacug

SEQ ID NO: 2916198 - RNA, 19 nt, Artificial Sequence
  Description of Artificial Sequence: Synthetic oligonucleotide
ucacucaggccugcacugu

SEQ ID NO: 2916199 - RNA, 19 nt, Artificial Sequence
  Description of Artificial Sequence: Synthetic oligonucleotide
gauggcccuagccucugcu

SEQ ID NO: 2916200 - RNA, 19 nt, Artificial Sequence
  Description of Artificial Sequence: Synthetic oligonucleotide
gaugauggcccuagccucu

SEQ ID NO: 2916201 - RNA, 19 nt, Artificial Sequence
  Description of Artificial Sequence: Synthetic oligonucleotide
accguuccugguuguugca

SEQ ID NO: 2916202 - RNA, 19 nt, Artificial Sequence
  Description of Artificial Sequence: Synthetic oligonucleotide
agggaaggaguggagggua

SEQ ID NO: 2916203 - RNA, 19 nt, Artificial Sequence
  Description of Artificial Sequence: Synthetic oligonucleotide
guaaggcguaacaacuugu

SEQ ID NO: 2916204 - RNA, 19 nt, Artificial Sequence
  Description of Artificial Sequence: Synthetic oligonucleotide
ggucccaaagaggcucugg

SEQ ID NO: 2916205 - RNA, 19 nt, Artificial Sequence
  Description of Artificial Sequence: Synthetic oligonucleotide
cuugcuaguuuacggccua

SEQ ID NO: 2916206 - RNA, 19 nt, Artificial Sequence
  Description of Artificial Sequence: Synthetic oligonucleotide
cuggacaucagggucccaa

SEQ ID NO: 2916207 - RNA, 19 nt, Artificial Sequence
  Description of Artificial Sequence: Synthetic oligonucleotide
cuggcuguaggucacuuuu

SEQ ID NO: 2916208 - RNA, 19 nt, Artificial Sequence
  Description of Artificial Sequence: Synthetic oligonucleotide
aggcuuagugucaccucug

SEQ ID NO: 2916209 - RNA, 19 nt, Artificial Sequence
  Description of Artificial Sequence: Synthetic oligonucleotide
cacguaucuuuguggaacu

SEQ ID NO: 2916210 - RNA, 19 nt, Artificial Sequence
  Description of Artificial Sequence: Synthetic oligonucleotide
ggauuccagacacguaucu

SEQ ID NO: 2916211 - RNA, 19 nt, Artificial Sequence
  Description of Artificial Sequence: Synthetic oligonucleotide
gucaccucuggggauucca

SEQ ID NO: 2916212 - RNA, 19 nt, Artificial Sequence
  Description of Artificial Sequence: Synthetic oligonucleotide
augugacacaggacugcug

SEQ ID NO: 2916213 - RNA, 19 nt, Artificial Sequence
  Description of Artificial Sequence: Synthetic oligonucleotide
accccgccaggguaucuca

SEQ ID NO: 2916214 - RNA, 19 nt, Artificial Sequence
  Description of Artificial Sequence: Synthetic oligonucleotide
caccucuggggauuccaga

SEQ ID NO: 2916215 - RNA, 19 nt, Artificial Sequence
  Description of Artificial Sequence: Synthetic oligonucleotide
ggcccuagccucugcuugc

SEQ ID NO: 2916216 - RNA, 19 nt, Artificial Sequence
  Description of Artificial Sequence: Synthetic oligonucleotide
aggacugcugacaggcuua

SEQ ID NO: 2916217 - RNA, 19 nt, Artificial Sequence
  Description of Artificial Sequence: Synthetic oligonucleotide
guggaggguaaagguuccc

SEQ ID NO: 2916218 - RNA, 19 nt, Artificial Sequence
  Description of Artificial Sequence: Synthetic oligonucleotide
augauggcccuagccucug

SEQ ID NO: 2916219 - RNA, 19 nt, Artificial Sequence
  Description of Artificial Sequence: Synthetic oligonucleotide
agccucugcuugcuaguuu

SEQ ID NO: 2916220 - RNA, 19 nt, Artificial Sequence
  Description of Artificial Sequence: Synthetic oligonucleotide
ccgccaggguaucucagcc

SEQ ID NO: 2916221 - RNA, 19 nt, Artificial Sequence
  Description of Artificial Sequence: Synthetic oligonucleotide
guaggaaccccgccagggu

SEQ ID NO: 2916222 - RNA, 19 nt, Artificial Sequence
  Description of Artificial Sequence: Synthetic oligonucleotide
agggcuucccgcaaccguu

SEQ ID NO: 2916223 - RNA, 19 nt, Artificial Sequence
  Description of Artificial Sequence: Synthetic oligonucleotide
cuggggauuccagacacgu

SEQ ID NO: 2916224 - RNA, 19 nt, Artificial Sequence
  Description of Artificial Sequence: Synthetic oligonucleotide
ugucaccucuggggauucc

SEQ ID NO: 2916225 - RNA, 19 nt, Artificial Sequence
  Description of Artificial Sequence: Synthetic oligonucleotide
gccucugcuugcuaguuua

SEQ ID NO: 2916226 - RNA, 19 nt, Artificial Sequence
  Description of Artificial Sequence: Synthetic oligonucleotide
gucuccgccgcugcacagc

SEQ ID NO: 2916227 - RNA, 19 nt, Artificial Sequence
  Description of Artificial Sequence: Synthetic oligonucleotide
ccagguaggaaccccgcca

SEQ ID NO: 2916228 - RNA, 19 nt, Artificial Sequence
  Description of Artificial Sequence: Synthetic oligonucleotide
cuagccucugcuugcuagu

SEQ ID NO: 2916229 - RNA, 19 nt, Artificial Sequence
  Description of Artificial Sequence: Synthetic oligonucleotide
gauuccagacacguaucuu

SEQ ID NO: 2916230 - RNA, 19 nt, Artificial Sequence
  Description of Artificial Sequence: Synthetic oligonucleotide
cugcagggcuucccgcaac

SEQ ID NO: 2916231 - RNA, 19 nt, Artificial Sequence
  Description of Artificial Sequence: Synthetic oligonucleotide
cacauccuccuggcuguag

SEQ ID NO: 2916232 - RNA, 19 nt, Artificial Sequence
  Description of Artificial Sequence: Synthetic oligonucleotide
ggcuguaggucacuuuugu

SEQ ID NO: 2916233 - RNA, 19 nt, Artificial Sequence
  Description of Artificial Sequence: Synthetic oligonucleotide
gccugcacuguuugcgcug

SEQ ID NO: 2916234 - RNA, 19 nt, Artificial Sequence
  Description of Artificial Sequence: Synthetic oligonucleotide
gccuagacuaugugacaca

SEQ ID NO: 2916235 - RNA, 19 nt, Artificial Sequence
  Description of Artificial Sequence: Synthetic oligonucleotide
gguucccagguaggaaccc

SEQ ID NO: 2916236 - RNA, 19 nt, Artificial Sequence
  Description of Artificial Sequence: Synthetic oligonucleotide
aggaaccccgccaggguau

SEQ ID NO: 2916237 - RNA, 19 nt, Artificial Sequence
  Description of Artificial Sequence: Synthetic oligonucleotide
uagccucugcuugcuaguu

SEQ ID NO: 2916238 - RNA, 19 nt, Artificial Sequence
  Description of Artificial Sequence: Synthetic oligonucleotide
cugucuccgccgcugcaca

SEQ ID NO: 2916239 - RNA, 19 nt, Artificial Sequence
  Description of Artificial Sequence: Synthetic oligonucleotide
ggacugcugacaggcuuag

SEQ ID NO: 2916240 - RNA, 19 nt, Artificial Sequence
  Description of Artificial Sequence: Synthetic oligonucleotide
gcugacaggcuuaguguca

SEQ ID NO: 2916241 - RNA, 19 nt, Artificial Sequence
  Description of Artificial Sequence: Synthetic oligonucleotide
cccgccaggguaucucagc

SEQ ID NO: 2916242 - RNA, 19 nt, Artificial Sequence
  Description of Artificial Sequence: Synthetic oligonucleotide
ccaucacucaggccugcac

SEQ ID NO: 2916243 - RNA, 19 nt, Artificial Sequence
  Description of Artificial Sequence: Synthetic oligonucleotide
agggucccaaagaggcucu

SEQ ID NO: 2916244 - RNA, 19 nt, Artificial Sequence
  Description of Artificial Sequence: Synthetic oligonucleotide
gggauuccagacacguauc

SEQ ID NO: 2916245 - RNA, 19 nt, Artificial Sequence
  Description of Artificial Sequence: Synthetic oligonucleotide
aguuuacggccuagacuau

SEQ ID NO: 2916246 - RNA, 19 nt, Artificial Sequence
  Description of Artificial Sequence: Synthetic oligonucleotide
cccagguaggaaccccgcc

SEQ ID NO: 2916247 - RNA, 19 nt, Artificial Sequence
  Description of Artificial Sequence: Synthetic oligonucleotide
uugcgcugucuccgccgcu

SEQ ID NO: 2916248 - RNA, 19 nt, Artificial Sequence
  Description of Artificial Sequence: Synthetic oligonucleotide
acaggacugcugacaggcu

SEQ ID NO: 2916249 - RNA, 19 nt, Artificial Sequence
  Description of Artificial Sequence: Synthetic oligonucleotide
uccuggcuguaggucacuu

SEQ ID NO: 2916250 - RNA, 19 nt, Artificial Sequence
  Description of Artificial Sequence: Synthetic oligonucleotide
ggcuucccgcaaccguucc

SEQ ID NO: 2916251 - RNA, 19 nt, Artificial Sequence
  Description of Artificial Sequence: Synthetic oligonucleotide
cauccuccuggcuguaggu

SEQ ID NO: 2916252 - RNA, 19 nt, Artificial Sequence
  Description of Artificial Sequence: Synthetic oligonucleotide
ggguaaagguucccaggua

SEQ ID NO: 2916253 - RNA, 19 nt, Artificial Sequence
  Description of Artificial Sequence: Synthetic oligonucleotide
guguaaggcguaacaacuu

SEQ ID NO: 2916254 - RNA, 19 nt, Artificial Sequence
  Description of Artificial Sequence: Synthetic oligonucleotide
ccucugcuugcuaguuuac

SEQ ID NO: 2916255 - RNA, 19 nt, Artificial Sequence
  Description of Artificial Sequence: Synthetic oligonucleotide
ggaacuggaccuggacauc

SEQ ID NO: 2916256 - RNA, 19 nt, Artificial Sequence
  Description of Artificial Sequence: Synthetic oligonucleotide
acucaggccugcacuguuu

SEQ ID NO: 2916257 - RNA, 19 nt, Artificial Sequence
  Description of Artificial Sequence: Synthetic oligonucleotide
gccaggguaucucagccau

SEQ ID NO: 2916258 - RNA, 19 nt, Artificial Sequence
  Description of Artificial Sequence: Synthetic oligonucleotide
acagccugcugcagggcuu

SEQ ID NO: 2916259 - RNA, 19 nt, Artificial Sequence
  Description of Artificial Sequence: Synthetic oligonucleotide
ccgcaaccguuccugguug

SEQ ID NO: 2916260 - RNA, 19 nt, Artificial Sequence
  Description of Artificial Sequence: Synthetic oligonucleotide
caggacugcugacaggcuu

SEQ ID NO: 2916261 - RNA, 19 nt, Artificial Sequence
  Description of Artificial Sequence: Synthetic oligonucleotide
gugucaccucuggggauuc

SEQ ID NO: 2916262 - RNA, 19 nt, Artificial Sequence
  Description of Artificial Sequence: Synthetic oligonucleotide
ggaguggaggguaaagguu

SEQ ID NO: 2916263 - RNA, 19 nt, Artificial Sequence
  Description of Artificial Sequence: Synthetic oligonucleotide
ccguuccugguuguugcag

SEQ ID NO: 2916264 - RNA, 19 nt, Artificial Sequence
  Description of Artificial Sequence: Synthetic oligonucleotide
cagggcuucccgcaaccgu

SEQ ID NO: 2916265 - RNA, 19 nt, Artificial Sequence
  Description of Artificial Sequence: Synthetic oligonucleotide
ggaaggaguggaggguaaa

SEQ ID NO: 2916266 - RNA, 19 nt, Artificial Sequence
  Description of Artificial Sequence: Synthetic oligonucleotide
gcacuuggugauacuuguc

SEQ ID NO: 2916267 - RNA, 19 nt, Artificial Sequence
  Description of Artificial Sequence: Synthetic oligonucleotide
cguuccugguuguugcaga

SEQ ID NO: 2916268 - RNA, 19 nt, Artificial Sequence
  Description of Artificial Sequence: Synthetic oligonucleotide
gcuugcuaguuuacggccu

SEQ ID NO: 2916269 - RNA, 19 nt, Artificial Sequence
  Description of Artificial Sequence: Synthetic oligonucleotide
cguaacaacuuguccacau

SEQ ID NO: 2916270 - RNA, 19 nt, Artificial Sequence
  Description of Artificial Sequence: Synthetic oligonucleotide
cugcacuguuugcgcuguc

SEQ ID NO: 2916271 - RNA, 19 nt, Artificial Sequence
  Description of Artificial Sequence: Synthetic oligonucleotide
ccaggguaucucagccauc

SEQ ID NO: 2916272 - RNA, 19 nt, Artificial Sequence
  Description of Artificial Sequence: Synthetic oligonucleotide
gcguaacaacuuguccaca

SEQ ID NO: 2916273 - RNA, 19 nt, Artificial Sequence
  Description of Artificial Sequence: Synthetic oligonucleotide
gggaaggaguggaggguaa

SEQ ID NO: 2916274 - RNA, 19 nt, Artificial Sequence
  Description of Artificial Sequence: Synthetic oligonucleotide
ccccgccaggguaucucag

SEQ ID NO: 2916275 - RNA, 19 nt, Artificial Sequence
  Description of Artificial Sequence: Synthetic oligonucleotide
ggccugcacuguuugcgcu

SEQ ID NO: 2916276 - RNA, 19 nt, Artificial Sequence
  Description of Artificial Sequence: Synthetic oligonucleotide
ggagcagcacuuggugaua

SEQ ID NO: 2916277 - RNA, 19 nt, Artificial Sequence
  Description of Artificial Sequence: Synthetic oligonucleotide
gggcuucccgcaaccguuc

SEQ ID NO: 2916278 - RNA, 19 nt, Artificial Sequence
  Description of Artificial Sequence: Synthetic oligonucleotide
gccugcugcagggcuuccc

SEQ ID NO: 2916279 - RNA, 19 nt, Artificial Sequence
  Description of Artificial Sequence: Synthetic oligonucleotide
gggucccaaagaggcucug

SEQ ID NO: 2916280 - RNA, 19 nt, Artificial Sequence
  Description of Artificial Sequence: Synthetic oligonucleotide
ggaaccccgccaggguauc

SEQ ID NO: 2916281 - RNA, 19 nt, Artificial Sequence
  Description of Artificial Sequence: Synthetic oligonucleotide
cacucaggccugcacuguu

SEQ ID NO: 2916282 - RNA, 19 nt, Artificial Sequence
  Description of Artificial Sequence: Synthetic oligonucleotide
gacugcugacaggcuuagu

SEQ ID NO: 2916283 - RNA, 19 nt, Artificial Sequence
  Description of Artificial Sequence: Synthetic oligonucleotide
gaaccccgccaggguaucu

SEQ ID NO: 2916284 - RNA, 19 nt, Artificial Sequence
  Description of Artificial Sequence: Synthetic oligonucleotide
gcuucccgcaaccguuccu

SEQ ID NO: 2916285 - RNA, 19 nt, Artificial Sequence
  Description of Artificial Sequence: Synthetic oligonucleotide
cggccuagacuaugugaca

SEQ ID NO: 2916286 - RNA, 19 nt, Artificial Sequence
  Description of Artificial Sequence: Synthetic oligonucleotide
cccgcaaccguuccugguu

SEQ ID NO: 2916287 - RNA, 19 nt, Artificial Sequence
  Description of Artificial Sequence: Synthetic oligonucleotide
ccugcacuguuugcgcugu

SEQ ID NO: 2916288 - RNA, 19 nt, Artificial Sequence
  Description of Artificial Sequence: Synthetic oligonucleotide
cuccuggcuguaggucacu

SEQ ID NO: 2916289 - RNA, 19 nt, Artificial Sequence
  Description of Artificial Sequence: Synthetic oligonucleotide
gcaaccguuccugguuguu

SEQ ID NO: 2916290 - RNA, 19 nt, Artificial Sequence
  Description of Artificial Sequence: Synthetic oligonucleotide
gcccuagccucugcuugcu

SEQ ID NO: 2916291 - RNA, 19 nt, Artificial Sequence
  Description of Artificial Sequence: Synthetic oligonucleotide
cccuagccucugcuugcua

SEQ ID NO: 2916292 - RNA, 19 nt, Artificial Sequence
  Description of Artificial Sequence: Synthetic oligonucleotide
cgcaaccguuccugguugu

SEQ ID NO: 2916293 - RNA, 19 nt, Artificial Sequence
  Description of Artificial Sequence: Synthetic oligonucleotide
ccuggacaucaggguccca

SEQ ID NO: 2916294 - RNA, 19 nt, Artificial Sequence
  Description of Artificial Sequence: Synthetic oligonucleotide
ccacauccuccuggcugua

SEQ ID NO: 2916295 - RNA, 19 nt, Artificial Sequence
  Description of Artificial Sequence: Synthetic oligonucleotide
cgccgcugcacagccugcu

SEQ ID NO: 2916296 - RNA, 19 nt, Artificial Sequence
  Description of Artificial Sequence: Synthetic oligonucleotide
aaauaugcaauguugacac

SEQ ID NO: 2916297 - RNA, 19 nt, Artificial Sequence
  Description of Artificial Sequence: Synthetic oligonucleotide
uggacugagauauagaccg

SEQ ID NO: 2916298 - RNA, 19 nt, Artificial Sequence
  Description of Artificial Sequence: Synthetic oligonucleotide
aaaggauucaaggaugggc

SEQ ID NO: 2916299 - RNA, 19 nt, Artificial Sequence
  Description of Artificial Sequence: Synthetic oligonucleotide
uauuucuguccacugaugg

SEQ ID NO: 2916300 - RNA, 19 nt, Artificial Sequence
  Description of Artificial Sequence: Synthetic oligonucleotide
uguaugaugucucaugaug

SEQ ID NO: 2916301 - RNA, 19 nt, Artificial Sequence
  Description of Artificial Sequence: Synthetic oligonucleotide
ugucuaaaagguauucacg

SEQ ID NO: 2916302 - RNA, 19 nt, Artificial Sequence
  Description of Artificial Sequence: Synthetic oligonucleotide
aaguuugaaagcauggaac

SEQ ID NO: 2916303 - RNA, 19 nt, Artificial Sequence
  Description of Artificial Sequence: Synthetic oligonucleotide
ugagauauagaccggggag

SEQ ID NO: 2916304 - RNA, 19 nt, Artificial Sequence
  Description of Artificial Sequence: Synthetic oligonucleotide
augucuaaaagguauucac

SEQ ID NO: 2916305 - RNA, 19 nt, Artificial Sequence
  Description of Artificial Sequence: Synthetic oligonucleotide
auggguaaaggauucaagg

SEQ ID NO: 2916306 - RNA, 19 nt, Artificial Sequence
  Description of Artificial Sequence: Synthetic oligonucleotide
ugacacuggauacagcugg

SEQ ID NO: 2916307 - RNA, 19 nt, Artificial Sequence
  Description of Artificial Sequence: Synthetic oligonucleotide
uucaaauaugcaauguuga

SEQ ID NO: 2916308 - RNA, 19 nt, Artificial Sequence
  Description of Artificial Sequence: Synthetic oligonucleotide
aaaguuugaaagcauggaa

SEQ ID NO: 2916309 - RNA, 19 nt, Artificial Sequence
  Description of Artificial Sequence: Synthetic oligonucleotide
gauggacugagauauagac

SEQ ID NO: 2916310 - RNA, 19 nt, Artificial Sequence
  Description of Artificial Sequence: Synthetic oligonucleotide
gucuaaaagguauucacgc

SEQ ID NO: 2916311 - RNA, 19 nt, Artificial Sequence
  Description of Artificial Sequence: Synthetic oligonucleotide
acaggcguuauuucugucc

SEQ ID NO: 2916312 - RNA, 19 nt, Artificial Sequence
  Description of Artificial Sequence: Synthetic oligonucleotide
aaaagguauucacgcugcc

SEQ ID NO: 2916313 - RNA, 19 nt, Artificial Sequence
  Description of Artificial Sequence: Synthetic oligonucleotide
uguggguauaccacgcugg

SEQ ID NO: 2916314 - RNA, 19 nt, Artificial Sequence
  Description of Artificial Sequence: Synthetic oligonucleotide
uaaaagguauucacgcugc

SEQ ID NO: 2916315 - RNA, 19 nt, Artificial Sequence
  Description of Artificial Sequence: Synthetic oligonucleotide
aauaugcaauguugacacc

SEQ ID NO: 2916316 - RNA, 19 nt, Artificial Sequence
  Description of Artificial Sequence: Synthetic oligonucleotide
uaugguaggcaccaguaca

SEQ ID NO: 2916317 - RNA, 19 nt, Artificial Sequence
  Description of Artificial Sequence: Synthetic oligonucleotide
aaguguaugaugucucaug

SEQ ID NO: 2916318 - RNA, 19 nt, Artificial Sequence
  Description of Artificial Sequence: Synthetic oligonucleotide
ugugcaaaguuugaaagca

SEQ ID NO: 2916319 - RNA, 19 nt, Artificial Sequence
  Description of Artificial Sequence: Synthetic oligonucleotide
ugaugucucaugauggucu

SEQ ID NO: 2916320 - RNA, 19 nt, Artificial Sequence
  Description of Artificial Sequence: Synthetic oligonucleotide
ugcaaaguuugaaagcaug

SEQ ID NO: 2916321 - RNA, 19 nt, Artificial Sequence
  Description of Artificial Sequence: Synthetic oligonucleotide
cuaaaagguauucacgcug

SEQ ID NO: 2916322 - RNA, 19 nt, Artificial Sequence
  Description of Artificial Sequence: Synthetic oligonucleotide
gaaagcauggaacgggcag

SEQ ID NO: 2916323 - RNA, 19 nt, Artificial Sequence
  Description of Artificial Sequence: Synthetic oligonucleotide
agggaucaugucuaaaagg

SEQ ID NO: 2916324 - RNA, 19 nt, Artificial Sequence
  Description of Artificial Sequence: Synthetic oligonucleotide
uuuugcuuuccguguaugg

SEQ ID NO: 2916325 - RNA, 19 nt, Artificial Sequence
  Description of Artificial Sequence: Synthetic oligonucleotide
acuggauacagcuggagcu

SEQ ID NO: 2916326 - RNA, 19 nt, Artificial Sequence
  Description of Artificial Sequence: Synthetic oligonucleotide
ucaaauaugcaauguugac

SEQ ID NO: 2916327 - RNA, 19 nt, Artificial Sequence
  Description of Artificial Sequence: Synthetic oligonucleotide
guaugaugucucaugaugg

SEQ ID NO: 2916328 - RNA, 19 nt, Artificial Sequence
  Description of Artificial Sequence: Synthetic oligonucleotide
aaagguauucacgcugccg

SEQ ID NO: 2916329 - RNA, 19 nt, Artificial Sequence
  Description of Artificial Sequence: Synthetic oligonucleotide
uguuuacugacacuggaua

SEQ ID NO: 2916330 - RNA, 19 nt, Artificial Sequence
  Description of Artificial Sequence: Synthetic oligonucleotide
uggguaaaggauucaagga

SEQ ID NO: 2916331 - RNA, 19 nt, Artificial Sequence
  Description of Artificial Sequence: Synthetic oligonucleotide
aguguaugaugucucauga

SEQ ID NO: 2916332 - RNA, 19 nt, Artificial Sequence
  Description of Artificial Sequence: Synthetic oligonucleotide
aaggaugggcaguacaagu

SEQ ID NO: 2916333 - RNA, 19 nt, Artificial Sequence
  Description of Artificial Sequence: Synthetic oligonucleotide
guucaaauaugcaauguug

SEQ ID NO: 2916334 - RNA, 19 nt, Artificial Sequence
  Description of Artificial Sequence: Synthetic oligonucleotide
gagauauagaccggggagg

SEQ ID NO: 2916335 - RNA, 19 nt, Artificial Sequence
  Description of Artificial Sequence: Synthetic oligonucleotide
aaggauucaaggaugggca

SEQ ID NO: 2916336 - RNA, 19 nt, Artificial Sequence
  Description of Artificial Sequence: Synthetic oligonucleotide
uguucaaauaugcaauguu

SEQ ID NO: 2916337 - RNA, 19 nt, Artificial Sequence
  Description of Artificial Sequence: Synthetic oligonucleotide
aggagaaauggguaaagga

SEQ ID NO: 2916338 - RNA, 19 nt, Artificial Sequence
  Description of Artificial Sequence: Synthetic oligonucleotide
aguguucaaauaugcaaug

SEQ ID NO: 2916339 - RNA, 19 nt, Artificial Sequence
  Description of Artificial Sequence: Synthetic oligonucleotide
gagggaucaugucuaaaag

SEQ ID NO: 2916340 - RNA, 19 nt, Artificial Sequence
  Description of Artificial Sequence: Synthetic oligonucleotide
ucuaaaagguauucacgcu

SEQ ID NO: 2916341 - RNA, 19 nt, Artificial Sequence
  Description of Artificial Sequence: Synthetic oligonucleotide
uugaaagcauggaacgggc

SEQ ID NO: 2916342 - RNA, 19 nt, Artificial Sequence
  Description of Artificial Sequence: Synthetic oligonucleotide
ggguauaccacgcuggagg

SEQ ID NO: 2916343 - RNA, 19 nt, Artificial Sequence
  Description of Artificial Sequence: Synthetic oligonucleotide
aauggguaaaggauucaag

SEQ ID NO: 2916344 - RNA, 19 nt, Artificial Sequence
  Description of Artificial Sequence: Synthetic oligonucleotide
guaaaggauucaaggaugg

SEQ ID NO: 2916345 - RNA, 19 nt, Artificial Sequence
  Description of Artificial Sequence: Synthetic oligonucleotide
uguaguaggggagagugcu

SEQ ID NO: 2916346 - RNA, 19 nt, Artificial Sequence
  Description of Artificial Sequence: Synthetic oligonucleotide
uccacugauggacugagau

SEQ ID NO: 2916347 - RNA, 19 nt, Artificial Sequence
  Description of Artificial Sequence: Synthetic oligonucleotide
agaaauggguaaaggauuc

SEQ ID NO: 2916348 - RNA, 19 nt, Artificial Sequence
  Description of Artificial Sequence: Synthetic oligonucleotide
acaacuggggugccugugc

SEQ ID NO: 2916349 - RNA, 19 nt, Artificial Sequence
  Description of Artificial Sequence: Synthetic oligonucleotide
uuuauguccuccgaugcca

SEQ ID NO: 2916350 - RNA, 19 nt, Artificial Sequence
  Description of Artificial Sequence: Synthetic oligonucleotide
uaccaaggaggccaccugg

SEQ ID NO: 2916351 - RNA, 19 nt, Artificial Sequence
  Description of Artificial Sequence: Synthetic oligonucleotide
caguacaaguggaacaggc

SEQ ID NO: 2916352 - RNA, 19 nt, Artificial Sequence
  Description of Artificial Sequence: Synthetic oligonucleotide
ugcaauguugacaccuggc

SEQ ID NO: 2916353 - RNA, 19 nt, Artificial Sequence
  Description of Artificial Sequence: Synthetic oligonucleotide
ugccaguguucaaauaugc

SEQ ID NO: 2916354 - RNA, 19 nt, Artificial Sequence
  Description of Artificial Sequence: Synthetic oligonucleotide
uaugcaauguugacaccug

SEQ ID NO: 2916355 - RNA, 19 nt, Artificial Sequence
  Description of Artificial Sequence: Synthetic oligonucleotide
uuucuguccacugauggac

SEQ ID NO: 2916356 - RNA, 19 nt, Artificial Sequence
  Description of Artificial Sequence: Synthetic oligonucleotide
cagauguggguauaccacg

SEQ ID NO: 2916357 - RNA, 19 nt, Artificial Sequence
  Description of Artificial Sequence: Synthetic oligonucleotide
ugcuuuccguguaugguag

SEQ ID NO: 2916358 - RNA, 19 nt, Artificial Sequence
  Description of Artificial Sequence: Synthetic oligonucleotide
auaugcaauguugacaccu

SEQ ID NO: 2916359 - RNA, 19 nt, Artificial Sequence
  Description of Artificial Sequence: Synthetic oligonucleotide
uguaugguaggcaccagua

SEQ ID NO: 2916360 - RNA, 19 nt, Artificial Sequence
  Description of Artificial Sequence: Synthetic oligonucleotide
uuauuucuguccacugaug

SEQ ID NO: 2916361 - RNA, 19 nt, Artificial Sequence
  Description of Artificial Sequence: Synthetic oligonucleotide
auggacugagauauagacc

SEQ ID NO: 2916362 - RNA, 19 nt, Artificial Sequence
  Description of Artificial Sequence: Synthetic oligonucleotide
uaggagaaauggguaaagg

SEQ ID NO: 2916363 - RNA, 19 nt, Artificial Sequence
  Description of Artificial Sequence: Synthetic oligonucleotide
cugugcaaaguuugaaagc

SEQ ID NO: 2916364 - RNA, 19 nt, Artificial Sequence
  Description of Artificial Sequence: Synthetic oligonucleotide
uggaacaggcguuauuucu

SEQ ID NO: 2916365 - RNA, 19 nt, Artificial Sequence
  Description of Artificial Sequence: Synthetic oligonucleotide
guuuacugacacuggauac

SEQ ID NO: 2916366 - RNA, 19 nt, Artificial Sequence
  Description of Artificial Sequence: Synthetic oligonucleotide
uaugaugucucaugauggu

SEQ ID NO: 2916367 - RNA, 19 nt, Artificial Sequence
  Description of Artificial Sequence: Synthetic oligonucleotide
uuacugacacuggauacag

SEQ ID NO: 2916368 - RNA, 19 nt, Artificial Sequence
  Description of Artificial Sequence: Synthetic oligonucleotide
ggggcaauaggagaaaugg

SEQ ID NO: 2916369 - RNA, 19 nt, Artificial Sequence
  Description of Artificial Sequence: Synthetic oligonucleotide
aauaggagaaauggguaaa

SEQ ID NO: 2916370 - RNA, 19 nt, Artificial Sequence
  Description of Artificial Sequence: Synthetic oligonucleotide
uauaccacgcuggaggcug

SEQ ID NO: 2916371 - RNA, 19 nt, Artificial Sequence
  Description of Artificial Sequence: Synthetic oligonucleotide
aaggaggccaccuggcaca

SEQ ID NO: 2916372 - RNA, 19 nt, Artificial Sequence
  Description of Artificial Sequence: Synthetic oligonucleotide
gacugagauauagaccggg

SEQ ID NO: 2916373 - RNA, 19 nt, Artificial Sequence
  Description of Artificial Sequence: Synthetic oligonucleotide
agauauagaccggggaggg

SEQ ID NO: 2916374 - RNA, 19 nt, Artificial Sequence
  Description of Artificial Sequence: Synthetic oligonucleotide
ugcucugaggcugaggagc

SEQ ID NO: 2916375 - RNA, 19 nt, Artificial Sequence
  Description of Artificial Sequence: Synthetic oligonucleotide
uccuguuuacugacacugg

SEQ ID NO: 2916376 - RNA, 19 nt, Artificial Sequence
  Description of Artificial Sequence: Synthetic oligonucleotide
ucucaugauggucuccugu

SEQ ID NO: 2916377 - RNA, 19 nt, Artificial Sequence
  Description of Artificial Sequence: Synthetic oligonucleotide
aguacaggcacugcaugcg

SEQ ID NO: 2916378 - RNA, 19 nt, Artificial Sequence
  Description of Artificial Sequence: Synthetic oligonucleotide
uggcauaccaaggaggcca

SEQ ID NO: 2916379 - RNA, 19 nt, Artificial Sequence
  Description of Artificial Sequence: Synthetic oligonucleotide
guuugaaagcauggaacgg

SEQ ID NO: 2916380 - RNA, 19 nt, Artificial Sequence
  Description of Artificial Sequence: Synthetic oligonucleotide
ugacaccuggcauaccaag

SEQ ID NO: 2916381 - RNA, 19 nt, Artificial Sequence
  Description of Artificial Sequence: Synthetic oligonucleotide
uuugcuuuccguguauggu

SEQ ID NO: 2916382 - RNA, 19 nt, Artificial Sequence
  Description of Artificial Sequence: Synthetic oligonucleotide
uggagcuguaguaggggag

SEQ ID NO: 2916383 - RNA, 19 nt, Artificial Sequence
  Description of Artificial Sequence: Synthetic oligonucleotide
uggaacgggcagauguggg

SEQ ID NO: 2916384 - RNA, 19 nt, Artificial Sequence
  Description of Artificial Sequence: Synthetic oligonucleotide
aguacaaguggaacaggcg

SEQ ID NO: 2916385 - RNA, 19 nt, Artificial Sequence
  Description of Artificial Sequence: Synthetic oligonucleotide
ugccggucugccaaacugg

SEQ ID NO: 2916386 - RNA, 19 nt, Artificial Sequence
  Description of Artificial Sequence: Synthetic oligonucleotide
ugauggacugagauauaga

SEQ ID NO: 2916387 - RNA, 19 nt, Artificial Sequence
  Description of Artificial Sequence: Synthetic oligonucleotide
cuuuauguccuccgaugcc

SEQ ID NO: 2916388 - RNA, 19 nt, Artificial Sequence
  Description of Artificial Sequence: Synthetic oligonucleotide
guugacaccuggcauacca

SEQ ID NO: 2916389 - RNA, 19 nt, Artificial Sequence
  Description of Artificial Sequence: Synthetic oligonucleotide
aaauggguaaaggauucaa

SEQ ID NO: 2916390 - RNA, 19 nt, Artificial Sequence
  Description of Artificial Sequence: Synthetic oligonucleotide
agauguggguauaccacgc

SEQ ID NO: 2916391 - RNA, 19 nt, Artificial Sequence
  Description of Artificial Sequence: Synthetic oligonucleotide
uaaaggauucaaggauggg

SEQ ID NO: 2916392 - RNA, 19 nt, Artificial Sequence
  Description of Artificial Sequence: Synthetic oligonucleotide
aacaggcguuauuucuguc

SEQ ID NO: 2916393 - RNA, 19 nt, Artificial Sequence
  Description of Artificial Sequence: Synthetic oligonucleotide
gaugccaguguucaaauau

SEQ ID NO: 2916394 - RNA, 19 nt, Artificial Sequence
  Description of Artificial Sequence: Synthetic oligonucleotide
aaagcauggaacgggcaga

SEQ ID NO: 2916395 - RNA, 19 nt, Artificial Sequence
  Description of Artificial Sequence: Synthetic oligonucleotide
acaggcacugcaugcgacg

SEQ ID NO: 2916396 - RNA, 19 nt, Artificial Sequence
  Description of Artificial Sequence: Synthetic oligonucleotide
augcaauguugacaccugg

SEQ ID NO: 2916397 - RNA, 19 nt, Artificial Sequence
  Description of Artificial Sequence: Synthetic oligonucleotide
uuauguccuccgaugccag

SEQ ID NO: 2916398 - RNA, 19 nt, Artificial Sequence
  Description of Artificial Sequence: Synthetic oligonucleotide
aguaggggagagugcugcc

SEQ ID NO: 2916399 - RNA, 19 nt, Artificial Sequence
  Description of Artificial Sequence: Synthetic oligonucleotide
cuccuguuuacugacacug

SEQ ID NO: 2916400 - RNA, 19 nt, Artificial Sequence
  Description of Artificial Sequence: Synthetic oligonucleotide
caugcgacggaaguugggg

SEQ ID NO: 2916401 - RNA, 19 nt, Artificial Sequence
  Description of Artificial Sequence: Synthetic oligonucleotide
auuucuguccacugaugga

SEQ ID NO: 2916402 - RNA, 19 nt, Artificial Sequence
  Description of Artificial Sequence: Synthetic oligonucleotide
cugauggacugagauauag

SEQ ID NO: 2916403 - RNA, 19 nt, Artificial Sequence
  Description of Artificial Sequence: Synthetic oligonucleotide
uuccguguaugguaggcac

SEQ ID NO: 2916404 - RNA, 19 nt, Artificial Sequence
  Description of Artificial Sequence: Synthetic oligonucleotide
ugaaagcauggaacgggca

SEQ ID NO: 2916405 - RNA, 19 nt, Artificial Sequence
  Description of Artificial Sequence: Synthetic oligonucleotide
auaggagaaauggguaaag

SEQ ID NO: 2916406 - RNA, 19 nt, Artificial Sequence
  Description of Artificial Sequence: Synthetic oligonucleotide
gguaaaggauucaaggaug

SEQ ID NO: 2916407 - RNA, 19 nt, Artificial Sequence
  Description of Artificial Sequence: Synthetic oligonucleotide
gacaccuggcauaccaagg

SEQ ID NO: 2916408 - RNA, 19 nt, Artificial Sequence
  Description of Artificial Sequence: Synthetic oligonucleotide
ccugugcaaaguuugaaag

SEQ ID NO: 2916409 - RNA, 19 nt, Artificial Sequence
  Description of Artificial Sequence: Synthetic oligonucleotide
ggaugggcaguacaagugg

SEQ ID NO: 2916410 - RNA, 19 nt, Artificial Sequence
  Description of Artificial Sequence: Synthetic oligonucleotide
gcaaaguuugaaagcaugg

SEQ ID NO: 2916411 - RNA, 19 nt, Artificial Sequence
  Description of Artificial Sequence: Synthetic oligonucleotide
auguugacaccuggcauac

SEQ ID NO: 2916412 - RNA, 19 nt, Artificial Sequence
  Description of Artificial Sequence: Synthetic oligonucleotide
gauacagcuggagcuguag

SEQ ID NO: 2916413 - RNA, 19 nt, Artificial Sequence
  Description of Artificial Sequence: Synthetic oligonucleotide
accuggcacagacaacugg

SEQ ID NO: 2916414 - RNA, 19 nt, Artificial Sequence
  Description of Artificial Sequence: Synthetic oligonucleotide
acaccuggcauaccaagga

SEQ ID NO: 2916415 - RNA, 19 nt, Artificial Sequence
  Description of Artificial Sequence: Synthetic oligonucleotide
cacuggauacagcuggagc

SEQ ID NO: 2916416 - RNA, 19 nt, Artificial Sequence
  Description of Artificial Sequence: Synthetic oligonucleotide
caguacaggcacugcaugc

SEQ ID NO: 2916417 - RNA, 19 nt, Artificial Sequence
  Description of Artificial Sequence: Synthetic oligonucleotide
augaugucucaugaugguc

SEQ ID NO: 2916418 - RNA, 19 nt, Artificial Sequence
  Description of Artificial Sequence: Synthetic oligonucleotide
ucaugucuaaaagguauuc

SEQ ID NO: 2916419 - RNA, 19 nt, Artificial Sequence
  Description of Artificial Sequence: Synthetic oligonucleotide
uaguaggggagagugcugc

SEQ ID NO: 2916420 - RNA, 19 nt, Artificial Sequence
  Description of Artificial Sequence: Synthetic oligonucleotide
ugaggagccugccgaagug

SEQ ID NO: 2916421 - RNA, 19 nt, Artificial Sequence
  Description of Artificial Sequence: Synthetic oligonucleotide
auguggguauaccacgcug

SEQ ID NO: 2916422 - RNA, 19 nt, Artificial Sequence
  Description of Artificial Sequence: Synthetic oligonucleotide
aggauucaaggaugggcag

SEQ ID NO: 2916423 - RNA, 19 nt, Artificial Sequence
  Description of Artificial Sequence: Synthetic oligonucleotide
aguggaacaggcguuauuu

SEQ ID NO: 2916424 - RNA, 19 nt, Artificial Sequence
  Description of Artificial Sequence: Synthetic oligonucleotide
acugagauauagaccgggg

SEQ ID NO: 2916425 - RNA, 19 nt, Artificial Sequence
  Description of Artificial Sequence: Synthetic oligonucleotide
gaggccaccuggcacagac

SEQ ID NO: 2916426 - RNA, 19 nt, Artificial Sequence
  Description of Artificial Sequence: Synthetic oligonucleotide
uacaaguggaacaggcguu

SEQ ID NO: 2916427 - RNA, 19 nt, Artificial Sequence
  Description of Artificial Sequence: Synthetic oligonucleotide
gaucaugucuaaaagguau

SEQ ID NO: 2916428 - RNA, 19 nt, Artificial Sequence
  Description of Artificial Sequence: Synthetic oligonucleotide
ucuguccacugauggacug

SEQ ID NO: 2916429 - RNA, 19 nt, Artificial Sequence
  Description of Artificial Sequence: Synthetic oligonucleotide
uugcuuuccguguauggua

SEQ ID NO: 2916430 - RNA, 19 nt, Artificial Sequence
  Description of Artificial Sequence: Synthetic oligonucleotide
uguccacugauggacugag

SEQ ID NO: 2916431 - RNA, 19 nt, Artificial Sequence
  Description of Artificial Sequence: Synthetic oligonucleotide
auauagaccggggagggau

SEQ ID NO: 2916432 - RNA, 19 nt, Artificial Sequence
  Description of Artificial Sequence: Synthetic oligonucleotide
cuggcacagacaacugggg

SEQ ID NO: 2916433 - RNA, 19 nt, Artificial Sequence
  Description of Artificial Sequence: Synthetic oligonucleotide
uacagcuggagcuguagua

SEQ ID NO: 2916434 - RNA, 19 nt, Artificial Sequence
  Description of Artificial Sequence: Synthetic oligonucleotide
caauaggagaaauggguaa

SEQ ID NO: 2916435 - RNA, 19 nt, Artificial Sequence
  Description of Artificial Sequence: Synthetic oligonucleotide
auggucuccuguuuacuga

SEQ ID NO: 2916436 - RNA, 19 nt, Artificial Sequence
  Description of Artificial Sequence: Synthetic oligonucleotide
uccguguaugguaggcacc

SEQ ID NO: 2916437 - RNA, 19 nt, Artificial Sequence
  Description of Artificial Sequence: Synthetic oligonucleotide
gaggcugaggagccugccg

SEQ ID NO: 2916438 - RNA, 19 nt, Artificial Sequence
  Description of Artificial Sequence: Synthetic oligonucleotide
gcuuuauguccuccgaugc

SEQ ID NO: 2916439 - RNA, 19 nt, Artificial Sequence
  Description of Artificial Sequence: Synthetic oligonucleotide
augguaggcaccaguacag

SEQ ID NO: 2916440 - RNA, 19 nt, Artificial Sequence
  Description of Artificial Sequence: Synthetic oligonucleotide
guacaaguggaacaggcgu

SEQ ID NO: 2916441 - RNA, 19 nt, Artificial Sequence
  Description of Artificial Sequence: Synthetic oligonucleotide
cuuuccguguaugguaggc

SEQ ID NO: 2916442 - RNA, 19 nt, Artificial Sequence
  Description of Artificial Sequence: Synthetic oligonucleotide
cauggaacgggcagaugug

SEQ ID NO: 2916443 - RNA, 19 nt, Artificial Sequence
  Description of Artificial Sequence: Synthetic oligonucleotide
ccuggcacagacaacuggg

SEQ ID NO: 2916444 - RNA, 19 nt, Artificial Sequence
  Description of Artificial Sequence: Synthetic oligonucleotide
gucuccuguuuacugacac

SEQ ID NO: 2916445 - RNA, 19 nt, Artificial Sequence
  Description of Artificial Sequence: Synthetic oligonucleotide
gaugucucaugauggucuc

SEQ ID NO: 2916446 - RNA, 19 nt, Artificial Sequence
  Description of Artificial Sequence: Synthetic oligonucleotide
uggucuccuguuuacugac

SEQ ID NO: 2916447 - RNA, 19 nt, Artificial Sequence
  Description of Artificial Sequence: Synthetic oligonucleotide
guuauuucuguccacugau

SEQ ID NO: 2916448 - RNA, 19 nt, Artificial Sequence
  Description of Artificial Sequence: Synthetic oligonucleotide
auggaacgggcagaugugg

SEQ ID NO: 2916449 - RNA, 19 nt, Artificial Sequence
  Description of Artificial Sequence: Synthetic oligonucleotide
ggcaguacaaguggaacag

SEQ ID NO: 2916450 - RNA, 19 nt, Artificial Sequence
  Description of Artificial Sequence: Synthetic oligonucleotide
uucuguccacugauggacu

SEQ ID NO: 2916451 - RNA, 19 nt, Artificial Sequence
  Description of Artificial Sequence: Synthetic oligonucleotide
accuggcauaccaaggagg

SEQ ID NO: 2916452 - RNA, 19 nt, Artificial Sequence
  Description of Artificial Sequence: Synthetic oligonucleotide
guaugguaggcaccaguac

SEQ ID NO: 2916453 - RNA, 19 nt, Artificial Sequence
  Description of Artificial Sequence: Synthetic oligonucleotide
caaaguuugaaagcaugga

SEQ ID NO: 2916454 - RNA, 19 nt, Artificial Sequence
  Description of Artificial Sequence: Synthetic oligonucleotide
auaccaaggaggccaccug

SEQ ID NO: 2916455 - RNA, 19 nt, Artificial Sequence
  Description of Artificial Sequence: Synthetic oligonucleotide
gcuguaguaggggagagug

SEQ ID NO: 2916456 - RNA, 19 nt, Artificial Sequence
  Description of Artificial Sequence: Synthetic oligonucleotide
ggcuuuauguccuccgaug

SEQ ID NO: 2916457 - RNA, 19 nt, Artificial Sequence
  Description of Artificial Sequence: Synthetic oligonucleotide
ucugaggcugaggagccug

SEQ ID NO: 2916458 - RNA, 19 nt, Artificial Sequence
  Description of Artificial Sequence: Synthetic oligonucleotide
ccuggcauaccaaggaggc

SEQ ID NO: 2916459 - RNA, 19 nt, Artificial Sequence
  Description of Artificial Sequence: Synthetic oligonucleotide
uccgaugccaguguucaaa

SEQ ID NO: 2916460 - RNA, 19 nt, Artificial Sequence
  Description of Artificial Sequence: Synthetic oligonucleotide
cugacacuggauacagcug

SEQ ID NO: 2916461 - RNA, 19 nt, Artificial Sequence
  Description of Artificial Sequence: Synthetic oligonucleotide
ugggcaguacaaguggaac

SEQ ID NO: 2916462 - RNA, 19 nt, Artificial Sequence
  Description of Artificial Sequence: Synthetic oligonucleotide
uuuccguguaugguaggca

SEQ ID NO: 2916463 - RNA, 19 nt, Artificial Sequence
  Description of Artificial Sequence: Synthetic oligonucleotide
caaggaggccaccuggcac

SEQ ID NO: 2916464 - RNA, 19 nt, Artificial Sequence
  Description of Artificial Sequence: Synthetic oligonucleotide
gguauaccacgcuggaggc

SEQ ID NO: 2916465 - RNA, 19 nt, Artificial Sequence
  Description of Artificial Sequence: Synthetic oligonucleotide
uacaggcacugcaugcgac

SEQ ID NO: 2916466 - RNA, 19 nt, Artificial Sequence
  Description of Artificial Sequence: Synthetic oligonucleotide
accaaggaggccaccuggc

SEQ ID NO: 2916467 - RNA, 19 nt, Artificial Sequence
  Description of Artificial Sequence: Synthetic oligonucleotide
ucuccuguuuacugacacu

SEQ ID NO: 2916468 - RNA, 19 nt, Artificial Sequence
  Description of Artificial Sequence: Synthetic oligonucleotide
auacagcuggagcuguagu

SEQ ID NO: 2916469 - RNA, 19 nt, Artificial Sequence
  Description of Artificial Sequence: Synthetic oligonucleotide
cugagauauagaccgggga

SEQ ID NO: 2916470 - RNA, 19 nt, Artificial Sequence
  Description of Artificial Sequence: Synthetic oligonucleotide
aggaugggcaguacaagug

SEQ ID NO: 2916471 - RNA, 19 nt, Artificial Sequence
  Description of Artificial Sequence: Synthetic oligonucleotide
cuguaguaggggagagugc

SEQ ID NO: 2916472 - RNA, 19 nt, Artificial Sequence
  Description of Artificial Sequence: Synthetic oligonucleotide
aggcugaggagccugccga

SEQ ID NO: 2916473 - RNA, 19 nt, Artificial Sequence
  Description of Artificial Sequence: Synthetic oligonucleotide
caugucuaaaagguauuca

SEQ ID NO: 2916474 - RNA, 19 nt, Artificial Sequence
  Description of Artificial Sequence: Synthetic oligonucleotide
cugcaugcgacggaaguug

SEQ ID NO: 2916475 - RNA, 19 nt, Artificial Sequence
  Description of Artificial Sequence: Synthetic oligonucleotide
ggagggaucaugucuaaaa

SEQ ID NO: 2916476 - RNA, 19 nt, Artificial Sequence
  Description of Artificial Sequence: Synthetic oligonucleotide
ugguaggcaccaguacagg

SEQ ID NO: 2916477 - RNA, 19 nt, Artificial Sequence
  Description of Artificial Sequence: Synthetic oligonucleotide
gguaggcaccaguacaggc

SEQ ID NO: 2916478 - RNA, 19 nt, Artificial Sequence
  Description of Artificial Sequence: Synthetic oligonucleotide
uugacaccuggcauaccaa

SEQ ID NO: 2916479 - RNA, 19 nt, Artificial Sequence
  Description of Artificial Sequence: Synthetic oligonucleotide
uauagaccggggagggauc

SEQ ID NO: 2916480 - RNA, 19 nt, Artificial Sequence
  Description of Artificial Sequence: Synthetic oligonucleotide
cugccggucugccaaacug

SEQ ID NO: 2916481 - RNA, 19 nt, Artificial Sequence
  Description of Artificial Sequence: Synthetic oligonucleotide
auucacgcugccggucugc

SEQ ID NO: 2916482 - RNA, 19 nt, Artificial Sequence
  Description of Artificial Sequence: Synthetic oligonucleotide
aacgggcagauguggguau

SEQ ID NO: 2916483 - RNA, 19 nt, Artificial Sequence
  Description of Artificial Sequence: Synthetic oligonucleotide
uguccuccgaugccagugu

SEQ ID NO: 2916484 - RNA, 19 nt, Artificial Sequence
  Description of Artificial Sequence: Synthetic oligonucleotide
uauucacgcugccggucug

SEQ ID NO: 2916485 - RNA, 19 nt, Artificial Sequence
  Description of Artificial Sequence: Synthetic oligonucleotide
aaguggaacaggcguuauu

SEQ ID NO: 2916486 - RNA, 19 nt, Artificial Sequence
  Description of Artificial Sequence: Synthetic oligonucleotide
guaggcaccaguacaggca

SEQ ID NO: 2916487 - RNA, 19 nt, Artificial Sequence
  Description of Artificial Sequence: Synthetic oligonucleotide
gauucaaggaugggcagua

SEQ ID NO: 2916488 - RNA, 19 nt, Artificial Sequence
  Description of Artificial Sequence: Synthetic oligonucleotide
ggagagugcugccugcugc

SEQ ID NO: 2916489 - RNA, 19 nt, Artificial Sequence
  Description of Artificial Sequence: Synthetic oligonucleotide
aggcguuauuucuguccac

SEQ ID NO: 2916490 - RNA, 19 nt, Artificial Sequence
  Description of Artificial Sequence: Synthetic oligonucleotide
ggugccugugcaaaguuug

SEQ ID NO: 2916491 - RNA, 19 nt, Artificial Sequence
  Description of Artificial Sequence: Synthetic oligonucleotide
gaaauggguaaaggauuca

SEQ ID NO: 2916492 - RNA, 19 nt, Artificial Sequence
  Description of Artificial Sequence: Synthetic oligonucleotide
ggaacaggcguuauuucug

SEQ ID NO: 2916493 - RNA, 19 nt, Artificial Sequence
  Description of Artificial Sequence: Synthetic oligonucleotide
cuggauacagcuggagcug

SEQ ID NO: 2916494 - RNA, 19 nt, Artificial Sequence
  Description of Artificial Sequence: Synthetic oligonucleotide
caguguucaaauaugcaau

SEQ ID NO: 2916495 - RNA, 19 nt, Artificial Sequence
  Description of Artificial Sequence: Synthetic oligonucleotide
uggguauaccacgcuggag

SEQ ID NO: 2916496 - RNA, 19 nt, Artificial Sequence
  Description of Artificial Sequence: Synthetic oligonucleotide
ccaguguucaaauaugcaa

SEQ ID NO: 2916497 - RNA, 19 nt, Artificial Sequence
  Description of Artificial Sequence: Synthetic oligonucleotide
auguccuccgaugccagug

SEQ ID NO: 2916498 - RNA, 19 nt, Artificial Sequence
  Description of Artificial Sequence: Synthetic oligonucleotide
auucaaggaugggcaguac

SEQ ID NO: 2916499 - RNA, 19 nt, Artificial Sequence
  Description of Artificial Sequence: Synthetic oligonucleotide
caccuggcauaccaaggag

SEQ ID NO: 2916500 - RNA, 19 nt, Artificial Sequence
  Description of Artificial Sequence: Synthetic oligonucleotide
augccaguguucaaauaug

SEQ ID NO: 2916501 - RNA, 19 nt, Artificial Sequence
  Description of Artificial Sequence: Synthetic oligonucleotide
caggcguuauuucugucca

SEQ ID NO: 2916502 - RNA, 19 nt, Artificial Sequence
  Description of Artificial Sequence: Synthetic oligonucleotide
ggcagauguggguauacca

SEQ ID NO: 2916503 - RNA, 19 nt, Artificial Sequence
  Description of Artificial Sequence: Synthetic oligonucleotide
ugauggucuccuguuuacu

SEQ ID NO: 2916504 - RNA, 19 nt, Artificial Sequence
  Description of Artificial Sequence: Synthetic oligonucleotide
gaugggcaguacaagugga

SEQ ID NO: 2916505 - RNA, 19 nt, Artificial Sequence
  Description of Artificial Sequence: Synthetic oligonucleotide
aagcauggaacgggcagau

SEQ ID NO: 2916506 - RNA, 19 nt, Artificial Sequence
  Description of Artificial Sequence: Synthetic oligonucleotide
cugccgaaguguaugaugu

SEQ ID NO: 2916507 - RNA, 19 nt, Artificial Sequence
  Description of Artificial Sequence: Synthetic oligonucleotide
cacugauggacugagauau

SEQ ID NO: 2916508 - RNA, 19 nt, Artificial Sequence
  Description of Artificial Sequence: Synthetic oligonucleotide
gggaucaugucuaaaaggu

SEQ ID NO: 2916509 - RNA, 19 nt, Artificial Sequence
  Description of Artificial Sequence: Synthetic oligonucleotide
gggcaauaggagaaauggg

SEQ ID NO: 2916510 - RNA, 19 nt, Artificial Sequence
  Description of Artificial Sequence: Synthetic oligonucleotide
agguauucacgcugccggu

SEQ ID NO: 2916511 - RNA, 19 nt, Artificial Sequence
  Description of Artificial Sequence: Synthetic oligonucleotide
ggcaauaggagaaaugggu

SEQ ID NO: 2916512 - RNA, 19 nt, Artificial Sequence
  Description of Artificial Sequence: Synthetic oligonucleotide
cagacaacuggggugccug

SEQ ID NO: 2916513 - RNA, 19 nt, Artificial Sequence
  Description of Artificial Sequence: Synthetic oligonucleotide
gaacaggcguuauuucugu

SEQ ID NO: 2916514 - RNA, 19 nt, Artificial Sequence
  Description of Artificial Sequence: Synthetic oligonucleotide
caggcacugcaugcgacgg

SEQ ID NO: 2916515 - RNA, 19 nt, Artificial Sequence
  Description of Artificial Sequence: Synthetic oligonucleotide
accggggagggaucauguc

SEQ ID NO: 2916516 - RNA, 19 nt, Artificial Sequence
  Description of Artificial Sequence: Synthetic oligonucleotide
guggaacaggcguuauuuc

SEQ ID NO: 2916517 - RNA, 19 nt, Artificial Sequence
  Description of Artificial Sequence: Synthetic oligonucleotide
ggagaaauggguaaaggau

SEQ ID NO: 2916518 - RNA, 19 nt, Artificial Sequence
  Description of Artificial Sequence: Synthetic oligonucleotide
gcagauguggguauaccac

SEQ ID NO: 2916519 - RNA, 19 nt, Artificial Sequence
  Description of Artificial Sequence: Synthetic oligonucleotide
uccuccgaugccaguguuc

SEQ ID NO: 2916520 - RNA, 19 nt, Artificial Sequence
  Description of Artificial Sequence: Synthetic oligonucleotide
uggauacagcuggagcugu

SEQ ID NO: 2916521 - RNA, 19 nt, Artificial Sequence
  Description of Artificial Sequence: Synthetic oligonucleotide
gcacagacaacuggggugc

SEQ ID NO: 2916522 - RNA, 19 nt, Artificial Sequence
  Description of Artificial Sequence: Synthetic oligonucleotide
aacuggggugccugugcaa

SEQ ID NO: 2916523 - RNA, 19 nt, Artificial Sequence
  Description of Artificial Sequence: Synthetic oligonucleotide
gcauggaacgggcagaugu

SEQ ID NO: 2916524 - RNA, 19 nt, Artificial Sequence
  Description of Artificial Sequence: Synthetic oligonucleotide
gacaacuggggugccugug

SEQ ID NO: 2916525 - RNA, 19 nt, Artificial Sequence
  Description of Artificial Sequence: Synthetic oligonucleotide
ggguaaaggauucaaggau

SEQ ID NO: 2916526 - RNA, 19 nt, Artificial Sequence
  Description of Artificial Sequence: Synthetic oligonucleotide
uauguccuccgaugccagu

SEQ ID NO: 2916527 - RNA, 19 nt, Artificial Sequence
  Description of Artificial Sequence: Synthetic oligonucleotide
gagcuguaguaggggagag

SEQ ID NO: 2916528 - RNA, 19 nt, Artificial Sequence
  Description of Artificial Sequence: Synthetic oligonucleotide
cugaggcugaggagccugc

SEQ ID NO: 2916529 - RNA, 19 nt, Artificial Sequence
  Description of Artificial Sequence: Synthetic oligonucleotide
cuggagcuguaguagggga

SEQ ID NO: 2916530 - RNA, 19 nt, Artificial Sequence
  Description of Artificial Sequence: Synthetic oligonucleotide
acaaguggaacaggcguua

SEQ ID NO: 2916531 - RNA, 19 nt, Artificial Sequence
  Description of Artificial Sequence: Synthetic oligonucleotide
gggcaguacaaguggaaca

SEQ ID NO: 2916532 - RNA, 19 nt, Artificial Sequence
  Description of Artificial Sequence: Synthetic oligonucleotide
ccugccgaaguguaugaug

SEQ ID NO: 2916533 - RNA, 19 nt, Artificial Sequence
  Description of Artificial Sequence: Synthetic oligonucleotide
auagaccggggagggauca

SEQ ID NO: 2916534 - RNA, 19 nt, Artificial Sequence
  Description of Artificial Sequence: Synthetic oligonucleotide
guggguauaccacgcugga

SEQ ID NO: 2916535 - RNA, 19 nt, Artificial Sequence
  Description of Artificial Sequence: Synthetic oligonucleotide
ugccugugcaaaguuugaa

SEQ ID NO: 2916536 - RNA, 19 nt, Artificial Sequence
  Description of Artificial Sequence: Synthetic oligonucleotide
aucaugucuaaaagguauu

SEQ ID NO: 2916537 - RNA, 19 nt, Artificial Sequence
  Description of Artificial Sequence: Synthetic oligonucleotide
caccaguacaggcacugca

SEQ ID NO: 2916538 - RNA, 19 nt, Artificial Sequence
  Description of Artificial Sequence: Synthetic oligonucleotide
gauguggguauaccacgcu

SEQ ID NO: 2916539 - RNA, 19 nt, Artificial Sequence
  Description of Artificial Sequence: Synthetic oligonucleotide
cugcucugaggcugaggag

SEQ ID NO: 2916540 - RNA, 19 nt, Artificial Sequence
  Description of Artificial Sequence: Synthetic oligonucleotide
guacaggcacugcaugcga

SEQ ID NO: 2916541 - RNA, 19 nt, Artificial Sequence
  Description of Artificial Sequence: Synthetic oligonucleotide
gcuggagcuguaguagggg

SEQ ID NO: 2916542 - RNA, 19 nt, Artificial Sequence
  Description of Artificial Sequence: Synthetic oligonucleotide
accaguacaggcacugcau

SEQ ID NO: 2916543 - RNA, 19 nt, Artificial Sequence
  Description of Artificial Sequence: Synthetic oligonucleotide
gauauagaccggggaggga

SEQ ID NO: 2916544 - RNA, 19 nt, Artificial Sequence
  Description of Artificial Sequence: Synthetic oligonucleotide
acuggggugccugugcaaa

SEQ ID NO: 2916545 - RNA, 19 nt, Artificial Sequence
  Description of Artificial Sequence: Synthetic oligonucleotide
agacaacuggggugccugu

SEQ ID NO: 2916546 - RNA, 19 nt, Artificial Sequence
  Description of Artificial Sequence: Synthetic oligonucleotide
uucacgcugccggucugcc

SEQ ID NO: 2916547 - RNA, 19 nt, Artificial Sequence
  Description of Artificial Sequence: Synthetic oligonucleotide
cuggcauaccaaggaggcc

SEQ ID NO: 2916548 - RNA, 19 nt, Artificial Sequence
  Description of Artificial Sequence: Synthetic oligonucleotide
gcguuauuucuguccacug

SEQ ID NO: 2916549 - RNA, 19 nt, Artificial Sequence
  Description of Artificial Sequence: Synthetic oligonucleotide
guauucacgcugccggucu

SEQ ID NO: 2916550 - RNA, 19 nt, Artificial Sequence
  Description of Artificial Sequence: Synthetic oligonucleotide
acugcaugcgacggaaguu

SEQ ID NO: 2916551 - RNA, 19 nt, Artificial Sequence
  Description of Artificial Sequence: Synthetic oligonucleotide
gucucaugauggucuccug

SEQ ID NO: 2916552 - RNA, 19 nt, Artificial Sequence
  Description of Artificial Sequence: Synthetic oligonucleotide
ugccgaaguguaugauguc

SEQ ID NO: 2916553 - RNA, 19 nt, Artificial Sequence
  Description of Artificial Sequence: Synthetic oligonucleotide
guaguaggggagagugcug

SEQ ID NO: 2916554 - RNA, 19 nt, Artificial Sequence
  Description of Artificial Sequence: Synthetic oligonucleotide
cacgcuggaggcugcucug

SEQ ID NO: 2916555 - RNA, 19 nt, Artificial Sequence
  Description of Artificial Sequence: Synthetic oligonucleotide
ccgaaguguaugaugucuc

SEQ ID NO: 2916556 - RNA, 19 nt, Artificial Sequence
  Description of Artificial Sequence: Synthetic oligonucleotide
gaacgggcagaugugggua

SEQ ID NO: 2916557 - RNA, 19 nt, Artificial Sequence
  Description of Artificial Sequence: Synthetic oligonucleotide
ggcaccaguacaggcacug

SEQ ID NO: 2916558 - RNA, 19 nt, Artificial Sequence
  Description of Artificial Sequence: Synthetic oligonucleotide
gcaguacaaguggaacagg

SEQ ID NO: 2916559 - RNA, 19 nt, Artificial Sequence
  Description of Artificial Sequence: Synthetic oligonucleotide
agaccggggagggaucaug

SEQ ID NO: 2916560 - RNA, 19 nt, Artificial Sequence
  Description of Artificial Sequence: Synthetic oligonucleotide
cacgcugccggucugccaa

SEQ ID NO: 2916561 - RNA, 19 nt, Artificial Sequence
  Description of Artificial Sequence: Synthetic oligonucleotide
gcaauaggagaaaugggua

SEQ ID NO: 2916562 - RNA, 19 nt, Artificial Sequence
  Description of Artificial Sequence: Synthetic oligonucleotide
guguaugguaggcaccagu

SEQ ID NO: 2916563 - RNA, 19 nt, Artificial Sequence
  Description of Artificial Sequence: Synthetic oligonucleotide
auaccacgcuggaggcugc

SEQ ID NO: 2916564 - RNA, 19 nt, Artificial Sequence
  Description of Artificial Sequence: Synthetic oligonucleotide
guguucaaauaugcaaugu

SEQ ID NO: 2916565 - RNA, 19 nt, Artificial Sequence
  Description of Artificial Sequence: Synthetic oligonucleotide
gagagugcugccugcugcu

SEQ ID NO: 2916566 - RNA, 19 nt, Artificial Sequence
  Description of Artificial Sequence: Synthetic oligonucleotide
gaaguguaugaugucucau

SEQ ID NO: 2916567 - RNA, 19 nt, Artificial Sequence
  Description of Artificial Sequence: Synthetic oligonucleotide
ccuguuuacugacacugga

SEQ ID NO: 2916568 - RNA, 19 nt, Artificial Sequence
  Description of Artificial Sequence: Synthetic oligonucleotide
gcuuuccguguaugguagg

SEQ ID NO: 2916569 - RNA, 19 nt, Artificial Sequence
  Description of Artificial Sequence: Synthetic oligonucleotide
ccaguacaggcacugcaug

SEQ ID NO: 2916570 - RNA, 19 nt, Artificial Sequence
  Description of Artificial Sequence: Synthetic oligonucleotide
caccuggcacagacaacug

SEQ ID NO: 2916571 - RNA, 19 nt, Artificial Sequence
  Description of Artificial Sequence: Synthetic oligonucleotide
gccugugcaaaguuugaaa

SEQ ID NO: 2916572 - RNA, 19 nt, Artificial Sequence
  Description of Artificial Sequence: Synthetic oligonucleotide
ggacugagauauagaccgg

SEQ ID NO: 2916573 - RNA, 19 nt, Artificial Sequence
  Description of Artificial Sequence: Synthetic oligonucleotide
cuguuuacugacacuggau

SEQ ID NO: 2916574 - RNA, 19 nt, Artificial Sequence
  Description of Artificial Sequence: Synthetic oligonucleotide
uguugacaccuggcauacc

SEQ ID NO: 2916575 - RNA, 19 nt, Artificial Sequence
  Description of Artificial Sequence: Synthetic oligonucleotide
ggagcuguaguaggggaga

SEQ ID NO: 2916576 - RNA, 19 nt, Artificial Sequence
  Description of Artificial Sequence: Synthetic oligonucleotide
ggccaccuggcacagacaa

SEQ ID NO: 2916577 - RNA, 19 nt, Artificial Sequence
  Description of Artificial Sequence: Synthetic oligonucleotide
acagacaacuggggugccu

SEQ ID NO: 2916578 - RNA, 19 nt, Artificial Sequence
  Description of Artificial Sequence: Synthetic oligonucleotide
agcuguaguaggggagagu

SEQ ID NO: 2916579 - RNA, 19 nt, Artificial Sequence
  Description of Artificial Sequence: Synthetic oligonucleotide
cauaccaaggaggccaccu

SEQ ID NO: 2916580 - RNA, 19 nt, Artificial Sequence
  Description of Artificial Sequence: Synthetic oligonucleotide
caacuggggugccugugca

SEQ ID NO: 2916581 - RNA, 19 nt, Artificial Sequence
  Description of Artificial Sequence: Synthetic oligonucleotide
ucacgcugccggucugcca

SEQ ID NO: 2916582 - RNA, 19 nt, Artificial Sequence
  Description of Artificial Sequence: Synthetic oligonucleotide
augggcaguacaaguggaa

SEQ ID NO: 2916583 - RNA, 19 nt, Artificial Sequence
  Description of Artificial Sequence: Synthetic oligonucleotide
agagugcugccugcugcug

SEQ ID NO: 2916584 - RNA, 19 nt, Artificial Sequence
  Description of Artificial Sequence: Synthetic oligonucleotide
guguaugaugucucaugau

SEQ ID NO: 2916585 - RNA, 19 nt, Artificial Sequence
  Description of Artificial Sequence: Synthetic oligonucleotide
gccggucugccaaacuggg

SEQ ID NO: 2916586 - RNA, 19 nt, Artificial Sequence
  Description of Artificial Sequence: Synthetic oligonucleotide
gguauucacgcugccgguc

SEQ ID NO: 2916587 - RNA, 19 nt, Artificial Sequence
  Description of Artificial Sequence: Synthetic oligonucleotide
cacugcaugcgacggaagu

SEQ ID NO: 2916588 - RNA, 19 nt, Artificial Sequence
  Description of Artificial Sequence: Synthetic oligonucleotide
ggggcuuuauguccuccga

SEQ ID NO: 2916589 - RNA, 19 nt, Artificial Sequence
  Description of Artificial Sequence: Synthetic oligonucleotide
ggaucaugucuaaaaggua

SEQ ID NO: 2916590 - RNA, 19 nt, Artificial Sequence
  Description of Artificial Sequence: Synthetic oligonucleotide
gccaguguucaaauaugca

SEQ ID NO: 2916591 - RNA, 19 nt, Artificial Sequence
  Description of Artificial Sequence: Synthetic oligonucleotide
gcucugaggcugaggagcc

SEQ ID NO: 2916592 - RNA, 19 nt, Artificial Sequence
  Description of Artificial Sequence: Synthetic oligonucleotide
aggaggccaccuggcacag

SEQ ID NO: 2916593 - RNA, 19 nt, Artificial Sequence
  Description of Artificial Sequence: Synthetic oligonucleotide
gcaugcgacggaaguuggg

SEQ ID NO: 2916594 - RNA, 19 nt, Artificial Sequence
  Description of Artificial Sequence: Synthetic oligonucleotide
agcauggaacgggcagaug

SEQ ID NO: 2916595 - RNA, 19 nt, Artificial Sequence
  Description of Artificial Sequence: Synthetic oligonucleotide
cguuauuucuguccacuga

SEQ ID NO: 2916596 - RNA, 19 nt, Artificial Sequence
  Description of Artificial Sequence: Synthetic oligonucleotide
gaggcugcucugaggcuga

SEQ ID NO: 2916597 - RNA, 19 nt, Artificial Sequence
  Description of Artificial Sequence: Synthetic oligonucleotide
cacagacaacuggggugcc

SEQ ID NO: 2916598 - RNA, 19 nt, Artificial Sequence
  Description of Artificial Sequence: Synthetic oligonucleotide
ggaacgggcagaugugggu

SEQ ID NO: 2916599 - RNA, 19 nt, Artificial Sequence
  Description of Artificial Sequence: Synthetic oligonucleotide
cugaggagccugccgaagu

SEQ ID NO: 2916600 - RNA, 19 nt, Artificial Sequence
  Description of Artificial Sequence: Synthetic oligonucleotide
gggcagauguggguauacc

SEQ ID NO: 2916601 - RNA, 19 nt, Artificial Sequence
  Description of Artificial Sequence: Synthetic oligonucleotide
gugccugugcaaaguuuga

SEQ ID NO: 2916602 - RNA, 19 nt, Artificial Sequence
  Description of Artificial Sequence: Synthetic oligonucleotide
ggcguuauuucuguccacu

SEQ ID NO: 2916603 - RNA, 19 nt, Artificial Sequence
  Description of Artificial Sequence: Synthetic oligonucleotide
gcugaggagccugccgaag

SEQ ID NO: 2916604 - RNA, 19 nt, Artificial Sequence
  Description of Artificial Sequence: Synthetic oligonucleotide
ccggucugccaaacugggg

SEQ ID NO: 2916605 - RNA, 19 nt, Artificial Sequence
  Description of Artificial Sequence: Synthetic oligonucleotide
gaggagccugccgaagugu

SEQ ID NO: 2916606 - RNA, 19 nt, Artificial Sequence
  Description of Artificial Sequence: Synthetic oligonucleotide
ggcacugcaugcgacggaa

SEQ ID NO: 2916607 - RNA, 19 nt, Artificial Sequence
  Description of Artificial Sequence: Synthetic oligonucleotide
gccgaaguguaugaugucu

SEQ ID NO: 2916608 - RNA, 19 nt, Artificial Sequence
  Description of Artificial Sequence: Synthetic oligonucleotide
cgaaguguaugaugucuca

SEQ ID NO: 2916609 - RNA, 19 nt, Artificial Sequence
  Description of Artificial Sequence: Synthetic oligonucleotide
guaggggagagugcugccu

SEQ ID NO: 2916610 - RNA, 19 nt, Artificial Sequence
  Description of Artificial Sequence: Synthetic oligonucleotide
ccuccgaugccaguguuca

SEQ ID NO: 2916611 - RNA, 19 nt, Artificial Sequence
  Description of Artificial Sequence: Synthetic oligonucleotide
aggagccugccgaagugua

SEQ ID NO: 2916612 - RNA, 19 nt, Artificial Sequence
  Description of Artificial Sequence: Synthetic oligonucleotide
gaccggggagggaucaugu

SEQ ID NO: 2916613 - RNA, 19 nt, Artificial Sequence
  Description of Artificial Sequence: Synthetic oligonucleotide
ggauucaaggaugggcagu

SEQ ID NO: 2916614 - RNA, 19 nt, Artificial Sequence
  Description of Artificial Sequence: Synthetic oligonucleotide
ggcauaccaaggaggccac

SEQ ID NO: 2916615 - RNA, 19 nt, Artificial Sequence
  Description of Artificial Sequence: Synthetic oligonucleotide
acugauggacugagauaua

SEQ ID NO: 2916616 - RNA, 19 nt, Artificial Sequence
  Description of Artificial Sequence: Synthetic oligonucleotide
acgcuggaggcugcucuga

SEQ ID NO: 2916617 - RNA, 19 nt, Artificial Sequence
  Description of Artificial Sequence: Synthetic oligonucleotide
uaccacgcuggaggcugcu

SEQ ID NO: 2916618 - RNA, 19 nt, Artificial Sequence
  Description of Artificial Sequence: Synthetic oligonucleotide
ccguguaugguaggcacca

SEQ ID NO: 2916619 - RNA, 19 nt, Artificial Sequence
  Description of Artificial Sequence: Synthetic oligonucleotide
ggcugcucugaggcugagg

SEQ ID NO: 2916620 - RNA, 19 nt, Artificial Sequence
  Description of Artificial Sequence: Synthetic oligonucleotide
ccaccuggcacagacaacu

SEQ ID NO: 2916621 - RNA, 19 nt, Artificial Sequence
  Description of Artificial Sequence: Synthetic oligonucleotide
guauaccacgcuggaggcu

SEQ ID NO: 2916622 - RNA, 19 nt, Artificial Sequence
  Description of Artificial Sequence: Synthetic oligonucleotide
uagaccggggagggaucau

SEQ ID NO: 2916623 - RNA, 19 nt, Artificial Sequence
  Description of Artificial Sequence: Synthetic oligonucleotide
ccacugauggacugagaua

SEQ ID NO: 2916624 - RNA, 19 nt, Artificial Sequence
  Description of Artificial Sequence: Synthetic oligonucleotide
gcaccaguacaggcacugc

SEQ ID NO: 2916625 - RNA, 19 nt, Artificial Sequence
  Description of Artificial Sequence: Synthetic oligonucleotide
ggucuccuguuuacugaca

SEQ ID NO: 2916626 - RNA, 19 nt, Artificial Sequence
  Description of Artificial Sequence: Synthetic oligonucleotide
gggcuuuauguccuccgau

SEQ ID NO: 2916627 - RNA, 19 nt, Artificial Sequence
  Description of Artificial Sequence: Synthetic oligonucleotide
guccacugauggacugaga

SEQ ID NO: 2916628 - RNA, 19 nt, Artificial Sequence
  Description of Artificial Sequence: Synthetic oligonucleotide
ggcugaggagccugccgaa

SEQ ID NO: 2916629 - RNA, 19 nt, Artificial Sequence
  Description of Artificial Sequence: Synthetic oligonucleotide
acgggcagauguggguaua

SEQ ID NO: 2916630 - RNA, 19 nt, Artificial Sequence
  Description of Artificial Sequence: Synthetic oligonucleotide
gcacugcaugcgacggaag

SEQ ID NO: 2916631 - RNA, 19 nt, Artificial Sequence
  Description of Artificial Sequence: Synthetic oligonucleotide
ggggagggaucaugucuaa

SEQ ID NO: 2916632 - RNA, 19 nt, Artificial Sequence
  Description of Artificial Sequence: Synthetic oligonucleotide
gcauaccaaggaggccacc

SEQ ID NO: 2916633 - RNA, 19 nt, Artificial Sequence
  Description of Artificial Sequence: Synthetic oligonucleotide
acgcugccggucugccaaa

SEQ ID NO: 2916634 - RNA, 19 nt, Artificial Sequence
  Description of Artificial Sequence: Synthetic oligonucleotide
aggcugcucugaggcugag

SEQ ID NO: 2916635 - RNA, 19 nt, Artificial Sequence
  Description of Artificial Sequence: Synthetic oligonucleotide
aggccaccuggcacagaca

SEQ ID NO: 2916636 - RNA, 19 nt, Artificial Sequence
  Description of Artificial Sequence: Synthetic oligonucleotide
ccggggagggaucaugucu

SEQ ID NO: 2916637 - RNA, 19 nt, Artificial Sequence
  Description of Artificial Sequence: Synthetic oligonucleotide
cuccgaugccaguguucaa

SEQ ID NO: 2916638 - RNA, 19 nt, Artificial Sequence
  Description of Artificial Sequence: Synthetic oligonucleotide
gggagggaucaugucuaaa

SEQ ID NO: 2916639 - RNA, 19 nt, Artificial Sequence
  Description of Artificial Sequence: Synthetic oligonucleotide
gccaccuggcacagacaac

SEQ ID NO: 2916640 - RNA, 19 nt, Artificial Sequence
  Description of Artificial Sequence: Synthetic oligonucleotide
caaguggaacaggcguuau

SEQ ID NO: 2916641 - RNA, 19 nt, Artificial Sequence
  Description of Artificial Sequence: Synthetic oligonucleotide
ggauacagcuggagcugua

SEQ ID NO: 2916642 - RNA, 19 nt, Artificial Sequence
  Description of Artificial Sequence: Synthetic oligonucleotide
cguguaugguaggcaccag

SEQ ID NO: 2916643 - RNA, 19 nt, Artificial Sequence
  Description of Artificial Sequence: Synthetic oligonucleotide
guccuccgaugccaguguu

SEQ ID NO: 2916644 - RNA, 19 nt, Artificial Sequence
  Description of Artificial Sequence: Synthetic oligonucleotide
ccacgcuggaggcugcucu

SEQ ID NO: 2916645 - RNA, 19 nt, Artificial Sequence
  Description of Artificial Sequence: Synthetic oligonucleotide
cgggcagauguggguauac

SEQ ID NO: 2916646 - RNA, 19 nt, Artificial Sequence
  Description of Artificial Sequence: Synthetic oligonucleotide
gcugccggucugccaaacu

SEQ ID NO: 2916647 - RNA, 19 nt, Artificial Sequence
  Description of Artificial Sequence: Synthetic oligonucleotide
ccgaugccaguguucaaau

SEQ ID NO: 2916648 - RNA, 19 nt, Artificial Sequence
  Description of Artificial Sequence: Synthetic oligonucleotide
ggggugccugugcaaaguu

SEQ ID NO: 2916649 - RNA, 19 nt, Artificial Sequence
  Description of Artificial Sequence: Synthetic oligonucleotide
ggggagagugcugccugcu

SEQ ID NO: 2916650 - RNA, 19 nt, Artificial Sequence
  Description of Artificial Sequence: Synthetic oligonucleotide
cucugaggcugaggagccu

SEQ ID NO: 2916651 - RNA, 19 nt, Artificial Sequence
  Description of Artificial Sequence: Synthetic oligonucleotide
cgaugccaguguucaaaua

SEQ ID NO: 2916652 - RNA, 19 nt, Artificial Sequence
  Description of Artificial Sequence: Synthetic oligonucleotide
ggagccugccgaaguguau

SEQ ID NO: 2916653 - RNA, 19 nt, Artificial Sequence
  Description of Artificial Sequence: Synthetic oligonucleotide
gggugccugugcaaaguuu

SEQ ID NO: 2916654 - RNA, 19 nt, Artificial Sequence
  Description of Artificial Sequence: Synthetic oligonucleotide
ggaggccaccuggcacaga

SEQ ID NO: 2916655 - RNA, 19 nt, Artificial Sequence
  Description of Artificial Sequence: Synthetic oligonucleotide
gccugccgaaguguaugau

SEQ ID NO: 2916656 - RNA, 19 nt, Artificial Sequence
  Description of Artificial Sequence: Synthetic oligonucleotide
cgcugccggucugccaaac

SEQ ID NO: 2916657 - RNA, 19 nt, Artificial Sequence
  Description of Artificial Sequence: Synthetic oligonucleotide
ucuauuauuaguuucaaac

SEQ ID NO: 2916658 - RNA, 19 nt, Artificial Sequence
  Description of Artificial Sequence: Synthetic oligonucleotide
uauuauuaguuucaaaccc

SEQ ID NO: 2916659 - RNA, 19 nt, Artificial Sequence
  Description of Artificial Sequence: Synthetic oligonucleotide
aacaauguauaccaucugg

SEQ ID NO: 2916660 - RNA, 19 nt, Artificial Sequence
  Description of Artificial Sequence: Synthetic oligonucleotide
uggaauauuguauccaucg

SEQ ID NO: 2916661 - RNA, 19 nt, Artificial Sequence
  Description of Artificial Sequence: Synthetic oligonucleotide
uuugauaucauaucuauua

SEQ ID NO: 2916662 - RNA, 19 nt, Artificial Sequence
  Description of Artificial Sequence: Synthetic oligonucleotide
ucaguaacaauguauacca

SEQ ID NO: 2916663 - RNA, 19 nt, Artificial Sequence
  Description of Artificial Sequence: Synthetic oligonucleotide
aagaacauguauguugucc

SEQ ID NO: 2916664 - RNA, 19 nt, Artificial Sequence
  Description of Artificial Sequence: Synthetic oligonucleotide
acaaaugagaauuguaguc

SEQ ID NO: 2916665 - RNA, 19 nt, Artificial Sequence
  Description of Artificial Sequence: Synthetic oligonucleotide
aauguauaccaucuggucu

SEQ ID NO: 2916666 - RNA, 19 nt, Artificial Sequence
  Description of Artificial Sequence: Synthetic oligonucleotide
auauuugccaggcugguac

SEQ ID NO: 2916667 - RNA, 19 nt, Artificial Sequence
  Description of Artificial Sequence: Synthetic oligonucleotide
cuauuauuaguuucaaacc

SEQ ID NO: 2916668 - RNA, 19 nt, Artificial Sequence
  Description of Artificial Sequence: Synthetic oligonucleotide
uauguuguccaacugagcu

SEQ ID NO: 2916669 - RNA, 19 nt, Artificial Sequence
  Description of Artificial Sequence: Synthetic oligonucleotide
uguuaucaauuccagaggc

SEQ ID NO: 2916670 - RNA, 19 nt, Artificial Sequence
  Description of Artificial Sequence: Synthetic oligonucleotide
aguaacaauguauaccauc

SEQ ID NO: 2916671 - RNA, 19 nt, Artificial Sequence
  Description of Artificial Sequence: Synthetic oligonucleotide
uguauguuguccaacugag

SEQ ID NO: 2916672 - RNA, 19 nt, Artificial Sequence
  Description of Artificial Sequence: Synthetic oligonucleotide
agcuaaauauuccagacca

SEQ ID NO: 2916673 - RNA, 19 nt, Artificial Sequence
  Description of Artificial Sequence: Synthetic oligonucleotide
aaaugagaauuguagucag

SEQ ID NO: 2916674 - RNA, 19 nt, Artificial Sequence
  Description of Artificial Sequence: Synthetic oligonucleotide
aaacccuguuaucaauucc

SEQ ID NO: 2916675 - RNA, 19 nt, Artificial Sequence
  Description of Artificial Sequence: Synthetic oligonucleotide
gaauauuguauccaucggc

SEQ ID NO: 2916676 - RNA, 19 nt, Artificial Sequence
  Description of Artificial Sequence: Synthetic oligonucleotide
uaucauaucuauuauuagu

SEQ ID NO: 2916677 - RNA, 19 nt, Artificial Sequence
  Description of Artificial Sequence: Synthetic oligonucleotide
aaugcugaagaacauguau

SEQ ID NO: 2916678 - RNA, 19 nt, Artificial Sequence
  Description of Artificial Sequence: Synthetic oligonucleotide
ugaagaacauguauguugu

SEQ ID NO: 2916679 - RNA, 19 nt, Artificial Sequence
  Description of Artificial Sequence: Synthetic oligonucleotide
agugggaugguacaagggg

SEQ ID NO: 2916680 - RNA, 19 nt, Artificial Sequence
  Description of Artificial Sequence: Synthetic oligonucleotide
uaggauauuugccaggcug

SEQ ID NO: 2916681 - RNA, 19 nt, Artificial Sequence
  Description of Artificial Sequence: Synthetic oligonucleotide
uucgucauaggauauuugc

SEQ ID NO: 2916682 - RNA, 19 nt, Artificial Sequence
  Description of Artificial Sequence: Synthetic oligonucleotide
uauuguauccaucggcaag

SEQ ID NO: 2916683 - RNA, 19 nt, Artificial Sequence
  Description of Artificial Sequence: Synthetic oligonucleotide
auggucaugaucucucggc

SEQ ID NO: 2916684 - RNA, 19 nt, Artificial Sequence
  Description of Artificial Sequence: Synthetic oligonucleotide
aauauuguauccaucggca

SEQ ID NO: 2916685 - RNA, 19 nt, Artificial Sequence
  Description of Artificial Sequence: Synthetic oligonucleotide
uucaguaacaauguauacc

SEQ ID NO: 2916686 - RNA, 19 nt, Artificial Sequence
  Description of Artificial Sequence: Synthetic oligonucleotide
cugaagaacauguauguug

SEQ ID NO: 2916687 - RNA, 19 nt, Artificial Sequence
  Description of Artificial Sequence: Synthetic oligonucleotide
auuguauccaucggcaagc

SEQ ID NO: 2916688 - RNA, 19 nt, Artificial Sequence
  Description of Artificial Sequence: Synthetic oligonucleotide
aaaaugcugaagaacaugu

SEQ ID NO: 2916689 - RNA, 19 nt, Artificial Sequence
  Description of Artificial Sequence: Synthetic oligonucleotide
uaaauauuccagaccagga

SEQ ID NO: 2916690 - RNA, 19 nt, Artificial Sequence
  Description of Artificial Sequence: Synthetic oligonucleotide
cuaaauauuccagaccagg

SEQ ID NO: 2916691 - RNA, 19 nt, Artificial Sequence
  Description of Artificial Sequence: Synthetic oligonucleotide
uuauuaguuucaaacccug

SEQ ID NO: 2916692 - RNA, 19 nt, Artificial Sequence
  Description of Artificial Sequence: Synthetic oligonucleotide
cucaaaaugcugaagaaca

SEQ ID NO: 2916693 - RNA, 19 nt, Artificial Sequence
  Description of Artificial Sequence: Synthetic oligonucleotide
ugagcuaaauauuccagac

SEQ ID NO: 2916694 - RNA, 19 nt, Artificial Sequence
  Description of Artificial Sequence: Synthetic oligonucleotide
aacugagcuaaauauucca

SEQ ID NO: 2916695 - RNA, 19 nt, Artificial Sequence
  Description of Artificial Sequence: Synthetic oligonucleotide
uauaccaucuggucuaugu

SEQ ID NO: 2916696 - RNA, 19 nt, Artificial Sequence
  Description of Artificial Sequence: Synthetic oligonucleotide
gauaucauaucuauuauua

SEQ ID NO: 2916697 - RNA, 19 nt, Artificial Sequence
  Description of Artificial Sequence: Synthetic oligonucleotide
uuccagaggcucaaaaugc

SEQ ID NO: 2916698 - RNA, 19 nt, Artificial Sequence
  Description of Artificial Sequence: Synthetic oligonucleotide
ccuguuaucaauuccagag

SEQ ID NO: 2916699 - RNA, 19 nt, Artificial Sequence
  Description of Artificial Sequence: Synthetic oligonucleotide
uuaguuucaaacccuguua

SEQ ID NO: 2916700 - RNA, 19 nt, Artificial Sequence
  Description of Artificial Sequence: Synthetic oligonucleotide
agaacauguauguugucca

SEQ ID NO: 2916701 - RNA, 19 nt, Artificial Sequence
  Description of Artificial Sequence: Synthetic oligonucleotide
gaucucucggcccaggcag

SEQ ID NO: 2916702 - RNA, 19 nt, Artificial Sequence
  Description of Artificial Sequence: Synthetic oligonucleotide
aacauguauguuguccaac

SEQ ID NO: 2916703 - RNA, 19 nt, Artificial Sequence
  Description of Artificial Sequence: Synthetic oligonucleotide
ucgucauaggauauuugcc

SEQ ID NO: 2916704 - RNA, 19 nt, Artificial Sequence
  Description of Artificial Sequence: Synthetic oligonucleotide
cuggcauccacauuaccgg

SEQ ID NO: 2916705 - RNA, 19 nt, Artificial Sequence
  Description of Artificial Sequence: Synthetic oligonucleotide
ucauaggauauuugccagg

SEQ ID NO: 2916706 - RNA, 19 nt, Artificial Sequence
  Description of Artificial Sequence: Synthetic oligonucleotide
uuccgauaggcauuccugg

SEQ ID NO: 2916707 - RNA, 19 nt, Artificial Sequence
  Description of Artificial Sequence: Synthetic oligonucleotide
ugcugaagaacauguaugu

SEQ ID NO: 2916708 - RNA, 19 nt, Artificial Sequence
  Description of Artificial Sequence: Synthetic oligonucleotide
gguacaaggggauagcacc

SEQ ID NO: 2916709 - RNA, 19 nt, Artificial Sequence
  Description of Artificial Sequence: Synthetic oligonucleotide
uuaucaauuccagaggcuc

SEQ ID NO: 2916710 - RNA, 19 nt, Artificial Sequence
  Description of Artificial Sequence: Synthetic oligonucleotide
cuguuaucaauuccagagg

SEQ ID NO: 2916711 - RNA, 19 nt, Artificial Sequence
  Description of Artificial Sequence: Synthetic oligonucleotide
cugguacuggauaggaugg

SEQ ID NO: 2916712 - RNA, 19 nt, Artificial Sequence
  Description of Artificial Sequence: Synthetic oligonucleotide
auguauguuguccaacuga

SEQ ID NO: 2916713 - RNA, 19 nt, Artificial Sequence
  Description of Artificial Sequence: Synthetic oligonucleotide
uugauaucauaucuauuau

SEQ ID NO: 2916714 - RNA, 19 nt, Artificial Sequence
  Description of Artificial Sequence: Synthetic oligonucleotide
uccacauuaccggagcagg

SEQ ID NO: 2916715 - RNA, 19 nt, Artificial Sequence
  Description of Artificial Sequence: Synthetic oligonucleotide
auuaguuucaaacccuguu

SEQ ID NO: 2916716 - RNA, 19 nt, Artificial Sequence
  Description of Artificial Sequence: Synthetic oligonucleotide
auaucuauuauuaguuuca

SEQ ID NO: 2916717 - RNA, 19 nt, Artificial Sequence
  Description of Artificial Sequence: Synthetic oligonucleotide
acauguauguuguccaacu

SEQ ID NO: 2916718 - RNA, 19 nt, Artificial Sequence
  Description of Artificial Sequence: Synthetic oligonucleotide
uaguuucaaacccuguuau

SEQ ID NO: 2916719 - RNA, 19 nt, Artificial Sequence
  Description of Artificial Sequence: Synthetic oligonucleotide
aggcucaaaaugcugaaga

SEQ ID NO: 2916720 - RNA, 19 nt, Artificial Sequence
  Description of Artificial Sequence: Synthetic oligonucleotide
gagcuaaauauuccagacc

SEQ ID NO: 2916721 - RNA, 19 nt, Artificial Sequence
  Description of Artificial Sequence: Synthetic oligonucleotide
gucauaggauauuugccag

SEQ ID NO: 2916722 - RNA, 19 nt, Artificial Sequence
  Description of Artificial Sequence: Synthetic oligonucleotide
gaugcuguggaauauugua

SEQ ID NO: 2916723 - RNA, 19 nt, Artificial Sequence
  Description of Artificial Sequence: Synthetic oligonucleotide
guauccaucggcaagccug

SEQ ID NO: 2916724 - RNA, 19 nt, Artificial Sequence
  Description of Artificial Sequence: Synthetic oligonucleotide
uguggaauauuguauccau

SEQ ID NO: 2916725 - RNA, 19 nt, Artificial Sequence
  Description of Artificial Sequence: Synthetic oligonucleotide
aguuucaaacccuguuauc

SEQ ID NO: 2916726 - RNA, 19 nt, Artificial Sequence
  Description of Artificial Sequence: Synthetic oligonucleotide
aaugagaauuguagucagg

SEQ ID NO: 2916727 - RNA, 19 nt, Artificial Sequence
  Description of Artificial Sequence: Synthetic oligonucleotide
ugggcauaggaguuggccc

SEQ ID NO: 2916728 - RNA, 19 nt, Artificial Sequence
  Description of Artificial Sequence: Synthetic oligonucleotide
uaucaauuccagaggcuca

SEQ ID NO: 2916729 - RNA, 19 nt, Artificial Sequence
  Description of Artificial Sequence: Synthetic oligonucleotide
cauaggauauuugccaggc

SEQ ID NO: 2916730 - RNA, 19 nt, Artificial Sequence
  Description of Artificial Sequence: Synthetic oligonucleotide
auuauuaguuucaaacccu

SEQ ID NO: 2916731 - RNA, 19 nt, Artificial Sequence
  Description of Artificial Sequence: Synthetic oligonucleotide
uaacaauguauaccaucug

SEQ ID NO: 2916732 - RNA, 19 nt, Artificial Sequence
  Description of Artificial Sequence: Synthetic oligonucleotide
ugauaucauaucuauuauu

SEQ ID NO: 2916733 - RNA, 19 nt, Artificial Sequence
  Description of Artificial Sequence: Synthetic oligonucleotide
aacccuguuaucaauucca

SEQ ID NO: 2916734 - RNA, 19 nt, Artificial Sequence
  Description of Artificial Sequence: Synthetic oligonucleotide
ugcuguggaauauuguauc

SEQ ID NO: 2916735 - RNA, 19 nt, Artificial Sequence
  Description of Artificial Sequence: Synthetic oligonucleotide
uauuaguuucaaacccugu

SEQ ID NO: 2916736 - RNA, 19 nt, Artificial Sequence
  Description of Artificial Sequence: Synthetic oligonucleotide
uaggaguuggcccuggcau

SEQ ID NO: 2916737 - RNA, 19 nt, Artificial Sequence
  Description of Artificial Sequence: Synthetic oligonucleotide
ucaaaaugcugaagaacau

SEQ ID NO: 2916738 - RNA, 19 nt, Artificial Sequence
  Description of Artificial Sequence: Synthetic oligonucleotide
caauguauaccaucugguc

SEQ ID NO: 2916739 - RNA, 19 nt, Artificial Sequence
  Description of Artificial Sequence: Synthetic oligonucleotide
uggucaugaucucucggcc

SEQ ID NO: 2916740 - RNA, 19 nt, Artificial Sequence
  Description of Artificial Sequence: Synthetic oligonucleotide
caacugagcuaaauauucc

SEQ ID NO: 2916741 - RNA, 19 nt, Artificial Sequence
  Description of Artificial Sequence: Synthetic oligonucleotide
gauaggaugggcaccacca

SEQ ID NO: 2916742 - RNA, 19 nt, Artificial Sequence
  Description of Artificial Sequence: Synthetic oligonucleotide
aucauaucuauuauuaguu

SEQ ID NO: 2916743 - RNA, 19 nt, Artificial Sequence
  Description of Artificial Sequence: Synthetic oligonucleotide
uguuguccaacugagcuaa

SEQ ID NO: 2916744 - RNA, 19 nt, Artificial Sequence
  Description of Artificial Sequence: Synthetic oligonucleotide
aaggggauagcaccgggau

SEQ ID NO: 2916745 - RNA, 19 nt, Artificial Sequence
  Description of Artificial Sequence: Synthetic oligonucleotide
uguccaacugagcuaaaua

SEQ ID NO: 2916746 - RNA, 19 nt, Artificial Sequence
  Description of Artificial Sequence: Synthetic oligonucleotide
ggaauauuguauccaucgg

SEQ ID NO: 2916747 - RNA, 19 nt, Artificial Sequence
  Description of Artificial Sequence: Synthetic oligonucleotide
caagccugcagguguaggg

SEQ ID NO: 2916748 - RNA, 19 nt, Artificial Sequence
  Description of Artificial Sequence: Synthetic oligonucleotide
auguauaccaucuggucua

SEQ ID NO: 2916749 - RNA, 19 nt, Artificial Sequence
  Description of Artificial Sequence: Synthetic oligonucleotide
uaccggagcaggcugauuc

SEQ ID NO: 2916750 - RNA, 19 nt, Artificial Sequence
  Description of Artificial Sequence: Synthetic oligonucleotide
agaccaggagggcagcugg

SEQ ID NO: 2916751 - RNA, 19 nt, Artificial Sequence
  Description of Artificial Sequence: Synthetic oligonucleotide
gcacaaaugagaauuguag

SEQ ID NO: 2916752 - RNA, 19 nt, Artificial Sequence
  Description of Artificial Sequence: Synthetic oligonucleotide
cuucaguaacaauguauac

SEQ ID NO: 2916753 - RNA, 19 nt, Artificial Sequence
  Description of Artificial Sequence: Synthetic oligonucleotide
caaaugagaauuguaguca

SEQ ID NO: 2916754 - RNA, 19 nt, Artificial Sequence
  Description of Artificial Sequence: Synthetic oligonucleotide
acuggauaggaugggcacc

SEQ ID NO: 2916755 - RNA, 19 nt, Artificial Sequence
  Description of Artificial Sequence: Synthetic oligonucleotide
uuucaaacccuguuaucaa

SEQ ID NO: 2916756 - RNA, 19 nt, Artificial Sequence
  Description of Artificial Sequence: Synthetic oligonucleotide
uuccagaccaggagggcag

SEQ ID NO: 2916757 - RNA, 19 nt, Artificial Sequence
  Description of Artificial Sequence: Synthetic oligonucleotide
uauccaucggcaagccugc

SEQ ID NO: 2916758 - RNA, 19 nt, Artificial Sequence
  Description of Artificial Sequence: Synthetic oligonucleotide
uuuugauaucauaucuauu

SEQ ID NO: 2916759 - RNA, 19 nt, Artificial Sequence
  Description of Artificial Sequence: Synthetic oligonucleotide
aggauauuugccaggcugg

SEQ ID NO: 2916760 - RNA, 19 nt, Artificial Sequence
  Description of Artificial Sequence: Synthetic oligonucleotide
ccuggcauccacauuaccg

SEQ ID NO: 2916761 - RNA, 19 nt, Artificial Sequence
  Description of Artificial Sequence: Synthetic oligonucleotide
agcacgaagggucggaggu

SEQ ID NO: 2916762 - RNA, 19 nt, Artificial Sequence
  Description of Artificial Sequence: Synthetic oligonucleotide
gcugguacuggauaggaug

SEQ ID NO: 2916763 - RNA, 19 nt, Artificial Sequence
  Description of Artificial Sequence: Synthetic oligonucleotide
uccaacugagcuaaauauu

SEQ ID NO: 2916764 - RNA, 19 nt, Artificial Sequence
  Description of Artificial Sequence: Synthetic oligonucleotide
ucaaacccuguuaucaauu

SEQ ID NO: 2916765 - RNA, 19 nt, Artificial Sequence
  Description of Artificial Sequence: Synthetic oligonucleotide
aagccugcagguguagggg

SEQ ID NO: 2916766 - RNA, 19 nt, Artificial Sequence
  Description of Artificial Sequence: Synthetic oligonucleotide
uccaccgagguccuggcac

SEQ ID NO: 2916767 - RNA, 19 nt, Artificial Sequence
  Description of Artificial Sequence: Synthetic oligonucleotide
augaucucucggcccaggc

SEQ ID NO: 2916768 - RNA, 19 nt, Artificial Sequence
  Description of Artificial Sequence: Synthetic oligonucleotide
caaaaugcugaagaacaug

SEQ ID NO: 2916769 - RNA, 19 nt, Artificial Sequence
  Description of Artificial Sequence: Synthetic oligonucleotide
uacuggauaggaugggcac

SEQ ID NO: 2916770 - RNA, 19 nt, Artificial Sequence
  Description of Artificial Sequence: Synthetic oligonucleotide
uccagaggcucaaaaugcu

SEQ ID NO: 2916771 - RNA, 19 nt, Artificial Sequence
  Description of Artificial Sequence: Synthetic oligonucleotide
ucggcaagccugcaggugu

SEQ ID NO: 2916772 - RNA, 19 nt, Artificial Sequence
  Description of Artificial Sequence: Synthetic oligonucleotide
ugacccggagcacgaaggg

SEQ ID NO: 2916773 - RNA, 19 nt, Artificial Sequence
  Description of Artificial Sequence: Synthetic oligonucleotide
ugguacaaggggauagcac

SEQ ID NO: 2916774 - RNA, 19 nt, Artificial Sequence
  Description of Artificial Sequence: Synthetic oligonucleotide
acaauguauaccaucuggu

SEQ ID NO: 2916775 - RNA, 19 nt, Artificial Sequence
  Description of Artificial Sequence: Synthetic oligonucleotide
uguaggggcagcuggucca

SEQ ID NO: 2916776 - RNA, 19 nt, Artificial Sequence
  Description of Artificial Sequence: Synthetic oligonucleotide
acugagcuaaauauuccag

SEQ ID NO: 2916777 - RNA, 19 nt, Artificial Sequence
  Description of Artificial Sequence: Synthetic oligonucleotide
uccugguguagucaucugu

SEQ ID NO: 2916778 - RNA, 19 nt, Artificial Sequence
  Description of Artificial Sequence: Synthetic oligonucleotide
aggcugauucgucauagga

SEQ ID NO: 2916779 - RNA, 19 nt, Artificial Sequence
  Description of Artificial Sequence: Synthetic oligonucleotide
guaacaauguauaccaucu

SEQ ID NO: 2916780 - RNA, 19 nt, Artificial Sequence
  Description of Artificial Sequence: Synthetic oligonucleotide
acauuaccggagcaggcug

SEQ ID NO: 2916781 - RNA, 19 nt, Artificial Sequence
  Description of Artificial Sequence: Synthetic oligonucleotide
ccaacugagcuaaauauuc

SEQ ID NO: 2916782 - RNA, 19 nt, Artificial Sequence
  Description of Artificial Sequence: Synthetic oligonucleotide
agccugcagguguaggggc

SEQ ID NO: 2916783 - RNA, 19 nt, Artificial Sequence
  Description of Artificial Sequence: Synthetic oligonucleotide
caggcagucagugacccgg

SEQ ID NO: 2916784 - RNA, 19 nt, Artificial Sequence
  Description of Artificial Sequence: Synthetic oligonucleotide
cagguguaggggcagcugg

SEQ ID NO: 2916785 - RNA, 19 nt, Artificial Sequence
  Description of Artificial Sequence: Synthetic oligonucleotide
acaaggggauagcaccggg

SEQ ID NO: 2916786 - RNA, 19 nt, Artificial Sequence
  Description of Artificial Sequence: Synthetic oligonucleotide
cauggucaugaucucucgg

SEQ ID NO: 2916787 - RNA, 19 nt, Artificial Sequence
  Description of Artificial Sequence: Synthetic oligonucleotide
ugguguagucaucuguguc

SEQ ID NO: 2916788 - RNA, 19 nt, Artificial Sequence
  Description of Artificial Sequence: Synthetic oligonucleotide
ugaucucucggcccaggca

SEQ ID NO: 2916789 - RNA, 19 nt, Artificial Sequence
  Description of Artificial Sequence: Synthetic oligonucleotide
cugagcuaaauauuccaga

SEQ ID NO: 2916790 - RNA, 19 nt, Artificial Sequence
  Description of Artificial Sequence: Synthetic oligonucleotide
guacaaggggauagcaccg

SEQ ID NO: 2916791 - RNA, 19 nt, Artificial Sequence
  Description of Artificial Sequence: Synthetic oligonucleotide
caaacccuguuaucaauuc

SEQ ID NO: 2916792 - RNA, 19 nt, Artificial Sequence
  Description of Artificial Sequence: Synthetic oligonucleotide
auaggaugggcaccaccag

SEQ ID NO: 2916793 - RNA, 19 nt, Artificial Sequence
  Description of Artificial Sequence: Synthetic oligonucleotide
uucaaacccuguuaucaau

SEQ ID NO: 2916794 - RNA, 19 nt, Artificial Sequence
  Description of Artificial Sequence: Synthetic oligonucleotide
uaucuauuauuaguuucaa

SEQ ID NO: 2916795 - RNA, 19 nt, Artificial Sequence
  Description of Artificial Sequence: Synthetic oligonucleotide
accaccagugggaugguac

SEQ ID NO: 2916796 - RNA, 19 nt, Artificial Sequence
  Description of Artificial Sequence: Synthetic oligonucleotide
uccaucggcaagccugcag

SEQ ID NO: 2916797 - RNA, 19 nt, Artificial Sequence
  Description of Artificial Sequence: Synthetic oligonucleotide
cauguauguuguccaacug

SEQ ID NO: 2916798 - RNA, 19 nt, Artificial Sequence
  Description of Artificial Sequence: Synthetic oligonucleotide
uacaaggggauagcaccgg

SEQ ID NO: 2916799 - RNA, 19 nt, Artificial Sequence
  Description of Artificial Sequence: Synthetic oligonucleotide
aggaguuggcccuggcauc

SEQ ID NO: 2916800 - RNA, 19 nt, Artificial Sequence
  Description of Artificial Sequence: Synthetic oligonucleotide
auauuguauccaucggcaa

SEQ ID NO: 2916801 - RNA, 19 nt, Artificial Sequence
  Description of Artificial Sequence: Synthetic oligonucleotide
ucucggcccaggcagucag

SEQ ID NO: 2916802 - RNA, 19 nt, Artificial Sequence
  Description of Artificial Sequence: Synthetic oligonucleotide
aucuauuauuaguuucaaa

SEQ ID NO: 2916803 - RNA, 19 nt, Artificial Sequence
  Description of Artificial Sequence: Synthetic oligonucleotide
cagucagugacccggagca

SEQ ID NO: 2916804 - RNA, 19 nt, Artificial Sequence
  Description of Artificial Sequence: Synthetic oligonucleotide
agugacccggagcacgaag

SEQ ID NO: 2916805 - RNA, 19 nt, Artificial Sequence
  Description of Artificial Sequence: Synthetic oligonucleotide
cagugggaugguacaaggg

SEQ ID NO: 2916806 - RNA, 19 nt, Artificial Sequence
  Description of Artificial Sequence: Synthetic oligonucleotide
auaggaguuggcccuggca

SEQ ID NO: 2916807 - RNA, 19 nt, Artificial Sequence
  Description of Artificial Sequence: Synthetic oligonucleotide
gucagugacccggagcacg

SEQ ID NO: 2916808 - RNA, 19 nt, Artificial Sequence
  Description of Artificial Sequence: Synthetic oligonucleotide
guuccgauaggcauuccug

SEQ ID NO: 2916809 - RNA, 19 nt, Artificial Sequence
  Description of Artificial Sequence: Synthetic oligonucleotide
ugggaugguacaaggggau

SEQ ID NO: 2916810 - RNA, 19 nt, Artificial Sequence
  Description of Artificial Sequence: Synthetic oligonucleotide
ucagugacccggagcacga

SEQ ID NO: 2916811 - RNA, 19 nt, Artificial Sequence
  Description of Artificial Sequence: Synthetic oligonucleotide
aggcauuccugguguaguc

SEQ ID NO: 2916812 - RNA, 19 nt, Artificial Sequence
  Description of Artificial Sequence: Synthetic oligonucleotide
gagcacgaagggucggagg

SEQ ID NO: 2916813 - RNA, 19 nt, Artificial Sequence
  Description of Artificial Sequence: Synthetic oligonucleotide
ucugugucuucaguaacaa

SEQ ID NO: 2916814 - RNA, 19 nt, Artificial Sequence
  Description of Artificial Sequence: Synthetic oligonucleotide
aucuggucuauguuguuuu

SEQ ID NO: 2916815 - RNA, 19 nt, Artificial Sequence
  Description of Artificial Sequence: Synthetic oligonucleotide
ggggauagcaccgggaugc

SEQ ID NO: 2916816 - RNA, 19 nt, Artificial Sequence
  Description of Artificial Sequence: Synthetic oligonucleotide
uccgauaggcauuccuggu

SEQ ID NO: 2916817 - RNA, 19 nt, Artificial Sequence
  Description of Artificial Sequence: Synthetic oligonucleotide
ugguccaccgagguccugg

SEQ ID NO: 2916818 - RNA, 19 nt, Artificial Sequence
  Description of Artificial Sequence: Synthetic oligonucleotide
caucugugucuucaguaac

SEQ ID NO: 2916819 - RNA, 19 nt, Artificial Sequence
  Description of Artificial Sequence: Synthetic oligonucleotide
cuggcacaaaugagaauug

SEQ ID NO: 2916820 - RNA, 19 nt, Artificial Sequence
  Description of Artificial Sequence: Synthetic oligonucleotide
accggagcaggcugauucg

SEQ ID NO: 2916821 - RNA, 19 nt, Artificial Sequence
  Description of Artificial Sequence: Synthetic oligonucleotide
cugggcauaggaguuggcc

SEQ ID NO: 2916822 - RNA, 19 nt, Artificial Sequence
  Description of Artificial Sequence: Synthetic oligonucleotide
cagaggcucaaaaugcuga

SEQ ID NO: 2916823 - RNA, 19 nt, Artificial Sequence
  Description of Artificial Sequence: Synthetic oligonucleotide
auaggcauuccugguguag

SEQ ID NO: 2916824 - RNA, 19 nt, Artificial Sequence
  Description of Artificial Sequence: Synthetic oligonucleotide
agcaccgggaugcugugga

SEQ ID NO: 2916825 - RNA, 19 nt, Artificial Sequence
  Description of Artificial Sequence: Synthetic oligonucleotide
uguauccaucggcaagccu

SEQ ID NO: 2916826 - RNA, 19 nt, Artificial Sequence
  Description of Artificial Sequence: Synthetic oligonucleotide
ucggagguuccgauaggca

SEQ ID NO: 2916827 - RNA, 19 nt, Artificial Sequence
  Description of Artificial Sequence: Synthetic oligonucleotide
uauuugccaggcugguacu

SEQ ID NO: 2916828 - RNA, 19 nt, Artificial Sequence
  Description of Artificial Sequence: Synthetic oligonucleotide
gucaugaucucucggccca

SEQ ID NO: 2916829 - RNA, 19 nt, Artificial Sequence
  Description of Artificial Sequence: Synthetic oligonucleotide
ugguacuggauaggauggg

SEQ ID NO: 2916830 - RNA, 19 nt, Artificial Sequence
  Description of Artificial Sequence: Synthetic oligonucleotide
cacaaaugagaauuguagu

SEQ ID NO: 2916831 - RNA, 19 nt, Artificial Sequence
  Description of Artificial Sequence: Synthetic oligonucleotide
ugucuucaguaacaaugua

SEQ ID NO: 2916832 - RNA, 19 nt, Artificial Sequence
  Description of Artificial Sequence: Synthetic oligonucleotide
gaggcucaaaaugcugaag

SEQ ID NO: 2916833 - RNA, 19 nt, Artificial Sequence
  Description of Artificial Sequence: Synthetic oligonucleotide
gugacccggagcacgaagg

SEQ ID NO: 2916834 - RNA, 19 nt, Artificial Sequence
  Description of Artificial Sequence: Synthetic oligonucleotide
gucaucugugucuucagua

SEQ ID NO: 2916835 - RNA, 19 nt, Artificial Sequence
  Description of Artificial Sequence: Synthetic oligonucleotide
agaggcucaaaaugcugaa

SEQ ID NO: 2916836 - RNA, 19 nt, Artificial Sequence
  Description of Artificial Sequence: Synthetic oligonucleotide
auccacauuaccggagcag

SEQ ID NO: 2916837 - RNA, 19 nt, Artificial Sequence
  Description of Artificial Sequence: Synthetic oligonucleotide
acccggagcacgaaggguc

SEQ ID NO: 2916838 - RNA, 19 nt, Artificial Sequence
  Description of Artificial Sequence: Synthetic oligonucleotide
auaggauauuugccaggcu

SEQ ID NO: 2916839 - RNA, 19 nt, Artificial Sequence
  Description of Artificial Sequence: Synthetic oligonucleotide
ggaugguacaaggggauag

SEQ ID NO: 2916840 - RNA, 19 nt, Artificial Sequence
  Description of Artificial Sequence: Synthetic oligonucleotide
guccaacugagcuaaauau

SEQ ID NO: 2916841 - RNA, 19 nt, Artificial Sequence
  Description of Artificial Sequence: Synthetic oligonucleotide
gauagcaccgggaugcugu

SEQ ID NO: 2916842 - RNA, 19 nt, Artificial Sequence
  Description of Artificial Sequence: Synthetic oligonucleotide
aggggcagcugguccaccg

SEQ ID NO: 2916843 - RNA, 19 nt, Artificial Sequence
  Description of Artificial Sequence: Synthetic oligonucleotide
auaccaucuggucuauguu

SEQ ID NO: 2916844 - RNA, 19 nt, Artificial Sequence
  Description of Artificial Sequence: Synthetic oligonucleotide
gaacauguauguuguccaa

SEQ ID NO: 2916845 - RNA, 19 nt, Artificial Sequence
  Description of Artificial Sequence: Synthetic oligonucleotide
gcugauucgucauaggaua

SEQ ID NO: 2916846 - RNA, 19 nt, Artificial Sequence
  Description of Artificial Sequence: Synthetic oligonucleotide
gaagaacauguauguuguc

SEQ ID NO: 2916847 - RNA, 19 nt, Artificial Sequence
  Description of Artificial Sequence: Synthetic oligonucleotide
uaggcauuccugguguagu

SEQ ID NO: 2916848 - RNA, 19 nt, Artificial Sequence
  Description of Artificial Sequence: Synthetic oligonucleotide
aggaugggcaccaccagug

SEQ ID NO: 2916849 - RNA, 19 nt, Artificial Sequence
  Description of Artificial Sequence: Synthetic oligonucleotide
gggucggagguuccgauag

SEQ ID NO: 2916850 - RNA, 19 nt, Artificial Sequence
  Description of Artificial Sequence: Synthetic oligonucleotide
uggcauccacauuaccgga

SEQ ID NO: 2916851 - RNA, 19 nt, Artificial Sequence
  Description of Artificial Sequence: Synthetic oligonucleotide
auuccagaccaggagggca

SEQ ID NO: 2916852 - RNA, 19 nt, Artificial Sequence
  Description of Artificial Sequence: Synthetic oligonucleotide
aguuggcccuggcauccac

SEQ ID NO: 2916853 - RNA, 19 nt, Artificial Sequence
  Description of Artificial Sequence: Synthetic oligonucleotide
aucugugucuucaguaaca

SEQ ID NO: 2916854 - RNA, 19 nt, Artificial Sequence
  Description of Artificial Sequence: Synthetic oligonucleotide
aagggucggagguuccgau

SEQ ID NO: 2916855 - RNA, 19 nt, Artificial Sequence
  Description of Artificial Sequence: Synthetic oligonucleotide
auguuguccaacugagcua

SEQ ID NO: 2916856 - RNA, 19 nt, Artificial Sequence
  Description of Artificial Sequence: Synthetic oligonucleotide
ccaucggcaagccugcagg

SEQ ID NO: 2916857 - RNA, 19 nt, Artificial Sequence
  Description of Artificial Sequence: Synthetic oligonucleotide
aaaugcugaagaacaugua

SEQ ID NO: 2916858 - RNA, 19 nt, Artificial Sequence
  Description of Artificial Sequence: Synthetic oligonucleotide
uggcacaaaugagaauugu

SEQ ID NO: 2916859 - RNA, 19 nt, Artificial Sequence
  Description of Artificial Sequence: Synthetic oligonucleotide
ccugguguagucaucugug

SEQ ID NO: 2916860 - RNA, 19 nt, Artificial Sequence
  Description of Artificial Sequence: Synthetic oligonucleotide
accagugggaugguacaag

SEQ ID NO: 2916861 - RNA, 19 nt, Artificial Sequence
  Description of Artificial Sequence: Synthetic oligonucleotide
agcugggcauaggaguugg

SEQ ID NO: 2916862 - RNA, 19 nt, Artificial Sequence
  Description of Artificial Sequence: Synthetic oligonucleotide
guguaggggcagcuggucc

SEQ ID NO: 2916863 - RNA, 19 nt, Artificial Sequence
  Description of Artificial Sequence: Synthetic oligonucleotide
ggucaugaucucucggccc

SEQ ID NO: 2916864 - RNA, 19 nt, Artificial Sequence
  Description of Artificial Sequence: Synthetic oligonucleotide
gcucaaaaugcugaagaac

SEQ ID NO: 2916865 - RNA, 19 nt, Artificial Sequence
  Description of Artificial Sequence: Synthetic oligonucleotide
uuguauccaucggcaagcc

SEQ ID NO: 2916866 - RNA, 19 nt, Artificial Sequence
  Description of Artificial Sequence: Synthetic oligonucleotide
aggggauagcaccgggaug

SEQ ID NO: 2916867 - RNA, 19 nt, Artificial Sequence
  Description of Artificial Sequence: Synthetic oligonucleotide
caggcugauucgucauagg

SEQ ID NO: 2916868 - RNA, 19 nt, Artificial Sequence
  Description of Artificial Sequence: Synthetic oligonucleotide
ccagugggaugguacaagg

SEQ ID NO: 2916869 - RNA, 19 nt, Artificial Sequence
  Description of Artificial Sequence: Synthetic oligonucleotide
guauguuguccaacugagc

SEQ ID NO: 2916870 - RNA, 19 nt, Artificial Sequence
  Description of Artificial Sequence: Synthetic oligonucleotide
gucggagguuccgauaggc

SEQ ID NO: 2916871 - RNA, 19 nt, Artificial Sequence
  Description of Artificial Sequence: Synthetic oligonucleotide
gguguagucaucugugucu

SEQ ID NO: 2916872 - RNA, 19 nt, Artificial Sequence
  Description of Artificial Sequence: Synthetic oligonucleotide
augguacaaggggauagca

SEQ ID NO: 2916873 - RNA, 19 nt, Artificial Sequence
  Description of Artificial Sequence: Synthetic oligonucleotide
aucaauuccagaggcucaa

SEQ ID NO: 2916874 - RNA, 19 nt, Artificial Sequence
  Description of Artificial Sequence: Synthetic oligonucleotide
auucgucauaggauauuug

SEQ ID NO: 2916875 - RNA, 19 nt, Artificial Sequence
  Description of Artificial Sequence: Synthetic oligonucleotide
auagcaccgggaugcugug

SEQ ID NO: 2916876 - RNA, 19 nt, Artificial Sequence
  Description of Artificial Sequence: Synthetic oligonucleotide
guacuggauaggaugggca

SEQ ID NO: 2916877 - RNA, 19 nt, Artificial Sequence
  Description of Artificial Sequence: Synthetic oligonucleotide
uuguccaacugagcuaaau

SEQ ID NO: 2916878 - RNA, 19 nt, Artificial Sequence
  Description of Artificial Sequence: Synthetic oligonucleotide
gguacuggauaggaugggc

SEQ ID NO: 2916879 - RNA, 19 nt, Artificial Sequence
  Description of Artificial Sequence: Synthetic oligonucleotide
uuggcccuggcauccacau

SEQ ID NO: 2916880 - RNA, 19 nt, Artificial Sequence
  Description of Artificial Sequence: Synthetic oligonucleotide
gcauccacauuaccggagc

SEQ ID NO: 2916881 - RNA, 19 nt, Artificial Sequence
  Description of Artificial Sequence: Synthetic oligonucleotide
augcuguggaauauuguau

SEQ ID NO: 2916882 - RNA, 19 nt, Artificial Sequence
  Description of Artificial Sequence: Synthetic oligonucleotide
uugccaggcugguacugga

SEQ ID NO: 2916883 - RNA, 19 nt, Artificial Sequence
  Description of Artificial Sequence: Synthetic oligonucleotide
ggauaggaugggcaccacc

SEQ ID NO: 2916884 - RNA, 19 nt, Artificial Sequence
  Description of Artificial Sequence: Synthetic oligonucleotide
gcauggucaugaucucucg

SEQ ID NO: 2916885 - RNA, 19 nt, Artificial Sequence
  Description of Artificial Sequence: Synthetic oligonucleotide
gagguuccgauaggcauuc

SEQ ID NO: 2916886 - RNA, 19 nt, Artificial Sequence
  Description of Artificial Sequence: Synthetic oligonucleotide
acccuguuaucaauuccag

SEQ ID NO: 2916887 - RNA, 19 nt, Artificial Sequence
  Description of Artificial Sequence: Synthetic oligonucleotide
ugauucgucauaggauauu

SEQ ID NO: 2916888 - RNA, 19 nt, Artificial Sequence
  Description of Artificial Sequence: Synthetic oligonucleotide
gguccuggcacaaaugaga

SEQ ID NO: 2916889 - RNA, 19 nt, Artificial Sequence
  Description of Artificial Sequence: Synthetic oligonucleotide
gugggaugguacaagggga

SEQ ID NO: 2916890 - RNA, 19 nt, Artificial Sequence
  Description of Artificial Sequence: Synthetic oligonucleotide
caauuccagaggcucaaaa

SEQ ID NO: 2916891 - RNA, 19 nt, Artificial Sequence
  Description of Artificial Sequence: Synthetic oligonucleotide
cauaggaguuggcccuggc

SEQ ID NO: 2916892 - RNA, 19 nt, Artificial Sequence
  Description of Artificial Sequence: Synthetic oligonucleotide
agguccuggcacaaaugag

SEQ ID NO: 2916893 - RNA, 19 nt, Artificial Sequence
  Description of Artificial Sequence: Synthetic oligonucleotide
accgggaugcuguggaaua

SEQ ID NO: 2916894 - RNA, 19 nt, Artificial Sequence
  Description of Artificial Sequence: Synthetic oligonucleotide
gucuucaguaacaauguau

SEQ ID NO: 2916895 - RNA, 19 nt, Artificial Sequence
  Description of Artificial Sequence: Synthetic oligonucleotide
ggcccaggcagucagugac

SEQ ID NO: 2916896 - RNA, 19 nt, Artificial Sequence
  Description of Artificial Sequence: Synthetic oligonucleotide
gcuaaauauuccagaccag

SEQ ID NO: 2916897 - RNA, 19 nt, Artificial Sequence
  Description of Artificial Sequence: Synthetic oligonucleotide
guggaauauuguauccauc

SEQ ID NO: 2916898 - RNA, 19 nt, Artificial Sequence
  Description of Artificial Sequence: Synthetic oligonucleotide
gauucgucauaggauauuu

SEQ ID NO: 2916899 - RNA, 19 nt, Artificial Sequence
  Description of Artificial Sequence: Synthetic oligonucleotide
ggaugggcaccaccagugg

SEQ ID NO: 2916900 - RNA, 19 nt, Artificial Sequence
  Description of Artificial Sequence: Synthetic oligonucleotide
cgucauaggauauuugcca

SEQ ID NO: 2916901 - RNA, 19 nt, Artificial Sequence
  Description of Artificial Sequence: Synthetic oligonucleotide
uguagucaucugugucuuc

SEQ ID NO: 2916902 - RNA, 19 nt, Artificial Sequence
  Description of Artificial Sequence: Synthetic oligonucleotide
ucggcccaggcagucagug

SEQ ID NO: 2916903 - RNA, 19 nt, Artificial Sequence
  Description of Artificial Sequence: Synthetic oligonucleotide
ggagcaggcugauucguca

SEQ ID NO: 2916904 - RNA, 19 nt, Artificial Sequence
  Description of Artificial Sequence: Synthetic oligonucleotide
ucaugaucucucggcccag

SEQ ID NO: 2916905 - RNA, 19 nt, Artificial Sequence
  Description of Artificial Sequence: Synthetic oligonucleotide
gcagucagugacccggagc

SEQ ID NO: 2916906 - RNA, 19 nt, Artificial Sequence
  Description of Artificial Sequence: Synthetic oligonucleotide
cauuaccggagcaggcuga

SEQ ID NO: 2916907 - RNA, 19 nt, Artificial Sequence
  Description of Artificial Sequence: Synthetic oligonucleotide
caugaucucucggcccagg

SEQ ID NO: 2916908 - RNA, 19 nt, Artificial Sequence
  Description of Artificial Sequence: Synthetic oligonucleotide
cuggauaggaugggcacca

SEQ ID NO: 2916909 - RNA, 19 nt, Artificial Sequence
  Description of Artificial Sequence: Synthetic oligonucleotide
augggcaccaccaguggga

SEQ ID NO: 2916910 - RNA, 19 nt, Artificial Sequence
  Description of Artificial Sequence: Synthetic oligonucleotide
cauuccugguguagucauc

SEQ ID NO: 2916911 - RNA, 19 nt, Artificial Sequence
  Description of Artificial Sequence: Synthetic oligonucleotide
agucagugacccggagcac

SEQ ID NO: 2916912 - RNA, 19 nt, Artificial Sequence
  Description of Artificial Sequence: Synthetic oligonucleotide
gcaggcugauucgucauag

SEQ ID NO: 2916913 - RNA, 19 nt, Artificial Sequence
  Description of Artificial Sequence: Synthetic oligonucleotide
cacgaagggucggagguuc

SEQ ID NO: 2916914 - RNA, 19 nt, Artificial Sequence
  Description of Artificial Sequence: Synthetic oligonucleotide
caaggggauagcaccggga

SEQ ID NO: 2916915 - RNA, 19 nt, Artificial Sequence
  Description of Artificial Sequence: Synthetic oligonucleotide
uguauaccaucuggucuau

SEQ ID NO: 2916916 - RNA, 19 nt, Artificial Sequence
  Description of Artificial Sequence: Synthetic oligonucleotide
ggcccuggcauccacauua

SEQ ID NO: 2916917 - RNA, 19 nt, Artificial Sequence
  Description of Artificial Sequence: Synthetic oligonucleotide
gaccaggagggcagcuggg

SEQ ID NO: 2916918 - RNA, 19 nt, Artificial Sequence
  Description of Artificial Sequence: Synthetic oligonucleotide
gggaugcuguggaauauug

SEQ ID NO: 2916919 - RNA, 19 nt, Artificial Sequence
  Description of Artificial Sequence: Synthetic oligonucleotide
ggaguuggcccuggcaucc

SEQ ID NO: 2916920 - RNA, 19 nt, Artificial Sequence
  Description of Artificial Sequence: Synthetic oligonucleotide
uccuggcacaaaugagaau

SEQ ID NO: 2916921 - RNA, 19 nt, Artificial Sequence
  Description of Artificial Sequence: Synthetic oligonucleotide
acgaagggucggagguucc

SEQ ID NO: 2916922 - RNA, 19 nt, Artificial Sequence
  Description of Artificial Sequence: Synthetic oligonucleotide
aggcugguacuggauagga

SEQ ID NO: 2916923 - RNA, 19 nt, Artificial Sequence
  Description of Artificial Sequence: Synthetic oligonucleotide
gauauuugccaggcuggua

SEQ ID NO: 2916924 - RNA, 19 nt, Artificial Sequence
  Description of Artificial Sequence: Synthetic oligonucleotide
gaagggucggagguuccga

SEQ ID NO: 2916925 - RNA, 19 nt, Artificial Sequence
  Description of Artificial Sequence: Synthetic oligonucleotide
aucggcaagccugcaggug

SEQ ID NO: 2916926 - RNA, 19 nt, Artificial Sequence
  Description of Artificial Sequence: Synthetic oligonucleotide
gauaggcauuccuggugua

SEQ ID NO: 2916927 - RNA, 19 nt, Artificial Sequence
  Description of Artificial Sequence: Synthetic oligonucleotide
ccagaggcucaaaaugcug

SEQ ID NO: 2916928 - RNA, 19 nt, Artificial Sequence
  Description of Artificial Sequence: Synthetic oligonucleotide
ccacauuaccggagcaggc

SEQ ID NO: 2916929 - RNA, 19 nt, Artificial Sequence
  Description of Artificial Sequence: Synthetic oligonucleotide
uagcaccgggaugcugugg

SEQ ID NO: 2916930 - RNA, 19 nt, Artificial Sequence
  Description of Artificial Sequence: Synthetic oligonucleotide
ggcauccacauuaccggag

SEQ ID NO: 2916931 - RNA, 19 nt, Artificial Sequence
  Description of Artificial Sequence: Synthetic oligonucleotide
guccuggcacaaaugagaa

SEQ ID NO: 2916932 - RNA, 19 nt, Artificial Sequence
  Description of Artificial Sequence: Synthetic oligonucleotide
cauccacauuaccggagca

SEQ ID NO: 2916933 - RNA, 19 nt, Artificial Sequence
  Description of Artificial Sequence: Synthetic oligonucleotide
ggcagcugggcauaggagu

SEQ ID NO: 2916934 - RNA, 19 nt, Artificial Sequence
  Description of Artificial Sequence: Synthetic oligonucleotide
ccgauaggcauuccuggug

SEQ ID NO: 2916935 - RNA, 19 nt, Artificial Sequence
  Description of Artificial Sequence: Synthetic oligonucleotide
agcaggcugauucgucaua

SEQ ID NO: 2916936 - RNA, 19 nt, Artificial Sequence
  Description of Artificial Sequence: Synthetic oligonucleotide
uccagaccaggagggcagc

SEQ ID NO: 2916937 - RNA, 19 nt, Artificial Sequence
  Description of Artificial Sequence: Synthetic oligonucleotide
cagaccaggagggcagcug

SEQ ID NO: 2916938 - RNA, 19 nt, Artificial Sequence
  Description of Artificial Sequence: Synthetic oligonucleotide
ggucggagguuccgauagg

SEQ ID NO: 2916939 - RNA, 19 nt, Artificial Sequence
  Description of Artificial Sequence: Synthetic oligonucleotide
auuaccggagcaggcugau

SEQ ID NO: 2916940 - RNA, 19 nt, Artificial Sequence
  Description of Artificial Sequence: Synthetic oligonucleotide
ggcacaaaugagaauugua

SEQ ID NO: 2916941 - RNA, 19 nt, Artificial Sequence
  Description of Artificial Sequence: Synthetic oligonucleotide
ugggcaccaccagugggau

SEQ ID NO: 2916942 - RNA, 19 nt, Artificial Sequence
  Description of Artificial Sequence: Synthetic oligonucleotide
ggagcacgaagggucggag

SEQ ID NO: 2916943 - RNA, 19 nt, Artificial Sequence
  Description of Artificial Sequence: Synthetic oligonucleotide
gguuccgauaggcauuccu

SEQ ID NO: 2916944 - RNA, 19 nt, Artificial Sequence
  Description of Artificial Sequence: Synthetic oligonucleotide
agggucggagguuccgaua

SEQ ID NO: 2916945 - RNA, 19 nt, Artificial Sequence
  Description of Artificial Sequence: Synthetic oligonucleotide
agguuccgauaggcauucc

SEQ ID NO: 2916946 - RNA, 19 nt, Artificial Sequence
  Description of Artificial Sequence: Synthetic oligonucleotide
guauaccaucuggucuaug

SEQ ID NO: 2916947 - RNA, 19 nt, Artificial Sequence
  Description of Artificial Sequence: Synthetic oligonucleotide
agguguaggggcagcuggu

SEQ ID NO: 2916948 - RNA, 19 nt, Artificial Sequence
  Description of Artificial Sequence: Synthetic oligonucleotide
cccggagcacgaagggucg

SEQ ID NO: 2916949 - RNA, 19 nt, Artificial Sequence
  Description of Artificial Sequence: Synthetic oligonucleotide
cugguguagucaucugugu

SEQ ID NO: 2916950 - RNA, 19 nt, Artificial Sequence
  Description of Artificial Sequence: Synthetic oligonucleotide
cugauucgucauaggauau

SEQ ID NO: 2916951 - RNA, 19 nt, Artificial Sequence
  Description of Artificial Sequence: Synthetic oligonucleotide
cacauuaccggagcaggcu

SEQ ID NO: 2916952 - RNA, 19 nt, Artificial Sequence
  Description of Artificial Sequence: Synthetic oligonucleotide
ucucucggcccaggcaguc

SEQ ID NO: 2916953 - RNA, 19 nt, Artificial Sequence
  Description of Artificial Sequence: Synthetic oligonucleotide
ccuggcacaaaugagaauu

SEQ ID NO: 2916954 - RNA, 19 nt, Artificial Sequence
  Description of Artificial Sequence: Synthetic oligonucleotide
gggcauaggaguuggcccu

SEQ ID NO: 2916955 - RNA, 19 nt, Artificial Sequence
  Description of Artificial Sequence: Synthetic oligonucleotide
ggcauuccugguguaguca

SEQ ID NO: 2916956 - RNA, 19 nt, Artificial Sequence
  Description of Artificial Sequence: Synthetic oligonucleotide
uggauaggaugggcaccac

SEQ ID NO: 2916957 - RNA, 19 nt, Artificial Sequence
  Description of Artificial Sequence: Synthetic oligonucleotide
guaggggcagcugguccac

SEQ ID NO: 2916958 - RNA, 19 nt, Artificial Sequence
  Description of Artificial Sequence: Synthetic oligonucleotide
cagcugggcauaggaguug

SEQ ID NO: 2916959 - RNA, 19 nt, Artificial Sequence
  Description of Artificial Sequence: Synthetic oligonucleotide
gagcaggcugauucgucau

SEQ ID NO: 2916960 - RNA, 19 nt, Artificial Sequence
  Description of Artificial Sequence: Synthetic oligonucleotide
guuggcccuggcauccaca

SEQ ID NO: 2916961 - RNA, 19 nt, Artificial Sequence
  Description of Artificial Sequence: Synthetic oligonucleotide
cccaggcagucagugaccc

SEQ ID NO: 2916962 - RNA, 19 nt, Artificial Sequence
  Description of Artificial Sequence: Synthetic oligonucleotide
gcauaggaguuggcccugg

SEQ ID NO: 2916963 - RNA, 19 nt, Artificial Sequence
  Description of Artificial Sequence: Synthetic oligonucleotide
gggcagcugggcauaggag

SEQ ID NO: 2916964 - RNA, 19 nt, Artificial Sequence
  Description of Artificial Sequence: Synthetic oligonucleotide
ggcugauucgucauaggau

SEQ ID NO: 2916965 - RNA, 19 nt, Artificial Sequence
  Description of Artificial Sequence: Synthetic oligonucleotide
cccuguuaucaauuccaga

SEQ ID NO: 2916966 - RNA, 19 nt, Artificial Sequence
  Description of Artificial Sequence: Synthetic oligonucleotide
uaggggcagcugguccacc

SEQ ID NO: 2916967 - RNA, 19 nt, Artificial Sequence
  Description of Artificial Sequence: Synthetic oligonucleotide
gguguaggggcagcugguc

SEQ ID NO: 2916968 - RNA, 19 nt, Artificial Sequence
  Description of Artificial Sequence: Synthetic oligonucleotide
ggcauaggaguuggcccug

SEQ ID NO: 2916969 - RNA, 19 nt, Artificial Sequence
  Description of Artificial Sequence: Synthetic oligonucleotide
ccaccagugggaugguaca

SEQ ID NO: 2916970 - RNA, 19 nt, Artificial Sequence
  Description of Artificial Sequence: Synthetic oligonucleotide
ggauagcaccgggaugcug

SEQ ID NO: 2916971 - RNA, 19 nt, Artificial Sequence
  Description of Artificial Sequence: Synthetic oligonucleotide
caguaacaauguauaccau

SEQ ID NO: 2916972 - RNA, 19 nt, Artificial Sequence
  Description of Artificial Sequence: Synthetic oligonucleotide
ccaggcagucagugacccg

SEQ ID NO: 2916973 - RNA, 19 nt, Artificial Sequence
  Description of Artificial Sequence: Synthetic oligonucleotide
uggcccuggcauccacauu

SEQ ID NO: 2916974 - RNA, 19 nt, Artificial Sequence
  Description of Artificial Sequence: Synthetic oligonucleotide
aggagggcagcugggcaua

SEQ ID NO: 2916975 - RNA, 19 nt, Artificial Sequence
  Description of Artificial Sequence: Synthetic oligonucleotide
caucggcaagccugcaggu

SEQ ID NO: 2916976 - RNA, 19 nt, Artificial Sequence
  Description of Artificial Sequence: Synthetic oligonucleotide
cgagguccuggcacaaaug

SEQ ID NO: 2916977 - RNA, 19 nt, Artificial Sequence
  Description of Artificial Sequence: Synthetic oligonucleotide
ggcaagccugcagguguag

SEQ ID NO: 2916978 - RNA, 19 nt, Artificial Sequence
  Description of Artificial Sequence: Synthetic oligonucleotide
caucuggucuauguuguuu

SEQ ID NO: 2916979 - RNA, 19 nt, Artificial Sequence
  Description of Artificial Sequence: Synthetic oligonucleotide
uuaccggagcaggcugauu

SEQ ID NO: 2916980 - RNA, 19 nt, Artificial Sequence
  Description of Artificial Sequence: Synthetic oligonucleotide
gacccggagcacgaagggu

SEQ ID NO: 2916981 - RNA, 19 nt, Artificial Sequence
  Description of Artificial Sequence: Synthetic oligonucleotide
ggauauuugccaggcuggu

SEQ ID NO: 2916982 - RNA, 19 nt, Artificial Sequence
  Description of Artificial Sequence: Synthetic oligonucleotide
aggcagucagugacccgga

SEQ ID NO: 2916983 - RNA, 19 nt, Artificial Sequence
  Description of Artificial Sequence: Synthetic oligonucleotide
guccaccgagguccuggca

SEQ ID NO: 2916984 - RNA, 19 nt, Artificial Sequence
  Description of Artificial Sequence: Synthetic oligonucleotide
ggaugcuguggaauauugu

SEQ ID NO: 2916985 - RNA, 19 nt, Artificial Sequence
  Description of Artificial Sequence: Synthetic oligonucleotide
caccagugggaugguacaa

SEQ ID NO: 2916986 - RNA, 19 nt, Artificial Sequence
  Description of Artificial Sequence: Synthetic oligonucleotide
cccuggcauccacauuacc

SEQ ID NO: 2916987 - RNA, 19 nt, Artificial Sequence
  Description of Artificial Sequence: Synthetic oligonucleotide
gaguuggcccuggcaucca

SEQ ID NO: 2916988 - RNA, 19 nt, Artificial Sequence
  Description of Artificial Sequence: Synthetic oligonucleotide
cgaagggucggagguuccg

SEQ ID NO: 2916989 - RNA, 19 nt, Artificial Sequence
  Description of Artificial Sequence: Synthetic oligonucleotide
auccaucggcaagccugca

SEQ ID NO: 2916990 - RNA, 19 nt, Artificial Sequence
  Description of Artificial Sequence: Synthetic oligonucleotide
gcccaggcagucagugacc

SEQ ID NO: 2916991 - RNA, 19 nt, Artificial Sequence
  Description of Artificial Sequence: Synthetic oligonucleotide
ggggcagcugguccaccga

SEQ ID NO: 2916992 - RNA, 19 nt, Artificial Sequence
  Description of Artificial Sequence: Synthetic oligonucleotide
accgagguccuggcacaaa

SEQ ID NO: 2916993 - RNA, 19 nt, Artificial Sequence
  Description of Artificial Sequence: Synthetic oligonucleotide
ggagguuccgauaggcauu

SEQ ID NO: 2916994 - RNA, 19 nt, Artificial Sequence
  Description of Artificial Sequence: Synthetic oligonucleotide
ccaccgagguccuggcaca

SEQ ID NO: 2916995 - RNA, 19 nt, Artificial Sequence
  Description of Artificial Sequence: Synthetic oligonucleotide
cucucggcccaggcaguca

SEQ ID NO: 2916996 - RNA, 19 nt, Artificial Sequence
  Description of Artificial Sequence: Synthetic oligonucleotide
gggcaccaccagugggaug

SEQ ID NO: 2916997 - RNA, 19 nt, Artificial Sequence
  Description of Artificial Sequence: Synthetic oligonucleotide
gcugaagaacauguauguu

SEQ ID NO: 2916998 - RNA, 19 nt, Artificial Sequence
  Description of Artificial Sequence: Synthetic oligonucleotide
guuguccaacugagcuaaa

SEQ ID NO: 2916999 - RNA, 19 nt, Artificial Sequence
  Description of Artificial Sequence: Synthetic oligonucleotide
gggaugguacaaggggaua

SEQ ID NO: 2917000 - RNA, 19 nt, Artificial Sequence
  Description of Artificial Sequence: Synthetic oligonucleotide
cggagcaggcugauucguc

SEQ ID NO: 2917001 - RNA, 19 nt, Artificial Sequence
  Description of Artificial Sequence: Synthetic oligonucleotide
gcugggcauaggaguuggc

SEQ ID NO: 2917002 - RNA, 19 nt, Artificial Sequence
  Description of Artificial Sequence: Synthetic oligonucleotide
gcagcugggcauaggaguu

SEQ ID NO: 2917003 - RNA, 19 nt, Artificial Sequence
  Description of Artificial Sequence: Synthetic oligonucleotide
cggagguuccgauaggcau

SEQ ID NO: 2917004 - RNA, 19 nt, Artificial Sequence
  Description of Artificial Sequence: Synthetic oligonucleotide
gcccuggcauccacauuac

SEQ ID NO: 2917005 - RNA, 19 nt, Artificial Sequence
  Description of Artificial Sequence: Synthetic oligonucleotide
cugguccaccgagguccug

SEQ ID NO: 2917006 - RNA, 19 nt, Artificial Sequence
  Description of Artificial Sequence: Synthetic oligonucleotide
ccggagcacgaagggucgg

SEQ ID NO: 2917007 - RNA, 19 nt, Artificial Sequence
  Description of Artificial Sequence: Synthetic oligonucleotide
caccgggaugcuguggaau

SEQ ID NO: 2917008 - RNA, 19 nt, Artificial Sequence
  Description of Artificial Sequence: Synthetic oligonucleotide
gcaccgggaugcuguggaa

SEQ ID NO: 2917009 - RNA, 19 nt, Artificial Sequence
  Description of Artificial Sequence: Synthetic oligonucleotide
caccgagguccuggcacaa

SEQ ID NO: 2917010 - RNA, 19 nt, Artificial Sequence
  Description of Artificial Sequence: Synthetic oligonucleotide
ccgagguccuggcacaaau

SEQ ID NO: 2917011 - RNA, 19 nt, Artificial Sequence
  Description of Artificial Sequence: Synthetic oligonucleotide
ggcugguacuggauaggau

SEQ ID NO: 2917012 - RNA, 19 nt, Artificial Sequence
  Description of Artificial Sequence: Synthetic oligonucleotide
cucggcccaggcagucagu

SEQ ID NO: 2917013 - RNA, 19 nt, Artificial Sequence
  Description of Artificial Sequence: Synthetic oligonucleotide
cagugacccggagcacgaa

SEQ ID NO: 2917014 - RNA, 19 nt, Artificial Sequence
  Description of Artificial Sequence: Synthetic oligonucleotide
caccaccagugggauggua

SEQ ID NO: 2917015 - RNA, 19 nt, Artificial Sequence
  Description of Artificial Sequence: Synthetic oligonucleotide
gggauagcaccgggaugcu

SEQ ID NO: 2917016 - RNA, 19 nt, Artificial Sequence
  Description of Artificial Sequence: Synthetic oligonucleotide
cggagcacgaagggucgga

SEQ ID NO: 2917017 - RNA, 19 nt, Artificial Sequence
  Description of Artificial Sequence: Synthetic oligonucleotide
gcugguccaccgagguccu

SEQ ID NO: 2917018 - RNA, 19 nt, Artificial Sequence
  Description of Artificial Sequence: Synthetic oligonucleotide
ccaucuggucuauguuguu

SEQ ID NO: 2917019 - RNA, 19 nt, Artificial Sequence
  Description of Artificial Sequence: Synthetic oligonucleotide
gcacgaagggucggagguu

SEQ ID NO: 2917020 - RNA, 19 nt, Artificial Sequence
  Description of Artificial Sequence: Synthetic oligonucleotide
cggcccaggcagucaguga

SEQ ID NO: 2917021 - RNA, 19 nt, Artificial Sequence
  Description of Artificial Sequence: Synthetic oligonucleotide
ccggagcaggcugauucgu

SEQ ID NO: 2917022 - RNA, 19 nt, Artificial Sequence
  Description of Artificial Sequence: Synthetic oligonucleotide
cggcaagccugcaggugua

SEQ ID NO: 2917023 - RNA, 19 nt, Artificial Sequence
  Description of Artificial Sequence: Synthetic oligonucleotide
ccagaccaggagggcagcu

SEQ ID NO: 2917024 - RNA, 19 nt, Artificial Sequence
  Description of Artificial Sequence: Synthetic oligonucleotide
ccgggaugcuguggaauau

SEQ ID NO: 2917025 - RNA, 19 nt, Artificial Sequence
  Description of Artificial Sequence: Synthetic oligonucleotide
gcaccaccagugggauggu

SEQ ID NO: 2917026 - RNA, 19 nt, Artificial Sequence
  Description of Artificial Sequence: Synthetic oligonucleotide
cgggaugcuguggaauauu

SEQ ID NO: 2917027 - RNA, 19 nt, Artificial Sequence
  Description of Artificial Sequence: Synthetic oligonucleotide
aacaucaucaaccuucucc

SEQ ID NO: 2917028 - RNA, 19 nt, Artificial Sequence
  Description of Artificial Sequence: Synthetic oligonucleotide
aaagacaagauucuuuuca

SEQ ID NO: 2917029 - RNA, 19 nt, Artificial Sequence
  Description of Artificial Sequence: Synthetic oligonucleotide
auuuccaaagacaagauuc

SEQ ID NO: 2917030 - RNA, 19 nt, Artificial Sequence
  Description of Artificial Sequence: Synthetic oligonucleotide
ucaaccuucuccaugcugg

SEQ ID NO: 2917031 - RNA, 19 nt, Artificial Sequence
  Description of Artificial Sequence: Synthetic oligonucleotide
aagacaagauucuuuucac

SEQ ID NO: 2917032 - RNA, 19 nt, Artificial Sequence
  Description of Artificial Sequence: Synthetic oligonucleotide
cuuugaugaguguagaagg

SEQ ID NO: 2917033 - RNA, 19 nt, Artificial Sequence
  Description of Artificial Sequence: Synthetic oligonucleotide
uauucuuugaugaguguag

SEQ ID NO: 2917034 - RNA, 19 nt, Artificial Sequence
  Description of Artificial Sequence: Synthetic oligonucleotide
uuugaugaguguagaaggg

SEQ ID NO: 2917035 - RNA, 19 nt, Artificial Sequence
  Description of Artificial Sequence: Synthetic oligonucleotide
caaggcaacaacucgagcc

SEQ ID NO: 2917036 - RNA, 19 nt, Artificial Sequence
  Description of Artificial Sequence: Synthetic oligonucleotide
uuuuccgcaaucuugcuca

SEQ ID NO: 2917037 - RNA, 19 nt, Artificial Sequence
  Description of Artificial Sequence: Synthetic oligonucleotide
aacaacucgagccuccaag

SEQ ID NO: 2917038 - RNA, 19 nt, Artificial Sequence
  Description of Artificial Sequence: Synthetic oligonucleotide
aauccucaggguuuuccgc

SEQ ID NO: 2917039 - RNA, 19 nt, Artificial Sequence
  Description of Artificial Sequence: Synthetic oligonucleotide
acgaagggagcucagagcg

SEQ ID NO: 2917040 - RNA, 19 nt, Artificial Sequence
  Description of Artificial Sequence: Synthetic oligonucleotide
uuuaacuucucuuucuggu

SEQ ID NO: 2917041 - RNA, 19 nt, Artificial Sequence
  Description of Artificial Sequence: Synthetic oligonucleotide
ucuuugaugaguguagaag

SEQ ID NO: 2917042 - RNA, 19 nt, Artificial Sequence
  Description of Artificial Sequence: Synthetic oligonucleotide
uuguauucuuugaugagug

SEQ ID NO: 2917043 - RNA, 19 nt, Artificial Sequence
  Description of Artificial Sequence: Synthetic oligonucleotide
agcaugacgauucccggcc

SEQ ID NO: 2917044 - RNA, 19 nt, Artificial Sequence
  Description of Artificial Sequence: Synthetic oligonucleotide
ucaucaaccuucuccaugc

SEQ ID NO: 2917045 - RNA, 19 nt, Artificial Sequence
  Description of Artificial Sequence: Synthetic oligonucleotide
aaucuugcucauucaauug

SEQ ID NO: 2917046 - RNA, 19 nt, Artificial Sequence
  Description of Artificial Sequence: Synthetic oligonucleotide
acaagauucuuuucacaac

SEQ ID NO: 2917047 - RNA, 19 nt, Artificial Sequence
  Description of Artificial Sequence: Synthetic oligonucleotide
uggcucaucaucuuggcug

SEQ ID NO: 2917048 - RNA, 19 nt, Artificial Sequence
  Description of Artificial Sequence: Synthetic oligonucleotide
uuucuggucggccauuucc

SEQ ID NO: 2917049 - RNA, 19 nt, Artificial Sequence
  Description of Artificial Sequence: Synthetic oligonucleotide
uuguucuuugcuuugauuu

SEQ ID NO: 2917050 - RNA, 19 nt, Artificial Sequence
  Description of Artificial Sequence: Synthetic oligonucleotide
uuuccaaagacaagauucu

SEQ ID NO: 2917051 - RNA, 19 nt, Artificial Sequence
  Description of Artificial Sequence: Synthetic oligonucleotide
augcaggagacucggaggc

SEQ ID NO: 2917052 - RNA, 19 nt, Artificial Sequence
  Description of Artificial Sequence: Synthetic oligonucleotide
agacccuggagacugugcc

SEQ ID NO: 2917053 - RNA, 19 nt, Artificial Sequence
  Description of Artificial Sequence: Synthetic oligonucleotide
uucacaacaucaucaaccu

SEQ ID NO: 2917054 - RNA, 19 nt, Artificial Sequence
  Description of Artificial Sequence: Synthetic oligonucleotide
acaucaucaaccuucucca

SEQ ID NO: 2917055 - RNA, 19 nt, Artificial Sequence
  Description of Artificial Sequence: Synthetic oligonucleotide
aucaucuuggcugugcugg

SEQ ID NO: 2917056 - RNA, 19 nt, Artificial Sequence
  Description of Artificial Sequence: Synthetic oligonucleotide
aaggcaacaacucgagccu

SEQ ID NO: 2917057 - RNA, 19 nt, Artificial Sequence
  Description of Artificial Sequence: Synthetic oligonucleotide
gaauccucaggguuuuccg

SEQ ID NO: 2917058 - RNA, 19 nt, Artificial Sequence
  Description of Artificial Sequence: Synthetic oligonucleotide
ucuuguauucuuugaugag

SEQ ID NO: 2917059 - RNA, 19 nt, Artificial Sequence
  Description of Artificial Sequence: Synthetic oligonucleotide
gacaagauucuuuucacaa

SEQ ID NO: 2917060 - RNA, 19 nt, Artificial Sequence
  Description of Artificial Sequence: Synthetic oligonucleotide
gaugcucuuguauucuuug

SEQ ID NO: 2917061 - RNA, 19 nt, Artificial Sequence
  Description of Artificial Sequence: Synthetic oligonucleotide
uugaugaguguagaagggg

SEQ ID NO: 2917062 - RNA, 19 nt, Artificial Sequence
  Description of Artificial Sequence: Synthetic oligonucleotide
acaacucgagccuccaagg

SEQ ID NO: 2917063 - RNA, 19 nt, Artificial Sequence
  Description of Artificial Sequence: Synthetic oligonucleotide
aacuucucuuucuggucgg

SEQ ID NO: 2917064 - RNA, 19 nt, Artificial Sequence
  Description of Artificial Sequence: Synthetic oligonucleotide
uccgcaaucuugcucauuc

SEQ ID NO: 2917065 - RNA, 19 nt, Artificial Sequence
  Description of Artificial Sequence: Synthetic oligonucleotide
uggucggccauuuccaaag

SEQ ID NO: 2917066 - RNA, 19 nt, Artificial Sequence
  Description of Artificial Sequence: Synthetic oligonucleotide
ucggccauuuccaaagaca

SEQ ID NO: 2917067 - RNA, 19 nt, Artificial Sequence
  Description of Artificial Sequence: Synthetic oligonucleotide
caagauucuuuucacaaca

SEQ ID NO: 2917068 - RNA, 19 nt, Artificial Sequence
  Description of Artificial Sequence: Synthetic oligonucleotide
caugcaggagacucggagg

SEQ ID NO: 2917069 - RNA, 19 nt, Artificial Sequence
  Description of Artificial Sequence: Synthetic oligonucleotide
gaagggagcucagagcgcg

SEQ ID NO: 2917070 - RNA, 19 nt, Artificial Sequence
  Description of Artificial Sequence: Synthetic oligonucleotide
ucauucaauuguucuuugc

SEQ ID NO: 2917071 - RNA, 19 nt, Artificial Sequence
  Description of Artificial Sequence: Synthetic oligonucleotide
uucuuuucacaacaucauc

SEQ ID NO: 2917072 - RNA, 19 nt, Artificial Sequence
  Description of Artificial Sequence: Synthetic oligonucleotide
aucaucaaccuucuccaug

SEQ ID NO: 2917073 - RNA, 19 nt, Artificial Sequence
  Description of Artificial Sequence: Synthetic oligonucleotide
uuaacuucucuuucugguc

SEQ ID NO: 2917074 - RNA, 19 nt, Artificial Sequence
  Description of Artificial Sequence: Synthetic oligonucleotide
uucccaacggcguaggcac

SEQ ID NO: 2917075 - RNA, 19 nt, Artificial Sequence
  Description of Artificial Sequence: Synthetic oligonucleotide
aagguucuggaauccucag

SEQ ID NO: 2917076 - RNA, 19 nt, Artificial Sequence
  Description of Artificial Sequence: Synthetic oligonucleotide
uccaaagacaagauucuuu

SEQ ID NO: 2917077 - RNA, 19 nt, Artificial Sequence
  Description of Artificial Sequence: Synthetic oligonucleotide
cucuuguauucuuugauga

SEQ ID NO: 2917078 - RNA, 19 nt, Artificial Sequence
  Description of Artificial Sequence: Synthetic oligonucleotide
cagucaaggcaacaacucg

SEQ ID NO: 2917079 - RNA, 19 nt, Artificial Sequence
  Description of Artificial Sequence: Synthetic oligonucleotide
ugacagucaaggcaacaac

SEQ ID NO: 2917080 - RNA, 19 nt, Artificial Sequence
  Description of Artificial Sequence: Synthetic oligonucleotide
auucaauuguucuuugcuu

SEQ ID NO: 2917081 - RNA, 19 nt, Artificial Sequence
  Description of Artificial Sequence: Synthetic oligonucleotide
ugccugggcacgaagggag

SEQ ID NO: 2917082 - RNA, 19 nt, Artificial Sequence
  Description of Artificial Sequence: Synthetic oligonucleotide
gagacucggaggcugcagg

SEQ ID NO: 2917083 - RNA, 19 nt, Artificial Sequence
  Description of Artificial Sequence: Synthetic oligonucleotide
acagucaaggcaacaacuc

SEQ ID NO: 2917084 - RNA, 19 nt, Artificial Sequence
  Description of Artificial Sequence: Synthetic oligonucleotide
ucuggaauccucaggguuu

SEQ ID NO: 2917085 - RNA, 19 nt, Artificial Sequence
  Description of Artificial Sequence: Synthetic oligonucleotide
agacucggaggcugcaggc

SEQ ID NO: 2917086 - RNA, 19 nt, Artificial Sequence
  Description of Artificial Sequence: Synthetic oligonucleotide
gagcgcgccacguagcccg

SEQ ID NO: 2917087 - RNA, 19 nt, Artificial Sequence
  Description of Artificial Sequence: Synthetic oligonucleotide
ugcucuuguauucuuugau

SEQ ID NO: 2917088 - RNA, 19 nt, Artificial Sequence
  Description of Artificial Sequence: Synthetic oligonucleotide
uucucuuucuggucggcca

SEQ ID NO: 2917089 - RNA, 19 nt, Artificial Sequence
  Description of Artificial Sequence: Synthetic oligonucleotide
uucuggucggccauuucca

SEQ ID NO: 2917090 - RNA, 19 nt, Artificial Sequence
  Description of Artificial Sequence: Synthetic oligonucleotide
uucuggaauccucaggguu

SEQ ID NO: 2917091 - RNA, 19 nt, Artificial Sequence
  Description of Artificial Sequence: Synthetic oligonucleotide
agacaagauucuuuucaca

SEQ ID NO: 2917092 - RNA, 19 nt, Artificial Sequence
  Description of Artificial Sequence: Synthetic oligonucleotide
aacggcguaggcacgggcg

SEQ ID NO: 2917093 - RNA, 19 nt, Artificial Sequence
  Description of Artificial Sequence: Synthetic oligonucleotide
uguauucuuugaugagugu

SEQ ID NO: 2917094 - RNA, 19 nt, Artificial Sequence
  Description of Artificial Sequence: Synthetic oligonucleotide
acucgagccuccaagguuc

SEQ ID NO: 2917095 - RNA, 19 nt, Artificial Sequence
  Description of Artificial Sequence: Synthetic oligonucleotide
ugggcugguuucccaacgg

SEQ ID NO: 2917096 - RNA, 19 nt, Artificial Sequence
  Description of Artificial Sequence: Synthetic oligonucleotide
acucggaggcugcaggccg

SEQ ID NO: 2917097 - RNA, 19 nt, Artificial Sequence
  Description of Artificial Sequence: Synthetic oligonucleotide
ucaaggcaacaacucgagc

SEQ ID NO: 2917098 - RNA, 19 nt, Artificial Sequence
  Description of Artificial Sequence: Synthetic oligonucleotide
aacucgagccuccaagguu

SEQ ID NO: 2917099 - RNA, 19 nt, Artificial Sequence
  Description of Artificial Sequence: Synthetic oligonucleotide
uuucccaacggcguaggca

SEQ ID NO: 2917100 - RNA, 19 nt, Artificial Sequence
  Description of Artificial Sequence: Synthetic oligonucleotide
uguucuuugcuuugauuuu

SEQ ID NO: 2917101 - RNA, 19 nt, Artificial Sequence
  Description of Artificial Sequence: Synthetic oligonucleotide
ucuugcucauucaauuguu

SEQ ID NO: 2917102 - RNA, 19 nt, Artificial Sequence
  Description of Artificial Sequence: Synthetic oligonucleotide
cagacuggcgcuuccuccg

SEQ ID NO: 2917103 - RNA, 19 nt, Artificial Sequence
  Description of Artificial Sequence: Synthetic oligonucleotide
uucuuugaugaguguagaa

SEQ ID NO: 2917104 - RNA, 19 nt, Artificial Sequence
  Description of Artificial Sequence: Synthetic oligonucleotide
cuugcucauucaauuguuc

SEQ ID NO: 2917105 - RNA, 19 nt, Artificial Sequence
  Description of Artificial Sequence: Synthetic oligonucleotide
acccuggagacugugccgc

SEQ ID NO: 2917106 - RNA, 19 nt, Artificial Sequence
  Description of Artificial Sequence: Synthetic oligonucleotide
aucaaccuucuccaugcug

SEQ ID NO: 2917107 - RNA, 19 nt, Artificial Sequence
  Description of Artificial Sequence: Synthetic oligonucleotide
cacgaagggagcucagagc

SEQ ID NO: 2917108 - RNA, 19 nt, Artificial Sequence
  Description of Artificial Sequence: Synthetic oligonucleotide
cucagagcgcgccacguag

SEQ ID NO: 2917109 - RNA, 19 nt, Artificial Sequence
  Description of Artificial Sequence: Synthetic oligonucleotide
gacccuggagacugugccg

SEQ ID NO: 2917110 - RNA, 19 nt, Artificial Sequence
  Description of Artificial Sequence: Synthetic oligonucleotide
aggguuuuccgcaaucuug

SEQ ID NO: 2917111 - RNA, 19 nt, Artificial Sequence
  Description of Artificial Sequence: Synthetic oligonucleotide
auucuuuucacaacaucau

SEQ ID NO: 2917112 - RNA, 19 nt, Artificial Sequence
  Description of Artificial Sequence: Synthetic oligonucleotide
agucaaggcaacaacucga

SEQ ID NO: 2917113 - RNA, 19 nt, Artificial Sequence
  Description of Artificial Sequence: Synthetic oligonucleotide
auuguucuuugcuuugauu

SEQ ID NO: 2917114 - RNA, 19 nt, Artificial Sequence
  Description of Artificial Sequence: Synthetic oligonucleotide
auccucaggguuuuccgca

SEQ ID NO: 2917115 - RNA, 19 nt, Artificial Sequence
  Description of Artificial Sequence: Synthetic oligonucleotide
uucuccaugcuggggauga

SEQ ID NO: 2917116 - RNA, 19 nt, Artificial Sequence
  Description of Artificial Sequence: Synthetic oligonucleotide
gucaaggcaacaacucgag

SEQ ID NO: 2917117 - RNA, 19 nt, Artificial Sequence
  Description of Artificial Sequence: Synthetic oligonucleotide
gcucuuguauucuuugaug

SEQ ID NO: 2917118 - RNA, 19 nt, Artificial Sequence
  Description of Artificial Sequence: Synthetic oligonucleotide
gccauuuccaaagacaaga

SEQ ID NO: 2917119 - RNA, 19 nt, Artificial Sequence
  Description of Artificial Sequence: Synthetic oligonucleotide
ucagagcgcgccacguagc

SEQ ID NO: 2917120 - RNA, 19 nt, Artificial Sequence
  Description of Artificial Sequence: Synthetic oligonucleotide
aagauucuuuucacaacau

SEQ ID NO: 2917121 - RNA, 19 nt, Artificial Sequence
  Description of Artificial Sequence: Synthetic oligonucleotide
ugaugcucuuguauucuuu

SEQ ID NO: 2917122 - RNA, 19 nt, Artificial Sequence
  Description of Artificial Sequence: Synthetic oligonucleotide
auucuuugaugaguguaga

SEQ ID NO: 2917123 - RNA, 19 nt, Artificial Sequence
  Description of Artificial Sequence: Synthetic oligonucleotide
caaccuucuccaugcuggg

SEQ ID NO: 2917124 - RNA, 19 nt, Artificial Sequence
  Description of Artificial Sequence: Synthetic oligonucleotide
gacgauucccggccccgcg

SEQ ID NO: 2917125 - RNA, 19 nt, Artificial Sequence
  Description of Artificial Sequence: Synthetic oligonucleotide
cagcaugacgauucccggc

SEQ ID NO: 2917126 - RNA, 19 nt, Artificial Sequence
  Description of Artificial Sequence: Synthetic oligonucleotide
gcaugcaggagacucggag

SEQ ID NO: 2917127 - RNA, 19 nt, Artificial Sequence
  Description of Artificial Sequence: Synthetic oligonucleotide
agacuggcgcuuccuccgc

SEQ ID NO: 2917128 - RNA, 19 nt, Artificial Sequence
  Description of Artificial Sequence: Synthetic oligonucleotide
acggcguaggcacgggcgg

SEQ ID NO: 2917129 - RNA, 19 nt, Artificial Sequence
  Description of Artificial Sequence: Synthetic oligonucleotide
cucaucaucuuggcugugc

SEQ ID NO: 2917130 - RNA, 19 nt, Artificial Sequence
  Description of Artificial Sequence: Synthetic oligonucleotide
guauucuuugaugagugua

SEQ ID NO: 2917131 - RNA, 19 nt, Artificial Sequence
  Description of Artificial Sequence: Synthetic oligonucleotide
caugcuggggaugaugcuc

SEQ ID NO: 2917132 - RNA, 19 nt, Artificial Sequence
  Description of Artificial Sequence: Synthetic oligonucleotide
ucucuuucuggucggccau

SEQ ID NO: 2917133 - RNA, 19 nt, Artificial Sequence
  Description of Artificial Sequence: Synthetic oligonucleotide
ugugccgcugccugggcac

SEQ ID NO: 2917134 - RNA, 19 nt, Artificial Sequence
  Description of Artificial Sequence: Synthetic oligonucleotide
acaacaucaucaaccuucu

SEQ ID NO: 2917135 - RNA, 19 nt, Artificial Sequence
  Description of Artificial Sequence: Synthetic oligonucleotide
augcucuuguauucuuuga

SEQ ID NO: 2917136 - RNA, 19 nt, Artificial Sequence
  Description of Artificial Sequence: Synthetic oligonucleotide
cugggcugguuucccaacg

SEQ ID NO: 2917137 - RNA, 19 nt, Artificial Sequence
  Description of Artificial Sequence: Synthetic oligonucleotide
caugacgauucccggcccc

SEQ ID NO: 2917138 - RNA, 19 nt, Artificial Sequence
  Description of Artificial Sequence: Synthetic oligonucleotide
cuggagacugugccgcugc

SEQ ID NO: 2917139 - RNA, 19 nt, Artificial Sequence
  Description of Artificial Sequence: Synthetic oligonucleotide
gacagucaaggcaacaacu

SEQ ID NO: 2917140 - RNA, 19 nt, Artificial Sequence
  Description of Artificial Sequence: Synthetic oligonucleotide
agggcagacuggcgcuucc

SEQ ID NO: 2917141 - RNA, 19 nt, Artificial Sequence
  Description of Artificial Sequence: Synthetic oligonucleotide
uccgcagcgcagacccugg

SEQ ID NO: 2917142 - RNA, 19 nt, Artificial Sequence
  Description of Artificial Sequence: Synthetic oligonucleotide
ggaugaugcucuuguauuc

SEQ ID NO: 2917143 - RNA, 19 nt, Artificial Sequence
  Description of Artificial Sequence: Synthetic oligonucleotide
acuggcgcuuccuccgcuc

SEQ ID NO: 2917144 - RNA, 19 nt, Artificial Sequence
  Description of Artificial Sequence: Synthetic oligonucleotide
ggguuuuccgcaaucuugc

SEQ ID NO: 2917145 - RNA, 19 nt, Artificial Sequence
  Description of Artificial Sequence: Synthetic oligonucleotide
ucuuggcugugcugggcug

SEQ ID NO: 2917146 - RNA, 19 nt, Artificial Sequence
  Description of Artificial Sequence: Synthetic oligonucleotide
acgauucccggccccgcgg

SEQ ID NO: 2917147 - RNA, 19 nt, Artificial Sequence
  Description of Artificial Sequence: Synthetic oligonucleotide
ugguuucccaacggcguag

SEQ ID NO: 2917148 - RNA, 19 nt, Artificial Sequence
  Description of Artificial Sequence: Synthetic oligonucleotide
guagcccgcagcaugacga

SEQ ID NO: 2917149 - RNA, 19 nt, Artificial Sequence
  Description of Artificial Sequence: Synthetic oligonucleotide
acgggcggcaugcaggaga

SEQ ID NO: 2917150 - RNA, 19 nt, Artificial Sequence
  Description of Artificial Sequence: Synthetic oligonucleotide
gcacgaagggagcucagag

SEQ ID NO: 2917151 - RNA, 19 nt, Artificial Sequence
  Description of Artificial Sequence: Synthetic oligonucleotide
guaggcacgggcggcaugc

SEQ ID NO: 2917152 - RNA, 19 nt, Artificial Sequence
  Description of Artificial Sequence: Synthetic oligonucleotide
cuuguauucuuugaugagu

SEQ ID NO: 2917153 - RNA, 19 nt, Artificial Sequence
  Description of Artificial Sequence: Synthetic oligonucleotide
agacugugccgcugccugg

SEQ ID NO: 2917154 - RNA, 19 nt, Artificial Sequence
  Description of Artificial Sequence: Synthetic oligonucleotide
gcagcaugacgauucccgg

SEQ ID NO: 2917155 - RNA, 19 nt, Artificial Sequence
  Description of Artificial Sequence: Synthetic oligonucleotide
cuuccuccgcuccgcagcg

SEQ ID NO: 2917156 - RNA, 19 nt, Artificial Sequence
  Description of Artificial Sequence: Synthetic oligonucleotide
caucaucuuggcugugcug

SEQ ID NO: 2917157 - RNA, 19 nt, Artificial Sequence
  Description of Artificial Sequence: Synthetic oligonucleotide
cgcagcaugacgauucccg

SEQ ID NO: 2917158 - RNA, 19 nt, Artificial Sequence
  Description of Artificial Sequence: Synthetic oligonucleotide
cuuggcugugcugggcugg

SEQ ID NO: 2917159 - RNA, 19 nt, Artificial Sequence
  Description of Artificial Sequence: Synthetic oligonucleotide
gccacuguccccucugcgg

SEQ ID NO: 2917160 - RNA, 19 nt, Artificial Sequence
  Description of Artificial Sequence: Synthetic oligonucleotide
uccuccgcuccgcagcgca

SEQ ID NO: 2917161 - RNA, 19 nt, Artificial Sequence
  Description of Artificial Sequence: Synthetic oligonucleotide
cuucucuuucuggucggcc

SEQ ID NO: 2917162 - RNA, 19 nt, Artificial Sequence
  Description of Artificial Sequence: Synthetic oligonucleotide
augacgauucccggccccg

SEQ ID NO: 2917163 - RNA, 19 nt, Artificial Sequence
  Description of Artificial Sequence: Synthetic oligonucleotide
gaugaugcucuuguauucu

SEQ ID NO: 2917164 - RNA, 19 nt, Artificial Sequence
  Description of Artificial Sequence: Synthetic oligonucleotide
auucccggccccgcgggcc

SEQ ID NO: 2917165 - RNA, 19 nt, Artificial Sequence
  Description of Artificial Sequence: Synthetic oligonucleotide
caaucuugcucauucaauu

SEQ ID NO: 2917166 - RNA, 19 nt, Artificial Sequence
  Description of Artificial Sequence: Synthetic oligonucleotide
cagacccuggagacugugc

SEQ ID NO: 2917167 - RNA, 19 nt, Artificial Sequence
  Description of Artificial Sequence: Synthetic oligonucleotide
acuguccccucugcggugg

SEQ ID NO: 2917168 - RNA, 19 nt, Artificial Sequence
  Description of Artificial Sequence: Synthetic oligonucleotide
gagcucagagcgcgccacg

SEQ ID NO: 2917169 - RNA, 19 nt, Artificial Sequence
  Description of Artificial Sequence: Synthetic oligonucleotide
ucacaacaucaucaaccuu

SEQ ID NO: 2917170 - RNA, 19 nt, Artificial Sequence
  Description of Artificial Sequence: Synthetic oligonucleotide
ucuggucggccauuuccaa

SEQ ID NO: 2917171 - RNA, 19 nt, Artificial Sequence
  Description of Artificial Sequence: Synthetic oligonucleotide
ggcugguuucccaacggcg

SEQ ID NO: 2917172 - RNA, 19 nt, Artificial Sequence
  Description of Artificial Sequence: Synthetic oligonucleotide
uccaagguucuggaauccu

SEQ ID NO: 2917173 - RNA, 19 nt, Artificial Sequence
  Description of Artificial Sequence: Synthetic oligonucleotide
uggcgcuuccuccgcuccg

SEQ ID NO: 2917174 - RNA, 19 nt, Artificial Sequence
  Description of Artificial Sequence: Synthetic oligonucleotide
acugugccgcugccugggc

SEQ ID NO: 2917175 - RNA, 19 nt, Artificial Sequence
  Description of Artificial Sequence: Synthetic oligonucleotide
cagcgcagacccuggagac

SEQ ID NO: 2917176 - RNA, 19 nt, Artificial Sequence
  Description of Artificial Sequence: Synthetic oligonucleotide
ugggcacgaagggagcuca

SEQ ID NO: 2917177 - RNA, 19 nt, Artificial Sequence
  Description of Artificial Sequence: Synthetic oligonucleotide
ggaauccucaggguuuucc

SEQ ID NO: 2917178 - RNA, 19 nt, Artificial Sequence
  Description of Artificial Sequence: Synthetic oligonucleotide
ggauccugacagucaaggc

SEQ ID NO: 2917179 - RNA, 19 nt, Artificial Sequence
  Description of Artificial Sequence: Synthetic oligonucleotide
cagagcgcgccacguagcc

SEQ ID NO: 2917180 - RNA, 19 nt, Artificial Sequence
  Description of Artificial Sequence: Synthetic oligonucleotide
gucggccauuuccaaagac

SEQ ID NO: 2917181 - RNA, 19 nt, Artificial Sequence
  Description of Artificial Sequence: Synthetic oligonucleotide
cucaggguuuuccgcaauc

SEQ ID NO: 2917182 - RNA, 19 nt, Artificial Sequence
  Description of Artificial Sequence: Synthetic oligonucleotide
agagcgcgccacguagccc

SEQ ID NO: 2917183 - RNA, 19 nt, Artificial Sequence
  Description of Artificial Sequence: Synthetic oligonucleotide
uggagacugugccgcugcc

SEQ ID NO: 2917184 - RNA, 19 nt, Artificial Sequence
  Description of Artificial Sequence: Synthetic oligonucleotide
uuccaaagacaagauucuu

SEQ ID NO: 2917185 - RNA, 19 nt, Artificial Sequence
  Description of Artificial Sequence: Synthetic oligonucleotide
augaugcucuuguauucuu

SEQ ID NO: 2917186 - RNA, 19 nt, Artificial Sequence
  Description of Artificial Sequence: Synthetic oligonucleotide
ucccaacggcguaggcacg

SEQ ID NO: 2917187 - RNA, 19 nt, Artificial Sequence
  Description of Artificial Sequence: Synthetic oligonucleotide
gacucggaggcugcaggcc

SEQ ID NO: 2917188 - RNA, 19 nt, Artificial Sequence
  Description of Artificial Sequence: Synthetic oligonucleotide
ggguggcucaucaucuugg

SEQ ID NO: 2917189 - RNA, 19 nt, Artificial Sequence
  Description of Artificial Sequence: Synthetic oligonucleotide
caggagacucggaggcugc

SEQ ID NO: 2917190 - RNA, 19 nt, Artificial Sequence
  Description of Artificial Sequence: Synthetic oligonucleotide
cuccaagguucuggaaucc

SEQ ID NO: 2917191 - RNA, 19 nt, Artificial Sequence
  Description of Artificial Sequence: Synthetic oligonucleotide
gagccuccaagguucugga

SEQ ID NO: 2917192 - RNA, 19 nt, Artificial Sequence
  Description of Artificial Sequence: Synthetic oligonucleotide
gcagacuggcgcuuccucc

SEQ ID NO: 2917193 - RNA, 19 nt, Artificial Sequence
  Description of Artificial Sequence: Synthetic oligonucleotide
ugccgagggcagacuggcg

SEQ ID NO: 2917194 - RNA, 19 nt, Artificial Sequence
  Description of Artificial Sequence: Synthetic oligonucleotide
uccucaggguuuuccgcaa

SEQ ID NO: 2917195 - RNA, 19 nt, Artificial Sequence
  Description of Artificial Sequence: Synthetic oligonucleotide
aggcaacaacucgagccuc

SEQ ID NO: 2917196 - RNA, 19 nt, Artificial Sequence
  Description of Artificial Sequence: Synthetic oligonucleotide
cugacagucaaggcaacaa

SEQ ID NO: 2917197 - RNA, 19 nt, Artificial Sequence
  Description of Artificial Sequence: Synthetic oligonucleotide
uccugacagucaaggcaac

SEQ ID NO: 2917198 - RNA, 19 nt, Artificial Sequence
  Description of Artificial Sequence: Synthetic oligonucleotide
accgccacuguccccucug

SEQ ID NO: 2917199 - RNA, 19 nt, Artificial Sequence
  Description of Artificial Sequence: Synthetic oligonucleotide
gccgagggcagacuggcgc

SEQ ID NO: 2917200 - RNA, 19 nt, Artificial Sequence
  Description of Artificial Sequence: Synthetic oligonucleotide
guuucccaacggcguaggc

SEQ ID NO: 2917201 - RNA, 19 nt, Artificial Sequence
  Description of Artificial Sequence: Synthetic oligonucleotide
augcuggggaugaugcucu

SEQ ID NO: 2917202 - RNA, 19 nt, Artificial Sequence
  Description of Artificial Sequence: Synthetic oligonucleotide
ggcacgggcggcaugcagg

SEQ ID NO: 2917203 - RNA, 19 nt, Artificial Sequence
  Description of Artificial Sequence: Synthetic oligonucleotide
caucuuggcugugcugggc

SEQ ID NO: 2917204 - RNA, 19 nt, Artificial Sequence
  Description of Artificial Sequence: Synthetic oligonucleotide
cacguagcccgcagcauga

SEQ ID NO: 2917205 - RNA, 19 nt, Artificial Sequence
  Description of Artificial Sequence: Synthetic oligonucleotide
cucggaggcugcaggccgc

SEQ ID NO: 2917206 - RNA, 19 nt, Artificial Sequence
  Description of Artificial Sequence: Synthetic oligonucleotide
ucuuucuggucggccauuu

SEQ ID NO: 2917207 - RNA, 19 nt, Artificial Sequence
  Description of Artificial Sequence: Synthetic oligonucleotide
cuggggaugaugcucuugu

SEQ ID NO: 2917208 - RNA, 19 nt, Artificial Sequence
  Description of Artificial Sequence: Synthetic oligonucleotide
cuggcgcuuccuccgcucc

SEQ ID NO: 2917209 - RNA, 19 nt, Artificial Sequence
  Description of Artificial Sequence: Synthetic oligonucleotide
ccaagguucuggaauccuc

SEQ ID NO: 2917210 - RNA, 19 nt, Artificial Sequence
  Description of Artificial Sequence: Synthetic oligonucleotide
caacggcguaggcacgggc

SEQ ID NO: 2917211 - RNA, 19 nt, Artificial Sequence
  Description of Artificial Sequence: Synthetic oligonucleotide
ggccgcagcgugccgaggg

SEQ ID NO: 2917212 - RNA, 19 nt, Artificial Sequence
  Description of Artificial Sequence: Synthetic oligonucleotide
gugccgagggcagacuggc

SEQ ID NO: 2917213 - RNA, 19 nt, Artificial Sequence
  Description of Artificial Sequence: Synthetic oligonucleotide
cuuucuggucggccauuuc

SEQ ID NO: 2917214 - RNA, 19 nt, Artificial Sequence
  Description of Artificial Sequence: Synthetic oligonucleotide
gguuucccaacggcguagg

SEQ ID NO: 2917215 - RNA, 19 nt, Artificial Sequence
  Description of Artificial Sequence: Synthetic oligonucleotide
gcagcgcagacccuggaga

SEQ ID NO: 2917216 - RNA, 19 nt, Artificial Sequence
  Description of Artificial Sequence: Synthetic oligonucleotide
ugacgauucccggccccgc

SEQ ID NO: 2917217 - RNA, 19 nt, Artificial Sequence
  Description of Artificial Sequence: Synthetic oligonucleotide
gauucccggccccgcgggc

SEQ ID NO: 2917218 - RNA, 19 nt, Artificial Sequence
  Description of Artificial Sequence: Synthetic oligonucleotide
uggggaugaugcucuugua

SEQ ID NO: 2917219 - RNA, 19 nt, Artificial Sequence
  Description of Artificial Sequence: Synthetic oligonucleotide
gggguggcucaucaucuug

SEQ ID NO: 2917220 - RNA, 19 nt, Artificial Sequence
  Description of Artificial Sequence: Synthetic oligonucleotide
cggauccugacagucaagg

SEQ ID NO: 2917221 - RNA, 19 nt, Artificial Sequence
  Description of Artificial Sequence: Synthetic oligonucleotide
uuuccgcaaucuugcucau

SEQ ID NO: 2917222 - RNA, 19 nt, Artificial Sequence
  Description of Artificial Sequence: Synthetic oligonucleotide
cugugcugggcugguuucc

SEQ ID NO: 2917223 - RNA, 19 nt, Artificial Sequence
  Description of Artificial Sequence: Synthetic oligonucleotide
ggcggcaugcaggagacuc

SEQ ID NO: 2917224 - RNA, 19 nt, Artificial Sequence
  Description of Artificial Sequence: Synthetic oligonucleotide
uccgcuccgcagcgcagac

SEQ ID NO: 2917225 - RNA, 19 nt, Artificial Sequence
  Description of Artificial Sequence: Synthetic oligonucleotide
uucccggccccgcgggccc

SEQ ID NO: 2917226 - RNA, 19 nt, Artificial Sequence
  Description of Artificial Sequence: Synthetic oligonucleotide
ggcaacaacucgagccucc

SEQ ID NO: 2917227 - RNA, 19 nt, Artificial Sequence
  Description of Artificial Sequence: Synthetic oligonucleotide
cauuuccaaagacaagauu

SEQ ID NO: 2917228 - RNA, 19 nt, Artificial Sequence
  Description of Artificial Sequence: Synthetic oligonucleotide
gggcugguuucccaacggc

SEQ ID NO: 2917229 - RNA, 19 nt, Artificial Sequence
  Description of Artificial Sequence: Synthetic oligonucleotide
cuccgcagcgcagacccug

SEQ ID NO: 2917230 - RNA, 19 nt, Artificial Sequence
  Description of Artificial Sequence: Synthetic oligonucleotide
gcaggagacucggaggcug

SEQ ID NO: 2917231 - RNA, 19 nt, Artificial Sequence
  Description of Artificial Sequence: Synthetic oligonucleotide
gggaugaugcucuuguauu

SEQ ID NO: 2917232 - RNA, 19 nt, Artificial Sequence
  Description of Artificial Sequence: Synthetic oligonucleotide
cgcuccgcagcgcagaccc

SEQ ID NO: 2917233 - RNA, 19 nt, Artificial Sequence
  Description of Artificial Sequence: Synthetic oligonucleotide
cugcaggccgcagcgugcc

SEQ ID NO: 2917234 - RNA, 19 nt, Artificial Sequence
  Description of Artificial Sequence: Synthetic oligonucleotide
guucuggaauccucagggu

SEQ ID NO: 2917235 - RNA, 19 nt, Artificial Sequence
  Description of Artificial Sequence: Synthetic oligonucleotide
agcucagagcgcgccacgu

SEQ ID NO: 2917236 - RNA, 19 nt, Artificial Sequence
  Description of Artificial Sequence: Synthetic oligonucleotide
acguagcccgcagcaugac

SEQ ID NO: 2917237 - RNA, 19 nt, Artificial Sequence
  Description of Artificial Sequence: Synthetic oligonucleotide
ccacguagcccgcagcaug

SEQ ID NO: 2917238 - RNA, 19 nt, Artificial Sequence
  Description of Artificial Sequence: Synthetic oligonucleotide
caacaucaucaaccuucuc

SEQ ID NO: 2917239 - RNA, 19 nt, Artificial Sequence
  Description of Artificial Sequence: Synthetic oligonucleotide
cacuguccccucugcggug

SEQ ID NO: 2917240 - RNA, 19 nt, Artificial Sequence
  Description of Artificial Sequence: Synthetic oligonucleotide
uagcccgcagcaugacgau

SEQ ID NO: 2917241 - RNA, 19 nt, Artificial Sequence
  Description of Artificial Sequence: Synthetic oligonucleotide
caggccgcagcgugccgag

SEQ ID NO: 2917242 - RNA, 19 nt, Artificial Sequence
  Description of Artificial Sequence: Synthetic oligonucleotide
cuucuccaugcuggggaug

SEQ ID NO: 2917243 - RNA, 19 nt, Artificial Sequence
  Description of Artificial Sequence: Synthetic oligonucleotide
cuggucggccauuuccaaa

SEQ ID NO: 2917244 - RNA, 19 nt, Artificial Sequence
  Description of Artificial Sequence: Synthetic oligonucleotide
gcgcagacccuggagacug

SEQ ID NO: 2917245 - RNA, 19 nt, Artificial Sequence
  Description of Artificial Sequence: Synthetic oligonucleotide
ggggaugaugcucuuguau

SEQ ID NO: 2917246 - RNA, 19 nt, Artificial Sequence
  Description of Artificial Sequence: Synthetic oligonucleotide
uuggcugugcugggcuggu

SEQ ID NO: 2917247 - RNA, 19 nt, Artificial Sequence
  Description of Artificial Sequence: Synthetic oligonucleotide
ggagacucggaggcugcag

SEQ ID NO: 2917248 - RNA, 19 nt, Artificial Sequence
  Description of Artificial Sequence: Synthetic oligonucleotide
agcgcagacccuggagacu

SEQ ID NO: 2917249 - RNA, 19 nt, Artificial Sequence
  Description of Artificial Sequence: Synthetic oligonucleotide
agccuccaagguucuggaa

SEQ ID NO: 2917250 - RNA, 19 nt, Artificial Sequence
  Description of Artificial Sequence: Synthetic oligonucleotide
gcggcaugcaggagacucg

SEQ ID NO: 2917251 - RNA, 19 nt, Artificial Sequence
  Description of Artificial Sequence: Synthetic oligonucleotide
gcaugacgauucccggccc

SEQ ID NO: 2917252 - RNA, 19 nt, Artificial Sequence
  Description of Artificial Sequence: Synthetic oligonucleotide
gcugugcugggcugguuuc

SEQ ID NO: 2917253 - RNA, 19 nt, Artificial Sequence
  Description of Artificial Sequence: Synthetic oligonucleotide
cugggcacgaagggagcuc

SEQ ID NO: 2917254 - RNA, 19 nt, Artificial Sequence
  Description of Artificial Sequence: Synthetic oligonucleotide
ggcucaucaucuuggcugu

SEQ ID NO: 2917255 - RNA, 19 nt, Artificial Sequence
  Description of Artificial Sequence: Synthetic oligonucleotide
guggcucaucaucuuggcu

SEQ ID NO: 2917256 - RNA, 19 nt, Artificial Sequence
  Description of Artificial Sequence: Synthetic oligonucleotide
gccuccaagguucuggaau

SEQ ID NO: 2917257 - RNA, 19 nt, Artificial Sequence
  Description of Artificial Sequence: Synthetic oligonucleotide
cugguuucccaacggcgua

SEQ ID NO: 2917258 - RNA, 19 nt, Artificial Sequence
  Description of Artificial Sequence: Synthetic oligonucleotide
ggagcucagagcgcgccac

SEQ ID NO: 2917259 - RNA, 19 nt, Artificial Sequence
  Description of Artificial Sequence: Synthetic oligonucleotide
caacucgagccuccaaggu

SEQ ID NO: 2917260 - RNA, 19 nt, Artificial Sequence
  Description of Artificial Sequence: Synthetic oligonucleotide
ggcagacuggcgcuuccuc

SEQ ID NO: 2917261 - RNA, 19 nt, Artificial Sequence
  Description of Artificial Sequence: Synthetic oligonucleotide
cgcugccugggcacgaagg

SEQ ID NO: 2917262 - RNA, 19 nt, Artificial Sequence
  Description of Artificial Sequence: Synthetic oligonucleotide
ucggaggcugcaggccgca

SEQ ID NO: 2917263 - RNA, 19 nt, Artificial Sequence
  Description of Artificial Sequence: Synthetic oligonucleotide
gagggcagacuggcgcuuc

SEQ ID NO: 2917264 - RNA, 19 nt, Artificial Sequence
  Description of Artificial Sequence: Synthetic oligonucleotide
cgugccgagggcagacugg

SEQ ID NO: 2917265 - RNA, 19 nt, Artificial Sequence
  Description of Artificial Sequence: Synthetic oligonucleotide
aggagacucggaggcugca

SEQ ID NO: 2917266 - RNA, 19 nt, Artificial Sequence
  Description of Artificial Sequence: Synthetic oligonucleotide
ucgagccuccaagguucug

SEQ ID NO: 2917267 - RNA, 19 nt, Artificial Sequence
  Description of Artificial Sequence: Synthetic oligonucleotide
gcucauucaauuguucuuu

SEQ ID NO: 2917268 - RNA, 19 nt, Artificial Sequence
  Description of Artificial Sequence: Synthetic oligonucleotide
gcgugccgagggcagacug

SEQ ID NO: 2917269 - RNA, 19 nt, Artificial Sequence
  Description of Artificial Sequence: Synthetic oligonucleotide
gcccgcagcaugacgauuc

SEQ ID NO: 2917270 - RNA, 19 nt, Artificial Sequence
  Description of Artificial Sequence: Synthetic oligonucleotide
cccaacggcguaggcacgg

SEQ ID NO: 2917271 - RNA, 19 nt, Artificial Sequence
  Description of Artificial Sequence: Synthetic oligonucleotide
cguagcccgcagcaugacg

SEQ ID NO: 2917272 - RNA, 19 nt, Artificial Sequence
  Description of Artificial Sequence: Synthetic oligonucleotide
cagcgugccgagggcagac

SEQ ID NO: 2917273 - RNA, 19 nt, Artificial Sequence
  Description of Artificial Sequence: Synthetic oligonucleotide
cugccugggcacgaaggga

SEQ ID NO: 2917274 - RNA, 19 nt, Artificial Sequence
  Description of Artificial Sequence: Synthetic oligonucleotide
caacaacucgagccuccaa

SEQ ID NO: 2917275 - RNA, 19 nt, Artificial Sequence
  Description of Artificial Sequence: Synthetic oligonucleotide
gugcugggcugguuuccca

SEQ ID NO: 2917276 - RNA, 19 nt, Artificial Sequence
  Description of Artificial Sequence: Synthetic oligonucleotide
uggaauccucaggguuuuc

SEQ ID NO: 2917277 - RNA, 19 nt, Artificial Sequence
  Description of Artificial Sequence: Synthetic oligonucleotide
cugugccgcugccugggca

SEQ ID NO: 2917278 - RNA, 19 nt, Artificial Sequence
  Description of Artificial Sequence: Synthetic oligonucleotide
agcgcgccacguagcccgc

SEQ ID NO: 2917279 - RNA, 19 nt, Artificial Sequence
  Description of Artificial Sequence: Synthetic oligonucleotide
gcaaucuugcucauucaau

SEQ ID NO: 2917280 - RNA, 19 nt, Artificial Sequence
  Description of Artificial Sequence: Synthetic oligonucleotide
gcugguuucccaacggcgu

SEQ ID NO: 2917281 - RNA, 19 nt, Artificial Sequence
  Description of Artificial Sequence: Synthetic oligonucleotide
cgaagggagcucagagcgc

SEQ ID NO: 2917282 - RNA, 19 nt, Artificial Sequence
  Description of Artificial Sequence: Synthetic oligonucleotide
gcacgggcggcaugcagga

SEQ ID NO: 2917283 - RNA, 19 nt, Artificial Sequence
  Description of Artificial Sequence: Synthetic oligonucleotide
uuccgcaaucuugcucauu

SEQ ID NO: 2917284 - RNA, 19 nt, Artificial Sequence
  Description of Artificial Sequence: Synthetic oligonucleotide
gugccgcugccugggcacg

SEQ ID NO: 2917285 - RNA, 19 nt, Artificial Sequence
  Description of Artificial Sequence: Synthetic oligonucleotide
uaggcacgggcggcaugca

SEQ ID NO: 2917286 - RNA, 19 nt, Artificial Sequence
  Description of Artificial Sequence: Synthetic oligonucleotide
ggucggccauuuccaaaga

SEQ ID NO: 2917287 - RNA, 19 nt, Artificial Sequence
  Description of Artificial Sequence: Synthetic oligonucleotide
gcuggggaugaugcucuug

SEQ ID NO: 2917288 - RNA, 19 nt, Artificial Sequence
  Description of Artificial Sequence: Synthetic oligonucleotide
ucuccaugcuggggaugau

SEQ ID NO: 2917289 - RNA, 19 nt, Artificial Sequence
  Description of Artificial Sequence: Synthetic oligonucleotide
ugcuggggaugaugcucuu

SEQ ID NO: 2917290 - RNA, 19 nt, Artificial Sequence
  Description of Artificial Sequence: Synthetic oligonucleotide
gguuuuccgcaaucuugcu

SEQ ID NO: 2917291 - RNA, 19 nt, Artificial Sequence
  Description of Artificial Sequence: Synthetic oligonucleotide
ggcgcuuccuccgcuccgc

SEQ ID NO: 2917292 - RNA, 19 nt, Artificial Sequence
  Description of Artificial Sequence: Synthetic oligonucleotide
gcaacaacucgagccucca

SEQ ID NO: 2917293 - RNA, 19 nt, Artificial Sequence
  Description of Artificial Sequence: Synthetic oligonucleotide
caucaucaaccuucuccau

SEQ ID NO: 2917294 - RNA, 19 nt, Artificial Sequence
  Description of Artificial Sequence: Synthetic oligonucleotide
gcugcaggccgcagcgugc

SEQ ID NO: 2917295 - RNA, 19 nt, Artificial Sequence
  Description of Artificial Sequence: Synthetic oligonucleotide
gcagacccuggagacugug

SEQ ID NO: 2917296 - RNA, 19 nt, Artificial Sequence
  Description of Artificial Sequence: Synthetic oligonucleotide
cccgcagcaugacgauucc

SEQ ID NO: 2917297 - RNA, 19 nt, Artificial Sequence
  Description of Artificial Sequence: Synthetic oligonucleotide
ggcacgaagggagcucaga

SEQ ID NO: 2917298 - RNA, 19 nt, Artificial Sequence
  Description of Artificial Sequence: Synthetic oligonucleotide
cgcaaucuugcucauucaa

SEQ ID NO: 2917299 - RNA, 19 nt, Artificial Sequence
  Description of Artificial Sequence: Synthetic oligonucleotide
gacuggcgcuuccuccgcu

SEQ ID NO: 2917300 - RNA, 19 nt, Artificial Sequence
  Description of Artificial Sequence: Synthetic oligonucleotide
caggguuuuccgcaaucuu

SEQ ID NO: 2917301 - RNA, 19 nt, Artificial Sequence
  Description of Artificial Sequence: Synthetic oligonucleotide
gggagcucagagcgcgcca

SEQ ID NO: 2917302 - RNA, 19 nt, Artificial Sequence
  Description of Artificial Sequence: Synthetic oligonucleotide
agcgugccgagggcagacu

SEQ ID NO: 2917303 - RNA, 19 nt, Artificial Sequence
  Description of Artificial Sequence: Synthetic oligonucleotide
ccauuuccaaagacaagau

SEQ ID NO: 2917304 - RNA, 19 nt, Artificial Sequence
  Description of Artificial Sequence: Synthetic oligonucleotide
cgauucccggccccgcggg

SEQ ID NO: 2917305 - RNA, 19 nt, Artificial Sequence
  Description of Artificial Sequence: Synthetic oligonucleotide
ugccgcugccugggcacga

SEQ ID NO: 2917306 - RNA, 19 nt, Artificial Sequence
  Description of Artificial Sequence: Synthetic oligonucleotide
gccgcagcgugccgagggc

SEQ ID NO: 2917307 - RNA, 19 nt, Artificial Sequence
  Description of Artificial Sequence: Synthetic oligonucleotide
caucaaccuucuccaugcu

SEQ ID NO: 2917308 - RNA, 19 nt, Artificial Sequence
  Description of Artificial Sequence: Synthetic oligonucleotide
ggccccgcgggcccgcacc

SEQ ID NO: 2917309 - RNA, 19 nt, Artificial Sequence
  Description of Artificial Sequence: Synthetic oligonucleotide
cuccgcuccgcagcgcaga

SEQ ID NO: 2917310 - RNA, 19 nt, Artificial Sequence
  Description of Artificial Sequence: Synthetic oligonucleotide
gcggauccugacagucaag

SEQ ID NO: 2917311 - RNA, 19 nt, Artificial Sequence
  Description of Artificial Sequence: Synthetic oligonucleotide
cgcagcgcagacccuggag

SEQ ID NO: 2917312 - RNA, 19 nt, Artificial Sequence
  Description of Artificial Sequence: Synthetic oligonucleotide
cgggcggcaugcaggagac

SEQ ID NO: 2917313 - RNA, 19 nt, Artificial Sequence
  Description of Artificial Sequence: Synthetic oligonucleotide
ccaacggcguaggcacggg

SEQ ID NO: 2917314 - RNA, 19 nt, Artificial Sequence
  Description of Artificial Sequence: Synthetic oligonucleotide
ccuggagacugugccgcug

SEQ ID NO: 2917315 - RNA, 19 nt, Artificial Sequence
  Description of Artificial Sequence: Synthetic oligonucleotide
aggccgcagcgugccgagg

SEQ ID NO: 2917316 - RNA, 19 nt, Artificial Sequence
  Description of Artificial Sequence: Synthetic oligonucleotide
ccugacagucaaggcaaca

SEQ ID NO: 2917317 - RNA, 19 nt, Artificial Sequence
  Description of Artificial Sequence: Synthetic oligonucleotide
cucgagccuccaagguucu

SEQ ID NO: 2917318 - RNA, 19 nt, Artificial Sequence
  Description of Artificial Sequence: Synthetic oligonucleotide
ggcugugcugggcugguuu

SEQ ID NO: 2917319 - RNA, 19 nt, Artificial Sequence
  Description of Artificial Sequence: Synthetic oligonucleotide
agcccgcagcaugacgauu

SEQ ID NO: 2917320 - RNA, 19 nt, Artificial Sequence
  Description of Artificial Sequence: Synthetic oligonucleotide
ccgcaaucuugcucauuca

SEQ ID NO: 2917321 - RNA, 19 nt, Artificial Sequence
  Description of Artificial Sequence: Synthetic oligonucleotide
gcgccacguagcccgcagc

SEQ ID NO: 2917322 - RNA, 19 nt, Artificial Sequence
  Description of Artificial Sequence: Synthetic oligonucleotide
cuggaauccucaggguuuu

SEQ ID NO: 2917323 - RNA, 19 nt, Artificial Sequence
  Description of Artificial Sequence: Synthetic oligonucleotide
cacgggcggcaugcaggag

SEQ ID NO: 2917324 - RNA, 19 nt, Artificial Sequence
  Description of Artificial Sequence: Synthetic oligonucleotide
gccugggcacgaagggagc

SEQ ID NO: 2917325 - RNA, 19 nt, Artificial Sequence
  Description of Artificial Sequence: Synthetic oligonucleotide
ggcguaggcacgggcggca

SEQ ID NO: 2917326 - RNA, 19 nt, Artificial Sequence
  Description of Artificial Sequence: Synthetic oligonucleotide
gccccgcgggcccgcaccg

SEQ ID NO: 2917327 - RNA, 19 nt, Artificial Sequence
  Description of Artificial Sequence: Synthetic oligonucleotide
gcaggccgcagcgugccga

SEQ ID NO: 2917328 - RNA, 19 nt, Artificial Sequence
  Description of Artificial Sequence: Synthetic oligonucleotide
gggcacgaagggagcucag

SEQ ID NO: 2917329 - RNA, 19 nt, Artificial Sequence
  Description of Artificial Sequence: Synthetic oligonucleotide
ccgccacuguccccucugc

SEQ ID NO: 2917330 - RNA, 19 nt, Artificial Sequence
  Description of Artificial Sequence: Synthetic oligonucleotide
ccgcagcaugacgauuccc

SEQ ID NO: 2917331 - RNA, 19 nt, Artificial Sequence
  Description of Artificial Sequence: Synthetic oligonucleotide
gcucagagcgcgccacgua

SEQ ID NO: 2917332 - RNA, 19 nt, Artificial Sequence
  Description of Artificial Sequence: Synthetic oligonucleotide
ggagacugugccgcugccu

SEQ ID NO: 2917333 - RNA, 19 nt, Artificial Sequence
  Description of Artificial Sequence: Synthetic oligonucleotide
ccacuguccccucugcggu

SEQ ID NO: 2917334 - RNA, 19 nt, Artificial Sequence
  Description of Artificial Sequence: Synthetic oligonucleotide
ggcaugcaggagacucgga

SEQ ID NO: 2917335 - RNA, 19 nt, Artificial Sequence
  Description of Artificial Sequence: Synthetic oligonucleotide
cgcuuccuccgcuccgcag

SEQ ID NO: 2917336 - RNA, 19 nt, Artificial Sequence
  Description of Artificial Sequence: Synthetic oligonucleotide
cgccacguagcccgcagca

SEQ ID NO: 2917337 - RNA, 19 nt, Artificial Sequence
  Description of Artificial Sequence: Synthetic oligonucleotide
uggcugugcugggcugguu

SEQ ID NO: 2917338 - RNA, 19 nt, Artificial Sequence
  Description of Artificial Sequence: Synthetic oligonucleotide
ccgcugccugggcacgaag

SEQ ID NO: 2917339 - RNA, 19 nt, Artificial Sequence
  Description of Artificial Sequence: Synthetic oligonucleotide
cguaggcacgggcggcaug

SEQ ID NO: 2917340 - RNA, 19 nt, Artificial Sequence
  Description of Artificial Sequence: Synthetic oligonucleotide
gcagcgugccgagggcaga

SEQ ID NO: 2917341 - RNA, 19 nt, Artificial Sequence
  Description of Artificial Sequence: Synthetic oligonucleotide
ccaugcuggggaugaugcu

SEQ ID NO: 2917342 - RNA, 19 nt, Artificial Sequence
  Description of Artificial Sequence: Synthetic oligonucleotide
ccgagggcagacuggcgcu

SEQ ID NO: 2917343 - RNA, 19 nt, Artificial Sequence
  Description of Artificial Sequence: Synthetic oligonucleotide
cucuuucuggucggccauu

SEQ ID NO: 2917344 - RNA, 19 nt, Artificial Sequence
  Description of Artificial Sequence: Synthetic oligonucleotide
ccgcaccgccacugucccc

SEQ ID NO: 2917345 - RNA, 19 nt, Artificial Sequence
  Description of Artificial Sequence: Synthetic oligonucleotide
ccgcuccgcagcgcagacc

SEQ ID NO: 2917346 - RNA, 19 nt, Artificial Sequence
  Description of Artificial Sequence: Synthetic oligonucleotide
cggcguaggcacgggcggc

SEQ ID NO: 2917347 - RNA, 19 nt, Artificial Sequence
  Description of Artificial Sequence: Synthetic oligonucleotide
gcaccgccacuguccccuc

SEQ ID NO: 2917348 - RNA, 19 nt, Artificial Sequence
  Description of Artificial Sequence: Synthetic oligonucleotide
gggcagacuggcgcuuccu

SEQ ID NO: 2917349 - RNA, 19 nt, Artificial Sequence
  Description of Artificial Sequence: Synthetic oligonucleotide
ccugggcacgaagggagcu

SEQ ID NO: 2917350 - RNA, 19 nt, Artificial Sequence
  Description of Artificial Sequence: Synthetic oligonucleotide
cgcaccgccacuguccccu

SEQ ID NO: 2917351 - RNA, 19 nt, Artificial Sequence
  Description of Artificial Sequence: Synthetic oligonucleotide
caccgccacuguccccucu

SEQ ID NO: 2917352 - RNA, 19 nt, Artificial Sequence
  Description of Artificial Sequence: Synthetic oligonucleotide
ccgcagcgugccgagggca

SEQ ID NO: 2917353 - RNA, 19 nt, Artificial Sequence
  Description of Artificial Sequence: Synthetic oligonucleotide
gccacguagcccgcagcau

SEQ ID NO: 2917354 - RNA, 19 nt, Artificial Sequence
  Description of Artificial Sequence: Synthetic oligonucleotide
cgcgggcccgcaccgccac

SEQ ID NO: 2917355 - RNA, 19 nt, Artificial Sequence
  Description of Artificial Sequence: Synthetic oligonucleotide
ccucaggguuuuccgcaau

SEQ ID NO: 2917356 - RNA, 19 nt, Artificial Sequence
  Description of Artificial Sequence: Synthetic oligonucleotide
gccgcugccugggcacgaa

SEQ ID NO: 2917357 - RNA, 19 nt, Artificial Sequence
  Description of Artificial Sequence: Synthetic oligonucleotide
ccgcagcgcagacccugga

SEQ ID NO: 2917358 - RNA, 19 nt, Artificial Sequence
  Description of Artificial Sequence: Synthetic oligonucleotide
cccuggagacugugccgcu

SEQ ID NO: 2917359 - RNA, 19 nt, Artificial Sequence
  Description of Artificial Sequence: Synthetic oligonucleotide
ccccgcgggcccgcaccgc

SEQ ID NO: 2917360 - RNA, 19 nt, Artificial Sequence
  Description of Artificial Sequence: Synthetic oligonucleotide
gcgcgccacguagcccgca

SEQ ID NO: 2917361 - RNA, 19 nt, Artificial Sequence
  Description of Artificial Sequence: Synthetic oligonucleotide
gcguaggcacgggcggcau

SEQ ID NO: 2917362 - RNA, 19 nt, Artificial Sequence
  Description of Artificial Sequence: Synthetic oligonucleotide
gcuccgcagcgcagacccu

SEQ ID NO: 2917363 - RNA, 19 nt, Artificial Sequence
  Description of Artificial Sequence: Synthetic oligonucleotide
gggcggcaugcaggagacu

SEQ ID NO: 2917364 - RNA, 19 nt, Artificial Sequence
  Description of Artificial Sequence: Synthetic oligonucleotide
cgcagacccuggagacugu

SEQ ID NO: 2917365 - RNA, 19 nt, Artificial Sequence
  Description of Artificial Sequence: Synthetic oligonucleotide
gcgggcccgcaccgccacu

SEQ ID NO: 2917366 - RNA, 19 nt, Artificial Sequence
  Description of Artificial Sequence: Synthetic oligonucleotide
cgagggcagacuggcgcuu

SEQ ID NO: 2917367 - RNA, 19 nt, Artificial Sequence
  Description of Artificial Sequence: Synthetic oligonucleotide
ccggccccgcgggcccgca

SEQ ID NO: 2917368 - RNA, 19 nt, Artificial Sequence
  Description of Artificial Sequence: Synthetic oligonucleotide
uuuacaguuacaaauaagg

SEQ ID NO: 2917369 - RNA, 19 nt, Artificial Sequence
  Description of Artificial Sequence: Synthetic oligonucleotide
aaaauugcugucuugcuac

SEQ ID NO: 2917370 - RNA, 19 nt, Artificial Sequence
  Description of Artificial Sequence: Synthetic oligonucleotide
aaagguaauuuacaguuac

SEQ ID NO: 2917371 - RNA, 19 nt, Artificial Sequence
  Description of Artificial Sequence: Synthetic oligonucleotide
uguacaaucacugaugagg

SEQ ID NO: 2917372 - RNA, 19 nt, Artificial Sequence
  Description of Artificial Sequence: Synthetic oligonucleotide
uaaauuucauuuauuacag

SEQ ID NO: 2917373 - RNA, 19 nt, Artificial Sequence
  Description of Artificial Sequence: Synthetic oligonucleotide
aauaguacacacaauaaag

SEQ ID NO: 2917374 - RNA, 19 nt, Artificial Sequence
  Description of Artificial Sequence: Synthetic oligonucleotide
uuaaaggaaauuuuguggc

SEQ ID NO: 2917375 - RNA, 19 nt, Artificial Sequence
  Description of Artificial Sequence: Synthetic oligonucleotide
aaguauucaaaauugcugu

SEQ ID NO: 2917376 - RNA, 19 nt, Artificial Sequence
  Description of Artificial Sequence: Synthetic oligonucleotide
aaauaccaacuuuacaggg

SEQ ID NO: 2917377 - RNA, 19 nt, Artificial Sequence
  Description of Artificial Sequence: Synthetic oligonucleotide
ugucuugcuacgaaaaugg

SEQ ID NO: 2917378 - RNA, 19 nt, Artificial Sequence
  Description of Artificial Sequence: Synthetic oligonucleotide
uuuaguagcaaauaccaac

SEQ ID NO: 2917379 - RNA, 19 nt, Artificial Sequence
  Description of Artificial Sequence: Synthetic oligonucleotide
uuuguuacaguauuggaga

SEQ ID NO: 2917380 - RNA, 19 nt, Artificial Sequence
  Description of Artificial Sequence: Synthetic oligonucleotide
aauaaagguaauuuacagu

SEQ ID NO: 2917381 - RNA, 19 nt, Artificial Sequence
  Description of Artificial Sequence: Synthetic oligonucleotide
aaaucuagggucgaauagc

SEQ ID NO: 2917382 - RNA, 19 nt, Artificial Sequence
  Description of Artificial Sequence: Synthetic oligonucleotide
aauuucauuuauuacagua

SEQ ID NO: 2917383 - RNA, 19 nt, Artificial Sequence
  Description of Artificial Sequence: Synthetic oligonucleotide
aauguaauuuaucuuggcu

SEQ ID NO: 2917384 - RNA, 19 nt, Artificial Sequence
  Description of Artificial Sequence: Synthetic oligonucleotide
cuaaauuucauuuauuaca

SEQ ID NO: 2917385 - RNA, 19 nt, Artificial Sequence
  Description of Artificial Sequence: Synthetic oligonucleotide
aauggaucucaguuaaagg

SEQ ID NO: 2917386 - RNA, 19 nt, Artificial Sequence
  Description of Artificial Sequence: Synthetic oligonucleotide
aggaauguaauuuaucuug

SEQ ID NO: 2917387 - RNA, 19 nt, Artificial Sequence
  Description of Artificial Sequence: Synthetic oligonucleotide
uaaggaauguaauuuaucu

SEQ ID NO: 2917388 - RNA, 19 nt, Artificial Sequence
  Description of Artificial Sequence: Synthetic oligonucleotide
auaaagguaauuuacaguu

SEQ ID NO: 2917389 - RNA, 19 nt, Artificial Sequence
  Description of Artificial Sequence: Synthetic oligonucleotide
ucaguuaaaggaaauuuug

SEQ ID NO: 2917390 - RNA, 19 nt, Artificial Sequence
  Description of Artificial Sequence: Synthetic oligonucleotide
uuacaaauaaggaauguaa

SEQ ID NO: 2917391 - RNA, 19 nt, Artificial Sequence
  Description of Artificial Sequence: Synthetic oligonucleotide
gcaaauaccaacuuuacag

SEQ ID NO: 2917392 - RNA, 19 nt, Artificial Sequence
  Description of Artificial Sequence: Synthetic oligonucleotide
aaaguauucaaaauugcug

SEQ ID NO: 2917393 - RNA, 19 nt, Artificial Sequence
  Description of Artificial Sequence: Synthetic oligonucleotide
acugaugagguaugcaugc

SEQ ID NO: 2917394 - RNA, 19 nt, Artificial Sequence
  Description of Artificial Sequence: Synthetic oligonucleotide
aaauaguacacacaauaaa

SEQ ID NO: 2917395 - RNA, 19 nt, Artificial Sequence
  Description of Artificial Sequence: Synthetic oligonucleotide
ugugcuucagaaaucuagg

SEQ ID NO: 2917396 - RNA, 19 nt, Artificial Sequence
  Description of Artificial Sequence: Synthetic oligonucleotide
auguaauuuaucuuggcug

SEQ ID NO: 2917397 - RNA, 19 nt, Artificial Sequence
  Description of Artificial Sequence: Synthetic oligonucleotide
aguuaaaggaaauuuugug

SEQ ID NO: 2917398 - RNA, 19 nt, Artificial Sequence
  Description of Artificial Sequence: Synthetic oligonucleotide
aauaccaacuuuacagggc

SEQ ID NO: 2917399 - RNA, 19 nt, Artificial Sequence
  Description of Artificial Sequence: Synthetic oligonucleotide
cuugcuacgaaaauggauc

SEQ ID NO: 2917400 - RNA, 19 nt, Artificial Sequence
  Description of Artificial Sequence: Synthetic oligonucleotide
aaauggaucucaguuaaag

SEQ ID NO: 2917401 - RNA, 19 nt, Artificial Sequence
  Description of Artificial Sequence: Synthetic oligonucleotide
uuaguagcaaauaccaacu

SEQ ID NO: 2917402 - RNA, 19 nt, Artificial Sequence
  Description of Artificial Sequence: Synthetic oligonucleotide
cacaauaaagguaauuuac

SEQ ID NO: 2917403 - RNA, 19 nt, Artificial Sequence
  Description of Artificial Sequence: Synthetic oligonucleotide
caauaaagguaauuuacag

SEQ ID NO: 2917404 - RNA, 19 nt, Artificial Sequence
  Description of Artificial Sequence: Synthetic oligonucleotide
aacuuuacagggcucuggg

SEQ ID NO: 2917405 - RNA, 19 nt, Artificial Sequence
  Description of Artificial Sequence: Synthetic oligonucleotide
uguaauuuaucuuggcugu

SEQ ID NO: 2917406 - RNA, 19 nt, Artificial Sequence
  Description of Artificial Sequence: Synthetic oligonucleotide
aauagccuuagucaaggca

SEQ ID NO: 2917407 - RNA, 19 nt, Artificial Sequence
  Description of Artificial Sequence: Synthetic oligonucleotide
uuucauuuauuacaguaaa

SEQ ID NO: 2917408 - RNA, 19 nt, Artificial Sequence
  Description of Artificial Sequence: Synthetic oligonucleotide
aaucuagggucgaauagcc

SEQ ID NO: 2917409 - RNA, 19 nt, Artificial Sequence
  Description of Artificial Sequence: Synthetic oligonucleotide
uauguacaaucacugauga

SEQ ID NO: 2917410 - RNA, 19 nt, Artificial Sequence
  Description of Artificial Sequence: Synthetic oligonucleotide
guucaaguggccuuuacag

SEQ ID NO: 2917411 - RNA, 19 nt, Artificial Sequence
  Description of Artificial Sequence: Synthetic oligonucleotide
uccuuuaguagcaaauacc

SEQ ID NO: 2917412 - RNA, 19 nt, Artificial Sequence
  Description of Artificial Sequence: Synthetic oligonucleotide
caaauaccaacuuuacagg

SEQ ID NO: 2917413 - RNA, 19 nt, Artificial Sequence
  Description of Artificial Sequence: Synthetic oligonucleotide
auggaucucaguuaaagga

SEQ ID NO: 2917414 - RNA, 19 nt, Artificial Sequence
  Description of Artificial Sequence: Synthetic oligonucleotide
gaaaucuagggucgaauag

SEQ ID NO: 2917415 - RNA, 19 nt, Artificial Sequence
  Description of Artificial Sequence: Synthetic oligonucleotide
uuucguuuccuaaauuuca

SEQ ID NO: 2917416 - RNA, 19 nt, Artificial Sequence
  Description of Artificial Sequence: Synthetic oligonucleotide
acuuccacaaucuuuaaau

SEQ ID NO: 2917417 - RNA, 19 nt, Artificial Sequence
  Description of Artificial Sequence: Synthetic oligonucleotide
uucaaaauugcugucuugc

SEQ ID NO: 2917418 - RNA, 19 nt, Artificial Sequence
  Description of Artificial Sequence: Synthetic oligonucleotide
aaggaaauuuuguggcuuc

SEQ ID NO: 2917419 - RNA, 19 nt, Artificial Sequence
  Description of Artificial Sequence: Synthetic oligonucleotide
auagccuuagucaaggcac

SEQ ID NO: 2917420 - RNA, 19 nt, Artificial Sequence
  Description of Artificial Sequence: Synthetic oligonucleotide
uaugcaugcacgcaaagua

SEQ ID NO: 2917421 - RNA, 19 nt, Artificial Sequence
  Description of Artificial Sequence: Synthetic oligonucleotide
gagaagaaagugaacacag

SEQ ID NO: 2917422 - RNA, 19 nt, Artificial Sequence
  Description of Artificial Sequence: Synthetic oligonucleotide
auaguacacacaauaaagg

SEQ ID NO: 2917423 - RNA, 19 nt, Artificial Sequence
  Description of Artificial Sequence: Synthetic oligonucleotide
guaauuuacaguuacaaau

SEQ ID NO: 2917424 - RNA, 19 nt, Artificial Sequence
  Description of Artificial Sequence: Synthetic oligonucleotide
uaguacacacaauaaaggu

SEQ ID NO: 2917425 - RNA, 19 nt, Artificial Sequence
  Description of Artificial Sequence: Synthetic oligonucleotide
uccacaaucuuuaaauaaa

SEQ ID NO: 2917426 - RNA, 19 nt, Artificial Sequence
  Description of Artificial Sequence: Synthetic oligonucleotide
guuuguuacaguauuggag

SEQ ID NO: 2917427 - RNA, 19 nt, Artificial Sequence
  Description of Artificial Sequence: Synthetic oligonucleotide
acagagaagaaagugaaca

SEQ ID NO: 2917428 - RNA, 19 nt, Artificial Sequence
  Description of Artificial Sequence: Synthetic oligonucleotide
gaaauuuuguggcuucccc

SEQ ID NO: 2917429 - RNA, 19 nt, Artificial Sequence
  Description of Artificial Sequence: Synthetic oligonucleotide
uccuaaauuucauuuauua

SEQ ID NO: 2917430 - RNA, 19 nt, Artificial Sequence
  Description of Artificial Sequence: Synthetic oligonucleotide
aagugaacacagcugucuc

SEQ ID NO: 2917431 - RNA, 19 nt, Artificial Sequence
  Description of Artificial Sequence: Synthetic oligonucleotide
aguauucaaaauugcuguc

SEQ ID NO: 2917432 - RNA, 19 nt, Artificial Sequence
  Description of Artificial Sequence: Synthetic oligonucleotide
uacaaauaaggaauguaau

SEQ ID NO: 2917433 - RNA, 19 nt, Artificial Sequence
  Description of Artificial Sequence: Synthetic oligonucleotide
cuucagaaaucuagggucg

SEQ ID NO: 2917434 - RNA, 19 nt, Artificial Sequence
  Description of Artificial Sequence: Synthetic oligonucleotide
uuuucguuuccuaaauuuc

SEQ ID NO: 2917435 - RNA, 19 nt, Artificial Sequence
  Description of Artificial Sequence: Synthetic oligonucleotide
gaaaauggaucucaguuaa

SEQ ID NO: 2917436 - RNA, 19 nt, Artificial Sequence
  Description of Artificial Sequence: Synthetic oligonucleotide
acaguuacaaauaaggaau

SEQ ID NO: 2917437 - RNA, 19 nt, Artificial Sequence
  Description of Artificial Sequence: Synthetic oligonucleotide
aauuuaucuuggcugugcu

SEQ ID NO: 2917438 - RNA, 19 nt, Artificial Sequence
  Description of Artificial Sequence: Synthetic oligonucleotide
uggauuacuuccacaaucu

SEQ ID NO: 2917439 - RNA, 19 nt, Artificial Sequence
  Description of Artificial Sequence: Synthetic oligonucleotide
gaugagguaugcaugcacg

SEQ ID NO: 2917440 - RNA, 19 nt, Artificial Sequence
  Description of Artificial Sequence: Synthetic oligonucleotide
aagguauguacaaucacug

SEQ ID NO: 2917441 - RNA, 19 nt, Artificial Sequence
  Description of Artificial Sequence: Synthetic oligonucleotide
acgaaaauggaucucaguu

SEQ ID NO: 2917442 - RNA, 19 nt, Artificial Sequence
  Description of Artificial Sequence: Synthetic oligonucleotide
caguauuggagauucuggg

SEQ ID NO: 2917443 - RNA, 19 nt, Artificial Sequence
  Description of Artificial Sequence: Synthetic oligonucleotide
augagguaugcaugcacgc

SEQ ID NO: 2917444 - RNA, 19 nt, Artificial Sequence
  Description of Artificial Sequence: Synthetic oligonucleotide
aacacagcugucucuagga

SEQ ID NO: 2917445 - RNA, 19 nt, Artificial Sequence
  Description of Artificial Sequence: Synthetic oligonucleotide
acaaauaaggaauguaauu

SEQ ID NO: 2917446 - RNA, 19 nt, Artificial Sequence
  Description of Artificial Sequence: Synthetic oligonucleotide
aaagugaacacagcugucu

SEQ ID NO: 2917447 - RNA, 19 nt, Artificial Sequence
  Description of Artificial Sequence: Synthetic oligonucleotide
aaaauaguacacacaauaa

SEQ ID NO: 2917448 - RNA, 19 nt, Artificial Sequence
  Description of Artificial Sequence: Synthetic oligonucleotide
cugugcuucagaaaucuag

SEQ ID NO: 2917449 - RNA, 19 nt, Artificial Sequence
  Description of Artificial Sequence: Synthetic oligonucleotide
aagaaagugaacacagcug

SEQ ID NO: 2917450 - RNA, 19 nt, Artificial Sequence
  Description of Artificial Sequence: Synthetic oligonucleotide
aaauugcugucuugcuacg

SEQ ID NO: 2917451 - RNA, 19 nt, Artificial Sequence
  Description of Artificial Sequence: Synthetic oligonucleotide
uucuggauuacuuccacaa

SEQ ID NO: 2917452 - RNA, 19 nt, Artificial Sequence
  Description of Artificial Sequence: Synthetic oligonucleotide
ugcuucagaaaucuagggu

SEQ ID NO: 2917453 - RNA, 19 nt, Artificial Sequence
  Description of Artificial Sequence: Synthetic oligonucleotide
aaucacugaugagguaugc

SEQ ID NO: 2917454 - RNA, 19 nt, Artificial Sequence
  Description of Artificial Sequence: Synthetic oligonucleotide
uuccacaaucuuuaaauaa

SEQ ID NO: 2917455 - RNA, 19 nt, Artificial Sequence
  Description of Artificial Sequence: Synthetic oligonucleotide
gaauguaauuuaucuuggc

SEQ ID NO: 2917456 - RNA, 19 nt, Artificial Sequence
  Description of Artificial Sequence: Synthetic oligonucleotide
cuggggauccuuuaguagc

SEQ ID NO: 2917457 - RNA, 19 nt, Artificial Sequence
  Description of Artificial Sequence: Synthetic oligonucleotide
aaggaauguaauuuaucuu

SEQ ID NO: 2917458 - RNA, 19 nt, Artificial Sequence
  Description of Artificial Sequence: Synthetic oligonucleotide
gaagaaagugaacacagcu

SEQ ID NO: 2917459 - RNA, 19 nt, Artificial Sequence
  Description of Artificial Sequence: Synthetic oligonucleotide
uguuuguuacaguauugga

SEQ ID NO: 2917460 - RNA, 19 nt, Artificial Sequence
  Description of Artificial Sequence: Synthetic oligonucleotide
auaccaacuuuacagggcu

SEQ ID NO: 2917461 - RNA, 19 nt, Artificial Sequence
  Description of Artificial Sequence: Synthetic oligonucleotide
aaauuucauuuauuacagu

SEQ ID NO: 2917462 - RNA, 19 nt, Artificial Sequence
  Description of Artificial Sequence: Synthetic oligonucleotide
aggcaagguauguacaauc

SEQ ID NO: 2917463 - RNA, 19 nt, Artificial Sequence
  Description of Artificial Sequence: Synthetic oligonucleotide
uggaucucaguuaaaggaa

SEQ ID NO: 2917464 - RNA, 19 nt, Artificial Sequence
  Description of Artificial Sequence: Synthetic oligonucleotide
guuacaguauuggagauuc

SEQ ID NO: 2917465 - RNA, 19 nt, Artificial Sequence
  Description of Artificial Sequence: Synthetic oligonucleotide
uuuacaguuggaccacugu

SEQ ID NO: 2917466 - RNA, 19 nt, Artificial Sequence
  Description of Artificial Sequence: Synthetic oligonucleotide
uacaguauuggagauucug

SEQ ID NO: 2917467 - RNA, 19 nt, Artificial Sequence
  Description of Artificial Sequence: Synthetic oligonucleotide
agucaaggcacagagaaga

SEQ ID NO: 2917468 - RNA, 19 nt, Artificial Sequence
  Description of Artificial Sequence: Synthetic oligonucleotide
ucuugcuacgaaaauggau

SEQ ID NO: 2917469 - RNA, 19 nt, Artificial Sequence
  Description of Artificial Sequence: Synthetic oligonucleotide
cuguuuguuacaguauugg

SEQ ID NO: 2917470 - RNA, 19 nt, Artificial Sequence
  Description of Artificial Sequence: Synthetic oligonucleotide
uaaaggaaauuuuguggcu

SEQ ID NO: 2917471 - RNA, 19 nt, Artificial Sequence
  Description of Artificial Sequence: Synthetic oligonucleotide
aaguucaaguggccuuuac

SEQ ID NO: 2917472 - RNA, 19 nt, Artificial Sequence
  Description of Artificial Sequence: Synthetic oligonucleotide
ucaaguggccuuuacaguu

SEQ ID NO: 2917473 - RNA, 19 nt, Artificial Sequence
  Description of Artificial Sequence: Synthetic oligonucleotide
auaaggaauguaauuuauc

SEQ ID NO: 2917474 - RNA, 19 nt, Artificial Sequence
  Description of Artificial Sequence: Synthetic oligonucleotide
gauucuggggauccuuuag

SEQ ID NO: 2917475 - RNA, 19 nt, Artificial Sequence
  Description of Artificial Sequence: Synthetic oligonucleotide
uguaggcaagguauguaca

SEQ ID NO: 2917476 - RNA, 19 nt, Artificial Sequence
  Description of Artificial Sequence: Synthetic oligonucleotide
uaauuuaucuuggcugugc

SEQ ID NO: 2917477 - RNA, 19 nt, Artificial Sequence
  Description of Artificial Sequence: Synthetic oligonucleotide
cuggauuacuuccacaauc

SEQ ID NO: 2917478 - RNA, 19 nt, Artificial Sequence
  Description of Artificial Sequence: Synthetic oligonucleotide
uauucaaaauugcugucuu

SEQ ID NO: 2917479 - RNA, 19 nt, Artificial Sequence
  Description of Artificial Sequence: Synthetic oligonucleotide
ucacugaugagguaugcau

SEQ ID NO: 2917480 - RNA, 19 nt, Artificial Sequence
  Description of Artificial Sequence: Synthetic oligonucleotide
guauuggagauucugggga

SEQ ID NO: 2917481 - RNA, 19 nt, Artificial Sequence
  Description of Artificial Sequence: Synthetic oligonucleotide
acaguauuggagauucugg

SEQ ID NO: 2917482 - RNA, 19 nt, Artificial Sequence
  Description of Artificial Sequence: Synthetic oligonucleotide
ucuggggauccuuuaguag

SEQ ID NO: 2917483 - RNA, 19 nt, Artificial Sequence
  Description of Artificial Sequence: Synthetic oligonucleotide
ucuagggucgaauagccuu

SEQ ID NO: 2917484 - RNA, 19 nt, Artificial Sequence
  Description of Artificial Sequence: Synthetic oligonucleotide
aaguggccuuuacaguugg

SEQ ID NO: 2917485 - RNA, 19 nt, Artificial Sequence
  Description of Artificial Sequence: Synthetic oligonucleotide
ucgaauagccuuagucaag

SEQ ID NO: 2917486 - RNA, 19 nt, Artificial Sequence
  Description of Artificial Sequence: Synthetic oligonucleotide
acaauaaagguaauuuaca

SEQ ID NO: 2917487 - RNA, 19 nt, Artificial Sequence
  Description of Artificial Sequence: Synthetic oligonucleotide
auuacuuccacaaucuuua

SEQ ID NO: 2917488 - RNA, 19 nt, Artificial Sequence
  Description of Artificial Sequence: Synthetic oligonucleotide
guauguacaaucacugaug

SEQ ID NO: 2917489 - RNA, 19 nt, Artificial Sequence
  Description of Artificial Sequence: Synthetic oligonucleotide
ucucaguuaaaggaaauuu

SEQ ID NO: 2917490 - RNA, 19 nt, Artificial Sequence
  Description of Artificial Sequence: Synthetic oligonucleotide
ugaugagguaugcaugcac

SEQ ID NO: 2917491 - RNA, 19 nt, Artificial Sequence
  Description of Artificial Sequence: Synthetic oligonucleotide
ucaaaauugcugucuugcu

SEQ ID NO: 2917492 - RNA, 19 nt, Artificial Sequence
  Description of Artificial Sequence: Synthetic oligonucleotide
agaagaaagugaacacagc

SEQ ID NO: 2917493 - RNA, 19 nt, Artificial Sequence
  Description of Artificial Sequence: Synthetic oligonucleotide
uggccuuuacaguuggacc

SEQ ID NO: 2917494 - RNA, 19 nt, Artificial Sequence
  Description of Artificial Sequence: Synthetic oligonucleotide
agagaagaaagugaacaca

SEQ ID NO: 2917495 - RNA, 19 nt, Artificial Sequence
  Description of Artificial Sequence: Synthetic oligonucleotide
guacacacaauaaagguaa

SEQ ID NO: 2917496 - RNA, 19 nt, Artificial Sequence
  Description of Artificial Sequence: Synthetic oligonucleotide
cagagaagaaagugaacac

SEQ ID NO: 2917497 - RNA, 19 nt, Artificial Sequence
  Description of Artificial Sequence: Synthetic oligonucleotide
aguagcaaauaccaacuuu

SEQ ID NO: 2917498 - RNA, 19 nt, Artificial Sequence
  Description of Artificial Sequence: Synthetic oligonucleotide
acaaucacugaugagguau

SEQ ID NO: 2917499 - RNA, 19 nt, Artificial Sequence
  Description of Artificial Sequence: Synthetic oligonucleotide
agcaaauaccaacuuuaca

SEQ ID NO: 2917500 - RNA, 19 nt, Artificial Sequence
  Description of Artificial Sequence: Synthetic oligonucleotide
ucuaggaguguaggcaagg

SEQ ID NO: 2917501 - RNA, 19 nt, Artificial Sequence
  Description of Artificial Sequence: Synthetic oligonucleotide
gcuucagaaaucuaggguc

SEQ ID NO: 2917502 - RNA, 19 nt, Artificial Sequence
  Description of Artificial Sequence: Synthetic oligonucleotide
acacaauaaagguaauuua

SEQ ID NO: 2917503 - RNA, 19 nt, Artificial Sequence
  Description of Artificial Sequence: Synthetic oligonucleotide
uuacaguuggaccacuguu

SEQ ID NO: 2917504 - RNA, 19 nt, Artificial Sequence
  Description of Artificial Sequence: Synthetic oligonucleotide
aguucaaguggccuuuaca

SEQ ID NO: 2917505 - RNA, 19 nt, Artificial Sequence
  Description of Artificial Sequence: Synthetic oligonucleotide
acgcaaaguauucaaaauu

SEQ ID NO: 2917506 - RNA, 19 nt, Artificial Sequence
  Description of Artificial Sequence: Synthetic oligonucleotide
uagcaaauaccaacuuuac

SEQ ID NO: 2917507 - RNA, 19 nt, Artificial Sequence
  Description of Artificial Sequence: Synthetic oligonucleotide
gugcuucagaaaucuaggg

SEQ ID NO: 2917508 - RNA, 19 nt, Artificial Sequence
  Description of Artificial Sequence: Synthetic oligonucleotide
uaaagguaauuuacaguua

SEQ ID NO: 2917509 - RNA, 19 nt, Artificial Sequence
  Description of Artificial Sequence: Synthetic oligonucleotide
uacaguuggaccacuguuu

SEQ ID NO: 2917510 - RNA, 19 nt, Artificial Sequence
  Description of Artificial Sequence: Synthetic oligonucleotide
auucaaaauugcugucuug

SEQ ID NO: 2917511 - RNA, 19 nt, Artificial Sequence
  Description of Artificial Sequence: Synthetic oligonucleotide
auuucauuuauuacaguaa

SEQ ID NO: 2917512 - RNA, 19 nt, Artificial Sequence
  Description of Artificial Sequence: Synthetic oligonucleotide
agaaaucuagggucgaaua

SEQ ID NO: 2917513 - RNA, 19 nt, Artificial Sequence
  Description of Artificial Sequence: Synthetic oligonucleotide
uccacuucuggauuacuuc

SEQ ID NO: 2917514 - RNA, 19 nt, Artificial Sequence
  Description of Artificial Sequence: Synthetic oligonucleotide
ggaauguaauuuaucuugg

SEQ ID NO: 2917515 - RNA, 19 nt, Artificial Sequence
  Description of Artificial Sequence: Synthetic oligonucleotide
uucaaguggccuuuacagu

SEQ ID NO: 2917516 - RNA, 19 nt, Artificial Sequence
  Description of Artificial Sequence: Synthetic oligonucleotide
uucguuuccuaaauuucau

SEQ ID NO: 2917517 - RNA, 19 nt, Artificial Sequence
  Description of Artificial Sequence: Synthetic oligonucleotide
aggaaauuuuguggcuucc

SEQ ID NO: 2917518 - RNA, 19 nt, Artificial Sequence
  Description of Artificial Sequence: Synthetic oligonucleotide
ugucucuaggaguguaggc

SEQ ID NO: 2917519 - RNA, 19 nt, Artificial Sequence
  Description of Artificial Sequence: Synthetic oligonucleotide
ucucuaggaguguaggcaa

SEQ ID NO: 2917520 - RNA, 19 nt, Artificial Sequence
  Description of Artificial Sequence: Synthetic oligonucleotide
uugcuacgaaaauggaucu

SEQ ID NO: 2917521 - RNA, 19 nt, Artificial Sequence
  Description of Artificial Sequence: Synthetic oligonucleotide
aaaaguucaaguggccuuu

SEQ ID NO: 2917522 - RNA, 19 nt, Artificial Sequence
  Description of Artificial Sequence: Synthetic oligonucleotide
guguaggcaagguauguac

SEQ ID NO: 2917523 - RNA, 19 nt, Artificial Sequence
  Description of Artificial Sequence: Synthetic oligonucleotide
uagucaaggcacagagaag

SEQ ID NO: 2917524 - RNA, 19 nt, Artificial Sequence
  Description of Artificial Sequence: Synthetic oligonucleotide
ggucgaauagccuuaguca

SEQ ID NO: 2917525 - RNA, 19 nt, Artificial Sequence
  Description of Artificial Sequence: Synthetic oligonucleotide
guagcaaauaccaacuuua

SEQ ID NO: 2917526 - RNA, 19 nt, Artificial Sequence
  Description of Artificial Sequence: Synthetic oligonucleotide
uacgaaaauggaucucagu

SEQ ID NO: 2917527 - RNA, 19 nt, Artificial Sequence
  Description of Artificial Sequence: Synthetic oligonucleotide
uggggauccuuuaguagca

SEQ ID NO: 2917528 - RNA, 19 nt, Artificial Sequence
  Description of Artificial Sequence: Synthetic oligonucleotide
cacugaugagguaugcaug

SEQ ID NO: 2917529 - RNA, 19 nt, Artificial Sequence
  Description of Artificial Sequence: Synthetic oligonucleotide
auacucuccacuucuggau

SEQ ID NO: 2917530 - RNA, 19 nt, Artificial Sequence
  Description of Artificial Sequence: Synthetic oligonucleotide
cuacgaaaauggaucucag

SEQ ID NO: 2917531 - RNA, 19 nt, Artificial Sequence
  Description of Artificial Sequence: Synthetic oligonucleotide
aguuacaaauaaggaaugu

SEQ ID NO: 2917532 - RNA, 19 nt, Artificial Sequence
  Description of Artificial Sequence: Synthetic oligonucleotide
uuggagauucuggggaucc

SEQ ID NO: 2917533 - RNA, 19 nt, Artificial Sequence
  Description of Artificial Sequence: Synthetic oligonucleotide
ccuuagucaaggcacagag

SEQ ID NO: 2917534 - RNA, 19 nt, Artificial Sequence
  Description of Artificial Sequence: Synthetic oligonucleotide
ccuuuaguagcaaauacca

SEQ ID NO: 2917535 - RNA, 19 nt, Artificial Sequence
  Description of Artificial Sequence: Synthetic oligonucleotide
uacuuccacaaucuuuaaa

SEQ ID NO: 2917536 - RNA, 19 nt, Artificial Sequence
  Description of Artificial Sequence: Synthetic oligonucleotide
gucgaauagccuuagucaa

SEQ ID NO: 2917537 - RNA, 19 nt, Artificial Sequence
  Description of Artificial Sequence: Synthetic oligonucleotide
aggaguguaggcaagguau

SEQ ID NO: 2917538 - RNA, 19 nt, Artificial Sequence
  Description of Artificial Sequence: Synthetic oligonucleotide
auucuggggauccuuuagu

SEQ ID NO: 2917539 - RNA, 19 nt, Artificial Sequence
  Description of Artificial Sequence: Synthetic oligonucleotide
aguacacacaauaaaggua

SEQ ID NO: 2917540 - RNA, 19 nt, Artificial Sequence
  Description of Artificial Sequence: Synthetic oligonucleotide
uauuggagauucuggggau

SEQ ID NO: 2917541 - RNA, 19 nt, Artificial Sequence
  Description of Artificial Sequence: Synthetic oligonucleotide
auguacaaucacugaugag

SEQ ID NO: 2917542 - RNA, 19 nt, Artificial Sequence
  Description of Artificial Sequence: Synthetic oligonucleotide
auugcugucuugcuacgaa

SEQ ID NO: 2917543 - RNA, 19 nt, Artificial Sequence
  Description of Artificial Sequence: Synthetic oligonucleotide
cugucuugcuacgaaaaug

SEQ ID NO: 2917544 - RNA, 19 nt, Artificial Sequence
  Description of Artificial Sequence: Synthetic oligonucleotide
ugcacgcaaaguauucaaa

SEQ ID NO: 2917545 - RNA, 19 nt, Artificial Sequence
  Description of Artificial Sequence: Synthetic oligonucleotide
uuggaccacuguuuguuac

SEQ ID NO: 2917546 - RNA, 19 nt, Artificial Sequence
  Description of Artificial Sequence: Synthetic oligonucleotide
cuuuacaguuggaccacug

SEQ ID NO: 2917547 - RNA, 19 nt, Artificial Sequence
  Description of Artificial Sequence: Synthetic oligonucleotide
ucuggauuacuuccacaau

SEQ ID NO: 2917548 - RNA, 19 nt, Artificial Sequence
  Description of Artificial Sequence: Synthetic oligonucleotide
agguauguacaaucacuga

SEQ ID NO: 2917549 - RNA, 19 nt, Artificial Sequence
  Description of Artificial Sequence: Synthetic oligonucleotide
guuuccuaaauuucauuua

SEQ ID NO: 2917550 - RNA, 19 nt, Artificial Sequence
  Description of Artificial Sequence: Synthetic oligonucleotide
uggaccacuguuuguuaca

SEQ ID NO: 2917551 - RNA, 19 nt, Artificial Sequence
  Description of Artificial Sequence: Synthetic oligonucleotide
guuacaaauaaggaaugua

SEQ ID NO: 2917552 - RNA, 19 nt, Artificial Sequence
  Description of Artificial Sequence: Synthetic oligonucleotide
caaucacugaugagguaug

SEQ ID NO: 2917553 - RNA, 19 nt, Artificial Sequence
  Description of Artificial Sequence: Synthetic oligonucleotide
caagguauguacaaucacu

SEQ ID NO: 2917554 - RNA, 19 nt, Artificial Sequence
  Description of Artificial Sequence: Synthetic oligonucleotide
gaauagccuuagucaaggc

SEQ ID NO: 2917555 - RNA, 19 nt, Artificial Sequence
  Description of Artificial Sequence: Synthetic oligonucleotide
ugagguaugcaugcacgca

SEQ ID NO: 2917556 - RNA, 19 nt, Artificial Sequence
  Description of Artificial Sequence: Synthetic oligonucleotide
ugaacacagcugucucuag

SEQ ID NO: 2917557 - RNA, 19 nt, Artificial Sequence
  Description of Artificial Sequence: Synthetic oligonucleotide
acacagcugucucuaggag

SEQ ID NO: 2917558 - RNA, 19 nt, Artificial Sequence
  Description of Artificial Sequence: Synthetic oligonucleotide
gagguaugcaugcacgcaa

SEQ ID NO: 2917559 - RNA, 19 nt, Artificial Sequence
  Description of Artificial Sequence: Synthetic oligonucleotide
uuguuacaguauuggagau

SEQ ID NO: 2917560 - RNA, 19 nt, Artificial Sequence
  Description of Artificial Sequence: Synthetic oligonucleotide
ugcaugcacgcaaaguauu

SEQ ID NO: 2917561 - RNA, 19 nt, Artificial Sequence
  Description of Artificial Sequence: Synthetic oligonucleotide
cauacucuccacuucugga

SEQ ID NO: 2917562 - RNA, 19 nt, Artificial Sequence
  Description of Artificial Sequence: Synthetic oligonucleotide
caaauaaggaauguaauuu

SEQ ID NO: 2917563 - RNA, 19 nt, Artificial Sequence
  Description of Artificial Sequence: Synthetic oligonucleotide
uagccuuagucaaggcaca

SEQ ID NO: 2917564 - RNA, 19 nt, Artificial Sequence
  Description of Artificial Sequence: Synthetic oligonucleotide
acuguuuguuacaguauug

SEQ ID NO: 2917565 - RNA, 19 nt, Artificial Sequence
  Description of Artificial Sequence: Synthetic oligonucleotide
uucuggggauccuuuagua

SEQ ID NO: 2917566 - RNA, 19 nt, Artificial Sequence
  Description of Artificial Sequence: Synthetic oligonucleotide
caacuuuacagggcucugg

SEQ ID NO: 2917567 - RNA, 19 nt, Artificial Sequence
  Description of Artificial Sequence: Synthetic oligonucleotide
cacagagaagaaagugaac

SEQ ID NO: 2917568 - RNA, 19 nt, Artificial Sequence
  Description of Artificial Sequence: Synthetic oligonucleotide
uaggaguguaggcaaggua

SEQ ID NO: 2917569 - RNA, 19 nt, Artificial Sequence
  Description of Artificial Sequence: Synthetic oligonucleotide
aauugcugucuugcuacga

SEQ ID NO: 2917570 - RNA, 19 nt, Artificial Sequence
  Description of Artificial Sequence: Synthetic oligonucleotide
cugucucuaggaguguagg

SEQ ID NO: 2917571 - RNA, 19 nt, Artificial Sequence
  Description of Artificial Sequence: Synthetic oligonucleotide
auuggagauucuggggauc

SEQ ID NO: 2917572 - RNA, 19 nt, Artificial Sequence
  Description of Artificial Sequence: Synthetic oligonucleotide
caaguggccuuuacaguug

SEQ ID NO: 2917573 - RNA, 19 nt, Artificial Sequence
  Description of Artificial Sequence: Synthetic oligonucleotide
accaacuuuacagggcucu

SEQ ID NO: 2917574 - RNA, 19 nt, Artificial Sequence
  Description of Artificial Sequence: Synthetic oligonucleotide
gucucuaggaguguaggca

SEQ ID NO: 2917575 - RNA, 19 nt, Artificial Sequence
  Description of Artificial Sequence: Synthetic oligonucleotide
guaggcaagguauguacaa

SEQ ID NO: 2917576 - RNA, 19 nt, Artificial Sequence
  Description of Artificial Sequence: Synthetic oligonucleotide
gcaaaguauucaaaauugc

SEQ ID NO: 2917577 - RNA, 19 nt, Artificial Sequence
  Description of Artificial Sequence: Synthetic oligonucleotide
ucaaggcacagagaagaaa

SEQ ID NO: 2917578 - RNA, 19 nt, Artificial Sequence
  Description of Artificial Sequence: Synthetic oligonucleotide
uaguagcaaauaccaacuu

SEQ ID NO: 2917579 - RNA, 19 nt, Artificial Sequence
  Description of Artificial Sequence: Synthetic oligonucleotide
aguuggaccacuguuuguu

SEQ ID NO: 2917580 - RNA, 19 nt, Artificial Sequence
  Description of Artificial Sequence: Synthetic oligonucleotide
ggccuuuacaguuggacca

SEQ ID NO: 2917581 - RNA, 19 nt, Artificial Sequence
  Description of Artificial Sequence: Synthetic oligonucleotide
aaggcacagagaagaaagu

SEQ ID NO: 2917582 - RNA, 19 nt, Artificial Sequence
  Description of Artificial Sequence: Synthetic oligonucleotide
ccacuucuggauuacuucc

SEQ ID NO: 2917583 - RNA, 19 nt, Artificial Sequence
  Description of Artificial Sequence: Synthetic oligonucleotide
gauccuuuaguagcaaaua

SEQ ID NO: 2917584 - RNA, 19 nt, Artificial Sequence
  Description of Artificial Sequence: Synthetic oligonucleotide
gggucgaauagccuuaguc

SEQ ID NO: 2917585 - RNA, 19 nt, Artificial Sequence
  Description of Artificial Sequence: Synthetic oligonucleotide
augcacgcaaaguauucaa

SEQ ID NO: 2917586 - RNA, 19 nt, Artificial Sequence
  Description of Artificial Sequence: Synthetic oligonucleotide
cuuuaguagcaaauaccaa

SEQ ID NO: 2917587 - RNA, 19 nt, Artificial Sequence
  Description of Artificial Sequence: Synthetic oligonucleotide
caaaauugcugucuugcua

SEQ ID NO: 2917588 - RNA, 19 nt, Artificial Sequence
  Description of Artificial Sequence: Synthetic oligonucleotide
uacucuccacuucuggauu

SEQ ID NO: 2917589 - RNA, 19 nt, Artificial Sequence
  Description of Artificial Sequence: Synthetic oligonucleotide
uucagaaaucuagggucga

SEQ ID NO: 2917590 - RNA, 19 nt, Artificial Sequence
  Description of Artificial Sequence: Synthetic oligonucleotide
guaauuuaucuuggcugug

SEQ ID NO: 2917591 - RNA, 19 nt, Artificial Sequence
  Description of Artificial Sequence: Synthetic oligonucleotide
auuuaucuuggcugugcuu

SEQ ID NO: 2917592 - RNA, 19 nt, Artificial Sequence
  Description of Artificial Sequence: Synthetic oligonucleotide
cucuaggaguguaggcaag

SEQ ID NO: 2917593 - RNA, 19 nt, Artificial Sequence
  Description of Artificial Sequence: Synthetic oligonucleotide
guggccuuuacaguuggac

SEQ ID NO: 2917594 - RNA, 19 nt, Artificial Sequence
  Description of Artificial Sequence: Synthetic oligonucleotide
guauucaaaauugcugucu

SEQ ID NO: 2917595 - RNA, 19 nt, Artificial Sequence
  Description of Artificial Sequence: Synthetic oligonucleotide
gguauguacaaucacugau

SEQ ID NO: 2917596 - RNA, 19 nt, Artificial Sequence
  Description of Artificial Sequence: Synthetic oligonucleotide
uuacaguauuggagauucu

SEQ ID NO: 2917597 - RNA, 19 nt, Artificial Sequence
  Description of Artificial Sequence: Synthetic oligonucleotide
uugcugucuugcuacgaaa

SEQ ID NO: 2917598 - RNA, 19 nt, Artificial Sequence
  Description of Artificial Sequence: Synthetic oligonucleotide
ucguuuccuaaauuucauu

SEQ ID NO: 2917599 - RNA, 19 nt, Artificial Sequence
  Description of Artificial Sequence: Synthetic oligonucleotide
gcuacgaaaauggaucuca

SEQ ID NO: 2917600 - RNA, 19 nt, Artificial Sequence
  Description of Artificial Sequence: Synthetic oligonucleotide
gauuacuuccacaaucuuu

SEQ ID NO: 2917601 - RNA, 19 nt, Artificial Sequence
  Description of Artificial Sequence: Synthetic oligonucleotide
uguuacaguauuggagauu

SEQ ID NO: 2917602 - RNA, 19 nt, Artificial Sequence
  Description of Artificial Sequence: Synthetic oligonucleotide
gaaagugaacacagcuguc

SEQ ID NO: 2917603 - RNA, 19 nt, Artificial Sequence
  Description of Artificial Sequence: Synthetic oligonucleotide
cuuagucaaggcacagaga

SEQ ID NO: 2917604 - RNA, 19 nt, Artificial Sequence
  Description of Artificial Sequence: Synthetic oligonucleotide
uuacuuccacaaucuuuaa

SEQ ID NO: 2917605 - RNA, 19 nt, Artificial Sequence
  Description of Artificial Sequence: Synthetic oligonucleotide
cacacaauaaagguaauuu

SEQ ID NO: 2917606 - RNA, 19 nt, Artificial Sequence
  Description of Artificial Sequence: Synthetic oligonucleotide
ucagaaaucuagggucgaa

SEQ ID NO: 2917607 - RNA, 19 nt, Artificial Sequence
  Description of Artificial Sequence: Synthetic oligonucleotide
aucacugaugagguaugca

SEQ ID NO: 2917608 - RNA, 19 nt, Artificial Sequence
  Description of Artificial Sequence: Synthetic oligonucleotide
uaucuuggcugugcuucag

SEQ ID NO: 2917609 - RNA, 19 nt, Artificial Sequence
  Description of Artificial Sequence: Synthetic oligonucleotide
gcaagguauguacaaucac

SEQ ID NO: 2917610 - RNA, 19 nt, Artificial Sequence
  Description of Artificial Sequence: Synthetic oligonucleotide
ggcacagagaagaaaguga

SEQ ID NO: 2917611 - RNA, 19 nt, Artificial Sequence
  Description of Artificial Sequence: Synthetic oligonucleotide
cucaguuaaaggaaauuuu

SEQ ID NO: 2917612 - RNA, 19 nt, Artificial Sequence
  Description of Artificial Sequence: Synthetic oligonucleotide
ggaaauuuuguggcuuccc

SEQ ID NO: 2917613 - RNA, 19 nt, Artificial Sequence
  Description of Artificial Sequence: Synthetic oligonucleotide
gguaugcaugcacgcaaag

SEQ ID NO: 2917614 - RNA, 19 nt, Artificial Sequence
  Description of Artificial Sequence: Synthetic oligonucleotide
aaaauggaucucaguuaaa

SEQ ID NO: 2917615 - RNA, 19 nt, Artificial Sequence
  Description of Artificial Sequence: Synthetic oligonucleotide
aucucaguuaaaggaaauu

SEQ ID NO: 2917616 - RNA, 19 nt, Artificial Sequence
  Description of Artificial Sequence: Synthetic oligonucleotide
uacaaucacugaugaggua

SEQ ID NO: 2917617 - RNA, 19 nt, Artificial Sequence
  Description of Artificial Sequence: Synthetic oligonucleotide
guacaaucacugaugaggu

SEQ ID NO: 2917618 - RNA, 19 nt, Artificial Sequence
  Description of Artificial Sequence: Synthetic oligonucleotide
acacacaauaaagguaauu

SEQ ID NO: 2917619 - RNA, 19 nt, Artificial Sequence
  Description of Artificial Sequence: Synthetic oligonucleotide
uaggcaagguauguacaau

SEQ ID NO: 2917620 - RNA, 19 nt, Artificial Sequence
  Description of Artificial Sequence: Synthetic oligonucleotide
agauucuggggauccuuua

SEQ ID NO: 2917621 - RNA, 19 nt, Artificial Sequence
  Description of Artificial Sequence: Synthetic oligonucleotide
uagggucgaauagccuuag

SEQ ID NO: 2917622 - RNA, 19 nt, Artificial Sequence
  Description of Artificial Sequence: Synthetic oligonucleotide
ccauacucuccacuucugg

SEQ ID NO: 2917623 - RNA, 19 nt, Artificial Sequence
  Description of Artificial Sequence: Synthetic oligonucleotide
gcacgcaaaguauucaaaa

SEQ ID NO: 2917624 - RNA, 19 nt, Artificial Sequence
  Description of Artificial Sequence: Synthetic oligonucleotide
cgaauagccuuagucaagg

SEQ ID NO: 2917625 - RNA, 19 nt, Artificial Sequence
  Description of Artificial Sequence: Synthetic oligonucleotide
uaccaacuuuacagggcuc

SEQ ID NO: 2917626 - RNA, 19 nt, Artificial Sequence
  Description of Artificial Sequence: Synthetic oligonucleotide
aguguaggcaagguaugua

SEQ ID NO: 2917627 - RNA, 19 nt, Artificial Sequence
  Description of Artificial Sequence: Synthetic oligonucleotide
ugcuacgaaaauggaucuc

SEQ ID NO: 2917628 - RNA, 19 nt, Artificial Sequence
  Description of Artificial Sequence: Synthetic oligonucleotide
acucuccacuucuggauua

SEQ ID NO: 2917629 - RNA, 19 nt, Artificial Sequence
  Description of Artificial Sequence: Synthetic oligonucleotide
ggaccacuguuuguuacag

SEQ ID NO: 2917630 - RNA, 19 nt, Artificial Sequence
  Description of Artificial Sequence: Synthetic oligonucleotide
augcaugcacgcaaaguau

SEQ ID NO: 2917631 - RNA, 19 nt, Artificial Sequence
  Description of Artificial Sequence: Synthetic oligonucleotide
caugcacgcaaaguauuca

SEQ ID NO: 2917632 - RNA, 19 nt, Artificial Sequence
  Description of Artificial Sequence: Synthetic oligonucleotide
cuagggucgaauagccuua

SEQ ID NO: 2917633 - RNA, 19 nt, Artificial Sequence
  Description of Artificial Sequence: Synthetic oligonucleotide
ggcaagguauguacaauca

SEQ ID NO: 2917634 - RNA, 19 nt, Artificial Sequence
  Description of Artificial Sequence: Synthetic oligonucleotide
aaaguucaaguggccuuua

SEQ ID NO: 2917635 - RNA, 19 nt, Artificial Sequence
  Description of Artificial Sequence: Synthetic oligonucleotide
agccuuagucaaggcacag

SEQ ID NO: 2917636 - RNA, 19 nt, Artificial Sequence
  Description of Artificial Sequence: Synthetic oligonucleotide
cacgcaaaguauucaaaau

SEQ ID NO: 2917637 - RNA, 19 nt, Artificial Sequence
  Description of Artificial Sequence: Synthetic oligonucleotide
gugaacacagcugucucua

SEQ ID NO: 2917638 - RNA, 19 nt, Artificial Sequence
  Description of Artificial Sequence: Synthetic oligonucleotide
ggaguguaggcaagguaug

SEQ ID NO: 2917639 - RNA, 19 nt, Artificial Sequence
  Description of Artificial Sequence: Synthetic oligonucleotide
ccacaaucuuuaaauaaaa

SEQ ID NO: 2917640 - RNA, 19 nt, Artificial Sequence
  Description of Artificial Sequence: Synthetic oligonucleotide
ucuccacuucuggauuacu

SEQ ID NO: 2917641 - RNA, 19 nt, Artificial Sequence
  Description of Artificial Sequence: Synthetic oligonucleotide
guaugcaugcacgcaaagu

SEQ ID NO: 2917642 - RNA, 19 nt, Artificial Sequence
  Description of Artificial Sequence: Synthetic oligonucleotide
gaucucaguuaaaggaaau

SEQ ID NO: 2917643 - RNA, 19 nt, Artificial Sequence
  Description of Artificial Sequence: Synthetic oligonucleotide
ggaucucaguuaaaggaaa

SEQ ID NO: 2917644 - RNA, 19 nt, Artificial Sequence
  Description of Artificial Sequence: Synthetic oligonucleotide
cacuguuuguuacaguauu

SEQ ID NO: 2917645 - RNA, 19 nt, Artificial Sequence
  Description of Artificial Sequence: Synthetic oligonucleotide
cucuccacuucuggauuac

SEQ ID NO: 2917646 - RNA, 19 nt, Artificial Sequence
  Description of Artificial Sequence: Synthetic oligonucleotide
uggagauucuggggauccu

SEQ ID NO: 2917647 - RNA, 19 nt, Artificial Sequence
  Description of Artificial Sequence: Synthetic oligonucleotide
gcugucucuaggaguguag

SEQ ID NO: 2917648 - RNA, 19 nt, Artificial Sequence
  Description of Artificial Sequence: Synthetic oligonucleotide
aucuagggucgaauagccu

SEQ ID NO: 2917649 - RNA, 19 nt, Artificial Sequence
  Description of Artificial Sequence: Synthetic oligonucleotide
gaguguaggcaagguaugu

SEQ ID NO: 2917650 - RNA, 19 nt, Artificial Sequence
  Description of Artificial Sequence: Synthetic oligonucleotide
gucuugcuacgaaaaugga

SEQ ID NO: 2917651 - RNA, 19 nt, Artificial Sequence
  Description of Artificial Sequence: Synthetic oligonucleotide
agguaugcaugcacgcaaa

SEQ ID NO: 2917652 - RNA, 19 nt, Artificial Sequence
  Description of Artificial Sequence: Synthetic oligonucleotide
agggucgaauagccuuagu

SEQ ID NO: 2917653 - RNA, 19 nt, Artificial Sequence
  Description of Artificial Sequence: Synthetic oligonucleotide
cgaaaauggaucucaguua

SEQ ID NO: 2917654 - RNA, 19 nt, Artificial Sequence
  Description of Artificial Sequence: Synthetic oligonucleotide
gcaugcacgcaaaguauuc

SEQ ID NO: 2917655 - RNA, 19 nt, Artificial Sequence
  Description of Artificial Sequence: Synthetic oligonucleotide
cugaugagguaugcaugca

SEQ ID NO: 2917656 - RNA, 19 nt, Artificial Sequence
  Description of Artificial Sequence: Synthetic oligonucleotide
agcugucucuaggagugua

SEQ ID NO: 2917657 - RNA, 19 nt, Artificial Sequence
  Description of Artificial Sequence: Synthetic oligonucleotide
ggauccuuuaguagcaaau

SEQ ID NO: 2917658 - RNA, 19 nt, Artificial Sequence
  Description of Artificial Sequence: Synthetic oligonucleotide
gucaaggcacagagaagaa

SEQ ID NO: 2917659 - RNA, 19 nt, Artificial Sequence
  Description of Artificial Sequence: Synthetic oligonucleotide
gggauccuuuaguagcaaa

SEQ ID NO: 2917660 - RNA, 19 nt, Artificial Sequence
  Description of Artificial Sequence: Synthetic oligonucleotide
gaccacuguuuguuacagu

SEQ ID NO: 2917661 - RNA, 19 nt, Artificial Sequence
  Description of Artificial Sequence: Synthetic oligonucleotide
cuccacuucuggauuacuu

SEQ ID NO: 2917662 - RNA, 19 nt, Artificial Sequence
  Description of Artificial Sequence: Synthetic oligonucleotide
gagauucuggggauccuuu

SEQ ID NO: 2917663 - RNA, 19 nt, Artificial Sequence
  Description of Artificial Sequence: Synthetic oligonucleotide
ggcugugcuucagaaaucu

SEQ ID NO: 2917664 - RNA, 19 nt, Artificial Sequence
  Description of Artificial Sequence: Synthetic oligonucleotide
cccauacucuccacuucug

SEQ ID NO: 2917665 - RNA, 19 nt, Artificial Sequence
  Description of Artificial Sequence: Synthetic oligonucleotide
gccuuuacaguuggaccac

SEQ ID NO: 2917666 - RNA, 19 nt, Artificial Sequence
  Description of Artificial Sequence: Synthetic oligonucleotide
cagaaaucuagggucgaau

SEQ ID NO: 2917667 - RNA, 19 nt, Artificial Sequence
  Description of Artificial Sequence: Synthetic oligonucleotide
cguuuccuaaauuucauuu

SEQ ID NO: 2917668 - RNA, 19 nt, Artificial Sequence
  Description of Artificial Sequence: Synthetic oligonucleotide
cuaggaguguaggcaaggu

SEQ ID NO: 2917669 - RNA, 19 nt, Artificial Sequence
  Description of Artificial Sequence: Synthetic oligonucleotide
aguggccuuuacaguugga

SEQ ID NO: 2917670 - RNA, 19 nt, Artificial Sequence
  Description of Artificial Sequence: Synthetic oligonucleotide
ccaacuuuacagggcucug

SEQ ID NO: 2917671 - RNA, 19 nt, Artificial Sequence
  Description of Artificial Sequence: Synthetic oligonucleotide
gcugucuugcuacgaaaau

SEQ ID NO: 2917672 - RNA, 19 nt, Artificial Sequence
  Description of Artificial Sequence: Synthetic oligonucleotide
caguuggaccacuguuugu

SEQ ID NO: 2917673 - RNA, 19 nt, Artificial Sequence
  Description of Artificial Sequence: Synthetic oligonucleotide
gccuuagucaaggcacaga

SEQ ID NO: 2917674 - RNA, 19 nt, Artificial Sequence
  Description of Artificial Sequence: Synthetic oligonucleotide
ggauuacuuccacaaucuu

SEQ ID NO: 2917675 - RNA, 19 nt, Artificial Sequence
  Description of Artificial Sequence: Synthetic oligonucleotide
ccccauacucuccacuucu

SEQ ID NO: 2917676 - RNA, 19 nt, Artificial Sequence
  Description of Artificial Sequence: Synthetic oligonucleotide
ggagauucuggggauccuu

SEQ ID NO: 2917677 - RNA, 19 nt, Artificial Sequence
  Description of Artificial Sequence: Synthetic oligonucleotide
ccacuguuuguuacaguau

SEQ ID NO: 2917678 - RNA, 19 nt, Artificial Sequence
  Description of Artificial Sequence: Synthetic oligonucleotide
ggggauccuuuaguagcaa

SEQ ID NO: 2917679 - RNA, 19 nt, Artificial Sequence
  Description of Artificial Sequence: Synthetic oligonucleotide
gcugugcuucagaaaucua

SEQ ID NO: 2917680 - RNA, 19 nt, Artificial Sequence
  Description of Artificial Sequence: Synthetic oligonucleotide
ccuuuacaguuggaccacu

SEQ ID NO: 2917681 - RNA, 19 nt, Artificial Sequence
  Description of Artificial Sequence: Synthetic oligonucleotide
uguauuuuccaccacaucg

SEQ ID NO: 2917682 - RNA, 19 nt, Artificial Sequence
  Description of Artificial Sequence: Synthetic oligonucleotide
aauuucaaugaacuucugc

SEQ ID NO: 2917683 - RNA, 19 nt, Artificial Sequence
  Description of Artificial Sequence: Synthetic oligonucleotide
uuuguuuuaggucugacac

SEQ ID NO: 2917684 - RNA, 19 nt, Artificial Sequence
  Description of Artificial Sequence: Synthetic oligonucleotide
ucuuaguucagcuucaugc

SEQ ID NO: 2917685 - RNA, 19 nt, Artificial Sequence
  Description of Artificial Sequence: Synthetic oligonucleotide
ucuacaaucagggagcacg

SEQ ID NO: 2917686 - RNA, 19 nt, Artificial Sequence
  Description of Artificial Sequence: Synthetic oligonucleotide
ucaaaagccaucaccaucc

SEQ ID NO: 2917687 - RNA, 19 nt, Artificial Sequence
  Description of Artificial Sequence: Synthetic oligonucleotide
ugcuugaucaauuucaaug

SEQ ID NO: 2917688 - RNA, 19 nt, Artificial Sequence
  Description of Artificial Sequence: Synthetic oligonucleotide
auuucaaugaacuucugca

SEQ ID NO: 2917689 - RNA, 19 nt, Artificial Sequence
  Description of Artificial Sequence: Synthetic oligonucleotide
aauuuuccaugcuugauca

SEQ ID NO: 2917690 - RNA, 19 nt, Artificial Sequence
  Description of Artificial Sequence: Synthetic oligonucleotide
ucaauuucaaugaacuucu

SEQ ID NO: 2917691 - RNA, 19 nt, Artificial Sequence
  Description of Artificial Sequence: Synthetic oligonucleotide
agacucaucaucuuuguuc

SEQ ID NO: 2917692 - RNA, 19 nt, Artificial Sequence
  Description of Artificial Sequence: Synthetic oligonucleotide
aucaauuucaaugaacuuc

SEQ ID NO: 2917693 - RNA, 19 nt, Artificial Sequence
  Description of Artificial Sequence: Synthetic oligonucleotide
auuucuucaagguacaccu

SEQ ID NO: 2917694 - RNA, 19 nt, Artificial Sequence
  Description of Artificial Sequence: Synthetic oligonucleotide
uuguuuaucuggaugauac

SEQ ID NO: 2917695 - RNA, 19 nt, Artificial Sequence
  Description of Artificial Sequence: Synthetic oligonucleotide
auacuuuuguuuuaggucu

SEQ ID NO: 2917696 - RNA, 19 nt, Artificial Sequence
  Description of Artificial Sequence: Synthetic oligonucleotide
uuuuccaccacaucggcag

SEQ ID NO: 2917697 - RNA, 19 nt, Artificial Sequence
  Description of Artificial Sequence: Synthetic oligonucleotide
ucaucuuuguuccaggaca

SEQ ID NO: 2917698 - RNA, 19 nt, Artificial Sequence
  Description of Artificial Sequence: Synthetic oligonucleotide
gaguucuacaaucagggag

SEQ ID NO: 2917699 - RNA, 19 nt, Artificial Sequence
  Description of Artificial Sequence: Synthetic oligonucleotide
gauacuuuuguuuuagguc

SEQ ID NO: 2917700 - RNA, 19 nt, Artificial Sequence
  Description of Artificial Sequence: Synthetic oligonucleotide
uaauacgaguuucugauac

SEQ ID NO: 2917701 - RNA, 19 nt, Artificial Sequence
  Description of Artificial Sequence: Synthetic oligonucleotide
aguaauacgaguuucugau

SEQ ID NO: 2917702 - RNA, 19 nt, Artificial Sequence
  Description of Artificial Sequence: Synthetic oligonucleotide
uuaggucugacacauuugc

SEQ ID NO: 2917703 - RNA, 19 nt, Artificial Sequence
  Description of Artificial Sequence: Synthetic oligonucleotide
ucuacuucauccuuggaga

SEQ ID NO: 2917704 - RNA, 19 nt, Artificial Sequence
  Description of Artificial Sequence: Synthetic oligonucleotide
uguacuuuguuuaucugga

SEQ ID NO: 2917705 - RNA, 19 nt, Artificial Sequence
  Description of Artificial Sequence: Synthetic oligonucleotide
aguucuacaaucagggagc

SEQ ID NO: 2917706 - RNA, 19 nt, Artificial Sequence
  Description of Artificial Sequence: Synthetic oligonucleotide
ugcucaaaagccaucacca

SEQ ID NO: 2917707 - RNA, 19 nt, Artificial Sequence
  Description of Artificial Sequence: Synthetic oligonucleotide
augaaggaguucuacaauc

SEQ ID NO: 2917708 - RNA, 19 nt, Artificial Sequence
  Description of Artificial Sequence: Synthetic oligonucleotide
gaugauacaguaauacgag

SEQ ID NO: 2917709 - RNA, 19 nt, Artificial Sequence
  Description of Artificial Sequence: Synthetic oligonucleotide
uggaugauacaguaauacg

SEQ ID NO: 2917710 - RNA, 19 nt, Artificial Sequence
  Description of Artificial Sequence: Synthetic oligonucleotide
acuuuguuuaucuggauga

SEQ ID NO: 2917711 - RNA, 19 nt, Artificial Sequence
  Description of Artificial Sequence: Synthetic oligonucleotide
uuaguucagcuucaugccg

SEQ ID NO: 2917712 - RNA, 19 nt, Artificial Sequence
  Description of Artificial Sequence: Synthetic oligonucleotide
agacaguguauuuuccacc

SEQ ID NO: 2917713 - RNA, 19 nt, Artificial Sequence
  Description of Artificial Sequence: Synthetic oligonucleotide
gacucaucaucuuuguucc

SEQ ID NO: 2917714 - RNA, 19 nt, Artificial Sequence
  Description of Artificial Sequence: Synthetic oligonucleotide
cuguacuuuguuuaucugg

SEQ ID NO: 2917715 - RNA, 19 nt, Artificial Sequence
  Description of Artificial Sequence: Synthetic oligonucleotide
cuagaauuuuccaugcuug

SEQ ID NO: 2917716 - RNA, 19 nt, Artificial Sequence
  Description of Artificial Sequence: Synthetic oligonucleotide
ugauacuuuuguuuuaggu

SEQ ID NO: 2917717 - RNA, 19 nt, Artificial Sequence
  Description of Artificial Sequence: Synthetic oligonucleotide
acaucggcaggucagagag

SEQ ID NO: 2917718 - RNA, 19 nt, Artificial Sequence
  Description of Artificial Sequence: Synthetic oligonucleotide
gagagaaagacucaucauc

SEQ ID NO: 2917719 - RNA, 19 nt, Artificial Sequence
  Description of Artificial Sequence: Synthetic oligonucleotide
ucuucuacuucauccuugg

SEQ ID NO: 2917720 - RNA, 19 nt, Artificial Sequence
  Description of Artificial Sequence: Synthetic oligonucleotide
agcuucaugccgcugaagg

SEQ ID NO: 2917721 - RNA, 19 nt, Artificial Sequence
  Description of Artificial Sequence: Synthetic oligonucleotide
uacuuuguuuaucuggaug

SEQ ID NO: 2917722 - RNA, 19 nt, Artificial Sequence
  Description of Artificial Sequence: Synthetic oligonucleotide
cuuaguucagcuucaugcc

SEQ ID NO: 2917723 - RNA, 19 nt, Artificial Sequence
  Description of Artificial Sequence: Synthetic oligonucleotide
caaaaugcuguaccaaucc

SEQ ID NO: 2917724 - RNA, 19 nt, Artificial Sequence
  Description of Artificial Sequence: Synthetic oligonucleotide
uacuucuuaguucagcuuc

SEQ ID NO: 2917725 - RNA, 19 nt, Artificial Sequence
  Description of Artificial Sequence: Synthetic oligonucleotide
uuuuaggucugacacauuu

SEQ ID NO: 2917726 - RNA, 19 nt, Artificial Sequence
  Description of Artificial Sequence: Synthetic oligonucleotide
aggaguucuacaaucaggg

SEQ ID NO: 2917727 - RNA, 19 nt, Artificial Sequence
  Description of Artificial Sequence: Synthetic oligonucleotide
ucaaugaacuucugcauac

SEQ ID NO: 2917728 - RNA, 19 nt, Artificial Sequence
  Description of Artificial Sequence: Synthetic oligonucleotide
uuuaucuggaugauacagu

SEQ ID NO: 2917729 - RNA, 19 nt, Artificial Sequence
  Description of Artificial Sequence: Synthetic oligonucleotide
ucaucacugaugaaggagu

SEQ ID NO: 2917730 - RNA, 19 nt, Artificial Sequence
  Description of Artificial Sequence: Synthetic oligonucleotide
ugauacaguaauacgaguu

SEQ ID NO: 2917731 - RNA, 19 nt, Artificial Sequence
  Description of Artificial Sequence: Synthetic oligonucleotide
uucuucauucccuagaauu

SEQ ID NO: 2917732 - RNA, 19 nt, Artificial Sequence
  Description of Artificial Sequence: Synthetic oligonucleotide
uuuuguuuuaggucugaca

SEQ ID NO: 2917733 - RNA, 19 nt, Artificial Sequence
  Description of Artificial Sequence: Synthetic oligonucleotide
uugagugucugcucaaaag

SEQ ID NO: 2917734 - RNA, 19 nt, Artificial Sequence
  Description of Artificial Sequence: Synthetic oligonucleotide
aggucugacacauuugcag

SEQ ID NO: 2917735 - RNA, 19 nt, Artificial Sequence
  Description of Artificial Sequence: Synthetic oligonucleotide
uucccuagaauuuuccaug

SEQ ID NO: 2917736 - RNA, 19 nt, Artificial Sequence
  Description of Artificial Sequence: Synthetic oligonucleotide
gaauuuuccaugcuugauc

SEQ ID NO: 2917737 - RNA, 19 nt, Artificial Sequence
  Description of Artificial Sequence: Synthetic oligonucleotide
guuuaucuggaugauacag

SEQ ID NO: 2917738 - RNA, 19 nt, Artificial Sequence
  Description of Artificial Sequence: Synthetic oligonucleotide
aaggaguucuacaaucagg

SEQ ID NO: 2917739 - RNA, 19 nt, Artificial Sequence
  Description of Artificial Sequence: Synthetic oligonucleotide
aaaaugcuguaccaauccu

SEQ ID NO: 2917740 - RNA, 19 nt, Artificial Sequence
  Description of Artificial Sequence: Synthetic oligonucleotide
ugaaggaguucuacaauca

SEQ ID NO: 2917741 - RNA, 19 nt, Artificial Sequence
  Description of Artificial Sequence: Synthetic oligonucleotide
ucugauacuuuuguuuuag

SEQ ID NO: 2917742 - RNA, 19 nt, Artificial Sequence
  Description of Artificial Sequence: Synthetic oligonucleotide
ugaugaaggaguucuacaa

SEQ ID NO: 2917743 - RNA, 19 nt, Artificial Sequence
  Description of Artificial Sequence: Synthetic oligonucleotide
uucaagguacaccugugca

SEQ ID NO: 2917744 - RNA, 19 nt, Artificial Sequence
  Description of Artificial Sequence: Synthetic oligonucleotide
uguuccaggacauuucuuc

SEQ ID NO: 2917745 - RNA, 19 nt, Artificial Sequence
  Description of Artificial Sequence: Synthetic oligonucleotide
aguucaucacugaugaagg

SEQ ID NO: 2917746 - RNA, 19 nt, Artificial Sequence
  Description of Artificial Sequence: Synthetic oligonucleotide
gaaagacucaucaucuuug

SEQ ID NO: 2917747 - RNA, 19 nt, Artificial Sequence
  Description of Artificial Sequence: Synthetic oligonucleotide
uucaucacugaugaaggag

SEQ ID NO: 2917748 - RNA, 19 nt, Artificial Sequence
  Description of Artificial Sequence: Synthetic oligonucleotide
uucuucaagguacaccugu

SEQ ID NO: 2917749 - RNA, 19 nt, Artificial Sequence
  Description of Artificial Sequence: Synthetic oligonucleotide
auacauuccuccaugguuc

SEQ ID NO: 2917750 - RNA, 19 nt, Artificial Sequence
  Description of Artificial Sequence: Synthetic oligonucleotide
aucuggaugauacaguaau

SEQ ID NO: 2917751 - RNA, 19 nt, Artificial Sequence
  Description of Artificial Sequence: Synthetic oligonucleotide
aaagacucaucaucuuugu

SEQ ID NO: 2917752 - RNA, 19 nt, Artificial Sequence
  Description of Artificial Sequence: Synthetic oligonucleotide
uugcagaugggucugcccc

SEQ ID NO: 2917753 - RNA, 19 nt, Artificial Sequence
  Description of Artificial Sequence: Synthetic oligonucleotide
uuuguuccaggacauuucu

SEQ ID NO: 2917754 - RNA, 19 nt, Artificial Sequence
  Description of Artificial Sequence: Synthetic oligonucleotide
aaugaacuucugcauacau

SEQ ID NO: 2917755 - RNA, 19 nt, Artificial Sequence
  Description of Artificial Sequence: Synthetic oligonucleotide
aaagccaucaccauccuuu

SEQ ID NO: 2917756 - RNA, 19 nt, Artificial Sequence
  Description of Artificial Sequence: Synthetic oligonucleotide
uuaucuggaugauacagua

SEQ ID NO: 2917757 - RNA, 19 nt, Artificial Sequence
  Description of Artificial Sequence: Synthetic oligonucleotide
guauuuuccaccacaucgg

SEQ ID NO: 2917758 - RNA, 19 nt, Artificial Sequence
  Description of Artificial Sequence: Synthetic oligonucleotide
aucuguacuuuguuuaucu

SEQ ID NO: 2917759 - RNA, 19 nt, Artificial Sequence
  Description of Artificial Sequence: Synthetic oligonucleotide
uauuuuccaccacaucggc

SEQ ID NO: 2917760 - RNA, 19 nt, Artificial Sequence
  Description of Artificial Sequence: Synthetic oligonucleotide
caguucaucacugaugaag

SEQ ID NO: 2917761 - RNA, 19 nt, Artificial Sequence
  Description of Artificial Sequence: Synthetic oligonucleotide
uuuaggucugacacauuug

SEQ ID NO: 2917762 - RNA, 19 nt, Artificial Sequence
  Description of Artificial Sequence: Synthetic oligonucleotide
uacaguaauacgaguuucu

SEQ ID NO: 2917763 - RNA, 19 nt, Artificial Sequence
  Description of Artificial Sequence: Synthetic oligonucleotide
gaaggaguucuacaaucag

SEQ ID NO: 2917764 - RNA, 19 nt, Artificial Sequence
  Description of Artificial Sequence: Synthetic oligonucleotide
ucaucaucuuuguuccagg

SEQ ID NO: 2917765 - RNA, 19 nt, Artificial Sequence
  Description of Artificial Sequence: Synthetic oligonucleotide
ucagggagcacguaucaca

SEQ ID NO: 2917766 - RNA, 19 nt, Artificial Sequence
  Description of Artificial Sequence: Synthetic oligonucleotide
uguuuuaggucugacacau

SEQ ID NO: 2917767 - RNA, 19 nt, Artificial Sequence
  Description of Artificial Sequence: Synthetic oligonucleotide
ucacugaugaaggaguucu

SEQ ID NO: 2917768 - RNA, 19 nt, Artificial Sequence
  Description of Artificial Sequence: Synthetic oligonucleotide
uucaaugaacuucugcaua

SEQ ID NO: 2917769 - RNA, 19 nt, Artificial Sequence
  Description of Artificial Sequence: Synthetic oligonucleotide
acaccugugcaucuacugg

SEQ ID NO: 2917770 - RNA, 19 nt, Artificial Sequence
  Description of Artificial Sequence: Synthetic oligonucleotide
ugcauacauuccuccaugg

SEQ ID NO: 2917771 - RNA, 19 nt, Artificial Sequence
  Description of Artificial Sequence: Synthetic oligonucleotide
uccaggacauuucuucaag

SEQ ID NO: 2917772 - RNA, 19 nt, Artificial Sequence
  Description of Artificial Sequence: Synthetic oligonucleotide
aauacgaguuucugauacu

SEQ ID NO: 2917773 - RNA, 19 nt, Artificial Sequence
  Description of Artificial Sequence: Synthetic oligonucleotide
uucagcuucaugccgcuga

SEQ ID NO: 2917774 - RNA, 19 nt, Artificial Sequence
  Description of Artificial Sequence: Synthetic oligonucleotide
ucuucauucccuagaauuu

SEQ ID NO: 2917775 - RNA, 19 nt, Artificial Sequence
  Description of Artificial Sequence: Synthetic oligonucleotide
aaucagggagcacguauca

SEQ ID NO: 2917776 - RNA, 19 nt, Artificial Sequence
  Description of Artificial Sequence: Synthetic oligonucleotide
acugaugaaggaguucuac

SEQ ID NO: 2917777 - RNA, 19 nt, Artificial Sequence
  Description of Artificial Sequence: Synthetic oligonucleotide
acuucauccuuggagacag

SEQ ID NO: 2917778 - RNA, 19 nt, Artificial Sequence
  Description of Artificial Sequence: Synthetic oligonucleotide
uuucaaugaacuucugcau

SEQ ID NO: 2917779 - RNA, 19 nt, Artificial Sequence
  Description of Artificial Sequence: Synthetic oligonucleotide
cugacacauuugcagaugg

SEQ ID NO: 2917780 - RNA, 19 nt, Artificial Sequence
  Description of Artificial Sequence: Synthetic oligonucleotide
uaguucagcuucaugccgc

SEQ ID NO: 2917781 - RNA, 19 nt, Artificial Sequence
  Description of Artificial Sequence: Synthetic oligonucleotide
auacaguaauacgaguuuc

SEQ ID NO: 2917782 - RNA, 19 nt, Artificial Sequence
  Description of Artificial Sequence: Synthetic oligonucleotide
ucauucccuagaauuuucc

SEQ ID NO: 2917783 - RNA, 19 nt, Artificial Sequence
  Description of Artificial Sequence: Synthetic oligonucleotide
gagacaguguauuuuccac

SEQ ID NO: 2917784 - RNA, 19 nt, Artificial Sequence
  Description of Artificial Sequence: Synthetic oligonucleotide
gacaguguauuuuccacca

SEQ ID NO: 2917785 - RNA, 19 nt, Artificial Sequence
  Description of Artificial Sequence: Synthetic oligonucleotide
ucacaggaaaccagguuca

SEQ ID NO: 2917786 - RNA, 19 nt, Artificial Sequence
  Description of Artificial Sequence: Synthetic oligonucleotide
agagaaagacucaucaucu

SEQ ID NO: 2917787 - RNA, 19 nt, Artificial Sequence
  Description of Artificial Sequence: Synthetic oligonucleotide
cuggaugauacaguaauac

SEQ ID NO: 2917788 - RNA, 19 nt, Artificial Sequence
  Description of Artificial Sequence: Synthetic oligonucleotide
uagaauuuuccaugcuuga

SEQ ID NO: 2917789 - RNA, 19 nt, Artificial Sequence
  Description of Artificial Sequence: Synthetic oligonucleotide
ucuacuggccccauacuuc

SEQ ID NO: 2917790 - RNA, 19 nt, Artificial Sequence
  Description of Artificial Sequence: Synthetic oligonucleotide
ugacacauuugcagauggg

SEQ ID NO: 2917791 - RNA, 19 nt, Artificial Sequence
  Description of Artificial Sequence: Synthetic oligonucleotide
uuggagacaguguauuuuc

SEQ ID NO: 2917792 - RNA, 19 nt, Artificial Sequence
  Description of Artificial Sequence: Synthetic oligonucleotide
cauuucuucaagguacacc

SEQ ID NO: 2917793 - RNA, 19 nt, Artificial Sequence
  Description of Artificial Sequence: Synthetic oligonucleotide
ucugcauacauuccuccau

SEQ ID NO: 2917794 - RNA, 19 nt, Artificial Sequence
  Description of Artificial Sequence: Synthetic oligonucleotide
ucuucaagguacaccugug

SEQ ID NO: 2917795 - RNA, 19 nt, Artificial Sequence
  Description of Artificial Sequence: Synthetic oligonucleotide
auucccuagaauuuuccau

SEQ ID NO: 2917796 - RNA, 19 nt, Artificial Sequence
  Description of Artificial Sequence: Synthetic oligonucleotide
cagagagaaagacucauca

SEQ ID NO: 2917797 - RNA, 19 nt, Artificial Sequence
  Description of Artificial Sequence: Synthetic oligonucleotide
uacaccugugcaucuacug

SEQ ID NO: 2917798 - RNA, 19 nt, Artificial Sequence
  Description of Artificial Sequence: Synthetic oligonucleotide
agaaagacucaucaucuuu

SEQ ID NO: 2917799 - RNA, 19 nt, Artificial Sequence
  Description of Artificial Sequence: Synthetic oligonucleotide
auuccuccaugguuccugc

SEQ ID NO: 2917800 - RNA, 19 nt, Artificial Sequence
  Description of Artificial Sequence: Synthetic oligonucleotide
ucccuagaauuuuccaugc

SEQ ID NO: 2917801 - RNA, 19 nt, Artificial Sequence
  Description of Artificial Sequence: Synthetic oligonucleotide
cuucugcauacauuccucc

SEQ ID NO: 2917802 - RNA, 19 nt, Artificial Sequence
  Description of Artificial Sequence: Synthetic oligonucleotide
acaaucagggagcacguau

SEQ ID NO: 2917803 - RNA, 19 nt, Artificial Sequence
  Description of Artificial Sequence: Synthetic oligonucleotide
uuugagugucugcucaaaa

SEQ ID NO: 2917804 - RNA, 19 nt, Artificial Sequence
  Description of Artificial Sequence: Synthetic oligonucleotide
ucuguacuuuguuuaucug

SEQ ID NO: 2917805 - RNA, 19 nt, Artificial Sequence
  Description of Artificial Sequence: Synthetic oligonucleotide
uuguuuuaggucugacaca

SEQ ID NO: 2917806 - RNA, 19 nt, Artificial Sequence
  Description of Artificial Sequence: Synthetic oligonucleotide
gagugucugcucaaaagcc

SEQ ID NO: 2917807 - RNA, 19 nt, Artificial Sequence
  Description of Artificial Sequence: Synthetic oligonucleotide
acacauuugcagauggguc

SEQ ID NO: 2917808 - RNA, 19 nt, Artificial Sequence
  Description of Artificial Sequence: Synthetic oligonucleotide
cucaaaagccaucaccauc

SEQ ID NO: 2917809 - RNA, 19 nt, Artificial Sequence
  Description of Artificial Sequence: Synthetic oligonucleotide
uccuccaugguuccugcug

SEQ ID NO: 2917810 - RNA, 19 nt, Artificial Sequence
  Description of Artificial Sequence: Synthetic oligonucleotide
ggaugauacaguaauacga

SEQ ID NO: 2917811 - RNA, 19 nt, Artificial Sequence
  Description of Artificial Sequence: Synthetic oligonucleotide
ucaagguacaccugugcau

SEQ ID NO: 2917812 - RNA, 19 nt, Artificial Sequence
  Description of Artificial Sequence: Synthetic oligonucleotide
uuuuccaugcuugaucaau

SEQ ID NO: 2917813 - RNA, 19 nt, Artificial Sequence
  Description of Artificial Sequence: Synthetic oligonucleotide
cuucaagguacaccugugc

SEQ ID NO: 2917814 - RNA, 19 nt, Artificial Sequence
  Description of Artificial Sequence: Synthetic oligonucleotide
ucauccuuggagacagugu

SEQ ID NO: 2917815 - RNA, 19 nt, Artificial Sequence
  Description of Artificial Sequence: Synthetic oligonucleotide
aaugcuguaccaauccuuu

SEQ ID NO: 2917816 - RNA, 19 nt, Artificial Sequence
  Description of Artificial Sequence: Synthetic oligonucleotide
uacuuuuguuuuaggucug

SEQ ID NO: 2917817 - RNA, 19 nt, Artificial Sequence
  Description of Artificial Sequence: Synthetic oligonucleotide
augauacaguaauacgagu

SEQ ID NO: 2917818 - RNA, 19 nt, Artificial Sequence
  Description of Artificial Sequence: Synthetic oligonucleotide
caccugugcaucuacuggc

SEQ ID NO: 2917819 - RNA, 19 nt, Artificial Sequence
  Description of Artificial Sequence: Synthetic oligonucleotide
uucuuaguucagcuucaug

SEQ ID NO: 2917820 - RNA, 19 nt, Artificial Sequence
  Description of Artificial Sequence: Synthetic oligonucleotide
uggagacaguguauuuucc

SEQ ID NO: 2917821 - RNA, 19 nt, Artificial Sequence
  Description of Artificial Sequence: Synthetic oligonucleotide
uuugcagaugggucugccc

SEQ ID NO: 2917822 - RNA, 19 nt, Artificial Sequence
  Description of Artificial Sequence: Synthetic oligonucleotide
ggacauuucuucaagguac

SEQ ID NO: 2917823 - RNA, 19 nt, Artificial Sequence
  Description of Artificial Sequence: Synthetic oligonucleotide
uucauccuuggagacagug

SEQ ID NO: 2917824 - RNA, 19 nt, Artificial Sequence
  Description of Artificial Sequence: Synthetic oligonucleotide
ucagagagaaagacucauc

SEQ ID NO: 2917825 - RNA, 19 nt, Artificial Sequence
  Description of Artificial Sequence: Synthetic oligonucleotide
gcuugaucaauuucaauga

SEQ ID NO: 2917826 - RNA, 19 nt, Artificial Sequence
  Description of Artificial Sequence: Synthetic oligonucleotide
uucugcauacauuccucca

SEQ ID NO: 2917827 - RNA, 19 nt, Artificial Sequence
  Description of Artificial Sequence: Synthetic oligonucleotide
uucauucccuagaauuuuc

SEQ ID NO: 2917828 - RNA, 19 nt, Artificial Sequence
  Description of Artificial Sequence: Synthetic oligonucleotide
cucaucaucuuuguuccag

SEQ ID NO: 2917829 - RNA, 19 nt, Artificial Sequence
  Description of Artificial Sequence: Synthetic oligonucleotide
aagccaucaccauccuuug

SEQ ID NO: 2917830 - RNA, 19 nt, Artificial Sequence
  Description of Artificial Sequence: Synthetic oligonucleotide
acgaguuucugauacuuuu

SEQ ID NO: 2917831 - RNA, 19 nt, Artificial Sequence
  Description of Artificial Sequence: Synthetic oligonucleotide
cugauacuuuuguuuuagg

SEQ ID NO: 2917832 - RNA, 19 nt, Artificial Sequence
  Description of Artificial Sequence: Synthetic oligonucleotide
auuugcagaugggucugcc

SEQ ID NO: 2917833 - RNA, 19 nt, Artificial Sequence
  Description of Artificial Sequence: Synthetic oligonucleotide
uuuccaugcuugaucaauu

SEQ ID NO: 2917834 - RNA, 19 nt, Artificial Sequence
  Description of Artificial Sequence: Synthetic oligonucleotide
uccaugcuugaucaauuuc

SEQ ID NO: 2917835 - RNA, 19 nt, Artificial Sequence
  Description of Artificial Sequence: Synthetic oligonucleotide
acaguguauuuuccaccac

SEQ ID NO: 2917836 - RNA, 19 nt, Artificial Sequence
  Description of Artificial Sequence: Synthetic oligonucleotide
agagagaaagacucaucau

SEQ ID NO: 2917837 - RNA, 19 nt, Artificial Sequence
  Description of Artificial Sequence: Synthetic oligonucleotide
aggaaaccagguucacuuc

SEQ ID NO: 2917838 - RNA, 19 nt, Artificial Sequence
  Description of Artificial Sequence: Synthetic oligonucleotide
acaguaauacgaguuucug

SEQ ID NO: 2917839 - RNA, 19 nt, Artificial Sequence
  Description of Artificial Sequence: Synthetic oligonucleotide
uuucuucaagguacaccug

SEQ ID NO: 2917840 - RNA, 19 nt, Artificial Sequence
  Description of Artificial Sequence: Synthetic oligonucleotide
uuuccaccacaucggcagg

SEQ ID NO: 2917841 - RNA, 19 nt, Artificial Sequence
  Description of Artificial Sequence: Synthetic oligonucleotide
aggacauuucuucaaggua

SEQ ID NO: 2917842 - RNA, 19 nt, Artificial Sequence
  Description of Artificial Sequence: Synthetic oligonucleotide
ucuuuguuccaggacauuu

SEQ ID NO: 2917843 - RNA, 19 nt, Artificial Sequence
  Description of Artificial Sequence: Synthetic oligonucleotide
aaaugcuguaccaauccuu

SEQ ID NO: 2917844 - RNA, 19 nt, Artificial Sequence
  Description of Artificial Sequence: Synthetic oligonucleotide
uaggucugacacauuugca

SEQ ID NO: 2917845 - RNA, 19 nt, Artificial Sequence
  Description of Artificial Sequence: Synthetic oligonucleotide
cagggagcacguaucacag

SEQ ID NO: 2917846 - RNA, 19 nt, Artificial Sequence
  Description of Artificial Sequence: Synthetic oligonucleotide
uacauuccuccaugguucc

SEQ ID NO: 2917847 - RNA, 19 nt, Artificial Sequence
  Description of Artificial Sequence: Synthetic oligonucleotide
ucuggaugauacaguaaua

SEQ ID NO: 2917848 - RNA, 19 nt, Artificial Sequence
  Description of Artificial Sequence: Synthetic oligonucleotide
cugugcaucuacuggcccc

SEQ ID NO: 2917849 - RNA, 19 nt, Artificial Sequence
  Description of Artificial Sequence: Synthetic oligonucleotide
uaucuggaugauacaguaa

SEQ ID NO: 2917850 - RNA, 19 nt, Artificial Sequence
  Description of Artificial Sequence: Synthetic oligonucleotide
caaucagggagcacguauc

SEQ ID NO: 2917851 - RNA, 19 nt, Artificial Sequence
  Description of Artificial Sequence: Synthetic oligonucleotide
agcacguaucacaggaaac

SEQ ID NO: 2917852 - RNA, 19 nt, Artificial Sequence
  Description of Artificial Sequence: Synthetic oligonucleotide
guuucuucauucccuagaa

SEQ ID NO: 2917853 - RNA, 19 nt, Artificial Sequence
  Description of Artificial Sequence: Synthetic oligonucleotide
gauacaguaauacgaguuu

SEQ ID NO: 2917854 - RNA, 19 nt, Artificial Sequence
  Description of Artificial Sequence: Synthetic oligonucleotide
aagguacaccugugcaucu

SEQ ID NO: 2917855 - RNA, 19 nt, Artificial Sequence
  Description of Artificial Sequence: Synthetic oligonucleotide
cuacuucauccuuggagac

SEQ ID NO: 2917856 - RNA, 19 nt, Artificial Sequence
  Description of Artificial Sequence: Synthetic oligonucleotide
cuucaugccgcugaagguc

SEQ ID NO: 2917857 - RNA, 19 nt, Artificial Sequence
  Description of Artificial Sequence: Synthetic oligonucleotide
acaucuguacuuuguuuau

SEQ ID NO: 2917858 - RNA, 19 nt, Artificial Sequence
  Description of Artificial Sequence: Synthetic oligonucleotide
cauacuucuuaguucagcu

SEQ ID NO: 2917859 - RNA, 19 nt, Artificial Sequence
  Description of Artificial Sequence: Synthetic oligonucleotide
ucugcucaaaagccaucac

SEQ ID NO: 2917860 - RNA, 19 nt, Artificial Sequence
  Description of Artificial Sequence: Synthetic oligonucleotide
caagguacaccugugcauc

SEQ ID NO: 2917861 - RNA, 19 nt, Artificial Sequence
  Description of Artificial Sequence: Synthetic oligonucleotide
uuuguuuaucuggaugaua

SEQ ID NO: 2917862 - RNA, 19 nt, Artificial Sequence
  Description of Artificial Sequence: Synthetic oligonucleotide
aucuacuggccccauacuu

SEQ ID NO: 2917863 - RNA, 19 nt, Artificial Sequence
  Description of Artificial Sequence: Synthetic oligonucleotide
cugcauacauuccuccaug

SEQ ID NO: 2917864 - RNA, 19 nt, Artificial Sequence
  Description of Artificial Sequence: Synthetic oligonucleotide
uuucuucauucccuagaau

SEQ ID NO: 2917865 - RNA, 19 nt, Artificial Sequence
  Description of Artificial Sequence: Synthetic oligonucleotide
cugaugaaggaguucuaca

SEQ ID NO: 2917866 - RNA, 19 nt, Artificial Sequence
  Description of Artificial Sequence: Synthetic oligonucleotide
ugguuucuucauucccuag

SEQ ID NO: 2917867 - RNA, 19 nt, Artificial Sequence
  Description of Artificial Sequence: Synthetic oligonucleotide
uggcacaucuguacuuugu

SEQ ID NO: 2917868 - RNA, 19 nt, Artificial Sequence
  Description of Artificial Sequence: Synthetic oligonucleotide
aucacugaugaaggaguuc

SEQ ID NO: 2917869 - RNA, 19 nt, Artificial Sequence
  Description of Artificial Sequence: Synthetic oligonucleotide
caguaauacgaguuucuga

SEQ ID NO: 2917870 - RNA, 19 nt, Artificial Sequence
  Description of Artificial Sequence: Synthetic oligonucleotide
aguuucugauacuuuuguu

SEQ ID NO: 2917871 - RNA, 19 nt, Artificial Sequence
  Description of Artificial Sequence: Synthetic oligonucleotide
aagacucaucaucuuuguu

SEQ ID NO: 2917872 - RNA, 19 nt, Artificial Sequence
  Description of Artificial Sequence: Synthetic oligonucleotide
augccgcugaaggucauac

SEQ ID NO: 2917873 - RNA, 19 nt, Artificial Sequence
  Description of Artificial Sequence: Synthetic oligonucleotide
acauuucuucaagguacac

SEQ ID NO: 2917874 - RNA, 19 nt, Artificial Sequence
  Description of Artificial Sequence: Synthetic oligonucleotide
gaguuucugauacuuuugu

SEQ ID NO: 2917875 - RNA, 19 nt, Artificial Sequence
  Description of Artificial Sequence: Synthetic oligonucleotide
aaaagccaucaccauccuu

SEQ ID NO: 2917876 - RNA, 19 nt, Artificial Sequence
  Description of Artificial Sequence: Synthetic oligonucleotide
gagcacguaucacaggaaa

SEQ ID NO: 2917877 - RNA, 19 nt, Artificial Sequence
  Description of Artificial Sequence: Synthetic oligonucleotide
accugugcaucuacuggcc

SEQ ID NO: 2917878 - RNA, 19 nt, Artificial Sequence
  Description of Artificial Sequence: Synthetic oligonucleotide
ugugcaucuacuggcccca

SEQ ID NO: 2917879 - RNA, 19 nt, Artificial Sequence
  Description of Artificial Sequence: Synthetic oligonucleotide
uuccaggacauuucuucaa

SEQ ID NO: 2917880 - RNA, 19 nt, Artificial Sequence
  Description of Artificial Sequence: Synthetic oligonucleotide
caguguauuuuccaccaca

SEQ ID NO: 2917881 - RNA, 19 nt, Artificial Sequence
  Description of Artificial Sequence: Synthetic oligonucleotide
aguguauuuuccaccacau

SEQ ID NO: 2917882 - RNA, 19 nt, Artificial Sequence
  Description of Artificial Sequence: Synthetic oligonucleotide
guuccaggacauuucuuca

SEQ ID NO: 2917883 - RNA, 19 nt, Artificial Sequence
  Description of Artificial Sequence: Synthetic oligonucleotide
agaauuuuccaugcuugau

SEQ ID NO: 2917884 - RNA, 19 nt, Artificial Sequence
  Description of Artificial Sequence: Synthetic oligonucleotide
agugucugcucaaaagcca

SEQ ID NO: 2917885 - RNA, 19 nt, Artificial Sequence
  Description of Artificial Sequence: Synthetic oligonucleotide
gacacauuugcagaugggu

SEQ ID NO: 2917886 - RNA, 19 nt, Artificial Sequence
  Description of Artificial Sequence: Synthetic oligonucleotide
gcacguaucacaggaaacc

SEQ ID NO: 2917887 - RNA, 19 nt, Artificial Sequence
  Description of Artificial Sequence: Synthetic oligonucleotide
uucugauacuuuuguuuua

SEQ ID NO: 2917888 - RNA, 19 nt, Artificial Sequence
  Description of Artificial Sequence: Synthetic oligonucleotide
uacuucauccuuggagaca

SEQ ID NO: 2917889 - RNA, 19 nt, Artificial Sequence
  Description of Artificial Sequence: Synthetic oligonucleotide
gacauuucuucaagguaca

SEQ ID NO: 2917890 - RNA, 19 nt, Artificial Sequence
  Description of Artificial Sequence: Synthetic oligonucleotide
auacuucuuaguucagcuu

SEQ ID NO: 2917891 - RNA, 19 nt, Artificial Sequence
  Description of Artificial Sequence: Synthetic oligonucleotide
cauucccuagaauuuucca

SEQ ID NO: 2917892 - RNA, 19 nt, Artificial Sequence
  Description of Artificial Sequence: Synthetic oligonucleotide
ccaugcuugaucaauuuca

SEQ ID NO: 2917893 - RNA, 19 nt, Artificial Sequence
  Description of Artificial Sequence: Synthetic oligonucleotide
gcaucuacuggccccauac

SEQ ID NO: 2917894 - RNA, 19 nt, Artificial Sequence
  Description of Artificial Sequence: Synthetic oligonucleotide
gguuucuucauucccuaga

SEQ ID NO: 2917895 - RNA, 19 nt, Artificial Sequence
  Description of Artificial Sequence: Synthetic oligonucleotide
cauccuuggagacagugua

SEQ ID NO: 2917896 - RNA, 19 nt, Artificial Sequence
  Description of Artificial Sequence: Synthetic oligonucleotide
caugcuugaucaauuucaa

SEQ ID NO: 2917897 - RNA, 19 nt, Artificial Sequence
  Description of Artificial Sequence: Synthetic oligonucleotide
gaugaaggaguucuacaau

SEQ ID NO: 2917898 - RNA, 19 nt, Artificial Sequence
  Description of Artificial Sequence: Synthetic oligonucleotide
uacgaguuucugauacuuu

SEQ ID NO: 2917899 - RNA, 19 nt, Artificial Sequence
  Description of Artificial Sequence: Synthetic oligonucleotide
aucagggagcacguaucac

SEQ ID NO: 2917900 - RNA, 19 nt, Artificial Sequence
  Description of Artificial Sequence: Synthetic oligonucleotide
auacgaguuucugauacuu

SEQ ID NO: 2917901 - RNA, 19 nt, Artificial Sequence
  Description of Artificial Sequence: Synthetic oligonucleotide
aucggcaggucagagagaa

SEQ ID NO: 2917902 - RNA, 19 nt, Artificial Sequence
  Description of Artificial Sequence: Synthetic oligonucleotide
cacauuugcagaugggucu

SEQ ID NO: 2917903 - RNA, 19 nt, Artificial Sequence
  Description of Artificial Sequence: Synthetic oligonucleotide
gggagcacguaucacagga

SEQ ID NO: 2917904 - RNA, 19 nt, Artificial Sequence
  Description of Artificial Sequence: Synthetic oligonucleotide
uuccaugcuugaucaauuu

SEQ ID NO: 2917905 - RNA, 19 nt, Artificial Sequence
  Description of Artificial Sequence: Synthetic oligonucleotide
cuuuuguuuuaggucugac

SEQ ID NO: 2917906 - RNA, 19 nt, Artificial Sequence
  Description of Artificial Sequence: Synthetic oligonucleotide
acguaucacaggaaaccag

SEQ ID NO: 2917907 - RNA, 19 nt, Artificial Sequence
  Description of Artificial Sequence: Synthetic oligonucleotide
ggucugacacauuugcaga

SEQ ID NO: 2917908 - RNA, 19 nt, Artificial Sequence
  Description of Artificial Sequence: Synthetic oligonucleotide
agggagcacguaucacagg

SEQ ID NO: 2917909 - RNA, 19 nt, Artificial Sequence
  Description of Artificial Sequence: Synthetic oligonucleotide
ggagacaguguauuuucca

SEQ ID NO: 2917910 - RNA, 19 nt, Artificial Sequence
  Description of Artificial Sequence: Synthetic oligonucleotide
ugucugcucaaaagccauc

SEQ ID NO: 2917911 - RNA, 19 nt, Artificial Sequence
  Description of Artificial Sequence: Synthetic oligonucleotide
acuucuuaguucagcuuca

SEQ ID NO: 2917912 - RNA, 19 nt, Artificial Sequence
  Description of Artificial Sequence: Synthetic oligonucleotide
caucaucuuuguuccagga

SEQ ID NO: 2917913 - RNA, 19 nt, Artificial Sequence
  Description of Artificial Sequence: Synthetic oligonucleotide
uccuuggagacaguguauu

SEQ ID NO: 2917914 - RNA, 19 nt, Artificial Sequence
  Description of Artificial Sequence: Synthetic oligonucleotide
ccaaaaugcuguaccaauc

SEQ ID NO: 2917915 - RNA, 19 nt, Artificial Sequence
  Description of Artificial Sequence: Synthetic oligonucleotide
ccaggacauuucuucaagg

SEQ ID NO: 2917916 - RNA, 19 nt, Artificial Sequence
  Description of Artificial Sequence: Synthetic oligonucleotide
guucaucacugaugaagga

SEQ ID NO: 2917917 - RNA, 19 nt, Artificial Sequence
  Description of Artificial Sequence: Synthetic oligonucleotide
caugguuccugcuggcaca

SEQ ID NO: 2917918 - RNA, 19 nt, Artificial Sequence
  Description of Artificial Sequence: Synthetic oligonucleotide
ccugcuggcacaucuguac

SEQ ID NO: 2917919 - RNA, 19 nt, Artificial Sequence
  Description of Artificial Sequence: Synthetic oligonucleotide
gucugcucaaaagccauca

SEQ ID NO: 2917920 - RNA, 19 nt, Artificial Sequence
  Description of Artificial Sequence: Synthetic oligonucleotide
gaucaauuucaaugaacuu

SEQ ID NO: 2917921 - RNA, 19 nt, Artificial Sequence
  Description of Artificial Sequence: Synthetic oligonucleotide
guguauuuuccaccacauc

SEQ ID NO: 2917922 - RNA, 19 nt, Artificial Sequence
  Description of Artificial Sequence: Synthetic oligonucleotide
augcuugaucaauuucaau

SEQ ID NO: 2917923 - RNA, 19 nt, Artificial Sequence
  Description of Artificial Sequence: Synthetic oligonucleotide
cuggccccauacuucuuag

SEQ ID NO: 2917924 - RNA, 19 nt, Artificial Sequence
  Description of Artificial Sequence: Synthetic oligonucleotide
acaggaaaccagguucacu

SEQ ID NO: 2917925 - RNA, 19 nt, Artificial Sequence
  Description of Artificial Sequence: Synthetic oligonucleotide
caggaaaccagguucacuu

SEQ ID NO: 2917926 - RNA, 19 nt, Artificial Sequence
  Description of Artificial Sequence: Synthetic oligonucleotide
auuuuccaccacaucggca

SEQ ID NO: 2917927 - RNA, 19 nt, Artificial Sequence
  Description of Artificial Sequence: Synthetic oligonucleotide
acuuuuguuuuaggucuga

SEQ ID NO: 2917928 - RNA, 19 nt, Artificial Sequence
  Description of Artificial Sequence: Synthetic oligonucleotide
acuggccccauacuucuua

SEQ ID NO: 2917929 - RNA, 19 nt, Artificial Sequence
  Description of Artificial Sequence: Synthetic oligonucleotide
auuuuccaugcuugaucaa

SEQ ID NO: 2917930 - RNA, 19 nt, Artificial Sequence
  Description of Artificial Sequence: Synthetic oligonucleotide
caggacauuucuucaaggu

SEQ ID NO: 2917931 - RNA, 19 nt, Artificial Sequence
  Description of Artificial Sequence: Synthetic oligonucleotide
augaacuucugcauacauu

SEQ ID NO: 2917932 - RNA, 19 nt, Artificial Sequence
  Description of Artificial Sequence: Synthetic oligonucleotide
guaauacgaguuucugaua

SEQ ID NO: 2917933 - RNA, 19 nt, Artificial Sequence
  Description of Artificial Sequence: Synthetic oligonucleotide
gguacaccugugcaucuac

SEQ ID NO: 2917934 - RNA, 19 nt, Artificial Sequence
  Description of Artificial Sequence: Synthetic oligonucleotide
caucuguacuuuguuuauc

SEQ ID NO: 2917935 - RNA, 19 nt, Artificial Sequence
  Description of Artificial Sequence: Synthetic oligonucleotide
cuggcacaucuguacuuug

SEQ ID NO: 2917936 - RNA, 19 nt, Artificial Sequence
  Description of Artificial Sequence: Synthetic oligonucleotide
gcaggucagagagaaagac

SEQ ID NO: 2917937 - RNA, 19 nt, Artificial Sequence
  Description of Artificial Sequence: Synthetic oligonucleotide
uccaugguuccugcuggca

SEQ ID NO: 2917938 - RNA, 19 nt, Artificial Sequence
  Description of Artificial Sequence: Synthetic oligonucleotide
cacguaucacaggaaacca

SEQ ID NO: 2917939 - RNA, 19 nt, Artificial Sequence
  Description of Artificial Sequence: Synthetic oligonucleotide
ccccauacuucuuaguuca

SEQ ID NO: 2917940 - RNA, 19 nt, Artificial Sequence
  Description of Artificial Sequence: Synthetic oligonucleotide
acucaucaucuuuguucca

SEQ ID NO: 2917941 - RNA, 19 nt, Artificial Sequence
  Description of Artificial Sequence: Synthetic oligonucleotide
uccugcuggcacaucugua

SEQ ID NO: 2917942 - RNA, 19 nt, Artificial Sequence
  Description of Artificial Sequence: Synthetic oligonucleotide
ugccgcugaaggucauaca

SEQ ID NO: 2917943 - RNA, 19 nt, Artificial Sequence
  Description of Artificial Sequence: Synthetic oligonucleotide
ccauacuucuuaguucagc

SEQ ID NO: 2917944 - RNA, 19 nt, Artificial Sequence
  Description of Artificial Sequence: Synthetic oligonucleotide
uuccaccacaucggcaggu

SEQ ID NO: 2917945 - RNA, 19 nt, Artificial Sequence
  Description of Artificial Sequence: Synthetic oligonucleotide
cauuugcagaugggucugc

SEQ ID NO: 2917946 - RNA, 19 nt, Artificial Sequence
  Description of Artificial Sequence: Synthetic oligonucleotide
guucuacaaucagggagca

SEQ ID NO: 2917947 - RNA, 19 nt, Artificial Sequence
  Description of Artificial Sequence: Synthetic oligonucleotide
ggaaaccagguucacuucu

SEQ ID NO: 2917948 - RNA, 19 nt, Artificial Sequence
  Description of Artificial Sequence: Synthetic oligonucleotide
cacaucggcaggucagaga

SEQ ID NO: 2917949 - RNA, 19 nt, Artificial Sequence
  Description of Artificial Sequence: Synthetic oligonucleotide
caggucagagagaaagacu

SEQ ID NO: 2917950 - RNA, 19 nt, Artificial Sequence
  Description of Artificial Sequence: Synthetic oligonucleotide
uucuacaaucagggagcac

SEQ ID NO: 2917951 - RNA, 19 nt, Artificial Sequence
  Description of Artificial Sequence: Synthetic oligonucleotide
ggaguucuacaaucaggga

SEQ ID NO: 2917952 - RNA, 19 nt, Artificial Sequence
  Description of Artificial Sequence: Synthetic oligonucleotide
cgaguuucugauacuuuug

SEQ ID NO: 2917953 - RNA, 19 nt, Artificial Sequence
  Description of Artificial Sequence: Synthetic oligonucleotide
caaugaacuucugcauaca

SEQ ID NO: 2917954 - RNA, 19 nt, Artificial Sequence
  Description of Artificial Sequence: Synthetic oligonucleotide
ugcaucuacuggccccaua

SEQ ID NO: 2917955 - RNA, 19 nt, Artificial Sequence
  Description of Artificial Sequence: Synthetic oligonucleotide
uggccccauacuucuuagu

SEQ ID NO: 2917956 - RNA, 19 nt, Artificial Sequence
  Description of Artificial Sequence: Synthetic oligonucleotide
cuacuggccccauacuucu

SEQ ID NO: 2917957 - RNA, 19 nt, Artificial Sequence
  Description of Artificial Sequence: Synthetic oligonucleotide
cggcaggucagagagaaag

SEQ ID NO: 2917958 - RNA, 19 nt, Artificial Sequence
  Description of Artificial Sequence: Synthetic oligonucleotide
gccccauacuucuuaguuc

SEQ ID NO: 2917959 - RNA, 19 nt, Artificial Sequence
  Description of Artificial Sequence: Synthetic oligonucleotide
cuacaaucagggagcacgu

SEQ ID NO: 2917960 - RNA, 19 nt, Artificial Sequence
  Description of Artificial Sequence: Synthetic oligonucleotide
gucagagagaaagacucau

SEQ ID NO: 2917961 - RNA, 19 nt, Artificial Sequence
  Description of Artificial Sequence: Synthetic oligonucleotide
accacaucggcaggucaga

SEQ ID NO: 2917962 - RNA, 19 nt, Artificial Sequence
  Description of Artificial Sequence: Synthetic oligonucleotide
caucuuuguuccaggacau

SEQ ID NO: 2917963 - RNA, 19 nt, Artificial Sequence
  Description of Artificial Sequence: Synthetic oligonucleotide
augcuguaccaauccuuuu

SEQ ID NO: 2917964 - RNA, 19 nt, Artificial Sequence
  Description of Artificial Sequence: Synthetic oligonucleotide
uccaccacaucggcagguc

SEQ ID NO: 2917965 - RNA, 19 nt, Artificial Sequence
  Description of Artificial Sequence: Synthetic oligonucleotide
uacaaucagggagcacgua

SEQ ID NO: 2917966 - RNA, 19 nt, Artificial Sequence
  Description of Artificial Sequence: Synthetic oligonucleotide
cacaggaaaccagguucac

SEQ ID NO: 2917967 - RNA, 19 nt, Artificial Sequence
  Description of Artificial Sequence: Synthetic oligonucleotide
cuuggagacaguguauuuu

SEQ ID NO: 2917968 - RNA, 19 nt, Artificial Sequence
  Description of Artificial Sequence: Synthetic oligonucleotide
cuucuacuucauccuugga

SEQ ID NO: 2917969 - RNA, 19 nt, Artificial Sequence
  Description of Artificial Sequence: Synthetic oligonucleotide
ccugugcaucuacuggccc

SEQ ID NO: 2917970 - RNA, 19 nt, Artificial Sequence
  Description of Artificial Sequence: Synthetic oligonucleotide
ucaugccgcugaaggucau

SEQ ID NO: 2917971 - RNA, 19 nt, Artificial Sequence
  Description of Artificial Sequence: Synthetic oligonucleotide
gccgcugaaggucauacau

SEQ ID NO: 2917972 - RNA, 19 nt, Artificial Sequence
  Description of Artificial Sequence: Synthetic oligonucleotide
guacuuuguuuaucuggau

SEQ ID NO: 2917973 - RNA, 19 nt, Artificial Sequence
  Description of Artificial Sequence: Synthetic oligonucleotide
ucggcaggucagagagaaa

SEQ ID NO: 2917974 - RNA, 19 nt, Artificial Sequence
  Description of Artificial Sequence: Synthetic oligonucleotide
ggucagagagaaagacuca

SEQ ID NO: 2917975 - RNA, 19 nt, Artificial Sequence
  Description of Artificial Sequence: Synthetic oligonucleotide
augguuccugcuggcacau

SEQ ID NO: 2917976 - RNA, 19 nt, Artificial Sequence
  Description of Artificial Sequence: Synthetic oligonucleotide
gaaaccagguucacuucuu

SEQ ID NO: 2917977 - RNA, 19 nt, Artificial Sequence
  Description of Artificial Sequence: Synthetic oligonucleotide
cuucauucccuagaauuuu

SEQ ID NO: 2917978 - RNA, 19 nt, Artificial Sequence
  Description of Artificial Sequence: Synthetic oligonucleotide
acauuccuccaugguuccu

SEQ ID NO: 2917979 - RNA, 19 nt, Artificial Sequence
  Description of Artificial Sequence: Synthetic oligonucleotide
caucacugaugaaggaguu

SEQ ID NO: 2917980 - RNA, 19 nt, Artificial Sequence
  Description of Artificial Sequence: Synthetic oligonucleotide
cuuuguuuaucuggaugau

SEQ ID NO: 2917981 - RNA, 19 nt, Artificial Sequence
  Description of Artificial Sequence: Synthetic oligonucleotide
ccuagaauuuuccaugcuu

SEQ ID NO: 2917982 - RNA, 19 nt, Artificial Sequence
  Description of Artificial Sequence: Synthetic oligonucleotide
gugucugcucaaaagccau

SEQ ID NO: 2917983 - RNA, 19 nt, Artificial Sequence
  Description of Artificial Sequence: Synthetic oligonucleotide
cacugaugaaggaguucua

SEQ ID NO: 2917984 - RNA, 19 nt, Artificial Sequence
  Description of Artificial Sequence: Synthetic oligonucleotide
gcuucaugccgcugaaggu

SEQ ID NO: 2917985 - RNA, 19 nt, Artificial Sequence
  Description of Artificial Sequence: Synthetic oligonucleotide
ggcaggucagagagaaaga

SEQ ID NO: 2917986 - RNA, 19 nt, Artificial Sequence
  Description of Artificial Sequence: Synthetic oligonucleotide
ggccccauacuucuuaguu

SEQ ID NO: 2917987 - RNA, 19 nt, Artificial Sequence
  Description of Artificial Sequence: Synthetic oligonucleotide
caucggcaggucagagaga

SEQ ID NO: 2917988 - RNA, 19 nt, Artificial Sequence
  Description of Artificial Sequence: Synthetic oligonucleotide
cccaaaaugcuguaccaau

SEQ ID NO: 2917989 - RNA, 19 nt, Artificial Sequence
  Description of Artificial Sequence: Synthetic oligonucleotide
caucuacuggccccauacu

SEQ ID NO: 2917990 - RNA, 19 nt, Artificial Sequence
  Description of Artificial Sequence: Synthetic oligonucleotide
cugcuggcacaucuguacu

SEQ ID NO: 2917991 - RNA, 19 nt, Artificial Sequence
  Description of Artificial Sequence: Synthetic oligonucleotide
ggcacaucuguacuuuguu

SEQ ID NO: 2917992 - RNA, 19 nt, Artificial Sequence
  Description of Artificial Sequence: Synthetic oligonucleotide
caaaagccaucaccauccu

SEQ ID NO: 2917993 - RNA, 19 nt, Artificial Sequence
  Description of Artificial Sequence: Synthetic oligonucleotide
guacaccugugcaucuacu

SEQ ID NO: 2917994 - RNA, 19 nt, Artificial Sequence
  Description of Artificial Sequence: Synthetic oligonucleotide
gcucaaaagccaucaccau

SEQ ID NO: 2917995 - RNA, 19 nt, Artificial Sequence
  Description of Artificial Sequence: Synthetic oligonucleotide
ggagcacguaucacaggaa

SEQ ID NO: 2917996 - RNA, 19 nt, Artificial Sequence
  Description of Artificial Sequence: Synthetic oligonucleotide
ccacaucggcaggucagag

SEQ ID NO: 2917997 - RNA, 19 nt, Artificial Sequence
  Description of Artificial Sequence: Synthetic oligonucleotide
cuucuuaguucagcuucau

SEQ ID NO: 2917998 - RNA, 19 nt, Artificial Sequence
  Description of Artificial Sequence: Synthetic oligonucleotide
caugccgcugaaggucaua

SEQ ID NO: 2917999 - RNA, 19 nt, Artificial Sequence
  Description of Artificial Sequence: Synthetic oligonucleotide
gcuggcacaucuguacuuu

SEQ ID NO: 2918000 - RNA, 19 nt, Artificial Sequence
  Description of Artificial Sequence: Synthetic oligonucleotide
cuucauccuuggagacagu

SEQ ID NO: 2918001 - RNA, 19 nt, Artificial Sequence
  Description of Artificial Sequence: Synthetic oligonucleotide
guuuuaggucugacacauu

SEQ ID NO: 2918002 - RNA, 19 nt, Artificial Sequence
  Description of Artificial Sequence: Synthetic oligonucleotide
cccuagaauuuuccaugcu

SEQ ID NO: 2918003 - RNA, 19 nt, Artificial Sequence
  Description of Artificial Sequence: Synthetic oligonucleotide
ccuuggagacaguguauuu

SEQ ID NO: 2918004 - RNA, 19 nt, Artificial Sequence
  Description of Artificial Sequence: Synthetic oligonucleotide
gcugaaggucauacauuuu

SEQ ID NO: 2918005 - RNA, 19 nt, Artificial Sequence
  Description of Artificial Sequence: Synthetic oligonucleotide
ccgcugaaggucauacauu

SEQ ID NO: 2918006 - RNA, 19 nt, Artificial Sequence
  Description of Artificial Sequence: Synthetic oligonucleotide
gugcaucuacuggccccau

SEQ ID NO: 2918007 - RNA, 19 nt, Artificial Sequence
  Description of Artificial Sequence: Synthetic oligonucleotide
aaagucguaguucaccgcc

SEQ ID NO: 2918008 - RNA, 19 nt, Artificial Sequence
  Description of Artificial Sequence: Synthetic oligonucleotide
uaggugaugacuccgaugc

SEQ ID NO: 2918009 - RNA, 19 nt, Artificial Sequence
  Description of Artificial Sequence: Synthetic oligonucleotide
ucaaagucguaguucaccg

SEQ ID NO: 2918010 - RNA, 19 nt, Artificial Sequence
  Description of Artificial Sequence: Synthetic oligonucleotide
gaaguauuccucaucaaag

SEQ ID NO: 2918011 - RNA, 19 nt, Artificial Sequence
  Description of Artificial Sequence: Synthetic oligonucleotide
ucaucaaagucguaguuca

SEQ ID NO: 2918012 - RNA, 19 nt, Artificial Sequence
  Description of Artificial Sequence: Synthetic oligonucleotide
ugaaguauuccucaucaaa

SEQ ID NO: 2918013 - RNA, 19 nt, Artificial Sequence
  Description of Artificial Sequence: Synthetic oligonucleotide
cucgaaugugacuugaggc

SEQ ID NO: 2918014 - RNA, 19 nt, Artificial Sequence
  Description of Artificial Sequence: Synthetic oligonucleotide
aaguauuccucaucaaagu

SEQ ID NO: 2918015 - RNA, 19 nt, Artificial Sequence
  Description of Artificial Sequence: Synthetic oligonucleotide
aauguaggugaugacuccg

SEQ ID NO: 2918016 - RNA, 19 nt, Artificial Sequence
  Description of Artificial Sequence: Synthetic oligonucleotide
aucaaagucguaguucacc

SEQ ID NO: 2918017 - RNA, 19 nt, Artificial Sequence
  Description of Artificial Sequence: Synthetic oligonucleotide
guauuccucaucaaagucg

SEQ ID NO: 2918018 - RNA, 19 nt, Artificial Sequence
  Description of Artificial Sequence: Synthetic oligonucleotide
uauuccucaucaaagucgu

SEQ ID NO: 2918019 - RNA, 19 nt, Artificial Sequence
  Description of Artificial Sequence: Synthetic oligonucleotide
agaauguaggugaugacuc

SEQ ID NO: 2918020 - RNA, 19 nt, Artificial Sequence
  Description of Artificial Sequence: Synthetic oligonucleotide
ucgaagcuggcguagcucg

SEQ ID NO: 2918021 - RNA, 19 nt, Artificial Sequence
  Description of Artificial Sequence: Synthetic oligonucleotide
ucgaaugugacuugaggcu

SEQ ID NO: 2918022 - RNA, 19 nt, Artificial Sequence
  Description of Artificial Sequence: Synthetic oligonucleotide
uaguucaccgccgagaugu

SEQ ID NO: 2918023 - RNA, 19 nt, Artificial Sequence
  Description of Artificial Sequence: Synthetic oligonucleotide
uuccucaucaaagucguag

SEQ ID NO: 2918024 - RNA, 19 nt, Artificial Sequence
  Description of Artificial Sequence: Synthetic oligonucleotide
auggucauccuccucuugg

SEQ ID NO: 2918025 - RNA, 19 nt, Artificial Sequence
  Description of Artificial Sequence: Synthetic oligonucleotide
cacuccaggagaauguagg

SEQ ID NO: 2918026 - RNA, 19 nt, Artificial Sequence
  Description of Artificial Sequence: Synthetic oligonucleotide
ugcgcgauggucauccucc

SEQ ID NO: 2918027 - RNA, 19 nt, Artificial Sequence
  Description of Artificial Sequence: Synthetic oligonucleotide
ucucccaaggaacgggacg

SEQ ID NO: 2918028 - RNA, 19 nt, Artificial Sequence
  Description of Artificial Sequence: Synthetic oligonucleotide
uuggcuagcucgcuggugc

SEQ ID NO: 2918029 - RNA, 19 nt, Artificial Sequence
  Description of Artificial Sequence: Synthetic oligonucleotide
ugacuugaggcuguauucg

SEQ ID NO: 2918030 - RNA, 19 nt, Artificial Sequence
  Description of Artificial Sequence: Synthetic oligonucleotide
acuccgaugcuccacaugu

SEQ ID NO: 2918031 - RNA, 19 nt, Artificial Sequence
  Description of Artificial Sequence: Synthetic oligonucleotide
uugaccagcagccuucgga

SEQ ID NO: 2918032 - RNA, 19 nt, Artificial Sequence
  Description of Artificial Sequence: Synthetic oligonucleotide
cuuggucucccaaggaacg

SEQ ID NO: 2918033 - RNA, 19 nt, Artificial Sequence
  Description of Artificial Sequence: Synthetic oligonucleotide
acaugucagcccuccaagc

SEQ ID NO: 2918034 - RNA, 19 nt, Artificial Sequence
  Description of Artificial Sequence: Synthetic oligonucleotide
gagugcuccagacucugcg

SEQ ID NO: 2918035 - RNA, 19 nt, Artificial Sequence
  Description of Artificial Sequence: Synthetic oligonucleotide
uucaccgccgagauguuug

SEQ ID NO: 2918036 - RNA, 19 nt, Artificial Sequence
  Description of Artificial Sequence: Synthetic oligonucleotide
agugcuccagacucugcgc

SEQ ID NO: 2918037 - RNA, 19 nt, Artificial Sequence
  Description of Artificial Sequence: Synthetic oligonucleotide
cuugauccaagagugcucc

SEQ ID NO: 2918038 - RNA, 19 nt, Artificial Sequence
  Description of Artificial Sequence: Synthetic oligonucleotide
ucggaugaaguccuuggcu

SEQ ID NO: 2918039 - RNA, 19 nt, Artificial Sequence
  Description of Artificial Sequence: Synthetic oligonucleotide
gaauguaggugaugacucc

SEQ ID NO: 2918040 - RNA, 19 nt, Artificial Sequence
  Description of Artificial Sequence: Synthetic oligonucleotide
guuugugagggucuccugc

SEQ ID NO: 2918041 - RNA, 19 nt, Artificial Sequence
  Description of Artificial Sequence: Synthetic oligonucleotide
cuugaggcuguauucgcgc

SEQ ID NO: 2918042 - RNA, 19 nt, Artificial Sequence
  Description of Artificial Sequence: Synthetic oligonucleotide
aaguccuuggcuagcucgc

SEQ ID NO: 2918043 - RNA, 19 nt, Artificial Sequence
  Description of Artificial Sequence: Synthetic oligonucleotide
uccgaugcuccacauguca

SEQ ID NO: 2918044 - RNA, 19 nt, Artificial Sequence
  Description of Artificial Sequence: Synthetic oligonucleotide
auccaagagugcuccagac

SEQ ID NO: 2918045 - RNA, 19 nt, Artificial Sequence
  Description of Artificial Sequence: Synthetic oligonucleotide
ucuuugaccagcagccuuc

SEQ ID NO: 2918046 - RNA, 19 nt, Artificial Sequence
  Description of Artificial Sequence: Synthetic oligonucleotide
aggagaauguaggugauga

SEQ ID NO: 2918047 - RNA, 19 nt, Artificial Sequence
  Description of Artificial Sequence: Synthetic oligonucleotide
ugcuccacaugucagcccu

SEQ ID NO: 2918048 - RNA, 19 nt, Artificial Sequence
  Description of Artificial Sequence: Synthetic oligonucleotide
caugucagcccuccaagcc

SEQ ID NO: 2918049 - RNA, 19 nt, Artificial Sequence
  Description of Artificial Sequence: Synthetic oligonucleotide
uccagcacgcgcgagaagc

SEQ ID NO: 2918050 - RNA, 19 nt, Artificial Sequence
  Description of Artificial Sequence: Synthetic oligonucleotide
uucggaugaaguccuuggc

SEQ ID NO: 2918051 - RNA, 19 nt, Artificial Sequence
  Description of Artificial Sequence: Synthetic oligonucleotide
uuugugagggucuccugcu

SEQ ID NO: 2918052 - RNA, 19 nt, Artificial Sequence
  Description of Artificial Sequence: Synthetic oligonucleotide
uggucauccuccucuuggg

SEQ ID NO: 2918053 - RNA, 19 nt, Artificial Sequence
  Description of Artificial Sequence: Synthetic oligonucleotide
gaugcuccacaugucagcc

SEQ ID NO: 2918054 - RNA, 19 nt, Artificial Sequence
  Description of Artificial Sequence: Synthetic oligonucleotide
aacgggacgccccacucca

SEQ ID NO: 2918055 - RNA, 19 nt, Artificial Sequence
  Description of Artificial Sequence: Synthetic oligonucleotide
ugauccaagagugcuccag

SEQ ID NO: 2918056 - RNA, 19 nt, Artificial Sequence
  Description of Artificial Sequence: Synthetic oligonucleotide
uccucaucaaagucguagu

SEQ ID NO: 2918057 - RNA, 19 nt, Artificial Sequence
  Description of Artificial Sequence: Synthetic oligonucleotide
aagcgcucgaagcuggcgu

SEQ ID NO: 2918058 - RNA, 19 nt, Artificial Sequence
  Description of Artificial Sequence: Synthetic oligonucleotide
ugaggcuguauucgcgcag

SEQ ID NO: 2918059 - RNA, 19 nt, Artificial Sequence
  Description of Artificial Sequence: Synthetic oligonucleotide
uccucuuggggucuuugac

SEQ ID NO: 2918060 - RNA, 19 nt, Artificial Sequence
  Description of Artificial Sequence: Synthetic oligonucleotide
ugcuuggucucccaaggaa

SEQ ID NO: 2918061 - RNA, 19 nt, Artificial Sequence
  Description of Artificial Sequence: Synthetic oligonucleotide
uccaagagugcuccagacu

SEQ ID NO: 2918062 - RNA, 19 nt, Artificial Sequence
  Description of Artificial Sequence: Synthetic oligonucleotide
uccagacucugcgcgaugg

SEQ ID NO: 2918063 - RNA, 19 nt, Artificial Sequence
  Description of Artificial Sequence: Synthetic oligonucleotide
cacaugucagcccuccaag

SEQ ID NO: 2918064 - RNA, 19 nt, Artificial Sequence
  Description of Artificial Sequence: Synthetic oligonucleotide
gugacuugaggcuguauuc

SEQ ID NO: 2918065 - RNA, 19 nt, Artificial Sequence
  Description of Artificial Sequence: Synthetic oligonucleotide
cucaucaaagucguaguuc

SEQ ID NO: 2918066 - RNA, 19 nt, Artificial Sequence
  Description of Artificial Sequence: Synthetic oligonucleotide
agggucuccugcuuggucu

SEQ ID NO: 2918067 - RNA, 19 nt, Artificial Sequence
  Description of Artificial Sequence: Synthetic oligonucleotide
aggcgugccgcacgcagcc

SEQ ID NO: 2918068 - RNA, 19 nt, Artificial Sequence
  Description of Artificial Sequence: Synthetic oligonucleotide
gccgagauguuugugaggg

SEQ ID NO: 2918069 - RNA, 19 nt, Artificial Sequence
  Description of Artificial Sequence: Synthetic oligonucleotide
ugucagcccuccaagccca

SEQ ID NO: 2918070 - RNA, 19 nt, Artificial Sequence
  Description of Artificial Sequence: Synthetic oligonucleotide
aagagugcuccagacucug

SEQ ID NO: 2918071 - RNA, 19 nt, Artificial Sequence
  Description of Artificial Sequence: Synthetic oligonucleotide
ugcugcugaaguauuccuc

SEQ ID NO: 2918072 - RNA, 19 nt, Artificial Sequence
  Description of Artificial Sequence: Synthetic oligonucleotide
aagucguaguucaccgccg

SEQ ID NO: 2918073 - RNA, 19 nt, Artificial Sequence
  Description of Artificial Sequence: Synthetic oligonucleotide
guaggugaugacuccgaug

SEQ ID NO: 2918074 - RNA, 19 nt, Artificial Sequence
  Description of Artificial Sequence: Synthetic oligonucleotide
ugaccagcagccuucggau

SEQ ID NO: 2918075 - RNA, 19 nt, Artificial Sequence
  Description of Artificial Sequence: Synthetic oligonucleotide
uccugcuuggucucccaag

SEQ ID NO: 2918076 - RNA, 19 nt, Artificial Sequence
  Description of Artificial Sequence: Synthetic oligonucleotide
gagaauguaggugaugacu

SEQ ID NO: 2918077 - RNA, 19 nt, Artificial Sequence
  Description of Artificial Sequence: Synthetic oligonucleotide
ugcucgaaugugacuugag

SEQ ID NO: 2918078 - RNA, 19 nt, Artificial Sequence
  Description of Artificial Sequence: Synthetic oligonucleotide
gugcuccagacucugcgcg

SEQ ID NO: 2918079 - RNA, 19 nt, Artificial Sequence
  Description of Artificial Sequence: Synthetic oligonucleotide
ugcugaaguauuccucauc

SEQ ID NO: 2918080 - RNA, 19 nt, Artificial Sequence
  Description of Artificial Sequence: Synthetic oligonucleotide
gcucgaaugugacuugagg

SEQ ID NO: 2918081 - RNA, 19 nt, Artificial Sequence
  Description of Artificial Sequence: Synthetic oligonucleotide
gagaagcgcucgaagcugg

SEQ ID NO: 2918082 - RNA, 19 nt, Artificial Sequence
  Description of Artificial Sequence: Synthetic oligonucleotide
cagccuucggaugaagucc

SEQ ID NO: 2918083 - RNA, 19 nt, Artificial Sequence
  Description of Artificial Sequence: Synthetic oligonucleotide
gaggcuguauucgcgcagg

SEQ ID NO: 2918084 - RNA, 19 nt, Artificial Sequence
  Description of Artificial Sequence: Synthetic oligonucleotide
accgccgagauguuuguga

SEQ ID NO: 2918085 - RNA, 19 nt, Artificial Sequence
  Description of Artificial Sequence: Synthetic oligonucleotide
cucuuggggucuuugacca

SEQ ID NO: 2918086 - RNA, 19 nt, Artificial Sequence
  Description of Artificial Sequence: Synthetic oligonucleotide
auucgcgcaggcgugccgc

SEQ ID NO: 2918087 - RNA, 19 nt, Artificial Sequence
  Description of Artificial Sequence: Synthetic oligonucleotide
gauccaagagugcuccaga

SEQ ID NO: 2918088 - RNA, 19 nt, Artificial Sequence
  Description of Artificial Sequence: Synthetic oligonucleotide
uauucgcgcaggcgugccg

SEQ ID NO: 2918089 - RNA, 19 nt, Artificial Sequence
  Description of Artificial Sequence: Synthetic oligonucleotide
gaugaaguccuuggcuagc

SEQ ID NO: 2918090 - RNA, 19 nt, Artificial Sequence
  Description of Artificial Sequence: Synthetic oligonucleotide
ugcgcggcaugcucgaaug

SEQ ID NO: 2918091 - RNA, 19 nt, Artificial Sequence
  Description of Artificial Sequence: Synthetic oligonucleotide
uggucucccaaggaacggg

SEQ ID NO: 2918092 - RNA, 19 nt, Artificial Sequence
  Description of Artificial Sequence: Synthetic oligonucleotide
augcuccacaugucagccc

SEQ ID NO: 2918093 - RNA, 19 nt, Artificial Sequence
  Description of Artificial Sequence: Synthetic oligonucleotide
acuccaggagaauguaggu

SEQ ID NO: 2918094 - RNA, 19 nt, Artificial Sequence
  Description of Artificial Sequence: Synthetic oligonucleotide
acuugaggcuguauucgcg

SEQ ID NO: 2918095 - RNA, 19 nt, Artificial Sequence
  Description of Artificial Sequence: Synthetic oligonucleotide
gugagggucuccugcuugg

SEQ ID NO: 2918096 - RNA, 19 nt, Artificial Sequence
  Description of Artificial Sequence: Synthetic oligonucleotide
accuugauccaagagugcu

SEQ ID NO: 2918097 - RNA, 19 nt, Artificial Sequence
  Description of Artificial Sequence: Synthetic oligonucleotide
uguaggugaugacuccgau

SEQ ID NO: 2918098 - RNA, 19 nt, Artificial Sequence
  Description of Artificial Sequence: Synthetic oligonucleotide
cuuggggucuuugaccagc

SEQ ID NO: 2918099 - RNA, 19 nt, Artificial Sequence
  Description of Artificial Sequence: Synthetic oligonucleotide
cucccaaggaacgggacgc

SEQ ID NO: 2918100 - RNA, 19 nt, Artificial Sequence
  Description of Artificial Sequence: Synthetic oligonucleotide
agauguuugugagggucuc

SEQ ID NO: 2918101 - RNA, 19 nt, Artificial Sequence
  Description of Artificial Sequence: Synthetic oligonucleotide
cucugcgcgauggucaucc

SEQ ID NO: 2918102 - RNA, 19 nt, Artificial Sequence
  Description of Artificial Sequence: Synthetic oligonucleotide
ccaagagugcuccagacuc

SEQ ID NO: 2918103 - RNA, 19 nt, Artificial Sequence
  Description of Artificial Sequence: Synthetic oligonucleotide
augacuccgaugcuccaca

SEQ ID NO: 2918104 - RNA, 19 nt, Artificial Sequence
  Description of Artificial Sequence: Synthetic oligonucleotide
ucguaguucaccgccgaga

SEQ ID NO: 2918105 - RNA, 19 nt, Artificial Sequence
  Description of Artificial Sequence: Synthetic oligonucleotide
ucgcuggugcugcugaagu

SEQ ID NO: 2918106 - RNA, 19 nt, Artificial Sequence
  Description of Artificial Sequence: Synthetic oligonucleotide
gugaugacuccgaugcucc

SEQ ID NO: 2918107 - RNA, 19 nt, Artificial Sequence
  Description of Artificial Sequence: Synthetic oligonucleotide
uuggucucccaaggaacgg

SEQ ID NO: 2918108 - RNA, 19 nt, Artificial Sequence
  Description of Artificial Sequence: Synthetic oligonucleotide
aagcccaguggcucguagu

SEQ ID NO: 2918109 - RNA, 19 nt, Artificial Sequence
  Description of Artificial Sequence: Synthetic oligonucleotide
gcaccuugauccaagagug

SEQ ID NO: 2918110 - RNA, 19 nt, Artificial Sequence
  Description of Artificial Sequence: Synthetic oligonucleotide
ggaugaaguccuuggcuag

SEQ ID NO: 2918111 - RNA, 19 nt, Artificial Sequence
  Description of Artificial Sequence: Synthetic oligonucleotide
uugaggcuguauucgcgca

SEQ ID NO: 2918112 - RNA, 19 nt, Artificial Sequence
  Description of Artificial Sequence: Synthetic oligonucleotide
agcccuccaagcccagugg

SEQ ID NO: 2918113 - RNA, 19 nt, Artificial Sequence
  Description of Artificial Sequence: Synthetic oligonucleotide
aggcuguauucgcgcaggc

SEQ ID NO: 2918114 - RNA, 19 nt, Artificial Sequence
  Description of Artificial Sequence: Synthetic oligonucleotide
auguuugugagggucuccu

SEQ ID NO: 2918115 - RNA, 19 nt, Artificial Sequence
  Description of Artificial Sequence: Synthetic oligonucleotide
gaagcgcucgaagcuggcg

SEQ ID NO: 2918116 - RNA, 19 nt, Artificial Sequence
  Description of Artificial Sequence: Synthetic oligonucleotide
gauggucauccuccucuug

SEQ ID NO: 2918117 - RNA, 19 nt, Artificial Sequence
  Description of Artificial Sequence: Synthetic oligonucleotide
gaacgggacgccccacucc

SEQ ID NO: 2918118 - RNA, 19 nt, Artificial Sequence
  Description of Artificial Sequence: Synthetic oligonucleotide
uguauucgcgcaggcgugc

SEQ ID NO: 2918119 - RNA, 19 nt, Artificial Sequence
  Description of Artificial Sequence: Synthetic oligonucleotide
gauguuugugagggucucc

SEQ ID NO: 2918120 - RNA, 19 nt, Artificial Sequence
  Description of Artificial Sequence: Synthetic oligonucleotide
cuguauucgcgcaggcgug

SEQ ID NO: 2918121 - RNA, 19 nt, Artificial Sequence
  Description of Artificial Sequence: Synthetic oligonucleotide
uuggggucuuugaccagca

SEQ ID NO: 2918122 - RNA, 19 nt, Artificial Sequence
  Description of Artificial Sequence: Synthetic oligonucleotide
aagcuggcguagcucgugu

SEQ ID NO: 2918123 - RNA, 19 nt, Artificial Sequence
  Description of Artificial Sequence: Synthetic oligonucleotide
gcugcugaaguauuccuca

SEQ ID NO: 2918124 - RNA, 19 nt, Artificial Sequence
  Description of Artificial Sequence: Synthetic oligonucleotide
uggcguagcucguguugcg

SEQ ID NO: 2918125 - RNA, 19 nt, Artificial Sequence
  Description of Artificial Sequence: Synthetic oligonucleotide
caugcucgaaugugacuug

SEQ ID NO: 2918126 - RNA, 19 nt, Artificial Sequence
  Description of Artificial Sequence: Synthetic oligonucleotide
acguccuccagcacgcgcg

SEQ ID NO: 2918127 - RNA, 19 nt, Artificial Sequence
  Description of Artificial Sequence: Synthetic oligonucleotide
caucaaagucguaguucac

SEQ ID NO: 2918128 - RNA, 19 nt, Artificial Sequence
  Description of Artificial Sequence: Synthetic oligonucleotide
cuccaagcccaguggcucg

SEQ ID NO: 2918129 - RNA, 19 nt, Artificial Sequence
  Description of Artificial Sequence: Synthetic oligonucleotide
agucguaguucaccgccga

SEQ ID NO: 2918130 - RNA, 19 nt, Artificial Sequence
  Description of Artificial Sequence: Synthetic oligonucleotide
cuccaggagaauguaggug

SEQ ID NO: 2918131 - RNA, 19 nt, Artificial Sequence
  Description of Artificial Sequence: Synthetic oligonucleotide
uguugcgcggcaugcucga

SEQ ID NO: 2918132 - RNA, 19 nt, Artificial Sequence
  Description of Artificial Sequence: Synthetic oligonucleotide
cuuugaccagcagccuucg

SEQ ID NO: 2918133 - RNA, 19 nt, Artificial Sequence
  Description of Artificial Sequence: Synthetic oligonucleotide
gacuccgaugcuccacaug

SEQ ID NO: 2918134 - RNA, 19 nt, Artificial Sequence
  Description of Artificial Sequence: Synthetic oligonucleotide
cuggcguagcucguguugc

SEQ ID NO: 2918135 - RNA, 19 nt, Artificial Sequence
  Description of Artificial Sequence: Synthetic oligonucleotide
ccugcuuggucucccaagg

SEQ ID NO: 2918136 - RNA, 19 nt, Artificial Sequence
  Description of Artificial Sequence: Synthetic oligonucleotide
ggucauccuccucuugggg

SEQ ID NO: 2918137 - RNA, 19 nt, Artificial Sequence
  Description of Artificial Sequence: Synthetic oligonucleotide
ucuuggggucuuugaccag

SEQ ID NO: 2918138 - RNA, 19 nt, Artificial Sequence
  Description of Artificial Sequence: Synthetic oligonucleotide
cucgcgcagccccugcucg

SEQ ID NO: 2918139 - RNA, 19 nt, Artificial Sequence
  Description of Artificial Sequence: Synthetic oligonucleotide
agacucugcgcgaugguca

SEQ ID NO: 2918140 - RNA, 19 nt, Artificial Sequence
  Description of Artificial Sequence: Synthetic oligonucleotide
caccuugauccaagagugc

SEQ ID NO: 2918141 - RNA, 19 nt, Artificial Sequence
  Description of Artificial Sequence: Synthetic oligonucleotide
uggugcugcugaaguauuc

SEQ ID NO: 2918142 - RNA, 19 nt, Artificial Sequence
  Description of Artificial Sequence: Synthetic oligonucleotide
uccgcuccggcuuccgggc

SEQ ID NO: 2918143 - RNA, 19 nt, Artificial Sequence
  Description of Artificial Sequence: Synthetic oligonucleotide
gaagcuggcguagcucgug

SEQ ID NO: 2918144 - RNA, 19 nt, Artificial Sequence
  Description of Artificial Sequence: Synthetic oligonucleotide
ggugcugcugaaguauucc

SEQ ID NO: 2918145 - RNA, 19 nt, Artificial Sequence
  Description of Artificial Sequence: Synthetic oligonucleotide
aaggaacgggacgccccac

SEQ ID NO: 2918146 - RNA, 19 nt, Artificial Sequence
  Description of Artificial Sequence: Synthetic oligonucleotide
guguugcgcggcaugcucg

SEQ ID NO: 2918147 - RNA, 19 nt, Artificial Sequence
  Description of Artificial Sequence: Synthetic oligonucleotide
ugcuccagacucugcgcga

SEQ ID NO: 2918148 - RNA, 19 nt, Artificial Sequence
  Description of Artificial Sequence: Synthetic oligonucleotide
uggggucuuugaccagcag

SEQ ID NO: 2918149 - RNA, 19 nt, Artificial Sequence
  Description of Artificial Sequence: Synthetic oligonucleotide
cucguguugcgcggcaugc

SEQ ID NO: 2918150 - RNA, 19 nt, Artificial Sequence
  Description of Artificial Sequence: Synthetic oligonucleotide
ucggccgccgccacguccu

SEQ ID NO: 2918151 - RNA, 19 nt, Artificial Sequence
  Description of Artificial Sequence: Synthetic oligonucleotide
agagugcuccagacucugc

SEQ ID NO: 2918152 - RNA, 19 nt, Artificial Sequence
  Description of Artificial Sequence: Synthetic oligonucleotide
agcucgcuggugcugcuga

SEQ ID NO: 2918153 - RNA, 19 nt, Artificial Sequence
  Description of Artificial Sequence: Synthetic oligonucleotide
uugauccaagagugcucca

SEQ ID NO: 2918154 - RNA, 19 nt, Artificial Sequence
  Description of Artificial Sequence: Synthetic oligonucleotide
cugcgcaccuugauccaag

SEQ ID NO: 2918155 - RNA, 19 nt, Artificial Sequence
  Description of Artificial Sequence: Synthetic oligonucleotide
ggugaugacuccgaugcuc

SEQ ID NO: 2918156 - RNA, 19 nt, Artificial Sequence
  Description of Artificial Sequence: Synthetic oligonucleotide
uccacaugucagcccucca

SEQ ID NO: 2918157 - RNA, 19 nt, Artificial Sequence
  Description of Artificial Sequence: Synthetic oligonucleotide
agaagcgcucgaagcuggc

SEQ ID NO: 2918158 - RNA, 19 nt, Artificial Sequence
  Description of Artificial Sequence: Synthetic oligonucleotide
gucguaguucaccgccgag

SEQ ID NO: 2918159 - RNA, 19 nt, Artificial Sequence
  Description of Artificial Sequence: Synthetic oligonucleotide
ugcgcaccuugauccaaga

SEQ ID NO: 2918160 - RNA, 19 nt, Artificial Sequence
  Description of Artificial Sequence: Synthetic oligonucleotide
cuccacaugucagcccucc

SEQ ID NO: 2918161 - RNA, 19 nt, Artificial Sequence
  Description of Artificial Sequence: Synthetic oligonucleotide
caguggcucguaguugacg

SEQ ID NO: 2918162 - RNA, 19 nt, Artificial Sequence
  Description of Artificial Sequence: Synthetic oligonucleotide
gacgccccacuccaggaga

SEQ ID NO: 2918163 - RNA, 19 nt, Artificial Sequence
  Description of Artificial Sequence: Synthetic oligonucleotide
gcuguauucgcgcaggcgu

SEQ ID NO: 2918164 - RNA, 19 nt, Artificial Sequence
  Description of Artificial Sequence: Synthetic oligonucleotide
gcguagcucguguugcgcg

SEQ ID NO: 2918165 - RNA, 19 nt, Artificial Sequence
  Description of Artificial Sequence: Synthetic oligonucleotide
agcccaguggcucguaguu

SEQ ID NO: 2918166 - RNA, 19 nt, Artificial Sequence
  Description of Artificial Sequence: Synthetic oligonucleotide
aggaacgggacgccccacu

SEQ ID NO: 2918167 - RNA, 19 nt, Artificial Sequence
  Description of Artificial Sequence: Synthetic oligonucleotide
ggagaauguaggugaugac

SEQ ID NO: 2918168 - RNA, 19 nt, Artificial Sequence
  Description of Artificial Sequence: Synthetic oligonucleotide
guaguucaccgccgagaug

SEQ ID NO: 2918169 - RNA, 19 nt, Artificial Sequence
  Description of Artificial Sequence: Synthetic oligonucleotide
cagcccuccaagcccagug

SEQ ID NO: 2918170 - RNA, 19 nt, Artificial Sequence
  Description of Artificial Sequence: Synthetic oligonucleotide
gcagccuucggaugaaguc

SEQ ID NO: 2918171 - RNA, 19 nt, Artificial Sequence
  Description of Artificial Sequence: Synthetic oligonucleotide
uugcgcggcaugcucgaau

SEQ ID NO: 2918172 - RNA, 19 nt, Artificial Sequence
  Description of Artificial Sequence: Synthetic oligonucleotide
caagcccaguggcucguag

SEQ ID NO: 2918173 - RNA, 19 nt, Artificial Sequence
  Description of Artificial Sequence: Synthetic oligonucleotide
ccaaggaacgggacgcccc

SEQ ID NO: 2918174 - RNA, 19 nt, Artificial Sequence
  Description of Artificial Sequence: Synthetic oligonucleotide
ucaccgccgagauguuugu

SEQ ID NO: 2918175 - RNA, 19 nt, Artificial Sequence
  Description of Artificial Sequence: Synthetic oligonucleotide
gucauccuccucuuggggu

SEQ ID NO: 2918176 - RNA, 19 nt, Artificial Sequence
  Description of Artificial Sequence: Synthetic oligonucleotide
gagggucuccugcuugguc

SEQ ID NO: 2918177 - RNA, 19 nt, Artificial Sequence
  Description of Artificial Sequence: Synthetic oligonucleotide
aaugugacuugaggcugua

SEQ ID NO: 2918178 - RNA, 19 nt, Artificial Sequence
  Description of Artificial Sequence: Synthetic oligonucleotide
cacgcagccgccuccgcuc

SEQ ID NO: 2918179 - RNA, 19 nt, Artificial Sequence
  Description of Artificial Sequence: Synthetic oligonucleotide
auguaggugaugacuccga

SEQ ID NO: 2918180 - RNA, 19 nt, Artificial Sequence
  Description of Artificial Sequence: Synthetic oligonucleotide
cacguccuccagcacgcgc

SEQ ID NO: 2918181 - RNA, 19 nt, Artificial Sequence
  Description of Artificial Sequence: Synthetic oligonucleotide
gagauguuugugagggucu

SEQ ID NO: 2918182 - RNA, 19 nt, Artificial Sequence
  Description of Artificial Sequence: Synthetic oligonucleotide
ucgcgcagccccugcucgg

SEQ ID NO: 2918183 - RNA, 19 nt, Artificial Sequence
  Description of Artificial Sequence: Synthetic oligonucleotide
gcuggcguagcucguguug

SEQ ID NO: 2918184 - RNA, 19 nt, Artificial Sequence
  Description of Artificial Sequence: Synthetic oligonucleotide
guccuuggcuagcucgcug

SEQ ID NO: 2918185 - RNA, 19 nt, Artificial Sequence
  Description of Artificial Sequence: Synthetic oligonucleotide
cagacucugcgcgaugguc

SEQ ID NO: 2918186 - RNA, 19 nt, Artificial Sequence
  Description of Artificial Sequence: Synthetic oligonucleotide
cucgaagcuggcguagcuc

SEQ ID NO: 2918187 - RNA, 19 nt, Artificial Sequence
  Description of Artificial Sequence: Synthetic oligonucleotide
cugaaguauuccucaucaa

SEQ ID NO: 2918188 - RNA, 19 nt, Artificial Sequence
  Description of Artificial Sequence: Synthetic oligonucleotide
augcucgaaugugacuuga

SEQ ID NO: 2918189 - RNA, 19 nt, Artificial Sequence
  Description of Artificial Sequence: Synthetic oligonucleotide
gcuuggucucccaaggaac

SEQ ID NO: 2918190 - RNA, 19 nt, Artificial Sequence
  Description of Artificial Sequence: Synthetic oligonucleotide
ggcuguauucgcgcaggcg

SEQ ID NO: 2918191 - RNA, 19 nt, Artificial Sequence
  Description of Artificial Sequence: Synthetic oligonucleotide
caggcgugccgcacgcagc

SEQ ID NO: 2918192 - RNA, 19 nt, Artificial Sequence
  Description of Artificial Sequence: Synthetic oligonucleotide
agccuucggaugaaguccu

SEQ ID NO: 2918193 - RNA, 19 nt, Artificial Sequence
  Description of Artificial Sequence: Synthetic oligonucleotide
aggugaugacuccgaugcu

SEQ ID NO: 2918194 - RNA, 19 nt, Artificial Sequence
  Description of Artificial Sequence: Synthetic oligonucleotide
cucgcuggugcugcugaag

SEQ ID NO: 2918195 - RNA, 19 nt, Artificial Sequence
  Description of Artificial Sequence: Synthetic oligonucleotide
uagcucguguugcgcggca

SEQ ID NO: 2918196 - RNA, 19 nt, Artificial Sequence
  Description of Artificial Sequence: Synthetic oligonucleotide
caggagaauguaggugaug

SEQ ID NO: 2918197 - RNA, 19 nt, Artificial Sequence
  Description of Artificial Sequence: Synthetic oligonucleotide
caaggaacgggacgcccca

SEQ ID NO: 2918198 - RNA, 19 nt, Artificial Sequence
  Description of Artificial Sequence: Synthetic oligonucleotide
cgcgagaagcgcucgaagc

SEQ ID NO: 2918199 - RNA, 19 nt, Artificial Sequence
  Description of Artificial Sequence: Synthetic oligonucleotide
agcagccuucggaugaagu

SEQ ID NO: 2918200 - RNA, 19 nt, Artificial Sequence
  Description of Artificial Sequence: Synthetic oligonucleotide
cgccugcgcaccuugaucc

SEQ ID NO: 2918201 - RNA, 19 nt, Artificial Sequence
  Description of Artificial Sequence: Synthetic oligonucleotide
uggcuagcucgcuggugcu

SEQ ID NO: 2918202 - RNA, 19 nt, Artificial Sequence
  Description of Artificial Sequence: Synthetic oligonucleotide
ccuugauccaagagugcuc

SEQ ID NO: 2918203 - RNA, 19 nt, Artificial Sequence
  Description of Artificial Sequence: Synthetic oligonucleotide
guagcucguguugcgcggc

SEQ ID NO: 2918204 - RNA, 19 nt, Artificial Sequence
  Description of Artificial Sequence: Synthetic oligonucleotide
ucccaaggaacgggacgcc

SEQ ID NO: 2918205 - RNA, 19 nt, Artificial Sequence
  Description of Artificial Sequence: Synthetic oligonucleotide
gcaggcgugccgcacgcag

SEQ ID NO: 2918206 - RNA, 19 nt, Artificial Sequence
  Description of Artificial Sequence: Synthetic oligonucleotide
gaaugugacuugaggcugu

SEQ ID NO: 2918207 - RNA, 19 nt, Artificial Sequence
  Description of Artificial Sequence: Synthetic oligonucleotide
guauucgcgcaggcgugcc

SEQ ID NO: 2918208 - RNA, 19 nt, Artificial Sequence
  Description of Artificial Sequence: Synthetic oligonucleotide
ugacuccgaugcuccacau

SEQ ID NO: 2918209 - RNA, 19 nt, Artificial Sequence
  Description of Artificial Sequence: Synthetic oligonucleotide
cucggccgccgccacgucc

SEQ ID NO: 2918210 - RNA, 19 nt, Artificial Sequence
  Description of Artificial Sequence: Synthetic oligonucleotide
cuccgaugcuccacauguc

SEQ ID NO: 2918211 - RNA, 19 nt, Artificial Sequence
  Description of Artificial Sequence: Synthetic oligonucleotide
ugagggucuccugcuuggu

SEQ ID NO: 2918212 - RNA, 19 nt, Artificial Sequence
  Description of Artificial Sequence: Synthetic oligonucleotide
agcgcucgaagcuggcgua

SEQ ID NO: 2918213 - RNA, 19 nt, Artificial Sequence
  Description of Artificial Sequence: Synthetic oligonucleotide
gcgauggucauccuccucu

SEQ ID NO: 2918214 - RNA, 19 nt, Artificial Sequence
  Description of Artificial Sequence: Synthetic oligonucleotide
cgaugcuccacaugucagc

SEQ ID NO: 2918215 - RNA, 19 nt, Artificial Sequence
  Description of Artificial Sequence: Synthetic oligonucleotide
cugcgcgauggucauccuc

SEQ ID NO: 2918216 - RNA, 19 nt, Artificial Sequence
  Description of Artificial Sequence: Synthetic oligonucleotide
cuccucuuggggucuuuga

SEQ ID NO: 2918217 - RNA, 19 nt, Artificial Sequence
  Description of Artificial Sequence: Synthetic oligonucleotide
ccacuccaggagaauguag

SEQ ID NO: 2918218 - RNA, 19 nt, Artificial Sequence
  Description of Artificial Sequence: Synthetic oligonucleotide
gcuagcucgcuggugcugc

SEQ ID NO: 2918219 - RNA, 19 nt, Artificial Sequence
  Description of Artificial Sequence: Synthetic oligonucleotide
cgagauguuugugaggguc

SEQ ID NO: 2918220 - RNA, 19 nt, Artificial Sequence
  Description of Artificial Sequence: Synthetic oligonucleotide
ccgccgagauguuugugag

SEQ ID NO: 2918221 - RNA, 19 nt, Artificial Sequence
  Description of Artificial Sequence: Synthetic oligonucleotide
uccaagcccaguggcucgu

SEQ ID NO: 2918222 - RNA, 19 nt, Artificial Sequence
  Description of Artificial Sequence: Synthetic oligonucleotide
ucguguugcgcggcaugcu

SEQ ID NO: 2918223 - RNA, 19 nt, Artificial Sequence
  Description of Artificial Sequence: Synthetic oligonucleotide
agcacgcgcgagaagcgcu

SEQ ID NO: 2918224 - RNA, 19 nt, Artificial Sequence
  Description of Artificial Sequence: Synthetic oligonucleotide
ccagcacgcgcgagaagcg

SEQ ID NO: 2918225 - RNA, 19 nt, Artificial Sequence
  Description of Artificial Sequence: Synthetic oligonucleotide
cgaaugugacuugaggcug

SEQ ID NO: 2918226 - RNA, 19 nt, Artificial Sequence
  Description of Artificial Sequence: Synthetic oligonucleotide
cucgcgccugcgcaccuug

SEQ ID NO: 2918227 - RNA, 19 nt, Artificial Sequence
  Description of Artificial Sequence: Synthetic oligonucleotide
ggacgccccacuccaggag

SEQ ID NO: 2918228 - RNA, 19 nt, Artificial Sequence
  Description of Artificial Sequence: Synthetic oligonucleotide
aguccuuggcuagcucgcu

SEQ ID NO: 2918229 - RNA, 19 nt, Artificial Sequence
  Description of Artificial Sequence: Synthetic oligonucleotide
gugcugcugaaguauuccu

SEQ ID NO: 2918230 - RNA, 19 nt, Artificial Sequence
  Description of Artificial Sequence: Synthetic oligonucleotide
uccgggcgccguccucgcg

SEQ ID NO: 2918231 - RNA, 19 nt, Artificial Sequence
  Description of Artificial Sequence: Synthetic oligonucleotide
cagcacgcgcgagaagcgc

SEQ ID NO: 2918232 - RNA, 19 nt, Artificial Sequence
  Description of Artificial Sequence: Synthetic oligonucleotide
uucgcgcaggcgugccgca

SEQ ID NO: 2918233 - RNA, 19 nt, Artificial Sequence
  Description of Artificial Sequence: Synthetic oligonucleotide
cguagcucguguugcgcgg

SEQ ID NO: 2918234 - RNA, 19 nt, Artificial Sequence
  Description of Artificial Sequence: Synthetic oligonucleotide
gccgccacguccuccagca

SEQ ID NO: 2918235 - RNA, 19 nt, Artificial Sequence
  Description of Artificial Sequence: Synthetic oligonucleotide
ggaacgggacgccccacuc

SEQ ID NO: 2918236 - RNA, 19 nt, Artificial Sequence
  Description of Artificial Sequence: Synthetic oligonucleotide
gucuuugaccagcagccuu

SEQ ID NO: 2918237 - RNA, 19 nt, Artificial Sequence
  Description of Artificial Sequence: Synthetic oligonucleotide
caagagugcuccagacucu

SEQ ID NO: 2918238 - RNA, 19 nt, Artificial Sequence
  Description of Artificial Sequence: Synthetic oligonucleotide
cacgcgcgagaagcgcucg

SEQ ID NO: 2918239 - RNA, 19 nt, Artificial Sequence
  Description of Artificial Sequence: Synthetic oligonucleotide
agcucgcgcagccccugcu

SEQ ID NO: 2918240 - RNA, 19 nt, Artificial Sequence
  Description of Artificial Sequence: Synthetic oligonucleotide
gucucccaaggaacgggac

SEQ ID NO: 2918241 - RNA, 19 nt, Artificial Sequence
  Description of Artificial Sequence: Synthetic oligonucleotide
gcccuccaagcccaguggc

SEQ ID NO: 2918242 - RNA, 19 nt, Artificial Sequence
  Description of Artificial Sequence: Synthetic oligonucleotide
uagcucgcuggugcugcug

SEQ ID NO: 2918243 - RNA, 19 nt, Artificial Sequence
  Description of Artificial Sequence: Synthetic oligonucleotide
cugcuuggucucccaagga

SEQ ID NO: 2918244 - RNA, 19 nt, Artificial Sequence
  Description of Artificial Sequence: Synthetic oligonucleotide
gcgcaccuugauccaagag

SEQ ID NO: 2918245 - RNA, 19 nt, Artificial Sequence
  Description of Artificial Sequence: Synthetic oligonucleotide
cgccacguccuccagcacg

SEQ ID NO: 2918246 - RNA, 19 nt, Artificial Sequence
  Description of Artificial Sequence: Synthetic oligonucleotide
gcgcgagaagcgcucgaag

SEQ ID NO: 2918247 - RNA, 19 nt, Artificial Sequence
  Description of Artificial Sequence: Synthetic oligonucleotide
uuccgggcgccguccucgc

SEQ ID NO: 2918248 - RNA, 19 nt, Artificial Sequence
  Description of Artificial Sequence: Synthetic oligonucleotide
gccacguccuccagcacgc

SEQ ID NO: 2918249 - RNA, 19 nt, Artificial Sequence
  Description of Artificial Sequence: Synthetic oligonucleotide
gcgagaagcgcucgaagcu

SEQ ID NO: 2918250 - RNA, 19 nt, Artificial Sequence
  Description of Artificial Sequence: Synthetic oligonucleotide
gacucugcgcgauggucau

SEQ ID NO: 2918251 - RNA, 19 nt, Artificial Sequence
  Description of Artificial Sequence: Synthetic oligonucleotide
gcucguguugcgcggcaug

SEQ ID NO: 2918252 - RNA, 19 nt, Artificial Sequence
  Description of Artificial Sequence: Synthetic oligonucleotide
gcaugcucgaaugugacuu

SEQ ID NO: 2918253 - RNA, 19 nt, Artificial Sequence
  Description of Artificial Sequence: Synthetic oligonucleotide
cuccagacucugcgcgaug

SEQ ID NO: 2918254 - RNA, 19 nt, Artificial Sequence
  Description of Artificial Sequence: Synthetic oligonucleotide
ugccgcacgcagccgccuc

SEQ ID NO: 2918255 - RNA, 19 nt, Artificial Sequence
  Description of Artificial Sequence: Synthetic oligonucleotide
ucagcccuccaagcccagu

SEQ ID NO: 2918256 - RNA, 19 nt, Artificial Sequence
  Description of Artificial Sequence: Synthetic oligonucleotide
agcuggcguagcucguguu

SEQ ID NO: 2918257 - RNA, 19 nt, Artificial Sequence
  Description of Artificial Sequence: Synthetic oligonucleotide
ccuucggaugaaguccuug

SEQ ID NO: 2918258 - RNA, 19 nt, Artificial Sequence
  Description of Artificial Sequence: Synthetic oligonucleotide
ggcguagcucguguugcgc

SEQ ID NO: 2918259 - RNA, 19 nt, Artificial Sequence
  Description of Artificial Sequence: Synthetic oligonucleotide
acucugcgcgauggucauc

SEQ ID NO: 2918260 - RNA, 19 nt, Artificial Sequence
  Description of Artificial Sequence: Synthetic oligonucleotide
ucgcgccugcgcaccuuga

SEQ ID NO: 2918261 - RNA, 19 nt, Artificial Sequence
  Description of Artificial Sequence: Synthetic oligonucleotide
uccucgcgccugcgcaccu

SEQ ID NO: 2918262 - RNA, 19 nt, Artificial Sequence
  Description of Artificial Sequence: Synthetic oligonucleotide
gccccacuccaggagaaug

SEQ ID NO: 2918263 - RNA, 19 nt, Artificial Sequence
  Description of Artificial Sequence: Synthetic oligonucleotide
ggucucccaaggaacggga

SEQ ID NO: 2918264 - RNA, 19 nt, Artificial Sequence
  Description of Artificial Sequence: Synthetic oligonucleotide
guccucgcgccugcgcacc

SEQ ID NO: 2918265 - RNA, 19 nt, Artificial Sequence
  Description of Artificial Sequence: Synthetic oligonucleotide
acgcgcgagaagcgcucga

SEQ ID NO: 2918266 - RNA, 19 nt, Artificial Sequence
  Description of Artificial Sequence: Synthetic oligonucleotide
gcgugccgcacgcagccgc

SEQ ID NO: 2918267 - RNA, 19 nt, Artificial Sequence
  Description of Artificial Sequence: Synthetic oligonucleotide
gggucuccugcuuggucuc

SEQ ID NO: 2918268 - RNA, 19 nt, Artificial Sequence
  Description of Artificial Sequence: Synthetic oligonucleotide
augugacuugaggcuguau

SEQ ID NO: 2918269 - RNA, 19 nt, Artificial Sequence
  Description of Artificial Sequence: Synthetic oligonucleotide
gcggcaugcucgaauguga

SEQ ID NO: 2918270 - RNA, 19 nt, Artificial Sequence
  Description of Artificial Sequence: Synthetic oligonucleotide
uccggcuuccgggcgccgu

SEQ ID NO: 2918271 - RNA, 19 nt, Artificial Sequence
  Description of Artificial Sequence: Synthetic oligonucleotide
cugcucggccgccgccacg

SEQ ID NO: 2918272 - RNA, 19 nt, Artificial Sequence
  Description of Artificial Sequence: Synthetic oligonucleotide
cggaugaaguccuuggcua

SEQ ID NO: 2918273 - RNA, 19 nt, Artificial Sequence
  Description of Artificial Sequence: Synthetic oligonucleotide
cccgcugcagcucgcgcag

SEQ ID NO: 2918274 - RNA, 19 nt, Artificial Sequence
  Description of Artificial Sequence: Synthetic oligonucleotide
cgcaccuugauccaagagu

SEQ ID NO: 2918275 - RNA, 19 nt, Artificial Sequence
  Description of Artificial Sequence: Synthetic oligonucleotide
cgagaagcgcucgaagcug

SEQ ID NO: 2918276 - RNA, 19 nt, Artificial Sequence
  Description of Artificial Sequence: Synthetic oligonucleotide
cagcagccuucggaugaag

SEQ ID NO: 2918277 - RNA, 19 nt, Artificial Sequence
  Description of Artificial Sequence: Synthetic oligonucleotide
cccaaggaacgggacgccc

SEQ ID NO: 2918278 - RNA, 19 nt, Artificial Sequence
  Description of Artificial Sequence: Synthetic oligonucleotide
ccacaugucagcccuccaa

SEQ ID NO: 2918279 - RNA, 19 nt, Artificial Sequence
  Description of Artificial Sequence: Synthetic oligonucleotide
cagcucgcgcagccccugc

SEQ ID NO: 2918280 - RNA, 19 nt, Artificial Sequence
  Description of Artificial Sequence: Synthetic oligonucleotide
gggacgccccacuccagga

SEQ ID NO: 2918281 - RNA, 19 nt, Artificial Sequence
  Description of Artificial Sequence: Synthetic oligonucleotide
cguguugcgcggcaugcuc

SEQ ID NO: 2918282 - RNA, 19 nt, Artificial Sequence
  Description of Artificial Sequence: Synthetic oligonucleotide
gcuggugcugcugaaguau

SEQ ID NO: 2918283 - RNA, 19 nt, Artificial Sequence
  Description of Artificial Sequence: Synthetic oligonucleotide
cgccgagauguuugugagg

SEQ ID NO: 2918284 - RNA, 19 nt, Artificial Sequence
  Description of Artificial Sequence: Synthetic oligonucleotide
cggcaugcucgaaugugac

SEQ ID NO: 2918285 - RNA, 19 nt, Artificial Sequence
  Description of Artificial Sequence: Synthetic oligonucleotide
ggcaugcucgaaugugacu

SEQ ID NO: 2918286 - RNA, 19 nt, Artificial Sequence
  Description of Artificial Sequence: Synthetic oligonucleotide
cugcugaaguauuccucau

SEQ ID NO: 2918287 - RNA, 19 nt, Artificial Sequence
  Description of Artificial Sequence: Synthetic oligonucleotide
ccgggcgccguccucgcgc

SEQ ID NO: 2918288 - RNA, 19 nt, Artificial Sequence
  Description of Artificial Sequence: Synthetic oligonucleotide
caccgccgagauguuugug

SEQ ID NO: 2918289 - RNA, 19 nt, Artificial Sequence
  Description of Artificial Sequence: Synthetic oligonucleotide
gcgccugcgcaccuugauc

SEQ ID NO: 2918290 - RNA, 19 nt, Artificial Sequence
  Description of Artificial Sequence: Synthetic oligonucleotide
agcucguguugcgcggcau

SEQ ID NO: 2918291 - RNA, 19 nt, Artificial Sequence
  Description of Artificial Sequence: Synthetic oligonucleotide
ccaguggcucguaguugac

SEQ ID NO: 2918292 - RNA, 19 nt, Artificial Sequence
  Description of Artificial Sequence: Synthetic oligonucleotide
cuccugcuuggucucccaa

SEQ ID NO: 2918293 - RNA, 19 nt, Artificial Sequence
  Description of Artificial Sequence: Synthetic oligonucleotide
ggcuagcucgcuggugcug

SEQ ID NO: 2918294 - RNA, 19 nt, Artificial Sequence
  Description of Artificial Sequence: Synthetic oligonucleotide
gcagccgccuccgcuccgg

SEQ ID NO: 2918295 - RNA, 19 nt, Artificial Sequence
  Description of Artificial Sequence: Synthetic oligonucleotide
gcagccccugcucggccgc

SEQ ID NO: 2918296 - RNA, 19 nt, Artificial Sequence
  Description of Artificial Sequence: Synthetic oligonucleotide
gucagcccuccaagcccag

SEQ ID NO: 2918297 - RNA, 19 nt, Artificial Sequence
  Description of Artificial Sequence: Synthetic oligonucleotide
ccggccccgcugcagcucg

SEQ ID NO: 2918298 - RNA, 19 nt, Artificial Sequence
  Description of Artificial Sequence: Synthetic oligonucleotide
ucgcgcaggcgugccgcac

SEQ ID NO: 2918299 - RNA, 19 nt, Artificial Sequence
  Description of Artificial Sequence: Synthetic oligonucleotide
cgggacgccccacuccagg

SEQ ID NO: 2918300 - RNA, 19 nt, Artificial Sequence
  Description of Artificial Sequence: Synthetic oligonucleotide
ggucuccugcuuggucucc

SEQ ID NO: 2918301 - RNA, 19 nt, Artificial Sequence
  Description of Artificial Sequence: Synthetic oligonucleotide
gcugcagcucgcgcagccc

SEQ ID NO: 2918302 - RNA, 19 nt, Artificial Sequence
  Description of Artificial Sequence: Synthetic oligonucleotide
auuccucaucaaagucgua

SEQ ID NO: 2918303 - RNA, 19 nt, Artificial Sequence
  Description of Artificial Sequence: Synthetic oligonucleotide
cuggugcugcugaaguauu

SEQ ID NO: 2918304 - RNA, 19 nt, Artificial Sequence
  Description of Artificial Sequence: Synthetic oligonucleotide
cgcggcaugcucgaaugug

SEQ ID NO: 2918305 - RNA, 19 nt, Artificial Sequence
  Description of Artificial Sequence: Synthetic oligonucleotide
gcgcucgaagcuggcguag

SEQ ID NO: 2918306 - RNA, 19 nt, Artificial Sequence
  Description of Artificial Sequence: Synthetic oligonucleotide
gcucgcgcagccccugcuc

SEQ ID NO: 2918307 - RNA, 19 nt, Artificial Sequence
  Description of Artificial Sequence: Synthetic oligonucleotide
acgccccacuccaggagaa

SEQ ID NO: 2918308 - RNA, 19 nt, Artificial Sequence
  Description of Artificial Sequence: Synthetic oligonucleotide
acgggacgccccacuccag

SEQ ID NO: 2918309 - RNA, 19 nt, Artificial Sequence
  Description of Artificial Sequence: Synthetic oligonucleotide
gcgcaggcgugccgcacgc

SEQ ID NO: 2918310 - RNA, 19 nt, Artificial Sequence
  Description of Artificial Sequence: Synthetic oligonucleotide
cagccgccuccgcuccggc

SEQ ID NO: 2918311 - RNA, 19 nt, Artificial Sequence
  Description of Artificial Sequence: Synthetic oligonucleotide
ggcgccguccucgcgccug

SEQ ID NO: 2918312 - RNA, 19 nt, Artificial Sequence
  Description of Artificial Sequence: Synthetic oligonucleotide
gccguccucgcgccugcgc

SEQ ID NO: 2918313 - RNA, 19 nt, Artificial Sequence
  Description of Artificial Sequence: Synthetic oligonucleotide
cgcagccccugcucggccg

SEQ ID NO: 2918314 - RNA, 19 nt, Artificial Sequence
  Description of Artificial Sequence: Synthetic oligonucleotide
cgcugcagcucgcgcagcc

SEQ ID NO: 2918315 - RNA, 19 nt, Artificial Sequence
  Description of Artificial Sequence: Synthetic oligonucleotide
aguucaccgccgagauguu

SEQ ID NO: 2918316 - RNA, 19 nt, Artificial Sequence
  Description of Artificial Sequence: Synthetic oligonucleotide
cgcgcaggcgugccgcacg

SEQ ID NO: 2918317 - RNA, 19 nt, Artificial Sequence
  Description of Artificial Sequence: Synthetic oligonucleotide
gccugcgcaccuugaucca

SEQ ID NO: 2918318 - RNA, 19 nt, Artificial Sequence
  Description of Artificial Sequence: Synthetic oligonucleotide
gcgccggccccgcugcagc

SEQ ID NO: 2918319 - RNA, 19 nt, Artificial Sequence
  Description of Artificial Sequence: Synthetic oligonucleotide
ggccccgcugcagcucgcg

SEQ ID NO: 2918320 - RNA, 19 nt, Artificial Sequence
  Description of Artificial Sequence: Synthetic oligonucleotide
cgugccgcacgcagccgcc

SEQ ID NO: 2918321 - RNA, 19 nt, Artificial Sequence
  Description of Artificial Sequence: Synthetic oligonucleotide
cuagcucgcuggugcugcu

SEQ ID NO: 2918322 - RNA, 19 nt, Artificial Sequence
  Description of Artificial Sequence: Synthetic oligonucleotide
cguaguucaccgccgagau

SEQ ID NO: 2918323 - RNA, 19 nt, Artificial Sequence
  Description of Artificial Sequence: Synthetic oligonucleotide
ggucuuugaccagcagccu

SEQ ID NO: 2918324 - RNA, 19 nt, Artificial Sequence
  Description of Artificial Sequence: Synthetic oligonucleotide
ccguccucgcgccugcgca

SEQ ID NO: 2918325 - RNA, 19 nt, Artificial Sequence
  Description of Artificial Sequence: Synthetic oligonucleotide
ggcgugccgcacgcagccg

SEQ ID NO: 2918326 - RNA, 19 nt, Artificial Sequence
  Description of Artificial Sequence: Synthetic oligonucleotide
ccccgcugcagcucgcgca

SEQ ID NO: 2918327 - RNA, 19 nt, Artificial Sequence
  Description of Artificial Sequence: Synthetic oligonucleotide
ccucaucaaagucguaguu

SEQ ID NO: 2918328 - RNA, 19 nt, Artificial Sequence
  Description of Artificial Sequence: Synthetic oligonucleotide
ccccacuccaggagaaugu

SEQ ID NO: 2918329 - RNA, 19 nt, Artificial Sequence
  Description of Artificial Sequence: Synthetic oligonucleotide
gcacgcgcgagaagcgcuc

SEQ ID NO: 2918330 - RNA, 19 nt, Artificial Sequence
  Description of Artificial Sequence: Synthetic oligonucleotide
gcuccggcuuccgggcgcc

SEQ ID NO: 2918331 - RNA, 19 nt, Artificial Sequence
  Description of Artificial Sequence: Synthetic oligonucleotide
guugcgcggcaugcucgaa

SEQ ID NO: 2918332 - RNA, 19 nt, Artificial Sequence
  Description of Artificial Sequence: Synthetic oligonucleotide
gcgcagccccugcucggcc

SEQ ID NO: 2918333 - RNA, 19 nt, Artificial Sequence
  Description of Artificial Sequence: Synthetic oligonucleotide
gccccgcugcagcucgcgc

SEQ ID NO: 2918334 - RNA, 19 nt, Artificial Sequence
  Description of Artificial Sequence: Synthetic oligonucleotide
guucaccgccgagauguuu

SEQ ID NO: 2918335 - RNA, 19 nt, Artificial Sequence
  Description of Artificial Sequence: Synthetic oligonucleotide
cuccggcuuccgggcgccg

SEQ ID NO: 2918336 - RNA, 19 nt, Artificial Sequence
  Description of Artificial Sequence: Synthetic oligonucleotide
cguccucgcgccugcgcac

SEQ ID NO: 2918337 - RNA, 19 nt, Artificial Sequence
  Description of Artificial Sequence: Synthetic oligonucleotide
ggcgccggccccgcugcag

SEQ ID NO: 2918338 - RNA, 19 nt, Artificial Sequence
  Description of Artificial Sequence: Synthetic oligonucleotide
gcuuccgggcgccguccuc

SEQ ID NO: 2918339 - RNA, 19 nt, Artificial Sequence
  Description of Artificial Sequence: Synthetic oligonucleotide
ccaggagaauguaggugau

SEQ ID NO: 2918340 - RNA, 19 nt, Artificial Sequence
  Description of Artificial Sequence: Synthetic oligonucleotide
gcacgcagccgccuccgcu

SEQ ID NO: 2918341 - RNA, 19 nt, Artificial Sequence
  Description of Artificial Sequence: Synthetic oligonucleotide
cgcucgaagcuggcguagc

SEQ ID NO: 2918342 - RNA, 19 nt, Artificial Sequence
  Description of Artificial Sequence: Synthetic oligonucleotide
ccgcuccggcuuccgggcg

SEQ ID NO: 2918343 - RNA, 19 nt, Artificial Sequence
  Description of Artificial Sequence: Synthetic oligonucleotide
cgcuccggcuuccgggcgc

SEQ ID NO: 2918344 - RNA, 19 nt, Artificial Sequence
  Description of Artificial Sequence: Synthetic oligonucleotide
gcgccguccucgcgccugc

SEQ ID NO: 2918345 - RNA, 19 nt, Artificial Sequence
  Description of Artificial Sequence: Synthetic oligonucleotide
gcucgcuggugcugcugaa

SEQ ID NO: 2918346 - RNA, 19 nt, Artificial Sequence
  Description of Artificial Sequence: Synthetic oligonucleotide
ccggcuuccgggcgccguc

SEQ ID NO: 2918347 - RNA, 19 nt, Artificial Sequence
  Description of Artificial Sequence: Synthetic oligonucleotide
ccacguccuccagcacgcg

SEQ ID NO: 2918348 - RNA, 19 nt, Artificial Sequence
  Description of Artificial Sequence: Synthetic oligonucleotide
cccuccaagcccaguggcu

SEQ ID NO: 2918349 - RNA, 19 nt, Artificial Sequence
  Description of Artificial Sequence: Synthetic oligonucleotide
gcuccacaugucagcccuc

SEQ ID NO: 2918350 - RNA, 19 nt, Artificial Sequence
  Description of Artificial Sequence: Synthetic oligonucleotide
cgcgauggucauccuccuc

SEQ ID NO: 2918351 - RNA, 19 nt, Artificial Sequence
  Description of Artificial Sequence: Synthetic oligonucleotide
cccacuccaggagaaugua

SEQ ID NO: 2918352 - RNA, 19 nt, Artificial Sequence
  Description of Artificial Sequence: Synthetic oligonucleotide
cgggcgccguccucgcgcc

SEQ ID NO: 2918353 - RNA, 19 nt, Artificial Sequence
  Description of Artificial Sequence: Synthetic oligonucleotide
gccgccuccgcuccggcuu

SEQ ID NO: 2918354 - RNA, 19 nt, Artificial Sequence
  Description of Artificial Sequence: Synthetic oligonucleotide
gcuccagacucugcgcgau

SEQ ID NO: 2918355 - RNA, 19 nt, Artificial Sequence
  Description of Artificial Sequence: Synthetic oligonucleotide
ccugcgcaccuugauccaa

SEQ ID NO: 2918356 - RNA, 19 nt, Artificial Sequence
  Description of Artificial Sequence: Synthetic oligonucleotide
gcgcgauggucauccuccu

SEQ ID NO: 2918357 - RNA, 19 nt, Artificial Sequence
  Description of Artificial Sequence: Synthetic oligonucleotide
cgcgcagccccugcucggc

SEQ ID NO: 2918358 - RNA, 19 nt, Artificial Sequence
  Description of Artificial Sequence: Synthetic oligonucleotide
ccagcagccuucggaugaa

SEQ ID NO: 2918359 - RNA, 19 nt, Artificial Sequence
  Description of Artificial Sequence: Synthetic oligonucleotide
ccuuggcuagcucgcuggu

SEQ ID NO: 2918360 - RNA, 19 nt, Artificial Sequence
  Description of Artificial Sequence: Synthetic oligonucleotide
ccagacucugcgcgauggu

SEQ ID NO: 2918361 - RNA, 19 nt, Artificial Sequence
  Description of Artificial Sequence: Synthetic oligonucleotide
ccgagauguuugugagggu

SEQ ID NO: 2918362 - RNA, 19 nt, Artificial Sequence
  Description of Artificial Sequence: Synthetic oligonucleotide
gcgcggcaugcucgaaugu

SEQ ID NO: 2918363 - RNA, 19 nt, Artificial Sequence
  Description of Artificial Sequence: Synthetic oligonucleotide
cguccuccagcacgcgcga

SEQ ID NO: 2918364 - RNA, 19 nt, Artificial Sequence
  Description of Artificial Sequence: Synthetic oligonucleotide
ggcuuccgggcgccguccu

SEQ ID NO: 2918365 - RNA, 19 nt, Artificial Sequence
  Description of Artificial Sequence: Synthetic oligonucleotide
gugccgcacgcagccgccu

SEQ ID NO: 2918366 - RNA, 19 nt, Artificial Sequence
  Description of Artificial Sequence: Synthetic oligonucleotide
cggcuuccgggcgccgucc

SEQ ID NO: 2918367 - RNA, 19 nt, Artificial Sequence
  Description of Artificial Sequence: Synthetic oligonucleotide
ccgcugcagcucgcgcagc

SEQ ID NO: 2918368 - RNA, 19 nt, Artificial Sequence
  Description of Artificial Sequence: Synthetic oligonucleotide
gccggccccgcugcagcuc

SEQ ID NO: 2918369 - RNA, 19 nt, Artificial Sequence
  Description of Artificial Sequence: Synthetic oligonucleotide
ccgccgccacguccuccag

SEQ ID NO: 2918370 - RNA, 19 nt, Artificial Sequence
  Description of Artificial Sequence: Synthetic oligonucleotide
cgaagcuggcguagcucgu

SEQ ID NO: 2918371 - RNA, 19 nt, Artificial Sequence
  Description of Artificial Sequence: Synthetic oligonucleotide
cgcgcgagaagcgcucgaa

SEQ ID NO: 2918372 - RNA, 19 nt, Artificial Sequence
  Description of Artificial Sequence: Synthetic oligonucleotide
cgauggucauccuccucuu

SEQ ID NO: 2918373 - RNA, 19 nt, Artificial Sequence
  Description of Artificial Sequence: Synthetic oligonucleotide
ccaagcccaguggcucgua

SEQ ID NO: 2918374 - RNA, 19 nt, Artificial Sequence
  Description of Artificial Sequence: Synthetic oligonucleotide
cggccccgcugcagcucgc

SEQ ID NO: 2918375 - RNA, 19 nt, Artificial Sequence
  Description of Artificial Sequence: Synthetic oligonucleotide
cgccguccucgcgccugcg

SEQ ID NO: 2918376 - RNA, 19 nt, Artificial Sequence
  Description of Artificial Sequence: Synthetic oligonucleotide
gccuucggaugaaguccuu

SEQ ID NO: 2918377 - RNA, 19 nt, Artificial Sequence
  Description of Artificial Sequence: Synthetic oligonucleotide
cgcgccugcgcaccuugau

SEQ ID NO: 2918378 - RNA, 19 nt, Artificial Sequence
  Description of Artificial Sequence: Synthetic oligonucleotide
gggcgccguccucgcgccu

SEQ ID NO: 2918379 - RNA, 19 nt, Artificial Sequence
  Description of Artificial Sequence: Synthetic oligonucleotide
cgcaggcgugccgcacgca

SEQ ID NO: 2918380 - RNA, 19 nt, Artificial Sequence
  Description of Artificial Sequence: Synthetic oligonucleotide
cggccgccgccacguccuc

SEQ ID NO: 2918381 - RNA, 19 nt, Artificial Sequence
  Description of Artificial Sequence: Synthetic oligonucleotide
cgccggccccgcugcagcu

SEQ ID NO: 2918382 - RNA, 19 nt, Artificial Sequence
  Description of Artificial Sequence: Synthetic oligonucleotide
ccucgcgccugcgcaccuu

SEQ ID NO: 2918383 - RNA, 19 nt, Artificial Sequence
  Description of Artificial Sequence: Synthetic oligonucleotide
cgccccacuccaggagaau

SEQ ID NO: 2918384 - RNA, 19 nt, Artificial Sequence
  Description of Artificial Sequence: Synthetic oligonucleotide
aaaggguugaugcagcagc

SEQ ID NO: 2918385 - RNA, 19 nt, Artificial Sequence
  Description of Artificial Sequence: Synthetic oligonucleotide
aaaguuucgugccuggagc

SEQ ID NO: 2918386 - RNA, 19 nt, Artificial Sequence
  Description of Artificial Sequence: Synthetic oligonucleotide
uacaagaaaggguugaugc

SEQ ID NO: 2918387 - RNA, 19 nt, Artificial Sequence
  Description of Artificial Sequence: Synthetic oligonucleotide
aggcaauaaaguuucgugc

SEQ ID NO: 2918388 - RNA, 19 nt, Artificial Sequence
  Description of Artificial Sequence: Synthetic oligonucleotide
augacaagguagcagaaac

SEQ ID NO: 2918389 - RNA, 19 nt, Artificial Sequence
  Description of Artificial Sequence: Synthetic oligonucleotide
aaguaugccucacaugccg

SEQ ID NO: 2918390 - RNA, 19 nt, Artificial Sequence
  Description of Artificial Sequence: Synthetic oligonucleotide
aauccgauaaccaucuggg

SEQ ID NO: 2918391 - RNA, 19 nt, Artificial Sequence
  Description of Artificial Sequence: Synthetic oligonucleotide
aauaaaguuucgugccugg

SEQ ID NO: 2918392 - RNA, 19 nt, Artificial Sequence
  Description of Artificial Sequence: Synthetic oligonucleotide
uccuugaagagcuugaaga

SEQ ID NO: 2918393 - RNA, 19 nt, Artificial Sequence
  Description of Artificial Sequence: Synthetic oligonucleotide
aaugaaggcauacaagaaa

SEQ ID NO: 2918394 - RNA, 19 nt, Artificial Sequence
  Description of Artificial Sequence: Synthetic oligonucleotide
gaucacagccuccacaugg

SEQ ID NO: 2918395 - RNA, 19 nt, Artificial Sequence
  Description of Artificial Sequence: Synthetic oligonucleotide
gaauccgauaaccaucugg

SEQ ID NO: 2918396 - RNA, 19 nt, Artificial Sequence
  Description of Artificial Sequence: Synthetic oligonucleotide
aacuugacgccaaugaagg

SEQ ID NO: 2918397 - RNA, 19 nt, Artificial Sequence
  Description of Artificial Sequence: Synthetic oligonucleotide
agcuguuccugacugaggc

SEQ ID NO: 2918398 - RNA, 19 nt, Artificial Sequence
  Description of Artificial Sequence: Synthetic oligonucleotide
gaaggcauacaagaaaggg

SEQ ID NO: 2918399 - RNA, 19 nt, Artificial Sequence
  Description of Artificial Sequence: Synthetic oligonucleotide
ggaaguaugccucacaugc

SEQ ID NO: 2918400 - RNA, 19 nt, Artificial Sequence
  Description of Artificial Sequence: Synthetic oligonucleotide
uccgauaaccaucugggcc

SEQ ID NO: 2918401 - RNA, 19 nt, Artificial Sequence
  Description of Artificial Sequence: Synthetic oligonucleotide
guagcagaaacucauggcc

SEQ ID NO: 2918402 - RNA, 19 nt, Artificial Sequence
  Description of Artificial Sequence: Synthetic oligonucleotide
uuggauggugaucacagcc

SEQ ID NO: 2918403 - RNA, 19 nt, Artificial Sequence
  Description of Artificial Sequence: Synthetic oligonucleotide
gacgucauaggcaauaaag

SEQ ID NO: 2918404 - RNA, 19 nt, Artificial Sequence
  Description of Artificial Sequence: Synthetic oligonucleotide
acucauggccagcagaggc

SEQ ID NO: 2918405 - RNA, 19 nt, Artificial Sequence
  Description of Artificial Sequence: Synthetic oligonucleotide
uuccuuguaguccaucagg

SEQ ID NO: 2918406 - RNA, 19 nt, Artificial Sequence
  Description of Artificial Sequence: Synthetic oligonucleotide
uguaggugacgucauaggc

SEQ ID NO: 2918407 - RNA, 19 nt, Artificial Sequence
  Description of Artificial Sequence: Synthetic oligonucleotide
ucagccuccgugcucaugg

SEQ ID NO: 2918408 - RNA, 19 nt, Artificial Sequence
  Description of Artificial Sequence: Synthetic oligonucleotide
uaggcaauaaaguuucgug

SEQ ID NO: 2918409 - RNA, 19 nt, Artificial Sequence
  Description of Artificial Sequence: Synthetic oligonucleotide
uaaaguuucgugccuggag

SEQ ID NO: 2918410 - RNA, 19 nt, Artificial Sequence
  Description of Artificial Sequence: Synthetic oligonucleotide
aaccaucugggccacuugg

SEQ ID NO: 2918411 - RNA, 19 nt, Artificial Sequence
  Description of Artificial Sequence: Synthetic oligonucleotide
ugaugagugagcaucucca

SEQ ID NO: 2918412 - RNA, 19 nt, Artificial Sequence
  Description of Artificial Sequence: Synthetic oligonucleotide
augaugacaagguagcaga

SEQ ID NO: 2918413 - RNA, 19 nt, Artificial Sequence
  Description of Artificial Sequence: Synthetic oligonucleotide
ugaaggcauacaagaaagg

SEQ ID NO: 2918414 - RNA, 19 nt, Artificial Sequence
  Description of Artificial Sequence: Synthetic oligonucleotide
cucuauggggagaaggugg

SEQ ID NO: 2918415 - RNA, 19 nt, Artificial Sequence
  Description of Artificial Sequence: Synthetic oligonucleotide
uuguaguccaucaggggag

SEQ ID NO: 2918416 - RNA, 19 nt, Artificial Sequence
  Description of Artificial Sequence: Synthetic oligonucleotide
agguagcagaaacucaugg

SEQ ID NO: 2918417 - RNA, 19 nt, Artificial Sequence
  Description of Artificial Sequence: Synthetic oligonucleotide
aagaaaggguugaugcagc

SEQ ID NO: 2918418 - RNA, 19 nt, Artificial Sequence
  Description of Artificial Sequence: Synthetic oligonucleotide
gaugaugacaagguagcag

SEQ ID NO: 2918419 - RNA, 19 nt, Artificial Sequence
  Description of Artificial Sequence: Synthetic oligonucleotide
aaacucauggccagcagag

SEQ ID NO: 2918420 - RNA, 19 nt, Artificial Sequence
  Description of Artificial Sequence: Synthetic oligonucleotide
gaacuugacgccaaugaag

SEQ ID NO: 2918421 - RNA, 19 nt, Artificial Sequence
  Description of Artificial Sequence: Synthetic oligonucleotide
ugagugagcaucuccacgu

SEQ ID NO: 2918422 - RNA, 19 nt, Artificial Sequence
  Description of Artificial Sequence: Synthetic oligonucleotide
ucagugaugagugagcauc

SEQ ID NO: 2918423 - RNA, 19 nt, Artificial Sequence
  Description of Artificial Sequence: Synthetic oligonucleotide
augaaggcauacaagaaag

SEQ ID NO: 2918424 - RNA, 19 nt, Artificial Sequence
  Description of Artificial Sequence: Synthetic oligonucleotide
cuugaagaggucacugcgg

SEQ ID NO: 2918425 - RNA, 19 nt, Artificial Sequence
  Description of Artificial Sequence: Synthetic oligonucleotide
gucacugcggaacuugacg

SEQ ID NO: 2918426 - RNA, 19 nt, Artificial Sequence
  Description of Artificial Sequence: Synthetic oligonucleotide
uugaagaggucacugcgga

SEQ ID NO: 2918427 - RNA, 19 nt, Artificial Sequence
  Description of Artificial Sequence: Synthetic oligonucleotide
acuggaguucuucugggag

SEQ ID NO: 2918428 - RNA, 19 nt, Artificial Sequence
  Description of Artificial Sequence: Synthetic oligonucleotide
uaggaauccgauaaccauc

SEQ ID NO: 2918429 - RNA, 19 nt, Artificial Sequence
  Description of Artificial Sequence: Synthetic oligonucleotide
augagugagcaucuccacg

SEQ ID NO: 2918430 - RNA, 19 nt, Artificial Sequence
  Description of Artificial Sequence: Synthetic oligonucleotide
cucacuggaguucuucugg

SEQ ID NO: 2918431 - RNA, 19 nt, Artificial Sequence
  Description of Artificial Sequence: Synthetic oligonucleotide
ucacugcggaacuugacgc

SEQ ID NO: 2918432 - RNA, 19 nt, Artificial Sequence
  Description of Artificial Sequence: Synthetic oligonucleotide
ggcaauaaaguuucgugcc

SEQ ID NO: 2918433 - RNA, 19 nt, Artificial Sequence
  Description of Artificial Sequence: Synthetic oligonucleotide
aaggcauacaagaaagggu

SEQ ID NO: 2918434 - RNA, 19 nt, Artificial Sequence
  Description of Artificial Sequence: Synthetic oligonucleotide
ucaggggagcccucuaugg

SEQ ID NO: 2918435 - RNA, 19 nt, Artificial Sequence
  Description of Artificial Sequence: Synthetic oligonucleotide
gaugcagcagcggacacag

SEQ ID NO: 2918436 - RNA, 19 nt, Artificial Sequence
  Description of Artificial Sequence: Synthetic oligonucleotide
caagaaaggguugaugcag

SEQ ID NO: 2918437 - RNA, 19 nt, Artificial Sequence
  Description of Artificial Sequence: Synthetic oligonucleotide
aggaagaccacugucggag

SEQ ID NO: 2918438 - RNA, 19 nt, Artificial Sequence
  Description of Artificial Sequence: Synthetic oligonucleotide
ucacaugccggcaggaaga

SEQ ID NO: 2918439 - RNA, 19 nt, Artificial Sequence
  Description of Artificial Sequence: Synthetic oligonucleotide
uagcagaaacucauggcca

SEQ ID NO: 2918440 - RNA, 19 nt, Artificial Sequence
  Description of Artificial Sequence: Synthetic oligonucleotide
ugcucauggaaguaugccu

SEQ ID NO: 2918441 - RNA, 19 nt, Artificial Sequence
  Description of Artificial Sequence: Synthetic oligonucleotide
agaagguggugguagucuc

SEQ ID NO: 2918442 - RNA, 19 nt, Artificial Sequence
  Description of Artificial Sequence: Synthetic oligonucleotide
uccacauggucagugauga

SEQ ID NO: 2918443 - RNA, 19 nt, Artificial Sequence
  Description of Artificial Sequence: Synthetic oligonucleotide
uaggugacgucauaggcaa

SEQ ID NO: 2918444 - RNA, 19 nt, Artificial Sequence
  Description of Artificial Sequence: Synthetic oligonucleotide
gaggccacuguacagcagc

SEQ ID NO: 2918445 - RNA, 19 nt, Artificial Sequence
  Description of Artificial Sequence: Synthetic oligonucleotide
acuuggauggugaucacag

SEQ ID NO: 2918446 - RNA, 19 nt, Artificial Sequence
  Description of Artificial Sequence: Synthetic oligonucleotide
cuuguaguccaucagggga

SEQ ID NO: 2918447 - RNA, 19 nt, Artificial Sequence
  Description of Artificial Sequence: Synthetic oligonucleotide
acaagaaaggguugaugca

SEQ ID NO: 2918448 - RNA, 19 nt, Artificial Sequence
  Description of Artificial Sequence: Synthetic oligonucleotide
aguuccuuguaguccauca

SEQ ID NO: 2918449 - RNA, 19 nt, Artificial Sequence
  Description of Artificial Sequence: Synthetic oligonucleotide
agcagaaacucauggccag

SEQ ID NO: 2918450 - RNA, 19 nt, Artificial Sequence
  Description of Artificial Sequence: Synthetic oligonucleotide
aaguuucgugccuggagca

SEQ ID NO: 2918451 - RNA, 19 nt, Artificial Sequence
  Description of Artificial Sequence: Synthetic oligonucleotide
gagaguuccuuguagucca

SEQ ID NO: 2918452 - RNA, 19 nt, Artificial Sequence
  Description of Artificial Sequence: Synthetic oligonucleotide
uggauggugaucacagccu

SEQ ID NO: 2918453 - RNA, 19 nt, Artificial Sequence
  Description of Artificial Sequence: Synthetic oligonucleotide
auccgauaaccaucugggc

SEQ ID NO: 2918454 - RNA, 19 nt, Artificial Sequence
  Description of Artificial Sequence: Synthetic oligonucleotide
ugacaagguagcagaaacu

SEQ ID NO: 2918455 - RNA, 19 nt, Artificial Sequence
  Description of Artificial Sequence: Synthetic oligonucleotide
gaaacucauggccagcaga

SEQ ID NO: 2918456 - RNA, 19 nt, Artificial Sequence
  Description of Artificial Sequence: Synthetic oligonucleotide
ucugggaggccacuguaca

SEQ ID NO: 2918457 - RNA, 19 nt, Artificial Sequence
  Description of Artificial Sequence: Synthetic oligonucleotide
agcagaggcacuaggaauc

SEQ ID NO: 2918458 - RNA, 19 nt, Artificial Sequence
  Description of Artificial Sequence: Synthetic oligonucleotide
uuucgugccuggagcaggg

SEQ ID NO: 2918459 - RNA, 19 nt, Artificial Sequence
  Description of Artificial Sequence: Synthetic oligonucleotide
ucuauggggagaagguggu

SEQ ID NO: 2918460 - RNA, 19 nt, Artificial Sequence
  Description of Artificial Sequence: Synthetic oligonucleotide
cuggaguucuucugggagg

SEQ ID NO: 2918461 - RNA, 19 nt, Artificial Sequence
  Description of Artificial Sequence: Synthetic oligonucleotide
acuugacgccaaugaaggc

SEQ ID NO: 2918462 - RNA, 19 nt, Artificial Sequence
  Description of Artificial Sequence: Synthetic oligonucleotide
gcuugaagaggucacugcg

SEQ ID NO: 2918463 - RNA, 19 nt, Artificial Sequence
  Description of Artificial Sequence: Synthetic oligonucleotide
ucggagcuguuccugacug

SEQ ID NO: 2918464 - RNA, 19 nt, Artificial Sequence
  Description of Artificial Sequence: Synthetic oligonucleotide
aggggagcccucuaugggg

SEQ ID NO: 2918465 - RNA, 19 nt, Artificial Sequence
  Description of Artificial Sequence: Synthetic oligonucleotide
guagucucagccuccgugc

SEQ ID NO: 2918466 - RNA, 19 nt, Artificial Sequence
  Description of Artificial Sequence: Synthetic oligonucleotide
gguggugguagucucagcc

SEQ ID NO: 2918467 - RNA, 19 nt, Artificial Sequence
  Description of Artificial Sequence: Synthetic oligonucleotide
auggaaguaugccucacau

SEQ ID NO: 2918468 - RNA, 19 nt, Artificial Sequence
  Description of Artificial Sequence: Synthetic oligonucleotide
caugccggcaggaagacca

SEQ ID NO: 2918469 - RNA, 19 nt, Artificial Sequence
  Description of Artificial Sequence: Synthetic oligonucleotide
aaggguugaugcagcagcg

SEQ ID NO: 2918470 - RNA, 19 nt, Artificial Sequence
  Description of Artificial Sequence: Synthetic oligonucleotide
uggucagugaugagugagc

SEQ ID NO: 2918471 - RNA, 19 nt, Artificial Sequence
  Description of Artificial Sequence: Synthetic oligonucleotide
caccuuagggcccugggag

SEQ ID NO: 2918472 - RNA, 19 nt, Artificial Sequence
  Description of Artificial Sequence: Synthetic oligonucleotide
ugagcaucuccacgugucc

SEQ ID NO: 2918473 - RNA, 19 nt, Artificial Sequence
  Description of Artificial Sequence: Synthetic oligonucleotide
cacuaggaauccgauaacc

SEQ ID NO: 2918474 - RNA, 19 nt, Artificial Sequence
  Description of Artificial Sequence: Synthetic oligonucleotide
uugacgccaaugaaggcau

SEQ ID NO: 2918475 - RNA, 19 nt, Artificial Sequence
  Description of Artificial Sequence: Synthetic oligonucleotide
gugaugagugagcaucucc

SEQ ID NO: 2918476 - RNA, 19 nt, Artificial Sequence
  Description of Artificial Sequence: Synthetic oligonucleotide
gaugagugagcaucuccac

SEQ ID NO: 2918477 - RNA, 19 nt, Artificial Sequence
  Description of Artificial Sequence: Synthetic oligonucleotide
gguagcagaaacucauggc

SEQ ID NO: 2918478 - RNA, 19 nt, Artificial Sequence
  Description of Artificial Sequence: Synthetic oligonucleotide
uggagcagggugcggauga

SEQ ID NO: 2918479 - RNA, 19 nt, Artificial Sequence
  Description of Artificial Sequence: Synthetic oligonucleotide
uccugacugaggcagccca

SEQ ID NO: 2918480 - RNA, 19 nt, Artificial Sequence
  Description of Artificial Sequence: Synthetic oligonucleotide
acauggucagugaugagug

SEQ ID NO: 2918481 - RNA, 19 nt, Artificial Sequence
  Description of Artificial Sequence: Synthetic oligonucleotide
agcaucuccacguguccuc

SEQ ID NO: 2918482 - RNA, 19 nt, Artificial Sequence
  Description of Artificial Sequence: Synthetic oligonucleotide
ggcacuaggaauccgauaa

SEQ ID NO: 2918483 - RNA, 19 nt, Artificial Sequence
  Description of Artificial Sequence: Synthetic oligonucleotide
uggaaguaugccucacaug

SEQ ID NO: 2918484 - RNA, 19 nt, Artificial Sequence
  Description of Artificial Sequence: Synthetic oligonucleotide
auggucagugaugagugag

SEQ ID NO: 2918485 - RNA, 19 nt, Artificial Sequence
  Description of Artificial Sequence: Synthetic oligonucleotide
cucacaugccggcaggaag

SEQ ID NO: 2918486 - RNA, 19 nt, Artificial Sequence
  Description of Artificial Sequence: Synthetic oligonucleotide
ccaaugaaggcauacaaga

SEQ ID NO: 2918487 - RNA, 19 nt, Artificial Sequence
  Description of Artificial Sequence: Synthetic oligonucleotide
ugggagaguuccuuguagu

SEQ ID NO: 2918488 - RNA, 19 nt, Artificial Sequence
  Description of Artificial Sequence: Synthetic oligonucleotide
auaggcaauaaaguuucgu

SEQ ID NO: 2918489 - RNA, 19 nt, Artificial Sequence
  Description of Artificial Sequence: Synthetic oligonucleotide
auacaagaaaggguugaug

SEQ ID NO: 2918490 - RNA, 19 nt, Artificial Sequence
  Description of Artificial Sequence: Synthetic oligonucleotide
cuguuccugacugaggcag

SEQ ID NO: 2918491 - RNA, 19 nt, Artificial Sequence
  Description of Artificial Sequence: Synthetic oligonucleotide
uggaguucuucugggaggc

SEQ ID NO: 2918492 - RNA, 19 nt, Artificial Sequence
  Description of Artificial Sequence: Synthetic oligonucleotide
guuccuuguaguccaucag

SEQ ID NO: 2918493 - RNA, 19 nt, Artificial Sequence
  Description of Artificial Sequence: Synthetic oligonucleotide
agaaacucauggccagcag

SEQ ID NO: 2918494 - RNA, 19 nt, Artificial Sequence
  Description of Artificial Sequence: Synthetic oligonucleotide
ucuccacguguccucacug

SEQ ID NO: 2918495 - RNA, 19 nt, Artificial Sequence
  Description of Artificial Sequence: Synthetic oligonucleotide
gaaaggguugaugcagcag

SEQ ID NO: 2918496 - RNA, 19 nt, Artificial Sequence
  Description of Artificial Sequence: Synthetic oligonucleotide
caauaaaguuucgugccug

SEQ ID NO: 2918497 - RNA, 19 nt, Artificial Sequence
  Description of Artificial Sequence: Synthetic oligonucleotide
ucuucugggaggccacugu

SEQ ID NO: 2918498 - RNA, 19 nt, Artificial Sequence
  Description of Artificial Sequence: Synthetic oligonucleotide
acgucauaggcaauaaagu

SEQ ID NO: 2918499 - RNA, 19 nt, Artificial Sequence
  Description of Artificial Sequence: Synthetic oligonucleotide
ggugcggaugaugacaagg

SEQ ID NO: 2918500 - RNA, 19 nt, Artificial Sequence
  Description of Artificial Sequence: Synthetic oligonucleotide
ugggccacuuggaugguga

SEQ ID NO: 2918501 - RNA, 19 nt, Artificial Sequence
  Description of Artificial Sequence: Synthetic oligonucleotide
cuugacgccaaugaaggca

SEQ ID NO: 2918502 - RNA, 19 nt, Artificial Sequence
  Description of Artificial Sequence: Synthetic oligonucleotide
aacucauggccagcagagg

SEQ ID NO: 2918503 - RNA, 19 nt, Artificial Sequence
  Description of Artificial Sequence: Synthetic oligonucleotide
ugaugacaagguagcagaa

SEQ ID NO: 2918504 - RNA, 19 nt, Artificial Sequence
  Description of Artificial Sequence: Synthetic oligonucleotide
cauaggcaauaaaguuucg

SEQ ID NO: 2918505 - RNA, 19 nt, Artificial Sequence
  Description of Artificial Sequence: Synthetic oligonucleotide
uggugguagucucagccuc

SEQ ID NO: 2918506 - RNA, 19 nt, Artificial Sequence
  Description of Artificial Sequence: Synthetic oligonucleotide
uccacguguccucacugga

SEQ ID NO: 2918507 - RNA, 19 nt, Artificial Sequence
  Description of Artificial Sequence: Synthetic oligonucleotide
aggcauacaagaaaggguu

SEQ ID NO: 2918508 - RNA, 19 nt, Artificial Sequence
  Description of Artificial Sequence: Synthetic oligonucleotide
acuaggaauccgauaacca

SEQ ID NO: 2918509 - RNA, 19 nt, Artificial Sequence
  Description of Artificial Sequence: Synthetic oligonucleotide
ggcaggaagaccacugucg

SEQ ID NO: 2918510 - RNA, 19 nt, Artificial Sequence
  Description of Artificial Sequence: Synthetic oligonucleotide
agaaaggguugaugcagca

SEQ ID NO: 2918511 - RNA, 19 nt, Artificial Sequence
  Description of Artificial Sequence: Synthetic oligonucleotide
gguagucucagccuccgug

SEQ ID NO: 2918512 - RNA, 19 nt, Artificial Sequence
  Description of Artificial Sequence: Synthetic oligonucleotide
gaaguaugccucacaugcc

SEQ ID NO: 2918513 - RNA, 19 nt, Artificial Sequence
  Description of Artificial Sequence: Synthetic oligonucleotide
guccuugaagagcuugaag

SEQ ID NO: 2918514 - RNA, 19 nt, Artificial Sequence
  Description of Artificial Sequence: Synthetic oligonucleotide
cugggagaguuccuuguag

SEQ ID NO: 2918515 - RNA, 19 nt, Artificial Sequence
  Description of Artificial Sequence: Synthetic oligonucleotide
gcaggaagaccacugucgg

SEQ ID NO: 2918516 - RNA, 19 nt, Artificial Sequence
  Description of Artificial Sequence: Synthetic oligonucleotide
cuuggauggugaucacagc

SEQ ID NO: 2918517 - RNA, 19 nt, Artificial Sequence
  Description of Artificial Sequence: Synthetic oligonucleotide
aggaauccgauaaccaucu

SEQ ID NO: 2918518 - RNA, 19 nt, Artificial Sequence
  Description of Artificial Sequence: Synthetic oligonucleotide
ugggaggccacuguacagc

SEQ ID NO: 2918519 - RNA, 19 nt, Artificial Sequence
  Description of Artificial Sequence: Synthetic oligonucleotide
accacugucggagcuguuc

SEQ ID NO: 2918520 - RNA, 19 nt, Artificial Sequence
  Description of Artificial Sequence: Synthetic oligonucleotide
aucaggggagcccucuaug

SEQ ID NO: 2918521 - RNA, 19 nt, Artificial Sequence
  Description of Artificial Sequence: Synthetic oligonucleotide
ugccucacaugccggcagg

SEQ ID NO: 2918522 - RNA, 19 nt, Artificial Sequence
  Description of Artificial Sequence: Synthetic oligonucleotide
caucugggccacuuggaug

SEQ ID NO: 2918523 - RNA, 19 nt, Artificial Sequence
  Description of Artificial Sequence: Synthetic oligonucleotide
guaggugacgucauaggca

SEQ ID NO: 2918524 - RNA, 19 nt, Artificial Sequence
  Description of Artificial Sequence: Synthetic oligonucleotide
guuucgugccuggagcagg

SEQ ID NO: 2918525 - RNA, 19 nt, Artificial Sequence
  Description of Artificial Sequence: Synthetic oligonucleotide
uccucacuggaguucuucu

SEQ ID NO: 2918526 - RNA, 19 nt, Artificial Sequence
  Description of Artificial Sequence: Synthetic oligonucleotide
ucgugccuggagcagggug

SEQ ID NO: 2918527 - RNA, 19 nt, Artificial Sequence
  Description of Artificial Sequence: Synthetic oligonucleotide
uguuccugacugaggcagc

SEQ ID NO: 2918528 - RNA, 19 nt, Artificial Sequence
  Description of Artificial Sequence: Synthetic oligonucleotide
uaaccaucugggccacuug

SEQ ID NO: 2918529 - RNA, 19 nt, Artificial Sequence
  Description of Artificial Sequence: Synthetic oligonucleotide
gagcuugaagaggucacug

SEQ ID NO: 2918530 - RNA, 19 nt, Artificial Sequence
  Description of Artificial Sequence: Synthetic oligonucleotide
aagguagcagaaacucaug

SEQ ID NO: 2918531 - RNA, 19 nt, Artificial Sequence
  Description of Artificial Sequence: Synthetic oligonucleotide
agugagcaucuccacgugu

SEQ ID NO: 2918532 - RNA, 19 nt, Artificial Sequence
  Description of Artificial Sequence: Synthetic oligonucleotide
aagaccacugucggagcug

SEQ ID NO: 2918533 - RNA, 19 nt, Artificial Sequence
  Description of Artificial Sequence: Synthetic oligonucleotide
cuccacguguccucacugg

SEQ ID NO: 2918534 - RNA, 19 nt, Artificial Sequence
  Description of Artificial Sequence: Synthetic oligonucleotide
caaugaaggcauacaagaa

SEQ ID NO: 2918535 - RNA, 19 nt, Artificial Sequence
  Description of Artificial Sequence: Synthetic oligonucleotide
gcggaugaugacaagguag

SEQ ID NO: 2918536 - RNA, 19 nt, Artificial Sequence
  Description of Artificial Sequence: Synthetic oligonucleotide
aguaugccucacaugccgg

SEQ ID NO: 2918537 - RNA, 19 nt, Artificial Sequence
  Description of Artificial Sequence: Synthetic oligonucleotide
guaugccucacaugccggc

SEQ ID NO: 2918538 - RNA, 19 nt, Artificial Sequence
  Description of Artificial Sequence: Synthetic oligonucleotide
ggagaguuccuuguagucc

SEQ ID NO: 2918539 - RNA, 19 nt, Artificial Sequence
  Description of Artificial Sequence: Synthetic oligonucleotide
uaguccaucaggggagccc

SEQ ID NO: 2918540 - RNA, 19 nt, Artificial Sequence
  Description of Artificial Sequence: Synthetic oligonucleotide
ugacgucauaggcaauaaa

SEQ ID NO: 2918541 - RNA, 19 nt, Artificial Sequence
  Description of Artificial Sequence: Synthetic oligonucleotide
ugaagagcuugaagagguc

SEQ ID NO: 2918542 - RNA, 19 nt, Artificial Sequence
  Description of Artificial Sequence: Synthetic oligonucleotide
ugcggaugaugacaaggua

SEQ ID NO: 2918543 - RNA, 19 nt, Artificial Sequence
  Description of Artificial Sequence: Synthetic oligonucleotide
caggggagcccucuauggg

SEQ ID NO: 2918544 - RNA, 19 nt, Artificial Sequence
  Description of Artificial Sequence: Synthetic oligonucleotide
agucucagccuccgugcuc

SEQ ID NO: 2918545 - RNA, 19 nt, Artificial Sequence
  Description of Artificial Sequence: Synthetic oligonucleotide
agugaugagugagcaucuc

SEQ ID NO: 2918546 - RNA, 19 nt, Artificial Sequence
  Description of Artificial Sequence: Synthetic oligonucleotide
uguaguccaucaggggagc

SEQ ID NO: 2918547 - RNA, 19 nt, Artificial Sequence
  Description of Artificial Sequence: Synthetic oligonucleotide
cacugcggaacuugacgcc

SEQ ID NO: 2918548 - RNA, 19 nt, Artificial Sequence
  Description of Artificial Sequence: Synthetic oligonucleotide
auggugaucacagccucca

SEQ ID NO: 2918549 - RNA, 19 nt, Artificial Sequence
  Description of Artificial Sequence: Synthetic oligonucleotide
gacgccaaugaaggcauac

SEQ ID NO: 2918550 - RNA, 19 nt, Artificial Sequence
  Description of Artificial Sequence: Synthetic oligonucleotide
ugacugaggcagcccaagu

SEQ ID NO: 2918551 - RNA, 19 nt, Artificial Sequence
  Description of Artificial Sequence: Synthetic oligonucleotide
caagguagcagaaacucau

SEQ ID NO: 2918552 - RNA, 19 nt, Artificial Sequence
  Description of Artificial Sequence: Synthetic oligonucleotide
gugcucauggaaguaugcc

SEQ ID NO: 2918553 - RNA, 19 nt, Artificial Sequence
  Description of Artificial Sequence: Synthetic oligonucleotide
gaugacaagguagcagaaa

SEQ ID NO: 2918554 - RNA, 19 nt, Artificial Sequence
  Description of Artificial Sequence: Synthetic oligonucleotide
agaggcacuaggaauccga

SEQ ID NO: 2918555 - RNA, 19 nt, Artificial Sequence
  Description of Artificial Sequence: Synthetic oligonucleotide
uagucucagccuccgugcu

SEQ ID NO: 2918556 - RNA, 19 nt, Artificial Sequence
  Description of Artificial Sequence: Synthetic oligonucleotide
augccucacaugccggcag

SEQ ID NO: 2918557 - RNA, 19 nt, Artificial Sequence
  Description of Artificial Sequence: Synthetic oligonucleotide
uaugccucacaugccggca

SEQ ID NO: 2918558 - RNA, 19 nt, Artificial Sequence
  Description of Artificial Sequence: Synthetic oligonucleotide
ucauggccagcagaggcac

SEQ ID NO: 2918559 - RNA, 19 nt, Artificial Sequence
  Description of Artificial Sequence: Synthetic oligonucleotide
gagugagcaucuccacgug

SEQ ID NO: 2918560 - RNA, 19 nt, Artificial Sequence
  Description of Artificial Sequence: Synthetic oligonucleotide
auggggagaaggugguggu

SEQ ID NO: 2918561 - RNA, 19 nt, Artificial Sequence
  Description of Artificial Sequence: Synthetic oligonucleotide
agguggugguagucucagc

SEQ ID NO: 2918562 - RNA, 19 nt, Artificial Sequence
  Description of Artificial Sequence: Synthetic oligonucleotide
auaaaguuucgugccugga

SEQ ID NO: 2918563 - RNA, 19 nt, Artificial Sequence
  Description of Artificial Sequence: Synthetic oligonucleotide
ugaugcagcagcggacaca

SEQ ID NO: 2918564 - RNA, 19 nt, Artificial Sequence
  Description of Artificial Sequence: Synthetic oligonucleotide
cugggaggccacuguacag

SEQ ID NO: 2918565 - RNA, 19 nt, Artificial Sequence
  Description of Artificial Sequence: Synthetic oligonucleotide
gccacuuggauggugauca

SEQ ID NO: 2918566 - RNA, 19 nt, Artificial Sequence
  Description of Artificial Sequence: Synthetic oligonucleotide
ggagcuguuccugacugag

SEQ ID NO: 2918567 - RNA, 19 nt, Artificial Sequence
  Description of Artificial Sequence: Synthetic oligonucleotide
cggaugaugacaagguagc

SEQ ID NO: 2918568 - RNA, 19 nt, Artificial Sequence
  Description of Artificial Sequence: Synthetic oligonucleotide
ugaagaggucacugcggaa

SEQ ID NO: 2918569 - RNA, 19 nt, Artificial Sequence
  Description of Artificial Sequence: Synthetic oligonucleotide
aguccaucaggggagcccu

SEQ ID NO: 2918570 - RNA, 19 nt, Artificial Sequence
  Description of Artificial Sequence: Synthetic oligonucleotide
cuaggaauccgauaaccau

SEQ ID NO: 2918571 - RNA, 19 nt, Artificial Sequence
  Description of Artificial Sequence: Synthetic oligonucleotide
ggugaucacagccuccaca

SEQ ID NO: 2918572 - RNA, 19 nt, Artificial Sequence
  Description of Artificial Sequence: Synthetic oligonucleotide
cacagccuccacaugguca

SEQ ID NO: 2918573 - RNA, 19 nt, Artificial Sequence
  Description of Artificial Sequence: Synthetic oligonucleotide
caggcuguaggugacguca

SEQ ID NO: 2918574 - RNA, 19 nt, Artificial Sequence
  Description of Artificial Sequence: Synthetic oligonucleotide
aucuccacguguccucacu

SEQ ID NO: 2918575 - RNA, 19 nt, Artificial Sequence
  Description of Artificial Sequence: Synthetic oligonucleotide
aguuucgugccuggagcag

SEQ ID NO: 2918576 - RNA, 19 nt, Artificial Sequence
  Description of Artificial Sequence: Synthetic oligonucleotide
agagcuugaagaggucacu

SEQ ID NO: 2918577 - RNA, 19 nt, Artificial Sequence
  Description of Artificial Sequence: Synthetic oligonucleotide
acugcggaacuugacgcca

SEQ ID NO: 2918578 - RNA, 19 nt, Artificial Sequence
  Description of Artificial Sequence: Synthetic oligonucleotide
aggguugaugcagcagcgg

SEQ ID NO: 2918579 - RNA, 19 nt, Artificial Sequence
  Description of Artificial Sequence: Synthetic oligonucleotide
ugucggagcuguuccugac

SEQ ID NO: 2918580 - RNA, 19 nt, Artificial Sequence
  Description of Artificial Sequence: Synthetic oligonucleotide
ccuuguaguccaucagggg

SEQ ID NO: 2918581 - RNA, 19 nt, Artificial Sequence
  Description of Artificial Sequence: Synthetic oligonucleotide
auaaccaucugggccacuu

SEQ ID NO: 2918582 - RNA, 19 nt, Artificial Sequence
  Description of Artificial Sequence: Synthetic oligonucleotide
ucauggaaguaugccucac

SEQ ID NO: 2918583 - RNA, 19 nt, Artificial Sequence
  Description of Artificial Sequence: Synthetic oligonucleotide
gucauaggcaauaaaguuu

SEQ ID NO: 2918584 - RNA, 19 nt, Artificial Sequence
  Description of Artificial Sequence: Synthetic oligonucleotide
cucauggccagcagaggca

SEQ ID NO: 2918585 - RNA, 19 nt, Artificial Sequence
  Description of Artificial Sequence: Synthetic oligonucleotide
uucuucugggaggccacug

SEQ ID NO: 2918586 - RNA, 19 nt, Artificial Sequence
  Description of Artificial Sequence: Synthetic oligonucleotide
gagcuguuccugacugagg

SEQ ID NO: 2918587 - RNA, 19 nt, Artificial Sequence
  Description of Artificial Sequence: Synthetic oligonucleotide
cucauggaaguaugccuca

SEQ ID NO: 2918588 - RNA, 19 nt, Artificial Sequence
  Description of Artificial Sequence: Synthetic oligonucleotide
guuccugacugaggcagcc

SEQ ID NO: 2918589 - RNA, 19 nt, Artificial Sequence
  Description of Artificial Sequence: Synthetic oligonucleotide
gugagcaucuccacguguc

SEQ ID NO: 2918590 - RNA, 19 nt, Artificial Sequence
  Description of Artificial Sequence: Synthetic oligonucleotide
ggaacuugacgccaaugaa

SEQ ID NO: 2918591 - RNA, 19 nt, Artificial Sequence
  Description of Artificial Sequence: Synthetic oligonucleotide
gugguagucucagccuccg

SEQ ID NO: 2918592 - RNA, 19 nt, Artificial Sequence
  Description of Artificial Sequence: Synthetic oligonucleotide
cauggaaguaugccucaca

SEQ ID NO: 2918593 - RNA, 19 nt, Artificial Sequence
  Description of Artificial Sequence: Synthetic oligonucleotide
accuuagggcccugggaga

SEQ ID NO: 2918594 - RNA, 19 nt, Artificial Sequence
  Description of Artificial Sequence: Synthetic oligonucleotide
uccgugcucauggaaguau

SEQ ID NO: 2918595 - RNA, 19 nt, Artificial Sequence
  Description of Artificial Sequence: Synthetic oligonucleotide
ccgauaaccaucugggcca

SEQ ID NO: 2918596 - RNA, 19 nt, Artificial Sequence
  Description of Artificial Sequence: Synthetic oligonucleotide
gaagaccacugucggagcu

SEQ ID NO: 2918597 - RNA, 19 nt, Artificial Sequence
  Description of Artificial Sequence: Synthetic oligonucleotide
acaugccggcaggaagacc

SEQ ID NO: 2918598 - RNA, 19 nt, Artificial Sequence
  Description of Artificial Sequence: Synthetic oligonucleotide
ggauggugaucacagccuc

SEQ ID NO: 2918599 - RNA, 19 nt, Artificial Sequence
  Description of Artificial Sequence: Synthetic oligonucleotide
gaagguggugguagucuca

SEQ ID NO: 2918600 - RNA, 19 nt, Artificial Sequence
  Description of Artificial Sequence: Synthetic oligonucleotide
uccaucaggggagcccucu

SEQ ID NO: 2918601 - RNA, 19 nt, Artificial Sequence
  Description of Artificial Sequence: Synthetic oligonucleotide
gggagaguuccuuguaguc

SEQ ID NO: 2918602 - RNA, 19 nt, Artificial Sequence
  Description of Artificial Sequence: Synthetic oligonucleotide
cagaaacucauggccagca

SEQ ID NO: 2918603 - RNA, 19 nt, Artificial Sequence
  Description of Artificial Sequence: Synthetic oligonucleotide
cacauggucagugaugagu

SEQ ID NO: 2918604 - RNA, 19 nt, Artificial Sequence
  Description of Artificial Sequence: Synthetic oligonucleotide
gcauacaagaaaggguuga

SEQ ID NO: 2918605 - RNA, 19 nt, Artificial Sequence
  Description of Artificial Sequence: Synthetic oligonucleotide
uggugaucacagccuccac

SEQ ID NO: 2918606 - RNA, 19 nt, Artificial Sequence
  Description of Artificial Sequence: Synthetic oligonucleotide
ggguugaugcagcagcgga

SEQ ID NO: 2918607 - RNA, 19 nt, Artificial Sequence
  Description of Artificial Sequence: Synthetic oligonucleotide
agaccacugucggagcugu

SEQ ID NO: 2918608 - RNA, 19 nt, Artificial Sequence
  Description of Artificial Sequence: Synthetic oligonucleotide
acgccaaugaaggcauaca

SEQ ID NO: 2918609 - RNA, 19 nt, Artificial Sequence
  Description of Artificial Sequence: Synthetic oligonucleotide
aucacagccuccacauggu

SEQ ID NO: 2918610 - RNA, 19 nt, Artificial Sequence
  Description of Artificial Sequence: Synthetic oligonucleotide
gcagcccaaguccuugaag

SEQ ID NO: 2918611 - RNA, 19 nt, Artificial Sequence
  Description of Artificial Sequence: Synthetic oligonucleotide
ggaagaccacugucggagc

SEQ ID NO: 2918612 - RNA, 19 nt, Artificial Sequence
  Description of Artificial Sequence: Synthetic oligonucleotide
uuagggcccugggagaguu

SEQ ID NO: 2918613 - RNA, 19 nt, Artificial Sequence
  Description of Artificial Sequence: Synthetic oligonucleotide
ccacugucggagcuguucc

SEQ ID NO: 2918614 - RNA, 19 nt, Artificial Sequence
  Description of Artificial Sequence: Synthetic oligonucleotide
gcccucuauggggagaagg

SEQ ID NO: 2918615 - RNA, 19 nt, Artificial Sequence
  Description of Artificial Sequence: Synthetic oligonucleotide
uuccugacugaggcagccc

SEQ ID NO: 2918616 - RNA, 19 nt, Artificial Sequence
  Description of Artificial Sequence: Synthetic oligonucleotide
cagggugcggaugaugaca

SEQ ID NO: 2918617 - RNA, 19 nt, Artificial Sequence
  Description of Artificial Sequence: Synthetic oligonucleotide
ggucagugaugagugagca

SEQ ID NO: 2918618 - RNA, 19 nt, Artificial Sequence
  Description of Artificial Sequence: Synthetic oligonucleotide
ggcauacaagaaaggguug

SEQ ID NO: 2918619 - RNA, 19 nt, Artificial Sequence
  Description of Artificial Sequence: Synthetic oligonucleotide
gguugaugcagcagcggac

SEQ ID NO: 2918620 - RNA, 19 nt, Artificial Sequence
  Description of Artificial Sequence: Synthetic oligonucleotide
ugcggaacuugacgccaau

SEQ ID NO: 2918621 - RNA, 19 nt, Artificial Sequence
  Description of Artificial Sequence: Synthetic oligonucleotide
aggcacuaggaauccgaua

SEQ ID NO: 2918622 - RNA, 19 nt, Artificial Sequence
  Description of Artificial Sequence: Synthetic oligonucleotide
cauggucagugaugaguga

SEQ ID NO: 2918623 - RNA, 19 nt, Artificial Sequence
  Description of Artificial Sequence: Synthetic oligonucleotide
gugccuggagcagggugcg

SEQ ID NO: 2918624 - RNA, 19 nt, Artificial Sequence
  Description of Artificial Sequence: Synthetic oligonucleotide
cagcagcggacacaggcca

SEQ ID NO: 2918625 - RNA, 19 nt, Artificial Sequence
  Description of Artificial Sequence: Synthetic oligonucleotide
ugguagucucagccuccgu

SEQ ID NO: 2918626 - RNA, 19 nt, Artificial Sequence
  Description of Artificial Sequence: Synthetic oligonucleotide
agcggacacaggccaggcu

SEQ ID NO: 2918627 - RNA, 19 nt, Artificial Sequence
  Description of Artificial Sequence: Synthetic oligonucleotide
gagcagggugcggaugaug

SEQ ID NO: 2918628 - RNA, 19 nt, Artificial Sequence
  Description of Artificial Sequence: Synthetic oligonucleotide
agggugcggaugaugacaa

SEQ ID NO: 2918629 - RNA, 19 nt, Artificial Sequence
  Description of Artificial Sequence: Synthetic oligonucleotide
gcaauaaaguuucgugccu

SEQ ID NO: 2918630 - RNA, 19 nt, Artificial Sequence
  Description of Artificial Sequence: Synthetic oligonucleotide
ggugguagucucagccucc

SEQ ID NO: 2918631 - RNA, 19 nt, Artificial Sequence
  Description of Artificial Sequence: Synthetic oligonucleotide
accaucugggccacuugga

SEQ ID NO: 2918632 - RNA, 19 nt, Artificial Sequence
  Description of Artificial Sequence: Synthetic oligonucleotide
cuauggggagaagguggug

SEQ ID NO: 2918633 - RNA, 19 nt, Artificial Sequence
  Description of Artificial Sequence: Synthetic oligonucleotide
guaguccaucaggggagcc

SEQ ID NO: 2918634 - RNA, 19 nt, Artificial Sequence
  Description of Artificial Sequence: Synthetic oligonucleotide
guggugguagucucagccu

SEQ ID NO: 2918635 - RNA, 19 nt, Artificial Sequence
  Description of Artificial Sequence: Synthetic oligonucleotide
cugucggagcuguuccuga

SEQ ID NO: 2918636 - RNA, 19 nt, Artificial Sequence
  Description of Artificial Sequence: Synthetic oligonucleotide
caggaagaccacugucgga

SEQ ID NO: 2918637 - RNA, 19 nt, Artificial Sequence
  Description of Artificial Sequence: Synthetic oligonucleotide
gaguuccuuguaguccauc

SEQ ID NO: 2918638 - RNA, 19 nt, Artificial Sequence
  Description of Artificial Sequence: Synthetic oligonucleotide
uggccagcagaggcacuag

SEQ ID NO: 2918639 - RNA, 19 nt, Artificial Sequence
  Description of Artificial Sequence: Synthetic oligonucleotide
cgugcucauggaaguaugc

SEQ ID NO: 2918640 - RNA, 19 nt, Artificial Sequence
  Description of Artificial Sequence: Synthetic oligonucleotide
ggugacgucauaggcaaua

SEQ ID NO: 2918641 - RNA, 19 nt, Artificial Sequence
  Description of Artificial Sequence: Synthetic oligonucleotide
acguguccucacuggaguu

SEQ ID NO: 2918642 - RNA, 19 nt, Artificial Sequence
  Description of Artificial Sequence: Synthetic oligonucleotide
caucuccacguguccucac

SEQ ID NO: 2918643 - RNA, 19 nt, Artificial Sequence
  Description of Artificial Sequence: Synthetic oligonucleotide
ccacguguccucacuggag

SEQ ID NO: 2918644 - RNA, 19 nt, Artificial Sequence
  Description of Artificial Sequence: Synthetic oligonucleotide
cacaugccggcaggaagac

SEQ ID NO: 2918645 - RNA, 19 nt, Artificial Sequence
  Description of Artificial Sequence: Synthetic oligonucleotide
aggcagcccaaguccuuga

SEQ ID NO: 2918646 - RNA, 19 nt, Artificial Sequence
  Description of Artificial Sequence: Synthetic oligonucleotide
cacuuggauggugaucaca

SEQ ID NO: 2918647 - RNA, 19 nt, Artificial Sequence
  Description of Artificial Sequence: Synthetic oligonucleotide
gcacuaggaauccgauaac

SEQ ID NO: 2918648 - RNA, 19 nt, Artificial Sequence
  Description of Artificial Sequence: Synthetic oligonucleotide
gcagaggcacuaggaaucc

SEQ ID NO: 2918649 - RNA, 19 nt, Artificial Sequence
  Description of Artificial Sequence: Synthetic oligonucleotide
gcagcagcggacacaggcc

SEQ ID NO: 2918650 - RNA, 19 nt, Artificial Sequence
  Description of Artificial Sequence: Synthetic oligonucleotide
cacguguccucacuggagu

SEQ ID NO: 2918651 - RNA, 19 nt, Artificial Sequence
  Description of Artificial Sequence: Synthetic oligonucleotide
agccuccgugcucauggaa

SEQ ID NO: 2918652 - RNA, 19 nt, Artificial Sequence
  Description of Artificial Sequence: Synthetic oligonucleotide
cuucugggaggccacugua

SEQ ID NO: 2918653 - RNA, 19 nt, Artificial Sequence
  Description of Artificial Sequence: Synthetic oligonucleotide
cagugaugagugagcaucu

SEQ ID NO: 2918654 - RNA, 19 nt, Artificial Sequence
  Description of Artificial Sequence: Synthetic oligonucleotide
cagcagaggcacuaggaau

SEQ ID NO: 2918655 - RNA, 19 nt, Artificial Sequence
  Description of Artificial Sequence: Synthetic oligonucleotide
gugacgucauaggcaauaa

SEQ ID NO: 2918656 - RNA, 19 nt, Artificial Sequence
  Description of Artificial Sequence: Synthetic oligonucleotide
gagcccucuauggggagaa

SEQ ID NO: 2918657 - RNA, 19 nt, Artificial Sequence
  Description of Artificial Sequence: Synthetic oligonucleotide
gugcggaugaugacaaggu

SEQ ID NO: 2918658 - RNA, 19 nt, Artificial Sequence
  Description of Artificial Sequence: Synthetic oligonucleotide
gcagcggacacaggccagg

SEQ ID NO: 2918659 - RNA, 19 nt, Artificial Sequence
  Description of Artificial Sequence: Synthetic oligonucleotide
cggaacuugacgccaauga

SEQ ID NO: 2918660 - RNA, 19 nt, Artificial Sequence
  Description of Artificial Sequence: Synthetic oligonucleotide
gggaggccacuguacagca

SEQ ID NO: 2918661 - RNA, 19 nt, Artificial Sequence
  Description of Artificial Sequence: Synthetic oligonucleotide
agcagcggacacaggccag

SEQ ID NO: 2918662 - RNA, 19 nt, Artificial Sequence
  Description of Artificial Sequence: Synthetic oligonucleotide
augccggcaggaagaccac

SEQ ID NO: 2918663 - RNA, 19 nt, Artificial Sequence
  Description of Artificial Sequence: Synthetic oligonucleotide
ggaugaugacaagguagca

SEQ ID NO: 2918664 - RNA, 19 nt, Artificial Sequence
  Description of Artificial Sequence: Synthetic oligonucleotide
ccucuauggggagaaggug

SEQ ID NO: 2918665 - RNA, 19 nt, Artificial Sequence
  Description of Artificial Sequence: Synthetic oligonucleotide
ggaauccgauaaccaucug

SEQ ID NO: 2918666 - RNA, 19 nt, Artificial Sequence
  Description of Artificial Sequence: Synthetic oligonucleotide
ccuuagggcccugggagag

SEQ ID NO: 2918667 - RNA, 19 nt, Artificial Sequence
  Description of Artificial Sequence: Synthetic oligonucleotide
ccgugcucauggaaguaug

SEQ ID NO: 2918668 - RNA, 19 nt, Artificial Sequence
  Description of Artificial Sequence: Synthetic oligonucleotide
ggagaagguggugguaguc

SEQ ID NO: 2918669 - RNA, 19 nt, Artificial Sequence
  Description of Artificial Sequence: Synthetic oligonucleotide
cauacaagaaaggguugau

SEQ ID NO: 2918670 - RNA, 19 nt, Artificial Sequence
  Description of Artificial Sequence: Synthetic oligonucleotide
ugacgccaaugaaggcaua

SEQ ID NO: 2918671 - RNA, 19 nt, Artificial Sequence
  Description of Artificial Sequence: Synthetic oligonucleotide
cuggagcagggugcggaug

SEQ ID NO: 2918672 - RNA, 19 nt, Artificial Sequence
  Description of Artificial Sequence: Synthetic oligonucleotide
cagcggacacaggccaggc

SEQ ID NO: 2918673 - RNA, 19 nt, Artificial Sequence
  Description of Artificial Sequence: Synthetic oligonucleotide
gagcaucuccacguguccu

SEQ ID NO: 2918674 - RNA, 19 nt, Artificial Sequence
  Description of Artificial Sequence: Synthetic oligonucleotide
gccggcaggaagaccacug

SEQ ID NO: 2918675 - RNA, 19 nt, Artificial Sequence
  Description of Artificial Sequence: Synthetic oligonucleotide
gccagcagaggcacuagga

SEQ ID NO: 2918676 - RNA, 19 nt, Artificial Sequence
  Description of Artificial Sequence: Synthetic oligonucleotide
uguccucacuggaguucuu

SEQ ID NO: 2918677 - RNA, 19 nt, Artificial Sequence
  Description of Artificial Sequence: Synthetic oligonucleotide
ugccggcaggaagaccacu

SEQ ID NO: 2918678 - RNA, 19 nt, Artificial Sequence
  Description of Artificial Sequence: Synthetic oligonucleotide
ugccuggagcagggugcgg

SEQ ID NO: 2918679 - RNA, 19 nt, Artificial Sequence
  Description of Artificial Sequence: Synthetic oligonucleotide
gucggagcuguuccugacu

SEQ ID NO: 2918680 - RNA, 19 nt, Artificial Sequence
  Description of Artificial Sequence: Synthetic oligonucleotide
gaggcacuaggaauccgau

SEQ ID NO: 2918681 - RNA, 19 nt, Artificial Sequence
  Description of Artificial Sequence: Synthetic oligonucleotide
ggucacugcggaacuugac

SEQ ID NO: 2918682 - RNA, 19 nt, Artificial Sequence
  Description of Artificial Sequence: Synthetic oligonucleotide
gcagggugcggaugaugac

SEQ ID NO: 2918683 - RNA, 19 nt, Artificial Sequence
  Description of Artificial Sequence: Synthetic oligonucleotide
gggagcccucuauggggag

SEQ ID NO: 2918684 - RNA, 19 nt, Artificial Sequence
  Description of Artificial Sequence: Synthetic oligonucleotide
uagggcccugggagaguuc

SEQ ID NO: 2918685 - RNA, 19 nt, Artificial Sequence
  Description of Artificial Sequence: Synthetic oligonucleotide
cugggccacuuggauggug

SEQ ID NO: 2918686 - RNA, 19 nt, Artificial Sequence
  Description of Artificial Sequence: Synthetic oligonucleotide
uucgugccuggagcagggu

SEQ ID NO: 2918687 - RNA, 19 nt, Artificial Sequence
  Description of Artificial Sequence: Synthetic oligonucleotide
gcggaacuugacgccaaug

SEQ ID NO: 2918688 - RNA, 19 nt, Artificial Sequence
  Description of Artificial Sequence: Synthetic oligonucleotide
gcccugggagaguuccuug

SEQ ID NO: 2918689 - RNA, 19 nt, Artificial Sequence
  Description of Artificial Sequence: Synthetic oligonucleotide
ucugggccacuuggauggu

SEQ ID NO: 2918690 - RNA, 19 nt, Artificial Sequence
  Description of Artificial Sequence: Synthetic oligonucleotide
gccuccacauggucaguga

SEQ ID NO: 2918691 - RNA, 19 nt, Artificial Sequence
  Description of Artificial Sequence: Synthetic oligonucleotide
gggugcggaugaugacaag

SEQ ID NO: 2918692 - RNA, 19 nt, Artificial Sequence
  Description of Artificial Sequence: Synthetic oligonucleotide
cgucauaggcaauaaaguu

SEQ ID NO: 2918693 - RNA, 19 nt, Artificial Sequence
  Description of Artificial Sequence: Synthetic oligonucleotide
agaguuccuuguaguccau

SEQ ID NO: 2918694 - RNA, 19 nt, Artificial Sequence
  Description of Artificial Sequence: Synthetic oligonucleotide
ggaggccacuguacagcag

SEQ ID NO: 2918695 - RNA, 19 nt, Artificial Sequence
  Description of Artificial Sequence: Synthetic oligonucleotide
cacaggccaggcuguaggu

SEQ ID NO: 2918696 - RNA, 19 nt, Artificial Sequence
  Description of Artificial Sequence: Synthetic oligonucleotide
ggggagcccucuaugggga

SEQ ID NO: 2918697 - RNA, 19 nt, Artificial Sequence
  Description of Artificial Sequence: Synthetic oligonucleotide
agcccucuauggggagaag

SEQ ID NO: 2918698 - RNA, 19 nt, Artificial Sequence
  Description of Artificial Sequence: Synthetic oligonucleotide
ggaguucuucugggaggcc

SEQ ID NO: 2918699 - RNA, 19 nt, Artificial Sequence
  Description of Artificial Sequence: Synthetic oligonucleotide
cgccaaugaaggcauacaa

SEQ ID NO: 2918700 - RNA, 19 nt, Artificial Sequence
  Description of Artificial Sequence: Synthetic oligonucleotide
ccacauggucagugaugag

SEQ ID NO: 2918701 - RNA, 19 nt, Artificial Sequence
  Description of Artificial Sequence: Synthetic oligonucleotide
cccucuauggggagaaggu

SEQ ID NO: 2918702 - RNA, 19 nt, Artificial Sequence
  Description of Artificial Sequence: Synthetic oligonucleotide
ggccaggcuguaggugacg

SEQ ID NO: 2918703 - RNA, 19 nt, Artificial Sequence
  Description of Artificial Sequence: Synthetic oligonucleotide
caucaggggagcccucuau

SEQ ID NO: 2918704 - RNA, 19 nt, Artificial Sequence
  Description of Artificial Sequence: Synthetic oligonucleotide
ucucagccuccgugcucau

SEQ ID NO: 2918705 - RNA, 19 nt, Artificial Sequence
  Description of Artificial Sequence: Synthetic oligonucleotide
gcaucuccacguguccuca

SEQ ID NO: 2918706 - RNA, 19 nt, Artificial Sequence
  Description of Artificial Sequence: Synthetic oligonucleotide
ggccacuuggauggugauc

SEQ ID NO: 2918707 - RNA, 19 nt, Artificial Sequence
  Description of Artificial Sequence: Synthetic oligonucleotide
gccuggagcagggugcgga

SEQ ID NO: 2918708 - RNA, 19 nt, Artificial Sequence
  Description of Artificial Sequence: Synthetic oligonucleotide
ccaccuuagggcccuggga

SEQ ID NO: 2918709 - RNA, 19 nt, Artificial Sequence
  Description of Artificial Sequence: Synthetic oligonucleotide
ggcagcccaaguccuugaa

SEQ ID NO: 2918710 - RNA, 19 nt, Artificial Sequence
  Description of Artificial Sequence: Synthetic oligonucleotide
cacugucggagcuguuccu

SEQ ID NO: 2918711 - RNA, 19 nt, Artificial Sequence
  Description of Artificial Sequence: Synthetic oligonucleotide
ccacuuggauggugaucac

SEQ ID NO: 2918712 - RNA, 19 nt, Artificial Sequence
  Description of Artificial Sequence: Synthetic oligonucleotide
cagccuccgugcucaugga

SEQ ID NO: 2918713 - RNA, 19 nt, Artificial Sequence
  Description of Artificial Sequence: Synthetic oligonucleotide
cguguccucacuggaguuc

SEQ ID NO: 2918714 - RNA, 19 nt, Artificial Sequence
  Description of Artificial Sequence: Synthetic oligonucleotide
gauaaccaucugggccacu

SEQ ID NO: 2918715 - RNA, 19 nt, Artificial Sequence
  Description of Artificial Sequence: Synthetic oligonucleotide
cggcaggaagaccacuguc

SEQ ID NO: 2918716 - RNA, 19 nt, Artificial Sequence
  Description of Artificial Sequence: Synthetic oligonucleotide
ggccacuguacagcagcuc

SEQ ID NO: 2918717 - RNA, 19 nt, Artificial Sequence
  Description of Artificial Sequence: Synthetic oligonucleotide
guucuucugggaggccacu

SEQ ID NO: 2918718 - RNA, 19 nt, Artificial Sequence
  Description of Artificial Sequence: Synthetic oligonucleotide
ggcuguaggugacgucaua

SEQ ID NO: 2918719 - RNA, 19 nt, Artificial Sequence
  Description of Artificial Sequence: Synthetic oligonucleotide
ccuccgugcucauggaagu

SEQ ID NO: 2918720 - RNA, 19 nt, Artificial Sequence
  Description of Artificial Sequence: Synthetic oligonucleotide
cuccgugcucauggaagua

SEQ ID NO: 2918721 - RNA, 19 nt, Artificial Sequence
  Description of Artificial Sequence: Synthetic oligonucleotide
ccugggagaguuccuugua

SEQ ID NO: 2918722 - RNA, 19 nt, Artificial Sequence
  Description of Artificial Sequence: Synthetic oligonucleotide
aggugacgucauaggcaau

SEQ ID NO: 2918723 - RNA, 19 nt, Artificial Sequence
  Description of Artificial Sequence: Synthetic oligonucleotide
guccaucaggggagcccuc

SEQ ID NO: 2918724 - RNA, 19 nt, Artificial Sequence
  Description of Artificial Sequence: Synthetic oligonucleotide
cgauaaccaucugggccac

SEQ ID NO: 2918725 - RNA, 19 nt, Artificial Sequence
  Description of Artificial Sequence: Synthetic oligonucleotide
cuuagggcccugggagagu

SEQ ID NO: 2918726 - RNA, 19 nt, Artificial Sequence
  Description of Artificial Sequence: Synthetic oligonucleotide
gccucacaugccggcagga

SEQ ID NO: 2918727 - RNA, 19 nt, Artificial Sequence
  Description of Artificial Sequence: Synthetic oligonucleotide
cccugggagaguuccuugu

SEQ ID NO: 2918728 - RNA, 19 nt, Artificial Sequence
  Description of Artificial Sequence: Synthetic oligonucleotide
gccaggcuguaggugacgu

SEQ ID NO: 2918729 - RNA, 19 nt, Artificial Sequence
  Description of Artificial Sequence: Synthetic oligonucleotide
ccucacaugccggcaggaa

SEQ ID NO: 2918730 - RNA, 19 nt, Artificial Sequence
  Description of Artificial Sequence: Synthetic oligonucleotide
ggacacaggccaggcugua

SEQ ID NO: 2918731 - RNA, 19 nt, Artificial Sequence
  Description of Artificial Sequence: Synthetic oligonucleotide
ccggcaggaagaccacugu

SEQ ID NO: 2918732 - RNA, 19 nt, Artificial Sequence
  Description of Artificial Sequence: Synthetic oligonucleotide
cggagcuguuccugacuga

SEQ ID NO: 2918733 - RNA, 19 nt, Artificial Sequence
  Description of Artificial Sequence: Synthetic oligonucleotide
gggccacuuggauggugau

SEQ ID NO: 2918734 - RNA, 19 nt, Artificial Sequence
  Description of Artificial Sequence: Synthetic oligonucleotide
ccaucaggggagcccucua

SEQ ID NO: 2918735 - RNA, 19 nt, Artificial Sequence
  Description of Artificial Sequence: Synthetic oligonucleotide
ggcccugggagaguuccuu

SEQ ID NO: 2918736 - RNA, 19 nt, Artificial Sequence
  Description of Artificial Sequence: Synthetic oligonucleotide
ccuggagcagggugcggau

SEQ ID NO: 2918737 - RNA, 19 nt, Artificial Sequence
  Description of Artificial Sequence: Synthetic oligonucleotide
cggacacaggccaggcugu

SEQ ID NO: 2918738 - RNA, 19 nt, Artificial Sequence
  Description of Artificial Sequence: Synthetic oligonucleotide
cagccuccacauggucagu

SEQ ID NO: 2918739 - RNA, 19 nt, Artificial Sequence
  Description of Artificial Sequence: Synthetic oligonucleotide
gggcccugggagaguuccu

SEQ ID NO: 2918740 - RNA, 19 nt, Artificial Sequence
  Description of Artificial Sequence: Synthetic oligonucleotide
agacaaaacacacauaggg

SEQ ID NO: 2918741 - RNA, 19 nt, Artificial Sequence
  Description of Artificial Sequence: Synthetic oligonucleotide
acagacaaaacacacauag

SEQ ID NO: 2918742 - RNA, 19 nt, Artificial Sequence
  Description of Artificial Sequence: Synthetic oligonucleotide
acaugcuugacacugauag

SEQ ID NO: 2918743 - RNA, 19 nt, Artificial Sequence
  Description of Artificial Sequence: Synthetic oligonucleotide
auuuauacggucucucccc

SEQ ID NO: 2918744 - RNA, 19 nt, Artificial Sequence
  Description of Artificial Sequence: Synthetic oligonucleotide
guguuaaaaggucugagcg

SEQ ID NO: 2918745 - RNA, 19 nt, Artificial Sequence
  Description of Artificial Sequence: Synthetic oligonucleotide
aguccucacauuuauacgg

SEQ ID NO: 2918746 - RNA, 19 nt, Artificial Sequence
  Description of Artificial Sequence: Synthetic oligonucleotide
ugaagcuuuucccacaugc

SEQ ID NO: 2918747 - RNA, 19 nt, Artificial Sequence
  Description of Artificial Sequence: Synthetic oligonucleotide
uuuauaguacuucucgcug

SEQ ID NO: 2918748 - RNA, 19 nt, Artificial Sequence
  Description of Artificial Sequence: Synthetic oligonucleotide
acaaaacacacauagggcu

SEQ ID NO: 2918749 - RNA, 19 nt, Artificial Sequence
  Description of Artificial Sequence: Synthetic oligonucleotide
uuucccacagacaaaacac

SEQ ID NO: 2918750 - RNA, 19 nt, Artificial Sequence
  Description of Artificial Sequence: Synthetic oligonucleotide
uuauaguacuucucgcugg

SEQ ID NO: 2918751 - RNA, 19 nt, Artificial Sequence
  Description of Artificial Sequence: Synthetic oligonucleotide
ucugaugccgacuaagaug

SEQ ID NO: 2918752 - RNA, 19 nt, Artificial Sequence
  Description of Artificial Sequence: Synthetic oligonucleotide
aagcuuuucccacagacaa

SEQ ID NO: 2918753 - RNA, 19 nt, Artificial Sequence
  Description of Artificial Sequence: Synthetic oligonucleotide
ucugucuaaagcauucccc

SEQ ID NO: 2918754 - RNA, 19 nt, Artificial Sequence
  Description of Artificial Sequence: Synthetic oligonucleotide
gauuuauaguacuucucgc

SEQ ID NO: 2918755 - RNA, 19 nt, Artificial Sequence
  Description of Artificial Sequence: Synthetic oligonucleotide
auuuauaguacuucucgcu

SEQ ID NO: 2918756 - RNA, 19 nt, Artificial Sequence
  Description of Artificial Sequence: Synthetic oligonucleotide
uuuaaugaggguugcacuc

SEQ ID NO: 2918757 - RNA, 19 nt, Artificial Sequence
  Description of Artificial Sequence: Synthetic oligonucleotide
uguuaaaaggucugagcgc

SEQ ID NO: 2918758 - RNA, 19 nt, Artificial Sequence
  Description of Artificial Sequence: Synthetic oligonucleotide
augcuugacacugauaggg

SEQ ID NO: 2918759 - RNA, 19 nt, Artificial Sequence
  Description of Artificial Sequence: Synthetic oligonucleotide
acucugggcaugcauaugg

SEQ ID NO: 2918760 - RNA, 19 nt, Artificial Sequence
  Description of Artificial Sequence: Synthetic oligonucleotide
uuccucacgauuuauagua

SEQ ID NO: 2918761 - RNA, 19 nt, Artificial Sequence
  Description of Artificial Sequence: Synthetic oligonucleotide
agauguggaagaucucccc

SEQ ID NO: 2918762 - RNA, 19 nt, Artificial Sequence
  Description of Artificial Sequence: Synthetic oligonucleotide
cauuccucacgauuuauag

SEQ ID NO: 2918763 - RNA, 19 nt, Artificial Sequence
  Description of Artificial Sequence: Synthetic oligonucleotide
gcuugaagaggucugagcg

SEQ ID NO: 2918764 - RNA, 19 nt, Artificial Sequence
  Description of Artificial Sequence: Synthetic oligonucleotide
aaaacacacauagggcuuc

SEQ ID NO: 2918765 - RNA, 19 nt, Artificial Sequence
  Description of Artificial Sequence: Synthetic oligonucleotide
gacaaaacacacauagggc

SEQ ID NO: 2918766 - RNA, 19 nt, Artificial Sequence
  Description of Artificial Sequence: Synthetic oligonucleotide
uauaguacuucucgcuggc

SEQ ID NO: 2918767 - RNA, 19 nt, Artificial Sequence
  Description of Artificial Sequence: Synthetic oligonucleotide
cauuuauacggucucuccc

SEQ ID NO: 2918768 - RNA, 19 nt, Artificial Sequence
  Description of Artificial Sequence: Synthetic oligonucleotide
aagaucuccccacauuccu

SEQ ID NO: 2918769 - RNA, 19 nt, Artificial Sequence
  Description of Artificial Sequence: Synthetic oligonucleotide
aacccucugaugcuugaag

SEQ ID NO: 2918770 - RNA, 19 nt, Artificial Sequence
  Description of Artificial Sequence: Synthetic oligonucleotide
uguccgcugguguuuaacg

SEQ ID NO: 2918771 - RNA, 19 nt, Artificial Sequence
  Description of Artificial Sequence: Synthetic oligonucleotide
ugguguuuaacgagugcag

SEQ ID NO: 2918772 - RNA, 19 nt, Artificial Sequence
  Description of Artificial Sequence: Synthetic oligonucleotide
uccgcugguguuaaaaggu

SEQ ID NO: 2918773 - RNA, 19 nt, Artificial Sequence
  Description of Artificial Sequence: Synthetic oligonucleotide
aagcauuccccacacucug

SEQ ID NO: 2918774 - RNA, 19 nt, Artificial Sequence
  Description of Artificial Sequence: Synthetic oligonucleotide
uuuggcaguccucacauuu

SEQ ID NO: 2918775 - RNA, 19 nt, Artificial Sequence
  Description of Artificial Sequence: Synthetic oligonucleotide
auguggaagaucuccccac

SEQ ID NO: 2918776 - RNA, 19 nt, Artificial Sequence
  Description of Artificial Sequence: Synthetic oligonucleotide
aaggcuggagauguggaag

SEQ ID NO: 2918777 - RNA, 19 nt, Artificial Sequence
  Description of Artificial Sequence: Synthetic oligonucleotide
ucuuuuggcaguccucaca

SEQ ID NO: 2918778 - RNA, 19 nt, Artificial Sequence
  Description of Artificial Sequence: Synthetic oligonucleotide
ugaugcuugaagaggucug

SEQ ID NO: 2918779 - RNA, 19 nt, Artificial Sequence
  Description of Artificial Sequence: Synthetic oligonucleotide
augaggguugcacucugac

SEQ ID NO: 2918780 - RNA, 19 nt, Artificial Sequence
  Description of Artificial Sequence: Synthetic oligonucleotide
uuugugcagucucuggugu

SEQ ID NO: 2918781 - RNA, 19 nt, Artificial Sequence
  Description of Artificial Sequence: Synthetic oligonucleotide
aagaugugagcucugucua

SEQ ID NO: 2918782 - RNA, 19 nt, Artificial Sequence
  Description of Artificial Sequence: Synthetic oligonucleotide
ucugagcgcugcuugaagc

SEQ ID NO: 2918783 - RNA, 19 nt, Artificial Sequence
  Description of Artificial Sequence: Synthetic oligonucleotide
cagacaaaacacacauagg

SEQ ID NO: 2918784 - RNA, 19 nt, Artificial Sequence
  Description of Artificial Sequence: Synthetic oligonucleotide
aaaaggucugagcgcuguc

SEQ ID NO: 2918785 - RNA, 19 nt, Artificial Sequence
  Description of Artificial Sequence: Synthetic oligonucleotide
uuuaacgagugcagcacuc

SEQ ID NO: 2918786 - RNA, 19 nt, Artificial Sequence
  Description of Artificial Sequence: Synthetic oligonucleotide
cuugaagaggucugagcgc

SEQ ID NO: 2918787 - RNA, 19 nt, Artificial Sequence
  Description of Artificial Sequence: Synthetic oligonucleotide
uccgcugguguuuaacgag

SEQ ID NO: 2918788 - RNA, 19 nt, Artificial Sequence
  Description of Artificial Sequence: Synthetic oligonucleotide
ucccacagacaaaacacac

SEQ ID NO: 2918789 - RNA, 19 nt, Artificial Sequence
  Description of Artificial Sequence: Synthetic oligonucleotide
uguuuaacgagugcagcac

SEQ ID NO: 2918790 - RNA, 19 nt, Artificial Sequence
  Description of Artificial Sequence: Synthetic oligonucleotide
cauggguucucugaugccg

SEQ ID NO: 2918791 - RNA, 19 nt, Artificial Sequence
  Description of Artificial Sequence: Synthetic oligonucleotide
gguguuaaaaggucugagc

SEQ ID NO: 2918792 - RNA, 19 nt, Artificial Sequence
  Description of Artificial Sequence: Synthetic oligonucleotide
aacgagugcagcacucugg

SEQ ID NO: 2918793 - RNA, 19 nt, Artificial Sequence
  Description of Artificial Sequence: Synthetic oligonucleotide
uguccgcugguguuaaaag

SEQ ID NO: 2918794 - RNA, 19 nt, Artificial Sequence
  Description of Artificial Sequence: Synthetic oligonucleotide
ugagcucugucuaaagcau

SEQ ID NO: 2918795 - RNA, 19 nt, Artificial Sequence
  Description of Artificial Sequence: Synthetic oligonucleotide
uuuauacggucucuccccu

SEQ ID NO: 2918796 - RNA, 19 nt, Artificial Sequence
  Description of Artificial Sequence: Synthetic oligonucleotide
gugagcucugucuaaagca

SEQ ID NO: 2918797 - RNA, 19 nt, Artificial Sequence
  Description of Artificial Sequence: Synthetic oligonucleotide
uugaagaggucugagcgcu

SEQ ID NO: 2918798 - RNA, 19 nt, Artificial Sequence
  Description of Artificial Sequence: Synthetic oligonucleotide
aaagcauuccccacacucu

SEQ ID NO: 2918799 - RNA, 19 nt, Artificial Sequence
  Description of Artificial Sequence: Synthetic oligonucleotide
ugcuugaagaggucugagc

SEQ ID NO: 2918800 - RNA, 19 nt, Artificial Sequence
  Description of Artificial Sequence: Synthetic oligonucleotide
ugcuugacacugauagggc

SEQ ID NO: 2918801 - RNA, 19 nt, Artificial Sequence
  Description of Artificial Sequence: Synthetic oligonucleotide
caguccucacauuuauacg

SEQ ID NO: 2918802 - RNA, 19 nt, Artificial Sequence
  Description of Artificial Sequence: Synthetic oligonucleotide
cgauuuauaguacuucucg

SEQ ID NO: 2918803 - RNA, 19 nt, Artificial Sequence
  Description of Artificial Sequence: Synthetic oligonucleotide
cucugucuaaagcauuccc

SEQ ID NO: 2918804 - RNA, 19 nt, Artificial Sequence
  Description of Artificial Sequence: Synthetic oligonucleotide
ucugagcgcugucugaccu

SEQ ID NO: 2918805 - RNA, 19 nt, Artificial Sequence
  Description of Artificial Sequence: Synthetic oligonucleotide
cuuugugcagucucuggug

SEQ ID NO: 2918806 - RNA, 19 nt, Artificial Sequence
  Description of Artificial Sequence: Synthetic oligonucleotide
aguacuucucgcuggcaug

SEQ ID NO: 2918807 - RNA, 19 nt, Artificial Sequence
  Description of Artificial Sequence: Synthetic oligonucleotide
guccgcugguguuaaaagg

SEQ ID NO: 2918808 - RNA, 19 nt, Artificial Sequence
  Description of Artificial Sequence: Synthetic oligonucleotide
aaaggcuggagauguggaa

SEQ ID NO: 2918809 - RNA, 19 nt, Artificial Sequence
  Description of Artificial Sequence: Synthetic oligonucleotide
ucccacaugcuugacacug

SEQ ID NO: 2918810 - RNA, 19 nt, Artificial Sequence
  Description of Artificial Sequence: Synthetic oligonucleotide
ugguguuaaaaggucugag

SEQ ID NO: 2918811 - RNA, 19 nt, Artificial Sequence
  Description of Artificial Sequence: Synthetic oligonucleotide
caugcuugacacugauagg

SEQ ID NO: 2918812 - RNA, 19 nt, Artificial Sequence
  Description of Artificial Sequence: Synthetic oligonucleotide
uguggaagaucuccccaca

SEQ ID NO: 2918813 - RNA, 19 nt, Artificial Sequence
  Description of Artificial Sequence: Synthetic oligonucleotide
gauguggaagaucucccca

SEQ ID NO: 2918814 - RNA, 19 nt, Artificial Sequence
  Description of Artificial Sequence: Synthetic oligonucleotide
uaaugaggguugcacucug

SEQ ID NO: 2918815 - RNA, 19 nt, Artificial Sequence
  Description of Artificial Sequence: Synthetic oligonucleotide
auuccucacgauuuauagu

SEQ ID NO: 2918816 - RNA, 19 nt, Artificial Sequence
  Description of Artificial Sequence: Synthetic oligonucleotide
uaguacuucucgcuggcau

SEQ ID NO: 2918817 - RNA, 19 nt, Artificial Sequence
  Description of Artificial Sequence: Synthetic oligonucleotide
aaaggucugagcgcugucu

SEQ ID NO: 2918818 - RNA, 19 nt, Artificial Sequence
  Description of Artificial Sequence: Synthetic oligonucleotide
cugucuaaagcauucccca

SEQ ID NO: 2918819 - RNA, 19 nt, Artificial Sequence
  Description of Artificial Sequence: Synthetic oligonucleotide
uuaaugaggguugcacucu

SEQ ID NO: 2918820 - RNA, 19 nt, Artificial Sequence
  Description of Artificial Sequence: Synthetic oligonucleotide
uaacgagugcagcacucug

SEQ ID NO: 2918821 - RNA, 19 nt, Artificial Sequence
  Description of Artificial Sequence: Synthetic oligonucleotide
aagcucuuuuggcaguccu

SEQ ID NO: 2918822 - RNA, 19 nt, Artificial Sequence
  Description of Artificial Sequence: Synthetic oligonucleotide
gcaguccucacauuuauac

SEQ ID NO: 2918823 - RNA, 19 nt, Artificial Sequence
  Description of Artificial Sequence: Synthetic oligonucleotide
acgauuuauaguacuucuc

SEQ ID NO: 2918824 - RNA, 19 nt, Artificial Sequence
  Description of Artificial Sequence: Synthetic oligonucleotide
gagauguggaagaucuccc

SEQ ID NO: 2918825 - RNA, 19 nt, Artificial Sequence
  Description of Artificial Sequence: Synthetic oligonucleotide
ugucuaaagcauuccccac

SEQ ID NO: 2918826 - RNA, 19 nt, Artificial Sequence
  Description of Artificial Sequence: Synthetic oligonucleotide
ggaagaucuccccacauuc

SEQ ID NO: 2918827 - RNA, 19 nt, Artificial Sequence
  Description of Artificial Sequence: Synthetic oligonucleotide
aaaaggcuggagaugugga

SEQ ID NO: 2918828 - RNA, 19 nt, Artificial Sequence
  Description of Artificial Sequence: Synthetic oligonucleotide
guguuuaacgagugcagca

SEQ ID NO: 2918829 - RNA, 19 nt, Artificial Sequence
  Description of Artificial Sequence: Synthetic oligonucleotide
ucacgauuuauaguacuuc

SEQ ID NO: 2918830 - RNA, 19 nt, Artificial Sequence
  Description of Artificial Sequence: Synthetic oligonucleotide
ugucugaccucuucucaca

SEQ ID NO: 2918831 - RNA, 19 nt, Artificial Sequence
  Description of Artificial Sequence: Synthetic oligonucleotide
cugaugccgacuaagaugu

SEQ ID NO: 2918832 - RNA, 19 nt, Artificial Sequence
  Description of Artificial Sequence: Synthetic oligonucleotide
gaagaucuccccacauucc

SEQ ID NO: 2918833 - RNA, 19 nt, Artificial Sequence
  Description of Artificial Sequence: Synthetic oligonucleotide
gaucuccccacauuccuca

SEQ ID NO: 2918834 - RNA, 19 nt, Artificial Sequence
  Description of Artificial Sequence: Synthetic oligonucleotide
agcucugucuaaagcauuc

SEQ ID NO: 2918835 - RNA, 19 nt, Artificial Sequence
  Description of Artificial Sequence: Synthetic oligonucleotide
uaaaaggucugagcgcugu

SEQ ID NO: 2918836 - RNA, 19 nt, Artificial Sequence
  Description of Artificial Sequence: Synthetic oligonucleotide
uauacggucucuccccuuu

SEQ ID NO: 2918837 - RNA, 19 nt, Artificial Sequence
  Description of Artificial Sequence: Synthetic oligonucleotide
guacuucucgcuggcaugg

SEQ ID NO: 2918838 - RNA, 19 nt, Artificial Sequence
  Description of Artificial Sequence: Synthetic oligonucleotide
ucugggcaugcauauggcu

SEQ ID NO: 2918839 - RNA, 19 nt, Artificial Sequence
  Description of Artificial Sequence: Synthetic oligonucleotide
ucccgugugaacccucuga

SEQ ID NO: 2918840 - RNA, 19 nt, Artificial Sequence
  Description of Artificial Sequence: Synthetic oligonucleotide
guuaaaaggucugagcgcu

SEQ ID NO: 2918841 - RNA, 19 nt, Artificial Sequence
  Description of Artificial Sequence: Synthetic oligonucleotide
cuggagauguggaagaucu

SEQ ID NO: 2918842 - RNA, 19 nt, Artificial Sequence
  Description of Artificial Sequence: Synthetic oligonucleotide
ugggcaugcauauggcuuc

SEQ ID NO: 2918843 - RNA, 19 nt, Artificial Sequence
  Description of Artificial Sequence: Synthetic oligonucleotide
agcuuuucccacaugcuug

SEQ ID NO: 2918844 - RNA, 19 nt, Artificial Sequence
  Description of Artificial Sequence: Synthetic oligonucleotide
gucuaaagcauuccccaca

SEQ ID NO: 2918845 - RNA, 19 nt, Artificial Sequence
  Description of Artificial Sequence: Synthetic oligonucleotide
ugaggguugcacucugacu

SEQ ID NO: 2918846 - RNA, 19 nt, Artificial Sequence
  Description of Artificial Sequence: Synthetic oligonucleotide
ggcauggguucucugaugc

SEQ ID NO: 2918847 - RNA, 19 nt, Artificial Sequence
  Description of Artificial Sequence: Synthetic oligonucleotide
acccucugaugcuugaaga

SEQ ID NO: 2918848 - RNA, 19 nt, Artificial Sequence
  Description of Artificial Sequence: Synthetic oligonucleotide
cugucugaccucuucucac

SEQ ID NO: 2918849 - RNA, 19 nt, Artificial Sequence
  Description of Artificial Sequence: Synthetic oligonucleotide
uauggcuucucgccccgug

SEQ ID NO: 2918850 - RNA, 19 nt, Artificial Sequence
  Description of Artificial Sequence: Synthetic oligonucleotide
uuaacgagugcagcacucu

SEQ ID NO: 2918851 - RNA, 19 nt, Artificial Sequence
  Description of Artificial Sequence: Synthetic oligonucleotide
agcgcugucugaccucuuc

SEQ ID NO: 2918852 - RNA, 19 nt, Artificial Sequence
  Description of Artificial Sequence: Synthetic oligonucleotide
uccucacgauuuauaguac

SEQ ID NO: 2918853 - RNA, 19 nt, Artificial Sequence
  Description of Artificial Sequence: Synthetic oligonucleotide
ucugaccucuucucacagc

SEQ ID NO: 2918854 - RNA, 19 nt, Artificial Sequence
  Description of Artificial Sequence: Synthetic oligonucleotide
gaagcuuuucccacagaca

SEQ ID NO: 2918855 - RNA, 19 nt, Artificial Sequence
  Description of Artificial Sequence: Synthetic oligonucleotide
gaagaggucugagcgcugc

SEQ ID NO: 2918856 - RNA, 19 nt, Artificial Sequence
  Description of Artificial Sequence: Synthetic oligonucleotide
guuuaaugaggguugcacu

SEQ ID NO: 2918857 - RNA, 19 nt, Artificial Sequence
  Description of Artificial Sequence: Synthetic oligonucleotide
gaugccgacuaagauguga

SEQ ID NO: 2918858 - RNA, 19 nt, Artificial Sequence
  Description of Artificial Sequence: Synthetic oligonucleotide
cuaagaugugagcucuguc

SEQ ID NO: 2918859 - RNA, 19 nt, Artificial Sequence
  Description of Artificial Sequence: Synthetic oligonucleotide
uugaagcucuuuuggcagu

SEQ ID NO: 2918860 - RNA, 19 nt, Artificial Sequence
  Description of Artificial Sequence: Synthetic oligonucleotide
ucugaugcuugaagagguc

SEQ ID NO: 2918861 - RNA, 19 nt, Artificial Sequence
  Description of Artificial Sequence: Synthetic oligonucleotide
uggaagaucuccccacauu

SEQ ID NO: 2918862 - RNA, 19 nt, Artificial Sequence
  Description of Artificial Sequence: Synthetic oligonucleotide
gcugcuugaagcucuuuug

SEQ ID NO: 2918863 - RNA, 19 nt, Artificial Sequence
  Description of Artificial Sequence: Synthetic oligonucleotide
cugguguuuaacgagugca

SEQ ID NO: 2918864 - RNA, 19 nt, Artificial Sequence
  Description of Artificial Sequence: Synthetic oligonucleotide
augccgacuaagaugugag

SEQ ID NO: 2918865 - RNA, 19 nt, Artificial Sequence
  Description of Artificial Sequence: Synthetic oligonucleotide
gaugcuugaagaggucuga

SEQ ID NO: 2918866 - RNA, 19 nt, Artificial Sequence
  Description of Artificial Sequence: Synthetic oligonucleotide
uggcaguccucacauuuau

SEQ ID NO: 2918867 - RNA, 19 nt, Artificial Sequence
  Description of Artificial Sequence: Synthetic oligonucleotide
aggcuggagauguggaaga

SEQ ID NO: 2918868 - RNA, 19 nt, Artificial Sequence
  Description of Artificial Sequence: Synthetic oligonucleotide
ugaacccucugaugcuuga

SEQ ID NO: 2918869 - RNA, 19 nt, Artificial Sequence
  Description of Artificial Sequence: Synthetic oligonucleotide
gucugaccucuucucacag

SEQ ID NO: 2918870 - RNA, 19 nt, Artificial Sequence
  Description of Artificial Sequence: Synthetic oligonucleotide
cucugggcaugcauauggc

SEQ ID NO: 2918871 - RNA, 19 nt, Artificial Sequence
  Description of Artificial Sequence: Synthetic oligonucleotide
uuggcaguccucacauuua

SEQ ID NO: 2918872 - RNA, 19 nt, Artificial Sequence
  Description of Artificial Sequence: Synthetic oligonucleotide
cacgauuuauaguacuucu

SEQ ID NO: 2918873 - RNA, 19 nt, Artificial Sequence
  Description of Artificial Sequence: Synthetic oligonucleotide
gguguuuaacgagugcagc

SEQ ID NO: 2918874 - RNA, 19 nt, Artificial Sequence
  Description of Artificial Sequence: Synthetic oligonucleotide
acacucugggcaugcauau

SEQ ID NO: 2918875 - RNA, 19 nt, Artificial Sequence
  Description of Artificial Sequence: Synthetic oligonucleotide
ugccgacuaagaugugagc

SEQ ID NO: 2918876 - RNA, 19 nt, Artificial Sequence
  Description of Artificial Sequence: Synthetic oligonucleotide
uccccuuugugcagucucu

SEQ ID NO: 2918877 - RNA, 19 nt, Artificial Sequence
  Description of Artificial Sequence: Synthetic oligonucleotide
uccucacauuuauacgguc

SEQ ID NO: 2918878 - RNA, 19 nt, Artificial Sequence
  Description of Artificial Sequence: Synthetic oligonucleotide
ugaccucuucucacagcug

SEQ ID NO: 2918879 - RNA, 19 nt, Artificial Sequence
  Description of Artificial Sequence: Synthetic oligonucleotide
uucucgcuggcauggguuc

SEQ ID NO: 2918880 - RNA, 19 nt, Artificial Sequence
  Description of Artificial Sequence: Synthetic oligonucleotide
aagaggucugagcgcugcu

SEQ ID NO: 2918881 - RNA, 19 nt, Artificial Sequence
  Description of Artificial Sequence: Synthetic oligonucleotide
gcauuccccacacucuggg

SEQ ID NO: 2918882 - RNA, 19 nt, Artificial Sequence
  Description of Artificial Sequence: Synthetic oligonucleotide
aaacacacauagggcuucu

SEQ ID NO: 2918883 - RNA, 19 nt, Artificial Sequence
  Description of Artificial Sequence: Synthetic oligonucleotide
ucucccgugugaacccucu

SEQ ID NO: 2918884 - RNA, 19 nt, Artificial Sequence
  Description of Artificial Sequence: Synthetic oligonucleotide
agaugugagcucugucuaa

SEQ ID NO: 2918885 - RNA, 19 nt, Artificial Sequence
  Description of Artificial Sequence: Synthetic oligonucleotide
uacggucucuccccuuugu

SEQ ID NO: 2918886 - RNA, 19 nt, Artificial Sequence
  Description of Artificial Sequence: Synthetic oligonucleotide
agaucuccccacauuccuc

SEQ ID NO: 2918887 - RNA, 19 nt, Artificial Sequence
  Description of Artificial Sequence: Synthetic oligonucleotide
gaugugagcucugucuaaa

SEQ ID NO: 2918888 - RNA, 19 nt, Artificial Sequence
  Description of Artificial Sequence: Synthetic oligonucleotide
ugagcgcugucugaccucu

SEQ ID NO: 2918889 - RNA, 19 nt, Artificial Sequence
  Description of Artificial Sequence: Synthetic oligonucleotide
aucuccccacauuccucac

SEQ ID NO: 2918890 - RNA, 19 nt, Artificial Sequence
  Description of Artificial Sequence: Synthetic oligonucleotide
uggcauggguucucugaug

SEQ ID NO: 2918891 - RNA, 19 nt, Artificial Sequence
  Description of Artificial Sequence: Synthetic oligonucleotide
gucugagcgcugcuugaag

SEQ ID NO: 2918892 - RNA, 19 nt, Artificial Sequence
  Description of Artificial Sequence: Synthetic oligonucleotide
ugaagcucuuuuggcaguc

SEQ ID NO: 2918893 - RNA, 19 nt, Artificial Sequence
  Description of Artificial Sequence: Synthetic oligonucleotide
cauuccccacacucugggc

SEQ ID NO: 2918894 - RNA, 19 nt, Artificial Sequence
  Description of Artificial Sequence: Synthetic oligonucleotide
acuucucgcuggcaugggu

SEQ ID NO: 2918895 - RNA, 19 nt, Artificial Sequence
  Description of Artificial Sequence: Synthetic oligonucleotide
aaugaggguugcacucuga

SEQ ID NO: 2918896 - RNA, 19 nt, Artificial Sequence
  Description of Artificial Sequence: Synthetic oligonucleotide
gcagcacucuggcugaagc

SEQ ID NO: 2918897 - RNA, 19 nt, Artificial Sequence
  Description of Artificial Sequence: Synthetic oligonucleotide
acggucucuccccuuugug

SEQ ID NO: 2918898 - RNA, 19 nt, Artificial Sequence
  Description of Artificial Sequence: Synthetic oligonucleotide
augcuugaagaggucugag

SEQ ID NO: 2918899 - RNA, 19 nt, Artificial Sequence
  Description of Artificial Sequence: Synthetic oligonucleotide
cuccccuuugugcagucuc

SEQ ID NO: 2918900 - RNA, 19 nt, Artificial Sequence
  Description of Artificial Sequence: Synthetic oligonucleotide
gaagcucuuuuggcagucc

SEQ ID NO: 2918901 - RNA, 19 nt, Artificial Sequence
  Description of Artificial Sequence: Synthetic oligonucleotide
ggucucuccccuuugugca

SEQ ID NO: 2918902 - RNA, 19 nt, Artificial Sequence
  Description of Artificial Sequence: Synthetic oligonucleotide
cugaccucuucucacagcu

SEQ ID NO: 2918903 - RNA, 19 nt, Artificial Sequence
  Description of Artificial Sequence: Synthetic oligonucleotide
cuccccacauuccucacga

SEQ ID NO: 2918904 - RNA, 19 nt, Artificial Sequence
  Description of Artificial Sequence: Synthetic oligonucleotide
auggcuucucgccccgugu

SEQ ID NO: 2918905 - RNA, 19 nt, Artificial Sequence
  Description of Artificial Sequence: Synthetic oligonucleotide
uguguguccgcugguguua

SEQ ID NO: 2918906 - RNA, 19 nt, Artificial Sequence
  Description of Artificial Sequence: Synthetic oligonucleotide
agcauuccccacacucugg

SEQ ID NO: 2918907 - RNA, 19 nt, Artificial Sequence
  Description of Artificial Sequence: Synthetic oligonucleotide
guuuaacgagugcagcacu

SEQ ID NO: 2918908 - RNA, 19 nt, Artificial Sequence
  Description of Artificial Sequence: Synthetic oligonucleotide
gcugguguuaaaaggucug

SEQ ID NO: 2918909 - RNA, 19 nt, Artificial Sequence
  Description of Artificial Sequence: Synthetic oligonucleotide
cucuuuuggcaguccucac

SEQ ID NO: 2918910 - RNA, 19 nt, Artificial Sequence
  Description of Artificial Sequence: Synthetic oligonucleotide
auacggucucuccccuuug

SEQ ID NO: 2918911 - RNA, 19 nt, Artificial Sequence
  Description of Artificial Sequence: Synthetic oligonucleotide
cuuuuggcaguccucacau

SEQ ID NO: 2918912 - RNA, 19 nt, Artificial Sequence
  Description of Artificial Sequence: Synthetic oligonucleotide
cacacucugggcaugcaua

SEQ ID NO: 2918913 - RNA, 19 nt, Artificial Sequence
  Description of Artificial Sequence: Synthetic oligonucleotide
gucucuccccuuugugcag

SEQ ID NO: 2918914 - RNA, 19 nt, Artificial Sequence
  Description of Artificial Sequence: Synthetic oligonucleotide
uacuucucgcuggcauggg

SEQ ID NO: 2918915 - RNA, 19 nt, Artificial Sequence
  Description of Artificial Sequence: Synthetic oligonucleotide
guccgcugguguuuaacga

SEQ ID NO: 2918916 - RNA, 19 nt, Artificial Sequence
  Description of Artificial Sequence: Synthetic oligonucleotide
aggucugagcgcugcuuga

SEQ ID NO: 2918917 - RNA, 19 nt, Artificial Sequence
  Description of Artificial Sequence: Synthetic oligonucleotide
gcuuuucccacagacaaaa

SEQ ID NO: 2918918 - RNA, 19 nt, Artificial Sequence
  Description of Artificial Sequence: Synthetic oligonucleotide
gacuaagaugugagcucug

SEQ ID NO: 2918919 - RNA, 19 nt, Artificial Sequence
  Description of Artificial Sequence: Synthetic oligonucleotide
ugagcgcugcuugaagcuc

SEQ ID NO: 2918920 - RNA, 19 nt, Artificial Sequence
  Description of Artificial Sequence: Synthetic oligonucleotide
gcugguguuuaacgagugc

SEQ ID NO: 2918921 - RNA, 19 nt, Artificial Sequence
  Description of Artificial Sequence: Synthetic oligonucleotide
gguucucugaugccgacua

SEQ ID NO: 2918922 - RNA, 19 nt, Artificial Sequence
  Description of Artificial Sequence: Synthetic oligonucleotide
gucugagcgcugucugacc

SEQ ID NO: 2918923 - RNA, 19 nt, Artificial Sequence
  Description of Artificial Sequence: Synthetic oligonucleotide
ccgacuaagaugugagcuc

SEQ ID NO: 2918924 - RNA, 19 nt, Artificial Sequence
  Description of Artificial Sequence: Synthetic oligonucleotide
uuauacggucucuccccuu

SEQ ID NO: 2918925 - RNA, 19 nt, Artificial Sequence
  Description of Artificial Sequence: Synthetic oligonucleotide
ugcagcacucuggcugaag

SEQ ID NO: 2918926 - RNA, 19 nt, Artificial Sequence
  Description of Artificial Sequence: Synthetic oligonucleotide
ugaugccgacuaagaugug

SEQ ID NO: 2918927 - RNA, 19 nt, Artificial Sequence
  Description of Artificial Sequence: Synthetic oligonucleotide
caaaacacacauagggcuu

SEQ ID NO: 2918928 - RNA, 19 nt, Artificial Sequence
  Description of Artificial Sequence: Synthetic oligonucleotide
ucucgccccgugugugucc

SEQ ID NO: 2918929 - RNA, 19 nt, Artificial Sequence
  Description of Artificial Sequence: Synthetic oligonucleotide
auaguacuucucgcuggca

SEQ ID NO: 2918930 - RNA, 19 nt, Artificial Sequence
  Description of Artificial Sequence: Synthetic oligonucleotide
ugcagucucuggugucuaa

SEQ ID NO: 2918931 - RNA, 19 nt, Artificial Sequence
  Description of Artificial Sequence: Synthetic oligonucleotide
acauuccucacgauuuaua

SEQ ID NO: 2918932 - RNA, 19 nt, Artificial Sequence
  Description of Artificial Sequence: Synthetic oligonucleotide
gcucuuuuggcaguccuca

SEQ ID NO: 2918933 - RNA, 19 nt, Artificial Sequence
  Description of Artificial Sequence: Synthetic oligonucleotide
cugguguuaaaaggucuga

SEQ ID NO: 2918934 - RNA, 19 nt, Artificial Sequence
  Description of Artificial Sequence: Synthetic oligonucleotide
uuuuggcaguccucacauu

SEQ ID NO: 2918935 - RNA, 19 nt, Artificial Sequence
  Description of Artificial Sequence: Synthetic oligonucleotide
cuugacacugauagggcuu

SEQ ID NO: 2918936 - RNA, 19 nt, Artificial Sequence
  Description of Artificial Sequence: Synthetic oligonucleotide
cccuuugugcagucucugg

SEQ ID NO: 2918937 - RNA, 19 nt, Artificial Sequence
  Description of Artificial Sequence: Synthetic oligonucleotide
cucacgauuuauaguacuu

SEQ ID NO: 2918938 - RNA, 19 nt, Artificial Sequence
  Description of Artificial Sequence: Synthetic oligonucleotide
cucgccccguguguguccg

SEQ ID NO: 2918939 - RNA, 19 nt, Artificial Sequence
  Description of Artificial Sequence: Synthetic oligonucleotide
cugagcgcugucugaccuc

SEQ ID NO: 2918940 - RNA, 19 nt, Artificial Sequence
  Description of Artificial Sequence: Synthetic oligonucleotide
ucucgcuggcauggguucu

SEQ ID NO: 2918941 - RNA, 19 nt, Artificial Sequence
  Description of Artificial Sequence: Synthetic oligonucleotide
cacagacaaaacacacaua

SEQ ID NO: 2918942 - RNA, 19 nt, Artificial Sequence
  Description of Artificial Sequence: Synthetic oligonucleotide
ggucugagcgcugucugac

SEQ ID NO: 2918943 - RNA, 19 nt, Artificial Sequence
  Description of Artificial Sequence: Synthetic oligonucleotide
cugggcaugcauauggcuu

SEQ ID NO: 2918944 - RNA, 19 nt, Artificial Sequence
  Description of Artificial Sequence: Synthetic oligonucleotide
cugagcgcugcuugaagcu

SEQ ID NO: 2918945 - RNA, 19 nt, Artificial Sequence
  Description of Artificial Sequence: Synthetic oligonucleotide
cugaugcuugaagaggucu

SEQ ID NO: 2918946 - RNA, 19 nt, Artificial Sequence
  Description of Artificial Sequence: Synthetic oligonucleotide
ccacagacaaaacacacau

SEQ ID NO: 2918947 - RNA, 19 nt, Artificial Sequence
  Description of Artificial Sequence: Synthetic oligonucleotide
gcucugucuaaagcauucc

SEQ ID NO: 2918948 - RNA, 19 nt, Artificial Sequence
  Description of Artificial Sequence: Synthetic oligonucleotide
agaggucugagcgcugcuu

SEQ ID NO: 2918949 - RNA, 19 nt, Artificial Sequence
  Description of Artificial Sequence: Synthetic oligonucleotide
cccacagacaaaacacaca

SEQ ID NO: 2918950 - RNA, 19 nt, Artificial Sequence
  Description of Artificial Sequence: Synthetic oligonucleotide
gcauggguucucugaugcc

SEQ ID NO: 2918951 - RNA, 19 nt, Artificial Sequence
  Description of Artificial Sequence: Synthetic oligonucleotide
gguugcacucugacugaag

SEQ ID NO: 2918952 - RNA, 19 nt, Artificial Sequence
  Description of Artificial Sequence: Synthetic oligonucleotide
cggucucuccccuuugugc

SEQ ID NO: 2918953 - RNA, 19 nt, Artificial Sequence
  Description of Artificial Sequence: Synthetic oligonucleotide
gccgacuaagaugugagcu

SEQ ID NO: 2918954 - RNA, 19 nt, Artificial Sequence
  Description of Artificial Sequence: Synthetic oligonucleotide
gcuugacacugauagggcu

SEQ ID NO: 2918955 - RNA, 19 nt, Artificial Sequence
  Description of Artificial Sequence: Synthetic oligonucleotide
uucucgccccguguguguc

SEQ ID NO: 2918956 - RNA, 19 nt, Artificial Sequence
  Description of Artificial Sequence: Synthetic oligonucleotide
ucuccccuuugugcagucu

SEQ ID NO: 2918957 - RNA, 19 nt, Artificial Sequence
  Description of Artificial Sequence: Synthetic oligonucleotide
uguguccgcugguguuuaa

SEQ ID NO: 2918958 - RNA, 19 nt, Artificial Sequence
  Description of Artificial Sequence: Synthetic oligonucleotide
gaacccucugaugcuugaa

SEQ ID NO: 2918959 - RNA, 19 nt, Artificial Sequence
  Description of Artificial Sequence: Synthetic oligonucleotide
cacaugcuugacacugaua

SEQ ID NO: 2918960 - RNA, 19 nt, Artificial Sequence
  Description of Artificial Sequence: Synthetic oligonucleotide
cuucucgcuggcauggguu

SEQ ID NO: 2918961 - RNA, 19 nt, Artificial Sequence
  Description of Artificial Sequence: Synthetic oligonucleotide
cucuccccuuugugcaguc

SEQ ID NO: 2918962 - RNA, 19 nt, Artificial Sequence
  Description of Artificial Sequence: Synthetic oligonucleotide
ccucacauuuauacggucu

SEQ ID NO: 2918963 - RNA, 19 nt, Artificial Sequence
  Description of Artificial Sequence: Synthetic oligonucleotide
ccgcugguguuaaaagguc

SEQ ID NO: 2918964 - RNA, 19 nt, Artificial Sequence
  Description of Artificial Sequence: Synthetic oligonucleotide
gcuggagauguggaagauc

SEQ ID NO: 2918965 - RNA, 19 nt, Artificial Sequence
  Description of Artificial Sequence: Synthetic oligonucleotide
guggaagaucuccccacau

SEQ ID NO: 2918966 - RNA, 19 nt, Artificial Sequence
  Description of Artificial Sequence: Synthetic oligonucleotide
uccccacacucugggcaug

SEQ ID NO: 2918967 - RNA, 19 nt, Artificial Sequence
  Description of Artificial Sequence: Synthetic oligonucleotide
cucgcuggcauggguucuc

SEQ ID NO: 2918968 - RNA, 19 nt, Artificial Sequence
  Description of Artificial Sequence: Synthetic oligonucleotide
ucgcuggcauggguucucu

SEQ ID NO: 2918969 - RNA, 19 nt, Artificial Sequence
  Description of Artificial Sequence: Synthetic oligonucleotide
gcuucucgccccgugugug

SEQ ID NO: 2918970 - RNA, 19 nt, Artificial Sequence
  Description of Artificial Sequence: Synthetic oligonucleotide
uccccacauuccucacgau

SEQ ID NO: 2918971 - RNA, 19 nt, Artificial Sequence
  Description of Artificial Sequence: Synthetic oligonucleotide
cagcacucuggcugaagcu

SEQ ID NO: 2918972 - RNA, 19 nt, Artificial Sequence
  Description of Artificial Sequence: Synthetic oligonucleotide
ccuuugugcagucucuggu

SEQ ID NO: 2918973 - RNA, 19 nt, Artificial Sequence
  Description of Artificial Sequence: Synthetic oligonucleotide
ccucacgauuuauaguacu

SEQ ID NO: 2918974 - RNA, 19 nt, Artificial Sequence
  Description of Artificial Sequence: Synthetic oligonucleotide
cgcugguguuuaacgagug

SEQ ID NO: 2918975 - RNA, 19 nt, Artificial Sequence
  Description of Artificial Sequence: Synthetic oligonucleotide
cgcugucugaccucuucuc

SEQ ID NO: 2918976 - RNA, 19 nt, Artificial Sequence
  Description of Artificial Sequence: Synthetic oligonucleotide
gagcucugucuaaagcauu

SEQ ID NO: 2918977 - RNA, 19 nt, Artificial Sequence
  Description of Artificial Sequence: Synthetic oligonucleotide
gcagucucuggugucuaaa

SEQ ID NO: 2918978 - RNA, 19 nt, Artificial Sequence
  Description of Artificial Sequence: Synthetic oligonucleotide
cuucucgccccgugugugu

SEQ ID NO: 2918979 - RNA, 19 nt, Artificial Sequence
  Description of Artificial Sequence: Synthetic oligonucleotide
ggucugagcgcugcuugaa

SEQ ID NO: 2918980 - RNA, 19 nt, Artificial Sequence
  Description of Artificial Sequence: Synthetic oligonucleotide
cacauuccucacgauuuau

SEQ ID NO: 2918981 - RNA, 19 nt, Artificial Sequence
  Description of Artificial Sequence: Synthetic oligonucleotide
cccacaugcuugacacuga

SEQ ID NO: 2918982 - RNA, 19 nt, Artificial Sequence
  Description of Artificial Sequence: Synthetic oligonucleotide
ucgccccguguguguccgc

SEQ ID NO: 2918983 - RNA, 19 nt, Artificial Sequence
  Description of Artificial Sequence: Synthetic oligonucleotide
ccccuuugugcagucucug

SEQ ID NO: 2918984 - RNA, 19 nt, Artificial Sequence
  Description of Artificial Sequence: Synthetic oligonucleotide
guguguccgcugguguuua

SEQ ID NO: 2918985 - RNA, 19 nt, Artificial Sequence
  Description of Artificial Sequence: Synthetic oligonucleotide
gugcagucucuggugucua

SEQ ID NO: 2918986 - RNA, 19 nt, Artificial Sequence
  Description of Artificial Sequence: Synthetic oligonucleotide
ccacauuccucacgauuua

SEQ ID NO: 2918987 - RNA, 19 nt, Artificial Sequence
  Description of Artificial Sequence: Synthetic oligonucleotide
gcgcugucugaccucuucu

SEQ ID NO: 2918988 - RNA, 19 nt, Artificial Sequence
  Description of Artificial Sequence: Synthetic oligonucleotide
ggcuucucgccccgugugu

SEQ ID NO: 2918989 - RNA, 19 nt, Artificial Sequence
  Description of Artificial Sequence: Synthetic oligonucleotide
ccccacacucugggcaugc

SEQ ID NO: 2918990 - RNA, 19 nt, Artificial Sequence
  Description of Artificial Sequence: Synthetic oligonucleotide
ggguugcacucugacugaa

SEQ ID NO: 2918991 - RNA, 19 nt, Artificial Sequence
  Description of Artificial Sequence: Synthetic oligonucleotide
gccccguguguguccgcug

SEQ ID NO: 2918992 - RNA, 19 nt, Artificial Sequence
  Description of Artificial Sequence: Synthetic oligonucleotide
cgacuaagaugugagcucu

SEQ ID NO: 2918993 - RNA, 19 nt, Artificial Sequence
  Description of Artificial Sequence: Synthetic oligonucleotide
ccgcugguguuuaacgagu

SEQ ID NO: 2918994 - RNA, 19 nt, Artificial Sequence
  Description of Artificial Sequence: Synthetic oligonucleotide
cgcugguguuaaaaggucu

SEQ ID NO: 2918995 - RNA, 19 nt, Artificial Sequence
  Description of Artificial Sequence: Synthetic oligonucleotide
cccgugugaacccucugau

SEQ ID NO: 2918996 - RNA, 19 nt, Artificial Sequence
  Description of Artificial Sequence: Synthetic oligonucleotide
ggguucucugaugccgacu

SEQ ID NO: 2918997 - RNA, 19 nt, Artificial Sequence
  Description of Artificial Sequence: Synthetic oligonucleotide
ccacaugcuugacacugau

SEQ ID NO: 2918998 - RNA, 19 nt, Artificial Sequence
  Description of Artificial Sequence: Synthetic oligonucleotide
ccccacauuccucacgauu

SEQ ID NO: 2918999 - RNA, 19 nt, Artificial Sequence
  Description of Artificial Sequence: Synthetic oligonucleotide
ggcuggagauguggaagau

SEQ ID NO: 2919000 - RNA, 19 nt, Artificial Sequence
  Description of Artificial Sequence: Synthetic oligonucleotide
gggcaugcauauggcuucu

SEQ ID NO: 2919001 - RNA, 19 nt, Artificial Sequence
  Description of Artificial Sequence: Synthetic oligonucleotide
gugcagcacucuggcugaa

SEQ ID NO: 2919002 - RNA, 19 nt, Artificial Sequence
  Description of Artificial Sequence: Synthetic oligonucleotide
ccacacucugggcaugcau

SEQ ID NO: 2919003 - RNA, 19 nt, Artificial Sequence
  Description of Artificial Sequence: Synthetic oligonucleotide
cccacacucugggcaugca

SEQ ID NO: 2919004 - RNA, 19 nt, Artificial Sequence
  Description of Artificial Sequence: Synthetic oligonucleotide
cgagugcagcacucuggcu

SEQ ID NO: 2919005 - RNA, 19 nt, Artificial Sequence
  Description of Artificial Sequence: Synthetic oligonucleotide
gagcgcugucugaccucuu

SEQ ID NO: 2919006 - RNA, 19 nt, Artificial Sequence
  Description of Artificial Sequence: Synthetic oligonucleotide
cgccccguguguguccgcu

SEQ ID NO: 2919007 - RNA, 19 nt, Artificial Sequence
  Description of Artificial Sequence: Synthetic oligonucleotide
aauuccagaggccugagag

SEQ ID NO: 2919008 - RNA, 19 nt, Artificial Sequence
  Description of Artificial Sequence: Synthetic oligonucleotide
uuaugagcugacaggaacg

SEQ ID NO: 2919009 - RNA, 19 nt, Artificial Sequence
  Description of Artificial Sequence: Synthetic oligonucleotide
agagcuuaugagcugacag

SEQ ID NO: 2919010 - RNA, 19 nt, Artificial Sequence
  Description of Artificial Sequence: Synthetic oligonucleotide
uguggggaauuccagaggc

SEQ ID NO: 2919011 - RNA, 19 nt, Artificial Sequence
  Description of Artificial Sequence: Synthetic oligonucleotide
uccuuuugagcucugcuca

SEQ ID NO: 2919012 - RNA, 19 nt, Artificial Sequence
  Description of Artificial Sequence: Synthetic oligonucleotide
gagcuuaugagcugacagg

SEQ ID NO: 2919013 - RNA, 19 nt, Artificial Sequence
  Description of Artificial Sequence: Synthetic oligonucleotide
agggacuuccuuuugagcu

SEQ ID NO: 2919014 - RNA, 19 nt, Artificial Sequence
  Description of Artificial Sequence: Synthetic oligonucleotide
aaagccucaccagggaugg

SEQ ID NO: 2919015 - RNA, 19 nt, Artificial Sequence
  Description of Artificial Sequence: Synthetic oligonucleotide
cuuaugagcugacaggaac

SEQ ID NO: 2919016 - RNA, 19 nt, Artificial Sequence
  Description of Artificial Sequence: Synthetic oligonucleotide
uuuugagcucugcucagag

SEQ ID NO: 2919017 - RNA, 19 nt, Artificial Sequence
  Description of Artificial Sequence: Synthetic oligonucleotide
aguguggggaauuccagag

SEQ ID NO: 2919018 - RNA, 19 nt, Artificial Sequence
  Description of Artificial Sequence: Synthetic oligonucleotide
acaguguugagucuucuca

SEQ ID NO: 2919019 - RNA, 19 nt, Artificial Sequence
  Description of Artificial Sequence: Synthetic oligonucleotide
uccauggugguguuagggg

SEQ ID NO: 2919020 - RNA, 19 nt, Artificial Sequence
  Description of Artificial Sequence: Synthetic oligonucleotide
aguguugagucuucucacg

SEQ ID NO: 2919021 - RNA, 19 nt, Artificial Sequence
  Description of Artificial Sequence: Synthetic oligonucleotide
ucagaguuaggguugccug

SEQ ID NO: 2919022 - RNA, 19 nt, Artificial Sequence
  Description of Artificial Sequence: Synthetic oligonucleotide
ucucagggacgccaggugg

SEQ ID NO: 2919023 - RNA, 19 nt, Artificial Sequence
  Description of Artificial Sequence: Synthetic oligonucleotide
auuccagaggccugagagc

SEQ ID NO: 2919024 - RNA, 19 nt, Artificial Sequence
  Description of Artificial Sequence: Synthetic oligonucleotide
uugagcucugcucagaguu

SEQ ID NO: 2919025 - RNA, 19 nt, Artificial Sequence
  Description of Artificial Sequence: Synthetic oligonucleotide
uugagucuucucacgagcc

SEQ ID NO: 2919026 - RNA, 19 nt, Artificial Sequence
  Description of Artificial Sequence: Synthetic oligonucleotide
gaucacccgagacagguug

SEQ ID NO: 2919027 - RNA, 19 nt, Artificial Sequence
  Description of Artificial Sequence: Synthetic oligonucleotide
uuccccauggacaggaaga

SEQ ID NO: 2919028 - RNA, 19 nt, Artificial Sequence
  Description of Artificial Sequence: Synthetic oligonucleotide
uggccacaggcucagacag

SEQ ID NO: 2919029 - RNA, 19 nt, Artificial Sequence
  Description of Artificial Sequence: Synthetic oligonucleotide
uuggcuucccacccugugg

SEQ ID NO: 2919030 - RNA, 19 nt, Artificial Sequence
  Description of Artificial Sequence: Synthetic oligonucleotide
uugggcacaguguugaguc

SEQ ID NO: 2919031 - RNA, 19 nt, Artificial Sequence
  Description of Artificial Sequence: Synthetic oligonucleotide
gacagggaaagccucacca

SEQ ID NO: 2919032 - RNA, 19 nt, Artificial Sequence
  Description of Artificial Sequence: Synthetic oligonucleotide
uguugagucuucucacgag

SEQ ID NO: 2919033 - RNA, 19 nt, Artificial Sequence
  Description of Artificial Sequence: Synthetic oligonucleotide
cugaguuccccauggacag

SEQ ID NO: 2919034 - RNA, 19 nt, Artificial Sequence
  Description of Artificial Sequence: Synthetic oligonucleotide
guugagucuucucacgagc

SEQ ID NO: 2919035 - RNA, 19 nt, Artificial Sequence
  Description of Artificial Sequence: Synthetic oligonucleotide
ucuucacccagaucacccg

SEQ ID NO: 2919036 - RNA, 19 nt, Artificial Sequence
  Description of Artificial Sequence: Synthetic oligonucleotide
cuuucuuggcuucccaccc

SEQ ID NO: 2919037 - RNA, 19 nt, Artificial Sequence
  Description of Artificial Sequence: Synthetic oligonucleotide
uggaguguggggaauucca

SEQ ID NO: 2919038 - RNA, 19 nt, Artificial Sequence
  Description of Artificial Sequence: Synthetic oligonucleotide
agaguuaggguugccuggc

SEQ ID NO: 2919039 - RNA, 19 nt, Artificial Sequence
  Description of Artificial Sequence: Synthetic oligonucleotide
cacgagcccauucucaggg

SEQ ID NO: 2919040 - RNA, 19 nt, Artificial Sequence
  Description of Artificial Sequence: Synthetic oligonucleotide
ucuucacuugacuucccug

SEQ ID NO: 2919041 - RNA, 19 nt, Artificial Sequence
  Description of Artificial Sequence: Synthetic oligonucleotide
agugaggucugagugcugg

SEQ ID NO: 2919042 - RNA, 19 nt, Artificial Sequence
  Description of Artificial Sequence: Synthetic oligonucleotide
cuagggacuuccuuuugag

SEQ ID NO: 2919043 - RNA, 19 nt, Artificial Sequence
  Description of Artificial Sequence: Synthetic oligonucleotide
uccccugaguuccccaugg

SEQ ID NO: 2919044 - RNA, 19 nt, Artificial Sequence
  Description of Artificial Sequence: Synthetic oligonucleotide
ugagucuucucacgagccc

SEQ ID NO: 2919045 - RNA, 19 nt, Artificial Sequence
  Description of Artificial Sequence: Synthetic oligonucleotide
aggccugagagcuuaugag

SEQ ID NO: 2919046 - RNA, 19 nt, Artificial Sequence
  Description of Artificial Sequence: Synthetic oligonucleotide
cagaguuaggguugccugg

SEQ ID NO: 2919047 - RNA, 19 nt, Artificial Sequence
  Description of Artificial Sequence: Synthetic oligonucleotide
agacagguugggcacagug

SEQ ID NO: 2919048 - RNA, 19 nt, Artificial Sequence
  Description of Artificial Sequence: Synthetic oligonucleotide
gcugacaggaacgagcugg

SEQ ID NO: 2919049 - RNA, 19 nt, Artificial Sequence
  Description of Artificial Sequence: Synthetic oligonucleotide
uuccuuuugagcucugcuc

SEQ ID NO: 2919050 - RNA, 19 nt, Artificial Sequence
  Description of Artificial Sequence: Synthetic oligonucleotide
cagggaaagccucaccagg

SEQ ID NO: 2919051 - RNA, 19 nt, Artificial Sequence
  Description of Artificial Sequence: Synthetic oligonucleotide
guuaggguugccuggcuug

SEQ ID NO: 2919052 - RNA, 19 nt, Artificial Sequence
  Description of Artificial Sequence: Synthetic oligonucleotide
aggcagugaggucugagug

SEQ ID NO: 2919053 - RNA, 19 nt, Artificial Sequence
  Description of Artificial Sequence: Synthetic oligonucleotide
acagggaaagccucaccag

SEQ ID NO: 2919054 - RNA, 19 nt, Artificial Sequence
  Description of Artificial Sequence: Synthetic oligonucleotide
ucucacgagcccauucuca

SEQ ID NO: 2919055 - RNA, 19 nt, Artificial Sequence
  Description of Artificial Sequence: Synthetic oligonucleotide
uuccagaggccugagagcu

SEQ ID NO: 2919056 - RNA, 19 nt, Artificial Sequence
  Description of Artificial Sequence: Synthetic oligonucleotide
agacagggaaagccucacc

SEQ ID NO: 2919057 - RNA, 19 nt, Artificial Sequence
  Description of Artificial Sequence: Synthetic oligonucleotide
ccugcuugcagcuagggac

SEQ ID NO: 2919058 - RNA, 19 nt, Artificial Sequence
  Description of Artificial Sequence: Synthetic oligonucleotide
uggcuucccacccuguggc

SEQ ID NO: 2919059 - RNA, 19 nt, Artificial Sequence
  Description of Artificial Sequence: Synthetic oligonucleotide
agcuuaugagcugacagga

SEQ ID NO: 2919060 - RNA, 19 nt, Artificial Sequence
  Description of Artificial Sequence: Synthetic oligonucleotide
gaaagccucaccagggaug

SEQ ID NO: 2919061 - RNA, 19 nt, Artificial Sequence
  Description of Artificial Sequence: Synthetic oligonucleotide
uguggccacaggcucagac

SEQ ID NO: 2919062 - RNA, 19 nt, Artificial Sequence
  Description of Artificial Sequence: Synthetic oligonucleotide
uucacccagaucacccgag

SEQ ID NO: 2919063 - RNA, 19 nt, Artificial Sequence
  Description of Artificial Sequence: Synthetic oligonucleotide
cauggacaggaagaggagg

SEQ ID NO: 2919064 - RNA, 19 nt, Artificial Sequence
  Description of Artificial Sequence: Synthetic oligonucleotide
cucacgagcccauucucag

SEQ ID NO: 2919065 - RNA, 19 nt, Artificial Sequence
  Description of Artificial Sequence: Synthetic oligonucleotide
cuugcagcuagggacuucc

SEQ ID NO: 2919066 - RNA, 19 nt, Artificial Sequence
  Description of Artificial Sequence: Synthetic oligonucleotide
agcccauucucagggacgc

SEQ ID NO: 2919067 - RNA, 19 nt, Artificial Sequence
  Description of Artificial Sequence: Synthetic oligonucleotide
uaugagcugacaggaacga

SEQ ID NO: 2919068 - RNA, 19 nt, Artificial Sequence
  Description of Artificial Sequence: Synthetic oligonucleotide
ucucuguccaugguggugu

SEQ ID NO: 2919069 - RNA, 19 nt, Artificial Sequence
  Description of Artificial Sequence: Synthetic oligonucleotide
acgagcugggaucccaguc

SEQ ID NO: 2919070 - RNA, 19 nt, Artificial Sequence
  Description of Artificial Sequence: Synthetic oligonucleotide
ucacuugacuucccugucu

SEQ ID NO: 2919071 - RNA, 19 nt, Artificial Sequence
  Description of Artificial Sequence: Synthetic oligonucleotide
acagguugggcacaguguu

SEQ ID NO: 2919072 - RNA, 19 nt, Artificial Sequence
  Description of Artificial Sequence: Synthetic oligonucleotide
uggggaauuccagaggccu

SEQ ID NO: 2919073 - RNA, 19 nt, Artificial Sequence
  Description of Artificial Sequence: Synthetic oligonucleotide
uuaggguugccuggcuugg

SEQ ID NO: 2919074 - RNA, 19 nt, Artificial Sequence
  Description of Artificial Sequence: Synthetic oligonucleotide
ucuucucacgagcccauuc

SEQ ID NO: 2919075 - RNA, 19 nt, Artificial Sequence
  Description of Artificial Sequence: Synthetic oligonucleotide
uagggacuuccuuuugagc

SEQ ID NO: 2919076 - RNA, 19 nt, Artificial Sequence
  Description of Artificial Sequence: Synthetic oligonucleotide
uucuuggcuucccacccug

SEQ ID NO: 2919077 - RNA, 19 nt, Artificial Sequence
  Description of Artificial Sequence: Synthetic oligonucleotide
cugacaggaacgagcuggg

SEQ ID NO: 2919078 - RNA, 19 nt, Artificial Sequence
  Description of Artificial Sequence: Synthetic oligonucleotide
uucucagggacgccaggug

SEQ ID NO: 2919079 - RNA, 19 nt, Artificial Sequence
  Description of Artificial Sequence: Synthetic oligonucleotide
ucacgagcccauucucagg

SEQ ID NO: 2919080 - RNA, 19 nt, Artificial Sequence
  Description of Artificial Sequence: Synthetic oligonucleotide
caguguugagucuucucac

SEQ ID NO: 2919081 - RNA, 19 nt, Artificial Sequence
  Description of Artificial Sequence: Synthetic oligonucleotide
agccgccuggcacagcccc

SEQ ID NO: 2919082 - RNA, 19 nt, Artificial Sequence
  Description of Artificial Sequence: Synthetic oligonucleotide
cucagggacgccagguggg

SEQ ID NO: 2919083 - RNA, 19 nt, Artificial Sequence
  Description of Artificial Sequence: Synthetic oligonucleotide
aggacuccccaagcgagcc

SEQ ID NO: 2919084 - RNA, 19 nt, Artificial Sequence
  Description of Artificial Sequence: Synthetic oligonucleotide
cuguccauggugguguuag

SEQ ID NO: 2919085 - RNA, 19 nt, Artificial Sequence
  Description of Artificial Sequence: Synthetic oligonucleotide
acuuccuuuugagcucugc

SEQ ID NO: 2919086 - RNA, 19 nt, Artificial Sequence
  Description of Artificial Sequence: Synthetic oligonucleotide
aucccaguccccugaguuc

SEQ ID NO: 2919087 - RNA, 19 nt, Artificial Sequence
  Description of Artificial Sequence: Synthetic oligonucleotide
ucuugcucuuucuuggcuu

SEQ ID NO: 2919088 - RNA, 19 nt, Artificial Sequence
  Description of Artificial Sequence: Synthetic oligonucleotide
ucucuugcucuuucuuggc

SEQ ID NO: 2919089 - RNA, 19 nt, Artificial Sequence
  Description of Artificial Sequence: Synthetic oligonucleotide
agggaaagccucaccaggg

SEQ ID NO: 2919090 - RNA, 19 nt, Artificial Sequence
  Description of Artificial Sequence: Synthetic oligonucleotide
gaggccugagagcuuauga

SEQ ID NO: 2919091 - RNA, 19 nt, Artificial Sequence
  Description of Artificial Sequence: Synthetic oligonucleotide
uucacuugacuucccuguc

SEQ ID NO: 2919092 - RNA, 19 nt, Artificial Sequence
  Description of Artificial Sequence: Synthetic oligonucleotide
acccagaucacccgagaca

SEQ ID NO: 2919093 - RNA, 19 nt, Artificial Sequence
  Description of Artificial Sequence: Synthetic oligonucleotide
caggaggacuccccaagcg

SEQ ID NO: 2919094 - RNA, 19 nt, Artificial Sequence
  Description of Artificial Sequence: Synthetic oligonucleotide
ucccaguccccugaguucc

SEQ ID NO: 2919095 - RNA, 19 nt, Artificial Sequence
  Description of Artificial Sequence: Synthetic oligonucleotide
uuugagcucugcucagagu

SEQ ID NO: 2919096 - RNA, 19 nt, Artificial Sequence
  Description of Artificial Sequence: Synthetic oligonucleotide
guguggggaauuccagagg

SEQ ID NO: 2919097 - RNA, 19 nt, Artificial Sequence
  Description of Artificial Sequence: Synthetic oligonucleotide
aggaggacuccccaagcga

SEQ ID NO: 2919098 - RNA, 19 nt, Artificial Sequence
  Description of Artificial Sequence: Synthetic oligonucleotide
aagcgagccgccuggcaca

SEQ ID NO: 2919099 - RNA, 19 nt, Artificial Sequence
  Description of Artificial Sequence: Synthetic oligonucleotide
caagcgagccgccuggcac

SEQ ID NO: 2919100 - RNA, 19 nt, Artificial Sequence
  Description of Artificial Sequence: Synthetic oligonucleotide
guuccccauggacaggaag

SEQ ID NO: 2919101 - RNA, 19 nt, Artificial Sequence
  Description of Artificial Sequence: Synthetic oligonucleotide
gagcugggaucccaguccc

SEQ ID NO: 2919102 - RNA, 19 nt, Artificial Sequence
  Description of Artificial Sequence: Synthetic oligonucleotide
cuugggugucuucacccag

SEQ ID NO: 2919103 - RNA, 19 nt, Artificial Sequence
  Description of Artificial Sequence: Synthetic oligonucleotide
cucuuucuuggcuucccac

SEQ ID NO: 2919104 - RNA, 19 nt, Artificial Sequence
  Description of Artificial Sequence: Synthetic oligonucleotide
agggauggcaggaggacuc

SEQ ID NO: 2919105 - RNA, 19 nt, Artificial Sequence
  Description of Artificial Sequence: Synthetic oligonucleotide
ugaggucugagugcuggug

SEQ ID NO: 2919106 - RNA, 19 nt, Artificial Sequence
  Description of Artificial Sequence: Synthetic oligonucleotide
uccccauggacaggaagag

SEQ ID NO: 2919107 - RNA, 19 nt, Artificial Sequence
  Description of Artificial Sequence: Synthetic oligonucleotide
cugcucagaguuaggguug

SEQ ID NO: 2919108 - RNA, 19 nt, Artificial Sequence
  Description of Artificial Sequence: Synthetic oligonucleotide
uuucuuggcuucccacccu

SEQ ID NO: 2919109 - RNA, 19 nt, Artificial Sequence
  Description of Artificial Sequence: Synthetic oligonucleotide
uucucacgagcccauucuc

SEQ ID NO: 2919110 - RNA, 19 nt, Artificial Sequence
  Description of Artificial Sequence: Synthetic oligonucleotide
gagcucugcucagaguuag

SEQ ID NO: 2919111 - RNA, 19 nt, Artificial Sequence
  Description of Artificial Sequence: Synthetic oligonucleotide
ugggaucccaguccccuga

SEQ ID NO: 2919112 - RNA, 19 nt, Artificial Sequence
  Description of Artificial Sequence: Synthetic oligonucleotide
gagcccauucucagggacg

SEQ ID NO: 2919113 - RNA, 19 nt, Artificial Sequence
  Description of Artificial Sequence: Synthetic oligonucleotide
gaguguggggaauuccaga

SEQ ID NO: 2919114 - RNA, 19 nt, Artificial Sequence
  Description of Artificial Sequence: Synthetic oligonucleotide
uguccauggugguguuagg

SEQ ID NO: 2919115 - RNA, 19 nt, Artificial Sequence
  Description of Artificial Sequence: Synthetic oligonucleotide
ggccugagagcuuaugagc

SEQ ID NO: 2919116 - RNA, 19 nt, Artificial Sequence
  Description of Artificial Sequence: Synthetic oligonucleotide
uggcuugggugucuucacc

SEQ ID NO: 2919117 - RNA, 19 nt, Artificial Sequence
  Description of Artificial Sequence: Synthetic oligonucleotide
ugccccgagacagggaaag

SEQ ID NO: 2919118 - RNA, 19 nt, Artificial Sequence
  Description of Artificial Sequence: Synthetic oligonucleotide
auggacaggaagaggagga

SEQ ID NO: 2919119 - RNA, 19 nt, Artificial Sequence
  Description of Artificial Sequence: Synthetic oligonucleotide
ugucuucacccagaucacc

SEQ ID NO: 2919120 - RNA, 19 nt, Artificial Sequence
  Description of Artificial Sequence: Synthetic oligonucleotide
gauggcaggaggacucccc

SEQ ID NO: 2919121 - RNA, 19 nt, Artificial Sequence
  Description of Artificial Sequence: Synthetic oligonucleotide
aacgagcugggaucccagu

SEQ ID NO: 2919122 - RNA, 19 nt, Artificial Sequence
  Description of Artificial Sequence: Synthetic oligonucleotide
guguugagucuucucacga

SEQ ID NO: 2919123 - RNA, 19 nt, Artificial Sequence
  Description of Artificial Sequence: Synthetic oligonucleotide
ugagagcuuaugagcugac

SEQ ID NO: 2919124 - RNA, 19 nt, Artificial Sequence
  Description of Artificial Sequence: Synthetic oligonucleotide
cacuugacuucccugucuc

SEQ ID NO: 2919125 - RNA, 19 nt, Artificial Sequence
  Description of Artificial Sequence: Synthetic oligonucleotide
ucacccagaucacccgaga

SEQ ID NO: 2919126 - RNA, 19 nt, Artificial Sequence
  Description of Artificial Sequence: Synthetic oligonucleotide
ucacccgagacagguuggg

SEQ ID NO: 2919127 - RNA, 19 nt, Artificial Sequence
  Description of Artificial Sequence: Synthetic oligonucleotide
cuucacuugacuucccugu

SEQ ID NO: 2919128 - RNA, 19 nt, Artificial Sequence
  Description of Artificial Sequence: Synthetic oligonucleotide
gacuccccaagcgagccgc

SEQ ID NO: 2919129 - RNA, 19 nt, Artificial Sequence
  Description of Artificial Sequence: Synthetic oligonucleotide
gagucuucucacgagccca

SEQ ID NO: 2919130 - RNA, 19 nt, Artificial Sequence
  Description of Artificial Sequence: Synthetic oligonucleotide
ucagggacgccaggugggg

SEQ ID NO: 2919131 - RNA, 19 nt, Artificial Sequence
  Description of Artificial Sequence: Synthetic oligonucleotide
ggcuugggugucuucaccc

SEQ ID NO: 2919132 - RNA, 19 nt, Artificial Sequence
  Description of Artificial Sequence: Synthetic oligonucleotide
auucucagggacgccaggu

SEQ ID NO: 2919133 - RNA, 19 nt, Artificial Sequence
  Description of Artificial Sequence: Synthetic oligonucleotide
cauucucagggacgccagg

SEQ ID NO: 2919134 - RNA, 19 nt, Artificial Sequence
  Description of Artificial Sequence: Synthetic oligonucleotide
ugcagcuagggacuuccuu

SEQ ID NO: 2919135 - RNA, 19 nt, Artificial Sequence
  Description of Artificial Sequence: Synthetic oligonucleotide
cuuggcuucccacccugug

SEQ ID NO: 2919136 - RNA, 19 nt, Artificial Sequence
  Description of Artificial Sequence: Synthetic oligonucleotide
ugagcucugcucagaguua

SEQ ID NO: 2919137 - RNA, 19 nt, Artificial Sequence
  Description of Artificial Sequence: Synthetic oligonucleotide
gacaggaacgagcugggau

SEQ ID NO: 2919138 - RNA, 19 nt, Artificial Sequence
  Description of Artificial Sequence: Synthetic oligonucleotide
ggcagugaggucugagugc

SEQ ID NO: 2919139 - RNA, 19 nt, Artificial Sequence
  Description of Artificial Sequence: Synthetic oligonucleotide
agacagcuccugcuugcag

SEQ ID NO: 2919140 - RNA, 19 nt, Artificial Sequence
  Description of Artificial Sequence: Synthetic oligonucleotide
caggaacgagcugggaucc

SEQ ID NO: 2919141 - RNA, 19 nt, Artificial Sequence
  Description of Artificial Sequence: Synthetic oligonucleotide
auggcaggaggacucccca

SEQ ID NO: 2919142 - RNA, 19 nt, Artificial Sequence
  Description of Artificial Sequence: Synthetic oligonucleotide
gaccccucgucucugucca

SEQ ID NO: 2919143 - RNA, 19 nt, Artificial Sequence
  Description of Artificial Sequence: Synthetic oligonucleotide
cacaguguugagucuucuc

SEQ ID NO: 2919144 - RNA, 19 nt, Artificial Sequence
  Description of Artificial Sequence: Synthetic oligonucleotide
aguuaggguugccuggcuu

SEQ ID NO: 2919145 - RNA, 19 nt, Artificial Sequence
  Description of Artificial Sequence: Synthetic oligonucleotide
caccagggauggcaggagg

SEQ ID NO: 2919146 - RNA, 19 nt, Artificial Sequence
  Description of Artificial Sequence: Synthetic oligonucleotide
uccccaagcgagccgccug

SEQ ID NO: 2919147 - RNA, 19 nt, Artificial Sequence
  Description of Artificial Sequence: Synthetic oligonucleotide
ugcucuuucuuggcuuccc

SEQ ID NO: 2919148 - RNA, 19 nt, Artificial Sequence
  Description of Artificial Sequence: Synthetic oligonucleotide
cccauggacaggaagagga

SEQ ID NO: 2919149 - RNA, 19 nt, Artificial Sequence
  Description of Artificial Sequence: Synthetic oligonucleotide
ugggugucuucacccagau

SEQ ID NO: 2919150 - RNA, 19 nt, Artificial Sequence
  Description of Artificial Sequence: Synthetic oligonucleotide
ugaguuccccauggacagg

SEQ ID NO: 2919151 - RNA, 19 nt, Artificial Sequence
  Description of Artificial Sequence: Synthetic oligonucleotide
ugcucagaguuaggguugc

SEQ ID NO: 2919152 - RNA, 19 nt, Artificial Sequence
  Description of Artificial Sequence: Synthetic oligonucleotide
acuugacuucccugucucu

SEQ ID NO: 2919153 - RNA, 19 nt, Artificial Sequence
  Description of Artificial Sequence: Synthetic oligonucleotide
gaguuccccauggacagga

SEQ ID NO: 2919154 - RNA, 19 nt, Artificial Sequence
  Description of Artificial Sequence: Synthetic oligonucleotide
ucaccagggauggcaggag

SEQ ID NO: 2919155 - RNA, 19 nt, Artificial Sequence
  Description of Artificial Sequence: Synthetic oligonucleotide
cccagaucacccgagacag

SEQ ID NO: 2919156 - RNA, 19 nt, Artificial Sequence
  Description of Artificial Sequence: Synthetic oligonucleotide
gagacagggaaagccucac

SEQ ID NO: 2919157 - RNA, 19 nt, Artificial Sequence
  Description of Artificial Sequence: Synthetic oligonucleotide
gaauuccagaggccugaga

SEQ ID NO: 2919158 - RNA, 19 nt, Artificial Sequence
  Description of Artificial Sequence: Synthetic oligonucleotide
gaacgagcugggaucccag

SEQ ID NO: 2919159 - RNA, 19 nt, Artificial Sequence
  Description of Artificial Sequence: Synthetic oligonucleotide
agcuagggacuuccuuuug

SEQ ID NO: 2919160 - RNA, 19 nt, Artificial Sequence
  Description of Artificial Sequence: Synthetic oligonucleotide
ccugaguuccccauggaca

SEQ ID NO: 2919161 - RNA, 19 nt, Artificial Sequence
  Description of Artificial Sequence: Synthetic oligonucleotide
ggaggacuccccaagcgag

SEQ ID NO: 2919162 - RNA, 19 nt, Artificial Sequence
  Description of Artificial Sequence: Synthetic oligonucleotide
cacccagaucacccgagac

SEQ ID NO: 2919163 - RNA, 19 nt, Artificial Sequence
  Description of Artificial Sequence: Synthetic oligonucleotide
gaucccaguccccugaguu

SEQ ID NO: 2919164 - RNA, 19 nt, Artificial Sequence
  Description of Artificial Sequence: Synthetic oligonucleotide
ucuuggcuucccacccugu

SEQ ID NO: 2919165 - RNA, 19 nt, Artificial Sequence
  Description of Artificial Sequence: Synthetic oligonucleotide
aucacccgagacagguugg

SEQ ID NO: 2919166 - RNA, 19 nt, Artificial Sequence
  Description of Artificial Sequence: Synthetic oligonucleotide
augagcugacaggaacgag

SEQ ID NO: 2919167 - RNA, 19 nt, Artificial Sequence
  Description of Artificial Sequence: Synthetic oligonucleotide
cuggaguguggggaauucc

SEQ ID NO: 2919168 - RNA, 19 nt, Artificial Sequence
  Description of Artificial Sequence: Synthetic oligonucleotide
guggccacaggcucagaca

SEQ ID NO: 2919169 - RNA, 19 nt, Artificial Sequence
  Description of Artificial Sequence: Synthetic oligonucleotide
cugagagcuuaugagcuga

SEQ ID NO: 2919170 - RNA, 19 nt, Artificial Sequence
  Description of Artificial Sequence: Synthetic oligonucleotide
cuucccacccuguggccac

SEQ ID NO: 2919171 - RNA, 19 nt, Artificial Sequence
  Description of Artificial Sequence: Synthetic oligonucleotide
gaggcagugaggucugagu

SEQ ID NO: 2919172 - RNA, 19 nt, Artificial Sequence
  Description of Artificial Sequence: Synthetic oligonucleotide
gaggacuccccaagcgagc

SEQ ID NO: 2919173 - RNA, 19 nt, Artificial Sequence
  Description of Artificial Sequence: Synthetic oligonucleotide
guggugccccgagacaggg

SEQ ID NO: 2919174 - RNA, 19 nt, Artificial Sequence
  Description of Artificial Sequence: Synthetic oligonucleotide
gcugguggugccccgagac

SEQ ID NO: 2919175 - RNA, 19 nt, Artificial Sequence
  Description of Artificial Sequence: Synthetic oligonucleotide
uucccugucucuugcucuu

SEQ ID NO: 2919176 - RNA, 19 nt, Artificial Sequence
  Description of Artificial Sequence: Synthetic oligonucleotide
ugggcacaguguugagucu

SEQ ID NO: 2919177 - RNA, 19 nt, Artificial Sequence
  Description of Artificial Sequence: Synthetic oligonucleotide
gagagcuuaugagcugaca

SEQ ID NO: 2919178 - RNA, 19 nt, Artificial Sequence
  Description of Artificial Sequence: Synthetic oligonucleotide
ggaguguggggaauuccag

SEQ ID NO: 2919179 - RNA, 19 nt, Artificial Sequence
  Description of Artificial Sequence: Synthetic oligonucleotide
aggaacgagcugggauccc

SEQ ID NO: 2919180 - RNA, 19 nt, Artificial Sequence
  Description of Artificial Sequence: Synthetic oligonucleotide
gagugcugguggugccccg

SEQ ID NO: 2919181 - RNA, 19 nt, Artificial Sequence
  Description of Artificial Sequence: Synthetic oligonucleotide
aguccccugaguuccccau

SEQ ID NO: 2919182 - RNA, 19 nt, Artificial Sequence
  Description of Artificial Sequence: Synthetic oligonucleotide
gucucuguccaugguggug

SEQ ID NO: 2919183 - RNA, 19 nt, Artificial Sequence
  Description of Artificial Sequence: Synthetic oligonucleotide
cuucacccagaucacccga

SEQ ID NO: 2919184 - RNA, 19 nt, Artificial Sequence
  Description of Artificial Sequence: Synthetic oligonucleotide
cugagugcugguggugccc

SEQ ID NO: 2919185 - RNA, 19 nt, Artificial Sequence
  Description of Artificial Sequence: Synthetic oligonucleotide
aagccucaccagggauggc

SEQ ID NO: 2919186 - RNA, 19 nt, Artificial Sequence
  Description of Artificial Sequence: Synthetic oligonucleotide
gcuagggacuuccuuuuga

SEQ ID NO: 2919187 - RNA, 19 nt, Artificial Sequence
  Description of Artificial Sequence: Synthetic oligonucleotide
gggacuuccuuuugagcuc

SEQ ID NO: 2919188 - RNA, 19 nt, Artificial Sequence
  Description of Artificial Sequence: Synthetic oligonucleotide
cuucucacgagcccauucu

SEQ ID NO: 2919189 - RNA, 19 nt, Artificial Sequence
  Description of Artificial Sequence: Synthetic oligonucleotide
ugcugguggugccccgaga

SEQ ID NO: 2919190 - RNA, 19 nt, Artificial Sequence
  Description of Artificial Sequence: Synthetic oligonucleotide
ccauggacaggaagaggag

SEQ ID NO: 2919191 - RNA, 19 nt, Artificial Sequence
  Description of Artificial Sequence: Synthetic oligonucleotide
ccacccuguggccacaggc

SEQ ID NO: 2919192 - RNA, 19 nt, Artificial Sequence
  Description of Artificial Sequence: Synthetic oligonucleotide
agccccgcuggaguguggg

SEQ ID NO: 2919193 - RNA, 19 nt, Artificial Sequence
  Description of Artificial Sequence: Synthetic oligonucleotide
ccuuuugagcucugcucag

SEQ ID NO: 2919194 - RNA, 19 nt, Artificial Sequence
  Description of Artificial Sequence: Synthetic oligonucleotide
ggaccccucgucucugucc

SEQ ID NO: 2919195 - RNA, 19 nt, Artificial Sequence
  Description of Artificial Sequence: Synthetic oligonucleotide
guggggaauuccagaggcc

SEQ ID NO: 2919196 - RNA, 19 nt, Artificial Sequence
  Description of Artificial Sequence: Synthetic oligonucleotide
uugcagcuagggacuuccu

SEQ ID NO: 2919197 - RNA, 19 nt, Artificial Sequence
  Description of Artificial Sequence: Synthetic oligonucleotide
gcaggaggacuccccaagc

SEQ ID NO: 2919198 - RNA, 19 nt, Artificial Sequence
  Description of Artificial Sequence: Synthetic oligonucleotide
cuuuugagcucugcucaga

SEQ ID NO: 2919199 - RNA, 19 nt, Artificial Sequence
  Description of Artificial Sequence: Synthetic oligonucleotide
ugacaggaacgagcuggga

SEQ ID NO: 2919200 - RNA, 19 nt, Artificial Sequence
  Description of Artificial Sequence: Synthetic oligonucleotide
uggcacagccccgcuggag

SEQ ID NO: 2919201 - RNA, 19 nt, Artificial Sequence
  Description of Artificial Sequence: Synthetic oligonucleotide
cgagcugggaucccagucc

SEQ ID NO: 2919202 - RNA, 19 nt, Artificial Sequence
  Description of Artificial Sequence: Synthetic oligonucleotide
agcugggaucccagucccc

SEQ ID NO: 2919203 - RNA, 19 nt, Artificial Sequence
  Description of Artificial Sequence: Synthetic oligonucleotide
cagaucacccgagacaggu

SEQ ID NO: 2919204 - RNA, 19 nt, Artificial Sequence
  Description of Artificial Sequence: Synthetic oligonucleotide
cccgagacagguugggcac

SEQ ID NO: 2919205 - RNA, 19 nt, Artificial Sequence
  Description of Artificial Sequence: Synthetic oligonucleotide
ccugagagcuuaugagcug

SEQ ID NO: 2919206 - RNA, 19 nt, Artificial Sequence
  Description of Artificial Sequence: Synthetic oligonucleotide
ccauucucagggacgccag

SEQ ID NO: 2919207 - RNA, 19 nt, Artificial Sequence
  Description of Artificial Sequence: Synthetic oligonucleotide
ggguugccuggcuugggug

SEQ ID NO: 2919208 - RNA, 19 nt, Artificial Sequence
  Description of Artificial Sequence: Synthetic oligonucleotide
guccccugaguuccccaug

SEQ ID NO: 2919209 - RNA, 19 nt, Artificial Sequence
  Description of Artificial Sequence: Synthetic oligonucleotide
acgagcccauucucaggga

SEQ ID NO: 2919210 - RNA, 19 nt, Artificial Sequence
  Description of Artificial Sequence: Synthetic oligonucleotide
gggaauuccagaggccuga

SEQ ID NO: 2919211 - RNA, 19 nt, Artificial Sequence
  Description of Artificial Sequence: Synthetic oligonucleotide
cucugcucagaguuagggu

SEQ ID NO: 2919212 - RNA, 19 nt, Artificial Sequence
  Description of Artificial Sequence: Synthetic oligonucleotide
cccugaguuccccauggac

SEQ ID NO: 2919213 - RNA, 19 nt, Artificial Sequence
  Description of Artificial Sequence: Synthetic oligonucleotide
ccccgagacagggaaagcc

SEQ ID NO: 2919214 - RNA, 19 nt, Artificial Sequence
  Description of Artificial Sequence: Synthetic oligonucleotide
gugcugguggugccccgag

SEQ ID NO: 2919215 - RNA, 19 nt, Artificial Sequence
  Description of Artificial Sequence: Synthetic oligonucleotide
gggaaagccucaccaggga

SEQ ID NO: 2919216 - RNA, 19 nt, Artificial Sequence
  Description of Artificial Sequence: Synthetic oligonucleotide
cccucgucucuguccaugg

SEQ ID NO: 2919217 - RNA, 19 nt, Artificial Sequence
  Description of Artificial Sequence: Synthetic oligonucleotide
uggugccccgagacaggga

SEQ ID NO: 2919218 - RNA, 19 nt, Artificial Sequence
  Description of Artificial Sequence: Synthetic oligonucleotide
cugcuugcagcuagggacu

SEQ ID NO: 2919219 - RNA, 19 nt, Artificial Sequence
  Description of Artificial Sequence: Synthetic oligonucleotide
gguugggcacaguguugag

SEQ ID NO: 2919220 - RNA, 19 nt, Artificial Sequence
  Description of Artificial Sequence: Synthetic oligonucleotide
agugcugguggugccccga

SEQ ID NO: 2919221 - RNA, 19 nt, Artificial Sequence
  Description of Artificial Sequence: Synthetic oligonucleotide
ggaggcagugaggucugag

SEQ ID NO: 2919222 - RNA, 19 nt, Artificial Sequence
  Description of Artificial Sequence: Synthetic oligonucleotide
acuccccaagcgagccgcc

SEQ ID NO: 2919223 - RNA, 19 nt, Artificial Sequence
  Description of Artificial Sequence: Synthetic oligonucleotide
cacccgagacagguugggc

SEQ ID NO: 2919224 - RNA, 19 nt, Artificial Sequence
  Description of Artificial Sequence: Synthetic oligonucleotide
ggacuccccaagcgagccg

SEQ ID NO: 2919225 - RNA, 19 nt, Artificial Sequence
  Description of Artificial Sequence: Synthetic oligonucleotide
acagccccgcuggagugug

SEQ ID NO: 2919226 - RNA, 19 nt, Artificial Sequence
  Description of Artificial Sequence: Synthetic oligonucleotide
ggaauuccagaggccugag

SEQ ID NO: 2919227 - RNA, 19 nt, Artificial Sequence
  Description of Artificial Sequence: Synthetic oligonucleotide
caggcucagacagcuccug

SEQ ID NO: 2919228 - RNA, 19 nt, Artificial Sequence
  Description of Artificial Sequence: Synthetic oligonucleotide
gcuugggugucuucaccca

SEQ ID NO: 2919229 - RNA, 19 nt, Artificial Sequence
  Description of Artificial Sequence: Synthetic oligonucleotide
ccgagacagggaaagccuc

SEQ ID NO: 2919230 - RNA, 19 nt, Artificial Sequence
  Description of Artificial Sequence: Synthetic oligonucleotide
gcagcuagggacuuccuuu

SEQ ID NO: 2919231 - RNA, 19 nt, Artificial Sequence
  Description of Artificial Sequence: Synthetic oligonucleotide
agucuucucacgagcccau

SEQ ID NO: 2919232 - RNA, 19 nt, Artificial Sequence
  Description of Artificial Sequence: Synthetic oligonucleotide
guugggcacaguguugagu

SEQ ID NO: 2919233 - RNA, 19 nt, Artificial Sequence
  Description of Artificial Sequence: Synthetic oligonucleotide
guugccuggcuuggguguc

SEQ ID NO: 2919234 - RNA, 19 nt, Artificial Sequence
  Description of Artificial Sequence: Synthetic oligonucleotide
gguggugccccgagacagg

SEQ ID NO: 2919235 - RNA, 19 nt, Artificial Sequence
  Description of Artificial Sequence: Synthetic oligonucleotide
ggaacgagcugggauccca

SEQ ID NO: 2919236 - RNA, 19 nt, Artificial Sequence
  Description of Artificial Sequence: Synthetic oligonucleotide
ggggaauuccagaggccug

SEQ ID NO: 2919237 - RNA, 19 nt, Artificial Sequence
  Description of Artificial Sequence: Synthetic oligonucleotide
cgagccgccuggcacagcc

SEQ ID NO: 2919238 - RNA, 19 nt, Artificial Sequence
  Description of Artificial Sequence: Synthetic oligonucleotide
ucuguccauggugguguua

SEQ ID NO: 2919239 - RNA, 19 nt, Artificial Sequence
  Description of Artificial Sequence: Synthetic oligonucleotide
cucuugcucuuucuuggcu

SEQ ID NO: 2919240 - RNA, 19 nt, Artificial Sequence
  Description of Artificial Sequence: Synthetic oligonucleotide
gggaucccaguccccugag

SEQ ID NO: 2919241 - RNA, 19 nt, Artificial Sequence
  Description of Artificial Sequence: Synthetic oligonucleotide
cacccuguggccacaggcu

SEQ ID NO: 2919242 - RNA, 19 nt, Artificial Sequence
  Description of Artificial Sequence: Synthetic oligonucleotide
agcgagccgccuggcacag

SEQ ID NO: 2919243 - RNA, 19 nt, Artificial Sequence
  Description of Artificial Sequence: Synthetic oligonucleotide
ccagaucacccgagacagg

SEQ ID NO: 2919244 - RNA, 19 nt, Artificial Sequence
  Description of Artificial Sequence: Synthetic oligonucleotide
cagugaggucugagugcug

SEQ ID NO: 2919245 - RNA, 19 nt, Artificial Sequence
  Description of Artificial Sequence: Synthetic oligonucleotide
gguugccuggcuugggugu

SEQ ID NO: 2919246 - RNA, 19 nt, Artificial Sequence
  Description of Artificial Sequence: Synthetic oligonucleotide
gaguuaggguugccuggcu

SEQ ID NO: 2919247 - RNA, 19 nt, Artificial Sequence
  Description of Artificial Sequence: Synthetic oligonucleotide
gcucuuucuuggcuuccca

SEQ ID NO: 2919248 - RNA, 19 nt, Artificial Sequence
  Description of Artificial Sequence: Synthetic oligonucleotide
uugccuggcuugggugucu

SEQ ID NO: 2919249 - RNA, 19 nt, Artificial Sequence
  Description of Artificial Sequence: Synthetic oligonucleotide
cuugacuucccugucucuu

SEQ ID NO: 2919250 - RNA, 19 nt, Artificial Sequence
  Description of Artificial Sequence: Synthetic oligonucleotide
ccccaagcgagccgccugg

SEQ ID NO: 2919251 - RNA, 19 nt, Artificial Sequence
  Description of Artificial Sequence: Synthetic oligonucleotide
gcacagccccgcuggagug

SEQ ID NO: 2919252 - RNA, 19 nt, Artificial Sequence
  Description of Artificial Sequence: Synthetic oligonucleotide
ucccacccuguggccacag

SEQ ID NO: 2919253 - RNA, 19 nt, Artificial Sequence
  Description of Artificial Sequence: Synthetic oligonucleotide
ggaaagccucaccagggau

SEQ ID NO: 2919254 - RNA, 19 nt, Artificial Sequence
  Description of Artificial Sequence: Synthetic oligonucleotide
gcagugaggucugagugcu

SEQ ID NO: 2919255 - RNA, 19 nt, Artificial Sequence
  Description of Artificial Sequence: Synthetic oligonucleotide
ggauggcaggaggacuccc

SEQ ID NO: 2919256 - RNA, 19 nt, Artificial Sequence
  Description of Artificial Sequence: Synthetic oligonucleotide
ugcuugcagcuagggacuu

SEQ ID NO: 2919257 - RNA, 19 nt, Artificial Sequence
  Description of Artificial Sequence: Synthetic oligonucleotide
cgagcccauucucagggac

SEQ ID NO: 2919258 - RNA, 19 nt, Artificial Sequence
  Description of Artificial Sequence: Synthetic oligonucleotide
ccagggauggcaggaggac

SEQ ID NO: 2919259 - RNA, 19 nt, Artificial Sequence
  Description of Artificial Sequence: Synthetic oligonucleotide
gggauggcaggaggacucc

SEQ ID NO: 2919260 - RNA, 19 nt, Artificial Sequence
  Description of Artificial Sequence: Synthetic oligonucleotide
ggcacagccccgcuggagu

SEQ ID NO: 2919261 - RNA, 19 nt, Artificial Sequence
  Description of Artificial Sequence: Synthetic oligonucleotide
ggcuucccacccuguggcc

SEQ ID NO: 2919262 - RNA, 19 nt, Artificial Sequence
  Description of Artificial Sequence: Synthetic oligonucleotide
agaucacccgagacagguu

SEQ ID NO: 2919263 - RNA, 19 nt, Artificial Sequence
  Description of Artificial Sequence: Synthetic oligonucleotide
caguccccugaguucccca

SEQ ID NO: 2919264 - RNA, 19 nt, Artificial Sequence
  Description of Artificial Sequence: Synthetic oligonucleotide
ccuguggccacaggcucag

SEQ ID NO: 2919265 - RNA, 19 nt, Artificial Sequence
  Description of Artificial Sequence: Synthetic oligonucleotide
ggcacaguguugagucuuc

SEQ ID NO: 2919266 - RNA, 19 nt, Artificial Sequence
  Description of Artificial Sequence: Synthetic oligonucleotide
ccccauggacaggaagagg

SEQ ID NO: 2919267 - RNA, 19 nt, Artificial Sequence
  Description of Artificial Sequence: Synthetic oligonucleotide
gcuggaguguggggaauuc

SEQ ID NO: 2919268 - RNA, 19 nt, Artificial Sequence
  Description of Artificial Sequence: Synthetic oligonucleotide
cccauucucagggacgcca

SEQ ID NO: 2919269 - RNA, 19 nt, Artificial Sequence
  Description of Artificial Sequence: Synthetic oligonucleotide
gagccgccuggcacagccc

SEQ ID NO: 2919270 - RNA, 19 nt, Artificial Sequence
  Description of Artificial Sequence: Synthetic oligonucleotide
gugaggucugagugcuggu

SEQ ID NO: 2919271 - RNA, 19 nt, Artificial Sequence
  Description of Artificial Sequence: Synthetic oligonucleotide
cagcuagggacuuccuuuu

SEQ ID NO: 2919272 - RNA, 19 nt, Artificial Sequence
  Description of Artificial Sequence: Synthetic oligonucleotide
gcuuaugagcugacaggaa

SEQ ID NO: 2919273 - RNA, 19 nt, Artificial Sequence
  Description of Artificial Sequence: Synthetic oligonucleotide
gcuucccacccuguggcca

SEQ ID NO: 2919274 - RNA, 19 nt, Artificial Sequence
  Description of Artificial Sequence: Synthetic oligonucleotide
uucccacccuguggccaca

SEQ ID NO: 2919275 - RNA, 19 nt, Artificial Sequence
  Description of Artificial Sequence: Synthetic oligonucleotide
cagccccgcuggagugugg

SEQ ID NO: 2919276 - RNA, 19 nt, Artificial Sequence
  Description of Artificial Sequence: Synthetic oligonucleotide
ggacuuccuuuugagcucu

SEQ ID NO: 2919277 - RNA, 19 nt, Artificial Sequence
  Description of Artificial Sequence: Synthetic oligonucleotide
ggggaggcagugaggucug

SEQ ID NO: 2919278 - RNA, 19 nt, Artificial Sequence
  Description of Artificial Sequence: Synthetic oligonucleotide
ucccugucucuugcucuuu

SEQ ID NO: 2919279 - RNA, 19 nt, Artificial Sequence
  Description of Artificial Sequence: Synthetic oligonucleotide
cccugucucuugcucuuuc

SEQ ID NO: 2919280 - RNA, 19 nt, Artificial Sequence
  Description of Artificial Sequence: Synthetic oligonucleotide
cccgagacagggaaagccu

SEQ ID NO: 2919281 - RNA, 19 nt, Artificial Sequence
  Description of Artificial Sequence: Synthetic oligonucleotide
aguuccccauggacaggaa

SEQ ID NO: 2919282 - RNA, 19 nt, Artificial Sequence
  Description of Artificial Sequence: Synthetic oligonucleotide
gccuggcacagccccgcug

SEQ ID NO: 2919283 - RNA, 19 nt, Artificial Sequence
  Description of Artificial Sequence: Synthetic oligonucleotide
ggccacaggcucagacagc

SEQ ID NO: 2919284 - RNA, 19 nt, Artificial Sequence
  Description of Artificial Sequence: Synthetic oligonucleotide
gcugggaucccaguccccu

SEQ ID NO: 2919285 - RNA, 19 nt, Artificial Sequence
  Description of Artificial Sequence: Synthetic oligonucleotide
ugccuggcuugggugucuu

SEQ ID NO: 2919286 - RNA, 19 nt, Artificial Sequence
  Description of Artificial Sequence: Synthetic oligonucleotide
cgagacagguugggcacag

SEQ ID NO: 2919287 - RNA, 19 nt, Artificial Sequence
  Description of Artificial Sequence: Synthetic oligonucleotide
gggaccccucgucucuguc

SEQ ID NO: 2919288 - RNA, 19 nt, Artificial Sequence
  Description of Artificial Sequence: Synthetic oligonucleotide
cuggcacagccccgcugga

SEQ ID NO: 2919289 - RNA, 19 nt, Artificial Sequence
  Description of Artificial Sequence: Synthetic oligonucleotide
gcucagaguuaggguugcc

SEQ ID NO: 2919290 - RNA, 19 nt, Artificial Sequence
  Description of Artificial Sequence: Synthetic oligonucleotide
cccaguccccugaguuccc

SEQ ID NO: 2919291 - RNA, 19 nt, Artificial Sequence
  Description of Artificial Sequence: Synthetic oligonucleotide
ccaguccccugaguucccc

SEQ ID NO: 2919292 - RNA, 19 nt, Artificial Sequence
  Description of Artificial Sequence: Synthetic oligonucleotide
accccucgucucuguccau

SEQ ID NO: 2919293 - RNA, 19 nt, Artificial Sequence
  Description of Artificial Sequence: Synthetic oligonucleotide
ccccucgucucuguccaug

SEQ ID NO: 2919294 - RNA, 19 nt, Artificial Sequence
  Description of Artificial Sequence: Synthetic oligonucleotide
ccagaggccugagagcuua

SEQ ID NO: 2919295 - RNA, 19 nt, Artificial Sequence
  Description of Artificial Sequence: Synthetic oligonucleotide
gccgccuggcacagccccg

SEQ ID NO: 2919296 - RNA, 19 nt, Artificial Sequence
  Description of Artificial Sequence: Synthetic oligonucleotide
cccacccuguggccacagg

SEQ ID NO: 2919297 - RNA, 19 nt, Artificial Sequence
  Description of Artificial Sequence: Synthetic oligonucleotide
gagacagguugggcacagu

SEQ ID NO: 2919298 - RNA, 19 nt, Artificial Sequence
  Description of Artificial Sequence: Synthetic oligonucleotide
gcuugcagcuagggacuuc

SEQ ID NO: 2919299 - RNA, 19 nt, Artificial Sequence
  Description of Artificial Sequence: Synthetic oligonucleotide
gccccgagacagggaaagc

SEQ ID NO: 2919300 - RNA, 19 nt, Artificial Sequence
  Description of Artificial Sequence: Synthetic oligonucleotide
ccaagcgagccgccuggca

SEQ ID NO: 2919301 - RNA, 19 nt, Artificial Sequence
  Description of Artificial Sequence: Synthetic oligonucleotide
ccgccuggcacagccccgc

SEQ ID NO: 2919302 - RNA, 19 nt, Artificial Sequence
  Description of Artificial Sequence: Synthetic oligonucleotide
gugccccgagacagggaaa

SEQ ID NO: 2919303 - RNA, 19 nt, Artificial Sequence
  Description of Artificial Sequence: Synthetic oligonucleotide
cccaagcgagccgccuggc

SEQ ID NO: 2919304 - RNA, 19 nt, Artificial Sequence
  Description of Artificial Sequence: Synthetic oligonucleotide
gccuggcuugggugucuuc

SEQ ID NO: 2919305 - RNA, 19 nt, Artificial Sequence
  Description of Artificial Sequence: Synthetic oligonucleotide
cacagccccgcuggagugu

SEQ ID NO: 2919306 - RNA, 19 nt, Artificial Sequence
  Description of Artificial Sequence: Synthetic oligonucleotide
cucuguccauggugguguu

SEQ ID NO: 2919307 - RNA, 19 nt, Artificial Sequence
  Description of Artificial Sequence: Synthetic oligonucleotide
cuccccaagcgagccgccu

SEQ ID NO: 2919308 - RNA, 19 nt, Artificial Sequence
  Description of Artificial Sequence: Synthetic oligonucleotide
gucuucucacgagcccauu

SEQ ID NO: 2919309 - RNA, 19 nt, Artificial Sequence
  Description of Artificial Sequence: Synthetic oligonucleotide
ccgagacagguugggcaca

SEQ ID NO: 2919310 - RNA, 19 nt, Artificial Sequence
  Description of Artificial Sequence: Synthetic oligonucleotide
cagaggccugagagcuuau

SEQ ID NO: 2919311 - RNA, 19 nt, Artificial Sequence
  Description of Artificial Sequence: Synthetic oligonucleotide
ccccugaguuccccaugga

SEQ ID NO: 2919312 - RNA, 19 nt, Artificial Sequence
  Description of Artificial Sequence: Synthetic oligonucleotide
ggggaccccucgucucugu

SEQ ID NO: 2919313 - RNA, 19 nt, Artificial Sequence
  Description of Artificial Sequence: Synthetic oligonucleotide
gggaggcagugaggucuga

SEQ ID NO: 2919314 - RNA, 19 nt, Artificial Sequence
  Description of Artificial Sequence: Synthetic oligonucleotide
cuguggccacaggcucaga

SEQ ID NO: 2919315 - RNA, 19 nt, Artificial Sequence
  Description of Artificial Sequence: Synthetic oligonucleotide
cgucucuguccaugguggu

SEQ ID NO: 2919316 - RNA, 19 nt, Artificial Sequence
  Description of Artificial Sequence: Synthetic oligonucleotide
gcgagccgccuggcacagc

SEQ ID NO: 2919317 - RNA, 19 nt, Artificial Sequence
  Description of Artificial Sequence: Synthetic oligonucleotide
cgcuggaguguggggaauu

SEQ ID NO: 2919318 - RNA, 19 nt, Artificial Sequence
  Description of Artificial Sequence: Synthetic oligonucleotide
ccgcuggaguguggggaau

SEQ ID NO: 2919319 - RNA, 19 nt, Artificial Sequence
  Description of Artificial Sequence: Synthetic oligonucleotide
cgccuggcacagccccgcu

SEQ ID NO: 2919320 - RNA, 19 nt, Artificial Sequence
  Description of Artificial Sequence: Synthetic oligonucleotide
acuaacuucaaaguaaggc

SEQ ID NO: 2919321 - RNA, 19 nt, Artificial Sequence
  Description of Artificial Sequence: Synthetic oligonucleotide
auugauaucauucuuggca

SEQ ID NO: 2919322 - RNA, 19 nt, Artificial Sequence
  Description of Artificial Sequence: Synthetic oligonucleotide
aaccucaaaggcuuguacc

SEQ ID NO: 2919323 - RNA, 19 nt, Artificial Sequence
  Description of Artificial Sequence: Synthetic oligonucleotide
uucaaaguaaggcaugucc

SEQ ID NO: 2919324 - RNA, 19 nt, Artificial Sequence
  Description of Artificial Sequence: Synthetic oligonucleotide
aaaggcuuguaccacauug

SEQ ID NO: 2919325 - RNA, 19 nt, Artificial Sequence
  Description of Artificial Sequence: Synthetic oligonucleotide
cuuccugucuuccagaucg

SEQ ID NO: 2919326 - RNA, 19 nt, Artificial Sequence
  Description of Artificial Sequence: Synthetic oligonucleotide
ugccgugagagucagaagg

SEQ ID NO: 2919327 - RNA, 19 nt, Artificial Sequence
  Description of Artificial Sequence: Synthetic oligonucleotide
cuuuacaccauccaugggc

SEQ ID NO: 2919328 - RNA, 19 nt, Artificial Sequence
  Description of Artificial Sequence: Synthetic oligonucleotide
uccagaucgauuuuguugc

SEQ ID NO: 2919329 - RNA, 19 nt, Artificial Sequence
  Description of Artificial Sequence: Synthetic oligonucleotide
acauugauaucauucuugg

SEQ ID NO: 2919330 - RNA, 19 nt, Artificial Sequence
  Description of Artificial Sequence: Synthetic oligonucleotide
cuuggcacuaacuucaaag

SEQ ID NO: 2919331 - RNA, 19 nt, Artificial Sequence
  Description of Artificial Sequence: Synthetic oligonucleotide
gauuuuguugccaagcacc

SEQ ID NO: 2919332 - RNA, 19 nt, Artificial Sequence
  Description of Artificial Sequence: Synthetic oligonucleotide
cuugauggauuccacaagg

SEQ ID NO: 2919333 - RNA, 19 nt, Artificial Sequence
  Description of Artificial Sequence: Synthetic oligonucleotide
ucucuuuacaccauccaug

SEQ ID NO: 2919334 - RNA, 19 nt, Artificial Sequence
  Description of Artificial Sequence: Synthetic oligonucleotide
uuuacaccauccaugggcc

SEQ ID NO: 2919335 - RNA, 19 nt, Artificial Sequence
  Description of Artificial Sequence: Synthetic oligonucleotide
auguccuucucuuuacacc

SEQ ID NO: 2919336 - RNA, 19 nt, Artificial Sequence
  Description of Artificial Sequence: Synthetic oligonucleotide
aaggugauucucuacggug

SEQ ID NO: 2919337 - RNA, 19 nt, Artificial Sequence
  Description of Artificial Sequence: Synthetic oligonucleotide
uuccagaucgauuuuguug

SEQ ID NO: 2919338 - RNA, 19 nt, Artificial Sequence
  Description of Artificial Sequence: Synthetic oligonucleotide
cucuuuacaccauccaugg

SEQ ID NO: 2919339 - RNA, 19 nt, Artificial Sequence
  Description of Artificial Sequence: Synthetic oligonucleotide
uugauaucauucuuggcac

SEQ ID NO: 2919340 - RNA, 19 nt, Artificial Sequence
  Description of Artificial Sequence: Synthetic oligonucleotide
aaaguaaggcauguccuuc

SEQ ID NO: 2919341 - RNA, 19 nt, Artificial Sequence
  Description of Artificial Sequence: Synthetic oligonucleotide
cacaaggugauucucuacg

SEQ ID NO: 2919342 - RNA, 19 nt, Artificial Sequence
  Description of Artificial Sequence: Synthetic oligonucleotide
uguccuucucuuuacacca

SEQ ID NO: 2919343 - RNA, 19 nt, Artificial Sequence
  Description of Artificial Sequence: Synthetic oligonucleotide
aucgauuuuguugccaagc

SEQ ID NO: 2919344 - RNA, 19 nt, Artificial Sequence
  Description of Artificial Sequence: Synthetic oligonucleotide
agagucagaaggacgagcc

SEQ ID NO: 2919345 - RNA, 19 nt, Artificial Sequence
  Description of Artificial Sequence: Synthetic oligonucleotide
uaacuucaaaguaaggcau

SEQ ID NO: 2919346 - RNA, 19 nt, Artificial Sequence
  Description of Artificial Sequence: Synthetic oligonucleotide
ugugucaggggagaggagg

SEQ ID NO: 2919347 - RNA, 19 nt, Artificial Sequence
  Description of Artificial Sequence: Synthetic oligonucleotide
cacauugauaucauucuug

SEQ ID NO: 2919348 - RNA, 19 nt, Artificial Sequence
  Description of Artificial Sequence: Synthetic oligonucleotide
caugggauaugacugcucc

SEQ ID NO: 2919349 - RNA, 19 nt, Artificial Sequence
  Description of Artificial Sequence: Synthetic oligonucleotide
gauggauuccacaagguga

SEQ ID NO: 2919350 - RNA, 19 nt, Artificial Sequence
  Description of Artificial Sequence: Synthetic oligonucleotide
ucauucuuggcacuaacuu

SEQ ID NO: 2919351 - RNA, 19 nt, Artificial Sequence
  Description of Artificial Sequence: Synthetic oligonucleotide
guggguugagcuuggaacg

SEQ ID NO: 2919352 - RNA, 19 nt, Artificial Sequence
  Description of Artificial Sequence: Synthetic oligonucleotide
accaccaugggauaugacu

SEQ ID NO: 2919353 - RNA, 19 nt, Artificial Sequence
  Description of Artificial Sequence: Synthetic oligonucleotide
acaaggugauucucuacgg

SEQ ID NO: 2919354 - RNA, 19 nt, Artificial Sequence
  Description of Artificial Sequence: Synthetic oligonucleotide
uugguaccucaacagagcc

SEQ ID NO: 2919355 - RNA, 19 nt, Artificial Sequence
  Description of Artificial Sequence: Synthetic oligonucleotide
uuguaccacauugauauca

SEQ ID NO: 2919356 - RNA, 19 nt, Artificial Sequence
  Description of Artificial Sequence: Synthetic oligonucleotide
ucgauuuuguugccaagca

SEQ ID NO: 2919357 - RNA, 19 nt, Artificial Sequence
  Description of Artificial Sequence: Synthetic oligonucleotide
uuggcacuaacuucaaagu

SEQ ID NO: 2919358 - RNA, 19 nt, Artificial Sequence
  Description of Artificial Sequence: Synthetic oligonucleotide
ugcacagcugccgugagag

SEQ ID NO: 2919359 - RNA, 19 nt, Artificial Sequence
  Description of Artificial Sequence: Synthetic oligonucleotide
agcccggcuggccagaacc

SEQ ID NO: 2919360 - RNA, 19 nt, Artificial Sequence
  Description of Artificial Sequence: Synthetic oligonucleotide
cuugguaccucaacagagc

SEQ ID NO: 2919361 - RNA, 19 nt, Artificial Sequence
  Description of Artificial Sequence: Synthetic oligonucleotide
gaacgaguggccugcacag

SEQ ID NO: 2919362 - RNA, 19 nt, Artificial Sequence
  Description of Artificial Sequence: Synthetic oligonucleotide
gguaccucaacagagcccg

SEQ ID NO: 2919363 - RNA, 19 nt, Artificial Sequence
  Description of Artificial Sequence: Synthetic oligonucleotide
agcagcaucugcucuuugg

SEQ ID NO: 2919364 - RNA, 19 nt, Artificial Sequence
  Description of Artificial Sequence: Synthetic oligonucleotide
aaguaaggcauguccuucu

SEQ ID NO: 2919365 - RNA, 19 nt, Artificial Sequence
  Description of Artificial Sequence: Synthetic oligonucleotide
uucucuuuacaccauccau

SEQ ID NO: 2919366 - RNA, 19 nt, Artificial Sequence
  Description of Artificial Sequence: Synthetic oligonucleotide
ccuggcgagagcuugaugg

SEQ ID NO: 2919367 - RNA, 19 nt, Artificial Sequence
  Description of Artificial Sequence: Synthetic oligonucleotide
agcaucugcucuuuggcug

SEQ ID NO: 2919368 - RNA, 19 nt, Artificial Sequence
  Description of Artificial Sequence: Synthetic oligonucleotide
aggugauucucuacggugc

SEQ ID NO: 2919369 - RNA, 19 nt, Artificial Sequence
  Description of Artificial Sequence: Synthetic oligonucleotide
cauucuuggcacuaacuuc

SEQ ID NO: 2919370 - RNA, 19 nt, Artificial Sequence
  Description of Artificial Sequence: Synthetic oligonucleotide
ugacguucucuccugcugc

SEQ ID NO: 2919371 - RNA, 19 nt, Artificial Sequence
  Description of Artificial Sequence: Synthetic oligonucleotide
gagagcuggagccaccgag

SEQ ID NO: 2919372 - RNA, 19 nt, Artificial Sequence
  Description of Artificial Sequence: Synthetic oligonucleotide
ugccuugguaccucaacag

SEQ ID NO: 2919373 - RNA, 19 nt, Artificial Sequence
  Description of Artificial Sequence: Synthetic oligonucleotide
ucuuccagaucgauuuugu

SEQ ID NO: 2919374 - RNA, 19 nt, Artificial Sequence
  Description of Artificial Sequence: Synthetic oligonucleotide
ucuuuggcuggccuggcga

SEQ ID NO: 2919375 - RNA, 19 nt, Artificial Sequence
  Description of Artificial Sequence: Synthetic oligonucleotide
ucuggggccaggauuugcc

SEQ ID NO: 2919376 - RNA, 19 nt, Artificial Sequence
  Description of Artificial Sequence: Synthetic oligonucleotide
uccugcugcagccuccuag

SEQ ID NO: 2919377 - RNA, 19 nt, Artificial Sequence
  Description of Artificial Sequence: Synthetic oligonucleotide
uguaccacauugauaucau

SEQ ID NO: 2919378 - RNA, 19 nt, Artificial Sequence
  Description of Artificial Sequence: Synthetic oligonucleotide
cauugauaucauucuuggc

SEQ ID NO: 2919379 - RNA, 19 nt, Artificial Sequence
  Description of Artificial Sequence: Synthetic oligonucleotide
aacagagcccggcuggcca

SEQ ID NO: 2919380 - RNA, 19 nt, Artificial Sequence
  Description of Artificial Sequence: Synthetic oligonucleotide
uugauggauuccacaaggu

SEQ ID NO: 2919381 - RNA, 19 nt, Artificial Sequence
  Description of Artificial Sequence: Synthetic oligonucleotide
ucaggggagaggaggcagg

SEQ ID NO: 2919382 - RNA, 19 nt, Artificial Sequence
  Description of Artificial Sequence: Synthetic oligonucleotide
aguaaggcauguccuucuc

SEQ ID NO: 2919383 - RNA, 19 nt, Artificial Sequence
  Description of Artificial Sequence: Synthetic oligonucleotide
gcuuguaccacauugauau

SEQ ID NO: 2919384 - RNA, 19 nt, Artificial Sequence
  Description of Artificial Sequence: Synthetic oligonucleotide
aacuucaaaguaaggcaug

SEQ ID NO: 2919385 - RNA, 19 nt, Artificial Sequence
  Description of Artificial Sequence: Synthetic oligonucleotide
gaggaggcaggagagcugg

SEQ ID NO: 2919386 - RNA, 19 nt, Artificial Sequence
  Description of Artificial Sequence: Synthetic oligonucleotide
aaggacgagcccaggaauc

SEQ ID NO: 2919387 - RNA, 19 nt, Artificial Sequence
  Description of Artificial Sequence: Synthetic oligonucleotide
ugugcuuucucuggggcca

SEQ ID NO: 2919388 - RNA, 19 nt, Artificial Sequence
  Description of Artificial Sequence: Synthetic oligonucleotide
uaaggcauguccuucucuu

SEQ ID NO: 2919389 - RNA, 19 nt, Artificial Sequence
  Description of Artificial Sequence: Synthetic oligonucleotide
gaaccucaaaggcuuguac

SEQ ID NO: 2919390 - RNA, 19 nt, Artificial Sequence
  Description of Artificial Sequence: Synthetic oligonucleotide
gaaucagcagcaucugcuc

SEQ ID NO: 2919391 - RNA, 19 nt, Artificial Sequence
  Description of Artificial Sequence: Synthetic oligonucleotide
gaucgauuuuguugccaag

SEQ ID NO: 2919392 - RNA, 19 nt, Artificial Sequence
  Description of Artificial Sequence: Synthetic oligonucleotide
agaucgauuuuguugccaa

SEQ ID NO: 2919393 - RNA, 19 nt, Artificial Sequence
  Description of Artificial Sequence: Synthetic oligonucleotide
uucucuggggccaggauuu

SEQ ID NO: 2919394 - RNA, 19 nt, Artificial Sequence
  Description of Artificial Sequence: Synthetic oligonucleotide
uggcacuaacuucaaagua

SEQ ID NO: 2919395 - RNA, 19 nt, Artificial Sequence
  Description of Artificial Sequence: Synthetic oligonucleotide
ucaaaggcuuguaccacau

SEQ ID NO: 2919396 - RNA, 19 nt, Artificial Sequence
  Description of Artificial Sequence: Synthetic oligonucleotide
guaccuuccugucuuccag

SEQ ID NO: 2919397 - RNA, 19 nt, Artificial Sequence
  Description of Artificial Sequence: Synthetic oligonucleotide
cacuaacuucaaaguaagg

SEQ ID NO: 2919398 - RNA, 19 nt, Artificial Sequence
  Description of Artificial Sequence: Synthetic oligonucleotide
ugguaccucaacagagccc

SEQ ID NO: 2919399 - RNA, 19 nt, Artificial Sequence
  Description of Artificial Sequence: Synthetic oligonucleotide
agaaggacgagcccaggaa

SEQ ID NO: 2919400 - RNA, 19 nt, Artificial Sequence
  Description of Artificial Sequence: Synthetic oligonucleotide
acugugucaggggagagga

SEQ ID NO: 2919401 - RNA, 19 nt, Artificial Sequence
  Description of Artificial Sequence: Synthetic oligonucleotide
gaggcaggagagcuggagc

SEQ ID NO: 2919402 - RNA, 19 nt, Artificial Sequence
  Description of Artificial Sequence: Synthetic oligonucleotide
agcaggacugugucagggg

SEQ ID NO: 2919403 - RNA, 19 nt, Artificial Sequence
  Description of Artificial Sequence: Synthetic oligonucleotide
agucagaaggacgagccca

SEQ ID NO: 2919404 - RNA, 19 nt, Artificial Sequence
  Description of Artificial Sequence: Synthetic oligonucleotide
uccugugcuuucucugggg

SEQ ID NO: 2919405 - RNA, 19 nt, Artificial Sequence
  Description of Artificial Sequence: Synthetic oligonucleotide
cuuggaacgaguggccugc

SEQ ID NO: 2919406 - RNA, 19 nt, Artificial Sequence
  Description of Artificial Sequence: Synthetic oligonucleotide
aaggcuuguaccacauuga

SEQ ID NO: 2919407 - RNA, 19 nt, Artificial Sequence
  Description of Artificial Sequence: Synthetic oligonucleotide
ugauaucauucuuggcacu

SEQ ID NO: 2919408 - RNA, 19 nt, Artificial Sequence
  Description of Artificial Sequence: Synthetic oligonucleotide
aacgaguggccugcacagc

SEQ ID NO: 2919409 - RNA, 19 nt, Artificial Sequence
  Description of Artificial Sequence: Synthetic oligonucleotide
uucucuacggugccuuggu

SEQ ID NO: 2919410 - RNA, 19 nt, Artificial Sequence
  Description of Artificial Sequence: Synthetic oligonucleotide
ucugcucuuuggcuggccu

SEQ ID NO: 2919411 - RNA, 19 nt, Artificial Sequence
  Description of Artificial Sequence: Synthetic oligonucleotide
acuucaaaguaaggcaugu

SEQ ID NO: 2919412 - RNA, 19 nt, Artificial Sequence
  Description of Artificial Sequence: Synthetic oligonucleotide
ugggauaugacugcuccau

SEQ ID NO: 2919413 - RNA, 19 nt, Artificial Sequence
  Description of Artificial Sequence: Synthetic oligonucleotide
gagagucagaaggacgagc

SEQ ID NO: 2919414 - RNA, 19 nt, Artificial Sequence
  Description of Artificial Sequence: Synthetic oligonucleotide
gcugcagccuccuaggggc

SEQ ID NO: 2919415 - RNA, 19 nt, Artificial Sequence
  Description of Artificial Sequence: Synthetic oligonucleotide
gugagagucagaaggacga

SEQ ID NO: 2919416 - RNA, 19 nt, Artificial Sequence
  Description of Artificial Sequence: Synthetic oligonucleotide
ccuugguaccucaacagag

SEQ ID NO: 2919417 - RNA, 19 nt, Artificial Sequence
  Description of Artificial Sequence: Synthetic oligonucleotide
auuuuguugccaagcacca

SEQ ID NO: 2919418 - RNA, 19 nt, Artificial Sequence
  Description of Artificial Sequence: Synthetic oligonucleotide
ccuccuaggggcaugcugg

SEQ ID NO: 2919419 - RNA, 19 nt, Artificial Sequence
  Description of Artificial Sequence: Synthetic oligonucleotide
gagagcuugauggauucca

SEQ ID NO: 2919420 - RNA, 19 nt, Artificial Sequence
  Description of Artificial Sequence: Synthetic oligonucleotide
caccaugggauaugacugc

SEQ ID NO: 2919421 - RNA, 19 nt, Artificial Sequence
  Description of Artificial Sequence: Synthetic oligonucleotide
gacugugucaggggagagg

SEQ ID NO: 2919422 - RNA, 19 nt, Artificial Sequence
  Description of Artificial Sequence: Synthetic oligonucleotide
acgaguggccugcacagcu

SEQ ID NO: 2919423 - RNA, 19 nt, Artificial Sequence
  Description of Artificial Sequence: Synthetic oligonucleotide
agagcuugauggauuccac

SEQ ID NO: 2919424 - RNA, 19 nt, Artificial Sequence
  Description of Artificial Sequence: Synthetic oligonucleotide
ugugacguucucuccugcu

SEQ ID NO: 2919425 - RNA, 19 nt, Artificial Sequence
  Description of Artificial Sequence: Synthetic oligonucleotide
uccacaaggugauucucua

SEQ ID NO: 2919426 - RNA, 19 nt, Artificial Sequence
  Description of Artificial Sequence: Synthetic oligonucleotide
auucucuacggugccuugg

SEQ ID NO: 2919427 - RNA, 19 nt, Artificial Sequence
  Description of Artificial Sequence: Synthetic oligonucleotide
ugccaagcaccaccauggg

SEQ ID NO: 2919428 - RNA, 19 nt, Artificial Sequence
  Description of Artificial Sequence: Synthetic oligonucleotide
gauuccacaaggugauucu

SEQ ID NO: 2919429 - RNA, 19 nt, Artificial Sequence
  Description of Artificial Sequence: Synthetic oligonucleotide
gagucagaaggacgagccc

SEQ ID NO: 2919430 - RNA, 19 nt, Artificial Sequence
  Description of Artificial Sequence: Synthetic oligonucleotide
cugugcuuucucuggggcc

SEQ ID NO: 2919431 - RNA, 19 nt, Artificial Sequence
  Description of Artificial Sequence: Synthetic oligonucleotide
ccauccaugggccaccucc

SEQ ID NO: 2919432 - RNA, 19 nt, Artificial Sequence
  Description of Artificial Sequence: Synthetic oligonucleotide
ugggccaccuccuggguac

SEQ ID NO: 2919433 - RNA, 19 nt, Artificial Sequence
  Description of Artificial Sequence: Synthetic oligonucleotide
ugcugggguggguugagcu

SEQ ID NO: 2919434 - RNA, 19 nt, Artificial Sequence
  Description of Artificial Sequence: Synthetic oligonucleotide
ccaccaugggauaugacug

SEQ ID NO: 2919435 - RNA, 19 nt, Artificial Sequence
  Description of Artificial Sequence: Synthetic oligonucleotide
gugacguucucuccugcug

SEQ ID NO: 2919436 - RNA, 19 nt, Artificial Sequence
  Description of Artificial Sequence: Synthetic oligonucleotide
gaguggccugcacagcugc

SEQ ID NO: 2919437 - RNA, 19 nt, Artificial Sequence
  Description of Artificial Sequence: Synthetic oligonucleotide
cuuuggcuggccuggcgag

SEQ ID NO: 2919438 - RNA, 19 nt, Artificial Sequence
  Description of Artificial Sequence: Synthetic oligonucleotide
ugagagucagaaggacgag

SEQ ID NO: 2919439 - RNA, 19 nt, Artificial Sequence
  Description of Artificial Sequence: Synthetic oligonucleotide
gauucucuacggugccuug

SEQ ID NO: 2919440 - RNA, 19 nt, Artificial Sequence
  Description of Artificial Sequence: Synthetic oligonucleotide
gauaucauucuuggcacua

SEQ ID NO: 2919441 - RNA, 19 nt, Artificial Sequence
  Description of Artificial Sequence: Synthetic oligonucleotide
acaccauccaugggccacc

SEQ ID NO: 2919442 - RNA, 19 nt, Artificial Sequence
  Description of Artificial Sequence: Synthetic oligonucleotide
gcacuaacuucaaaguaag

SEQ ID NO: 2919443 - RNA, 19 nt, Artificial Sequence
  Description of Artificial Sequence: Synthetic oligonucleotide
gagcuugauggauuccaca

SEQ ID NO: 2919444 - RNA, 19 nt, Artificial Sequence
  Description of Artificial Sequence: Synthetic oligonucleotide
uacaccauccaugggccac

SEQ ID NO: 2919445 - RNA, 19 nt, Artificial Sequence
  Description of Artificial Sequence: Synthetic oligonucleotide
gcuggccagaaccucaaag

SEQ ID NO: 2919446 - RNA, 19 nt, Artificial Sequence
  Description of Artificial Sequence: Synthetic oligonucleotide
aucauucuuggcacuaacu

SEQ ID NO: 2919447 - RNA, 19 nt, Artificial Sequence
  Description of Artificial Sequence: Synthetic oligonucleotide
auggauuccacaaggugau

SEQ ID NO: 2919448 - RNA, 19 nt, Artificial Sequence
  Description of Artificial Sequence: Synthetic oligonucleotide
aaggcauguccuucucuuu

SEQ ID NO: 2919449 - RNA, 19 nt, Artificial Sequence
  Description of Artificial Sequence: Synthetic oligonucleotide
cucaaaggcuuguaccaca

SEQ ID NO: 2919450 - RNA, 19 nt, Artificial Sequence
  Description of Artificial Sequence: Synthetic oligonucleotide
uggggccaggauuugccug

SEQ ID NO: 2919451 - RNA, 19 nt, Artificial Sequence
  Description of Artificial Sequence: Synthetic oligonucleotide
gcuggagccaccgagacuc

SEQ ID NO: 2919452 - RNA, 19 nt, Artificial Sequence
  Description of Artificial Sequence: Synthetic oligonucleotide
gcuugauggauuccacaag

SEQ ID NO: 2919453 - RNA, 19 nt, Artificial Sequence
  Description of Artificial Sequence: Synthetic oligonucleotide
gcaucugcucuuuggcugg

SEQ ID NO: 2919454 - RNA, 19 nt, Artificial Sequence
  Description of Artificial Sequence: Synthetic oligonucleotide
ccaggauuugccugugacg

SEQ ID NO: 2919455 - RNA, 19 nt, Artificial Sequence
  Description of Artificial Sequence: Synthetic oligonucleotide
cuucucuuuacaccaucca

SEQ ID NO: 2919456 - RNA, 19 nt, Artificial Sequence
  Description of Artificial Sequence: Synthetic oligonucleotide
gggagcaggacugugucag

SEQ ID NO: 2919457 - RNA, 19 nt, Artificial Sequence
  Description of Artificial Sequence: Synthetic oligonucleotide
cacagcugccgugagaguc

SEQ ID NO: 2919458 - RNA, 19 nt, Artificial Sequence
  Description of Artificial Sequence: Synthetic oligonucleotide
caggacugugucaggggag

SEQ ID NO: 2919459 - RNA, 19 nt, Artificial Sequence
  Description of Artificial Sequence: Synthetic oligonucleotide
ggugauucucuacggugcc

SEQ ID NO: 2919460 - RNA, 19 nt, Artificial Sequence
  Description of Artificial Sequence: Synthetic oligonucleotide
ugauucucuacggugccuu

SEQ ID NO: 2919461 - RNA, 19 nt, Artificial Sequence
  Description of Artificial Sequence: Synthetic oligonucleotide
agacuccugugcuuucucu

SEQ ID NO: 2919462 - RNA, 19 nt, Artificial Sequence
  Description of Artificial Sequence: Synthetic oligonucleotide
uaccuuccugucuuccaga

SEQ ID NO: 2919463 - RNA, 19 nt, Artificial Sequence
  Description of Artificial Sequence: Synthetic oligonucleotide
accucaacagagcccggcu

SEQ ID NO: 2919464 - RNA, 19 nt, Artificial Sequence
  Description of Artificial Sequence: Synthetic oligonucleotide
ccuucucuuuacaccaucc

SEQ ID NO: 2919465 - RNA, 19 nt, Artificial Sequence
  Description of Artificial Sequence: Synthetic oligonucleotide
gugccuugguaccucaaca

SEQ ID NO: 2919466 - RNA, 19 nt, Artificial Sequence
  Description of Artificial Sequence: Synthetic oligonucleotide
augggauaugacugcucca

SEQ ID NO: 2919467 - RNA, 19 nt, Artificial Sequence
  Description of Artificial Sequence: Synthetic oligonucleotide
ggcacuaacuucaaaguaa

SEQ ID NO: 2919468 - RNA, 19 nt, Artificial Sequence
  Description of Artificial Sequence: Synthetic oligonucleotide
gucuuccagaucgauuuug

SEQ ID NO: 2919469 - RNA, 19 nt, Artificial Sequence
  Description of Artificial Sequence: Synthetic oligonucleotide
ucagaaggacgagcccagg

SEQ ID NO: 2919470 - RNA, 19 nt, Artificial Sequence
  Description of Artificial Sequence: Synthetic oligonucleotide
cugucuuccagaucgauuu

SEQ ID NO: 2919471 - RNA, 19 nt, Artificial Sequence
  Description of Artificial Sequence: Synthetic oligonucleotide
uuggcuggccuggcgagag

SEQ ID NO: 2919472 - RNA, 19 nt, Artificial Sequence
  Description of Artificial Sequence: Synthetic oligonucleotide
ucuuggcacuaacuucaaa

SEQ ID NO: 2919473 - RNA, 19 nt, Artificial Sequence
  Description of Artificial Sequence: Synthetic oligonucleotide
uaccucaacagagcccggc

SEQ ID NO: 2919474 - RNA, 19 nt, Artificial Sequence
  Description of Artificial Sequence: Synthetic oligonucleotide
gacgagcccaggaaucagc

SEQ ID NO: 2919475 - RNA, 19 nt, Artificial Sequence
  Description of Artificial Sequence: Synthetic oligonucleotide
gucagaaggacgagcccag

SEQ ID NO: 2919476 - RNA, 19 nt, Artificial Sequence
  Description of Artificial Sequence: Synthetic oligonucleotide
gagcuggagccaccgagac

SEQ ID NO: 2919477 - RNA, 19 nt, Artificial Sequence
  Description of Artificial Sequence: Synthetic oligonucleotide
auuugccugugacguucuc

SEQ ID NO: 2919478 - RNA, 19 nt, Artificial Sequence
  Description of Artificial Sequence: Synthetic oligonucleotide
uuuuguugccaagcaccac

SEQ ID NO: 2919479 - RNA, 19 nt, Artificial Sequence
  Description of Artificial Sequence: Synthetic oligonucleotide
ucaacagagcccggcuggc

SEQ ID NO: 2919480 - RNA, 19 nt, Artificial Sequence
  Description of Artificial Sequence: Synthetic oligonucleotide
ggaacgaguggccugcaca

SEQ ID NO: 2919481 - RNA, 19 nt, Artificial Sequence
  Description of Artificial Sequence: Synthetic oligonucleotide
cgugagagucagaaggacg

SEQ ID NO: 2919482 - RNA, 19 nt, Artificial Sequence
  Description of Artificial Sequence: Synthetic oligonucleotide
uuacaccauccaugggcca

SEQ ID NO: 2919483 - RNA, 19 nt, Artificial Sequence
  Description of Artificial Sequence: Synthetic oligonucleotide
acagagcccggcuggccag

SEQ ID NO: 2919484 - RNA, 19 nt, Artificial Sequence
  Description of Artificial Sequence: Synthetic oligonucleotide
gucaggggagaggaggcag

SEQ ID NO: 2919485 - RNA, 19 nt, Artificial Sequence
  Description of Artificial Sequence: Synthetic oligonucleotide
uggguugagcuuggaacga

SEQ ID NO: 2919486 - RNA, 19 nt, Artificial Sequence
  Description of Artificial Sequence: Synthetic oligonucleotide
gagcuuggaacgaguggcc

SEQ ID NO: 2919487 - RNA, 19 nt, Artificial Sequence
  Description of Artificial Sequence: Synthetic oligonucleotide
uucuuggcacuaacuucaa

SEQ ID NO: 2919488 - RNA, 19 nt, Artificial Sequence
  Description of Artificial Sequence: Synthetic oligonucleotide
cucuuuggcuggccuggcg

SEQ ID NO: 2919489 - RNA, 19 nt, Artificial Sequence
  Description of Artificial Sequence: Synthetic oligonucleotide
ugccugugacguucucucc

SEQ ID NO: 2919490 - RNA, 19 nt, Artificial Sequence
  Description of Artificial Sequence: Synthetic oligonucleotide
guggccugcacagcugccg

SEQ ID NO: 2919491 - RNA, 19 nt, Artificial Sequence
  Description of Artificial Sequence: Synthetic oligonucleotide
caggauuugccugugacgu

SEQ ID NO: 2919492 - RNA, 19 nt, Artificial Sequence
  Description of Artificial Sequence: Synthetic oligonucleotide
cuucaaaguaaggcauguc

SEQ ID NO: 2919493 - RNA, 19 nt, Artificial Sequence
  Description of Artificial Sequence: Synthetic oligonucleotide
gaaggacgagcccaggaau

SEQ ID NO: 2919494 - RNA, 19 nt, Artificial Sequence
  Description of Artificial Sequence: Synthetic oligonucleotide
gacguucucuccugcugca

SEQ ID NO: 2919495 - RNA, 19 nt, Artificial Sequence
  Description of Artificial Sequence: Synthetic oligonucleotide
gccaccgagacuccugugc

SEQ ID NO: 2919496 - RNA, 19 nt, Artificial Sequence
  Description of Artificial Sequence: Synthetic oligonucleotide
aggacugugucaggggaga

SEQ ID NO: 2919497 - RNA, 19 nt, Artificial Sequence
  Description of Artificial Sequence: Synthetic oligonucleotide
auaucauucuuggcacuaa

SEQ ID NO: 2919498 - RNA, 19 nt, Artificial Sequence
  Description of Artificial Sequence: Synthetic oligonucleotide
ugucuuccagaucgauuuu

SEQ ID NO: 2919499 - RNA, 19 nt, Artificial Sequence
  Description of Artificial Sequence: Synthetic oligonucleotide
gugucaggggagaggaggc

SEQ ID NO: 2919500 - RNA, 19 nt, Artificial Sequence
  Description of Artificial Sequence: Synthetic oligonucleotide
uggaacgaguggccugcac

SEQ ID NO: 2919501 - RNA, 19 nt, Artificial Sequence
  Description of Artificial Sequence: Synthetic oligonucleotide
agcaccaccaugggauaug

SEQ ID NO: 2919502 - RNA, 19 nt, Artificial Sequence
  Description of Artificial Sequence: Synthetic oligonucleotide
cugcucuuuggcuggccug

SEQ ID NO: 2919503 - RNA, 19 nt, Artificial Sequence
  Description of Artificial Sequence: Synthetic oligonucleotide
uuccugucuuccagaucga

SEQ ID NO: 2919504 - RNA, 19 nt, Artificial Sequence
  Description of Artificial Sequence: Synthetic oligonucleotide
aggacgagcccaggaauca

SEQ ID NO: 2919505 - RNA, 19 nt, Artificial Sequence
  Description of Artificial Sequence: Synthetic oligonucleotide
ggauuugccugugacguuc

SEQ ID NO: 2919506 - RNA, 19 nt, Artificial Sequence
  Description of Artificial Sequence: Synthetic oligonucleotide
accaugggauaugacugcu

SEQ ID NO: 2919507 - RNA, 19 nt, Artificial Sequence
  Description of Artificial Sequence: Synthetic oligonucleotide
gccaggauuugccugugac

SEQ ID NO: 2919508 - RNA, 19 nt, Artificial Sequence
  Description of Artificial Sequence: Synthetic oligonucleotide
uccuggguaccuuccuguc

SEQ ID NO: 2919509 - RNA, 19 nt, Artificial Sequence
  Description of Artificial Sequence: Synthetic oligonucleotide
uaggggcaugcuggggugg

SEQ ID NO: 2919510 - RNA, 19 nt, Artificial Sequence
  Description of Artificial Sequence: Synthetic oligonucleotide
cugugacguucucuccugc

SEQ ID NO: 2919511 - RNA, 19 nt, Artificial Sequence
  Description of Artificial Sequence: Synthetic oligonucleotide
agagcuggagccaccgaga

SEQ ID NO: 2919512 - RNA, 19 nt, Artificial Sequence
  Description of Artificial Sequence: Synthetic oligonucleotide
ggugccuugguaccucaac

SEQ ID NO: 2919513 - RNA, 19 nt, Artificial Sequence
  Description of Artificial Sequence: Synthetic oligonucleotide
ccaugggccaccuccuggg

SEQ ID NO: 2919514 - RNA, 19 nt, Artificial Sequence
  Description of Artificial Sequence: Synthetic oligonucleotide
ugucaggggagaggaggca

SEQ ID NO: 2919515 - RNA, 19 nt, Artificial Sequence
  Description of Artificial Sequence: Synthetic oligonucleotide
ucucuacggugccuuggua

SEQ ID NO: 2919516 - RNA, 19 nt, Artificial Sequence
  Description of Artificial Sequence: Synthetic oligonucleotide
ggcauguccuucucuuuac

SEQ ID NO: 2919517 - RNA, 19 nt, Artificial Sequence
  Description of Artificial Sequence: Synthetic oligonucleotide
cagaaggacgagcccagga

SEQ ID NO: 2919518 - RNA, 19 nt, Artificial Sequence
  Description of Artificial Sequence: Synthetic oligonucleotide
caccuccuggguaccuucc

SEQ ID NO: 2919519 - RNA, 19 nt, Artificial Sequence
  Description of Artificial Sequence: Synthetic oligonucleotide
agcuuggaacgaguggccu

SEQ ID NO: 2919520 - RNA, 19 nt, Artificial Sequence
  Description of Artificial Sequence: Synthetic oligonucleotide
caggaaucagcagcaucug

SEQ ID NO: 2919521 - RNA, 19 nt, Artificial Sequence
  Description of Artificial Sequence: Synthetic oligonucleotide
ccaggaaucagcagcaucu

SEQ ID NO: 2919522 - RNA, 19 nt, Artificial Sequence
  Description of Artificial Sequence: Synthetic oligonucleotide
gcuuggaacgaguggccug

SEQ ID NO: 2919523 - RNA, 19 nt, Artificial Sequence
  Description of Artificial Sequence: Synthetic oligonucleotide
agcccaggaaucagcagca

SEQ ID NO: 2919524 - RNA, 19 nt, Artificial Sequence
  Description of Artificial Sequence: Synthetic oligonucleotide
ccugugcuuucucuggggc

SEQ ID NO: 2919525 - RNA, 19 nt, Artificial Sequence
  Description of Artificial Sequence: Synthetic oligonucleotide
uuuggcuggccuggcgaga

SEQ ID NO: 2919526 - RNA, 19 nt, Artificial Sequence
  Description of Artificial Sequence: Synthetic oligonucleotide
cugccgugagagucagaag

SEQ ID NO: 2919527 - RNA, 19 nt, Artificial Sequence
  Description of Artificial Sequence: Synthetic oligonucleotide
auccaugggccaccuccug

SEQ ID NO: 2919528 - RNA, 19 nt, Artificial Sequence
  Description of Artificial Sequence: Synthetic oligonucleotide
agaaccucaaaggcuugua

SEQ ID NO: 2919529 - RNA, 19 nt, Artificial Sequence
  Description of Artificial Sequence: Synthetic oligonucleotide
gguaccuuccugucuucca

SEQ ID NO: 2919530 - RNA, 19 nt, Artificial Sequence
  Description of Artificial Sequence: Synthetic oligonucleotide
acagcugccgugagaguca

SEQ ID NO: 2919531 - RNA, 19 nt, Artificial Sequence
  Description of Artificial Sequence: Synthetic oligonucleotide
aagcaccaccaugggauau

SEQ ID NO: 2919532 - RNA, 19 nt, Artificial Sequence
  Description of Artificial Sequence: Synthetic oligonucleotide
cuggcgagagcuugaugga

SEQ ID NO: 2919533 - RNA, 19 nt, Artificial Sequence
  Description of Artificial Sequence: Synthetic oligonucleotide
caaaguaaggcauguccuu

SEQ ID NO: 2919534 - RNA, 19 nt, Artificial Sequence
  Description of Artificial Sequence: Synthetic oligonucleotide
acgagcccaggaaucagca

SEQ ID NO: 2919535 - RNA, 19 nt, Artificial Sequence
  Description of Artificial Sequence: Synthetic oligonucleotide
agcuggagccaccgagacu

SEQ ID NO: 2919536 - RNA, 19 nt, Artificial Sequence
  Description of Artificial Sequence: Synthetic oligonucleotide
accuccuggguaccuuccu

SEQ ID NO: 2919537 - RNA, 19 nt, Artificial Sequence
  Description of Artificial Sequence: Synthetic oligonucleotide
cuggccuggcgagagcuug

SEQ ID NO: 2919538 - RNA, 19 nt, Artificial Sequence
  Description of Artificial Sequence: Synthetic oligonucleotide
uggccuggcgagagcuuga

SEQ ID NO: 2919539 - RNA, 19 nt, Artificial Sequence
  Description of Artificial Sequence: Synthetic oligonucleotide
augcugggguggguugagc

SEQ ID NO: 2919540 - RNA, 19 nt, Artificial Sequence
  Description of Artificial Sequence: Synthetic oligonucleotide
ccaagcaccaccaugggau

SEQ ID NO: 2919541 - RNA, 19 nt, Artificial Sequence
  Description of Artificial Sequence: Synthetic oligonucleotide
accgagacuccugugcuuu

SEQ ID NO: 2919542 - RNA, 19 nt, Artificial Sequence
  Description of Artificial Sequence: Synthetic oligonucleotide
agaggaggcaggagagcug

SEQ ID NO: 2919543 - RNA, 19 nt, Artificial Sequence
  Description of Artificial Sequence: Synthetic oligonucleotide
uucucuccugcugcagccu

SEQ ID NO: 2919544 - RNA, 19 nt, Artificial Sequence
  Description of Artificial Sequence: Synthetic oligonucleotide
guaaggcauguccuucucu

SEQ ID NO: 2919545 - RNA, 19 nt, Artificial Sequence
  Description of Artificial Sequence: Synthetic oligonucleotide
ggagcaggacugugucagg

SEQ ID NO: 2919546 - RNA, 19 nt, Artificial Sequence
  Description of Artificial Sequence: Synthetic oligonucleotide
agaggggagcaggacugug

SEQ ID NO: 2919547 - RNA, 19 nt, Artificial Sequence
  Description of Artificial Sequence: Synthetic oligonucleotide
cugugucaggggagaggag

SEQ ID NO: 2919548 - RNA, 19 nt, Artificial Sequence
  Description of Artificial Sequence: Synthetic oligonucleotide
aggggcaugcugggguggg

SEQ ID NO: 2919549 - RNA, 19 nt, Artificial Sequence
  Description of Artificial Sequence: Synthetic oligonucleotide
gcugccgugagagucagaa

SEQ ID NO: 2919550 - RNA, 19 nt, Artificial Sequence
  Description of Artificial Sequence: Synthetic oligonucleotide
ugcuuucucuggggccagg

SEQ ID NO: 2919551 - RNA, 19 nt, Artificial Sequence
  Description of Artificial Sequence: Synthetic oligonucleotide
uggcgagagcuugauggau

SEQ ID NO: 2919552 - RNA, 19 nt, Artificial Sequence
  Description of Artificial Sequence: Synthetic oligonucleotide
aggauuugccugugacguu

SEQ ID NO: 2919553 - RNA, 19 nt, Artificial Sequence
  Description of Artificial Sequence: Synthetic oligonucleotide
caaggugauucucuacggu

SEQ ID NO: 2919554 - RNA, 19 nt, Artificial Sequence
  Description of Artificial Sequence: Synthetic oligonucleotide
caugcugggguggguugag

SEQ ID NO: 2919555 - RNA, 19 nt, Artificial Sequence
  Description of Artificial Sequence: Synthetic oligonucleotide
gcgagagcuugauggauuc

SEQ ID NO: 2919556 - RNA, 19 nt, Artificial Sequence
  Description of Artificial Sequence: Synthetic oligonucleotide
uccugucuuccagaucgau

SEQ ID NO: 2919557 - RNA, 19 nt, Artificial Sequence
  Description of Artificial Sequence: Synthetic oligonucleotide
caacagagcccggcuggcc

SEQ ID NO: 2919558 - RNA, 19 nt, Artificial Sequence
  Description of Artificial Sequence: Synthetic oligonucleotide
accauccaugggccaccuc

SEQ ID NO: 2919559 - RNA, 19 nt, Artificial Sequence
  Description of Artificial Sequence: Synthetic oligonucleotide
cagaucgauuuuguugcca

SEQ ID NO: 2919560 - RNA, 19 nt, Artificial Sequence
  Description of Artificial Sequence: Synthetic oligonucleotide
ccugugacguucucuccug

SEQ ID NO: 2919561 - RNA, 19 nt, Artificial Sequence
  Description of Artificial Sequence: Synthetic oligonucleotide
gccuugguaccucaacaga

SEQ ID NO: 2919562 - RNA, 19 nt, Artificial Sequence
  Description of Artificial Sequence: Synthetic oligonucleotide
uacggugccuugguaccuc

SEQ ID NO: 2919563 - RNA, 19 nt, Artificial Sequence
  Description of Artificial Sequence: Synthetic oligonucleotide
acguucucuccugcugcag

SEQ ID NO: 2919564 - RNA, 19 nt, Artificial Sequence
  Description of Artificial Sequence: Synthetic oligonucleotide
gccuccuaggggcaugcug

SEQ ID NO: 2919565 - RNA, 19 nt, Artificial Sequence
  Description of Artificial Sequence: Synthetic oligonucleotide
ggcaugcugggguggguug

SEQ ID NO: 2919566 - RNA, 19 nt, Artificial Sequence
  Description of Artificial Sequence: Synthetic oligonucleotide
acggugccuugguaccuca

SEQ ID NO: 2919567 - RNA, 19 nt, Artificial Sequence
  Description of Artificial Sequence: Synthetic oligonucleotide
ccacaaggugauucucuac

SEQ ID NO: 2919568 - RNA, 19 nt, Artificial Sequence
  Description of Artificial Sequence: Synthetic oligonucleotide
caccaccaugggauaugac

SEQ ID NO: 2919569 - RNA, 19 nt, Artificial Sequence
  Description of Artificial Sequence: Synthetic oligonucleotide
ucucuggggccaggauuug

SEQ ID NO: 2919570 - RNA, 19 nt, Artificial Sequence
  Description of Artificial Sequence: Synthetic oligonucleotide
ggguugagcuuggaacgag

SEQ ID NO: 2919571 - RNA, 19 nt, Artificial Sequence
  Description of Artificial Sequence: Synthetic oligonucleotide
agccaccgagacuccugug

SEQ ID NO: 2919572 - RNA, 19 nt, Artificial Sequence
  Description of Artificial Sequence: Synthetic oligonucleotide
gagccaccgagacuccugu

SEQ ID NO: 2919573 - RNA, 19 nt, Artificial Sequence
  Description of Artificial Sequence: Synthetic oligonucleotide
uggagccaccgagacuccu

SEQ ID NO: 2919574 - RNA, 19 nt, Artificial Sequence
  Description of Artificial Sequence: Synthetic oligonucleotide
guaccucaacagagcccgg

SEQ ID NO: 2919575 - RNA, 19 nt, Artificial Sequence
  Description of Artificial Sequence: Synthetic oligonucleotide
ccucaacagagcccggcug

SEQ ID NO: 2919576 - RNA, 19 nt, Artificial Sequence
  Description of Artificial Sequence: Synthetic oligonucleotide
cuccuggguaccuuccugu

SEQ ID NO: 2919577 - RNA, 19 nt, Artificial Sequence
  Description of Artificial Sequence: Synthetic oligonucleotide
caucugcucuuuggcuggc

SEQ ID NO: 2919578 - RNA, 19 nt, Artificial Sequence
  Description of Artificial Sequence: Synthetic oligonucleotide
cguucucuccugcugcagc

SEQ ID NO: 2919579 - RNA, 19 nt, Artificial Sequence
  Description of Artificial Sequence: Synthetic oligonucleotide
cuggguaccuuccugucuu

SEQ ID NO: 2919580 - RNA, 19 nt, Artificial Sequence
  Description of Artificial Sequence: Synthetic oligonucleotide
uuggaacgaguggccugca

SEQ ID NO: 2919581 - RNA, 19 nt, Artificial Sequence
  Description of Artificial Sequence: Synthetic oligonucleotide
ggagccaccgagacuccug

SEQ ID NO: 2919582 - RNA, 19 nt, Artificial Sequence
  Description of Artificial Sequence: Synthetic oligonucleotide
caagcaccaccaugggaua

SEQ ID NO: 2919583 - RNA, 19 nt, Artificial Sequence
  Description of Artificial Sequence: Synthetic oligonucleotide
gcauguccuucucuuuaca

SEQ ID NO: 2919584 - RNA, 19 nt, Artificial Sequence
  Description of Artificial Sequence: Synthetic oligonucleotide
cagcaucugcucuuuggcu

SEQ ID NO: 2919585 - RNA, 19 nt, Artificial Sequence
  Description of Artificial Sequence: Synthetic oligonucleotide
cagccuccuaggggcaugc

SEQ ID NO: 2919586 - RNA, 19 nt, Artificial Sequence
  Description of Artificial Sequence: Synthetic oligonucleotide
ccucaaaggcuuguaccac

SEQ ID NO: 2919587 - RNA, 19 nt, Artificial Sequence
  Description of Artificial Sequence: Synthetic oligonucleotide
gauuugccugugacguucu

SEQ ID NO: 2919588 - RNA, 19 nt, Artificial Sequence
  Description of Artificial Sequence: Synthetic oligonucleotide
gaggggagcaggacugugu

SEQ ID NO: 2919589 - RNA, 19 nt, Artificial Sequence
  Description of Artificial Sequence: Synthetic oligonucleotide
cauccaugggccaccuccu

SEQ ID NO: 2919590 - RNA, 19 nt, Artificial Sequence
  Description of Artificial Sequence: Synthetic oligonucleotide
ggacgagcccaggaaucag

SEQ ID NO: 2919591 - RNA, 19 nt, Artificial Sequence
  Description of Artificial Sequence: Synthetic oligonucleotide
ggguaccuuccugucuucc

SEQ ID NO: 2919592 - RNA, 19 nt, Artificial Sequence
  Description of Artificial Sequence: Synthetic oligonucleotide
ccaugggauaugacugcuc

SEQ ID NO: 2919593 - RNA, 19 nt, Artificial Sequence
  Description of Artificial Sequence: Synthetic oligonucleotide
ccagaaccucaaaggcuug

SEQ ID NO: 2919594 - RNA, 19 nt, Artificial Sequence
  Description of Artificial Sequence: Synthetic oligonucleotide
cagcugccgugagagucag

SEQ ID NO: 2919595 - RNA, 19 nt, Artificial Sequence
  Description of Artificial Sequence: Synthetic oligonucleotide
ccuccuggguaccuuccug

SEQ ID NO: 2919596 - RNA, 19 nt, Artificial Sequence
  Description of Artificial Sequence: Synthetic oligonucleotide
gugcuuucucuggggccag

SEQ ID NO: 2919597 - RNA, 19 nt, Artificial Sequence
  Description of Artificial Sequence: Synthetic oligonucleotide
uggauuccacaaggugauu

SEQ ID NO: 2919598 - RNA, 19 nt, Artificial Sequence
  Description of Artificial Sequence: Synthetic oligonucleotide
gccgugagagucagaagga

SEQ ID NO: 2919599 - RNA, 19 nt, Artificial Sequence
  Description of Artificial Sequence: Synthetic oligonucleotide
ggacugugucaggggagag

SEQ ID NO: 2919600 - RNA, 19 nt, Artificial Sequence
  Description of Artificial Sequence: Synthetic oligonucleotide
ugcagccuccuaggggcau

SEQ ID NO: 2919601 - RNA, 19 nt, Artificial Sequence
  Description of Artificial Sequence: Synthetic oligonucleotide
cugcacagcugccgugaga

SEQ ID NO: 2919602 - RNA, 19 nt, Artificial Sequence
  Description of Artificial Sequence: Synthetic oligonucleotide
ccgugagagucagaaggac

SEQ ID NO: 2919603 - RNA, 19 nt, Artificial Sequence
  Description of Artificial Sequence: Synthetic oligonucleotide
ggggccaggauuugccugu

SEQ ID NO: 2919604 - RNA, 19 nt, Artificial Sequence
  Description of Artificial Sequence: Synthetic oligonucleotide
caggggagaggaggcagga

SEQ ID NO: 2919605 - RNA, 19 nt, Artificial Sequence
  Description of Artificial Sequence: Synthetic oligonucleotide
gccugugacguucucuccu

SEQ ID NO: 2919606 - RNA, 19 nt, Artificial Sequence
  Description of Artificial Sequence: Synthetic oligonucleotide
ggccagaaccucaaaggcu

SEQ ID NO: 2919607 - RNA, 19 nt, Artificial Sequence
  Description of Artificial Sequence: Synthetic oligonucleotide
ggggagcaggacuguguca

SEQ ID NO: 2919608 - RNA, 19 nt, Artificial Sequence
  Description of Artificial Sequence: Synthetic oligonucleotide
gagcccggcuggccagaac

SEQ ID NO: 2919609 - RNA, 19 nt, Artificial Sequence
  Description of Artificial Sequence: Synthetic oligonucleotide
ccaccuccuggguaccuuc

SEQ ID NO: 2919610 - RNA, 19 nt, Artificial Sequence
  Description of Artificial Sequence: Synthetic oligonucleotide
cuuucucuggggccaggau

SEQ ID NO: 2919611 - RNA, 19 nt, Artificial Sequence
  Description of Artificial Sequence: Synthetic oligonucleotide
ggcaggagagcuggagcca

SEQ ID NO: 2919612 - RNA, 19 nt, Artificial Sequence
  Description of Artificial Sequence: Synthetic oligonucleotide
ccuuccugucuuccagauc

SEQ ID NO: 2919613 - RNA, 19 nt, Artificial Sequence
  Description of Artificial Sequence: Synthetic oligonucleotide
gugauucucuacggugccu

SEQ ID NO: 2919614 - RNA, 19 nt, Artificial Sequence
  Description of Artificial Sequence: Synthetic oligonucleotide
gcuuucucuggggccagga

SEQ ID NO: 2919615 - RNA, 19 nt, Artificial Sequence
  Description of Artificial Sequence: Synthetic oligonucleotide
cuggggccaggauuugccu

SEQ ID NO: 2919616 - RNA, 19 nt, Artificial Sequence
  Description of Artificial Sequence: Synthetic oligonucleotide
ggagagcuggagccaccga

SEQ ID NO: 2919617 - RNA, 19 nt, Artificial Sequence
  Description of Artificial Sequence: Synthetic oligonucleotide
cagaaccucaaaggcuugu

SEQ ID NO: 2919618 - RNA, 19 nt, Artificial Sequence
  Description of Artificial Sequence: Synthetic oligonucleotide
cgagcccaggaaucagcag

SEQ ID NO: 2919619 - RNA, 19 nt, Artificial Sequence
  Description of Artificial Sequence: Synthetic oligonucleotide
gguugagcuuggaacgagu

SEQ ID NO: 2919620 - RNA, 19 nt, Artificial Sequence
  Description of Artificial Sequence: Synthetic oligonucleotide
gccugcacagcugccguga

SEQ ID NO: 2919621 - RNA, 19 nt, Artificial Sequence
  Description of Artificial Sequence: Synthetic oligonucleotide
gccuggcgagagcuugaug

SEQ ID NO: 2919622 - RNA, 19 nt, Artificial Sequence
  Description of Artificial Sequence: Synthetic oligonucleotide
cgaguggccugcacagcug

SEQ ID NO: 2919623 - RNA, 19 nt, Artificial Sequence
  Description of Artificial Sequence: Synthetic oligonucleotide
gcaugcugggguggguuga

SEQ ID NO: 2919624 - RNA, 19 nt, Artificial Sequence
  Description of Artificial Sequence: Synthetic oligonucleotide
gcagccuccuaggggcaug

SEQ ID NO: 2919625 - RNA, 19 nt, Artificial Sequence
  Description of Artificial Sequence: Synthetic oligonucleotide
gcucuuuggcuggccuggc

SEQ ID NO: 2919626 - RNA, 19 nt, Artificial Sequence
  Description of Artificial Sequence: Synthetic oligonucleotide
cgagagcuugauggauucc

SEQ ID NO: 2919627 - RNA, 19 nt, Artificial Sequence
  Description of Artificial Sequence: Synthetic oligonucleotide
agagcccggcuggccagaa

SEQ ID NO: 2919628 - RNA, 19 nt, Artificial Sequence
  Description of Artificial Sequence: Synthetic oligonucleotide
cuacggugccuugguaccu

SEQ ID NO: 2919629 - RNA, 19 nt, Artificial Sequence
  Description of Artificial Sequence: Synthetic oligonucleotide
ggccaggauuugccuguga

SEQ ID NO: 2919630 - RNA, 19 nt, Artificial Sequence
  Description of Artificial Sequence: Synthetic oligonucleotide
caaaggcuuguaccacauu

SEQ ID NO: 2919631 - RNA, 19 nt, Artificial Sequence
  Description of Artificial Sequence: Synthetic oligonucleotide
ccacauugauaucauucuu

SEQ ID NO: 2919632 - RNA, 19 nt, Artificial Sequence
  Description of Artificial Sequence: Synthetic oligonucleotide
caugggccaccuccugggu

SEQ ID NO: 2919633 - RNA, 19 nt, Artificial Sequence
  Description of Artificial Sequence: Synthetic oligonucleotide
ccgagacuccugugcuuuc

SEQ ID NO: 2919634 - RNA, 19 nt, Artificial Sequence
  Description of Artificial Sequence: Synthetic oligonucleotide
ccugucuuccagaucgauu

SEQ ID NO: 2919635 - RNA, 19 nt, Artificial Sequence
  Description of Artificial Sequence: Synthetic oligonucleotide
ggcuggccuggcgagagcu

SEQ ID NO: 2919636 - RNA, 19 nt, Artificial Sequence
  Description of Artificial Sequence: Synthetic oligonucleotide
ggcgagagcuugauggauu

SEQ ID NO: 2919637 - RNA, 19 nt, Artificial Sequence
  Description of Artificial Sequence: Synthetic oligonucleotide
ccaccgagacuccugugcu

SEQ ID NO: 2919638 - RNA, 19 nt, Artificial Sequence
  Description of Artificial Sequence: Synthetic oligonucleotide
ccuggguaccuuccugucu

SEQ ID NO: 2919639 - RNA, 19 nt, Artificial Sequence
  Description of Artificial Sequence: Synthetic oligonucleotide
gcugggguggguugagcuu

SEQ ID NO: 2919640 - RNA, 19 nt, Artificial Sequence
  Description of Artificial Sequence: Synthetic oligonucleotide
caccgagacuccugugcuu

SEQ ID NO: 2919641 - RNA, 19 nt, Artificial Sequence
  Description of Artificial Sequence: Synthetic oligonucleotide
cagagcccggcuggccaga

SEQ ID NO: 2919642 - RNA, 19 nt, Artificial Sequence
  Description of Artificial Sequence: Synthetic oligonucleotide
ggcuggccagaaccucaaa

SEQ ID NO: 2919643 - RNA, 19 nt, Artificial Sequence
  Description of Artificial Sequence: Synthetic oligonucleotide
cagaggggagcaggacugu

SEQ ID NO: 2919644 - RNA, 19 nt, Artificial Sequence
  Description of Artificial Sequence: Synthetic oligonucleotide
gggccaccuccuggguacc

SEQ ID NO: 2919645 - RNA, 19 nt, Artificial Sequence
  Description of Artificial Sequence: Synthetic oligonucleotide
agcugccgugagagucaga

SEQ ID NO: 2919646 - RNA, 19 nt, Artificial Sequence
  Description of Artificial Sequence: Synthetic oligonucleotide
caccauccaugggccaccu

SEQ ID NO: 2919647 - RNA, 19 nt, Artificial Sequence
  Description of Artificial Sequence: Synthetic oligonucleotide
gcacagcugccgugagagu

SEQ ID NO: 2919648 - RNA, 19 nt, Artificial Sequence
  Description of Artificial Sequence: Synthetic oligonucleotide
gggcaugcugggguggguu

SEQ ID NO: 2919649 - RNA, 19 nt, Artificial Sequence
  Description of Artificial Sequence: Synthetic oligonucleotide
cgagacuccugugcuuucu

SEQ ID NO: 2919650 - RNA, 19 nt, Artificial Sequence
  Description of Artificial Sequence: Synthetic oligonucleotide
ggccuggcgagagcuugau

SEQ ID NO: 2919651 - RNA, 19 nt, Artificial Sequence
  Description of Artificial Sequence: Synthetic oligonucleotide
gcccggcuggccagaaccu

SEQ ID NO: 2919652 - RNA, 19 nt, Artificial Sequence
  Description of Artificial Sequence: Synthetic oligonucleotide
ggggcaugcuggggugggu

SEQ ID NO: 2919653 - RNA, 19 nt, Artificial Sequence
  Description of Artificial Sequence: Synthetic oligonucleotide
gccaccuccuggguaccuu

SEQ ID NO: 2919654 - RNA, 19 nt, Artificial Sequence
  Description of Artificial Sequence: Synthetic oligonucleotide
ggccaccuccuggguaccu

SEQ ID NO: 2919655 - RNA, 19 nt, Artificial Sequence
  Description of Artificial Sequence: Synthetic oligonucleotide
cggugccuugguaccucaa

SEQ ID NO: 2919656 - RNA, 19 nt, Artificial Sequence
  Description of Artificial Sequence: Synthetic oligonucleotide
gcccaggaaucagcagcau

SEQ ID NO: 2919657 - RNA, 19 nt, Artificial Sequence
  Description of Artificial Sequence: Synthetic oligonucleotide
acuuguagaguuuugacac

SEQ ID NO: 2919658 - RNA, 19 nt, Artificial Sequence
  Description of Artificial Sequence: Synthetic oligonucleotide
agucuguacacucauaggg

SEQ ID NO: 2919659 - RNA, 19 nt, Artificial Sequence
  Description of Artificial Sequence: Synthetic oligonucleotide
agucauggcaaacauaggg

SEQ ID NO: 2919660 - RNA, 19 nt, Artificial Sequence
  Description of Artificial Sequence: Synthetic oligonucleotide
agauagaagguuuucccgc

SEQ ID NO: 2919661 - RNA, 19 nt, Artificial Sequence
  Description of Artificial Sequence: Synthetic oligonucleotide
aauaguuucccacacucgu

SEQ ID NO: 2919662 - RNA, 19 nt, Artificial Sequence
  Description of Artificial Sequence: Synthetic oligonucleotide
uucuguaauggacaguuag

SEQ ID NO: 2919663 - RNA, 19 nt, Artificial Sequence
  Description of Artificial Sequence: Synthetic oligonucleotide
aaugaguucugugaugcac

SEQ ID NO: 2919664 - RNA, 19 nt, Artificial Sequence
  Description of Artificial Sequence: Synthetic oligonucleotide
acaguuagguaugacaacc

SEQ ID NO: 2919665 - RNA, 19 nt, Artificial Sequence
  Description of Artificial Sequence: Synthetic oligonucleotide
aguuuugacaccugugugg

SEQ ID NO: 2919666 - RNA, 19 nt, Artificial Sequence
  Description of Artificial Sequence: Synthetic oligonucleotide
ucuguaauggacaguuagg

SEQ ID NO: 2919667 - RNA, 19 nt, Artificial Sequence
  Description of Artificial Sequence: Synthetic oligonucleotide
agaaagucuuuccacaguc

SEQ ID NO: 2919668 - RNA, 19 nt, Artificial Sequence
  Description of Artificial Sequence: Synthetic oligonucleotide
ucagauagaagguuuuccc

SEQ ID NO: 2919669 - RNA, 19 nt, Artificial Sequence
  Description of Artificial Sequence: Synthetic oligonucleotide
uuagguaugacaaccucga

SEQ ID NO: 2919670 - RNA, 19 nt, Artificial Sequence
  Description of Artificial Sequence: Synthetic oligonucleotide
uuuucuggugaucauugag

SEQ ID NO: 2919671 - RNA, 19 nt, Artificial Sequence
  Description of Artificial Sequence: Synthetic oligonucleotide
acagucauggcaaacauag

SEQ ID NO: 2919672 - RNA, 19 nt, Artificial Sequence
  Description of Artificial Sequence: Synthetic oligonucleotide
uaugacaaccucgagaaga

SEQ ID NO: 2919673 - RNA, 19 nt, Artificial Sequence
  Description of Artificial Sequence: Synthetic oligonucleotide
gagggcugaguucagauag

SEQ ID NO: 2919674 - RNA, 19 nt, Artificial Sequence
  Description of Artificial Sequence: Synthetic oligonucleotide
aguucugugaugcacggug

SEQ ID NO: 2919675 - RNA, 19 nt, Artificial Sequence
  Description of Artificial Sequence: Synthetic oligonucleotide
ucauggcaaacauagggcc

SEQ ID NO: 2919676 - RNA, 19 nt, Artificial Sequence
  Description of Artificial Sequence: Synthetic oligonucleotide
ugugagaauaguuucccac

SEQ ID NO: 2919677 - RNA, 19 nt, Artificial Sequence
  Description of Artificial Sequence: Synthetic oligonucleotide
gaacuucccacacucauug

SEQ ID NO: 2919678 - RNA, 19 nt, Artificial Sequence
  Description of Artificial Sequence: Synthetic oligonucleotide
agaguuuugacaccugugu

SEQ ID NO: 2919679 - RNA, 19 nt, Artificial Sequence
  Description of Artificial Sequence: Synthetic oligonucleotide
aaccucgagaagaacuucc

SEQ ID NO: 2919680 - RNA, 19 nt, Artificial Sequence
  Description of Artificial Sequence: Synthetic oligonucleotide
uccugaaugaguucuguga

SEQ ID NO: 2919681 - RNA, 19 nt, Artificial Sequence
  Description of Artificial Sequence: Synthetic oligonucleotide
ugagagaaagucuuuccac

SEQ ID NO: 2919682 - RNA, 19 nt, Artificial Sequence
  Description of Artificial Sequence: Synthetic oligonucleotide
guagacuugcggcagaagc

SEQ ID NO: 2919683 - RNA, 19 nt, Artificial Sequence
  Description of Artificial Sequence: Synthetic oligonucleotide
uggacaguuagguaugaca

SEQ ID NO: 2919684 - RNA, 19 nt, Artificial Sequence
  Description of Artificial Sequence: Synthetic oligonucleotide
ucugagagaaagucuuucc

SEQ ID NO: 2919685 - RNA, 19 nt, Artificial Sequence
  Description of Artificial Sequence: Synthetic oligonucleotide
agagaaagucuuuccacag

SEQ ID NO: 2919686 - RNA, 19 nt, Artificial Sequence
  Description of Artificial Sequence: Synthetic oligonucleotide
guuagguaugacaaccucg

SEQ ID NO: 2919687 - RNA, 19 nt, Artificial Sequence
  Description of Artificial Sequence: Synthetic oligonucleotide
uucuggugaucauugagug

SEQ ID NO: 2919688 - RNA, 19 nt, Artificial Sequence
  Description of Artificial Sequence: Synthetic oligonucleotide
uugagugcugauuucugag

SEQ ID NO: 2919689 - RNA, 19 nt, Artificial Sequence
  Description of Artificial Sequence: Synthetic oligonucleotide
cagauagaagguuuucccg

SEQ ID NO: 2919690 - RNA, 19 nt, Artificial Sequence
  Description of Artificial Sequence: Synthetic oligonucleotide
ugaguguguucucuggugc

SEQ ID NO: 2919691 - RNA, 19 nt, Artificial Sequence
  Description of Artificial Sequence: Synthetic oligonucleotide
aguuagguaugacaaccuc

SEQ ID NO: 2919692 - RNA, 19 nt, Artificial Sequence
  Description of Artificial Sequence: Synthetic oligonucleotide
ugagaauaguuucccacac

SEQ ID NO: 2919693 - RNA, 19 nt, Artificial Sequence
  Description of Artificial Sequence: Synthetic oligonucleotide
gauuuucuggugaucauug

SEQ ID NO: 2919694 - RNA, 19 nt, Artificial Sequence
  Description of Artificial Sequence: Synthetic oligonucleotide
uaauggacaguuagguaug

SEQ ID NO: 2919695 - RNA, 19 nt, Artificial Sequence
  Description of Artificial Sequence: Synthetic oligonucleotide
aggguuucacuccugaaug

SEQ ID NO: 2919696 - RNA, 19 nt, Artificial Sequence
  Description of Artificial Sequence: Synthetic oligonucleotide
gagugcugauuucugagag

SEQ ID NO: 2919697 - RNA, 19 nt, Artificial Sequence
  Description of Artificial Sequence: Synthetic oligonucleotide
ugauuucugagagaaaguc

SEQ ID NO: 2919698 - RNA, 19 nt, Artificial Sequence
  Description of Artificial Sequence: Synthetic oligonucleotide
ucugaugucucaugagggc

SEQ ID NO: 2919699 - RNA, 19 nt, Artificial Sequence
  Description of Artificial Sequence: Synthetic oligonucleotide
uucagauagaagguuuucc

SEQ ID NO: 2919700 - RNA, 19 nt, Artificial Sequence
  Description of Artificial Sequence: Synthetic oligonucleotide
cucgagaagaacuucccac

SEQ ID NO: 2919701 - RNA, 19 nt, Artificial Sequence
  Description of Artificial Sequence: Synthetic oligonucleotide
ugaguucugugaugcacgg

SEQ ID NO: 2919702 - RNA, 19 nt, Artificial Sequence
  Description of Artificial Sequence: Synthetic oligonucleotide
uagacuugcggcagaagca

SEQ ID NO: 2919703 - RNA, 19 nt, Artificial Sequence
  Description of Artificial Sequence: Synthetic oligonucleotide
uuuucccgcagucuguaca

SEQ ID NO: 2919704 - RNA, 19 nt, Artificial Sequence
  Description of Artificial Sequence: Synthetic oligonucleotide
ugaugcacggugagguacg

SEQ ID NO: 2919705 - RNA, 19 nt, Artificial Sequence
  Description of Artificial Sequence: Synthetic oligonucleotide
uagaguuuugacaccugug

SEQ ID NO: 2919706 - RNA, 19 nt, Artificial Sequence
  Description of Artificial Sequence: Synthetic oligonucleotide
ugcacggugagguacgaca

SEQ ID NO: 2919707 - RNA, 19 nt, Artificial Sequence
  Description of Artificial Sequence: Synthetic oligonucleotide
agguaugacaaccucgaga

SEQ ID NO: 2919708 - RNA, 19 nt, Artificial Sequence
  Description of Artificial Sequence: Synthetic oligonucleotide
ucgagaagaacuucccaca

SEQ ID NO: 2919709 - RNA, 19 nt, Artificial Sequence
  Description of Artificial Sequence: Synthetic oligonucleotide
ugugagcguagacuugcgg

SEQ ID NO: 2919710 - RNA, 19 nt, Artificial Sequence
  Description of Artificial Sequence: Synthetic oligonucleotide
aacuucccacacucauugc

SEQ ID NO: 2919711 - RNA, 19 nt, Artificial Sequence
  Description of Artificial Sequence: Synthetic oligonucleotide
aguggguucuguaauggac

SEQ ID NO: 2919712 - RNA, 19 nt, Artificial Sequence
  Description of Artificial Sequence: Synthetic oligonucleotide
gaauaguuucccacacucg

SEQ ID NO: 2919713 - RNA, 19 nt, Artificial Sequence
  Description of Artificial Sequence: Synthetic oligonucleotide
gguaugacaaccucgagaa

SEQ ID NO: 2919714 - RNA, 19 nt, Artificial Sequence
  Description of Artificial Sequence: Synthetic oligonucleotide
gcugauuucugagagaaag

SEQ ID NO: 2919715 - RNA, 19 nt, Artificial Sequence
  Description of Artificial Sequence: Synthetic oligonucleotide
ugcggcagaagcauuuccc

SEQ ID NO: 2919716 - RNA, 19 nt, Artificial Sequence
  Description of Artificial Sequence: Synthetic oligonucleotide
guaauggacaguuagguau

SEQ ID NO: 2919717 - RNA, 19 nt, Artificial Sequence
  Description of Artificial Sequence: Synthetic oligonucleotide
ugagcguagacuugcggca

SEQ ID NO: 2919718 - RNA, 19 nt, Artificial Sequence
  Description of Artificial Sequence: Synthetic oligonucleotide
gaguuuugacaccugugug

SEQ ID NO: 2919719 - RNA, 19 nt, Artificial Sequence
  Description of Artificial Sequence: Synthetic oligonucleotide
aucauugagugcugauuuc

SEQ ID NO: 2919720 - RNA, 19 nt, Artificial Sequence
  Description of Artificial Sequence: Synthetic oligonucleotide
ugaugucucaugagggcug

SEQ ID NO: 2919721 - RNA, 19 nt, Artificial Sequence
  Description of Artificial Sequence: Synthetic oligonucleotide
gugagcguagacuugcggc

SEQ ID NO: 2919722 - RNA, 19 nt, Artificial Sequence
  Description of Artificial Sequence: Synthetic oligonucleotide
ugagguacgacagcuguga

SEQ ID NO: 2919723 - RNA, 19 nt, Artificial Sequence
  Description of Artificial Sequence: Synthetic oligonucleotide
agcugugagaauaguuucc

SEQ ID NO: 2919724 - RNA, 19 nt, Artificial Sequence
  Description of Artificial Sequence: Synthetic oligonucleotide
uggguucuguaauggacag

SEQ ID NO: 2919725 - RNA, 19 nt, Artificial Sequence
  Description of Artificial Sequence: Synthetic oligonucleotide
uguguccucauguggguug

SEQ ID NO: 2919726 - RNA, 19 nt, Artificial Sequence
  Description of Artificial Sequence: Synthetic oligonucleotide
ucauugagugcugauuucu

SEQ ID NO: 2919727 - RNA, 19 nt, Artificial Sequence
  Description of Artificial Sequence: Synthetic oligonucleotide
cuuguagaguuuugacacc

SEQ ID NO: 2919728 - RNA, 19 nt, Artificial Sequence
  Description of Artificial Sequence: Synthetic oligonucleotide
uucugugaugcacggugag

SEQ ID NO: 2919729 - RNA, 19 nt, Artificial Sequence
  Description of Artificial Sequence: Synthetic oligonucleotide
ugagugcugauuucugaga

SEQ ID NO: 2919730 - RNA, 19 nt, Artificial Sequence
  Description of Artificial Sequence: Synthetic oligonucleotide
uguaauggacaguuaggua

SEQ ID NO: 2919731 - RNA, 19 nt, Artificial Sequence
  Description of Artificial Sequence: Synthetic oligonucleotide
auuucugagagaaagucuu

SEQ ID NO: 2919732 - RNA, 19 nt, Artificial Sequence
  Description of Artificial Sequence: Synthetic oligonucleotide
gcagucuguacacucauag

SEQ ID NO: 2919733 - RNA, 19 nt, Artificial Sequence
  Description of Artificial Sequence: Synthetic oligonucleotide
aguuucccacacucguuac

SEQ ID NO: 2919734 - RNA, 19 nt, Artificial Sequence
  Description of Artificial Sequence: Synthetic oligonucleotide
uuguagaguuuugacaccu

SEQ ID NO: 2919735 - RNA, 19 nt, Artificial Sequence
  Description of Artificial Sequence: Synthetic oligonucleotide
uccacagucauggcaaaca

SEQ ID NO: 2919736 - RNA, 19 nt, Artificial Sequence
  Description of Artificial Sequence: Synthetic oligonucleotide
uccucauguggguugugag

SEQ ID NO: 2919737 - RNA, 19 nt, Artificial Sequence
  Description of Artificial Sequence: Synthetic oligonucleotide
gacaguuagguaugacaac

SEQ ID NO: 2919738 - RNA, 19 nt, Artificial Sequence
  Description of Artificial Sequence: Synthetic oligonucleotide
ucugugaugcacggugagg

SEQ ID NO: 2919739 - RNA, 19 nt, Artificial Sequence
  Description of Artificial Sequence: Synthetic oligonucleotide
uaguuucccacacucguua

SEQ ID NO: 2919740 - RNA, 19 nt, Artificial Sequence
  Description of Artificial Sequence: Synthetic oligonucleotide
guugugagcguagacuugc

SEQ ID NO: 2919741 - RNA, 19 nt, Artificial Sequence
  Description of Artificial Sequence: Synthetic oligonucleotide
acucucugaugucucauga

SEQ ID NO: 2919742 - RNA, 19 nt, Artificial Sequence
  Description of Artificial Sequence: Synthetic oligonucleotide
gugagaauaguuucccaca

SEQ ID NO: 2919743 - RNA, 19 nt, Artificial Sequence
  Description of Artificial Sequence: Synthetic oligonucleotide
uguagaguuuugacaccug

SEQ ID NO: 2919744 - RNA, 19 nt, Artificial Sequence
  Description of Artificial Sequence: Synthetic oligonucleotide
cacuuguagaguuuugaca

SEQ ID NO: 2919745 - RNA, 19 nt, Artificial Sequence
  Description of Artificial Sequence: Synthetic oligonucleotide
auggcaaacauagggccuc

SEQ ID NO: 2919746 - RNA, 19 nt, Artificial Sequence
  Description of Artificial Sequence: Synthetic oligonucleotide
uggguugugagcguagacu

SEQ ID NO: 2919747 - RNA, 19 nt, Artificial Sequence
  Description of Artificial Sequence: Synthetic oligonucleotide
cagucuguacacucauagg

SEQ ID NO: 2919748 - RNA, 19 nt, Artificial Sequence
  Description of Artificial Sequence: Synthetic oligonucleotide
uacgacagcugugagaaua

SEQ ID NO: 2919749 - RNA, 19 nt, Artificial Sequence
  Description of Artificial Sequence: Synthetic oligonucleotide
uuugacaccuguguggauu

SEQ ID NO: 2919750 - RNA, 19 nt, Artificial Sequence
  Description of Artificial Sequence: Synthetic oligonucleotide
uuucccgcagucuguacac

SEQ ID NO: 2919751 - RNA, 19 nt, Artificial Sequence
  Description of Artificial Sequence: Synthetic oligonucleotide
cugaaugaguucugugaug

SEQ ID NO: 2919752 - RNA, 19 nt, Artificial Sequence
  Description of Artificial Sequence: Synthetic oligonucleotide
cauugagugcugauuucug

SEQ ID NO: 2919753 - RNA, 19 nt, Artificial Sequence
  Description of Artificial Sequence: Synthetic oligonucleotide
gaucauugagugcugauuu

SEQ ID NO: 2919754 - RNA, 19 nt, Artificial Sequence
  Description of Artificial Sequence: Synthetic oligonucleotide
uugugagcguagacuugcg

SEQ ID NO: 2919755 - RNA, 19 nt, Artificial Sequence
  Description of Artificial Sequence: Synthetic oligonucleotide
cugaguguguucucuggug

SEQ ID NO: 2919756 - RNA, 19 nt, Artificial Sequence
  Description of Artificial Sequence: Synthetic oligonucleotide
uagguaugacaaccucgag

SEQ ID NO: 2919757 - RNA, 19 nt, Artificial Sequence
  Description of Artificial Sequence: Synthetic oligonucleotide
uucugagagaaagucuuuc

SEQ ID NO: 2919758 - RNA, 19 nt, Artificial Sequence
  Description of Artificial Sequence: Synthetic oligonucleotide
accucgagaagaacuuccc

SEQ ID NO: 2919759 - RNA, 19 nt, Artificial Sequence
  Description of Artificial Sequence: Synthetic oligonucleotide
ucucaugagggcugaguuc

SEQ ID NO: 2919760 - RNA, 19 nt, Artificial Sequence
  Description of Artificial Sequence: Synthetic oligonucleotide
cugagagaaagucuuucca

SEQ ID NO: 2919761 - RNA, 19 nt, Artificial Sequence
  Description of Artificial Sequence: Synthetic oligonucleotide
auuuucuggugaucauuga

SEQ ID NO: 2919762 - RNA, 19 nt, Artificial Sequence
  Description of Artificial Sequence: Synthetic oligonucleotide
aagucuuuccacagucaug

SEQ ID NO: 2919763 - RNA, 19 nt, Artificial Sequence
  Description of Artificial Sequence: Synthetic oligonucleotide
cagcugugagaauaguuuc

SEQ ID NO: 2919764 - RNA, 19 nt, Artificial Sequence
  Description of Artificial Sequence: Synthetic oligonucleotide
guggauuuucuggugauca

SEQ ID NO: 2919765 - RNA, 19 nt, Artificial Sequence
  Description of Artificial Sequence: Synthetic oligonucleotide
ugaucauugagugcugauu

SEQ ID NO: 2919766 - RNA, 19 nt, Artificial Sequence
  Description of Artificial Sequence: Synthetic oligonucleotide
uguguguccucaugugggu

SEQ ID NO: 2919767 - RNA, 19 nt, Artificial Sequence
  Description of Artificial Sequence: Synthetic oligonucleotide
uugcggcagaagcauuucc

SEQ ID NO: 2919768 - RNA, 19 nt, Artificial Sequence
  Description of Artificial Sequence: Synthetic oligonucleotide
cucaugagggcugaguuca

SEQ ID NO: 2919769 - RNA, 19 nt, Artificial Sequence
  Description of Artificial Sequence: Synthetic oligonucleotide
gguacgacagcugugagaa

SEQ ID NO: 2919770 - RNA, 19 nt, Artificial Sequence
  Description of Artificial Sequence: Synthetic oligonucleotide
guuuugacaccugugugga

SEQ ID NO: 2919771 - RNA, 19 nt, Artificial Sequence
  Description of Artificial Sequence: Synthetic oligonucleotide
aauggacaguuagguauga

SEQ ID NO: 2919772 - RNA, 19 nt, Artificial Sequence
  Description of Artificial Sequence: Synthetic oligonucleotide
gacaaccucgagaagaacu

SEQ ID NO: 2919773 - RNA, 19 nt, Artificial Sequence
  Description of Artificial Sequence: Synthetic oligonucleotide
augagggcugaguucagau

SEQ ID NO: 2919774 - RNA, 19 nt, Artificial Sequence
  Description of Artificial Sequence: Synthetic oligonucleotide
uuucugagagaaagucuuu

SEQ ID NO: 2919775 - RNA, 19 nt, Artificial Sequence
  Description of Artificial Sequence: Synthetic oligonucleotide
gauuucugagagaaagucu

SEQ ID NO: 2919776 - RNA, 19 nt, Artificial Sequence
  Description of Artificial Sequence: Synthetic oligonucleotide
agguacgacagcugugaga

SEQ ID NO: 2919777 - RNA, 19 nt, Artificial Sequence
  Description of Artificial Sequence: Synthetic oligonucleotide
cagucauggcaaacauagg

SEQ ID NO: 2919778 - RNA, 19 nt, Artificial Sequence
  Description of Artificial Sequence: Synthetic oligonucleotide
cuccugaaugaguucugug

SEQ ID NO: 2919779 - RNA, 19 nt, Artificial Sequence
  Description of Artificial Sequence: Synthetic oligonucleotide
ugucucaugagggcugagu

SEQ ID NO: 2919780 - RNA, 19 nt, Artificial Sequence
  Description of Artificial Sequence: Synthetic oligonucleotide
cuggugaucauugagugcu

SEQ ID NO: 2919781 - RNA, 19 nt, Artificial Sequence
  Description of Artificial Sequence: Synthetic oligonucleotide
uggauuuucuggugaucau

SEQ ID NO: 2919782 - RNA, 19 nt, Artificial Sequence
  Description of Artificial Sequence: Synthetic oligonucleotide
auggacaguuagguaugac

SEQ ID NO: 2919783 - RNA, 19 nt, Artificial Sequence
  Description of Artificial Sequence: Synthetic oligonucleotide
ggacaguuagguaugacaa

SEQ ID NO: 2919784 - RNA, 19 nt, Artificial Sequence
  Description of Artificial Sequence: Synthetic oligonucleotide
gagguacgacagcugugag

SEQ ID NO: 2919785 - RNA, 19 nt, Artificial Sequence
  Description of Artificial Sequence: Synthetic oligonucleotide
guggguucuguaauggaca

SEQ ID NO: 2919786 - RNA, 19 nt, Artificial Sequence
  Description of Artificial Sequence: Synthetic oligonucleotide
acggugagguacgacagcu

SEQ ID NO: 2919787 - RNA, 19 nt, Artificial Sequence
  Description of Artificial Sequence: Synthetic oligonucleotide
uggugaucauugagugcug

SEQ ID NO: 2919788 - RNA, 19 nt, Artificial Sequence
  Description of Artificial Sequence: Synthetic oligonucleotide
guaugacaaccucgagaag

SEQ ID NO: 2919789 - RNA, 19 nt, Artificial Sequence
  Description of Artificial Sequence: Synthetic oligonucleotide
ugagggcugaguucagaua

SEQ ID NO: 2919790 - RNA, 19 nt, Artificial Sequence
  Description of Artificial Sequence: Synthetic oligonucleotide
ucaugagggcugaguucag

SEQ ID NO: 2919791 - RNA, 19 nt, Artificial Sequence
  Description of Artificial Sequence: Synthetic oligonucleotide
gcugugagaauaguuuccc

SEQ ID NO: 2919792 - RNA, 19 nt, Artificial Sequence
  Description of Artificial Sequence: Synthetic oligonucleotide
cacucucugaugucucaug

SEQ ID NO: 2919793 - RNA, 19 nt, Artificial Sequence
  Description of Artificial Sequence: Synthetic oligonucleotide
gugaugcacggugagguac

SEQ ID NO: 2919794 - RNA, 19 nt, Artificial Sequence
  Description of Artificial Sequence: Synthetic oligonucleotide
ggcagaagcauuucccaca

SEQ ID NO: 2919795 - RNA, 19 nt, Artificial Sequence
  Description of Artificial Sequence: Synthetic oligonucleotide
ucccgaguggguucuguaa

SEQ ID NO: 2919796 - RNA, 19 nt, Artificial Sequence
  Description of Artificial Sequence: Synthetic oligonucleotide
uguggguugugagcguaga

SEQ ID NO: 2919797 - RNA, 19 nt, Artificial Sequence
  Description of Artificial Sequence: Synthetic oligonucleotide
uguggauuuucuggugauc

SEQ ID NO: 2919798 - RNA, 19 nt, Artificial Sequence
  Description of Artificial Sequence: Synthetic oligonucleotide
gaguggguucuguaaugga

SEQ ID NO: 2919799 - RNA, 19 nt, Artificial Sequence
  Description of Artificial Sequence: Synthetic oligonucleotide
acaaccucgagaagaacuu

SEQ ID NO: 2919800 - RNA, 19 nt, Artificial Sequence
  Description of Artificial Sequence: Synthetic oligonucleotide
acgacagcugugagaauag

SEQ ID NO: 2919801 - RNA, 19 nt, Artificial Sequence
  Description of Artificial Sequence: Synthetic oligonucleotide
gcacuuguagaguuuugac

SEQ ID NO: 2919802 - RNA, 19 nt, Artificial Sequence
  Description of Artificial Sequence: Synthetic oligonucleotide
gagaaagucuuuccacagu

SEQ ID NO: 2919803 - RNA, 19 nt, Artificial Sequence
  Description of Artificial Sequence: Synthetic oligonucleotide
gagcguagacuugcggcag

SEQ ID NO: 2919804 - RNA, 19 nt, Artificial Sequence
  Description of Artificial Sequence: Synthetic oligonucleotide
guucagauagaagguuuuc

SEQ ID NO: 2919805 - RNA, 19 nt, Artificial Sequence
  Description of Artificial Sequence: Synthetic oligonucleotide
agacuugcggcagaagcau

SEQ ID NO: 2919806 - RNA, 19 nt, Artificial Sequence
  Description of Artificial Sequence: Synthetic oligonucleotide
aguucagauagaagguuuu

SEQ ID NO: 2919807 - RNA, 19 nt, Artificial Sequence
  Description of Artificial Sequence: Synthetic oligonucleotide
ugugaugcacggugaggua

SEQ ID NO: 2919808 - RNA, 19 nt, Artificial Sequence
  Description of Artificial Sequence: Synthetic oligonucleotide
gagaauaguuucccacacu

SEQ ID NO: 2919809 - RNA, 19 nt, Artificial Sequence
  Description of Artificial Sequence: Synthetic oligonucleotide
augacaaccucgagaagaa

SEQ ID NO: 2919810 - RNA, 19 nt, Artificial Sequence
  Description of Artificial Sequence: Synthetic oligonucleotide
gagaagaacuucccacacu

SEQ ID NO: 2919811 - RNA, 19 nt, Artificial Sequence
  Description of Artificial Sequence: Synthetic oligonucleotide
ucccgcagucuguacacuc

SEQ ID NO: 2919812 - RNA, 19 nt, Artificial Sequence
  Description of Artificial Sequence: Synthetic oligonucleotide
ccucauguggguugugagc

SEQ ID NO: 2919813 - RNA, 19 nt, Artificial Sequence
  Description of Artificial Sequence: Synthetic oligonucleotide
ugcugauuucugagagaaa

SEQ ID NO: 2919814 - RNA, 19 nt, Artificial Sequence
  Description of Artificial Sequence: Synthetic oligonucleotide
gacaccuguguggauuuuc

SEQ ID NO: 2919815 - RNA, 19 nt, Artificial Sequence
  Description of Artificial Sequence: Synthetic oligonucleotide
acuccugaaugaguucugu

SEQ ID NO: 2919816 - RNA, 19 nt, Artificial Sequence
  Description of Artificial Sequence: Synthetic oligonucleotide
cacggugagguacgacagc

SEQ ID NO: 2919817 - RNA, 19 nt, Artificial Sequence
  Description of Artificial Sequence: Synthetic oligonucleotide
gaugucucaugagggcuga

SEQ ID NO: 2919818 - RNA, 19 nt, Artificial Sequence
  Description of Artificial Sequence: Synthetic oligonucleotide
ucguaggguuucacuccug

SEQ ID NO: 2919819 - RNA, 19 nt, Artificial Sequence
  Description of Artificial Sequence: Synthetic oligonucleotide
cugugagaauaguuuccca

SEQ ID NO: 2919820 - RNA, 19 nt, Artificial Sequence
  Description of Artificial Sequence: Synthetic oligonucleotide
uuuugacaccuguguggau

SEQ ID NO: 2919821 - RNA, 19 nt, Artificial Sequence
  Description of Artificial Sequence: Synthetic oligonucleotide
guggguugugagcguagac

SEQ ID NO: 2919822 - RNA, 19 nt, Artificial Sequence
  Description of Artificial Sequence: Synthetic oligonucleotide
cugcacuuguagaguuuug

SEQ ID NO: 2919823 - RNA, 19 nt, Artificial Sequence
  Description of Artificial Sequence: Synthetic oligonucleotide
uuccacagucauggcaaac

SEQ ID NO: 2919824 - RNA, 19 nt, Artificial Sequence
  Description of Artificial Sequence: Synthetic oligonucleotide
ugacaaccucgagaagaac

SEQ ID NO: 2919825 - RNA, 19 nt, Artificial Sequence
  Description of Artificial Sequence: Synthetic oligonucleotide
cauggcaaacauagggccu

SEQ ID NO: 2919826 - RNA, 19 nt, Artificial Sequence
  Description of Artificial Sequence: Synthetic oligonucleotide
ggugagguacgacagcugu

SEQ ID NO: 2919827 - RNA, 19 nt, Artificial Sequence
  Description of Artificial Sequence: Synthetic oligonucleotide
agaacuucccacacucauu

SEQ ID NO: 2919828 - RNA, 19 nt, Artificial Sequence
  Description of Artificial Sequence: Synthetic oligonucleotide
gugagguacgacagcugug

SEQ ID NO: 2919829 - RNA, 19 nt, Artificial Sequence
  Description of Artificial Sequence: Synthetic oligonucleotide
agcguagacuugcggcaga

SEQ ID NO: 2919830 - RNA, 19 nt, Artificial Sequence
  Description of Artificial Sequence: Synthetic oligonucleotide
guuuucccgcagucuguac

SEQ ID NO: 2919831 - RNA, 19 nt, Artificial Sequence
  Description of Artificial Sequence: Synthetic oligonucleotide
gucuuuccacagucauggc

SEQ ID NO: 2919832 - RNA, 19 nt, Artificial Sequence
  Description of Artificial Sequence: Synthetic oligonucleotide
cuugcggcagaagcauuuc

SEQ ID NO: 2919833 - RNA, 19 nt, Artificial Sequence
  Description of Artificial Sequence: Synthetic oligonucleotide
caaccucgagaagaacuuc

SEQ ID NO: 2919834 - RNA, 19 nt, Artificial Sequence
  Description of Artificial Sequence: Synthetic oligonucleotide
cugugaugcacggugaggu

SEQ ID NO: 2919835 - RNA, 19 nt, Artificial Sequence
  Description of Artificial Sequence: Synthetic oligonucleotide
acuugcggcagaagcauuu

SEQ ID NO: 2919836 - RNA, 19 nt, Artificial Sequence
  Description of Artificial Sequence: Synthetic oligonucleotide
guucugugaugcacgguga

SEQ ID NO: 2919837 - RNA, 19 nt, Artificial Sequence
  Description of Artificial Sequence: Synthetic oligonucleotide
gucucaugagggcugaguu

SEQ ID NO: 2919838 - RNA, 19 nt, Artificial Sequence
  Description of Artificial Sequence: Synthetic oligonucleotide
augcacggugagguacgac

SEQ ID NO: 2919839 - RNA, 19 nt, Artificial Sequence
  Description of Artificial Sequence: Synthetic oligonucleotide
auguggguugugagcguag

SEQ ID NO: 2919840 - RNA, 19 nt, Artificial Sequence
  Description of Artificial Sequence: Synthetic oligonucleotide
cacagucauggcaaacaua

SEQ ID NO: 2919841 - RNA, 19 nt, Artificial Sequence
  Description of Artificial Sequence: Synthetic oligonucleotide
gacagcugugagaauaguu

SEQ ID NO: 2919842 - RNA, 19 nt, Artificial Sequence
  Description of Artificial Sequence: Synthetic oligonucleotide
gcacggugagguacgacag

SEQ ID NO: 2919843 - RNA, 19 nt, Artificial Sequence
  Description of Artificial Sequence: Synthetic oligonucleotide
caguuagguaugacaaccu

SEQ ID NO: 2919844 - RNA, 19 nt, Artificial Sequence
  Description of Artificial Sequence: Synthetic oligonucleotide
cucuccugaguguguucuc

SEQ ID NO: 2919845 - RNA, 19 nt, Artificial Sequence
  Description of Artificial Sequence: Synthetic oligonucleotide
gcggcagaagcauuuccca

SEQ ID NO: 2919846 - RNA, 19 nt, Artificial Sequence
  Description of Artificial Sequence: Synthetic oligonucleotide
guuucacuccugaaugagu

SEQ ID NO: 2919847 - RNA, 19 nt, Artificial Sequence
  Description of Artificial Sequence: Synthetic oligonucleotide
ucucccgaguggguucugu

SEQ ID NO: 2919848 - RNA, 19 nt, Artificial Sequence
  Description of Artificial Sequence: Synthetic oligonucleotide
cgagaagaacuucccacac

SEQ ID NO: 2919849 - RNA, 19 nt, Artificial Sequence
  Description of Artificial Sequence: Synthetic oligonucleotide
uggcaaacauagggccucu

SEQ ID NO: 2919850 - RNA, 19 nt, Artificial Sequence
  Description of Artificial Sequence: Synthetic oligonucleotide
cugaugucucaugagggcu

SEQ ID NO: 2919851 - RNA, 19 nt, Artificial Sequence
  Description of Artificial Sequence: Synthetic oligonucleotide
gguugugagcguagacuug

SEQ ID NO: 2919852 - RNA, 19 nt, Artificial Sequence
  Description of Artificial Sequence: Synthetic oligonucleotide
agguuuucccgcagucugu

SEQ ID NO: 2919853 - RNA, 19 nt, Artificial Sequence
  Description of Artificial Sequence: Synthetic oligonucleotide
guccucauguggguuguga

SEQ ID NO: 2919854 - RNA, 19 nt, Artificial Sequence
  Description of Artificial Sequence: Synthetic oligonucleotide
cgaguggguucuguaaugg

SEQ ID NO: 2919855 - RNA, 19 nt, Artificial Sequence
  Description of Artificial Sequence: Synthetic oligonucleotide
ccgaguggguucuguaaug

SEQ ID NO: 2919856 - RNA, 19 nt, Artificial Sequence
  Description of Artificial Sequence: Synthetic oligonucleotide
gaugcacggugagguacga

SEQ ID NO: 2919857 - RNA, 19 nt, Artificial Sequence
  Description of Artificial Sequence: Synthetic oligonucleotide
ggugaucauugagugcuga

SEQ ID NO: 2919858 - RNA, 19 nt, Artificial Sequence
  Description of Artificial Sequence: Synthetic oligonucleotide
gugaucauugagugcugau

SEQ ID NO: 2919859 - RNA, 19 nt, Artificial Sequence
  Description of Artificial Sequence: Synthetic oligonucleotide
ucucgcccguguguguccu

SEQ ID NO: 2919860 - RNA, 19 nt, Artificial Sequence
  Description of Artificial Sequence: Synthetic oligonucleotide
ggguugugagcguagacuu

SEQ ID NO: 2919861 - RNA, 19 nt, Artificial Sequence
  Description of Artificial Sequence: Synthetic oligonucleotide
caugagggcugaguucaga

SEQ ID NO: 2919862 - RNA, 19 nt, Artificial Sequence
  Description of Artificial Sequence: Synthetic oligonucleotide
uucccgcagucuguacacu

SEQ ID NO: 2919863 - RNA, 19 nt, Artificial Sequence
  Description of Artificial Sequence: Synthetic oligonucleotide
agggcugaguucagauaga

SEQ ID NO: 2919864 - RNA, 19 nt, Artificial Sequence
  Description of Artificial Sequence: Synthetic oligonucleotide
uguccucauguggguugug

SEQ ID NO: 2919865 - RNA, 19 nt, Artificial Sequence
  Description of Artificial Sequence: Synthetic oligonucleotide
cauguggguugugagcgua

SEQ ID NO: 2919866 - RNA, 19 nt, Artificial Sequence
  Description of Artificial Sequence: Synthetic oligonucleotide
ccugaaugaguucugugau

SEQ ID NO: 2919867 - RNA, 19 nt, Artificial Sequence
  Description of Artificial Sequence: Synthetic oligonucleotide
ccucgagaagaacuuccca

SEQ ID NO: 2919868 - RNA, 19 nt, Artificial Sequence
  Description of Artificial Sequence: Synthetic oligonucleotide
ggauuuucuggugaucauu

SEQ ID NO: 2919869 - RNA, 19 nt, Artificial Sequence
  Description of Artificial Sequence: Synthetic oligonucleotide
cggcagaagcauuucccac

SEQ ID NO: 2919870 - RNA, 19 nt, Artificial Sequence
  Description of Artificial Sequence: Synthetic oligonucleotide
cucccgaguggguucugua

SEQ ID NO: 2919871 - RNA, 19 nt, Artificial Sequence
  Description of Artificial Sequence: Synthetic oligonucleotide
gguuuucccgcagucugua

SEQ ID NO: 2919872 - RNA, 19 nt, Artificial Sequence
  Description of Artificial Sequence: Synthetic oligonucleotide
gaguucugugaugcacggu

SEQ ID NO: 2919873 - RNA, 19 nt, Artificial Sequence
  Description of Artificial Sequence: Synthetic oligonucleotide
cccgcagucuguacacuca

SEQ ID NO: 2919874 - RNA, 19 nt, Artificial Sequence
  Description of Artificial Sequence: Synthetic oligonucleotide
cggugugcacucucugaug

SEQ ID NO: 2919875 - RNA, 19 nt, Artificial Sequence
  Description of Artificial Sequence: Synthetic oligonucleotide
guguccucauguggguugu

SEQ ID NO: 2919876 - RNA, 19 nt, Artificial Sequence
  Description of Artificial Sequence: Synthetic oligonucleotide
gcugcacuuguagaguuuu

SEQ ID NO: 2919877 - RNA, 19 nt, Artificial Sequence
  Description of Artificial Sequence: Synthetic oligonucleotide
ccugaguguguucucuggu

SEQ ID NO: 2919878 - RNA, 19 nt, Artificial Sequence
  Description of Artificial Sequence: Synthetic oligonucleotide
ggcaaacauagggccucuc

SEQ ID NO: 2919879 - RNA, 19 nt, Artificial Sequence
  Description of Artificial Sequence: Synthetic oligonucleotide
cggugagguacgacagcug

SEQ ID NO: 2919880 - RNA, 19 nt, Artificial Sequence
  Description of Artificial Sequence: Synthetic oligonucleotide
cguagacuugcggcagaag

SEQ ID NO: 2919881 - RNA, 19 nt, Artificial Sequence
  Description of Artificial Sequence: Synthetic oligonucleotide
cagaagcauuucccacacu

SEQ ID NO: 2919882 - RNA, 19 nt, Artificial Sequence
  Description of Artificial Sequence: Synthetic oligonucleotide
gacuugcggcagaagcauu

SEQ ID NO: 2919883 - RNA, 19 nt, Artificial Sequence
  Description of Artificial Sequence: Synthetic oligonucleotide
ccacagucauggcaaacau

SEQ ID NO: 2919884 - RNA, 19 nt, Artificial Sequence
  Description of Artificial Sequence: Synthetic oligonucleotide
gcguagacuugcggcagaa

SEQ ID NO: 2919885 - RNA, 19 nt, Artificial Sequence
  Description of Artificial Sequence: Synthetic oligonucleotide
cucucccgaguggguucug

SEQ ID NO: 2919886 - RNA, 19 nt, Artificial Sequence
  Description of Artificial Sequence: Synthetic oligonucleotide
guguguccucauguggguu

SEQ ID NO: 2919887 - RNA, 19 nt, Artificial Sequence
  Description of Artificial Sequence: Synthetic oligonucleotide
guacgacagcugugagaau

SEQ ID NO: 2919888 - RNA, 19 nt, Artificial Sequence
  Description of Artificial Sequence: Synthetic oligonucleotide
cccgaguggguucuguaau

SEQ ID NO: 2919889 - RNA, 19 nt, Artificial Sequence
  Description of Artificial Sequence: Synthetic oligonucleotide
ccggugugcacucucugau

SEQ ID NO: 2919890 - RNA, 19 nt, Artificial Sequence
  Description of Artificial Sequence: Synthetic oligonucleotide
ggguucuguaauggacagu

SEQ ID NO: 2919891 - RNA, 19 nt, Artificial Sequence
  Description of Artificial Sequence: Synthetic oligonucleotide
aaagaggccauguaugggc

SEQ ID NO: 2919892 - RNA, 19 nt, Artificial Sequence
  Description of Artificial Sequence: Synthetic oligonucleotide
uguaaagaggccauguaug

SEQ ID NO: 2919893 - RNA, 19 nt, Artificial Sequence
  Description of Artificial Sequence: Synthetic oligonucleotide
agcaccagcuuuuagcugc

SEQ ID NO: 2919894 - RNA, 19 nt, Artificial Sequence
  Description of Artificial Sequence: Synthetic oligonucleotide
aacacccacuuuuggaugc

SEQ ID NO: 2919895 - RNA, 19 nt, Artificial Sequence
  Description of Artificial Sequence: Synthetic oligonucleotide
uaaccagggugcuugaugg

SEQ ID NO: 2919896 - RNA, 19 nt, Artificial Sequence
  Description of Artificial Sequence: Synthetic oligonucleotide
aaggugaggccuuuggguc

SEQ ID NO: 2919897 - RNA, 19 nt, Artificial Sequence
  Description of Artificial Sequence: Synthetic oligonucleotide
uuuggaugcacgaggaccc

SEQ ID NO: 2919898 - RNA, 19 nt, Artificial Sequence
  Description of Artificial Sequence: Synthetic oligonucleotide
uggaccuccauccuggugc

SEQ ID NO: 2919899 - RNA, 19 nt, Artificial Sequence
  Description of Artificial Sequence: Synthetic oligonucleotide
uguaugggcgggaaugugg

SEQ ID NO: 2919900 - RNA, 19 nt, Artificial Sequence
  Description of Artificial Sequence: Synthetic oligonucleotide
guaaagaggccauguaugg

SEQ ID NO: 2919901 - RNA, 19 nt, Artificial Sequence
  Description of Artificial Sequence: Synthetic oligonucleotide
aaugaugugggucuccgau

SEQ ID NO: 2919902 - RNA, 19 nt, Artificial Sequence
  Description of Artificial Sequence: Synthetic oligonucleotide
ucauuuucaagguugcggu

SEQ ID NO: 2919903 - RNA, 19 nt, Artificial Sequence
  Description of Artificial Sequence: Synthetic oligonucleotide
uuggagguggugcaggccg

SEQ ID NO: 2919904 - RNA, 19 nt, Artificial Sequence
  Description of Artificial Sequence: Synthetic oligonucleotide
uugauggcugccuugaugu

SEQ ID NO: 2919905 - RNA, 19 nt, Artificial Sequence
  Description of Artificial Sequence: Synthetic oligonucleotide
acuuaugguuccuggaggg

SEQ ID NO: 2919906 - RNA, 19 nt, Artificial Sequence
  Description of Artificial Sequence: Synthetic oligonucleotide
uuuuggaugcacgaggacc

SEQ ID NO: 2919907 - RNA, 19 nt, Artificial Sequence
  Description of Artificial Sequence: Synthetic oligonucleotide
uuccugugaggacaggugg

SEQ ID NO: 2919908 - RNA, 19 nt, Artificial Sequence
  Description of Artificial Sequence: Synthetic oligonucleotide
ugcgguuguaaccagggug

SEQ ID NO: 2919909 - RNA, 19 nt, Artificial Sequence
  Description of Artificial Sequence: Synthetic oligonucleotide
gacuuaugguuccuggagg

SEQ ID NO: 2919910 - RNA, 19 nt, Artificial Sequence
  Description of Artificial Sequence: Synthetic oligonucleotide
ugggcagcagucaacaccc

SEQ ID NO: 2919911 - RNA, 19 nt, Artificial Sequence
  Description of Artificial Sequence: Synthetic oligonucleotide
agcuuuuagcugcuguagc

SEQ ID NO: 2919912 - RNA, 19 nt, Artificial Sequence
  Description of Artificial Sequence: Synthetic oligonucleotide
gucauuuucaagguugcgg

SEQ ID NO: 2919913 - RNA, 19 nt, Artificial Sequence
  Description of Artificial Sequence: Synthetic oligonucleotide
uguauccagggccagcaag

SEQ ID NO: 2919914 - RNA, 19 nt, Artificial Sequence
  Description of Artificial Sequence: Synthetic oligonucleotide
agacuuaugguuccuggag

SEQ ID NO: 2919915 - RNA, 19 nt, Artificial Sequence
  Description of Artificial Sequence: Synthetic oligonucleotide
uugauguggaaggugaggc

SEQ ID NO: 2919916 - RNA, 19 nt, Artificial Sequence
  Description of Artificial Sequence: Synthetic oligonucleotide
aggucuuuggagguggugc

SEQ ID NO: 2919917 - RNA, 19 nt, Artificial Sequence
  Description of Artificial Sequence: Synthetic oligonucleotide
caggucauuuucaagguug

SEQ ID NO: 2919918 - RNA, 19 nt, Artificial Sequence
  Description of Artificial Sequence: Synthetic oligonucleotide
uuuucuguaaagaggccau

SEQ ID NO: 2919919 - RNA, 19 nt, Artificial Sequence
  Description of Artificial Sequence: Synthetic oligonucleotide
caagacuuaugguuccugg

SEQ ID NO: 2919920 - RNA, 19 nt, Artificial Sequence
  Description of Artificial Sequence: Synthetic oligonucleotide
aagacuuaugguuccugga

SEQ ID NO: 2919921 - RNA, 19 nt, Artificial Sequence
  Description of Artificial Sequence: Synthetic oligonucleotide
gacugguggaccuccaucc

SEQ ID NO: 2919922 - RNA, 19 nt, Artificial Sequence
  Description of Artificial Sequence: Synthetic oligonucleotide
cacuuuuggaugcacgagg

SEQ ID NO: 2919923 - RNA, 19 nt, Artificial Sequence
  Description of Artificial Sequence: Synthetic oligonucleotide
ucaacacccacuuuuggau

SEQ ID NO: 2919924 - RNA, 19 nt, Artificial Sequence
  Description of Artificial Sequence: Synthetic oligonucleotide
uggaaggugaggccuuugg

SEQ ID NO: 2919925 - RNA, 19 nt, Artificial Sequence
  Description of Artificial Sequence: Synthetic oligonucleotide
ugaugugggucuccgaugu

SEQ ID NO: 2919926 - RNA, 19 nt, Artificial Sequence
  Description of Artificial Sequence: Synthetic oligonucleotide
caagguugcgguuguaacc

SEQ ID NO: 2919927 - RNA, 19 nt, Artificial Sequence
  Description of Artificial Sequence: Synthetic oligonucleotide
ugguggaccuccauccugg

SEQ ID NO: 2919928 - RNA, 19 nt, Artificial Sequence
  Description of Artificial Sequence: Synthetic oligonucleotide
aagguugcgguuguaacca

SEQ ID NO: 2919929 - RNA, 19 nt, Artificial Sequence
  Description of Artificial Sequence: Synthetic oligonucleotide
gucucgaaggucuuuggag

SEQ ID NO: 2919930 - RNA, 19 nt, Artificial Sequence
  Description of Artificial Sequence: Synthetic oligonucleotide
gacuuucucuuccugugag

SEQ ID NO: 2919931 - RNA, 19 nt, Artificial Sequence
  Description of Artificial Sequence: Synthetic oligonucleotide
gcuguagcgacucaggcag

SEQ ID NO: 2919932 - RNA, 19 nt, Artificial Sequence
  Description of Artificial Sequence: Synthetic oligonucleotide
uaaagaggccauguauggg

SEQ ID NO: 2919933 - RNA, 19 nt, Artificial Sequence
  Description of Artificial Sequence: Synthetic oligonucleotide
uggugcaagacuuaugguu

SEQ ID NO: 2919934 - RNA, 19 nt, Artificial Sequence
  Description of Artificial Sequence: Synthetic oligonucleotide
auuuucaagguugcgguug

SEQ ID NO: 2919935 - RNA, 19 nt, Artificial Sequence
  Description of Artificial Sequence: Synthetic oligonucleotide
gauggcugccuugaugugg

SEQ ID NO: 2919936 - RNA, 19 nt, Artificial Sequence
  Description of Artificial Sequence: Synthetic oligonucleotide
uucucuuccugugaggaca

SEQ ID NO: 2919937 - RNA, 19 nt, Artificial Sequence
  Description of Artificial Sequence: Synthetic oligonucleotide
acagguggccuuccgaguc

SEQ ID NO: 2919938 - RNA, 19 nt, Artificial Sequence
  Description of Artificial Sequence: Synthetic oligonucleotide
gcugccuugauguggaagg

SEQ ID NO: 2919939 - RNA, 19 nt, Artificial Sequence
  Description of Artificial Sequence: Synthetic oligonucleotide
aaccagggugcuugauggc

SEQ ID NO: 2919940 - RNA, 19 nt, Artificial Sequence
  Description of Artificial Sequence: Synthetic oligonucleotide
ucaagguugcgguuguaac

SEQ ID NO: 2919941 - RNA, 19 nt, Artificial Sequence
  Description of Artificial Sequence: Synthetic oligonucleotide
uuuuagcugcuguagcgac

SEQ ID NO: 2919942 - RNA, 19 nt, Artificial Sequence
  Description of Artificial Sequence: Synthetic oligonucleotide
ccuggugcaagacuuaugg

SEQ ID NO: 2919943 - RNA, 19 nt, Artificial Sequence
  Description of Artificial Sequence: Synthetic oligonucleotide
uuaugguuccuggagggug

SEQ ID NO: 2919944 - RNA, 19 nt, Artificial Sequence
  Description of Artificial Sequence: Synthetic oligonucleotide
uuuucaagguugcgguugu

SEQ ID NO: 2919945 - RNA, 19 nt, Artificial Sequence
  Description of Artificial Sequence: Synthetic oligonucleotide
uuuagcagcgccaggucau

SEQ ID NO: 2919946 - RNA, 19 nt, Artificial Sequence
  Description of Artificial Sequence: Synthetic oligonucleotide
agucaacacccacuuuugg

SEQ ID NO: 2919947 - RNA, 19 nt, Artificial Sequence
  Description of Artificial Sequence: Synthetic oligonucleotide
uagcgacucaggcaggcag

SEQ ID NO: 2919948 - RNA, 19 nt, Artificial Sequence
  Description of Artificial Sequence: Synthetic oligonucleotide
gcuuuuagcugcuguagcg

SEQ ID NO: 2919949 - RNA, 19 nt, Artificial Sequence
  Description of Artificial Sequence: Synthetic oligonucleotide
acuuucucuuccugugagg

SEQ ID NO: 2919950 - RNA, 19 nt, Artificial Sequence
  Description of Artificial Sequence: Synthetic oligonucleotide
aauguggggcugccucucg

SEQ ID NO: 2919951 - RNA, 19 nt, Artificial Sequence
  Description of Artificial Sequence: Synthetic oligonucleotide
ucuuuggagguggugcagg

SEQ ID NO: 2919952 - RNA, 19 nt, Artificial Sequence
  Description of Artificial Sequence: Synthetic oligonucleotide
aggccuuugggucucgaag

SEQ ID NO: 2919953 - RNA, 19 nt, Artificial Sequence
  Description of Artificial Sequence: Synthetic oligonucleotide
augggcgggaauguggggc

SEQ ID NO: 2919954 - RNA, 19 nt, Artificial Sequence
  Description of Artificial Sequence: Synthetic oligonucleotide
cuugauguggaaggugagg

SEQ ID NO: 2919955 - RNA, 19 nt, Artificial Sequence
  Description of Artificial Sequence: Synthetic oligonucleotide
guugcgguuguaaccaggg

SEQ ID NO: 2919956 - RNA, 19 nt, Artificial Sequence
  Description of Artificial Sequence: Synthetic oligonucleotide
ugauguggaaggugaggcc

SEQ ID NO: 2919957 - RNA, 19 nt, Artificial Sequence
  Description of Artificial Sequence: Synthetic oligonucleotide
ucuguaaagaggccaugua

SEQ ID NO: 2919958 - RNA, 19 nt, Artificial Sequence
  Description of Artificial Sequence: Synthetic oligonucleotide
aagaggccauguaugggcg

SEQ ID NO: 2919959 - RNA, 19 nt, Artificial Sequence
  Description of Artificial Sequence: Synthetic oligonucleotide
gugggcagcagucaacacc

SEQ ID NO: 2919960 - RNA, 19 nt, Artificial Sequence
  Description of Artificial Sequence: Synthetic oligonucleotide
ugcuguagcgacucaggca

SEQ ID NO: 2919961 - RNA, 19 nt, Artificial Sequence
  Description of Artificial Sequence: Synthetic oligonucleotide
aggucauuuucaagguugc

SEQ ID NO: 2919962 - RNA, 19 nt, Artificial Sequence
  Description of Artificial Sequence: Synthetic oligonucleotide
cuugauggcugccuugaug

SEQ ID NO: 2919963 - RNA, 19 nt, Artificial Sequence
  Description of Artificial Sequence: Synthetic oligonucleotide
uucuguaaagaggccaugu

SEQ ID NO: 2919964 - RNA, 19 nt, Artificial Sequence
  Description of Artificial Sequence: Synthetic oligonucleotide
augggauccggcuuuucug

SEQ ID NO: 2919965 - RNA, 19 nt, Artificial Sequence
  Description of Artificial Sequence: Synthetic oligonucleotide
agucccgcccaucuagcac

SEQ ID NO: 2919966 - RNA, 19 nt, Artificial Sequence
  Description of Artificial Sequence: Synthetic oligonucleotide
auccagcuuuagcagcgcc

SEQ ID NO: 2919967 - RNA, 19 nt, Artificial Sequence
  Description of Artificial Sequence: Synthetic oligonucleotide
uuuagcugcuguagcgacu

SEQ ID NO: 2919968 - RNA, 19 nt, Artificial Sequence
  Description of Artificial Sequence: Synthetic oligonucleotide
uccugugaggacagguggc

SEQ ID NO: 2919969 - RNA, 19 nt, Artificial Sequence
  Description of Artificial Sequence: Synthetic oligonucleotide
ucuccgauguguugccugc

SEQ ID NO: 2919970 - RNA, 19 nt, Artificial Sequence
  Description of Artificial Sequence: Synthetic oligonucleotide
ugggucuccgauguguugc

SEQ ID NO: 2919971 - RNA, 19 nt, Artificial Sequence
  Description of Artificial Sequence: Synthetic oligonucleotide
guaugggcgggaauguggg

SEQ ID NO: 2919972 - RNA, 19 nt, Artificial Sequence
  Description of Artificial Sequence: Synthetic oligonucleotide
acacacaugggauccggcu

SEQ ID NO: 2919973 - RNA, 19 nt, Artificial Sequence
  Description of Artificial Sequence: Synthetic oligonucleotide
gucaacacccacuuuugga

SEQ ID NO: 2919974 - RNA, 19 nt, Artificial Sequence
  Description of Artificial Sequence: Synthetic oligonucleotide
cuuuucuguaaagaggcca

SEQ ID NO: 2919975 - RNA, 19 nt, Artificial Sequence
  Description of Artificial Sequence: Synthetic oligonucleotide
gaaggugaggccuuugggu

SEQ ID NO: 2919976 - RNA, 19 nt, Artificial Sequence
  Description of Artificial Sequence: Synthetic oligonucleotide
uuagcugcuguagcgacuc

SEQ ID NO: 2919977 - RNA, 19 nt, Artificial Sequence
  Description of Artificial Sequence: Synthetic oligonucleotide
ggccuuugggucucgaagg

SEQ ID NO: 2919978 - RNA, 19 nt, Artificial Sequence
  Description of Artificial Sequence: Synthetic oligonucleotide
ugggauccggcuuuucugu

SEQ ID NO: 2919979 - RNA, 19 nt, Artificial Sequence
  Description of Artificial Sequence: Synthetic oligonucleotide
augaugugggucuccgaug

SEQ ID NO: 2919980 - RNA, 19 nt, Artificial Sequence
  Description of Artificial Sequence: Synthetic oligonucleotide
uccgauguguugccugccc

SEQ ID NO: 2919981 - RNA, 19 nt, Artificial Sequence
  Description of Artificial Sequence: Synthetic oligonucleotide
ucuuccugugaggacaggu

SEQ ID NO: 2919982 - RNA, 19 nt, Artificial Sequence
  Description of Artificial Sequence: Synthetic oligonucleotide
aguguauccagggccagca

SEQ ID NO: 2919983 - RNA, 19 nt, Artificial Sequence
  Description of Artificial Sequence: Synthetic oligonucleotide
uccggcuuuucuguaaaga

SEQ ID NO: 2919984 - RNA, 19 nt, Artificial Sequence
  Description of Artificial Sequence: Synthetic oligonucleotide
cagucaacacccacuuuug

SEQ ID NO: 2919985 - RNA, 19 nt, Artificial Sequence
  Description of Artificial Sequence: Synthetic oligonucleotide
uguagcgacucaggcaggc

SEQ ID NO: 2919986 - RNA, 19 nt, Artificial Sequence
  Description of Artificial Sequence: Synthetic oligonucleotide
accagcuuuuagcugcugu

SEQ ID NO: 2919987 - RNA, 19 nt, Artificial Sequence
  Description of Artificial Sequence: Synthetic oligonucleotide
uguguugccugcccacagu

SEQ ID NO: 2919988 - RNA, 19 nt, Artificial Sequence
  Description of Artificial Sequence: Synthetic oligonucleotide
uucaagguugcgguuguaa

SEQ ID NO: 2919989 - RNA, 19 nt, Artificial Sequence
  Description of Artificial Sequence: Synthetic oligonucleotide
uggggcugccucucgaccc

SEQ ID NO: 2919990 - RNA, 19 nt, Artificial Sequence
  Description of Artificial Sequence: Synthetic oligonucleotide
uaugggcgggaaugugggg

SEQ ID NO: 2919991 - RNA, 19 nt, Artificial Sequence
  Description of Artificial Sequence: Synthetic oligonucleotide
acuuuuggaugcacgagga

SEQ ID NO: 2919992 - RNA, 19 nt, Artificial Sequence
  Description of Artificial Sequence: Synthetic oligonucleotide
agugggcagcagucaacac

SEQ ID NO: 2919993 - RNA, 19 nt, Artificial Sequence
  Description of Artificial Sequence: Synthetic oligonucleotide
cuuucucuuccugugagga

SEQ ID NO: 2919994 - RNA, 19 nt, Artificial Sequence
  Description of Artificial Sequence: Synthetic oligonucleotide
ugcuugauggcugccuuga

SEQ ID NO: 2919995 - RNA, 19 nt, Artificial Sequence
  Description of Artificial Sequence: Synthetic oligonucleotide
caacacccacuuuuggaug

SEQ ID NO: 2919996 - RNA, 19 nt, Artificial Sequence
  Description of Artificial Sequence: Synthetic oligonucleotide
ugcccacaguguauccagg

SEQ ID NO: 2919997 - RNA, 19 nt, Artificial Sequence
  Description of Artificial Sequence: Synthetic oligonucleotide
auguguugccugcccacag

SEQ ID NO: 2919998 - RNA, 19 nt, Artificial Sequence
  Description of Artificial Sequence: Synthetic oligonucleotide
agaggccauguaugggcgg

SEQ ID NO: 2919999 - RNA, 19 nt, Artificial Sequence
  Description of Artificial Sequence: Synthetic oligonucleotide
uuucuguaaagaggccaug

SEQ ID NO: 2920000 - RNA, 19 nt, Artificial Sequence
  Description of Artificial Sequence: Synthetic oligonucleotide
cugcuguagcgacucaggc

SEQ ID NO: 2920001 - RNA, 19 nt, Artificial Sequence
  Description of Artificial Sequence: Synthetic oligonucleotide
gugcaagacuuaugguucc

SEQ ID NO: 2920002 - RNA, 19 nt, Artificial Sequence
  Description of Artificial Sequence: Synthetic oligonucleotide
cgccaggucauuuucaagg

SEQ ID NO: 2920003 - RNA, 19 nt, Artificial Sequence
  Description of Artificial Sequence: Synthetic oligonucleotide
agcaagagcagcagggacu

SEQ ID NO: 2920004 - RNA, 19 nt, Artificial Sequence
  Description of Artificial Sequence: Synthetic oligonucleotide
uauccagggccagcaagag

SEQ ID NO: 2920005 - RNA, 19 nt, Artificial Sequence
  Description of Artificial Sequence: Synthetic oligonucleotide
uuccgagucccgcccaucu

SEQ ID NO: 2920006 - RNA, 19 nt, Artificial Sequence
  Description of Artificial Sequence: Synthetic oligonucleotide
cagcuuuuagcugcuguag

SEQ ID NO: 2920007 - RNA, 19 nt, Artificial Sequence
  Description of Artificial Sequence: Synthetic oligonucleotide
ggugcaagacuuaugguuc

SEQ ID NO: 2920008 - RNA, 19 nt, Artificial Sequence
  Description of Artificial Sequence: Synthetic oligonucleotide
ggacagguggccuuccgag

SEQ ID NO: 2920009 - RNA, 19 nt, Artificial Sequence
  Description of Artificial Sequence: Synthetic oligonucleotide
uccuggugcaagacuuaug

SEQ ID NO: 2920010 - RNA, 19 nt, Artificial Sequence
  Description of Artificial Sequence: Synthetic oligonucleotide
ugggucucgaaggucuuug

SEQ ID NO: 2920011 - RNA, 19 nt, Artificial Sequence
  Description of Artificial Sequence: Synthetic oligonucleotide
ccacaguguauccagggcc

SEQ ID NO: 2920012 - RNA, 19 nt, Artificial Sequence
  Description of Artificial Sequence: Synthetic oligonucleotide
guguugccugcccacagug

SEQ ID NO: 2920013 - RNA, 19 nt, Artificial Sequence
  Description of Artificial Sequence: Synthetic oligonucleotide
cuuuagcagcgccagguca

SEQ ID NO: 2920014 - RNA, 19 nt, Artificial Sequence
  Description of Artificial Sequence: Synthetic oligonucleotide
cuuuuggaugcacgaggac

SEQ ID NO: 2920015 - RNA, 19 nt, Artificial Sequence
  Description of Artificial Sequence: Synthetic oligonucleotide
gauguggaaggugaggccu

SEQ ID NO: 2920016 - RNA, 19 nt, Artificial Sequence
  Description of Artificial Sequence: Synthetic oligonucleotide
ccggcuuuucuguaaagag

SEQ ID NO: 2920017 - RNA, 19 nt, Artificial Sequence
  Description of Artificial Sequence: Synthetic oligonucleotide
cuuugggucucgaaggucu

SEQ ID NO: 2920018 - RNA, 19 nt, Artificial Sequence
  Description of Artificial Sequence: Synthetic oligonucleotide
ccgagcaccagcuuuuagc

SEQ ID NO: 2920019 - RNA, 19 nt, Artificial Sequence
  Description of Artificial Sequence: Synthetic oligonucleotide
cacaguguauccagggcca

SEQ ID NO: 2920020 - RNA, 19 nt, Artificial Sequence
  Description of Artificial Sequence: Synthetic oligonucleotide
uguugccugcccacagugu

SEQ ID NO: 2920021 - RNA, 19 nt, Artificial Sequence
  Description of Artificial Sequence: Synthetic oligonucleotide
uuuggagguggugcaggcc

SEQ ID NO: 2920022 - RNA, 19 nt, Artificial Sequence
  Description of Artificial Sequence: Synthetic oligonucleotide
aaggucuuuggagguggug

SEQ ID NO: 2920023 - RNA, 19 nt, Artificial Sequence
  Description of Artificial Sequence: Synthetic oligonucleotide
gucuccgauguguugccug

SEQ ID NO: 2920024 - RNA, 19 nt, Artificial Sequence
  Description of Artificial Sequence: Synthetic oligonucleotide
caggcagugggcagcaguc

SEQ ID NO: 2920025 - RNA, 19 nt, Artificial Sequence
  Description of Artificial Sequence: Synthetic oligonucleotide
cuccccgacuuucucuucc

SEQ ID NO: 2920026 - RNA, 19 nt, Artificial Sequence
  Description of Artificial Sequence: Synthetic oligonucleotide
acacaugggauccggcuuu

SEQ ID NO: 2920027 - RNA, 19 nt, Artificial Sequence
  Description of Artificial Sequence: Synthetic oligonucleotide
accuccauccuggugcaag

SEQ ID NO: 2920028 - RNA, 19 nt, Artificial Sequence
  Description of Artificial Sequence: Synthetic oligonucleotide
cagcaagagcagcagggac

SEQ ID NO: 2920029 - RNA, 19 nt, Artificial Sequence
  Description of Artificial Sequence: Synthetic oligonucleotide
cuuuuagcugcuguagcga

SEQ ID NO: 2920030 - RNA, 19 nt, Artificial Sequence
  Description of Artificial Sequence: Synthetic oligonucleotide
ugugggucuccgauguguu

SEQ ID NO: 2920031 - RNA, 19 nt, Artificial Sequence
  Description of Artificial Sequence: Synthetic oligonucleotide
augugggucuccgaugugu

SEQ ID NO: 2920032 - RNA, 19 nt, Artificial Sequence
  Description of Artificial Sequence: Synthetic oligonucleotide
cacacacaugggauccggc

SEQ ID NO: 2920033 - RNA, 19 nt, Artificial Sequence
  Description of Artificial Sequence: Synthetic oligonucleotide
aggugaggccuuugggucu

SEQ ID NO: 2920034 - RNA, 19 nt, Artificial Sequence
  Description of Artificial Sequence: Synthetic oligonucleotide
guauccagggccagcaaga

SEQ ID NO: 2920035 - RNA, 19 nt, Artificial Sequence
  Description of Artificial Sequence: Synthetic oligonucleotide
gagcaccagcuuuuagcug

SEQ ID NO: 2920036 - RNA, 19 nt, Artificial Sequence
  Description of Artificial Sequence: Synthetic oligonucleotide
gcgguuguaaccagggugc

SEQ ID NO: 2920037 - RNA, 19 nt, Artificial Sequence
  Description of Artificial Sequence: Synthetic oligonucleotide
ucgaaggucuuuggaggug

SEQ ID NO: 2920038 - RNA, 19 nt, Artificial Sequence
  Description of Artificial Sequence: Synthetic oligonucleotide
gauccggcuuuucuguaaa

SEQ ID NO: 2920039 - RNA, 19 nt, Artificial Sequence
  Description of Artificial Sequence: Synthetic oligonucleotide
ugauggcugccuugaugug

SEQ ID NO: 2920040 - RNA, 19 nt, Artificial Sequence
  Description of Artificial Sequence: Synthetic oligonucleotide
uguggggcugccucucgac

SEQ ID NO: 2920041 - RNA, 19 nt, Artificial Sequence
  Description of Artificial Sequence: Synthetic oligonucleotide
aggacagguggccuuccga

SEQ ID NO: 2920042 - RNA, 19 nt, Artificial Sequence
  Description of Artificial Sequence: Synthetic oligonucleotide
agcugcuguagcgacucag

SEQ ID NO: 2920043 - RNA, 19 nt, Artificial Sequence
  Description of Artificial Sequence: Synthetic oligonucleotide
agcgccaggucauuuucaa

SEQ ID NO: 2920044 - RNA, 19 nt, Artificial Sequence
  Description of Artificial Sequence: Synthetic oligonucleotide
acugguggaccuccauccu

SEQ ID NO: 2920045 - RNA, 19 nt, Artificial Sequence
  Description of Artificial Sequence: Synthetic oligonucleotide
uugcgguuguaaccagggu

SEQ ID NO: 2920046 - RNA, 19 nt, Artificial Sequence
  Description of Artificial Sequence: Synthetic oligonucleotide
uggccuuccgagucccgcc

SEQ ID NO: 2920047 - RNA, 19 nt, Artificial Sequence
  Description of Artificial Sequence: Synthetic oligonucleotide
cagggugcuugauggcugc

SEQ ID NO: 2920048 - RNA, 19 nt, Artificial Sequence
  Description of Artificial Sequence: Synthetic oligonucleotide
ugggcgggaauguggggcu

SEQ ID NO: 2920049 - RNA, 19 nt, Artificial Sequence
  Description of Artificial Sequence: Synthetic oligonucleotide
guugccugcccacagugua

SEQ ID NO: 2920050 - RNA, 19 nt, Artificial Sequence
  Description of Artificial Sequence: Synthetic oligonucleotide
cugguggaccuccauccug

SEQ ID NO: 2920051 - RNA, 19 nt, Artificial Sequence
  Description of Artificial Sequence: Synthetic oligonucleotide
cggcuuuucuguaaagagg

SEQ ID NO: 2920052 - RNA, 19 nt, Artificial Sequence
  Description of Artificial Sequence: Synthetic oligonucleotide
accagggugcuugauggcu

SEQ ID NO: 2920053 - RNA, 19 nt, Artificial Sequence
  Description of Artificial Sequence: Synthetic oligonucleotide
uggugcaggccgagcacca

SEQ ID NO: 2920054 - RNA, 19 nt, Artificial Sequence
  Description of Artificial Sequence: Synthetic oligonucleotide
gauguguugccugcccaca

SEQ ID NO: 2920055 - RNA, 19 nt, Artificial Sequence
  Description of Artificial Sequence: Synthetic oligonucleotide
gucccgcccaucuagcaca

SEQ ID NO: 2920056 - RNA, 19 nt, Artificial Sequence
  Description of Artificial Sequence: Synthetic oligonucleotide
cuguaaagaggccauguau

SEQ ID NO: 2920057 - RNA, 19 nt, Artificial Sequence
  Description of Artificial Sequence: Synthetic oligonucleotide
auccggcuuuucuguaaag

SEQ ID NO: 2920058 - RNA, 19 nt, Artificial Sequence
  Description of Artificial Sequence: Synthetic oligonucleotide
gcccacaguguauccaggg

SEQ ID NO: 2920059 - RNA, 19 nt, Artificial Sequence
  Description of Artificial Sequence: Synthetic oligonucleotide
ccauguaugggcgggaaug

SEQ ID NO: 2920060 - RNA, 19 nt, Artificial Sequence
  Description of Artificial Sequence: Synthetic oligonucleotide
gaugugggucuccgaugug

SEQ ID NO: 2920061 - RNA, 19 nt, Artificial Sequence
  Description of Artificial Sequence: Synthetic oligonucleotide
agguggccuuccgaguccc

SEQ ID NO: 2920062 - RNA, 19 nt, Artificial Sequence
  Description of Artificial Sequence: Synthetic oligonucleotide
gggaauguggggcugccuc

SEQ ID NO: 2920063 - RNA, 19 nt, Artificial Sequence
  Description of Artificial Sequence: Synthetic oligonucleotide
ugcaagacuuaugguuccu

SEQ ID NO: 2920064 - RNA, 19 nt, Artificial Sequence
  Description of Artificial Sequence: Synthetic oligonucleotide
uuugggucucgaaggucuu

SEQ ID NO: 2920065 - RNA, 19 nt, Artificial Sequence
  Description of Artificial Sequence: Synthetic oligonucleotide
ggucauuuucaagguugcg

SEQ ID NO: 2920066 - RNA, 19 nt, Artificial Sequence
  Description of Artificial Sequence: Synthetic oligonucleotide
uugccugcccacaguguau

SEQ ID NO: 2920067 - RNA, 19 nt, Artificial Sequence
  Description of Artificial Sequence: Synthetic oligonucleotide
gcugcuguagcgacucagg

SEQ ID NO: 2920068 - RNA, 19 nt, Artificial Sequence
  Description of Artificial Sequence: Synthetic oligonucleotide
auggcugccuugaugugga

SEQ ID NO: 2920069 - RNA, 19 nt, Artificial Sequence
  Description of Artificial Sequence: Synthetic oligonucleotide
agguugcgguuguaaccag

SEQ ID NO: 2920070 - RNA, 19 nt, Artificial Sequence
  Description of Artificial Sequence: Synthetic oligonucleotide
ccgacuuucucuuccugug

SEQ ID NO: 2920071 - RNA, 19 nt, Artificial Sequence
  Description of Artificial Sequence: Synthetic oligonucleotide
gugcuugauggcugccuug

SEQ ID NO: 2920072 - RNA, 19 nt, Artificial Sequence
  Description of Artificial Sequence: Synthetic oligonucleotide
ccaaugaugugggucuccg

SEQ ID NO: 2920073 - RNA, 19 nt, Artificial Sequence
  Description of Artificial Sequence: Synthetic oligonucleotide
auguaugggcgggaaugug

SEQ ID NO: 2920074 - RNA, 19 nt, Artificial Sequence
  Description of Artificial Sequence: Synthetic oligonucleotide
cuguagcgacucaggcagg

SEQ ID NO: 2920075 - RNA, 19 nt, Artificial Sequence
  Description of Artificial Sequence: Synthetic oligonucleotide
gguugcgguuguaaccagg

SEQ ID NO: 2920076 - RNA, 19 nt, Artificial Sequence
  Description of Artificial Sequence: Synthetic oligonucleotide
acaguguauccagggccag

SEQ ID NO: 2920077 - RNA, 19 nt, Artificial Sequence
  Description of Artificial Sequence: Synthetic oligonucleotide
gaauguggggcugccucuc

SEQ ID NO: 2920078 - RNA, 19 nt, Artificial Sequence
  Description of Artificial Sequence: Synthetic oligonucleotide
cagguggccuuccgagucc

SEQ ID NO: 2920079 - RNA, 19 nt, Artificial Sequence
  Description of Artificial Sequence: Synthetic oligonucleotide
uuggaugcacgaggacccc

SEQ ID NO: 2920080 - RNA, 19 nt, Artificial Sequence
  Description of Artificial Sequence: Synthetic oligonucleotide
ggucuuuggagguggugca

SEQ ID NO: 2920081 - RNA, 19 nt, Artificial Sequence
  Description of Artificial Sequence: Synthetic oligonucleotide
guggggcugccucucgacc

SEQ ID NO: 2920082 - RNA, 19 nt, Artificial Sequence
  Description of Artificial Sequence: Synthetic oligonucleotide
gucuuuggagguggugcag

SEQ ID NO: 2920083 - RNA, 19 nt, Artificial Sequence
  Description of Artificial Sequence: Synthetic oligonucleotide
guggugcaggccgagcacc

SEQ ID NO: 2920084 - RNA, 19 nt, Artificial Sequence
  Description of Artificial Sequence: Synthetic oligonucleotide
gggucucgaaggucuuugg

SEQ ID NO: 2920085 - RNA, 19 nt, Artificial Sequence
  Description of Artificial Sequence: Synthetic oligonucleotide
uccccgacuuucucuuccu

SEQ ID NO: 2920086 - RNA, 19 nt, Artificial Sequence
  Description of Artificial Sequence: Synthetic oligonucleotide
gugggucuccgauguguug

SEQ ID NO: 2920087 - RNA, 19 nt, Artificial Sequence
  Description of Artificial Sequence: Synthetic oligonucleotide
agagcagcagggacuggug

SEQ ID NO: 2920088 - RNA, 19 nt, Artificial Sequence
  Description of Artificial Sequence: Synthetic oligonucleotide
agcagcgccaggucauuuu

SEQ ID NO: 2920089 - RNA, 19 nt, Artificial Sequence
  Description of Artificial Sequence: Synthetic oligonucleotide
cagggacugguggaccucc

SEQ ID NO: 2920090 - RNA, 19 nt, Artificial Sequence
  Description of Artificial Sequence: Synthetic oligonucleotide
gcagucaacacccacuuuu

SEQ ID NO: 2920091 - RNA, 19 nt, Artificial Sequence
  Description of Artificial Sequence: Synthetic oligonucleotide
uguaaccagggugcuugau

SEQ ID NO: 2920092 - RNA, 19 nt, Artificial Sequence
  Description of Artificial Sequence: Synthetic oligonucleotide
agggugcuugauggcugcc

SEQ ID NO: 2920093 - RNA, 19 nt, Artificial Sequence
  Description of Artificial Sequence: Synthetic oligonucleotide
ccagcuuuagcagcgccag

SEQ ID NO: 2920094 - RNA, 19 nt, Artificial Sequence
  Description of Artificial Sequence: Synthetic oligonucleotide
gagucccgcccaucuagca

SEQ ID NO: 2920095 - RNA, 19 nt, Artificial Sequence
  Description of Artificial Sequence: Synthetic oligonucleotide
ugaggacagguggccuucc

SEQ ID NO: 2920096 - RNA, 19 nt, Artificial Sequence
  Description of Artificial Sequence: Synthetic oligonucleotide
ccuugauguggaaggugag

SEQ ID NO: 2920097 - RNA, 19 nt, Artificial Sequence
  Description of Artificial Sequence: Synthetic oligonucleotide
guggaccuccauccuggug

SEQ ID NO: 2920098 - RNA, 19 nt, Artificial Sequence
  Description of Artificial Sequence: Synthetic oligonucleotide
ggucucgaaggucuuugga

SEQ ID NO: 2920099 - RNA, 19 nt, Artificial Sequence
  Description of Artificial Sequence: Synthetic oligonucleotide
auguggggcugccucucga

SEQ ID NO: 2920100 - RNA, 19 nt, Artificial Sequence
  Description of Artificial Sequence: Synthetic oligonucleotide
caguguauccagggccagc

SEQ ID NO: 2920101 - RNA, 19 nt, Artificial Sequence
  Description of Artificial Sequence: Synthetic oligonucleotide
cccacaguguauccagggc

SEQ ID NO: 2920102 - RNA, 19 nt, Artificial Sequence
  Description of Artificial Sequence: Synthetic oligonucleotide
ggacugguggaccuccauc

SEQ ID NO: 2920103 - RNA, 19 nt, Artificial Sequence
  Description of Artificial Sequence: Synthetic oligonucleotide
caugggauccggcuuuucu

SEQ ID NO: 2920104 - RNA, 19 nt, Artificial Sequence
  Description of Artificial Sequence: Synthetic oligonucleotide
ugccugcccacaguguauc

SEQ ID NO: 2920105 - RNA, 19 nt, Artificial Sequence
  Description of Artificial Sequence: Synthetic oligonucleotide
ggcagcagucaacacccac

SEQ ID NO: 2920106 - RNA, 19 nt, Artificial Sequence
  Description of Artificial Sequence: Synthetic oligonucleotide
auccuggugcaagacuuau

SEQ ID NO: 2920107 - RNA, 19 nt, Artificial Sequence
  Description of Artificial Sequence: Synthetic oligonucleotide
cccacuuuuggaugcacga

SEQ ID NO: 2920108 - RNA, 19 nt, Artificial Sequence
  Description of Artificial Sequence: Synthetic oligonucleotide
guggccuuccgagucccgc

SEQ ID NO: 2920109 - RNA, 19 nt, Artificial Sequence
  Description of Artificial Sequence: Synthetic oligonucleotide
gaggccuuugggucucgaa

SEQ ID NO: 2920110 - RNA, 19 nt, Artificial Sequence
  Description of Artificial Sequence: Synthetic oligonucleotide
caaugaugugggucuccga

SEQ ID NO: 2920111 - RNA, 19 nt, Artificial Sequence
  Description of Artificial Sequence: Synthetic oligonucleotide
gcuuuucuguaaagaggcc

SEQ ID NO: 2920112 - RNA, 19 nt, Artificial Sequence
  Description of Artificial Sequence: Synthetic oligonucleotide
ccgagucccgcccaucuag

SEQ ID NO: 2920113 - RNA, 19 nt, Artificial Sequence
  Description of Artificial Sequence: Synthetic oligonucleotide
gcaagacuuaugguuccug

SEQ ID NO: 2920114 - RNA, 19 nt, Artificial Sequence
  Description of Artificial Sequence: Synthetic oligonucleotide
gacagguggccuuccgagu

SEQ ID NO: 2920115 - RNA, 19 nt, Artificial Sequence
  Description of Artificial Sequence: Synthetic oligonucleotide
ccugugaggacagguggcc

SEQ ID NO: 2920116 - RNA, 19 nt, Artificial Sequence
  Description of Artificial Sequence: Synthetic oligonucleotide
gguggugcaggccgagcac

SEQ ID NO: 2920117 - RNA, 19 nt, Artificial Sequence
  Description of Artificial Sequence: Synthetic oligonucleotide
cgaaggucuuuggaggugg

SEQ ID NO: 2920118 - RNA, 19 nt, Artificial Sequence
  Description of Artificial Sequence: Synthetic oligonucleotide
agcgacucaggcaggcagu

SEQ ID NO: 2920119 - RNA, 19 nt, Artificial Sequence
  Description of Artificial Sequence: Synthetic oligonucleotide
uccgagucccgcccaucua

SEQ ID NO: 2920120 - RNA, 19 nt, Artificial Sequence
  Description of Artificial Sequence: Synthetic oligonucleotide
acaugggauccggcuuuuc

SEQ ID NO: 2920121 - RNA, 19 nt, Artificial Sequence
  Description of Artificial Sequence: Synthetic oligonucleotide
agcagucaacacccacuuu

SEQ ID NO: 2920122 - RNA, 19 nt, Artificial Sequence
  Description of Artificial Sequence: Synthetic oligonucleotide
cuccauccuggugcaagac

SEQ ID NO: 2920123 - RNA, 19 nt, Artificial Sequence
  Description of Artificial Sequence: Synthetic oligonucleotide
ccacuuuuggaugcacgag

SEQ ID NO: 2920124 - RNA, 19 nt, Artificial Sequence
  Description of Artificial Sequence: Synthetic oligonucleotide
uguggaaggugaggccuuu

SEQ ID NO: 2920125 - RNA, 19 nt, Artificial Sequence
  Description of Artificial Sequence: Synthetic oligonucleotide
ccagggugcuugauggcug

SEQ ID NO: 2920126 - RNA, 19 nt, Artificial Sequence
  Description of Artificial Sequence: Synthetic oligonucleotide
cuccgauguguugccugcc

SEQ ID NO: 2920127 - RNA, 19 nt, Artificial Sequence
  Description of Artificial Sequence: Synthetic oligonucleotide
gggucuccgauguguugcc

SEQ ID NO: 2920128 - RNA, 19 nt, Artificial Sequence
  Description of Artificial Sequence: Synthetic oligonucleotide
cucaggcaggcagugggca

SEQ ID NO: 2920129 - RNA, 19 nt, Artificial Sequence
  Description of Artificial Sequence: Synthetic oligonucleotide
gugaggacagguggccuuc

SEQ ID NO: 2920130 - RNA, 19 nt, Artificial Sequence
  Description of Artificial Sequence: Synthetic oligonucleotide
uuagcagcgccaggucauu

SEQ ID NO: 2920131 - RNA, 19 nt, Artificial Sequence
  Description of Artificial Sequence: Synthetic oligonucleotide
ccccacacacaugggaucc

SEQ ID NO: 2920132 - RNA, 19 nt, Artificial Sequence
  Description of Artificial Sequence: Synthetic oligonucleotide
ggauccggcuuuucuguaa

SEQ ID NO: 2920133 - RNA, 19 nt, Artificial Sequence
  Description of Artificial Sequence: Synthetic oligonucleotide
acacccacuuuuggaugca

SEQ ID NO: 2920134 - RNA, 19 nt, Artificial Sequence
  Description of Artificial Sequence: Synthetic oligonucleotide
ccacacacaugggauccgg

SEQ ID NO: 2920135 - RNA, 19 nt, Artificial Sequence
  Description of Artificial Sequence: Synthetic oligonucleotide
gcgccaggucauuuucaag

SEQ ID NO: 2920136 - RNA, 19 nt, Artificial Sequence
  Description of Artificial Sequence: Synthetic oligonucleotide
cauguaugggcgggaaugu

SEQ ID NO: 2920137 - RNA, 19 nt, Artificial Sequence
  Description of Artificial Sequence: Synthetic oligonucleotide
ugaggccuuugggucucga

SEQ ID NO: 2920138 - RNA, 19 nt, Artificial Sequence
  Description of Artificial Sequence: Synthetic oligonucleotide
uuucaagguugcgguugua

SEQ ID NO: 2920139 - RNA, 19 nt, Artificial Sequence
  Description of Artificial Sequence: Synthetic oligonucleotide
cauccuggugcaagacuua

SEQ ID NO: 2920140 - RNA, 19 nt, Artificial Sequence
  Description of Artificial Sequence: Synthetic oligonucleotide
cagcgccaggucauuuuca

SEQ ID NO: 2920141 - RNA, 19 nt, Artificial Sequence
  Description of Artificial Sequence: Synthetic oligonucleotide
uugggucucgaaggucuuu

SEQ ID NO: 2920142 - RNA, 19 nt, Artificial Sequence
  Description of Artificial Sequence: Synthetic oligonucleotide
cuggugcaagacuuauggu

SEQ ID NO: 2920143 - RNA, 19 nt, Artificial Sequence
  Description of Artificial Sequence: Synthetic oligonucleotide
ggggcugccucucgacccc

SEQ ID NO: 2920144 - RNA, 19 nt, Artificial Sequence
  Description of Artificial Sequence: Synthetic oligonucleotide
guagcgacucaggcaggca

SEQ ID NO: 2920145 - RNA, 19 nt, Artificial Sequence
  Description of Artificial Sequence: Synthetic oligonucleotide
ccagcuuuuagcugcugua

SEQ ID NO: 2920146 - RNA, 19 nt, Artificial Sequence
  Description of Artificial Sequence: Synthetic oligonucleotide
cacccacuuuuggaugcac

SEQ ID NO: 2920147 - RNA, 19 nt, Artificial Sequence
  Description of Artificial Sequence: Synthetic oligonucleotide
gcagcagggacugguggac

SEQ ID NO: 2920148 - RNA, 19 nt, Artificial Sequence
  Description of Artificial Sequence: Synthetic oligonucleotide
ggaauguggggcugccucu

SEQ ID NO: 2920149 - RNA, 19 nt, Artificial Sequence
  Description of Artificial Sequence: Synthetic oligonucleotide
gccaggucauuuucaaggu

SEQ ID NO: 2920150 - RNA, 19 nt, Artificial Sequence
  Description of Artificial Sequence: Synthetic oligonucleotide
cgauguguugccugcccac

SEQ ID NO: 2920151 - RNA, 19 nt, Artificial Sequence
  Description of Artificial Sequence: Synthetic oligonucleotide
cauuuucaagguugcgguu

SEQ ID NO: 2920152 - RNA, 19 nt, Artificial Sequence
  Description of Artificial Sequence: Synthetic oligonucleotide
ggaccuccauccuggugca

SEQ ID NO: 2920153 - RNA, 19 nt, Artificial Sequence
  Description of Artificial Sequence: Synthetic oligonucleotide
cacacaugggauccggcuu

SEQ ID NO: 2920154 - RNA, 19 nt, Artificial Sequence
  Description of Artificial Sequence: Synthetic oligonucleotide
cuuaugguuccuggagggu

SEQ ID NO: 2920155 - RNA, 19 nt, Artificial Sequence
  Description of Artificial Sequence: Synthetic oligonucleotide
gccgagcaccagcuuuuag

SEQ ID NO: 2920156 - RNA, 19 nt, Artificial Sequence
  Description of Artificial Sequence: Synthetic oligonucleotide
gcagcagucaacacccacu

SEQ ID NO: 2920157 - RNA, 19 nt, Artificial Sequence
  Description of Artificial Sequence: Synthetic oligonucleotide
guguauccagggccagcaa

SEQ ID NO: 2920158 - RNA, 19 nt, Artificial Sequence
  Description of Artificial Sequence: Synthetic oligonucleotide
cagcagucaacacccacuu

SEQ ID NO: 2920159 - RNA, 19 nt, Artificial Sequence
  Description of Artificial Sequence: Synthetic oligonucleotide
aggccgagcaccagcuuuu

SEQ ID NO: 2920160 - RNA, 19 nt, Artificial Sequence
  Description of Artificial Sequence: Synthetic oligonucleotide
cuuccgagucccgcccauc

SEQ ID NO: 2920161 - RNA, 19 nt, Artificial Sequence
  Description of Artificial Sequence: Synthetic oligonucleotide
cccaaugaugugggucucc

SEQ ID NO: 2920162 - RNA, 19 nt, Artificial Sequence
  Description of Artificial Sequence: Synthetic oligonucleotide
gcgacucaggcaggcagug

SEQ ID NO: 2920163 - RNA, 19 nt, Artificial Sequence
  Description of Artificial Sequence: Synthetic oligonucleotide
ggagguggugcaggccgag

SEQ ID NO: 2920164 - RNA, 19 nt, Artificial Sequence
  Description of Artificial Sequence: Synthetic oligonucleotide
aggccauguaugggcggga

SEQ ID NO: 2920165 - RNA, 19 nt, Artificial Sequence
  Description of Artificial Sequence: Synthetic oligonucleotide
gaaggucuuuggagguggu

SEQ ID NO: 2920166 - RNA, 19 nt, Artificial Sequence
  Description of Artificial Sequence: Synthetic oligonucleotide
ggugaggccuuugggucuc

SEQ ID NO: 2920167 - RNA, 19 nt, Artificial Sequence
  Description of Artificial Sequence: Synthetic oligonucleotide
uagcagcgccaggucauuu

SEQ ID NO: 2920168 - RNA, 19 nt, Artificial Sequence
  Description of Artificial Sequence: Synthetic oligonucleotide
gccugcccacaguguaucc

SEQ ID NO: 2920169 - RNA, 19 nt, Artificial Sequence
  Description of Artificial Sequence: Synthetic oligonucleotide
ccauccuggugcaagacuu

SEQ ID NO: 2920170 - RNA, 19 nt, Artificial Sequence
  Description of Artificial Sequence: Synthetic oligonucleotide
ggcgggaauguggggcugc

SEQ ID NO: 2920171 - RNA, 19 nt, Artificial Sequence
  Description of Artificial Sequence: Synthetic oligonucleotide
gugaggccuuugggucucg

SEQ ID NO: 2920172 - RNA, 19 nt, Artificial Sequence
  Description of Artificial Sequence: Synthetic oligonucleotide
cgagucccgcccaucuagc

SEQ ID NO: 2920173 - RNA, 19 nt, Artificial Sequence
  Description of Artificial Sequence: Synthetic oligonucleotide
ccuccauccuggugcaaga

SEQ ID NO: 2920174 - RNA, 19 nt, Artificial Sequence
  Description of Artificial Sequence: Synthetic oligonucleotide
ggugcuugauggcugccuu

SEQ ID NO: 2920175 - RNA, 19 nt, Artificial Sequence
  Description of Artificial Sequence: Synthetic oligonucleotide
ccuuugggucucgaagguc

SEQ ID NO: 2920176 - RNA, 19 nt, Artificial Sequence
  Description of Artificial Sequence: Synthetic oligonucleotide
caggccgagcaccagcuuu

SEQ ID NO: 2920177 - RNA, 19 nt, Artificial Sequence
  Description of Artificial Sequence: Synthetic oligonucleotide
cccacacacaugggauccg

SEQ ID NO: 2920178 - RNA, 19 nt, Artificial Sequence
  Description of Artificial Sequence: Synthetic oligonucleotide
ccagcaagagcagcaggga

SEQ ID NO: 2920179 - RNA, 19 nt, Artificial Sequence
  Description of Artificial Sequence: Synthetic oligonucleotide
gccuuugggucucgaaggu

SEQ ID NO: 2920180 - RNA, 19 nt, Artificial Sequence
  Description of Artificial Sequence: Synthetic oligonucleotide
agggacugguggaccucca

SEQ ID NO: 2920181 - RNA, 19 nt, Artificial Sequence
  Description of Artificial Sequence: Synthetic oligonucleotide
caccagcuuuuagcugcug

SEQ ID NO: 2920182 - RNA, 19 nt, Artificial Sequence
  Description of Artificial Sequence: Synthetic oligonucleotide
ccgauguguugccugccca

SEQ ID NO: 2920183 - RNA, 19 nt, Artificial Sequence
  Description of Artificial Sequence: Synthetic oligonucleotide
gguggccuuccgagucccg

SEQ ID NO: 2920184 - RNA, 19 nt, Artificial Sequence
  Description of Artificial Sequence: Synthetic oligonucleotide
gggauccggcuuuucugua

SEQ ID NO: 2920185 - RNA, 19 nt, Artificial Sequence
  Description of Artificial Sequence: Synthetic oligonucleotide
cccgacuuucucuuccugu

SEQ ID NO: 2920186 - RNA, 19 nt, Artificial Sequence
  Description of Artificial Sequence: Synthetic oligonucleotide
cugugaggacagguggccu

SEQ ID NO: 2920187 - RNA, 19 nt, Artificial Sequence
  Description of Artificial Sequence: Synthetic oligonucleotide
gcgggaauguggggcugcc

SEQ ID NO: 2920188 - RNA, 19 nt, Artificial Sequence
  Description of Artificial Sequence: Synthetic oligonucleotide
cgacuuucucuuccuguga

SEQ ID NO: 2920189 - RNA, 19 nt, Artificial Sequence
  Description of Artificial Sequence: Synthetic oligonucleotide
ccccgacuuucucuuccug

SEQ ID NO: 2920190 - RNA, 19 nt, Artificial Sequence
  Description of Artificial Sequence: Synthetic oligonucleotide
ggccuccccgacuuucucu

SEQ ID NO: 2920191 - RNA, 19 nt, Artificial Sequence
  Description of Artificial Sequence: Synthetic oligonucleotide
ggccauguaugggcgggaa

SEQ ID NO: 2920192 - RNA, 19 nt, Artificial Sequence
  Description of Artificial Sequence: Synthetic oligonucleotide
gcagggacugguggaccuc

SEQ ID NO: 2920193 - RNA, 19 nt, Artificial Sequence
  Description of Artificial Sequence: Synthetic oligonucleotide
gggugcuugauggcugccu

SEQ ID NO: 2920194 - RNA, 19 nt, Artificial Sequence
  Description of Artificial Sequence: Synthetic oligonucleotide
gccuuccgagucccgccca

SEQ ID NO: 2920195 - RNA, 19 nt, Artificial Sequence
  Description of Artificial Sequence: Synthetic oligonucleotide
ccuccccgacuuucucuuc

SEQ ID NO: 2920196 - RNA, 19 nt, Artificial Sequence
  Description of Artificial Sequence: Synthetic oligonucleotide
gguggaccuccauccuggu

SEQ ID NO: 2920197 - RNA, 19 nt, Artificial Sequence
  Description of Artificial Sequence: Synthetic oligonucleotide
gccuccccgacuuucucuu

SEQ ID NO: 2920198 - RNA, 19 nt, Artificial Sequence
  Description of Artificial Sequence: Synthetic oligonucleotide
gggcgggaauguggggcug

SEQ ID NO: 2920199 - RNA, 19 nt, Artificial Sequence
  Description of Artificial Sequence: Synthetic oligonucleotide
gccauguaugggcgggaau

SEQ ID NO: 2920200 - RNA, 19 nt, Artificial Sequence
  Description of Artificial Sequence: Synthetic oligonucleotide
gaccuccauccuggugcaa

SEQ ID NO: 2920201 - RNA, 19 nt, Artificial Sequence
  Description of Artificial Sequence: Synthetic oligonucleotide
gggacugguggaccuccau

SEQ ID NO: 2920202 - RNA, 19 nt, Artificial Sequence
  Description of Artificial Sequence: Synthetic oligonucleotide
gguuguaaccagggugcuu

SEQ ID NO: 2920203 - RNA, 19 nt, Artificial Sequence
  Description of Artificial Sequence: Synthetic oligonucleotide
ccccaaugaugugggucuc

SEQ ID NO: 2920204 - RNA, 19 nt, Artificial Sequence
  Description of Artificial Sequence: Synthetic oligonucleotide
ccaggucauuuucaagguu

SEQ ID NO: 2920205 - RNA, 19 nt, Artificial Sequence
  Description of Artificial Sequence: Synthetic oligonucleotide
ggucuccgauguguugccu

SEQ ID NO: 2920206 - RNA, 19 nt, Artificial Sequence
  Description of Artificial Sequence: Synthetic oligonucleotide
gcaccagcuuuuagcugcu

SEQ ID NO: 2920207 - RNA, 19 nt, Artificial Sequence
  Description of Artificial Sequence: Synthetic oligonucleotide
gggcagcagucaacaccca

SEQ ID NO: 2920208 - RNA, 19 nt, Artificial Sequence
  Description of Artificial Sequence: Synthetic oligonucleotide
cacaugggauccggcuuuu

SEQ ID NO: 2920209 - RNA, 19 nt, Artificial Sequence
  Description of Artificial Sequence: Synthetic oligonucleotide
ggggccuccccgacuuucu

SEQ ID NO: 2920210 - RNA, 19 nt, Artificial Sequence
  Description of Artificial Sequence: Synthetic oligonucleotide
ggccgagcaccagcuuuua

SEQ ID NO: 2920211 - RNA, 19 nt, Artificial Sequence
  Description of Artificial Sequence: Synthetic oligonucleotide
cccgcccaucuagcacaag

SEQ ID NO: 2920212 - RNA, 19 nt, Artificial Sequence
  Description of Artificial Sequence: Synthetic oligonucleotide
gcaggccgagcaccagcuu

SEQ ID NO: 2920213 - RNA, 19 nt, Artificial Sequence
  Description of Artificial Sequence: Synthetic oligonucleotide
ccuuccgagucccgcccau

SEQ ID NO: 2920214 - RNA, 19 nt, Artificial Sequence
  Description of Artificial Sequence: Synthetic oligonucleotide
cgguuguaaccagggugcu

SEQ ID NO: 2920215 - RNA, 19 nt, Artificial Sequence
  Description of Artificial Sequence: Synthetic oligonucleotide
cgggaauguggggcugccu

SEQ ID NO: 2920216 - RNA, 19 nt, Artificial Sequence
  Description of Artificial Sequence: Synthetic oligonucleotide
uuagaaucucuaaacaccg

SEQ ID NO: 2920217 - RNA, 19 nt, Artificial Sequence
  Description of Artificial Sequence: Synthetic oligonucleotide
cuuagaaucucuaaacacc

SEQ ID NO: 2920218 - RNA, 19 nt, Artificial Sequence
  Description of Artificial Sequence: Synthetic oligonucleotide
acaucaucaggucuacucc

SEQ ID NO: 2920219 - RNA, 19 nt, Artificial Sequence
  Description of Artificial Sequence: Synthetic oligonucleotide
acugaugagugguagaaag

SEQ ID NO: 2920220 - RNA, 19 nt, Artificial Sequence
  Description of Artificial Sequence: Synthetic oligonucleotide
accuuguacacguacaccg

SEQ ID NO: 2920221 - RNA, 19 nt, Artificial Sequence
  Description of Artificial Sequence: Synthetic oligonucleotide
ugguagaaagacaucauca

SEQ ID NO: 2920222 - RNA, 19 nt, Artificial Sequence
  Description of Artificial Sequence: Synthetic oligonucleotide
ucuuagaaucucuaaacac

SEQ ID NO: 2920223 - RNA, 19 nt, Artificial Sequence
  Description of Artificial Sequence: Synthetic oligonucleotide
aaugcgccaggcgagaagc

SEQ ID NO: 2920224 - RNA, 19 nt, Artificial Sequence
  Description of Artificial Sequence: Synthetic oligonucleotide
uuggugacggcuuuggugc

SEQ ID NO: 2920225 - RNA, 19 nt, Artificial Sequence
  Description of Artificial Sequence: Synthetic oligonucleotide
ucgaagaugucguugacga

SEQ ID NO: 2920226 - RNA, 19 nt, Artificial Sequence
  Description of Artificial Sequence: Synthetic oligonucleotide
guagaaagacaucaucagg

SEQ ID NO: 2920227 - RNA, 19 nt, Artificial Sequence
  Description of Artificial Sequence: Synthetic oligonucleotide
uugacgaacgaguucauga

SEQ ID NO: 2920228 - RNA, 19 nt, Artificial Sequence
  Description of Artificial Sequence: Synthetic oligonucleotide
caucuuagaaucucuaaac

SEQ ID NO: 2920229 - RNA, 19 nt, Artificial Sequence
  Description of Artificial Sequence: Synthetic oligonucleotide
uuggucacggccuucuugg

SEQ ID NO: 2920230 - RNA, 19 nt, Artificial Sequence
  Description of Artificial Sequence: Synthetic oligonucleotide
auggccuuggaggagaugc

SEQ ID NO: 2920231 - RNA, 19 nt, Artificial Sequence
  Description of Artificial Sequence: Synthetic oligonucleotide
agaaagacaucaucagguc

SEQ ID NO: 2920232 - RNA, 19 nt, Artificial Sequence
  Description of Artificial Sequence: Synthetic oligonucleotide
uguuguaaugcgccaggcg

SEQ ID NO: 2920233 - RNA, 19 nt, Artificial Sequence
  Description of Artificial Sequence: Synthetic oligonucleotide
acgaacgaguucaugaugc

SEQ ID NO: 2920234 - RNA, 19 nt, Artificial Sequence
  Description of Artificial Sequence: Synthetic oligonucleotide
uuucacuuggagcuggugu

SEQ ID NO: 2920235 - RNA, 19 nt, Artificial Sequence
  Description of Artificial Sequence: Synthetic oligonucleotide
uacacguacaccgaguagc

SEQ ID NO: 2920236 - RNA, 19 nt, Artificial Sequence
  Description of Artificial Sequence: Synthetic oligonucleotide
agaaucucuaaacaccgga

SEQ ID NO: 2920237 - RNA, 19 nt, Artificial Sequence
  Description of Artificial Sequence: Synthetic oligonucleotide
gacaucaucaggucuacuc

SEQ ID NO: 2920238 - RNA, 19 nt, Artificial Sequence
  Description of Artificial Sequence: Synthetic oligonucleotide
ucaggucuacuccucgugg

SEQ ID NO: 2920239 - RNA, 19 nt, Artificial Sequence
  Description of Artificial Sequence: Synthetic oligonucleotide
aucuuagaaucucuaaaca

SEQ ID NO: 2920240 - RNA, 19 nt, Artificial Sequence
  Description of Artificial Sequence: Synthetic oligonucleotide
ugaugagugguagaaagac

SEQ ID NO: 2920241 - RNA, 19 nt, Artificial Sequence
  Description of Artificial Sequence: Synthetic oligonucleotide
uucuuggagcccuucuucg

SEQ ID NO: 2920242 - RNA, 19 nt, Artificial Sequence
  Description of Artificial Sequence: Synthetic oligonucleotide
uucagcaccuuguacacgu

SEQ ID NO: 2920243 - RNA, 19 nt, Artificial Sequence
  Description of Artificial Sequence: Synthetic oligonucleotide
aagaugucguugacgaacg

SEQ ID NO: 2920244 - RNA, 19 nt, Artificial Sequence
  Description of Artificial Sequence: Synthetic oligonucleotide
guuguaaugcgccaggcga

SEQ ID NO: 2920245 - RNA, 19 nt, Artificial Sequence
  Description of Artificial Sequence: Synthetic oligonucleotide
gguagaaagacaucaucag

SEQ ID NO: 2920246 - RNA, 19 nt, Artificial Sequence
  Description of Artificial Sequence: Synthetic oligonucleotide
guucaugaugcccauggcc

SEQ ID NO: 2920247 - RNA, 19 nt, Artificial Sequence
  Description of Artificial Sequence: Synthetic oligonucleotide
ucaucaggucuacuccucg

SEQ ID NO: 2920248 - RNA, 19 nt, Artificial Sequence
  Description of Artificial Sequence: Synthetic oligonucleotide
ucguugacgaacgaguuca

SEQ ID NO: 2920249 - RNA, 19 nt, Artificial Sequence
  Description of Artificial Sequence: Synthetic oligonucleotide
uagaaucucuaaacaccgg

SEQ ID NO: 2920250 - RNA, 19 nt, Artificial Sequence
  Description of Artificial Sequence: Synthetic oligonucleotide
aacgaguucaugaugccca

SEQ ID NO: 2920251 - RNA, 19 nt, Artificial Sequence
  Description of Artificial Sequence: Synthetic oligonucleotide
gaugcgcucgaagaugucg

SEQ ID NO: 2920252 - RNA, 19 nt, Artificial Sequence
  Description of Artificial Sequence: Synthetic oligonucleotide
cuuguuguaaugcgccagg

SEQ ID NO: 2920253 - RNA, 19 nt, Artificial Sequence
  Description of Artificial Sequence: Synthetic oligonucleotide
aguucaugaugcccauggc

SEQ ID NO: 2920254 - RNA, 19 nt, Artificial Sequence
  Description of Artificial Sequence: Synthetic oligonucleotide
cuuggugacggcuuuggug

SEQ ID NO: 2920255 - RNA, 19 nt, Artificial Sequence
  Description of Artificial Sequence: Synthetic oligonucleotide
aaagacaucaucaggucua

SEQ ID NO: 2920256 - RNA, 19 nt, Artificial Sequence
  Description of Artificial Sequence: Synthetic oligonucleotide
acguacaccgaguagcucu

SEQ ID NO: 2920257 - RNA, 19 nt, Artificial Sequence
  Description of Artificial Sequence: Synthetic oligonucleotide
aagacaucaucaggucuac

SEQ ID NO: 2920258 - RNA, 19 nt, Artificial Sequence
  Description of Artificial Sequence: Synthetic oligonucleotide
gaugucguugacgaacgag

SEQ ID NO: 2920259 - RNA, 19 nt, Artificial Sequence
  Description of Artificial Sequence: Synthetic oligonucleotide
gagugguagaaagacauca

SEQ ID NO: 2920260 - RNA, 19 nt, Artificial Sequence
  Description of Artificial Sequence: Synthetic oligonucleotide
ucuuggagcccuucuucgg

SEQ ID NO: 2920261 - RNA, 19 nt, Artificial Sequence
  Description of Artificial Sequence: Synthetic oligonucleotide
uguacacguacaccgagua

SEQ ID NO: 2920262 - RNA, 19 nt, Artificial Sequence
  Description of Artificial Sequence: Synthetic oligonucleotide
ucggacaccgcaugcuugg

SEQ ID NO: 2920263 - RNA, 19 nt, Artificial Sequence
  Description of Artificial Sequence: Synthetic oligonucleotide
agcugguguacuuggugac

SEQ ID NO: 2920264 - RNA, 19 nt, Artificial Sequence
  Description of Artificial Sequence: Synthetic oligonucleotide
gagcgcuuguuguaaugcg

SEQ ID NO: 2920265 - RNA, 19 nt, Artificial Sequence
  Description of Artificial Sequence: Synthetic oligonucleotide
ugaaccugcuucagcaccu

SEQ ID NO: 2920266 - RNA, 19 nt, Artificial Sequence
  Description of Artificial Sequence: Synthetic oligonucleotide
ucccgggacgugauggucg

SEQ ID NO: 2920267 - RNA, 19 nt, Artificial Sequence
  Description of Artificial Sequence: Synthetic oligonucleotide
cuuguacacguacaccgag

SEQ ID NO: 2920268 - RNA, 19 nt, Artificial Sequence
  Description of Artificial Sequence: Synthetic oligonucleotide
accgaguagcucuccuugc

SEQ ID NO: 2920269 - RNA, 19 nt, Artificial Sequence
  Description of Artificial Sequence: Synthetic oligonucleotide
cuuggagcccuucuucggg

SEQ ID NO: 2920270 - RNA, 19 nt, Artificial Sequence
  Description of Artificial Sequence: Synthetic oligonucleotide
augagugguagaaagacau

SEQ ID NO: 2920271 - RNA, 19 nt, Artificial Sequence
  Description of Artificial Sequence: Synthetic oligonucleotide
gacgaacgaguucaugaug

SEQ ID NO: 2920272 - RNA, 19 nt, Artificial Sequence
  Description of Artificial Sequence: Synthetic oligonucleotide
uucacuuggagcuggugua

SEQ ID NO: 2920273 - RNA, 19 nt, Artificial Sequence
  Description of Artificial Sequence: Synthetic oligonucleotide
gaggagaugccgguguccg

SEQ ID NO: 2920274 - RNA, 19 nt, Artificial Sequence
  Description of Artificial Sequence: Synthetic oligonucleotide
gucacggccuucuuggagc

SEQ ID NO: 2920275 - RNA, 19 nt, Artificial Sequence
  Description of Artificial Sequence: Synthetic oligonucleotide
guccuuuucacuuggagcu

SEQ ID NO: 2920276 - RNA, 19 nt, Artificial Sequence
  Description of Artificial Sequence: Synthetic oligonucleotide
gucuggaucucccgggacg

SEQ ID NO: 2920277 - RNA, 19 nt, Artificial Sequence
  Description of Artificial Sequence: Synthetic oligonucleotide
uugccguccuucuucuggg

SEQ ID NO: 2920278 - RNA, 19 nt, Artificial Sequence
  Description of Artificial Sequence: Synthetic oligonucleotide
agcgcuuguuguaaugcgc

SEQ ID NO: 2920279 - RNA, 19 nt, Artificial Sequence
  Description of Artificial Sequence: Synthetic oligonucleotide
uuggaggagaugccggugu

SEQ ID NO: 2920280 - RNA, 19 nt, Artificial Sequence
  Description of Artificial Sequence: Synthetic oligonucleotide
uuggagcccuucuucgggg

SEQ ID NO: 2920281 - RNA, 19 nt, Artificial Sequence
  Description of Artificial Sequence: Synthetic oligonucleotide
uaaugcgccaggcgagaag

SEQ ID NO: 2920282 - RNA, 19 nt, Artificial Sequence
  Description of Artificial Sequence: Synthetic oligonucleotide
gugaaccugcuucagcacc

SEQ ID NO: 2920283 - RNA, 19 nt, Artificial Sequence
  Description of Artificial Sequence: Synthetic oligonucleotide
acguccuuuucacuuggag

SEQ ID NO: 2920284 - RNA, 19 nt, Artificial Sequence
  Description of Artificial Sequence: Synthetic oligonucleotide
uacuuggugacggcuuugg

SEQ ID NO: 2920285 - RNA, 19 nt, Artificial Sequence
  Description of Artificial Sequence: Synthetic oligonucleotide
ugacgaacgaguucaugau

SEQ ID NO: 2920286 - RNA, 19 nt, Artificial Sequence
  Description of Artificial Sequence: Synthetic oligonucleotide
uuguacacguacaccgagu

SEQ ID NO: 2920287 - RNA, 19 nt, Artificial Sequence
  Description of Artificial Sequence: Synthetic oligonucleotide
gaacgaguucaugaugccc

SEQ ID NO: 2920288 - RNA, 19 nt, Artificial Sequence
  Description of Artificial Sequence: Synthetic oligonucleotide
uccagcacugaugaguggu

SEQ ID NO: 2920289 - RNA, 19 nt, Artificial Sequence
  Description of Artificial Sequence: Synthetic oligonucleotide
gugguagaaagacaucauc

SEQ ID NO: 2920290 - RNA, 19 nt, Artificial Sequence
  Description of Artificial Sequence: Synthetic oligonucleotide
gauggucgagcgcuuguug

SEQ ID NO: 2920291 - RNA, 19 nt, Artificial Sequence
  Description of Artificial Sequence: Synthetic oligonucleotide
gaagccucgcccgcgaugc

SEQ ID NO: 2920292 - RNA, 19 nt, Artificial Sequence
  Description of Artificial Sequence: Synthetic oligonucleotide
aucaggucuacuccucgug

SEQ ID NO: 2920293 - RNA, 19 nt, Artificial Sequence
  Description of Artificial Sequence: Synthetic oligonucleotide
cucgaagaugucguugacg

SEQ ID NO: 2920294 - RNA, 19 nt, Artificial Sequence
  Description of Artificial Sequence: Synthetic oligonucleotide
gacaccgcaugcuuggcca

SEQ ID NO: 2920295 - RNA, 19 nt, Artificial Sequence
  Description of Artificial Sequence: Synthetic oligonucleotide
gaaagacaucaucaggucu

SEQ ID NO: 2920296 - RNA, 19 nt, Artificial Sequence
  Description of Artificial Sequence: Synthetic oligonucleotide
cuucuugccguccuucuuc

SEQ ID NO: 2920297 - RNA, 19 nt, Artificial Sequence
  Description of Artificial Sequence: Synthetic oligonucleotide
caggucuacuccucguggg

SEQ ID NO: 2920298 - RNA, 19 nt, Artificial Sequence
  Description of Artificial Sequence: Synthetic oligonucleotide
gagcugguguacuugguga

SEQ ID NO: 2920299 - RNA, 19 nt, Artificial Sequence
  Description of Artificial Sequence: Synthetic oligonucleotide
ucgugggacguccuuuuca

SEQ ID NO: 2920300 - RNA, 19 nt, Artificial Sequence
  Description of Artificial Sequence: Synthetic oligonucleotide
cugguguacuuggugacgg

SEQ ID NO: 2920301 - RNA, 19 nt, Artificial Sequence
  Description of Artificial Sequence: Synthetic oligonucleotide
ugggccuuggucacggccu

SEQ ID NO: 2920302 - RNA, 19 nt, Artificial Sequence
  Description of Artificial Sequence: Synthetic oligonucleotide
gucuacuccucgugggacg

SEQ ID NO: 2920303 - RNA, 19 nt, Artificial Sequence
  Description of Artificial Sequence: Synthetic oligonucleotide
ugggacguccuuuucacuu

SEQ ID NO: 2920304 - RNA, 19 nt, Artificial Sequence
  Description of Artificial Sequence: Synthetic oligonucleotide
uggcucaggcaucuuagaa

SEQ ID NO: 2920305 - RNA, 19 nt, Artificial Sequence
  Description of Artificial Sequence: Synthetic oligonucleotide
augucguugacgaacgagu

SEQ ID NO: 2920306 - RNA, 19 nt, Artificial Sequence
  Description of Artificial Sequence: Synthetic oligonucleotide
ugagugguagaaagacauc

SEQ ID NO: 2920307 - RNA, 19 nt, Artificial Sequence
  Description of Artificial Sequence: Synthetic oligonucleotide
ucaggcaucuuagaaucuc

SEQ ID NO: 2920308 - RNA, 19 nt, Artificial Sequence
  Description of Artificial Sequence: Synthetic oligonucleotide
uguacuuggugacggcuuu

SEQ ID NO: 2920309 - RNA, 19 nt, Artificial Sequence
  Description of Artificial Sequence: Synthetic oligonucleotide
cuuuggugcccucggacac

SEQ ID NO: 2920310 - RNA, 19 nt, Artificial Sequence
  Description of Artificial Sequence: Synthetic oligonucleotide
auggucgagcgcuuguugu

SEQ ID NO: 2920311 - RNA, 19 nt, Artificial Sequence
  Description of Artificial Sequence: Synthetic oligonucleotide
aggcgagaagccucgcccg

SEQ ID NO: 2920312 - RNA, 19 nt, Artificial Sequence
  Description of Artificial Sequence: Synthetic oligonucleotide
gaugagugguagaaagaca

SEQ ID NO: 2920313 - RNA, 19 nt, Artificial Sequence
  Description of Artificial Sequence: Synthetic oligonucleotide
ugucguugacgaacgaguu

SEQ ID NO: 2920314 - RNA, 19 nt, Artificial Sequence
  Description of Artificial Sequence: Synthetic oligonucleotide
cuuggucacggccuucuug

SEQ ID NO: 2920315 - RNA, 19 nt, Artificial Sequence
  Description of Artificial Sequence: Synthetic oligonucleotide
acggcuuuggugcccucgg

SEQ ID NO: 2920316 - RNA, 19 nt, Artificial Sequence
  Description of Artificial Sequence: Synthetic oligonucleotide
uucugggccuuggucacgg

SEQ ID NO: 2920317 - RNA, 19 nt, Artificial Sequence
  Description of Artificial Sequence: Synthetic oligonucleotide
ugcccauggccuuggagga

SEQ ID NO: 2920318 - RNA, 19 nt, Artificial Sequence
  Description of Artificial Sequence: Synthetic oligonucleotide
uuguuguaaugcgccaggc

SEQ ID NO: 2920319 - RNA, 19 nt, Artificial Sequence
  Description of Artificial Sequence: Synthetic oligonucleotide
guacacguacaccgaguag

SEQ ID NO: 2920320 - RNA, 19 nt, Artificial Sequence
  Description of Artificial Sequence: Synthetic oligonucleotide
acagccgucuggaucuccc

SEQ ID NO: 2920321 - RNA, 19 nt, Artificial Sequence
  Description of Artificial Sequence: Synthetic oligonucleotide
aguagcucuccuugcggcu

SEQ ID NO: 2920322 - RNA, 19 nt, Artificial Sequence
  Description of Artificial Sequence: Synthetic oligonucleotide
uacaccgaguagcucuccu

SEQ ID NO: 2920323 - RNA, 19 nt, Artificial Sequence
  Description of Artificial Sequence: Synthetic oligonucleotide
agccgucuggaucucccgg

SEQ ID NO: 2920324 - RNA, 19 nt, Artificial Sequence
  Description of Artificial Sequence: Synthetic oligonucleotide
uccgggugaaccugcuuca

SEQ ID NO: 2920325 - RNA, 19 nt, Artificial Sequence
  Description of Artificial Sequence: Synthetic oligonucleotide
uguaaugcgccaggcgaga

SEQ ID NO: 2920326 - RNA, 19 nt, Artificial Sequence
  Description of Artificial Sequence: Synthetic oligonucleotide
ucgagcgcuuguuguaaug

SEQ ID NO: 2920327 - RNA, 19 nt, Artificial Sequence
  Description of Artificial Sequence: Synthetic oligonucleotide
caccgaguagcucuccuug

SEQ ID NO: 2920328 - RNA, 19 nt, Artificial Sequence
  Description of Artificial Sequence: Synthetic oligonucleotide
agcacugaugagugguaga

SEQ ID NO: 2920329 - RNA, 19 nt, Artificial Sequence
  Description of Artificial Sequence: Synthetic oligonucleotide
uuggugcccucggacaccg

SEQ ID NO: 2920330 - RNA, 19 nt, Artificial Sequence
  Description of Artificial Sequence: Synthetic oligonucleotide
cuugcggcugcgcuugcgc

SEQ ID NO: 2920331 - RNA, 19 nt, Artificial Sequence
  Description of Artificial Sequence: Synthetic oligonucleotide
uucuugccguccuucuucu

SEQ ID NO: 2920332 - RNA, 19 nt, Artificial Sequence
  Description of Artificial Sequence: Synthetic oligonucleotide
gcaucuuagaaucucuaaa

SEQ ID NO: 2920333 - RNA, 19 nt, Artificial Sequence
  Description of Artificial Sequence: Synthetic oligonucleotide
aucaucaggucuacuccuc

SEQ ID NO: 2920334 - RNA, 19 nt, Artificial Sequence
  Description of Artificial Sequence: Synthetic oligonucleotide
guccgggugaaccugcuuc

SEQ ID NO: 2920335 - RNA, 19 nt, Artificial Sequence
  Description of Artificial Sequence: Synthetic oligonucleotide
gggacgugauggucgagcg

SEQ ID NO: 2920336 - RNA, 19 nt, Artificial Sequence
  Description of Artificial Sequence: Synthetic oligonucleotide
ucuggaucucccgggacgu

SEQ ID NO: 2920337 - RNA, 19 nt, Artificial Sequence
  Description of Artificial Sequence: Synthetic oligonucleotide
uccccgggcagcagcaagc

SEQ ID NO: 2920338 - RNA, 19 nt, Artificial Sequence
  Description of Artificial Sequence: Synthetic oligonucleotide
gggugaaccugcuucagca

SEQ ID NO: 2920339 - RNA, 19 nt, Artificial Sequence
  Description of Artificial Sequence: Synthetic oligonucleotide
uacuccucgugggacgucc

SEQ ID NO: 2920340 - RNA, 19 nt, Artificial Sequence
  Description of Artificial Sequence: Synthetic oligonucleotide
gacggcuuuggugcccucg

SEQ ID NO: 2920341 - RNA, 19 nt, Artificial Sequence
  Description of Artificial Sequence: Synthetic oligonucleotide
ucacggccuucuuggagcc

SEQ ID NO: 2920342 - RNA, 19 nt, Artificial Sequence
  Description of Artificial Sequence: Synthetic oligonucleotide
gacgugauggucgagcgcu

SEQ ID NO: 2920343 - RNA, 19 nt, Artificial Sequence
  Description of Artificial Sequence: Synthetic oligonucleotide
ggagaugccgguguccggg

SEQ ID NO: 2920344 - RNA, 19 nt, Artificial Sequence
  Description of Artificial Sequence: Synthetic oligonucleotide
cagcagcaagcgcacagcc

SEQ ID NO: 2920345 - RNA, 19 nt, Artificial Sequence
  Description of Artificial Sequence: Synthetic oligonucleotide
uggccuuggaggagaugcc

SEQ ID NO: 2920346 - RNA, 19 nt, Artificial Sequence
  Description of Artificial Sequence: Synthetic oligonucleotide
agaagccucgcccgcgaug

SEQ ID NO: 2920347 - RNA, 19 nt, Artificial Sequence
  Description of Artificial Sequence: Synthetic oligonucleotide
aggucuacuccucguggga

SEQ ID NO: 2920348 - RNA, 19 nt, Artificial Sequence
  Description of Artificial Sequence: Synthetic oligonucleotide
ggagcugguguacuuggug

SEQ ID NO: 2920349 - RNA, 19 nt, Artificial Sequence
  Description of Artificial Sequence: Synthetic oligonucleotide
cguccuuuucacuuggagc

SEQ ID NO: 2920350 - RNA, 19 nt, Artificial Sequence
  Description of Artificial Sequence: Synthetic oligonucleotide
gaugccgguguccggguga

SEQ ID NO: 2920351 - RNA, 19 nt, Artificial Sequence
  Description of Artificial Sequence: Synthetic oligonucleotide
cuucuucggggcgggagcg

SEQ ID NO: 2920352 - RNA, 19 nt, Artificial Sequence
  Description of Artificial Sequence: Synthetic oligonucleotide
ucuacuccucgugggacgu

SEQ ID NO: 2920353 - RNA, 19 nt, Artificial Sequence
  Description of Artificial Sequence: Synthetic oligonucleotide
uuuggugcccucggacacc

SEQ ID NO: 2920354 - RNA, 19 nt, Artificial Sequence
  Description of Artificial Sequence: Synthetic oligonucleotide
caccuuguacacguacacc

SEQ ID NO: 2920355 - RNA, 19 nt, Artificial Sequence
  Description of Artificial Sequence: Synthetic oligonucleotide
agcagcaagcgcacagccg

SEQ ID NO: 2920356 - RNA, 19 nt, Artificial Sequence
  Description of Artificial Sequence: Synthetic oligonucleotide
gucguugacgaacgaguuc

SEQ ID NO: 2920357 - RNA, 19 nt, Artificial Sequence
  Description of Artificial Sequence: Synthetic oligonucleotide
uccuuuucacuuggagcug

SEQ ID NO: 2920358 - RNA, 19 nt, Artificial Sequence
  Description of Artificial Sequence: Synthetic oligonucleotide
cugggccuuggucacggcc

SEQ ID NO: 2920359 - RNA, 19 nt, Artificial Sequence
  Description of Artificial Sequence: Synthetic oligonucleotide
uggaucucccgggacguga

SEQ ID NO: 2920360 - RNA, 19 nt, Artificial Sequence
  Description of Artificial Sequence: Synthetic oligonucleotide
ugguguacuuggugacggc

SEQ ID NO: 2920361 - RNA, 19 nt, Artificial Sequence
  Description of Artificial Sequence: Synthetic oligonucleotide
ucacuuggagcugguguac

SEQ ID NO: 2920362 - RNA, 19 nt, Artificial Sequence
  Description of Artificial Sequence: Synthetic oligonucleotide
agugguagaaagacaucau

SEQ ID NO: 2920363 - RNA, 19 nt, Artificial Sequence
  Description of Artificial Sequence: Synthetic oligonucleotide
ugcccucggacaccgcaug

SEQ ID NO: 2920364 - RNA, 19 nt, Artificial Sequence
  Description of Artificial Sequence: Synthetic oligonucleotide
ggacguccuuuucacuugg

SEQ ID NO: 2920365 - RNA, 19 nt, Artificial Sequence
  Description of Artificial Sequence: Synthetic oligonucleotide
agcaccuuguacacguaca

SEQ ID NO: 2920366 - RNA, 19 nt, Artificial Sequence
  Description of Artificial Sequence: Synthetic oligonucleotide
uuggcuggcucaggcaucu

SEQ ID NO: 2920367 - RNA, 19 nt, Artificial Sequence
  Description of Artificial Sequence: Synthetic oligonucleotide
uggagcccuucuucggggc

SEQ ID NO: 2920368 - RNA, 19 nt, Artificial Sequence
  Description of Artificial Sequence: Synthetic oligonucleotide
aggagaugccgguguccgg

SEQ ID NO: 2920369 - RNA, 19 nt, Artificial Sequence
  Description of Artificial Sequence: Synthetic oligonucleotide
uagcucuccuugcggcugc

SEQ ID NO: 2920370 - RNA, 19 nt, Artificial Sequence
  Description of Artificial Sequence: Synthetic oligonucleotide
uggagcugguguacuuggu

SEQ ID NO: 2920371 - RNA, 19 nt, Artificial Sequence
  Description of Artificial Sequence: Synthetic oligonucleotide
cagcaccuuguacacguac

SEQ ID NO: 2920372 - RNA, 19 nt, Artificial Sequence
  Description of Artificial Sequence: Synthetic oligonucleotide
gagcccuucuucggggcgg

SEQ ID NO: 2920373 - RNA, 19 nt, Artificial Sequence
  Description of Artificial Sequence: Synthetic oligonucleotide
acuuggugacggcuuuggu

SEQ ID NO: 2920374 - RNA, 19 nt, Artificial Sequence
  Description of Artificial Sequence: Synthetic oligonucleotide
ggacuuggcuggcucaggc

SEQ ID NO: 2920375 - RNA, 19 nt, Artificial Sequence
  Description of Artificial Sequence: Synthetic oligonucleotide
gcuuguuguaaugcgccag

SEQ ID NO: 2920376 - RNA, 19 nt, Artificial Sequence
  Description of Artificial Sequence: Synthetic oligonucleotide
augaugcccauggccuugg

SEQ ID NO: 2920377 - RNA, 19 nt, Artificial Sequence
  Description of Artificial Sequence: Synthetic oligonucleotide
uugcgcuucuugccguccu

SEQ ID NO: 2920378 - RNA, 19 nt, Artificial Sequence
  Description of Artificial Sequence: Synthetic oligonucleotide
caugaugcccauggccuug

SEQ ID NO: 2920379 - RNA, 19 nt, Artificial Sequence
  Description of Artificial Sequence: Synthetic oligonucleotide
guagcucuccuugcggcug

SEQ ID NO: 2920380 - RNA, 19 nt, Artificial Sequence
  Description of Artificial Sequence: Synthetic oligonucleotide
cagcacugaugagugguag

SEQ ID NO: 2920381 - RNA, 19 nt, Artificial Sequence
  Description of Artificial Sequence: Synthetic oligonucleotide
agccucgcccgcgaugcgc

SEQ ID NO: 2920382 - RNA, 19 nt, Artificial Sequence
  Description of Artificial Sequence: Synthetic oligonucleotide
uggucgagcgcuuguugua

SEQ ID NO: 2920383 - RNA, 19 nt, Artificial Sequence
  Description of Artificial Sequence: Synthetic oligonucleotide
ggucacggccuucuuggag

SEQ ID NO: 2920384 - RNA, 19 nt, Artificial Sequence
  Description of Artificial Sequence: Synthetic oligonucleotide
cuuggaggagaugccggug

SEQ ID NO: 2920385 - RNA, 19 nt, Artificial Sequence
  Description of Artificial Sequence: Synthetic oligonucleotide
caugcuuggccagcucccc

SEQ ID NO: 2920386 - RNA, 19 nt, Artificial Sequence
  Description of Artificial Sequence: Synthetic oligonucleotide
gcaccuuguacacguacac

SEQ ID NO: 2920387 - RNA, 19 nt, Artificial Sequence
  Description of Artificial Sequence: Synthetic oligonucleotide
acaccgcaugcuuggccag

SEQ ID NO: 2920388 - RNA, 19 nt, Artificial Sequence
  Description of Artificial Sequence: Synthetic oligonucleotide
acacguacaccgaguagcu

SEQ ID NO: 2920389 - RNA, 19 nt, Artificial Sequence
  Description of Artificial Sequence: Synthetic oligonucleotide
accugcuucagcaccuugu

SEQ ID NO: 2920390 - RNA, 19 nt, Artificial Sequence
  Description of Artificial Sequence: Synthetic oligonucleotide
acuuggagcugguguacuu

SEQ ID NO: 2920391 - RNA, 19 nt, Artificial Sequence
  Description of Artificial Sequence: Synthetic oligonucleotide
agcggacuuggcuggcuca

SEQ ID NO: 2920392 - RNA, 19 nt, Artificial Sequence
  Description of Artificial Sequence: Synthetic oligonucleotide
ggcaucuuagaaucucuaa

SEQ ID NO: 2920393 - RNA, 19 nt, Artificial Sequence
  Description of Artificial Sequence: Synthetic oligonucleotide
ucuccuugcggcugcgcuu

SEQ ID NO: 2920394 - RNA, 19 nt, Artificial Sequence
  Description of Artificial Sequence: Synthetic oligonucleotide
gcuggcucaggcaucuuag

SEQ ID NO: 2920395 - RNA, 19 nt, Artificial Sequence
  Description of Artificial Sequence: Synthetic oligonucleotide
caucaucaggucuacuccu

SEQ ID NO: 2920396 - RNA, 19 nt, Artificial Sequence
  Description of Artificial Sequence: Synthetic oligonucleotide
agaugucguugacgaacga

SEQ ID NO: 2920397 - RNA, 19 nt, Artificial Sequence
  Description of Artificial Sequence: Synthetic oligonucleotide
gggacguccuuuucacuug

SEQ ID NO: 2920398 - RNA, 19 nt, Artificial Sequence
  Description of Artificial Sequence: Synthetic oligonucleotide
uggugacggcuuuggugcc

SEQ ID NO: 2920399 - RNA, 19 nt, Artificial Sequence
  Description of Artificial Sequence: Synthetic oligonucleotide
ugcgccaggcgagaagccu

SEQ ID NO: 2920400 - RNA, 19 nt, Artificial Sequence
  Description of Artificial Sequence: Synthetic oligonucleotide
aagccucgcccgcgaugcg

SEQ ID NO: 2920401 - RNA, 19 nt, Artificial Sequence
  Description of Artificial Sequence: Synthetic oligonucleotide
gcgggagcggacuuggcug

SEQ ID NO: 2920402 - RNA, 19 nt, Artificial Sequence
  Description of Artificial Sequence: Synthetic oligonucleotide
acgaguucaugaugcccau

SEQ ID NO: 2920403 - RNA, 19 nt, Artificial Sequence
  Description of Artificial Sequence: Synthetic oligonucleotide
gccgucuggaucucccggg

SEQ ID NO: 2920404 - RNA, 19 nt, Artificial Sequence
  Description of Artificial Sequence: Synthetic oligonucleotide
cagccgucuggaucucccg

SEQ ID NO: 2920405 - RNA, 19 nt, Artificial Sequence
  Description of Artificial Sequence: Synthetic oligonucleotide
ucuucggggcgggagcgga

SEQ ID NO: 2920406 - RNA, 19 nt, Artificial Sequence
  Description of Artificial Sequence: Synthetic oligonucleotide
ggugaaccugcuucagcac

SEQ ID NO: 2920407 - RNA, 19 nt, Artificial Sequence
  Description of Artificial Sequence: Synthetic oligonucleotide
augcgcucgaagaugucgu

SEQ ID NO: 2920408 - RNA, 19 nt, Artificial Sequence
  Description of Artificial Sequence: Synthetic oligonucleotide
ccuuuucacuuggagcugg

SEQ ID NO: 2920409 - RNA, 19 nt, Artificial Sequence
  Description of Artificial Sequence: Synthetic oligonucleotide
gcugguguacuuggugacg

SEQ ID NO: 2920410 - RNA, 19 nt, Artificial Sequence
  Description of Artificial Sequence: Synthetic oligonucleotide
acaccgaguagcucuccuu

SEQ ID NO: 2920411 - RNA, 19 nt, Artificial Sequence
  Description of Artificial Sequence: Synthetic oligonucleotide
ccgaguagcucuccuugcg

SEQ ID NO: 2920412 - RNA, 19 nt, Artificial Sequence
  Description of Artificial Sequence: Synthetic oligonucleotide
ucuugccguccuucuucug

SEQ ID NO: 2920413 - RNA, 19 nt, Artificial Sequence
  Description of Artificial Sequence: Synthetic oligonucleotide
gaucucccgggacgugaug

SEQ ID NO: 2920414 - RNA, 19 nt, Artificial Sequence
  Description of Artificial Sequence: Synthetic oligonucleotide
ggcuuuggugcccucggac

SEQ ID NO: 2920415 - RNA, 19 nt, Artificial Sequence
  Description of Artificial Sequence: Synthetic oligonucleotide
acggccuucuuggagcccu

SEQ ID NO: 2920416 - RNA, 19 nt, Artificial Sequence
  Description of Artificial Sequence: Synthetic oligonucleotide
uucuucggggcgggagcgg

SEQ ID NO: 2920417 - RNA, 19 nt, Artificial Sequence
  Description of Artificial Sequence: Synthetic oligonucleotide
cuugcgcuucuugccgucc

SEQ ID NO: 2920418 - RNA, 19 nt, Artificial Sequence
  Description of Artificial Sequence: Synthetic oligonucleotide
cuccuugcggcugcgcuug

SEQ ID NO: 2920419 - RNA, 19 nt, Artificial Sequence
  Description of Artificial Sequence: Synthetic oligonucleotide
ggccuuggaggagaugccg

SEQ ID NO: 2920420 - RNA, 19 nt, Artificial Sequence
  Description of Artificial Sequence: Synthetic oligonucleotide
agaugccgguguccgggug

SEQ ID NO: 2920421 - RNA, 19 nt, Artificial Sequence
  Description of Artificial Sequence: Synthetic oligonucleotide
ugccguccuucuucugggc

SEQ ID NO: 2920422 - RNA, 19 nt, Artificial Sequence
  Description of Artificial Sequence: Synthetic oligonucleotide
gcgcuuguuguaaugcgcc

SEQ ID NO: 2920423 - RNA, 19 nt, Artificial Sequence
  Description of Artificial Sequence: Synthetic oligonucleotide
ugauggucgagcgcuuguu

SEQ ID NO: 2920424 - RNA, 19 nt, Artificial Sequence
  Description of Artificial Sequence: Synthetic oligonucleotide
gagcggacuuggcuggcuc

SEQ ID NO: 2920425 - RNA, 19 nt, Artificial Sequence
  Description of Artificial Sequence: Synthetic oligonucleotide
gcagcaagcgcacagccgu

SEQ ID NO: 2920426 - RNA, 19 nt, Artificial Sequence
  Description of Artificial Sequence: Synthetic oligonucleotide
ggacaccgcaugcuuggcc

SEQ ID NO: 2920427 - RNA, 19 nt, Artificial Sequence
  Description of Artificial Sequence: Synthetic oligonucleotide
uggucacggccuucuugga

SEQ ID NO: 2920428 - RNA, 19 nt, Artificial Sequence
  Description of Artificial Sequence: Synthetic oligonucleotide
ucagcaccuuguacacgua

SEQ ID NO: 2920429 - RNA, 19 nt, Artificial Sequence
  Description of Artificial Sequence: Synthetic oligonucleotide
agcaagcgcacagccgucu

SEQ ID NO: 2920430 - RNA, 19 nt, Artificial Sequence
  Description of Artificial Sequence: Synthetic oligonucleotide
cuuggccagcuccccgggc

SEQ ID NO: 2920431 - RNA, 19 nt, Artificial Sequence
  Description of Artificial Sequence: Synthetic oligonucleotide
ccuucuucggggcgggagc

SEQ ID NO: 2920432 - RNA, 19 nt, Artificial Sequence
  Description of Artificial Sequence: Synthetic oligonucleotide
augcgccaggcgagaagcc

SEQ ID NO: 2920433 - RNA, 19 nt, Artificial Sequence
  Description of Artificial Sequence: Synthetic oligonucleotide
guacuuggugacggcuuug

SEQ ID NO: 2920434 - RNA, 19 nt, Artificial Sequence
  Description of Artificial Sequence: Synthetic oligonucleotide
gccuuggaggagaugccgg

SEQ ID NO: 2920435 - RNA, 19 nt, Artificial Sequence
  Description of Artificial Sequence: Synthetic oligonucleotide
uucggggcgggagcggacu

SEQ ID NO: 2920436 - RNA, 19 nt, Artificial Sequence
  Description of Artificial Sequence: Synthetic oligonucleotide
gccgguguccgggugaacc

SEQ ID NO: 2920437 - RNA, 19 nt, Artificial Sequence
  Description of Artificial Sequence: Synthetic oligonucleotide
cuucugggccuuggucacg

SEQ ID NO: 2920438 - RNA, 19 nt, Artificial Sequence
  Description of Artificial Sequence: Synthetic oligonucleotide
cuggcucaggcaucuuaga

SEQ ID NO: 2920439 - RNA, 19 nt, Artificial Sequence
  Description of Artificial Sequence: Synthetic oligonucleotide
ugcgcucgaagaugucguu

SEQ ID NO: 2920440 - RNA, 19 nt, Artificial Sequence
  Description of Artificial Sequence: Synthetic oligonucleotide
caggcaucuuagaaucucu

SEQ ID NO: 2920441 - RNA, 19 nt, Artificial Sequence
  Description of Artificial Sequence: Synthetic oligonucleotide
ggacgugauggucgagcgc

SEQ ID NO: 2920442 - RNA, 19 nt, Artificial Sequence
  Description of Artificial Sequence: Synthetic oligonucleotide
cgugggacguccuuuucac

SEQ ID NO: 2920443 - RNA, 19 nt, Artificial Sequence
  Description of Artificial Sequence: Synthetic oligonucleotide
uguccgggugaaccugcuu

SEQ ID NO: 2920444 - RNA, 19 nt, Artificial Sequence
  Description of Artificial Sequence: Synthetic oligonucleotide
uccucgugggacguccuuu

SEQ ID NO: 2920445 - RNA, 19 nt, Artificial Sequence
  Description of Artificial Sequence: Synthetic oligonucleotide
ggaggagaugccggugucc

SEQ ID NO: 2920446 - RNA, 19 nt, Artificial Sequence
  Description of Artificial Sequence: Synthetic oligonucleotide
gccguccuucuucugggcc

SEQ ID NO: 2920447 - RNA, 19 nt, Artificial Sequence
  Description of Artificial Sequence: Synthetic oligonucleotide
ggucuacuccucgugggac

SEQ ID NO: 2920448 - RNA, 19 nt, Artificial Sequence
  Description of Artificial Sequence: Synthetic oligonucleotide
cucgcccgcgaugcgcucg

SEQ ID NO: 2920449 - RNA, 19 nt, Artificial Sequence
  Description of Artificial Sequence: Synthetic oligonucleotide
ugcgcuucuugccguccuu

SEQ ID NO: 2920450 - RNA, 19 nt, Artificial Sequence
  Description of Artificial Sequence: Synthetic oligonucleotide
gcacugaugagugguagaa

SEQ ID NO: 2920451 - RNA, 19 nt, Artificial Sequence
  Description of Artificial Sequence: Synthetic oligonucleotide
ccgggcagcagcaagcgca

SEQ ID NO: 2920452 - RNA, 19 nt, Artificial Sequence
  Description of Artificial Sequence: Synthetic oligonucleotide
cgaacgaguucaugaugcc

SEQ ID NO: 2920453 - RNA, 19 nt, Artificial Sequence
  Description of Artificial Sequence: Synthetic oligonucleotide
cgcaugcuuggccagcucc

SEQ ID NO: 2920454 - RNA, 19 nt, Artificial Sequence
  Description of Artificial Sequence: Synthetic oligonucleotide
ggcucaggcaucuuagaau

SEQ ID NO: 2920455 - RNA, 19 nt, Artificial Sequence
  Description of Artificial Sequence: Synthetic oligonucleotide
ucugggccuuggucacggc

SEQ ID NO: 2920456 - RNA, 19 nt, Artificial Sequence
  Description of Artificial Sequence: Synthetic oligonucleotide
accgcaugcuuggccagcu

SEQ ID NO: 2920457 - RNA, 19 nt, Artificial Sequence
  Description of Artificial Sequence: Synthetic oligonucleotide
agcccuucuucggggcggg

SEQ ID NO: 2920458 - RNA, 19 nt, Artificial Sequence
  Description of Artificial Sequence: Synthetic oligonucleotide
gcaugcuuggccagcuccc

SEQ ID NO: 2920459 - RNA, 19 nt, Artificial Sequence
  Description of Artificial Sequence: Synthetic oligonucleotide
ucgcccgcgaugcgcucga

SEQ ID NO: 2920460 - RNA, 19 nt, Artificial Sequence
  Description of Artificial Sequence: Synthetic oligonucleotide
cucgugggacguccuuuuc

SEQ ID NO: 2920461 - RNA, 19 nt, Artificial Sequence
  Description of Artificial Sequence: Synthetic oligonucleotide
ggcgagaagccucgcccgc

SEQ ID NO: 2920462 - RNA, 19 nt, Artificial Sequence
  Description of Artificial Sequence: Synthetic oligonucleotide
aggcaucuuagaaucucua

SEQ ID NO: 2920463 - RNA, 19 nt, Artificial Sequence
  Description of Artificial Sequence: Synthetic oligonucleotide
agacaucaucaggucuacu

SEQ ID NO: 2920464 - RNA, 19 nt, Artificial Sequence
  Description of Artificial Sequence: Synthetic oligonucleotide
cgagcgcuuguuguaaugc

SEQ ID NO: 2920465 - RNA, 19 nt, Artificial Sequence
  Description of Artificial Sequence: Synthetic oligonucleotide
guacaccgaguagcucucc

SEQ ID NO: 2920466 - RNA, 19 nt, Artificial Sequence
  Description of Artificial Sequence: Synthetic oligonucleotide
gguguccgggugaaccugc

SEQ ID NO: 2920467 - RNA, 19 nt, Artificial Sequence
  Description of Artificial Sequence: Synthetic oligonucleotide
cccgcgaugcgcucgaaga

SEQ ID NO: 2920468 - RNA, 19 nt, Artificial Sequence
  Description of Artificial Sequence: Synthetic oligonucleotide
cuucggggcgggagcggac

SEQ ID NO: 2920469 - RNA, 19 nt, Artificial Sequence
  Description of Artificial Sequence: Synthetic oligonucleotide
ccuuguacacguacaccga

SEQ ID NO: 2920470 - RNA, 19 nt, Artificial Sequence
  Description of Artificial Sequence: Synthetic oligonucleotide
caucaggucuacuccucgu

SEQ ID NO: 2920471 - RNA, 19 nt, Artificial Sequence
  Description of Artificial Sequence: Synthetic oligonucleotide
cagcaagcgcacagccguc

SEQ ID NO: 2920472 - RNA, 19 nt, Artificial Sequence
  Description of Artificial Sequence: Synthetic oligonucleotide
caccgcaugcuuggccagc

SEQ ID NO: 2920473 - RNA, 19 nt, Artificial Sequence
  Description of Artificial Sequence: Synthetic oligonucleotide
ccaggcgagaagccucgcc

SEQ ID NO: 2920474 - RNA, 19 nt, Artificial Sequence
  Description of Artificial Sequence: Synthetic oligonucleotide
gugauggucgagcgcuugu

SEQ ID NO: 2920475 - RNA, 19 nt, Artificial Sequence
  Description of Artificial Sequence: Synthetic oligonucleotide
gcucgaagaugucguugac

SEQ ID NO: 2920476 - RNA, 19 nt, Artificial Sequence
  Description of Artificial Sequence: Synthetic oligonucleotide
cacguacaccgaguagcuc

SEQ ID NO: 2920477 - RNA, 19 nt, Artificial Sequence
  Description of Artificial Sequence: Synthetic oligonucleotide
gacguccuuuucacuugga

SEQ ID NO: 2920478 - RNA, 19 nt, Artificial Sequence
  Description of Artificial Sequence: Synthetic oligonucleotide
gcaagcgcacagccgucug

SEQ ID NO: 2920479 - RNA, 19 nt, Artificial Sequence
  Description of Artificial Sequence: Synthetic oligonucleotide
cacagccgucuggaucucc

SEQ ID NO: 2920480 - RNA, 19 nt, Artificial Sequence
  Description of Artificial Sequence: Synthetic oligonucleotide
cacugaugagugguagaaa

SEQ ID NO: 2920481 - RNA, 19 nt, Artificial Sequence
  Description of Artificial Sequence: Synthetic oligonucleotide
agcucuccuugcggcugcg

SEQ ID NO: 2920482 - RNA, 19 nt, Artificial Sequence
  Description of Artificial Sequence: Synthetic oligonucleotide
cuuuucacuuggagcuggu

SEQ ID NO: 2920483 - RNA, 19 nt, Artificial Sequence
  Description of Artificial Sequence: Synthetic oligonucleotide
gcgcacagccgucuggauc

SEQ ID NO: 2920484 - RNA, 19 nt, Artificial Sequence
  Description of Artificial Sequence: Synthetic oligonucleotide
cauggccuuggaggagaug

SEQ ID NO: 2920485 - RNA, 19 nt, Artificial Sequence
  Description of Artificial Sequence: Synthetic oligonucleotide
ggugacggcuuuggugccc

SEQ ID NO: 2920486 - RNA, 19 nt, Artificial Sequence
  Description of Artificial Sequence: Synthetic oligonucleotide
cucuccuugcggcugcgcu

SEQ ID NO: 2920487 - RNA, 19 nt, Artificial Sequence
  Description of Artificial Sequence: Synthetic oligonucleotide
cucaggcaucuuagaaucu

SEQ ID NO: 2920488 - RNA, 19 nt, Artificial Sequence
  Description of Artificial Sequence: Synthetic oligonucleotide
gcgagaagccucgcccgcg

SEQ ID NO: 2920489 - RNA, 19 nt, Artificial Sequence
  Description of Artificial Sequence: Synthetic oligonucleotide
guaaugcgccaggcgagaa

SEQ ID NO: 2920490 - RNA, 19 nt, Artificial Sequence
  Description of Artificial Sequence: Synthetic oligonucleotide
gguguacuuggugacggcu

SEQ ID NO: 2920491 - RNA, 19 nt, Artificial Sequence
  Description of Artificial Sequence: Synthetic oligonucleotide
gcgcucgaagaugucguug

SEQ ID NO: 2920492 - RNA, 19 nt, Artificial Sequence
  Description of Artificial Sequence: Synthetic oligonucleotide
cucccgggacgugaugguc

SEQ ID NO: 2920493 - RNA, 19 nt, Artificial Sequence
  Description of Artificial Sequence: Synthetic oligonucleotide
gagaugccgguguccgggu

SEQ ID NO: 2920494 - RNA, 19 nt, Artificial Sequence
  Description of Artificial Sequence: Synthetic oligonucleotide
cgcucgaagaugucguuga

SEQ ID NO: 2920495 - RNA, 19 nt, Artificial Sequence
  Description of Artificial Sequence: Synthetic oligonucleotide
gcggacuuggcuggcucag

SEQ ID NO: 2920496 - RNA, 19 nt, Artificial Sequence
  Description of Artificial Sequence: Synthetic oligonucleotide
cgggagcggacuuggcugg

SEQ ID NO: 2920497 - RNA, 19 nt, Artificial Sequence
  Description of Artificial Sequence: Synthetic oligonucleotide
cguacaccgaguagcucuc

SEQ ID NO: 2920498 - RNA, 19 nt, Artificial Sequence
  Description of Artificial Sequence: Synthetic oligonucleotide
ggucgagcgcuuguuguaa

SEQ ID NO: 2920499 - RNA, 19 nt, Artificial Sequence
  Description of Artificial Sequence: Synthetic oligonucleotide
ucggggcgggagcggacuu

SEQ ID NO: 2920500 - RNA, 19 nt, Artificial Sequence
  Description of Artificial Sequence: Synthetic oligonucleotide
cuggaucucccgggacgug

SEQ ID NO: 2920501 - RNA, 19 nt, Artificial Sequence
  Description of Artificial Sequence: Synthetic oligonucleotide
ggcuggcucaggcaucuua

SEQ ID NO: 2920502 - RNA, 19 nt, Artificial Sequence
  Description of Artificial Sequence: Synthetic oligonucleotide
cgggacgugauggucgagc

SEQ ID NO: 2920503 - RNA, 19 nt, Artificial Sequence
  Description of Artificial Sequence: Synthetic oligonucleotide
uggugcccucggacaccgc

SEQ ID NO: 2920504 - RNA, 19 nt, Artificial Sequence
  Description of Artificial Sequence: Synthetic oligonucleotide
cgggugaaccugcuucagc

SEQ ID NO: 2920505 - RNA, 19 nt, Artificial Sequence
  Description of Artificial Sequence: Synthetic oligonucleotide
gcccucggacaccgcaugc

SEQ ID NO: 2920506 - RNA, 19 nt, Artificial Sequence
  Description of Artificial Sequence: Synthetic oligonucleotide
gugggacguccuuuucacu

SEQ ID NO: 2920507 - RNA, 19 nt, Artificial Sequence
  Description of Artificial Sequence: Synthetic oligonucleotide
cgccaggcgagaagccucg

SEQ ID NO: 2920508 - RNA, 19 nt, Artificial Sequence
  Description of Artificial Sequence: Synthetic oligonucleotide
gcccgcgaugcgcucgaag

SEQ ID NO: 2920509 - RNA, 19 nt, Artificial Sequence
  Description of Artificial Sequence: Synthetic oligonucleotide
augccgguguccgggugaa

SEQ ID NO: 2920510 - RNA, 19 nt, Artificial Sequence
  Description of Artificial Sequence: Synthetic oligonucleotide
ggcgggagcggacuuggcu

SEQ ID NO: 2920511 - RNA, 19 nt, Artificial Sequence
  Description of Artificial Sequence: Synthetic oligonucleotide
gcuugcgcuucuugccguc

SEQ ID NO: 2920512 - RNA, 19 nt, Artificial Sequence
  Description of Artificial Sequence: Synthetic oligonucleotide
cccuucuucggggcgggag

SEQ ID NO: 2920513 - RNA, 19 nt, Artificial Sequence
  Description of Artificial Sequence: Synthetic oligonucleotide
cacggccuucuuggagccc

SEQ ID NO: 2920514 - RNA, 19 nt, Artificial Sequence
  Description of Artificial Sequence: Synthetic oligonucleotide
ccugcuucagcaccuugua

SEQ ID NO: 2920515 - RNA, 19 nt, Artificial Sequence
  Description of Artificial Sequence: Synthetic oligonucleotide
acuccucgugggacguccu

SEQ ID NO: 2920516 - RNA, 19 nt, Artificial Sequence
  Description of Artificial Sequence: Synthetic oligonucleotide
cgcacagccgucuggaucu

SEQ ID NO: 2920517 - RNA, 19 nt, Artificial Sequence
  Description of Artificial Sequence: Synthetic oligonucleotide
ugacggcuuuggugcccuc

SEQ ID NO: 2920518 - RNA, 19 nt, Artificial Sequence
  Description of Artificial Sequence: Synthetic oligonucleotide
cgcgaugcgcucgaagaug

SEQ ID NO: 2920519 - RNA, 19 nt, Artificial Sequence
  Description of Artificial Sequence: Synthetic oligonucleotide
gucgagcgcuuguuguaau

SEQ ID NO: 2920520 - RNA, 19 nt, Artificial Sequence
  Description of Artificial Sequence: Synthetic oligonucleotide
cuacuccucgugggacguc

SEQ ID NO: 2920521 - RNA, 19 nt, Artificial Sequence
  Description of Artificial Sequence: Synthetic oligonucleotide
ccccgggcagcagcaagcg

SEQ ID NO: 2920522 - RNA, 19 nt, Artificial Sequence
  Description of Artificial Sequence: Synthetic oligonucleotide
gagaagccucgcccgcgau

SEQ ID NO: 2920523 - RNA, 19 nt, Artificial Sequence
  Description of Artificial Sequence: Synthetic oligonucleotide
gcgaugcgcucgaagaugu

SEQ ID NO: 2920524 - RNA, 19 nt, Artificial Sequence
  Description of Artificial Sequence: Synthetic oligonucleotide
cacuuggagcugguguacu

SEQ ID NO: 2920525 - RNA, 19 nt, Artificial Sequence
  Description of Artificial Sequence: Synthetic oligonucleotide
cccauggccuuggaggaga

SEQ ID NO: 2920526 - RNA, 19 nt, Artificial Sequence
  Description of Artificial Sequence: Synthetic oligonucleotide
gcgccaggcgagaagccuc

SEQ ID NO: 2920527 - RNA, 19 nt, Artificial Sequence
  Description of Artificial Sequence: Synthetic oligonucleotide
gcccauggccuuggaggag

SEQ ID NO: 2920528 - RNA, 19 nt, Artificial Sequence
  Description of Artificial Sequence: Synthetic oligonucleotide
ccagcacugaugaguggua

SEQ ID NO: 2920529 - RNA, 19 nt, Artificial Sequence
  Description of Artificial Sequence: Synthetic oligonucleotide
cgucuggaucucccgggac

SEQ ID NO: 2920530 - RNA, 19 nt, Artificial Sequence
  Description of Artificial Sequence: Synthetic oligonucleotide
ccuuggaggagaugccggu

SEQ ID NO: 2920531 - RNA, 19 nt, Artificial Sequence
  Description of Artificial Sequence: Synthetic oligonucleotide
ccgggugaaccugcuucag

SEQ ID NO: 2920532 - RNA, 19 nt, Artificial Sequence
  Description of Artificial Sequence: Synthetic oligonucleotide
cgcuuguuguaaugcgcca

SEQ ID NO: 2920533 - RNA, 19 nt, Artificial Sequence
  Description of Artificial Sequence: Synthetic oligonucleotide
cgugauggucgagcgcuug

SEQ ID NO: 2920534 - RNA, 19 nt, Artificial Sequence
  Description of Artificial Sequence: Synthetic oligonucleotide
gaaccugcuucagcaccuu

SEQ ID NO: 2920535 - RNA, 19 nt, Artificial Sequence
  Description of Artificial Sequence: Synthetic oligonucleotide
gggagcggacuuggcuggc

SEQ ID NO: 2920536 - RNA, 19 nt, Artificial Sequence
  Description of Artificial Sequence: Synthetic oligonucleotide
cccgggcagcagcaagcgc

SEQ ID NO: 2920537 - RNA, 19 nt, Artificial Sequence
  Description of Artificial Sequence: Synthetic oligonucleotide
acgugauggucgagcgcuu

SEQ ID NO: 2920538 - RNA, 19 nt, Artificial Sequence
  Description of Artificial Sequence: Synthetic oligonucleotide
ugccgguguccgggugaac

SEQ ID NO: 2920539 - RNA, 19 nt, Artificial Sequence
  Description of Artificial Sequence: Synthetic oligonucleotide
cccgggacgugauggucga

SEQ ID NO: 2920540 - RNA, 19 nt, Artificial Sequence
  Description of Artificial Sequence: Synthetic oligonucleotide
ccgucuggaucucccggga

SEQ ID NO: 2920541 - RNA, 19 nt, Artificial Sequence
  Description of Artificial Sequence: Synthetic oligonucleotide
cgaguucaugaugcccaug

SEQ ID NO: 2920542 - RNA, 19 nt, Artificial Sequence
  Description of Artificial Sequence: Synthetic oligonucleotide
gcucuccuugcggcugcgc

SEQ ID NO: 2920543 - RNA, 19 nt, Artificial Sequence
  Description of Artificial Sequence: Synthetic oligonucleotide
cggacuuggcuggcucagg

SEQ ID NO: 2920544 - RNA, 19 nt, Artificial Sequence
  Description of Artificial Sequence: Synthetic oligonucleotide
ggccuucuuggagcccuuc

SEQ ID NO: 2920545 - RNA, 19 nt, Artificial Sequence
  Description of Artificial Sequence: Synthetic oligonucleotide
guguccgggugaaccugcu

SEQ ID NO: 2920546 - RNA, 19 nt, Artificial Sequence
  Description of Artificial Sequence: Synthetic oligonucleotide
gugcccucggacaccgcau

SEQ ID NO: 2920547 - RNA, 19 nt, Artificial Sequence
  Description of Artificial Sequence: Synthetic oligonucleotide
cgagaagccucgcccgcga

SEQ ID NO: 2920548 - RNA, 19 nt, Artificial Sequence
  Description of Artificial Sequence: Synthetic oligonucleotide
cgguguccgggugaaccug

SEQ ID NO: 2920549 - RNA, 19 nt, Artificial Sequence
  Description of Artificial Sequence: Synthetic oligonucleotide
cgaugcgcucgaagauguc

SEQ ID NO: 2920550 - RNA, 19 nt, Artificial Sequence
  Description of Artificial Sequence: Synthetic oligonucleotide
gccaggcgagaagccucgc

SEQ ID NO: 2920551 - RNA, 19 nt, Artificial Sequence
  Description of Artificial Sequence: Synthetic oligonucleotide
ggaucucccgggacgugau

SEQ ID NO: 2920552 - RNA, 19 nt, Artificial Sequence
  Description of Artificial Sequence: Synthetic oligonucleotide
ccgguguccgggugaaccu

SEQ ID NO: 2920553 - RNA, 19 nt, Artificial Sequence
  Description of Artificial Sequence: Synthetic oligonucleotide
ggagcggacuuggcuggcu

SEQ ID NO: 2920554 - RNA, 19 nt, Artificial Sequence
  Description of Artificial Sequence: Synthetic oligonucleotide
ccgcaugcuuggccagcuc

SEQ ID NO: 2920555 - RNA, 19 nt, Artificial Sequence
  Description of Artificial Sequence: Synthetic oligonucleotide
cuccucgugggacguccuu

SEQ ID NO: 2920556 - RNA, 19 nt, Artificial Sequence
  Description of Artificial Sequence: Synthetic oligonucleotide
cggacaccgcaugcuuggc

SEQ ID NO: 2920557 - RNA, 19 nt, Artificial Sequence
  Description of Artificial Sequence: Synthetic oligonucleotide
ggccuuggucacggccuuc

SEQ ID NO: 2920558 - RNA, 19 nt, Artificial Sequence
  Description of Artificial Sequence: Synthetic oligonucleotide
ccucgugggacguccuuuu

SEQ ID NO: 2920559 - RNA, 19 nt, Artificial Sequence
  Description of Artificial Sequence: Synthetic oligonucleotide
gggcgggagcggacuuggc

SEQ ID NO: 2920560 - RNA, 19 nt, Artificial Sequence
  Description of Artificial Sequence: Synthetic oligonucleotide
gccucgcccgcgaugcgcu

SEQ ID NO: 2920561 - RNA, 19 nt, Artificial Sequence
  Description of Artificial Sequence: Synthetic oligonucleotide
gcacagccgucuggaucuc

SEQ ID NO: 2920562 - RNA, 19 nt, Artificial Sequence
  Description of Artificial Sequence: Synthetic oligonucleotide
ccucgcccgcgaugcgcuc

SEQ ID NO: 2920563 - RNA, 19 nt, Artificial Sequence
  Description of Artificial Sequence: Synthetic oligonucleotide
ccgggacgugauggucgag

SEQ ID NO: 2920564 - RNA, 19 nt, Artificial Sequence
  Description of Artificial Sequence: Synthetic oligonucleotide
ccgcgaugcgcucgaagau

SEQ ID NO: 2920565 - RNA, 19 nt, Artificial Sequence
  Description of Artificial Sequence: Synthetic oligonucleotide
cccucggacaccgcaugcu

SEQ ID NO: 2920566 - RNA, 19 nt, Artificial Sequence
  Description of Artificial Sequence: Synthetic oligonucleotide
cggcuuuggugcccucgga

SEQ ID NO: 2920567 - RNA, 19 nt, Artificial Sequence
  Description of Artificial Sequence: Synthetic oligonucleotide
ccauggccuuggaggagau

SEQ ID NO: 2920568 - RNA, 19 nt, Artificial Sequence
  Description of Artificial Sequence: Synthetic oligonucleotide
cguugacgaacgaguucau

SEQ ID NO: 2920569 - RNA, 19 nt, Artificial Sequence
  Description of Artificial Sequence: Synthetic oligonucleotide
gcccuucuucggggcggga

SEQ ID NO: 2920570 - RNA, 19 nt, Artificial Sequence
  Description of Artificial Sequence: Synthetic oligonucleotide
cguccuucuucugggccuu

SEQ ID NO: 2920571 - RNA, 19 nt, Artificial Sequence
  Description of Artificial Sequence: Synthetic oligonucleotide
ggcugcgcuugcgcuucuu

SEQ ID NO: 2920572 - RNA, 19 nt, Artificial Sequence
  Description of Artificial Sequence: Synthetic oligonucleotide
cggcugcgcuugcgcuucu

SEQ ID NO: 2920573 - RNA, 19 nt, Artificial Sequence
  Description of Artificial Sequence: Synthetic oligonucleotide
cgcccgcgaugcgcucgaa

SEQ ID NO: 2920574 - RNA, 19 nt, Artificial Sequence
  Description of Artificial Sequence: Synthetic oligonucleotide
aauacuuaaaaguaaaaga

SEQ ID NO: 2920575 - RNA, 19 nt, Artificial Sequence
  Description of Artificial Sequence: Synthetic oligonucleotide
auugaguucggccacagcc

SEQ ID NO: 2920576 - RNA, 19 nt, Artificial Sequence
  Description of Artificial Sequence: Synthetic oligonucleotide
uuaaaaguaaaagagacac

SEQ ID NO: 2920577 - RNA, 19 nt, Artificial Sequence
  Description of Artificial Sequence: Synthetic oligonucleotide
aaaaguaaaagagacacgu

SEQ ID NO: 2920578 - RNA, 19 nt, Artificial Sequence
  Description of Artificial Sequence: Synthetic oligonucleotide
uuaacauagacauugccca

SEQ ID NO: 2920579 - RNA, 19 nt, Artificial Sequence
  Description of Artificial Sequence: Synthetic oligonucleotide
gaaguuaucauaguguucc

SEQ ID NO: 2920580 - RNA, 19 nt, Artificial Sequence
  Description of Artificial Sequence: Synthetic oligonucleotide
cuuaacauagacauugccc

SEQ ID NO: 2920581 - RNA, 19 nt, Artificial Sequence
  Description of Artificial Sequence: Synthetic oligonucleotide
aaucucuccguacuucucc

SEQ ID NO: 2920582 - RNA, 19 nt, Artificial Sequence
  Description of Artificial Sequence: Synthetic oligonucleotide
auacuuaaaaguaaaagag

SEQ ID NO: 2920583 - RNA, 19 nt, Artificial Sequence
  Description of Artificial Sequence: Synthetic oligonucleotide
auagacauugcccacgagg

SEQ ID NO: 2920584 - RNA, 19 nt, Artificial Sequence
  Description of Artificial Sequence: Synthetic oligonucleotide
gaacuuaacauagacauug

SEQ ID NO: 2920585 - RNA, 19 nt, Artificial Sequence
  Description of Artificial Sequence: Synthetic oligonucleotide
aucauaguguuccugcacc

SEQ ID NO: 2920586 - RNA, 19 nt, Artificial Sequence
  Description of Artificial Sequence: Synthetic oligonucleotide
aaguaaaagagacacguua

SEQ ID NO: 2920587 - RNA, 19 nt, Artificial Sequence
  Description of Artificial Sequence: Synthetic oligonucleotide
acuuaacauagacauugcc

SEQ ID NO: 2920588 - RNA, 19 nt, Artificial Sequence
  Description of Artificial Sequence: Synthetic oligonucleotide
aaagaaguuaucauagugu

SEQ ID NO: 2920589 - RNA, 19 nt, Artificial Sequence
  Description of Artificial Sequence: Synthetic oligonucleotide
aaguugagcagcacgaugg

SEQ ID NO: 2920590 - RNA, 19 nt, Artificial Sequence
  Description of Artificial Sequence: Synthetic oligonucleotide
ugaaccagcgguuauugag

SEQ ID NO: 2920591 - RNA, 19 nt, Artificial Sequence
  Description of Artificial Sequence: Synthetic oligonucleotide
auaguguuccugcaccucc

SEQ ID NO: 2920592 - RNA, 19 nt, Artificial Sequence
  Description of Artificial Sequence: Synthetic oligonucleotide
aagaaguuaucauaguguu

SEQ ID NO: 2920593 - RNA, 19 nt, Artificial Sequence
  Description of Artificial Sequence: Synthetic oligonucleotide
uaaaagagacacguuaacc

SEQ ID NO: 2920594 - RNA, 19 nt, Artificial Sequence
  Description of Artificial Sequence: Synthetic oligonucleotide
uacaaguugagcagcacga

SEQ ID NO: 2920595 - RNA, 19 nt, Artificial Sequence
  Description of Artificial Sequence: Synthetic oligonucleotide
caaagaaguuaucauagug

SEQ ID NO: 2920596 - RNA, 19 nt, Artificial Sequence
  Description of Artificial Sequence: Synthetic oligonucleotide
uugagcagcacgauggucu

SEQ ID NO: 2920597 - RNA, 19 nt, Artificial Sequence
  Description of Artificial Sequence: Synthetic oligonucleotide
aacauagacauugcccacg

SEQ ID NO: 2920598 - RNA, 19 nt, Artificial Sequence
  Description of Artificial Sequence: Synthetic oligonucleotide
uagacauugcccacgaggu

SEQ ID NO: 2920599 - RNA, 19 nt, Artificial Sequence
  Description of Artificial Sequence: Synthetic oligonucleotide
gacauugcccacgaggugg

SEQ ID NO: 2920600 - RNA, 19 nt, Artificial Sequence
  Description of Artificial Sequence: Synthetic oligonucleotide
uuuguugugcagucgggag

SEQ ID NO: 2920601 - RNA, 19 nt, Artificial Sequence
  Description of Artificial Sequence: Synthetic oligonucleotide
ucauacugacggcagcacg

SEQ ID NO: 2920602 - RNA, 19 nt, Artificial Sequence
  Description of Artificial Sequence: Synthetic oligonucleotide
guacaaguugagcagcacg

SEQ ID NO: 2920603 - RNA, 19 nt, Artificial Sequence
  Description of Artificial Sequence: Synthetic oligonucleotide
aacuuaacauagacauugc

SEQ ID NO: 2920604 - RNA, 19 nt, Artificial Sequence
  Description of Artificial Sequence: Synthetic oligonucleotide
uugcgguacaaguugagca

SEQ ID NO: 2920605 - RNA, 19 nt, Artificial Sequence
  Description of Artificial Sequence: Synthetic oligonucleotide
uguugugcagucgggagcg

SEQ ID NO: 2920606 - RNA, 19 nt, Artificial Sequence
  Description of Artificial Sequence: Synthetic oligonucleotide
ugcgguacaaguugagcag

SEQ ID NO: 2920607 - RNA, 19 nt, Artificial Sequence
  Description of Artificial Sequence: Synthetic oligonucleotide
ugaguucggccacagcccg

SEQ ID NO: 2920608 - RNA, 19 nt, Artificial Sequence
  Description of Artificial Sequence: Synthetic oligonucleotide
cuuaaaaguaaaagagaca

SEQ ID NO: 2920609 - RNA, 19 nt, Artificial Sequence
  Description of Artificial Sequence: Synthetic oligonucleotide
acggccugcccguugaacc

SEQ ID NO: 2920610 - RNA, 19 nt, Artificial Sequence
  Description of Artificial Sequence: Synthetic oligonucleotide
ucacgugacagugcgaucc

SEQ ID NO: 2920611 - RNA, 19 nt, Artificial Sequence
  Description of Artificial Sequence: Synthetic oligonucleotide
uguguucugcggauugcgg

SEQ ID NO: 2920612 - RNA, 19 nt, Artificial Sequence
  Description of Artificial Sequence: Synthetic oligonucleotide
ugaacaccuccucaaagaa

SEQ ID NO: 2920613 - RNA, 19 nt, Artificial Sequence
  Description of Artificial Sequence: Synthetic oligonucleotide
auugcgguacaaguugagc

SEQ ID NO: 2920614 - RNA, 19 nt, Artificial Sequence
  Description of Artificial Sequence: Synthetic oligonucleotide
ugaaagucgguuuguugug

SEQ ID NO: 2920615 - RNA, 19 nt, Artificial Sequence
  Description of Artificial Sequence: Synthetic oligonucleotide
ucgcucacgugacagugcg

SEQ ID NO: 2920616 - RNA, 19 nt, Artificial Sequence
  Description of Artificial Sequence: Synthetic oligonucleotide
uaucauaguguuccugcac

SEQ ID NO: 2920617 - RNA, 19 nt, Artificial Sequence
  Description of Artificial Sequence: Synthetic oligonucleotide
acgauggucuggcugaaag

SEQ ID NO: 2920618 - RNA, 19 nt, Artificial Sequence
  Description of Artificial Sequence: Synthetic oligonucleotide
uccucaaucucuccguacu

SEQ ID NO: 2920619 - RNA, 19 nt, Artificial Sequence
  Description of Artificial Sequence: Synthetic oligonucleotide
aucucauacugacggcagc

SEQ ID NO: 2920620 - RNA, 19 nt, Artificial Sequence
  Description of Artificial Sequence: Synthetic oligonucleotide
acguucaucuccucaaucu

SEQ ID NO: 2920621 - RNA, 19 nt, Artificial Sequence
  Description of Artificial Sequence: Synthetic oligonucleotide
ugcccguugaaccagcggu

SEQ ID NO: 2920622 - RNA, 19 nt, Artificial Sequence
  Description of Artificial Sequence: Synthetic oligonucleotide
uuaucauaguguuccugca

SEQ ID NO: 2920623 - RNA, 19 nt, Artificial Sequence
  Description of Artificial Sequence: Synthetic oligonucleotide
ugacagugcgauccgucgg

SEQ ID NO: 2920624 - RNA, 19 nt, Artificial Sequence
  Description of Artificial Sequence: Synthetic oligonucleotide
guaaaagagacacguuaac

SEQ ID NO: 2920625 - RNA, 19 nt, Artificial Sequence
  Description of Artificial Sequence: Synthetic oligonucleotide
aaagucgguuuguugugca

SEQ ID NO: 2920626 - RNA, 19 nt, Artificial Sequence
  Description of Artificial Sequence: Synthetic oligonucleotide
ucaaucucuccguacuucu

SEQ ID NO: 2920627 - RNA, 19 nt, Artificial Sequence
  Description of Artificial Sequence: Synthetic oligonucleotide
uuguugugcagucgggagc

SEQ ID NO: 2920628 - RNA, 19 nt, Artificial Sequence
  Description of Artificial Sequence: Synthetic oligonucleotide
ugcggauugcgguacaagu

SEQ ID NO: 2920629 - RNA, 19 nt, Artificial Sequence
  Description of Artificial Sequence: Synthetic oligonucleotide
ggugacaggcgacagcucg

SEQ ID NO: 2920630 - RNA, 19 nt, Artificial Sequence
  Description of Artificial Sequence: Synthetic oligonucleotide
gacagcucggcgugcacgg

SEQ ID NO: 2920631 - RNA, 19 nt, Artificial Sequence
  Description of Artificial Sequence: Synthetic oligonucleotide
ugcaccuccacgucgcuca

SEQ ID NO: 2920632 - RNA, 19 nt, Artificial Sequence
  Description of Artificial Sequence: Synthetic oligonucleotide
agcagcacgauggucuggc

SEQ ID NO: 2920633 - RNA, 19 nt, Artificial Sequence
  Description of Artificial Sequence: Synthetic oligonucleotide
gugacagugcgauccgucg

SEQ ID NO: 2920634 - RNA, 19 nt, Artificial Sequence
  Description of Artificial Sequence: Synthetic oligonucleotide
agcacgauggucuggcuga

SEQ ID NO: 2920635 - RNA, 19 nt, Artificial Sequence
  Description of Artificial Sequence: Synthetic oligonucleotide
auugcccacgagguggucc

SEQ ID NO: 2920636 - RNA, 19 nt, Artificial Sequence
  Description of Artificial Sequence: Synthetic oligonucleotide
ucacacacguucaucuccu

SEQ ID NO: 2920637 - RNA, 19 nt, Artificial Sequence
  Description of Artificial Sequence: Synthetic oligonucleotide
aguaaaagagacacguuaa

SEQ ID NO: 2920638 - RNA, 19 nt, Artificial Sequence
  Description of Artificial Sequence: Synthetic oligonucleotide
uucaucuccucaaucucuc

SEQ ID NO: 2920639 - RNA, 19 nt, Artificial Sequence
  Description of Artificial Sequence: Synthetic oligonucleotide
acugacggcagcacgacuc

SEQ ID NO: 2920640 - RNA, 19 nt, Artificial Sequence
  Description of Artificial Sequence: Synthetic oligonucleotide
aagucgguuuguugugcag

SEQ ID NO: 2920641 - RNA, 19 nt, Artificial Sequence
  Description of Artificial Sequence: Synthetic oligonucleotide
ugugcagucgggagcgacc

SEQ ID NO: 2920642 - RNA, 19 nt, Artificial Sequence
  Description of Artificial Sequence: Synthetic oligonucleotide
ucucauacugacggcagca

SEQ ID NO: 2920643 - RNA, 19 nt, Artificial Sequence
  Description of Artificial Sequence: Synthetic oligonucleotide
agaaguuaucauaguguuc

SEQ ID NO: 2920644 - RNA, 19 nt, Artificial Sequence
  Description of Artificial Sequence: Synthetic oligonucleotide
gacagugcgauccgucggc

SEQ ID NO: 2920645 - RNA, 19 nt, Artificial Sequence
  Description of Artificial Sequence: Synthetic oligonucleotide
uaacauagacauugcccac

SEQ ID NO: 2920646 - RNA, 19 nt, Artificial Sequence
  Description of Artificial Sequence: Synthetic oligonucleotide
caucucauacugacggcag

SEQ ID NO: 2920647 - RNA, 19 nt, Artificial Sequence
  Description of Artificial Sequence: Synthetic oligonucleotide
cacgaggugguccccaagg

SEQ ID NO: 2920648 - RNA, 19 nt, Artificial Sequence
  Description of Artificial Sequence: Synthetic oligonucleotide
aaguuaucauaguguuccu

SEQ ID NO: 2920649 - RNA, 19 nt, Artificial Sequence
  Description of Artificial Sequence: Synthetic oligonucleotide
ucauaguguuccugcaccu

SEQ ID NO: 2920650 - RNA, 19 nt, Artificial Sequence
  Description of Artificial Sequence: Synthetic oligonucleotide
ucggugacaggcgacagcu

SEQ ID NO: 2920651 - RNA, 19 nt, Artificial Sequence
  Description of Artificial Sequence: Synthetic oligonucleotide
agucgggagcgaccggucc

SEQ ID NO: 2920652 - RNA, 19 nt, Artificial Sequence
  Description of Artificial Sequence: Synthetic oligonucleotide
uacuucuccugcagcuccg

SEQ ID NO: 2920653 - RNA, 19 nt, Artificial Sequence
  Description of Artificial Sequence: Synthetic oligonucleotide
cauacugacggcagcacga

SEQ ID NO: 2920654 - RNA, 19 nt, Artificial Sequence
  Description of Artificial Sequence: Synthetic oligonucleotide
cugaaagucgguuuguugu

SEQ ID NO: 2920655 - RNA, 19 nt, Artificial Sequence
  Description of Artificial Sequence: Synthetic oligonucleotide
acucccggaagucggugac

SEQ ID NO: 2920656 - RNA, 19 nt, Artificial Sequence
  Description of Artificial Sequence: Synthetic oligonucleotide
acauagacauugcccacga

SEQ ID NO: 2920657 - RNA, 19 nt, Artificial Sequence
  Description of Artificial Sequence: Synthetic oligonucleotide
gaaagucgguuuguugugc

SEQ ID NO: 2920658 - RNA, 19 nt, Artificial Sequence
  Description of Artificial Sequence: Synthetic oligonucleotide
cacgacucccggaagucgg

SEQ ID NO: 2920659 - RNA, 19 nt, Artificial Sequence
  Description of Artificial Sequence: Synthetic oligonucleotide
caaguugagcagcacgaug

SEQ ID NO: 2920660 - RNA, 19 nt, Artificial Sequence
  Description of Artificial Sequence: Synthetic oligonucleotide
uccugcagcuccgugaaca

SEQ ID NO: 2920661 - RNA, 19 nt, Artificial Sequence
  Description of Artificial Sequence: Synthetic oligonucleotide
gaacaccuccucaaagaag

SEQ ID NO: 2920662 - RNA, 19 nt, Artificial Sequence
  Description of Artificial Sequence: Synthetic oligonucleotide
uccgugaacaccuccucaa

SEQ ID NO: 2920663 - RNA, 19 nt, Artificial Sequence
  Description of Artificial Sequence: Synthetic oligonucleotide
ucugcgcuguguucugcgg

SEQ ID NO: 2920664 - RNA, 19 nt, Artificial Sequence
  Description of Artificial Sequence: Synthetic oligonucleotide
aguuaucauaguguuccug

SEQ ID NO: 2920665 - RNA, 19 nt, Artificial Sequence
  Description of Artificial Sequence: Synthetic oligonucleotide
uuauugaguucggccacag

SEQ ID NO: 2920666 - RNA, 19 nt, Artificial Sequence
  Description of Artificial Sequence: Synthetic oligonucleotide
guugaaccagcgguuauug

SEQ ID NO: 2920667 - RNA, 19 nt, Artificial Sequence
  Description of Artificial Sequence: Synthetic oligonucleotide
uccguacuucuccugcagc

SEQ ID NO: 2920668 - RNA, 19 nt, Artificial Sequence
  Description of Artificial Sequence: Synthetic oligonucleotide
aguguuccugcaccuccac

SEQ ID NO: 2920669 - RNA, 19 nt, Artificial Sequence
  Description of Artificial Sequence: Synthetic oligonucleotide
cucuccguacuucuccugc

SEQ ID NO: 2920670 - RNA, 19 nt, Artificial Sequence
  Description of Artificial Sequence: Synthetic oligonucleotide
acaggcgacagcucggcgu

SEQ ID NO: 2920671 - RNA, 19 nt, Artificial Sequence
  Description of Artificial Sequence: Synthetic oligonucleotide
aaaguaaaagagacacguu

SEQ ID NO: 2920672 - RNA, 19 nt, Artificial Sequence
  Description of Artificial Sequence: Synthetic oligonucleotide
agccgccucggguacauuc

SEQ ID NO: 2920673 - RNA, 19 nt, Artificial Sequence
  Description of Artificial Sequence: Synthetic oligonucleotide
uauugaguucggccacagc

SEQ ID NO: 2920674 - RNA, 19 nt, Artificial Sequence
  Description of Artificial Sequence: Synthetic oligonucleotide
ccccaucucauacugacgg

SEQ ID NO: 2920675 - RNA, 19 nt, Artificial Sequence
  Description of Artificial Sequence: Synthetic oligonucleotide
ccagcgguuauugaguucg

SEQ ID NO: 2920676 - RNA, 19 nt, Artificial Sequence
  Description of Artificial Sequence: Synthetic oligonucleotide
uguucugcggauugcggua

SEQ ID NO: 2920677 - RNA, 19 nt, Artificial Sequence
  Description of Artificial Sequence: Synthetic oligonucleotide
ugagcagcacgauggucug

SEQ ID NO: 2920678 - RNA, 19 nt, Artificial Sequence
  Description of Artificial Sequence: Synthetic oligonucleotide
agcgguuauugaguucggc

SEQ ID NO: 2920679 - RNA, 19 nt, Artificial Sequence
  Description of Artificial Sequence: Synthetic oligonucleotide
agugcgauccgucggcggu

SEQ ID NO: 2920680 - RNA, 19 nt, Artificial Sequence
  Description of Artificial Sequence: Synthetic oligonucleotide
aaccagcgguuauugaguu

SEQ ID NO: 2920681 - RNA, 19 nt, Artificial Sequence
  Description of Artificial Sequence: Synthetic oligonucleotide
acacacguucaucuccuca

SEQ ID NO: 2920682 - RNA, 19 nt, Artificial Sequence
  Description of Artificial Sequence: Synthetic oligonucleotide
gcgguuauugaguucggcc

SEQ ID NO: 2920683 - RNA, 19 nt, Artificial Sequence
  Description of Artificial Sequence: Synthetic oligonucleotide
ggcggaacuuaacauagac

SEQ ID NO: 2920684 - RNA, 19 nt, Artificial Sequence
  Description of Artificial Sequence: Synthetic oligonucleotide
gauugcgguacaaguugag

SEQ ID NO: 2920685 - RNA, 19 nt, Artificial Sequence
  Description of Artificial Sequence: Synthetic oligonucleotide
uugcccacgaggugguccc

SEQ ID NO: 2920686 - RNA, 19 nt, Artificial Sequence
  Description of Artificial Sequence: Synthetic oligonucleotide
uaguguuccugcaccucca

SEQ ID NO: 2920687 - RNA, 19 nt, Artificial Sequence
  Description of Artificial Sequence: Synthetic oligonucleotide
cuguguucugcggauugcg

SEQ ID NO: 2920688 - RNA, 19 nt, Artificial Sequence
  Description of Artificial Sequence: Synthetic oligonucleotide
auacugacggcagcacgac

SEQ ID NO: 2920689 - RNA, 19 nt, Artificial Sequence
  Description of Artificial Sequence: Synthetic oligonucleotide
ucccggaagucggugacag

SEQ ID NO: 2920690 - RNA, 19 nt, Artificial Sequence
  Description of Artificial Sequence: Synthetic oligonucleotide
uccacgucgcucacgugac

SEQ ID NO: 2920691 - RNA, 19 nt, Artificial Sequence
  Description of Artificial Sequence: Synthetic oligonucleotide
gauccgucggcggucugcg

SEQ ID NO: 2920692 - RNA, 19 nt, Artificial Sequence
  Description of Artificial Sequence: Synthetic oligonucleotide
aagucggugacaggcgaca

SEQ ID NO: 2920693 - RNA, 19 nt, Artificial Sequence
  Description of Artificial Sequence: Synthetic oligonucleotide
ucgguuuguugugcagucg

SEQ ID NO: 2920694 - RNA, 19 nt, Artificial Sequence
  Description of Artificial Sequence: Synthetic oligonucleotide
accuccacgucgcucacgu

SEQ ID NO: 2920695 - RNA, 19 nt, Artificial Sequence
  Description of Artificial Sequence: Synthetic oligonucleotide
uccgucggcggucugcgcu

SEQ ID NO: 2920696 - RNA, 19 nt, Artificial Sequence
  Description of Artificial Sequence: Synthetic oligonucleotide
ucuccguacuucuccugca

SEQ ID NO: 2920697 - RNA, 19 nt, Artificial Sequence
  Description of Artificial Sequence: Synthetic oligonucleotide
gacggcagcacgacucccg

SEQ ID NO: 2920698 - RNA, 19 nt, Artificial Sequence
  Description of Artificial Sequence: Synthetic oligonucleotide
aguugagcagcacgauggu

SEQ ID NO: 2920699 - RNA, 19 nt, Artificial Sequence
  Description of Artificial Sequence: Synthetic oligonucleotide
gguuauugaguucggccac

SEQ ID NO: 2920700 - RNA, 19 nt, Artificial Sequence
  Description of Artificial Sequence: Synthetic oligonucleotide
gucugcgcuguguucugcg

SEQ ID NO: 2920701 - RNA, 19 nt, Artificial Sequence
  Description of Artificial Sequence: Synthetic oligonucleotide
uugaaccagcgguuauuga

SEQ ID NO: 2920702 - RNA, 19 nt, Artificial Sequence
  Description of Artificial Sequence: Synthetic oligonucleotide
agacauugcccacgaggug

SEQ ID NO: 2920703 - RNA, 19 nt, Artificial Sequence
  Description of Artificial Sequence: Synthetic oligonucleotide
accagcgguuauugaguuc

SEQ ID NO: 2920704 - RNA, 19 nt, Artificial Sequence
  Description of Artificial Sequence: Synthetic oligonucleotide
gcugaaagucgguuuguug

SEQ ID NO: 2920705 - RNA, 19 nt, Artificial Sequence
  Description of Artificial Sequence: Synthetic oligonucleotide
acggcagcacgacucccgg

SEQ ID NO: 2920706 - RNA, 19 nt, Artificial Sequence
  Description of Artificial Sequence: Synthetic oligonucleotide
ucccgugccggcacggccc

SEQ ID NO: 2920707 - RNA, 19 nt, Artificial Sequence
  Description of Artificial Sequence: Synthetic oligonucleotide
acggccccaauacuuaaaa

SEQ ID NO: 2920708 - RNA, 19 nt, Artificial Sequence
  Description of Artificial Sequence: Synthetic oligonucleotide
cuccacgucgcucacguga

SEQ ID NO: 2920709 - RNA, 19 nt, Artificial Sequence
  Description of Artificial Sequence: Synthetic oligonucleotide
guguuccugcaccuccacg

SEQ ID NO: 2920710 - RNA, 19 nt, Artificial Sequence
  Description of Artificial Sequence: Synthetic oligonucleotide
uucggccacagcccgcucu

SEQ ID NO: 2920711 - RNA, 19 nt, Artificial Sequence
  Description of Artificial Sequence: Synthetic oligonucleotide
agucgguuuguugugcagu

SEQ ID NO: 2920712 - RNA, 19 nt, Artificial Sequence
  Description of Artificial Sequence: Synthetic oligonucleotide
agcacgacucccggaaguc

SEQ ID NO: 2920713 - RNA, 19 nt, Artificial Sequence
  Description of Artificial Sequence: Synthetic oligonucleotide
ugguccccaagguugucac

SEQ ID NO: 2920714 - RNA, 19 nt, Artificial Sequence
  Description of Artificial Sequence: Synthetic oligonucleotide
gucgguuuguugugcaguc

SEQ ID NO: 2920715 - RNA, 19 nt, Artificial Sequence
  Description of Artificial Sequence: Synthetic oligonucleotide
cucaaucucuccguacuuc

SEQ ID NO: 2920716 - RNA, 19 nt, Artificial Sequence
  Description of Artificial Sequence: Synthetic oligonucleotide
cacacguucaucuccucaa

SEQ ID NO: 2920717 - RNA, 19 nt, Artificial Sequence
  Description of Artificial Sequence: Synthetic oligonucleotide
ggccccaauacuuaaaagu

SEQ ID NO: 2920718 - RNA, 19 nt, Artificial Sequence
  Description of Artificial Sequence: Synthetic oligonucleotide
guccccaagguugucacac

SEQ ID NO: 2920719 - RNA, 19 nt, Artificial Sequence
  Description of Artificial Sequence: Synthetic oligonucleotide
cugacggcagcacgacucc

SEQ ID NO: 2920720 - RNA, 19 nt, Artificial Sequence
  Description of Artificial Sequence: Synthetic oligonucleotide
gugcagucgggagcgaccg

SEQ ID NO: 2920721 - RNA, 19 nt, Artificial Sequence
  Description of Artificial Sequence: Synthetic oligonucleotide
guuuguugugcagucggga

SEQ ID NO: 2920722 - RNA, 19 nt, Artificial Sequence
  Description of Artificial Sequence: Synthetic oligonucleotide
gacaggcgacagcucggcg

SEQ ID NO: 2920723 - RNA, 19 nt, Artificial Sequence
  Description of Artificial Sequence: Synthetic oligonucleotide
cuccucaaucucuccguac

SEQ ID NO: 2920724 - RNA, 19 nt, Artificial Sequence
  Description of Artificial Sequence: Synthetic oligonucleotide
ucucuccguacuucuccug

SEQ ID NO: 2920725 - RNA, 19 nt, Artificial Sequence
  Description of Artificial Sequence: Synthetic oligonucleotide
cacgugacagugcgauccg

SEQ ID NO: 2920726 - RNA, 19 nt, Artificial Sequence
  Description of Artificial Sequence: Synthetic oligonucleotide
cuccguacuucuccugcag

SEQ ID NO: 2920727 - RNA, 19 nt, Artificial Sequence
  Description of Artificial Sequence: Synthetic oligonucleotide
ccggcggaacuuaacauag

SEQ ID NO: 2920728 - RNA, 19 nt, Artificial Sequence
  Description of Artificial Sequence: Synthetic oligonucleotide
cacgucgcucacgugacag

SEQ ID NO: 2920729 - RNA, 19 nt, Artificial Sequence
  Description of Artificial Sequence: Synthetic oligonucleotide
ugacaggcgacagcucggc

SEQ ID NO: 2920730 - RNA, 19 nt, Artificial Sequence
  Description of Artificial Sequence: Synthetic oligonucleotide
uccuccucccggcggaacu

SEQ ID NO: 2920731 - RNA, 19 nt, Artificial Sequence
  Description of Artificial Sequence: Synthetic oligonucleotide
cacguucaucuccucaauc

SEQ ID NO: 2920732 - RNA, 19 nt, Artificial Sequence
  Description of Artificial Sequence: Synthetic oligonucleotide
caaucucuccguacuucuc

SEQ ID NO: 2920733 - RNA, 19 nt, Artificial Sequence
  Description of Artificial Sequence: Synthetic oligonucleotide
acgaggugguccccaaggu

SEQ ID NO: 2920734 - RNA, 19 nt, Artificial Sequence
  Description of Artificial Sequence: Synthetic oligonucleotide
ucgggagcgaccggucccg

SEQ ID NO: 2920735 - RNA, 19 nt, Artificial Sequence
  Description of Artificial Sequence: Synthetic oligonucleotide
cacagcccgcucugcaucc

SEQ ID NO: 2920736 - RNA, 19 nt, Artificial Sequence
  Description of Artificial Sequence: Synthetic oligonucleotide
ugcgcuguguucugcggau

SEQ ID NO: 2920737 - RNA, 19 nt, Artificial Sequence
  Description of Artificial Sequence: Synthetic oligonucleotide
cagcacgauggucuggcug

SEQ ID NO: 2920738 - RNA, 19 nt, Artificial Sequence
  Description of Artificial Sequence: Synthetic oligonucleotide
ggagcgaccggucccgugc

SEQ ID NO: 2920739 - RNA, 19 nt, Artificial Sequence
  Description of Artificial Sequence: Synthetic oligonucleotide
ccggaagucggugacaggc

SEQ ID NO: 2920740 - RNA, 19 nt, Artificial Sequence
  Description of Artificial Sequence: Synthetic oligonucleotide
caggcgacagcucggcgug

SEQ ID NO: 2920741 - RNA, 19 nt, Artificial Sequence
  Description of Artificial Sequence: Synthetic oligonucleotide
gugacaggcgacagcucgg

SEQ ID NO: 2920742 - RNA, 19 nt, Artificial Sequence
  Description of Artificial Sequence: Synthetic oligonucleotide
cauagacauugcccacgag

SEQ ID NO: 2920743 - RNA, 19 nt, Artificial Sequence
  Description of Artificial Sequence: Synthetic oligonucleotide
ucccggcggaacuuaacau

SEQ ID NO: 2920744 - RNA, 19 nt, Artificial Sequence
  Description of Artificial Sequence: Synthetic oligonucleotide
cccaauacuuaaaaguaaa

SEQ ID NO: 2920745 - RNA, 19 nt, Artificial Sequence
  Description of Artificial Sequence: Synthetic oligonucleotide
uacugacggcagcacgacu

SEQ ID NO: 2920746 - RNA, 19 nt, Artificial Sequence
  Description of Artificial Sequence: Synthetic oligonucleotide
ugcagucgggagcgaccgg

SEQ ID NO: 2920747 - RNA, 19 nt, Artificial Sequence
  Description of Artificial Sequence: Synthetic oligonucleotide
gucgggagcgaccgguccc

SEQ ID NO: 2920748 - RNA, 19 nt, Artificial Sequence
  Description of Artificial Sequence: Synthetic oligonucleotide
gaaccagcgguuauugagu

SEQ ID NO: 2920749 - RNA, 19 nt, Artificial Sequence
  Description of Artificial Sequence: Synthetic oligonucleotide
gaagucggugacaggcgac

SEQ ID NO: 2920750 - RNA, 19 nt, Artificial Sequence
  Description of Artificial Sequence: Synthetic oligonucleotide
gguuuguugugcagucggg

SEQ ID NO: 2920751 - RNA, 19 nt, Artificial Sequence
  Description of Artificial Sequence: Synthetic oligonucleotide
acacguucaucuccucaau

SEQ ID NO: 2920752 - RNA, 19 nt, Artificial Sequence
  Description of Artificial Sequence: Synthetic oligonucleotide
accggucccgugccggcac

SEQ ID NO: 2920753 - RNA, 19 nt, Artificial Sequence
  Description of Artificial Sequence: Synthetic oligonucleotide
cauaguguuccugcaccuc

SEQ ID NO: 2920754 - RNA, 19 nt, Artificial Sequence
  Description of Artificial Sequence: Synthetic oligonucleotide
acagugcgauccgucggcg

SEQ ID NO: 2920755 - RNA, 19 nt, Artificial Sequence
  Description of Artificial Sequence: Synthetic oligonucleotide
gucggugacaggcgacagc

SEQ ID NO: 2920756 - RNA, 19 nt, Artificial Sequence
  Description of Artificial Sequence: Synthetic oligonucleotide
cucauacugacggcagcac

SEQ ID NO: 2920757 - RNA, 19 nt, Artificial Sequence
  Description of Artificial Sequence: Synthetic oligonucleotide
cugcccguugaaccagcgg

SEQ ID NO: 2920758 - RNA, 19 nt, Artificial Sequence
  Description of Artificial Sequence: Synthetic oligonucleotide
guuauugaguucggccaca

SEQ ID NO: 2920759 - RNA, 19 nt, Artificial Sequence
  Description of Artificial Sequence: Synthetic oligonucleotide
cggaacuuaacauagacau

SEQ ID NO: 2920760 - RNA, 19 nt, Artificial Sequence
  Description of Artificial Sequence: Synthetic oligonucleotide
acaaguugagcagcacgau

SEQ ID NO: 2920761 - RNA, 19 nt, Artificial Sequence
  Description of Artificial Sequence: Synthetic oligonucleotide
cccaagguugucacacacg

SEQ ID NO: 2920762 - RNA, 19 nt, Artificial Sequence
  Description of Artificial Sequence: Synthetic oligonucleotide
aguucggccacagcccgcu

SEQ ID NO: 2920763 - RNA, 19 nt, Artificial Sequence
  Description of Artificial Sequence: Synthetic oligonucleotide
cagugcgauccgucggcgg

SEQ ID NO: 2920764 - RNA, 19 nt, Artificial Sequence
  Description of Artificial Sequence: Synthetic oligonucleotide
cucccggcggaacuuaaca

SEQ ID NO: 2920765 - RNA, 19 nt, Artificial Sequence
  Description of Artificial Sequence: Synthetic oligonucleotide
agcuccgugaacaccuccu

SEQ ID NO: 2920766 - RNA, 19 nt, Artificial Sequence
  Description of Artificial Sequence: Synthetic oligonucleotide
cgguuuguugugcagucgg

SEQ ID NO: 2920767 - RNA, 19 nt, Artificial Sequence
  Description of Artificial Sequence: Synthetic oligonucleotide
uugugcagucgggagcgac

SEQ ID NO: 2920768 - RNA, 19 nt, Artificial Sequence
  Description of Artificial Sequence: Synthetic oligonucleotide
guuccugcaccuccacguc

SEQ ID NO: 2920769 - RNA, 19 nt, Artificial Sequence
  Description of Artificial Sequence: Synthetic oligonucleotide
agucggugacaggcgacag

SEQ ID NO: 2920770 - RNA, 19 nt, Artificial Sequence
  Description of Artificial Sequence: Synthetic oligonucleotide
ggaagucggugacaggcga

SEQ ID NO: 2920771 - RNA, 19 nt, Artificial Sequence
  Description of Artificial Sequence: Synthetic oligonucleotide
cggauugcgguacaaguug

SEQ ID NO: 2920772 - RNA, 19 nt, Artificial Sequence
  Description of Artificial Sequence: Synthetic oligonucleotide
cagcgguuauugaguucgg

SEQ ID NO: 2920773 - RNA, 19 nt, Artificial Sequence
  Description of Artificial Sequence: Synthetic oligonucleotide
guguucugcggauugcggu

SEQ ID NO: 2920774 - RNA, 19 nt, Artificial Sequence
  Description of Artificial Sequence: Synthetic oligonucleotide
gagcgaccggucccgugcc

SEQ ID NO: 2920775 - RNA, 19 nt, Artificial Sequence
  Description of Artificial Sequence: Synthetic oligonucleotide
guugagcagcacgaugguc

SEQ ID NO: 2920776 - RNA, 19 nt, Artificial Sequence
  Description of Artificial Sequence: Synthetic oligonucleotide
cugcggauugcgguacaag

SEQ ID NO: 2920777 - RNA, 19 nt, Artificial Sequence
  Description of Artificial Sequence: Synthetic oligonucleotide
guucugcggauugcgguac

SEQ ID NO: 2920778 - RNA, 19 nt, Artificial Sequence
  Description of Artificial Sequence: Synthetic oligonucleotide
cgugaacaccuccucaaag

SEQ ID NO: 2920779 - RNA, 19 nt, Artificial Sequence
  Description of Artificial Sequence: Synthetic oligonucleotide
cuccgugaacaccuccuca

SEQ ID NO: 2920780 - RNA, 19 nt, Artificial Sequence
  Description of Artificial Sequence: Synthetic oligonucleotide
cagcuccgugaacaccucc

SEQ ID NO: 2920781 - RNA, 19 nt, Artificial Sequence
  Description of Artificial Sequence: Synthetic oligonucleotide
auccgucggcggucugcgc

SEQ ID NO: 2920782 - RNA, 19 nt, Artificial Sequence
  Description of Artificial Sequence: Synthetic oligonucleotide
cucacgugacagugcgauc

SEQ ID NO: 2920783 - RNA, 19 nt, Artificial Sequence
  Description of Artificial Sequence: Synthetic oligonucleotide
gccccaauacuuaaaagua

SEQ ID NO: 2920784 - RNA, 19 nt, Artificial Sequence
  Description of Artificial Sequence: Synthetic oligonucleotide
acgucgcucacgugacagu

SEQ ID NO: 2920785 - RNA, 19 nt, Artificial Sequence
  Description of Artificial Sequence: Synthetic oligonucleotide
ggcagcacgacucccggaa

SEQ ID NO: 2920786 - RNA, 19 nt, Artificial Sequence
  Description of Artificial Sequence: Synthetic oligonucleotide
gccggcacggccccaauac

SEQ ID NO: 2920787 - RNA, 19 nt, Artificial Sequence
  Description of Artificial Sequence: Synthetic oligonucleotide
agcgaccggucccgugccg

SEQ ID NO: 2920788 - RNA, 19 nt, Artificial Sequence
  Description of Artificial Sequence: Synthetic oligonucleotide
gucgcucacgugacagugc

SEQ ID NO: 2920789 - RNA, 19 nt, Artificial Sequence
  Description of Artificial Sequence: Synthetic oligonucleotide
ugacggcagcacgacuccc

SEQ ID NO: 2920790 - RNA, 19 nt, Artificial Sequence
  Description of Artificial Sequence: Synthetic oligonucleotide
cgguuauugaguucggcca

SEQ ID NO: 2920791 - RNA, 19 nt, Artificial Sequence
  Description of Artificial Sequence: Synthetic oligonucleotide
cugcagcuccgugaacacc

SEQ ID NO: 2920792 - RNA, 19 nt, Artificial Sequence
  Description of Artificial Sequence: Synthetic oligonucleotide
ucggcgugcacggccugcc

SEQ ID NO: 2920793 - RNA, 19 nt, Artificial Sequence
  Description of Artificial Sequence: Synthetic oligonucleotide
gucccgugccggcacggcc

SEQ ID NO: 2920794 - RNA, 19 nt, Artificial Sequence
  Description of Artificial Sequence: Synthetic oligonucleotide
gcggaacuuaacauagaca

SEQ ID NO: 2920795 - RNA, 19 nt, Artificial Sequence
  Description of Artificial Sequence: Synthetic oligonucleotide
gcgguacaaguugagcagc

SEQ ID NO: 2920796 - RNA, 19 nt, Artificial Sequence
  Description of Artificial Sequence: Synthetic oligonucleotide
ccgcucugcauccuccucc

SEQ ID NO: 2920797 - RNA, 19 nt, Artificial Sequence
  Description of Artificial Sequence: Synthetic oligonucleotide
ugcgauccgucggcggucu

SEQ ID NO: 2920798 - RNA, 19 nt, Artificial Sequence
  Description of Artificial Sequence: Synthetic oligonucleotide
acauugcccacgagguggu

SEQ ID NO: 2920799 - RNA, 19 nt, Artificial Sequence
  Description of Artificial Sequence: Synthetic oligonucleotide
ccaagguugucacacacgu

SEQ ID NO: 2920800 - RNA, 19 nt, Artificial Sequence
  Description of Artificial Sequence: Synthetic oligonucleotide
cccaucucauacugacggc

SEQ ID NO: 2920801 - RNA, 19 nt, Artificial Sequence
  Description of Artificial Sequence: Synthetic oligonucleotide
ucggcggucugcgcugugu

SEQ ID NO: 2920802 - RNA, 19 nt, Artificial Sequence
  Description of Artificial Sequence: Synthetic oligonucleotide
ggauugcgguacaaguuga

SEQ ID NO: 2920803 - RNA, 19 nt, Artificial Sequence
  Description of Artificial Sequence: Synthetic oligonucleotide
cacacacguucaucuccuc

SEQ ID NO: 2920804 - RNA, 19 nt, Artificial Sequence
  Description of Artificial Sequence: Synthetic oligonucleotide
cugcgcuguguucugcgga

SEQ ID NO: 2920805 - RNA, 19 nt, Artificial Sequence
  Description of Artificial Sequence: Synthetic oligonucleotide
gcacgacucccggaagucg

SEQ ID NO: 2920806 - RNA, 19 nt, Artificial Sequence
  Description of Artificial Sequence: Synthetic oligonucleotide
ccccaauacuuaaaaguaa

SEQ ID NO: 2920807 - RNA, 19 nt, Artificial Sequence
  Description of Artificial Sequence: Synthetic oligonucleotide
gugguccccaagguuguca

SEQ ID NO: 2920808 - RNA, 19 nt, Artificial Sequence
  Description of Artificial Sequence: Synthetic oligonucleotide
ccccaagguugucacacac

SEQ ID NO: 2920809 - RNA, 19 nt, Artificial Sequence
  Description of Artificial Sequence: Synthetic oligonucleotide
gaguucggccacagcccgc

SEQ ID NO: 2920810 - RNA, 19 nt, Artificial Sequence
  Description of Artificial Sequence: Synthetic oligonucleotide
cggaagucggugacaggcg

SEQ ID NO: 2920811 - RNA, 19 nt, Artificial Sequence
  Description of Artificial Sequence: Synthetic oligonucleotide
aggugguccccaagguugu

SEQ ID NO: 2920812 - RNA, 19 nt, Artificial Sequence
  Description of Artificial Sequence: Synthetic oligonucleotide
ccaucucauacugacggca

SEQ ID NO: 2920813 - RNA, 19 nt, Artificial Sequence
  Description of Artificial Sequence: Synthetic oligonucleotide
gcagcacgacucccggaag

SEQ ID NO: 2920814 - RNA, 19 nt, Artificial Sequence
  Description of Artificial Sequence: Synthetic oligonucleotide
gcuguguucugcggauugc

SEQ ID NO: 2920815 - RNA, 19 nt, Artificial Sequence
  Description of Artificial Sequence: Synthetic oligonucleotide
cagucgggagcgaccgguc

SEQ ID NO: 2920816 - RNA, 19 nt, Artificial Sequence
  Description of Artificial Sequence: Synthetic oligonucleotide
ccugcagcuccgugaacac

SEQ ID NO: 2920817 - RNA, 19 nt, Artificial Sequence
  Description of Artificial Sequence: Synthetic oligonucleotide
caccuccucaaagaaguua

SEQ ID NO: 2920818 - RNA, 19 nt, Artificial Sequence
  Description of Artificial Sequence: Synthetic oligonucleotide
aggcgacagcucggcgugc

SEQ ID NO: 2920819 - RNA, 19 nt, Artificial Sequence
  Description of Artificial Sequence: Synthetic oligonucleotide
ccugcccguugaaccagcg

SEQ ID NO: 2920820 - RNA, 19 nt, Artificial Sequence
  Description of Artificial Sequence: Synthetic oligonucleotide
ugccggcacggccccaaua

SEQ ID NO: 2920821 - RNA, 19 nt, Artificial Sequence
  Description of Artificial Sequence: Synthetic oligonucleotide
cucggcgugcacggccugc

SEQ ID NO: 2920822 - RNA, 19 nt, Artificial Sequence
  Description of Artificial Sequence: Synthetic oligonucleotide
cgugacagugcgauccguc

SEQ ID NO: 2920823 - RNA, 19 nt, Artificial Sequence
  Description of Artificial Sequence: Synthetic oligonucleotide
acgugacagugcgauccgu

SEQ ID NO: 2920824 - RNA, 19 nt, Artificial Sequence
  Description of Artificial Sequence: Synthetic oligonucleotide
gcuccgugaacaccuccuc

SEQ ID NO: 2920825 - RNA, 19 nt, Artificial Sequence
  Description of Artificial Sequence: Synthetic oligonucleotide
cacggccccaauacuuaaa

SEQ ID NO: 2920826 - RNA, 19 nt, Artificial Sequence
  Description of Artificial Sequence: Synthetic oligonucleotide
ccuccucaaagaaguuauc

SEQ ID NO: 2920827 - RNA, 19 nt, Artificial Sequence
  Description of Artificial Sequence: Synthetic oligonucleotide
caccuccacgucgcucacg

SEQ ID NO: 2920828 - RNA, 19 nt, Artificial Sequence
  Description of Artificial Sequence: Synthetic oligonucleotide
gccgccucggguacauucc

SEQ ID NO: 2920829 - RNA, 19 nt, Artificial Sequence
  Description of Artificial Sequence: Synthetic oligonucleotide
acgacucccggaagucggu

SEQ ID NO: 2920830 - RNA, 19 nt, Artificial Sequence
  Description of Artificial Sequence: Synthetic oligonucleotide
cgcucugcauccuccuccc

SEQ ID NO: 2920831 - RNA, 19 nt, Artificial Sequence
  Description of Artificial Sequence: Synthetic oligonucleotide
gcgaccggucccgugccgg

SEQ ID NO: 2920832 - RNA, 19 nt, Artificial Sequence
  Description of Artificial Sequence: Synthetic oligonucleotide
ccacagcccgcucugcauc

SEQ ID NO: 2920833 - RNA, 19 nt, Artificial Sequence
  Description of Artificial Sequence: Synthetic oligonucleotide
cugcaccuccacgucgcuc

SEQ ID NO: 2920834 - RNA, 19 nt, Artificial Sequence
  Description of Artificial Sequence: Synthetic oligonucleotide
cgcuguguucugcggauug

SEQ ID NO: 2920835 - RNA, 19 nt, Artificial Sequence
  Description of Artificial Sequence: Synthetic oligonucleotide
cagcacgacucccggaagu

SEQ ID NO: 2920836 - RNA, 19 nt, Artificial Sequence
  Description of Artificial Sequence: Synthetic oligonucleotide
cggccccaauacuuaaaag

SEQ ID NO: 2920837 - RNA, 19 nt, Artificial Sequence
  Description of Artificial Sequence: Synthetic oligonucleotide
gcucacgugacagugcgau

SEQ ID NO: 2920838 - RNA, 19 nt, Artificial Sequence
  Description of Artificial Sequence: Synthetic oligonucleotide
cgucgcucacgugacagug

SEQ ID NO: 2920839 - RNA, 19 nt, Artificial Sequence
  Description of Artificial Sequence: Synthetic oligonucleotide
ggcggucugcgcuguguuc

SEQ ID NO: 2920840 - RNA, 19 nt, Artificial Sequence
  Description of Artificial Sequence: Synthetic oligonucleotide
ugcccacgagguggucccc

SEQ ID NO: 2920841 - RNA, 19 nt, Artificial Sequence
  Description of Artificial Sequence: Synthetic oligonucleotide
ccgccucggguacauuccc

SEQ ID NO: 2920842 - RNA, 19 nt, Artificial Sequence
  Description of Artificial Sequence: Synthetic oligonucleotide
cgacagcucggcgugcacg

SEQ ID NO: 2920843 - RNA, 19 nt, Artificial Sequence
  Description of Artificial Sequence: Synthetic oligonucleotide
acaccuccucaaagaaguu

SEQ ID NO: 2920844 - RNA, 19 nt, Artificial Sequence
  Description of Artificial Sequence: Synthetic oligonucleotide
cccggcggaacuuaacaua

SEQ ID NO: 2920845 - RNA, 19 nt, Artificial Sequence
  Description of Artificial Sequence: Synthetic oligonucleotide
ggccugcccguugaaccag

SEQ ID NO: 2920846 - RNA, 19 nt, Artificial Sequence
  Description of Artificial Sequence: Synthetic oligonucleotide
gguccccaagguugucaca

SEQ ID NO: 2920847 - RNA, 19 nt, Artificial Sequence
  Description of Artificial Sequence: Synthetic oligonucleotide
ggucugcgcuguguucugc

SEQ ID NO: 2920848 - RNA, 19 nt, Artificial Sequence
  Description of Artificial Sequence: Synthetic oligonucleotide
gugcgauccgucggcgguc

SEQ ID NO: 2920849 - RNA, 19 nt, Artificial Sequence
  Description of Artificial Sequence: Synthetic oligonucleotide
ggaacuuaacauagacauu

SEQ ID NO: 2920850 - RNA, 19 nt, Artificial Sequence
  Description of Artificial Sequence: Synthetic oligonucleotide
gggagcgaccggucccgug

SEQ ID NO: 2920851 - RNA, 19 nt, Artificial Sequence
  Description of Artificial Sequence: Synthetic oligonucleotide
ccguacuucuccugcagcu

SEQ ID NO: 2920852 - RNA, 19 nt, Artificial Sequence
  Description of Artificial Sequence: Synthetic oligonucleotide
caagguugucacacacguu

SEQ ID NO: 2920853 - RNA, 19 nt, Artificial Sequence
  Description of Artificial Sequence: Synthetic oligonucleotide
cccggaagucggugacagg

SEQ ID NO: 2920854 - RNA, 19 nt, Artificial Sequence
  Description of Artificial Sequence: Synthetic oligonucleotide
gaccggucccgugccggca

SEQ ID NO: 2920855 - RNA, 19 nt, Artificial Sequence
  Description of Artificial Sequence: Synthetic oligonucleotide
cguacuucuccugcagcuc

SEQ ID NO: 2920856 - RNA, 19 nt, Artificial Sequence
  Description of Artificial Sequence: Synthetic oligonucleotide
ccucccggcggaacuuaac

SEQ ID NO: 2920857 - RNA, 19 nt, Artificial Sequence
  Description of Artificial Sequence: Synthetic oligonucleotide
ggcacggccccaauacuua

SEQ ID NO: 2920858 - RNA, 19 nt, Artificial Sequence
  Description of Artificial Sequence: Synthetic oligonucleotide
cauugcccacgaggugguc

SEQ ID NO: 2920859 - RNA, 19 nt, Artificial Sequence
  Description of Artificial Sequence: Synthetic oligonucleotide
cgguacaaguugagcagca

SEQ ID NO: 2920860 - RNA, 19 nt, Artificial Sequence
  Description of Artificial Sequence: Synthetic oligonucleotide
cucccggaagucggugaca

SEQ ID NO: 2920861 - RNA, 19 nt, Artificial Sequence
  Description of Artificial Sequence: Synthetic oligonucleotide
gcacggccccaauacuuaa

SEQ ID NO: 2920862 - RNA, 19 nt, Artificial Sequence
  Description of Artificial Sequence: Synthetic oligonucleotide
gucuggcugaaagucgguu

SEQ ID NO: 2920863 - RNA, 19 nt, Artificial Sequence
  Description of Artificial Sequence: Synthetic oligonucleotide
ccacgaggugguccccaag

SEQ ID NO: 2920864 - RNA, 19 nt, Artificial Sequence
  Description of Artificial Sequence: Synthetic oligonucleotide
guugugcagucgggagcga

SEQ ID NO: 2920865 - RNA, 19 nt, Artificial Sequence
  Description of Artificial Sequence: Synthetic oligonucleotide
gcggucugcgcuguguucu

SEQ ID NO: 2920866 - RNA, 19 nt, Artificial Sequence
  Description of Artificial Sequence: Synthetic oligonucleotide
gucggcggucugcgcugug

SEQ ID NO: 2920867 - RNA, 19 nt, Artificial Sequence
  Description of Artificial Sequence: Synthetic oligonucleotide
ccgucggcggucugcgcug

SEQ ID NO: 2920868 - RNA, 19 nt, Artificial Sequence
  Description of Artificial Sequence: Synthetic oligonucleotide
cgccucggguacauucccc

SEQ ID NO: 2920869 - RNA, 19 nt, Artificial Sequence
  Description of Artificial Sequence: Synthetic oligonucleotide
cgauccgucggcggucugc

SEQ ID NO: 2920870 - RNA, 19 nt, Artificial Sequence
  Description of Artificial Sequence: Synthetic oligonucleotide
guucggccacagcccgcuc

SEQ ID NO: 2920871 - RNA, 19 nt, Artificial Sequence
  Description of Artificial Sequence: Synthetic oligonucleotide
ggcgacagcucggcgugca

SEQ ID NO: 2920872 - RNA, 19 nt, Artificial Sequence
  Description of Artificial Sequence: Synthetic oligonucleotide
gcagucgggagcgaccggu

SEQ ID NO: 2920873 - RNA, 19 nt, Artificial Sequence
  Description of Artificial Sequence: Synthetic oligonucleotide
ggucccgugccggcacggc

SEQ ID NO: 2920874 - RNA, 19 nt, Artificial Sequence
  Description of Artificial Sequence: Synthetic oligonucleotide
gcggauugcgguacaaguu

SEQ ID NO: 2920875 - RNA, 19 nt, Artificial Sequence
  Description of Artificial Sequence: Synthetic oligonucleotide
gcgacagcucggcgugcac

SEQ ID NO: 2920876 - RNA, 19 nt, Artificial Sequence
  Description of Artificial Sequence: Synthetic oligonucleotide
ccgugaacaccuccucaaa

SEQ ID NO: 2920877 - RNA, 19 nt, Artificial Sequence
  Description of Artificial Sequence: Synthetic oligonucleotide
cacgauggucuggcugaaa

SEQ ID NO: 2920878 - RNA, 19 nt, Artificial Sequence
  Description of Artificial Sequence: Synthetic oligonucleotide
gccugcccguugaaccagc

SEQ ID NO: 2920879 - RNA, 19 nt, Artificial Sequence
  Description of Artificial Sequence: Synthetic oligonucleotide
ggugguccccaagguuguc

SEQ ID NO: 2920880 - RNA, 19 nt, Artificial Sequence
  Description of Artificial Sequence: Synthetic oligonucleotide
cccgugccggcacggcccc

SEQ ID NO: 2920881 - RNA, 19 nt, Artificial Sequence
  Description of Artificial Sequence: Synthetic oligonucleotide
aagccgccucggguacauu

SEQ ID NO: 2920882 - RNA, 19 nt, Artificial Sequence
  Description of Artificial Sequence: Synthetic oligonucleotide
gcagcuccgugaacaccuc

SEQ ID NO: 2920883 - RNA, 19 nt, Artificial Sequence
  Description of Artificial Sequence: Synthetic oligonucleotide
ccggucccgugccggcacg

SEQ ID NO: 2920884 - RNA, 19 nt, Artificial Sequence
  Description of Artificial Sequence: Synthetic oligonucleotide
cgaccggucccgugccggc

SEQ ID NO: 2920885 - RNA, 19 nt, Artificial Sequence
  Description of Artificial Sequence: Synthetic oligonucleotide
gcucggcgugcacggccug

SEQ ID NO: 2920886 - RNA, 19 nt, Artificial Sequence
  Description of Artificial Sequence: Synthetic oligonucleotide
ccuccacgucgcucacgug

SEQ ID NO: 2920887 - RNA, 19 nt, Artificial Sequence
  Description of Artificial Sequence: Synthetic oligonucleotide
gcgugcacggccugcccgu

SEQ ID NO: 2920888 - RNA, 19 nt, Artificial Sequence
  Description of Artificial Sequence: Synthetic oligonucleotide
cuccucccggcggaacuua

SEQ ID NO: 2920889 - RNA, 19 nt, Artificial Sequence
  Description of Artificial Sequence: Synthetic oligonucleotide
cggucugcgcuguguucug

SEQ ID NO: 2920890 - RNA, 19 nt, Artificial Sequence
  Description of Artificial Sequence: Synthetic oligonucleotide
cccguugaaccagcgguua

SEQ ID NO: 2920891 - RNA, 19 nt, Artificial Sequence
  Description of Artificial Sequence: Synthetic oligonucleotide
gcagcacgauggucuggcu

SEQ ID NO: 2920892 - RNA, 19 nt, Artificial Sequence
  Description of Artificial Sequence: Synthetic oligonucleotide
gcccacgagguggucccca

SEQ ID NO: 2920893 - RNA, 19 nt, Artificial Sequence
  Description of Artificial Sequence: Synthetic oligonucleotide
cgacucccggaagucggug

SEQ ID NO: 2920894 - RNA, 19 nt, Artificial Sequence
  Description of Artificial Sequence: Synthetic oligonucleotide
ccucaaucucuccguacuu

SEQ ID NO: 2920895 - RNA, 19 nt, Artificial Sequence
  Description of Artificial Sequence: Synthetic oligonucleotide
gcacgauggucuggcugaa

SEQ ID NO: 2920896 - RNA, 19 nt, Artificial Sequence
  Description of Artificial Sequence: Synthetic oligonucleotide
cggcggaacuuaacauaga

SEQ ID NO: 2920897 - RNA, 19 nt, Artificial Sequence
  Description of Artificial Sequence: Synthetic oligonucleotide
gcgauccgucggcggucug

SEQ ID NO: 2920898 - RNA, 19 nt, Artificial Sequence
  Description of Artificial Sequence: Synthetic oligonucleotide
cccacgaggugguccccaa

SEQ ID NO: 2920899 - RNA, 19 nt, Artificial Sequence
  Description of Artificial Sequence: Synthetic oligonucleotide
ccacgucgcucacgugaca

SEQ ID NO: 2920900 - RNA, 19 nt, Artificial Sequence
  Description of Artificial Sequence: Synthetic oligonucleotide
gcccguugaaccagcgguu

SEQ ID NO: 2920901 - RNA, 19 nt, Artificial Sequence
  Description of Artificial Sequence: Synthetic oligonucleotide
ccguugaaccagcgguuau

SEQ ID NO: 2920902 - RNA, 19 nt, Artificial Sequence
  Description of Artificial Sequence: Synthetic oligonucleotide
gcacggccugcccguugaa

SEQ ID NO: 2920903 - RNA, 19 nt, Artificial Sequence
  Description of Artificial Sequence: Synthetic oligonucleotide
cggucccgugccggcacgg

SEQ ID NO: 2920904 - RNA, 19 nt, Artificial Sequence
  Description of Artificial Sequence: Synthetic oligonucleotide
cgaggugguccccaagguu

SEQ ID NO: 2920905 - RNA, 19 nt, Artificial Sequence
  Description of Artificial Sequence: Synthetic oligonucleotide
cguugaaccagcgguuauu

SEQ ID NO: 2920906 - RNA, 19 nt, Artificial Sequence
  Description of Artificial Sequence: Synthetic oligonucleotide
cgcucacgugacagugcga

SEQ ID NO: 2920907 - RNA, 19 nt, Artificial Sequence
  Description of Artificial Sequence: Synthetic oligonucleotide
ccggcacggccccaauacu

SEQ ID NO: 2920908 - RNA, 19 nt, Artificial Sequence
  Description of Artificial Sequence: Synthetic oligonucleotide
cggcacggccccaauacuu

SEQ ID NO: 2920909 - RNA, 19 nt, Artificial Sequence
  Description of Artificial Sequence: Synthetic oligonucleotide
gugccggcacggccccaau

SEQ ID NO: 2920910 - RNA, 19 nt, Artificial Sequence
  Description of Artificial Sequence: Synthetic oligonucleotide
cggcagcacgacucccgga

SEQ ID NO: 2920911 - RNA, 19 nt, Artificial Sequence
  Description of Artificial Sequence: Synthetic oligonucleotide
ccugcaccuccacgucgcu

SEQ ID NO: 2920912 - RNA, 19 nt, Artificial Sequence
  Description of Artificial Sequence: Synthetic oligonucleotide
cgugccggcacggccccaa

SEQ ID NO: 2920913 - RNA, 19 nt, Artificial Sequence
  Description of Artificial Sequence: Synthetic oligonucleotide
gcgcuguguucugcggauu

SEQ ID NO: 2920914 - RNA, 19 nt, Artificial Sequence
  Description of Artificial Sequence: Synthetic oligonucleotide
cggcggucugcgcuguguu

SEQ ID NO: 2920915 - RNA, 19 nt, Artificial Sequence
  Description of Artificial Sequence: Synthetic oligonucleotide
cgucggcggucugcgcugu

SEQ ID NO: 2920916 - RNA, 19 nt, Artificial Sequence
  Description of Artificial Sequence: Synthetic oligonucleotide
ccgugccggcacggcccca

SEQ ID NO: 2920917 - RNA, 19 nt, Artificial Sequence
  Description of Artificial Sequence: Synthetic oligonucleotide
cgugcacggccugcccguu

SEQ ID NO: 2920918 - RNA, 19 nt, Artificial Sequence
  Description of Artificial Sequence: Synthetic oligonucleotide
cgggagcgaccggucccgu

SEQ ID NO: 2920919 - RNA, 19 nt, Artificial Sequence
  Description of Artificial Sequence: Synthetic oligonucleotide
uuaaucaugggucuguggg

SEQ ID NO: 2920920 - RNA, 19 nt, Artificial Sequence
  Description of Artificial Sequence: Synthetic oligonucleotide
aaugcugccacccuagauc

SEQ ID NO: 2920921 - RNA, 19 nt, Artificial Sequence
  Description of Artificial Sequence: Synthetic oligonucleotide
cauauugucaacuccgucg

SEQ ID NO: 2920922 - RNA, 19 nt, Artificial Sequence
  Description of Artificial Sequence: Synthetic oligonucleotide
ucagcauacuucuuggucg

SEQ ID NO: 2920923 - RNA, 19 nt, Artificial Sequence
  Description of Artificial Sequence: Synthetic oligonucleotide
aaaugcuggcuucacaagg

SEQ ID NO: 2920924 - RNA, 19 nt, Artificial Sequence
  Description of Artificial Sequence: Synthetic oligonucleotide
aaggcuuugguccuaaaug

SEQ ID NO: 2920925 - RNA, 19 nt, Artificial Sequence
  Description of Artificial Sequence: Synthetic oligonucleotide
guugauggcaaccauauug

SEQ ID NO: 2920926 - RNA, 19 nt, Artificial Sequence
  Description of Artificial Sequence: Synthetic oligonucleotide
aucacauugagaagaaucc

SEQ ID NO: 2920927 - RNA, 19 nt, Artificial Sequence
  Description of Artificial Sequence: Synthetic oligonucleotide
ugcucugucagcaugaauc

SEQ ID NO: 2920928 - RNA, 19 nt, Artificial Sequence
  Description of Artificial Sequence: Synthetic oligonucleotide
ugcuuuuaagggcaagugg

SEQ ID NO: 2920929 - RNA, 19 nt, Artificial Sequence
  Description of Artificial Sequence: Synthetic oligonucleotide
aaccauauugucaacuccg

SEQ ID NO: 2920930 - RNA, 19 nt, Artificial Sequence
  Description of Artificial Sequence: Synthetic oligonucleotide
aagguccucuuguaguugc

SEQ ID NO: 2920931 - RNA, 19 nt, Artificial Sequence
  Description of Artificial Sequence: Synthetic oligonucleotide
ucugucagcaugaaucugc

SEQ ID NO: 2920932 - RNA, 19 nt, Artificial Sequence
  Description of Artificial Sequence: Synthetic oligonucleotide
auauugucaacuccgucgg

SEQ ID NO: 2920933 - RNA, 19 nt, Artificial Sequence
  Description of Artificial Sequence: Synthetic oligonucleotide
uagacuccaagugugagcg

SEQ ID NO: 2920934 - RNA, 19 nt, Artificial Sequence
  Description of Artificial Sequence: Synthetic oligonucleotide
uugagaauguccuggaugu

SEQ ID NO: 2920935 - RNA, 19 nt, Artificial Sequence
  Description of Artificial Sequence: Synthetic oligonucleotide
uguaguugcgccccauucg

SEQ ID NO: 2920936 - RNA, 19 nt, Artificial Sequence
  Description of Artificial Sequence: Synthetic oligonucleotide
auugagaauguccuggaug

SEQ ID NO: 2920937 - RNA, 19 nt, Artificial Sequence
  Description of Artificial Sequence: Synthetic oligonucleotide
aagggcaagugguugcccc

SEQ ID NO: 2920938 - RNA, 19 nt, Artificial Sequence
  Description of Artificial Sequence: Synthetic oligonucleotide
aggcagacuccucaaaugc

SEQ ID NO: 2920939 - RNA, 19 nt, Artificial Sequence
  Description of Artificial Sequence: Synthetic oligonucleotide
ucaccauugagaauguccu

SEQ ID NO: 2920940 - RNA, 19 nt, Artificial Sequence
  Description of Artificial Sequence: Synthetic oligonucleotide
ucaaaugcuggcuucacaa

SEQ ID NO: 2920941 - RNA, 19 nt, Artificial Sequence
  Description of Artificial Sequence: Synthetic oligonucleotide
aucacaucagcauacuucu

SEQ ID NO: 2920942 - RNA, 19 nt, Artificial Sequence
  Description of Artificial Sequence: Synthetic oligonucleotide
gugcugaacgaguugaugg

SEQ ID NO: 2920943 - RNA, 19 nt, Artificial Sequence
  Description of Artificial Sequence: Synthetic oligonucleotide
cacauugagaagaaucccc

SEQ ID NO: 2920944 - RNA, 19 nt, Artificial Sequence
  Description of Artificial Sequence: Synthetic oligonucleotide
uuuaagggcaagugguugc

SEQ ID NO: 2920945 - RNA, 19 nt, Artificial Sequence
  Description of Artificial Sequence: Synthetic oligonucleotide
uugauggcaaccauauugu

SEQ ID NO: 2920946 - RNA, 19 nt, Artificial Sequence
  Description of Artificial Sequence: Synthetic oligonucleotide
acaucagcauacuucuugg

SEQ ID NO: 2920947 - RNA, 19 nt, Artificial Sequence
  Description of Artificial Sequence: Synthetic oligonucleotide
gaucacauugagaagaauc

SEQ ID NO: 2920948 - RNA, 19 nt, Artificial Sequence
  Description of Artificial Sequence: Synthetic oligonucleotide
uaaucaugggucugugggg

SEQ ID NO: 2920949 - RNA, 19 nt, Artificial Sequence
  Description of Artificial Sequence: Synthetic oligonucleotide
auugagaagaauccccuga

SEQ ID NO: 2920950 - RNA, 19 nt, Artificial Sequence
  Description of Artificial Sequence: Synthetic oligonucleotide
aagugugagcgcuugccag

SEQ ID NO: 2920951 - RNA, 19 nt, Artificial Sequence
  Description of Artificial Sequence: Synthetic oligonucleotide
ugaucuccuggcucgaggg

SEQ ID NO: 2920952 - RNA, 19 nt, Artificial Sequence
  Description of Artificial Sequence: Synthetic oligonucleotide
cuuugguccuaaaugcugc

SEQ ID NO: 2920953 - RNA, 19 nt, Artificial Sequence
  Description of Artificial Sequence: Synthetic oligonucleotide
ugaaucugcccuuccaagc

SEQ ID NO: 2920954 - RNA, 19 nt, Artificial Sequence
  Description of Artificial Sequence: Synthetic oligonucleotide
agacccuuaaucauggguc

SEQ ID NO: 2920955 - RNA, 19 nt, Artificial Sequence
  Description of Artificial Sequence: Synthetic oligonucleotide
agcaaggaaggcuuugguc

SEQ ID NO: 2920956 - RNA, 19 nt, Artificial Sequence
  Description of Artificial Sequence: Synthetic oligonucleotide
caggucaccauugagaaug

SEQ ID NO: 2920957 - RNA, 19 nt, Artificial Sequence
  Description of Artificial Sequence: Synthetic oligonucleotide
aguugcgccccauucgggc

SEQ ID NO: 2920958 - RNA, 19 nt, Artificial Sequence
  Description of Artificial Sequence: Synthetic oligonucleotide
aaucuacguaugcuggucu

SEQ ID NO: 2920959 - RNA, 19 nt, Artificial Sequence
  Description of Artificial Sequence: Synthetic oligonucleotide
gaucacaucagcauacuuc

SEQ ID NO: 2920960 - RNA, 19 nt, Artificial Sequence
  Description of Artificial Sequence: Synthetic oligonucleotide
ugcugcuagacuccaagug

SEQ ID NO: 2920961 - RNA, 19 nt, Artificial Sequence
  Description of Artificial Sequence: Synthetic oligonucleotide
guaugcuggucucaguggg

SEQ ID NO: 2920962 - RNA, 19 nt, Artificial Sequence
  Description of Artificial Sequence: Synthetic oligonucleotide
cuaaaugcugccacccuag

SEQ ID NO: 2920963 - RNA, 19 nt, Artificial Sequence
  Description of Artificial Sequence: Synthetic oligonucleotide
uuuuaagggcaagugguug

SEQ ID NO: 2920964 - RNA, 19 nt, Artificial Sequence
  Description of Artificial Sequence: Synthetic oligonucleotide
guaguugcgccccauucgg

SEQ ID NO: 2920965 - RNA, 19 nt, Artificial Sequence
  Description of Artificial Sequence: Synthetic oligonucleotide
auugucaacuccgucgggg

SEQ ID NO: 2920966 - RNA, 19 nt, Artificial Sequence
  Description of Artificial Sequence: Synthetic oligonucleotide
uugccaguggccaaccacc

SEQ ID NO: 2920967 - RNA, 19 nt, Artificial Sequence
  Description of Artificial Sequence: Synthetic oligonucleotide
agggugaucuccuggcucg

SEQ ID NO: 2920968 - RNA, 19 nt, Artificial Sequence
  Description of Artificial Sequence: Synthetic oligonucleotide
cuagaucacauugagaaga

SEQ ID NO: 2920969 - RNA, 19 nt, Artificial Sequence
  Description of Artificial Sequence: Synthetic oligonucleotide
ugcuggcuucacaaggugg

SEQ ID NO: 2920970 - RNA, 19 nt, Artificial Sequence
  Description of Artificial Sequence: Synthetic oligonucleotide
cuuaaucaugggucugugg

SEQ ID NO: 2920971 - RNA, 19 nt, Artificial Sequence
  Description of Artificial Sequence: Synthetic oligonucleotide
cacaucagcauacuucuug

SEQ ID NO: 2920972 - RNA, 19 nt, Artificial Sequence
  Description of Artificial Sequence: Synthetic oligonucleotide
cucuaugccgcuugcacag

SEQ ID NO: 2920973 - RNA, 19 nt, Artificial Sequence
  Description of Artificial Sequence: Synthetic oligonucleotide
ucucaguggggccugcugc

SEQ ID NO: 2920974 - RNA, 19 nt, Artificial Sequence
  Description of Artificial Sequence: Synthetic oligonucleotide
gagaauguccuggaugugc

SEQ ID NO: 2920975 - RNA, 19 nt, Artificial Sequence
  Description of Artificial Sequence: Synthetic oligonucleotide
gucaccauugagaaugucc

SEQ ID NO: 2920976 - RNA, 19 nt, Artificial Sequence
  Description of Artificial Sequence: Synthetic oligonucleotide
acguaugcuggucucagug

SEQ ID NO: 2920977 - RNA, 19 nt, Artificial Sequence
  Description of Artificial Sequence: Synthetic oligonucleotide
cuagacuccaagugugagc

SEQ ID NO: 2920978 - RNA, 19 nt, Artificial Sequence
  Description of Artificial Sequence: Synthetic oligonucleotide
aaucaugggucugugggga

SEQ ID NO: 2920979 - RNA, 19 nt, Artificial Sequence
  Description of Artificial Sequence: Synthetic oligonucleotide
uaugcuggucucagugggg

SEQ ID NO: 2920980 - RNA, 19 nt, Artificial Sequence
  Description of Artificial Sequence: Synthetic oligonucleotide
uuggucggcaggcagacuc

SEQ ID NO: 2920981 - RNA, 19 nt, Artificial Sequence
  Description of Artificial Sequence: Synthetic oligonucleotide
ucacauugagaagaauccc

SEQ ID NO: 2920982 - RNA, 19 nt, Artificial Sequence
  Description of Artificial Sequence: Synthetic oligonucleotide
accggaaugcucugucagc

SEQ ID NO: 2920983 - RNA, 19 nt, Artificial Sequence
  Description of Artificial Sequence: Synthetic oligonucleotide
auggaucacaucagcauac

SEQ ID NO: 2920984 - RNA, 19 nt, Artificial Sequence
  Description of Artificial Sequence: Synthetic oligonucleotide
agacuccucaaaugcuggc

SEQ ID NO: 2920985 - RNA, 19 nt, Artificial Sequence
  Description of Artificial Sequence: Synthetic oligonucleotide
aacgaguugauggcaacca

SEQ ID NO: 2920986 - RNA, 19 nt, Artificial Sequence
  Description of Artificial Sequence: Synthetic oligonucleotide
caaccauauugucaacucc

SEQ ID NO: 2920987 - RNA, 19 nt, Artificial Sequence
  Description of Artificial Sequence: Synthetic oligonucleotide
ugcacaggucaccauugag

SEQ ID NO: 2920988 - RNA, 19 nt, Artificial Sequence
  Description of Artificial Sequence: Synthetic oligonucleotide
uccucuaugccgcuugcac

SEQ ID NO: 2920989 - RNA, 19 nt, Artificial Sequence
  Description of Artificial Sequence: Synthetic oligonucleotide
cauacuucuuggucggcag

SEQ ID NO: 2920990 - RNA, 19 nt, Artificial Sequence
  Description of Artificial Sequence: Synthetic oligonucleotide
ugguccuaaaugcugccac

SEQ ID NO: 2920991 - RNA, 19 nt, Artificial Sequence
  Description of Artificial Sequence: Synthetic oligonucleotide
agcaugaaucugcccuucc

SEQ ID NO: 2920992 - RNA, 19 nt, Artificial Sequence
  Description of Artificial Sequence: Synthetic oligonucleotide
gaaucugcccuuccaagca

SEQ ID NO: 2920993 - RNA, 19 nt, Artificial Sequence
  Description of Artificial Sequence: Synthetic oligonucleotide
gaugugcugaacgaguuga

SEQ ID NO: 2920994 - RNA, 19 nt, Artificial Sequence
  Description of Artificial Sequence: Synthetic oligonucleotide
cuucacaaggugguguacg

SEQ ID NO: 2920995 - RNA, 19 nt, Artificial Sequence
  Description of Artificial Sequence: Synthetic oligonucleotide
uuugguccuaaaugcugcc

SEQ ID NO: 2920996 - RNA, 19 nt, Artificial Sequence
  Description of Artificial Sequence: Synthetic oligonucleotide
aaugcuggcuucacaaggu

SEQ ID NO: 2920997 - RNA, 19 nt, Artificial Sequence
  Description of Artificial Sequence: Synthetic oligonucleotide
uguggggaaucuacguaug

SEQ ID NO: 2920998 - RNA, 19 nt, Artificial Sequence
  Description of Artificial Sequence: Synthetic oligonucleotide
aaaugcugccacccuagau

SEQ ID NO: 2920999 - RNA, 19 nt, Artificial Sequence
  Description of Artificial Sequence: Synthetic oligonucleotide
ucugcccuuccaagcaagg

SEQ ID NO: 2921000 - RNA, 19 nt, Artificial Sequence
  Description of Artificial Sequence: Synthetic oligonucleotide
cuugcacaggucaccauug

SEQ ID NO: 2921001 - RNA, 19 nt, Artificial Sequence
  Description of Artificial Sequence: Synthetic oligonucleotide
ugcccuuccaagcaaggaa

SEQ ID NO: 2921002 - RNA, 19 nt, Artificial Sequence
  Description of Artificial Sequence: Synthetic oligonucleotide
cugacugcuuuuaagggca

SEQ ID NO: 2921003 - RNA, 19 nt, Artificial Sequence
  Description of Artificial Sequence: Synthetic oligonucleotide
gauggaucacaucagcaua

SEQ ID NO: 2921004 - RNA, 19 nt, Artificial Sequence
  Description of Artificial Sequence: Synthetic oligonucleotide
aucuacguaugcuggucuc

SEQ ID NO: 2921005 - RNA, 19 nt, Artificial Sequence
  Description of Artificial Sequence: Synthetic oligonucleotide
aagcaaggaaggcuuuggu

SEQ ID NO: 2921006 - RNA, 19 nt, Artificial Sequence
  Description of Artificial Sequence: Synthetic oligonucleotide
uauugucaacuccgucggg

SEQ ID NO: 2921007 - RNA, 19 nt, Artificial Sequence
  Description of Artificial Sequence: Synthetic oligonucleotide
uccucuuguaguugcgccc

SEQ ID NO: 2921008 - RNA, 19 nt, Artificial Sequence
  Description of Artificial Sequence: Synthetic oligonucleotide
uagaucacauugagaagaa

SEQ ID NO: 2921009 - RNA, 19 nt, Artificial Sequence
  Description of Artificial Sequence: Synthetic oligonucleotide
ucuguggggaaucuacgua

SEQ ID NO: 2921010 - RNA, 19 nt, Artificial Sequence
  Description of Artificial Sequence: Synthetic oligonucleotide
cagcauacuucuuggucgg

SEQ ID NO: 2921011 - RNA, 19 nt, Artificial Sequence
  Description of Artificial Sequence: Synthetic oligonucleotide
ucggcaggcagacuccuca

SEQ ID NO: 2921012 - RNA, 19 nt, Artificial Sequence
  Description of Artificial Sequence: Synthetic oligonucleotide
caaaugcuggcuucacaag

SEQ ID NO: 2921013 - RNA, 19 nt, Artificial Sequence
  Description of Artificial Sequence: Synthetic oligonucleotide
gucagcaugaaucugcccu

SEQ ID NO: 2921014 - RNA, 19 nt, Artificial Sequence
  Description of Artificial Sequence: Synthetic oligonucleotide
uucacaaggugguguacgu

SEQ ID NO: 2921015 - RNA, 19 nt, Artificial Sequence
  Description of Artificial Sequence: Synthetic oligonucleotide
cugcuagacuccaagugug

SEQ ID NO: 2921016 - RNA, 19 nt, Artificial Sequence
  Description of Artificial Sequence: Synthetic oligonucleotide
augcuggucucaguggggc

SEQ ID NO: 2921017 - RNA, 19 nt, Artificial Sequence
  Description of Artificial Sequence: Synthetic oligonucleotide
agggaagguccucuuguag

SEQ ID NO: 2921018 - RNA, 19 nt, Artificial Sequence
  Description of Artificial Sequence: Synthetic oligonucleotide
uuaagggcaagugguugcc

SEQ ID NO: 2921019 - RNA, 19 nt, Artificial Sequence
  Description of Artificial Sequence: Synthetic oligonucleotide
caagcaaggaaggcuuugg

SEQ ID NO: 2921020 - RNA, 19 nt, Artificial Sequence
  Description of Artificial Sequence: Synthetic oligonucleotide
augcugccacccuagauca

SEQ ID NO: 2921021 - RNA, 19 nt, Artificial Sequence
  Description of Artificial Sequence: Synthetic oligonucleotide
ugugcugaacgaguugaug

SEQ ID NO: 2921022 - RNA, 19 nt, Artificial Sequence
  Description of Artificial Sequence: Synthetic oligonucleotide
uccccugacugcuuuuaag

SEQ ID NO: 2921023 - RNA, 19 nt, Artificial Sequence
  Description of Artificial Sequence: Synthetic oligonucleotide
uucuuggucggcaggcaga

SEQ ID NO: 2921024 - RNA, 19 nt, Artificial Sequence
  Description of Artificial Sequence: Synthetic oligonucleotide
uacuucuuggucggcaggc

SEQ ID NO: 2921025 - RNA, 19 nt, Artificial Sequence
  Description of Artificial Sequence: Synthetic oligonucleotide
cacccuagaucacauugag

SEQ ID NO: 2921026 - RNA, 19 nt, Artificial Sequence
  Description of Artificial Sequence: Synthetic oligonucleotide
cacaaggugguguacguga

SEQ ID NO: 2921027 - RNA, 19 nt, Artificial Sequence
  Description of Artificial Sequence: Synthetic oligonucleotide
cauugagaagaauccccug

SEQ ID NO: 2921028 - RNA, 19 nt, Artificial Sequence
  Description of Artificial Sequence: Synthetic oligonucleotide
cuugccaguggccaaccac

SEQ ID NO: 2921029 - RNA, 19 nt, Artificial Sequence
  Description of Artificial Sequence: Synthetic oligonucleotide
ugaacgaguugauggcaac

SEQ ID NO: 2921030 - RNA, 19 nt, Artificial Sequence
  Description of Artificial Sequence: Synthetic oligonucleotide
cccuagaucacauugagaa

SEQ ID NO: 2921031 - RNA, 19 nt, Artificial Sequence
  Description of Artificial Sequence: Synthetic oligonucleotide
acugcuuuuaagggcaagu

SEQ ID NO: 2921032 - RNA, 19 nt, Artificial Sequence
  Description of Artificial Sequence: Synthetic oligonucleotide
gaacgaguugauggcaacc

SEQ ID NO: 2921033 - RNA, 19 nt, Artificial Sequence
  Description of Artificial Sequence: Synthetic oligonucleotide
ggggaaucuacguaugcug

SEQ ID NO: 2921034 - RNA, 19 nt, Artificial Sequence
  Description of Artificial Sequence: Synthetic oligonucleotide
gugaucuccuggcucgagg

SEQ ID NO: 2921035 - RNA, 19 nt, Artificial Sequence
  Description of Artificial Sequence: Synthetic oligonucleotide
ugcuagacuccaaguguga

SEQ ID NO: 2921036 - RNA, 19 nt, Artificial Sequence
  Description of Artificial Sequence: Synthetic oligonucleotide
aaucugcccuuccaagcaa

SEQ ID NO: 2921037 - RNA, 19 nt, Artificial Sequence
  Description of Artificial Sequence: Synthetic oligonucleotide
agugugagcgcuugccagu

SEQ ID NO: 2921038 - RNA, 19 nt, Artificial Sequence
  Description of Artificial Sequence: Synthetic oligonucleotide
uccuaaaugcugccacccu

SEQ ID NO: 2921039 - RNA, 19 nt, Artificial Sequence
  Description of Artificial Sequence: Synthetic oligonucleotide
gaaucuacguaugcugguc

SEQ ID NO: 2921040 - RNA, 19 nt, Artificial Sequence
  Description of Artificial Sequence: Synthetic oligonucleotide
uaaaugcugccacccuaga

SEQ ID NO: 2921041 - RNA, 19 nt, Artificial Sequence
  Description of Artificial Sequence: Synthetic oligonucleotide
cacaggucaccauugagaa

SEQ ID NO: 2921042 - RNA, 19 nt, Artificial Sequence
  Description of Artificial Sequence: Synthetic oligonucleotide
caggcagacuccucaaaug

SEQ ID NO: 2921043 - RNA, 19 nt, Artificial Sequence
  Description of Artificial Sequence: Synthetic oligonucleotide
ucuccuggcucgagggaag

SEQ ID NO: 2921044 - RNA, 19 nt, Artificial Sequence
  Description of Artificial Sequence: Synthetic oligonucleotide
gggaaucuacguaugcugg

SEQ ID NO: 2921045 - RNA, 19 nt, Artificial Sequence
  Description of Artificial Sequence: Synthetic oligonucleotide
guccucuuguaguugcgcc

SEQ ID NO: 2921046 - RNA, 19 nt, Artificial Sequence
  Description of Artificial Sequence: Synthetic oligonucleotide
ucuacguaugcuggucuca

SEQ ID NO: 2921047 - RNA, 19 nt, Artificial Sequence
  Description of Artificial Sequence: Synthetic oligonucleotide
uggggaaucuacguaugcu

SEQ ID NO: 2921048 - RNA, 19 nt, Artificial Sequence
  Description of Artificial Sequence: Synthetic oligonucleotide
uaguugcgccccauucggg

SEQ ID NO: 2921049 - RNA, 19 nt, Artificial Sequence
  Description of Artificial Sequence: Synthetic oligonucleotide
caccggaaugcucugucag

SEQ ID NO: 2921050 - RNA, 19 nt, Artificial Sequence
  Description of Artificial Sequence: Synthetic oligonucleotide
ccugacugcuuuuaagggc

SEQ ID NO: 2921051 - RNA, 19 nt, Artificial Sequence
  Description of Artificial Sequence: Synthetic oligonucleotide
cuucuuggucggcaggcag

SEQ ID NO: 2921052 - RNA, 19 nt, Artificial Sequence
  Description of Artificial Sequence: Synthetic oligonucleotide
uggaugugcugaacgaguu

SEQ ID NO: 2921053 - RNA, 19 nt, Artificial Sequence
  Description of Artificial Sequence: Synthetic oligonucleotide
ucgagggaagguccucuug

SEQ ID NO: 2921054 - RNA, 19 nt, Artificial Sequence
  Description of Artificial Sequence: Synthetic oligonucleotide
ggaaugcucugucagcaug

SEQ ID NO: 2921055 - RNA, 19 nt, Artificial Sequence
  Description of Artificial Sequence: Synthetic oligonucleotide
gccacccuagaucacauug

SEQ ID NO: 2921056 - RNA, 19 nt, Artificial Sequence
  Description of Artificial Sequence: Synthetic oligonucleotide
ugagcgcuugccaguggcc

SEQ ID NO: 2921057 - RNA, 19 nt, Artificial Sequence
  Description of Artificial Sequence: Synthetic oligonucleotide
ccccugacugcuuuuaagg

SEQ ID NO: 2921058 - RNA, 19 nt, Artificial Sequence
  Description of Artificial Sequence: Synthetic oligonucleotide
gacaccggaaugcucuguc

SEQ ID NO: 2921059 - RNA, 19 nt, Artificial Sequence
  Description of Artificial Sequence: Synthetic oligonucleotide
ugugagcgcuugccagugg

SEQ ID NO: 2921060 - RNA, 19 nt, Artificial Sequence
  Description of Artificial Sequence: Synthetic oligonucleotide
ucagcaugaaucugcccuu

SEQ ID NO: 2921061 - RNA, 19 nt, Artificial Sequence
  Description of Artificial Sequence: Synthetic oligonucleotide
cugcuuuuaagggcaagug

SEQ ID NO: 2921062 - RNA, 19 nt, Artificial Sequence
  Description of Artificial Sequence: Synthetic oligonucleotide
guccuaaaugcugccaccc

SEQ ID NO: 2921063 - RNA, 19 nt, Artificial Sequence
  Description of Artificial Sequence: Synthetic oligonucleotide
ugauggcaaccauauuguc

SEQ ID NO: 2921064 - RNA, 19 nt, Artificial Sequence
  Description of Artificial Sequence: Synthetic oligonucleotide
augccgcuugcacagguca

SEQ ID NO: 2921065 - RNA, 19 nt, Artificial Sequence
  Description of Artificial Sequence: Synthetic oligonucleotide
ugccaguggccaaccaccc

SEQ ID NO: 2921066 - RNA, 19 nt, Artificial Sequence
  Description of Artificial Sequence: Synthetic oligonucleotide
agacuccaagugugagcgc

SEQ ID NO: 2921067 - RNA, 19 nt, Artificial Sequence
  Description of Artificial Sequence: Synthetic oligonucleotide
uucgggcccuccucuaugc

SEQ ID NO: 2921068 - RNA, 19 nt, Artificial Sequence
  Description of Artificial Sequence: Synthetic oligonucleotide
guggggaaucuacguaugc

SEQ ID NO: 2921069 - RNA, 19 nt, Artificial Sequence
  Description of Artificial Sequence: Synthetic oligonucleotide
uugcacaggucaccauuga

SEQ ID NO: 2921070 - RNA, 19 nt, Artificial Sequence
  Description of Artificial Sequence: Synthetic oligonucleotide
gugagcgcuugccaguggc

SEQ ID NO: 2921071 - RNA, 19 nt, Artificial Sequence
  Description of Artificial Sequence: Synthetic oligonucleotide
ugucagcaugaaucugccc

SEQ ID NO: 2921072 - RNA, 19 nt, Artificial Sequence
  Description of Artificial Sequence: Synthetic oligonucleotide
uccaagugugagcgcuugc

SEQ ID NO: 2921073 - RNA, 19 nt, Artificial Sequence
  Description of Artificial Sequence: Synthetic oligonucleotide
cuacguaugcuggucucag

SEQ ID NO: 2921074 - RNA, 19 nt, Artificial Sequence
  Description of Artificial Sequence: Synthetic oligonucleotide
caggcccagacccuuaauc

SEQ ID NO: 2921075 - RNA, 19 nt, Artificial Sequence
  Description of Artificial Sequence: Synthetic oligonucleotide
gcaaccauauugucaacuc

SEQ ID NO: 2921076 - RNA, 19 nt, Artificial Sequence
  Description of Artificial Sequence: Synthetic oligonucleotide
acuccucaaaugcuggcuu

SEQ ID NO: 2921077 - RNA, 19 nt, Artificial Sequence
  Description of Artificial Sequence: Synthetic oligonucleotide
gaagaauccccugacugcu

SEQ ID NO: 2921078 - RNA, 19 nt, Artificial Sequence
  Description of Artificial Sequence: Synthetic oligonucleotide
caugaaucugcccuuccaa

SEQ ID NO: 2921079 - RNA, 19 nt, Artificial Sequence
  Description of Artificial Sequence: Synthetic oligonucleotide
gaagguccucuuguaguug

SEQ ID NO: 2921080 - RNA, 19 nt, Artificial Sequence
  Description of Artificial Sequence: Synthetic oligonucleotide
ucuuggucggcaggcagac

SEQ ID NO: 2921081 - RNA, 19 nt, Artificial Sequence
  Description of Artificial Sequence: Synthetic oligonucleotide
augcuggcuucacaaggug

SEQ ID NO: 2921082 - RNA, 19 nt, Artificial Sequence
  Description of Artificial Sequence: Synthetic oligonucleotide
ucacaaggugguguacgug

SEQ ID NO: 2921083 - RNA, 19 nt, Artificial Sequence
  Description of Artificial Sequence: Synthetic oligonucleotide
auucgggcccuccucuaug

SEQ ID NO: 2921084 - RNA, 19 nt, Artificial Sequence
  Description of Artificial Sequence: Synthetic oligonucleotide
uggucggcaggcagacucc

SEQ ID NO: 2921085 - RNA, 19 nt, Artificial Sequence
  Description of Artificial Sequence: Synthetic oligonucleotide
guugcgccccauucgggcc

SEQ ID NO: 2921086 - RNA, 19 nt, Artificial Sequence
  Description of Artificial Sequence: Synthetic oligonucleotide
uugguccuaaaugcugcca

SEQ ID NO: 2921087 - RNA, 19 nt, Artificial Sequence
  Description of Artificial Sequence: Synthetic oligonucleotide
cccagacccuuaaucaugg

SEQ ID NO: 2921088 - RNA, 19 nt, Artificial Sequence
  Description of Artificial Sequence: Synthetic oligonucleotide
uggcuucacaagguggugu

SEQ ID NO: 2921089 - RNA, 19 nt, Artificial Sequence
  Description of Artificial Sequence: Synthetic oligonucleotide
cccugacugcuuuuaaggg

SEQ ID NO: 2921090 - RNA, 19 nt, Artificial Sequence
  Description of Artificial Sequence: Synthetic oligonucleotide
agaauccccugacugcuuu

SEQ ID NO: 2921091 - RNA, 19 nt, Artificial Sequence
  Description of Artificial Sequence: Synthetic oligonucleotide
ucuaugccgcuugcacagg

SEQ ID NO: 2921092 - RNA, 19 nt, Artificial Sequence
  Description of Artificial Sequence: Synthetic oligonucleotide
ccuagaucacauugagaag

SEQ ID NO: 2921093 - RNA, 19 nt, Artificial Sequence
  Description of Artificial Sequence: Synthetic oligonucleotide
acaaggugguguacgugag

SEQ ID NO: 2921094 - RNA, 19 nt, Artificial Sequence
  Description of Artificial Sequence: Synthetic oligonucleotide
aaugcucugucagcaugaa

SEQ ID NO: 2921095 - RNA, 19 nt, Artificial Sequence
  Description of Artificial Sequence: Synthetic oligonucleotide
gguccuaaaugcugccacc

SEQ ID NO: 2921096 - RNA, 19 nt, Artificial Sequence
  Description of Artificial Sequence: Synthetic oligonucleotide
gacccuuaaucaugggucu

SEQ ID NO: 2921097 - RNA, 19 nt, Artificial Sequence
  Description of Artificial Sequence: Synthetic oligonucleotide
gaguugauggcaaccauau

SEQ ID NO: 2921098 - RNA, 19 nt, Artificial Sequence
  Description of Artificial Sequence: Synthetic oligonucleotide
ugagaauguccuggaugug

SEQ ID NO: 2921099 - RNA, 19 nt, Artificial Sequence
  Description of Artificial Sequence: Synthetic oligonucleotide
caccauugagaauguccug

SEQ ID NO: 2921100 - RNA, 19 nt, Artificial Sequence
  Description of Artificial Sequence: Synthetic oligonucleotide
agcauacuucuuggucggc

SEQ ID NO: 2921101 - RNA, 19 nt, Artificial Sequence
  Description of Artificial Sequence: Synthetic oligonucleotide
uugcgccccauucgggccc

SEQ ID NO: 2921102 - RNA, 19 nt, Artificial Sequence
  Description of Artificial Sequence: Synthetic oligonucleotide
uggaucacaucagcauacu

SEQ ID NO: 2921103 - RNA, 19 nt, Artificial Sequence
  Description of Artificial Sequence: Synthetic oligonucleotide
ggggauggaucacaucagc

SEQ ID NO: 2921104 - RNA, 19 nt, Artificial Sequence
  Description of Artificial Sequence: Synthetic oligonucleotide
acaccggaaugcucuguca

SEQ ID NO: 2921105 - RNA, 19 nt, Artificial Sequence
  Description of Artificial Sequence: Synthetic oligonucleotide
gacugcuuuuaagggcaag

SEQ ID NO: 2921106 - RNA, 19 nt, Artificial Sequence
  Description of Artificial Sequence: Synthetic oligonucleotide
aauccccugacugcuuuua

SEQ ID NO: 2921107 - RNA, 19 nt, Artificial Sequence
  Description of Artificial Sequence: Synthetic oligonucleotide
accauauugucaacuccgu

SEQ ID NO: 2921108 - RNA, 19 nt, Artificial Sequence
  Description of Artificial Sequence: Synthetic oligonucleotide
cugaacgaguugauggcaa

SEQ ID NO: 2921109 - RNA, 19 nt, Artificial Sequence
  Description of Artificial Sequence: Synthetic oligonucleotide
cagggugaucuccuggcuc

SEQ ID NO: 2921110 - RNA, 19 nt, Artificial Sequence
  Description of Artificial Sequence: Synthetic oligonucleotide
gcuuuuaagggcaaguggu

SEQ ID NO: 2921111 - RNA, 19 nt, Artificial Sequence
  Description of Artificial Sequence: Synthetic oligonucleotide
caagugugagcgcuugcca

SEQ ID NO: 2921112 - RNA, 19 nt, Artificial Sequence
  Description of Artificial Sequence: Synthetic oligonucleotide
acgaguugauggcaaccau

SEQ ID NO: 2921113 - RNA, 19 nt, Artificial Sequence
  Description of Artificial Sequence: Synthetic oligonucleotide
uacguaugcuggucucagu

SEQ ID NO: 2921114 - RNA, 19 nt, Artificial Sequence
  Description of Artificial Sequence: Synthetic oligonucleotide
cucaaaugcuggcuucaca

SEQ ID NO: 2921115 - RNA, 19 nt, Artificial Sequence
  Description of Artificial Sequence: Synthetic oligonucleotide
ugcuggucucaguggggcc

SEQ ID NO: 2921116 - RNA, 19 nt, Artificial Sequence
  Description of Artificial Sequence: Synthetic oligonucleotide
gcagacuccucaaaugcug

SEQ ID NO: 2921117 - RNA, 19 nt, Artificial Sequence
  Description of Artificial Sequence: Synthetic oligonucleotide
ggggccugcugcuagacuc

SEQ ID NO: 2921118 - RNA, 19 nt, Artificial Sequence
  Description of Artificial Sequence: Synthetic oligonucleotide
ggucuguggggaaucuacg

SEQ ID NO: 2921119 - RNA, 19 nt, Artificial Sequence
  Description of Artificial Sequence: Synthetic oligonucleotide
ggaugugcugaacgaguug

SEQ ID NO: 2921120 - RNA, 19 nt, Artificial Sequence
  Description of Artificial Sequence: Synthetic oligonucleotide
gucucaguggggccugcug

SEQ ID NO: 2921121 - RNA, 19 nt, Artificial Sequence
  Description of Artificial Sequence: Synthetic oligonucleotide
gacuccaagugugagcgcu

SEQ ID NO: 2921122 - RNA, 19 nt, Artificial Sequence
  Description of Artificial Sequence: Synthetic oligonucleotide
ugccgcuugcacaggucac

SEQ ID NO: 2921123 - RNA, 19 nt, Artificial Sequence
  Description of Artificial Sequence: Synthetic oligonucleotide
gaucuccuggcucgaggga

SEQ ID NO: 2921124 - RNA, 19 nt, Artificial Sequence
  Description of Artificial Sequence: Synthetic oligonucleotide
ugacugcuuuuaagggcaa

SEQ ID NO: 2921125 - RNA, 19 nt, Artificial Sequence
  Description of Artificial Sequence: Synthetic oligonucleotide
gcuagacuccaagugugag

SEQ ID NO: 2921126 - RNA, 19 nt, Artificial Sequence
  Description of Artificial Sequence: Synthetic oligonucleotide
ccaagugugagcgcuugcc

SEQ ID NO: 2921127 - RNA, 19 nt, Artificial Sequence
  Description of Artificial Sequence: Synthetic oligonucleotide
cguaugcuggucucagugg

SEQ ID NO: 2921128 - RNA, 19 nt, Artificial Sequence
  Description of Artificial Sequence: Synthetic oligonucleotide
aguugauggcaaccauauu

SEQ ID NO: 2921129 - RNA, 19 nt, Artificial Sequence
  Description of Artificial Sequence: Synthetic oligonucleotide
gcccuuccaagcaaggaag

SEQ ID NO: 2921130 - RNA, 19 nt, Artificial Sequence
  Description of Artificial Sequence: Synthetic oligonucleotide
aucugcccuuccaagcaag

SEQ ID NO: 2921131 - RNA, 19 nt, Artificial Sequence
  Description of Artificial Sequence: Synthetic oligonucleotide
acaggucaccauugagaau

SEQ ID NO: 2921132 - RNA, 19 nt, Artificial Sequence
  Description of Artificial Sequence: Synthetic oligonucleotide
aucuccuggcucgagggaa

SEQ ID NO: 2921133 - RNA, 19 nt, Artificial Sequence
  Description of Artificial Sequence: Synthetic oligonucleotide
gcugcuagacuccaagugu

SEQ ID NO: 2921134 - RNA, 19 nt, Artificial Sequence
  Description of Artificial Sequence: Synthetic oligonucleotide
gcacaggucaccauugaga

SEQ ID NO: 2921135 - RNA, 19 nt, Artificial Sequence
  Description of Artificial Sequence: Synthetic oligonucleotide
ucacaucagcauacuucuu

SEQ ID NO: 2921136 - RNA, 19 nt, Artificial Sequence
  Description of Artificial Sequence: Synthetic oligonucleotide
ggauggaucacaucagcau

SEQ ID NO: 2921137 - RNA, 19 nt, Artificial Sequence
  Description of Artificial Sequence: Synthetic oligonucleotide
cccuuccaagcaaggaagg

SEQ ID NO: 2921138 - RNA, 19 nt, Artificial Sequence
  Description of Artificial Sequence: Synthetic oligonucleotide
cccagggugaucuccuggc

SEQ ID NO: 2921139 - RNA, 19 nt, Artificial Sequence
  Description of Artificial Sequence: Synthetic oligonucleotide
ucaugggucuguggggaau

SEQ ID NO: 2921140 - RNA, 19 nt, Artificial Sequence
  Description of Artificial Sequence: Synthetic oligonucleotide
gagggaagguccucuugua

SEQ ID NO: 2921141 - RNA, 19 nt, Artificial Sequence
  Description of Artificial Sequence: Synthetic oligonucleotide
cucugucagcaugaaucug

SEQ ID NO: 2921142 - RNA, 19 nt, Artificial Sequence
  Description of Artificial Sequence: Synthetic oligonucleotide
caugggucuguggggaauc

SEQ ID NO: 2921143 - RNA, 19 nt, Artificial Sequence
  Description of Artificial Sequence: Synthetic oligonucleotide
caguggggccugcugcuag

SEQ ID NO: 2921144 - RNA, 19 nt, Artificial Sequence
  Description of Artificial Sequence: Synthetic oligonucleotide
gucuguggggaaucuacgu

SEQ ID NO: 2921145 - RNA, 19 nt, Artificial Sequence
  Description of Artificial Sequence: Synthetic oligonucleotide
cuguggggaaucuacguau

SEQ ID NO: 2921146 - RNA, 19 nt, Artificial Sequence
  Description of Artificial Sequence: Synthetic oligonucleotide
acccuuaaucaugggucug

SEQ ID NO: 2921147 - RNA, 19 nt, Artificial Sequence
  Description of Artificial Sequence: Synthetic oligonucleotide
gggucuguggggaaucuac

SEQ ID NO: 2921148 - RNA, 19 nt, Artificial Sequence
  Description of Artificial Sequence: Synthetic oligonucleotide
acuucuuggucggcaggca

SEQ ID NO: 2921149 - RNA, 19 nt, Artificial Sequence
  Description of Artificial Sequence: Synthetic oligonucleotide
cuccaagugugagcgcuug

SEQ ID NO: 2921150 - RNA, 19 nt, Artificial Sequence
  Description of Artificial Sequence: Synthetic oligonucleotide
agaucacauugagaagaau

SEQ ID NO: 2921151 - RNA, 19 nt, Artificial Sequence
  Description of Artificial Sequence: Synthetic oligonucleotide
cuuuuaagggcaagugguu

SEQ ID NO: 2921152 - RNA, 19 nt, Artificial Sequence
  Description of Artificial Sequence: Synthetic oligonucleotide
gacuccucaaaugcuggcu

SEQ ID NO: 2921153 - RNA, 19 nt, Artificial Sequence
  Description of Artificial Sequence: Synthetic oligonucleotide
gcaugaaucugcccuucca

SEQ ID NO: 2921154 - RNA, 19 nt, Artificial Sequence
  Description of Artificial Sequence: Synthetic oligonucleotide
gugugagcgcuugccagug

SEQ ID NO: 2921155 - RNA, 19 nt, Artificial Sequence
  Description of Artificial Sequence: Synthetic oligonucleotide
agguccucuuguaguugcg

SEQ ID NO: 2921156 - RNA, 19 nt, Artificial Sequence
  Description of Artificial Sequence: Synthetic oligonucleotide
uggggccugcugcuagacu

SEQ ID NO: 2921157 - RNA, 19 nt, Artificial Sequence
  Description of Artificial Sequence: Synthetic oligonucleotide
ucuuguaguugcgccccau

SEQ ID NO: 2921158 - RNA, 19 nt, Artificial Sequence
  Description of Artificial Sequence: Synthetic oligonucleotide
aucaugggucuguggggaa

SEQ ID NO: 2921159 - RNA, 19 nt, Artificial Sequence
  Description of Artificial Sequence: Synthetic oligonucleotide
uggcaaccauauugucaac

SEQ ID NO: 2921160 - RNA, 19 nt, Artificial Sequence
  Description of Artificial Sequence: Synthetic oligonucleotide
gggaagguccucuuguagu

SEQ ID NO: 2921161 - RNA, 19 nt, Artificial Sequence
  Description of Artificial Sequence: Synthetic oligonucleotide
caaggaaggcuuugguccu

SEQ ID NO: 2921162 - RNA, 19 nt, Artificial Sequence
  Description of Artificial Sequence: Synthetic oligonucleotide
ccucuuguaguugcgcccc

SEQ ID NO: 2921163 - RNA, 19 nt, Artificial Sequence
  Description of Artificial Sequence: Synthetic oligonucleotide
gggauggaucacaucagca

SEQ ID NO: 2921164 - RNA, 19 nt, Artificial Sequence
  Description of Artificial Sequence: Synthetic oligonucleotide
augcucugucagcaugaau

SEQ ID NO: 2921165 - RNA, 19 nt, Artificial Sequence
  Description of Artificial Sequence: Synthetic oligonucleotide
ccuggaugugcugaacgag

SEQ ID NO: 2921166 - RNA, 19 nt, Artificial Sequence
  Description of Artificial Sequence: Synthetic oligonucleotide
cuggcuucacaagguggug

SEQ ID NO: 2921167 - RNA, 19 nt, Artificial Sequence
  Description of Artificial Sequence: Synthetic oligonucleotide
auccccugacugcuuuuaa

SEQ ID NO: 2921168 - RNA, 19 nt, Artificial Sequence
  Description of Artificial Sequence: Synthetic oligonucleotide
gguccucuuguaguugcgc

SEQ ID NO: 2921169 - RNA, 19 nt, Artificial Sequence
  Description of Artificial Sequence: Synthetic oligonucleotide
ccuuccaagcaaggaaggc

SEQ ID NO: 2921170 - RNA, 19 nt, Artificial Sequence
  Description of Artificial Sequence: Synthetic oligonucleotide
acccuagaucacauugaga

SEQ ID NO: 2921171 - RNA, 19 nt, Artificial Sequence
  Description of Artificial Sequence: Synthetic oligonucleotide
ccauauugucaacuccguc

SEQ ID NO: 2921172 - RNA, 19 nt, Artificial Sequence
  Description of Artificial Sequence: Synthetic oligonucleotide
agcgcuugccaguggccaa

SEQ ID NO: 2921173 - RNA, 19 nt, Artificial Sequence
  Description of Artificial Sequence: Synthetic oligonucleotide
ggaaucuacguaugcuggu

SEQ ID NO: 2921174 - RNA, 19 nt, Artificial Sequence
  Description of Artificial Sequence: Synthetic oligonucleotide
aagaauccccugacugcuu

SEQ ID NO: 2921175 - RNA, 19 nt, Artificial Sequence
  Description of Artificial Sequence: Synthetic oligonucleotide
ugcugccacccuagaucac

SEQ ID NO: 2921176 - RNA, 19 nt, Artificial Sequence
  Description of Artificial Sequence: Synthetic oligonucleotide
aaggaaggcuuugguccua

SEQ ID NO: 2921177 - RNA, 19 nt, Artificial Sequence
  Description of Artificial Sequence: Synthetic oligonucleotide
gcccagacccuuaaucaug

SEQ ID NO: 2921178 - RNA, 19 nt, Artificial Sequence
  Description of Artificial Sequence: Synthetic oligonucleotide
gcugaacgaguugauggca

SEQ ID NO: 2921179 - RNA, 19 nt, Artificial Sequence
  Description of Artificial Sequence: Synthetic oligonucleotide
cagcaugaaucugcccuuc

SEQ ID NO: 2921180 - RNA, 19 nt, Artificial Sequence
  Description of Artificial Sequence: Synthetic oligonucleotide
gcauacuucuuggucggca

SEQ ID NO: 2921181 - RNA, 19 nt, Artificial Sequence
  Description of Artificial Sequence: Synthetic oligonucleotide
ccauugagaauguccugga

SEQ ID NO: 2921182 - RNA, 19 nt, Artificial Sequence
  Description of Artificial Sequence: Synthetic oligonucleotide
augggucuguggggaaucu

SEQ ID NO: 2921183 - RNA, 19 nt, Artificial Sequence
  Description of Artificial Sequence: Synthetic oligonucleotide
ccucuaugccgcuugcaca

SEQ ID NO: 2921184 - RNA, 19 nt, Artificial Sequence
  Description of Artificial Sequence: Synthetic oligonucleotide
ggcuucacaagguggugua

SEQ ID NO: 2921185 - RNA, 19 nt, Artificial Sequence
  Description of Artificial Sequence: Synthetic oligonucleotide
gcugccacccuagaucaca

SEQ ID NO: 2921186 - RNA, 19 nt, Artificial Sequence
  Description of Artificial Sequence: Synthetic oligonucleotide
caucagcauacuucuuggu

SEQ ID NO: 2921187 - RNA, 19 nt, Artificial Sequence
  Description of Artificial Sequence: Synthetic oligonucleotide
ggcaaccauauugucaacu

SEQ ID NO: 2921188 - RNA, 19 nt, Artificial Sequence
  Description of Artificial Sequence: Synthetic oligonucleotide
ccuuaaucaugggucugug

SEQ ID NO: 2921189 - RNA, 19 nt, Artificial Sequence
  Description of Artificial Sequence: Synthetic oligonucleotide
gggcccuccucuaugccgc

SEQ ID NO: 2921190 - RNA, 19 nt, Artificial Sequence
  Description of Artificial Sequence: Synthetic oligonucleotide
aggaaggcuuugguccuaa

SEQ ID NO: 2921191 - RNA, 19 nt, Artificial Sequence
  Description of Artificial Sequence: Synthetic oligonucleotide
uccuggcucgagggaaggu

SEQ ID NO: 2921192 - RNA, 19 nt, Artificial Sequence
  Description of Artificial Sequence: Synthetic oligonucleotide
aggucaccauugagaaugu

SEQ ID NO: 2921193 - RNA, 19 nt, Artificial Sequence
  Description of Artificial Sequence: Synthetic oligonucleotide
ccacccuagaucacauuga

SEQ ID NO: 2921194 - RNA, 19 nt, Artificial Sequence
  Description of Artificial Sequence: Synthetic oligonucleotide
ggaagguccucuuguaguu

SEQ ID NO: 2921195 - RNA, 19 nt, Artificial Sequence
  Description of Artificial Sequence: Synthetic oligonucleotide
ccaagcaaggaaggcuuug

SEQ ID NO: 2921196 - RNA, 19 nt, Artificial Sequence
  Description of Artificial Sequence: Synthetic oligonucleotide
cuggucucaguggggccug

SEQ ID NO: 2921197 - RNA, 19 nt, Artificial Sequence
  Description of Artificial Sequence: Synthetic oligonucleotide
ccagacccuuaaucauggg

SEQ ID NO: 2921198 - RNA, 19 nt, Artificial Sequence
  Description of Artificial Sequence: Synthetic oligonucleotide
ugggucuguggggaaucua

SEQ ID NO: 2921199 - RNA, 19 nt, Artificial Sequence
  Description of Artificial Sequence: Synthetic oligonucleotide
augugcugaacgaguugau

SEQ ID NO: 2921200 - RNA, 19 nt, Artificial Sequence
  Description of Artificial Sequence: Synthetic oligonucleotide
ucaguggggccugcugcua

SEQ ID NO: 2921201 - RNA, 19 nt, Artificial Sequence
  Description of Artificial Sequence: Synthetic oligonucleotide
cugcccuuccaagcaagga

SEQ ID NO: 2921202 - RNA, 19 nt, Artificial Sequence
  Description of Artificial Sequence: Synthetic oligonucleotide
cauugagaauguccuggau

SEQ ID NO: 2921203 - RNA, 19 nt, Artificial Sequence
  Description of Artificial Sequence: Synthetic oligonucleotide
cucaguggggccugcugcu

SEQ ID NO: 2921204 - RNA, 19 nt, Artificial Sequence
  Description of Artificial Sequence: Synthetic oligonucleotide
ggugaucuccuggcucgag

SEQ ID NO: 2921205 - RNA, 19 nt, Artificial Sequence
  Description of Artificial Sequence: Synthetic oligonucleotide
gccgcuugcacaggucacc

SEQ ID NO: 2921206 - RNA, 19 nt, Artificial Sequence
  Description of Artificial Sequence: Synthetic oligonucleotide
ugccacccuagaucacauu

SEQ ID NO: 2921207 - RNA, 19 nt, Artificial Sequence
  Description of Artificial Sequence: Synthetic oligonucleotide
cuaugccgcuugcacaggu

SEQ ID NO: 2921208 - RNA, 19 nt, Artificial Sequence
  Description of Artificial Sequence: Synthetic oligonucleotide
ccuggcucgagggaagguc

SEQ ID NO: 2921209 - RNA, 19 nt, Artificial Sequence
  Description of Artificial Sequence: Synthetic oligonucleotide
cugcugcuagacuccaagu

SEQ ID NO: 2921210 - RNA, 19 nt, Artificial Sequence
  Description of Artificial Sequence: Synthetic oligonucleotide
gcuggcuucacaagguggu

SEQ ID NO: 2921211 - RNA, 19 nt, Artificial Sequence
  Description of Artificial Sequence: Synthetic oligonucleotide
gcaggcagacuccucaaau

SEQ ID NO: 2921212 - RNA, 19 nt, Artificial Sequence
  Description of Artificial Sequence: Synthetic oligonucleotide
cccuccucuaugccgcuug

SEQ ID NO: 2921213 - RNA, 19 nt, Artificial Sequence
  Description of Artificial Sequence: Synthetic oligonucleotide
gcuugcacaggucaccauu

SEQ ID NO: 2921214 - RNA, 19 nt, Artificial Sequence
  Description of Artificial Sequence: Synthetic oligonucleotide
ccggaaugcucugucagca

SEQ ID NO: 2921215 - RNA, 19 nt, Artificial Sequence
  Description of Artificial Sequence: Synthetic oligonucleotide
cucuuguaguugcgcccca

SEQ ID NO: 2921216 - RNA, 19 nt, Artificial Sequence
  Description of Artificial Sequence: Synthetic oligonucleotide
gcuucacaaggugguguac

SEQ ID NO: 2921217 - RNA, 19 nt, Artificial Sequence
  Description of Artificial Sequence: Synthetic oligonucleotide
uggucucaguggggccugc

SEQ ID NO: 2921218 - RNA, 19 nt, Artificial Sequence
  Description of Artificial Sequence: Synthetic oligonucleotide
gggccugcugcuagacucc

SEQ ID NO: 2921219 - RNA, 19 nt, Artificial Sequence
  Description of Artificial Sequence: Synthetic oligonucleotide
caaggugguguacgugagu

SEQ ID NO: 2921220 - RNA, 19 nt, Artificial Sequence
  Description of Artificial Sequence: Synthetic oligonucleotide
gaauccccugacugcuuuu

SEQ ID NO: 2921221 - RNA, 19 nt, Artificial Sequence
  Description of Artificial Sequence: Synthetic oligonucleotide
guggggccugcugcuagac

SEQ ID NO: 2921222 - RNA, 19 nt, Artificial Sequence
  Description of Artificial Sequence: Synthetic oligonucleotide
ccuccucuaugccgcuugc

SEQ ID NO: 2921223 - RNA, 19 nt, Artificial Sequence
  Description of Artificial Sequence: Synthetic oligonucleotide
acuccaagugugagcgcuu

SEQ ID NO: 2921224 - RNA, 19 nt, Artificial Sequence
  Description of Artificial Sequence: Synthetic oligonucleotide
cuuguaguugcgccccauu

SEQ ID NO: 2921225 - RNA, 19 nt, Artificial Sequence
  Description of Artificial Sequence: Synthetic oligonucleotide
cuccucuaugccgcuugca

SEQ ID NO: 2921226 - RNA, 19 nt, Artificial Sequence
  Description of Artificial Sequence: Synthetic oligonucleotide
cgaguugauggcaaccaua

SEQ ID NO: 2921227 - RNA, 19 nt, Artificial Sequence
  Description of Artificial Sequence: Synthetic oligonucleotide
ggcaggcagacuccucaaa

SEQ ID NO: 2921228 - RNA, 19 nt, Artificial Sequence
  Description of Artificial Sequence: Synthetic oligonucleotide
ggcagacuccucaaaugcu

SEQ ID NO: 2921229 - RNA, 19 nt, Artificial Sequence
  Description of Artificial Sequence: Synthetic oligonucleotide
ggaucacaucagcauacuu

SEQ ID NO: 2921230 - RNA, 19 nt, Artificial Sequence
  Description of Artificial Sequence: Synthetic oligonucleotide
ggcccagacccuuaaucau

SEQ ID NO: 2921231 - RNA, 19 nt, Artificial Sequence
  Description of Artificial Sequence: Synthetic oligonucleotide
ugcgccccauucgggcccu

SEQ ID NO: 2921232 - RNA, 19 nt, Artificial Sequence
  Description of Artificial Sequence: Synthetic oligonucleotide
ggucaccauugagaauguc

SEQ ID NO: 2921233 - RNA, 19 nt, Artificial Sequence
  Description of Artificial Sequence: Synthetic oligonucleotide
cauucgggcccuccucuau

SEQ ID NO: 2921234 - RNA, 19 nt, Artificial Sequence
  Description of Artificial Sequence: Synthetic oligonucleotide
gucggcaggcagacuccuc

SEQ ID NO: 2921235 - RNA, 19 nt, Artificial Sequence
  Description of Artificial Sequence: Synthetic oligonucleotide
cugccacccuagaucacau

SEQ ID NO: 2921236 - RNA, 19 nt, Artificial Sequence
  Description of Artificial Sequence: Synthetic oligonucleotide
gcuggucucaguggggccu

SEQ ID NO: 2921237 - RNA, 19 nt, Artificial Sequence
  Description of Artificial Sequence: Synthetic oligonucleotide
gcuugccaguggccaacca

SEQ ID NO: 2921238 - RNA, 19 nt, Artificial Sequence
  Description of Artificial Sequence: Synthetic oligonucleotide
ccccauucgggcccuccuc

SEQ ID NO: 2921239 - RNA, 19 nt, Artificial Sequence
  Description of Artificial Sequence: Synthetic oligonucleotide
gcgcuugccaguggccaac

SEQ ID NO: 2921240 - RNA, 19 nt, Artificial Sequence
  Description of Artificial Sequence: Synthetic oligonucleotide
cgagggaagguccucuugu

SEQ ID NO: 2921241 - RNA, 19 nt, Artificial Sequence
  Description of Artificial Sequence: Synthetic oligonucleotide
cucgagggaagguccucuu

SEQ ID NO: 2921242 - RNA, 19 nt, Artificial Sequence
  Description of Artificial Sequence: Synthetic oligonucleotide
cccuuaaucaugggucugu

SEQ ID NO: 2921243 - RNA, 19 nt, Artificial Sequence
  Description of Artificial Sequence: Synthetic oligonucleotide
gcucgagggaagguccucu

SEQ ID NO: 2921244 - RNA, 19 nt, Artificial Sequence
  Description of Artificial Sequence: Synthetic oligonucleotide
ggccugcugcuagacucca

SEQ ID NO: 2921245 - RNA, 19 nt, Artificial Sequence
  Description of Artificial Sequence: Synthetic oligonucleotide
cccauucgggcccuccucu

SEQ ID NO: 2921246 - RNA, 19 nt, Artificial Sequence
  Description of Artificial Sequence: Synthetic oligonucleotide
gggugaucuccuggcucga

SEQ ID NO: 2921247 - RNA, 19 nt, Artificial Sequence
  Description of Artificial Sequence: Synthetic oligonucleotide
ccgcuugcacaggucacca

SEQ ID NO: 2921248 - RNA, 19 nt, Artificial Sequence
  Description of Artificial Sequence: Synthetic oligonucleotide
ggucggcaggcagacuccu

SEQ ID NO: 2921249 - RNA, 19 nt, Artificial Sequence
  Description of Artificial Sequence: Synthetic oligonucleotide
ccagggugaucuccuggcu

SEQ ID NO: 2921250 - RNA, 19 nt, Artificial Sequence
  Description of Artificial Sequence: Synthetic oligonucleotide
cgcuugccaguggccaacc

SEQ ID NO: 2921251 - RNA, 19 nt, Artificial Sequence
  Description of Artificial Sequence: Synthetic oligonucleotide
ccauucgggcccuccucua

SEQ ID NO: 2921252 - RNA, 19 nt, Artificial Sequence
  Description of Artificial Sequence: Synthetic oligonucleotide
cuuggucggcaggcagacu

SEQ ID NO: 2921253 - RNA, 19 nt, Artificial Sequence
  Description of Artificial Sequence: Synthetic oligonucleotide
gccccauucgggcccuccu

SEQ ID NO: 2921254 - RNA, 19 nt, Artificial Sequence
  Description of Artificial Sequence: Synthetic oligonucleotide
cccaggcccagacccuuaa

SEQ ID NO: 2921255 - RNA, 19 nt, Artificial Sequence
  Description of Artificial Sequence: Synthetic oligonucleotide
ggucucaguggggccugcu

SEQ ID NO: 2921256 - RNA, 19 nt, Artificial Sequence
  Description of Artificial Sequence: Synthetic oligonucleotide
cgccccauucgggcccucc

SEQ ID NO: 2921257 - RNA, 19 nt, Artificial Sequence
  Description of Artificial Sequence: Synthetic oligonucleotide
gccugcugcuagacuccaa

SEQ ID NO: 2921258 - RNA, 19 nt, Artificial Sequence
  Description of Artificial Sequence: Synthetic oligonucleotide
ggcccuccucuaugccgcu

SEQ ID NO: 2921259 - RNA, 19 nt, Artificial Sequence
  Description of Artificial Sequence: Synthetic oligonucleotide
cggaaugcucugucagcau

SEQ ID NO: 2921260 - RNA, 19 nt, Artificial Sequence
  Description of Artificial Sequence: Synthetic oligonucleotide
ccccaggcccagacccuua

SEQ ID NO: 2921261 - RNA, 19 nt, Artificial Sequence
  Description of Artificial Sequence: Synthetic oligonucleotide
cgcuugcacaggucaccau

SEQ ID NO: 2921262 - RNA, 19 nt, Artificial Sequence
  Description of Artificial Sequence: Synthetic oligonucleotide
gcccuccucuaugccgcuu

SEQ ID NO: 2921263 - RNA, 19 nt, Artificial Sequence
  Description of Artificial Sequence: Synthetic oligonucleotide
gcgccccauucgggcccuc

SEQ ID NO: 2921264 - RNA, 19 nt, Artificial Sequence
  Description of Artificial Sequence: Synthetic oligonucleotide
uuuuguaucaauauuaagu

SEQ ID NO: 2921265 - RNA, 19 nt, Artificial Sequence
  Description of Artificial Sequence: Synthetic oligonucleotide
acaaugaaaauucuucucc

SEQ ID NO: 2921266 - RNA, 19 nt, Artificial Sequence
  Description of Artificial Sequence: Synthetic oligonucleotide
aucaauauuaaguacuuuc

SEQ ID NO: 2921267 - RNA, 19 nt, Artificial Sequence
  Description of Artificial Sequence: Synthetic oligonucleotide
aaaguggaacaguagagac

SEQ ID NO: 2921268 - RNA, 19 nt, Artificial Sequence
  Description of Artificial Sequence: Synthetic oligonucleotide
auuaaguacuuucacuucc

SEQ ID NO: 2921269 - RNA, 19 nt, Artificial Sequence
  Description of Artificial Sequence: Synthetic oligonucleotide
uguaucaauauuaaguacu

SEQ ID NO: 2921270 - RNA, 19 nt, Artificial Sequence
  Description of Artificial Sequence: Synthetic oligonucleotide
aauauuaaguacuuucacu

SEQ ID NO: 2921271 - RNA, 19 nt, Artificial Sequence
  Description of Artificial Sequence: Synthetic oligonucleotide
aguacuuucacuucccggg

SEQ ID NO: 2921272 - RNA, 19 nt, Artificial Sequence
  Description of Artificial Sequence: Synthetic oligonucleotide
uauucaucagcacugaacu

SEQ ID NO: 2921273 - RNA, 19 nt, Artificial Sequence
  Description of Artificial Sequence: Synthetic oligonucleotide
uaugaaguauucaucagca

SEQ ID NO: 2921274 - RNA, 19 nt, Artificial Sequence
  Description of Artificial Sequence: Synthetic oligonucleotide
uuaaaugucaaugaucaca

SEQ ID NO: 2921275 - RNA, 19 nt, Artificial Sequence
  Description of Artificial Sequence: Synthetic oligonucleotide
ucaauauuaaguacuuuca

SEQ ID NO: 2921276 - RNA, 19 nt, Artificial Sequence
  Description of Artificial Sequence: Synthetic oligonucleotide
ugucauguaaccaaacaug

SEQ ID NO: 2921277 - RNA, 19 nt, Artificial Sequence
  Description of Artificial Sequence: Synthetic oligonucleotide
cauguaaccaaacauggcc

SEQ ID NO: 2921278 - RNA, 19 nt, Artificial Sequence
  Description of Artificial Sequence: Synthetic oligonucleotide
uuuguaucaauauuaagua

SEQ ID NO: 2921279 - RNA, 19 nt, Artificial Sequence
  Description of Artificial Sequence: Synthetic oligonucleotide
uacuucuacuguuugaagg

SEQ ID NO: 2921280 - RNA, 19 nt, Artificial Sequence
  Description of Artificial Sequence: Synthetic oligonucleotide
ugaaguauucaucagcacu

SEQ ID NO: 2921281 - RNA, 19 nt, Artificial Sequence
  Description of Artificial Sequence: Synthetic oligonucleotide
augaucacaacacuucugg

SEQ ID NO: 2921282 - RNA, 19 nt, Artificial Sequence
  Description of Artificial Sequence: Synthetic oligonucleotide
ggauacuuguccuugaucg

SEQ ID NO: 2921283 - RNA, 19 nt, Artificial Sequence
  Description of Artificial Sequence: Synthetic oligonucleotide
cuuguaaagccacucaucc

SEQ ID NO: 2921284 - RNA, 19 nt, Artificial Sequence
  Description of Artificial Sequence: Synthetic oligonucleotide
acuucuacuguuugaaggg

SEQ ID NO: 2921285 - RNA, 19 nt, Artificial Sequence
  Description of Artificial Sequence: Synthetic oligonucleotide
ucucccacccaauugaccg

SEQ ID NO: 2921286 - RNA, 19 nt, Artificial Sequence
  Description of Artificial Sequence: Synthetic oligonucleotide
uguaaagccacucauccaa

SEQ ID NO: 2921287 - RNA, 19 nt, Artificial Sequence
  Description of Artificial Sequence: Synthetic oligonucleotide
uggacaaugaaaauucuuc

SEQ ID NO: 2921288 - RNA, 19 nt, Artificial Sequence
  Description of Artificial Sequence: Synthetic oligonucleotide
cuggacaucagcuguaugg

SEQ ID NO: 2921289 - RNA, 19 nt, Artificial Sequence
  Description of Artificial Sequence: Synthetic oligonucleotide
aaaugcuuccuccagagua

SEQ ID NO: 2921290 - RNA, 19 nt, Artificial Sequence
  Description of Artificial Sequence: Synthetic oligonucleotide
aaugaaaauucuucuccca

SEQ ID NO: 2921291 - RNA, 19 nt, Artificial Sequence
  Description of Artificial Sequence: Synthetic oligonucleotide
ucauuguagaccugcauug

SEQ ID NO: 2921292 - RNA, 19 nt, Artificial Sequence
  Description of Artificial Sequence: Synthetic oligonucleotide
ucaaugaucacaacacuuc

SEQ ID NO: 2921293 - RNA, 19 nt, Artificial Sequence
  Description of Artificial Sequence: Synthetic oligonucleotide
aaguacuuucacuucccgg

SEQ ID NO: 2921294 - RNA, 19 nt, Artificial Sequence
  Description of Artificial Sequence: Synthetic oligonucleotide
aacaguagagacugcaggu

SEQ ID NO: 2921295 - RNA, 19 nt, Artificial Sequence
  Description of Artificial Sequence: Synthetic oligonucleotide
uucucuucauuguagaccu

SEQ ID NO: 2921296 - RNA, 19 nt, Artificial Sequence
  Description of Artificial Sequence: Synthetic oligonucleotide
ucaaaugcuuccuccagag

SEQ ID NO: 2921297 - RNA, 19 nt, Artificial Sequence
  Description of Artificial Sequence: Synthetic oligonucleotide
acacuguucaaaugcuucc

SEQ ID NO: 2921298 - RNA, 19 nt, Artificial Sequence
  Description of Artificial Sequence: Synthetic oligonucleotide
augucaaugaucacaacac

SEQ ID NO: 2921299 - RNA, 19 nt, Artificial Sequence
  Description of Artificial Sequence: Synthetic oligonucleotide
gaaguauucaucagcacug

SEQ ID NO: 2921300 - RNA, 19 nt, Artificial Sequence
  Description of Artificial Sequence: Synthetic oligonucleotide
ugaaaauucuucucccacc

SEQ ID NO: 2921301 - RNA, 19 nt, Artificial Sequence
  Description of Artificial Sequence: Synthetic oligonucleotide
uccaguaucugucauguaa

SEQ ID NO: 2921302 - RNA, 19 nt, Artificial Sequence
  Description of Artificial Sequence: Synthetic oligonucleotide
guaugaaguauucaucagc

SEQ ID NO: 2921303 - RNA, 19 nt, Artificial Sequence
  Description of Artificial Sequence: Synthetic oligonucleotide
uaaccaaacauggccaugg

SEQ ID NO: 2921304 - RNA, 19 nt, Artificial Sequence
  Description of Artificial Sequence: Synthetic oligonucleotide
uggcacacuguucaaaugc

SEQ ID NO: 2921305 - RNA, 19 nt, Artificial Sequence
  Description of Artificial Sequence: Synthetic oligonucleotide
uuaaguacuuucacuuccc

SEQ ID NO: 2921306 - RNA, 19 nt, Artificial Sequence
  Description of Artificial Sequence: Synthetic oligonucleotide
aaaaguggaacaguagaga

SEQ ID NO: 2921307 - RNA, 19 nt, Artificial Sequence
  Description of Artificial Sequence: Synthetic oligonucleotide
gucauguaaccaaacaugg

SEQ ID NO: 2921308 - RNA, 19 nt, Artificial Sequence
  Description of Artificial Sequence: Synthetic oligonucleotide
ucuucucccacccaauuga

SEQ ID NO: 2921309 - RNA, 19 nt, Artificial Sequence
  Description of Artificial Sequence: Synthetic oligonucleotide
caaugaaaauucuucuccc

SEQ ID NO: 2921310 - RNA, 19 nt, Artificial Sequence
  Description of Artificial Sequence: Synthetic oligonucleotide
uucaucagcacugaacuug

SEQ ID NO: 2921311 - RNA, 19 nt, Artificial Sequence
  Description of Artificial Sequence: Synthetic oligonucleotide
uugaccguaacuuguaagu

SEQ ID NO: 2921312 - RNA, 19 nt, Artificial Sequence
  Description of Artificial Sequence: Synthetic oligonucleotide
uguaacuggacaucagcug

SEQ ID NO: 2921313 - RNA, 19 nt, Artificial Sequence
  Description of Artificial Sequence: Synthetic oligonucleotide
aaauucuucucccacccaa

SEQ ID NO: 2921314 - RNA, 19 nt, Artificial Sequence
  Description of Artificial Sequence: Synthetic oligonucleotide
agcacugaacuuguaaagc

SEQ ID NO: 2921315 - RNA, 19 nt, Artificial Sequence
  Description of Artificial Sequence: Synthetic oligonucleotide
guauucguacuuucgauug

SEQ ID NO: 2921316 - RNA, 19 nt, Artificial Sequence
  Description of Artificial Sequence: Synthetic oligonucleotide
gagacugcaggucaucucc

SEQ ID NO: 2921317 - RNA, 19 nt, Artificial Sequence
  Description of Artificial Sequence: Synthetic oligonucleotide
guaucuuaaaugucaauga

SEQ ID NO: 2921318 - RNA, 19 nt, Artificial Sequence
  Description of Artificial Sequence: Synthetic oligonucleotide
uguaugguccaaguauucg

SEQ ID NO: 2921319 - RNA, 19 nt, Artificial Sequence
  Description of Artificial Sequence: Synthetic oligonucleotide
uaucuuaaaugucaaugau

SEQ ID NO: 2921320 - RNA, 19 nt, Artificial Sequence
  Description of Artificial Sequence: Synthetic oligonucleotide
auacuuguccuugaucgcc

SEQ ID NO: 2921321 - RNA, 19 nt, Artificial Sequence
  Description of Artificial Sequence: Synthetic oligonucleotide
aacuuguaaagccacucau

SEQ ID NO: 2921322 - RNA, 19 nt, Artificial Sequence
  Description of Artificial Sequence: Synthetic oligonucleotide
ucguacuuucgauugacug

SEQ ID NO: 2921323 - RNA, 19 nt, Artificial Sequence
  Description of Artificial Sequence: Synthetic oligonucleotide
gacuggaggauacuugucc

SEQ ID NO: 2921324 - RNA, 19 nt, Artificial Sequence
  Description of Artificial Sequence: Synthetic oligonucleotide
aaaugucaaugaucacaac

SEQ ID NO: 2921325 - RNA, 19 nt, Artificial Sequence
  Description of Artificial Sequence: Synthetic oligonucleotide
guuugaagggguuccacag

SEQ ID NO: 2921326 - RNA, 19 nt, Artificial Sequence
  Description of Artificial Sequence: Synthetic oligonucleotide
cauguaacuggacaucagc

SEQ ID NO: 2921327 - RNA, 19 nt, Artificial Sequence
  Description of Artificial Sequence: Synthetic oligonucleotide
caauauuaaguacuuucac

SEQ ID NO: 2921328 - RNA, 19 nt, Artificial Sequence
  Description of Artificial Sequence: Synthetic oligonucleotide
auugaccguaacuuguaag

SEQ ID NO: 2921329 - RNA, 19 nt, Artificial Sequence
  Description of Artificial Sequence: Synthetic oligonucleotide
aucuuaaaugucaaugauc

SEQ ID NO: 2921330 - RNA, 19 nt, Artificial Sequence
  Description of Artificial Sequence: Synthetic oligonucleotide
uccccaugcauguaacugg

SEQ ID NO: 2921331 - RNA, 19 nt, Artificial Sequence
  Description of Artificial Sequence: Synthetic oligonucleotide
gaagggguuccacaguucc

SEQ ID NO: 2921332 - RNA, 19 nt, Artificial Sequence
  Description of Artificial Sequence: Synthetic oligonucleotide
aaccaaacauggccauggc

SEQ ID NO: 2921333 - RNA, 19 nt, Artificial Sequence
  Description of Artificial Sequence: Synthetic oligonucleotide
aaguauucguacuuucgau

SEQ ID NO: 2921334 - RNA, 19 nt, Artificial Sequence
  Description of Artificial Sequence: Synthetic oligonucleotide
uuguaucaauauuaaguac

SEQ ID NO: 2921335 - RNA, 19 nt, Artificial Sequence
  Description of Artificial Sequence: Synthetic oligonucleotide
uguucaaaugcuuccucca

SEQ ID NO: 2921336 - RNA, 19 nt, Artificial Sequence
  Description of Artificial Sequence: Synthetic oligonucleotide
ucagcacugaacuuguaaa

SEQ ID NO: 2921337 - RNA, 19 nt, Artificial Sequence
  Description of Artificial Sequence: Synthetic oligonucleotide
ucauguaaccaaacauggc

SEQ ID NO: 2921338 - RNA, 19 nt, Artificial Sequence
  Description of Artificial Sequence: Synthetic oligonucleotide
gacaucagcuguauggucc

SEQ ID NO: 2921339 - RNA, 19 nt, Artificial Sequence
  Description of Artificial Sequence: Synthetic oligonucleotide
cuucucuucauuguagacc

SEQ ID NO: 2921340 - RNA, 19 nt, Artificial Sequence
  Description of Artificial Sequence: Synthetic oligonucleotide
agcuguaugguccaaguau

SEQ ID NO: 2921341 - RNA, 19 nt, Artificial Sequence
  Description of Artificial Sequence: Synthetic oligonucleotide
acuuucgauugacuggagg

SEQ ID NO: 2921342 - RNA, 19 nt, Artificial Sequence
  Description of Artificial Sequence: Synthetic oligonucleotide
ucuacuucuacuguuugaa

SEQ ID NO: 2921343 - RNA, 19 nt, Artificial Sequence
  Description of Artificial Sequence: Synthetic oligonucleotide
uacuucuguucccugagga

SEQ ID NO: 2921344 - RNA, 19 nt, Artificial Sequence
  Description of Artificial Sequence: Synthetic oligonucleotide
uugacuggaggauacuugu

SEQ ID NO: 2921345 - RNA, 19 nt, Artificial Sequence
  Description of Artificial Sequence: Synthetic oligonucleotide
uuguagaccugcauugcug

SEQ ID NO: 2921346 - RNA, 19 nt, Artificial Sequence
  Description of Artificial Sequence: Synthetic oligonucleotide
uucuguucccugaggaugc

SEQ ID NO: 2921347 - RNA, 19 nt, Artificial Sequence
  Description of Artificial Sequence: Synthetic oligonucleotide
uguagaccugcauugcuga

SEQ ID NO: 2921348 - RNA, 19 nt, Artificial Sequence
  Description of Artificial Sequence: Synthetic oligonucleotide
augaaguauucaucagcac

SEQ ID NO: 2921349 - RNA, 19 nt, Artificial Sequence
  Description of Artificial Sequence: Synthetic oligonucleotide
uguuugaagggguuccaca

SEQ ID NO: 2921350 - RNA, 19 nt, Artificial Sequence
  Description of Artificial Sequence: Synthetic oligonucleotide
ugucaaugaucacaacacu

SEQ ID NO: 2921351 - RNA, 19 nt, Artificial Sequence
  Description of Artificial Sequence: Synthetic oligonucleotide
cuuucgauugacuggagga

SEQ ID NO: 2921352 - RNA, 19 nt, Artificial Sequence
  Description of Artificial Sequence: Synthetic oligonucleotide
acuguucaaaugcuuccuc

SEQ ID NO: 2921353 - RNA, 19 nt, Artificial Sequence
  Description of Artificial Sequence: Synthetic oligonucleotide
acugaacuuguaaagccac

SEQ ID NO: 2921354 - RNA, 19 nt, Artificial Sequence
  Description of Artificial Sequence: Synthetic oligonucleotide
uuggguuucuacuucuacu

SEQ ID NO: 2921355 - RNA, 19 nt, Artificial Sequence
  Description of Artificial Sequence: Synthetic oligonucleotide
cuguucaaaugcuuccucc

SEQ ID NO: 2921356 - RNA, 19 nt, Artificial Sequence
  Description of Artificial Sequence: Synthetic oligonucleotide
gauacuuguccuugaucgc

SEQ ID NO: 2921357 - RNA, 19 nt, Artificial Sequence
  Description of Artificial Sequence: Synthetic oligonucleotide
aguaucuccccaugcaugu

SEQ ID NO: 2921358 - RNA, 19 nt, Artificial Sequence
  Description of Artificial Sequence: Synthetic oligonucleotide
cacaguuccaguaucuguc

SEQ ID NO: 2921359 - RNA, 19 nt, Artificial Sequence
  Description of Artificial Sequence: Synthetic oligonucleotide
aaugaucacaacacuucug

SEQ ID NO: 2921360 - RNA, 19 nt, Artificial Sequence
  Description of Artificial Sequence: Synthetic oligonucleotide
aacacuucuggcuucucuu

SEQ ID NO: 2921361 - RNA, 19 nt, Artificial Sequence
  Description of Artificial Sequence: Synthetic oligonucleotide
aaacauggccauggcacac

SEQ ID NO: 2921362 - RNA, 19 nt, Artificial Sequence
  Description of Artificial Sequence: Synthetic oligonucleotide
auucguacuuucgauugac

SEQ ID NO: 2921363 - RNA, 19 nt, Artificial Sequence
  Description of Artificial Sequence: Synthetic oligonucleotide
augguccaaguauucguac

SEQ ID NO: 2921364 - RNA, 19 nt, Artificial Sequence
  Description of Artificial Sequence: Synthetic oligonucleotide
ucgauugacuggaggauac

SEQ ID NO: 2921365 - RNA, 19 nt, Artificial Sequence
  Description of Artificial Sequence: Synthetic oligonucleotide
aucacaacacuucuggcuu

SEQ ID NO: 2921366 - RNA, 19 nt, Artificial Sequence
  Description of Artificial Sequence: Synthetic oligonucleotide
aauugaccguaacuuguaa

SEQ ID NO: 2921367 - RNA, 19 nt, Artificial Sequence
  Description of Artificial Sequence: Synthetic oligonucleotide
uuuuguacuucuguucccu

SEQ ID NO: 2921368 - RNA, 19 nt, Artificial Sequence
  Description of Artificial Sequence: Synthetic oligonucleotide
uauucguacuuucgauuga

SEQ ID NO: 2921369 - RNA, 19 nt, Artificial Sequence
  Description of Artificial Sequence: Synthetic oligonucleotide
aguauucguacuuucgauu

SEQ ID NO: 2921370 - RNA, 19 nt, Artificial Sequence
  Description of Artificial Sequence: Synthetic oligonucleotide
guucaaaugcuuccuccag

SEQ ID NO: 2921371 - RNA, 19 nt, Artificial Sequence
  Description of Artificial Sequence: Synthetic oligonucleotide
aucuccuuggguuucuacu

SEQ ID NO: 2921372 - RNA, 19 nt, Artificial Sequence
  Description of Artificial Sequence: Synthetic oligonucleotide
ugaacuuguaaagccacuc

SEQ ID NO: 2921373 - RNA, 19 nt, Artificial Sequence
  Description of Artificial Sequence: Synthetic oligonucleotide
auuguagaccugcauugcu

SEQ ID NO: 2921374 - RNA, 19 nt, Artificial Sequence
  Description of Artificial Sequence: Synthetic oligonucleotide
uaugguccaaguauucgua

SEQ ID NO: 2921375 - RNA, 19 nt, Artificial Sequence
  Description of Artificial Sequence: Synthetic oligonucleotide
uucuacuguuugaaggggu

SEQ ID NO: 2921376 - RNA, 19 nt, Artificial Sequence
  Description of Artificial Sequence: Synthetic oligonucleotide
uggcuucucuucauuguag

SEQ ID NO: 2921377 - RNA, 19 nt, Artificial Sequence
  Description of Artificial Sequence: Synthetic oligonucleotide
uacuguuugaagggguucc

SEQ ID NO: 2921378 - RNA, 19 nt, Artificial Sequence
  Description of Artificial Sequence: Synthetic oligonucleotide
acuuguaaagccacucauc

SEQ ID NO: 2921379 - RNA, 19 nt, Artificial Sequence
  Description of Artificial Sequence: Synthetic oligonucleotide
ugcauguaacuggacauca

SEQ ID NO: 2921380 - RNA, 19 nt, Artificial Sequence
  Description of Artificial Sequence: Synthetic oligonucleotide
gaucacaacacuucuggcu

SEQ ID NO: 2921381 - RNA, 19 nt, Artificial Sequence
  Description of Artificial Sequence: Synthetic oligonucleotide
uuugaagggguuccacagu

SEQ ID NO: 2921382 - RNA, 19 nt, Artificial Sequence
  Description of Artificial Sequence: Synthetic oligonucleotide
aguuccaguaucugucaug

SEQ ID NO: 2921383 - RNA, 19 nt, Artificial Sequence
  Description of Artificial Sequence: Synthetic oligonucleotide
ucagcuguaugguccaagu

SEQ ID NO: 2921384 - RNA, 19 nt, Artificial Sequence
  Description of Artificial Sequence: Synthetic oligonucleotide
ugaucacaacacuucuggc

SEQ ID NO: 2921385 - RNA, 19 nt, Artificial Sequence
  Description of Artificial Sequence: Synthetic oligonucleotide
ugcauugcugaguauguua

SEQ ID NO: 2921386 - RNA, 19 nt, Artificial Sequence
  Description of Artificial Sequence: Synthetic oligonucleotide
cugcaggucaucuccuugg

SEQ ID NO: 2921387 - RNA, 19 nt, Artificial Sequence
  Description of Artificial Sequence: Synthetic oligonucleotide
gaacuuguaaagccacuca

SEQ ID NO: 2921388 - RNA, 19 nt, Artificial Sequence
  Description of Artificial Sequence: Synthetic oligonucleotide
cagcacugaacuuguaaag

SEQ ID NO: 2921389 - RNA, 19 nt, Artificial Sequence
  Description of Artificial Sequence: Synthetic oligonucleotide
uggaacaguagagacugca

SEQ ID NO: 2921390 - RNA, 19 nt, Artificial Sequence
  Description of Artificial Sequence: Synthetic oligonucleotide
agagacugcaggucaucuc

SEQ ID NO: 2921391 - RNA, 19 nt, Artificial Sequence
  Description of Artificial Sequence: Synthetic oligonucleotide
acacuucuggcuucucuuc

SEQ ID NO: 2921392 - RNA, 19 nt, Artificial Sequence
  Description of Artificial Sequence: Synthetic oligonucleotide
acaguagagacugcagguc

SEQ ID NO: 2921393 - RNA, 19 nt, Artificial Sequence
  Description of Artificial Sequence: Synthetic oligonucleotide
ucuggcuucucuucauugu

SEQ ID NO: 2921394 - RNA, 19 nt, Artificial Sequence
  Description of Artificial Sequence: Synthetic oligonucleotide
guacuuucacuucccgggg

SEQ ID NO: 2921395 - RNA, 19 nt, Artificial Sequence
  Description of Artificial Sequence: Synthetic oligonucleotide
uugaagggguuccacaguu

SEQ ID NO: 2921396 - RNA, 19 nt, Artificial Sequence
  Description of Artificial Sequence: Synthetic oligonucleotide
caguaucugucauguaacc

SEQ ID NO: 2921397 - RNA, 19 nt, Artificial Sequence
  Description of Artificial Sequence: Synthetic oligonucleotide
ggguaugaaguauucauca

SEQ ID NO: 2921398 - RNA, 19 nt, Artificial Sequence
  Description of Artificial Sequence: Synthetic oligonucleotide
acuggaggauacuuguccu

SEQ ID NO: 2921399 - RNA, 19 nt, Artificial Sequence
  Description of Artificial Sequence: Synthetic oligonucleotide
uuguaaagccacucaucca

SEQ ID NO: 2921400 - RNA, 19 nt, Artificial Sequence
  Description of Artificial Sequence: Synthetic oligonucleotide
uguaaccaaacauggccau

SEQ ID NO: 2921401 - RNA, 19 nt, Artificial Sequence
  Description of Artificial Sequence: Synthetic oligonucleotide
gguaugaaguauucaucag

SEQ ID NO: 2921402 - RNA, 19 nt, Artificial Sequence
  Description of Artificial Sequence: Synthetic oligonucleotide
aucagcacugaacuuguaa

SEQ ID NO: 2921403 - RNA, 19 nt, Artificial Sequence
  Description of Artificial Sequence: Synthetic oligonucleotide
ugaggaugcuuggacaaug

SEQ ID NO: 2921404 - RNA, 19 nt, Artificial Sequence
  Description of Artificial Sequence: Synthetic oligonucleotide
ucuacuguuugaagggguu

SEQ ID NO: 2921405 - RNA, 19 nt, Artificial Sequence
  Description of Artificial Sequence: Synthetic oligonucleotide
caaguauucguacuuucga

SEQ ID NO: 2921406 - RNA, 19 nt, Artificial Sequence
  Description of Artificial Sequence: Synthetic oligonucleotide
uccaaguauucguacuuuc

SEQ ID NO: 2921407 - RNA, 19 nt, Artificial Sequence
  Description of Artificial Sequence: Synthetic oligonucleotide
ugcuuggacaaugaaaauu

SEQ ID NO: 2921408 - RNA, 19 nt, Artificial Sequence
  Description of Artificial Sequence: Synthetic oligonucleotide
uaucuccccaugcauguaa

SEQ ID NO: 2921409 - RNA, 19 nt, Artificial Sequence
  Description of Artificial Sequence: Synthetic oligonucleotide
uccagaguaucuccccaug

SEQ ID NO: 2921410 - RNA, 19 nt, Artificial Sequence
  Description of Artificial Sequence: Synthetic oligonucleotide
uugcugaguauguuauugu

SEQ ID NO: 2921411 - RNA, 19 nt, Artificial Sequence
  Description of Artificial Sequence: Synthetic oligonucleotide
agaguaucuccccaugcau

SEQ ID NO: 2921412 - RNA, 19 nt, Artificial Sequence
  Description of Artificial Sequence: Synthetic oligonucleotide
uggaggauacuuguccuug

SEQ ID NO: 2921413 - RNA, 19 nt, Artificial Sequence
  Description of Artificial Sequence: Synthetic oligonucleotide
aaguggaacaguagagacu

SEQ ID NO: 2921414 - RNA, 19 nt, Artificial Sequence
  Description of Artificial Sequence: Synthetic oligonucleotide
aguaucugucauguaacca

SEQ ID NO: 2921415 - RNA, 19 nt, Artificial Sequence
  Description of Artificial Sequence: Synthetic oligonucleotide
ccaaguauucguacuuucg

SEQ ID NO: 2921416 - RNA, 19 nt, Artificial Sequence
  Description of Artificial Sequence: Synthetic oligonucleotide
cuucuacuguuugaagggg

SEQ ID NO: 2921417 - RNA, 19 nt, Artificial Sequence
  Description of Artificial Sequence: Synthetic oligonucleotide
cuacuucuacuguuugaag

SEQ ID NO: 2921418 - RNA, 19 nt, Artificial Sequence
  Description of Artificial Sequence: Synthetic oligonucleotide
auugacuggaggauacuug

SEQ ID NO: 2921419 - RNA, 19 nt, Artificial Sequence
  Description of Artificial Sequence: Synthetic oligonucleotide
cuuggguuucuacuucuac

SEQ ID NO: 2921420 - RNA, 19 nt, Artificial Sequence
  Description of Artificial Sequence: Synthetic oligonucleotide
ugguccaaguauucguacu

SEQ ID NO: 2921421 - RNA, 19 nt, Artificial Sequence
  Description of Artificial Sequence: Synthetic oligonucleotide
gcacugaacuuguaaagcc

SEQ ID NO: 2921422 - RNA, 19 nt, Artificial Sequence
  Description of Artificial Sequence: Synthetic oligonucleotide
accugcauugcugaguaug

SEQ ID NO: 2921423 - RNA, 19 nt, Artificial Sequence
  Description of Artificial Sequence: Synthetic oligonucleotide
guacuuucgauugacugga

SEQ ID NO: 2921424 - RNA, 19 nt, Artificial Sequence
  Description of Artificial Sequence: Synthetic oligonucleotide
uggacaucagcuguauggu

SEQ ID NO: 2921425 - RNA, 19 nt, Artificial Sequence
  Description of Artificial Sequence: Synthetic oligonucleotide
auguaacuggacaucagcu

SEQ ID NO: 2921426 - RNA, 19 nt, Artificial Sequence
  Description of Artificial Sequence: Synthetic oligonucleotide
gaguaucuccccaugcaug

SEQ ID NO: 2921427 - RNA, 19 nt, Artificial Sequence
  Description of Artificial Sequence: Synthetic oligonucleotide
uucucccacccaauugacc

SEQ ID NO: 2921428 - RNA, 19 nt, Artificial Sequence
  Description of Artificial Sequence: Synthetic oligonucleotide
auguaaccaaacauggcca

SEQ ID NO: 2921429 - RNA, 19 nt, Artificial Sequence
  Description of Artificial Sequence: Synthetic oligonucleotide
aaguauucaucagcacuga

SEQ ID NO: 2921430 - RNA, 19 nt, Artificial Sequence
  Description of Artificial Sequence: Synthetic oligonucleotide
guaacuggacaucagcugu

SEQ ID NO: 2921431 - RNA, 19 nt, Artificial Sequence
  Description of Artificial Sequence: Synthetic oligonucleotide
uacuuguccuugaucgccu

SEQ ID NO: 2921432 - RNA, 19 nt, Artificial Sequence
  Description of Artificial Sequence: Synthetic oligonucleotide
cguacuuucgauugacugg

SEQ ID NO: 2921433 - RNA, 19 nt, Artificial Sequence
  Description of Artificial Sequence: Synthetic oligonucleotide
uaaagccacucauccaaaa

SEQ ID NO: 2921434 - RNA, 19 nt, Artificial Sequence
  Description of Artificial Sequence: Synthetic oligonucleotide
accaaacauggccauggca

SEQ ID NO: 2921435 - RNA, 19 nt, Artificial Sequence
  Description of Artificial Sequence: Synthetic oligonucleotide
ucccugaggaugcuuggac

SEQ ID NO: 2921436 - RNA, 19 nt, Artificial Sequence
  Description of Artificial Sequence: Synthetic oligonucleotide
ugcugaguauguuauuguu

SEQ ID NO: 2921437 - RNA, 19 nt, Artificial Sequence
  Description of Artificial Sequence: Synthetic oligonucleotide
gcuuggacaaugaaaauuc

SEQ ID NO: 2921438 - RNA, 19 nt, Artificial Sequence
  Description of Artificial Sequence: Synthetic oligonucleotide
auggccauggcacacuguu

SEQ ID NO: 2921439 - RNA, 19 nt, Artificial Sequence
  Description of Artificial Sequence: Synthetic oligonucleotide
acugcaggucaucuccuug

SEQ ID NO: 2921440 - RNA, 19 nt, Artificial Sequence
  Description of Artificial Sequence: Synthetic oligonucleotide
uuucgauugacuggaggau

SEQ ID NO: 2921441 - RNA, 19 nt, Artificial Sequence
  Description of Artificial Sequence: Synthetic oligonucleotide
uccuccagaguaucucccc

SEQ ID NO: 2921442 - RNA, 19 nt, Artificial Sequence
  Description of Artificial Sequence: Synthetic oligonucleotide
agggguuccacaguuccag

SEQ ID NO: 2921443 - RNA, 19 nt, Artificial Sequence
  Description of Artificial Sequence: Synthetic oligonucleotide
cauuguagaccugcauugc

SEQ ID NO: 2921444 - RNA, 19 nt, Artificial Sequence
  Description of Artificial Sequence: Synthetic oligonucleotide
acaucagcuguauggucca

SEQ ID NO: 2921445 - RNA, 19 nt, Artificial Sequence
  Description of Artificial Sequence: Synthetic oligonucleotide
agaccugcauugcugagua

SEQ ID NO: 2921446 - RNA, 19 nt, Artificial Sequence
  Description of Artificial Sequence: Synthetic oligonucleotide
acccaauugaccguaacuu

SEQ ID NO: 2921447 - RNA, 19 nt, Artificial Sequence
  Description of Artificial Sequence: Synthetic oligonucleotide
guucccugaggaugcuugg

SEQ ID NO: 2921448 - RNA, 19 nt, Artificial Sequence
  Description of Artificial Sequence: Synthetic oligonucleotide
uacuuucacuucccggggu

SEQ ID NO: 2921449 - RNA, 19 nt, Artificial Sequence
  Description of Artificial Sequence: Synthetic oligonucleotide
uccuuggguuucuacuucu

SEQ ID NO: 2921450 - RNA, 19 nt, Artificial Sequence
  Description of Artificial Sequence: Synthetic oligonucleotide
cuguaugguccaaguauuc

SEQ ID NO: 2921451 - RNA, 19 nt, Artificial Sequence
  Description of Artificial Sequence: Synthetic oligonucleotide
uaacuggacaucagcugua

SEQ ID NO: 2921452 - RNA, 19 nt, Artificial Sequence
  Description of Artificial Sequence: Synthetic oligonucleotide
uucacuucccgggguauga

SEQ ID NO: 2921453 - RNA, 19 nt, Artificial Sequence
  Description of Artificial Sequence: Synthetic oligonucleotide
ccaguaucugucauguaac

SEQ ID NO: 2921454 - RNA, 19 nt, Artificial Sequence
  Description of Artificial Sequence: Synthetic oligonucleotide
aauucuucucccacccaau

SEQ ID NO: 2921455 - RNA, 19 nt, Artificial Sequence
  Description of Artificial Sequence: Synthetic oligonucleotide
uagaccugcauugcugagu

SEQ ID NO: 2921456 - RNA, 19 nt, Artificial Sequence
  Description of Artificial Sequence: Synthetic oligonucleotide
cuccccaugcauguaacug

SEQ ID NO: 2921457 - RNA, 19 nt, Artificial Sequence
  Description of Artificial Sequence: Synthetic oligonucleotide
guaugguccaaguauucgu

SEQ ID NO: 2921458 - RNA, 19 nt, Artificial Sequence
  Description of Artificial Sequence: Synthetic oligonucleotide
uacuuucgauugacuggag

SEQ ID NO: 2921459 - RNA, 19 nt, Artificial Sequence
  Description of Artificial Sequence: Synthetic oligonucleotide
cugaguauguuauuguuuu

SEQ ID NO: 2921460 - RNA, 19 nt, Artificial Sequence
  Description of Artificial Sequence: Synthetic oligonucleotide
uguccuugaucgccuucug

SEQ ID NO: 2921461 - RNA, 19 nt, Artificial Sequence
  Description of Artificial Sequence: Synthetic oligonucleotide
uucgauugacuggaggaua

SEQ ID NO: 2921462 - RNA, 19 nt, Artificial Sequence
  Description of Artificial Sequence: Synthetic oligonucleotide
ugaagggguuccacaguuc

SEQ ID NO: 2921463 - RNA, 19 nt, Artificial Sequence
  Description of Artificial Sequence: Synthetic oligonucleotide
aacauggccauggcacacu

SEQ ID NO: 2921464 - RNA, 19 nt, Artificial Sequence
  Description of Artificial Sequence: Synthetic oligonucleotide
uaucaauauuaaguacuuu

SEQ ID NO: 2921465 - RNA, 19 nt, Artificial Sequence
  Description of Artificial Sequence: Synthetic oligonucleotide
ugacuggaggauacuuguc

SEQ ID NO: 2921466 - RNA, 19 nt, Artificial Sequence
  Description of Artificial Sequence: Synthetic oligonucleotide
caaacauggccauggcaca

SEQ ID NO: 2921467 - RNA, 19 nt, Artificial Sequence
  Description of Artificial Sequence: Synthetic oligonucleotide
cuucucccacccaauugac

SEQ ID NO: 2921468 - RNA, 19 nt, Artificial Sequence
  Description of Artificial Sequence: Synthetic oligonucleotide
guagaccugcauugcugag

SEQ ID NO: 2921469 - RNA, 19 nt, Artificial Sequence
  Description of Artificial Sequence: Synthetic oligonucleotide
cagaguaucuccccaugca

SEQ ID NO: 2921470 - RNA, 19 nt, Artificial Sequence
  Description of Artificial Sequence: Synthetic oligonucleotide
acauggccauggcacacug

SEQ ID NO: 2921471 - RNA, 19 nt, Artificial Sequence
  Description of Artificial Sequence: Synthetic oligonucleotide
aucagcuguaugguccaag

SEQ ID NO: 2921472 - RNA, 19 nt, Artificial Sequence
  Description of Artificial Sequence: Synthetic oligonucleotide
ggaacaguagagacugcag

SEQ ID NO: 2921473 - RNA, 19 nt, Artificial Sequence
  Description of Artificial Sequence: Synthetic oligonucleotide
uuucacuucccgggguaug

SEQ ID NO: 2921474 - RNA, 19 nt, Artificial Sequence
  Description of Artificial Sequence: Synthetic oligonucleotide
auucuucucccacccaauu

SEQ ID NO: 2921475 - RNA, 19 nt, Artificial Sequence
  Description of Artificial Sequence: Synthetic oligonucleotide
ggacaaugaaaauucuucu

SEQ ID NO: 2921476 - RNA, 19 nt, Artificial Sequence
  Description of Artificial Sequence: Synthetic oligonucleotide
ugaccguaacuuguaaguu

SEQ ID NO: 2921477 - RNA, 19 nt, Artificial Sequence
  Description of Artificial Sequence: Synthetic oligonucleotide
guaaccaaacauggccaug

SEQ ID NO: 2921478 - RNA, 19 nt, Artificial Sequence
  Description of Artificial Sequence: Synthetic oligonucleotide
acuucccgggguaugaagu

SEQ ID NO: 2921479 - RNA, 19 nt, Artificial Sequence
  Description of Artificial Sequence: Synthetic oligonucleotide
acuggacaucagcuguaug

SEQ ID NO: 2921480 - RNA, 19 nt, Artificial Sequence
  Description of Artificial Sequence: Synthetic oligonucleotide
acuuucacuucccggggua

SEQ ID NO: 2921481 - RNA, 19 nt, Artificial Sequence
  Description of Artificial Sequence: Synthetic oligonucleotide
ucuccccaugcauguaacu

SEQ ID NO: 2921482 - RNA, 19 nt, Artificial Sequence
  Description of Artificial Sequence: Synthetic oligonucleotide
accguaacuuguaaguuuu

SEQ ID NO: 2921483 - RNA, 19 nt, Artificial Sequence
  Description of Artificial Sequence: Synthetic oligonucleotide
aacuggacaucagcuguau

SEQ ID NO: 2921484 - RNA, 19 nt, Artificial Sequence
  Description of Artificial Sequence: Synthetic oligonucleotide
ucacaacacuucuggcuuc

SEQ ID NO: 2921485 - RNA, 19 nt, Artificial Sequence
  Description of Artificial Sequence: Synthetic oligonucleotide
ggccauggcacacuguuca

SEQ ID NO: 2921486 - RNA, 19 nt, Artificial Sequence
  Description of Artificial Sequence: Synthetic oligonucleotide
guuccaguaucugucaugu

SEQ ID NO: 2921487 - RNA, 19 nt, Artificial Sequence
  Description of Artificial Sequence: Synthetic oligonucleotide
cugucauguaaccaaacau

SEQ ID NO: 2921488 - RNA, 19 nt, Artificial Sequence
  Description of Artificial Sequence: Synthetic oligonucleotide
cacuucccgggguaugaag

SEQ ID NO: 2921489 - RNA, 19 nt, Artificial Sequence
  Description of Artificial Sequence: Synthetic oligonucleotide
aucuccccaugcauguaac

SEQ ID NO: 2921490 - RNA, 19 nt, Artificial Sequence
  Description of Artificial Sequence: Synthetic oligonucleotide
aggaugcuuggacaaugaa

SEQ ID NO: 2921491 - RNA, 19 nt, Artificial Sequence
  Description of Artificial Sequence: Synthetic oligonucleotide
ucucuucauuguagaccug

SEQ ID NO: 2921492 - RNA, 19 nt, Artificial Sequence
  Description of Artificial Sequence: Synthetic oligonucleotide
cccaauugaccguaacuug

SEQ ID NO: 2921493 - RNA, 19 nt, Artificial Sequence
  Description of Artificial Sequence: Synthetic oligonucleotide
caaugaucacaacacuucu

SEQ ID NO: 2921494 - RNA, 19 nt, Artificial Sequence
  Description of Artificial Sequence: Synthetic oligonucleotide
aggucaucuccuuggguuu

SEQ ID NO: 2921495 - RNA, 19 nt, Artificial Sequence
  Description of Artificial Sequence: Synthetic oligonucleotide
cuacuguuugaagggguuc

SEQ ID NO: 2921496 - RNA, 19 nt, Artificial Sequence
  Description of Artificial Sequence: Synthetic oligonucleotide
caauugaccguaacuugua

SEQ ID NO: 2921497 - RNA, 19 nt, Artificial Sequence
  Description of Artificial Sequence: Synthetic oligonucleotide
gaccguaacuuguaaguuu

SEQ ID NO: 2921498 - RNA, 19 nt, Artificial Sequence
  Description of Artificial Sequence: Synthetic oligonucleotide
gaggaugcuuggacaauga

SEQ ID NO: 2921499 - RNA, 19 nt, Artificial Sequence
  Description of Artificial Sequence: Synthetic oligonucleotide
acuguuugaagggguucca

SEQ ID NO: 2921500 - RNA, 19 nt, Artificial Sequence
  Description of Artificial Sequence: Synthetic oligonucleotide
uucccugaggaugcuugga

SEQ ID NO: 2921501 - RNA, 19 nt, Artificial Sequence
  Description of Artificial Sequence: Synthetic oligonucleotide
aagggguuccacaguucca

SEQ ID NO: 2921502 - RNA, 19 nt, Artificial Sequence
  Description of Artificial Sequence: Synthetic oligonucleotide
cuguuugaagggguuccac

SEQ ID NO: 2921503 - RNA, 19 nt, Artificial Sequence
  Description of Artificial Sequence: Synthetic oligonucleotide
guaucaauauuaaguacuu

SEQ ID NO: 2921504 - RNA, 19 nt, Artificial Sequence
  Description of Artificial Sequence: Synthetic oligonucleotide
ucccgggguaugaaguauu

SEQ ID NO: 2921505 - RNA, 19 nt, Artificial Sequence
  Description of Artificial Sequence: Synthetic oligonucleotide
cuuguccuugaucgccuuc

SEQ ID NO: 2921506 - RNA, 19 nt, Artificial Sequence
  Description of Artificial Sequence: Synthetic oligonucleotide
uggccauggcacacuguuc

SEQ ID NO: 2921507 - RNA, 19 nt, Artificial Sequence
  Description of Artificial Sequence: Synthetic oligonucleotide
gucaaugaucacaacacuu

SEQ ID NO: 2921508 - RNA, 19 nt, Artificial Sequence
  Description of Artificial Sequence: Synthetic oligonucleotide
ccaugcauguaacuggaca

SEQ ID NO: 2921509 - RNA, 19 nt, Artificial Sequence
  Description of Artificial Sequence: Synthetic oligonucleotide
cauggcacacuguucaaau

SEQ ID NO: 2921510 - RNA, 19 nt, Artificial Sequence
  Description of Artificial Sequence: Synthetic oligonucleotide
ggcuucucuucauuguaga

SEQ ID NO: 2921511 - RNA, 19 nt, Artificial Sequence
  Description of Artificial Sequence: Synthetic oligonucleotide
gggguaugaaguauucauc

SEQ ID NO: 2921512 - RNA, 19 nt, Artificial Sequence
  Description of Artificial Sequence: Synthetic oligonucleotide
cacuucuggcuucucuuca

SEQ ID NO: 2921513 - RNA, 19 nt, Artificial Sequence
  Description of Artificial Sequence: Synthetic oligonucleotide
caggucaucuccuuggguu

SEQ ID NO: 2921514 - RNA, 19 nt, Artificial Sequence
  Description of Artificial Sequence: Synthetic oligonucleotide
gauugacuggaggauacuu

SEQ ID NO: 2921515 - RNA, 19 nt, Artificial Sequence
  Description of Artificial Sequence: Synthetic oligonucleotide
acaacacuucuggcuucuc

SEQ ID NO: 2921516 - RNA, 19 nt, Artificial Sequence
  Description of Artificial Sequence: Synthetic oligonucleotide
cuggcuucucuucauugua

SEQ ID NO: 2921517 - RNA, 19 nt, Artificial Sequence
  Description of Artificial Sequence: Synthetic oligonucleotide
uucccgggguaugaaguau

SEQ ID NO: 2921518 - RNA, 19 nt, Artificial Sequence
  Description of Artificial Sequence: Synthetic oligonucleotide
gaggauacuuguccuugau

SEQ ID NO: 2921519 - RNA, 19 nt, Artificial Sequence
  Description of Artificial Sequence: Synthetic oligonucleotide
ggacaucagcuguaugguc

SEQ ID NO: 2921520 - RNA, 19 nt, Artificial Sequence
  Description of Artificial Sequence: Synthetic oligonucleotide
cacccaauugaccguaacu

SEQ ID NO: 2921521 - RNA, 19 nt, Artificial Sequence
  Description of Artificial Sequence: Synthetic oligonucleotide
ggaggauacuuguccuuga

SEQ ID NO: 2921522 - RNA, 19 nt, Artificial Sequence
  Description of Artificial Sequence: Synthetic oligonucleotide
gcauguaacuggacaucag

SEQ ID NO: 2921523 - RNA, 19 nt, Artificial Sequence
  Description of Artificial Sequence: Synthetic oligonucleotide
guaaagccacucauccaaa

SEQ ID NO: 2921524 - RNA, 19 nt, Artificial Sequence
  Description of Artificial Sequence: Synthetic oligonucleotide
ccaauugaccguaacuugu

SEQ ID NO: 2921525 - RNA, 19 nt, Artificial Sequence
  Description of Artificial Sequence: Synthetic oligonucleotide
cugaacuuguaaagccacu

SEQ ID NO: 2921526 - RNA, 19 nt, Artificial Sequence
  Description of Artificial Sequence: Synthetic oligonucleotide
ucccacccaauugaccgua

SEQ ID NO: 2921527 - RNA, 19 nt, Artificial Sequence
  Description of Artificial Sequence: Synthetic oligonucleotide
ucuguucccugaggaugcu

SEQ ID NO: 2921528 - RNA, 19 nt, Artificial Sequence
  Description of Artificial Sequence: Synthetic oligonucleotide
uuccaguaucugucaugua

SEQ ID NO: 2921529 - RNA, 19 nt, Artificial Sequence
  Description of Artificial Sequence: Synthetic oligonucleotide
agacugcaggucaucuccu

SEQ ID NO: 2921530 - RNA, 19 nt, Artificial Sequence
  Description of Artificial Sequence: Synthetic oligonucleotide
cuucccgggguaugaagua

SEQ ID NO: 2921531 - RNA, 19 nt, Artificial Sequence
  Description of Artificial Sequence: Synthetic oligonucleotide
ccugaggaugcuuggacaa

SEQ ID NO: 2921532 - RNA, 19 nt, Artificial Sequence
  Description of Artificial Sequence: Synthetic oligonucleotide
ucacuucccgggguaugaa

SEQ ID NO: 2921533 - RNA, 19 nt, Artificial Sequence
  Description of Artificial Sequence: Synthetic oligonucleotide
caacacuucuggcuucucu

SEQ ID NO: 2921534 - RNA, 19 nt, Artificial Sequence
  Description of Artificial Sequence: Synthetic oligonucleotide
gguuccacaguuccaguau

SEQ ID NO: 2921535 - RNA, 19 nt, Artificial Sequence
  Description of Artificial Sequence: Synthetic oligonucleotide
gguccaaguauucguacuu

SEQ ID NO: 2921536 - RNA, 19 nt, Artificial Sequence
  Description of Artificial Sequence: Synthetic oligonucleotide
cacuguucaaaugcuuccu

SEQ ID NO: 2921537 - RNA, 19 nt, Artificial Sequence
  Description of Artificial Sequence: Synthetic oligonucleotide
ggguuccacaguuccagua

SEQ ID NO: 2921538 - RNA, 19 nt, Artificial Sequence
  Description of Artificial Sequence: Synthetic oligonucleotide
cagcuguaugguccaagua

SEQ ID NO: 2921539 - RNA, 19 nt, Artificial Sequence
  Description of Artificial Sequence: Synthetic oligonucleotide
ggguuucuacuucuacugu

SEQ ID NO: 2921540 - RNA, 19 nt, Artificial Sequence
  Description of Artificial Sequence: Synthetic oligonucleotide
gcauugcugaguauguuau

SEQ ID NO: 2921541 - RNA, 19 nt, Artificial Sequence
  Description of Artificial Sequence: Synthetic oligonucleotide
cccgggguaugaaguauuc

SEQ ID NO: 2921542 - RNA, 19 nt, Artificial Sequence
  Description of Artificial Sequence: Synthetic oligonucleotide
ccccaugcauguaacugga

SEQ ID NO: 2921543 - RNA, 19 nt, Artificial Sequence
  Description of Artificial Sequence: Synthetic oligonucleotide
ggucaucuccuuggguuuc

SEQ ID NO: 2921544 - RNA, 19 nt, Artificial Sequence
  Description of Artificial Sequence: Synthetic oligonucleotide
ccacccaauugaccguaac

SEQ ID NO: 2921545 - RNA, 19 nt, Artificial Sequence
  Description of Artificial Sequence: Synthetic oligonucleotide
gcugaguauguuauuguuu

SEQ ID NO: 2921546 - RNA, 19 nt, Artificial Sequence
  Description of Artificial Sequence: Synthetic oligonucleotide
gacugcaggucaucuccuu

SEQ ID NO: 2921547 - RNA, 19 nt, Artificial Sequence
  Description of Artificial Sequence: Synthetic oligonucleotide
ggcacacuguucaaaugcu

SEQ ID NO: 2921548 - RNA, 19 nt, Artificial Sequence
  Description of Artificial Sequence: Synthetic oligonucleotide
ccugcauugcugaguaugu

SEQ ID NO: 2921549 - RNA, 19 nt, Artificial Sequence
  Description of Artificial Sequence: Synthetic oligonucleotide
cuccagaguaucuccccau

SEQ ID NO: 2921550 - RNA, 19 nt, Artificial Sequence
  Description of Artificial Sequence: Synthetic oligonucleotide
gcuguaugguccaaguauu

SEQ ID NO: 2921551 - RNA, 19 nt, Artificial Sequence
  Description of Artificial Sequence: Synthetic oligonucleotide
cccaugcauguaacuggac

SEQ ID NO: 2921552 - RNA, 19 nt, Artificial Sequence
  Description of Artificial Sequence: Synthetic oligonucleotide
cauugcugaguauguuauu

SEQ ID NO: 2921553 - RNA, 19 nt, Artificial Sequence
  Description of Artificial Sequence: Synthetic oligonucleotide
cacaacacuucuggcuucu

SEQ ID NO: 2921554 - RNA, 19 nt, Artificial Sequence
  Description of Artificial Sequence: Synthetic oligonucleotide
cuggaggauacuuguccuu

SEQ ID NO: 2921555 - RNA, 19 nt, Artificial Sequence
  Description of Artificial Sequence: Synthetic oligonucleotide
guccaaguauucguacuuu

SEQ ID NO: 2921556 - RNA, 19 nt, Artificial Sequence
  Description of Artificial Sequence: Synthetic oligonucleotide
ccacaguuccaguaucugu

SEQ ID NO: 2921557 - RNA, 19 nt, Artificial Sequence
  Description of Artificial Sequence: Synthetic oligonucleotide
cgggguaugaaguauucau

SEQ ID NO: 2921558 - RNA, 19 nt, Artificial Sequence
  Description of Artificial Sequence: Synthetic oligonucleotide
guaucuccccaugcaugua

SEQ ID NO: 2921559 - RNA, 19 nt, Artificial Sequence
  Description of Artificial Sequence: Synthetic oligonucleotide
caucagcacugaacuugua

SEQ ID NO: 2921560 - RNA, 19 nt, Artificial Sequence
  Description of Artificial Sequence: Synthetic oligonucleotide
cucccacccaauugaccgu

SEQ ID NO: 2921561 - RNA, 19 nt, Artificial Sequence
  Description of Artificial Sequence: Synthetic oligonucleotide
caguuccaguaucugucau

SEQ ID NO: 2921562 - RNA, 19 nt, Artificial Sequence
  Description of Artificial Sequence: Synthetic oligonucleotide
cauggccauggcacacugu

SEQ ID NO: 2921563 - RNA, 19 nt, Artificial Sequence
  Description of Artificial Sequence: Synthetic oligonucleotide
cuuucacuucccgggguau

SEQ ID NO: 2921564 - RNA, 19 nt, Artificial Sequence
  Description of Artificial Sequence: Synthetic oligonucleotide
gccauggcacacuguucaa

SEQ ID NO: 2921565 - RNA, 19 nt, Artificial Sequence
  Description of Artificial Sequence: Synthetic oligonucleotide
gcaggucaucuccuugggu

SEQ ID NO: 2921566 - RNA, 19 nt, Artificial Sequence
  Description of Artificial Sequence: Synthetic oligonucleotide
cugaggaugcuuggacaau

SEQ ID NO: 2921567 - RNA, 19 nt, Artificial Sequence
  Description of Artificial Sequence: Synthetic oligonucleotide
ccuuggguuucuacuucua

SEQ ID NO: 2921568 - RNA, 19 nt, Artificial Sequence
  Description of Artificial Sequence: Synthetic oligonucleotide
gaccugcauugcugaguau

SEQ ID NO: 2921569 - RNA, 19 nt, Artificial Sequence
  Description of Artificial Sequence: Synthetic oligonucleotide
caucagcuguaugguccaa

SEQ ID NO: 2921570 - RNA, 19 nt, Artificial Sequence
  Description of Artificial Sequence: Synthetic oligonucleotide
ccauggcacacuguucaaa

SEQ ID NO: 2921571 - RNA, 19 nt, Artificial Sequence
  Description of Artificial Sequence: Synthetic oligonucleotide
gggguuccacaguuccagu

SEQ ID NO: 2921572 - RNA, 19 nt, Artificial Sequence
  Description of Artificial Sequence: Synthetic oligonucleotide
ccgggguaugaaguauuca

SEQ ID NO: 2921573 - RNA, 19 nt, Artificial Sequence
  Description of Artificial Sequence: Synthetic oligonucleotide
gcacacuguucaaaugcuu

SEQ ID NO: 2921574 - RNA, 19 nt, Artificial Sequence
  Description of Artificial Sequence: Synthetic oligonucleotide
cccacccaauugaccguaa

SEQ ID NO: 2921575 - RNA, 19 nt, Artificial Sequence
  Description of Artificial Sequence: Synthetic oligonucleotide
cuguucccugaggaugcuu

SEQ ID NO: 2921576 - RNA, 19 nt, Artificial Sequence
  Description of Artificial Sequence: Synthetic oligonucleotide
cgauugacuggaggauacu

SEQ ID NO: 2921577 - RNA, 19 nt, Artificial Sequence
  Description of Artificial Sequence: Synthetic oligonucleotide
aacaaauuacccuugaagg

SEQ ID NO: 2921578 - RNA, 19 nt, Artificial Sequence
  Description of Artificial Sequence: Synthetic oligonucleotide
aaugaaacccacaugaagg

SEQ ID NO: 2921579 - RNA, 19 nt, Artificial Sequence
  Description of Artificial Sequence: Synthetic oligonucleotide
auauuagcugcccacaugc

SEQ ID NO: 2921580 - RNA, 19 nt, Artificial Sequence
  Description of Artificial Sequence: Synthetic oligonucleotide
uaacaaauuacccuugaag

SEQ ID NO: 2921581 - RNA, 19 nt, Artificial Sequence
  Description of Artificial Sequence: Synthetic oligonucleotide
acaaauuacccuugaaggc

SEQ ID NO: 2921582 - RNA, 19 nt, Artificial Sequence
  Description of Artificial Sequence: Synthetic oligonucleotide
ugaauuuagggucaggcca

SEQ ID NO: 2921583 - RNA, 19 nt, Artificial Sequence
  Description of Artificial Sequence: Synthetic oligonucleotide
acaugcaauggucaugucc

SEQ ID NO: 2921584 - RNA, 19 nt, Artificial Sequence
  Description of Artificial Sequence: Synthetic oligonucleotide
caugcaauggucauguccc

SEQ ID NO: 2921585 - RNA, 19 nt, Artificial Sequence
  Description of Artificial Sequence: Synthetic oligonucleotide
aucccuugaauuuaggguc

SEQ ID NO: 2921586 - RNA, 19 nt, Artificial Sequence
  Description of Artificial Sequence: Synthetic oligonucleotide
ugaaaauaucccuugaauu

SEQ ID NO: 2921587 - RNA, 19 nt, Artificial Sequence
  Description of Artificial Sequence: Synthetic oligonucleotide
auaucccuugaauuuaggg

SEQ ID NO: 2921588 - RNA, 19 nt, Artificial Sequence
  Description of Artificial Sequence: Synthetic oligonucleotide
aauauuagcugcccacaug

SEQ ID NO: 2921589 - RNA, 19 nt, Artificial Sequence
  Description of Artificial Sequence: Synthetic oligonucleotide
agguccuuugaaaauaucc

SEQ ID NO: 2921590 - RNA, 19 nt, Artificial Sequence
  Description of Artificial Sequence: Synthetic oligonucleotide
uugaaaauaucccuugaau

SEQ ID NO: 2921591 - RNA, 19 nt, Artificial Sequence
  Description of Artificial Sequence: Synthetic oligonucleotide
uaucccuugaauuuagggu

SEQ ID NO: 2921592 - RNA, 19 nt, Artificial Sequence
  Description of Artificial Sequence: Synthetic oligonucleotide
uuugaaaauaucccuugaa

SEQ ID NO: 2921593 - RNA, 19 nt, Artificial Sequence
  Description of Artificial Sequence: Synthetic oligonucleotide
ugccauuaacaaauuaccc

SEQ ID NO: 2921594 - RNA, 19 nt, Artificial Sequence
  Description of Artificial Sequence: Synthetic oligonucleotide
cuugaauuuagggucaggc

SEQ ID NO: 2921595 - RNA, 19 nt, Artificial Sequence
  Description of Artificial Sequence: Synthetic oligonucleotide
uggguggagaauauuagcu

SEQ ID NO: 2921596 - RNA, 19 nt, Artificial Sequence
  Description of Artificial Sequence: Synthetic oligonucleotide
uugaauuuagggucaggcc

SEQ ID NO: 2921597 - RNA, 19 nt, Artificial Sequence
  Description of Artificial Sequence: Synthetic oligonucleotide
gaaacccacaugaaggucc

SEQ ID NO: 2921598 - RNA, 19 nt, Artificial Sequence
  Description of Artificial Sequence: Synthetic oligonucleotide
gagaauauuagcugcccac

SEQ ID NO: 2921599 - RNA, 19 nt, Artificial Sequence
  Description of Artificial Sequence: Synthetic oligonucleotide
caaugaaacccacaugaag

SEQ ID NO: 2921600 - RNA, 19 nt, Artificial Sequence
  Description of Artificial Sequence: Synthetic oligonucleotide
gaaaauaucccuugaauuu

SEQ ID NO: 2921601 - RNA, 19 nt, Artificial Sequence
  Description of Artificial Sequence: Synthetic oligonucleotide
auuaacaaauuacccuuga

SEQ ID NO: 2921602 - RNA, 19 nt, Artificial Sequence
  Description of Artificial Sequence: Synthetic oligonucleotide
aaaauaucccuugaauuua

SEQ ID NO: 2921603 - RNA, 19 nt, Artificial Sequence
  Description of Artificial Sequence: Synthetic oligonucleotide
aaauaucccuugaauuuag

SEQ ID NO: 2921604 - RNA, 19 nt, Artificial Sequence
  Description of Artificial Sequence: Synthetic oligonucleotide
uuaacaaauuacccuugaa

SEQ ID NO: 2921605 - RNA, 19 nt, Artificial Sequence
  Description of Artificial Sequence: Synthetic oligonucleotide
gguggagaauauuagcugc

SEQ ID NO: 2921606 - RNA, 19 nt, Artificial Sequence
  Description of Artificial Sequence: Synthetic oligonucleotide
uuagcugcccacaugcaau

SEQ ID NO: 2921607 - RNA, 19 nt, Artificial Sequence
  Description of Artificial Sequence: Synthetic oligonucleotide
cauuaacaaauuacccuug

SEQ ID NO: 2921608 - RNA, 19 nt, Artificial Sequence
  Description of Artificial Sequence: Synthetic oligonucleotide
gugccauuaacaaauuacc

SEQ ID NO: 2921609 - RNA, 19 nt, Artificial Sequence
  Description of Artificial Sequence: Synthetic oligonucleotide
augaaacccacaugaaggu

SEQ ID NO: 2921610 - RNA, 19 nt, Artificial Sequence
  Description of Artificial Sequence: Synthetic oligonucleotide
ucaaugaaacccacaugaa

SEQ ID NO: 2921611 - RNA, 19 nt, Artificial Sequence
  Description of Artificial Sequence: Synthetic oligonucleotide
auggucaugucccaggcau

SEQ ID NO: 2921612 - RNA, 19 nt, Artificial Sequence
  Description of Artificial Sequence: Synthetic oligonucleotide
aauaucccuugaauuuagg

SEQ ID NO: 2921613 - RNA, 19 nt, Artificial Sequence
  Description of Artificial Sequence: Synthetic oligonucleotide
ucccaggcaucaaugaaac

SEQ ID NO: 2921614 - RNA, 19 nt, Artificial Sequence
  Description of Artificial Sequence: Synthetic oligonucleotide
ccaggcaucaaugaaaccc

SEQ ID NO: 2921615 - RNA, 19 nt, Artificial Sequence
  Description of Artificial Sequence: Synthetic oligonucleotide
caaauuacccuugaaggca

SEQ ID NO: 2921616 - RNA, 19 nt, Artificial Sequence
  Description of Artificial Sequence: Synthetic oligonucleotide
acaugaagguccuuugaaa

SEQ ID NO: 2921617 - RNA, 19 nt, Artificial Sequence
  Description of Artificial Sequence: Synthetic oligonucleotide
gaauuuagggucaggccac

SEQ ID NO: 2921618 - RNA, 19 nt, Artificial Sequence
  Description of Artificial Sequence: Synthetic oligonucleotide
ugaagguccuuugaaaaua

SEQ ID NO: 2921619 - RNA, 19 nt, Artificial Sequence
  Description of Artificial Sequence: Synthetic oligonucleotide
aauggucaugucccaggca

SEQ ID NO: 2921620 - RNA, 19 nt, Artificial Sequence
  Description of Artificial Sequence: Synthetic oligonucleotide
caugaagguccuuugaaaa

SEQ ID NO: 2921621 - RNA, 19 nt, Artificial Sequence
  Description of Artificial Sequence: Synthetic oligonucleotide
gguccuuugaaaauauccc

SEQ ID NO: 2921622 - RNA, 19 nt, Artificial Sequence
  Description of Artificial Sequence: Synthetic oligonucleotide
agaauauuagcugcccaca

SEQ ID NO: 2921623 - RNA, 19 nt, Artificial Sequence
  Description of Artificial Sequence: Synthetic oligonucleotide
guggguggagaauauuagc

SEQ ID NO: 2921624 - RNA, 19 nt, Artificial Sequence
  Description of Artificial Sequence: Synthetic oligonucleotide
auuagcugcccacaugcaa

SEQ ID NO: 2921625 - RNA, 19 nt, Artificial Sequence
  Description of Artificial Sequence: Synthetic oligonucleotide
caugucccaggcaucaaug

SEQ ID NO: 2921626 - RNA, 19 nt, Artificial Sequence
  Description of Artificial Sequence: Synthetic oligonucleotide
ucccuugaauuuaggguca

SEQ ID NO: 2921627 - RNA, 19 nt, Artificial Sequence
  Description of Artificial Sequence: Synthetic oligonucleotide
augaagguccuuugaaaau

SEQ ID NO: 2921628 - RNA, 19 nt, Artificial Sequence
  Description of Artificial Sequence: Synthetic oligonucleotide
uggagaauauuagcugccc

SEQ ID NO: 2921629 - RNA, 19 nt, Artificial Sequence
  Description of Artificial Sequence: Synthetic oligonucleotide
caucaaugaaacccacaug

SEQ ID NO: 2921630 - RNA, 19 nt, Artificial Sequence
  Description of Artificial Sequence: Synthetic oligonucleotide
uuacccuugaaggcaauuc

SEQ ID NO: 2921631 - RNA, 19 nt, Artificial Sequence
  Description of Artificial Sequence: Synthetic oligonucleotide
caauggucaugucccaggc

SEQ ID NO: 2921632 - RNA, 19 nt, Artificial Sequence
  Description of Artificial Sequence: Synthetic oligonucleotide
ugucccaggcaucaaugaa

SEQ ID NO: 2921633 - RNA, 19 nt, Artificial Sequence
  Description of Artificial Sequence: Synthetic oligonucleotide
uauuagcugcccacaugca

SEQ ID NO: 2921634 - RNA, 19 nt, Artificial Sequence
  Description of Artificial Sequence: Synthetic oligonucleotide
aaauuacccuugaaggcaa

SEQ ID NO: 2921635 - RNA, 19 nt, Artificial Sequence
  Description of Artificial Sequence: Synthetic oligonucleotide
gcaauggucaugucccagg

SEQ ID NO: 2921636 - RNA, 19 nt, Artificial Sequence
  Description of Artificial Sequence: Synthetic oligonucleotide
cuuugaaaauaucccuuga

SEQ ID NO: 2921637 - RNA, 19 nt, Artificial Sequence
  Description of Artificial Sequence: Synthetic oligonucleotide
ucaugucccaggcaucaau

SEQ ID NO: 2921638 - RNA, 19 nt, Artificial Sequence
  Description of Artificial Sequence: Synthetic oligonucleotide
aagguccuuugaaaauauc

SEQ ID NO: 2921639 - RNA, 19 nt, Artificial Sequence
  Description of Artificial Sequence: Synthetic oligonucleotide
caggcaucaaugaaaccca

SEQ ID NO: 2921640 - RNA, 19 nt, Artificial Sequence
  Description of Artificial Sequence: Synthetic oligonucleotide
ccuuugaaaauaucccuug

SEQ ID NO: 2921641 - RNA, 19 nt, Artificial Sequence
  Description of Artificial Sequence: Synthetic oligonucleotide
ugcaauggucaugucccag

SEQ ID NO: 2921642 - RNA, 19 nt, Artificial Sequence
  Description of Artificial Sequence: Synthetic oligonucleotide
guggagaauauuagcugcc

SEQ ID NO: 2921643 - RNA, 19 nt, Artificial Sequence
  Description of Artificial Sequence: Synthetic oligonucleotide
uagcugcccacaugcaaug

SEQ ID NO: 2921644 - RNA, 19 nt, Artificial Sequence
  Description of Artificial Sequence: Synthetic oligonucleotide
guccuuugaaaauaucccu

SEQ ID NO: 2921645 - RNA, 19 nt, Artificial Sequence
  Description of Artificial Sequence: Synthetic oligonucleotide
gccauuaacaaauuacccu

SEQ ID NO: 2921646 - RNA, 19 nt, Artificial Sequence
  Description of Artificial Sequence: Synthetic oligonucleotide
ugaaacccacaugaagguc

SEQ ID NO: 2921647 - RNA, 19 nt, Artificial Sequence
  Description of Artificial Sequence: Synthetic oligonucleotide
aaacccacaugaagguccu

SEQ ID NO: 2921648 - RNA, 19 nt, Artificial Sequence
  Description of Artificial Sequence: Synthetic oligonucleotide
gguggguggagaauauuag

SEQ ID NO: 2921649 - RNA, 19 nt, Artificial Sequence
  Description of Artificial Sequence: Synthetic oligonucleotide
cacaugaagguccuuugaa

SEQ ID NO: 2921650 - RNA, 19 nt, Artificial Sequence
  Description of Artificial Sequence: Synthetic oligonucleotide
gaauauuagcugcccacau

SEQ ID NO: 2921651 - RNA, 19 nt, Artificial Sequence
  Description of Artificial Sequence: Synthetic oligonucleotide
ggagaauauuagcugccca

SEQ ID NO: 2921652 - RNA, 19 nt, Artificial Sequence
  Description of Artificial Sequence: Synthetic oligonucleotide
gcaucaaugaaacccacau

SEQ ID NO: 2921653 - RNA, 19 nt, Artificial Sequence
  Description of Artificial Sequence: Synthetic oligonucleotide
uggucaugucccaggcauc

SEQ ID NO: 2921654 - RNA, 19 nt, Artificial Sequence
  Description of Artificial Sequence: Synthetic oligonucleotide
augcaauggucauguccca

SEQ ID NO: 2921655 - RNA, 19 nt, Artificial Sequence
  Description of Artificial Sequence: Synthetic oligonucleotide
gucccaggcaucaaugaaa

SEQ ID NO: 2921656 - RNA, 19 nt, Artificial Sequence
  Description of Artificial Sequence: Synthetic oligonucleotide
agcugcccacaugcaaugg

SEQ ID NO: 2921657 - RNA, 19 nt, Artificial Sequence
  Description of Artificial Sequence: Synthetic oligonucleotide
auuacccuugaaggcaauu

SEQ ID NO: 2921658 - RNA, 19 nt, Artificial Sequence
  Description of Artificial Sequence: Synthetic oligonucleotide
gaagguccuuugaaaauau

SEQ ID NO: 2921659 - RNA, 19 nt, Artificial Sequence
  Description of Artificial Sequence: Synthetic oligonucleotide
aauuacccuugaaggcaau

SEQ ID NO: 2921660 - RNA, 19 nt, Artificial Sequence
  Description of Artificial Sequence: Synthetic oligonucleotide
cccacaugaagguccuuug

SEQ ID NO: 2921661 - RNA, 19 nt, Artificial Sequence
  Description of Artificial Sequence: Synthetic oligonucleotide
ggucaugucccaggcauca

SEQ ID NO: 2921662 - RNA, 19 nt, Artificial Sequence
  Description of Artificial Sequence: Synthetic oligonucleotide
cacaugcaauggucauguc

SEQ ID NO: 2921663 - RNA, 19 nt, Artificial Sequence
  Description of Artificial Sequence: Synthetic oligonucleotide
ccuugaauuuagggucagg

SEQ ID NO: 2921664 - RNA, 19 nt, Artificial Sequence
  Description of Artificial Sequence: Synthetic oligonucleotide
cccaggcaucaaugaaacc

SEQ ID NO: 2921665 - RNA, 19 nt, Artificial Sequence
  Description of Artificial Sequence: Synthetic oligonucleotide
cccacaugcaauggucaug

SEQ ID NO: 2921666 - RNA, 19 nt, Artificial Sequence
  Description of Artificial Sequence: Synthetic oligonucleotide
ccacaugaagguccuuuga

SEQ ID NO: 2921667 - RNA, 19 nt, Artificial Sequence
  Description of Artificial Sequence: Synthetic oligonucleotide
ccacaugcaauggucaugu

SEQ ID NO: 2921668 - RNA, 19 nt, Artificial Sequence
  Description of Artificial Sequence: Synthetic oligonucleotide
gcugcccacaugcaauggu

SEQ ID NO: 2921669 - RNA, 19 nt, Artificial Sequence
  Description of Artificial Sequence: Synthetic oligonucleotide
cccuugaauuuagggucag

SEQ ID NO: 2921670 - RNA, 19 nt, Artificial Sequence
  Description of Artificial Sequence: Synthetic oligonucleotide
aacccacaugaagguccuu

SEQ ID NO: 2921671 - RNA, 19 nt, Artificial Sequence
  Description of Artificial Sequence: Synthetic oligonucleotide
gucaugucccaggcaucaa

SEQ ID NO: 2921672 - RNA, 19 nt, Artificial Sequence
  Description of Artificial Sequence: Synthetic oligonucleotide
cuuaaguuggguagcgucg

SEQ ID NO: 2921673 - RNA, 19 nt, Artificial Sequence
  Description of Artificial Sequence: Synthetic oligonucleotide
gaaaagcuccuuaaguugg

SEQ ID NO: 2921674 - RNA, 19 nt, Artificial Sequence
  Description of Artificial Sequence: Synthetic oligonucleotide
uagguauugcaacaccacg

SEQ ID NO: 2921675 - RNA, 19 nt, Artificial Sequence
  Description of Artificial Sequence: Synthetic oligonucleotide
uauugcaacaccacgguuc

SEQ ID NO: 2921676 - RNA, 19 nt, Artificial Sequence
  Description of Artificial Sequence: Synthetic oligonucleotide
uugagcaguucccucagcg

SEQ ID NO: 2921677 - RNA, 19 nt, Artificial Sequence
  Description of Artificial Sequence: Synthetic oligonucleotide
aggccugccaccucgaggc

SEQ ID NO: 2921678 - RNA, 19 nt, Artificial Sequence
  Description of Artificial Sequence: Synthetic oligonucleotide
ugcacugcggcacacuagg

SEQ ID NO: 2921679 - RNA, 19 nt, Artificial Sequence
  Description of Artificial Sequence: Synthetic oligonucleotide
auugcaacaccacgguucg

SEQ ID NO: 2921680 - RNA, 19 nt, Artificial Sequence
  Description of Artificial Sequence: Synthetic oligonucleotide
aacaccacgguucguuccg

SEQ ID NO: 2921681 - RNA, 19 nt, Artificial Sequence
  Description of Artificial Sequence: Synthetic oligonucleotide
augauccucgcucacgucg

SEQ ID NO: 2921682 - RNA, 19 nt, Artificial Sequence
  Description of Artificial Sequence: Synthetic oligonucleotide
agcuccuuaaguuggguag

SEQ ID NO: 2921683 - RNA, 19 nt, Artificial Sequence
  Description of Artificial Sequence: Synthetic oligonucleotide
gagcaguucccucagcgcg

SEQ ID NO: 2921684 - RNA, 19 nt, Artificial Sequence
  Description of Artificial Sequence: Synthetic oligonucleotide
caaacccaggaaaagcucc

SEQ ID NO: 2921685 - RNA, 19 nt, Artificial Sequence
  Description of Artificial Sequence: Synthetic oligonucleotide
acugcggcacacuaggcgg

SEQ ID NO: 2921686 - RNA, 19 nt, Artificial Sequence
  Description of Artificial Sequence: Synthetic oligonucleotide
aaggugagggcggugggcc

SEQ ID NO: 2921687 - RNA, 19 nt, Artificial Sequence
  Description of Artificial Sequence: Synthetic oligonucleotide
uuggguagcgucgugaggc

SEQ ID NO: 2921688 - RNA, 19 nt, Artificial Sequence
  Description of Artificial Sequence: Synthetic oligonucleotide
augcucucgggacacgucc

SEQ ID NO: 2921689 - RNA, 19 nt, Artificial Sequence
  Description of Artificial Sequence: Synthetic oligonucleotide
agcgcucuccuccaggccc

SEQ ID NO: 2921690 - RNA, 19 nt, Artificial Sequence
  Description of Artificial Sequence: Synthetic oligonucleotide
uuugccucaggccugccac

SEQ ID NO: 2921691 - RNA, 19 nt, Artificial Sequence
  Description of Artificial Sequence: Synthetic oligonucleotide
agcagcugaacacagccug

SEQ ID NO: 2921692 - RNA, 19 nt, Artificial Sequence
  Description of Artificial Sequence: Synthetic oligonucleotide
aggaaaagcuccuuaaguu

SEQ ID NO: 2921693 - RNA, 19 nt, Artificial Sequence
  Description of Artificial Sequence: Synthetic oligonucleotide
acguagguauugcaacacc

SEQ ID NO: 2921694 - RNA, 19 nt, Artificial Sequence
  Description of Artificial Sequence: Synthetic oligonucleotide
agguauugcaacaccacgg

SEQ ID NO: 2921695 - RNA, 19 nt, Artificial Sequence
  Description of Artificial Sequence: Synthetic oligonucleotide
ggaaaagcuccuuaaguug

SEQ ID NO: 2921696 - RNA, 19 nt, Artificial Sequence
  Description of Artificial Sequence: Synthetic oligonucleotide
ugauccucgcucacgucgg

SEQ ID NO: 2921697 - RNA, 19 nt, Artificial Sequence
  Description of Artificial Sequence: Synthetic oligonucleotide
aaaagcuccuuaaguuggg

SEQ ID NO: 2921698 - RNA, 19 nt, Artificial Sequence
  Description of Artificial Sequence: Synthetic oligonucleotide
uggagguugagcaguuccc

SEQ ID NO: 2921699 - RNA, 19 nt, Artificial Sequence
  Description of Artificial Sequence: Synthetic oligonucleotide
gagacugaagagugcucgg

SEQ ID NO: 2921700 - RNA, 19 nt, Artificial Sequence
  Description of Artificial Sequence: Synthetic oligonucleotide
gucggcacgagacugaaga

SEQ ID NO: 2921701 - RNA, 19 nt, Artificial Sequence
  Description of Artificial Sequence: Synthetic oligonucleotide
ucgugaggcgcucagccgc

SEQ ID NO: 2921702 - RNA, 19 nt, Artificial Sequence
  Description of Artificial Sequence: Synthetic oligonucleotide
gagggcggagacaugaucc

SEQ ID NO: 2921703 - RNA, 19 nt, Artificial Sequence
  Description of Artificial Sequence: Synthetic oligonucleotide
ugcaucagcgcacguaggu

SEQ ID NO: 2921704 - RNA, 19 nt, Artificial Sequence
  Description of Artificial Sequence: Synthetic oligonucleotide
cucagcgcgagcagcaccg

SEQ ID NO: 2921705 - RNA, 19 nt, Artificial Sequence
  Description of Artificial Sequence: Synthetic oligonucleotide
aguuggguagcgucgugag

SEQ ID NO: 2921706 - RNA, 19 nt, Artificial Sequence
  Description of Artificial Sequence: Synthetic oligonucleotide
acaugauccucgcucacgu

SEQ ID NO: 2921707 - RNA, 19 nt, Artificial Sequence
  Description of Artificial Sequence: Synthetic oligonucleotide
guggagguugagcaguucc

SEQ ID NO: 2921708 - RNA, 19 nt, Artificial Sequence
  Description of Artificial Sequence: Synthetic oligonucleotide
gacaugauccucgcucacg

SEQ ID NO: 2921709 - RNA, 19 nt, Artificial Sequence
  Description of Artificial Sequence: Synthetic oligonucleotide
ggagacaugauccucgcuc

SEQ ID NO: 2921710 - RNA, 19 nt, Artificial Sequence
  Description of Artificial Sequence: Synthetic oligonucleotide
ugagcaguucccucagcgc

SEQ ID NO: 2921711 - RNA, 19 nt, Artificial Sequence
  Description of Artificial Sequence: Synthetic oligonucleotide
ugggccagccugcagggag

SEQ ID NO: 2921712 - RNA, 19 nt, Artificial Sequence
  Description of Artificial Sequence: Synthetic oligonucleotide
gagacaugauccucgcuca

SEQ ID NO: 2921713 - RNA, 19 nt, Artificial Sequence
  Description of Artificial Sequence: Synthetic oligonucleotide
uccaagagggcggagacau

SEQ ID NO: 2921714 - RNA, 19 nt, Artificial Sequence
  Description of Artificial Sequence: Synthetic oligonucleotide
agagggcggagacaugauc

SEQ ID NO: 2921715 - RNA, 19 nt, Artificial Sequence
  Description of Artificial Sequence: Synthetic oligonucleotide
cacugcggcacacuaggcg

SEQ ID NO: 2921716 - RNA, 19 nt, Artificial Sequence
  Description of Artificial Sequence: Synthetic oligonucleotide
uuaaguuggguagcgucgu

SEQ ID NO: 2921717 - RNA, 19 nt, Artificial Sequence
  Description of Artificial Sequence: Synthetic oligonucleotide
ugagcgcucuccuccaggc

SEQ ID NO: 2921718 - RNA, 19 nt, Artificial Sequence
  Description of Artificial Sequence: Synthetic oligonucleotide
agguugagcaguucccuca

SEQ ID NO: 2921719 - RNA, 19 nt, Artificial Sequence
  Description of Artificial Sequence: Synthetic oligonucleotide
caccucgaggccaagcagc

SEQ ID NO: 2921720 - RNA, 19 nt, Artificial Sequence
  Description of Artificial Sequence: Synthetic oligonucleotide
agcaccggcgcgcagugag

SEQ ID NO: 2921721 - RNA, 19 nt, Artificial Sequence
  Description of Artificial Sequence: Synthetic oligonucleotide
cucgaggccaagcagcgug

SEQ ID NO: 2921722 - RNA, 19 nt, Artificial Sequence
  Description of Artificial Sequence: Synthetic oligonucleotide
ugccuggcgaugcucucgg

SEQ ID NO: 2921723 - RNA, 19 nt, Artificial Sequence
  Description of Artificial Sequence: Synthetic oligonucleotide
ucgaggccaagcagcgugg

SEQ ID NO: 2921724 - RNA, 19 nt, Artificial Sequence
  Description of Artificial Sequence: Synthetic oligonucleotide
agacaugauccucgcucac

SEQ ID NO: 2921725 - RNA, 19 nt, Artificial Sequence
  Description of Artificial Sequence: Synthetic oligonucleotide
cuuggguacgcucgucugc

SEQ ID NO: 2921726 - RNA, 19 nt, Artificial Sequence
  Description of Artificial Sequence: Synthetic oligonucleotide
agggcguaggcgucggcac

SEQ ID NO: 2921727 - RNA, 19 nt, Artificial Sequence
  Description of Artificial Sequence: Synthetic oligonucleotide
uuuugccucaggccugcca

SEQ ID NO: 2921728 - RNA, 19 nt, Artificial Sequence
  Description of Artificial Sequence: Synthetic oligonucleotide
aagcuccuuaaguugggua

SEQ ID NO: 2921729 - RNA, 19 nt, Artificial Sequence
  Description of Artificial Sequence: Synthetic oligonucleotide
cuggcgaugcucucgggac

SEQ ID NO: 2921730 - RNA, 19 nt, Artificial Sequence
  Description of Artificial Sequence: Synthetic oligonucleotide
aaguuggguagcgucguga

SEQ ID NO: 2921731 - RNA, 19 nt, Artificial Sequence
  Description of Artificial Sequence: Synthetic oligonucleotide
guagguauugcaacaccac

SEQ ID NO: 2921732 - RNA, 19 nt, Artificial Sequence
  Description of Artificial Sequence: Synthetic oligonucleotide
caacaccacgguucguucc

SEQ ID NO: 2921733 - RNA, 19 nt, Artificial Sequence
  Description of Artificial Sequence: Synthetic oligonucleotide
ucugcacugcggcacacua

SEQ ID NO: 2921734 - RNA, 19 nt, Artificial Sequence
  Description of Artificial Sequence: Synthetic oligonucleotide
aaacccaggaaaagcuccu

SEQ ID NO: 2921735 - RNA, 19 nt, Artificial Sequence
  Description of Artificial Sequence: Synthetic oligonucleotide
agggcggugggccagccug

SEQ ID NO: 2921736 - RNA, 19 nt, Artificial Sequence
  Description of Artificial Sequence: Synthetic oligonucleotide
aaagcuccuuaaguugggu

SEQ ID NO: 2921737 - RNA, 19 nt, Artificial Sequence
  Description of Artificial Sequence: Synthetic oligonucleotide
aagagugcucggcggccag

SEQ ID NO: 2921738 - RNA, 19 nt, Artificial Sequence
  Description of Artificial Sequence: Synthetic oligonucleotide
uacgcucgucugcacugcg

SEQ ID NO: 2921739 - RNA, 19 nt, Artificial Sequence
  Description of Artificial Sequence: Synthetic oligonucleotide
aguucccucagcgcgagca

SEQ ID NO: 2921740 - RNA, 19 nt, Artificial Sequence
  Description of Artificial Sequence: Synthetic oligonucleotide
guuggguagcgucgugagg

SEQ ID NO: 2921741 - RNA, 19 nt, Artificial Sequence
  Description of Artificial Sequence: Synthetic oligonucleotide
uucguuccgccuccgccag

SEQ ID NO: 2921742 - RNA, 19 nt, Artificial Sequence
  Description of Artificial Sequence: Synthetic oligonucleotide
ucggcacgagacugaagag

SEQ ID NO: 2921743 - RNA, 19 nt, Artificial Sequence
  Description of Artificial Sequence: Synthetic oligonucleotide
uggguagcgucgugaggcg

SEQ ID NO: 2921744 - RNA, 19 nt, Artificial Sequence
  Description of Artificial Sequence: Synthetic oligonucleotide
guaggcgucggcacgagac

SEQ ID NO: 2921745 - RNA, 19 nt, Artificial Sequence
  Description of Artificial Sequence: Synthetic oligonucleotide
uaaguuggguagcgucgug

SEQ ID NO: 2921746 - RNA, 19 nt, Artificial Sequence
  Description of Artificial Sequence: Synthetic oligonucleotide
ugaagagugcucggcggcc

SEQ ID NO: 2921747 - RNA, 19 nt, Artificial Sequence
  Description of Artificial Sequence: Synthetic oligonucleotide
uuggguacgcucgucugca

SEQ ID NO: 2921748 - RNA, 19 nt, Artificial Sequence
  Description of Artificial Sequence: Synthetic oligonucleotide
cuccuuaaguuggguagcg

SEQ ID NO: 2921749 - RNA, 19 nt, Artificial Sequence
  Description of Artificial Sequence: Synthetic oligonucleotide
ugcucucgggacacguccc

SEQ ID NO: 2921750 - RNA, 19 nt, Artificial Sequence
  Description of Artificial Sequence: Synthetic oligonucleotide
gucgugaggcgcucagccg

SEQ ID NO: 2921751 - RNA, 19 nt, Artificial Sequence
  Description of Artificial Sequence: Synthetic oligonucleotide
ugcaacaccacgguucguu

SEQ ID NO: 2921752 - RNA, 19 nt, Artificial Sequence
  Description of Artificial Sequence: Synthetic oligonucleotide
ggcacgagacugaagagug

SEQ ID NO: 2921753 - RNA, 19 nt, Artificial Sequence
  Description of Artificial Sequence: Synthetic oligonucleotide
ccuuaaguuggguagcguc

SEQ ID NO: 2921754 - RNA, 19 nt, Artificial Sequence
  Description of Artificial Sequence: Synthetic oligonucleotide
uaggcggcccugcaucagc

SEQ ID NO: 2921755 - RNA, 19 nt, Artificial Sequence
  Description of Artificial Sequence: Synthetic oligonucleotide
ccugcaucagcgcacguag

SEQ ID NO: 2921756 - RNA, 19 nt, Artificial Sequence
  Description of Artificial Sequence: Synthetic oligonucleotide
ucccucagcgcgagcagca

SEQ ID NO: 2921757 - RNA, 19 nt, Artificial Sequence
  Description of Artificial Sequence: Synthetic oligonucleotide
ucucgggacacguccccgc

SEQ ID NO: 2921758 - RNA, 19 nt, Artificial Sequence
  Description of Artificial Sequence: Synthetic oligonucleotide
guucguuccgccuccgcca

SEQ ID NO: 2921759 - RNA, 19 nt, Artificial Sequence
  Description of Artificial Sequence: Synthetic oligonucleotide
cacguccccgcgcaggucc

SEQ ID NO: 2921760 - RNA, 19 nt, Artificial Sequence
  Description of Artificial Sequence: Synthetic oligonucleotide
gagguugagcaguucccuc

SEQ ID NO: 2921761 - RNA, 19 nt, Artificial Sequence
  Description of Artificial Sequence: Synthetic oligonucleotide
gguacgcucgucugcacug

SEQ ID NO: 2921762 - RNA, 19 nt, Artificial Sequence
  Description of Artificial Sequence: Synthetic oligonucleotide
agcgcgagcagcaccggcg

SEQ ID NO: 2921763 - RNA, 19 nt, Artificial Sequence
  Description of Artificial Sequence: Synthetic oligonucleotide
aggccaagcagcguggggu

SEQ ID NO: 2921764 - RNA, 19 nt, Artificial Sequence
  Description of Artificial Sequence: Synthetic oligonucleotide
gugagcgcucuccuccagg

SEQ ID NO: 2921765 - RNA, 19 nt, Artificial Sequence
  Description of Artificial Sequence: Synthetic oligonucleotide
gguucguuccgccuccgcc

SEQ ID NO: 2921766 - RNA, 19 nt, Artificial Sequence
  Description of Artificial Sequence: Synthetic oligonucleotide
cacguagguauugcaacac

SEQ ID NO: 2921767 - RNA, 19 nt, Artificial Sequence
  Description of Artificial Sequence: Synthetic oligonucleotide
uaggcgucggcacgagacu

SEQ ID NO: 2921768 - RNA, 19 nt, Artificial Sequence
  Description of Artificial Sequence: Synthetic oligonucleotide
caagagggcggagacauga

SEQ ID NO: 2921769 - RNA, 19 nt, Artificial Sequence
  Description of Artificial Sequence: Synthetic oligonucleotide
cacuaggcggcccugcauc

SEQ ID NO: 2921770 - RNA, 19 nt, Artificial Sequence
  Description of Artificial Sequence: Synthetic oligonucleotide
ggccaguggaaggugaggg

SEQ ID NO: 2921771 - RNA, 19 nt, Artificial Sequence
  Description of Artificial Sequence: Synthetic oligonucleotide
ggagcugagugcugccugg

SEQ ID NO: 2921772 - RNA, 19 nt, Artificial Sequence
  Description of Artificial Sequence: Synthetic oligonucleotide
ggcggagacaugauccucg

SEQ ID NO: 2921773 - RNA, 19 nt, Artificial Sequence
  Description of Artificial Sequence: Synthetic oligonucleotide
gggucguggagguugagca

SEQ ID NO: 2921774 - RNA, 19 nt, Artificial Sequence
  Description of Artificial Sequence: Synthetic oligonucleotide
caggaaaagcuccuuaagu

SEQ ID NO: 2921775 - RNA, 19 nt, Artificial Sequence
  Description of Artificial Sequence: Synthetic oligonucleotide
uccgccagcagcagcugaa

SEQ ID NO: 2921776 - RNA, 19 nt, Artificial Sequence
  Description of Artificial Sequence: Synthetic oligonucleotide
gauccucgcucacgucggg

SEQ ID NO: 2921777 - RNA, 19 nt, Artificial Sequence
  Description of Artificial Sequence: Synthetic oligonucleotide
uccucgcucacgucgggaa

SEQ ID NO: 2921778 - RNA, 19 nt, Artificial Sequence
  Description of Artificial Sequence: Synthetic oligonucleotide
ucagcgcacguagguauug

SEQ ID NO: 2921779 - RNA, 19 nt, Artificial Sequence
  Description of Artificial Sequence: Synthetic oligonucleotide
cucggcggccaguggaagg

SEQ ID NO: 2921780 - RNA, 19 nt, Artificial Sequence
  Description of Artificial Sequence: Synthetic oligonucleotide
agcgcacguagguauugca

SEQ ID NO: 2921781 - RNA, 19 nt, Artificial Sequence
  Description of Artificial Sequence: Synthetic oligonucleotide
acuaggcggcccugcauca

SEQ ID NO: 2921782 - RNA, 19 nt, Artificial Sequence
  Description of Artificial Sequence: Synthetic oligonucleotide
gguugagcaguucccucag

SEQ ID NO: 2921783 - RNA, 19 nt, Artificial Sequence
  Description of Artificial Sequence: Synthetic oligonucleotide
uggcgaugcucucgggaca

SEQ ID NO: 2921784 - RNA, 19 nt, Artificial Sequence
  Description of Artificial Sequence: Synthetic oligonucleotide
agccgcuuggguacgcucg

SEQ ID NO: 2921785 - RNA, 19 nt, Artificial Sequence
  Description of Artificial Sequence: Synthetic oligonucleotide
ccaguggaaggugagggcg

SEQ ID NO: 2921786 - RNA, 19 nt, Artificial Sequence
  Description of Artificial Sequence: Synthetic oligonucleotide
agggcggagacaugauccu

SEQ ID NO: 2921787 - RNA, 19 nt, Artificial Sequence
  Description of Artificial Sequence: Synthetic oligonucleotide
ccgcgcagguccaagaggg

SEQ ID NO: 2921788 - RNA, 19 nt, Artificial Sequence
  Description of Artificial Sequence: Synthetic oligonucleotide
ucaggccugccaccucgag

SEQ ID NO: 2921789 - RNA, 19 nt, Artificial Sequence
  Description of Artificial Sequence: Synthetic oligonucleotide
accucgaggccaagcagcg

SEQ ID NO: 2921790 - RNA, 19 nt, Artificial Sequence
  Description of Artificial Sequence: Synthetic oligonucleotide
cucgucugcacugcggcac

SEQ ID NO: 2921791 - RNA, 19 nt, Artificial Sequence
  Description of Artificial Sequence: Synthetic oligonucleotide
ccaggaaaagcuccuuaag

SEQ ID NO: 2921792 - RNA, 19 nt, Artificial Sequence
  Description of Artificial Sequence: Synthetic oligonucleotide
cugcaucagcgcacguagg

SEQ ID NO: 2921793 - RNA, 19 nt, Artificial Sequence
  Description of Artificial Sequence: Synthetic oligonucleotide
agcgucgugaggcgcucag

SEQ ID NO: 2921794 - RNA, 19 nt, Artificial Sequence
  Description of Artificial Sequence: Synthetic oligonucleotide
ugaggcgcucagccgcuug

SEQ ID NO: 2921795 - RNA, 19 nt, Artificial Sequence
  Description of Artificial Sequence: Synthetic oligonucleotide
cagcagcagcugaacacag

SEQ ID NO: 2921796 - RNA, 19 nt, Artificial Sequence
  Description of Artificial Sequence: Synthetic oligonucleotide
agugcucggcggccagugg

SEQ ID NO: 2921797 - RNA, 19 nt, Artificial Sequence
  Description of Artificial Sequence: Synthetic oligonucleotide
cacgguucguuccgccucc

SEQ ID NO: 2921798 - RNA, 19 nt, Artificial Sequence
  Description of Artificial Sequence: Synthetic oligonucleotide
ucgucugcacugcggcaca

SEQ ID NO: 2921799 - RNA, 19 nt, Artificial Sequence
  Description of Artificial Sequence: Synthetic oligonucleotide
cucgggacacguccccgcg

SEQ ID NO: 2921800 - RNA, 19 nt, Artificial Sequence
  Description of Artificial Sequence: Synthetic oligonucleotide
cugcacugcggcacacuag

SEQ ID NO: 2921801 - RNA, 19 nt, Artificial Sequence
  Description of Artificial Sequence: Synthetic oligonucleotide
cagcguggggucguggagg

SEQ ID NO: 2921802 - RNA, 19 nt, Artificial Sequence
  Description of Artificial Sequence: Synthetic oligonucleotide
accacgguucguuccgccu

SEQ ID NO: 2921803 - RNA, 19 nt, Artificial Sequence
  Description of Artificial Sequence: Synthetic oligonucleotide
ggugggccagccugcaggg

SEQ ID NO: 2921804 - RNA, 19 nt, Artificial Sequence
  Description of Artificial Sequence: Synthetic oligonucleotide
guucccucagcgcgagcag

SEQ ID NO: 2921805 - RNA, 19 nt, Artificial Sequence
  Description of Artificial Sequence: Synthetic oligonucleotide
agugagcgcucuccuccag

SEQ ID NO: 2921806 - RNA, 19 nt, Artificial Sequence
  Description of Artificial Sequence: Synthetic oligonucleotide
gccugcagggagcugagug

SEQ ID NO: 2921807 - RNA, 19 nt, Artificial Sequence
  Description of Artificial Sequence: Synthetic oligonucleotide
gguccaagagggcggagac

SEQ ID NO: 2921808 - RNA, 19 nt, Artificial Sequence
  Description of Artificial Sequence: Synthetic oligonucleotide
ccugcagggagcugagugc

SEQ ID NO: 2921809 - RNA, 19 nt, Artificial Sequence
  Description of Artificial Sequence: Synthetic oligonucleotide
gagugcugccuggcgaugc

SEQ ID NO: 2921810 - RNA, 19 nt, Artificial Sequence
  Description of Artificial Sequence: Synthetic oligonucleotide
uugccucaggccugccacc

SEQ ID NO: 2921811 - RNA, 19 nt, Artificial Sequence
  Description of Artificial Sequence: Synthetic oligonucleotide
cgagacugaagagugcucg

SEQ ID NO: 2921812 - RNA, 19 nt, Artificial Sequence
  Description of Artificial Sequence: Synthetic oligonucleotide
gguauugcaacaccacggu

SEQ ID NO: 2921813 - RNA, 19 nt, Artificial Sequence
  Description of Artificial Sequence: Synthetic oligonucleotide
uucccucagcgcgagcagc

SEQ ID NO: 2921814 - RNA, 19 nt, Artificial Sequence
  Description of Artificial Sequence: Synthetic oligonucleotide
uccuuaaguuggguagcgu

SEQ ID NO: 2921815 - RNA, 19 nt, Artificial Sequence
  Description of Artificial Sequence: Synthetic oligonucleotide
acgagacugaagagugcuc

SEQ ID NO: 2921816 - RNA, 19 nt, Artificial Sequence
  Description of Artificial Sequence: Synthetic oligonucleotide
ugcagggagcugagugcug

SEQ ID NO: 2921817 - RNA, 19 nt, Artificial Sequence
  Description of Artificial Sequence: Synthetic oligonucleotide
agcguggggucguggaggu

SEQ ID NO: 2921818 - RNA, 19 nt, Artificial Sequence
  Description of Artificial Sequence: Synthetic oligonucleotide
caggcccaaacccaggaaa

SEQ ID NO: 2921819 - RNA, 19 nt, Artificial Sequence
  Description of Artificial Sequence: Synthetic oligonucleotide
ucgggacacguccccgcgc

SEQ ID NO: 2921820 - RNA, 19 nt, Artificial Sequence
  Description of Artificial Sequence: Synthetic oligonucleotide
ucggcggccaguggaaggu

SEQ ID NO: 2921821 - RNA, 19 nt, Artificial Sequence
  Description of Artificial Sequence: Synthetic oligonucleotide
acaccacgguucguuccgc

SEQ ID NO: 2921822 - RNA, 19 nt, Artificial Sequence
  Description of Artificial Sequence: Synthetic oligonucleotide
agugcugccuggcgaugcu

SEQ ID NO: 2921823 - RNA, 19 nt, Artificial Sequence
  Description of Artificial Sequence: Synthetic oligonucleotide
ugcucggcggccaguggaa

SEQ ID NO: 2921824 - RNA, 19 nt, Artificial Sequence
  Description of Artificial Sequence: Synthetic oligonucleotide
cugcggcacacuaggcggc

SEQ ID NO: 2921825 - RNA, 19 nt, Artificial Sequence
  Description of Artificial Sequence: Synthetic oligonucleotide
agguccaagagggcggaga

SEQ ID NO: 2921826 - RNA, 19 nt, Artificial Sequence
  Description of Artificial Sequence: Synthetic oligonucleotide
accggcgcgcagugagcgc

SEQ ID NO: 2921827 - RNA, 19 nt, Artificial Sequence
  Description of Artificial Sequence: Synthetic oligonucleotide
ggucguggagguugagcag

SEQ ID NO: 2921828 - RNA, 19 nt, Artificial Sequence
  Description of Artificial Sequence: Synthetic oligonucleotide
caugauccucgcucacguc

SEQ ID NO: 2921829 - RNA, 19 nt, Artificial Sequence
  Description of Artificial Sequence: Synthetic oligonucleotide
aagcagcguggggucgugg

SEQ ID NO: 2921830 - RNA, 19 nt, Artificial Sequence
  Description of Artificial Sequence: Synthetic oligonucleotide
gagugcucggcggccagug

SEQ ID NO: 2921831 - RNA, 19 nt, Artificial Sequence
  Description of Artificial Sequence: Synthetic oligonucleotide
gcacguagguauugcaaca

SEQ ID NO: 2921832 - RNA, 19 nt, Artificial Sequence
  Description of Artificial Sequence: Synthetic oligonucleotide
cugccuggcgaugcucucg

SEQ ID NO: 2921833 - RNA, 19 nt, Artificial Sequence
  Description of Artificial Sequence: Synthetic oligonucleotide
ccaaacccaggaaaagcuc

SEQ ID NO: 2921834 - RNA, 19 nt, Artificial Sequence
  Description of Artificial Sequence: Synthetic oligonucleotide
gaugcucucgggacacguc

SEQ ID NO: 2921835 - RNA, 19 nt, Artificial Sequence
  Description of Artificial Sequence: Synthetic oligonucleotide
gaagagugcucggcggcca

SEQ ID NO: 2921836 - RNA, 19 nt, Artificial Sequence
  Description of Artificial Sequence: Synthetic oligonucleotide
gagggcguaggcgucggca

SEQ ID NO: 2921837 - RNA, 19 nt, Artificial Sequence
  Description of Artificial Sequence: Synthetic oligonucleotide
gcccaaacccaggaaaagc

SEQ ID NO: 2921838 - RNA, 19 nt, Artificial Sequence
  Description of Artificial Sequence: Synthetic oligonucleotide
caccggcgcgcagugagcg

SEQ ID NO: 2921839 - RNA, 19 nt, Artificial Sequence
  Description of Artificial Sequence: Synthetic oligonucleotide
aguggaaggugagggcggu

SEQ ID NO: 2921840 - RNA, 19 nt, Artificial Sequence
  Description of Artificial Sequence: Synthetic oligonucleotide
cgcacguagguauugcaac

SEQ ID NO: 2921841 - RNA, 19 nt, Artificial Sequence
  Description of Artificial Sequence: Synthetic oligonucleotide
cagggagcugagugcugcc

SEQ ID NO: 2921842 - RNA, 19 nt, Artificial Sequence
  Description of Artificial Sequence: Synthetic oligonucleotide
caccacgguucguuccgcc

SEQ ID NO: 2921843 - RNA, 19 nt, Artificial Sequence
  Description of Artificial Sequence: Synthetic oligonucleotide
ccucaggccugccaccucg

SEQ ID NO: 2921844 - RNA, 19 nt, Artificial Sequence
  Description of Artificial Sequence: Synthetic oligonucleotide
cucucgggacacguccccg

SEQ ID NO: 2921845 - RNA, 19 nt, Artificial Sequence
  Description of Artificial Sequence: Synthetic oligonucleotide
cguagguauugcaacacca

SEQ ID NO: 2921846 - RNA, 19 nt, Artificial Sequence
  Description of Artificial Sequence: Synthetic oligonucleotide
gcuuggguacgcucgucug

SEQ ID NO: 2921847 - RNA, 19 nt, Artificial Sequence
  Description of Artificial Sequence: Synthetic oligonucleotide
gggagcugagugcugccug

SEQ ID NO: 2921848 - RNA, 19 nt, Artificial Sequence
  Description of Artificial Sequence: Synthetic oligonucleotide
gcagcugaacacagccugg

SEQ ID NO: 2921849 - RNA, 19 nt, Artificial Sequence
  Description of Artificial Sequence: Synthetic oligonucleotide
aacacagccuggagggcuu

SEQ ID NO: 2921850 - RNA, 19 nt, Artificial Sequence
  Description of Artificial Sequence: Synthetic oligonucleotide
ucguggagguugagcaguu

SEQ ID NO: 2921851 - RNA, 19 nt, Artificial Sequence
  Description of Artificial Sequence: Synthetic oligonucleotide
ucagcgcgagcagcaccgg

SEQ ID NO: 2921852 - RNA, 19 nt, Artificial Sequence
  Description of Artificial Sequence: Synthetic oligonucleotide
agcagcaccggcgcgcagu

SEQ ID NO: 2921853 - RNA, 19 nt, Artificial Sequence
  Description of Artificial Sequence: Synthetic oligonucleotide
acacuaggcggcccugcau

SEQ ID NO: 2921854 - RNA, 19 nt, Artificial Sequence
  Description of Artificial Sequence: Synthetic oligonucleotide
gcuccuuaaguuggguagc

SEQ ID NO: 2921855 - RNA, 19 nt, Artificial Sequence
  Description of Artificial Sequence: Synthetic oligonucleotide
gcgcagguccaagagggcg

SEQ ID NO: 2921856 - RNA, 19 nt, Artificial Sequence
  Description of Artificial Sequence: Synthetic oligonucleotide
gcugagugcugccuggcga

SEQ ID NO: 2921857 - RNA, 19 nt, Artificial Sequence
  Description of Artificial Sequence: Synthetic oligonucleotide
ugagugcugccuggcgaug

SEQ ID NO: 2921858 - RNA, 19 nt, Artificial Sequence
  Description of Artificial Sequence: Synthetic oligonucleotide
caucagcgcacguagguau

SEQ ID NO: 2921859 - RNA, 19 nt, Artificial Sequence
  Description of Artificial Sequence: Synthetic oligonucleotide
gugcucggcggccagugga

SEQ ID NO: 2921860 - RNA, 19 nt, Artificial Sequence
  Description of Artificial Sequence: Synthetic oligonucleotide
aacccaggaaaagcuccuu

SEQ ID NO: 2921861 - RNA, 19 nt, Artificial Sequence
  Description of Artificial Sequence: Synthetic oligonucleotide
cucacgucgggaaaauuuu

SEQ ID NO: 2921862 - RNA, 19 nt, Artificial Sequence
  Description of Artificial Sequence: Synthetic oligonucleotide
aggcgucggcacgagacug

SEQ ID NO: 2921863 - RNA, 19 nt, Artificial Sequence
  Description of Artificial Sequence: Synthetic oligonucleotide
gccaguggaaggugagggc

SEQ ID NO: 2921864 - RNA, 19 nt, Artificial Sequence
  Description of Artificial Sequence: Synthetic oligonucleotide
cgucgugaggcgcucagcc

SEQ ID NO: 2921865 - RNA, 19 nt, Artificial Sequence
  Description of Artificial Sequence: Synthetic oligonucleotide
agcaguucccucagcgcga

SEQ ID NO: 2921866 - RNA, 19 nt, Artificial Sequence
  Description of Artificial Sequence: Synthetic oligonucleotide
aggcccaaacccaggaaaa

SEQ ID NO: 2921867 - RNA, 19 nt, Artificial Sequence
  Description of Artificial Sequence: Synthetic oligonucleotide
aagagggcggagacaugau

SEQ ID NO: 2921868 - RNA, 19 nt, Artificial Sequence
  Description of Artificial Sequence: Synthetic oligonucleotide
uccccgcgcagguccaaga

SEQ ID NO: 2921869 - RNA, 19 nt, Artificial Sequence
  Description of Artificial Sequence: Synthetic oligonucleotide
guacgcucgucugcacugc

SEQ ID NO: 2921870 - RNA, 19 nt, Artificial Sequence
  Description of Artificial Sequence: Synthetic oligonucleotide
ggcccaaacccaggaaaag

SEQ ID NO: 2921871 - RNA, 19 nt, Artificial Sequence
  Description of Artificial Sequence: Synthetic oligonucleotide
cacgagacugaagagugcu

SEQ ID NO: 2921872 - RNA, 19 nt, Artificial Sequence
  Description of Artificial Sequence: Synthetic oligonucleotide
aggcggcccugcaucagcg

SEQ ID NO: 2921873 - RNA, 19 nt, Artificial Sequence
  Description of Artificial Sequence: Synthetic oligonucleotide
gcagggagcugagugcugc

SEQ ID NO: 2921874 - RNA, 19 nt, Artificial Sequence
  Description of Artificial Sequence: Synthetic oligonucleotide
cagccugcagggagcugag

SEQ ID NO: 2921875 - RNA, 19 nt, Artificial Sequence
  Description of Artificial Sequence: Synthetic oligonucleotide
gccaccucgaggccaagca

SEQ ID NO: 2921876 - RNA, 19 nt, Artificial Sequence
  Description of Artificial Sequence: Synthetic oligonucleotide
ggacacguccccgcgcagg

SEQ ID NO: 2921877 - RNA, 19 nt, Artificial Sequence
  Description of Artificial Sequence: Synthetic oligonucleotide
agggagcugagugcugccu

SEQ ID NO: 2921878 - RNA, 19 nt, Artificial Sequence
  Description of Artificial Sequence: Synthetic oligonucleotide
acgcucgucugcacugcgg

SEQ ID NO: 2921879 - RNA, 19 nt, Artificial Sequence
  Description of Artificial Sequence: Synthetic oligonucleotide
gggcguaggcgucggcacg

SEQ ID NO: 2921880 - RNA, 19 nt, Artificial Sequence
  Description of Artificial Sequence: Synthetic oligonucleotide
ucagccgcuuggguacgcu

SEQ ID NO: 2921881 - RNA, 19 nt, Artificial Sequence
  Description of Artificial Sequence: Synthetic oligonucleotide
cgcagguccaagagggcgg

SEQ ID NO: 2921882 - RNA, 19 nt, Artificial Sequence
  Description of Artificial Sequence: Synthetic oligonucleotide
aggcgcucagccgcuuggg

SEQ ID NO: 2921883 - RNA, 19 nt, Artificial Sequence
  Description of Artificial Sequence: Synthetic oligonucleotide
gacacguccccgcgcaggu

SEQ ID NO: 2921884 - RNA, 19 nt, Artificial Sequence
  Description of Artificial Sequence: Synthetic oligonucleotide
gcaacaccacgguucguuc

SEQ ID NO: 2921885 - RNA, 19 nt, Artificial Sequence
  Description of Artificial Sequence: Synthetic oligonucleotide
uggguacgcucgucugcac

SEQ ID NO: 2921886 - RNA, 19 nt, Artificial Sequence
  Description of Artificial Sequence: Synthetic oligonucleotide
gcggagacaugauccucgc

SEQ ID NO: 2921887 - RNA, 19 nt, Artificial Sequence
  Description of Artificial Sequence: Synthetic oligonucleotide
gucguggagguugagcagu

SEQ ID NO: 2921888 - RNA, 19 nt, Artificial Sequence
  Description of Artificial Sequence: Synthetic oligonucleotide
gcagcguggggucguggag

SEQ ID NO: 2921889 - RNA, 19 nt, Artificial Sequence
  Description of Artificial Sequence: Synthetic oligonucleotide
aggugagggcggugggcca

SEQ ID NO: 2921890 - RNA, 19 nt, Artificial Sequence
  Description of Artificial Sequence: Synthetic oligonucleotide
cuaggcggcccugcaucag

SEQ ID NO: 2921891 - RNA, 19 nt, Artificial Sequence
  Description of Artificial Sequence: Synthetic oligonucleotide
cagcgcgagcagcaccggc

SEQ ID NO: 2921892 - RNA, 19 nt, Artificial Sequence
  Description of Artificial Sequence: Synthetic oligonucleotide
cacacuaggcggcccugca

SEQ ID NO: 2921893 - RNA, 19 nt, Artificial Sequence
  Description of Artificial Sequence: Synthetic oligonucleotide
cccaaacccaggaaaagcu

SEQ ID NO: 2921894 - RNA, 19 nt, Artificial Sequence
  Description of Artificial Sequence: Synthetic oligonucleotide
cagcugaacacagccugga

SEQ ID NO: 2921895 - RNA, 19 nt, Artificial Sequence
  Description of Artificial Sequence: Synthetic oligonucleotide
cagccgcuuggguacgcuc

SEQ ID NO: 2921896 - RNA, 19 nt, Artificial Sequence
  Description of Artificial Sequence: Synthetic oligonucleotide
ggggucguggagguugagc

SEQ ID NO: 2921897 - RNA, 19 nt, Artificial Sequence
  Description of Artificial Sequence: Synthetic oligonucleotide
cacagccuggagggcuugg

SEQ ID NO: 2921898 - RNA, 19 nt, Artificial Sequence
  Description of Artificial Sequence: Synthetic oligonucleotide
cagugagcgcucuccucca

SEQ ID NO: 2921899 - RNA, 19 nt, Artificial Sequence
  Description of Artificial Sequence: Synthetic oligonucleotide
cccgcgcagguccaagagg

SEQ ID NO: 2921900 - RNA, 19 nt, Artificial Sequence
  Description of Artificial Sequence: Synthetic oligonucleotide
cgcucagccgcuuggguac

SEQ ID NO: 2921901 - RNA, 19 nt, Artificial Sequence
  Description of Artificial Sequence: Synthetic oligonucleotide
guauugcaacaccacgguu

SEQ ID NO: 2921902 - RNA, 19 nt, Artificial Sequence
  Description of Artificial Sequence: Synthetic oligonucleotide
ccaccucgaggccaagcag

SEQ ID NO: 2921903 - RNA, 19 nt, Artificial Sequence
  Description of Artificial Sequence: Synthetic oligonucleotide
gcucucgggacacgucccc

SEQ ID NO: 2921904 - RNA, 19 nt, Artificial Sequence
  Description of Artificial Sequence: Synthetic oligonucleotide
ucguuccgccuccgccagc

SEQ ID NO: 2921905 - RNA, 19 nt, Artificial Sequence
  Description of Artificial Sequence: Synthetic oligonucleotide
ggcccugcaucagcgcacg

SEQ ID NO: 2921906 - RNA, 19 nt, Artificial Sequence
  Description of Artificial Sequence: Synthetic oligonucleotide
ucgcucacgucgggaaaau

SEQ ID NO: 2921907 - RNA, 19 nt, Artificial Sequence
  Description of Artificial Sequence: Synthetic oligonucleotide
ggugagggcggugggccag

SEQ ID NO: 2921908 - RNA, 19 nt, Artificial Sequence
  Description of Artificial Sequence: Synthetic oligonucleotide
cucgcucacgucgggaaaa

SEQ ID NO: 2921909 - RNA, 19 nt, Artificial Sequence
  Description of Artificial Sequence: Synthetic oligonucleotide
ggcgaugcucucgggacac

SEQ ID NO: 2921910 - RNA, 19 nt, Artificial Sequence
  Description of Artificial Sequence: Synthetic oligonucleotide
auccucgcucacgucggga

SEQ ID NO: 2921911 - RNA, 19 nt, Artificial Sequence
  Description of Artificial Sequence: Synthetic oligonucleotide
cguggggucguggagguug

SEQ ID NO: 2921912 - RNA, 19 nt, Artificial Sequence
  Description of Artificial Sequence: Synthetic oligonucleotide
ccucagcgcgagcagcacc

SEQ ID NO: 2921913 - RNA, 19 nt, Artificial Sequence
  Description of Artificial Sequence: Synthetic oligonucleotide
cugagugcugccuggcgau

SEQ ID NO: 2921914 - RNA, 19 nt, Artificial Sequence
  Description of Artificial Sequence: Synthetic oligonucleotide
cgcucgucugcacugcggc

SEQ ID NO: 2921915 - RNA, 19 nt, Artificial Sequence
  Description of Artificial Sequence: Synthetic oligonucleotide
ugagggcggugggccagcc

SEQ ID NO: 2921916 - RNA, 19 nt, Artificial Sequence
  Description of Artificial Sequence: Synthetic oligonucleotide
ggccaagcagcgugggguc

SEQ ID NO: 2921917 - RNA, 19 nt, Artificial Sequence
  Description of Artificial Sequence: Synthetic oligonucleotide
ccagcagcagcugaacaca

SEQ ID NO: 2921918 - RNA, 19 nt, Artificial Sequence
  Description of Artificial Sequence: Synthetic oligonucleotide
acgguucguuccgccuccg

SEQ ID NO: 2921919 - RNA, 19 nt, Artificial Sequence
  Description of Artificial Sequence: Synthetic oligonucleotide
gcagcaccggcgcgcagug

SEQ ID NO: 2921920 - RNA, 19 nt, Artificial Sequence
  Description of Artificial Sequence: Synthetic oligonucleotide
agagugcucggcggccagu

SEQ ID NO: 2921921 - RNA, 19 nt, Artificial Sequence
  Description of Artificial Sequence: Synthetic oligonucleotide
ccacgguucguuccgccuc

SEQ ID NO: 2921922 - RNA, 19 nt, Artificial Sequence
  Description of Artificial Sequence: Synthetic oligonucleotide
gcaguucccucagcgcgag

SEQ ID NO: 2921923 - RNA, 19 nt, Artificial Sequence
  Description of Artificial Sequence: Synthetic oligonucleotide
guccaagagggcggagaca

SEQ ID NO: 2921924 - RNA, 19 nt, Artificial Sequence
  Description of Artificial Sequence: Synthetic oligonucleotide
aucagcgcacguagguauu

SEQ ID NO: 2921925 - RNA, 19 nt, Artificial Sequence
  Description of Artificial Sequence: Synthetic oligonucleotide
guggaaggugagggcggug

SEQ ID NO: 2921926 - RNA, 19 nt, Artificial Sequence
  Description of Artificial Sequence: Synthetic oligonucleotide
gccaagcagcguggggucg

SEQ ID NO: 2921927 - RNA, 19 nt, Artificial Sequence
  Description of Artificial Sequence: Synthetic oligonucleotide
uggggucguggagguugag

SEQ ID NO: 2921928 - RNA, 19 nt, Artificial Sequence
  Description of Artificial Sequence: Synthetic oligonucleotide
caagcagcguggggucgug

SEQ ID NO: 2921929 - RNA, 19 nt, Artificial Sequence
  Description of Artificial Sequence: Synthetic oligonucleotide
acacagccuggagggcuug

SEQ ID NO: 2921930 - RNA, 19 nt, Artificial Sequence
  Description of Artificial Sequence: Synthetic oligonucleotide
gcacgagacugaagagugc

SEQ ID NO: 2921931 - RNA, 19 nt, Artificial Sequence
  Description of Artificial Sequence: Synthetic oligonucleotide
guagcgucgugaggcgcuc

SEQ ID NO: 2921932 - RNA, 19 nt, Artificial Sequence
  Description of Artificial Sequence: Synthetic oligonucleotide
uugcaacaccacgguucgu

SEQ ID NO: 2921933 - RNA, 19 nt, Artificial Sequence
  Description of Artificial Sequence: Synthetic oligonucleotide
gcgagcagcaccggcgcgc

SEQ ID NO: 2921934 - RNA, 19 nt, Artificial Sequence
  Description of Artificial Sequence: Synthetic oligonucleotide
ggagguugagcaguucccu

SEQ ID NO: 2921935 - RNA, 19 nt, Artificial Sequence
  Description of Artificial Sequence: Synthetic oligonucleotide
gcgcgagcagcaccggcgc

SEQ ID NO: 2921936 - RNA, 19 nt, Artificial Sequence
  Description of Artificial Sequence: Synthetic oligonucleotide
cucagccgcuuggguacgc

SEQ ID NO: 2921937 - RNA, 19 nt, Artificial Sequence
  Description of Artificial Sequence: Synthetic oligonucleotide
cucaggccugccaccucga

SEQ ID NO: 2921938 - RNA, 19 nt, Artificial Sequence
  Description of Artificial Sequence: Synthetic oligonucleotide
ccuggcgaugcucucggga

SEQ ID NO: 2921939 - RNA, 19 nt, Artificial Sequence
  Description of Artificial Sequence: Synthetic oligonucleotide
cagcagcugaacacagccu

SEQ ID NO: 2921940 - RNA, 19 nt, Artificial Sequence
  Description of Artificial Sequence: Synthetic oligonucleotide
ccagccugcagggagcuga

SEQ ID NO: 2921941 - RNA, 19 nt, Artificial Sequence
  Description of Artificial Sequence: Synthetic oligonucleotide
cugcagggagcugagugcu

SEQ ID NO: 2921942 - RNA, 19 nt, Artificial Sequence
  Description of Artificial Sequence: Synthetic oligonucleotide
uagcgucgugaggcgcuca

SEQ ID NO: 2921943 - RNA, 19 nt, Artificial Sequence
  Description of Artificial Sequence: Synthetic oligonucleotide
gcggcccugcaucagcgca

SEQ ID NO: 2921944 - RNA, 19 nt, Artificial Sequence
  Description of Artificial Sequence: Synthetic oligonucleotide
gcucacgucgggaaaauuu

SEQ ID NO: 2921945 - RNA, 19 nt, Artificial Sequence
  Description of Artificial Sequence: Synthetic oligonucleotide
gcggccaguggaaggugag

SEQ ID NO: 2921946 - RNA, 19 nt, Artificial Sequence
  Description of Artificial Sequence: Synthetic oligonucleotide
cuccgccagcagcagcuga

SEQ ID NO: 2921947 - RNA, 19 nt, Artificial Sequence
  Description of Artificial Sequence: Synthetic oligonucleotide
guccccgcgcagguccaag

SEQ ID NO: 2921948 - RNA, 19 nt, Artificial Sequence
  Description of Artificial Sequence: Synthetic oligonucleotide
ggguagcgucgugaggcgc

SEQ ID NO: 2921949 - RNA, 19 nt, Artificial Sequence
  Description of Artificial Sequence: Synthetic oligonucleotide
caguucccucagcgcgagc

SEQ ID NO: 2921950 - RNA, 19 nt, Artificial Sequence
  Description of Artificial Sequence: Synthetic oligonucleotide
cgcgcagugagcgcucucc

SEQ ID NO: 2921951 - RNA, 19 nt, Artificial Sequence
  Description of Artificial Sequence: Synthetic oligonucleotide
gugagggcggugggccagc

SEQ ID NO: 2921952 - RNA, 19 nt, Artificial Sequence
  Description of Artificial Sequence: Synthetic oligonucleotide
gggagggcguaggcgucgg

SEQ ID NO: 2921953 - RNA, 19 nt, Artificial Sequence
  Description of Artificial Sequence: Synthetic oligonucleotide
gcacacuaggcggcccugc

SEQ ID NO: 2921954 - RNA, 19 nt, Artificial Sequence
  Description of Artificial Sequence: Synthetic oligonucleotide
ccccgcgcagguccaagag

SEQ ID NO: 2921955 - RNA, 19 nt, Artificial Sequence
  Description of Artificial Sequence: Synthetic oligonucleotide
cagguccaagagggcggag

SEQ ID NO: 2921956 - RNA, 19 nt, Artificial Sequence
  Description of Artificial Sequence: Synthetic oligonucleotide
ggcggcccugcaucagcgc

SEQ ID NO: 2921957 - RNA, 19 nt, Artificial Sequence
  Description of Artificial Sequence: Synthetic oligonucleotide
gcucgucugcacugcggca

SEQ ID NO: 2921958 - RNA, 19 nt, Artificial Sequence
  Description of Artificial Sequence: Synthetic oligonucleotide
gguagcgucgugaggcgcu

SEQ ID NO: 2921959 - RNA, 19 nt, Artificial Sequence
  Description of Artificial Sequence: Synthetic oligonucleotide
ggguacgcucgucugcacu

SEQ ID NO: 2921960 - RNA, 19 nt, Artificial Sequence
  Description of Artificial Sequence: Synthetic oligonucleotide
gcgcacguagguauugcaa

SEQ ID NO: 2921961 - RNA, 19 nt, Artificial Sequence
  Description of Artificial Sequence: Synthetic oligonucleotide
gggacacguccccgcgcag

SEQ ID NO: 2921962 - RNA, 19 nt, Artificial Sequence
  Description of Artificial Sequence: Synthetic oligonucleotide
ggcguaggcgucggcacga

SEQ ID NO: 2921963 - RNA, 19 nt, Artificial Sequence
  Description of Artificial Sequence: Synthetic oligonucleotide
gcgcucagccgcuugggua

SEQ ID NO: 2921964 - RNA, 19 nt, Artificial Sequence
  Description of Artificial Sequence: Synthetic oligonucleotide
ccaagagggcggagacaug

SEQ ID NO: 2921965 - RNA, 19 nt, Artificial Sequence
  Description of Artificial Sequence: Synthetic oligonucleotide
gcucagccgcuuggguacg

SEQ ID NO: 2921966 - RNA, 19 nt, Artificial Sequence
  Description of Artificial Sequence: Synthetic oligonucleotide
ggcacacuaggcggcccug

SEQ ID NO: 2921967 - RNA, 19 nt, Artificial Sequence
  Description of Artificial Sequence: Synthetic oligonucleotide
gcaucagcgcacguaggua

SEQ ID NO: 2921968 - RNA, 19 nt, Artificial Sequence
  Description of Artificial Sequence: Synthetic oligonucleotide
gugcugccuggcgaugcuc

SEQ ID NO: 2921969 - RNA, 19 nt, Artificial Sequence
  Description of Artificial Sequence: Synthetic oligonucleotide
gccuggcgaugcucucggg

SEQ ID NO: 2921970 - RNA, 19 nt, Artificial Sequence
  Description of Artificial Sequence: Synthetic oligonucleotide
gcagguccaagagggcgga

SEQ ID NO: 2921971 - RNA, 19 nt, Artificial Sequence
  Description of Artificial Sequence: Synthetic oligonucleotide
gcacugcggcacacuaggc

SEQ ID NO: 2921972 - RNA, 19 nt, Artificial Sequence
  Description of Artificial Sequence: Synthetic oligonucleotide
gggcggagacaugauccuc

SEQ ID NO: 2921973 - RNA, 19 nt, Artificial Sequence
  Description of Artificial Sequence: Synthetic oligonucleotide
ggcggccaguggaagguga

SEQ ID NO: 2921974 - RNA, 19 nt, Artificial Sequence
  Description of Artificial Sequence: Synthetic oligonucleotide
ggagggcguaggcgucggc

SEQ ID NO: 2921975 - RNA, 19 nt, Artificial Sequence
  Description of Artificial Sequence: Synthetic oligonucleotide
gcucggcggccaguggaag

SEQ ID NO: 2921976 - RNA, 19 nt, Artificial Sequence
  Description of Artificial Sequence: Synthetic oligonucleotide
ggcgucggcacgagacuga

SEQ ID NO: 2921977 - RNA, 19 nt, Artificial Sequence
  Description of Artificial Sequence: Synthetic oligonucleotide
gcgaugcucucgggacacg

SEQ ID NO: 2921978 - RNA, 19 nt, Artificial Sequence
  Description of Artificial Sequence: Synthetic oligonucleotide
ggccugccaccucgaggcc

SEQ ID NO: 2921979 - RNA, 19 nt, Artificial Sequence
  Description of Artificial Sequence: Synthetic oligonucleotide
gcggugggccagccugcag

SEQ ID NO: 2921980 - RNA, 19 nt, Artificial Sequence
  Description of Artificial Sequence: Synthetic oligonucleotide
gcgucgugaggcgcucagc

SEQ ID NO: 2921981 - RNA, 19 nt, Artificial Sequence
  Description of Artificial Sequence: Synthetic oligonucleotide
gagggcggugggccagccu

SEQ ID NO: 2921982 - RNA, 19 nt, Artificial Sequence
  Description of Artificial Sequence: Synthetic oligonucleotide
gucugcacugcggcacacu

SEQ ID NO: 2921983 - RNA, 19 nt, Artificial Sequence
  Description of Artificial Sequence: Synthetic oligonucleotide
gccugccaccucgaggcca

SEQ ID NO: 2921984 - RNA, 19 nt, Artificial Sequence
  Description of Artificial Sequence: Synthetic oligonucleotide
cggcccugcaucagcgcac

SEQ ID NO: 2921985 - RNA, 19 nt, Artificial Sequence
  Description of Artificial Sequence: Synthetic oligonucleotide
cggccaguggaaggugagg

SEQ ID NO: 2921986 - RNA, 19 nt, Artificial Sequence
  Description of Artificial Sequence: Synthetic oligonucleotide
acguccccgcgcaggucca

SEQ ID NO: 2921987 - RNA, 19 nt, Artificial Sequence
  Description of Artificial Sequence: Synthetic oligonucleotide
gcaccggcgcgcagugagc

SEQ ID NO: 2921988 - RNA, 19 nt, Artificial Sequence
  Description of Artificial Sequence: Synthetic oligonucleotide
cgucggcacgagacugaag

SEQ ID NO: 2921989 - RNA, 19 nt, Artificial Sequence
  Description of Artificial Sequence: Synthetic oligonucleotide
gugggccagccugcaggga

SEQ ID NO: 2921990 - RNA, 19 nt, Artificial Sequence
  Description of Artificial Sequence: Synthetic oligonucleotide
ccaggcccaaacccaggaa

SEQ ID NO: 2921991 - RNA, 19 nt, Artificial Sequence
  Description of Artificial Sequence: Synthetic oligonucleotide
ggcgcucagccgcuugggu

SEQ ID NO: 2921992 - RNA, 19 nt, Artificial Sequence
  Description of Artificial Sequence: Synthetic oligonucleotide
gcguaggcgucggcacgag

SEQ ID NO: 2921993 - RNA, 19 nt, Artificial Sequence
  Description of Artificial Sequence: Synthetic oligonucleotide
cugccaccucgaggccaag

SEQ ID NO: 2921994 - RNA, 19 nt, Artificial Sequence
  Description of Artificial Sequence: Synthetic oligonucleotide
cgggacacguccccgcgca

SEQ ID NO: 2921995 - RNA, 19 nt, Artificial Sequence
  Description of Artificial Sequence: Synthetic oligonucleotide
cgcgagcagcaccggcgcg

SEQ ID NO: 2921996 - RNA, 19 nt, Artificial Sequence
  Description of Artificial Sequence: Synthetic oligonucleotide
gccgcuuggguacgcucgu

SEQ ID NO: 2921997 - RNA, 19 nt, Artificial Sequence
  Description of Artificial Sequence: Synthetic oligonucleotide
ccucgcucacgucgggaaa

SEQ ID NO: 2921998 - RNA, 19 nt, Artificial Sequence
  Description of Artificial Sequence: Synthetic oligonucleotide
cguuccgccuccgccagca

SEQ ID NO: 2921999 - RNA, 19 nt, Artificial Sequence
  Description of Artificial Sequence: Synthetic oligonucleotide
gcgcagugagcgcucuccu

SEQ ID NO: 2922000 - RNA, 19 nt, Artificial Sequence
  Description of Artificial Sequence: Synthetic oligonucleotide
gcgcucuccuccaggccca

SEQ ID NO: 2922001 - RNA, 19 nt, Artificial Sequence
  Description of Artificial Sequence: Synthetic oligonucleotide
cccugcaucagcgcacgua

SEQ ID NO: 2922002 - RNA, 19 nt, Artificial Sequence
  Description of Artificial Sequence: Synthetic oligonucleotide
gcgucggcacgagacugaa

SEQ ID NO: 2922003 - RNA, 19 nt, Artificial Sequence
  Description of Artificial Sequence: Synthetic oligonucleotide
cgguucguuccgccuccgc

SEQ ID NO: 2922004 - RNA, 19 nt, Artificial Sequence
  Description of Artificial Sequence: Synthetic oligonucleotide
cccucagcgcgagcagcac

SEQ ID NO: 2922005 - RNA, 19 nt, Artificial Sequence
  Description of Artificial Sequence: Synthetic oligonucleotide
ggcggugggccagccugca

SEQ ID NO: 2922006 - RNA, 19 nt, Artificial Sequence
  Description of Artificial Sequence: Synthetic oligonucleotide
cguggagguugagcaguuc

SEQ ID NO: 2922007 - RNA, 19 nt, Artificial Sequence
  Description of Artificial Sequence: Synthetic oligonucleotide
ccuccgccagcagcagcug

SEQ ID NO: 2922008 - RNA, 19 nt, Artificial Sequence
  Description of Artificial Sequence: Synthetic oligonucleotide
cgcuuggguacgcucgucu

SEQ ID NO: 2922009 - RNA, 19 nt, Artificial Sequence
  Description of Artificial Sequence: Synthetic oligonucleotide
cggcacgagacugaagagu

SEQ ID NO: 2922010 - RNA, 19 nt, Artificial Sequence
  Description of Artificial Sequence: Synthetic oligonucleotide
gcgcgcagugagcgcucuc

SEQ ID NO: 2922011 - RNA, 19 nt, Artificial Sequence
  Description of Artificial Sequence: Synthetic oligonucleotide
cagcaccggcgcgcaguga

SEQ ID NO: 2922012 - RNA, 19 nt, Artificial Sequence
  Description of Artificial Sequence: Synthetic oligonucleotide
ggccagccugcagggagcu

SEQ ID NO: 2922013 - RNA, 19 nt, Artificial Sequence
  Description of Artificial Sequence: Synthetic oligonucleotide
cguaggcgucggcacgaga

SEQ ID NO: 2922014 - RNA, 19 nt, Artificial Sequence
  Description of Artificial Sequence: Synthetic oligonucleotide
cgucugcacugcggcacac

SEQ ID NO: 2922015 - RNA, 19 nt, Artificial Sequence
  Description of Artificial Sequence: Synthetic oligonucleotide
ccaagcagcguggggucgu

SEQ ID NO: 2922016 - RNA, 19 nt, Artificial Sequence
  Description of Artificial Sequence: Synthetic oligonucleotide
ccgcuuggguacgcucguc

SEQ ID NO: 2922017 - RNA, 19 nt, Artificial Sequence
  Description of Artificial Sequence: Synthetic oligonucleotide
cgagcagcaccggcgcgca

SEQ ID NO: 2922018 - RNA, 19 nt, Artificial Sequence
  Description of Artificial Sequence: Synthetic oligonucleotide
ccgccuccgccagcagcag

SEQ ID NO: 2922019 - RNA, 19 nt, Artificial Sequence
  Description of Artificial Sequence: Synthetic oligonucleotide
cgaugcucucgggacacgu

SEQ ID NO: 2922020 - RNA, 19 nt, Artificial Sequence
  Description of Artificial Sequence: Synthetic oligonucleotide
cgugaggcgcucagccgcu

SEQ ID NO: 2922021 - RNA, 19 nt, Artificial Sequence
  Description of Artificial Sequence: Synthetic oligonucleotide
ggcgcgcagugagcgcucu

SEQ ID NO: 2922022 - RNA, 19 nt, Artificial Sequence
  Description of Artificial Sequence: Synthetic oligonucleotide
cggcgcgcagugagcgcuc

SEQ ID NO: 2922023 - RNA, 19 nt, Artificial Sequence
  Description of Artificial Sequence: Synthetic oligonucleotide
gugaggcgcucagccgcuu

SEQ ID NO: 2922024 - RNA, 19 nt, Artificial Sequence
  Description of Artificial Sequence: Synthetic oligonucleotide
cggcggccaguggaaggug

SEQ ID NO: 2922025 - RNA, 19 nt, Artificial Sequence
  Description of Artificial Sequence: Synthetic oligonucleotide
cggagacaugauccucgcu

SEQ ID NO: 2922026 - RNA, 19 nt, Artificial Sequence
  Description of Artificial Sequence: Synthetic oligonucleotide
cggcacacuaggcggcccu

SEQ ID NO: 2922027 - RNA, 19 nt, Artificial Sequence
  Description of Artificial Sequence: Synthetic oligonucleotide
gcccugcaucagcgcacgu

SEQ ID NO: 2922028 - RNA, 19 nt, Artificial Sequence
  Description of Artificial Sequence: Synthetic oligonucleotide
ccucgaggccaagcagcgu

SEQ ID NO: 2922029 - RNA, 19 nt, Artificial Sequence
  Description of Artificial Sequence: Synthetic oligonucleotide
cgcucacgucgggaaaauu

SEQ ID NO: 2922030 - RNA, 19 nt, Artificial Sequence
  Description of Artificial Sequence: Synthetic oligonucleotide
gcguggggucguggagguu

SEQ ID NO: 2922031 - RNA, 19 nt, Artificial Sequence
  Description of Artificial Sequence: Synthetic oligonucleotide
cguccccgcgcagguccaa

SEQ ID NO: 2922032 - RNA, 19 nt, Artificial Sequence
  Description of Artificial Sequence: Synthetic oligonucleotide
uagacauuuauuuaaagug

SEQ ID NO: 2922033 - RNA, 19 nt, Artificial Sequence
  Description of Artificial Sequence: Synthetic oligonucleotide
aauaccacuuucgaaagcc

SEQ ID NO: 2922034 - RNA, 19 nt, Artificial Sequence
  Description of Artificial Sequence: Synthetic oligonucleotide
aacucuuagauugugauuc

SEQ ID NO: 2922035 - RNA, 19 nt, Artificial Sequence
  Description of Artificial Sequence: Synthetic oligonucleotide
uuugagauaggguucaagg

SEQ ID NO: 2922036 - RNA, 19 nt, Artificial Sequence
  Description of Artificial Sequence: Synthetic oligonucleotide
ucucauaagacccagcuug

SEQ ID NO: 2922037 - RNA, 19 nt, Artificial Sequence
  Description of Artificial Sequence: Synthetic oligonucleotide
ucuuaaaauaugcugagac

SEQ ID NO: 2922038 - RNA, 19 nt, Artificial Sequence
  Description of Artificial Sequence: Synthetic oligonucleotide
uauaaagauucucaggaag

SEQ ID NO: 2922039 - RNA, 19 nt, Artificial Sequence
  Description of Artificial Sequence: Synthetic oligonucleotide
uuuaaagugaggcaucugc

SEQ ID NO: 2922040 - RNA, 19 nt, Artificial Sequence
  Description of Artificial Sequence: Synthetic oligonucleotide
uguaauaccacuuucgaaa

SEQ ID NO: 2922041 - RNA, 19 nt, Artificial Sequence
  Description of Artificial Sequence: Synthetic oligonucleotide
aagcaaauaacucuuagau

SEQ ID NO: 2922042 - RNA, 19 nt, Artificial Sequence
  Description of Artificial Sequence: Synthetic oligonucleotide
ucugucguuauaaagauuc

SEQ ID NO: 2922043 - RNA, 19 nt, Artificial Sequence
  Description of Artificial Sequence: Synthetic oligonucleotide
guuauaaagauucucagga

SEQ ID NO: 2922044 - RNA, 19 nt, Artificial Sequence
  Description of Artificial Sequence: Synthetic oligonucleotide
uacaucaucucucauaaga

SEQ ID NO: 2922045 - RNA, 19 nt, Artificial Sequence
  Description of Artificial Sequence: Synthetic oligonucleotide
gcaaauaacucuuagauug

SEQ ID NO: 2922046 - RNA, 19 nt, Artificial Sequence
  Description of Artificial Sequence: Synthetic oligonucleotide
aagccauccagccacuugc

SEQ ID NO: 2922047 - RNA, 19 nt, Artificial Sequence
  Description of Artificial Sequence: Synthetic oligonucleotide
ucaggaagccuucuuaugg

SEQ ID NO: 2922048 - RNA, 19 nt, Artificial Sequence
  Description of Artificial Sequence: Synthetic oligonucleotide
aauagacauuuauuuaaag

SEQ ID NO: 2922049 - RNA, 19 nt, Artificial Sequence
  Description of Artificial Sequence: Synthetic oligonucleotide
acaacuucuuaaaauaugc

SEQ ID NO: 2922050 - RNA, 19 nt, Artificial Sequence
  Description of Artificial Sequence: Synthetic oligonucleotide
cauuuauuuaaagugaggc

SEQ ID NO: 2922051 - RNA, 19 nt, Artificial Sequence
  Description of Artificial Sequence: Synthetic oligonucleotide
auauuuuguccacugcucc

SEQ ID NO: 2922052 - RNA, 19 nt, Artificial Sequence
  Description of Artificial Sequence: Synthetic oligonucleotide
uuuauuuaaagugaggcau

SEQ ID NO: 2922053 - RNA, 19 nt, Artificial Sequence
  Description of Artificial Sequence: Synthetic oligonucleotide
ucuuagauugugauucggg

SEQ ID NO: 2922054 - RNA, 19 nt, Artificial Sequence
  Description of Artificial Sequence: Synthetic oligonucleotide
cacaucuucagucucaugc

SEQ ID NO: 2922055 - RNA, 19 nt, Artificial Sequence
  Description of Artificial Sequence: Synthetic oligonucleotide
auagacauuuauuuaaagu

SEQ ID NO: 2922056 - RNA, 19 nt, Artificial Sequence
  Description of Artificial Sequence: Synthetic oligonucleotide
auaaagauucucaggaagc

SEQ ID NO: 2922057 - RNA, 19 nt, Artificial Sequence
  Description of Artificial Sequence: Synthetic oligonucleotide
uuacaauagacauuuauuu

SEQ ID NO: 2922058 - RNA, 19 nt, Artificial Sequence
  Description of Artificial Sequence: Synthetic oligonucleotide
aaagcaaauaacucuuaga

SEQ ID NO: 2922059 - RNA, 19 nt, Artificial Sequence
  Description of Artificial Sequence: Synthetic oligonucleotide
uucaagguagaauuugucc

SEQ ID NO: 2922060 - RNA, 19 nt, Artificial Sequence
  Description of Artificial Sequence: Synthetic oligonucleotide
uagauugugauucggguug

SEQ ID NO: 2922061 - RNA, 19 nt, Artificial Sequence
  Description of Artificial Sequence: Synthetic oligonucleotide
gauaaccucuuugagauag

SEQ ID NO: 2922062 - RNA, 19 nt, Artificial Sequence
  Description of Artificial Sequence: Synthetic oligonucleotide
gauucgaaacauucugucg

SEQ ID NO: 2922063 - RNA, 19 nt, Artificial Sequence
  Description of Artificial Sequence: Synthetic oligonucleotide
cuuaaaauaugcugagacc

SEQ ID NO: 2922064 - RNA, 19 nt, Artificial Sequence
  Description of Artificial Sequence: Synthetic oligonucleotide
acagaucucaacaacaagg

SEQ ID NO: 2922065 - RNA, 19 nt, Artificial Sequence
  Description of Artificial Sequence: Synthetic oligonucleotide
aacaaggucacuucuuugu

SEQ ID NO: 2922066 - RNA, 19 nt, Artificial Sequence
  Description of Artificial Sequence: Synthetic oligonucleotide
ucaagguagaauuuguccu

SEQ ID NO: 2922067 - RNA, 19 nt, Artificial Sequence
  Description of Artificial Sequence: Synthetic oligonucleotide
ucauauuuuguccacugcu

SEQ ID NO: 2922068 - RNA, 19 nt, Artificial Sequence
  Description of Artificial Sequence: Synthetic oligonucleotide
acaauagacauuuauuuaa

SEQ ID NO: 2922069 - RNA, 19 nt, Artificial Sequence
  Description of Artificial Sequence: Synthetic oligonucleotide
agucucaugcauuacauca

SEQ ID NO: 2922070 - RNA, 19 nt, Artificial Sequence
  Description of Artificial Sequence: Synthetic oligonucleotide
aucaucucucauaagaccc

SEQ ID NO: 2922071 - RNA, 19 nt, Artificial Sequence
  Description of Artificial Sequence: Synthetic oligonucleotide
ugaaacaacuucuuaaaau

SEQ ID NO: 2922072 - RNA, 19 nt, Artificial Sequence
  Description of Artificial Sequence: Synthetic oligonucleotide
aaauaugcugagaccaggc

SEQ ID NO: 2922073 - RNA, 19 nt, Artificial Sequence
  Description of Artificial Sequence: Synthetic oligonucleotide
auaugcugagaccaggcac

SEQ ID NO: 2922074 - RNA, 19 nt, Artificial Sequence
  Description of Artificial Sequence: Synthetic oligonucleotide
gaaacaacuucuuaaaaua

SEQ ID NO: 2922075 - RNA, 19 nt, Artificial Sequence
  Description of Artificial Sequence: Synthetic oligonucleotide
auuuauuuaaagugaggca

SEQ ID NO: 2922076 - RNA, 19 nt, Artificial Sequence
  Description of Artificial Sequence: Synthetic oligonucleotide
aaaauaugcugagaccagg

SEQ ID NO: 2922077 - RNA, 19 nt, Artificial Sequence
  Description of Artificial Sequence: Synthetic oligonucleotide
cuugauucgaaacauucug

SEQ ID NO: 2922078 - RNA, 19 nt, Artificial Sequence
  Description of Artificial Sequence: Synthetic oligonucleotide
auucgaaacauucugucgu

SEQ ID NO: 2922079 - RNA, 19 nt, Artificial Sequence
  Description of Artificial Sequence: Synthetic oligonucleotide
uaaaauaugcugagaccag

SEQ ID NO: 2922080 - RNA, 19 nt, Artificial Sequence
  Description of Artificial Sequence: Synthetic oligonucleotide
gaucucaacaacaagguca

SEQ ID NO: 2922081 - RNA, 19 nt, Artificial Sequence
  Description of Artificial Sequence: Synthetic oligonucleotide
ucugcaaagcaaauaacuc

SEQ ID NO: 2922082 - RNA, 19 nt, Artificial Sequence
  Description of Artificial Sequence: Synthetic oligonucleotide
cuuaggcaagaucugaugc

SEQ ID NO: 2922083 - RNA, 19 nt, Artificial Sequence
  Description of Artificial Sequence: Synthetic oligonucleotide
ucgaaagccauccagccac

SEQ ID NO: 2922084 - RNA, 19 nt, Artificial Sequence
  Description of Artificial Sequence: Synthetic oligonucleotide
ucguuauaaagauucucag

SEQ ID NO: 2922085 - RNA, 19 nt, Artificial Sequence
  Description of Artificial Sequence: Synthetic oligonucleotide
aagugaggcaucugcaaag

SEQ ID NO: 2922086 - RNA, 19 nt, Artificial Sequence
  Description of Artificial Sequence: Synthetic oligonucleotide
cuuguugaauccugcagcg

SEQ ID NO: 2922087 - RNA, 19 nt, Artificial Sequence
  Description of Artificial Sequence: Synthetic oligonucleotide
uugugauucggguugaaac

SEQ ID NO: 2922088 - RNA, 19 nt, Artificial Sequence
  Description of Artificial Sequence: Synthetic oligonucleotide
uuaaagugaggcaucugca

SEQ ID NO: 2922089 - RNA, 19 nt, Artificial Sequence
  Description of Artificial Sequence: Synthetic oligonucleotide
ugugauucggguugaaaca

SEQ ID NO: 2922090 - RNA, 19 nt, Artificial Sequence
  Description of Artificial Sequence: Synthetic oligonucleotide
aagguagaauuuguccucc

SEQ ID NO: 2922091 - RNA, 19 nt, Artificial Sequence
  Description of Artificial Sequence: Synthetic oligonucleotide
ucucucauaagacccagcu

SEQ ID NO: 2922092 - RNA, 19 nt, Artificial Sequence
  Description of Artificial Sequence: Synthetic oligonucleotide
uaugcugagaccaggcaca

SEQ ID NO: 2922093 - RNA, 19 nt, Artificial Sequence
  Description of Artificial Sequence: Synthetic oligonucleotide
cuuucgaaagccauccagc

SEQ ID NO: 2922094 - RNA, 19 nt, Artificial Sequence
  Description of Artificial Sequence: Synthetic oligonucleotide
ugagauaggguucaaggua

SEQ ID NO: 2922095 - RNA, 19 nt, Artificial Sequence
  Description of Artificial Sequence: Synthetic oligonucleotide
acauccacagaucucaaca

SEQ ID NO: 2922096 - RNA, 19 nt, Artificial Sequence
  Description of Artificial Sequence: Synthetic oligonucleotide
cauucugucguuauaaaga

SEQ ID NO: 2922097 - RNA, 19 nt, Artificial Sequence
  Description of Artificial Sequence: Synthetic oligonucleotide
ucuuucucuuccuuucccg

SEQ ID NO: 2922098 - RNA, 19 nt, Artificial Sequence
  Description of Artificial Sequence: Synthetic oligonucleotide
uuucgaaagccauccagcc

SEQ ID NO: 2922099 - RNA, 19 nt, Artificial Sequence
  Description of Artificial Sequence: Synthetic oligonucleotide
auaagacccagcuuguuga

SEQ ID NO: 2922100 - RNA, 19 nt, Artificial Sequence
  Description of Artificial Sequence: Synthetic oligonucleotide
uccacagaucucaacaaca

SEQ ID NO: 2922101 - RNA, 19 nt, Artificial Sequence
  Description of Artificial Sequence: Synthetic oligonucleotide
acauucugucguuauaaag

SEQ ID NO: 2922102 - RNA, 19 nt, Artificial Sequence
  Description of Artificial Sequence: Synthetic oligonucleotide
acuuucgaaagccauccag

SEQ ID NO: 2922103 - RNA, 19 nt, Artificial Sequence
  Description of Artificial Sequence: Synthetic oligonucleotide
uucuuucacaucuucaguc

SEQ ID NO: 2922104 - RNA, 19 nt, Artificial Sequence
  Description of Artificial Sequence: Synthetic oligonucleotide
aacaacuucuuaaaauaug

SEQ ID NO: 2922105 - RNA, 19 nt, Artificial Sequence
  Description of Artificial Sequence: Synthetic oligonucleotide
auaacucuuagauugugau

SEQ ID NO: 2922106 - RNA, 19 nt, Artificial Sequence
  Description of Artificial Sequence: Synthetic oligonucleotide
uuaggcaagaucugaugcc

SEQ ID NO: 2922107 - RNA, 19 nt, Artificial Sequence
  Description of Artificial Sequence: Synthetic oligonucleotide
aauaugcugagaccaggca

SEQ ID NO: 2922108 - RNA, 19 nt, Artificial Sequence
  Description of Artificial Sequence: Synthetic oligonucleotide
ucggguugaaacaacuucu

SEQ ID NO: 2922109 - RNA, 19 nt, Artificial Sequence
  Description of Artificial Sequence: Synthetic oligonucleotide
uaggguucaagguagaauu

SEQ ID NO: 2922110 - RNA, 19 nt, Artificial Sequence
  Description of Artificial Sequence: Synthetic oligonucleotide
uucagucucaugcauuaca

SEQ ID NO: 2922111 - RNA, 19 nt, Artificial Sequence
  Description of Artificial Sequence: Synthetic oligonucleotide
ucuugauucgaaacauucu

SEQ ID NO: 2922112 - RNA, 19 nt, Artificial Sequence
  Description of Artificial Sequence: Synthetic oligonucleotide
gaucugaugccucauggac

SEQ ID NO: 2922113 - RNA, 19 nt, Artificial Sequence
  Description of Artificial Sequence: Synthetic oligonucleotide
acuucuuugucccauuccu

SEQ ID NO: 2922114 - RNA, 19 nt, Artificial Sequence
  Description of Artificial Sequence: Synthetic oligonucleotide
guaauaccacuuucgaaag

SEQ ID NO: 2922115 - RNA, 19 nt, Artificial Sequence
  Description of Artificial Sequence: Synthetic oligonucleotide
aaacauucugucguuauaa

SEQ ID NO: 2922116 - RNA, 19 nt, Artificial Sequence
  Description of Artificial Sequence: Synthetic oligonucleotide
accucuuugagauaggguu

SEQ ID NO: 2922117 - RNA, 19 nt, Artificial Sequence
  Description of Artificial Sequence: Synthetic oligonucleotide
uuauuuaaagugaggcauc

SEQ ID NO: 2922118 - RNA, 19 nt, Artificial Sequence
  Description of Artificial Sequence: Synthetic oligonucleotide
agacccagcuuguugaauc

SEQ ID NO: 2922119 - RNA, 19 nt, Artificial Sequence
  Description of Artificial Sequence: Synthetic oligonucleotide
ugcaaagcaaauaacucuu

SEQ ID NO: 2922120 - RNA, 19 nt, Artificial Sequence
  Description of Artificial Sequence: Synthetic oligonucleotide
uacaauagacauuuauuua

SEQ ID NO: 2922121 - RNA, 19 nt, Artificial Sequence
  Description of Artificial Sequence: Synthetic oligonucleotide
uucggguugaaacaacuuc

SEQ ID NO: 2922122 - RNA, 19 nt, Artificial Sequence
  Description of Artificial Sequence: Synthetic oligonucleotide
caucaucucucauaagacc

SEQ ID NO: 2922123 - RNA, 19 nt, Artificial Sequence
  Description of Artificial Sequence: Synthetic oligonucleotide
aaagugaggcaucugcaaa

SEQ ID NO: 2922124 - RNA, 19 nt, Artificial Sequence
  Description of Artificial Sequence: Synthetic oligonucleotide
uugauucgaaacauucugu

SEQ ID NO: 2922125 - RNA, 19 nt, Artificial Sequence
  Description of Artificial Sequence: Synthetic oligonucleotide
gagauaggguucaagguag

SEQ ID NO: 2922126 - RNA, 19 nt, Artificial Sequence
  Description of Artificial Sequence: Synthetic oligonucleotide
uugagauaggguucaaggu

SEQ ID NO: 2922127 - RNA, 19 nt, Artificial Sequence
  Description of Artificial Sequence: Synthetic oligonucleotide
caaagcaaauaacucuuag

SEQ ID NO: 2922128 - RNA, 19 nt, Artificial Sequence
  Description of Artificial Sequence: Synthetic oligonucleotide
aauccugcagcguuguaau

SEQ ID NO: 2922129 - RNA, 19 nt, Artificial Sequence
  Description of Artificial Sequence: Synthetic oligonucleotide
cucuugauucgaaacauuc

SEQ ID NO: 2922130 - RNA, 19 nt, Artificial Sequence
  Description of Artificial Sequence: Synthetic oligonucleotide
ugauucgaaacauucuguc

SEQ ID NO: 2922131 - RNA, 19 nt, Artificial Sequence
  Description of Artificial Sequence: Synthetic oligonucleotide
augccucauggacaggucc

SEQ ID NO: 2922132 - RNA, 19 nt, Artificial Sequence
  Description of Artificial Sequence: Synthetic oligonucleotide
ucaacaacaaggucacuuc

SEQ ID NO: 2922133 - RNA, 19 nt, Artificial Sequence
  Description of Artificial Sequence: Synthetic oligonucleotide
ucuuucacaucuucagucu

SEQ ID NO: 2922134 - RNA, 19 nt, Artificial Sequence
  Description of Artificial Sequence: Synthetic oligonucleotide
aaauaacucuuagauugug

SEQ ID NO: 2922135 - RNA, 19 nt, Artificial Sequence
  Description of Artificial Sequence: Synthetic oligonucleotide
acaucaucucucauaagac

SEQ ID NO: 2922136 - RNA, 19 nt, Artificial Sequence
  Description of Artificial Sequence: Synthetic oligonucleotide
uuauaaagauucucaggaa

SEQ ID NO: 2922137 - RNA, 19 nt, Artificial Sequence
  Description of Artificial Sequence: Synthetic oligonucleotide
ugaggcaucugcaaagcaa

SEQ ID NO: 2922138 - RNA, 19 nt, Artificial Sequence
  Description of Artificial Sequence: Synthetic oligonucleotide
auccacagaucucaacaac

SEQ ID NO: 2922139 - RNA, 19 nt, Artificial Sequence
  Description of Artificial Sequence: Synthetic oligonucleotide
cauauuuuguccacugcuc

SEQ ID NO: 2922140 - RNA, 19 nt, Artificial Sequence
  Description of Artificial Sequence: Synthetic oligonucleotide
uugaaacaacuucuuaaaa

SEQ ID NO: 2922141 - RNA, 19 nt, Artificial Sequence
  Description of Artificial Sequence: Synthetic oligonucleotide
agaucucaacaacaagguc

SEQ ID NO: 2922142 - RNA, 19 nt, Artificial Sequence
  Description of Artificial Sequence: Synthetic oligonucleotide
aucucaacaacaaggucac

SEQ ID NO: 2922143 - RNA, 19 nt, Artificial Sequence
  Description of Artificial Sequence: Synthetic oligonucleotide
uccuccucauauuuugucc

SEQ ID NO: 2922144 - RNA, 19 nt, Artificial Sequence
  Description of Artificial Sequence: Synthetic oligonucleotide
cucauggacagguccaggg

SEQ ID NO: 2922145 - RNA, 19 nt, Artificial Sequence
  Description of Artificial Sequence: Synthetic oligonucleotide
aauaacucuuagauuguga

SEQ ID NO: 2922146 - RNA, 19 nt, Artificial Sequence
  Description of Artificial Sequence: Synthetic oligonucleotide
guugaaacaacuucuuaaa

SEQ ID NO: 2922147 - RNA, 19 nt, Artificial Sequence
  Description of Artificial Sequence: Synthetic oligonucleotide
gcugagaccaggcacaucc

SEQ ID NO: 2922148 - RNA, 19 nt, Artificial Sequence
  Description of Artificial Sequence: Synthetic oligonucleotide
acaaggucacuucuuuguc

SEQ ID NO: 2922149 - RNA, 19 nt, Artificial Sequence
  Description of Artificial Sequence: Synthetic oligonucleotide
agaccaggcacauccacag

SEQ ID NO: 2922150 - RNA, 19 nt, Artificial Sequence
  Description of Artificial Sequence: Synthetic oligonucleotide
acuugccugacgcugcaac

SEQ ID NO: 2922151 - RNA, 19 nt, Artificial Sequence
  Description of Artificial Sequence: Synthetic oligonucleotide
auucugucguuauaaagau

SEQ ID NO: 2922152 - RNA, 19 nt, Artificial Sequence
  Description of Artificial Sequence: Synthetic oligonucleotide
uguugaauccugcagcguu

SEQ ID NO: 2922153 - RNA, 19 nt, Artificial Sequence
  Description of Artificial Sequence: Synthetic oligonucleotide
uaaccucuuugagauaggg

SEQ ID NO: 2922154 - RNA, 19 nt, Artificial Sequence
  Description of Artificial Sequence: Synthetic oligonucleotide
agcuuguugaauccugcag

SEQ ID NO: 2922155 - RNA, 19 nt, Artificial Sequence
  Description of Artificial Sequence: Synthetic oligonucleotide
cuuccuuucccggauaacc

SEQ ID NO: 2922156 - RNA, 19 nt, Artificial Sequence
  Description of Artificial Sequence: Synthetic oligonucleotide
uuguccacugcuccuuagg

SEQ ID NO: 2922157 - RNA, 19 nt, Artificial Sequence
  Description of Artificial Sequence: Synthetic oligonucleotide
guagaauuuguccuccuca

SEQ ID NO: 2922158 - RNA, 19 nt, Artificial Sequence
  Description of Artificial Sequence: Synthetic oligonucleotide
uauuuaaagugaggcaucu

SEQ ID NO: 2922159 - RNA, 19 nt, Artificial Sequence
  Description of Artificial Sequence: Synthetic oligonucleotide
ucagucucaugcauuacau

SEQ ID NO: 2922160 - RNA, 19 nt, Artificial Sequence
  Description of Artificial Sequence: Synthetic oligonucleotide
guuguaauaccacuuucga

SEQ ID NO: 2922161 - RNA, 19 nt, Artificial Sequence
  Description of Artificial Sequence: Synthetic oligonucleotide
uguccacugcuccuuaggc

SEQ ID NO: 2922162 - RNA, 19 nt, Artificial Sequence
  Description of Artificial Sequence: Synthetic oligonucleotide
cauaagacccagcuuguug

SEQ ID NO: 2922163 - RNA, 19 nt, Artificial Sequence
  Description of Artificial Sequence: Synthetic oligonucleotide
cuucuuauggcuucuuuca

SEQ ID NO: 2922164 - RNA, 19 nt, Artificial Sequence
  Description of Artificial Sequence: Synthetic oligonucleotide
uaaagugaggcaucugcaa

SEQ ID NO: 2922165 - RNA, 19 nt, Artificial Sequence
  Description of Artificial Sequence: Synthetic oligonucleotide
aucugcaaagcaaauaacu

SEQ ID NO: 2922166 - RNA, 19 nt, Artificial Sequence
  Description of Artificial Sequence: Synthetic oligonucleotide
aaacaacuucuuaaaauau

SEQ ID NO: 2922167 - RNA, 19 nt, Artificial Sequence
  Description of Artificial Sequence: Synthetic oligonucleotide
aaagauucucaggaagccu

SEQ ID NO: 2922168 - RNA, 19 nt, Artificial Sequence
  Description of Artificial Sequence: Synthetic oligonucleotide
uuagauugugauucggguu

SEQ ID NO: 2922169 - RNA, 19 nt, Artificial Sequence
  Description of Artificial Sequence: Synthetic oligonucleotide
ucaugcauuacaucaucuc

SEQ ID NO: 2922170 - RNA, 19 nt, Artificial Sequence
  Description of Artificial Sequence: Synthetic oligonucleotide
agugaggcaucugcaaagc

SEQ ID NO: 2922171 - RNA, 19 nt, Artificial Sequence
  Description of Artificial Sequence: Synthetic oligonucleotide
uccacugcuccuuaggcaa

SEQ ID NO: 2922172 - RNA, 19 nt, Artificial Sequence
  Description of Artificial Sequence: Synthetic oligonucleotide
caaggucacuucuuugucc

SEQ ID NO: 2922173 - RNA, 19 nt, Artificial Sequence
  Description of Artificial Sequence: Synthetic oligonucleotide
uaauaccacuuucgaaagc

SEQ ID NO: 2922174 - RNA, 19 nt, Artificial Sequence
  Description of Artificial Sequence: Synthetic oligonucleotide
uuguaauaccacuuucgaa

SEQ ID NO: 2922175 - RNA, 19 nt, Artificial Sequence
  Description of Artificial Sequence: Synthetic oligonucleotide
ucauggacagguccagggc

SEQ ID NO: 2922176 - RNA, 19 nt, Artificial Sequence
  Description of Artificial Sequence: Synthetic oligonucleotide
ucaucucucauaagaccca

SEQ ID NO: 2922177 - RNA, 19 nt, Artificial Sequence
  Description of Artificial Sequence: Synthetic oligonucleotide
gucguuauaaagauucuca

SEQ ID NO: 2922178 - RNA, 19 nt, Artificial Sequence
  Description of Artificial Sequence: Synthetic oligonucleotide
acucuuagauugugauucg

SEQ ID NO: 2922179 - RNA, 19 nt, Artificial Sequence
  Description of Artificial Sequence: Synthetic oligonucleotide
ugacgcugcaacagcaggc

SEQ ID NO: 2922180 - RNA, 19 nt, Artificial Sequence
  Description of Artificial Sequence: Synthetic oligonucleotide
aacauucugucguuauaaa

SEQ ID NO: 2922181 - RNA, 19 nt, Artificial Sequence
  Description of Artificial Sequence: Synthetic oligonucleotide
ucucaugcauuacaucauc

SEQ ID NO: 2922182 - RNA, 19 nt, Artificial Sequence
  Description of Artificial Sequence: Synthetic oligonucleotide
gguugaaacaacuucuuaa

SEQ ID NO: 2922183 - RNA, 19 nt, Artificial Sequence
  Description of Artificial Sequence: Synthetic oligonucleotide
caagguagaauuuguccuc

SEQ ID NO: 2922184 - RNA, 19 nt, Artificial Sequence
  Description of Artificial Sequence: Synthetic oligonucleotide
uucgaaagccauccagcca

SEQ ID NO: 2922185 - RNA, 19 nt, Artificial Sequence
  Description of Artificial Sequence: Synthetic oligonucleotide
uuccuuucccggauaaccu

SEQ ID NO: 2922186 - RNA, 19 nt, Artificial Sequence
  Description of Artificial Sequence: Synthetic oligonucleotide
uucuuauggcuucuuucac

SEQ ID NO: 2922187 - RNA, 19 nt, Artificial Sequence
  Description of Artificial Sequence: Synthetic oligonucleotide
ucccggauaaccucuuuga

SEQ ID NO: 2922188 - RNA, 19 nt, Artificial Sequence
  Description of Artificial Sequence: Synthetic oligonucleotide
aauuuguccuccucauauu

SEQ ID NO: 2922189 - RNA, 19 nt, Artificial Sequence
  Description of Artificial Sequence: Synthetic oligonucleotide
gaagccuucuuauggcuuc

SEQ ID NO: 2922190 - RNA, 19 nt, Artificial Sequence
  Description of Artificial Sequence: Synthetic oligonucleotide
uucucaggaagccuucuua

SEQ ID NO: 2922191 - RNA, 19 nt, Artificial Sequence
  Description of Artificial Sequence: Synthetic oligonucleotide
acaacaaggucacuucuuu

SEQ ID NO: 2922192 - RNA, 19 nt, Artificial Sequence
  Description of Artificial Sequence: Synthetic oligonucleotide
aagauucucaggaagccuu

SEQ ID NO: 2922193 - RNA, 19 nt, Artificial Sequence
  Description of Artificial Sequence: Synthetic oligonucleotide
caggaagccuucuuauggc

SEQ ID NO: 2922194 - RNA, 19 nt, Artificial Sequence
  Description of Artificial Sequence: Synthetic oligonucleotide
ugucguuauaaagauucuc

SEQ ID NO: 2922195 - RNA, 19 nt, Artificial Sequence
  Description of Artificial Sequence: Synthetic oligonucleotide
uuucucuuccuuucccgga

SEQ ID NO: 2922196 - RNA, 19 nt, Artificial Sequence
  Description of Artificial Sequence: Synthetic oligonucleotide
ucucaggaagccuucuuau

SEQ ID NO: 2922197 - RNA, 19 nt, Artificial Sequence
  Description of Artificial Sequence: Synthetic oligonucleotide
ugcagcguuguaauaccac

SEQ ID NO: 2922198 - RNA, 19 nt, Artificial Sequence
  Description of Artificial Sequence: Synthetic oligonucleotide
ugucccauuccucuuucuc

SEQ ID NO: 2922199 - RNA, 19 nt, Artificial Sequence
  Description of Artificial Sequence: Synthetic oligonucleotide
uccugcagcguuguaauac

SEQ ID NO: 2922200 - RNA, 19 nt, Artificial Sequence
  Description of Artificial Sequence: Synthetic oligonucleotide
caucugcaaagcaaauaac

SEQ ID NO: 2922201 - RNA, 19 nt, Artificial Sequence
  Description of Artificial Sequence: Synthetic oligonucleotide
uucuuaaaauaugcugaga

SEQ ID NO: 2922202 - RNA, 19 nt, Artificial Sequence
  Description of Artificial Sequence: Synthetic oligonucleotide
cauuacaucaucucucaua

SEQ ID NO: 2922203 - RNA, 19 nt, Artificial Sequence
  Description of Artificial Sequence: Synthetic oligonucleotide
ugagaccaggcacauccac

SEQ ID NO: 2922204 - RNA, 19 nt, Artificial Sequence
  Description of Artificial Sequence: Synthetic oligonucleotide
agaucugaugccucaugga

SEQ ID NO: 2922205 - RNA, 19 nt, Artificial Sequence
  Description of Artificial Sequence: Synthetic oligonucleotide
ugaugccucauggacaggu

SEQ ID NO: 2922206 - RNA, 19 nt, Artificial Sequence
  Description of Artificial Sequence: Synthetic oligonucleotide
cacagaucucaacaacaag

SEQ ID NO: 2922207 - RNA, 19 nt, Artificial Sequence
  Description of Artificial Sequence: Synthetic oligonucleotide
uaggcaagaucugaugccu

SEQ ID NO: 2922208 - RNA, 19 nt, Artificial Sequence
  Description of Artificial Sequence: Synthetic oligonucleotide
cguuauaaagauucucagg

SEQ ID NO: 2922209 - RNA, 19 nt, Artificial Sequence
  Description of Artificial Sequence: Synthetic oligonucleotide
ugccucauggacaggucca

SEQ ID NO: 2922210 - RNA, 19 nt, Artificial Sequence
  Description of Artificial Sequence: Synthetic oligonucleotide
cguuguaauaccacuuucg

SEQ ID NO: 2922211 - RNA, 19 nt, Artificial Sequence
  Description of Artificial Sequence: Synthetic oligonucleotide
cugacgcugcaacagcagg

SEQ ID NO: 2922212 - RNA, 19 nt, Artificial Sequence
  Description of Artificial Sequence: Synthetic oligonucleotide
accaggcacauccacagau

SEQ ID NO: 2922213 - RNA, 19 nt, Artificial Sequence
  Description of Artificial Sequence: Synthetic oligonucleotide
cucuuucucuuccuuuccc

SEQ ID NO: 2922214 - RNA, 19 nt, Artificial Sequence
  Description of Artificial Sequence: Synthetic oligonucleotide
uuuguccacugcuccuuag

SEQ ID NO: 2922215 - RNA, 19 nt, Artificial Sequence
  Description of Artificial Sequence: Synthetic oligonucleotide
ugauucggguugaaacaac

SEQ ID NO: 2922216 - RNA, 19 nt, Artificial Sequence
  Description of Artificial Sequence: Synthetic oligonucleotide
caauagacauuuauuuaaa

SEQ ID NO: 2922217 - RNA, 19 nt, Artificial Sequence
  Description of Artificial Sequence: Synthetic oligonucleotide
gacccagcuuguugaaucc

SEQ ID NO: 2922218 - RNA, 19 nt, Artificial Sequence
  Description of Artificial Sequence: Synthetic oligonucleotide
uuacaucaucucucauaag

SEQ ID NO: 2922219 - RNA, 19 nt, Artificial Sequence
  Description of Artificial Sequence: Synthetic oligonucleotide
uccuuaggcaagaucugau

SEQ ID NO: 2922220 - RNA, 19 nt, Artificial Sequence
  Description of Artificial Sequence: Synthetic oligonucleotide
uaccacuuucgaaagccau

SEQ ID NO: 2922221 - RNA, 19 nt, Artificial Sequence
  Description of Artificial Sequence: Synthetic oligonucleotide
gcaucugcaaagcaaauaa

SEQ ID NO: 2922222 - RNA, 19 nt, Artificial Sequence
  Description of Artificial Sequence: Synthetic oligonucleotide
uugccugacgcugcaacag

SEQ ID NO: 2922223 - RNA, 19 nt, Artificial Sequence
  Description of Artificial Sequence: Synthetic oligonucleotide
cuuagauugugauucgggu

SEQ ID NO: 2922224 - RNA, 19 nt, Artificial Sequence
  Description of Artificial Sequence: Synthetic oligonucleotide
cuuucacaucuucagucuc

SEQ ID NO: 2922225 - RNA, 19 nt, Artificial Sequence
  Description of Artificial Sequence: Synthetic oligonucleotide
agguccagggcucucuuga

SEQ ID NO: 2922226 - RNA, 19 nt, Artificial Sequence
  Description of Artificial Sequence: Synthetic oligonucleotide
cuuugagauaggguucaag

SEQ ID NO: 2922227 - RNA, 19 nt, Artificial Sequence
  Description of Artificial Sequence: Synthetic oligonucleotide
uucucuuccuuucccggau

SEQ ID NO: 2922228 - RNA, 19 nt, Artificial Sequence
  Description of Artificial Sequence: Synthetic oligonucleotide
accacuuucgaaagccauc

SEQ ID NO: 2922229 - RNA, 19 nt, Artificial Sequence
  Description of Artificial Sequence: Synthetic oligonucleotide
cucaggaagccuucuuaug

SEQ ID NO: 2922230 - RNA, 19 nt, Artificial Sequence
  Description of Artificial Sequence: Synthetic oligonucleotide
cucuuagauugugauucgg

SEQ ID NO: 2922231 - RNA, 19 nt, Artificial Sequence
  Description of Artificial Sequence: Synthetic oligonucleotide
caacaaggucacuucuuug

SEQ ID NO: 2922232 - RNA, 19 nt, Artificial Sequence
  Description of Artificial Sequence: Synthetic oligonucleotide
agcguuguaauaccacuuu

SEQ ID NO: 2922233 - RNA, 19 nt, Artificial Sequence
  Description of Artificial Sequence: Synthetic oligonucleotide
cugcaaagcaaauaacucu

SEQ ID NO: 2922234 - RNA, 19 nt, Artificial Sequence
  Description of Artificial Sequence: Synthetic oligonucleotide
aggaagccuucuuauggcu

SEQ ID NO: 2922235 - RNA, 19 nt, Artificial Sequence
  Description of Artificial Sequence: Synthetic oligonucleotide
uguccuccucauauuuugu

SEQ ID NO: 2922236 - RNA, 19 nt, Artificial Sequence
  Description of Artificial Sequence: Synthetic oligonucleotide
gaaacauucugucguuaua

SEQ ID NO: 2922237 - RNA, 19 nt, Artificial Sequence
  Description of Artificial Sequence: Synthetic oligonucleotide
cuucuuugucccauuccuc

SEQ ID NO: 2922238 - RNA, 19 nt, Artificial Sequence
  Description of Artificial Sequence: Synthetic oligonucleotide
gaauccugcagcguuguaa

SEQ ID NO: 2922239 - RNA, 19 nt, Artificial Sequence
  Description of Artificial Sequence: Synthetic oligonucleotide
aacagcaggccggcccgcc

SEQ ID NO: 2922240 - RNA, 19 nt, Artificial Sequence
  Description of Artificial Sequence: Synthetic oligonucleotide
aacaacaaggucacuucuu

SEQ ID NO: 2922241 - RNA, 19 nt, Artificial Sequence
  Description of Artificial Sequence: Synthetic oligonucleotide
caagaucugaugccucaug

SEQ ID NO: 2922242 - RNA, 19 nt, Artificial Sequence
  Description of Artificial Sequence: Synthetic oligonucleotide
ucucuugauucgaaacauu

SEQ ID NO: 2922243 - RNA, 19 nt, Artificial Sequence
  Description of Artificial Sequence: Synthetic oligonucleotide
aaccucuuugagauagggu

SEQ ID NO: 2922244 - RNA, 19 nt, Artificial Sequence
  Description of Artificial Sequence: Synthetic oligonucleotide
ugccugacgcugcaacagc

SEQ ID NO: 2922245 - RNA, 19 nt, Artificial Sequence
  Description of Artificial Sequence: Synthetic oligonucleotide
uucgaaacauucugucguu

SEQ ID NO: 2922246 - RNA, 19 nt, Artificial Sequence
  Description of Artificial Sequence: Synthetic oligonucleotide
uccuuucccggauaaccuc

SEQ ID NO: 2922247 - RNA, 19 nt, Artificial Sequence
  Description of Artificial Sequence: Synthetic oligonucleotide
auuuaaagugaggcaucug

SEQ ID NO: 2922248 - RNA, 19 nt, Artificial Sequence
  Description of Artificial Sequence: Synthetic oligonucleotide
ucccauuccucuuucucuu

SEQ ID NO: 2922249 - RNA, 19 nt, Artificial Sequence
  Description of Artificial Sequence: Synthetic oligonucleotide
agauucucaggaagccuuc

SEQ ID NO: 2922250 - RNA, 19 nt, Artificial Sequence
  Description of Artificial Sequence: Synthetic oligonucleotide
cagaucucaacaacaaggu

SEQ ID NO: 2922251 - RNA, 19 nt, Artificial Sequence
  Description of Artificial Sequence: Synthetic oligonucleotide
cuccucauauuuuguccac

SEQ ID NO: 2922252 - RNA, 19 nt, Artificial Sequence
  Description of Artificial Sequence: Synthetic oligonucleotide
aucucucauaagacccagc

SEQ ID NO: 2922253 - RNA, 19 nt, Artificial Sequence
  Description of Artificial Sequence: Synthetic oligonucleotide
ggcucucuugauucgaaac

SEQ ID NO: 2922254 - RNA, 19 nt, Artificial Sequence
  Description of Artificial Sequence: Synthetic oligonucleotide
uuuuguccacugcuccuua

SEQ ID NO: 2922255 - RNA, 19 nt, Artificial Sequence
  Description of Artificial Sequence: Synthetic oligonucleotide
guucaagguagaauuuguc

SEQ ID NO: 2922256 - RNA, 19 nt, Artificial Sequence
  Description of Artificial Sequence: Synthetic oligonucleotide
agaauuuguccuccucaua

SEQ ID NO: 2922257 - RNA, 19 nt, Artificial Sequence
  Description of Artificial Sequence: Synthetic oligonucleotide
uaagacccagcuuguugaa

SEQ ID NO: 2922258 - RNA, 19 nt, Artificial Sequence
  Description of Artificial Sequence: Synthetic oligonucleotide
ggcacauccacagaucuca

SEQ ID NO: 2922259 - RNA, 19 nt, Artificial Sequence
  Description of Artificial Sequence: Synthetic oligonucleotide
ccagccacuugccugacgc

SEQ ID NO: 2922260 - RNA, 19 nt, Artificial Sequence
  Description of Artificial Sequence: Synthetic oligonucleotide
uccucauauuuuguccacu

SEQ ID NO: 2922261 - RNA, 19 nt, Artificial Sequence
  Description of Artificial Sequence: Synthetic oligonucleotide
ccuucuuauggcuucuuuc

SEQ ID NO: 2922262 - RNA, 19 nt, Artificial Sequence
  Description of Artificial Sequence: Synthetic oligonucleotide
cauccagccacuugccuga

SEQ ID NO: 2922263 - RNA, 19 nt, Artificial Sequence
  Description of Artificial Sequence: Synthetic oligonucleotide
auaaccucuuugagauagg

SEQ ID NO: 2922264 - RNA, 19 nt, Artificial Sequence
  Description of Artificial Sequence: Synthetic oligonucleotide
cacauccacagaucucaac

SEQ ID NO: 2922265 - RNA, 19 nt, Artificial Sequence
  Description of Artificial Sequence: Synthetic oligonucleotide
uucugucguuauaaagauu

SEQ ID NO: 2922266 - RNA, 19 nt, Artificial Sequence
  Description of Artificial Sequence: Synthetic oligonucleotide
gcucucuugauucgaaaca

SEQ ID NO: 2922267 - RNA, 19 nt, Artificial Sequence
  Description of Artificial Sequence: Synthetic oligonucleotide
uucacaucuucagucucau

SEQ ID NO: 2922268 - RNA, 19 nt, Artificial Sequence
  Description of Artificial Sequence: Synthetic oligonucleotide
ucuuugucccauuccucuu

SEQ ID NO: 2922269 - RNA, 19 nt, Artificial Sequence
  Description of Artificial Sequence: Synthetic oligonucleotide
ccucauauuuuguccacug

SEQ ID NO: 2922270 - RNA, 19 nt, Artificial Sequence
  Description of Artificial Sequence: Synthetic oligonucleotide
gcaacagcaggccggcccg

SEQ ID NO: 2922271 - RNA, 19 nt, Artificial Sequence
  Description of Artificial Sequence: Synthetic oligonucleotide
ccacuuucgaaagccaucc

SEQ ID NO: 2922272 - RNA, 19 nt, Artificial Sequence
  Description of Artificial Sequence: Synthetic oligonucleotide
guccuccucauauuuuguc

SEQ ID NO: 2922273 - RNA, 19 nt, Artificial Sequence
  Description of Artificial Sequence: Synthetic oligonucleotide
uccagccacuugccugacg

SEQ ID NO: 2922274 - RNA, 19 nt, Artificial Sequence
  Description of Artificial Sequence: Synthetic oligonucleotide
cagucucaugcauuacauc

SEQ ID NO: 2922275 - RNA, 19 nt, Artificial Sequence
  Description of Artificial Sequence: Synthetic oligonucleotide
gguagaauuuguccuccuc

SEQ ID NO: 2922276 - RNA, 19 nt, Artificial Sequence
  Description of Artificial Sequence: Synthetic oligonucleotide
gauucggguugaaacaacu

SEQ ID NO: 2922277 - RNA, 19 nt, Artificial Sequence
  Description of Artificial Sequence: Synthetic oligonucleotide
acgcugcaacagcaggccg

SEQ ID NO: 2922278 - RNA, 19 nt, Artificial Sequence
  Description of Artificial Sequence: Synthetic oligonucleotide
ucacaucuucagucucaug

SEQ ID NO: 2922279 - RNA, 19 nt, Artificial Sequence
  Description of Artificial Sequence: Synthetic oligonucleotide
caaauaacucuuagauugu

SEQ ID NO: 2922280 - RNA, 19 nt, Artificial Sequence
  Description of Artificial Sequence: Synthetic oligonucleotide
cucuuugagauaggguuca

SEQ ID NO: 2922281 - RNA, 19 nt, Artificial Sequence
  Description of Artificial Sequence: Synthetic oligonucleotide
ggguucaagguagaauuug

SEQ ID NO: 2922282 - RNA, 19 nt, Artificial Sequence
  Description of Artificial Sequence: Synthetic oligonucleotide
cuugccugacgcugcaaca

SEQ ID NO: 2922283 - RNA, 19 nt, Artificial Sequence
  Description of Artificial Sequence: Synthetic oligonucleotide
agccacuugccugacgcug

SEQ ID NO: 2922284 - RNA, 19 nt, Artificial Sequence
  Description of Artificial Sequence: Synthetic oligonucleotide
ccugcagcguuguaauacc

SEQ ID NO: 2922285 - RNA, 19 nt, Artificial Sequence
  Description of Artificial Sequence: Synthetic oligonucleotide
agguagaauuuguccuccu

SEQ ID NO: 2922286 - RNA, 19 nt, Artificial Sequence
  Description of Artificial Sequence: Synthetic oligonucleotide
ccuuaggcaagaucugaug

SEQ ID NO: 2922287 - RNA, 19 nt, Artificial Sequence
  Description of Artificial Sequence: Synthetic oligonucleotide
gauaggguucaagguagaa

SEQ ID NO: 2922288 - RNA, 19 nt, Artificial Sequence
  Description of Artificial Sequence: Synthetic oligonucleotide
uuguugaauccugcagcgu

SEQ ID NO: 2922289 - RNA, 19 nt, Artificial Sequence
  Description of Artificial Sequence: Synthetic oligonucleotide
guccacugcuccuuaggca

SEQ ID NO: 2922290 - RNA, 19 nt, Artificial Sequence
  Description of Artificial Sequence: Synthetic oligonucleotide
gugauucggguugaaacaa

SEQ ID NO: 2922291 - RNA, 19 nt, Artificial Sequence
  Description of Artificial Sequence: Synthetic oligonucleotide
ccagcuuguugaauccugc

SEQ ID NO: 2922292 - RNA, 19 nt, Artificial Sequence
  Description of Artificial Sequence: Synthetic oligonucleotide
aagccuucuuauggcuucu

SEQ ID NO: 2922293 - RNA, 19 nt, Artificial Sequence
  Description of Artificial Sequence: Synthetic oligonucleotide
ucuuccuuucccggauaac

SEQ ID NO: 2922294 - RNA, 19 nt, Artificial Sequence
  Description of Artificial Sequence: Synthetic oligonucleotide
aagacccagcuuguugaau

SEQ ID NO: 2922295 - RNA, 19 nt, Artificial Sequence
  Description of Artificial Sequence: Synthetic oligonucleotide
ucgaaacauucugucguua

SEQ ID NO: 2922296 - RNA, 19 nt, Artificial Sequence
  Description of Artificial Sequence: Synthetic oligonucleotide
gucccauuccucuuucucu

SEQ ID NO: 2922297 - RNA, 19 nt, Artificial Sequence
  Description of Artificial Sequence: Synthetic oligonucleotide
ccauccagccacuugccug

SEQ ID NO: 2922298 - RNA, 19 nt, Artificial Sequence
  Description of Artificial Sequence: Synthetic oligonucleotide
agauugugauucggguuga

SEQ ID NO: 2922299 - RNA, 19 nt, Artificial Sequence
  Description of Artificial Sequence: Synthetic oligonucleotide
ccucuuugagauaggguuc

SEQ ID NO: 2922300 - RNA, 19 nt, Artificial Sequence
  Description of Artificial Sequence: Synthetic oligonucleotide
ucucuuccuuucccggaua

SEQ ID NO: 2922301 - RNA, 19 nt, Artificial Sequence
  Description of Artificial Sequence: Synthetic oligonucleotide
uugucccauuccucuuucu

SEQ ID NO: 2922302 - RNA, 19 nt, Artificial Sequence
  Description of Artificial Sequence: Synthetic oligonucleotide
cuucuuucacaucuucagu

SEQ ID NO: 2922303 - RNA, 19 nt, Artificial Sequence
  Description of Artificial Sequence: Synthetic oligonucleotide
auaccacuuucgaaagcca

SEQ ID NO: 2922304 - RNA, 19 nt, Artificial Sequence
  Description of Artificial Sequence: Synthetic oligonucleotide
cucaugcauuacaucaucu

SEQ ID NO: 2922305 - RNA, 19 nt, Artificial Sequence
  Description of Artificial Sequence: Synthetic oligonucleotide
aggcaagaucugaugccuc

SEQ ID NO: 2922306 - RNA, 19 nt, Artificial Sequence
  Description of Artificial Sequence: Synthetic oligonucleotide
cauggacagguccagggcu

SEQ ID NO: 2922307 - RNA, 19 nt, Artificial Sequence
  Description of Artificial Sequence: Synthetic oligonucleotide
aggcacauccacagaucuc

SEQ ID NO: 2922308 - RNA, 19 nt, Artificial Sequence
  Description of Artificial Sequence: Synthetic oligonucleotide
gugaggcaucugcaaagca

SEQ ID NO: 2922309 - RNA, 19 nt, Artificial Sequence
  Description of Artificial Sequence: Synthetic oligonucleotide
cucaacaacaaggucacuu

SEQ ID NO: 2922310 - RNA, 19 nt, Artificial Sequence
  Description of Artificial Sequence: Synthetic oligonucleotide
ucauaagacccagcuuguu

SEQ ID NO: 2922311 - RNA, 19 nt, Artificial Sequence
  Description of Artificial Sequence: Synthetic oligonucleotide
cagcuuguugaauccugca

SEQ ID NO: 2922312 - RNA, 19 nt, Artificial Sequence
  Description of Artificial Sequence: Synthetic oligonucleotide
cuucagucucaugcauuac

SEQ ID NO: 2922313 - RNA, 19 nt, Artificial Sequence
  Description of Artificial Sequence: Synthetic oligonucleotide
gaugccucauggacagguc

SEQ ID NO: 2922314 - RNA, 19 nt, Artificial Sequence
  Description of Artificial Sequence: Synthetic oligonucleotide
ccggauaaccucuuugaga

SEQ ID NO: 2922315 - RNA, 19 nt, Artificial Sequence
  Description of Artificial Sequence: Synthetic oligonucleotide
cugcuccuuaggcaagauc

SEQ ID NO: 2922316 - RNA, 19 nt, Artificial Sequence
  Description of Artificial Sequence: Synthetic oligonucleotide
cuccuuaggcaagaucuga

SEQ ID NO: 2922317 - RNA, 19 nt, Artificial Sequence
  Description of Artificial Sequence: Synthetic oligonucleotide
gcguuguaauaccacuuuc

SEQ ID NO: 2922318 - RNA, 19 nt, Artificial Sequence
  Description of Artificial Sequence: Synthetic oligonucleotide
caacaacaaggucacuucu

SEQ ID NO: 2922319 - RNA, 19 nt, Artificial Sequence
  Description of Artificial Sequence: Synthetic oligonucleotide
cucauaagacccagcuugu

SEQ ID NO: 2922320 - RNA, 19 nt, Artificial Sequence
  Description of Artificial Sequence: Synthetic oligonucleotide
auucggguugaaacaacuu

SEQ ID NO: 2922321 - RNA, 19 nt, Artificial Sequence
  Description of Artificial Sequence: Synthetic oligonucleotide
ugaauccugcagcguugua

SEQ ID NO: 2922322 - RNA, 19 nt, Artificial Sequence
  Description of Artificial Sequence: Synthetic oligonucleotide
ccuccucauauuuugucca

SEQ ID NO: 2922323 - RNA, 19 nt, Artificial Sequence
  Description of Artificial Sequence: Synthetic oligonucleotide
caggcacauccacagaucu

SEQ ID NO: 2922324 - RNA, 19 nt, Artificial Sequence
  Description of Artificial Sequence: Synthetic oligonucleotide
cccggauaaccucuuugag

SEQ ID NO: 2922325 - RNA, 19 nt, Artificial Sequence
  Description of Artificial Sequence: Synthetic oligonucleotide
ucuuugagauaggguucaa

SEQ ID NO: 2922326 - RNA, 19 nt, Artificial Sequence
  Description of Artificial Sequence: Synthetic oligonucleotide
cugcagcguuguaauacca

SEQ ID NO: 2922327 - RNA, 19 nt, Artificial Sequence
  Description of Artificial Sequence: Synthetic oligonucleotide
agauaggguucaagguaga

SEQ ID NO: 2922328 - RNA, 19 nt, Artificial Sequence
  Description of Artificial Sequence: Synthetic oligonucleotide
uggacagguccagggcucu

SEQ ID NO: 2922329 - RNA, 19 nt, Artificial Sequence
  Description of Artificial Sequence: Synthetic oligonucleotide
cccagcuuguugaauccug

SEQ ID NO: 2922330 - RNA, 19 nt, Artificial Sequence
  Description of Artificial Sequence: Synthetic oligonucleotide
ccugacgcugcaacagcag

SEQ ID NO: 2922331 - RNA, 19 nt, Artificial Sequence
  Description of Artificial Sequence: Synthetic oligonucleotide
gcagcguuguaauaccacu

SEQ ID NO: 2922332 - RNA, 19 nt, Artificial Sequence
  Description of Artificial Sequence: Synthetic oligonucleotide
cagguccagggcucucuug

SEQ ID NO: 2922333 - RNA, 19 nt, Artificial Sequence
  Description of Artificial Sequence: Synthetic oligonucleotide
cucuuccuuucccggauaa

SEQ ID NO: 2922334 - RNA, 19 nt, Artificial Sequence
  Description of Artificial Sequence: Synthetic oligonucleotide
cgcugcaacagcaggccgg

SEQ ID NO: 2922335 - RNA, 19 nt, Artificial Sequence
  Description of Artificial Sequence: Synthetic oligonucleotide
gaccaggcacauccacaga

SEQ ID NO: 2922336 - RNA, 19 nt, Artificial Sequence
  Description of Artificial Sequence: Synthetic oligonucleotide
gauucucaggaagccuucu

SEQ ID NO: 2922337 - RNA, 19 nt, Artificial Sequence
  Description of Artificial Sequence: Synthetic oligonucleotide
cucucuugauucgaaacau

SEQ ID NO: 2922338 - RNA, 19 nt, Artificial Sequence
  Description of Artificial Sequence: Synthetic oligonucleotide
gguucaagguagaauuugu

SEQ ID NO: 2922339 - RNA, 19 nt, Artificial Sequence
  Description of Artificial Sequence: Synthetic oligonucleotide
ccagggcucucuugauucg

SEQ ID NO: 2922340 - RNA, 19 nt, Artificial Sequence
  Description of Artificial Sequence: Synthetic oligonucleotide
aggguucaagguagaauuu

SEQ ID NO: 2922341 - RNA, 19 nt, Artificial Sequence
  Description of Artificial Sequence: Synthetic oligonucleotide
ccacagaucucaacaacaa

SEQ ID NO: 2922342 - RNA, 19 nt, Artificial Sequence
  Description of Artificial Sequence: Synthetic oligonucleotide
acagguccagggcucucuu

SEQ ID NO: 2922343 - RNA, 19 nt, Artificial Sequence
  Description of Artificial Sequence: Synthetic oligonucleotide
ucucaacaacaaggucacu

SEQ ID NO: 2922344 - RNA, 19 nt, Artificial Sequence
  Description of Artificial Sequence: Synthetic oligonucleotide
ggguugaaacaacuucuua

SEQ ID NO: 2922345 - RNA, 19 nt, Artificial Sequence
  Description of Artificial Sequence: Synthetic oligonucleotide
cugucguuauaaagauucu

SEQ ID NO: 2922346 - RNA, 19 nt, Artificial Sequence
  Description of Artificial Sequence: Synthetic oligonucleotide
acccagcuuguugaauccu

SEQ ID NO: 2922347 - RNA, 19 nt, Artificial Sequence
  Description of Artificial Sequence: Synthetic oligonucleotide
cggauaaccucuuugagau

SEQ ID NO: 2922348 - RNA, 19 nt, Artificial Sequence
  Description of Artificial Sequence: Synthetic oligonucleotide
ccaggcacauccacagauc

SEQ ID NO: 2922349 - RNA, 19 nt, Artificial Sequence
  Description of Artificial Sequence: Synthetic oligonucleotide
gcuccuuaggcaagaucug

SEQ ID NO: 2922350 - RNA, 19 nt, Artificial Sequence
  Description of Artificial Sequence: Synthetic oligonucleotide
cacuuucgaaagccaucca

SEQ ID NO: 2922351 - RNA, 19 nt, Artificial Sequence
  Description of Artificial Sequence: Synthetic oligonucleotide
gauugugauucggguugaa

SEQ ID NO: 2922352 - RNA, 19 nt, Artificial Sequence
  Description of Artificial Sequence: Synthetic oligonucleotide
ggcaucugcaaagcaaaua

SEQ ID NO: 2922353 - RNA, 19 nt, Artificial Sequence
  Description of Artificial Sequence: Synthetic oligonucleotide
auccagccacuugccugac

SEQ ID NO: 2922354 - RNA, 19 nt, Artificial Sequence
  Description of Artificial Sequence: Synthetic oligonucleotide
gucucaugcauuacaucau

SEQ ID NO: 2922355 - RNA, 19 nt, Artificial Sequence
  Description of Artificial Sequence: Synthetic oligonucleotide
auccugcagcguuguaaua

SEQ ID NO: 2922356 - RNA, 19 nt, Artificial Sequence
  Description of Artificial Sequence: Synthetic oligonucleotide
gccacuugccugacgcugc

SEQ ID NO: 2922357 - RNA, 19 nt, Artificial Sequence
  Description of Artificial Sequence: Synthetic oligonucleotide
gacagguccagggcucucu

SEQ ID NO: 2922358 - RNA, 19 nt, Artificial Sequence
  Description of Artificial Sequence: Synthetic oligonucleotide
cugaugccucauggacagg

SEQ ID NO: 2922359 - RNA, 19 nt, Artificial Sequence
  Description of Artificial Sequence: Synthetic oligonucleotide
acugcuccuuaggcaagau

SEQ ID NO: 2922360 - RNA, 19 nt, Artificial Sequence
  Description of Artificial Sequence: Synthetic oligonucleotide
augcugagaccaggcacau

SEQ ID NO: 2922361 - RNA, 19 nt, Artificial Sequence
  Description of Artificial Sequence: Synthetic oligonucleotide
cagcguuguaauaccacuu

SEQ ID NO: 2922362 - RNA, 19 nt, Artificial Sequence
  Description of Artificial Sequence: Synthetic oligonucleotide
gccucauggacagguccag

SEQ ID NO: 2922363 - RNA, 19 nt, Artificial Sequence
  Description of Artificial Sequence: Synthetic oligonucleotide
agggcucucuugauucgaa

SEQ ID NO: 2922364 - RNA, 19 nt, Artificial Sequence
  Description of Artificial Sequence: Synthetic oligonucleotide
cucucauaagacccagcuu

SEQ ID NO: 2922365 - RNA, 19 nt, Artificial Sequence
  Description of Artificial Sequence: Synthetic oligonucleotide
cagggcucucuugauucga

SEQ ID NO: 2922366 - RNA, 19 nt, Artificial Sequence
  Description of Artificial Sequence: Synthetic oligonucleotide
ccucauggacagguccagg

SEQ ID NO: 2922367 - RNA, 19 nt, Artificial Sequence
  Description of Artificial Sequence: Synthetic oligonucleotide
gcaaagcaaauaacucuua

SEQ ID NO: 2922368 - RNA, 19 nt, Artificial Sequence
  Description of Artificial Sequence: Synthetic oligonucleotide
ugcugagaccaggcacauc

SEQ ID NO: 2922369 - RNA, 19 nt, Artificial Sequence
  Description of Artificial Sequence: Synthetic oligonucleotide
ccacugcuccuuaggcaag

SEQ ID NO: 2922370 - RNA, 19 nt, Artificial Sequence
  Description of Artificial Sequence: Synthetic oligonucleotide
caacagcaggccggcccgc

SEQ ID NO: 2922371 - RNA, 19 nt, Artificial Sequence
  Description of Artificial Sequence: Synthetic oligonucleotide
gucacuucuuugucccauu

SEQ ID NO: 2922372 - RNA, 19 nt, Artificial Sequence
  Description of Artificial Sequence: Synthetic oligonucleotide
ggauaaccucuuugagaua

SEQ ID NO: 2922373 - RNA, 19 nt, Artificial Sequence
  Description of Artificial Sequence: Synthetic oligonucleotide
gggcucucuugauucgaaa

SEQ ID NO: 2922374 - RNA, 19 nt, Artificial Sequence
  Description of Artificial Sequence: Synthetic oligonucleotide
gccugacgcugcaacagca

SEQ ID NO: 2922375 - RNA, 19 nt, Artificial Sequence
  Description of Artificial Sequence: Synthetic oligonucleotide
ccuuucccggauaaccucu

SEQ ID NO: 2922376 - RNA, 19 nt, Artificial Sequence
  Description of Artificial Sequence: Synthetic oligonucleotide
cuuucccggauaaccucuu

SEQ ID NO: 2922377 - RNA, 19 nt, Artificial Sequence
  Description of Artificial Sequence: Synthetic oligonucleotide
guccagggcucucuugauu

SEQ ID NO: 2922378 - RNA, 19 nt, Artificial Sequence
  Description of Artificial Sequence: Synthetic oligonucleotide
ggucacuucuuugucccau

SEQ ID NO: 2922379 - RNA, 19 nt, Artificial Sequence
  Description of Artificial Sequence: Synthetic oligonucleotide
gaaagccauccagccacuu

SEQ ID NO: 2922380 - RNA, 19 nt, Artificial Sequence
  Description of Artificial Sequence: Synthetic oligonucleotide
cgaaacauucugucguuau

SEQ ID NO: 2922381 - RNA, 19 nt, Artificial Sequence
  Description of Artificial Sequence: Synthetic oligonucleotide
ggaagccuucuuauggcuu

SEQ ID NO: 2922382 - RNA, 19 nt, Artificial Sequence
  Description of Artificial Sequence: Synthetic oligonucleotide
cagccacuugccugacgcu

SEQ ID NO: 2922383 - RNA, 19 nt, Artificial Sequence
  Description of Artificial Sequence: Synthetic oligonucleotide
gccauccagccacuugccu

SEQ ID NO: 2922384 - RNA, 19 nt, Artificial Sequence
  Description of Artificial Sequence: Synthetic oligonucleotide
gccuucuuauggcuucuuu

SEQ ID NO: 2922385 - RNA, 19 nt, Artificial Sequence
  Description of Artificial Sequence: Synthetic oligonucleotide
gcaagaucugaugccucau

SEQ ID NO: 2922386 - RNA, 19 nt, Artificial Sequence
  Description of Artificial Sequence: Synthetic oligonucleotide
gguccagggcucucuugau

SEQ ID NO: 2922387 - RNA, 19 nt, Artificial Sequence
  Description of Artificial Sequence: Synthetic oligonucleotide
ccacuugccugacgcugca

SEQ ID NO: 2922388 - RNA, 19 nt, Artificial Sequence
  Description of Artificial Sequence: Synthetic oligonucleotide
cacuugccugacgcugcaa

SEQ ID NO: 2922389 - RNA, 19 nt, Artificial Sequence
  Description of Artificial Sequence: Synthetic oligonucleotide
ggacagguccagggcucuc

SEQ ID NO: 2922390 - RNA, 19 nt, Artificial Sequence
  Description of Artificial Sequence: Synthetic oligonucleotide
cagcaggccggcccgccau

SEQ ID NO: 2922391 - RNA, 19 nt, Artificial Sequence
  Description of Artificial Sequence: Synthetic oligonucleotide
cggguugaaacaacuucuu

SEQ ID NO: 2922392 - RNA, 19 nt, Artificial Sequence
  Description of Artificial Sequence: Synthetic oligonucleotide
  modified_base (15)..(15): a, c, u, g, unknown or other
aaugauuccacaaanaccc

SEQ ID NO: 2922393 - RNA, 19 nt, Artificial Sequence
  Description of Artificial Sequence: Synthetic oligonucleotide
aaucuuaacaaacagcaac

SEQ ID NO: 2922394 - RNA, 19 nt, Artificial Sequence
  Description of Artificial Sequence: Synthetic oligonucleotide
acauuuauuaccaacaacc

SEQ ID NO: 2922395 - RNA, 19 nt, Artificial Sequence
  Description of Artificial Sequence: Synthetic oligonucleotide
  modified_base (16)..(16): a, c, u, g, unknown or other
aaaugauuccacaaanacc

SEQ ID NO: 2922396 - RNA, 19 nt, Artificial Sequence
  Description of Artificial Sequence: Synthetic oligonucleotide
acaucauacauuuauuacc

SEQ ID NO: 2922397 - RNA, 19 nt, Artificial Sequence
  Description of Artificial Sequence: Synthetic oligonucleotide
aauucuugauacuuggagg

SEQ ID NO: 2922398 - RNA, 19 nt, Artificial Sequence
  Description of Artificial Sequence: Synthetic oligonucleotide
uuaacaaacagcaacuuga

SEQ ID NO: 2922399 - RNA, 19 nt, Artificial Sequence
  Description of Artificial Sequence: Synthetic oligonucleotide
acuugagguaaccagaugc

SEQ ID NO: 2922400 - RNA, 19 nt, Artificial Sequence
  Description of Artificial Sequence: Synthetic oligonucleotide
aaauucuugauacuuggag

SEQ ID NO: 2922401 - RNA, 19 nt, Artificial Sequence
  Description of Artificial Sequence: Synthetic oligonucleotide
aauucauugcacuacuuag

SEQ ID NO: 2922402 - RNA, 19 nt, Artificial Sequence
  Description of Artificial Sequence: Synthetic oligonucleotide
aaacuauguuaacugauac

SEQ ID NO: 2922403 - RNA, 19 nt, Artificial Sequence
  Description of Artificial Sequence: Synthetic oligonucleotide
auucuugauacuuggaggc

SEQ ID NO: 2922404 - RNA, 19 nt, Artificial Sequence
  Description of Artificial Sequence: Synthetic oligonucleotide
uuuauuaccaacaacccuc

SEQ ID NO: 2922405 - RNA, 19 nt, Artificial Sequence
  Description of Artificial Sequence: Synthetic oligonucleotide
uauguuaacugauacaaug

SEQ ID NO: 2922406 - RNA, 19 nt, Artificial Sequence
  Description of Artificial Sequence: Synthetic oligonucleotide
uccaaaauugggcacaggg

SEQ ID NO: 2922407 - RNA, 19 nt, Artificial Sequence
  Description of Artificial Sequence: Synthetic oligonucleotide
aaaugauuugguuacagau

SEQ ID NO: 2922408 - RNA, 19 nt, Artificial Sequence
  Description of Artificial Sequence: Synthetic oligonucleotide
aaagaaggccuagagauac

SEQ ID NO: 2922409 - RNA, 19 nt, Artificial Sequence
  Description of Artificial Sequence: Synthetic oligonucleotide
uuaucaagccuucaaauga

SEQ ID NO: 2922410 - RNA, 19 nt, Artificial Sequence
  Description of Artificial Sequence: Synthetic oligonucleotide
uuauaauacauacauuuaa

SEQ ID NO: 2922411 - RNA, 19 nt, Artificial Sequence
  Description of Artificial Sequence: Synthetic oligonucleotide
cuuaguaaagcauuacuag

SEQ ID NO: 2922412 - RNA, 19 nt, Artificial Sequence
  Description of Artificial Sequence: Synthetic oligonucleotide
auuacuaguaacuuuacau

SEQ ID NO: 2922413 - RNA, 19 nt, Artificial Sequence
  Description of Artificial Sequence: Synthetic oligonucleotide
uuucauaaucuuaacaaac

SEQ ID NO: 2922414 - RNA, 19 nt, Artificial Sequence
  Description of Artificial Sequence: Synthetic oligonucleotide
uuacagauauuuauaauac

SEQ ID NO: 2922415 - RNA, 19 nt, Artificial Sequence
  Description of Artificial Sequence: Synthetic oligonucleotide
uaugauuugaggaaaugac

SEQ ID NO: 2922416 - RNA, 19 nt, Artificial Sequence
  Description of Artificial Sequence: Synthetic oligonucleotide
uaaagcauuacuaguaacu

SEQ ID NO: 2922417 - RNA, 19 nt, Artificial Sequence
  Description of Artificial Sequence: Synthetic oligonucleotide
uguuacaucauacauuuau

SEQ ID NO: 2922418 - RNA, 19 nt, Artificial Sequence
  Description of Artificial Sequence: Synthetic oligonucleotide
auaaucuuaacaaacagca

SEQ ID NO: 2922419 - RNA, 19 nt, Artificial Sequence
  Description of Artificial Sequence: Synthetic oligonucleotide
uuaacugauacaauggaau

SEQ ID NO: 2922420 - RNA, 19 nt, Artificial Sequence
  Description of Artificial Sequence: Synthetic oligonucleotide
aaggccuagagauacuggg

SEQ ID NO: 2922421 - RNA, 19 nt, Artificial Sequence
  Description of Artificial Sequence: Synthetic oligonucleotide
uacauuuaaaacuauguua

SEQ ID NO: 2922422 - RNA, 19 nt, Artificial Sequence
  Description of Artificial Sequence: Synthetic oligonucleotide
cauaaucuuaacaaacagc

SEQ ID NO: 2922423 - RNA, 19 nt, Artificial Sequence
  Description of Artificial Sequence: Synthetic oligonucleotide
caauacauuacagugagag

SEQ ID NO: 2922424 - RNA, 19 nt, Artificial Sequence
  Description of Artificial Sequence: Synthetic oligonucleotide
aaaauauucucagaagcug

SEQ ID NO: 2922425 - RNA, 19 nt, Artificial Sequence
  Description of Artificial Sequence: Synthetic oligonucleotide
uucauaaucuuaacaaaca

SEQ ID NO: 2922426 - RNA, 19 nt, Artificial Sequence
  Description of Artificial Sequence: Synthetic oligonucleotide
uuuaucaagccuucaaaug

SEQ ID NO: 2922427 - RNA, 19 nt, Artificial Sequence
  Description of Artificial Sequence: Synthetic oligonucleotide
cagacaauacauuacagug

SEQ ID NO: 2922428 - RNA, 19 nt, Artificial Sequence
  Description of Artificial Sequence: Synthetic oligonucleotide
aaauauucucagaagcugg

SEQ ID NO: 2922429 - RNA, 19 nt, Artificial Sequence
  Description of Artificial Sequence: Synthetic oligonucleotide
ugauuugaggaaaugacuc

SEQ ID NO: 2922430 - RNA, 19 nt, Artificial Sequence
  Description of Artificial Sequence: Synthetic oligonucleotide
ugagcuuucauaaucuuaa

SEQ ID NO: 2922431 - RNA, 19 nt, Artificial Sequence
  Description of Artificial Sequence: Synthetic oligonucleotide
aauauucucagaagcuggc

SEQ ID NO: 2922432 - RNA, 19 nt, Artificial Sequence
  Description of Artificial Sequence: Synthetic oligonucleotide
aaauguaccaaacuuuguu

SEQ ID NO: 2922433 - RNA, 19 nt, Artificial Sequence
  Description of Artificial Sequence: Synthetic oligonucleotide
ucaacuccaaaauugggca

SEQ ID NO: 2922434 - RNA, 19 nt, Artificial Sequence
  Description of Artificial Sequence: Synthetic oligonucleotide
  modified_base (17)..(17): a, c, u, g, unknown or other
caaaugauuccacaaanac

SEQ ID NO: 2922435 - RNA, 19 nt, Artificial Sequence
  Description of Artificial Sequence: Synthetic oligonucleotide
aagccuucaaaugauuugg

SEQ ID NO: 2922436 - RNA, 19 nt, Artificial Sequence
  Description of Artificial Sequence: Synthetic oligonucleotide
auggaauaugauuugagga

SEQ ID NO: 2922437 - RNA, 19 nt, Artificial Sequence
  Description of Artificial Sequence: Synthetic oligonucleotide
uuaaaacuauguuaacuga

SEQ ID NO: 2922438 - RNA, 19 nt, Artificial Sequence
  Description of Artificial Sequence: Synthetic oligonucleotide
aaauuuaucaagccuucaa

SEQ ID NO: 2922439 - RNA, 19 nt, Artificial Sequence
  Description of Artificial Sequence: Synthetic oligonucleotide
aguguuacaucauacauuu

SEQ ID NO: 2922440 - RNA, 19 nt, Artificial Sequence
  Description of Artificial Sequence: Synthetic oligonucleotide
uucuaaagaaggccuagag

SEQ ID NO: 2922441 - RNA, 19 nt, Artificial Sequence
  Description of Artificial Sequence: Synthetic oligonucleotide
uuaguaaagcauuacuagu

SEQ ID NO: 2922442 - RNA, 19 nt, Artificial Sequence
  Description of Artificial Sequence: Synthetic oligonucleotide
uguuaacugauacaaugga

SEQ ID NO: 2922443 - RNA, 19 nt, Artificial Sequence
  Description of Artificial Sequence: Synthetic oligonucleotide
uuaaguguuacaucauaca

SEQ ID NO: 2922444 - RNA, 19 nt, Artificial Sequence
  Description of Artificial Sequence: Synthetic oligonucleotide
cauuuauuaccaacaaccc

SEQ ID NO: 2922445 - RNA, 19 nt, Artificial Sequence
  Description of Artificial Sequence: Synthetic oligonucleotide
ucuaaagaaggccuagaga

SEQ ID NO: 2922446 - RNA, 19 nt, Artificial Sequence
  Description of Artificial Sequence: Synthetic oligonucleotide
  modified_base (9)..(9): a, c, u, g, unknown or other
uccacaaanaccccuguga

SEQ ID NO: 2922447 - RNA, 19 nt, Artificial Sequence
  Description of Artificial Sequence: Synthetic oligonucleotide
gaggaaaugacucagcaaa

SEQ ID NO: 2922448 - RNA, 19 nt, Artificial Sequence
  Description of Artificial Sequence: Synthetic oligonucleotide
uaaguguuacaucauacau

SEQ ID NO: 2922449 - RNA, 19 nt, Artificial Sequence
  Description of Artificial Sequence: Synthetic oligonucleotide
ugcacuacuuaguaaagca

SEQ ID NO: 2922450 - RNA, 19 nt, Artificial Sequence
  Description of Artificial Sequence: Synthetic oligonucleotide
uuuauaauacauacauuua

SEQ ID NO: 2922451 - RNA, 19 nt, Artificial Sequence
  Description of Artificial Sequence: Synthetic oligonucleotide
cucaacuccaaaauugggc

SEQ ID NO: 2922452 - RNA, 19 nt, Artificial Sequence
  Description of Artificial Sequence: Synthetic oligonucleotide
aacaaacagcaacuugagg

SEQ ID NO: 2922453 - RNA, 19 nt, Artificial Sequence
  Description of Artificial Sequence: Synthetic oligonucleotide
uacaucauacauuuauuac

SEQ ID NO: 2922454 - RNA, 19 nt, Artificial Sequence
  Description of Artificial Sequence: Synthetic oligonucleotide
uggaauaugauuugaggaa

SEQ ID NO: 2922455 - RNA, 19 nt, Artificial Sequence
  Description of Artificial Sequence: Synthetic oligonucleotide
  modified_base (6)..(6): a, c, u, g, unknown or other
acaaanaccccugugagcu

SEQ ID NO: 2922456 - RNA, 19 nt, Artificial Sequence
  Description of Artificial Sequence: Synthetic oligonucleotide
auuuaaaacuauguuaacu

SEQ ID NO: 2922457 - RNA, 19 nt, Artificial Sequence
  Description of Artificial Sequence: Synthetic oligonucleotide
cauacauuuauuaccaaca

SEQ ID NO: 2922458 - RNA, 19 nt, Artificial Sequence
  Description of Artificial Sequence: Synthetic oligonucleotide
ucauacauuuauuaccaac

SEQ ID NO: 2922459 - RNA, 19 nt, Artificial Sequence
  Description of Artificial Sequence: Synthetic oligonucleotide
acuauguuaacugauacaa

SEQ ID NO: 2922460 - RNA, 19 nt, Artificial Sequence
  Description of Artificial Sequence: Synthetic oligonucleotide
aauguaccaaacuuuguua

SEQ ID NO: 2922461 - RNA, 19 nt, Artificial Sequence
  Description of Artificial Sequence: Synthetic oligonucleotide
aacuauguuaacugauaca

SEQ ID NO: 2922462 - RNA, 19 nt, Artificial Sequence
  Description of Artificial Sequence: Synthetic oligonucleotide
uaaaacuauguuaacugau

SEQ ID NO: 2922463 - RNA, 19 nt, Artificial Sequence
  Description of Artificial Sequence: Synthetic oligonucleotide
aaauucauugcacuacuua

SEQ ID NO: 2922464 - RNA, 19 nt, Artificial Sequence
  Description of Artificial Sequence: Synthetic oligonucleotide
augauuugguuacagauau

SEQ ID NO: 2922465 - RNA, 19 nt, Artificial Sequence
  Description of Artificial Sequence: Synthetic oligonucleotide
aauacauuacagugagagu

SEQ ID NO: 2922466 - RNA, 19 nt, Artificial Sequence
  Description of Artificial Sequence: Synthetic oligonucleotide
auuaccaacaacccucuca

SEQ ID NO: 2922467 - RNA, 19 nt, Artificial Sequence
  Description of Artificial Sequence: Synthetic oligonucleotide
uacuuaguaaagcauuacu

SEQ ID NO: 2922468 - RNA, 19 nt, Artificial Sequence
  Description of Artificial Sequence: Synthetic oligonucleotide
uacuaguaacuuuacauaa

SEQ ID NO: 2922469 - RNA, 19 nt, Artificial Sequence
  Description of Artificial Sequence: Synthetic oligonucleotide
agcaacuugagguaaccag

SEQ ID NO: 2922470 - RNA, 19 nt, Artificial Sequence
  Description of Artificial Sequence: Synthetic oligonucleotide
auuuauuaccaacaacccu

SEQ ID NO: 2922471 - RNA, 19 nt, Artificial Sequence
  Description of Artificial Sequence: Synthetic oligonucleotide
acauuuaaaacuauguuaa

SEQ ID NO: 2922472 - RNA, 19 nt, Artificial Sequence
  Description of Artificial Sequence: Synthetic oligonucleotide
uugaggaaaugacucagca

SEQ ID NO: 2922473 - RNA, 19 nt, Artificial Sequence
  Description of Artificial Sequence: Synthetic oligonucleotide
uaguaaagcauuacuagua

SEQ ID NO: 2922474 - RNA, 19 nt, Artificial Sequence
  Description of Artificial Sequence: Synthetic oligonucleotide
gaaaugacucagcaaauga

SEQ ID NO: 2922475 - RNA, 19 nt, Artificial Sequence
  Description of Artificial Sequence: Synthetic oligonucleotide
uuaccaacaacccucucaa

SEQ ID NO: 2922476 - RNA, 19 nt, Artificial Sequence
  Description of Artificial Sequence: Synthetic oligonucleotide
ucucaacuccaaaauuggg

SEQ ID NO: 2922477 - RNA, 19 nt, Artificial Sequence
  Description of Artificial Sequence: Synthetic oligonucleotide
uuacaucauacauuuauua

SEQ ID NO: 2922478 - RNA, 19 nt, Artificial Sequence
  Description of Artificial Sequence: Synthetic oligonucleotide
uuacuaguaacuuuacaua

SEQ ID NO: 2922479 - RNA, 19 nt, Artificial Sequence
  Description of Artificial Sequence: Synthetic oligonucleotide
aauaugauuugaggaaaug

SEQ ID NO: 2922480 - RNA, 19 nt, Artificial Sequence
  Description of Artificial Sequence: Synthetic oligonucleotide
uacauuuauuaccaacaac

SEQ ID NO: 2922481 - RNA, 19 nt, Artificial Sequence
  Description of Artificial Sequence: Synthetic oligonucleotide
cucucaacuccaaaauugg

SEQ ID NO: 2922482 - RNA, 19 nt, Artificial Sequence
  Description of Artificial Sequence: Synthetic oligonucleotide
gagguaaccagaugcacug

SEQ ID NO: 2922483 - RNA, 19 nt, Artificial Sequence
  Description of Artificial Sequence: Synthetic oligonucleotide
auacauuacagugagagua

SEQ ID NO: 2922484 - RNA, 19 nt, Artificial Sequence
  Description of Artificial Sequence: Synthetic oligonucleotide
uacaauggaauaugauuug

SEQ ID NO: 2922485 - RNA, 19 nt, Artificial Sequence
  Description of Artificial Sequence: Synthetic oligonucleotide
caucauacauuuauuacca

SEQ ID NO: 2922486 - RNA, 19 nt, Artificial Sequence
  Description of Artificial Sequence: Synthetic oligonucleotide
gauacaauggaauaugauu

SEQ ID NO: 2922487 - RNA, 19 nt, Artificial Sequence
  Description of Artificial Sequence: Synthetic oligonucleotide
cuuaacaaacagcaacuug

SEQ ID NO: 2922488 - RNA, 19 nt, Artificial Sequence
  Description of Artificial Sequence: Synthetic oligonucleotide
cuugaguuguuuguggagg

SEQ ID NO: 2922489 - RNA, 19 nt, Artificial Sequence
  Description of Artificial Sequence: Synthetic oligonucleotide
ucaaaugauuugguuacag

SEQ ID NO: 2922490 - RNA, 19 nt, Artificial Sequence
  Description of Artificial Sequence: Synthetic oligonucleotide
cuaaagaaggccuagagau

SEQ ID NO: 2922491 - RNA, 19 nt, Artificial Sequence
  Description of Artificial Sequence: Synthetic oligonucleotide
accaacaacccucucaacu

SEQ ID NO: 2922492 - RNA, 19 nt, Artificial Sequence
  Description of Artificial Sequence: Synthetic oligonucleotide
auguuaacugauacaaugg

SEQ ID NO: 2922493 - RNA, 19 nt, Artificial Sequence
  Description of Artificial Sequence: Synthetic oligonucleotide
uacagauauuuauaauaca

SEQ ID NO: 2922494 - RNA, 19 nt, Artificial Sequence
  Description of Artificial Sequence: Synthetic oligonucleotide
ucagcaaaugauuccacaa

SEQ ID NO: 2922495 - RNA, 19 nt, Artificial Sequence
  Description of Artificial Sequence: Synthetic oligonucleotide
acagauauuuauaauacau

SEQ ID NO: 2922496 - RNA, 19 nt, Artificial Sequence
  Description of Artificial Sequence: Synthetic oligonucleotide
gauacuuggaggccuugag

SEQ ID NO: 2922497 - RNA, 19 nt, Artificial Sequence
  Description of Artificial Sequence: Synthetic oligonucleotide
acugauacaauggaauaug

SEQ ID NO: 2922498 - RNA, 19 nt, Artificial Sequence
  Description of Artificial Sequence: Synthetic oligonucleotide
ugagguaaccagaugcacu

SEQ ID NO: 2922499 - RNA, 19 nt, Artificial Sequence
  Description of Artificial Sequence: Synthetic oligonucleotide
uuugaggaaaugacucagc

SEQ ID NO: 2922500 - RNA, 19 nt, Artificial Sequence
  Description of Artificial Sequence: Synthetic oligonucleotide
accagaugcacuguggagg

SEQ ID NO: 2922501 - RNA, 19 nt, Artificial Sequence
  Description of Artificial Sequence: Synthetic oligonucleotide
uugguuacagauauuuaua

SEQ ID NO: 2922502 - RNA, 19 nt, Artificial Sequence
  Description of Artificial Sequence: Synthetic oligonucleotide
ugguuacagauauuuauaa

SEQ ID NO: 2922503 - RNA, 19 nt, Artificial Sequence
  Description of Artificial Sequence: Synthetic oligonucleotide
uucauugcacuacuuagua

SEQ ID NO: 2922504 - RNA, 19 nt, Artificial Sequence
  Description of Artificial Sequence: Synthetic oligonucleotide
gaagcuggcaggcagacaa

SEQ ID NO: 2922505 - RNA, 19 nt, Artificial Sequence
  Description of Artificial Sequence: Synthetic oligonucleotide
  modified_base (19)..(19): a, c, u, g, unknown or other
agcaaaugauuccacaaan

SEQ ID NO: 2922506 - RNA, 19 nt, Artificial Sequence
  Description of Artificial Sequence: Synthetic oligonucleotide
auaugauuugaggaaauga

SEQ ID NO: 2922507 - RNA, 19 nt, Artificial Sequence
  Description of Artificial Sequence: Synthetic oligonucleotide
acagacuucuaaagaaggc

SEQ ID NO: 2922508 - RNA, 19 nt, Artificial Sequence
  Description of Artificial Sequence: Synthetic oligonucleotide
auacaauggaauaugauuu

SEQ ID NO: 2922509 - RNA, 19 nt, Artificial Sequence
  Description of Artificial Sequence: Synthetic oligonucleotide
  modified_base (13)..(13): a, c, u, g, unknown or other
ugauuccacaaanaccccu

SEQ ID NO: 2922510 - RNA, 19 nt, Artificial Sequence
  Description of Artificial Sequence: Synthetic oligonucleotide
agcuuucauaaucuuaaca

SEQ ID NO: 2922511 - RNA, 19 nt, Artificial Sequence
  Description of Artificial Sequence: Synthetic oligonucleotide
aguaaagcauuacuaguaa

SEQ ID NO: 2922512 - RNA, 19 nt, Artificial Sequence
  Description of Artificial Sequence: Synthetic oligonucleotide
auuugaggaaaugacucag

SEQ ID NO: 2922513 - RNA, 19 nt, Artificial Sequence
  Description of Artificial Sequence: Synthetic oligonucleotide
aaccagaugcacuguggag

SEQ ID NO: 2922514 - RNA, 19 nt, Artificial Sequence
  Description of Artificial Sequence: Synthetic oligonucleotide
aaagcauuacuaguaacuu

SEQ ID NO: 2922515 - RNA, 19 nt, Artificial Sequence
  Description of Artificial Sequence: Synthetic oligonucleotide
  modified_base (7)..(7): a, c, u, g, unknown or other
cacaaanaccccugugagc

SEQ ID NO: 2922516 - RNA, 19 nt, Artificial Sequence
  Description of Artificial Sequence: Synthetic oligonucleotide
uuauuaccaacaacccucu

SEQ ID NO: 2922517 - RNA, 19 nt, Artificial Sequence
  Description of Artificial Sequence: Synthetic oligonucleotide
gauuugaggaaaugacuca

SEQ ID NO: 2922518 - RNA, 19 nt, Artificial Sequence
  Description of Artificial Sequence: Synthetic oligonucleotide
aggacagacuucuaaagaa

SEQ ID NO: 2922519 - RNA, 19 nt, Artificial Sequence
  Description of Artificial Sequence: Synthetic oligonucleotide
uaaccagaugcacugugga

SEQ ID NO: 2922520 - RNA, 19 nt, Artificial Sequence
  Description of Artificial Sequence: Synthetic oligonucleotide
cauugcacuacuuaguaaa

SEQ ID NO: 2922521 - RNA, 19 nt, Artificial Sequence
  Description of Artificial Sequence: Synthetic oligonucleotide
ugauacaauggaauaugau

SEQ ID NO: 2922522 - RNA, 19 nt, Artificial Sequence
  Description of Artificial Sequence: Synthetic oligonucleotide
  modified_base (10)..(10): a, c, u, g, unknown or other
uuccacaaanaccccugug

SEQ ID NO: 2922523 - RNA, 19 nt, Artificial Sequence
  Description of Artificial Sequence: Synthetic oligonucleotide
ugacucagcaaaugauucc

SEQ ID NO: 2922524 - RNA, 19 nt, Artificial Sequence
  Description of Artificial Sequence: Synthetic oligonucleotide
aaugauuugguuacagaua

SEQ ID NO: 2922525 - RNA, 19 nt, Artificial Sequence
  Description of Artificial Sequence: Synthetic oligonucleotide
augacucagcaaaugauuc

SEQ ID NO: 2922526 - RNA, 19 nt, Artificial Sequence
  Description of Artificial Sequence: Synthetic oligonucleotide
aaaacuauguuaacugaua

SEQ ID NO: 2922527 - RNA, 19 nt, Artificial Sequence
  Description of Artificial Sequence: Synthetic oligonucleotide
uacauuacagugagaguaa

SEQ ID NO: 2922528 - RNA, 19 nt, Artificial Sequence
  Description of Artificial Sequence: Synthetic oligonucleotide
caagccuucaaaugauuug

SEQ ID NO: 2922529 - RNA, 19 nt, Artificial Sequence
  Description of Artificial Sequence: Synthetic oligonucleotide
aacugauacaauggaauau

SEQ ID NO: 2922530 - RNA, 19 nt, Artificial Sequence
  Description of Artificial Sequence: Synthetic oligonucleotide
aaugacucagcaaaugauu

SEQ ID NO: 2922531 - RNA, 19 nt, Artificial Sequence
  Description of Artificial Sequence: Synthetic oligonucleotide
aacccucucaacuccaaaa

SEQ ID NO: 2922532 - RNA, 19 nt, Artificial Sequence
  Description of Artificial Sequence: Synthetic oligonucleotide
uaacugauacaauggaaua

SEQ ID NO: 2922533 - RNA, 19 nt, Artificial Sequence
  Description of Artificial Sequence: Synthetic oligonucleotide
aaaauuuaucaagccuuca

SEQ ID NO: 2922534 - RNA, 19 nt, Artificial Sequence
  Description of Artificial Sequence: Synthetic oligonucleotide
auacauuuauuaccaacaa

SEQ ID NO: 2922535 - RNA, 19 nt, Artificial Sequence
  Description of Artificial Sequence: Synthetic oligonucleotide
  modified_base (12)..(12): a, c, u, g, unknown or other
gauuccacaaanaccccug

SEQ ID NO: 2922536 - RNA, 19 nt, Artificial Sequence
  Description of Artificial Sequence: Synthetic oligonucleotide
uaaucuuaacaaacagcaa

SEQ ID NO: 2922537 - RNA, 19 nt, Artificial Sequence
  Description of Artificial Sequence: Synthetic oligonucleotide
uacuuggaggccuugaguu

SEQ ID NO: 2922538 - RNA, 19 nt, Artificial Sequence
  Description of Artificial Sequence: Synthetic oligonucleotide
aaaugacucagcaaaugau

SEQ ID NO: 2922539 - RNA, 19 nt, Artificial Sequence
  Description of Artificial Sequence: Synthetic oligonucleotide
uaucaagccuucaaaugau

SEQ ID NO: 2922540 - RNA, 19 nt, Artificial Sequence
  Description of Artificial Sequence: Synthetic oligonucleotide
ugcacuguggaggacagac

SEQ ID NO: 2922541 - RNA, 19 nt, Artificial Sequence
  Description of Artificial Sequence: Synthetic oligonucleotide
aucuuaacaaacagcaacu

SEQ ID NO: 2922542 - RNA, 19 nt, Artificial Sequence
  Description of Artificial Sequence: Synthetic oligonucleotide
auguaccaaacuuuguuaa

SEQ ID NO: 2922543 - RNA, 19 nt, Artificial Sequence
  Description of Artificial Sequence: Synthetic oligonucleotide
aggcagacaauacauuaca

SEQ ID NO: 2922544 - RNA, 19 nt, Artificial Sequence
  Description of Artificial Sequence: Synthetic oligonucleotide
  modified_base (14)..(14): a, c, u, g, unknown or other
augauuccacaaanacccc

SEQ ID NO: 2922545 - RNA, 19 nt, Artificial Sequence
  Description of Artificial Sequence: Synthetic oligonucleotide
aacuccaaaauugggcaca

SEQ ID NO: 2922546 - RNA, 19 nt, Artificial Sequence
  Description of Artificial Sequence: Synthetic oligonucleotide
aagcauuacuaguaacuuu

SEQ ID NO: 2922547 - RNA, 19 nt, Artificial Sequence
  Description of Artificial Sequence: Synthetic oligonucleotide
acagcaacuugagguaacc

SEQ ID NO: 2922548 - RNA, 19 nt, Artificial Sequence
  Description of Artificial Sequence: Synthetic oligonucleotide
ucaagccuucaaaugauuu

SEQ ID NO: 2922549 - RNA, 19 nt, Artificial Sequence
  Description of Artificial Sequence: Synthetic oligonucleotide
guaaagcauuacuaguaac

SEQ ID NO: 2922550 - RNA, 19 nt, Artificial Sequence
  Description of Artificial Sequence: Synthetic oligonucleotide
cuuucauaaucuuaacaaa

SEQ ID NO: 2922551 - RNA, 19 nt, Artificial Sequence
  Description of Artificial Sequence: Synthetic oligonucleotide
gaggacagacuucuaaaga

SEQ ID NO: 2922552 - RNA, 19 nt, Artificial Sequence
  Description of Artificial Sequence: Synthetic oligonucleotide
aaaauucuugauacuugga

SEQ ID NO: 2922553 - RNA, 19 nt, Artificial Sequence
  Description of Artificial Sequence: Synthetic oligonucleotide
uuguuuguggagguuggag

SEQ ID NO: 2922554 - RNA, 19 nt, Artificial Sequence
  Description of Artificial Sequence: Synthetic oligonucleotide
aacagcaacuugagguaac

SEQ ID NO: 2922555 - RNA, 19 nt, Artificial Sequence
  Description of Artificial Sequence: Synthetic oligonucleotide
uugggcacagggauuaaaa

SEQ ID NO: 2922556 - RNA, 19 nt, Artificial Sequence
  Description of Artificial Sequence: Synthetic oligonucleotide
acauacauuuaaaacuaug

SEQ ID NO: 2922557 - RNA, 19 nt, Artificial Sequence
  Description of Artificial Sequence: Synthetic oligonucleotide
aaaauguaccaaacuuugu

SEQ ID NO: 2922558 - RNA, 19 nt, Artificial Sequence
  Description of Artificial Sequence: Synthetic oligonucleotide
aaauugggcacagggauua

SEQ ID NO: 2922559 - RNA, 19 nt, Artificial Sequence
  Description of Artificial Sequence: Synthetic oligonucleotide
cucagaagcuggcaggcag

SEQ ID NO: 2922560 - RNA, 19 nt, Artificial Sequence
  Description of Artificial Sequence: Synthetic oligonucleotide
acuuaguaaagcauuacua

SEQ ID NO: 2922561 - RNA, 19 nt, Artificial Sequence
  Description of Artificial Sequence: Synthetic oligonucleotide
uguaccaaacuuuguuaaa

SEQ ID NO: 2922562 - RNA, 19 nt, Artificial Sequence
  Description of Artificial Sequence: Synthetic oligonucleotide
ugaggaaaugacucagcaa

SEQ ID NO: 2922563 - RNA, 19 nt, Artificial Sequence
  Description of Artificial Sequence: Synthetic oligonucleotide
gaguuguuuguggagguug

SEQ ID NO: 2922564 - RNA, 19 nt, Artificial Sequence
  Description of Artificial Sequence: Synthetic oligonucleotide
augauuugaggaaaugacu

SEQ ID NO: 2922565 - RNA, 19 nt, Artificial Sequence
  Description of Artificial Sequence: Synthetic oligonucleotide
guaaccagaugcacugugg

SEQ ID NO: 2922566 - RNA, 19 nt, Artificial Sequence
  Description of Artificial Sequence: Synthetic oligonucleotide
agcauuacuaguaacuuua

SEQ ID NO: 2922567 - RNA, 19 nt, Artificial Sequence
  Description of Artificial Sequence: Synthetic oligonucleotide
ucuugauacuuggaggccu

SEQ ID NO: 2922568 - RNA, 19 nt, Artificial Sequence
  Description of Artificial Sequence: Synthetic oligonucleotide
uggaggacagacuucuaaa

SEQ ID NO: 2922569 - RNA, 19 nt, Artificial Sequence
  Description of Artificial Sequence: Synthetic oligonucleotide
uaaagaaggccuagagaua

SEQ ID NO: 2922570 - RNA, 19 nt, Artificial Sequence
  Description of Artificial Sequence: Synthetic oligonucleotide
acuucuaaagaaggccuag

SEQ ID NO: 2922571 - RNA, 19 nt, Artificial Sequence
  Description of Artificial Sequence: Synthetic oligonucleotide
agacaauacauuacaguga

SEQ ID NO: 2922572 - RNA, 19 nt, Artificial Sequence
  Description of Artificial Sequence: Synthetic oligonucleotide
caggcagacaauacauuac

SEQ ID NO: 2922573 - RNA, 19 nt, Artificial Sequence
  Description of Artificial Sequence: Synthetic oligonucleotide
auacuuggaggccuugagu

SEQ ID NO: 2922574 - RNA, 19 nt, Artificial Sequence
  Description of Artificial Sequence: Synthetic oligonucleotide
uugcacuacuuaguaaagc

SEQ ID NO: 2922575 - RNA, 19 nt, Artificial Sequence
  Description of Artificial Sequence: Synthetic oligonucleotide
uggcaggcagacaauacau

SEQ ID NO: 2922576 - RNA, 19 nt, Artificial Sequence
  Description of Artificial Sequence: Synthetic oligonucleotide
ggaggacagacuucuaaag

SEQ ID NO: 2922577 - RNA, 19 nt, Artificial Sequence
  Description of Artificial Sequence: Synthetic oligonucleotide
ucagaagcuggcaggcaga

SEQ ID NO: 2922578 - RNA, 19 nt, Artificial Sequence
  Description of Artificial Sequence: Synthetic oligonucleotide
gacucagcaaaugauucca

SEQ ID NO: 2922579 - RNA, 19 nt, Artificial Sequence
  Description of Artificial Sequence: Synthetic oligonucleotide
gaaggccuagagauacugg

SEQ ID NO: 2922580 - RNA, 19 nt, Artificial Sequence
  Description of Artificial Sequence: Synthetic oligonucleotide
ccucucaacuccaaaauug

SEQ ID NO: 2922581 - RNA, 19 nt, Artificial Sequence
  Description of Artificial Sequence: Synthetic oligonucleotide
uucucagaagcuggcaggc

SEQ ID NO: 2922582 - RNA, 19 nt, Artificial Sequence
  Description of Artificial Sequence: Synthetic oligonucleotide
aguuguuuguggagguugg

SEQ ID NO: 2922583 - RNA, 19 nt, Artificial Sequence
  Description of Artificial Sequence: Synthetic oligonucleotide
gauuugguuacagauauuu

SEQ ID NO: 2922584 - RNA, 19 nt, Artificial Sequence
  Description of Artificial Sequence: Synthetic oligonucleotide
  modified_base (4)..(4): a, c, u, g, unknown or other
aaanaccccugugagcuuu

SEQ ID NO: 2922585 - RNA, 19 nt, Artificial Sequence
  Description of Artificial Sequence: Synthetic oligonucleotide
acaauggaauaugauuuga

SEQ ID NO: 2922586 - RNA, 19 nt, Artificial Sequence
  Description of Artificial Sequence: Synthetic oligonucleotide
cagauauuuauaauacaua

SEQ ID NO: 2922587 - RNA, 19 nt, Artificial Sequence
  Description of Artificial Sequence: Synthetic oligonucleotide
ucauugcacuacuuaguaa

SEQ ID NO: 2922588 - RNA, 19 nt, Artificial Sequence
  Description of Artificial Sequence: Synthetic oligonucleotide
auucauugcacuacuuagu

SEQ ID NO: 2922589 - RNA, 19 nt, Artificial Sequence
  Description of Artificial Sequence: Synthetic oligonucleotide
caaaugauuugguuacaga

SEQ ID NO: 2922590 - RNA, 19 nt, Artificial Sequence
  Description of Artificial Sequence: Synthetic oligonucleotide
uucuugauacuuggaggcc

SEQ ID NO: 2922591 - RNA, 19 nt, Artificial Sequence
  Description of Artificial Sequence: Synthetic oligonucleotide
auugcacuacuuaguaaag

SEQ ID NO: 2922592 - RNA, 19 nt, Artificial Sequence
  Description of Artificial Sequence: Synthetic oligonucleotide
aaacagcaacuugagguaa

SEQ ID NO: 2922593 - RNA, 19 nt, Artificial Sequence
  Description of Artificial Sequence: Synthetic oligonucleotide
caaaauugggcacagggau

SEQ ID NO: 2922594 - RNA, 19 nt, Artificial Sequence
  Description of Artificial Sequence: Synthetic oligonucleotide
cugauacaauggaauauga

SEQ ID NO: 2922595 - RNA, 19 nt, Artificial Sequence
  Description of Artificial Sequence: Synthetic oligonucleotide
guuaacugauacaauggaa

SEQ ID NO: 2922596 - RNA, 19 nt, Artificial Sequence
  Description of Artificial Sequence: Synthetic oligonucleotide
  modified_base (11)..(11): a, c, u, g, unknown or other
auuccacaaanaccccugu

SEQ ID NO: 2922597 - RNA, 19 nt, Artificial Sequence
  Description of Artificial Sequence: Synthetic oligonucleotide
uugagguaaccagaugcac

SEQ ID NO: 2922598 - RNA, 19 nt, Artificial Sequence
  Description of Artificial Sequence: Synthetic oligonucleotide
cuacuuaguaaagcauuac

SEQ ID NO: 2922599 - RNA, 19 nt, Artificial Sequence
  Description of Artificial Sequence: Synthetic oligonucleotide
gaugcacuguggaggacag

SEQ ID NO: 2922600 - RNA, 19 nt, Artificial Sequence
  Description of Artificial Sequence: Synthetic oligonucleotide
cauuacuaguaacuuuaca

SEQ ID NO: 2922601 - RNA, 19 nt, Artificial Sequence
  Description of Artificial Sequence: Synthetic oligonucleotide
ucuuaacaaacagcaacuu

SEQ ID NO: 2922602 - RNA, 19 nt, Artificial Sequence
  Description of Artificial Sequence: Synthetic oligonucleotide
caacuccaaaauugggcac

SEQ ID NO: 2922603 - RNA, 19 nt, Artificial Sequence
  Description of Artificial Sequence: Synthetic oligonucleotide
agaugcacuguggaggaca

SEQ ID NO: 2922604 - RNA, 19 nt, Artificial Sequence
  Description of Artificial Sequence: Synthetic oligonucleotide
caaacagcaacuugaggua

SEQ ID NO: 2922605 - RNA, 19 nt, Artificial Sequence
  Description of Artificial Sequence: Synthetic oligonucleotide
guaccaaacuuuguuaaaa

SEQ ID NO: 2922606 - RNA, 19 nt, Artificial Sequence
  Description of Artificial Sequence: Synthetic oligonucleotide
gagcuuucauaaucuuaac

SEQ ID NO: 2922607 - RNA, 19 nt, Artificial Sequence
  Description of Artificial Sequence: Synthetic oligonucleotide
aaaauucauugcacuacuu

SEQ ID NO: 2922608 - RNA, 19 nt, Artificial Sequence
  Description of Artificial Sequence: Synthetic oligonucleotide
gguaaccagaugcacugug

SEQ ID NO: 2922609 - RNA, 19 nt, Artificial Sequence
  Description of Artificial Sequence: Synthetic oligonucleotide
uucaaaugauuugguuaca

SEQ ID NO: 2922610 - RNA, 19 nt, Artificial Sequence
  Description of Artificial Sequence: Synthetic oligonucleotide
acuacuuaguaaagcauua

SEQ ID NO: 2922611 - RNA, 19 nt, Artificial Sequence
  Description of Artificial Sequence: Synthetic oligonucleotide
  modified_base (8)..(8): a, c, u, g, unknown or other
ccacaaanaccccugugag

SEQ ID NO: 2922612 - RNA, 19 nt, Artificial Sequence
  Description of Artificial Sequence: Synthetic oligonucleotide
ggaaaugacucagcaaaug

SEQ ID NO: 2922613 - RNA, 19 nt, Artificial Sequence
  Description of Artificial Sequence: Synthetic oligonucleotide
cucagcaaaugauuccaca

SEQ ID NO: 2922614 - RNA, 19 nt, Artificial Sequence
  Description of Artificial Sequence: Synthetic oligonucleotide
acccucucaacuccaaaau

SEQ ID NO: 2922615 - RNA, 19 nt, Artificial Sequence
  Description of Artificial Sequence: Synthetic oligonucleotide
ugauacuuggaggccuuga

SEQ ID NO: 2922616 - RNA, 19 nt, Artificial Sequence
  Description of Artificial Sequence: Synthetic oligonucleotide
ugugagcuuucauaaucuu

SEQ ID NO: 2922617 - RNA, 19 nt, Artificial Sequence
  Description of Artificial Sequence: Synthetic oligonucleotide
acuaguaacuuuacauaaa

SEQ ID NO: 2922618 - RNA, 19 nt, Artificial Sequence
  Description of Artificial Sequence: Synthetic oligonucleotide
ggacagacuucuaaagaag

SEQ ID NO: 2922619 - RNA, 19 nt, Artificial Sequence
  Description of Artificial Sequence: Synthetic oligonucleotide
acucagcaaaugauuccac

SEQ ID NO: 2922620 - RNA, 19 nt, Artificial Sequence
  Description of Artificial Sequence: Synthetic oligonucleotide
  modified_base (3)..(3): a, c, u, g, unknown or other
aanaccccugugagcuuuc

SEQ ID NO: 2922621 - RNA, 19 nt, Artificial Sequence
  Description of Artificial Sequence: Synthetic oligonucleotide
accccugugagcuuucaua

SEQ ID NO: 2922622 - RNA, 19 nt, Artificial Sequence
  Description of Artificial Sequence: Synthetic oligonucleotide
auauucucagaagcuggca

SEQ ID NO: 2922623 - RNA, 19 nt, Artificial Sequence
  Description of Artificial Sequence: Synthetic oligonucleotide
ccugugagcuuucauaauc

SEQ ID NO: 2922624 - RNA, 19 nt, Artificial Sequence
  Description of Artificial Sequence: Synthetic oligonucleotide
ggccuugaguuguuugugg

SEQ ID NO: 2922625 - RNA, 19 nt, Artificial Sequence
  Description of Artificial Sequence: Synthetic oligonucleotide
aucauacauuuauuaccaa

SEQ ID NO: 2922626 - RNA, 19 nt, Artificial Sequence
  Description of Artificial Sequence: Synthetic oligonucleotide
ccaacaacccucucaacuc

SEQ ID NO: 2922627 - RNA, 19 nt, Artificial Sequence
  Description of Artificial Sequence: Synthetic oligonucleotide
acuccaaaauugggcacag

SEQ ID NO: 2922628 - RNA, 19 nt, Artificial Sequence
  Description of Artificial Sequence: Synthetic oligonucleotide
ccuucaaaugauuugguua

SEQ ID NO: 2922629 - RNA, 19 nt, Artificial Sequence
  Description of Artificial Sequence: Synthetic oligonucleotide
aacaacccucucaacucca

SEQ ID NO: 2922630 - RNA, 19 nt, Artificial Sequence
  Description of Artificial Sequence: Synthetic oligonucleotide
cuggcaggcagacaauaca

SEQ ID NO: 2922631 - RNA, 19 nt, Artificial Sequence
  Description of Artificial Sequence: Synthetic oligonucleotide
ggaauaugauuugaggaaa

SEQ ID NO: 2922632 - RNA, 19 nt, Artificial Sequence
  Description of Artificial Sequence: Synthetic oligonucleotide
cauuacagugagaguaaaa

SEQ ID NO: 2922633 - RNA, 19 nt, Artificial Sequence
  Description of Artificial Sequence: Synthetic oligonucleotide
acuguggaggacagacuuc

SEQ ID NO: 2922634 - RNA, 19 nt, Artificial Sequence
  Description of Artificial Sequence: Synthetic oligonucleotide
guggaggacagacuucuaa

SEQ ID NO: 2922635 - RNA, 19 nt, Artificial Sequence
  Description of Artificial Sequence: Synthetic oligonucleotide
gaggccuugaguuguuugu

SEQ ID NO: 2922636 - RNA, 19 nt, Artificial Sequence
  Description of Artificial Sequence: Synthetic oligonucleotide
uauuaccaacaacccucuc

SEQ ID NO: 2922637 - RNA, 19 nt, Artificial Sequence
  Description of Artificial Sequence: Synthetic oligonucleotide
cagcaaaugauuccacaaa

SEQ ID NO: 2922638 - RNA, 19 nt, Artificial Sequence
  Description of Artificial Sequence: Synthetic oligonucleotide
ggcagacaauacauuacag

SEQ ID NO: 2922639 - RNA, 19 nt, Artificial Sequence
  Description of Artificial Sequence: Synthetic oligonucleotide
gcagacaauacauuacagu

SEQ ID NO: 2922640 - RNA, 19 nt, Artificial Sequence
  Description of Artificial Sequence: Synthetic oligonucleotide
ccuugaguuguuuguggag

SEQ ID NO: 2922641 - RNA, 19 nt, Artificial Sequence
  Description of Artificial Sequence: Synthetic oligonucleotide
gcaacuugagguaaccaga

SEQ ID NO: 2922642 - RNA, 19 nt, Artificial Sequence
  Description of Artificial Sequence: Synthetic oligonucleotide
cacuacuuaguaaagcauu

SEQ ID NO: 2922643 - RNA, 19 nt, Artificial Sequence
  Description of Artificial Sequence: Synthetic oligonucleotide
cugugagcuuucauaaucu

SEQ ID NO: 2922644 - RNA, 19 nt, Artificial Sequence
  Description of Artificial Sequence: Synthetic oligonucleotide
aggccuugaguuguuugug

SEQ ID NO: 2922645 - RNA, 19 nt, Artificial Sequence
  Description of Artificial Sequence: Synthetic oligonucleotide
gcaggcagacaauacauua

SEQ ID NO: 2922646 - RNA, 19 nt, Artificial Sequence
  Description of Artificial Sequence: Synthetic oligonucleotide
uugauacuuggaggccuug

SEQ ID NO: 2922647 - RNA, 19 nt, Artificial Sequence
  Description of Artificial Sequence: Synthetic oligonucleotide
guuuguggagguuggaguu

SEQ ID NO: 2922648 - RNA, 19 nt, Artificial Sequence
  Description of Artificial Sequence: Synthetic oligonucleotide
ccaaaauugggcacaggga

SEQ ID NO: 2922649 - RNA, 19 nt, Artificial Sequence
  Description of Artificial Sequence: Synthetic oligonucleotide
ggaggccuugaguuguuug

SEQ ID NO: 2922650 - RNA, 19 nt, Artificial Sequence
  Description of Artificial Sequence: Synthetic oligonucleotide
gaauaugauuugaggaaau

SEQ ID NO: 2922651 - RNA, 19 nt, Artificial Sequence
  Description of Artificial Sequence: Synthetic oligonucleotide
acauuacagugagaguaaa

SEQ ID NO: 2922652 - RNA, 19 nt, Artificial Sequence
  Description of Artificial Sequence: Synthetic oligonucleotide
cuucuaaagaaggccuaga

SEQ ID NO: 2922653 - RNA, 19 nt, Artificial Sequence
  Description of Artificial Sequence: Synthetic oligonucleotide
aggaaaugacucagcaaau

SEQ ID NO: 2922654 - RNA, 19 nt, Artificial Sequence
  Description of Artificial Sequence: Synthetic oligonucleotide
aagaaggccuagagauacu

SEQ ID NO: 2922655 - RNA, 19 nt, Artificial Sequence
  Description of Artificial Sequence: Synthetic oligonucleotide
ucucagaagcuggcaggca

SEQ ID NO: 2922656 - RNA, 19 nt, Artificial Sequence
  Description of Artificial Sequence: Synthetic oligonucleotide
uaccaacaacccucucaac

SEQ ID NO: 2922657 - RNA, 19 nt, Artificial Sequence
  Description of Artificial Sequence: Synthetic oligonucleotide
ggccuagagauacugggaa

SEQ ID NO: 2922658 - RNA, 19 nt, Artificial Sequence
  Description of Artificial Sequence: Synthetic oligonucleotide
gugagcuuucauaaucuua

SEQ ID NO: 2922659 - RNA, 19 nt, Artificial Sequence
  Description of Artificial Sequence: Synthetic oligonucleotide
  modified_base (2)..(2): a, c, u, g, unknown or other
anaccccugugagcuuuca

SEQ ID NO: 2922660 - RNA, 19 nt, Artificial Sequence
  Description of Artificial Sequence: Synthetic oligonucleotide
  modified_base (18)..(18): a, c, u, g, unknown or other
gcaaaugauuccacaaana

SEQ ID NO: 2922661 - RNA, 19 nt, Artificial Sequence
  Description of Artificial Sequence: Synthetic oligonucleotide
ugaguuguuuguggagguu

SEQ ID NO: 2922662 - RNA, 19 nt, Artificial Sequence
  Description of Artificial Sequence: Synthetic oligonucleotide
aggccuagagauacuggga

SEQ ID NO: 2922663 - RNA, 19 nt, Artificial Sequence
  Description of Artificial Sequence: Synthetic oligonucleotide
cagaagcuggcaggcagac

SEQ ID NO: 2922664 - RNA, 19 nt, Artificial Sequence
  Description of Artificial Sequence: Synthetic oligonucleotide
gguuacagauauuuauaau

SEQ ID NO: 2922665 - RNA, 19 nt, Artificial Sequence
  Description of Artificial Sequence: Synthetic oligonucleotide
uguggaggacagacuucua

SEQ ID NO: 2922666 - RNA, 19 nt, Artificial Sequence
  Description of Artificial Sequence: Synthetic oligonucleotide
auugggcacagggauuaaa

SEQ ID NO: 2922667 - RNA, 19 nt, Artificial Sequence
  Description of Artificial Sequence: Synthetic oligonucleotide
caacuugagguaaccagau

SEQ ID NO: 2922668 - RNA, 19 nt, Artificial Sequence
  Description of Artificial Sequence: Synthetic oligonucleotide
cuauguuaacugauacaau

SEQ ID NO: 2922669 - RNA, 19 nt, Artificial Sequence
  Description of Artificial Sequence: Synthetic oligonucleotide
agccuucaaaugauuuggu

SEQ ID NO: 2922670 - RNA, 19 nt, Artificial Sequence
  Description of Artificial Sequence: Synthetic oligonucleotide
cuccaaaauugggcacagg

SEQ ID NO: 2922671 - RNA, 19 nt, Artificial Sequence
  Description of Artificial Sequence: Synthetic oligonucleotide
aauugggcacagggauuaa

SEQ ID NO: 2922672 - RNA, 19 nt, Artificial Sequence
  Description of Artificial Sequence: Synthetic oligonucleotide
gccuugaguuguuugugga

SEQ ID NO: 2922673 - RNA, 19 nt, Artificial Sequence
  Description of Artificial Sequence: Synthetic oligonucleotide
cacuguggaggacagacuu

SEQ ID NO: 2922674 - RNA, 19 nt, Artificial Sequence
  Description of Artificial Sequence: Synthetic oligonucleotide
guuguuuguggagguugga

SEQ ID NO: 2922675 - RNA, 19 nt, Artificial Sequence
  Description of Artificial Sequence: Synthetic oligonucleotide
cuuggaggccuugaguugu

SEQ ID NO: 2922676 - RNA, 19 nt, Artificial Sequence
  Description of Artificial Sequence: Synthetic oligonucleotide
cuguggaggacagacuucu

SEQ ID NO: 2922677 - RNA, 19 nt, Artificial Sequence
  Description of Artificial Sequence: Synthetic oligonucleotide
aucaagccuucaaaugauu

SEQ ID NO: 2922678 - RNA, 19 nt, Artificial Sequence
  Description of Artificial Sequence: Synthetic oligonucleotide
gcauuacuaguaacuuuac

SEQ ID NO: 2922679 - RNA, 19 nt, Artificial Sequence
  Description of Artificial Sequence: Synthetic oligonucleotide
agguaaccagaugcacugu

SEQ ID NO: 2922680 - RNA, 19 nt, Artificial Sequence
  Description of Artificial Sequence: Synthetic oligonucleotide
ccuagagauacugggaaaa

SEQ ID NO: 2922681 - RNA, 19 nt, Artificial Sequence
  Description of Artificial Sequence: Synthetic oligonucleotide
ccagaugcacuguggagga

SEQ ID NO: 2922682 - RNA, 19 nt, Artificial Sequence
  Description of Artificial Sequence: Synthetic oligonucleotide
uuggaggccuugaguuguu

SEQ ID NO: 2922683 - RNA, 19 nt, Artificial Sequence
  Description of Artificial Sequence: Synthetic oligonucleotide
agcuggcaggcagacaaua

SEQ ID NO: 2922684 - RNA, 19 nt, Artificial Sequence
  Description of Artificial Sequence: Synthetic oligonucleotide
agaagcuggcaggcagaca

SEQ ID NO: 2922685 - RNA, 19 nt, Artificial Sequence
  Description of Artificial Sequence: Synthetic oligonucleotide
cagcaacuugagguaacca

SEQ ID NO: 2922686 - RNA, 19 nt, Artificial Sequence
  Description of Artificial Sequence: Synthetic oligonucleotide
cuugauacuuggaggccuu

SEQ ID NO: 2922687 - RNA, 19 nt, Artificial Sequence
  Description of Artificial Sequence: Synthetic oligonucleotide
gcuggcaggcagacaauac

SEQ ID NO: 2922688 - RNA, 19 nt, Artificial Sequence
  Description of Artificial Sequence: Synthetic oligonucleotide
acaacccucucaacuccaa

SEQ ID NO: 2922689 - RNA, 19 nt, Artificial Sequence
  Description of Artificial Sequence: Synthetic oligonucleotide
ccccugugagcuuucauaa

SEQ ID NO: 2922690 - RNA, 19 nt, Artificial Sequence
  Description of Artificial Sequence: Synthetic oligonucleotide
caacccucucaacuccaaa

SEQ ID NO: 2922691 - RNA, 19 nt, Artificial Sequence
  Description of Artificial Sequence: Synthetic oligonucleotide
aagcuggcaggcagacaau

SEQ ID NO: 2922692 - RNA, 19 nt, Artificial Sequence
  Description of Artificial Sequence: Synthetic oligonucleotide
gccuagagauacugggaaa

SEQ ID NO: 2922693 - RNA, 19 nt, Artificial Sequence
  Description of Artificial Sequence: Synthetic oligonucleotide
cagaugcacuguggaggac

SEQ ID NO: 2922694 - RNA, 19 nt, Artificial Sequence
  Description of Artificial Sequence: Synthetic oligonucleotide
uggaggccuugaguuguuu

SEQ ID NO: 2922695 - RNA, 19 nt, Artificial Sequence
  Description of Artificial Sequence: Synthetic oligonucleotide
gcacuacuuaguaaagcau

SEQ ID NO: 2922696 - RNA, 19 nt, Artificial Sequence
  Description of Artificial Sequence: Synthetic oligonucleotide
  modified_base (5)..(5): a, c, u, g, unknown or other
caaanaccccugugagcuu

SEQ ID NO: 2922697 - RNA, 19 nt, Artificial Sequence
  Description of Artificial Sequence: Synthetic oligonucleotide
ggcaggcagacaauacauu

SEQ ID NO: 2922698 - RNA, 19 nt, Artificial Sequence
  Description of Artificial Sequence: Synthetic oligonucleotide
gcacuguggaggacagacu

SEQ ID NO: 2922699 - RNA, 19 nt, Artificial Sequence
  Description of Artificial Sequence: Synthetic oligonucleotide
cccugugagcuuucauaau

SEQ ID NO: 2922700 - RNA, 19 nt, Artificial Sequence
  Description of Artificial Sequence: Synthetic oligonucleotide
  modified_base (1)..(1): a, c, u, g, unknown or other
naccccugugagcuuucau

SEQ ID NO: 2922701 - RNA, 19 nt, Artificial Sequence
  Description of Artificial Sequence: Synthetic oligonucleotide
uauuucaucagauaaaugg

SEQ ID NO: 2922702 - RNA, 19 nt, Artificial Sequence
  Description of Artificial Sequence: Synthetic oligonucleotide
aagauauugagauaacaag

SEQ ID NO: 2922703 - RNA, 19 nt, Artificial Sequence
  Description of Artificial Sequence: Synthetic oligonucleotide
aguaucaggacuuccagcc

SEQ ID NO: 2922704 - RNA, 19 nt, Artificial Sequence
  Description of Artificial Sequence: Synthetic oligonucleotide
cacaaaaucuucuucaucg

SEQ ID NO: 2922705 - RNA, 19 nt, Artificial Sequence
  Description of Artificial Sequence: Synthetic oligonucleotide
uagucauucacuaacacug

SEQ ID NO: 2922706 - RNA, 19 nt, Artificial Sequence
  Description of Artificial Sequence: Synthetic oligonucleotide
auaacaaggcuucacaggg

SEQ ID NO: 2922707 - RNA, 19 nt, Artificial Sequence
  Description of Artificial Sequence: Synthetic oligonucleotide
ugaaucagcaguaguaagg

SEQ ID NO: 2922708 - RNA, 19 nt, Artificial Sequence
  Description of Artificial Sequence: Synthetic oligonucleotide
aggacuuccagccagagag

SEQ ID NO: 2922709 - RNA, 19 nt, Artificial Sequence
  Description of Artificial Sequence: Synthetic oligonucleotide
ucugccucugaauagacgg

SEQ ID NO: 2922710 - RNA, 19 nt, Artificial Sequence
  Description of Artificial Sequence: Synthetic oligonucleotide
uagacggucaguuugagug

SEQ ID NO: 2922711 - RNA, 19 nt, Artificial Sequence
  Description of Artificial Sequence: Synthetic oligonucleotide
ugaauagacggucaguuug

SEQ ID NO: 2922712 - RNA, 19 nt, Artificial Sequence
  Description of Artificial Sequence: Synthetic oligonucleotide
uggagauucaguaucagga

SEQ ID NO: 2922713 - RNA, 19 nt, Artificial Sequence
  Description of Artificial Sequence: Synthetic oligonucleotide
guaucugagaauuccagcg

SEQ ID NO: 2922714 - RNA, 19 nt, Artificial Sequence
  Description of Artificial Sequence: Synthetic oligonucleotide
aggguaauggcauaggguc

SEQ ID NO: 2922715 - RNA, 19 nt, Artificial Sequence
  Description of Artificial Sequence: Synthetic oligonucleotide
gauaacaaggcuucacagg

SEQ ID NO: 2922716 - RNA, 19 nt, Artificial Sequence
  Description of Artificial Sequence: Synthetic oligonucleotide
aaaaucuucuucaucggac

SEQ ID NO: 2922717 - RNA, 19 nt, Artificial Sequence
  Description of Artificial Sequence: Synthetic oligonucleotide
uauguuuccagacucugcc

SEQ ID NO: 2922718 - RNA, 19 nt, Artificial Sequence
  Description of Artificial Sequence: Synthetic oligonucleotide
agauauugagauaacaagg

SEQ ID NO: 2922719 - RNA, 19 nt, Artificial Sequence
  Description of Artificial Sequence: Synthetic oligonucleotide
aguaucugagaauuccagc

SEQ ID NO: 2922720 - RNA, 19 nt, Artificial Sequence
  Description of Artificial Sequence: Synthetic oligonucleotide
gauauugagauaacaaggc

SEQ ID NO: 2922721 - RNA, 19 nt, Artificial Sequence
  Description of Artificial Sequence: Synthetic oligonucleotide
ucaacuuucacaaaaucuu

SEQ ID NO: 2922722 - RNA, 19 nt, Artificial Sequence
  Description of Artificial Sequence: Synthetic oligonucleotide
uuucacuugcaguuaaggg

SEQ ID NO: 2922723 - RNA, 19 nt, Artificial Sequence
  Description of Artificial Sequence: Synthetic oligonucleotide
uaaagguuguccauuuucc

SEQ ID NO: 2922724 - RNA, 19 nt, Artificial Sequence
  Description of Artificial Sequence: Synthetic oligonucleotide
uucacuugcaguuaagggu

SEQ ID NO: 2922725 - RNA, 19 nt, Artificial Sequence
  Description of Artificial Sequence: Synthetic oligonucleotide
uguccauuuuccaagauau

SEQ ID NO: 2922726 - RNA, 19 nt, Artificial Sequence
  Description of Artificial Sequence: Synthetic oligonucleotide
uaaggguaauggcauaggg

SEQ ID NO: 2922727 - RNA, 19 nt, Artificial Sequence
  Description of Artificial Sequence: Synthetic oligonucleotide
aacaaggcuucacagggag

SEQ ID NO: 2922728 - RNA, 19 nt, Artificial Sequence
  Description of Artificial Sequence: Synthetic oligonucleotide
gauuucacuuccuugacuc

SEQ ID NO: 2922729 - RNA, 19 nt, Artificial Sequence
  Description of Artificial Sequence: Synthetic oligonucleotide
uuucacauauuucaucaga

SEQ ID NO: 2922730 - RNA, 19 nt, Artificial Sequence
  Description of Artificial Sequence: Synthetic oligonucleotide
uccauuuuccaagauauug

SEQ ID NO: 2922731 - RNA, 19 nt, Artificial Sequence
  Description of Artificial Sequence: Synthetic oligonucleotide
uuaaagguuguccauuuuc

SEQ ID NO: 2922732 - RNA, 19 nt, Artificial Sequence
  Description of Artificial Sequence: Synthetic oligonucleotide
aauucuucagucugcauuu

SEQ ID NO: 2922733 - RNA, 19 nt, Artificial Sequence
  Description of Artificial Sequence: Synthetic oligonucleotide
auugagauaacaaggcuuc

SEQ ID NO: 2922734 - RNA, 19 nt, Artificial Sequence
  Description of Artificial Sequence: Synthetic oligonucleotide
aaaucuucuucaucggacu

SEQ ID NO: 2922735 - RNA, 19 nt, Artificial Sequence
  Description of Artificial Sequence: Synthetic oligonucleotide
ucauucacuaacacuggag

SEQ ID NO: 2922736 - RNA, 19 nt, Artificial Sequence
  Description of Artificial Sequence: Synthetic oligonucleotide
gaaucagcaguaguaaggg

SEQ ID NO: 2922737 - RNA, 19 nt, Artificial Sequence
  Description of Artificial Sequence: Synthetic oligonucleotide
uauugagauaacaaggcuu

SEQ ID NO: 2922738 - RNA, 19 nt, Artificial Sequence
  Description of Artificial Sequence: Synthetic oligonucleotide
acuuuugacuuauguuucc

SEQ ID NO: 2922739 - RNA, 19 nt, Artificial Sequence
  Description of Artificial Sequence: Synthetic oligonucleotide
aauuccagcguaauucuuc

SEQ ID NO: 2922740 - RNA, 19 nt, Artificial Sequence
  Description of Artificial Sequence: Synthetic oligonucleotide
cucauagucauucacuaac

SEQ ID NO: 2922741 - RNA, 19 nt, Artificial Sequence
  Description of Artificial Sequence: Synthetic oligonucleotide
uuuagaugaaucagcagua

SEQ ID NO: 2922742 - RNA, 19 nt, Artificial Sequence
  Description of Artificial Sequence: Synthetic oligonucleotide
agauaacaaggcuucacag

SEQ ID NO: 2922743 - RNA, 19 nt, Artificial Sequence
  Description of Artificial Sequence: Synthetic oligonucleotide
aguaagggaguccuucugg

SEQ ID NO: 2922744 - RNA, 19 nt, Artificial Sequence
  Description of Artificial Sequence: Synthetic oligonucleotide
acacuggagauucaguauc

SEQ ID NO: 2922745 - RNA, 19 nt, Artificial Sequence
  Description of Artificial Sequence: Synthetic oligonucleotide
uuuucuguucuucuucuac

SEQ ID NO: 2922746 - RNA, 19 nt, Artificial Sequence
  Description of Artificial Sequence: Synthetic oligonucleotide
uucaguaucugagaauucc

SEQ ID NO: 2922747 - RNA, 19 nt, Artificial Sequence
  Description of Artificial Sequence: Synthetic oligonucleotide
auggcauagggucaggcuc

SEQ ID NO: 2922748 - RNA, 19 nt, Artificial Sequence
  Description of Artificial Sequence: Synthetic oligonucleotide
uuugacuuauguuuccaga

SEQ ID NO: 2922749 - RNA, 19 nt, Artificial Sequence
  Description of Artificial Sequence: Synthetic oligonucleotide
gagaauuccagcguaauuc

SEQ ID NO: 2922750 - RNA, 19 nt, Artificial Sequence
  Description of Artificial Sequence: Synthetic oligonucleotide
uugcaguuaaggguaaugg

SEQ ID NO: 2922751 - RNA, 19 nt, Artificial Sequence
  Description of Artificial Sequence: Synthetic oligonucleotide
uucaguaucaggacuucca

SEQ ID NO: 2922752 - RNA, 19 nt, Artificial Sequence
  Description of Artificial Sequence: Synthetic oligonucleotide
uugacuuauguuuccagac

SEQ ID NO: 2922753 - RNA, 19 nt, Artificial Sequence
  Description of Artificial Sequence: Synthetic oligonucleotide
uggguagugcuacuuaaag

SEQ ID NO: 2922754 - RNA, 19 nt, Artificial Sequence
  Description of Artificial Sequence: Synthetic oligonucleotide
ucaguaucaggacuuccag

SEQ ID NO: 2922755 - RNA, 19 nt, Artificial Sequence
  Description of Artificial Sequence: Synthetic oligonucleotide
acaaaaucuucuucaucgg

SEQ ID NO: 2922756 - RNA, 19 nt, Artificial Sequence
  Description of Artificial Sequence: Synthetic oligonucleotide
uagugcuacuuaaagguug

SEQ ID NO: 2922757 - RNA, 19 nt, Artificial Sequence
  Description of Artificial Sequence: Synthetic oligonucleotide
cauuucacauauuucauca

SEQ ID NO: 2922758 - RNA, 19 nt, Artificial Sequence
  Description of Artificial Sequence: Synthetic oligonucleotide
acuacaguuucacuugcag

SEQ ID NO: 2922759 - RNA, 19 nt, Artificial Sequence
  Description of Artificial Sequence: Synthetic oligonucleotide
auagucauucacuaacacu

SEQ ID NO: 2922760 - RNA, 19 nt, Artificial Sequence
  Description of Artificial Sequence: Synthetic oligonucleotide
uaucaggacuuccagccag

SEQ ID NO: 2922761 - RNA, 19 nt, Artificial Sequence
  Description of Artificial Sequence: Synthetic oligonucleotide
uucacauauuucaucagau

SEQ ID NO: 2922762 - RNA, 19 nt, Artificial Sequence
  Description of Artificial Sequence: Synthetic oligonucleotide
uuuugacuuauguuuccag

SEQ ID NO: 2922763 - RNA, 19 nt, Artificial Sequence
  Description of Artificial Sequence: Synthetic oligonucleotide
uuccaagauauugagauaa

SEQ ID NO: 2922764 - RNA, 19 nt, Artificial Sequence
  Description of Artificial Sequence: Synthetic oligonucleotide
aauggcauagggucaggcu

SEQ ID NO: 2922765 - RNA, 19 nt, Artificial Sequence
  Description of Artificial Sequence: Synthetic oligonucleotide
ucuucaucggacuuuugac

SEQ ID NO: 2922766 - RNA, 19 nt, Artificial Sequence
  Description of Artificial Sequence: Synthetic oligonucleotide
aaagguuguccauuuucca

SEQ ID NO: 2922767 - RNA, 19 nt, Artificial Sequence
  Description of Artificial Sequence: Synthetic oligonucleotide
ucauagucauucacuaaca

SEQ ID NO: 2922768 - RNA, 19 nt, Artificial Sequence
  Description of Artificial Sequence: Synthetic oligonucleotide
agcguaauucuucagucug

SEQ ID NO: 2922769 - RNA, 19 nt, Artificial Sequence
  Description of Artificial Sequence: Synthetic oligonucleotide
ugcaguuaaggguaauggc

SEQ ID NO: 2922770 - RNA, 19 nt, Artificial Sequence
  Description of Artificial Sequence: Synthetic oligonucleotide
uuagcucugccucugaaua

SEQ ID NO: 2922771 - RNA, 19 nt, Artificial Sequence
  Description of Artificial Sequence: Synthetic oligonucleotide
auauugagauaacaaggcu

SEQ ID NO: 2922772 - RNA, 19 nt, Artificial Sequence
  Description of Artificial Sequence: Synthetic oligonucleotide
cugcauuucacauauuuca

SEQ ID NO: 2922773 - RNA, 19 nt, Artificial Sequence
  Description of Artificial Sequence: Synthetic oligonucleotide
ucaguaucugagaauucca

SEQ ID NO: 2922774 - RNA, 19 nt, Artificial Sequence
  Description of Artificial Sequence: Synthetic oligonucleotide
uuauguuuccagacucugc

SEQ ID NO: 2922775 - RNA, 19 nt, Artificial Sequence
  Description of Artificial Sequence: Synthetic oligonucleotide
ucacuugcaguuaagggua

SEQ ID NO: 2922776 - RNA, 19 nt, Artificial Sequence
  Description of Artificial Sequence: Synthetic oligonucleotide
agguuguccauuuuccaag

SEQ ID NO: 2922777 - RNA, 19 nt, Artificial Sequence
  Description of Artificial Sequence: Synthetic oligonucleotide
ucuuuagaugaaucagcag

SEQ ID NO: 2922778 - RNA, 19 nt, Artificial Sequence
  Description of Artificial Sequence: Synthetic oligonucleotide
uucuuucaguaucugagaa

SEQ ID NO: 2922779 - RNA, 19 nt, Artificial Sequence
  Description of Artificial Sequence: Synthetic oligonucleotide
uuugaguggcaaauccuca

SEQ ID NO: 2922780 - RNA, 19 nt, Artificial Sequence
  Description of Artificial Sequence: Synthetic oligonucleotide
uuucaucagauaaaugguu

SEQ ID NO: 2922781 - RNA, 19 nt, Artificial Sequence
  Description of Artificial Sequence: Synthetic oligonucleotide
caagauauugagauaacaa

SEQ ID NO: 2922782 - RNA, 19 nt, Artificial Sequence
  Description of Artificial Sequence: Synthetic oligonucleotide
uucaucagauaaaugguuu

SEQ ID NO: 2922783 - RNA, 19 nt, Artificial Sequence
  Description of Artificial Sequence: Synthetic oligonucleotide
gacuuauguuuccagacuc

SEQ ID NO: 2922784 - RNA, 19 nt, Artificial Sequence
  Description of Artificial Sequence: Synthetic oligonucleotide
ucuaccauuuucuuccuua

SEQ ID NO: 2922785 - RNA, 19 nt, Artificial Sequence
  Description of Artificial Sequence: Synthetic oligonucleotide
uccagcguaauucuucagu

SEQ ID NO: 2922786 - RNA, 19 nt, Artificial Sequence
  Description of Artificial Sequence: Synthetic oligonucleotide
ugacuuauguuuccagacu

SEQ ID NO: 2922787 - RNA, 19 nt, Artificial Sequence
  Description of Artificial Sequence: Synthetic oligonucleotide
aagguuguccauuuuccaa

SEQ ID NO: 2922788 - RNA, 19 nt, Artificial Sequence
  Description of Artificial Sequence: Synthetic oligonucleotide
ucuucagucugcauuucac

SEQ ID NO: 2922789 - RNA, 19 nt, Artificial Sequence
  Description of Artificial Sequence: Synthetic oligonucleotide
cacauauuucaucagauaa

SEQ ID NO: 2922790 - RNA, 19 nt, Artificial Sequence
  Description of Artificial Sequence: Synthetic oligonucleotide
uaacacuggagauucagua

SEQ ID NO: 2922791 - RNA, 19 nt, Artificial Sequence
  Description of Artificial Sequence: Synthetic oligonucleotide
agaauuccagcguaauucu

SEQ ID NO: 2922792 - RNA, 19 nt, Artificial Sequence
  Description of Artificial Sequence: Synthetic oligonucleotide
cuuccuugacucuaggcac

SEQ ID NO: 2922793 - RNA, 19 nt, Artificial Sequence
  Description of Artificial Sequence: Synthetic oligonucleotide
ugcuacuuaaagguugucc

SEQ ID NO: 2922794 - RNA, 19 nt, Artificial Sequence
  Description of Artificial Sequence: Synthetic oligonucleotide
gagauaacaaggcuucaca

SEQ ID NO: 2922795 - RNA, 19 nt, Artificial Sequence
  Description of Artificial Sequence: Synthetic oligonucleotide
guaagggaguccuucuggg

SEQ ID NO: 2922796 - RNA, 19 nt, Artificial Sequence
  Description of Artificial Sequence: Synthetic oligonucleotide
augaaucagcaguaguaag

SEQ ID NO: 2922797 - RNA, 19 nt, Artificial Sequence
  Description of Artificial Sequence: Synthetic oligonucleotide
ucagcaguaguaagggagu

SEQ ID NO: 2922798 - RNA, 19 nt, Artificial Sequence
  Description of Artificial Sequence: Synthetic oligonucleotide
ucggacuuuugacuuaugu

SEQ ID NO: 2922799 - RNA, 19 nt, Artificial Sequence
  Description of Artificial Sequence: Synthetic oligonucleotide
guuucacuugcaguuaagg

SEQ ID NO: 2922800 - RNA, 19 nt, Artificial Sequence
  Description of Artificial Sequence: Synthetic oligonucleotide
uuaaggguaauggcauagg

SEQ ID NO: 2922801 - RNA, 19 nt, Artificial Sequence
  Description of Artificial Sequence: Synthetic oligonucleotide
uaucugagaauuccagcgu

SEQ ID NO: 2922802 - RNA, 19 nt, Artificial Sequence
  Description of Artificial Sequence: Synthetic oligonucleotide
uggcaaauccucaacuuuc

SEQ ID NO: 2922803 - RNA, 19 nt, Artificial Sequence
  Description of Artificial Sequence: Synthetic oligonucleotide
uagaugaaucagcaguagu

SEQ ID NO: 2922804 - RNA, 19 nt, Artificial Sequence
  Description of Artificial Sequence: Synthetic oligonucleotide
uucacuuccuugacucuag

SEQ ID NO: 2922805 - RNA, 19 nt, Artificial Sequence
  Description of Artificial Sequence: Synthetic oligonucleotide
caguuugaguggcaaaucc

SEQ ID NO: 2922806 - RNA, 19 nt, Artificial Sequence
  Description of Artificial Sequence: Synthetic oligonucleotide
auuucaucagauaaauggu

SEQ ID NO: 2922807 - RNA, 19 nt, Artificial Sequence
  Description of Artificial Sequence: Synthetic oligonucleotide
uuagaugaaucagcaguag

SEQ ID NO: 2922808 - RNA, 19 nt, Artificial Sequence
  Description of Artificial Sequence: Synthetic oligonucleotide
agcagauuucacuuccuug

SEQ ID NO: 2922809 - RNA, 19 nt, Artificial Sequence
  Description of Artificial Sequence: Synthetic oligonucleotide
uguucuucuucuaccauuu

SEQ ID NO: 2922810 - RNA, 19 nt, Artificial Sequence
  Description of Artificial Sequence: Synthetic oligonucleotide
cugagcagauuucacuucc

SEQ ID NO: 2922811 - RNA, 19 nt, Artificial Sequence
  Description of Artificial Sequence: Synthetic oligonucleotide
uguuuccagacucugccuc

SEQ ID NO: 2922812 - RNA, 19 nt, Artificial Sequence
  Description of Artificial Sequence: Synthetic oligonucleotide
acuaacacuggagauucag

SEQ ID NO: 2922813 - RNA, 19 nt, Artificial Sequence
  Description of Artificial Sequence: Synthetic oligonucleotide
ucacuaacacuggagauuc

SEQ ID NO: 2922814 - RNA, 19 nt, Artificial Sequence
  Description of Artificial Sequence: Synthetic oligonucleotide
ucugaauagacggucaguu

SEQ ID NO: 2922815 - RNA, 19 nt, Artificial Sequence
  Description of Artificial Sequence: Synthetic oligonucleotide
guuaaggguaauggcauag

SEQ ID NO: 2922816 - RNA, 19 nt, Artificial Sequence
  Description of Artificial Sequence: Synthetic oligonucleotide
uucagucugcauuucacau

SEQ ID NO: 2922817 - RNA, 19 nt, Artificial Sequence
  Description of Artificial Sequence: Synthetic oligonucleotide
caaggcuucacagggagag

SEQ ID NO: 2922818 - RNA, 19 nt, Artificial Sequence
  Description of Artificial Sequence: Synthetic oligonucleotide
caguaucugagaauuccag

SEQ ID NO: 2922819 - RNA, 19 nt, Artificial Sequence
  Description of Artificial Sequence: Synthetic oligonucleotide
ugccucauagucauucacu

SEQ ID NO: 2922820 - RNA, 19 nt, Artificial Sequence
  Description of Artificial Sequence: Synthetic oligonucleotide
aggcuucacagggagaggc

SEQ ID NO: 2922821 - RNA, 19 nt, Artificial Sequence
  Description of Artificial Sequence: Synthetic oligonucleotide
uucaucggacuuuugacuu

SEQ ID NO: 2922822 - RNA, 19 nt, Artificial Sequence
  Description of Artificial Sequence: Synthetic oligonucleotide
ucacaaaaucuucuucauc

SEQ ID NO: 2922823 - RNA, 19 nt, Artificial Sequence
  Description of Artificial Sequence: Synthetic oligonucleotide
cucuuuagaugaaucagca

SEQ ID NO: 2922824 - RNA, 19 nt, Artificial Sequence
  Description of Artificial Sequence: Synthetic oligonucleotide
caacuuucacaaaaucuuc

SEQ ID NO: 2922825 - RNA, 19 nt, Artificial Sequence
  Description of Artificial Sequence: Synthetic oligonucleotide
uucacaaaaucuucuucau

SEQ ID NO: 2922826 - RNA, 19 nt, Artificial Sequence
  Description of Artificial Sequence: Synthetic oligonucleotide
cauucacuaacacuggaga

SEQ ID NO: 2922827 - RNA, 19 nt, Artificial Sequence
  Description of Artificial Sequence: Synthetic oligonucleotide
gguagugcuacuuaaaggu

SEQ ID NO: 2922828 - RNA, 19 nt, Artificial Sequence
  Description of Artificial Sequence: Synthetic oligonucleotide
cauagucauucacuaacac

SEQ ID NO: 2922829 - RNA, 19 nt, Artificial Sequence
  Description of Artificial Sequence: Synthetic oligonucleotide
auucaguaucaggacuucc

SEQ ID NO: 2922830 - RNA, 19 nt, Artificial Sequence
  Description of Artificial Sequence: Synthetic oligonucleotide
aguccuucuggguagugcu

SEQ ID NO: 2922831 - RNA, 19 nt, Artificial Sequence
  Description of Artificial Sequence: Synthetic oligonucleotide
uuguccauuuuccaagaua

SEQ ID NO: 2922832 - RNA, 19 nt, Artificial Sequence
  Description of Artificial Sequence: Synthetic oligonucleotide
agcaguaguaagggagucc

SEQ ID NO: 2922833 - RNA, 19 nt, Artificial Sequence
  Description of Artificial Sequence: Synthetic oligonucleotide
cuaccauuuucuuccuuag

SEQ ID NO: 2922834 - RNA, 19 nt, Artificial Sequence
  Description of Artificial Sequence: Synthetic oligonucleotide
auagggucaggcucuuuag

SEQ ID NO: 2922835 - RNA, 19 nt, Artificial Sequence
  Description of Artificial Sequence: Synthetic oligonucleotide
aaucagcaguaguaaggga

SEQ ID NO: 2922836 - RNA, 19 nt, Artificial Sequence
  Description of Artificial Sequence: Synthetic oligonucleotide
aaggguaauggcauagggu

SEQ ID NO: 2922837 - RNA, 19 nt, Artificial Sequence
  Description of Artificial Sequence: Synthetic oligonucleotide
ugaguggcaaauccucaac

SEQ ID NO: 2922838 - RNA, 19 nt, Artificial Sequence
  Description of Artificial Sequence: Synthetic oligonucleotide
caaauccucaacuuucaca

SEQ ID NO: 2922839 - RNA, 19 nt, Artificial Sequence
  Description of Artificial Sequence: Synthetic oligonucleotide
agacggucaguuugagugg

SEQ ID NO: 2922840 - RNA, 19 nt, Artificial Sequence
  Description of Artificial Sequence: Synthetic oligonucleotide
ugagauaacaaggcuucac

SEQ ID NO: 2922841 - RNA, 19 nt, Artificial Sequence
  Description of Artificial Sequence: Synthetic oligonucleotide
auucacuaacacuggagau

SEQ ID NO: 2922842 - RNA, 19 nt, Artificial Sequence
  Description of Artificial Sequence: Synthetic oligonucleotide
auuccagcguaauucuuca

SEQ ID NO: 2922843 - RNA, 19 nt, Artificial Sequence
  Description of Artificial Sequence: Synthetic oligonucleotide
gcuacuuaaagguugucca

SEQ ID NO: 2922844 - RNA, 19 nt, Artificial Sequence
  Description of Artificial Sequence: Synthetic oligonucleotide
gaugaaucagcaguaguaa

SEQ ID NO: 2922845 - RNA, 19 nt, Artificial Sequence
  Description of Artificial Sequence: Synthetic oligonucleotide
uaguaagggaguccuucug

SEQ ID NO: 2922846 - RNA, 19 nt, Artificial Sequence
  Description of Artificial Sequence: Synthetic oligonucleotide
ucaucagauaaaugguuuu

SEQ ID NO: 2922847 - RNA, 19 nt, Artificial Sequence
  Description of Artificial Sequence: Synthetic oligonucleotide
uucuucagucugcauuuca

SEQ ID NO: 2922848 - RNA, 19 nt, Artificial Sequence
  Description of Artificial Sequence: Synthetic oligonucleotide
ucuggguagugcuacuuaa

SEQ ID NO: 2922849 - RNA, 19 nt, Artificial Sequence
  Description of Artificial Sequence: Synthetic oligonucleotide
aauagacggucaguuugag

SEQ ID NO: 2922850 - RNA, 19 nt, Artificial Sequence
  Description of Artificial Sequence: Synthetic oligonucleotide
ucuuucaguaucugagaau

SEQ ID NO: 2922851 - RNA, 19 nt, Artificial Sequence
  Description of Artificial Sequence: Synthetic oligonucleotide
ggguagugcuacuuaaagg

SEQ ID NO: 2922852 - RNA, 19 nt, Artificial Sequence
  Description of Artificial Sequence: Synthetic oligonucleotide
ucugagaauuccagcguaa

SEQ ID NO: 2922853 - RNA, 19 nt, Artificial Sequence
  Description of Artificial Sequence: Synthetic oligonucleotide
cucaacuuucacaaaaucu

SEQ ID NO: 2922854 - RNA, 19 nt, Artificial Sequence
  Description of Artificial Sequence: Synthetic oligonucleotide
ugacucuaggcacuacagu

SEQ ID NO: 2922855 - RNA, 19 nt, Artificial Sequence
  Description of Artificial Sequence: Synthetic oligonucleotide
cagacucugccucauaguc

SEQ ID NO: 2922856 - RNA, 19 nt, Artificial Sequence
  Description of Artificial Sequence: Synthetic oligonucleotide
gacuuuugacuuauguuuc

SEQ ID NO: 2922857 - RNA, 19 nt, Artificial Sequence
  Description of Artificial Sequence: Synthetic oligonucleotide
aggcucuuuagaugaauca

SEQ ID NO: 2922858 - RNA, 19 nt, Artificial Sequence
  Description of Artificial Sequence: Synthetic oligonucleotide
aaucuucuucaucggacuu

SEQ ID NO: 2922859 - RNA, 19 nt, Artificial Sequence
  Description of Artificial Sequence: Synthetic oligonucleotide
agauuucacuuccuugacu

SEQ ID NO: 2922860 - RNA, 19 nt, Artificial Sequence
  Description of Artificial Sequence: Synthetic oligonucleotide
acuuaaagguuguccauuu

SEQ ID NO: 2922861 - RNA, 19 nt, Artificial Sequence
  Description of Artificial Sequence: Synthetic oligonucleotide
uccugagcagauuucacuu

SEQ ID NO: 2922862 - RNA, 19 nt, Artificial Sequence
  Description of Artificial Sequence: Synthetic oligonucleotide
cuuauguuuccagacucug

SEQ ID NO: 2922863 - RNA, 19 nt, Artificial Sequence
  Description of Artificial Sequence: Synthetic oligonucleotide
aggcacuacaguuucacuu

SEQ ID NO: 2922864 - RNA, 19 nt, Artificial Sequence
  Description of Artificial Sequence: Synthetic oligonucleotide
gcagauuucacuuccuuga

SEQ ID NO: 2922865 - RNA, 19 nt, Artificial Sequence
  Description of Artificial Sequence: Synthetic oligonucleotide
uucacuaacacuggagauu

SEQ ID NO: 2922866 - RNA, 19 nt, Artificial Sequence
  Description of Artificial Sequence: Synthetic oligonucleotide
uccaagauauugagauaac

SEQ ID NO: 2922867 - RNA, 19 nt, Artificial Sequence
  Description of Artificial Sequence: Synthetic oligonucleotide
ugagaauuccagcguaauu

SEQ ID NO: 2922868 - RNA, 19 nt, Artificial Sequence
  Description of Artificial Sequence: Synthetic oligonucleotide
caguaucaggacuuccagc

SEQ ID NO: 2922869 - RNA, 19 nt, Artificial Sequence
  Description of Artificial Sequence: Synthetic oligonucleotide
uugaguggcaaauccucaa

SEQ ID NO: 2922870 - RNA, 19 nt, Artificial Sequence
  Description of Artificial Sequence: Synthetic oligonucleotide
ucacuuccuugacucuagg

SEQ ID NO: 2922871 - RNA, 19 nt, Artificial Sequence
  Description of Artificial Sequence: Synthetic oligonucleotide
uggcauagggucaggcucu

SEQ ID NO: 2922872 - RNA, 19 nt, Artificial Sequence
  Description of Artificial Sequence: Synthetic oligonucleotide
agggaguccuucuggguag

SEQ ID NO: 2922873 - RNA, 19 nt, Artificial Sequence
  Description of Artificial Sequence: Synthetic oligonucleotide
ggcacuacaguuucacuug

SEQ ID NO: 2922874 - RNA, 19 nt, Artificial Sequence
  Description of Artificial Sequence: Synthetic oligonucleotide
aguggcaaauccucaacuu

SEQ ID NO: 2922875 - RNA, 19 nt, Artificial Sequence
  Description of Artificial Sequence: Synthetic oligonucleotide
uaacaaggcuucacaggga

SEQ ID NO: 2922876 - RNA, 19 nt, Artificial Sequence
  Description of Artificial Sequence: Synthetic oligonucleotide
guuugaguggcaaauccuc

SEQ ID NO: 2922877 - RNA, 19 nt, Artificial Sequence
  Description of Artificial Sequence: Synthetic oligonucleotide
uuucaguaucugagaauuc

SEQ ID NO: 2922878 - RNA, 19 nt, Artificial Sequence
  Description of Artificial Sequence: Synthetic oligonucleotide
acauauuucaucagauaaa

SEQ ID NO: 2922879 - RNA, 19 nt, Artificial Sequence
  Description of Artificial Sequence: Synthetic oligonucleotide
agucauucacuaacacugg

SEQ ID NO: 2922880 - RNA, 19 nt, Artificial Sequence
  Description of Artificial Sequence: Synthetic oligonucleotide
cuugcaguuaaggguaaug

SEQ ID NO: 2922881 - RNA, 19 nt, Artificial Sequence
  Description of Artificial Sequence: Synthetic oligonucleotide
guucuuucaguaucugaga

SEQ ID NO: 2922882 - RNA, 19 nt, Artificial Sequence
  Description of Artificial Sequence: Synthetic oligonucleotide
uagcucugccucugaauag

SEQ ID NO: 2922883 - RNA, 19 nt, Artificial Sequence
  Description of Artificial Sequence: Synthetic oligonucleotide
cuaggcacuacaguuucac

SEQ ID NO: 2922884 - RNA, 19 nt, Artificial Sequence
  Description of Artificial Sequence: Synthetic oligonucleotide
ucagucugcauuucacaua

SEQ ID NO: 2922885 - RNA, 19 nt, Artificial Sequence
  Description of Artificial Sequence: Synthetic oligonucleotide
agggucaggcucuuuagau

SEQ ID NO: 2922886 - RNA, 19 nt, Artificial Sequence
  Description of Artificial Sequence: Synthetic oligonucleotide
uuuccaagauauugagaua

SEQ ID NO: 2922887 - RNA, 19 nt, Artificial Sequence
  Description of Artificial Sequence: Synthetic oligonucleotide
caaaaucuucuucaucgga

SEQ ID NO: 2922888 - RNA, 19 nt, Artificial Sequence
  Description of Artificial Sequence: Synthetic oligonucleotide
uuucuuccuuagcucugcc

SEQ ID NO: 2922889 - RNA, 19 nt, Artificial Sequence
  Description of Artificial Sequence: Synthetic oligonucleotide
ucuccugagcagauuucac

SEQ ID NO: 2922890 - RNA, 19 nt, Artificial Sequence
  Description of Artificial Sequence: Synthetic oligonucleotide
ucuguucuucuucuaccau

SEQ ID NO: 2922891 - RNA, 19 nt, Artificial Sequence
  Description of Artificial Sequence: Synthetic oligonucleotide
uaauggcauagggucaggc

SEQ ID NO: 2922892 - RNA, 19 nt, Artificial Sequence
  Description of Artificial Sequence: Synthetic oligonucleotide
gagauucaguaucaggacu

SEQ ID NO: 2922893 - RNA, 19 nt, Artificial Sequence
  Description of Artificial Sequence: Synthetic oligonucleotide
ggagauucaguaucaggac

SEQ ID NO: 2922894 - RNA, 19 nt, Artificial Sequence
  Description of Artificial Sequence: Synthetic oligonucleotide
cacuuccuugacucuaggc

SEQ ID NO: 2922895 - RNA, 19 nt, Artificial Sequence
  Description of Artificial Sequence: Synthetic oligonucleotide
ggucaggcucuuuagauga

SEQ ID NO: 2922896 - RNA, 19 nt, Artificial Sequence
  Description of Artificial Sequence: Synthetic oligonucleotide
cucuaggcacuacaguuuc

SEQ ID NO: 2922897 - RNA, 19 nt, Artificial Sequence
  Description of Artificial Sequence: Synthetic oligonucleotide
ucugccucauagucauuca

SEQ ID NO: 2922898 - RNA, 19 nt, Artificial Sequence
  Description of Artificial Sequence: Synthetic oligonucleotide
gaauagacggucaguuuga

SEQ ID NO: 2922899 - RNA, 19 nt, Artificial Sequence
  Description of Artificial Sequence: Synthetic oligonucleotide
ggcucuuuagaugaaucag

SEQ ID NO: 2922900 - RNA, 19 nt, Artificial Sequence
  Description of Artificial Sequence: Synthetic oligonucleotide
auuucacuuccuugacucu

SEQ ID NO: 2922901 - RNA, 19 nt, Artificial Sequence
  Description of Artificial Sequence: Synthetic oligonucleotide
cucugccucugaauagacg

SEQ ID NO: 2922902 - RNA, 19 nt, Artificial Sequence
  Description of Artificial Sequence: Synthetic oligonucleotide
uaagggaguccuucugggu

SEQ ID NO: 2922903 - RNA, 19 nt, Artificial Sequence
  Description of Artificial Sequence: Synthetic oligonucleotide
auauuucaucagauaaaug

SEQ ID NO: 2922904 - RNA, 19 nt, Artificial Sequence
  Description of Artificial Sequence: Synthetic oligonucleotide
gacucuaggcacuacaguu

SEQ ID NO: 2922905 - RNA, 19 nt, Artificial Sequence
  Description of Artificial Sequence: Synthetic oligonucleotide
cacagggagaggcugcuug

SEQ ID NO: 2922906 - RNA, 19 nt, Artificial Sequence
  Description of Artificial Sequence: Synthetic oligonucleotide
aguuugaguggcaaauccu

SEQ ID NO: 2922907 - RNA, 19 nt, Artificial Sequence
  Description of Artificial Sequence: Synthetic oligonucleotide
agggagaggcugcuugauc

SEQ ID NO: 2922908 - RNA, 19 nt, Artificial Sequence
  Description of Artificial Sequence: Synthetic oligonucleotide
aucugagaauuccagcgua

SEQ ID NO: 2922909 - RNA, 19 nt, Artificial Sequence
  Description of Artificial Sequence: Synthetic oligonucleotide
aauccucaacuuucacaaa

SEQ ID NO: 2922910 - RNA, 19 nt, Artificial Sequence
  Description of Artificial Sequence: Synthetic oligonucleotide
ucgggagucuccugagcag

SEQ ID NO: 2922911 - RNA, 19 nt, Artificial Sequence
  Description of Artificial Sequence: Synthetic oligonucleotide
uacuuaaagguuguccauu

SEQ ID NO: 2922912 - RNA, 19 nt, Artificial Sequence
  Description of Artificial Sequence: Synthetic oligonucleotide
caggcucuuuagaugaauc

SEQ ID NO: 2922913 - RNA, 19 nt, Artificial Sequence
  Description of Artificial Sequence: Synthetic oligonucleotide
cagauuucacuuccuugac

SEQ ID NO: 2922914 - RNA, 19 nt, Artificial Sequence
  Description of Artificial Sequence: Synthetic oligonucleotide
ggacuuuugacuuauguuu

SEQ ID NO: 2922915 - RNA, 19 nt, Artificial Sequence
  Description of Artificial Sequence: Synthetic oligonucleotide
agccagagagcucucggga

SEQ ID NO: 2922916 - RNA, 19 nt, Artificial Sequence
  Description of Artificial Sequence: Synthetic oligonucleotide
gguaauggcauagggucag

SEQ ID NO: 2922917 - RNA, 19 nt, Artificial Sequence
  Description of Artificial Sequence: Synthetic oligonucleotide
cuucagucugcauuucaca

SEQ ID NO: 2922918 - RNA, 19 nt, Artificial Sequence
  Description of Artificial Sequence: Synthetic oligonucleotide
aaggcuucacagggagagg

SEQ ID NO: 2922919 - RNA, 19 nt, Artificial Sequence
  Description of Artificial Sequence: Synthetic oligonucleotide
auuuuccaagauauugaga

SEQ ID NO: 2922920 - RNA, 19 nt, Artificial Sequence
  Description of Artificial Sequence: Synthetic oligonucleotide
ucuaggcacuacaguuuca

SEQ ID NO: 2922921 - RNA, 19 nt, Artificial Sequence
  Description of Artificial Sequence: Synthetic oligonucleotide
auagacggucaguuugagu

SEQ ID NO: 2922922 - RNA, 19 nt, Artificial Sequence
  Description of Artificial Sequence: Synthetic oligonucleotide
gcaguuaaggguaauggca

SEQ ID NO: 2922923 - RNA, 19 nt, Artificial Sequence
  Description of Artificial Sequence: Synthetic oligonucleotide
cagccagagagcucucggg

SEQ ID NO: 2922924 - RNA, 19 nt, Artificial Sequence
  Description of Artificial Sequence: Synthetic oligonucleotide
agauucaguaucaggacuu

SEQ ID NO: 2922925 - RNA, 19 nt, Artificial Sequence
  Description of Artificial Sequence: Synthetic oligonucleotide
ucaguuugaguggcaaauc

SEQ ID NO: 2922926 - RNA, 19 nt, Artificial Sequence
  Description of Artificial Sequence: Synthetic oligonucleotide
agugcuacuuaaagguugu

SEQ ID NO: 2922927 - RNA, 19 nt, Artificial Sequence
  Description of Artificial Sequence: Synthetic oligonucleotide
uucuggguagugcuacuua

SEQ ID NO: 2922928 - RNA, 19 nt, Artificial Sequence
  Description of Artificial Sequence: Synthetic oligonucleotide
cauauuucaucagauaaau

SEQ ID NO: 2922929 - RNA, 19 nt, Artificial Sequence
  Description of Artificial Sequence: Synthetic oligonucleotide
gcucuuuagaugaaucagc

SEQ ID NO: 2922930 - RNA, 19 nt, Artificial Sequence
  Description of Artificial Sequence: Synthetic oligonucleotide
gacggucaguuugaguggc

SEQ ID NO: 2922931 - RNA, 19 nt, Artificial Sequence
  Description of Artificial Sequence: Synthetic oligonucleotide
ucucgggagucuccugagc

SEQ ID NO: 2922932 - RNA, 19 nt, Artificial Sequence
  Description of Artificial Sequence: Synthetic oligonucleotide
auguuuccagacucugccu

SEQ ID NO: 2922933 - RNA, 19 nt, Artificial Sequence
  Description of Artificial Sequence: Synthetic oligonucleotide
auuuucuuccuuagcucug

SEQ ID NO: 2922934 - RNA, 19 nt, Artificial Sequence
  Description of Artificial Sequence: Synthetic oligonucleotide
uccuucuggguagugcuac

SEQ ID NO: 2922935 - RNA, 19 nt, Artificial Sequence
  Description of Artificial Sequence: Synthetic oligonucleotide
gucauucacuaacacugga

SEQ ID NO: 2922936 - RNA, 19 nt, Artificial Sequence
  Description of Artificial Sequence: Synthetic oligonucleotide
cucugccucauagucauuc

SEQ ID NO: 2922937 - RNA, 19 nt, Artificial Sequence
  Description of Artificial Sequence: Synthetic oligonucleotide
agagcucucgggagucucc

SEQ ID NO: 2922938 - RNA, 19 nt, Artificial Sequence
  Description of Artificial Sequence: Synthetic oligonucleotide
acuuauguuuccagacucu

SEQ ID NO: 2922939 - RNA, 19 nt, Artificial Sequence
  Description of Artificial Sequence: Synthetic oligonucleotide
gacucugccucauagucau

SEQ ID NO: 2922940 - RNA, 19 nt, Artificial Sequence
  Description of Artificial Sequence: Synthetic oligonucleotide
gauucaguaucaggacuuc

SEQ ID NO: 2922941 - RNA, 19 nt, Artificial Sequence
  Description of Artificial Sequence: Synthetic oligonucleotide
uugagauaacaaggcuuca

SEQ ID NO: 2922942 - RNA, 19 nt, Artificial Sequence
  Description of Artificial Sequence: Synthetic oligonucleotide
uuccagcguaauucuucag

SEQ ID NO: 2922943 - RNA, 19 nt, Artificial Sequence
  Description of Artificial Sequence: Synthetic oligonucleotide
gcauuucacauauuucauc

SEQ ID NO: 2922944 - RNA, 19 nt, Artificial Sequence
  Description of Artificial Sequence: Synthetic oligonucleotide
cuuucaguaucugagaauu

SEQ ID NO: 2922945 - RNA, 19 nt, Artificial Sequence
  Description of Artificial Sequence: Synthetic oligonucleotide
acagggagaggcugcuuga

SEQ ID NO: 2922946 - RNA, 19 nt, Artificial Sequence
  Description of Artificial Sequence: Synthetic oligonucleotide
aguuaaggguaauggcaua

SEQ ID NO: 2922947 - RNA, 19 nt, Artificial Sequence
  Description of Artificial Sequence: Synthetic oligonucleotide
cugccucauagucauucac

SEQ ID NO: 2922948 - RNA, 19 nt, Artificial Sequence
  Description of Artificial Sequence: Synthetic oligonucleotide
ccauuuuccaagauauuga

SEQ ID NO: 2922949 - RNA, 19 nt, Artificial Sequence
  Description of Artificial Sequence: Synthetic oligonucleotide
gaguggcaaauccucaacu

SEQ ID NO: 2922950 - RNA, 19 nt, Artificial Sequence
  Description of Artificial Sequence: Synthetic oligonucleotide
cuucaucggacuuuugacu

SEQ ID NO: 2922951 - RNA, 19 nt, Artificial Sequence
  Description of Artificial Sequence: Synthetic oligonucleotide
guuuccagacucugccuca

SEQ ID NO: 2922952 - RNA, 19 nt, Artificial Sequence
  Description of Artificial Sequence: Synthetic oligonucleotide
auucuucagucugcauuuc

SEQ ID NO: 2922953 - RNA, 19 nt, Artificial Sequence
  Description of Artificial Sequence: Synthetic oligonucleotide
ccagcguaauucuucaguc

SEQ ID NO: 2922954 - RNA, 19 nt, Artificial Sequence
  Description of Artificial Sequence: Synthetic oligonucleotide
cucgggagucuccugagca

SEQ ID NO: 2922955 - RNA, 19 nt, Artificial Sequence
  Description of Artificial Sequence: Synthetic oligonucleotide
uccagccagagagcucucg

SEQ ID NO: 2922956 - RNA, 19 nt, Artificial Sequence
  Description of Artificial Sequence: Synthetic oligonucleotide
cauagggucaggcucuuua

SEQ ID NO: 2922957 - RNA, 19 nt, Artificial Sequence
  Description of Artificial Sequence: Synthetic oligonucleotide
cuuuugacuuauguuucca

SEQ ID NO: 2922958 - RNA, 19 nt, Artificial Sequence
  Description of Artificial Sequence: Synthetic oligonucleotide
ucaucggacuuuugacuua

SEQ ID NO: 2922959 - RNA, 19 nt, Artificial Sequence
  Description of Artificial Sequence: Synthetic oligonucleotide
aguuucacuugcaguuaag

SEQ ID NO: 2922960 - RNA, 19 nt, Artificial Sequence
  Description of Artificial Sequence: Synthetic oligonucleotide
agcucugccucugaauaga

SEQ ID NO: 2922961 - RNA, 19 nt, Artificial Sequence
  Description of Artificial Sequence: Synthetic oligonucleotide
cacuggagauucaguauca

SEQ ID NO: 2922962 - RNA, 19 nt, Artificial Sequence
  Description of Artificial Sequence: Synthetic oligonucleotide
uuccuuagcucugccucug

SEQ ID NO: 2922963 - RNA, 19 nt, Artificial Sequence
  Description of Artificial Sequence: Synthetic oligonucleotide
ucaggcucuuuagaugaau

SEQ ID NO: 2922964 - RNA, 19 nt, Artificial Sequence
  Description of Artificial Sequence: Synthetic oligonucleotide
uucacagggagaggcugcu

SEQ ID NO: 2922965 - RNA, 19 nt, Artificial Sequence
  Description of Artificial Sequence: Synthetic oligonucleotide
cucucgggagucuccugag

SEQ ID NO: 2922966 - RNA, 19 nt, Artificial Sequence
  Description of Artificial Sequence: Synthetic oligonucleotide
agucuccugagcagauuuc

SEQ ID NO: 2922967 - RNA, 19 nt, Artificial Sequence
  Description of Artificial Sequence: Synthetic oligonucleotide
gggucaggcucuuuagaug

SEQ ID NO: 2922968 - RNA, 19 nt, Artificial Sequence
  Description of Artificial Sequence: Synthetic oligonucleotide
guaguaagggaguccuucu

SEQ ID NO: 2922969 - RNA, 19 nt, Artificial Sequence
  Description of Artificial Sequence: Synthetic oligonucleotide
agacucugccucauaguca

SEQ ID NO: 2922970 - RNA, 19 nt, Artificial Sequence
  Description of Artificial Sequence: Synthetic oligonucleotide
caguuaaggguaauggcau

SEQ ID NO: 2922971 - RNA, 19 nt, Artificial Sequence
  Description of Artificial Sequence: Synthetic oligonucleotide
guaauggcauagggucagg

SEQ ID NO: 2922972 - RNA, 19 nt, Artificial Sequence
  Description of Artificial Sequence: Synthetic oligonucleotide
gucuccugagcagauuuca

SEQ ID NO: 2922973 - RNA, 19 nt, Artificial Sequence
  Description of Artificial Sequence: Synthetic oligonucleotide
cuaacacuggagauucagu

SEQ ID NO: 2922974 - RNA, 19 nt, Artificial Sequence
  Description of Artificial Sequence: Synthetic oligonucleotide
gguuguccauuuuccaaga

SEQ ID NO: 2922975 - RNA, 19 nt, Artificial Sequence
  Description of Artificial Sequence: Synthetic oligonucleotide
aucuucuucaucggacuuu

SEQ ID NO: 2922976 - RNA, 19 nt, Artificial Sequence
  Description of Artificial Sequence: Synthetic oligonucleotide
cuuccagccagagagcucu

SEQ ID NO: 2922977 - RNA, 19 nt, Artificial Sequence
  Description of Artificial Sequence: Synthetic oligonucleotide
gccagagagcucucgggag

SEQ ID NO: 2922978 - RNA, 19 nt, Artificial Sequence
  Description of Artificial Sequence: Synthetic oligonucleotide
gcacuacaguuucacuugc

SEQ ID NO: 2922979 - RNA, 19 nt, Artificial Sequence
  Description of Artificial Sequence: Synthetic oligonucleotide
acaguuucacuugcaguua

SEQ ID NO: 2922980 - RNA, 19 nt, Artificial Sequence
  Description of Artificial Sequence: Synthetic oligonucleotide
acucuaggcacuacaguuu

SEQ ID NO: 2922981 - RNA, 19 nt, Artificial Sequence
  Description of Artificial Sequence: Synthetic oligonucleotide
gucaguuugaguggcaaau

SEQ ID NO: 2922982 - RNA, 19 nt, Artificial Sequence
  Description of Artificial Sequence: Synthetic oligonucleotide
acuuccagccagagagcuc

SEQ ID NO: 2922983 - RNA, 19 nt, Artificial Sequence
  Description of Artificial Sequence: Synthetic oligonucleotide
uuuccagacucugccucau

SEQ ID NO: 2922984 - RNA, 19 nt, Artificial Sequence
  Description of Artificial Sequence: Synthetic oligonucleotide
cuggguagugcuacuuaaa

SEQ ID NO: 2922985 - RNA, 19 nt, Artificial Sequence
  Description of Artificial Sequence: Synthetic oligonucleotide
cuccugagcagauuucacu

SEQ ID NO: 2922986 - RNA, 19 nt, Artificial Sequence
  Description of Artificial Sequence: Synthetic oligonucleotide
ccucugaauagacggucag

SEQ ID NO: 2922987 - RNA, 19 nt, Artificial Sequence
  Description of Artificial Sequence: Synthetic oligonucleotide
gcaaauccucaacuuucac

SEQ ID NO: 2922988 - RNA, 19 nt, Artificial Sequence
  Description of Artificial Sequence: Synthetic oligonucleotide
ccagccagagagcucucgg

SEQ ID NO: 2922989 - RNA, 19 nt, Artificial Sequence
  Description of Artificial Sequence: Synthetic oligonucleotide
cacuacaguuucacuugca

SEQ ID NO: 2922990 - RNA, 19 nt, Artificial Sequence
  Description of Artificial Sequence: Synthetic oligonucleotide
gacuuccagccagagagcu

SEQ ID NO: 2922991 - RNA, 19 nt, Artificial Sequence
  Description of Artificial Sequence: Synthetic oligonucleotide
gccucauagucauucacua

SEQ ID NO: 2922992 - RNA, 19 nt, Artificial Sequence
  Description of Artificial Sequence: Synthetic oligonucleotide
ccaagauauugagauaaca

SEQ ID NO: 2922993 - RNA, 19 nt, Artificial Sequence
  Description of Artificial Sequence: Synthetic oligonucleotide
cuacuuaaagguuguccau

SEQ ID NO: 2922994 - RNA, 19 nt, Artificial Sequence
  Description of Artificial Sequence: Synthetic oligonucleotide
caguuucacuugcaguuaa

SEQ ID NO: 2922995 - RNA, 19 nt, Artificial Sequence
  Description of Artificial Sequence: Synthetic oligonucleotide
ggcaaauccucaacuuuca

SEQ ID NO: 2922996 - RNA, 19 nt, Artificial Sequence
  Description of Artificial Sequence: Synthetic oligonucleotide
gagagcucucgggagucuc

SEQ ID NO: 2922997 - RNA, 19 nt, Artificial Sequence
  Description of Artificial Sequence: Synthetic oligonucleotide
cuuagcucugccucugaau

SEQ ID NO: 2922998 - RNA, 19 nt, Artificial Sequence
  Description of Artificial Sequence: Synthetic oligonucleotide
cagagagcucucgggaguc

SEQ ID NO: 2922999 - RNA, 19 nt, Artificial Sequence
  Description of Artificial Sequence: Synthetic oligonucleotide
gcguaauucuucagucugc

SEQ ID NO: 2923000 - RNA, 19 nt, Artificial Sequence
  Description of Artificial Sequence: Synthetic oligonucleotide
cagcaguaguaagggaguc

SEQ ID NO: 2923001 - RNA, 19 nt, Artificial Sequence
  Description of Artificial Sequence: Synthetic oligonucleotide
cuguucuucuucuaccauu

SEQ ID NO: 2923002 - RNA, 19 nt, Artificial Sequence
  Description of Artificial Sequence: Synthetic oligonucleotide
agcucucgggagucuccug

SEQ ID NO: 2923003 - RNA, 19 nt, Artificial Sequence
  Description of Artificial Sequence: Synthetic oligonucleotide
uccuugacucuaggcacua

SEQ ID NO: 2923004 - RNA, 19 nt, Artificial Sequence
  Description of Artificial Sequence: Synthetic oligonucleotide
aucaggacuuccagccaga

SEQ ID NO: 2923005 - RNA, 19 nt, Artificial Sequence
  Description of Artificial Sequence: Synthetic oligonucleotide
uuccagacucugccucaua

SEQ ID NO: 2923006 - RNA, 19 nt, Artificial Sequence
  Description of Artificial Sequence: Synthetic oligonucleotide
cagcguaauucuucagucu

SEQ ID NO: 2923007 - RNA, 19 nt, Artificial Sequence
  Description of Artificial Sequence: Synthetic oligonucleotide
gagcagauuucacuuccuu

SEQ ID NO: 2923008 - RNA, 19 nt, Artificial Sequence
  Description of Artificial Sequence: Synthetic oligonucleotide
acaaggcuucacagggaga

SEQ ID NO: 2923009 - RNA, 19 nt, Artificial Sequence
  Description of Artificial Sequence: Synthetic oligonucleotide
gcucucgggagucuccuga

SEQ ID NO: 2923010 - RNA, 19 nt, Artificial Sequence
  Description of Artificial Sequence: Synthetic oligonucleotide
acuugcaguuaaggguaau

SEQ ID NO: 2923011 - RNA, 19 nt, Artificial Sequence
  Description of Artificial Sequence: Synthetic oligonucleotide
ggguaauggcauaggguca

SEQ ID NO: 2923012 - RNA, 19 nt, Artificial Sequence
  Description of Artificial Sequence: Synthetic oligonucleotide
ggucaguuugaguggcaaa

SEQ ID NO: 2923013 - RNA, 19 nt, Artificial Sequence
  Description of Artificial Sequence: Synthetic oligonucleotide
caggacuuccagccagaga

SEQ ID NO: 2923014 - RNA, 19 nt, Artificial Sequence
  Description of Artificial Sequence: Synthetic oligonucleotide
agagagcucucgggagucu

SEQ ID NO: 2923015 - RNA, 19 nt, Artificial Sequence
  Description of Artificial Sequence: Synthetic oligonucleotide
cugaauagacggucaguuu

SEQ ID NO: 2923016 - RNA, 19 nt, Artificial Sequence
  Description of Artificial Sequence: Synthetic oligonucleotide
guuguccauuuuccaagau

SEQ ID NO: 2923017 - RNA, 19 nt, Artificial Sequence
  Description of Artificial Sequence: Synthetic oligonucleotide
cuuaaagguuguccauuuu

SEQ ID NO: 2923018 - RNA, 19 nt, Artificial Sequence
  Description of Artificial Sequence: Synthetic oligonucleotide
guagugcuacuuaaagguu

SEQ ID NO: 2923019 - RNA, 19 nt, Artificial Sequence
  Description of Artificial Sequence: Synthetic oligonucleotide
ggacuuccagccagagagc

SEQ ID NO: 2923020 - RNA, 19 nt, Artificial Sequence
  Description of Artificial Sequence: Synthetic oligonucleotide
cacuaacacuggagauuca

SEQ ID NO: 2923021 - RNA, 19 nt, Artificial Sequence
  Description of Artificial Sequence: Synthetic oligonucleotide
cacuugcaguuaaggguaa

SEQ ID NO: 2923022 - RNA, 19 nt, Artificial Sequence
  Description of Artificial Sequence: Synthetic oligonucleotide
uuccagccagagagcucuc

SEQ ID NO: 2923023 - RNA, 19 nt, Artificial Sequence
  Description of Artificial Sequence: Synthetic oligonucleotide
cucugaauagacggucagu

SEQ ID NO: 2923024 - RNA, 19 nt, Artificial Sequence
  Description of Artificial Sequence: Synthetic oligonucleotide
aucggacuuuugacuuaug

SEQ ID NO: 2923025 - RNA, 19 nt, Artificial Sequence
  Description of Artificial Sequence: Synthetic oligonucleotide
cugccucugaauagacggu

SEQ ID NO: 2923026 - RNA, 19 nt, Artificial Sequence
  Description of Artificial Sequence: Synthetic oligonucleotide
ccucauagucauucacuaa

SEQ ID NO: 2923027 - RNA, 19 nt, Artificial Sequence
  Description of Artificial Sequence: Synthetic oligonucleotide
gugcuacuuaaagguuguc

SEQ ID NO: 2923028 - RNA, 19 nt, Artificial Sequence
  Description of Artificial Sequence: Synthetic oligonucleotide
gccucugaauagacgguca

SEQ ID NO: 2923029 - RNA, 19 nt, Artificial Sequence
  Description of Artificial Sequence: Synthetic oligonucleotide
cugagaauuccagcguaau

SEQ ID NO: 2923030 - RNA, 19 nt, Artificial Sequence
  Description of Artificial Sequence: Synthetic oligonucleotide
acggucaguuugaguggca

SEQ ID NO: 2923031 - RNA, 19 nt, Artificial Sequence
  Description of Artificial Sequence: Synthetic oligonucleotide
caucggacuuuugacuuau

SEQ ID NO: 2923032 - RNA, 19 nt, Artificial Sequence
  Description of Artificial Sequence: Synthetic oligonucleotide
gagcucucgggagucuccu

SEQ ID NO: 2923033 - RNA, 19 nt, Artificial Sequence
  Description of Artificial Sequence: Synthetic oligonucleotide
gcucugccucugaauagac

SEQ ID NO: 2923034 - RNA, 19 nt, Artificial Sequence
  Description of Artificial Sequence: Synthetic oligonucleotide
gucaggcucuuuagaugaa

SEQ ID NO: 2923035 - RNA, 19 nt, Artificial Sequence
  Description of Artificial Sequence: Synthetic oligonucleotide
guccuucuggguagugcua

SEQ ID NO: 2923036 - RNA, 19 nt, Artificial Sequence
  Description of Artificial Sequence: Synthetic oligonucleotide
cuucuggguagugcuacuu

SEQ ID NO: 2923037 - RNA, 19 nt, Artificial Sequence
  Description of Artificial Sequence: Synthetic oligonucleotide
guccauuuuccaagauauu

SEQ ID NO: 2923038 - RNA, 19 nt, Artificial Sequence
  Description of Artificial Sequence: Synthetic oligonucleotide
ccagacucugccucauagu

SEQ ID NO: 2923039 - RNA, 19 nt, Artificial Sequence
  Description of Artificial Sequence: Synthetic oligonucleotide
agucugcauuucacauauu

SEQ ID NO: 2923040 - RNA, 19 nt, Artificial Sequence
  Description of Artificial Sequence: Synthetic oligonucleotide
ccagagagcucucgggagu

SEQ ID NO: 2923041 - RNA, 19 nt, Artificial Sequence
  Description of Artificial Sequence: Synthetic oligonucleotide
ggcuucacagggagaggcu

SEQ ID NO: 2923042 - RNA, 19 nt, Artificial Sequence
  Description of Artificial Sequence: Synthetic oligonucleotide
cagggagaggcugcuugau

SEQ ID NO: 2923043 - RNA, 19 nt, Artificial Sequence
  Description of Artificial Sequence: Synthetic oligonucleotide
acucugccucauagucauu

SEQ ID NO: 2923044 - RNA, 19 nt, Artificial Sequence
  Description of Artificial Sequence: Synthetic oligonucleotide
cgggagucuccugagcaga

SEQ ID NO: 2923045 - RNA, 19 nt, Artificial Sequence
  Description of Artificial Sequence: Synthetic oligonucleotide
ccuucuggguagugcuacu

SEQ ID NO: 2923046 - RNA, 19 nt, Artificial Sequence
  Description of Artificial Sequence: Synthetic oligonucleotide
gggagucuccugagcagau

SEQ ID NO: 2923047 - RNA, 19 nt, Artificial Sequence
  Description of Artificial Sequence: Synthetic oligonucleotide
gggaguccuucuggguagu

SEQ ID NO: 2923048 - RNA, 19 nt, Artificial Sequence
  Description of Artificial Sequence: Synthetic oligonucleotide
ggcauagggucaggcucuu

SEQ ID NO: 2923049 - RNA, 19 nt, Artificial Sequence
  Description of Artificial Sequence: Synthetic oligonucleotide
gcauagggucaggcucuuu

SEQ ID NO: 2923050 - RNA, 19 nt, Artificial Sequence
  Description of Artificial Sequence: Synthetic oligonucleotide
aaagucauaagacaaaugu

SEQ ID NO: 2923051 - RNA, 19 nt, Artificial Sequence
  Description of Artificial Sequence: Synthetic oligonucleotide
aguacuggcauucauaggg

SEQ ID NO: 2923052 - RNA, 19 nt, Artificial Sequence
  Description of Artificial Sequence: Synthetic oligonucleotide
aaaugucacacuugaaugg

SEQ ID NO: 2923053 - RNA, 19 nt, Artificial Sequence
  Description of Artificial Sequence: Synthetic oligonucleotide
accuuuaucacacauauca

SEQ ID NO: 2923054 - RNA, 19 nt, Artificial Sequence
  Description of Artificial Sequence: Synthetic oligonucleotide
aagagcauguuguugcacc

SEQ ID NO: 2923055 - RNA, 19 nt, Artificial Sequence
  Description of Artificial Sequence: Synthetic oligonucleotide
aaucacuugaguucgaacu

SEQ ID NO: 2923056 - RNA, 19 nt, Artificial Sequence
  Description of Artificial Sequence: Synthetic oligonucleotide
auauucacagaacuuacac

SEQ ID NO: 2923057 - RNA, 19 nt, Artificial Sequence
  Description of Artificial Sequence: Synthetic oligonucleotide
uguguuuucaaguuagaag

SEQ ID NO: 2923058 - RNA, 19 nt, Artificial Sequence
  Description of Artificial Sequence: Synthetic oligonucleotide
acacauaucacacuuauga

SEQ ID NO: 2923059 - RNA, 19 nt, Artificial Sequence
  Description of Artificial Sequence: Synthetic oligonucleotide
ucaaguuagaagaaucugc

SEQ ID NO: 2923060 - RNA, 19 nt, Artificial Sequence
  Description of Artificial Sequence: Synthetic oligonucleotide
acauaucacacuuaugagg

SEQ ID NO: 2923061 - RNA, 19 nt, Artificial Sequence
  Description of Artificial Sequence: Synthetic oligonucleotide
uuuaucacacauaucacac

SEQ ID NO: 2923062 - RNA, 19 nt, Artificial Sequence
  Description of Artificial Sequence: Synthetic oligonucleotide
gauucaauaagccuuguuc

SEQ ID NO: 2923063 - RNA, 19 nt, Artificial Sequence
  Description of Artificial Sequence: Synthetic oligonucleotide
ugaacugaaauuauguguc

SEQ ID NO: 2923064 - RNA, 19 nt, Artificial Sequence
  Description of Artificial Sequence: Synthetic oligonucleotide
ucugagaaagucauaagac

SEQ ID NO: 2923065 - RNA, 19 nt, Artificial Sequence
  Description of Artificial Sequence: Synthetic oligonucleotide
auuugaggaaaguucuugc

SEQ ID NO: 2923066 - RNA, 19 nt, Artificial Sequence
  Description of Artificial Sequence: Synthetic oligonucleotide
aaugucacacuugaauggc

SEQ ID NO: 2923067 - RNA, 19 nt, Artificial Sequence
  Description of Artificial Sequence: Synthetic oligonucleotide
acuaauuugaggaaaguuc

SEQ ID NO: 2923068 - RNA, 19 nt, Artificial Sequence
  Description of Artificial Sequence: Synthetic oligonucleotide
caaguuagaagaaucugcg

SEQ ID NO: 2923069 - RNA, 19 nt, Artificial Sequence
  Description of Artificial Sequence: Synthetic oligonucleotide
uaugugucguuucaaauca

SEQ ID NO: 2923070 - RNA, 19 nt, Artificial Sequence
  Description of Artificial Sequence: Synthetic oligonucleotide
uuuacauguguuuucaagu

SEQ ID NO: 2923071 - RNA, 19 nt, Artificial Sequence
  Description of Artificial Sequence: Synthetic oligonucleotide
ugagaaagucauaagacaa

SEQ ID NO: 2923072 - RNA, 19 nt, Artificial Sequence
  Description of Artificial Sequence: Synthetic oligonucleotide
ugaguucgaacucuugugg

SEQ ID NO: 2923073 - RNA, 19 nt, Artificial Sequence
  Description of Artificial Sequence: Synthetic oligonucleotide
aaaucacuugaguucgaac

SEQ ID NO: 2923074 - RNA, 19 nt, Artificial Sequence
  Description of Artificial Sequence: Synthetic oligonucleotide
guguuuucaaguuagaaga

SEQ ID NO: 2923075 - RNA, 19 nt, Artificial Sequence
  Description of Artificial Sequence: Synthetic oligonucleotide
uuuucaaguuagaagaauc

SEQ ID NO: 2923076 - RNA, 19 nt, Artificial Sequence
  Description of Artificial Sequence: Synthetic oligonucleotide
uguuguugcaccucuuugg

SEQ ID NO: 2923077 - RNA, 19 nt, Artificial Sequence
  Description of Artificial Sequence: Synthetic oligonucleotide
uuucaaaucacuugaguuc

SEQ ID NO: 2923078 - RNA, 19 nt, Artificial Sequence
  Description of Artificial Sequence: Synthetic oligonucleotide
aguuagaagaaucugcgga

SEQ ID NO: 2923079 - RNA, 19 nt, Artificial Sequence
  Description of Artificial Sequence: Synthetic oligonucleotide
uuugccagcacucugcacu

SEQ ID NO: 2923080 - RNA, 19 nt, Artificial Sequence
  Description of Artificial Sequence: Synthetic oligonucleotide
acacuuaugaggauagucc

SEQ ID NO: 2923081 - RNA, 19 nt, Artificial Sequence
  Description of Artificial Sequence: Synthetic oligonucleotide
auucaauaagccuuguuca

SEQ ID NO: 2923082 - RNA, 19 nt, Artificial Sequence
  Description of Artificial Sequence: Synthetic oligonucleotide
aauggcaucucuuuacuau

SEQ ID NO: 2923083 - RNA, 19 nt, Artificial Sequence
  Description of Artificial Sequence: Synthetic oligonucleotide
cauaagacaaaugucacac

SEQ ID NO: 2923084 - RNA, 19 nt, Artificial Sequence
  Description of Artificial Sequence: Synthetic oligonucleotide
uuucaaguuagaagaaucu

SEQ ID NO: 2923085 - RNA, 19 nt, Artificial Sequence
  Description of Artificial Sequence: Synthetic oligonucleotide
aaguuagaagaaucugcgg

SEQ ID NO: 2923086 - RNA, 19 nt, Artificial Sequence
  Description of Artificial Sequence: Synthetic oligonucleotide
cucuugauggauaagagca

SEQ ID NO: 2923087 - RNA, 19 nt, Artificial Sequence
  Description of Artificial Sequence: Synthetic oligonucleotide
ugugaacugaaauuaugug

SEQ ID NO: 2923088 - RNA, 19 nt, Artificial Sequence
  Description of Artificial Sequence: Synthetic oligonucleotide
aucugagaaagucauaaga

SEQ ID NO: 2923089 - RNA, 19 nt, Artificial Sequence
  Description of Artificial Sequence: Synthetic oligonucleotide
gauggauaagagcauguug

SEQ ID NO: 2923090 - RNA, 19 nt, Artificial Sequence
  Description of Artificial Sequence: Synthetic oligonucleotide
agucauaagacaaauguca

SEQ ID NO: 2923091 - RNA, 19 nt, Artificial Sequence
  Description of Artificial Sequence: Synthetic oligonucleotide
aauuaugugucguuucaaa

SEQ ID NO: 2923092 - RNA, 19 nt, Artificial Sequence
  Description of Artificial Sequence: Synthetic oligonucleotide
aagucauaagacaaauguc

SEQ ID NO: 2923093 - RNA, 19 nt, Artificial Sequence
  Description of Artificial Sequence: Synthetic oligonucleotide
cauaucacacuuaugagga

SEQ ID NO: 2923094 - RNA, 19 nt, Artificial Sequence
  Description of Artificial Sequence: Synthetic oligonucleotide
ugugugaacugaaauuaug

SEQ ID NO: 2923095 - RNA, 19 nt, Artificial Sequence
  Description of Artificial Sequence: Synthetic oligonucleotide
uuaugugucguuucaaauc

SEQ ID NO: 2923096 - RNA, 19 nt, Artificial Sequence
  Description of Artificial Sequence: Synthetic oligonucleotide
uuugguaucugagaaaguc

SEQ ID NO: 2923097 - RNA, 19 nt, Artificial Sequence
  Description of Artificial Sequence: Synthetic oligonucleotide
aaugcaaacacuggugugu

SEQ ID NO: 2923098 - RNA, 19 nt, Artificial Sequence
  Description of Artificial Sequence: Synthetic oligonucleotide
uugaggaaaguucuugcug

SEQ ID NO: 2923099 - RNA, 19 nt, Artificial Sequence
  Description of Artificial Sequence: Synthetic oligonucleotide
uucaauaagccuuguucag

SEQ ID NO: 2923100 - RNA, 19 nt, Artificial Sequence
  Description of Artificial Sequence: Synthetic oligonucleotide
aaucugcggaccuguauuc

SEQ ID NO: 2923101 - RNA, 19 nt, Artificial Sequence
  Description of Artificial Sequence: Synthetic oligonucleotide
ugaggaaaguucuugcugu

SEQ ID NO: 2923102 - RNA, 19 nt, Artificial Sequence
  Description of Artificial Sequence: Synthetic oligonucleotide
uuugugugaacugaaauua

SEQ ID NO: 2923103 - RNA, 19 nt, Artificial Sequence
  Description of Artificial Sequence: Synthetic oligonucleotide
ugucguuucaaaucacuug

SEQ ID NO: 2923104 - RNA, 19 nt, Artificial Sequence
  Description of Artificial Sequence: Synthetic oligonucleotide
ucauauucacagaacuuac

SEQ ID NO: 2923105 - RNA, 19 nt, Artificial Sequence
  Description of Artificial Sequence: Synthetic oligonucleotide
uagguggcgauucaauaag

SEQ ID NO: 2923106 - RNA, 19 nt, Artificial Sequence
  Description of Artificial Sequence: Synthetic oligonucleotide
gaacugaaauuaugugucg

SEQ ID NO: 2923107 - RNA, 19 nt, Artificial Sequence
  Description of Artificial Sequence: Synthetic oligonucleotide
aucacuugaguucgaacuc

SEQ ID NO: 2923108 - RNA, 19 nt, Artificial Sequence
  Description of Artificial Sequence: Synthetic oligonucleotide
agacaaaugucacacuuga

SEQ ID NO: 2923109 - RNA, 19 nt, Artificial Sequence
  Description of Artificial Sequence: Synthetic oligonucleotide
ucucuugauggauaagagc

SEQ ID NO: 2923110 - RNA, 19 nt, Artificial Sequence
  Description of Artificial Sequence: Synthetic oligonucleotide
uucauauucacagaacuua

SEQ ID NO: 2923111 - RNA, 19 nt, Artificial Sequence
  Description of Artificial Sequence: Synthetic oligonucleotide
gaaauuaugugucguuuca

SEQ ID NO: 2923112 - RNA, 19 nt, Artificial Sequence
  Description of Artificial Sequence: Synthetic oligonucleotide
gaggauaguccuuugugug

SEQ ID NO: 2923113 - RNA, 19 nt, Artificial Sequence
  Description of Artificial Sequence: Synthetic oligonucleotide
uaucacacauaucacacuu

SEQ ID NO: 2923114 - RNA, 19 nt, Artificial Sequence
  Description of Artificial Sequence: Synthetic oligonucleotide
uugaguucgaacucuugug

SEQ ID NO: 2923115 - RNA, 19 nt, Artificial Sequence
  Description of Artificial Sequence: Synthetic oligonucleotide
uauucacagaacuuacacu

SEQ ID NO: 2923116 - RNA, 19 nt, Artificial Sequence
  Description of Artificial Sequence: Synthetic oligonucleotide
aaacacugguguguuuugc

SEQ ID NO: 2923117 - RNA, 19 nt, Artificial Sequence
  Description of Artificial Sequence: Synthetic oligonucleotide
uggacugccaauagguggc

SEQ ID NO: 2923118 - RNA, 19 nt, Artificial Sequence
  Description of Artificial Sequence: Synthetic oligonucleotide
uguugcaccucuuugguau

SEQ ID NO: 2923119 - RNA, 19 nt, Artificial Sequence
  Description of Artificial Sequence: Synthetic oligonucleotide
uugguaucugagaaaguca

SEQ ID NO: 2923120 - RNA, 19 nt, Artificial Sequence
  Description of Artificial Sequence: Synthetic oligonucleotide
uugaauggcaucucuuuac

SEQ ID NO: 2923121 - RNA, 19 nt, Artificial Sequence
  Description of Artificial Sequence: Synthetic oligonucleotide
acucuuguggucgcaaugc

SEQ ID NO: 2923122 - RNA, 19 nt, Artificial Sequence
  Description of Artificial Sequence: Synthetic oligonucleotide
ucauaagacaaaugucaca

SEQ ID NO: 2923123 - RNA, 19 nt, Artificial Sequence
  Description of Artificial Sequence: Synthetic oligonucleotide
aauagguggcgauucaaua

SEQ ID NO: 2923124 - RNA, 19 nt, Artificial Sequence
  Description of Artificial Sequence: Synthetic oligonucleotide
ugaaauuaugugucguuuc

SEQ ID NO: 2923125 - RNA, 19 nt, Artificial Sequence
  Description of Artificial Sequence: Synthetic oligonucleotide
cucugcacuaauuugagga

SEQ ID NO: 2923126 - RNA, 19 nt, Artificial Sequence
  Description of Artificial Sequence: Synthetic oligonucleotide
uuugaggaaaguucuugcu

SEQ ID NO: 2923127 - RNA, 19 nt, Artificial Sequence
  Description of Artificial Sequence: Synthetic oligonucleotide
uucaaguuagaagaaucug

SEQ ID NO: 2923128 - RNA, 19 nt, Artificial Sequence
  Description of Artificial Sequence: Synthetic oligonucleotide
guuagaagaaucugcggac

SEQ ID NO: 2923129 - RNA, 19 nt, Artificial Sequence
  Description of Artificial Sequence: Synthetic oligonucleotide
aaaguucuugcuguggacu

SEQ ID NO: 2923130 - RNA, 19 nt, Artificial Sequence
  Description of Artificial Sequence: Synthetic oligonucleotide
guggacugccaauaggugg

SEQ ID NO: 2923131 - RNA, 19 nt, Artificial Sequence
  Description of Artificial Sequence: Synthetic oligonucleotide
aaguucuugcuguggacug

SEQ ID NO: 2923132 - RNA, 19 nt, Artificial Sequence
  Description of Artificial Sequence: Synthetic oligonucleotide
augaggauaguccuuugug

SEQ ID NO: 2923133 - RNA, 19 nt, Artificial Sequence
  Description of Artificial Sequence: Synthetic oligonucleotide
ugaggauaguccuuugugu

SEQ ID NO: 2923134 - RNA, 19 nt, Artificial Sequence
  Description of Artificial Sequence: Synthetic oligonucleotide
ugacggaaaccuuugccag

SEQ ID NO: 2923135 - RNA, 19 nt, Artificial Sequence
  Description of Artificial Sequence: Synthetic oligonucleotide
cuuuaucacacauaucaca

SEQ ID NO: 2923136 - RNA, 19 nt, Artificial Sequence
  Description of Artificial Sequence: Synthetic oligonucleotide
uguauucgcaguacuggca

SEQ ID NO: 2923137 - RNA, 19 nt, Artificial Sequence
  Description of Artificial Sequence: Synthetic oligonucleotide
aguucgaacucuugugguc

SEQ ID NO: 2923138 - RNA, 19 nt, Artificial Sequence
  Description of Artificial Sequence: Synthetic oligonucleotide
ucacacauaucacacuuau

SEQ ID NO: 2923139 - RNA, 19 nt, Artificial Sequence
  Description of Artificial Sequence: Synthetic oligonucleotide
ucacagaacuuacacuugu

SEQ ID NO: 2923140 - RNA, 19 nt, Artificial Sequence
  Description of Artificial Sequence: Synthetic oligonucleotide
uuuugagcucugaugggug

SEQ ID NO: 2923141 - RNA, 19 nt, Artificial Sequence
  Description of Artificial Sequence: Synthetic oligonucleotide
gucguuucaaaucacuuga

SEQ ID NO: 2923142 - RNA, 19 nt, Artificial Sequence
  Description of Artificial Sequence: Synthetic oligonucleotide
ugguaucugagaaagucau

SEQ ID NO: 2923143 - RNA, 19 nt, Artificial Sequence
  Description of Artificial Sequence: Synthetic oligonucleotide
ugugucguuucaaaucacu

SEQ ID NO: 2923144 - RNA, 19 nt, Artificial Sequence
  Description of Artificial Sequence: Synthetic oligonucleotide
uaucugagaaagucauaag

SEQ ID NO: 2923145 - RNA, 19 nt, Artificial Sequence
  Description of Artificial Sequence: Synthetic oligonucleotide
ugaauggcaucucuuuacu

SEQ ID NO: 2923146 - RNA, 19 nt, Artificial Sequence
  Description of Artificial Sequence: Synthetic oligonucleotide
cacauaucacacuuaugag

SEQ ID NO: 2923147 - RNA, 19 nt, Artificial Sequence
  Description of Artificial Sequence: Synthetic oligonucleotide
aacacugguguguuuugcu

SEQ ID NO: 2923148 - RNA, 19 nt, Artificial Sequence
  Description of Artificial Sequence: Synthetic oligonucleotide
auuaugugucguuucaaau

SEQ ID NO: 2923149 - RNA, 19 nt, Artificial Sequence
  Description of Artificial Sequence: Synthetic oligonucleotide
auaagccuuguucagcugu

SEQ ID NO: 2923150 - RNA, 19 nt, Artificial Sequence
  Description of Artificial Sequence: Synthetic oligonucleotide
uuucauauucacagaacuu

SEQ ID NO: 2923151 - RNA, 19 nt, Artificial Sequence
  Description of Artificial Sequence: Synthetic oligonucleotide
ucaauaagccuuguucagc

SEQ ID NO: 2923152 - RNA, 19 nt, Artificial Sequence
  Description of Artificial Sequence: Synthetic oligonucleotide
acauguguuuucaaguuag

SEQ ID NO: 2923153 - RNA, 19 nt, Artificial Sequence
  Description of Artificial Sequence: Synthetic oligonucleotide
uaugaggauaguccuuugu

SEQ ID NO: 2923154 - RNA, 19 nt, Artificial Sequence
  Description of Artificial Sequence: Synthetic oligonucleotide
uuagaagaaucugcggacc

SEQ ID NO: 2923155 - RNA, 19 nt, Artificial Sequence
  Description of Artificial Sequence: Synthetic oligonucleotide
uguuuucaaguuagaagaa

SEQ ID NO: 2923156 - RNA, 19 nt, Artificial Sequence
  Description of Artificial Sequence: Synthetic oligonucleotide
ugaugggugacggaaaccu

SEQ ID NO: 2923157 - RNA, 19 nt, Artificial Sequence
  Description of Artificial Sequence: Synthetic oligonucleotide
uggcgauucaauaagccuu

SEQ ID NO: 2923158 - RNA, 19 nt, Artificial Sequence
  Description of Artificial Sequence: Synthetic oligonucleotide
uugauggauaagagcaugu

SEQ ID NO: 2923159 - RNA, 19 nt, Artificial Sequence
  Description of Artificial Sequence: Synthetic oligonucleotide
guuucauauucacagaacu

SEQ ID NO: 2923160 - RNA, 19 nt, Artificial Sequence
  Description of Artificial Sequence: Synthetic oligonucleotide
cuaauuugaggaaaguucu

SEQ ID NO: 2923161 - RNA, 19 nt, Artificial Sequence
  Description of Artificial Sequence: Synthetic oligonucleotide
aagacaaaugucacacuug

SEQ ID NO: 2923162 - RNA, 19 nt, Artificial Sequence
  Description of Artificial Sequence: Synthetic oligonucleotide
aucucuuuacuaugcuuag

SEQ ID NO: 2923163 - RNA, 19 nt, Artificial Sequence
  Description of Artificial Sequence: Synthetic oligonucleotide
uuacauguguuuucaaguu

SEQ ID NO: 2923164 - RNA, 19 nt, Artificial Sequence
  Description of Artificial Sequence: Synthetic oligonucleotide
guucgaacucuuguggucg

SEQ ID NO: 2923165 - RNA, 19 nt, Artificial Sequence
  Description of Artificial Sequence: Synthetic oligonucleotide
auagguggcgauucaauaa

SEQ ID NO: 2923166 - RNA, 19 nt, Artificial Sequence
  Description of Artificial Sequence: Synthetic oligonucleotide
ucugaugggugacggaaac

SEQ ID NO: 2923167 - RNA, 19 nt, Artificial Sequence
  Description of Artificial Sequence: Synthetic oligonucleotide
cucucuugauggauaagag

SEQ ID NO: 2923168 - RNA, 19 nt, Artificial Sequence
  Description of Artificial Sequence: Synthetic oligonucleotide
agcacucugcacuaauuug

SEQ ID NO: 2923169 - RNA, 19 nt, Artificial Sequence
  Description of Artificial Sequence: Synthetic oligonucleotide
aauaagccuuguucagcug

SEQ ID NO: 2923170 - RNA, 19 nt, Artificial Sequence
  Description of Artificial Sequence: Synthetic oligonucleotide
cugagaaagucauaagaca

SEQ ID NO: 2923171 - RNA, 19 nt, Artificial Sequence
  Description of Artificial Sequence: Synthetic oligonucleotide
aacugaaauuaugugucgu

SEQ ID NO: 2923172 - RNA, 19 nt, Artificial Sequence
  Description of Artificial Sequence: Synthetic oligonucleotide
ucgcaaugcaaacacuggu

SEQ ID NO: 2923173 - RNA, 19 nt, Artificial Sequence
  Description of Artificial Sequence: Synthetic oligonucleotide
ucguuucaaaucacuugag

SEQ ID NO: 2923174 - RNA, 19 nt, Artificial Sequence
  Description of Artificial Sequence: Synthetic oligonucleotide
cuguauucgcaguacuggc

SEQ ID NO: 2923175 - RNA, 19 nt, Artificial Sequence
  Description of Artificial Sequence: Synthetic oligonucleotide
uuaucacacauaucacacu

SEQ ID NO: 2923176 - RNA, 19 nt, Artificial Sequence
  Description of Artificial Sequence: Synthetic oligonucleotide
acacugguguguuuugcuc

SEQ ID NO: 2923177 - RNA, 19 nt, Artificial Sequence
  Description of Artificial Sequence: Synthetic oligonucleotide
uguggacugccaauaggug

SEQ ID NO: 2923178 - RNA, 19 nt, Artificial Sequence
  Description of Artificial Sequence: Synthetic oligonucleotide
gaaagucauaagacaaaug

SEQ ID NO: 2923179 - RNA, 19 nt, Artificial Sequence
  Description of Artificial Sequence: Synthetic oligonucleotide
uagaagaaucugcggaccu

SEQ ID NO: 2923180 - RNA, 19 nt, Artificial Sequence
  Description of Artificial Sequence: Synthetic oligonucleotide
uggcaucucuuuacuaugc

SEQ ID NO: 2923181 - RNA, 19 nt, Artificial Sequence
  Description of Artificial Sequence: Synthetic oligonucleotide
guaucugagaaagucauaa

SEQ ID NO: 2923182 - RNA, 19 nt, Artificial Sequence
  Description of Artificial Sequence: Synthetic oligonucleotide
gugaacugaaauuaugugu

SEQ ID NO: 2923183 - RNA, 19 nt, Artificial Sequence
  Description of Artificial Sequence: Synthetic oligonucleotide
gcaguacuggcauucauag

SEQ ID NO: 2923184 - RNA, 19 nt, Artificial Sequence
  Description of Artificial Sequence: Synthetic oligonucleotide
uuugcucucuugauggaua

SEQ ID NO: 2923185 - RNA, 19 nt, Artificial Sequence
  Description of Artificial Sequence: Synthetic oligonucleotide
auggcaucucuuuacuaug

SEQ ID NO: 2923186 - RNA, 19 nt, Artificial Sequence
  Description of Artificial Sequence: Synthetic oligonucleotide
agaaagucauaagacaaau

SEQ ID NO: 2923187 - RNA, 19 nt, Artificial Sequence
  Description of Artificial Sequence: Synthetic oligonucleotide
gaaaguucuugcuguggac

SEQ ID NO: 2923188 - RNA, 19 nt, Artificial Sequence
  Description of Artificial Sequence: Synthetic oligonucleotide
acugguguguuuugcucuc

SEQ ID NO: 2923189 - RNA, 19 nt, Artificial Sequence
  Description of Artificial Sequence: Synthetic oligonucleotide
ucugcacuaauuugaggaa

SEQ ID NO: 2923190 - RNA, 19 nt, Artificial Sequence
  Description of Artificial Sequence: Synthetic oligonucleotide
uacauguguuuucaaguua

SEQ ID NO: 2923191 - RNA, 19 nt, Artificial Sequence
  Description of Artificial Sequence: Synthetic oligonucleotide
ugucacacuugaauggcau

SEQ ID NO: 2923192 - RNA, 19 nt, Artificial Sequence
  Description of Artificial Sequence: Synthetic oligonucleotide
gugacggaaaccuuugcca

SEQ ID NO: 2923193 - RNA, 19 nt, Artificial Sequence
  Description of Artificial Sequence: Synthetic oligonucleotide
auucgcaguacuggcauuc

SEQ ID NO: 2923194 - RNA, 19 nt, Artificial Sequence
  Description of Artificial Sequence: Synthetic oligonucleotide
uguguuuugcucucuugau

SEQ ID NO: 2923195 - RNA, 19 nt, Artificial Sequence
  Description of Artificial Sequence: Synthetic oligonucleotide
aucacacuuaugaggauag

SEQ ID NO: 2923196 - RNA, 19 nt, Artificial Sequence
  Description of Artificial Sequence: Synthetic oligonucleotide
aaaaccuuuaucacacaua

SEQ ID NO: 2923197 - RNA, 19 nt, Artificial Sequence
  Description of Artificial Sequence: Synthetic oligonucleotide
aaccuuugccagcacucug

SEQ ID NO: 2923198 - RNA, 19 nt, Artificial Sequence
  Description of Artificial Sequence: Synthetic oligonucleotide
uuugagcucugauggguga

SEQ ID NO: 2923199 - RNA, 19 nt, Artificial Sequence
  Description of Artificial Sequence: Synthetic oligonucleotide
ucuugauggauaagagcau

SEQ ID NO: 2923200 - RNA, 19 nt, Artificial Sequence
  Description of Artificial Sequence: Synthetic oligonucleotide
cuugauggauaagagcaug

SEQ ID NO: 2923201 - RNA, 19 nt, Artificial Sequence
  Description of Artificial Sequence: Synthetic oligonucleotide
accuuugccagcacucugc

SEQ ID NO: 2923202 - RNA, 19 nt, Artificial Sequence
  Description of Artificial Sequence: Synthetic oligonucleotide
guggucgcaaugcaaacac

SEQ ID NO: 2923203 - RNA, 19 nt, Artificial Sequence
  Description of Artificial Sequence: Synthetic oligonucleotide
guguuuugcucucuugaug

SEQ ID NO: 2923204 - RNA, 19 nt, Artificial Sequence
  Description of Artificial Sequence: Synthetic oligonucleotide
aaauuaugugucguuucaa

SEQ ID NO: 2923205 - RNA, 19 nt, Artificial Sequence
  Description of Artificial Sequence: Synthetic oligonucleotide
guucagcuguuucauauuc

SEQ ID NO: 2923206 - RNA, 19 nt, Artificial Sequence
  Description of Artificial Sequence: Synthetic oligonucleotide
caucucuuuacuaugcuua

SEQ ID NO: 2923207 - RNA, 19 nt, Artificial Sequence
  Description of Artificial Sequence: Synthetic oligonucleotide
acugaaauuaugugucguu

SEQ ID NO: 2923208 - RNA, 19 nt, Artificial Sequence
  Description of Artificial Sequence: Synthetic oligonucleotide
auaagacaaaugucacacu

SEQ ID NO: 2923209 - RNA, 19 nt, Artificial Sequence
  Description of Artificial Sequence: Synthetic oligonucleotide
guuucaaaucacuugaguu

SEQ ID NO: 2923210 - RNA, 19 nt, Artificial Sequence
  Description of Artificial Sequence: Synthetic oligonucleotide
accucuuugguaucugaga

SEQ ID NO: 2923211 - RNA, 19 nt, Artificial Sequence
  Description of Artificial Sequence: Synthetic oligonucleotide
uauggauucgcaugugcuu

SEQ ID NO: 2923212 - RNA, 19 nt, Artificial Sequence
  Description of Artificial Sequence: Synthetic oligonucleotide
ucugcggaccuguauucgc

SEQ ID NO: 2923213 - RNA, 19 nt, Artificial Sequence
  Description of Artificial Sequence: Synthetic oligonucleotide
acucugcacuaauuugagg

SEQ ID NO: 2923214 - RNA, 19 nt, Artificial Sequence
  Description of Artificial Sequence: Synthetic oligonucleotide
uaguccuuugugugaacug

SEQ ID NO: 2923215 - RNA, 19 nt, Artificial Sequence
  Description of Artificial Sequence: Synthetic oligonucleotide
agccuuguucagcuguuuc

SEQ ID NO: 2923216 - RNA, 19 nt, Artificial Sequence
  Description of Artificial Sequence: Synthetic oligonucleotide
aggauaguccuuuguguga

SEQ ID NO: 2923217 - RNA, 19 nt, Artificial Sequence
  Description of Artificial Sequence: Synthetic oligonucleotide
auaagagcauguuguugca

SEQ ID NO: 2923218 - RNA, 19 nt, Artificial Sequence
  Description of Artificial Sequence: Synthetic oligonucleotide
gucauaagacaaaugucac

SEQ ID NO: 2923219 - RNA, 19 nt, Artificial Sequence
  Description of Artificial Sequence: Synthetic oligonucleotide
ucuuguggucgcaaugcaa

SEQ ID NO: 2923220 - RNA, 19 nt, Artificial Sequence
  Description of Artificial Sequence: Synthetic oligonucleotide
ugggugacggaaaccuuug

SEQ ID NO: 2923221 - RNA, 19 nt, Artificial Sequence
  Description of Artificial Sequence: Synthetic oligonucleotide
aguucuugcuguggacugc

SEQ ID NO: 2923222 - RNA, 19 nt, Artificial Sequence
  Description of Artificial Sequence: Synthetic oligonucleotide
uaucacacuuaugaggaua

SEQ ID NO: 2923223 - RNA, 19 nt, Artificial Sequence
  Description of Artificial Sequence: Synthetic oligonucleotide
cacucugcacuaauuugag

SEQ ID NO: 2923224 - RNA, 19 nt, Artificial Sequence
  Description of Artificial Sequence: Synthetic oligonucleotide
cacacuuaugaggauaguc

SEQ ID NO: 2923225 - RNA, 19 nt, Artificial Sequence
  Description of Artificial Sequence: Synthetic oligonucleotide
caaugcaaacacuggugug

SEQ ID NO: 2923226 - RNA, 19 nt, Artificial Sequence
  Description of Artificial Sequence: Synthetic oligonucleotide
ugcuguggacugccaauag

SEQ ID NO: 2923227 - RNA, 19 nt, Artificial Sequence
  Description of Artificial Sequence: Synthetic oligonucleotide
gacggaaaccuuugccagc

SEQ ID NO: 2923228 - RNA, 19 nt, Artificial Sequence
  Description of Artificial Sequence: Synthetic oligonucleotide
cuuguggucgcaaugcaaa

SEQ ID NO: 2923229 - RNA, 19 nt, Artificial Sequence
  Description of Artificial Sequence: Synthetic oligonucleotide
gucgcaaugcaaacacugg

SEQ ID NO: 2923230 - RNA, 19 nt, Artificial Sequence
  Description of Artificial Sequence: Synthetic oligonucleotide
uuaugaggauaguccuuug

SEQ ID NO: 2923231 - RNA, 19 nt, Artificial Sequence
  Description of Artificial Sequence: Synthetic oligonucleotide
ggugacggaaaccuuugcc

SEQ ID NO: 2923232 - RNA, 19 nt, Artificial Sequence
  Description of Artificial Sequence: Synthetic oligonucleotide
ugagcucugaugggugacg

SEQ ID NO: 2923233 - RNA, 19 nt, Artificial Sequence
  Description of Artificial Sequence: Synthetic oligonucleotide
gaggaaaguucuugcugug

SEQ ID NO: 2923234 - RNA, 19 nt, Artificial Sequence
  Description of Artificial Sequence: Synthetic oligonucleotide
uguggucgcaaugcaaaca

SEQ ID NO: 2923235 - RNA, 19 nt, Artificial Sequence
  Description of Artificial Sequence: Synthetic oligonucleotide
cauauucacagaacuuaca

SEQ ID NO: 2923236 - RNA, 19 nt, Artificial Sequence
  Description of Artificial Sequence: Synthetic oligonucleotide
agagcauguuguugcaccu

SEQ ID NO: 2923237 - RNA, 19 nt, Artificial Sequence
  Description of Artificial Sequence: Synthetic oligonucleotide
aguccuuugugugaacuga

SEQ ID NO: 2923238 - RNA, 19 nt, Artificial Sequence
  Description of Artificial Sequence: Synthetic oligonucleotide
ugaaaaccuuuaucacaca

SEQ ID NO: 2923239 - RNA, 19 nt, Artificial Sequence
  Description of Artificial Sequence: Synthetic oligonucleotide
ucuugcuguggacugccaa

SEQ ID NO: 2923240 - RNA, 19 nt, Artificial Sequence
  Description of Artificial Sequence: Synthetic oligonucleotide
cuguuucauauucacagaa

SEQ ID NO: 2923241 - RNA, 19 nt, Artificial Sequence
  Description of Artificial Sequence: Synthetic oligonucleotide
ucacuugaguucgaacucu

SEQ ID NO: 2923242 - RNA, 19 nt, Artificial Sequence
  Description of Artificial Sequence: Synthetic oligonucleotide
caccucuuugguaucugag

SEQ ID NO: 2923243 - RNA, 19 nt, Artificial Sequence
  Description of Artificial Sequence: Synthetic oligonucleotide
auaguccuuugugugaacu

SEQ ID NO: 2923244 - RNA, 19 nt, Artificial Sequence
  Description of Artificial Sequence: Synthetic oligonucleotide
cuuuacuaugcuuaguuuu

SEQ ID NO: 2923245 - RNA, 19 nt, Artificial Sequence
  Description of Artificial Sequence: Synthetic oligonucleotide
uacuggcauucauagggcu

SEQ ID NO: 2923246 - RNA, 19 nt, Artificial Sequence
  Description of Artificial Sequence: Synthetic oligonucleotide
uccuuugugugaacugaaa

SEQ ID NO: 2923247 - RNA, 19 nt, Artificial Sequence
  Description of Artificial Sequence: Synthetic oligonucleotide
ucaaaucacuugaguucga

SEQ ID NO: 2923248 - RNA, 19 nt, Artificial Sequence
  Description of Artificial Sequence: Synthetic oligonucleotide
cacagaacuuacacuugug

SEQ ID NO: 2923249 - RNA, 19 nt, Artificial Sequence
  Description of Artificial Sequence: Synthetic oligonucleotide
caaacacugguguguuuug

SEQ ID NO: 2923250 - RNA, 19 nt, Artificial Sequence
  Description of Artificial Sequence: Synthetic oligonucleotide
agaaucugcggaccuguau

SEQ ID NO: 2923251 - RNA, 19 nt, Artificial Sequence
  Description of Artificial Sequence: Synthetic oligonucleotide
gagaaagucauaagacaaa

SEQ ID NO: 2923252 - RNA, 19 nt, Artificial Sequence
  Description of Artificial Sequence: Synthetic oligonucleotide
agguggcgauucaauaagc

SEQ ID NO: 2923253 - RNA, 19 nt, Artificial Sequence
  Description of Artificial Sequence: Synthetic oligonucleotide
uggauaagagcauguuguu

SEQ ID NO: 2923254 - RNA, 19 nt, Artificial Sequence
  Description of Artificial Sequence: Synthetic oligonucleotide
ccuguauucgcaguacugg

SEQ ID NO: 2923255 - RNA, 19 nt, Artificial Sequence
  Description of Artificial Sequence: Synthetic oligonucleotide
caguacuggcauucauagg

SEQ ID NO: 2923256 - RNA, 19 nt, Artificial Sequence
  Description of Artificial Sequence: Synthetic oligonucleotide
uuuugcucucuugauggau

SEQ ID NO: 2923257 - RNA, 19 nt, Artificial Sequence
  Description of Artificial Sequence: Synthetic oligonucleotide
ugcggaccuguauucgcag

SEQ ID NO: 2923258 - RNA, 19 nt, Artificial Sequence
  Description of Artificial Sequence: Synthetic oligonucleotide
uuguggucgcaaugcaaac

SEQ ID NO: 2923259 - RNA, 19 nt, Artificial Sequence
  Description of Artificial Sequence: Synthetic oligonucleotide
ggaaaguucuugcugugga

SEQ ID NO: 2923260 - RNA, 19 nt, Artificial Sequence
  Description of Artificial Sequence: Synthetic oligonucleotide
acugccaauagguggcgau

SEQ ID NO: 2923261 - RNA, 19 nt, Artificial Sequence
  Description of Artificial Sequence: Synthetic oligonucleotide
cacacauaucacacuuaug

SEQ ID NO: 2923262 - RNA, 19 nt, Artificial Sequence
  Description of Artificial Sequence: Synthetic oligonucleotide
ggucgcaaugcaaacacug

SEQ ID NO: 2923263 - RNA, 19 nt, Artificial Sequence
  Description of Artificial Sequence: Synthetic oligonucleotide
uucgaacucuuguggucgc

SEQ ID NO: 2923264 - RNA, 19 nt, Artificial Sequence
  Description of Artificial Sequence: Synthetic oligonucleotide
gagcucugaugggugacgg

SEQ ID NO: 2923265 - RNA, 19 nt, Artificial Sequence
  Description of Artificial Sequence: Synthetic oligonucleotide
uguucagcuguuucauauu

SEQ ID NO: 2923266 - RNA, 19 nt, Artificial Sequence
  Description of Artificial Sequence: Synthetic oligonucleotide
uugcucucuugauggauaa

SEQ ID NO: 2923267 - RNA, 19 nt, Artificial Sequence
  Description of Artificial Sequence: Synthetic oligonucleotide
agaagaaucugcggaccug

SEQ ID NO: 2923268 - RNA, 19 nt, Artificial Sequence
  Description of Artificial Sequence: Synthetic oligonucleotide
cuugaguucgaacucuugu

SEQ ID NO: 2923269 - RNA, 19 nt, Artificial Sequence
  Description of Artificial Sequence: Synthetic oligonucleotide
caauaagccuuguucagcu

SEQ ID NO: 2923270 - RNA, 19 nt, Artificial Sequence
  Description of Artificial Sequence: Synthetic oligonucleotide
gcuguggacugccaauagg

SEQ ID NO: 2923271 - RNA, 19 nt, Artificial Sequence
  Description of Artificial Sequence: Synthetic oligonucleotide
ugauggauaagagcauguu

SEQ ID NO: 2923272 - RNA, 19 nt, Artificial Sequence
  Description of Artificial Sequence: Synthetic oligonucleotide
uaagccuuguucagcuguu

SEQ ID NO: 2923273 - RNA, 19 nt, Artificial Sequence
  Description of Artificial Sequence: Synthetic oligonucleotide
gaaucugcggaccuguauu

SEQ ID NO: 2923274 - RNA, 19 nt, Artificial Sequence
  Description of Artificial Sequence: Synthetic oligonucleotide
acggaaaccuuugccagca

SEQ ID NO: 2923275 - RNA, 19 nt, Artificial Sequence
  Description of Artificial Sequence: Synthetic oligonucleotide
ggauaagagcauguuguug

SEQ ID NO: 2923276 - RNA, 19 nt, Artificial Sequence
  Description of Artificial Sequence: Synthetic oligonucleotide
ucucuuuacuaugcuuagu

SEQ ID NO: 2923277 - RNA, 19 nt, Artificial Sequence
  Description of Artificial Sequence: Synthetic oligonucleotide
gauaguccuuugugugaac

SEQ ID NO: 2923278 - RNA, 19 nt, Artificial Sequence
  Description of Artificial Sequence: Synthetic oligonucleotide
aucugcggaccuguauucg

SEQ ID NO: 2923279 - RNA, 19 nt, Artificial Sequence
  Description of Artificial Sequence: Synthetic oligonucleotide
cuguggacugccaauaggu

SEQ ID NO: 2923280 - RNA, 19 nt, Artificial Sequence
  Description of Artificial Sequence: Synthetic oligonucleotide
ugccaauagguggcgauuc

SEQ ID NO: 2923281 - RNA, 19 nt, Artificial Sequence
  Description of Artificial Sequence: Synthetic oligonucleotide
gugugaacugaaauuaugu

SEQ ID NO: 2923282 - RNA, 19 nt, Artificial Sequence
  Description of Artificial Sequence: Synthetic oligonucleotide
guacuggcauucauagggc

SEQ ID NO: 2923283 - RNA, 19 nt, Artificial Sequence
  Description of Artificial Sequence: Synthetic oligonucleotide
gguggcgauucaauaagcc

SEQ ID NO: 2923284 - RNA, 19 nt, Artificial Sequence
  Description of Artificial Sequence: Synthetic oligonucleotide
cacuuaugaggauaguccu

SEQ ID NO: 2923285 - RNA, 19 nt, Artificial Sequence
  Description of Artificial Sequence: Synthetic oligonucleotide
accuguauucgcaguacug

SEQ ID NO: 2923286 - RNA, 19 nt, Artificial Sequence
  Description of Artificial Sequence: Synthetic oligonucleotide
cuugaauggcaucucuuua

SEQ ID NO: 2923287 - RNA, 19 nt, Artificial Sequence
  Description of Artificial Sequence: Synthetic oligonucleotide
uggucgcaaugcaaacacu

SEQ ID NO: 2923288 - RNA, 19 nt, Artificial Sequence
  Description of Artificial Sequence: Synthetic oligonucleotide
guuguugcaccucuuuggu

SEQ ID NO: 2923289 - RNA, 19 nt, Artificial Sequence
  Description of Artificial Sequence: Synthetic oligonucleotide
gaauggcaucucuuuacua

SEQ ID NO: 2923290 - RNA, 19 nt, Artificial Sequence
  Description of Artificial Sequence: Synthetic oligonucleotide
auggauucgcaugugcuuu

SEQ ID NO: 2923291 - RNA, 19 nt, Artificial Sequence
  Description of Artificial Sequence: Synthetic oligonucleotide
auaucacacuuaugaggau

SEQ ID NO: 2923292 - RNA, 19 nt, Artificial Sequence
  Description of Artificial Sequence: Synthetic oligonucleotide
gaguucgaacucuuguggu

SEQ ID NO: 2923293 - RNA, 19 nt, Artificial Sequence
  Description of Artificial Sequence: Synthetic oligonucleotide
augugucguuucaaaucac

SEQ ID NO: 2923294 - RNA, 19 nt, Artificial Sequence
  Description of Artificial Sequence: Synthetic oligonucleotide
guggcgauucaauaagccu

SEQ ID NO: 2923295 - RNA, 19 nt, Artificial Sequence
  Description of Artificial Sequence: Synthetic oligonucleotide
gaagaaucugcggaccugu

SEQ ID NO: 2923296 - RNA, 19 nt, Artificial Sequence
  Description of Artificial Sequence: Synthetic oligonucleotide
cauguguuuucaaguuaga

SEQ ID NO: 2923297 - RNA, 19 nt, Artificial Sequence
  Description of Artificial Sequence: Synthetic oligonucleotide
cccgguauggauucgcaug

SEQ ID NO: 2923298 - RNA, 19 nt, Artificial Sequence
  Description of Artificial Sequence: Synthetic oligonucleotide
uugagcucugaugggugac

SEQ ID NO: 2923299 - RNA, 19 nt, Artificial Sequence
  Description of Artificial Sequence: Synthetic oligonucleotide
uccccgguauggauucgca

SEQ ID NO: 2923300 - RNA, 19 nt, Artificial Sequence
  Description of Artificial Sequence: Synthetic oligonucleotide
cugaugggugacggaaacc

SEQ ID NO: 2923301 - RNA, 19 nt, Artificial Sequence
  Description of Artificial Sequence: Synthetic oligonucleotide
gcucucuugauggauaaga

SEQ ID NO: 2923302 - RNA, 19 nt, Artificial Sequence
  Description of Artificial Sequence: Synthetic oligonucleotide
ggcgauucaauaagccuug

SEQ ID NO: 2923303 - RNA, 19 nt, Artificial Sequence
  Description of Artificial Sequence: Synthetic oligonucleotide
uuguugcaccucuuuggua

SEQ ID NO: 2923304 - RNA, 19 nt, Artificial Sequence
  Description of Artificial Sequence: Synthetic oligonucleotide
guauucgcaguacuggcau

SEQ ID NO: 2923305 - RNA, 19 nt, Artificial Sequence
  Description of Artificial Sequence: Synthetic oligonucleotide
guuuugcucucuugaugga

SEQ ID NO: 2923306 - RNA, 19 nt, Artificial Sequence
  Description of Artificial Sequence: Synthetic oligonucleotide
ugcucucuugauggauaag

SEQ ID NO: 2923307 - RNA, 19 nt, Artificial Sequence
  Description of Artificial Sequence: Synthetic oligonucleotide
cucuuugguaucugagaaa

SEQ ID NO: 2923308 - RNA, 19 nt, Artificial Sequence
  Description of Artificial Sequence: Synthetic oligonucleotide
uucgcaguacuggcauuca

SEQ ID NO: 2923309 - RNA, 19 nt, Artificial Sequence
  Description of Artificial Sequence: Synthetic oligonucleotide
acuugaguucgaacucuug

SEQ ID NO: 2923310 - RNA, 19 nt, Artificial Sequence
  Description of Artificial Sequence: Synthetic oligonucleotide
uugcuguggacugccaaua

SEQ ID NO: 2923311 - RNA, 19 nt, Artificial Sequence
  Description of Artificial Sequence: Synthetic oligonucleotide
uucuugcuguggacugcca

SEQ ID NO: 2923312 - RNA, 19 nt, Artificial Sequence
  Description of Artificial Sequence: Synthetic oligonucleotide
guauggauucgcaugugcu

SEQ ID NO: 2923313 - RNA, 19 nt, Artificial Sequence
  Description of Artificial Sequence: Synthetic oligonucleotide
ugguguguuuugcucucuu

SEQ ID NO: 2923314 - RNA, 19 nt, Artificial Sequence
  Description of Artificial Sequence: Synthetic oligonucleotide
ugcaccucuuugguaucug

SEQ ID NO: 2923315 - RNA, 19 nt, Artificial Sequence
  Description of Artificial Sequence: Synthetic oligonucleotide
ucgcaguacuggcauucau

SEQ ID NO: 2923316 - RNA, 19 nt, Artificial Sequence
  Description of Artificial Sequence: Synthetic oligonucleotide
uugccagcacucugcacua

SEQ ID NO: 2923317 - RNA, 19 nt, Artificial Sequence
  Description of Artificial Sequence: Synthetic oligonucleotide
guuuucaaguuagaagaau

SEQ ID NO: 2923318 - RNA, 19 nt, Artificial Sequence
  Description of Artificial Sequence: Synthetic oligonucleotide
cgcaaugcaaacacuggug

SEQ ID NO: 2923319 - RNA, 19 nt, Artificial Sequence
  Description of Artificial Sequence: Synthetic oligonucleotide
gcacucugcacuaauuuga

SEQ ID NO: 2923320 - RNA, 19 nt, Artificial Sequence
  Description of Artificial Sequence: Synthetic oligonucleotide
uauucgcaguacuggcauu

SEQ ID NO: 2923321 - RNA, 19 nt, Artificial Sequence
  Description of Artificial Sequence: Synthetic oligonucleotide
augggugacggaaaccuuu

SEQ ID NO: 2923322 - RNA, 19 nt, Artificial Sequence
  Description of Artificial Sequence: Synthetic oligonucleotide
ucacacuuaugaggauagu

SEQ ID NO: 2923323 - RNA, 19 nt, Artificial Sequence
  Description of Artificial Sequence: Synthetic oligonucleotide
acuuaugaggauaguccuu

SEQ ID NO: 2923324 - RNA, 19 nt, Artificial Sequence
  Description of Artificial Sequence: Synthetic oligonucleotide
uugcaccucuuugguaucu

SEQ ID NO: 2923325 - RNA, 19 nt, Artificial Sequence
  Description of Artificial Sequence: Synthetic oligonucleotide
guugcaccucuuugguauc

SEQ ID NO: 2923326 - RNA, 19 nt, Artificial Sequence
  Description of Artificial Sequence: Synthetic oligonucleotide
gacaaaugucacacuugaa

SEQ ID NO: 2923327 - RNA, 19 nt, Artificial Sequence
  Description of Artificial Sequence: Synthetic oligonucleotide
cuuaugaggauaguccuuu

SEQ ID NO: 2923328 - RNA, 19 nt, Artificial Sequence
  Description of Artificial Sequence: Synthetic oligonucleotide
augucacacuugaauggca

SEQ ID NO: 2923329 - RNA, 19 nt, Artificial Sequence
  Description of Artificial Sequence: Synthetic oligonucleotide
agcucugaugggugacgga

SEQ ID NO: 2923330 - RNA, 19 nt, Artificial Sequence
  Description of Artificial Sequence: Synthetic oligonucleotide
gaccuguauucgcaguacu

SEQ ID NO: 2923331 - RNA, 19 nt, Artificial Sequence
  Description of Artificial Sequence: Synthetic oligonucleotide
caaaucacuugaguucgaa

SEQ ID NO: 2923332 - RNA, 19 nt, Artificial Sequence
  Description of Artificial Sequence: Synthetic oligonucleotide
cugcggaccuguauucgca

SEQ ID NO: 2923333 - RNA, 19 nt, Artificial Sequence
  Description of Artificial Sequence: Synthetic oligonucleotide
cacugguguguuuugcucu

SEQ ID NO: 2923334 - RNA, 19 nt, Artificial Sequence
  Description of Artificial Sequence: Synthetic oligonucleotide
ccucuuugguaucugagaa

SEQ ID NO: 2923335 - RNA, 19 nt, Artificial Sequence
  Description of Artificial Sequence: Synthetic oligonucleotide
cugcacuaauuugaggaaa

SEQ ID NO: 2923336 - RNA, 19 nt, Artificial Sequence
  Description of Artificial Sequence: Synthetic oligonucleotide
gagcauguuguugcaccuc

SEQ ID NO: 2923337 - RNA, 19 nt, Artificial Sequence
  Description of Artificial Sequence: Synthetic oligonucleotide
caauagguggcgauucaau

SEQ ID NO: 2923338 - RNA, 19 nt, Artificial Sequence
  Description of Artificial Sequence: Synthetic oligonucleotide
ucgaacucuuguggucgca

SEQ ID NO: 2923339 - RNA, 19 nt, Artificial Sequence
  Description of Artificial Sequence: Synthetic oligonucleotide
ugcaaacacugguguguuu

SEQ ID NO: 2923340 - RNA, 19 nt, Artificial Sequence
  Description of Artificial Sequence: Synthetic oligonucleotide
augcaaacacugguguguu

SEQ ID NO: 2923341 - RNA, 19 nt, Artificial Sequence
  Description of Artificial Sequence: Synthetic oligonucleotide
cucugaugggugacggaaa

SEQ ID NO: 2923342 - RNA, 19 nt, Artificial Sequence
  Description of Artificial Sequence: Synthetic oligonucleotide
cuugcuguggacugccaau

SEQ ID NO: 2923343 - RNA, 19 nt, Artificial Sequence
  Description of Artificial Sequence: Synthetic oligonucleotide
ggauaguccuuugugugaa

SEQ ID NO: 2923344 - RNA, 19 nt, Artificial Sequence
  Description of Artificial Sequence: Synthetic oligonucleotide
cugaaauuaugugucguuu

SEQ ID NO: 2923345 - RNA, 19 nt, Artificial Sequence
  Description of Artificial Sequence: Synthetic oligonucleotide
cacuaauuugaggaaaguu

SEQ ID NO: 2923346 - RNA, 19 nt, Artificial Sequence
  Description of Artificial Sequence: Synthetic oligonucleotide
ggaaaccuuugccagcacu

SEQ ID NO: 2923347 - RNA, 19 nt, Artificial Sequence
  Description of Artificial Sequence: Synthetic oligonucleotide
gaacucuuguggucgcaau

SEQ ID NO: 2923348 - RNA, 19 nt, Artificial Sequence
  Description of Artificial Sequence: Synthetic oligonucleotide
aagaaucugcggaccugua

SEQ ID NO: 2923349 - RNA, 19 nt, Artificial Sequence
  Description of Artificial Sequence: Synthetic oligonucleotide
uggcauucauagggcuucu

SEQ ID NO: 2923350 - RNA, 19 nt, Artificial Sequence
  Description of Artificial Sequence: Synthetic oligonucleotide
ggaccuguauucgcaguac

SEQ ID NO: 2923351 - RNA, 19 nt, Artificial Sequence
  Description of Artificial Sequence: Synthetic oligonucleotide
cuuugguaucugagaaagu

SEQ ID NO: 2923352 - RNA, 19 nt, Artificial Sequence
  Description of Artificial Sequence: Synthetic oligonucleotide
gcucugaugggugacggaa

SEQ ID NO: 2923353 - RNA, 19 nt, Artificial Sequence
  Description of Artificial Sequence: Synthetic oligonucleotide
gggugacggaaaccuuugc

SEQ ID NO: 2923354 - RNA, 19 nt, Artificial Sequence
  Description of Artificial Sequence: Synthetic oligonucleotide
guccuuugugugaacugaa

SEQ ID NO: 2923355 - RNA, 19 nt, Artificial Sequence
  Description of Artificial Sequence: Synthetic oligonucleotide
ggacugccaauagguggcg

SEQ ID NO: 2923356 - RNA, 19 nt, Artificial Sequence
  Description of Artificial Sequence: Synthetic oligonucleotide
gacugccaauagguggcga

SEQ ID NO: 2923357 - RNA, 19 nt, Artificial Sequence
  Description of Artificial Sequence: Synthetic oligonucleotide
cacuugaauggcaucucuu

SEQ ID NO: 2923358 - RNA, 19 nt, Artificial Sequence
  Description of Artificial Sequence: Synthetic oligonucleotide
gccaauagguggcgauuca

SEQ ID NO: 2923359 - RNA, 19 nt, Artificial Sequence
  Description of Artificial Sequence: Synthetic oligonucleotide
gugucguuucaaaucacuu

SEQ ID NO: 2923360 - RNA, 19 nt, Artificial Sequence
  Description of Artificial Sequence: Synthetic oligonucleotide
cagcacucugcacuaauuu

SEQ ID NO: 2923361 - RNA, 19 nt, Artificial Sequence
  Description of Artificial Sequence: Synthetic oligonucleotide
gcaccucuuugguaucuga

SEQ ID NO: 2923362 - RNA, 19 nt, Artificial Sequence
  Description of Artificial Sequence: Synthetic oligonucleotide
ggcaucucuuuacuaugcu

SEQ ID NO: 2923363 - RNA, 19 nt, Artificial Sequence
  Description of Artificial Sequence: Synthetic oligonucleotide
gcaaacacugguguguuuu

SEQ ID NO: 2923364 - RNA, 19 nt, Artificial Sequence
  Description of Artificial Sequence: Synthetic oligonucleotide
ccuuugugugaacugaaau

SEQ ID NO: 2923365 - RNA, 19 nt, Artificial Sequence
  Description of Artificial Sequence: Synthetic oligonucleotide
gguaucugagaaagucaua

SEQ ID NO: 2923366 - RNA, 19 nt, Artificial Sequence
  Description of Artificial Sequence: Synthetic oligonucleotide
gcaucucuuuacuaugcuu

SEQ ID NO: 2923367 - RNA, 19 nt, Artificial Sequence
  Description of Artificial Sequence: Synthetic oligonucleotide
gaugggugacggaaaccuu

SEQ ID NO: 2923368 - RNA, 19 nt, Artificial Sequence
  Description of Artificial Sequence: Synthetic oligonucleotide
ugccagcacucugcacuaa

SEQ ID NO: 2923369 - RNA, 19 nt, Artificial Sequence
  Description of Artificial Sequence: Synthetic oligonucleotide
cacuugaguucgaacucuu

SEQ ID NO: 2923370 - RNA, 19 nt, Artificial Sequence
  Description of Artificial Sequence: Synthetic oligonucleotide
cguuucaaaucacuugagu

SEQ ID NO: 2923371 - RNA, 19 nt, Artificial Sequence
  Description of Artificial Sequence: Synthetic oligonucleotide
ccuuugccagcacucugca

SEQ ID NO: 2923372 - RNA, 19 nt, Artificial Sequence
  Description of Artificial Sequence: Synthetic oligonucleotide
ccgguauggauucgcaugu

SEQ ID NO: 2923373 - RNA, 19 nt, Artificial Sequence
  Description of Artificial Sequence: Synthetic oligonucleotide
ccaauagguggcgauucaa

SEQ ID NO: 2923374 - RNA, 19 nt, Artificial Sequence
  Description of Artificial Sequence: Synthetic oligonucleotide
cgcaguacuggcauucaua

SEQ ID NO: 2923375 - RNA, 19 nt, Artificial Sequence
  Description of Artificial Sequence: Synthetic oligonucleotide
ccuuguucagcuguuucau

SEQ ID NO: 2923376 - RNA, 19 nt, Artificial Sequence
  Description of Artificial Sequence: Synthetic oligonucleotide
cugccaauagguggcgauu

SEQ ID NO: 2923377 - RNA, 19 nt, Artificial Sequence
  Description of Artificial Sequence: Synthetic oligonucleotide
gccagcacucugcacuaau

SEQ ID NO: 2923378 - RNA, 19 nt, Artificial Sequence
  Description of Artificial Sequence: Synthetic oligonucleotide
gcggaccuguauucgcagu

SEQ ID NO: 2923379 - RNA, 19 nt, Artificial Sequence
  Description of Artificial Sequence: Synthetic oligonucleotide
cugguguguuuugcucucu

SEQ ID NO: 2923380 - RNA, 19 nt, Artificial Sequence
  Description of Artificial Sequence: Synthetic oligonucleotide
cggaccuguauucgcagua

SEQ ID NO: 2923381 - RNA, 19 nt, Artificial Sequence
  Description of Artificial Sequence: Synthetic oligonucleotide
ccagcacucugcacuaauu

SEQ ID NO: 2923382 - RNA, 19 nt, Artificial Sequence
  Description of Artificial Sequence: Synthetic oligonucleotide
cgguauggauucgcaugug

SEQ ID NO: 2923383 - RNA, 19 nt, Artificial Sequence
  Description of Artificial Sequence: Synthetic oligonucleotide
cgaacucuuguggucgcaa

SEQ ID NO: 2923384 - RNA, 19 nt, Artificial Sequence
  Description of Artificial Sequence: Synthetic oligonucleotide
cggaaaccuuugccagcac

SEQ ID NO: 2923385 - RNA, 19 nt, Artificial Sequence
  Description of Artificial Sequence: Synthetic oligonucleotide
gcgauucaauaagccuugu

SEQ ID NO: 2923386 - RNA, 19 nt, Artificial Sequence
  Description of Artificial Sequence: Synthetic oligonucleotide
cgauucaauaagccuuguu

SEQ ID NO: 2923387 - RNA, 19 nt, Artificial Sequence
  Description of Artificial Sequence: Synthetic oligonucleotide
ccccgguauggauucgcau

SEQ ID NO: 2923388 - RNA, 19 nt, Artificial Sequence
  Description of Artificial Sequence: Synthetic oligonucleotide
aaaaggguuaaugagagag

SEQ ID NO: 2923389 - RNA, 19 nt, Artificial Sequence
  Description of Artificial Sequence: Synthetic oligonucleotide
uuauauuucagccaugcca

SEQ ID NO: 2923390 - RNA, 19 nt, Artificial Sequence
  Description of Artificial Sequence: Synthetic oligonucleotide
uauauaaaaggguuaauga

SEQ ID NO: 2923391 - RNA, 19 nt, Artificial Sequence
  Description of Artificial Sequence: Synthetic oligonucleotide
uauaaaaggguuaaugaga

SEQ ID NO: 2923392 - RNA, 19 nt, Artificial Sequence
  Description of Artificial Sequence: Synthetic oligonucleotide
uguaucgugaccuuuaucu

SEQ ID NO: 2923393 - RNA, 19 nt, Artificial Sequence
  Description of Artificial Sequence: Synthetic oligonucleotide
augccaagaagacagaagc

SEQ ID NO: 2923394 - RNA, 19 nt, Artificial Sequence
  Description of Artificial Sequence: Synthetic oligonucleotide
ucuuacagcacaaacucgg

SEQ ID NO: 2923395 - RNA, 19 nt, Artificial Sequence
  Description of Artificial Sequence: Synthetic oligonucleotide
aaugagagaguuugcauag

SEQ ID NO: 2923396 - RNA, 19 nt, Artificial Sequence
  Description of Artificial Sequence: Synthetic oligonucleotide
  modified_base (18)..(18): a, c, u, g, unknown or other
uacacuuguacacagauna

SEQ ID NO: 2923397 - RNA, 19 nt, Artificial Sequence
  Description of Artificial Sequence: Synthetic oligonucleotide
auauaaaaggguuaaugag

SEQ ID NO: 2923398 - RNA, 19 nt, Artificial Sequence
  Description of Artificial Sequence: Synthetic oligonucleotide
gaaggcauauauaaaaggg

SEQ ID NO: 2923399 - RNA, 19 nt, Artificial Sequence
  Description of Artificial Sequence: Synthetic oligonucleotide
aagacagaagccauguucc

SEQ ID NO: 2923400 - RNA, 19 nt, Artificial Sequence
  Description of Artificial Sequence: Synthetic oligonucleotide
uugaagaaggcauauauaa

SEQ ID NO: 2923401 - RNA, 19 nt, Artificial Sequence
  Description of Artificial Sequence: Synthetic oligonucleotide
aaacucggauuucucaggc

SEQ ID NO: 2923402 - RNA, 19 nt, Artificial Sequence
  Description of Artificial Sequence: Synthetic oligonucleotide
uauauuucagccaugccaa

SEQ ID NO: 2923403 - RNA, 19 nt, Artificial Sequence
  Description of Artificial Sequence: Synthetic oligonucleotide
agaaggcauauauaaaagg

SEQ ID NO: 2923404 - RNA, 19 nt, Artificial Sequence
  Description of Artificial Sequence: Synthetic oligonucleotide
ucuguuuugcacuauuuca

SEQ ID NO: 2923405 - RNA, 19 nt, Artificial Sequence
  Description of Artificial Sequence: Synthetic oligonucleotide
ugucuuacagcacaaacuc

SEQ ID NO: 2923406 - RNA, 19 nt, Artificial Sequence
  Description of Artificial Sequence: Synthetic oligonucleotide
auauauaaaaggguuaaug

SEQ ID NO: 2923407 - RNA, 19 nt, Artificial Sequence
  Description of Artificial Sequence: Synthetic oligonucleotide
ucagaguuuugucuuacag

SEQ ID NO: 2923408 - RNA, 19 nt, Artificial Sequence
  Description of Artificial Sequence: Synthetic oligonucleotide
agacauguccucucuaccc

SEQ ID NO: 2923409 - RNA, 19 nt, Artificial Sequence
  Description of Artificial Sequence: Synthetic oligonucleotide
uuuaucucuacagugguca

SEQ ID NO: 2923410 - RNA, 19 nt, Artificial Sequence
  Description of Artificial Sequence: Synthetic oligonucleotide
  modified_base (15)..(15): a, c, u, g, unknown or other
acuuguacacagaunaccc

SEQ ID NO: 2923411 - RNA, 19 nt, Artificial Sequence
  Description of Artificial Sequence: Synthetic oligonucleotide
uuugcacuauuucaucucc

SEQ ID NO: 2923412 - RNA, 19 nt, Artificial Sequence
  Description of Artificial Sequence: Synthetic oligonucleotide
gaagacagaagccauguuc

SEQ ID NO: 2923413 - RNA, 19 nt, Artificial Sequence
  Description of Artificial Sequence: Synthetic oligonucleotide
aaacuacacuuguacacag

SEQ ID NO: 2923414 - RNA, 19 nt, Artificial Sequence
  Description of Artificial Sequence: Synthetic oligonucleotide
gaagccauguuccauuuug

SEQ ID NO: 2923415 - RNA, 19 nt, Artificial Sequence
  Description of Artificial Sequence: Synthetic oligonucleotide
auaaaaggguuaaugagag

SEQ ID NO: 2923416 - RNA, 19 nt, Artificial Sequence
  Description of Artificial Sequence: Synthetic oligonucleotide
aguuuugucuuacagcaca

SEQ ID NO: 2923417 - RNA, 19 nt, Artificial Sequence
  Description of Artificial Sequence: Synthetic oligonucleotide
ugagagaguuugcauagcc

SEQ ID NO: 2923418 - RNA, 19 nt, Artificial Sequence
  Description of Artificial Sequence: Synthetic oligonucleotide
  modified_base (14)..(14): a, c, u, g, unknown or other
cuuguacacagaunacccc

SEQ ID NO: 2923419 - RNA, 19 nt, Artificial Sequence
  Description of Artificial Sequence: Synthetic oligonucleotide
aagaaggcauauauaaaag

SEQ ID NO: 2923420 - RNA, 19 nt, Artificial Sequence
  Description of Artificial Sequence: Synthetic oligonucleotide
guugauauuccuguacugg

SEQ ID NO: 2923421 - RNA, 19 nt, Artificial Sequence
  Description of Artificial Sequence: Synthetic oligonucleotide
uauuucaucuccugcauuc

SEQ ID NO: 2923422 - RNA, 19 nt, Artificial Sequence
  Description of Artificial Sequence: Synthetic oligonucleotide
aucuguuuugcacuauuuc

SEQ ID NO: 2923423 - RNA, 19 nt, Artificial Sequence
  Description of Artificial Sequence: Synthetic oligonucleotide
uugauauuccuguacuggc

SEQ ID NO: 2923424 - RNA, 19 nt, Artificial Sequence
  Description of Artificial Sequence: Synthetic oligonucleotide
  modified_base (13)..(13): a, c, u, g, unknown or other
uuguacacagaunaccccu

SEQ ID NO: 2923425 - RNA, 19 nt, Artificial Sequence
  Description of Artificial Sequence: Synthetic oligonucleotide
ugaagucucagccaauggu

SEQ ID NO: 2923426 - RNA, 19 nt, Artificial Sequence
  Description of Artificial Sequence: Synthetic oligonucleotide
agagaguuugcauagccca

SEQ ID NO: 2923427 - RNA, 19 nt, Artificial Sequence
  Description of Artificial Sequence: Synthetic oligonucleotide
aaugguuucguuguuucca

SEQ ID NO: 2923428 - RNA, 19 nt, Artificial Sequence
  Description of Artificial Sequence: Synthetic oligonucleotide
gugaccuuuaucucuacag

SEQ ID NO: 2923429 - RNA, 19 nt, Artificial Sequence
  Description of Artificial Sequence: Synthetic oligonucleotide
ucagccaaugguuucguug

SEQ ID NO: 2923430 - RNA, 19 nt, Artificial Sequence
  Description of Artificial Sequence: Synthetic oligonucleotide
uccauuuugaagucucagc

SEQ ID NO: 2923431 - RNA, 19 nt, Artificial Sequence
  Description of Artificial Sequence: Synthetic oligonucleotide
  modified_base (16)..(16): a, c, u, g, unknown or other
cacuuguacacagaunacc

SEQ ID NO: 2923432 - RNA, 19 nt, Artificial Sequence
  Description of Artificial Sequence: Synthetic oligonucleotide
aacucggauuucucaggcc

SEQ ID NO: 2923433 - RNA, 19 nt, Artificial Sequence
  Description of Artificial Sequence: Synthetic oligonucleotide
guuugcauagcccagccac

SEQ ID NO: 2923434 - RNA, 19 nt, Artificial Sequence
  Description of Artificial Sequence: Synthetic oligonucleotide
cucagcaaguuucagggcc

SEQ ID NO: 2923435 - RNA, 19 nt, Artificial Sequence
  Description of Artificial Sequence: Synthetic oligonucleotide
gaccuuuaucucuacagug

SEQ ID NO: 2923436 - RNA, 19 nt, Artificial Sequence
  Description of Artificial Sequence: Synthetic oligonucleotide
uuuccaucuguuuugcacu

SEQ ID NO: 2923437 - RNA, 19 nt, Artificial Sequence
  Description of Artificial Sequence: Synthetic oligonucleotide
guccucucuacccacagcg

SEQ ID NO: 2923438 - RNA, 19 nt, Artificial Sequence
  Description of Artificial Sequence: Synthetic oligonucleotide
guuguuuccaucuguuuug

SEQ ID NO: 2923439 - RNA, 19 nt, Artificial Sequence
  Description of Artificial Sequence: Synthetic oligonucleotide
uucagccaugccaagaaga

SEQ ID NO: 2923440 - RNA, 19 nt, Artificial Sequence
  Description of Artificial Sequence: Synthetic oligonucleotide
ucuggaucauguaucguga

SEQ ID NO: 2923441 - RNA, 19 nt, Artificial Sequence
  Description of Artificial Sequence: Synthetic oligonucleotide
auuuugaagucucagccaa

SEQ ID NO: 2923442 - RNA, 19 nt, Artificial Sequence
  Description of Artificial Sequence: Synthetic oligonucleotide
uugaagucucagccaaugg

SEQ ID NO: 2923443 - RNA, 19 nt, Artificial Sequence
  Description of Artificial Sequence: Synthetic oligonucleotide
aaggcauauauaaaagggu

SEQ ID NO: 2923444 - RNA, 19 nt, Artificial Sequence
  Description of Artificial Sequence: Synthetic oligonucleotide
gauuucucaggccucucag

SEQ ID NO: 2923445 - RNA, 19 nt, Artificial Sequence
  Description of Artificial Sequence: Synthetic oligonucleotide
ucucaggccucucagcaag

SEQ ID NO: 2923446 - RNA, 19 nt, Artificial Sequence
  Description of Artificial Sequence: Synthetic oligonucleotide
uguuccauuuugaagucuc

SEQ ID NO: 2923447 - RNA, 19 nt, Artificial Sequence
  Description of Artificial Sequence: Synthetic oligonucleotide
guuuccaucuguuuugcac

SEQ ID NO: 2923448 - RNA, 19 nt, Artificial Sequence
  Description of Artificial Sequence: Synthetic oligonucleotide
ugaagaaggcauauauaaa

SEQ ID NO: 2923449 - RNA, 19 nt, Artificial Sequence
  Description of Artificial Sequence: Synthetic oligonucleotide
aguaggcugcgguaggugg

SEQ ID NO: 2923450 - RNA, 19 nt, Artificial Sequence
  Description of Artificial Sequence: Synthetic oligonucleotide
aguggucagaguuuugucu

SEQ ID NO: 2923451 - RNA, 19 nt, Artificial Sequence
  Description of Artificial Sequence: Synthetic oligonucleotide
uuaaugagagaguuugcau

SEQ ID NO: 2923452 - RNA, 19 nt, Artificial Sequence
  Description of Artificial Sequence: Synthetic oligonucleotide
uaucgugaccuuuaucucu

SEQ ID NO: 2923453 - RNA, 19 nt, Artificial Sequence
  Description of Artificial Sequence: Synthetic oligonucleotide
ugaccuuuaucucuacagu

SEQ ID NO: 2923454 - RNA, 19 nt, Artificial Sequence
  Description of Artificial Sequence: Synthetic oligonucleotide
cucuggaucauguaucgug

SEQ ID NO: 2923455 - RNA, 19 nt, Artificial Sequence
  Description of Artificial Sequence: Synthetic oligonucleotide
uguacuggcacuggaguag

SEQ ID NO: 2923456 - RNA, 19 nt, Artificial Sequence
  Description of Artificial Sequence: Synthetic oligonucleotide
gaaugccugcugcagagag

SEQ ID NO: 2923457 - RNA, 19 nt, Artificial Sequence
  Description of Artificial Sequence: Synthetic oligonucleotide
uuugaagucucagccaaug

SEQ ID NO: 2923458 - RNA, 19 nt, Artificial Sequence
  Description of Artificial Sequence: Synthetic oligonucleotide
  modified_base (7)..(7): a, c, u, g, unknown or other
acagaunaccccucguuau

SEQ ID NO: 2923459 - RNA, 19 nt, Artificial Sequence
  Description of Artificial Sequence: Synthetic oligonucleotide
ucagccaugccaagaagac

SEQ ID NO: 2923460 - RNA, 19 nt, Artificial Sequence
  Description of Artificial Sequence: Synthetic oligonucleotide
uggaucauguaucgugacc

SEQ ID NO: 2923461 - RNA, 19 nt, Artificial Sequence
  Description of Artificial Sequence: Synthetic oligonucleotide
caaacucggauuucucagg

SEQ ID NO: 2923462 - RNA, 19 nt, Artificial Sequence
  Description of Artificial Sequence: Synthetic oligonucleotide
ugcacuauuucaucuccug

SEQ ID NO: 2923463 - RNA, 19 nt, Artificial Sequence
  Description of Artificial Sequence: Synthetic oligonucleotide
uuuugcacuauuucaucuc

SEQ ID NO: 2923464 - RNA, 19 nt, Artificial Sequence
  Description of Artificial Sequence: Synthetic oligonucleotide
agccaugccaagaagacag

SEQ ID NO: 2923465 - RNA, 19 nt, Artificial Sequence
  Description of Artificial Sequence: Synthetic oligonucleotide
ccauuuugaagucucagcc

SEQ ID NO: 2923466 - RNA, 19 nt, Artificial Sequence
  Description of Artificial Sequence: Synthetic oligonucleotide
agaguuugcauagcccagc

SEQ ID NO: 2923467 - RNA, 19 nt, Artificial Sequence
  Description of Artificial Sequence: Synthetic oligonucleotide
uccacucuggaucauguau

SEQ ID NO: 2923468 - RNA, 19 nt, Artificial Sequence
  Description of Artificial Sequence: Synthetic oligonucleotide
aucucuacaguggucagag

SEQ ID NO: 2923469 - RNA, 19 nt, Artificial Sequence
  Description of Artificial Sequence: Synthetic oligonucleotide
accuuuaucucuacagugg

SEQ ID NO: 2923470 - RNA, 19 nt, Artificial Sequence
  Description of Artificial Sequence: Synthetic oligonucleotide
cugcauuccacucuggauc

SEQ ID NO: 2923471 - RNA, 19 nt, Artificial Sequence
  Description of Artificial Sequence: Synthetic oligonucleotide
auuucaucuccugcauucc

SEQ ID NO: 2923472 - RNA, 19 nt, Artificial Sequence
  Description of Artificial Sequence: Synthetic oligonucleotide
acucggauuucucaggccu

SEQ ID NO: 2923473 - RNA, 19 nt, Artificial Sequence
  Description of Artificial Sequence: Synthetic oligonucleotide
ugccaagaagacagaagcc

SEQ ID NO: 2923474 - RNA, 19 nt, Artificial Sequence
  Description of Artificial Sequence: Synthetic oligonucleotide
uuucguuguuuccaucugu

SEQ ID NO: 2923475 - RNA, 19 nt, Artificial Sequence
  Description of Artificial Sequence: Synthetic oligonucleotide
cacucuggaucauguaucg

SEQ ID NO: 2923476 - RNA, 19 nt, Artificial Sequence
  Description of Artificial Sequence: Synthetic oligonucleotide
cagauaaagggccuugcug

SEQ ID NO: 2923477 - RNA, 19 nt, Artificial Sequence
  Description of Artificial Sequence: Synthetic oligonucleotide
aaguuucagggccucguga

SEQ ID NO: 2923478 - RNA, 19 nt, Artificial Sequence
  Description of Artificial Sequence: Synthetic oligonucleotide
uuccgguugauauuccugu

SEQ ID NO: 2923479 - RNA, 19 nt, Artificial Sequence
  Description of Artificial Sequence: Synthetic oligonucleotide
uguuuugcacuauuucauc

SEQ ID NO: 2923480 - RNA, 19 nt, Artificial Sequence
  Description of Artificial Sequence: Synthetic oligonucleotide
uacagcacaaacucggauu

SEQ ID NO: 2923481 - RNA, 19 nt, Artificial Sequence
  Description of Artificial Sequence: Synthetic oligonucleotide
gauaaagggccuugcugug

SEQ ID NO: 2923482 - RNA, 19 nt, Artificial Sequence
  Description of Artificial Sequence: Synthetic oligonucleotide
ucuccugcauuccacucug

SEQ ID NO: 2923483 - RNA, 19 nt, Artificial Sequence
  Description of Artificial Sequence: Synthetic oligonucleotide
aaggguuaaugagagaguu

SEQ ID NO: 2923484 - RNA, 19 nt, Artificial Sequence
  Description of Artificial Sequence: Synthetic oligonucleotide
guuaaugagagaguuugca

SEQ ID NO: 2923485 - RNA, 19 nt, Artificial Sequence
  Description of Artificial Sequence: Synthetic oligonucleotide
auuucagccaugccaagaa

SEQ ID NO: 2923486 - RNA, 19 nt, Artificial Sequence
  Description of Artificial Sequence: Synthetic oligonucleotide
ugcauuccacucuggauca

SEQ ID NO: 2923487 - RNA, 19 nt, Artificial Sequence
  Description of Artificial Sequence: Synthetic oligonucleotide
uccuguacuggcacuggag

SEQ ID NO: 2923488 - RNA, 19 nt, Artificial Sequence
  Description of Artificial Sequence: Synthetic oligonucleotide
uuucagccaugccaagaag

SEQ ID NO: 2923489 - RNA, 19 nt, Artificial Sequence
  Description of Artificial Sequence: Synthetic oligonucleotide
uaaagggccuugcugugga

SEQ ID NO: 2923490 - RNA, 19 nt, Artificial Sequence
  Description of Artificial Sequence: Synthetic oligonucleotide
aaugccugcugcagagagc

SEQ ID NO: 2923491 - RNA, 19 nt, Artificial Sequence
  Description of Artificial Sequence: Synthetic oligonucleotide
  modified_base (10)..(10): a, c, u, g, unknown or other
uacacagaunaccccucgu

SEQ ID NO: 2923492 - RNA, 19 nt, Artificial Sequence
  Description of Artificial Sequence: Synthetic oligonucleotide
uuucaucuccugcauucca

SEQ ID NO: 2923493 - RNA, 19 nt, Artificial Sequence
  Description of Artificial Sequence: Synthetic oligonucleotide
ucauguaucgugaccuuua

SEQ ID NO: 2923494 - RNA, 19 nt, Artificial Sequence
  Description of Artificial Sequence: Synthetic oligonucleotide
uucaucuccugcauuccac

SEQ ID NO: 2923495 - RNA, 19 nt, Artificial Sequence
  Description of Artificial Sequence: Synthetic oligonucleotide
ggguuaaugagagaguuug

SEQ ID NO: 2923496 - RNA, 19 nt, Artificial Sequence
  Description of Artificial Sequence: Synthetic oligonucleotide
uuccauuuugaagucucag

SEQ ID NO: 2923497 - RNA, 19 nt, Artificial Sequence
  Description of Artificial Sequence: Synthetic oligonucleotide
ugcagagagcuuccgguug

SEQ ID NO: 2923498 - RNA, 19 nt, Artificial Sequence
  Description of Artificial Sequence: Synthetic oligonucleotide
ucuacccacagcgggaugc

SEQ ID NO: 2923499 - RNA, 19 nt, Artificial Sequence
  Description of Artificial Sequence: Synthetic oligonucleotide
uuugcauagcccagccaca

SEQ ID NO: 2923500 - RNA, 19 nt, Artificial Sequence
  Description of Artificial Sequence: Synthetic oligonucleotide
guuauauuucagccaugcc

SEQ ID NO: 2923501 - RNA, 19 nt, Artificial Sequence
  Description of Artificial Sequence: Synthetic oligonucleotide
uauuccuguacuggcacug

SEQ ID NO: 2923502 - RNA, 19 nt, Artificial Sequence
  Description of Artificial Sequence: Synthetic oligonucleotide
uuaucucuacaguggucag

SEQ ID NO: 2923503 - RNA, 19 nt, Artificial Sequence
  Description of Artificial Sequence: Synthetic oligonucleotide
cacuauuucaucuccugca

SEQ ID NO: 2923504 - RNA, 19 nt, Artificial Sequence
  Description of Artificial Sequence: Synthetic oligonucleotide
ugcugcagagagcuuccgg

SEQ ID NO: 2923505 - RNA, 19 nt, Artificial Sequence
  Description of Artificial Sequence: Synthetic oligonucleotide
agucucagccaaugguuuc

SEQ ID NO: 2923506 - RNA, 19 nt, Artificial Sequence
  Description of Artificial Sequence: Synthetic oligonucleotide
acuauuucaucuccugcau

SEQ ID NO: 2923507 - RNA, 19 nt, Artificial Sequence
  Description of Artificial Sequence: Synthetic oligonucleotide
ccaaacuacacuuguacac

SEQ ID NO: 2923508 - RNA, 19 nt, Artificial Sequence
  Description of Artificial Sequence: Synthetic oligonucleotide
acauguccucucuacccac

SEQ ID NO: 2923509 - RNA, 19 nt, Artificial Sequence
  Description of Artificial Sequence: Synthetic oligonucleotide
  modified_base (12)..(12): a, c, u, g, unknown or other
uguacacagaunaccccuc

SEQ ID NO: 2923510 - RNA, 19 nt, Artificial Sequence
  Description of Artificial Sequence: Synthetic oligonucleotide
ucagcaaguuucagggccu

SEQ ID NO: 2923511 - RNA, 19 nt, Artificial Sequence
  Description of Artificial Sequence: Synthetic oligonucleotide
uuucagggccucgugaaug

SEQ ID NO: 2923512 - RNA, 19 nt, Artificial Sequence
  Description of Artificial Sequence: Synthetic oligonucleotide
caagaagacagaagccaug

SEQ ID NO: 2923513 - RNA, 19 nt, Artificial Sequence
  Description of Artificial Sequence: Synthetic oligonucleotide
uggaguaggcugcgguagg

SEQ ID NO: 2923514 - RNA, 19 nt, Artificial Sequence
  Description of Artificial Sequence: Synthetic oligonucleotide
  modified_base (3)..(3): a, c, u, g, unknown or other
aunaccccucguuauauuu

SEQ ID NO: 2923515 - RNA, 19 nt, Artificial Sequence
  Description of Artificial Sequence: Synthetic oligonucleotide
agcgggaugcagcugcagg

SEQ ID NO: 2923516 - RNA, 19 nt, Artificial Sequence
  Description of Artificial Sequence: Synthetic oligonucleotide
uauuucagccaugccaaga

SEQ ID NO: 2923517 - RNA, 19 nt, Artificial Sequence
  Description of Artificial Sequence: Synthetic oligonucleotide
aaaggguuaaugagagagu

SEQ ID NO: 2923518 - RNA, 19 nt, Artificial Sequence
  Description of Artificial Sequence: Synthetic oligonucleotide
  modified_base (11)..(11): a, c, u, g, unknown or other
guacacagaunaccccucg

SEQ ID NO: 2923519 - RNA, 19 nt, Artificial Sequence
  Description of Artificial Sequence: Synthetic oligonucleotide
acagauaaagggccuugcu

SEQ ID NO: 2923520 - RNA, 19 nt, Artificial Sequence
  Description of Artificial Sequence: Synthetic oligonucleotide
acagcacaaacucggauuu

SEQ ID NO: 2923521 - RNA, 19 nt, Artificial Sequence
  Description of Artificial Sequence: Synthetic oligonucleotide
ucccgguugaagaaggcau

SEQ ID NO: 2923522 - RNA, 19 nt, Artificial Sequence
  Description of Artificial Sequence: Synthetic oligonucleotide
gaguuugcauagcccagcc

SEQ ID NO: 2923523 - RNA, 19 nt, Artificial Sequence
  Description of Artificial Sequence: Synthetic oligonucleotide
uuacagcacaaacucggau

SEQ ID NO: 2923524 - RNA, 19 nt, Artificial Sequence
  Description of Artificial Sequence: Synthetic oligonucleotide
  modified_base (2)..(2): a, c, u, g, unknown or other
unaccccucguuauauuuc

SEQ ID NO: 2923525 - RNA, 19 nt, Artificial Sequence
  Description of Artificial Sequence: Synthetic oligonucleotide
cacagcgggaugcagcugc

SEQ ID NO: 2923526 - RNA, 19 nt, Artificial Sequence
  Description of Artificial Sequence: Synthetic oligonucleotide
gagagaguuugcauagccc

SEQ ID NO: 2923527 - RNA, 19 nt, Artificial Sequence
  Description of Artificial Sequence: Synthetic oligonucleotide
uccucucuacccacagcgg

SEQ ID NO: 2923528 - RNA, 19 nt, Artificial Sequence
  Description of Artificial Sequence: Synthetic oligonucleotide
aguuucagggccucgugaa

SEQ ID NO: 2923529 - RNA, 19 nt, Artificial Sequence
  Description of Artificial Sequence: Synthetic oligonucleotide
aggccucucagcaaguuuc

SEQ ID NO: 2923530 - RNA, 19 nt, Artificial Sequence
  Description of Artificial Sequence: Synthetic oligonucleotide
auguaucgugaccuuuauc

SEQ ID NO: 2923531 - RNA, 19 nt, Artificial Sequence
  Description of Artificial Sequence: Synthetic oligonucleotide
uaaaaggguuaaugagaga

SEQ ID NO: 2923532 - RNA, 19 nt, Artificial Sequence
  Description of Artificial Sequence: Synthetic oligonucleotide
cauuuugaagucucagcca

SEQ ID NO: 2923533 - RNA, 19 nt, Artificial Sequence
  Description of Artificial Sequence: Synthetic oligonucleotide
cuuccgguugauauuccug

SEQ ID NO: 2923534 - RNA, 19 nt, Artificial Sequence
  Description of Artificial Sequence: Synthetic oligonucleotide
ggugccacagauaaagggc

SEQ ID NO: 2923535 - RNA, 19 nt, Artificial Sequence
  Description of Artificial Sequence: Synthetic oligonucleotide
auagcccagccacagacau

SEQ ID NO: 2923536 - RNA, 19 nt, Artificial Sequence
  Description of Artificial Sequence: Synthetic oligonucleotide
ucuccccaaacuacacuug

SEQ ID NO: 2923537 - RNA, 19 nt, Artificial Sequence
  Description of Artificial Sequence: Synthetic oligonucleotide
uccugcauuccacucugga

SEQ ID NO: 2923538 - RNA, 19 nt, Artificial Sequence
  Description of Artificial Sequence: Synthetic oligonucleotide
uucguuguuuccaucuguu

SEQ ID NO: 2923539 - RNA, 19 nt, Artificial Sequence
  Description of Artificial Sequence: Synthetic oligonucleotide
caaugguuucguuguuucc

SEQ ID NO: 2923540 - RNA, 19 nt, Artificial Sequence
  Description of Artificial Sequence: Synthetic oligonucleotide
auaaagggccuugcugugg

SEQ ID NO: 2923541 - RNA, 19 nt, Artificial Sequence
  Description of Artificial Sequence: Synthetic oligonucleotide
aaagggccuugcuguggac

SEQ ID NO: 2923542 - RNA, 19 nt, Artificial Sequence
  Description of Artificial Sequence: Synthetic oligonucleotide
acagaagccauguuccauu

SEQ ID NO: 2923543 - RNA, 19 nt, Artificial Sequence
  Description of Artificial Sequence: Synthetic oligonucleotide
gacauguccucucuaccca

SEQ ID NO: 2923544 - RNA, 19 nt, Artificial Sequence
  Description of Artificial Sequence: Synthetic oligonucleotide
uggcacuggaguaggcugc

SEQ ID NO: 2923545 - RNA, 19 nt, Artificial Sequence
  Description of Artificial Sequence: Synthetic oligonucleotide
  modified_base (9)..(9): a, c, u, g, unknown or other
acacagaunaccccucguu

SEQ ID NO: 2923546 - RNA, 19 nt, Artificial Sequence
  Description of Artificial Sequence: Synthetic oligonucleotide
gccauguuccauuuugaag

SEQ ID NO: 2923547 - RNA, 19 nt, Artificial Sequence
  Description of Artificial Sequence: Synthetic oligonucleotide
guuucguuguuuccaucug

SEQ ID NO: 2923548 - RNA, 19 nt, Artificial Sequence
  Description of Artificial Sequence: Synthetic oligonucleotide
cagacauguccucucuacc

SEQ ID NO: 2923549 - RNA, 19 nt, Artificial Sequence
  Description of Artificial Sequence: Synthetic oligonucleotide
acaguggucagaguuuugu

SEQ ID NO: 2923550 - RNA, 19 nt, Artificial Sequence
  Description of Artificial Sequence: Synthetic oligonucleotide
agcacaaacucggauuucu

SEQ ID NO: 2923551 - RNA, 19 nt, Artificial Sequence
  Description of Artificial Sequence: Synthetic oligonucleotide
cauguuccauuuugaaguc

SEQ ID NO: 2923552 - RNA, 19 nt, Artificial Sequence
  Description of Artificial Sequence: Synthetic oligonucleotide
auauuucagccaugccaag

SEQ ID NO: 2923553 - RNA, 19 nt, Artificial Sequence
  Description of Artificial Sequence: Synthetic oligonucleotide
cuuuaucucuacagugguc

SEQ ID NO: 2923554 - RNA, 19 nt, Artificial Sequence
  Description of Artificial Sequence: Synthetic oligonucleotide
cuggcacuggaguaggcug

SEQ ID NO: 2923555 - RNA, 19 nt, Artificial Sequence
  Description of Artificial Sequence: Synthetic oligonucleotide
cccucguuauauuucagcc

SEQ ID NO: 2923556 - RNA, 19 nt, Artificial Sequence
  Description of Artificial Sequence: Synthetic oligonucleotide
aucuccugcauuccacucu

SEQ ID NO: 2923557 - RNA, 19 nt, Artificial Sequence
  Description of Artificial Sequence: Synthetic oligonucleotide
gagaguuugcauagcccag

SEQ ID NO: 2923558 - RNA, 19 nt, Artificial Sequence
  Description of Artificial Sequence: Synthetic oligonucleotide
gucuuacagcacaaacucg

SEQ ID NO: 2923559 - RNA, 19 nt, Artificial Sequence
  Description of Artificial Sequence: Synthetic oligonucleotide
uugcauagcccagccacag

SEQ ID NO: 2923560 - RNA, 19 nt, Artificial Sequence
  Description of Artificial Sequence: Synthetic oligonucleotide
ggcggugccacagauaaag

SEQ ID NO: 2923561 - RNA, 19 nt, Artificial Sequence
  Description of Artificial Sequence: Synthetic oligonucleotide
cacaaacucggauuucuca

SEQ ID NO: 2923562 - RNA, 19 nt, Artificial Sequence
  Description of Artificial Sequence: Synthetic oligonucleotide
gucucagccaaugguuucg

SEQ ID NO: 2923563 - RNA, 19 nt, Artificial Sequence
  Description of Artificial Sequence: Synthetic oligonucleotide
aggcauauauaaaaggguu

SEQ ID NO: 2923564 - RNA, 19 nt, Artificial Sequence
  Description of Artificial Sequence: Synthetic oligonucleotide
caaacuacacuuguacaca

SEQ ID NO: 2923565 - RNA, 19 nt, Artificial Sequence
  Description of Artificial Sequence: Synthetic oligonucleotide
uugcacuauuucaucuccu

SEQ ID NO: 2923566 - RNA, 19 nt, Artificial Sequence
  Description of Artificial Sequence: Synthetic oligonucleotide
ucucagcaaguuucagggc

SEQ ID NO: 2923567 - RNA, 19 nt, Artificial Sequence
  Description of Artificial Sequence: Synthetic oligonucleotide
augccugcugcagagagcu

SEQ ID NO: 2923568 - RNA, 19 nt, Artificial Sequence
  Description of Artificial Sequence: Synthetic oligonucleotide
uuguuuccaucuguuuugc

SEQ ID NO: 2923569 - RNA, 19 nt, Artificial Sequence
  Description of Artificial Sequence: Synthetic oligonucleotide
gguugauauuccuguacug

SEQ ID NO: 2923570 - RNA, 19 nt, Artificial Sequence
  Description of Artificial Sequence: Synthetic oligonucleotide
gugccacagauaaagggcc

SEQ ID NO: 2923571 - RNA, 19 nt, Artificial Sequence
  Description of Artificial Sequence: Synthetic oligonucleotide
guaucgugaccuuuaucuc

SEQ ID NO: 2923572 - RNA, 19 nt, Artificial Sequence
  Description of Artificial Sequence: Synthetic oligonucleotide
gagagcuuccgguugauau

SEQ ID NO: 2923573 - RNA, 19 nt, Artificial Sequence
  Description of Artificial Sequence: Synthetic oligonucleotide
ucguuauauuucagccaug

SEQ ID NO: 2923574 - RNA, 19 nt, Artificial Sequence
  Description of Artificial Sequence: Synthetic oligonucleotide
ucgugaaugccugcugcag

SEQ ID NO: 2923575 - RNA, 19 nt, Artificial Sequence
  Description of Artificial Sequence: Synthetic oligonucleotide
auguccucucuacccacag

SEQ ID NO: 2923576 - RNA, 19 nt, Artificial Sequence
  Description of Artificial Sequence: Synthetic oligonucleotide
uuuugaagucucagccaau

SEQ ID NO: 2923577 - RNA, 19 nt, Artificial Sequence
  Description of Artificial Sequence: Synthetic oligonucleotide
auauuccuguacuggcacu

SEQ ID NO: 2923578 - RNA, 19 nt, Artificial Sequence
  Description of Artificial Sequence: Synthetic oligonucleotide
ucaggucccgguugaagaa

SEQ ID NO: 2923579 - RNA, 19 nt, Artificial Sequence
  Description of Artificial Sequence: Synthetic oligonucleotide
  modified_base (17)..(17): a, c, u, g, unknown or other
acacuuguacacagaunac

SEQ ID NO: 2923580 - RNA, 19 nt, Artificial Sequence
  Description of Artificial Sequence: Synthetic oligonucleotide
uguccucucuacccacagc

SEQ ID NO: 2923581 - RNA, 19 nt, Artificial Sequence
  Description of Artificial Sequence: Synthetic oligonucleotide
ccauguuccauuuugaagu

SEQ ID NO: 2923582 - RNA, 19 nt, Artificial Sequence
  Description of Artificial Sequence: Synthetic oligonucleotide
gguugaagaaggcauauau

SEQ ID NO: 2923583 - RNA, 19 nt, Artificial Sequence
  Description of Artificial Sequence: Synthetic oligonucleotide
cuggaguaggcugcgguag

SEQ ID NO: 2923584 - RNA, 19 nt, Artificial Sequence
  Description of Artificial Sequence: Synthetic oligonucleotide
uuuugucuuacagcacaaa

SEQ ID NO: 2923585 - RNA, 19 nt, Artificial Sequence
  Description of Artificial Sequence: Synthetic oligonucleotide
ccucucagcaaguuucagg

SEQ ID NO: 2923586 - RNA, 19 nt, Artificial Sequence
  Description of Artificial Sequence: Synthetic oligonucleotide
agacagaagccauguucca

SEQ ID NO: 2923587 - RNA, 19 nt, Artificial Sequence
  Description of Artificial Sequence: Synthetic oligonucleotide
augguuucguuguuuccau

SEQ ID NO: 2923588 - RNA, 19 nt, Artificial Sequence
  Description of Artificial Sequence: Synthetic oligonucleotide
  modified_base (5)..(5): a, c, u, g, unknown or other
agaunaccccucguuauau

SEQ ID NO: 2923589 - RNA, 19 nt, Artificial Sequence
  Description of Artificial Sequence: Synthetic oligonucleotide
ugccacagauaaagggccu

SEQ ID NO: 2923590 - RNA, 19 nt, Artificial Sequence
  Description of Artificial Sequence: Synthetic oligonucleotide
cucguuauauuucagccau

SEQ ID NO: 2923591 - RNA, 19 nt, Artificial Sequence
  Description of Artificial Sequence: Synthetic oligonucleotide
aagggccuugcuguggaca

SEQ ID NO: 2923592 - RNA, 19 nt, Artificial Sequence
  Description of Artificial Sequence: Synthetic oligonucleotide
uguuuccaucuguuuugca

SEQ ID NO: 2923593 - RNA, 19 nt, Artificial Sequence
  Description of Artificial Sequence: Synthetic oligonucleotide
cacagauaaagggccuugc

SEQ ID NO: 2923594 - RNA, 19 nt, Artificial Sequence
  Description of Artificial Sequence: Synthetic oligonucleotide
agccauguuccauuuugaa

SEQ ID NO: 2923595 - RNA, 19 nt, Artificial Sequence
  Description of Artificial Sequence: Synthetic oligonucleotide
auuccuguacuggcacugg

SEQ ID NO: 2923596 - RNA, 19 nt, Artificial Sequence
  Description of Artificial Sequence: Synthetic oligonucleotide
cuggaucauguaucgugac

SEQ ID NO: 2923597 - RNA, 19 nt, Artificial Sequence
  Description of Artificial Sequence: Synthetic oligonucleotide
gcauagcccagccacagac

SEQ ID NO: 2923598 - RNA, 19 nt, Artificial Sequence
  Description of Artificial Sequence: Synthetic oligonucleotide
cuuacagcacaaacucgga

SEQ ID NO: 2923599 - RNA, 19 nt, Artificial Sequence
  Description of Artificial Sequence: Synthetic oligonucleotide
aacuacacuuguacacaga

SEQ ID NO: 2923600 - RNA, 19 nt, Artificial Sequence
  Description of Artificial Sequence: Synthetic oligonucleotide
caggcggugccacagauaa

SEQ ID NO: 2923601 - RNA, 19 nt, Artificial Sequence
  Description of Artificial Sequence: Synthetic oligonucleotide
aagccauguuccauuuuga

SEQ ID NO: 2923602 - RNA, 19 nt, Artificial Sequence
  Description of Artificial Sequence: Synthetic oligonucleotide
aguuugcauagcccagcca

SEQ ID NO: 2923603 - RNA, 19 nt, Artificial Sequence
  Description of Artificial Sequence: Synthetic oligonucleotide
uacaguggucagaguuuug

SEQ ID NO: 2923604 - RNA, 19 nt, Artificial Sequence
  Description of Artificial Sequence: Synthetic oligonucleotide
gcacuauuucaucuccugc

SEQ ID NO: 2923605 - RNA, 19 nt, Artificial Sequence
  Description of Artificial Sequence: Synthetic oligonucleotide
aagucucagccaaugguuu

SEQ ID NO: 2923606 - RNA, 19 nt, Artificial Sequence
  Description of Artificial Sequence: Synthetic oligonucleotide
guacuggcacuggaguagg

SEQ ID NO: 2923607 - RNA, 19 nt, Artificial Sequence
  Description of Artificial Sequence: Synthetic oligonucleotide
uuccaucuguuuugcacua

SEQ ID NO: 2923608 - RNA, 19 nt, Artificial Sequence
  Description of Artificial Sequence: Synthetic oligonucleotide
cguuauauuucagccaugc

SEQ ID NO: 2923609 - RNA, 19 nt, Artificial Sequence
  Description of Artificial Sequence: Synthetic oligonucleotide
ugcgguaggugguccucag

SEQ ID NO: 2923610 - RNA, 19 nt, Artificial Sequence
  Description of Artificial Sequence: Synthetic oligonucleotide
ugcauagcccagccacaga

SEQ ID NO: 2923611 - RNA, 19 nt, Artificial Sequence
  Description of Artificial Sequence: Synthetic oligonucleotide
guugaagaaggcauauaua

SEQ ID NO: 2923612 - RNA, 19 nt, Artificial Sequence
  Description of Artificial Sequence: Synthetic oligonucleotide
ucggauuucucaggccucu

SEQ ID NO: 2923613 - RNA, 19 nt, Artificial Sequence
  Description of Artificial Sequence: Synthetic oligonucleotide
acuggaguaggcugcggua

SEQ ID NO: 2923614 - RNA, 19 nt, Artificial Sequence
  Description of Artificial Sequence: Synthetic oligonucleotide
ccccaaacuacacuuguac

SEQ ID NO: 2923615 - RNA, 19 nt, Artificial Sequence
  Description of Artificial Sequence: Synthetic oligonucleotide
acuggcacuggaguaggcu

SEQ ID NO: 2923616 - RNA, 19 nt, Artificial Sequence
  Description of Artificial Sequence: Synthetic oligonucleotide
cuguuuugcacuauuucau

SEQ ID NO: 2923617 - RNA, 19 nt, Artificial Sequence
  Description of Artificial Sequence: Synthetic oligonucleotide
caguggucagaguuuuguc

SEQ ID NO: 2923618 - RNA, 19 nt, Artificial Sequence
  Description of Artificial Sequence: Synthetic oligonucleotide
aggucccgguugaagaagg

SEQ ID NO: 2923619 - RNA, 19 nt, Artificial Sequence
  Description of Artificial Sequence: Synthetic oligonucleotide
gaugcagcugcaggcggug

SEQ ID NO: 2923620 - RNA, 19 nt, Artificial Sequence
  Description of Artificial Sequence: Synthetic oligonucleotide
gaguuuugucuuacagcac

SEQ ID NO: 2923621 - RNA, 19 nt, Artificial Sequence
  Description of Artificial Sequence: Synthetic oligonucleotide
ccucucuacccacagcggg

SEQ ID NO: 2923622 - RNA, 19 nt, Artificial Sequence
  Description of Artificial Sequence: Synthetic oligonucleotide
uucucaggccucucagcaa

SEQ ID NO: 2923623 - RNA, 19 nt, Artificial Sequence
  Description of Artificial Sequence: Synthetic oligonucleotide
cauuccacucuggaucaug

SEQ ID NO: 2923624 - RNA, 19 nt, Artificial Sequence
  Description of Artificial Sequence: Synthetic oligonucleotide
ucguuguuuccaucuguuu

SEQ ID NO: 2923625 - RNA, 19 nt, Artificial Sequence
  Description of Artificial Sequence: Synthetic oligonucleotide
gguuucguuguuuccaucu

SEQ ID NO: 2923626 - RNA, 19 nt, Artificial Sequence
  Description of Artificial Sequence: Synthetic oligonucleotide
ccaaugguuucguuguuuc

SEQ ID NO: 2923627 - RNA, 19 nt, Artificial Sequence
  Description of Artificial Sequence: Synthetic oligonucleotide
ugcaggcggugccacagau

SEQ ID NO: 2923628 - RNA, 19 nt, Artificial Sequence
  Description of Artificial Sequence: Synthetic oligonucleotide
gaagucucagccaaugguu

SEQ ID NO: 2923629 - RNA, 19 nt, Artificial Sequence
  Description of Artificial Sequence: Synthetic oligonucleotide
  modified_base (8)..(8): a, c, u, g, unknown or other
cacagaunaccccucguua

SEQ ID NO: 2923630 - RNA, 19 nt, Artificial Sequence
  Description of Artificial Sequence: Synthetic oligonucleotide
cucggauuucucaggccuc

SEQ ID NO: 2923631 - RNA, 19 nt, Artificial Sequence
  Description of Artificial Sequence: Synthetic oligonucleotide
ggaucauguaucgugaccu

SEQ ID NO: 2923632 - RNA, 19 nt, Artificial Sequence
  Description of Artificial Sequence: Synthetic oligonucleotide
agggccuugcuguggacaa

SEQ ID NO: 2923633 - RNA, 19 nt, Artificial Sequence
  Description of Artificial Sequence: Synthetic oligonucleotide
agcaaguuucagggccucg

SEQ ID NO: 2923634 - RNA, 19 nt, Artificial Sequence
  Description of Artificial Sequence: Synthetic oligonucleotide
cucuacaguggucagaguu

SEQ ID NO: 2923635 - RNA, 19 nt, Artificial Sequence
  Description of Artificial Sequence: Synthetic oligonucleotide
cucucuacccacagcggga

SEQ ID NO: 2923636 - RNA, 19 nt, Artificial Sequence
  Description of Artificial Sequence: Synthetic oligonucleotide
uggucagaguuuugucuua

SEQ ID NO: 2923637 - RNA, 19 nt, Artificial Sequence
  Description of Artificial Sequence: Synthetic oligonucleotide
uacuggcacuggaguaggc

SEQ ID NO: 2923638 - RNA, 19 nt, Artificial Sequence
  Description of Artificial Sequence: Synthetic oligonucleotide
agaagacagaagccauguu

SEQ ID NO: 2923639 - RNA, 19 nt, Artificial Sequence
  Description of Artificial Sequence: Synthetic oligonucleotide
gguuaaugagagaguuugc

SEQ ID NO: 2923640 - RNA, 19 nt, Artificial Sequence
  Description of Artificial Sequence: Synthetic oligonucleotide
uccgguugauauuccugua

SEQ ID NO: 2923641 - RNA, 19 nt, Artificial Sequence
  Description of Artificial Sequence: Synthetic oligonucleotide
gaguaggcugcgguaggug

SEQ ID NO: 2923642 - RNA, 19 nt, Artificial Sequence
  Description of Artificial Sequence: Synthetic oligonucleotide
ugaaugccugcugcagaga

SEQ ID NO: 2923643 - RNA, 19 nt, Artificial Sequence
  Description of Artificial Sequence: Synthetic oligonucleotide
uagcccagccacagacaug

SEQ ID NO: 2923644 - RNA, 19 nt, Artificial Sequence
  Description of Artificial Sequence: Synthetic oligonucleotide
ucucuacccacagcgggau

SEQ ID NO: 2923645 - RNA, 19 nt, Artificial Sequence
  Description of Artificial Sequence: Synthetic oligonucleotide
gucagaguuuugucuuaca

SEQ ID NO: 2923646 - RNA, 19 nt, Artificial Sequence
  Description of Artificial Sequence: Synthetic oligonucleotide
cagccaaugguuucguugu

SEQ ID NO: 2923647 - RNA, 19 nt, Artificial Sequence
  Description of Artificial Sequence: Synthetic oligonucleotide
agcuuccgguugauauucc

SEQ ID NO: 2923648 - RNA, 19 nt, Artificial Sequence
  Description of Artificial Sequence: Synthetic oligonucleotide
cggugccacagauaaaggg

SEQ ID NO: 2923649 - RNA, 19 nt, Artificial Sequence
  Description of Artificial Sequence: Synthetic oligonucleotide
cucgugaaugccugcugca

SEQ ID NO: 2923650 - RNA, 19 nt, Artificial Sequence
  Description of Artificial Sequence: Synthetic oligonucleotide
auguuccauuuugaagucu

SEQ ID NO: 2923651 - RNA, 19 nt, Artificial Sequence
  Description of Artificial Sequence: Synthetic oligonucleotide
gcgggaugcagcugcaggc

SEQ ID NO: 2923652 - RNA, 19 nt, Artificial Sequence
  Description of Artificial Sequence: Synthetic oligonucleotide
aucauguaucgugaccuuu

SEQ ID NO: 2923653 - RNA, 19 nt, Artificial Sequence
  Description of Artificial Sequence: Synthetic oligonucleotide
ugguuucguuguuuccauc

SEQ ID NO: 2923654 - RNA, 19 nt, Artificial Sequence
  Description of Artificial Sequence: Synthetic oligonucleotide
gggaugcagcugcaggcgg

SEQ ID NO: 2923655 - RNA, 19 nt, Artificial Sequence
  Description of Artificial Sequence: Synthetic oligonucleotide
  modified_base (19)..(19): a, c, u, g, unknown or other
cuacacuuguacacagaun

SEQ ID NO: 2923656 - RNA, 19 nt, Artificial Sequence
  Description of Artificial Sequence: Synthetic oligonucleotide
ccucgugaaugccugcugc

SEQ ID NO: 2923657 - RNA, 19 nt, Artificial Sequence
  Description of Artificial Sequence: Synthetic oligonucleotide
cauagcccagccacagaca

SEQ ID NO: 2923658 - RNA, 19 nt, Artificial Sequence
  Description of Artificial Sequence: Synthetic oligonucleotide
ccccucguuauauuucagc

SEQ ID NO: 2923659 - RNA, 19 nt, Artificial Sequence
  Description of Artificial Sequence: Synthetic oligonucleotide
ucucagccaaugguuucgu

SEQ ID NO: 2923660 - RNA, 19 nt, Artificial Sequence
  Description of Artificial Sequence: Synthetic oligonucleotide
guuuugucuuacagcacaa

SEQ ID NO: 2923661 - RNA, 19 nt, Artificial Sequence
  Description of Artificial Sequence: Synthetic oligonucleotide
ggauuucucaggccucuca

SEQ ID NO: 2923662 - RNA, 19 nt, Artificial Sequence
  Description of Artificial Sequence: Synthetic oligonucleotide
uuccacucuggaucaugua

SEQ ID NO: 2923663 - RNA, 19 nt, Artificial Sequence
  Description of Artificial Sequence: Synthetic oligonucleotide
ucucuacaguggucagagu

SEQ ID NO: 2923664 - RNA, 19 nt, Artificial Sequence
  Description of Artificial Sequence: Synthetic oligonucleotide
ggcauauauaaaaggguua

SEQ ID NO: 2923665 - RNA, 19 nt, Artificial Sequence
  Description of Artificial Sequence: Synthetic oligonucleotide
caggucccgguugaagaag

SEQ ID NO: 2923666 - RNA, 19 nt, Artificial Sequence
  Description of Artificial Sequence: Synthetic oligonucleotide
aucgugaccuuuaucucua

SEQ ID NO: 2923667 - RNA, 19 nt, Artificial Sequence
  Description of Artificial Sequence: Synthetic oligonucleotide
ucagggccucgugaaugcc

SEQ ID NO: 2923668 - RNA, 19 nt, Artificial Sequence
  Description of Artificial Sequence: Synthetic oligonucleotide
cauguccucucuacccaca

SEQ ID NO: 2923669 - RNA, 19 nt, Artificial Sequence
  Description of Artificial Sequence: Synthetic oligonucleotide
ccgguugauauuccuguac

SEQ ID NO: 2923670 - RNA, 19 nt, Artificial Sequence
  Description of Artificial Sequence: Synthetic oligonucleotide
cuguacuggcacuggagua

SEQ ID NO: 2923671 - RNA, 19 nt, Artificial Sequence
  Description of Artificial Sequence: Synthetic oligonucleotide
agggccucgugaaugccug

SEQ ID NO: 2923672 - RNA, 19 nt, Artificial Sequence
  Description of Artificial Sequence: Synthetic oligonucleotide
  modified_base (4)..(4): a, c, u, g, unknown or other
gaunaccccucguuauauu

SEQ ID NO: 2923673 - RNA, 19 nt, Artificial Sequence
  Description of Artificial Sequence: Synthetic oligonucleotide
cuccugcauuccacucugg

SEQ ID NO: 2923674 - RNA, 19 nt, Artificial Sequence
  Description of Artificial Sequence: Synthetic oligonucleotide
ccugcugcagagagcuucc

SEQ ID NO: 2923675 - RNA, 19 nt, Artificial Sequence
  Description of Artificial Sequence: Synthetic oligonucleotide
ucgugaccuuuaucucuac

SEQ ID NO: 2923676 - RNA, 19 nt, Artificial Sequence
  Description of Artificial Sequence: Synthetic oligonucleotide
ccucguuauauuucagcca

SEQ ID NO: 2923677 - RNA, 19 nt, Artificial Sequence
  Description of Artificial Sequence: Synthetic oligonucleotide
aggcugcgguagguggucc

SEQ ID NO: 2923678 - RNA, 19 nt, Artificial Sequence
  Description of Artificial Sequence: Synthetic oligonucleotide
cccaaacuacacuuguaca

SEQ ID NO: 2923679 - RNA, 19 nt, Artificial Sequence
  Description of Artificial Sequence: Synthetic oligonucleotide
  modified_base (6)..(6): a, c, u, g, unknown or other
cagaunaccccucguuaua

SEQ ID NO: 2923680 - RNA, 19 nt, Artificial Sequence
  Description of Artificial Sequence: Synthetic oligonucleotide
gcugcagagagcuuccggu

SEQ ID NO: 2923681 - RNA, 19 nt, Artificial Sequence
  Description of Artificial Sequence: Synthetic oligonucleotide
acucuggaucauguaucgu

SEQ ID NO: 2923682 - RNA, 19 nt, Artificial Sequence
  Description of Artificial Sequence: Synthetic oligonucleotide
uaggcugcgguaggugguc

SEQ ID NO: 2923683 - RNA, 19 nt, Artificial Sequence
  Description of Artificial Sequence: Synthetic oligonucleotide
ggucagaguuuugucuuac

SEQ ID NO: 2923684 - RNA, 19 nt, Artificial Sequence
  Description of Artificial Sequence: Synthetic oligonucleotide
uacccacagcgggaugcag

SEQ ID NO: 2923685 - RNA, 19 nt, Artificial Sequence
  Description of Artificial Sequence: Synthetic oligonucleotide
gucccgguugaagaaggca

SEQ ID NO: 2923686 - RNA, 19 nt, Artificial Sequence
  Description of Artificial Sequence: Synthetic oligonucleotide
uccaucuguuuugcacuau

SEQ ID NO: 2923687 - RNA, 19 nt, Artificial Sequence
  Description of Artificial Sequence: Synthetic oligonucleotide
ggcacuggaguaggcugcg

SEQ ID NO: 2923688 - RNA, 19 nt, Artificial Sequence
  Description of Artificial Sequence: Synthetic oligonucleotide
aggguuaaugagagaguuu

SEQ ID NO: 2923689 - RNA, 19 nt, Artificial Sequence
  Description of Artificial Sequence: Synthetic oligonucleotide
gacagaagccauguuccau

SEQ ID NO: 2923690 - RNA, 19 nt, Artificial Sequence
  Description of Artificial Sequence: Synthetic oligonucleotide
gaucauguaucgugaccuu

SEQ ID NO: 2923691 - RNA, 19 nt, Artificial Sequence
  Description of Artificial Sequence: Synthetic oligonucleotide
guccucaggucccgguuga

SEQ ID NO: 2923692 - RNA, 19 nt, Artificial Sequence
  Description of Artificial Sequence: Synthetic oligonucleotide
gcugcaggcggugccacag

SEQ ID NO: 2923693 - RNA, 19 nt, Artificial Sequence
  Description of Artificial Sequence: Synthetic oligonucleotide
gccacagacauguccucuc

SEQ ID NO: 2923694 - RNA, 19 nt, Artificial Sequence
  Description of Artificial Sequence: Synthetic oligonucleotide
aggugguccucaggucccg

SEQ ID NO: 2923695 - RNA, 19 nt, Artificial Sequence
  Description of Artificial Sequence: Synthetic oligonucleotide
cauauauaaaaggguuaau

SEQ ID NO: 2923696 - RNA, 19 nt, Artificial Sequence
  Description of Artificial Sequence: Synthetic oligonucleotide
ucaggccucucagcaaguu

SEQ ID NO: 2923697 - RNA, 19 nt, Artificial Sequence
  Description of Artificial Sequence: Synthetic oligonucleotide
caucuguuuugcacuauuu

SEQ ID NO: 2923698 - RNA, 19 nt, Artificial Sequence
  Description of Artificial Sequence: Synthetic oligonucleotide
agccaaugguuucguuguu

SEQ ID NO: 2923699 - RNA, 19 nt, Artificial Sequence
  Description of Artificial Sequence: Synthetic oligonucleotide
ccagccacagacauguccu

SEQ ID NO: 2923700 - RNA, 19 nt, Artificial Sequence
  Description of Artificial Sequence: Synthetic oligonucleotide
gcgguaggugguccucagg

SEQ ID NO: 2923701 - RNA, 19 nt, Artificial Sequence
  Description of Artificial Sequence: Synthetic oligonucleotide
gccugcugcagagagcuuc

SEQ ID NO: 2923702 - RNA, 19 nt, Artificial Sequence
  Description of Artificial Sequence: Synthetic oligonucleotide
cucuacccacagcgggaug

SEQ ID NO: 2923703 - RNA, 19 nt, Artificial Sequence
  Description of Artificial Sequence: Synthetic oligonucleotide
accccucguuauauuucag

SEQ ID NO: 2923704 - RNA, 19 nt, Artificial Sequence
  Description of Artificial Sequence: Synthetic oligonucleotide
cagccaugccaagaagaca

SEQ ID NO: 2923705 - RNA, 19 nt, Artificial Sequence
  Description of Artificial Sequence: Synthetic oligonucleotide
cauguaucgugaccuuuau

SEQ ID NO: 2923706 - RNA, 19 nt, Artificial Sequence
  Description of Artificial Sequence: Synthetic oligonucleotide
agcugcaggcggugccaca

SEQ ID NO: 2923707 - RNA, 19 nt, Artificial Sequence
  Description of Artificial Sequence: Synthetic oligonucleotide
ccacagauaaagggccuug

SEQ ID NO: 2923708 - RNA, 19 nt, Artificial Sequence
  Description of Artificial Sequence: Synthetic oligonucleotide
cacuggaguaggcugcggu

SEQ ID NO: 2923709 - RNA, 19 nt, Artificial Sequence
  Description of Artificial Sequence: Synthetic oligonucleotide
cagcacaaacucggauuuc

SEQ ID NO: 2923710 - RNA, 19 nt, Artificial Sequence
  Description of Artificial Sequence: Synthetic oligonucleotide
gccucgugaaugccugcug

SEQ ID NO: 2923711 - RNA, 19 nt, Artificial Sequence
  Description of Artificial Sequence: Synthetic oligonucleotide
gcggugccacagauaaagg

SEQ ID NO: 2923712 - RNA, 19 nt, Artificial Sequence
  Description of Artificial Sequence: Synthetic oligonucleotide
cuauuucaucuccugcauu

SEQ ID NO: 2923713 - RNA, 19 nt, Artificial Sequence
  Description of Artificial Sequence: Synthetic oligonucleotide
ccuuuaucucuacaguggu

SEQ ID NO: 2923714 - RNA, 19 nt, Artificial Sequence
  Description of Artificial Sequence: Synthetic oligonucleotide
guuucagggccucgugaau

SEQ ID NO: 2923715 - RNA, 19 nt, Artificial Sequence
  Description of Artificial Sequence: Synthetic oligonucleotide
cagcaaguuucagggccuc

SEQ ID NO: 2923716 - RNA, 19 nt, Artificial Sequence
  Description of Artificial Sequence: Synthetic oligonucleotide
cuacccacagcgggaugca

SEQ ID NO: 2923717 - RNA, 19 nt, Artificial Sequence
  Description of Artificial Sequence: Synthetic oligonucleotide
gcacaaacucggauuucuc

SEQ ID NO: 2923718 - RNA, 19 nt, Artificial Sequence
  Description of Artificial Sequence: Synthetic oligonucleotide
guaggcugcgguagguggu

SEQ ID NO: 2923719 - RNA, 19 nt, Artificial Sequence
  Description of Artificial Sequence: Synthetic oligonucleotide
cuacaguggucagaguuuu

SEQ ID NO: 2923720 - RNA, 19 nt, Artificial Sequence
  Description of Artificial Sequence: Synthetic oligonucleotide
ccucaggucccgguugaag

SEQ ID NO: 2923721 - RNA, 19 nt, Artificial Sequence
  Description of Artificial Sequence: Synthetic oligonucleotide
ccuguacuggcacuggagu

SEQ ID NO: 2923722 - RNA, 19 nt, Artificial Sequence
  Description of Artificial Sequence: Synthetic oligonucleotide
acagcgggaugcagcugca

SEQ ID NO: 2923723 - RNA, 19 nt, Artificial Sequence
  Description of Artificial Sequence: Synthetic oligonucleotide
ggucccgguugaagaaggc

SEQ ID NO: 2923724 - RNA, 19 nt, Artificial Sequence
  Description of Artificial Sequence: Synthetic oligonucleotide
cagggccucgugaaugccu

SEQ ID NO: 2923725 - RNA, 19 nt, Artificial Sequence
  Description of Artificial Sequence: Synthetic oligonucleotide
cagaagccauguuccauuu

SEQ ID NO: 2923726 - RNA, 19 nt, Artificial Sequence
  Description of Artificial Sequence: Synthetic oligonucleotide
cgggaugcagcugcaggcg

SEQ ID NO: 2923727 - RNA, 19 nt, Artificial Sequence
  Description of Artificial Sequence: Synthetic oligonucleotide
uccucaggucccgguugaa

SEQ ID NO: 2923728 - RNA, 19 nt, Artificial Sequence
  Description of Artificial Sequence: Synthetic oligonucleotide
gcuuccgguugauauuccu

SEQ ID NO: 2923729 - RNA, 19 nt, Artificial Sequence
  Description of Artificial Sequence: Synthetic oligonucleotide
cagcgggaugcagcugcag

SEQ ID NO: 2923730 - RNA, 19 nt, Artificial Sequence
  Description of Artificial Sequence: Synthetic oligonucleotide
gcaaguuucagggccucgu

SEQ ID NO: 2923731 - RNA, 19 nt, Artificial Sequence
  Description of Artificial Sequence: Synthetic oligonucleotide
cugcagagagcuuccgguu

SEQ ID NO: 2923732 - RNA, 19 nt, Artificial Sequence
  Description of Artificial Sequence: Synthetic oligonucleotide
cgugaaugccugcugcaga

SEQ ID NO: 2923733 - RNA, 19 nt, Artificial Sequence
  Description of Artificial Sequence: Synthetic oligonucleotide
cagcugcaggcggugccac

SEQ ID NO: 2923734 - RNA, 19 nt, Artificial Sequence
  Description of Artificial Sequence: Synthetic oligonucleotide
gugguccucaggucccggu

SEQ ID NO: 2923735 - RNA, 19 nt, Artificial Sequence
  Description of Artificial Sequence: Synthetic oligonucleotide
cguuguuuccaucuguuuu

SEQ ID NO: 2923736 - RNA, 19 nt, Artificial Sequence
  Description of Artificial Sequence: Synthetic oligonucleotide
ggccucucagcaaguuuca

SEQ ID NO: 2923737 - RNA, 19 nt, Artificial Sequence
  Description of Artificial Sequence: Synthetic oligonucleotide
gggccucgugaaugccugc

SEQ ID NO: 2923738 - RNA, 19 nt, Artificial Sequence
  Description of Artificial Sequence: Synthetic oligonucleotide
gcacuggaguaggcugcgg

SEQ ID NO: 2923739 - RNA, 19 nt, Artificial Sequence
  Description of Artificial Sequence: Synthetic oligonucleotide
ccugcauuccacucuggau

SEQ ID NO: 2923740 - RNA, 19 nt, Artificial Sequence
  Description of Artificial Sequence: Synthetic oligonucleotide
ugccugcugcagagagcuu

SEQ ID NO: 2923741 - RNA, 19 nt, Artificial Sequence
  Description of Artificial Sequence: Synthetic oligonucleotide
gcagcugcaggcggugcca

SEQ ID NO: 2923742 - RNA, 19 nt, Artificial Sequence
  Description of Artificial Sequence: Synthetic oligonucleotide
cugcaggcggugccacaga

SEQ ID NO: 2923743 - RNA, 19 nt, Artificial Sequence
  Description of Artificial Sequence: Synthetic oligonucleotide
cgguugauauuccuguacu

SEQ ID NO: 2923744 - RNA, 19 nt, Artificial Sequence
  Description of Artificial Sequence: Synthetic oligonucleotide
cucaggccucucagcaagu

SEQ ID NO: 2923745 - RNA, 19 nt, Artificial Sequence
  Description of Artificial Sequence: Synthetic oligonucleotide
cccgguugaagaaggcaua

SEQ ID NO: 2923746 - RNA, 19 nt, Artificial Sequence
  Description of Artificial Sequence: Synthetic oligonucleotide
cgugaccuuuaucucuaca

SEQ ID NO: 2923747 - RNA, 19 nt, Artificial Sequence
  Description of Artificial Sequence: Synthetic oligonucleotide
gggccuugcuguggacaag

SEQ ID NO: 2923748 - RNA, 19 nt, Artificial Sequence
  Description of Artificial Sequence: Synthetic oligonucleotide
gcugcgguaggugguccuc

SEQ ID NO: 2923749 - RNA, 19 nt, Artificial Sequence
  Description of Artificial Sequence: Synthetic oligonucleotide
cccacagcgggaugcagcu

SEQ ID NO: 2923750 - RNA, 19 nt, Artificial Sequence
  Description of Artificial Sequence: Synthetic oligonucleotide
caggccucucagcaaguuu

SEQ ID NO: 2923751 - RNA, 19 nt, Artificial Sequence
  Description of Artificial Sequence: Synthetic oligonucleotide
ggaguaggcugcgguaggu

SEQ ID NO: 2923752 - RNA, 19 nt, Artificial Sequence
  Description of Artificial Sequence: Synthetic oligonucleotide
cgguaggugguccucaggu

SEQ ID NO: 2923753 - RNA, 19 nt, Artificial Sequence
  Description of Artificial Sequence: Synthetic oligonucleotide
ggaugcagcugcaggcggu

SEQ ID NO: 2923754 - RNA, 19 nt, Artificial Sequence
  Description of Artificial Sequence: Synthetic oligonucleotide
cucagccaaugguuucguu

SEQ ID NO: 2923755 - RNA, 19 nt, Artificial Sequence
  Description of Artificial Sequence: Synthetic oligonucleotide
ccaucuguuuugcacuauu

SEQ ID NO: 2923756 - RNA, 19 nt, Artificial Sequence
  Description of Artificial Sequence: Synthetic oligonucleotide
gccaaugguuucguuguuu

SEQ ID NO: 2923757 - RNA, 19 nt, Artificial Sequence
  Description of Artificial Sequence: Synthetic oligonucleotide
ggccucgugaaugccugcu

SEQ ID NO: 2923758 - RNA, 19 nt, Artificial Sequence
  Description of Artificial Sequence: Synthetic oligonucleotide
ccacagacauguccucucu

SEQ ID NO: 2923759 - RNA, 19 nt, Artificial Sequence
  Description of Artificial Sequence: Synthetic oligonucleotide
aggcggugccacagauaaa

SEQ ID NO: 2923760 - RNA, 19 nt, Artificial Sequence
  Description of Artificial Sequence: Synthetic oligonucleotide
ggcugcgguaggugguccu

SEQ ID NO: 2923761 - RNA, 19 nt, Artificial Sequence
  Description of Artificial Sequence: Synthetic oligonucleotide
gccacagauaaagggccuu

SEQ ID NO: 2923762 - RNA, 19 nt, Artificial Sequence
  Description of Artificial Sequence: Synthetic oligonucleotide
gcaggcggugccacagaua

SEQ ID NO: 2923763 - RNA, 19 nt, Artificial Sequence
  Description of Artificial Sequence: Synthetic oligonucleotide
ccacagcgggaugcagcug

SEQ ID NO: 2923764 - RNA, 19 nt, Artificial Sequence
  Description of Artificial Sequence: Synthetic oligonucleotide
ccgguugaagaaggcauau

SEQ ID NO: 2923765 - RNA, 19 nt, Artificial Sequence
  Description of Artificial Sequence: Synthetic oligonucleotide
cggauuucucaggccucuc

SEQ ID NO: 2923766 - RNA, 19 nt, Artificial Sequence
  Description of Artificial Sequence: Synthetic oligonucleotide
cgguugaagaaggcauaua

SEQ ID NO: 2923767 - RNA, 19 nt, Artificial Sequence
  Description of Artificial Sequence: Synthetic oligonucleotide
gcauuccacucuggaucau

SEQ ID NO: 2923768 - RNA, 19 nt, Artificial Sequence
  Description of Artificial Sequence: Synthetic oligonucleotide
  modified_base (1)..(1): a, c, u, g, unknown or other
naccccucguuauauuuca

SEQ ID NO: 2923769 - RNA, 19 nt, Artificial Sequence
  Description of Artificial Sequence: Synthetic oligonucleotide
ucuaguguuauccagggcu

SEQ ID NO: 2923770 - RNA, 19 nt, Artificial Sequence
  Description of Artificial Sequence: Synthetic oligonucleotide
uguauuguuccuugaagcg

SEQ ID NO: 2923771 - RNA, 19 nt, Artificial Sequence
  Description of Artificial Sequence: Synthetic oligonucleotide
uuguauuguuccuugaagc

SEQ ID NO: 2923772 - RNA, 19 nt, Artificial Sequence
  Description of Artificial Sequence: Synthetic oligonucleotide
ugugacuccaucaugucca

SEQ ID NO: 2923773 - RNA, 19 nt, Artificial Sequence
  Description of Artificial Sequence: Synthetic oligonucleotide
uccaucauguccauggucu

SEQ ID NO: 2923774 - RNA, 19 nt, Artificial Sequence
  Description of Artificial Sequence: Synthetic oligonucleotide
ucugccaccgccuggaaag

SEQ ID NO: 2923775 - RNA, 19 nt, Artificial Sequence
  Description of Artificial Sequence: Synthetic oligonucleotide
ugucuaguguuauccaggg

SEQ ID NO: 2923776 - RNA, 19 nt, Artificial Sequence
  Description of Artificial Sequence: Synthetic oligonucleotide
ucauguuucugcuggagca

SEQ ID NO: 2923777 - RNA, 19 nt, Artificial Sequence
  Description of Artificial Sequence: Synthetic oligonucleotide
aucaucuaggagcuccugc

SEQ ID NO: 2923778 - RNA, 19 nt, Artificial Sequence
  Description of Artificial Sequence: Synthetic oligonucleotide
uucacagacagcaggguca

SEQ ID NO: 2923779 - RNA, 19 nt, Artificial Sequence
  Description of Artificial Sequence: Synthetic oligonucleotide
uuuuccaucuucacagaca

SEQ ID NO: 2923780 - RNA, 19 nt, Artificial Sequence
  Description of Artificial Sequence: Synthetic oligonucleotide
cuuguauuguuccuugaag

SEQ ID NO: 2923781 - RNA, 19 nt, Artificial Sequence
  Description of Artificial Sequence: Synthetic oligonucleotide
ucaucuaggagcuccugcc

SEQ ID NO: 2923782 - RNA, 19 nt, Artificial Sequence
  Description of Artificial Sequence: Synthetic oligonucleotide
cucaugucuaguguuaucc

SEQ ID NO: 2923783 - RNA, 19 nt, Artificial Sequence
  Description of Artificial Sequence: Synthetic oligonucleotide
ugccaaguccuucucagcc

SEQ ID NO: 2923784 - RNA, 19 nt, Artificial Sequence
  Description of Artificial Sequence: Synthetic oligonucleotide
cuucccugcauguggaugg

SEQ ID NO: 2923785 - RNA, 19 nt, Artificial Sequence
  Description of Artificial Sequence: Synthetic oligonucleotide
caucugggcauccagggcg

SEQ ID NO: 2923786 - RNA, 19 nt, Artificial Sequence
  Description of Artificial Sequence: Synthetic oligonucleotide
caucuucacagacagcagg

SEQ ID NO: 2923787 - RNA, 19 nt, Artificial Sequence
  Description of Artificial Sequence: Synthetic oligonucleotide
uccuucucgcggcacaugg

SEQ ID NO: 2923788 - RNA, 19 nt, Artificial Sequence
  Description of Artificial Sequence: Synthetic oligonucleotide
ugcagaucaucuaggagcu

SEQ ID NO: 2923789 - RNA, 19 nt, Artificial Sequence
  Description of Artificial Sequence: Synthetic oligonucleotide
agucagguuguuuuccauc

SEQ ID NO: 2923790 - RNA, 19 nt, Artificial Sequence
  Description of Artificial Sequence: Synthetic oligonucleotide
cuggaaagggcccagcagc

SEQ ID NO: 2923791 - RNA, 19 nt, Artificial Sequence
  Description of Artificial Sequence: Synthetic oligonucleotide
ucuuguauuguuccuugaa

SEQ ID NO: 2923792 - RNA, 19 nt, Artificial Sequence
  Description of Artificial Sequence: Synthetic oligonucleotide
caugucuaguguuauccag

SEQ ID NO: 2923793 - RNA, 19 nt, Artificial Sequence
  Description of Artificial Sequence: Synthetic oligonucleotide
ugucuuguauuguuccuug

SEQ ID NO: 2923794 - RNA, 19 nt, Artificial Sequence
  Description of Artificial Sequence: Synthetic oligonucleotide
uguuauccagggcuguggc

SEQ ID NO: 2923795 - RNA, 19 nt, Artificial Sequence
  Description of Artificial Sequence: Synthetic oligonucleotide
uuauccagggcuguggcca

SEQ ID NO: 2923796 - RNA, 19 nt, Artificial Sequence
  Description of Artificial Sequence: Synthetic oligonucleotide
gaaagggcccagcagcucc

SEQ ID NO: 2923797 - RNA, 19 nt, Artificial Sequence
  Description of Artificial Sequence: Synthetic oligonucleotide
guuguuuuccaucuucaca

SEQ ID NO: 2923798 - RNA, 19 nt, Artificial Sequence
  Description of Artificial Sequence: Synthetic oligonucleotide
auguccauggucuucugga

SEQ ID NO: 2923799 - RNA, 19 nt, Artificial Sequence
  Description of Artificial Sequence: Synthetic oligonucleotide
aucuaggagcuccugcccg

SEQ ID NO: 2923800 - RNA, 19 nt, Artificial Sequence
  Description of Artificial Sequence: Synthetic oligonucleotide
agcuucuccuucucgcggc

SEQ ID NO: 2923801 - RNA, 19 nt, Artificial Sequence
  Description of Artificial Sequence: Synthetic oligonucleotide
cagugucuuguauuguucc

SEQ ID NO: 2923802 - RNA, 19 nt, Artificial Sequence
  Description of Artificial Sequence: Synthetic oligonucleotide
cuggcugcagaucaucuag

SEQ ID NO: 2923803 - RNA, 19 nt, Artificial Sequence
  Description of Artificial Sequence: Synthetic oligonucleotide
aggagcugcaggguggucc

SEQ ID NO: 2923804 - RNA, 19 nt, Artificial Sequence
  Description of Artificial Sequence: Synthetic oligonucleotide
uguuccuugaagcgcucug

SEQ ID NO: 2923805 - RNA, 19 nt, Artificial Sequence
  Description of Artificial Sequence: Synthetic oligonucleotide
agcagagucagguuguuuu

SEQ ID NO: 2923806 - RNA, 19 nt, Artificial Sequence
  Description of Artificial Sequence: Synthetic oligonucleotide
uagcuucuccuucucgcgg

SEQ ID NO: 2923807 - RNA, 19 nt, Artificial Sequence
  Description of Artificial Sequence: Synthetic oligonucleotide
cuaguguuauccagggcug

SEQ ID NO: 2923808 - RNA, 19 nt, Artificial Sequence
  Description of Artificial Sequence: Synthetic oligonucleotide
augucuaguguuauccagg

SEQ ID NO: 2923809 - RNA, 19 nt, Artificial Sequence
  Description of Artificial Sequence: Synthetic oligonucleotide
gucucuucuuguguaaggg

SEQ ID NO: 2923810 - RNA, 19 nt, Artificial Sequence
  Description of Artificial Sequence: Synthetic oligonucleotide
ucaugucuaguguuaucca

SEQ ID NO: 2923811 - RNA, 19 nt, Artificial Sequence
  Description of Artificial Sequence: Synthetic oligonucleotide
guauuguuccuugaagcgc

SEQ ID NO: 2923812 - RNA, 19 nt, Artificial Sequence
  Description of Artificial Sequence: Synthetic oligonucleotide
uuccuugaagcgcucugcc

SEQ ID NO: 2923813 - RNA, 19 nt, Artificial Sequence
  Description of Artificial Sequence: Synthetic oligonucleotide
ggagcagaugccaagcucg

SEQ ID NO: 2923814 - RNA, 19 nt, Artificial Sequence
  Description of Artificial Sequence: Synthetic oligonucleotide
cucauguuucugcuggagc

SEQ ID NO: 2923815 - RNA, 19 nt, Artificial Sequence
  Description of Artificial Sequence: Synthetic oligonucleotide
uguccauggucuucuggag

SEQ ID NO: 2923816 - RNA, 19 nt, Artificial Sequence
  Description of Artificial Sequence: Synthetic oligonucleotide
uggagcagcagcuggcgcc

SEQ ID NO: 2923817 - RNA, 19 nt, Artificial Sequence
  Description of Artificial Sequence: Synthetic oligonucleotide
cauggucuucuggagaucc

SEQ ID NO: 2923818 - RNA, 19 nt, Artificial Sequence
  Description of Artificial Sequence: Synthetic oligonucleotide
uggucuucuggagaucccg

SEQ ID NO: 2923819 - RNA, 19 nt, Artificial Sequence
  Description of Artificial Sequence: Synthetic oligonucleotide
uggagaucccgucucuucu

SEQ ID NO: 2923820 - RNA, 19 nt, Artificial Sequence
  Description of Artificial Sequence: Synthetic oligonucleotide
ugucugugacuccaucaug

SEQ ID NO: 2923821 - RNA, 19 nt, Artificial Sequence
  Description of Artificial Sequence: Synthetic oligonucleotide
ucucuucuuguguaagggu

SEQ ID NO: 2923822 - RNA, 19 nt, Artificial Sequence
  Description of Artificial Sequence: Synthetic oligonucleotide
uccauggucuucuggagau

SEQ ID NO: 2923823 - RNA, 19 nt, Artificial Sequence
  Description of Artificial Sequence: Synthetic oligonucleotide
uggccagugucuuguauug

SEQ ID NO: 2923824 - RNA, 19 nt, Artificial Sequence
  Description of Artificial Sequence: Synthetic oligonucleotide
aagcucgcccaggagcugc

SEQ ID NO: 2923825 - RNA, 19 nt, Artificial Sequence
  Description of Artificial Sequence: Synthetic oligonucleotide
ucuucuuguguaaggguuu

SEQ ID NO: 2923826 - RNA, 19 nt, Artificial Sequence
  Description of Artificial Sequence: Synthetic oligonucleotide
cugugacuccaucaugucc

SEQ ID NO: 2923827 - RNA, 19 nt, Artificial Sequence
  Description of Artificial Sequence: Synthetic oligonucleotide
guuuuccaucuucacagac

SEQ ID NO: 2923828 - RNA, 19 nt, Artificial Sequence
  Description of Artificial Sequence: Synthetic oligonucleotide
acagacagcagggucagca

SEQ ID NO: 2923829 - RNA, 19 nt, Artificial Sequence
  Description of Artificial Sequence: Synthetic oligonucleotide
auguuucugcuggagcagc

SEQ ID NO: 2923830 - RNA, 19 nt, Artificial Sequence
  Description of Artificial Sequence: Synthetic oligonucleotide
uccuccagcagagucaggu

SEQ ID NO: 2923831 - RNA, 19 nt, Artificial Sequence
  Description of Artificial Sequence: Synthetic oligonucleotide
agugucuuguauuguuccu

SEQ ID NO: 2923832 - RNA, 19 nt, Artificial Sequence
  Description of Artificial Sequence: Synthetic oligonucleotide
agcucuagcaccugccccu

SEQ ID NO: 2923833 - RNA, 19 nt, Artificial Sequence
  Description of Artificial Sequence: Synthetic oligonucleotide
gaucccgucucuucuugug

SEQ ID NO: 2923834 - RNA, 19 nt, Artificial Sequence
  Description of Artificial Sequence: Synthetic oligonucleotide
uguuucugcuggagcagca

SEQ ID NO: 2923835 - RNA, 19 nt, Artificial Sequence
  Description of Artificial Sequence: Synthetic oligonucleotide
uggaaagggcccagcagcu

SEQ ID NO: 2923836 - RNA, 19 nt, Artificial Sequence
  Description of Artificial Sequence: Synthetic oligonucleotide
ucuaggagcuccugcccgc

SEQ ID NO: 2923837 - RNA, 19 nt, Artificial Sequence
  Description of Artificial Sequence: Synthetic oligonucleotide
uguuuuccaucuucacaga

SEQ ID NO: 2923838 - RNA, 19 nt, Artificial Sequence
  Description of Artificial Sequence: Synthetic oligonucleotide
cauguccauggucuucugg

SEQ ID NO: 2923839 - RNA, 19 nt, Artificial Sequence
  Description of Artificial Sequence: Synthetic oligonucleotide
guggauggccugcacaggc

SEQ ID NO: 2923840 - RNA, 19 nt, Artificial Sequence
  Description of Artificial Sequence: Synthetic oligonucleotide
cuugaagcgcucugccacc

SEQ ID NO: 2923841 - RNA, 19 nt, Artificial Sequence
  Description of Artificial Sequence: Synthetic oligonucleotide
agagucagguuguuuucca

SEQ ID NO: 2923842 - RNA, 19 nt, Artificial Sequence
  Description of Artificial Sequence: Synthetic oligonucleotide
ucucgcggcacauggcugc

SEQ ID NO: 2923843 - RNA, 19 nt, Artificial Sequence
  Description of Artificial Sequence: Synthetic oligonucleotide
cuccaucugggcauccagg

SEQ ID NO: 2923844 - RNA, 19 nt, Artificial Sequence
  Description of Artificial Sequence: Synthetic oligonucleotide
cuucacagacagcaggguc

SEQ ID NO: 2923845 - RNA, 19 nt, Artificial Sequence
  Description of Artificial Sequence: Synthetic oligonucleotide
gaagcgcucugccaccgcc

SEQ ID NO: 2923846 - RNA, 19 nt, Artificial Sequence
  Description of Artificial Sequence: Synthetic oligonucleotide
acaggcagcucaugucuag

SEQ ID NO: 2923847 - RNA, 19 nt, Artificial Sequence
  Description of Artificial Sequence: Synthetic oligonucleotide
cagguuguuuuccaucuuc

SEQ ID NO: 2923848 - RNA, 19 nt, Artificial Sequence
  Description of Artificial Sequence: Synthetic oligonucleotide
agcagcuccaucugggcau

SEQ ID NO: 2923849 - RNA, 19 nt, Artificial Sequence
  Description of Artificial Sequence: Synthetic oligonucleotide
caucuaggagcuccugccc

SEQ ID NO: 2923850 - RNA, 19 nt, Artificial Sequence
  Description of Artificial Sequence: Synthetic oligonucleotide
gcagaugccaagcucgccc

SEQ ID NO: 2923851 - RNA, 19 nt, Artificial Sequence
  Description of Artificial Sequence: Synthetic oligonucleotide
ugcacaggcagcucauguc

SEQ ID NO: 2923852 - RNA, 19 nt, Artificial Sequence
  Description of Artificial Sequence: Synthetic oligonucleotide
gagaucccgucucuucuug

SEQ ID NO: 2923853 - RNA, 19 nt, Artificial Sequence
  Description of Artificial Sequence: Synthetic oligonucleotide
guguuauccagggcugugg

SEQ ID NO: 2923854 - RNA, 19 nt, Artificial Sequence
  Description of Artificial Sequence: Synthetic oligonucleotide
uucuccuucucgcggcaca

SEQ ID NO: 2923855 - RNA, 19 nt, Artificial Sequence
  Description of Artificial Sequence: Synthetic oligonucleotide
guuauccagggcuguggcc

SEQ ID NO: 2923856 - RNA, 19 nt, Artificial Sequence
  Description of Artificial Sequence: Synthetic oligonucleotide
aggagcuccugcccgcuuc

SEQ ID NO: 2923857 - RNA, 19 nt, Artificial Sequence
  Description of Artificial Sequence: Synthetic oligonucleotide
ucugugacuccaucauguc

SEQ ID NO: 2923858 - RNA, 19 nt, Artificial Sequence
  Description of Artificial Sequence: Synthetic oligonucleotide
uccuugaagcgcucugcca

SEQ ID NO: 2923859 - RNA, 19 nt, Artificial Sequence
  Description of Artificial Sequence: Synthetic oligonucleotide
gcugccaaguccuucucag

SEQ ID NO: 2923860 - RNA, 19 nt, Artificial Sequence
  Description of Artificial Sequence: Synthetic oligonucleotide
cuguagcuucuccuucucg

SEQ ID NO: 2923861 - RNA, 19 nt, Artificial Sequence
  Description of Artificial Sequence: Synthetic oligonucleotide
cauguuucugcuggagcag

SEQ ID NO: 2923862 - RNA, 19 nt, Artificial Sequence
  Description of Artificial Sequence: Synthetic oligonucleotide
uguggauggccugcacagg

SEQ ID NO: 2923863 - RNA, 19 nt, Artificial Sequence
  Description of Artificial Sequence: Synthetic oligonucleotide
agcaccugccccuguagcu

SEQ ID NO: 2923864 - RNA, 19 nt, Artificial Sequence
  Description of Artificial Sequence: Synthetic oligonucleotide
uucucgcggcacauggcug

SEQ ID NO: 2923865 - RNA, 19 nt, Artificial Sequence
  Description of Artificial Sequence: Synthetic oligonucleotide
cuucuggagaucccgucuc

SEQ ID NO: 2923866 - RNA, 19 nt, Artificial Sequence
  Description of Artificial Sequence: Synthetic oligonucleotide
agcagggucagcagcagug

SEQ ID NO: 2923867 - RNA, 19 nt, Artificial Sequence
  Description of Artificial Sequence: Synthetic oligonucleotide
agcagugucugugacucca

SEQ ID NO: 2923868 - RNA, 19 nt, Artificial Sequence
  Description of Artificial Sequence: Synthetic oligonucleotide
uucuggagaucccgucucu

SEQ ID NO: 2923869 - RNA, 19 nt, Artificial Sequence
  Description of Artificial Sequence: Synthetic oligonucleotide
ucuagcaccugccccugua

SEQ ID NO: 2923870 - RNA, 19 nt, Artificial Sequence
  Description of Artificial Sequence: Synthetic oligonucleotide
guuccuugaagcgcucugc

SEQ ID NO: 2923871 - RNA, 19 nt, Artificial Sequence
  Description of Artificial Sequence: Synthetic oligonucleotide
uggauggccugcacaggca

SEQ ID NO: 2923872 - RNA, 19 nt, Artificial Sequence
  Description of Artificial Sequence: Synthetic oligonucleotide
agcagaugccaagcucgcc

SEQ ID NO: 2923873 - RNA, 19 nt, Artificial Sequence
  Description of Artificial Sequence: Synthetic oligonucleotide
agcagcagugucugugacu

SEQ ID NO: 2923874 - RNA, 19 nt, Artificial Sequence
  Description of Artificial Sequence: Synthetic oligonucleotide
agccuucuccuccagcaga

SEQ ID NO: 2923875 - RNA, 19 nt, Artificial Sequence
  Description of Artificial Sequence: Synthetic oligonucleotide
cuagcaccugccccuguag

SEQ ID NO: 2923876 - RNA, 19 nt, Artificial Sequence
  Description of Artificial Sequence: Synthetic oligonucleotide
aguguuauccagggcugug

SEQ ID NO: 2923877 - RNA, 19 nt, Artificial Sequence
  Description of Artificial Sequence: Synthetic oligonucleotide
uguggccagugucuuguau

SEQ ID NO: 2923878 - RNA, 19 nt, Artificial Sequence
  Description of Artificial Sequence: Synthetic oligonucleotide
ugccccuguagcuucuccu

SEQ ID NO: 2923879 - RNA, 19 nt, Artificial Sequence
  Description of Artificial Sequence: Synthetic oligonucleotide
ccuugaagcgcucugccac

SEQ ID NO: 2923880 - RNA, 19 nt, Artificial Sequence
  Description of Artificial Sequence: Synthetic oligonucleotide
gccaagcucgcccaggagc

SEQ ID NO: 2923881 - RNA, 19 nt, Artificial Sequence
  Description of Artificial Sequence: Synthetic oligonucleotide
cuggagaucccgucucuuc

SEQ ID NO: 2923882 - RNA, 19 nt, Artificial Sequence
  Description of Artificial Sequence: Synthetic oligonucleotide
cagcucuagcaccugcccc

SEQ ID NO: 2923883 - RNA, 19 nt, Artificial Sequence
  Description of Artificial Sequence: Synthetic oligonucleotide
gguuguuuuccaucuucac

SEQ ID NO: 2923884 - RNA, 19 nt, Artificial Sequence
  Description of Artificial Sequence: Synthetic oligonucleotide
aucccgucucuucuugugu

SEQ ID NO: 2923885 - RNA, 19 nt, Artificial Sequence
  Description of Artificial Sequence: Synthetic oligonucleotide
gcacauggcugccaagucc

SEQ ID NO: 2923886 - RNA, 19 nt, Artificial Sequence
  Description of Artificial Sequence: Synthetic oligonucleotide
agguuguuuuccaucuuca

SEQ ID NO: 2923887 - RNA, 19 nt, Artificial Sequence
  Description of Artificial Sequence: Synthetic oligonucleotide
guuucugcuggagcagcag

SEQ ID NO: 2923888 - RNA, 19 nt, Artificial Sequence
  Description of Artificial Sequence: Synthetic oligonucleotide
gucuaguguuauccagggc

SEQ ID NO: 2923889 - RNA, 19 nt, Artificial Sequence
  Description of Artificial Sequence: Synthetic oligonucleotide
gaucaucuaggagcuccug

SEQ ID NO: 2923890 - RNA, 19 nt, Artificial Sequence
  Description of Artificial Sequence: Synthetic oligonucleotide
ugccaagcucgcccaggag

SEQ ID NO: 2923891 - RNA, 19 nt, Artificial Sequence
  Description of Artificial Sequence: Synthetic oligonucleotide
ggauggccugcacaggcag

SEQ ID NO: 2923892 - RNA, 19 nt, Artificial Sequence
  Description of Artificial Sequence: Synthetic oligonucleotide
gcagcagugucugugacuc

SEQ ID NO: 2923893 - RNA, 19 nt, Artificial Sequence
  Description of Artificial Sequence: Synthetic oligonucleotide
ucagguuguuuuccaucuu

SEQ ID NO: 2923894 - RNA, 19 nt, Artificial Sequence
  Description of Artificial Sequence: Synthetic oligonucleotide
ugaagcgcucugccaccgc

SEQ ID NO: 2923895 - RNA, 19 nt, Artificial Sequence
  Description of Artificial Sequence: Synthetic oligonucleotide
cucgcccaggagcugcagg

SEQ ID NO: 2923896 - RNA, 19 nt, Artificial Sequence
  Description of Artificial Sequence: Synthetic oligonucleotide
guccauggucuucuggaga

SEQ ID NO: 2923897 - RNA, 19 nt, Artificial Sequence
  Description of Artificial Sequence: Synthetic oligonucleotide
ucccgucucuucuugugua

SEQ ID NO: 2923898 - RNA, 19 nt, Artificial Sequence
  Description of Artificial Sequence: Synthetic oligonucleotide
agaucccgucucuucuugu

SEQ ID NO: 2923899 - RNA, 19 nt, Artificial Sequence
  Description of Artificial Sequence: Synthetic oligonucleotide
agccagcuccucauguuuc

SEQ ID NO: 2923900 - RNA, 19 nt, Artificial Sequence
  Description of Artificial Sequence: Synthetic oligonucleotide
gucuucuggagaucccguc

SEQ ID NO: 2923901 - RNA, 19 nt, Artificial Sequence
  Description of Artificial Sequence: Synthetic oligonucleotide
uaguguuauccagggcugu

SEQ ID NO: 2923902 - RNA, 19 nt, Artificial Sequence
  Description of Artificial Sequence: Synthetic oligonucleotide
cugcauguggauggccugc

SEQ ID NO: 2923903 - RNA, 19 nt, Artificial Sequence
  Description of Artificial Sequence: Synthetic oligonucleotide
gucugugacuccaucaugu

SEQ ID NO: 2923904 - RNA, 19 nt, Artificial Sequence
  Description of Artificial Sequence: Synthetic oligonucleotide
cagggcuggcugcagauca

SEQ ID NO: 2923905 - RNA, 19 nt, Artificial Sequence
  Description of Artificial Sequence: Synthetic oligonucleotide
cucagccuucuccuccagc

SEQ ID NO: 2923906 - RNA, 19 nt, Artificial Sequence
  Description of Artificial Sequence: Synthetic oligonucleotide
gagcagaugccaagcucgc

SEQ ID NO: 2923907 - RNA, 19 nt, Artificial Sequence
  Description of Artificial Sequence: Synthetic oligonucleotide
ugcauguggauggccugca

SEQ ID NO: 2923908 - RNA, 19 nt, Artificial Sequence
  Description of Artificial Sequence: Synthetic oligonucleotide
cacauggcugccaaguccu

SEQ ID NO: 2923909 - RNA, 19 nt, Artificial Sequence
  Description of Artificial Sequence: Synthetic oligonucleotide
aucugggcauccagggcgg

SEQ ID NO: 2923910 - RNA, 19 nt, Artificial Sequence
  Description of Artificial Sequence: Synthetic oligonucleotide
gucuuguauuguuccuuga

SEQ ID NO: 2923911 - RNA, 19 nt, Artificial Sequence
  Description of Artificial Sequence: Synthetic oligonucleotide
cccagcagcuccaucuggg

SEQ ID NO: 2923912 - RNA, 19 nt, Artificial Sequence
  Description of Artificial Sequence: Synthetic oligonucleotide
cucuucuuguguaaggguu

SEQ ID NO: 2923913 - RNA, 19 nt, Artificial Sequence
  Description of Artificial Sequence: Synthetic oligonucleotide
agggcuguggccagugucu

SEQ ID NO: 2923914 - RNA, 19 nt, Artificial Sequence
  Description of Artificial Sequence: Synthetic oligonucleotide
caucauguccauggucuuc

SEQ ID NO: 2923915 - RNA, 19 nt, Artificial Sequence
  Description of Artificial Sequence: Synthetic oligonucleotide
gauggccugcacaggcagc

SEQ ID NO: 2923916 - RNA, 19 nt, Artificial Sequence
  Description of Artificial Sequence: Synthetic oligonucleotide
agaucaucuaggagcuccu

SEQ ID NO: 2923917 - RNA, 19 nt, Artificial Sequence
  Description of Artificial Sequence: Synthetic oligonucleotide
cagggcuguggccaguguc

SEQ ID NO: 2923918 - RNA, 19 nt, Artificial Sequence
  Description of Artificial Sequence: Synthetic oligonucleotide
ugccaccgccuggaaaggg

SEQ ID NO: 2923919 - RNA, 19 nt, Artificial Sequence
  Description of Artificial Sequence: Synthetic oligonucleotide
uuguuccuugaagcgcucu

SEQ ID NO: 2923920 - RNA, 19 nt, Artificial Sequence
  Description of Artificial Sequence: Synthetic oligonucleotide
agcgcucugccaccgccug

SEQ ID NO: 2923921 - RNA, 19 nt, Artificial Sequence
  Description of Artificial Sequence: Synthetic oligonucleotide
cccgcuucccugcaugugg

SEQ ID NO: 2923922 - RNA, 19 nt, Artificial Sequence
  Description of Artificial Sequence: Synthetic oligonucleotide
cagaugccaagcucgccca

SEQ ID NO: 2923923 - RNA, 19 nt, Artificial Sequence
  Description of Artificial Sequence: Synthetic oligonucleotide
ccuggaaagggcccagcag

SEQ ID NO: 2923924 - RNA, 19 nt, Artificial Sequence
  Description of Artificial Sequence: Synthetic oligonucleotide
agcucaugucuaguguuau

SEQ ID NO: 2923925 - RNA, 19 nt, Artificial Sequence
  Description of Artificial Sequence: Synthetic oligonucleotide
ggagcagcagcuggcgccg

SEQ ID NO: 2923926 - RNA, 19 nt, Artificial Sequence
  Description of Artificial Sequence: Synthetic oligonucleotide
gugucugugacuccaucau

SEQ ID NO: 2923927 - RNA, 19 nt, Artificial Sequence
  Description of Artificial Sequence: Synthetic oligonucleotide
ccaucuucacagacagcag

SEQ ID NO: 2923928 - RNA, 19 nt, Artificial Sequence
  Description of Artificial Sequence: Synthetic oligonucleotide
gggagcagaugccaagcuc

SEQ ID NO: 2923929 - RNA, 19 nt, Artificial Sequence
  Description of Artificial Sequence: Synthetic oligonucleotide
cuccugcccgcuucccugc

SEQ ID NO: 2923930 - RNA, 19 nt, Artificial Sequence
  Description of Artificial Sequence: Synthetic oligonucleotide
cgucucuucuuguguaagg

SEQ ID NO: 2923931 - RNA, 19 nt, Artificial Sequence
  Description of Artificial Sequence: Synthetic oligonucleotide
cccaggagcugcagggugg

SEQ ID NO: 2923932 - RNA, 19 nt, Artificial Sequence
  Description of Artificial Sequence: Synthetic oligonucleotide
agcuccugcccgcuucccu

SEQ ID NO: 2923933 - RNA, 19 nt, Artificial Sequence
  Description of Artificial Sequence: Synthetic oligonucleotide
caccgccuggaaagggccc

SEQ ID NO: 2923934 - RNA, 19 nt, Artificial Sequence
  Description of Artificial Sequence: Synthetic oligonucleotide
cauggcugccaaguccuuc

SEQ ID NO: 2923935 - RNA, 19 nt, Artificial Sequence
  Description of Artificial Sequence: Synthetic oligonucleotide
cuucucgcggcacauggcu

SEQ ID NO: 2923936 - RNA, 19 nt, Artificial Sequence
  Description of Artificial Sequence: Synthetic oligonucleotide
ucuggagaucccgucucuu

SEQ ID NO: 2923937 - RNA, 19 nt, Artificial Sequence
  Description of Artificial Sequence: Synthetic oligonucleotide
uucccugcauguggauggc

SEQ ID NO: 2923938 - RNA, 19 nt, Artificial Sequence
  Description of Artificial Sequence: Synthetic oligonucleotide
gcuggagcagcagcuggcg

SEQ ID NO: 2923939 - RNA, 19 nt, Artificial Sequence
  Description of Artificial Sequence: Synthetic oligonucleotide
cugcccgcuucccugcaug

SEQ ID NO: 2923940 - RNA, 19 nt, Artificial Sequence
  Description of Artificial Sequence: Synthetic oligonucleotide
ugcccgcuucccugcaugu

SEQ ID NO: 2923941 - RNA, 19 nt, Artificial Sequence
  Description of Artificial Sequence: Synthetic oligonucleotide
ucuccuucucgcggcacau

SEQ ID NO: 2923942 - RNA, 19 nt, Artificial Sequence
  Description of Artificial Sequence: Synthetic oligonucleotide
caaguccuucucagccuuc

SEQ ID NO: 2923943 - RNA, 19 nt, Artificial Sequence
  Description of Artificial Sequence: Synthetic oligonucleotide
cagggucagcagcaguguc

SEQ ID NO: 2923944 - RNA, 19 nt, Artificial Sequence
  Description of Artificial Sequence: Synthetic oligonucleotide
cagcagcagugucugugac

SEQ ID NO: 2923945 - RNA, 19 nt, Artificial Sequence
  Description of Artificial Sequence: Synthetic oligonucleotide
ugacuccaucauguccaug

SEQ ID NO: 2923946 - RNA, 19 nt, Artificial Sequence
  Description of Artificial Sequence: Synthetic oligonucleotide
cugcagggugguccucagg

SEQ ID NO: 2923947 - RNA, 19 nt, Artificial Sequence
  Description of Artificial Sequence: Synthetic oligonucleotide
aagcgcucugccaccgccu

SEQ ID NO: 2923948 - RNA, 19 nt, Artificial Sequence
  Description of Artificial Sequence: Synthetic oligonucleotide
ggcgccgcagcucuagcac

SEQ ID NO: 2923949 - RNA, 19 nt, Artificial Sequence
  Description of Artificial Sequence: Synthetic oligonucleotide
agcugcagggugguccuca

SEQ ID NO: 2923950 - RNA, 19 nt, Artificial Sequence
  Description of Artificial Sequence: Synthetic oligonucleotide
agggugguccucagggcug

SEQ ID NO: 2923951 - RNA, 19 nt, Artificial Sequence
  Description of Artificial Sequence: Synthetic oligonucleotide
caccugccccuguagcuuc

SEQ ID NO: 2923952 - RNA, 19 nt, Artificial Sequence
  Description of Artificial Sequence: Synthetic oligonucleotide
ucccugcauguggauggcc

SEQ ID NO: 2923953 - RNA, 19 nt, Artificial Sequence
  Description of Artificial Sequence: Synthetic oligonucleotide
cagcagugucugugacucc

SEQ ID NO: 2923954 - RNA, 19 nt, Artificial Sequence
  Description of Artificial Sequence: Synthetic oligonucleotide
ggagcuccugcccgcuucc

SEQ ID NO: 2923955 - RNA, 19 nt, Artificial Sequence
  Description of Artificial Sequence: Synthetic oligonucleotide
ccaccgccuggaaagggcc

SEQ ID NO: 2923956 - RNA, 19 nt, Artificial Sequence
  Description of Artificial Sequence: Synthetic oligonucleotide
guggccagugucuuguauu

SEQ ID NO: 2923957 - RNA, 19 nt, Artificial Sequence
  Description of Artificial Sequence: Synthetic oligonucleotide
gcuucccugcauguggaug

SEQ ID NO: 2923958 - RNA, 19 nt, Artificial Sequence
  Description of Artificial Sequence: Synthetic oligonucleotide
gcagggugguccucagggc

SEQ ID NO: 2923959 - RNA, 19 nt, Artificial Sequence
  Description of Artificial Sequence: Synthetic oligonucleotide
ggcacauggcugccaaguc

SEQ ID NO: 2923960 - RNA, 19 nt, Artificial Sequence
  Description of Artificial Sequence: Synthetic oligonucleotide
accgccuggaaagggccca

SEQ ID NO: 2923961 - RNA, 19 nt, Artificial Sequence
  Description of Artificial Sequence: Synthetic oligonucleotide
ccugcauguggauggccug

SEQ ID NO: 2923962 - RNA, 19 nt, Artificial Sequence
  Description of Artificial Sequence: Synthetic oligonucleotide
cugccaccgccuggaaagg

SEQ ID NO: 2923963 - RNA, 19 nt, Artificial Sequence
  Description of Artificial Sequence: Synthetic oligonucleotide
gcucaugucuaguguuauc

SEQ ID NO: 2923964 - RNA, 19 nt, Artificial Sequence
  Description of Artificial Sequence: Synthetic oligonucleotide
uccugcccgcuucccugca

SEQ ID NO: 2923965 - RNA, 19 nt, Artificial Sequence
  Description of Artificial Sequence: Synthetic oligonucleotide
agcuccaucugggcaucca

SEQ ID NO: 2923966 - RNA, 19 nt, Artificial Sequence
  Description of Artificial Sequence: Synthetic oligonucleotide
cagggugguccucagggcu

SEQ ID NO: 2923967 - RNA, 19 nt, Artificial Sequence
  Description of Artificial Sequence: Synthetic oligonucleotide
cuucuccuucucgcggcac

SEQ ID NO: 2923968 - RNA, 19 nt, Artificial Sequence
  Description of Artificial Sequence: Synthetic oligonucleotide
ccuucucgcggcacauggc

SEQ ID NO: 2923969 - RNA, 19 nt, Artificial Sequence
  Description of Artificial Sequence: Synthetic oligonucleotide
ggcagcucaugucuagugu

SEQ ID NO: 2923970 - RNA, 19 nt, Artificial Sequence
  Description of Artificial Sequence: Synthetic oligonucleotide
cugcacaggcagcucaugu

SEQ ID NO: 2923971 - RNA, 19 nt, Artificial Sequence
  Description of Artificial Sequence: Synthetic oligonucleotide
gggcccagcagcuccaucu

SEQ ID NO: 2923972 - RNA, 19 nt, Artificial Sequence
  Description of Artificial Sequence: Synthetic oligonucleotide
cuggcgccgcagcucuagc

SEQ ID NO: 2923973 - RNA, 19 nt, Artificial Sequence
  Description of Artificial Sequence: Synthetic oligonucleotide
ggcccagcagcuccaucug

SEQ ID NO: 2923974 - RNA, 19 nt, Artificial Sequence
  Description of Artificial Sequence: Synthetic oligonucleotide
cacaggcagcucaugucua

SEQ ID NO: 2923975 - RNA, 19 nt, Artificial Sequence
  Description of Artificial Sequence: Synthetic oligonucleotide
cucgcggcacauggcugcc

SEQ ID NO: 2923976 - RNA, 19 nt, Artificial Sequence
  Description of Artificial Sequence: Synthetic oligonucleotide
gcugcagggugguccucag

SEQ ID NO: 2923977 - RNA, 19 nt, Artificial Sequence
  Description of Artificial Sequence: Synthetic oligonucleotide
gggugguccucagggcugg

SEQ ID NO: 2923978 - RNA, 19 nt, Artificial Sequence
  Description of Artificial Sequence: Synthetic oligonucleotide
ggcugccaaguccuucuca

SEQ ID NO: 2923979 - RNA, 19 nt, Artificial Sequence
  Description of Artificial Sequence: Synthetic oligonucleotide
gccaccgccuggaaagggc

SEQ ID NO: 2923980 - RNA, 19 nt, Artificial Sequence
  Description of Artificial Sequence: Synthetic oligonucleotide
uaggagcuccugcccgcuu

SEQ ID NO: 2923981 - RNA, 19 nt, Artificial Sequence
  Description of Artificial Sequence: Synthetic oligonucleotide
gcagcucaugucuaguguu

SEQ ID NO: 2923982 - RNA, 19 nt, Artificial Sequence
  Description of Artificial Sequence: Synthetic oligonucleotide
ggcuguggccagugucuug

SEQ ID NO: 2923983 - RNA, 19 nt, Artificial Sequence
  Description of Artificial Sequence: Synthetic oligonucleotide
cucugccaccgccuggaaa

SEQ ID NO: 2923984 - RNA, 19 nt, Artificial Sequence
  Description of Artificial Sequence: Synthetic oligonucleotide
caagcucgcccaggagcug

SEQ ID NO: 2923985 - RNA, 19 nt, Artificial Sequence
  Description of Artificial Sequence: Synthetic oligonucleotide
ccgucucuucuuguguaag

SEQ ID NO: 2923986 - RNA, 19 nt, Artificial Sequence
  Description of Artificial Sequence: Synthetic oligonucleotide
cuccuucucgcggcacaug

SEQ ID NO: 2923987 - RNA, 19 nt, Artificial Sequence
  Description of Artificial Sequence: Synthetic oligonucleotide
gcuggcugcagaucaucua

SEQ ID NO: 2923988 - RNA, 19 nt, Artificial Sequence
  Description of Artificial Sequence: Synthetic oligonucleotide
gcuggcgccgcagcucuag

SEQ ID NO: 2923989 - RNA, 19 nt, Artificial Sequence
  Description of Artificial Sequence: Synthetic oligonucleotide
gagcuccugcccgcuuccc

SEQ ID NO: 2923990 - RNA, 19 nt, Artificial Sequence
  Description of Artificial Sequence: Synthetic oligonucleotide
ggagcugcagggugguccu

SEQ ID NO: 2923991 - RNA, 19 nt, Artificial Sequence
  Description of Artificial Sequence: Synthetic oligonucleotide
gcuguggccagugucuugu

SEQ ID NO: 2923992 - RNA, 19 nt, Artificial Sequence
  Description of Artificial Sequence: Synthetic oligonucleotide
gcauguggauggccugcac

SEQ ID NO: 2923993 - RNA, 19 nt, Artificial Sequence
  Description of Artificial Sequence: Synthetic oligonucleotide
gccagugucuuguauuguu

SEQ ID NO: 2923994 - RNA, 19 nt, Artificial Sequence
  Description of Artificial Sequence: Synthetic oligonucleotide
ggcggcagccagcuccuca

SEQ ID NO: 2923995 - RNA, 19 nt, Artificial Sequence
  Description of Artificial Sequence: Synthetic oligonucleotide
agggcggcagccagcuccu

SEQ ID NO: 2923996 - RNA, 19 nt, Artificial Sequence
  Description of Artificial Sequence: Synthetic oligonucleotide
ccaagcucgcccaggagcu

SEQ ID NO: 2923997 - RNA, 19 nt, Artificial Sequence
  Description of Artificial Sequence: Synthetic oligonucleotide
gcagcagcuggcgccgcag

SEQ ID NO: 2923998 - RNA, 19 nt, Artificial Sequence
  Description of Artificial Sequence: Synthetic oligonucleotide
ggcagccagcuccucaugu

SEQ ID NO: 2923999 - RNA, 19 nt, Artificial Sequence
  Description of Artificial Sequence: Synthetic oligonucleotide
ggaaagggcccagcagcuc

SEQ ID NO: 2924000 - RNA, 19 nt, Artificial Sequence
  Description of Artificial Sequence: Synthetic oligonucleotide
gcuucuccuucucgcggca

SEQ ID NO: 2924001 - RNA, 19 nt, Artificial Sequence
  Description of Artificial Sequence: Synthetic oligonucleotide
cuucuuguguaaggguuuu

SEQ ID NO: 2924002 - RNA, 19 nt, Artificial Sequence
  Description of Artificial Sequence: Synthetic oligonucleotide
ucgcggcacauggcugcca

SEQ ID NO: 2924003 - RNA, 19 nt, Artificial Sequence
  Description of Artificial Sequence: Synthetic oligonucleotide
gugacuccaucauguccau

SEQ ID NO: 2924004 - RNA, 19 nt, Artificial Sequence
  Description of Artificial Sequence: Synthetic oligonucleotide
cagcuccaucugggcaucc

SEQ ID NO: 2924005 - RNA, 19 nt, Artificial Sequence
  Description of Artificial Sequence: Synthetic oligonucleotide
ccgcagcucuagcaccugc

SEQ ID NO: 2924006 - RNA, 19 nt, Artificial Sequence
  Description of Artificial Sequence: Synthetic oligonucleotide
gcggcacauggcugccaag

SEQ ID NO: 2924007 - RNA, 19 nt, Artificial Sequence
  Description of Artificial Sequence: Synthetic oligonucleotide
gcgcucugccaccgccugg

SEQ ID NO: 2924008 - RNA, 19 nt, Artificial Sequence
  Description of Artificial Sequence: Synthetic oligonucleotide
cugggcauccagggcggca

SEQ ID NO: 2924009 - RNA, 19 nt, Artificial Sequence
  Description of Artificial Sequence: Synthetic oligonucleotide
gcucuagcaccugccccug

SEQ ID NO: 2924010 - RNA, 19 nt, Artificial Sequence
  Description of Artificial Sequence: Synthetic oligonucleotide
ggggagcagaugccaagcu

SEQ ID NO: 2924011 - RNA, 19 nt, Artificial Sequence
  Description of Artificial Sequence: Synthetic oligonucleotide
cagccagcuccucauguuu

SEQ ID NO: 2924012 - RNA, 19 nt, Artificial Sequence
  Description of Artificial Sequence: Synthetic oligonucleotide
agggcuggcugcagaucau

SEQ ID NO: 2924013 - RNA, 19 nt, Artificial Sequence
  Description of Artificial Sequence: Synthetic oligonucleotide
gagcagcagcuggcgccgc

SEQ ID NO: 2924014 - RNA, 19 nt, Artificial Sequence
  Description of Artificial Sequence: Synthetic oligonucleotide
cagcuggcgccgcagcucu

SEQ ID NO: 2924015 - RNA, 19 nt, Artificial Sequence
  Description of Artificial Sequence: Synthetic oligonucleotide
gcagcuggcgccgcagcuc

SEQ ID NO: 2924016 - RNA, 19 nt, Artificial Sequence
  Description of Artificial Sequence: Synthetic oligonucleotide
ggagaucccgucucuucuu

SEQ ID NO: 2924017 - RNA, 19 nt, Artificial Sequence
  Description of Artificial Sequence: Synthetic oligonucleotide
cccugcauguggauggccu

SEQ ID NO: 2924018 - RNA, 19 nt, Artificial Sequence
  Description of Artificial Sequence: Synthetic oligonucleotide
ggucuucuggagaucccgu

SEQ ID NO: 2924019 - RNA, 19 nt, Artificial Sequence
  Description of Artificial Sequence: Synthetic oligonucleotide
gggcuggcugcagaucauc

SEQ ID NO: 2924020 - RNA, 19 nt, Artificial Sequence
  Description of Artificial Sequence: Synthetic oligonucleotide
accugccccuguagcuucu

SEQ ID NO: 2924021 - RNA, 19 nt, Artificial Sequence
  Description of Artificial Sequence: Synthetic oligonucleotide
caggcagcucaugucuagu

SEQ ID NO: 2924022 - RNA, 19 nt, Artificial Sequence
  Description of Artificial Sequence: Synthetic oligonucleotide
acauggcugccaaguccuu

SEQ ID NO: 2924023 - RNA, 19 nt, Artificial Sequence
  Description of Artificial Sequence: Synthetic oligonucleotide
gcagcuccaucugggcauc

SEQ ID NO: 2924024 - RNA, 19 nt, Artificial Sequence
  Description of Artificial Sequence: Synthetic oligonucleotide
cccgucucuucuuguguaa

SEQ ID NO: 2924025 - RNA, 19 nt, Artificial Sequence
  Description of Artificial Sequence: Synthetic oligonucleotide
cuaggagcuccugcccgcu

SEQ ID NO: 2924026 - RNA, 19 nt, Artificial Sequence
  Description of Artificial Sequence: Synthetic oligonucleotide
ccgcuucccugcaugugga

SEQ ID NO: 2924027 - RNA, 19 nt, Artificial Sequence
  Description of Artificial Sequence: Synthetic oligonucleotide
ggcuggcugcagaucaucu

SEQ ID NO: 2924028 - RNA, 19 nt, Artificial Sequence
  Description of Artificial Sequence: Synthetic oligonucleotide
cuguggccagugucuugua

SEQ ID NO: 2924029 - RNA, 19 nt, Artificial Sequence
  Description of Artificial Sequence: Synthetic oligonucleotide
gagcugcagggugguccuc

SEQ ID NO: 2924030 - RNA, 19 nt, Artificial Sequence
  Description of Artificial Sequence: Synthetic oligonucleotide
gcccgcuucccugcaugug

SEQ ID NO: 2924031 - RNA, 19 nt, Artificial Sequence
  Description of Artificial Sequence: Synthetic oligonucleotide
ccaaguccuucucagccuu

SEQ ID NO: 2924032 - RNA, 19 nt, Artificial Sequence
  Description of Artificial Sequence: Synthetic oligonucleotide
gccccuguagcuucuccuu

SEQ ID NO: 2924033 - RNA, 19 nt, Artificial Sequence
  Description of Artificial Sequence: Synthetic oligonucleotide
cucuagcaccugccccugu

SEQ ID NO: 2924034 - RNA, 19 nt, Artificial Sequence
  Description of Artificial Sequence: Synthetic oligonucleotide
ggccagugucuuguauugu

SEQ ID NO: 2924035 - RNA, 19 nt, Artificial Sequence
  Description of Artificial Sequence: Synthetic oligonucleotide
ccgccuggaaagggcccag

SEQ ID NO: 2924036 - RNA, 19 nt, Artificial Sequence
  Description of Artificial Sequence: Synthetic oligonucleotide
ggucagcagcagugucugu

SEQ ID NO: 2924037 - RNA, 19 nt, Artificial Sequence
  Description of Artificial Sequence: Synthetic oligonucleotide
ccaucauguccauggucuu

SEQ ID NO: 2924038 - RNA, 19 nt, Artificial Sequence
  Description of Artificial Sequence: Synthetic oligonucleotide
gcaccugccccuguagcuu

SEQ ID NO: 2924039 - RNA, 19 nt, Artificial Sequence
  Description of Artificial Sequence: Synthetic oligonucleotide
cagcagagucagguuguuu

SEQ ID NO: 2924040 - RNA, 19 nt, Artificial Sequence
  Description of Artificial Sequence: Synthetic oligonucleotide
cgcggcacauggcugccaa

SEQ ID NO: 2924041 - RNA, 19 nt, Artificial Sequence
  Description of Artificial Sequence: Synthetic oligonucleotide
gcucugccaccgccuggaa

SEQ ID NO: 2924042 - RNA, 19 nt, Artificial Sequence
  Description of Artificial Sequence: Synthetic oligonucleotide
cggcacauggcugccaagu

SEQ ID NO: 2924043 - RNA, 19 nt, Artificial Sequence
  Description of Artificial Sequence: Synthetic oligonucleotide
cggcagccagcuccucaug

SEQ ID NO: 2924044 - RNA, 19 nt, Artificial Sequence
  Description of Artificial Sequence: Synthetic oligonucleotide
ccagggcggcagccagcuc

SEQ ID NO: 2924045 - RNA, 19 nt, Artificial Sequence
  Description of Artificial Sequence: Synthetic oligonucleotide
gggcuguggccagugucuu

SEQ ID NO: 2924046 - RNA, 19 nt, Artificial Sequence
  Description of Artificial Sequence: Synthetic oligonucleotide
ccagcagagucagguuguu

SEQ ID NO: 2924047 - RNA, 19 nt, Artificial Sequence
  Description of Artificial Sequence: Synthetic oligonucleotide
gggcggcagccagcuccuc

SEQ ID NO: 2924048 - RNA, 19 nt, Artificial Sequence
  Description of Artificial Sequence: Synthetic oligonucleotide
ccugcccgcuucccugcau

SEQ ID NO: 2924049 - RNA, 19 nt, Artificial Sequence
  Description of Artificial Sequence: Synthetic oligonucleotide
cgcuucccugcauguggau

SEQ ID NO: 2924050 - RNA, 19 nt, Artificial Sequence
  Description of Artificial Sequence: Synthetic oligonucleotide
uuuauuggcagacuucagg

SEQ ID NO: 2924051 - RNA, 19 nt, Artificial Sequence
  Description of Artificial Sequence: Synthetic oligonucleotide
cauucguuggauuugaagc

SEQ ID NO: 2924052 - RNA, 19 nt, Artificial Sequence
  Description of Artificial Sequence: Synthetic oligonucleotide
uuauuggcagacuucaggg

SEQ ID NO: 2924053 - RNA, 19 nt, Artificial Sequence
  Description of Artificial Sequence: Synthetic oligonucleotide
auuggcagacuucagggcc

SEQ ID NO: 2924054 - RNA, 19 nt, Artificial Sequence
  Description of Artificial Sequence: Synthetic oligonucleotide
gagacccucggcuagaugg

SEQ ID NO: 2924055 - RNA, 19 nt, Artificial Sequence
  Description of Artificial Sequence: Synthetic oligonucleotide
uuggauuugaagcuggcca

SEQ ID NO: 2924056 - RNA, 19 nt, Artificial Sequence
  Description of Artificial Sequence: Synthetic oligonucleotide
aauggagcagccuucccag

SEQ ID NO: 2924057 - RNA, 19 nt, Artificial Sequence
  Description of Artificial Sequence: Synthetic oligonucleotide
uucagggccaccagaaugg

SEQ ID NO: 2924058 - RNA, 19 nt, Artificial Sequence
  Description of Artificial Sequence: Synthetic oligonucleotide
guugucuuucccuagagac

SEQ ID NO: 2924059 - RNA, 19 nt, Artificial Sequence
  Description of Artificial Sequence: Synthetic oligonucleotide
uuugaagcuggccagggac

SEQ ID NO: 2924060 - RNA, 19 nt, Artificial Sequence
  Description of Artificial Sequence: Synthetic oligonucleotide
uauuuauuggcagacuuca

SEQ ID NO: 2924061 - RNA, 19 nt, Artificial Sequence
  Description of Artificial Sequence: Synthetic oligonucleotide
uagauggucagcauccuug

SEQ ID NO: 2924062 - RNA, 19 nt, Artificial Sequence
  Description of Artificial Sequence: Synthetic oligonucleotide
cuacuugugaccugggugc

SEQ ID NO: 2924063 - RNA, 19 nt, Artificial Sequence
  Description of Artificial Sequence: Synthetic oligonucleotide
cuuggugggaagcugaagc

SEQ ID NO: 2924064 - RNA, 19 nt, Artificial Sequence
  Description of Artificial Sequence: Synthetic oligonucleotide
caacugguuauuuauuggc

SEQ ID NO: 2924065 - RNA, 19 nt, Artificial Sequence
  Description of Artificial Sequence: Synthetic oligonucleotide
acucaggugaccguugucc

SEQ ID NO: 2924066 - RNA, 19 nt, Artificial Sequence
  Description of Artificial Sequence: Synthetic oligonucleotide
ugucuuucccuagagaccc

SEQ ID NO: 2924067 - RNA, 19 nt, Artificial Sequence
  Description of Artificial Sequence: Synthetic oligonucleotide
uuauuuauuggcagacuuc

SEQ ID NO: 2924068 - RNA, 19 nt, Artificial Sequence
  Description of Artificial Sequence: Synthetic oligonucleotide
auggucagcauccuugaag

SEQ ID NO: 2924069 - RNA, 19 nt, Artificial Sequence
  Description of Artificial Sequence: Synthetic oligonucleotide
uggauuugaagcuggccag

SEQ ID NO: 2924070 - RNA, 19 nt, Artificial Sequence
  Description of Artificial Sequence: Synthetic oligonucleotide
auucguuggauuugaagcu

SEQ ID NO: 2924071 - RNA, 19 nt, Artificial Sequence
  Description of Artificial Sequence: Synthetic oligonucleotide
cucaccaagcauucguugg

SEQ ID NO: 2924072 - RNA, 19 nt, Artificial Sequence
  Description of Artificial Sequence: Synthetic oligonucleotide
agggccaccagaauggagc

SEQ ID NO: 2924073 - RNA, 19 nt, Artificial Sequence
  Description of Artificial Sequence: Synthetic oligonucleotide
uuucccuagagacccucgg

SEQ ID NO: 2924074 - RNA, 19 nt, Artificial Sequence
  Description of Artificial Sequence: Synthetic oligonucleotide
uugucuuucccuagagacc

SEQ ID NO: 2924075 - RNA, 19 nt, Artificial Sequence
  Description of Artificial Sequence: Synthetic oligonucleotide
aggaaagaggcuuggguug

SEQ ID NO: 2924076 - RNA, 19 nt, Artificial Sequence
  Description of Artificial Sequence: Synthetic oligonucleotide
ugaaggguugccuggguug

SEQ ID NO: 2924077 - RNA, 19 nt, Artificial Sequence
  Description of Artificial Sequence: Synthetic oligonucleotide
ucguuggauuugaagcugg

SEQ ID NO: 2924078 - RNA, 19 nt, Artificial Sequence
  Description of Artificial Sequence: Synthetic oligonucleotide
uggagcagccuucccaggg

SEQ ID NO: 2924079 - RNA, 19 nt, Artificial Sequence
  Description of Artificial Sequence: Synthetic oligonucleotide
auggaagccagggagccgc

SEQ ID NO: 2924080 - RNA, 19 nt, Artificial Sequence
  Description of Artificial Sequence: Synthetic oligonucleotide
cucagcuggggcuaagugc

SEQ ID NO: 2924081 - RNA, 19 nt, Artificial Sequence
  Description of Artificial Sequence: Synthetic oligonucleotide
uauuggcagacuucagggc

SEQ ID NO: 2924082 - RNA, 19 nt, Artificial Sequence
  Description of Artificial Sequence: Synthetic oligonucleotide
gauuugaagcuggccaggg

SEQ ID NO: 2924083 - RNA, 19 nt, Artificial Sequence
  Description of Artificial Sequence: Synthetic oligonucleotide
ugaagcaggaaagaggcuu

SEQ ID NO: 2924084 - RNA, 19 nt, Artificial Sequence
  Description of Artificial Sequence: Synthetic oligonucleotide
ucaccaagcauucguugga

SEQ ID NO: 2924085 - RNA, 19 nt, Artificial Sequence
  Description of Artificial Sequence: Synthetic oligonucleotide
aagccagggagccgcagag

SEQ ID NO: 2924086 - RNA, 19 nt, Artificial Sequence
  Description of Artificial Sequence: Synthetic oligonucleotide
gaauggagcagccuuccca

SEQ ID NO: 2924087 - RNA, 19 nt, Artificial Sequence
  Description of Artificial Sequence: Synthetic oligonucleotide
cuucagggccaccagaaug

SEQ ID NO: 2924088 - RNA, 19 nt, Artificial Sequence
  Description of Artificial Sequence: Synthetic oligonucleotide
aacugguuauuuauuggca

SEQ ID NO: 2924089 - RNA, 19 nt, Artificial Sequence
  Description of Artificial Sequence: Synthetic oligonucleotide
ucagcauccuugaaggguu

SEQ ID NO: 2924090 - RNA, 19 nt, Artificial Sequence
  Description of Artificial Sequence: Synthetic oligonucleotide
ugguuauuuauuggcagac

SEQ ID NO: 2924091 - RNA, 19 nt, Artificial Sequence
  Description of Artificial Sequence: Synthetic oligonucleotide
ucccuagagacccucggcu

SEQ ID NO: 2924092 - RNA, 19 nt, Artificial Sequence
  Description of Artificial Sequence: Synthetic oligonucleotide
agaauggagcagccuuccc

SEQ ID NO: 2924093 - RNA, 19 nt, Artificial Sequence
  Description of Artificial Sequence: Synthetic oligonucleotide
agaggcccagcauggaggg

SEQ ID NO: 2924094 - RNA, 19 nt, Artificial Sequence
  Description of Artificial Sequence: Synthetic oligonucleotide
gcugaagcaggaaagaggc

SEQ ID NO: 2924095 - RNA, 19 nt, Artificial Sequence
  Description of Artificial Sequence: Synthetic oligonucleotide
cagaggcccagcauggagg

SEQ ID NO: 2924096 - RNA, 19 nt, Artificial Sequence
  Description of Artificial Sequence: Synthetic oligonucleotide
ugcagcuggggauggaagc

SEQ ID NO: 2924097 - RNA, 19 nt, Artificial Sequence
  Description of Artificial Sequence: Synthetic oligonucleotide
uuggugggaagcugaagca

SEQ ID NO: 2924098 - RNA, 19 nt, Artificial Sequence
  Description of Artificial Sequence: Synthetic oligonucleotide
uguccguggccccuggcag

SEQ ID NO: 2924099 - RNA, 19 nt, Artificial Sequence
  Description of Artificial Sequence: Synthetic oligonucleotide
cucaggugaccguuguccg

SEQ ID NO: 2924100 - RNA, 19 nt, Artificial Sequence
  Description of Artificial Sequence: Synthetic oligonucleotide
accagaauggagcagccuu

SEQ ID NO: 2924101 - RNA, 19 nt, Artificial Sequence
  Description of Artificial Sequence: Synthetic oligonucleotide
gaaggguugccuggguugg

SEQ ID NO: 2924102 - RNA, 19 nt, Artificial Sequence
  Description of Artificial Sequence: Synthetic oligonucleotide
uugaagcuggccagggacu

SEQ ID NO: 2924103 - RNA, 19 nt, Artificial Sequence
  Description of Artificial Sequence: Synthetic oligonucleotide
gcuacuugugaccugggug

SEQ ID NO: 2924104 - RNA, 19 nt, Artificial Sequence
  Description of Artificial Sequence: Synthetic oligonucleotide
uucguuggauuugaagcug

SEQ ID NO: 2924105 - RNA, 19 nt, Artificial Sequence
  Description of Artificial Sequence: Synthetic oligonucleotide
ucgcucaccaagcauucgu

SEQ ID NO: 2924106 - RNA, 19 nt, Artificial Sequence
  Description of Artificial Sequence: Synthetic oligonucleotide
uucccuagagacccucggc

SEQ ID NO: 2924107 - RNA, 19 nt, Artificial Sequence
  Description of Artificial Sequence: Synthetic oligonucleotide
cuggcuacuugugaccugg

SEQ ID NO: 2924108 - RNA, 19 nt, Artificial Sequence
  Description of Artificial Sequence: Synthetic oligonucleotide
cacuugccaaugcagcucc

SEQ ID NO: 2924109 - RNA, 19 nt, Artificial Sequence
  Description of Artificial Sequence: Synthetic oligonucleotide
gaagcaggaaagaggcuug

SEQ ID NO: 2924110 - RNA, 19 nt, Artificial Sequence
  Description of Artificial Sequence: Synthetic oligonucleotide
ugaccguuguccguggccc

SEQ ID NO: 2924111 - RNA, 19 nt, Artificial Sequence
  Description of Artificial Sequence: Synthetic oligonucleotide
ugcagcuccugccuccuug

SEQ ID NO: 2924112 - RNA, 19 nt, Artificial Sequence
  Description of Artificial Sequence: Synthetic oligonucleotide
uuggcagacuucagggcca

SEQ ID NO: 2924113 - RNA, 19 nt, Artificial Sequence
  Description of Artificial Sequence: Synthetic oligonucleotide
accacuugccaaugcagcu

SEQ ID NO: 2924114 - RNA, 19 nt, Artificial Sequence
  Description of Artificial Sequence: Synthetic oligonucleotide
uugcagcuggggauggaag

SEQ ID NO: 2924115 - RNA, 19 nt, Artificial Sequence
  Description of Artificial Sequence: Synthetic oligonucleotide
uccuggugccaccacuugc

SEQ ID NO: 2924116 - RNA, 19 nt, Artificial Sequence
  Description of Artificial Sequence: Synthetic oligonucleotide
cuuucccuagagacccucg

SEQ ID NO: 2924117 - RNA, 19 nt, Artificial Sequence
  Description of Artificial Sequence: Synthetic oligonucleotide
guuauuuauuggcagacuu

SEQ ID NO: 2924118 - RNA, 19 nt, Artificial Sequence
  Description of Artificial Sequence: Synthetic oligonucleotide
uuggguugucuuucccuag

SEQ ID NO: 2924119 - RNA, 19 nt, Artificial Sequence
  Description of Artificial Sequence: Synthetic oligonucleotide
aagcaggaaagaggcuugg

SEQ ID NO: 2924120 - RNA, 19 nt, Artificial Sequence
  Description of Artificial Sequence: Synthetic oligonucleotide
agauggucagcauccuuga

SEQ ID NO: 2924121 - RNA, 19 nt, Artificial Sequence
  Description of Artificial Sequence: Synthetic oligonucleotide
uggguugucuuucccuaga

SEQ ID NO: 2924122 - RNA, 19 nt, Artificial Sequence
  Description of Artificial Sequence: Synthetic oligonucleotide
uuguccguggccccuggca

SEQ ID NO: 2924123 - RNA, 19 nt, Artificial Sequence
  Description of Artificial Sequence: Synthetic oligonucleotide
aggcccagcauggagggcg

SEQ ID NO: 2924124 - RNA, 19 nt, Artificial Sequence
  Description of Artificial Sequence: Synthetic oligonucleotide
caaugcagcuccugccucc

SEQ ID NO: 2924125 - RNA, 19 nt, Artificial Sequence
  Description of Artificial Sequence: Synthetic oligonucleotide
uggugggaagcugaagcag

SEQ ID NO: 2924126 - RNA, 19 nt, Artificial Sequence
  Description of Artificial Sequence: Synthetic oligonucleotide
aagcauucguuggauuuga

SEQ ID NO: 2924127 - RNA, 19 nt, Artificial Sequence
  Description of Artificial Sequence: Synthetic oligonucleotide
guuggauuugaagcuggcc

SEQ ID NO: 2924128 - RNA, 19 nt, Artificial Sequence
  Description of Artificial Sequence: Synthetic oligonucleotide
gcauucguuggauuugaag

SEQ ID NO: 2924129 - RNA, 19 nt, Artificial Sequence
  Description of Artificial Sequence: Synthetic oligonucleotide
cugguuauuuauuggcaga

SEQ ID NO: 2924130 - RNA, 19 nt, Artificial Sequence
  Description of Artificial Sequence: Synthetic oligonucleotide
caggcauugcccgugcugc

SEQ ID NO: 2924131 - RNA, 19 nt, Artificial Sequence
  Description of Artificial Sequence: Synthetic oligonucleotide
ggggcugucgcucaccaag

SEQ ID NO: 2924132 - RNA, 19 nt, Artificial Sequence
  Description of Artificial Sequence: Synthetic oligonucleotide
aaagaggcuuggguugucu

SEQ ID NO: 2924133 - RNA, 19 nt, Artificial Sequence
  Description of Artificial Sequence: Synthetic oligonucleotide
aggcuuggguugucuuucc

SEQ ID NO: 2924134 - RNA, 19 nt, Artificial Sequence
  Description of Artificial Sequence: Synthetic oligonucleotide
agggacuugcagcugggga

SEQ ID NO: 2924135 - RNA, 19 nt, Artificial Sequence
  Description of Artificial Sequence: Synthetic oligonucleotide
ugucgcucaccaagcauuc

SEQ ID NO: 2924136 - RNA, 19 nt, Artificial Sequence
  Description of Artificial Sequence: Synthetic oligonucleotide
cuugugaccugggugcccc

SEQ ID NO: 2924137 - RNA, 19 nt, Artificial Sequence
  Description of Artificial Sequence: Synthetic oligonucleotide
auuugaagcuggccaggga

SEQ ID NO: 2924138 - RNA, 19 nt, Artificial Sequence
  Description of Artificial Sequence: Synthetic oligonucleotide
ggcuagauggucagcaucc

SEQ ID NO: 2924139 - RNA, 19 nt, Artificial Sequence
  Description of Artificial Sequence: Synthetic oligonucleotide
agggcgugggguccuuccc

SEQ ID NO: 2924140 - RNA, 19 nt, Artificial Sequence
  Description of Artificial Sequence: Synthetic oligonucleotide
agcauccuugaaggguugc

SEQ ID NO: 2924141 - RNA, 19 nt, Artificial Sequence
  Description of Artificial Sequence: Synthetic oligonucleotide
guggggcaggcauugcccg

SEQ ID NO: 2924142 - RNA, 19 nt, Artificial Sequence
  Description of Artificial Sequence: Synthetic oligonucleotide
ggugggaagcugaagcagg

SEQ ID NO: 2924143 - RNA, 19 nt, Artificial Sequence
  Description of Artificial Sequence: Synthetic oligonucleotide
uugaaggguugccuggguu

SEQ ID NO: 2924144 - RNA, 19 nt, Artificial Sequence
  Description of Artificial Sequence: Synthetic oligonucleotide
auuuauuggcagacuucag

SEQ ID NO: 2924145 - RNA, 19 nt, Artificial Sequence
  Description of Artificial Sequence: Synthetic oligonucleotide
gauggaagccagggagccg

SEQ ID NO: 2924146 - RNA, 19 nt, Artificial Sequence
  Description of Artificial Sequence: Synthetic oligonucleotide
ugccgggcugcccucgggg

SEQ ID NO: 2924147 - RNA, 19 nt, Artificial Sequence
  Description of Artificial Sequence: Synthetic oligonucleotide
cagggagccgcagaggccc

SEQ ID NO: 2924148 - RNA, 19 nt, Artificial Sequence
  Description of Artificial Sequence: Synthetic oligonucleotide
accugggugccccuuccuc

SEQ ID NO: 2924149 - RNA, 19 nt, Artificial Sequence
  Description of Artificial Sequence: Synthetic oligonucleotide
aagaggcuuggguugucuu

SEQ ID NO: 2924150 - RNA, 19 nt, Artificial Sequence
  Description of Artificial Sequence: Synthetic oligonucleotide
ugaccugggugccccuucc

SEQ ID NO: 2924151 - RNA, 19 nt, Artificial Sequence
  Description of Artificial Sequence: Synthetic oligonucleotide
cagaauggagcagccuucc

SEQ ID NO: 2924152 - RNA, 19 nt, Artificial Sequence
  Description of Artificial Sequence: Synthetic oligonucleotide
acuugugaccugggugccc

SEQ ID NO: 2924153 - RNA, 19 nt, Artificial Sequence
  Description of Artificial Sequence: Synthetic oligonucleotide
agcuccugccuccuuggug

SEQ ID NO: 2924154 - RNA, 19 nt, Artificial Sequence
  Description of Artificial Sequence: Synthetic oligonucleotide
aaugcagcuccugccuccu

SEQ ID NO: 2924155 - RNA, 19 nt, Artificial Sequence
  Description of Artificial Sequence: Synthetic oligonucleotide
gaggcuuggguugucuuuc

SEQ ID NO: 2924156 - RNA, 19 nt, Artificial Sequence
  Description of Artificial Sequence: Synthetic oligonucleotide
ucaggugaccguuguccgu

SEQ ID NO: 2924157 - RNA, 19 nt, Artificial Sequence
  Description of Artificial Sequence: Synthetic oligonucleotide
gggacuggcuacuugugac

SEQ ID NO: 2924158 - RNA, 19 nt, Artificial Sequence
  Description of Artificial Sequence: Synthetic oligonucleotide
gugaccguuguccguggcc

SEQ ID NO: 2924159 - RNA, 19 nt, Artificial Sequence
  Description of Artificial Sequence: Synthetic oligonucleotide
agcaggaaagaggcuuggg

SEQ ID NO: 2924160 - RNA, 19 nt, Artificial Sequence
  Description of Artificial Sequence: Synthetic oligonucleotide
gaagccagggagccgcaga

SEQ ID NO: 2924161 - RNA, 19 nt, Artificial Sequence
  Description of Artificial Sequence: Synthetic oligonucleotide
uggggcuaagugccgggcu

SEQ ID NO: 2924162 - RNA, 19 nt, Artificial Sequence
  Description of Artificial Sequence: Synthetic oligonucleotide
auggagcagccuucccagg

SEQ ID NO: 2924163 - RNA, 19 nt, Artificial Sequence
  Description of Artificial Sequence: Synthetic oligonucleotide
ccuggugccaccacuugcc

SEQ ID NO: 2924164 - RNA, 19 nt, Artificial Sequence
  Description of Artificial Sequence: Synthetic oligonucleotide
gugggguccuucccguggg

SEQ ID NO: 2924165 - RNA, 19 nt, Artificial Sequence
  Description of Artificial Sequence: Synthetic oligonucleotide
cagacuucagggccaccag

SEQ ID NO: 2924166 - RNA, 19 nt, Artificial Sequence
  Description of Artificial Sequence: Synthetic oligonucleotide
cuuggguugucuuucccua

SEQ ID NO: 2924167 - RNA, 19 nt, Artificial Sequence
  Description of Artificial Sequence: Synthetic oligonucleotide
uggcuacuugugaccuggg

SEQ ID NO: 2924168 - RNA, 19 nt, Artificial Sequence
  Description of Artificial Sequence: Synthetic oligonucleotide
gagggcgugggguccuucc

SEQ ID NO: 2924169 - RNA, 19 nt, Artificial Sequence
  Description of Artificial Sequence: Synthetic oligonucleotide
agcauggagggcguggggu

SEQ ID NO: 2924170 - RNA, 19 nt, Artificial Sequence
  Description of Artificial Sequence: Synthetic oligonucleotide
gacuucagggccaccagaa

SEQ ID NO: 2924171 - RNA, 19 nt, Artificial Sequence
  Description of Artificial Sequence: Synthetic oligonucleotide
ggauuugaagcuggccagg

SEQ ID NO: 2924172 - RNA, 19 nt, Artificial Sequence
  Description of Artificial Sequence: Synthetic oligonucleotide
ggagcagccuucccagggg

SEQ ID NO: 2924173 - RNA, 19 nt, Artificial Sequence
  Description of Artificial Sequence: Synthetic oligonucleotide
ucggggcugucgcucacca

SEQ ID NO: 2924174 - RNA, 19 nt, Artificial Sequence
  Description of Artificial Sequence: Synthetic oligonucleotide
uacuugugaccugggugcc

SEQ ID NO: 2924175 - RNA, 19 nt, Artificial Sequence
  Description of Artificial Sequence: Synthetic oligonucleotide
gccagggacuugcagcugg

SEQ ID NO: 2924176 - RNA, 19 nt, Artificial Sequence
  Description of Artificial Sequence: Synthetic oligonucleotide
ggacuggcuacuugugacc

SEQ ID NO: 2924177 - RNA, 19 nt, Artificial Sequence
  Description of Artificial Sequence: Synthetic oligonucleotide
cgugcugcuccucagcugg

SEQ ID NO: 2924178 - RNA, 19 nt, Artificial Sequence
  Description of Artificial Sequence: Synthetic oligonucleotide
gacuugcagcuggggaugg

SEQ ID NO: 2924179 - RNA, 19 nt, Artificial Sequence
  Description of Artificial Sequence: Synthetic oligonucleotide
uccuuggugggaagcugaa

SEQ ID NO: 2924180 - RNA, 19 nt, Artificial Sequence
  Description of Artificial Sequence: Synthetic oligonucleotide
acuggcuacuugugaccug

SEQ ID NO: 2924181 - RNA, 19 nt, Artificial Sequence
  Description of Artificial Sequence: Synthetic oligonucleotide
ugccaccacuugccaaugc

SEQ ID NO: 2924182 - RNA, 19 nt, Artificial Sequence
  Description of Artificial Sequence: Synthetic oligonucleotide
caggugaccguuguccgug

SEQ ID NO: 2924183 - RNA, 19 nt, Artificial Sequence
  Description of Artificial Sequence: Synthetic oligonucleotide
gccaccagaauggagcagc

SEQ ID NO: 2924184 - RNA, 19 nt, Artificial Sequence
  Description of Artificial Sequence: Synthetic oligonucleotide
ugggguccuucccgugggg

SEQ ID NO: 2924185 - RNA, 19 nt, Artificial Sequence
  Description of Artificial Sequence: Synthetic oligonucleotide
cucggcuagauggucagca

SEQ ID NO: 2924186 - RNA, 19 nt, Artificial Sequence
  Description of Artificial Sequence: Synthetic oligonucleotide
aggugaccguuguccgugg

SEQ ID NO: 2924187 - RNA, 19 nt, Artificial Sequence
  Description of Artificial Sequence: Synthetic oligonucleotide
gccgcagaggcccagcaug

SEQ ID NO: 2924188 - RNA, 19 nt, Artificial Sequence
  Description of Artificial Sequence: Synthetic oligonucleotide
gcucaccaagcauucguug

SEQ ID NO: 2924189 - RNA, 19 nt, Artificial Sequence
  Description of Artificial Sequence: Synthetic oligonucleotide
ggguugucuuucccuagag

SEQ ID NO: 2924190 - RNA, 19 nt, Artificial Sequence
  Description of Artificial Sequence: Synthetic oligonucleotide
acuucagggccaccagaau

SEQ ID NO: 2924191 - RNA, 19 nt, Artificial Sequence
  Description of Artificial Sequence: Synthetic oligonucleotide
cauggagggcguggggucc

SEQ ID NO: 2924192 - RNA, 19 nt, Artificial Sequence
  Description of Artificial Sequence: Synthetic oligonucleotide
guccguggccccuggcagg

SEQ ID NO: 2924193 - RNA, 19 nt, Artificial Sequence
  Description of Artificial Sequence: Synthetic oligonucleotide
aagugccgggcugcccucg

SEQ ID NO: 2924194 - RNA, 19 nt, Artificial Sequence
  Description of Artificial Sequence: Synthetic oligonucleotide
agcuggggcuaagugccgg

SEQ ID NO: 2924195 - RNA, 19 nt, Artificial Sequence
  Description of Artificial Sequence: Synthetic oligonucleotide
ucggcuagauggucagcau

SEQ ID NO: 2924196 - RNA, 19 nt, Artificial Sequence
  Description of Artificial Sequence: Synthetic oligonucleotide
ugaagcuggccagggacuu

SEQ ID NO: 2924197 - RNA, 19 nt, Artificial Sequence
  Description of Artificial Sequence: Synthetic oligonucleotide
gcagaggcccagcauggag

SEQ ID NO: 2924198 - RNA, 19 nt, Artificial Sequence
  Description of Artificial Sequence: Synthetic oligonucleotide
ccuagagacccucggcuag

SEQ ID NO: 2924199 - RNA, 19 nt, Artificial Sequence
  Description of Artificial Sequence: Synthetic oligonucleotide
gucagcauccuugaagggu

SEQ ID NO: 2924200 - RNA, 19 nt, Artificial Sequence
  Description of Artificial Sequence: Synthetic oligonucleotide
ccaccacuugccaaugcag

SEQ ID NO: 2924201 - RNA, 19 nt, Artificial Sequence
  Description of Artificial Sequence: Synthetic oligonucleotide
agagacccucggcuagaug

SEQ ID NO: 2924202 - RNA, 19 nt, Artificial Sequence
  Description of Artificial Sequence: Synthetic oligonucleotide
cugcccucggggcugucgc

SEQ ID NO: 2924203 - RNA, 19 nt, Artificial Sequence
  Description of Artificial Sequence: Synthetic oligonucleotide
accaagcauucguuggauu

SEQ ID NO: 2924204 - RNA, 19 nt, Artificial Sequence
  Description of Artificial Sequence: Synthetic oligonucleotide
caggaaagaggcuuggguu

SEQ ID NO: 2924205 - RNA, 19 nt, Artificial Sequence
  Description of Artificial Sequence: Synthetic oligonucleotide
gguugucuuucccuagaga

SEQ ID NO: 2924206 - RNA, 19 nt, Artificial Sequence
  Description of Artificial Sequence: Synthetic oligonucleotide
gauggucagcauccuugaa

SEQ ID NO: 2924207 - RNA, 19 nt, Artificial Sequence
  Description of Artificial Sequence: Synthetic oligonucleotide
cuaagugccgggcugcccu

SEQ ID NO: 2924208 - RNA, 19 nt, Artificial Sequence
  Description of Artificial Sequence: Synthetic oligonucleotide
uggugccaccacuugccaa

SEQ ID NO: 2924209 - RNA, 19 nt, Artificial Sequence
  Description of Artificial Sequence: Synthetic oligonucleotide
agugccgggcugcccucgg

SEQ ID NO: 2924210 - RNA, 19 nt, Artificial Sequence
  Description of Artificial Sequence: Synthetic oligonucleotide
gaccguuguccguggcccc

SEQ ID NO: 2924211 - RNA, 19 nt, Artificial Sequence
  Description of Artificial Sequence: Synthetic oligonucleotide
gagcagccuucccagggga

SEQ ID NO: 2924212 - RNA, 19 nt, Artificial Sequence
  Description of Artificial Sequence: Synthetic oligonucleotide
gacucaggugaccguuguc

SEQ ID NO: 2924213 - RNA, 19 nt, Artificial Sequence
  Description of Artificial Sequence: Synthetic oligonucleotide
ucagggccaccagaaugga

SEQ ID NO: 2924214 - RNA, 19 nt, Artificial Sequence
  Description of Artificial Sequence: Synthetic oligonucleotide
ccugggugccccuuccucc

SEQ ID NO: 2924215 - RNA, 19 nt, Artificial Sequence
  Description of Artificial Sequence: Synthetic oligonucleotide
ggggcuaagugccgggcug

SEQ ID NO: 2924216 - RNA, 19 nt, Artificial Sequence
  Description of Artificial Sequence: Synthetic oligonucleotide
ugccuccuuggugggaagc

SEQ ID NO: 2924217 - RNA, 19 nt, Artificial Sequence
  Description of Artificial Sequence: Synthetic oligonucleotide
ccagaauggagcagccuuc

SEQ ID NO: 2924218 - RNA, 19 nt, Artificial Sequence
  Description of Artificial Sequence: Synthetic oligonucleotide
gucgcucaccaagcauucg

SEQ ID NO: 2924219 - RNA, 19 nt, Artificial Sequence
  Description of Artificial Sequence: Synthetic oligonucleotide
ugcccgugcugcuccucag

SEQ ID NO: 2924220 - RNA, 19 nt, Artificial Sequence
  Description of Artificial Sequence: Synthetic oligonucleotide
gcauugcccgugcugcucc

SEQ ID NO: 2924221 - RNA, 19 nt, Artificial Sequence
  Description of Artificial Sequence: Synthetic oligonucleotide
gaagcuggccagggacuug

SEQ ID NO: 2924222 - RNA, 19 nt, Artificial Sequence
  Description of Artificial Sequence: Synthetic oligonucleotide
cagcauggagggcgugggg

SEQ ID NO: 2924223 - RNA, 19 nt, Artificial Sequence
  Description of Artificial Sequence: Synthetic oligonucleotide
uccucagcuggggcuaagu

SEQ ID NO: 2924224 - RNA, 19 nt, Artificial Sequence
  Description of Artificial Sequence: Synthetic oligonucleotide
gacuggcuacuugugaccu

SEQ ID NO: 2924225 - RNA, 19 nt, Artificial Sequence
  Description of Artificial Sequence: Synthetic oligonucleotide
gcaggaaagaggcuugggu

SEQ ID NO: 2924226 - RNA, 19 nt, Artificial Sequence
  Description of Artificial Sequence: Synthetic oligonucleotide
cagcauccuugaaggguug

SEQ ID NO: 2924227 - RNA, 19 nt, Artificial Sequence
  Description of Artificial Sequence: Synthetic oligonucleotide
uggaagccagggagccgca

SEQ ID NO: 2924228 - RNA, 19 nt, Artificial Sequence
  Description of Artificial Sequence: Synthetic oligonucleotide
gggcgugggguccuucccg

SEQ ID NO: 2924229 - RNA, 19 nt, Artificial Sequence
  Description of Artificial Sequence: Synthetic oligonucleotide
agcuggggauggaagccag

SEQ ID NO: 2924230 - RNA, 19 nt, Artificial Sequence
  Description of Artificial Sequence: Synthetic oligonucleotide
ggacuugcagcuggggaug

SEQ ID NO: 2924231 - RNA, 19 nt, Artificial Sequence
  Description of Artificial Sequence: Synthetic oligonucleotide
gcagcuggggauggaagcc

SEQ ID NO: 2924232 - RNA, 19 nt, Artificial Sequence
  Description of Artificial Sequence: Synthetic oligonucleotide
uaagugccgggcugcccuc

SEQ ID NO: 2924233 - RNA, 19 nt, Artificial Sequence
  Description of Artificial Sequence: Synthetic oligonucleotide
uggggcaggcauugcccgu

SEQ ID NO: 2924234 - RNA, 19 nt, Artificial Sequence
  Description of Artificial Sequence: Synthetic oligonucleotide
ugcuccucagcuggggcua

SEQ ID NO: 2924235 - RNA, 19 nt, Artificial Sequence
  Description of Artificial Sequence: Synthetic oligonucleotide
gcuggggcuaagugccggg

SEQ ID NO: 2924236 - RNA, 19 nt, Artificial Sequence
  Description of Artificial Sequence: Synthetic oligonucleotide
caggggacuggcuacuugu

SEQ ID NO: 2924237 - RNA, 19 nt, Artificial Sequence
  Description of Artificial Sequence: Synthetic oligonucleotide
ccuugaaggguugccuggg

SEQ ID NO: 2924238 - RNA, 19 nt, Artificial Sequence
  Description of Artificial Sequence: Synthetic oligonucleotide
gccaccacuugccaaugca

SEQ ID NO: 2924239 - RNA, 19 nt, Artificial Sequence
  Description of Artificial Sequence: Synthetic oligonucleotide
cuggggcuaagugccgggc

SEQ ID NO: 2924240 - RNA, 19 nt, Artificial Sequence
  Description of Artificial Sequence: Synthetic oligonucleotide
cugucgcucaccaagcauu

SEQ ID NO: 2924241 - RNA, 19 nt, Artificial Sequence
  Description of Artificial Sequence: Synthetic oligonucleotide
gcagacuucagggccacca

SEQ ID NO: 2924242 - RNA, 19 nt, Artificial Sequence
  Description of Artificial Sequence: Synthetic oligonucleotide
agccagggagccgcagagg

SEQ ID NO: 2924243 - RNA, 19 nt, Artificial Sequence
  Description of Artificial Sequence: Synthetic oligonucleotide
aggcauugcccgugcugcu

SEQ ID NO: 2924244 - RNA, 19 nt, Artificial Sequence
  Description of Artificial Sequence: Synthetic oligonucleotide
cagggacuugcagcugggg

SEQ ID NO: 2924245 - RNA, 19 nt, Artificial Sequence
  Description of Artificial Sequence: Synthetic oligonucleotide
gaaagaggcuuggguuguc

SEQ ID NO: 2924246 - RNA, 19 nt, Artificial Sequence
  Description of Artificial Sequence: Synthetic oligonucleotide
cuugcagcuggggauggaa

SEQ ID NO: 2924247 - RNA, 19 nt, Artificial Sequence
  Description of Artificial Sequence: Synthetic oligonucleotide
gcauccuugaaggguugcc

SEQ ID NO: 2924248 - RNA, 19 nt, Artificial Sequence
  Description of Artificial Sequence: Synthetic oligonucleotide
uccguggccccuggcaggu

SEQ ID NO: 2924249 - RNA, 19 nt, Artificial Sequence
  Description of Artificial Sequence: Synthetic oligonucleotide
guuguccguggccccuggc

SEQ ID NO: 2924250 - RNA, 19 nt, Artificial Sequence
  Description of Artificial Sequence: Synthetic oligonucleotide
ccgcagaggcccagcaugg

SEQ ID NO: 2924251 - RNA, 19 nt, Artificial Sequence
  Description of Artificial Sequence: Synthetic oligonucleotide
uuccuccuggugccaccac

SEQ ID NO: 2924252 - RNA, 19 nt, Artificial Sequence
  Description of Artificial Sequence: Synthetic oligonucleotide
ggcuuggguugucuuuccc

SEQ ID NO: 2924253 - RNA, 19 nt, Artificial Sequence
  Description of Artificial Sequence: Synthetic oligonucleotide
aggggacuggcuacuugug

SEQ ID NO: 2924254 - RNA, 19 nt, Artificial Sequence
  Description of Artificial Sequence: Synthetic oligonucleotide
gagccgcagaggcccagca

SEQ ID NO: 2924255 - RNA, 19 nt, Artificial Sequence
  Description of Artificial Sequence: Synthetic oligonucleotide
gccccuuccuccuggugcc

SEQ ID NO: 2924256 - RNA, 19 nt, Artificial Sequence
  Description of Artificial Sequence: Synthetic oligonucleotide
gugaccugggugccccuuc

SEQ ID NO: 2924257 - RNA, 19 nt, Artificial Sequence
  Description of Artificial Sequence: Synthetic oligonucleotide
ggggacuggcuacuuguga

SEQ ID NO: 2924258 - RNA, 19 nt, Artificial Sequence
  Description of Artificial Sequence: Synthetic oligonucleotide
uagagacccucggcuagau

SEQ ID NO: 2924259 - RNA, 19 nt, Artificial Sequence
  Description of Artificial Sequence: Synthetic oligonucleotide
cagccuucccaggggacug

SEQ ID NO: 2924260 - RNA, 19 nt, Artificial Sequence
  Description of Artificial Sequence: Synthetic oligonucleotide
ucccaggggacuggcuacu

SEQ ID NO: 2924261 - RNA, 19 nt, Artificial Sequence
  Description of Artificial Sequence: Synthetic oligonucleotide
agccuucccaggggacugg

SEQ ID NO: 2924262 - RNA, 19 nt, Artificial Sequence
  Description of Artificial Sequence: Synthetic oligonucleotide
gggacuugcagcuggggau

SEQ ID NO: 2924263 - RNA, 19 nt, Artificial Sequence
  Description of Artificial Sequence: Synthetic oligonucleotide
cuagagacccucggcuaga

SEQ ID NO: 2924264 - RNA, 19 nt, Artificial Sequence
  Description of Artificial Sequence: Synthetic oligonucleotide
uggcagacuucagggccac

SEQ ID NO: 2924265 - RNA, 19 nt, Artificial Sequence
  Description of Artificial Sequence: Synthetic oligonucleotide
ccagcauggagggcguggg

SEQ ID NO: 2924266 - RNA, 19 nt, Artificial Sequence
  Description of Artificial Sequence: Synthetic oligonucleotide
cauccuugaaggguugccu

SEQ ID NO: 2924267 - RNA, 19 nt, Artificial Sequence
  Description of Artificial Sequence: Synthetic oligonucleotide
acccucggcuagaugguca

SEQ ID NO: 2924268 - RNA, 19 nt, Artificial Sequence
  Description of Artificial Sequence: Synthetic oligonucleotide
ccagggacuugcagcuggg

SEQ ID NO: 2924269 - RNA, 19 nt, Artificial Sequence
  Description of Artificial Sequence: Synthetic oligonucleotide
cguuggauuugaagcuggc

SEQ ID NO: 2924270 - RNA, 19 nt, Artificial Sequence
  Description of Artificial Sequence: Synthetic oligonucleotide
gcauggagggcgugggguc

SEQ ID NO: 2924271 - RNA, 19 nt, Artificial Sequence
  Description of Artificial Sequence: Synthetic oligonucleotide
gcuuggguugucuuucccu

SEQ ID NO: 2924272 - RNA, 19 nt, Artificial Sequence
  Description of Artificial Sequence: Synthetic oligonucleotide
agccgcagaggcccagcau

SEQ ID NO: 2924273 - RNA, 19 nt, Artificial Sequence
  Description of Artificial Sequence: Synthetic oligonucleotide
uugugaccugggugccccu

SEQ ID NO: 2924274 - RNA, 19 nt, Artificial Sequence
  Description of Artificial Sequence: Synthetic oligonucleotide
cccucggcuagauggucag

SEQ ID NO: 2924275 - RNA, 19 nt, Artificial Sequence
  Description of Artificial Sequence: Synthetic oligonucleotide
gggccaccagaauggagca

SEQ ID NO: 2924276 - RNA, 19 nt, Artificial Sequence
  Description of Artificial Sequence: Synthetic oligonucleotide
gguuauuuauuggcagacu

SEQ ID NO: 2924277 - RNA, 19 nt, Artificial Sequence
  Description of Artificial Sequence: Synthetic oligonucleotide
ggugaccguuguccguggc

SEQ ID NO: 2924278 - RNA, 19 nt, Artificial Sequence
  Description of Artificial Sequence: Synthetic oligonucleotide
gacccucggcuagaugguc

SEQ ID NO: 2924279 - RNA, 19 nt, Artificial Sequence
  Description of Artificial Sequence: Synthetic oligonucleotide
cgugggguccuucccgugg

SEQ ID NO: 2924280 - RNA, 19 nt, Artificial Sequence
  Description of Artificial Sequence: Synthetic oligonucleotide
ugugaccugggugccccuu

SEQ ID NO: 2924281 - RNA, 19 nt, Artificial Sequence
  Description of Artificial Sequence: Synthetic oligonucleotide
cuuccuccuggugccacca

SEQ ID NO: 2924282 - RNA, 19 nt, Artificial Sequence
  Description of Artificial Sequence: Synthetic oligonucleotide
cuggugccaccacuugcca

SEQ ID NO: 2924283 - RNA, 19 nt, Artificial Sequence
  Description of Artificial Sequence: Synthetic oligonucleotide
ccagggagccgcagaggcc

SEQ ID NO: 2924284 - RNA, 19 nt, Artificial Sequence
  Description of Artificial Sequence: Synthetic oligonucleotide
gccaaugcagcuccugccu

SEQ ID NO: 2924285 - RNA, 19 nt, Artificial Sequence
  Description of Artificial Sequence: Synthetic oligonucleotide
gugccgggcugcccucggg

SEQ ID NO: 2924286 - RNA, 19 nt, Artificial Sequence
  Description of Artificial Sequence: Synthetic oligonucleotide
cccagcauggagggcgugg

SEQ ID NO: 2924287 - RNA, 19 nt, Artificial Sequence
  Description of Artificial Sequence: Synthetic oligonucleotide
gugccaccacuugccaaug

SEQ ID NO: 2924288 - RNA, 19 nt, Artificial Sequence
  Description of Artificial Sequence: Synthetic oligonucleotide
ccuuccuccuggugccacc

SEQ ID NO: 2924289 - RNA, 19 nt, Artificial Sequence
  Description of Artificial Sequence: Synthetic oligonucleotide
cugaagcaggaaagaggcu

SEQ ID NO: 2924290 - RNA, 19 nt, Artificial Sequence
  Description of Artificial Sequence: Synthetic oligonucleotide
gggacucaggugaccguug

SEQ ID NO: 2924291 - RNA, 19 nt, Artificial Sequence
  Description of Artificial Sequence: Synthetic oligonucleotide
acuugcagcuggggaugga

SEQ ID NO: 2924292 - RNA, 19 nt, Artificial Sequence
  Description of Artificial Sequence: Synthetic oligonucleotide
cuugaaggguugccugggu

SEQ ID NO: 2924293 - RNA, 19 nt, Artificial Sequence
  Description of Artificial Sequence: Synthetic oligonucleotide
gggcuaagugccgggcugc

SEQ ID NO: 2924294 - RNA, 19 nt, Artificial Sequence
  Description of Artificial Sequence: Synthetic oligonucleotide
ccacuugccaaugcagcuc

SEQ ID NO: 2924295 - RNA, 19 nt, Artificial Sequence
  Description of Artificial Sequence: Synthetic oligonucleotide
gggcugucgcucaccaagc

SEQ ID NO: 2924296 - RNA, 19 nt, Artificial Sequence
  Description of Artificial Sequence: Synthetic oligonucleotide
gugcugcuccucagcuggg

SEQ ID NO: 2924297 - RNA, 19 nt, Artificial Sequence
  Description of Artificial Sequence: Synthetic oligonucleotide
gugccccuuccuccuggug

SEQ ID NO: 2924298 - RNA, 19 nt, Artificial Sequence
  Description of Artificial Sequence: Synthetic oligonucleotide
gaggcccagcauggagggc

SEQ ID NO: 2924299 - RNA, 19 nt, Artificial Sequence
  Description of Artificial Sequence: Synthetic oligonucleotide
auggagggcgugggguccu

SEQ ID NO: 2924300 - RNA, 19 nt, Artificial Sequence
  Description of Artificial Sequence: Synthetic oligonucleotide
ggaaagaggcuuggguugu

SEQ ID NO: 2924301 - RNA, 19 nt, Artificial Sequence
  Description of Artificial Sequence: Synthetic oligonucleotide
agcauucguuggauuugaa

SEQ ID NO: 2924302 - RNA, 19 nt, Artificial Sequence
  Description of Artificial Sequence: Synthetic oligonucleotide
cugcuccucagcuggggcu

SEQ ID NO: 2924303 - RNA, 19 nt, Artificial Sequence
  Description of Artificial Sequence: Synthetic oligonucleotide
ggggcaggcauugcccgug

SEQ ID NO: 2924304 - RNA, 19 nt, Artificial Sequence
  Description of Artificial Sequence: Synthetic oligonucleotide
cuagauggucagcauccuu

SEQ ID NO: 2924305 - RNA, 19 nt, Artificial Sequence
  Description of Artificial Sequence: Synthetic oligonucleotide
gcugcccucggggcugucg

SEQ ID NO: 2924306 - RNA, 19 nt, Artificial Sequence
  Description of Artificial Sequence: Synthetic oligonucleotide
gcuaagugccgggcugccc

SEQ ID NO: 2924307 - RNA, 19 nt, Artificial Sequence
  Description of Artificial Sequence: Synthetic oligonucleotide
ccaggggacuggcuacuug

SEQ ID NO: 2924308 - RNA, 19 nt, Artificial Sequence
  Description of Artificial Sequence: Synthetic oligonucleotide
ccuuggugggaagcugaag

SEQ ID NO: 2924309 - RNA, 19 nt, Artificial Sequence
  Description of Artificial Sequence: Synthetic oligonucleotide
ggaagccagggagccgcag

SEQ ID NO: 2924310 - RNA, 19 nt, Artificial Sequence
  Description of Artificial Sequence: Synthetic oligonucleotide
acuugccaaugcagcuccu

SEQ ID NO: 2924311 - RNA, 19 nt, Artificial Sequence
  Description of Artificial Sequence: Synthetic oligonucleotide
ggcuaagugccgggcugcc

SEQ ID NO: 2924312 - RNA, 19 nt, Artificial Sequence
  Description of Artificial Sequence: Synthetic oligonucleotide
gcccgugcugcuccucagc

SEQ ID NO: 2924313 - RNA, 19 nt, Artificial Sequence
  Description of Artificial Sequence: Synthetic oligonucleotide
cagguggggcaggcauugc

SEQ ID NO: 2924314 - RNA, 19 nt, Artificial Sequence
  Description of Artificial Sequence: Synthetic oligonucleotide
cggcuagauggucagcauc

SEQ ID NO: 2924315 - RNA, 19 nt, Artificial Sequence
  Description of Artificial Sequence: Synthetic oligonucleotide
ggcauugcccgugcugcuc

SEQ ID NO: 2924316 - RNA, 19 nt, Artificial Sequence
  Description of Artificial Sequence: Synthetic oligonucleotide
ggcuacuugugaccugggu

SEQ ID NO: 2924317 - RNA, 19 nt, Artificial Sequence
  Description of Artificial Sequence: Synthetic oligonucleotide
ggacucaggugaccguugu

SEQ ID NO: 2924318 - RNA, 19 nt, Artificial Sequence
  Description of Artificial Sequence: Synthetic oligonucleotide
gggcaggcauugcccgugc

SEQ ID NO: 2924319 - RNA, 19 nt, Artificial Sequence
  Description of Artificial Sequence: Synthetic oligonucleotide
ggccaccagaauggagcag

SEQ ID NO: 2924320 - RNA, 19 nt, Artificial Sequence
  Description of Artificial Sequence: Synthetic oligonucleotide
gccccuggcagguggggca

SEQ ID NO: 2924321 - RNA, 19 nt, Artificial Sequence
  Description of Artificial Sequence: Synthetic oligonucleotide
gccgggcugcccucggggc

SEQ ID NO: 2924322 - RNA, 19 nt, Artificial Sequence
  Description of Artificial Sequence: Synthetic oligonucleotide
ggagccgcagaggcccagc

SEQ ID NO: 2924323 - RNA, 19 nt, Artificial Sequence
  Description of Artificial Sequence: Synthetic oligonucleotide
ccgugcugcuccucagcug

SEQ ID NO: 2924324 - RNA, 19 nt, Artificial Sequence
  Description of Artificial Sequence: Synthetic oligonucleotide
gcugucgcucaccaagcau

SEQ ID NO: 2924325 - RNA, 19 nt, Artificial Sequence
  Description of Artificial Sequence: Synthetic oligonucleotide
cccuagagacccucggcua

SEQ ID NO: 2924326 - RNA, 19 nt, Artificial Sequence
  Description of Artificial Sequence: Synthetic oligonucleotide
ggccccuggcagguggggc

SEQ ID NO: 2924327 - RNA, 19 nt, Artificial Sequence
  Description of Artificial Sequence: Synthetic oligonucleotide
augcagcuccugccuccuu

SEQ ID NO: 2924328 - RNA, 19 nt, Artificial Sequence
  Description of Artificial Sequence: Synthetic oligonucleotide
caccaagcauucguuggau

SEQ ID NO: 2924329 - RNA, 19 nt, Artificial Sequence
  Description of Artificial Sequence: Synthetic oligonucleotide
gcgugggguccuucccgug

SEQ ID NO: 2924330 - RNA, 19 nt, Artificial Sequence
  Description of Artificial Sequence: Synthetic oligonucleotide
ggcgugggguccuucccgu

SEQ ID NO: 2924331 - RNA, 19 nt, Artificial Sequence
  Description of Artificial Sequence: Synthetic oligonucleotide
gccuucccaggggacuggc

SEQ ID NO: 2924332 - RNA, 19 nt, Artificial Sequence
  Description of Artificial Sequence: Synthetic oligonucleotide
caccagaauggagcagccu

SEQ ID NO: 2924333 - RNA, 19 nt, Artificial Sequence
  Description of Artificial Sequence: Synthetic oligonucleotide
cguuguccguggccccugg

SEQ ID NO: 2924334 - RNA, 19 nt, Artificial Sequence
  Description of Artificial Sequence: Synthetic oligonucleotide
ccugccuccuuggugggaa

SEQ ID NO: 2924335 - RNA, 19 nt, Artificial Sequence
  Description of Artificial Sequence: Synthetic oligonucleotide
cauugcccgugcugcuccu

SEQ ID NO: 2924336 - RNA, 19 nt, Artificial Sequence
  Description of Artificial Sequence: Synthetic oligonucleotide
agggagccgcagaggccca

SEQ ID NO: 2924337 - RNA, 19 nt, Artificial Sequence
  Description of Artificial Sequence: Synthetic oligonucleotide
ccucggcuagauggucagc

SEQ ID NO: 2924338 - RNA, 19 nt, Artificial Sequence
  Description of Artificial Sequence: Synthetic oligonucleotide
gggagccgcagaggcccag

SEQ ID NO: 2924339 - RNA, 19 nt, Artificial Sequence
  Description of Artificial Sequence: Synthetic oligonucleotide
ggcagacuucagggccacc

SEQ ID NO: 2924340 - RNA, 19 nt, Artificial Sequence
  Description of Artificial Sequence: Synthetic oligonucleotide
ggggacucaggugaccguu

SEQ ID NO: 2924341 - RNA, 19 nt, Artificial Sequence
  Description of Artificial Sequence: Synthetic oligonucleotide
uggagggcgugggguccuu

SEQ ID NO: 2924342 - RNA, 19 nt, Artificial Sequence
  Description of Artificial Sequence: Synthetic oligonucleotide
ggugccccuuccuccuggu

SEQ ID NO: 2924343 - RNA, 19 nt, Artificial Sequence
  Description of Artificial Sequence: Synthetic oligonucleotide
cccgugcugcuccucagcu

SEQ ID NO: 2924344 - RNA, 19 nt, Artificial Sequence
  Description of Artificial Sequence: Synthetic oligonucleotide
ccucggggcugucgcucac

SEQ ID NO: 2924345 - RNA, 19 nt, Artificial Sequence
  Description of Artificial Sequence: Synthetic oligonucleotide
ccuccuggugccaccacuu

SEQ ID NO: 2924346 - RNA, 19 nt, Artificial Sequence
  Description of Artificial Sequence: Synthetic oligonucleotide
ggcaggcauugcccgugcu

SEQ ID NO: 2924347 - RNA, 19 nt, Artificial Sequence
  Description of Artificial Sequence: Synthetic oligonucleotide
cagcuccugccuccuuggu

SEQ ID NO: 2924348 - RNA, 19 nt, Artificial Sequence
  Description of Artificial Sequence: Synthetic oligonucleotide
ggagggcgugggguccuuc

SEQ ID NO: 2924349 - RNA, 19 nt, Artificial Sequence
  Description of Artificial Sequence: Synthetic oligonucleotide
ccguuguccguggccccug

SEQ ID NO: 2924350 - RNA, 19 nt, Artificial Sequence
  Description of Artificial Sequence: Synthetic oligonucleotide
gcccagcauggagggcgug

SEQ ID NO: 2924351 - RNA, 19 nt, Artificial Sequence
  Description of Artificial Sequence: Synthetic oligonucleotide
ccuucccaggggacuggcu

SEQ ID NO: 2924352 - RNA, 19 nt, Artificial Sequence
  Description of Artificial Sequence: Synthetic oligonucleotide
cgcucaccaagcauucguu

SEQ ID NO: 2924353 - RNA, 19 nt, Artificial Sequence
  Description of Artificial Sequence: Synthetic oligonucleotide
ggcccagcauggagggcgu

SEQ ID NO: 2924354 - RNA, 19 nt, Artificial Sequence
  Description of Artificial Sequence: Synthetic oligonucleotide
cgcagaggcccagcaugga

SEQ ID NO: 2924355 - RNA, 19 nt, Artificial Sequence
  Description of Artificial Sequence: Synthetic oligonucleotide
ccccuuccuccuggugcca

SEQ ID NO: 2924356 - RNA, 19 nt, Artificial Sequence
  Description of Artificial Sequence: Synthetic oligonucleotide
ccguggccccuggcaggug

SEQ ID NO: 2924357 - RNA, 19 nt, Artificial Sequence
  Description of Artificial Sequence: Synthetic oligonucleotide
cggggcugucgcucaccaa

SEQ ID NO: 2924358 - RNA, 19 nt, Artificial Sequence
  Description of Artificial Sequence: Synthetic oligonucleotide
ggcugcccucggggcuguc

SEQ ID NO: 2924359 - RNA, 19 nt, Artificial Sequence
  Description of Artificial Sequence: Synthetic oligonucleotide
cccaggggacuggcuacuu

SEQ ID NO: 2924360 - RNA, 19 nt, Artificial Sequence
  Description of Artificial Sequence: Synthetic oligonucleotide
aauaguucaaccuugugag

SEQ ID NO: 2924361 - RNA, 19 nt, Artificial Sequence
  Description of Artificial Sequence: Synthetic oligonucleotide
uccaugaagauucagagag

SEQ ID NO: 2924362 - RNA, 19 nt, Artificial Sequence
  Description of Artificial Sequence: Synthetic oligonucleotide
uuuauuguaugcuacagcc

SEQ ID NO: 2924363 - RNA, 19 nt, Artificial Sequence
  Description of Artificial Sequence: Synthetic oligonucleotide
aauccaugaagauucagag

SEQ ID NO: 2924364 - RNA, 19 nt, Artificial Sequence
  Description of Artificial Sequence: Synthetic oligonucleotide
uauauaaaauaguucaacc

SEQ ID NO: 2924365 - RNA, 19 nt, Artificial Sequence
  Description of Artificial Sequence: Synthetic oligonucleotide
aaauaguucaaccuuguga

SEQ ID NO: 2924366 - RNA, 19 nt, Artificial Sequence
  Description of Artificial Sequence: Synthetic oligonucleotide
uguacuugaagacacuccg

SEQ ID NO: 2924367 - RNA, 19 nt, Artificial Sequence
  Description of Artificial Sequence: Synthetic oligonucleotide
acuguuucaagucugcagc

SEQ ID NO: 2924368 - RNA, 19 nt, Artificial Sequence
  Description of Artificial Sequence: Synthetic oligonucleotide
ugaaccaccuucuucaugg

SEQ ID NO: 2924369 - RNA, 19 nt, Artificial Sequence
  Description of Artificial Sequence: Synthetic oligonucleotide
aauucucuucaacagucgc

SEQ ID NO: 2924370 - RNA, 19 nt, Artificial Sequence
  Description of Artificial Sequence: Synthetic oligonucleotide
agaacugacaaguagaaga

SEQ ID NO: 2924371 - RNA, 19 nt, Artificial Sequence
  Description of Artificial Sequence: Synthetic oligonucleotide
ugaagauucagagagguag

SEQ ID NO: 2924372 - RNA, 19 nt, Artificial Sequence
  Description of Artificial Sequence: Synthetic oligonucleotide
uuaagaacugacaaguaga

SEQ ID NO: 2924373 - RNA, 19 nt, Artificial Sequence
  Description of Artificial Sequence: Synthetic oligonucleotide
ucagauguaauucucuuca

SEQ ID NO: 2924374 - RNA, 19 nt, Artificial Sequence
  Description of Artificial Sequence: Synthetic oligonucleotide
guguauauaaaauaguuca

SEQ ID NO: 2924375 - RNA, 19 nt, Artificial Sequence
  Description of Artificial Sequence: Synthetic oligonucleotide
uuaagauacaugauuacaa

SEQ ID NO: 2924376 - RNA, 19 nt, Artificial Sequence
  Description of Artificial Sequence: Synthetic oligonucleotide
uauaaaauaguucaaccuu

SEQ ID NO: 2924377 - RNA, 19 nt, Artificial Sequence
  Description of Artificial Sequence: Synthetic oligonucleotide
auauaaaauaguucaaccu

SEQ ID NO: 2924378 - RNA, 19 nt, Artificial Sequence
  Description of Artificial Sequence: Synthetic oligonucleotide
acaaguagaagauugugug

SEQ ID NO: 2924379 - RNA, 19 nt, Artificial Sequence
  Description of Artificial Sequence: Synthetic oligonucleotide
aaccuugugagacagaaau

SEQ ID NO: 2924380 - RNA, 19 nt, Artificial Sequence
  Description of Artificial Sequence: Synthetic oligonucleotide
aagauuguguguuauggca

SEQ ID NO: 2924381 - RNA, 19 nt, Artificial Sequence
  Description of Artificial Sequence: Synthetic oligonucleotide
cagaaauccaugaagauuc

SEQ ID NO: 2924382 - RNA, 19 nt, Artificial Sequence
  Description of Artificial Sequence: Synthetic oligonucleotide
uuuuguacagacuucagau

SEQ ID NO: 2924383 - RNA, 19 nt, Artificial Sequence
  Description of Artificial Sequence: Synthetic oligonucleotide
gauguuaagaacugacaag

SEQ ID NO: 2924384 - RNA, 19 nt, Artificial Sequence
  Description of Artificial Sequence: Synthetic oligonucleotide
aaaaggagcagacuuucug

SEQ ID NO: 2924385 - RNA, 19 nt, Artificial Sequence
  Description of Artificial Sequence: Synthetic oligonucleotide
agagguagauguuaagaac

SEQ ID NO: 2924386 - RNA, 19 nt, Artificial Sequence
  Description of Artificial Sequence: Synthetic oligonucleotide
gauguaauucucuucaaca

SEQ ID NO: 2924387 - RNA, 19 nt, Artificial Sequence
  Description of Artificial Sequence: Synthetic oligonucleotide
guuaagaacugacaaguag

SEQ ID NO: 2924388 - RNA, 19 nt, Artificial Sequence
  Description of Artificial Sequence: Synthetic oligonucleotide
uuguacagacuucagaugu

SEQ ID NO: 2924389 - RNA, 19 nt, Artificial Sequence
  Description of Artificial Sequence: Synthetic oligonucleotide
acuuucuggggucugaagg

SEQ ID NO: 2924390 - RNA, 19 nt, Artificial Sequence
  Description of Artificial Sequence: Synthetic oligonucleotide
uauggcacguguuacaggc

SEQ ID NO: 2924391 - RNA, 19 nt, Artificial Sequence
  Description of Artificial Sequence: Synthetic oligonucleotide
uuuuauuguaugcuacagc

SEQ ID NO: 2924392 - RNA, 19 nt, Artificial Sequence
  Description of Artificial Sequence: Synthetic oligonucleotide
agauguaauucucuucaac

SEQ ID NO: 2924393 - RNA, 19 nt, Artificial Sequence
  Description of Artificial Sequence: Synthetic oligonucleotide
agggauuuguacuugaaga

SEQ ID NO: 2924394 - RNA, 19 nt, Artificial Sequence
  Description of Artificial Sequence: Synthetic oligonucleotide
aagggauuuguacuugaag

SEQ ID NO: 2924395 - RNA, 19 nt, Artificial Sequence
  Description of Artificial Sequence: Synthetic oligonucleotide
augaaaagugguuugagaa

SEQ ID NO: 2924396 - RNA, 19 nt, Artificial Sequence
  Description of Artificial Sequence: Synthetic oligonucleotide
uaugcuguuuuauuguaug

SEQ ID NO: 2924397 - RNA, 19 nt, Artificial Sequence
  Description of Artificial Sequence: Synthetic oligonucleotide
auguaauucucuucaacag

SEQ ID NO: 2924398 - RNA, 19 nt, Artificial Sequence
  Description of Artificial Sequence: Synthetic oligonucleotide
uguaauucucuucaacagu

SEQ ID NO: 2924399 - RNA, 19 nt, Artificial Sequence
  Description of Artificial Sequence: Synthetic oligonucleotide
aagauacaugauuacaaaa

SEQ ID NO: 2924400 - RNA, 19 nt, Artificial Sequence
  Description of Artificial Sequence: Synthetic oligonucleotide
gauucagagagguagaugu

SEQ ID NO: 2924401 - RNA, 19 nt, Artificial Sequence
  Description of Artificial Sequence: Synthetic oligonucleotide
aaccuuaagauacaugauu

SEQ ID NO: 2924402 - RNA, 19 nt, Artificial Sequence
  Description of Artificial Sequence: Synthetic oligonucleotide
aguguauauaaaauaguuc

SEQ ID NO: 2924403 - RNA, 19 nt, Artificial Sequence
  Description of Artificial Sequence: Synthetic oligonucleotide
accuucacgcgguugagcc

SEQ ID NO: 2924404 - RNA, 19 nt, Artificial Sequence
  Description of Artificial Sequence: Synthetic oligonucleotide
gauuguguguuauggcacg

SEQ ID NO: 2924405 - RNA, 19 nt, Artificial Sequence
  Description of Artificial Sequence: Synthetic oligonucleotide
ugugagacagaaauccaug

SEQ ID NO: 2924406 - RNA, 19 nt, Artificial Sequence
  Description of Artificial Sequence: Synthetic oligonucleotide
uguauauaaaauaguucaa

SEQ ID NO: 2924407 - RNA, 19 nt, Artificial Sequence
  Description of Artificial Sequence: Synthetic oligonucleotide
agauguuaagaacugacaa

SEQ ID NO: 2924408 - RNA, 19 nt, Artificial Sequence
  Description of Artificial Sequence: Synthetic oligonucleotide
ugcugaaccaccuucuuca

SEQ ID NO: 2924409 - RNA, 19 nt, Artificial Sequence
  Description of Artificial Sequence: Synthetic oligonucleotide
uugggcauucugcagacag

SEQ ID NO: 2924410 - RNA, 19 nt, Artificial Sequence
  Description of Artificial Sequence: Synthetic oligonucleotide
uuugagaaaccuuaagaua

SEQ ID NO: 2924411 - RNA, 19 nt, Artificial Sequence
  Description of Artificial Sequence: Synthetic oligonucleotide
uaauucucuucaacagucg

SEQ ID NO: 2924412 - RNA, 19 nt, Artificial Sequence
  Description of Artificial Sequence: Synthetic oligonucleotide
gaaaagugguuugagaaac

SEQ ID NO: 2924413 - RNA, 19 nt, Artificial Sequence
  Description of Artificial Sequence: Synthetic oligonucleotide
aaaauaguucaaccuugug

SEQ ID NO: 2924414 - RNA, 19 nt, Artificial Sequence
  Description of Artificial Sequence: Synthetic oligonucleotide
uguuacaggcuuuuguaca

SEQ ID NO: 2924415 - RNA, 19 nt, Artificial Sequence
  Description of Artificial Sequence: Synthetic oligonucleotide
uagauguuaagaacugaca

SEQ ID NO: 2924416 - RNA, 19 nt, Artificial Sequence
  Description of Artificial Sequence: Synthetic oligonucleotide
uaaaauaguucaaccuugu

SEQ ID NO: 2924417 - RNA, 19 nt, Artificial Sequence
  Description of Artificial Sequence: Synthetic oligonucleotide
uguuuuauuguaugcuaca

SEQ ID NO: 2924418 - RNA, 19 nt, Artificial Sequence
  Description of Artificial Sequence: Synthetic oligonucleotide
aaauccaugaagauucaga

SEQ ID NO: 2924419 - RNA, 19 nt, Artificial Sequence
  Description of Artificial Sequence: Synthetic oligonucleotide
auguuaagaacugacaagu

SEQ ID NO: 2924420 - RNA, 19 nt, Artificial Sequence
  Description of Artificial Sequence: Synthetic oligonucleotide
aaaagugguuugagaaacc

SEQ ID NO: 2924421 - RNA, 19 nt, Artificial Sequence
  Description of Artificial Sequence: Synthetic oligonucleotide
uaagauacaugauuacaaa

SEQ ID NO: 2924422 - RNA, 19 nt, Artificial Sequence
  Description of Artificial Sequence: Synthetic oligonucleotide
uaagaacugacaaguagaa

SEQ ID NO: 2924423 - RNA, 19 nt, Artificial Sequence
  Description of Artificial Sequence: Synthetic oligonucleotide
gauuuguacuugaagacac

SEQ ID NO: 2924424 - RNA, 19 nt, Artificial Sequence
  Description of Artificial Sequence: Synthetic oligonucleotide
ugccugagaaaccuucacg

SEQ ID NO: 2924425 - RNA, 19 nt, Artificial Sequence
  Description of Artificial Sequence: Synthetic oligonucleotide
auaaaauaguucaaccuug

SEQ ID NO: 2924426 - RNA, 19 nt, Artificial Sequence
  Description of Artificial Sequence: Synthetic oligonucleotide
cugagaaaccuucacgcgg

SEQ ID NO: 2924427 - RNA, 19 nt, Artificial Sequence
  Description of Artificial Sequence: Synthetic oligonucleotide
guauauaaaauaguucaac

SEQ ID NO: 2924428 - RNA, 19 nt, Artificial Sequence
  Description of Artificial Sequence: Synthetic oligonucleotide
acugacaaguagaagauug

SEQ ID NO: 2924429 - RNA, 19 nt, Artificial Sequence
  Description of Artificial Sequence: Synthetic oligonucleotide
uuuguacagacuucagaug

SEQ ID NO: 2924430 - RNA, 19 nt, Artificial Sequence
  Description of Artificial Sequence: Synthetic oligonucleotide
cuuucuggggucugaaggg

SEQ ID NO: 2924431 - RNA, 19 nt, Artificial Sequence
  Description of Artificial Sequence: Synthetic oligonucleotide
uacuugaagacacuccggu

SEQ ID NO: 2924432 - RNA, 19 nt, Artificial Sequence
  Description of Artificial Sequence: Synthetic oligonucleotide
uuguacuugaagacacucc

SEQ ID NO: 2924433 - RNA, 19 nt, Artificial Sequence
  Description of Artificial Sequence: Synthetic oligonucleotide
agacagaacuguuucaagu

SEQ ID NO: 2924434 - RNA, 19 nt, Artificial Sequence
  Description of Artificial Sequence: Synthetic oligonucleotide
uaugcuacagccaguguau

SEQ ID NO: 2924435 - RNA, 19 nt, Artificial Sequence
  Description of Artificial Sequence: Synthetic oligonucleotide
ugaaaagugguuugagaaa

SEQ ID NO: 2924436 - RNA, 19 nt, Artificial Sequence
  Description of Artificial Sequence: Synthetic oligonucleotide
gacagaacuguuucaaguc

SEQ ID NO: 2924437 - RNA, 19 nt, Artificial Sequence
  Description of Artificial Sequence: Synthetic oligonucleotide
uguguuauggcacguguua

SEQ ID NO: 2924438 - RNA, 19 nt, Artificial Sequence
  Description of Artificial Sequence: Synthetic oligonucleotide
aaagugguuugagaaaccu

SEQ ID NO: 2924439 - RNA, 19 nt, Artificial Sequence
  Description of Artificial Sequence: Synthetic oligonucleotide
guuacaggcuuuuguacag

SEQ ID NO: 2924440 - RNA, 19 nt, Artificial Sequence
  Description of Artificial Sequence: Synthetic oligonucleotide
ucauguugggcauucugca

SEQ ID NO: 2924441 - RNA, 19 nt, Artificial Sequence
  Description of Artificial Sequence: Synthetic oligonucleotide
ugagaaaccuucacgcggu

SEQ ID NO: 2924442 - RNA, 19 nt, Artificial Sequence
  Description of Artificial Sequence: Synthetic oligonucleotide
ugguuugagaaaccuuaag

SEQ ID NO: 2924443 - RNA, 19 nt, Artificial Sequence
  Description of Artificial Sequence: Synthetic oligonucleotide
aaccaccuucuucauggcg

SEQ ID NO: 2924444 - RNA, 19 nt, Artificial Sequence
  Description of Artificial Sequence: Synthetic oligonucleotide
uucucuucaacagucgcug

SEQ ID NO: 2924445 - RNA, 19 nt, Artificial Sequence
  Description of Artificial Sequence: Synthetic oligonucleotide
gaaaccuucacgcgguuga

SEQ ID NO: 2924446 - RNA, 19 nt, Artificial Sequence
  Description of Artificial Sequence: Synthetic oligonucleotide
acagccaguguauauaaaa

SEQ ID NO: 2924447 - RNA, 19 nt, Artificial Sequence
  Description of Artificial Sequence: Synthetic oligonucleotide
guuuuauuguaugcuacag

SEQ ID NO: 2924448 - RNA, 19 nt, Artificial Sequence
  Description of Artificial Sequence: Synthetic oligonucleotide
cuguuuuauuguaugcuac

SEQ ID NO: 2924449 - RNA, 19 nt, Artificial Sequence
  Description of Artificial Sequence: Synthetic oligonucleotide
uugaagacacuccggucag

SEQ ID NO: 2924450 - RNA, 19 nt, Artificial Sequence
  Description of Artificial Sequence: Synthetic oligonucleotide
cuugaagacacuccgguca

SEQ ID NO: 2924451 - RNA, 19 nt, Artificial Sequence
  Description of Artificial Sequence: Synthetic oligonucleotide
aaguagaagauuguguguu

SEQ ID NO: 2924452 - RNA, 19 nt, Artificial Sequence
  Description of Artificial Sequence: Synthetic oligonucleotide
guuucaagucugcagcugc

SEQ ID NO: 2924453 - RNA, 19 nt, Artificial Sequence
  Description of Artificial Sequence: Synthetic oligonucleotide
guucaugaaaagugguuug

SEQ ID NO: 2924454 - RNA, 19 nt, Artificial Sequence
  Description of Artificial Sequence: Synthetic oligonucleotide
uaguucaaccuugugagac

SEQ ID NO: 2924455 - RNA, 19 nt, Artificial Sequence
  Description of Artificial Sequence: Synthetic oligonucleotide
agauuguguguuauggcac

SEQ ID NO: 2924456 - RNA, 19 nt, Artificial Sequence
  Description of Artificial Sequence: Synthetic oligonucleotide
acagaacuguuucaagucu

SEQ ID NO: 2924457 - RNA, 19 nt, Artificial Sequence
  Description of Artificial Sequence: Synthetic oligonucleotide
gagagguagauguuaagaa

SEQ ID NO: 2924458 - RNA, 19 nt, Artificial Sequence
  Description of Artificial Sequence: Synthetic oligonucleotide
guagauguuaagaacugac

SEQ ID NO: 2924459 - RNA, 19 nt, Artificial Sequence
  Description of Artificial Sequence: Synthetic oligonucleotide
ucaugaaaagugguuugag

SEQ ID NO: 2924460 - RNA, 19 nt, Artificial Sequence
  Description of Artificial Sequence: Synthetic oligonucleotide
cauucugcagacagaacug

SEQ ID NO: 2924461 - RNA, 19 nt, Artificial Sequence
  Description of Artificial Sequence: Synthetic oligonucleotide
agaacuguuucaagucugc

SEQ ID NO: 2924462 - RNA, 19 nt, Artificial Sequence
  Description of Artificial Sequence: Synthetic oligonucleotide
guaauucucuucaacaguc

SEQ ID NO: 2924463 - RNA, 19 nt, Artificial Sequence
  Description of Artificial Sequence: Synthetic oligonucleotide
acuugaagacacuccgguc

SEQ ID NO: 2924464 - RNA, 19 nt, Artificial Sequence
  Description of Artificial Sequence: Synthetic oligonucleotide
ucaaccuugugagacagaa

SEQ ID NO: 2924465 - RNA, 19 nt, Artificial Sequence
  Description of Artificial Sequence: Synthetic oligonucleotide
aacagucgcugguucauga

SEQ ID NO: 2924466 - RNA, 19 nt, Artificial Sequence
  Description of Artificial Sequence: Synthetic oligonucleotide
uguuauggcacguguuaca

SEQ ID NO: 2924467 - RNA, 19 nt, Artificial Sequence
  Description of Artificial Sequence: Synthetic oligonucleotide
gguuugagaaaccuuaaga

SEQ ID NO: 2924468 - RNA, 19 nt, Artificial Sequence
  Description of Artificial Sequence: Synthetic oligonucleotide
ucagagagguagauguuaa

SEQ ID NO: 2924469 - RNA, 19 nt, Artificial Sequence
  Description of Artificial Sequence: Synthetic oligonucleotide
aagaacugacaaguagaag

SEQ ID NO: 2924470 - RNA, 19 nt, Artificial Sequence
  Description of Artificial Sequence: Synthetic oligonucleotide
agacagaaauccaugaaga

SEQ ID NO: 2924471 - RNA, 19 nt, Artificial Sequence
  Description of Artificial Sequence: Synthetic oligonucleotide
acagacuucagauguaauu

SEQ ID NO: 2924472 - RNA, 19 nt, Artificial Sequence
  Description of Artificial Sequence: Synthetic oligonucleotide
ucugaagggauuuguacuu

SEQ ID NO: 2924473 - RNA, 19 nt, Artificial Sequence
  Description of Artificial Sequence: Synthetic oligonucleotide
agagagguagauguuaaga

SEQ ID NO: 2924474 - RNA, 19 nt, Artificial Sequence
  Description of Artificial Sequence: Synthetic oligonucleotide
cagacuucagauguaauuc

SEQ ID NO: 2924475 - RNA, 19 nt, Artificial Sequence
  Description of Artificial Sequence: Synthetic oligonucleotide
uuucaagucugcagcugcc

SEQ ID NO: 2924476 - RNA, 19 nt, Artificial Sequence
  Description of Artificial Sequence: Synthetic oligonucleotide
uucagauguaauucucuuc

SEQ ID NO: 2924477 - RNA, 19 nt, Artificial Sequence
  Description of Artificial Sequence: Synthetic oligonucleotide
uuuguacuugaagacacuc

SEQ ID NO: 2924478 - RNA, 19 nt, Artificial Sequence
  Description of Artificial Sequence: Synthetic oligonucleotide
cuuaagauacaugauuaca

SEQ ID NO: 2924479 - RNA, 19 nt, Artificial Sequence
  Description of Artificial Sequence: Synthetic oligonucleotide
uuguaugcuacagccagug

SEQ ID NO: 2924480 - RNA, 19 nt, Artificial Sequence
  Description of Artificial Sequence: Synthetic oligonucleotide
uuauggcacguguuacagg

SEQ ID NO: 2924481 - RNA, 19 nt, Artificial Sequence
  Description of Artificial Sequence: Synthetic oligonucleotide
uucuucauggcggcgacgc

SEQ ID NO: 2924482 - RNA, 19 nt, Artificial Sequence
  Description of Artificial Sequence: Synthetic oligonucleotide
accaccuucuucauggcgg

SEQ ID NO: 2924483 - RNA, 19 nt, Artificial Sequence
  Description of Artificial Sequence: Synthetic oligonucleotide
uucaugaaaagugguuuga

SEQ ID NO: 2924484 - RNA, 19 nt, Artificial Sequence
  Description of Artificial Sequence: Synthetic oligonucleotide
uagaagauuguguguuaug

SEQ ID NO: 2924485 - RNA, 19 nt, Artificial Sequence
  Description of Artificial Sequence: Synthetic oligonucleotide
gccaguguauauaaaauag

SEQ ID NO: 2924486 - RNA, 19 nt, Artificial Sequence
  Description of Artificial Sequence: Synthetic oligonucleotide
guuauggcacguguuacag

SEQ ID NO: 2924487 - RNA, 19 nt, Artificial Sequence
  Description of Artificial Sequence: Synthetic oligonucleotide
ucaagucugcagcugccug

SEQ ID NO: 2924488 - RNA, 19 nt, Artificial Sequence
  Description of Artificial Sequence: Synthetic oligonucleotide
ccuugugagacagaaaucc

SEQ ID NO: 2924489 - RNA, 19 nt, Artificial Sequence
  Description of Artificial Sequence: Synthetic oligonucleotide
ugaagggauuuguacuuga

SEQ ID NO: 2924490 - RNA, 19 nt, Artificial Sequence
  Description of Artificial Sequence: Synthetic oligonucleotide
agacacuccggucagcaga

SEQ ID NO: 2924491 - RNA, 19 nt, Artificial Sequence
  Description of Artificial Sequence: Synthetic oligonucleotide
ucugcagacagaacuguuu

SEQ ID NO: 2924492 - RNA, 19 nt, Artificial Sequence
  Description of Artificial Sequence: Synthetic oligonucleotide
cucgaggaacccgacaugg

SEQ ID NO: 2924493 - RNA, 19 nt, Artificial Sequence
  Description of Artificial Sequence: Synthetic oligonucleotide
auguugggcauucugcaga

SEQ ID NO: 2924494 - RNA, 19 nt, Artificial Sequence
  Description of Artificial Sequence: Synthetic oligonucleotide
aggagcagacuuucugggg

SEQ ID NO: 2924495 - RNA, 19 nt, Artificial Sequence
  Description of Artificial Sequence: Synthetic oligonucleotide
aaccuucacgcgguugagc

SEQ ID NO: 2924496 - RNA, 19 nt, Artificial Sequence
  Description of Artificial Sequence: Synthetic oligonucleotide
uucaacagucgcugguuca

SEQ ID NO: 2924497 - RNA, 19 nt, Artificial Sequence
  Description of Artificial Sequence: Synthetic oligonucleotide
agugguuugagaaaccuua

SEQ ID NO: 2924498 - RNA, 19 nt, Artificial Sequence
  Description of Artificial Sequence: Synthetic oligonucleotide
caugaaaagugguuugaga

SEQ ID NO: 2924499 - RNA, 19 nt, Artificial Sequence
  Description of Artificial Sequence: Synthetic oligonucleotide
cuuuuguacagacuucaga

SEQ ID NO: 2924500 - RNA, 19 nt, Artificial Sequence
  Description of Artificial Sequence: Synthetic oligonucleotide
gucauguugggcauucugc

SEQ ID NO: 2924501 - RNA, 19 nt, Artificial Sequence
  Description of Artificial Sequence: Synthetic oligonucleotide
gccugagaaaccuucacgc

SEQ ID NO: 2924502 - RNA, 19 nt, Artificial Sequence
  Description of Artificial Sequence: Synthetic oligonucleotide
cuucacgcgguugagcccg

SEQ ID NO: 2924503 - RNA, 19 nt, Artificial Sequence
  Description of Artificial Sequence: Synthetic oligonucleotide
auggcggcgacgcucgagg

SEQ ID NO: 2924504 - RNA, 19 nt, Artificial Sequence
  Description of Artificial Sequence: Synthetic oligonucleotide
gaaauccaugaagauucag

SEQ ID NO: 2924505 - RNA, 19 nt, Artificial Sequence
  Description of Artificial Sequence: Synthetic oligonucleotide
ucucuucaacagucgcugg

SEQ ID NO: 2924506 - RNA, 19 nt, Artificial Sequence
  Description of Artificial Sequence: Synthetic oligonucleotide
acguguuacaggcuuuugu

SEQ ID NO: 2924507 - RNA, 19 nt, Artificial Sequence
  Description of Artificial Sequence: Synthetic oligonucleotide
agccaguguauauaaaaua

SEQ ID NO: 2924508 - RNA, 19 nt, Artificial Sequence
  Description of Artificial Sequence: Synthetic oligonucleotide
ugguucaugaaaagugguu

SEQ ID NO: 2924509 - RNA, 19 nt, Artificial Sequence
  Description of Artificial Sequence: Synthetic oligonucleotide
gggauuuguacuugaagac

SEQ ID NO: 2924510 - RNA, 19 nt, Artificial Sequence
  Description of Artificial Sequence: Synthetic oligonucleotide
uacaggcuuuuguacagac

SEQ ID NO: 2924511 - RNA, 19 nt, Artificial Sequence
  Description of Artificial Sequence: Synthetic oligonucleotide
gagguagauguuaagaacu

SEQ ID NO: 2924512 - RNA, 19 nt, Artificial Sequence
  Description of Artificial Sequence: Synthetic oligonucleotide
aagacacuccggucagcag

SEQ ID NO: 2924513 - RNA, 19 nt, Artificial Sequence
  Description of Artificial Sequence: Synthetic oligonucleotide
guaugcuacagccagugua

SEQ ID NO: 2924514 - RNA, 19 nt, Artificial Sequence
  Description of Artificial Sequence: Synthetic oligonucleotide
cauguugggcauucugcag

SEQ ID NO: 2924515 - RNA, 19 nt, Artificial Sequence
  Description of Artificial Sequence: Synthetic oligonucleotide
aguucaaccuugugagaca

SEQ ID NO: 2924516 - RNA, 19 nt, Artificial Sequence
  Description of Artificial Sequence: Synthetic oligonucleotide
auccaugaagauucagaga

SEQ ID NO: 2924517 - RNA, 19 nt, Artificial Sequence
  Description of Artificial Sequence: Synthetic oligonucleotide
guguuacaggcuuuuguac

SEQ ID NO: 2924518 - RNA, 19 nt, Artificial Sequence
  Description of Artificial Sequence: Synthetic oligonucleotide
cagagggucauguugggca

SEQ ID NO: 2924519 - RNA, 19 nt, Artificial Sequence
  Description of Artificial Sequence: Synthetic oligonucleotide
ugcagacagaacuguuuca

SEQ ID NO: 2924520 - RNA, 19 nt, Artificial Sequence
  Description of Artificial Sequence: Synthetic oligonucleotide
aaaccuuaagauacaugau

SEQ ID NO: 2924521 - RNA, 19 nt, Artificial Sequence
  Description of Artificial Sequence: Synthetic oligonucleotide
aagucugcagcugccugag

SEQ ID NO: 2924522 - RNA, 19 nt, Artificial Sequence
  Description of Artificial Sequence: Synthetic oligonucleotide
guucaaccuugugagacag

SEQ ID NO: 2924523 - RNA, 19 nt, Artificial Sequence
  Description of Artificial Sequence: Synthetic oligonucleotide
uucagagagguagauguua

SEQ ID NO: 2924524 - RNA, 19 nt, Artificial Sequence
  Description of Artificial Sequence: Synthetic oligonucleotide
cagacagaacuguuucaag

SEQ ID NO: 2924525 - RNA, 19 nt, Artificial Sequence
  Description of Artificial Sequence: Synthetic oligonucleotide
uguugggcauucugcagac

SEQ ID NO: 2924526 - RNA, 19 nt, Artificial Sequence
  Description of Artificial Sequence: Synthetic oligonucleotide
gcugguucaugaaaagugg

SEQ ID NO: 2924527 - RNA, 19 nt, Artificial Sequence
  Description of Artificial Sequence: Synthetic oligonucleotide
cugcagacagaacuguuuc

SEQ ID NO: 2924528 - RNA, 19 nt, Artificial Sequence
  Description of Artificial Sequence: Synthetic oligonucleotide
aagauucagagagguagau

SEQ ID NO: 2924529 - RNA, 19 nt, Artificial Sequence
  Description of Artificial Sequence: Synthetic oligonucleotide
uguacagacuucagaugua

SEQ ID NO: 2924530 - RNA, 19 nt, Artificial Sequence
  Description of Artificial Sequence: Synthetic oligonucleotide
gaacccgacauggcgcucg

SEQ ID NO: 2924531 - RNA, 19 nt, Artificial Sequence
  Description of Artificial Sequence: Synthetic oligonucleotide
gacuuucuggggucugaag

SEQ ID NO: 2924532 - RNA, 19 nt, Artificial Sequence
  Description of Artificial Sequence: Synthetic oligonucleotide
gugccgacucgucaguccg

SEQ ID NO: 2924533 - RNA, 19 nt, Artificial Sequence
  Description of Artificial Sequence: Synthetic oligonucleotide
guacuugaagacacuccgg

SEQ ID NO: 2924534 - RNA, 19 nt, Artificial Sequence
  Description of Artificial Sequence: Synthetic oligonucleotide
ggucugaagggauuuguac

SEQ ID NO: 2924535 - RNA, 19 nt, Artificial Sequence
  Description of Artificial Sequence: Synthetic oligonucleotide
gaggaacccgacauggcgc

SEQ ID NO: 2924536 - RNA, 19 nt, Artificial Sequence
  Description of Artificial Sequence: Synthetic oligonucleotide
cacuccggucagcagaggg

SEQ ID NO: 2924537 - RNA, 19 nt, Artificial Sequence
  Description of Artificial Sequence: Synthetic oligonucleotide
uugagcccggccuccagcc

SEQ ID NO: 2924538 - RNA, 19 nt, Artificial Sequence
  Description of Artificial Sequence: Synthetic oligonucleotide
gaagauucagagagguaga

SEQ ID NO: 2924539 - RNA, 19 nt, Artificial Sequence
  Description of Artificial Sequence: Synthetic oligonucleotide
auaguucaaccuugugaga

SEQ ID NO: 2924540 - RNA, 19 nt, Artificial Sequence
  Description of Artificial Sequence: Synthetic oligonucleotide
agaaaccuuaagauacaug

SEQ ID NO: 2924541 - RNA, 19 nt, Artificial Sequence
  Description of Artificial Sequence: Synthetic oligonucleotide
acuucagauguaauucucu

SEQ ID NO: 2924542 - RNA, 19 nt, Artificial Sequence
  Description of Artificial Sequence: Synthetic oligonucleotide
gaagacacuccggucagca

SEQ ID NO: 2924543 - RNA, 19 nt, Artificial Sequence
  Description of Artificial Sequence: Synthetic oligonucleotide
gacaaguagaagauugugu

SEQ ID NO: 2924544 - RNA, 19 nt, Artificial Sequence
  Description of Artificial Sequence: Synthetic oligonucleotide
gacacuccggucagcagag

SEQ ID NO: 2924545 - RNA, 19 nt, Artificial Sequence
  Description of Artificial Sequence: Synthetic oligonucleotide
agauucagagagguagaug

SEQ ID NO: 2924546 - RNA, 19 nt, Artificial Sequence
  Description of Artificial Sequence: Synthetic oligonucleotide
cuugugagacagaaaucca

SEQ ID NO: 2924547 - RNA, 19 nt, Artificial Sequence
  Description of Artificial Sequence: Synthetic oligonucleotide
agcagagggucauguuggg

SEQ ID NO: 2924548 - RNA, 19 nt, Artificial Sequence
  Description of Artificial Sequence: Synthetic oligonucleotide
gucgcugguucaugaaaag

SEQ ID NO: 2924549 - RNA, 19 nt, Artificial Sequence
  Description of Artificial Sequence: Synthetic oligonucleotide
uguaugcuacagccagugu

SEQ ID NO: 2924550 - RNA, 19 nt, Artificial Sequence
  Description of Artificial Sequence: Synthetic oligonucleotide
aguagaagauuguguguua

SEQ ID NO: 2924551 - RNA, 19 nt, Artificial Sequence
  Description of Artificial Sequence: Synthetic oligonucleotide
aaaccuucacgcgguugag

SEQ ID NO: 2924552 - RNA, 19 nt, Artificial Sequence
  Description of Artificial Sequence: Synthetic oligonucleotide
gacuucagauguaauucuc

SEQ ID NO: 2924553 - RNA, 19 nt, Artificial Sequence
  Description of Artificial Sequence: Synthetic oligonucleotide
agguagauguuaagaacug

SEQ ID NO: 2924554 - RNA, 19 nt, Artificial Sequence
  Description of Artificial Sequence: Synthetic oligonucleotide
gucugaagggauuuguacu

SEQ ID NO: 2924555 - RNA, 19 nt, Artificial Sequence
  Description of Artificial Sequence: Synthetic oligonucleotide
ucgaggaacccgacauggc

SEQ ID NO: 2924556 - RNA, 19 nt, Artificial Sequence
  Description of Artificial Sequence: Synthetic oligonucleotide
caguguauauaaaauaguu

SEQ ID NO: 2924557 - RNA, 19 nt, Artificial Sequence
  Description of Artificial Sequence: Synthetic oligonucleotide
auucucuucaacagucgcu

SEQ ID NO: 2924558 - RNA, 19 nt, Artificial Sequence
  Description of Artificial Sequence: Synthetic oligonucleotide
cagagagguagauguuaag

SEQ ID NO: 2924559 - RNA, 19 nt, Artificial Sequence
  Description of Artificial Sequence: Synthetic oligonucleotide
ugggcauucugcagacaga

SEQ ID NO: 2924560 - RNA, 19 nt, Artificial Sequence
  Description of Artificial Sequence: Synthetic oligonucleotide
uacagacuucagauguaau

SEQ ID NO: 2924561 - RNA, 19 nt, Artificial Sequence
  Description of Artificial Sequence: Synthetic oligonucleotide
ccugagaaaccuucacgcg

SEQ ID NO: 2924562 - RNA, 19 nt, Artificial Sequence
  Description of Artificial Sequence: Synthetic oligonucleotide
gacauggcgcucgggacag

SEQ ID NO: 2924563 - RNA, 19 nt, Artificial Sequence
  Description of Artificial Sequence: Synthetic oligonucleotide
gcauucugcagacagaacu

SEQ ID NO: 2924564 - RNA, 19 nt, Artificial Sequence
  Description of Artificial Sequence: Synthetic oligonucleotide
ugcuacagccaguguauau

SEQ ID NO: 2924565 - RNA, 19 nt, Artificial Sequence
  Description of Artificial Sequence: Synthetic oligonucleotide
aacccgacauggcgcucgg

SEQ ID NO: 2924566 - RNA, 19 nt, Artificial Sequence
  Description of Artificial Sequence: Synthetic oligonucleotide
agccgugccgacucgucag

SEQ ID NO: 2924567 - RNA, 19 nt, Artificial Sequence
  Description of Artificial Sequence: Synthetic oligonucleotide
uggcacguguuacaggcuu

SEQ ID NO: 2924568 - RNA, 19 nt, Artificial Sequence
  Description of Artificial Sequence: Synthetic oligonucleotide
cuucaacagucgcugguuc

SEQ ID NO: 2924569 - RNA, 19 nt, Artificial Sequence
  Description of Artificial Sequence: Synthetic oligonucleotide
auucugcagacagaacugu

SEQ ID NO: 2924570 - RNA, 19 nt, Artificial Sequence
  Description of Artificial Sequence: Synthetic oligonucleotide
ccuuaagauacaugauuac

SEQ ID NO: 2924571 - RNA, 19 nt, Artificial Sequence
  Description of Artificial Sequence: Synthetic oligonucleotide
ucaacagucgcugguucau

SEQ ID NO: 2924572 - RNA, 19 nt, Artificial Sequence
  Description of Artificial Sequence: Synthetic oligonucleotide
gagcccggccuccagccgg

SEQ ID NO: 2924573 - RNA, 19 nt, Artificial Sequence
  Description of Artificial Sequence: Synthetic oligonucleotide
aggaacccgacauggcgcu

SEQ ID NO: 2924574 - RNA, 19 nt, Artificial Sequence
  Description of Artificial Sequence: Synthetic oligonucleotide
ucuucaacagucgcugguu

SEQ ID NO: 2924575 - RNA, 19 nt, Artificial Sequence
  Description of Artificial Sequence: Synthetic oligonucleotide
accuugugagacagaaauc

SEQ ID NO: 2924576 - RNA, 19 nt, Artificial Sequence
  Description of Artificial Sequence: Synthetic oligonucleotide
agggucauguugggcauuc

SEQ ID NO: 2924577 - RNA, 19 nt, Artificial Sequence
  Description of Artificial Sequence: Synthetic oligonucleotide
ggauuuguacuugaagaca

SEQ ID NO: 2924578 - RNA, 19 nt, Artificial Sequence
  Description of Artificial Sequence: Synthetic oligonucleotide
ggucauguugggcauucug

SEQ ID NO: 2924579 - RNA, 19 nt, Artificial Sequence
  Description of Artificial Sequence: Synthetic oligonucleotide
uucaagucugcagcugccu

SEQ ID NO: 2924580 - RNA, 19 nt, Artificial Sequence
  Description of Artificial Sequence: Synthetic oligonucleotide
cuacagccaguguauauaa

SEQ ID NO: 2924581 - RNA, 19 nt, Artificial Sequence
  Description of Artificial Sequence: Synthetic oligonucleotide
ucgcugguucaugaaaagu

SEQ ID NO: 2924582 - RNA, 19 nt, Artificial Sequence
  Description of Artificial Sequence: Synthetic oligonucleotide
uucugcagacagaacuguu

SEQ ID NO: 2924583 - RNA, 19 nt, Artificial Sequence
  Description of Artificial Sequence: Synthetic oligonucleotide
gaaccaccuucuucauggc

SEQ ID NO: 2924584 - RNA, 19 nt, Artificial Sequence
  Description of Artificial Sequence: Synthetic oligonucleotide
uacagccaguguauauaaa

SEQ ID NO: 2924585 - RNA, 19 nt, Artificial Sequence
  Description of Artificial Sequence: Synthetic oligonucleotide
uucaaccuugugagacaga

SEQ ID NO: 2924586 - RNA, 19 nt, Artificial Sequence
  Description of Artificial Sequence: Synthetic oligonucleotide
guugagcccggccuccagc

SEQ ID NO: 2924587 - RNA, 19 nt, Artificial Sequence
  Description of Artificial Sequence: Synthetic oligonucleotide
aacugacaaguagaagauu

SEQ ID NO: 2924588 - RNA, 19 nt, Artificial Sequence
  Description of Artificial Sequence: Synthetic oligonucleotide
ugagcccggccuccagccg

SEQ ID NO: 2924589 - RNA, 19 nt, Artificial Sequence
  Description of Artificial Sequence: Synthetic oligonucleotide
uuacaggcuuuuguacaga

SEQ ID NO: 2924590 - RNA, 19 nt, Artificial Sequence
  Description of Artificial Sequence: Synthetic oligonucleotide
cagccggagcugcugaacc

SEQ ID NO: 2924591 - RNA, 19 nt, Artificial Sequence
  Description of Artificial Sequence: Synthetic oligonucleotide
agaaaccuucacgcgguug

SEQ ID NO: 2924592 - RNA, 19 nt, Artificial Sequence
  Description of Artificial Sequence: Synthetic oligonucleotide
agagggucauguugggcau

SEQ ID NO: 2924593 - RNA, 19 nt, Artificial Sequence
  Description of Artificial Sequence: Synthetic oligonucleotide
ucuggggucugaagggauu

SEQ ID NO: 2924594 - RNA, 19 nt, Artificial Sequence
  Description of Artificial Sequence: Synthetic oligonucleotide
uucuggggucugaagggau

SEQ ID NO: 2924595 - RNA, 19 nt, Artificial Sequence
  Description of Artificial Sequence: Synthetic oligonucleotide
gaacugacaaguagaagau

SEQ ID NO: 2924596 - RNA, 19 nt, Artificial Sequence
  Description of Artificial Sequence: Synthetic oligonucleotide
cgcugguucaugaaaagug

SEQ ID NO: 2924597 - RNA, 19 nt, Artificial Sequence
  Description of Artificial Sequence: Synthetic oligonucleotide
guguuauggcacguguuac

SEQ ID NO: 2924598 - RNA, 19 nt, Artificial Sequence
  Description of Artificial Sequence: Synthetic oligonucleotide
cugccugagaaaccuucac

SEQ ID NO: 2924599 - RNA, 19 nt, Artificial Sequence
  Description of Artificial Sequence: Synthetic oligonucleotide
gagcagacuuucugggguc

SEQ ID NO: 2924600 - RNA, 19 nt, Artificial Sequence
  Description of Artificial Sequence: Synthetic oligonucleotide
auuuguacuugaagacacu

SEQ ID NO: 2924601 - RNA, 19 nt, Artificial Sequence
  Description of Artificial Sequence: Synthetic oligonucleotide
caagucugcagcugccuga

SEQ ID NO: 2924602 - RNA, 19 nt, Artificial Sequence
  Description of Artificial Sequence: Synthetic oligonucleotide
caggcuuuuguacagacuu

SEQ ID NO: 2924603 - RNA, 19 nt, Artificial Sequence
  Description of Artificial Sequence: Synthetic oligonucleotide
cugcugaaccaccuucuuc

SEQ ID NO: 2924604 - RNA, 19 nt, Artificial Sequence
  Description of Artificial Sequence: Synthetic oligonucleotide
cugaaccaccuucuucaug

SEQ ID NO: 2924605 - RNA, 19 nt, Artificial Sequence
  Description of Artificial Sequence: Synthetic oligonucleotide
cugaagggauuuguacuug

SEQ ID NO: 2924606 - RNA, 19 nt, Artificial Sequence
  Description of Artificial Sequence: Synthetic oligonucleotide
gcuguuuuauuguaugcua

SEQ ID NO: 2924607 - RNA, 19 nt, Artificial Sequence
  Description of Artificial Sequence: Synthetic oligonucleotide
aggcuuuuguacagacuuc

SEQ ID NO: 2924608 - RNA, 19 nt, Artificial Sequence
  Description of Artificial Sequence: Synthetic oligonucleotide
aagugguuugagaaaccuu

SEQ ID NO: 2924609 - RNA, 19 nt, Artificial Sequence
  Description of Artificial Sequence: Synthetic oligonucleotide
agucgcugguucaugaaaa

SEQ ID NO: 2924610 - RNA, 19 nt, Artificial Sequence
  Description of Artificial Sequence: Synthetic oligonucleotide
gaacuguuucaagucugca

SEQ ID NO: 2924611 - RNA, 19 nt, Artificial Sequence
  Description of Artificial Sequence: Synthetic oligonucleotide
caaguagaagauugugugu

SEQ ID NO: 2924612 - RNA, 19 nt, Artificial Sequence
  Description of Artificial Sequence: Synthetic oligonucleotide
acgcgguugagcccggccu

SEQ ID NO: 2924613 - RNA, 19 nt, Artificial Sequence
  Description of Artificial Sequence: Synthetic oligonucleotide
accuucuucauggcggcga

SEQ ID NO: 2924614 - RNA, 19 nt, Artificial Sequence
  Description of Artificial Sequence: Synthetic oligonucleotide
auuguguguuauggcacgu

SEQ ID NO: 2924615 - RNA, 19 nt, Artificial Sequence
  Description of Artificial Sequence: Synthetic oligonucleotide
cauggcgcucgggacagcc

SEQ ID NO: 2924616 - RNA, 19 nt, Artificial Sequence
  Description of Artificial Sequence: Synthetic oligonucleotide
guacagacuucagauguaa

SEQ ID NO: 2924617 - RNA, 19 nt, Artificial Sequence
  Description of Artificial Sequence: Synthetic oligonucleotide
ucuucauggcggcgacgcu

SEQ ID NO: 2924618 - RNA, 19 nt, Artificial Sequence
  Description of Artificial Sequence: Synthetic oligonucleotide
ggcuuuuguacagacuuca

SEQ ID NO: 2924619 - RNA, 19 nt, Artificial Sequence
  Description of Artificial Sequence: Synthetic oligonucleotide
cgaggaacccgacauggcg

SEQ ID NO: 2924620 - RNA, 19 nt, Artificial Sequence
  Description of Artificial Sequence: Synthetic oligonucleotide
agaaauccaugaagauuca

SEQ ID NO: 2924621 - RNA, 19 nt, Artificial Sequence
  Description of Artificial Sequence: Synthetic oligonucleotide
auuguaugcuacagccagu

SEQ ID NO: 2924622 - RNA, 19 nt, Artificial Sequence
  Description of Artificial Sequence: Synthetic oligonucleotide
acagucgcugguucaugaa

SEQ ID NO: 2924623 - RNA, 19 nt, Artificial Sequence
  Description of Artificial Sequence: Synthetic oligonucleotide
uccggucagcagaggguca

SEQ ID NO: 2924624 - RNA, 19 nt, Artificial Sequence
  Description of Artificial Sequence: Synthetic oligonucleotide
ugaagacacuccggucagc

SEQ ID NO: 2924625 - RNA, 19 nt, Artificial Sequence
  Description of Artificial Sequence: Synthetic oligonucleotide
cugacaaguagaagauugu

SEQ ID NO: 2924626 - RNA, 19 nt, Artificial Sequence
  Description of Artificial Sequence: Synthetic oligonucleotide
gguagauguuaagaacuga

SEQ ID NO: 2924627 - RNA, 19 nt, Artificial Sequence
  Description of Artificial Sequence: Synthetic oligonucleotide
uucacgcgguugagcccgg

SEQ ID NO: 2924628 - RNA, 19 nt, Artificial Sequence
  Description of Artificial Sequence: Synthetic oligonucleotide
cugguucaugaaaaguggu

SEQ ID NO: 2924629 - RNA, 19 nt, Artificial Sequence
  Description of Artificial Sequence: Synthetic oligonucleotide
acaggcuuuuguacagacu

SEQ ID NO: 2924630 - RNA, 19 nt, Artificial Sequence
  Description of Artificial Sequence: Synthetic oligonucleotide
cuucagauguaauucucuu

SEQ ID NO: 2924631 - RNA, 19 nt, Artificial Sequence
  Description of Artificial Sequence: Synthetic oligonucleotide
cuucuucauggcggcgacg

SEQ ID NO: 2924632 - RNA, 19 nt, Artificial Sequence
  Description of Artificial Sequence: Synthetic oligonucleotide
acuccggucagcagagggu

SEQ ID NO: 2924633 - RNA, 19 nt, Artificial Sequence
  Description of Artificial Sequence: Synthetic oligonucleotide
cagauguaauucucuucaa

SEQ ID NO: 2924634 - RNA, 19 nt, Artificial Sequence
  Description of Artificial Sequence: Synthetic oligonucleotide
uggggucugaagggauuug

SEQ ID NO: 2924635 - RNA, 19 nt, Artificial Sequence
  Description of Artificial Sequence: Synthetic oligonucleotide
gcuuuuguacagacuucag

SEQ ID NO: 2924636 - RNA, 19 nt, Artificial Sequence
  Description of Artificial Sequence: Synthetic oligonucleotide
agcagacuuucuggggucu

SEQ ID NO: 2924637 - RNA, 19 nt, Artificial Sequence
  Description of Artificial Sequence: Synthetic oligonucleotide
cacgcgguugagcccggcc

SEQ ID NO: 2924638 - RNA, 19 nt, Artificial Sequence
  Description of Artificial Sequence: Synthetic oligonucleotide
cagccaguguauauaaaau

SEQ ID NO: 2924639 - RNA, 19 nt, Artificial Sequence
  Description of Artificial Sequence: Synthetic oligonucleotide
gagaaaccuuaagauacau

SEQ ID NO: 2924640 - RNA, 19 nt, Artificial Sequence
  Description of Artificial Sequence: Synthetic oligonucleotide
gggacagccgugccgacuc

SEQ ID NO: 2924641 - RNA, 19 nt, Artificial Sequence
  Description of Artificial Sequence: Synthetic oligonucleotide
guagaagauuguguguuau

SEQ ID NO: 2924642 - RNA, 19 nt, Artificial Sequence
  Description of Artificial Sequence: Synthetic oligonucleotide
gcagacagaacuguuucaa

SEQ ID NO: 2924643 - RNA, 19 nt, Artificial Sequence
  Description of Artificial Sequence: Synthetic oligonucleotide
cuguuucaagucugcagcu

SEQ ID NO: 2924644 - RNA, 19 nt, Artificial Sequence
  Description of Artificial Sequence: Synthetic oligonucleotide
gcucgggacagccgugccg

SEQ ID NO: 2924645 - RNA, 19 nt, Artificial Sequence
  Description of Artificial Sequence: Synthetic oligonucleotide
cucgggacagccgugccga

SEQ ID NO: 2924646 - RNA, 19 nt, Artificial Sequence
  Description of Artificial Sequence: Synthetic oligonucleotide
acagccgugccgacucguc

SEQ ID NO: 2924647 - RNA, 19 nt, Artificial Sequence
  Description of Artificial Sequence: Synthetic oligonucleotide
cagucgcugguucaugaaa

SEQ ID NO: 2924648 - RNA, 19 nt, Artificial Sequence
  Description of Artificial Sequence: Synthetic oligonucleotide
gugguuugagaaaccuuaa

SEQ ID NO: 2924649 - RNA, 19 nt, Artificial Sequence
  Description of Artificial Sequence: Synthetic oligonucleotide
agacuuucuggggucugaa

SEQ ID NO: 2924650 - RNA, 19 nt, Artificial Sequence
  Description of Artificial Sequence: Synthetic oligonucleotide
ccaccuucuucauggcggc

SEQ ID NO: 2924651 - RNA, 19 nt, Artificial Sequence
  Description of Artificial Sequence: Synthetic oligonucleotide
acgcucgaggaacccgaca

SEQ ID NO: 2924652 - RNA, 19 nt, Artificial Sequence
  Description of Artificial Sequence: Synthetic oligonucleotide
auucagagagguagauguu

SEQ ID NO: 2924653 - RNA, 19 nt, Artificial Sequence
  Description of Artificial Sequence: Synthetic oligonucleotide
cucuucaacagucgcuggu

SEQ ID NO: 2924654 - RNA, 19 nt, Artificial Sequence
  Description of Artificial Sequence: Synthetic oligonucleotide
caacagucgcugguucaug

SEQ ID NO: 2924655 - RNA, 19 nt, Artificial Sequence
  Description of Artificial Sequence: Synthetic oligonucleotide
gcuacagccaguguauaua

SEQ ID NO: 2924656 - RNA, 19 nt, Artificial Sequence
  Description of Artificial Sequence: Synthetic oligonucleotide
gggcauucugcagacagaa

SEQ ID NO: 2924657 - RNA, 19 nt, Artificial Sequence
  Description of Artificial Sequence: Synthetic oligonucleotide
ccaguguauauaaaauagu

SEQ ID NO: 2924658 - RNA, 19 nt, Artificial Sequence
  Description of Artificial Sequence: Synthetic oligonucleotide
augaagauucagagaggua

SEQ ID NO: 2924659 - RNA, 19 nt, Artificial Sequence
  Description of Artificial Sequence: Synthetic oligonucleotide
uccagccggagcugcugaa

SEQ ID NO: 2924660 - RNA, 19 nt, Artificial Sequence
  Description of Artificial Sequence: Synthetic oligonucleotide
caaccuugugagacagaaa

SEQ ID NO: 2924661 - RNA, 19 nt, Artificial Sequence
  Description of Artificial Sequence: Synthetic oligonucleotide
cacguguuacaggcuuuug

SEQ ID NO: 2924662 - RNA, 19 nt, Artificial Sequence
  Description of Artificial Sequence: Synthetic oligonucleotide
cauggcggcgacgcucgag

SEQ ID NO: 2924663 - RNA, 19 nt, Artificial Sequence
  Description of Artificial Sequence: Synthetic oligonucleotide
auggcgcucgggacagccg

SEQ ID NO: 2924664 - RNA, 19 nt, Artificial Sequence
  Description of Artificial Sequence: Synthetic oligonucleotide
gcucgaggaacccgacaug

SEQ ID NO: 2924665 - RNA, 19 nt, Artificial Sequence
  Description of Artificial Sequence: Synthetic oligonucleotide
uggcggcgacgcucgagga

SEQ ID NO: 2924666 - RNA, 19 nt, Artificial Sequence
  Description of Artificial Sequence: Synthetic oligonucleotide
cguguuacaggcuuuugua

SEQ ID NO: 2924667 - RNA, 19 nt, Artificial Sequence
  Description of Artificial Sequence: Synthetic oligonucleotide
caccuucuucauggcggcg

SEQ ID NO: 2924668 - RNA, 19 nt, Artificial Sequence
  Description of Artificial Sequence: Synthetic oligonucleotide
ccuucacgcgguugagccc

SEQ ID NO: 2924669 - RNA, 19 nt, Artificial Sequence
  Description of Artificial Sequence: Synthetic oligonucleotide
gacgcucgaggaacccgac

SEQ ID NO: 2924670 - RNA, 19 nt, Artificial Sequence
  Description of Artificial Sequence: Synthetic oligonucleotide
ccgacauggcgcucgggac

SEQ ID NO: 2924671 - RNA, 19 nt, Artificial Sequence
  Description of Artificial Sequence: Synthetic oligonucleotide
gguugagcccggccuccag

SEQ ID NO: 2924672 - RNA, 19 nt, Artificial Sequence
  Description of Artificial Sequence: Synthetic oligonucleotide
cagacuuucuggggucuga

SEQ ID NO: 2924673 - RNA, 19 nt, Artificial Sequence
  Description of Artificial Sequence: Synthetic oligonucleotide
ccuucuucauggcggcgac

SEQ ID NO: 2924674 - RNA, 19 nt, Artificial Sequence
  Description of Artificial Sequence: Synthetic oligonucleotide
gcagagggucauguugggc

SEQ ID NO: 2924675 - RNA, 19 nt, Artificial Sequence
  Description of Artificial Sequence: Synthetic oligonucleotide
agucugcagcugccugaga

SEQ ID NO: 2924676 - RNA, 19 nt, Artificial Sequence
  Description of Artificial Sequence: Synthetic oligonucleotide
gcgacgcucgaggaacccg

SEQ ID NO: 2924677 - RNA, 19 nt, Artificial Sequence
  Description of Artificial Sequence: Synthetic oligonucleotide
acacuccggucagcagagg

SEQ ID NO: 2924678 - RNA, 19 nt, Artificial Sequence
  Description of Artificial Sequence: Synthetic oligonucleotide
auggcacguguuacaggcu

SEQ ID NO: 2924679 - RNA, 19 nt, Artificial Sequence
  Description of Artificial Sequence: Synthetic oligonucleotide
gcggcgacgcucgaggaac

SEQ ID NO: 2924680 - RNA, 19 nt, Artificial Sequence
  Description of Artificial Sequence: Synthetic oligonucleotide
ucauggcggcgacgcucga

SEQ ID NO: 2924681 - RNA, 19 nt, Artificial Sequence
  Description of Artificial Sequence: Synthetic oligonucleotide
cgugccgacucgucagucc

SEQ ID NO: 2924682 - RNA, 19 nt, Artificial Sequence
  Description of Artificial Sequence: Synthetic oligonucleotide
acauggcgcucgggacagc

SEQ ID NO: 2924683 - RNA, 19 nt, Artificial Sequence
  Description of Artificial Sequence: Synthetic oligonucleotide
ggacagccgugccgacucg

SEQ ID NO: 2924684 - RNA, 19 nt, Artificial Sequence
  Description of Artificial Sequence: Synthetic oligonucleotide
cuccagccggagcugcuga

SEQ ID NO: 2924685 - RNA, 19 nt, Artificial Sequence
  Description of Artificial Sequence: Synthetic oligonucleotide
cagccgugccgacucguca

SEQ ID NO: 2924686 - RNA, 19 nt, Artificial Sequence
  Description of Artificial Sequence: Synthetic oligonucleotide
cccgacauggcgcucggga

SEQ ID NO: 2924687 - RNA, 19 nt, Artificial Sequence
  Description of Artificial Sequence: Synthetic oligonucleotide
augcuacagccaguguaua

SEQ ID NO: 2924688 - RNA, 19 nt, Artificial Sequence
  Description of Artificial Sequence: Synthetic oligonucleotide
ggcauucugcagacagaac

SEQ ID NO: 2924689 - RNA, 19 nt, Artificial Sequence
  Description of Artificial Sequence: Synthetic oligonucleotide
ucgggacagccgugccgac

SEQ ID NO: 2924690 - RNA, 19 nt, Artificial Sequence
  Description of Artificial Sequence: Synthetic oligonucleotide
guugggcauucugcagaca

SEQ ID NO: 2924691 - RNA, 19 nt, Artificial Sequence
  Description of Artificial Sequence: Synthetic oligonucleotide
gccggagcugcugaaccac

SEQ ID NO: 2924692 - RNA, 19 nt, Artificial Sequence
  Description of Artificial Sequence: Synthetic oligonucleotide
gcagacuuucuggggucug

SEQ ID NO: 2924693 - RNA, 19 nt, Artificial Sequence
  Description of Artificial Sequence: Synthetic oligonucleotide
ucacgcgguugagcccggc

SEQ ID NO: 2924694 - RNA, 19 nt, Artificial Sequence
  Description of Artificial Sequence: Synthetic oligonucleotide
acccgacauggcgcucggg

SEQ ID NO: 2924695 - RNA, 19 nt, Artificial Sequence
  Description of Artificial Sequence: Synthetic oligonucleotide
guguguuauggcacguguu

SEQ ID NO: 2924696 - RNA, 19 nt, Artificial Sequence
  Description of Artificial Sequence: Synthetic oligonucleotide
gagaaaccuucacgcgguu

SEQ ID NO: 2924697 - RNA, 19 nt, Artificial Sequence
  Description of Artificial Sequence: Synthetic oligonucleotide
gggucugaagggauuugua

SEQ ID NO: 2924698 - RNA, 19 nt, Artificial Sequence
  Description of Artificial Sequence: Synthetic oligonucleotide
ggcgacgcucgaggaaccc

SEQ ID NO: 2924699 - RNA, 19 nt, Artificial Sequence
  Description of Artificial Sequence: Synthetic oligonucleotide
gacagccgugccgacucgu

SEQ ID NO: 2924700 - RNA, 19 nt, Artificial Sequence
  Description of Artificial Sequence: Synthetic oligonucleotide
ggggucugaagggauuugu

SEQ ID NO: 2924701 - RNA, 19 nt, Artificial Sequence
  Description of Artificial Sequence: Synthetic oligonucleotide
ccagccggagcugcugaac

SEQ ID NO: 2924702 - RNA, 19 nt, Artificial Sequence
  Description of Artificial Sequence: Synthetic oligonucleotide
ggcggcgacgcucgaggaa

SEQ ID NO: 2924703 - RNA, 19 nt, Artificial Sequence
  Description of Artificial Sequence: Synthetic oligonucleotide
cgacgcucgaggaacccga

SEQ ID NO: 2924704 - RNA, 19 nt, Artificial Sequence
  Description of Artificial Sequence: Synthetic oligonucleotide
gcgcucgggacagccgugc

SEQ ID NO: 2924705 - RNA, 19 nt, Artificial Sequence
  Description of Artificial Sequence: Synthetic oligonucleotide
cuggggucugaagggauuu

SEQ ID NO: 2924706 - RNA, 19 nt, Artificial Sequence
  Description of Artificial Sequence: Synthetic oligonucleotide
gcugaaccaccuucuucau

SEQ ID NO: 2924707 - RNA, 19 nt, Artificial Sequence
  Description of Artificial Sequence: Synthetic oligonucleotide
ccuccagccggagcugcug

SEQ ID NO: 2924708 - RNA, 19 nt, Artificial Sequence
  Description of Artificial Sequence: Synthetic oligonucleotide
agcccggccuccagccgga

SEQ ID NO: 2924709 - RNA, 19 nt, Artificial Sequence
  Description of Artificial Sequence: Synthetic oligonucleotide
ggcgcucgggacagccgug

SEQ ID NO: 2924710 - RNA, 19 nt, Artificial Sequence
  Description of Artificial Sequence: Synthetic oligonucleotide
cgcucgaggaacccgacau

SEQ ID NO: 2924711 - RNA, 19 nt, Artificial Sequence
  Description of Artificial Sequence: Synthetic oligonucleotide
ggaacccgacauggcgcuc

SEQ ID NO: 2924712 - RNA, 19 nt, Artificial Sequence
  Description of Artificial Sequence: Synthetic oligonucleotide
cggcgacgcucgaggaacc

SEQ ID NO: 2924713 - RNA, 19 nt, Artificial Sequence
  Description of Artificial Sequence: Synthetic oligonucleotide
cgcucgggacagccgugcc

SEQ ID NO: 2924714 - RNA, 19 nt, Artificial Sequence
  Description of Artificial Sequence: Synthetic oligonucleotide
gcacguguuacaggcuuuu

SEQ ID NO: 2924715 - RNA, 19 nt, Artificial Sequence
  Description of Artificial Sequence: Synthetic oligonucleotide
ccgugccgacucgucaguc

SEQ ID NO: 2924716 - RNA, 19 nt, Artificial Sequence
  Description of Artificial Sequence: Synthetic oligonucleotide
gccgugccgacucgucagu

SEQ ID NO: 2924717 - RNA, 19 nt, Artificial Sequence
  Description of Artificial Sequence: Synthetic oligonucleotide
ggcacguguuacaggcuuu

SEQ ID NO: 2924718 - RNA, 19 nt, Artificial Sequence
  Description of Artificial Sequence: Synthetic oligonucleotide
gggucauguugggcauucu

SEQ ID NO: 2924719 - RNA, 19 nt, Artificial Sequence
  Description of Artificial Sequence: Synthetic oligonucleotide
cggucagcagagggucaug

SEQ ID NO: 2924720 - RNA, 19 nt, Artificial Sequence
  Description of Artificial Sequence: Synthetic oligonucleotide
ccggucagcagagggucau

SEQ ID NO: 2924721 - RNA, 19 nt, Artificial Sequence
  Description of Artificial Sequence: Synthetic oligonucleotide
gcccggccuccagccggag

SEQ ID NO: 2924722 - RNA, 19 nt, Artificial Sequence
  Description of Artificial Sequence: Synthetic oligonucleotide
cgguugagcccggccucca

SEQ ID NO: 2924723 - RNA, 19 nt, Artificial Sequence
  Description of Artificial Sequence: Synthetic oligonucleotide
cgggacagccgugccgacu

SEQ ID NO: 2924724 - RNA, 19 nt, Artificial Sequence
  Description of Artificial Sequence: Synthetic oligonucleotide
acggauauagcacucaggc

SEQ ID NO: 2924725 - RNA, 19 nt, Artificial Sequence
  Description of Artificial Sequence: Synthetic oligonucleotide
uugauguucauccaguugu

SEQ ID NO: 2924726 - RNA, 19 nt, Artificial Sequence
  Description of Artificial Sequence: Synthetic oligonucleotide
aagggaagcaucuuccucu

SEQ ID NO: 2924727 - RNA, 19 nt, Artificial Sequence
  Description of Artificial Sequence: Synthetic oligonucleotide
aagguugauguucauccag

SEQ ID NO: 2924728 - RNA, 19 nt, Artificial Sequence
  Description of Artificial Sequence: Synthetic oligonucleotide
auagcacucaggcauucgc

SEQ ID NO: 2924729 - RNA, 19 nt, Artificial Sequence
  Description of Artificial Sequence: Synthetic oligonucleotide
ucuggagacacuuccgccg

SEQ ID NO: 2924730 - RNA, 19 nt, Artificial Sequence
  Description of Artificial Sequence: Synthetic oligonucleotide
guugucacagcucaccagg

SEQ ID NO: 2924731 - RNA, 19 nt, Artificial Sequence
  Description of Artificial Sequence: Synthetic oligonucleotide
ucaggcauucgccagaacu

SEQ ID NO: 2924732 - RNA, 19 nt, Artificial Sequence
  Description of Artificial Sequence: Synthetic oligonucleotide
auguucauccaguugucac

SEQ ID NO: 2924733 - RNA, 19 nt, Artificial Sequence
  Description of Artificial Sequence: Synthetic oligonucleotide
ucuugagcagcgacaaggg

SEQ ID NO: 2924734 - RNA, 19 nt, Artificial Sequence
  Description of Artificial Sequence: Synthetic oligonucleotide
ugagcagcgacaagggaag

SEQ ID NO: 2924735 - RNA, 19 nt, Artificial Sequence
  Description of Artificial Sequence: Synthetic oligonucleotide
uacagaucaccucucgaag

SEQ ID NO: 2924736 - RNA, 19 nt, Artificial Sequence
  Description of Artificial Sequence: Synthetic oligonucleotide
aaugaucucaucagggaug

SEQ ID NO: 2924737 - RNA, 19 nt, Artificial Sequence
  Description of Artificial Sequence: Synthetic oligonucleotide
ucaaugaucucaucaggga

SEQ ID NO: 2924738 - RNA, 19 nt, Artificial Sequence
  Description of Artificial Sequence: Synthetic oligonucleotide
acagaucaccucucgaagg

SEQ ID NO: 2924739 - RNA, 19 nt, Artificial Sequence
  Description of Artificial Sequence: Synthetic oligonucleotide
cauggggugauucugcgcc

SEQ ID NO: 2924740 - RNA, 19 nt, Artificial Sequence
  Description of Artificial Sequence: Synthetic oligonucleotide
aucagggaugcgcagguac

SEQ ID NO: 2924741 - RNA, 19 nt, Artificial Sequence
  Description of Artificial Sequence: Synthetic oligonucleotide
uugagcagcgacaagggaa

SEQ ID NO: 2924742 - RNA, 19 nt, Artificial Sequence
  Description of Artificial Sequence: Synthetic oligonucleotide
ucauccaguugucacagcu

SEQ ID NO: 2924743 - RNA, 19 nt, Artificial Sequence
  Description of Artificial Sequence: Synthetic oligonucleotide
agguacuugauggugcugc

SEQ ID NO: 2924744 - RNA, 19 nt, Artificial Sequence
  Description of Artificial Sequence: Synthetic oligonucleotide
auuguaugucuccccauuc

SEQ ID NO: 2924745 - RNA, 19 nt, Artificial Sequence
  Description of Artificial Sequence: Synthetic oligonucleotide
uucugcgccgucuugagca

SEQ ID NO: 2924746 - RNA, 19 nt, Artificial Sequence
  Description of Artificial Sequence: Synthetic oligonucleotide
auucgccagaacuugucac

SEQ ID NO: 2924747 - RNA, 19 nt, Artificial Sequence
  Description of Artificial Sequence: Synthetic oligonucleotide
gucuugagcagcgacaagg

SEQ ID NO: 2924748 - RNA, 19 nt, Artificial Sequence
  Description of Artificial Sequence: Synthetic oligonucleotide
augaucucaucagggaugc

SEQ ID NO: 2924749 - RNA, 19 nt, Artificial Sequence
  Description of Artificial Sequence: Synthetic oligonucleotide
ucccucgauguacagauca

SEQ ID NO: 2924750 - RNA, 19 nt, Artificial Sequence
  Description of Artificial Sequence: Synthetic oligonucleotide
acacaccucggccagcgcc

SEQ ID NO: 2924751 - RNA, 19 nt, Artificial Sequence
  Description of Artificial Sequence: Synthetic oligonucleotide
gaucucaucagggaugcgc

SEQ ID NO: 2924752 - RNA, 19 nt, Artificial Sequence
  Description of Artificial Sequence: Synthetic oligonucleotide
uuccucuggagacacuucc

SEQ ID NO: 2924753 - RNA, 19 nt, Artificial Sequence
  Description of Artificial Sequence: Synthetic oligonucleotide
uacuugauggugcugccac

SEQ ID NO: 2924754 - RNA, 19 nt, Artificial Sequence
  Description of Artificial Sequence: Synthetic oligonucleotide
caugccucggccuuucugc

SEQ ID NO: 2924755 - RNA, 19 nt, Artificial Sequence
  Description of Artificial Sequence: Synthetic oligonucleotide
ugggaugccaccccggccc

SEQ ID NO: 2924756 - RNA, 19 nt, Artificial Sequence
  Description of Artificial Sequence: Synthetic oligonucleotide
ucuccguuugaccucggcc

SEQ ID NO: 2924757 - RNA, 19 nt, Artificial Sequence
  Description of Artificial Sequence: Synthetic oligonucleotide
aacuugucaccgucccucg

SEQ ID NO: 2924758 - RNA, 19 nt, Artificial Sequence
  Description of Artificial Sequence: Synthetic oligonucleotide
gaagcaucuuccucuggag

SEQ ID NO: 2924759 - RNA, 19 nt, Artificial Sequence
  Description of Artificial Sequence: Synthetic oligonucleotide
aaacacaccucggccagcg

SEQ ID NO: 2924760 - RNA, 19 nt, Artificial Sequence
  Description of Artificial Sequence: Synthetic oligonucleotide
uguacagaucaccucucga

SEQ ID NO: 2924761 - RNA, 19 nt, Artificial Sequence
  Description of Artificial Sequence: Synthetic oligonucleotide
ucucgaagguugauguuca

SEQ ID NO: 2924762 - RNA, 19 nt, Artificial Sequence
  Description of Artificial Sequence: Synthetic oligonucleotide
gacaagggaagcaucuucc

SEQ ID NO: 2924763 - RNA, 19 nt, Artificial Sequence
  Description of Artificial Sequence: Synthetic oligonucleotide
uucgccagaacuugucacc

SEQ ID NO: 2924764 - RNA, 19 nt, Artificial Sequence
  Description of Artificial Sequence: Synthetic oligonucleotide
uuguaugucuccccauucu

SEQ ID NO: 2924765 - RNA, 19 nt, Artificial Sequence
  Description of Artificial Sequence: Synthetic oligonucleotide
gucacagcucaccaggugc

SEQ ID NO: 2924766 - RNA, 19 nt, Artificial Sequence
  Description of Artificial Sequence: Synthetic oligonucleotide
ucuucuccguuugaccucg

SEQ ID NO: 2924767 - RNA, 19 nt, Artificial Sequence
  Description of Artificial Sequence: Synthetic oligonucleotide
auccaguugucacagcuca

SEQ ID NO: 2924768 - RNA, 19 nt, Artificial Sequence
  Description of Artificial Sequence: Synthetic oligonucleotide
auguacagaucaccucucg

SEQ ID NO: 2924769 - RNA, 19 nt, Artificial Sequence
  Description of Artificial Sequence: Synthetic oligonucleotide
aagcaucuuccucuggaga

SEQ ID NO: 2924770 - RNA, 19 nt, Artificial Sequence
  Description of Artificial Sequence: Synthetic oligonucleotide
cuccccauucuucagcucc

SEQ ID NO: 2924771 - RNA, 19 nt, Artificial Sequence
  Description of Artificial Sequence: Synthetic oligonucleotide
uccucuggagacacuuccg

SEQ ID NO: 2924772 - RNA, 19 nt, Artificial Sequence
  Description of Artificial Sequence: Synthetic oligonucleotide
ggugcugccacggauauag

SEQ ID NO: 2924773 - RNA, 19 nt, Artificial Sequence
  Description of Artificial Sequence: Synthetic oligonucleotide
accucucgaagguugaugu

SEQ ID NO: 2924774 - RNA, 19 nt, Artificial Sequence
  Description of Artificial Sequence: Synthetic oligonucleotide
cgaagguugauguucaucc

SEQ ID NO: 2924775 - RNA, 19 nt, Artificial Sequence
  Description of Artificial Sequence: Synthetic oligonucleotide
uuugaccucggcccgcacc

SEQ ID NO: 2924776 - RNA, 19 nt, Artificial Sequence
  Description of Artificial Sequence: Synthetic oligonucleotide
cauucuucagcuccaccag

SEQ ID NO: 2924777 - RNA, 19 nt, Artificial Sequence
  Description of Artificial Sequence: Synthetic oligonucleotide
uccguuugaccucggcccg

SEQ ID NO: 2924778 - RNA, 19 nt, Artificial Sequence
  Description of Artificial Sequence: Synthetic oligonucleotide
accaaacacaccucggcca

SEQ ID NO: 2924779 - RNA, 19 nt, Artificial Sequence
  Description of Artificial Sequence: Synthetic oligonucleotide
ucacagcucaccaggugcc

SEQ ID NO: 2924780 - RNA, 19 nt, Artificial Sequence
  Description of Artificial Sequence: Synthetic oligonucleotide
ugucuccccauucuucagc

SEQ ID NO: 2924781 - RNA, 19 nt, Artificial Sequence
  Description of Artificial Sequence: Synthetic oligonucleotide
uagcacucaggcauucgcc

SEQ ID NO: 2924782 - RNA, 19 nt, Artificial Sequence
  Description of Artificial Sequence: Synthetic oligonucleotide
cuugauggugcugccacgg

SEQ ID NO: 2924783 - RNA, 19 nt, Artificial Sequence
  Description of Artificial Sequence: Synthetic oligonucleotide
gauucugcgccgucuugag

SEQ ID NO: 2924784 - RNA, 19 nt, Artificial Sequence
  Description of Artificial Sequence: Synthetic oligonucleotide
agcauggggugauucugcg

SEQ ID NO: 2924785 - RNA, 19 nt, Artificial Sequence
  Description of Artificial Sequence: Synthetic oligonucleotide
cacggauauagcacucagg

SEQ ID NO: 2924786 - RNA, 19 nt, Artificial Sequence
  Description of Artificial Sequence: Synthetic oligonucleotide
uguaugucuccccauucuu

SEQ ID NO: 2924787 - RNA, 19 nt, Artificial Sequence
  Description of Artificial Sequence: Synthetic oligonucleotide
uugaccucggcccgcaccu

SEQ ID NO: 2924788 - RNA, 19 nt, Artificial Sequence
  Description of Artificial Sequence: Synthetic oligonucleotide
ugcugccacggauauagca

SEQ ID NO: 2924789 - RNA, 19 nt, Artificial Sequence
  Description of Artificial Sequence: Synthetic oligonucleotide
ucgcccucggcccuuggcg

SEQ ID NO: 2924790 - RNA, 19 nt, Artificial Sequence
  Description of Artificial Sequence: Synthetic oligonucleotide
uauagcacucaggcauucg

SEQ ID NO: 2924791 - RNA, 19 nt, Artificial Sequence
  Description of Artificial Sequence: Synthetic oligonucleotide
cagaacuugucaccguccc

SEQ ID NO: 2924792 - RNA, 19 nt, Artificial Sequence
  Description of Artificial Sequence: Synthetic oligonucleotide
ugcgccgucuugagcagcg

SEQ ID NO: 2924793 - RNA, 19 nt, Artificial Sequence
  Description of Artificial Sequence: Synthetic oligonucleotide
ucccgcaccaugucaauga

SEQ ID NO: 2924794 - RNA, 19 nt, Artificial Sequence
  Description of Artificial Sequence: Synthetic oligonucleotide
gaacuugucaccgucccuc

SEQ ID NO: 2924795 - RNA, 19 nt, Artificial Sequence
  Description of Artificial Sequence: Synthetic oligonucleotide
caccaaacacaccucggcc

SEQ ID NO: 2924796 - RNA, 19 nt, Artificial Sequence
  Description of Artificial Sequence: Synthetic oligonucleotide
ucgccagaacuugucaccg

SEQ ID NO: 2924797 - RNA, 19 nt, Artificial Sequence
  Description of Artificial Sequence: Synthetic oligonucleotide
ggauauagcacucaggcau

SEQ ID NO: 2924798 - RNA, 19 nt, Artificial Sequence
  Description of Artificial Sequence: Synthetic oligonucleotide
gaucaccucucgaagguug

SEQ ID NO: 2924799 - RNA, 19 nt, Artificial Sequence
  Description of Artificial Sequence: Synthetic oligonucleotide
auucugcgccgucuugagc

SEQ ID NO: 2924800 - RNA, 19 nt, Artificial Sequence
  Description of Artificial Sequence: Synthetic oligonucleotide
ugucacagcucaccaggug

SEQ ID NO: 2924801 - RNA, 19 nt, Artificial Sequence
  Description of Artificial Sequence: Synthetic oligonucleotide
ucagggaugcgcagguacu

SEQ ID NO: 2924802 - RNA, 19 nt, Artificial Sequence
  Description of Artificial Sequence: Synthetic oligonucleotide
agcacucaggcauucgcca

SEQ ID NO: 2924803 - RNA, 19 nt, Artificial Sequence
  Description of Artificial Sequence: Synthetic oligonucleotide
guacagaucaccucucgaa

SEQ ID NO: 2924804 - RNA, 19 nt, Artificial Sequence
  Description of Artificial Sequence: Synthetic oligonucleotide
aacacaccucggccagcgc

SEQ ID NO: 2924805 - RNA, 19 nt, Artificial Sequence
  Description of Artificial Sequence: Synthetic oligonucleotide
ugauguucauccaguuguc

SEQ ID NO: 2924806 - RNA, 19 nt, Artificial Sequence
  Description of Artificial Sequence: Synthetic oligonucleotide
accaggugcccauuguaug

SEQ ID NO: 2924807 - RNA, 19 nt, Artificial Sequence
  Description of Artificial Sequence: Synthetic oligonucleotide
cucuggagacacuuccgcc

SEQ ID NO: 2924808 - RNA, 19 nt, Artificial Sequence
  Description of Artificial Sequence: Synthetic oligonucleotide
ucgauguacagaucaccuc

SEQ ID NO: 2924809 - RNA, 19 nt, Artificial Sequence
  Description of Artificial Sequence: Synthetic oligonucleotide
ugauucugcgccgucuuga

SEQ ID NO: 2924810 - RNA, 19 nt, Artificial Sequence
  Description of Artificial Sequence: Synthetic oligonucleotide
acaagggaagcaucuuccu

SEQ ID NO: 2924811 - RNA, 19 nt, Artificial Sequence
  Description of Artificial Sequence: Synthetic oligonucleotide
cucucgaagguugauguuc

SEQ ID NO: 2924812 - RNA, 19 nt, Artificial Sequence
  Description of Artificial Sequence: Synthetic oligonucleotide
gaagguugauguucaucca

SEQ ID NO: 2924813 - RNA, 19 nt, Artificial Sequence
  Description of Artificial Sequence: Synthetic oligonucleotide
cucaucagggaugcgcagg

SEQ ID NO: 2924814 - RNA, 19 nt, Artificial Sequence
  Description of Artificial Sequence: Synthetic oligonucleotide
cugcuugccugcuugccgc

SEQ ID NO: 2924815 - RNA, 19 nt, Artificial Sequence
  Description of Artificial Sequence: Synthetic oligonucleotide
uugucaccgucccucgaug

SEQ ID NO: 2924816 - RNA, 19 nt, Artificial Sequence
  Description of Artificial Sequence: Synthetic oligonucleotide
cacaccucggccagcgccg

SEQ ID NO: 2924817 - RNA, 19 nt, Artificial Sequence
  Description of Artificial Sequence: Synthetic oligonucleotide
ugauggugcugccacggau

SEQ ID NO: 2924818 - RNA, 19 nt, Artificial Sequence
  Description of Artificial Sequence: Synthetic oligonucleotide
auauagcacucaggcauuc

SEQ ID NO: 2924819 - RNA, 19 nt, Artificial Sequence
  Description of Artificial Sequence: Synthetic oligonucleotide
acuuccgccgcugcacagc

SEQ ID NO: 2924820 - RNA, 19 nt, Artificial Sequence
  Description of Artificial Sequence: Synthetic oligonucleotide
cuggagacacuuccgccgc

SEQ ID NO: 2924821 - RNA, 19 nt, Artificial Sequence
  Description of Artificial Sequence: Synthetic oligonucleotide
uugucacagcucaccaggu

SEQ ID NO: 2924822 - RNA, 19 nt, Artificial Sequence
  Description of Artificial Sequence: Synthetic oligonucleotide
cagcauggggugauucugc

SEQ ID NO: 2924823 - RNA, 19 nt, Artificial Sequence
  Description of Artificial Sequence: Synthetic oligonucleotide
agggaagcaucuuccucug

SEQ ID NO: 2924824 - RNA, 19 nt, Artificial Sequence
  Description of Artificial Sequence: Synthetic oligonucleotide
uccucccgcaccaugucaa

SEQ ID NO: 2924825 - RNA, 19 nt, Artificial Sequence
  Description of Artificial Sequence: Synthetic oligonucleotide
accagcauggggugauucu

SEQ ID NO: 2924826 - RNA, 19 nt, Artificial Sequence
  Description of Artificial Sequence: Synthetic oligonucleotide
ggaagcaucuuccucugga

SEQ ID NO: 2924827 - RNA, 19 nt, Artificial Sequence
  Description of Artificial Sequence: Synthetic oligonucleotide
cauccaguugucacagcuc

SEQ ID NO: 2924828 - RNA, 19 nt, Artificial Sequence
  Description of Artificial Sequence: Synthetic oligonucleotide
auggggugauucugcgccg

SEQ ID NO: 2924829 - RNA, 19 nt, Artificial Sequence
  Description of Artificial Sequence: Synthetic oligonucleotide
gcuucuucuccguuugacc

SEQ ID NO: 2924830 - RNA, 19 nt, Artificial Sequence
  Description of Artificial Sequence: Synthetic oligonucleotide
gacacuuccgccgcugcac

SEQ ID NO: 2924831 - RNA, 19 nt, Artificial Sequence
  Description of Artificial Sequence: Synthetic oligonucleotide
agaacuugucaccgucccu

SEQ ID NO: 2924832 - RNA, 19 nt, Artificial Sequence
  Description of Artificial Sequence: Synthetic oligonucleotide
uucuucuccguuugaccuc

SEQ ID NO: 2924833 - RNA, 19 nt, Artificial Sequence
  Description of Artificial Sequence: Synthetic oligonucleotide
gcuucugcugcuguggucc

SEQ ID NO: 2924834 - RNA, 19 nt, Artificial Sequence
  Description of Artificial Sequence: Synthetic oligonucleotide
ugcgcagguacuugauggu

SEQ ID NO: 2924835 - RNA, 19 nt, Artificial Sequence
  Description of Artificial Sequence: Synthetic oligonucleotide
uucuccguuugaccucggc

SEQ ID NO: 2924836 - RNA, 19 nt, Artificial Sequence
  Description of Artificial Sequence: Synthetic oligonucleotide
ucgaagguugauguucauc

SEQ ID NO: 2924837 - RNA, 19 nt, Artificial Sequence
  Description of Artificial Sequence: Synthetic oligonucleotide
ggccaccaaacacaccucg

SEQ ID NO: 2924838 - RNA, 19 nt, Artificial Sequence
  Description of Artificial Sequence: Synthetic oligonucleotide
gauguucauccaguuguca

SEQ ID NO: 2924839 - RNA, 19 nt, Artificial Sequence
  Description of Artificial Sequence: Synthetic oligonucleotide
gauguacagaucaccucuc

SEQ ID NO: 2924840 - RNA, 19 nt, Artificial Sequence
  Description of Artificial Sequence: Synthetic oligonucleotide
ugucaccgucccucgaugu

SEQ ID NO: 2924841 - RNA, 19 nt, Artificial Sequence
  Description of Artificial Sequence: Synthetic oligonucleotide
ucaccgucccucgauguac

SEQ ID NO: 2924842 - RNA, 19 nt, Artificial Sequence
  Description of Artificial Sequence: Synthetic oligonucleotide
agcgacaagggaagcaucu

SEQ ID NO: 2924843 - RNA, 19 nt, Artificial Sequence
  Description of Artificial Sequence: Synthetic oligonucleotide
aucucaucagggaugcgca

SEQ ID NO: 2924844 - RNA, 19 nt, Artificial Sequence
  Description of Artificial Sequence: Synthetic oligonucleotide
augucuccccauucuucag

SEQ ID NO: 2924845 - RNA, 19 nt, Artificial Sequence
  Description of Artificial Sequence: Synthetic oligonucleotide
gagacacuuccgccgcugc

SEQ ID NO: 2924846 - RNA, 19 nt, Artificial Sequence
  Description of Artificial Sequence: Synthetic oligonucleotide
gaccucggcccgcaccugg

SEQ ID NO: 2924847 - RNA, 19 nt, Artificial Sequence
  Description of Artificial Sequence: Synthetic oligonucleotide
cucgauguacagaucaccu

SEQ ID NO: 2924848 - RNA, 19 nt, Artificial Sequence
  Description of Artificial Sequence: Synthetic oligonucleotide
ucugcgccgucuugagcag

SEQ ID NO: 2924849 - RNA, 19 nt, Artificial Sequence
  Description of Artificial Sequence: Synthetic oligonucleotide
agguugauguucauccagu

SEQ ID NO: 2924850 - RNA, 19 nt, Artificial Sequence
  Description of Artificial Sequence: Synthetic oligonucleotide
ucacugcuugccugcuugc

SEQ ID NO: 2924851 - RNA, 19 nt, Artificial Sequence
  Description of Artificial Sequence: Synthetic oligonucleotide
aggcauucgccagaacuug

SEQ ID NO: 2924852 - RNA, 19 nt, Artificial Sequence
  Description of Artificial Sequence: Synthetic oligonucleotide
cuuccgccgcugcacagcc

SEQ ID NO: 2924853 - RNA, 19 nt, Artificial Sequence
  Description of Artificial Sequence: Synthetic oligonucleotide
uccaguugucacagcucac

SEQ ID NO: 2924854 - RNA, 19 nt, Artificial Sequence
  Description of Artificial Sequence: Synthetic oligonucleotide
guaugucuccccauucuuc

SEQ ID NO: 2924855 - RNA, 19 nt, Artificial Sequence
  Description of Artificial Sequence: Synthetic oligonucleotide
cauucgccagaacuuguca

SEQ ID NO: 2924856 - RNA, 19 nt, Artificial Sequence
  Description of Artificial Sequence: Synthetic oligonucleotide
caucuuccucuggagacac

SEQ ID NO: 2924857 - RNA, 19 nt, Artificial Sequence
  Description of Artificial Sequence: Synthetic oligonucleotide
gguacuugauggugcugcc

SEQ ID NO: 2924858 - RNA, 19 nt, Artificial Sequence
  Description of Artificial Sequence: Synthetic oligonucleotide
accucggccagcgccgccc

SEQ ID NO: 2924859 - RNA, 19 nt, Artificial Sequence
  Description of Artificial Sequence: Synthetic oligonucleotide
cuuggcggccuccucccgc

SEQ ID NO: 2924860 - RNA, 19 nt, Artificial Sequence
  Description of Artificial Sequence: Synthetic oligonucleotide
ccaccaaacacaccucggc

SEQ ID NO: 2924861 - RNA, 19 nt, Artificial Sequence
  Description of Artificial Sequence: Synthetic oligonucleotide
gaugccaccccggccccgg

SEQ ID NO: 2924862 - RNA, 19 nt, Artificial Sequence
  Description of Artificial Sequence: Synthetic oligonucleotide
ucggcccgcaccugggaug

SEQ ID NO: 2924863 - RNA, 19 nt, Artificial Sequence
  Description of Artificial Sequence: Synthetic oligonucleotide
auggugcugccacggauau

SEQ ID NO: 2924864 - RNA, 19 nt, Artificial Sequence
  Description of Artificial Sequence: Synthetic oligonucleotide
gauggugcugccacggaua

SEQ ID NO: 2924865 - RNA, 19 nt, Artificial Sequence
  Description of Artificial Sequence: Synthetic oligonucleotide
agacacuuccgccgcugca

SEQ ID NO: 2924866 - RNA, 19 nt, Artificial Sequence
  Description of Artificial Sequence: Synthetic oligonucleotide
ccaaacacaccucggccag

SEQ ID NO: 2924867 - RNA, 19 nt, Artificial Sequence
  Description of Artificial Sequence: Synthetic oligonucleotide
aggugcccauuguaugucu

SEQ ID NO: 2924868 - RNA, 19 nt, Artificial Sequence
  Description of Artificial Sequence: Synthetic oligonucleotide
ugccacggauauagcacuc

SEQ ID NO: 2924869 - RNA, 19 nt, Artificial Sequence
  Description of Artificial Sequence: Synthetic oligonucleotide
gcugccacggauauagcac

SEQ ID NO: 2924870 - RNA, 19 nt, Artificial Sequence
  Description of Artificial Sequence: Synthetic oligonucleotide
agcagcgacaagggaagca

SEQ ID NO: 2924871 - RNA, 19 nt, Artificial Sequence
  Description of Artificial Sequence: Synthetic oligonucleotide
ccagaacuugucaccgucc

SEQ ID NO: 2924872 - RNA, 19 nt, Artificial Sequence
  Description of Artificial Sequence: Synthetic oligonucleotide
caaugaucucaucagggau

SEQ ID NO: 2924873 - RNA, 19 nt, Artificial Sequence
  Description of Artificial Sequence: Synthetic oligonucleotide
ccaguugucacagcucacc

SEQ ID NO: 2924874 - RNA, 19 nt, Artificial Sequence
  Description of Artificial Sequence: Synthetic oligonucleotide
uuggcggccuccucccgca

SEQ ID NO: 2924875 - RNA, 19 nt, Artificial Sequence
  Description of Artificial Sequence: Synthetic oligonucleotide
caguugucacagcucacca

SEQ ID NO: 2924876 - RNA, 19 nt, Artificial Sequence
  Description of Artificial Sequence: Synthetic oligonucleotide
gugauucugcgccgucuug

SEQ ID NO: 2924877 - RNA, 19 nt, Artificial Sequence
  Description of Artificial Sequence: Synthetic oligonucleotide
acacuuccgccgcugcaca

SEQ ID NO: 2924878 - RNA, 19 nt, Artificial Sequence
  Description of Artificial Sequence: Synthetic oligonucleotide
caccugggaugccaccccg

SEQ ID NO: 2924879 - RNA, 19 nt, Artificial Sequence
  Description of Artificial Sequence: Synthetic oligonucleotide
cuugagcagcgacaaggga

SEQ ID NO: 2924880 - RNA, 19 nt, Artificial Sequence
  Description of Artificial Sequence: Synthetic oligonucleotide
cugggaugccaccccggcc

SEQ ID NO: 2924881 - RNA, 19 nt, Artificial Sequence
  Description of Artificial Sequence: Synthetic oligonucleotide
ugaucucaucagggaugcg

SEQ ID NO: 2924882 - RNA, 19 nt, Artificial Sequence
  Description of Artificial Sequence: Synthetic oligonucleotide
caccucucgaagguugaug

SEQ ID NO: 2924883 - RNA, 19 nt, Artificial Sequence
  Description of Artificial Sequence: Synthetic oligonucleotide
ugcuugccugcuugccgcc

SEQ ID NO: 2924884 - RNA, 19 nt, Artificial Sequence
  Description of Artificial Sequence: Synthetic oligonucleotide
augccucggccuuucugcu

SEQ ID NO: 2924885 - RNA, 19 nt, Artificial Sequence
  Description of Artificial Sequence: Synthetic oligonucleotide
agggaugcgcagguacuug

SEQ ID NO: 2924886 - RNA, 19 nt, Artificial Sequence
  Description of Artificial Sequence: Synthetic oligonucleotide
acuugucaccgucccucga

SEQ ID NO: 2924887 - RNA, 19 nt, Artificial Sequence
  Description of Artificial Sequence: Synthetic oligonucleotide
gcacucaggcauucgccag

SEQ ID NO: 2924888 - RNA, 19 nt, Artificial Sequence
  Description of Artificial Sequence: Synthetic oligonucleotide
cacugcuugccugcuugcc

SEQ ID NO: 2924889 - RNA, 19 nt, Artificial Sequence
  Description of Artificial Sequence: Synthetic oligonucleotide
ccucgauguacagaucacc

SEQ ID NO: 2924890 - RNA, 19 nt, Artificial Sequence
  Description of Artificial Sequence: Synthetic oligonucleotide
ugccucggccuuucugcug

SEQ ID NO: 2924891 - RNA, 19 nt, Artificial Sequence
  Description of Artificial Sequence: Synthetic oligonucleotide
uggagacacuuccgccgcu

SEQ ID NO: 2924892 - RNA, 19 nt, Artificial Sequence
  Description of Artificial Sequence: Synthetic oligonucleotide
gccagaacuugucaccguc

SEQ ID NO: 2924893 - RNA, 19 nt, Artificial Sequence
  Description of Artificial Sequence: Synthetic oligonucleotide
uugccgcccaggcuucuuc

SEQ ID NO: 2924894 - RNA, 19 nt, Artificial Sequence
  Description of Artificial Sequence: Synthetic oligonucleotide
gccucggccuuucugcugc

SEQ ID NO: 2924895 - RNA, 19 nt, Artificial Sequence
  Description of Artificial Sequence: Synthetic oligonucleotide
accgucccucgauguacag

SEQ ID NO: 2924896 - RNA, 19 nt, Artificial Sequence
  Description of Artificial Sequence: Synthetic oligonucleotide
cgcagguacuugauggugc

SEQ ID NO: 2924897 - RNA, 19 nt, Artificial Sequence
  Description of Artificial Sequence: Synthetic oligonucleotide
cagcgacaagggaagcauc

SEQ ID NO: 2924898 - RNA, 19 nt, Artificial Sequence
  Description of Artificial Sequence: Synthetic oligonucleotide
cagaucaccucucgaaggu

SEQ ID NO: 2924899 - RNA, 19 nt, Artificial Sequence
  Description of Artificial Sequence: Synthetic oligonucleotide
ugccgcccaggcuucuucu

SEQ ID NO: 2924900 - RNA, 19 nt, Artificial Sequence
  Description of Artificial Sequence: Synthetic oligonucleotide
cagcuccaccagcaugggg

SEQ ID NO: 2924901 - RNA, 19 nt, Artificial Sequence
  Description of Artificial Sequence: Synthetic oligonucleotide
ccacggauauagcacucag

SEQ ID NO: 2924902 - RNA, 19 nt, Artificial Sequence
  Description of Artificial Sequence: Synthetic oligonucleotide
aucaccucucgaagguuga

SEQ ID NO: 2924903 - RNA, 19 nt, Artificial Sequence
  Description of Artificial Sequence: Synthetic oligonucleotide
gcugcacagccucucgcgc

SEQ ID NO: 2924904 - RNA, 19 nt, Artificial Sequence
  Description of Artificial Sequence: Synthetic oligonucleotide
caaacacaccucggccagc

SEQ ID NO: 2924905 - RNA, 19 nt, Artificial Sequence
  Description of Artificial Sequence: Synthetic oligonucleotide
cgcaccaugucaaugaucu

SEQ ID NO: 2924906 - RNA, 19 nt, Artificial Sequence
  Description of Artificial Sequence: Synthetic oligonucleotide
gauauagcacucaggcauu

SEQ ID NO: 2924907 - RNA, 19 nt, Artificial Sequence
  Description of Artificial Sequence: Synthetic oligonucleotide
guacuugauggugcugcca

SEQ ID NO: 2924908 - RNA, 19 nt, Artificial Sequence
  Description of Artificial Sequence: Synthetic oligonucleotide
acagcucaccaggugccca

SEQ ID NO: 2924909 - RNA, 19 nt, Artificial Sequence
  Description of Artificial Sequence: Synthetic oligonucleotide
cacagcucaccaggugccc

SEQ ID NO: 2924910 - RNA, 19 nt, Artificial Sequence
  Description of Artificial Sequence: Synthetic oligonucleotide
uggggugauucugcgccgu

SEQ ID NO: 2924911 - RNA, 19 nt, Artificial Sequence
  Description of Artificial Sequence: Synthetic oligonucleotide
cacucaggcauucgccaga

SEQ ID NO: 2924912 - RNA, 19 nt, Artificial Sequence
  Description of Artificial Sequence: Synthetic oligonucleotide
cacuuccgccgcugcacag

SEQ ID NO: 2924913 - RNA, 19 nt, Artificial Sequence
  Description of Artificial Sequence: Synthetic oligonucleotide
acaccucggccagcgccgc

SEQ ID NO: 2924914 - RNA, 19 nt, Artificial Sequence
  Description of Artificial Sequence: Synthetic oligonucleotide
cucgcccucggcccuuggc

SEQ ID NO: 2924915 - RNA, 19 nt, Artificial Sequence
  Description of Artificial Sequence: Synthetic oligonucleotide
caggugcccauuguauguc

SEQ ID NO: 2924916 - RNA, 19 nt, Artificial Sequence
  Description of Artificial Sequence: Synthetic oligonucleotide
ggcuucuucuccguuugac

SEQ ID NO: 2924917 - RNA, 19 nt, Artificial Sequence
  Description of Artificial Sequence: Synthetic oligonucleotide
ugcuugccgcccaggcuuc

SEQ ID NO: 2924918 - RNA, 19 nt, Artificial Sequence
  Description of Artificial Sequence: Synthetic oligonucleotide
cugccacggauauagcacu

SEQ ID NO: 2924919 - RNA, 19 nt, Artificial Sequence
  Description of Artificial Sequence: Synthetic oligonucleotide
cauuguaugucuccccauu

SEQ ID NO: 2924920 - RNA, 19 nt, Artificial Sequence
  Description of Artificial Sequence: Synthetic oligonucleotide
ucggccagcgccgcccaug

SEQ ID NO: 2924921 - RNA, 19 nt, Artificial Sequence
  Description of Artificial Sequence: Synthetic oligonucleotide
uucugcugcuguggucccc

SEQ ID NO: 2924922 - RNA, 19 nt, Artificial Sequence
  Description of Artificial Sequence: Synthetic oligonucleotide
acucaggcauucgccagaa

SEQ ID NO: 2924923 - RNA, 19 nt, Artificial Sequence
  Description of Artificial Sequence: Synthetic oligonucleotide
gcauggggugauucugcgc

SEQ ID NO: 2924924 - RNA, 19 nt, Artificial Sequence
  Description of Artificial Sequence: Synthetic oligonucleotide
ugccaccccggccccggcc

SEQ ID NO: 2924925 - RNA, 19 nt, Artificial Sequence
  Description of Artificial Sequence: Synthetic oligonucleotide
cuucuccguuugaccucgg

SEQ ID NO: 2924926 - RNA, 19 nt, Artificial Sequence
  Description of Artificial Sequence: Synthetic oligonucleotide
caggcauucgccagaacuu

SEQ ID NO: 2924927 - RNA, 19 nt, Artificial Sequence
  Description of Artificial Sequence: Synthetic oligonucleotide
accugggaugccaccccgg

SEQ ID NO: 2924928 - RNA, 19 nt, Artificial Sequence
  Description of Artificial Sequence: Synthetic oligonucleotide
gccuuucugcugcuucugc

SEQ ID NO: 2924929 - RNA, 19 nt, Artificial Sequence
  Description of Artificial Sequence: Synthetic oligonucleotide
cuugccugcuugccgccca

SEQ ID NO: 2924930 - RNA, 19 nt, Artificial Sequence
  Description of Artificial Sequence: Synthetic oligonucleotide
agaucaccucucgaagguu

SEQ ID NO: 2924931 - RNA, 19 nt, Artificial Sequence
  Description of Artificial Sequence: Synthetic oligonucleotide
cucccgcaccaugucaaug

SEQ ID NO: 2924932 - RNA, 19 nt, Artificial Sequence
  Description of Artificial Sequence: Synthetic oligonucleotide
ccagcauggggugauucug

SEQ ID NO: 2924933 - RNA, 19 nt, Artificial Sequence
  Description of Artificial Sequence: Synthetic oligonucleotide
aggcuucuucuccguuuga

SEQ ID NO: 2924934 - RNA, 19 nt, Artificial Sequence
  Description of Artificial Sequence: Synthetic oligonucleotide
ucaccucucgaagguugau

SEQ ID NO: 2924935 - RNA, 19 nt, Artificial Sequence
  Description of Artificial Sequence: Synthetic oligonucleotide
caccagcauggggugauuc

SEQ ID NO: 2924936 - RNA, 19 nt, Artificial Sequence
  Description of Artificial Sequence: Synthetic oligonucleotide
ccugggaugccaccccggc

SEQ ID NO: 2924937 - RNA, 19 nt, Artificial Sequence
  Description of Artificial Sequence: Synthetic oligonucleotide
augccaccccggccccggc

SEQ ID NO: 2924938 - RNA, 19 nt, Artificial Sequence
  Description of Artificial Sequence: Synthetic oligonucleotide
ugccugcuugccgcccagg

SEQ ID NO: 2924939 - RNA, 19 nt, Artificial Sequence
  Description of Artificial Sequence: Synthetic oligonucleotide
gcccuuggcggccuccucc

SEQ ID NO: 2924940 - RNA, 19 nt, Artificial Sequence
  Description of Artificial Sequence: Synthetic oligonucleotide
cuugucaccgucccucgau

SEQ ID NO: 2924941 - RNA, 19 nt, Artificial Sequence
  Description of Artificial Sequence: Synthetic oligonucleotide
ggagacacuuccgccgcug

SEQ ID NO: 2924942 - RNA, 19 nt, Artificial Sequence
  Description of Artificial Sequence: Synthetic oligonucleotide
ggccccggccaccaaacac

SEQ ID NO: 2924943 - RNA, 19 nt, Artificial Sequence
  Description of Artificial Sequence: Synthetic oligonucleotide
cagguacuugauggugcug

SEQ ID NO: 2924944 - RNA, 19 nt, Artificial Sequence
  Description of Artificial Sequence: Synthetic oligonucleotide
cgcugcacagccucucgcg

SEQ ID NO: 2924945 - RNA, 19 nt, Artificial Sequence
  Description of Artificial Sequence: Synthetic oligonucleotide
cgacaagggaagcaucuuc

SEQ ID NO: 2924946 - RNA, 19 nt, Artificial Sequence
  Description of Artificial Sequence: Synthetic oligonucleotide
gucaccgucccucgaugua

SEQ ID NO: 2924947 - RNA, 19 nt, Artificial Sequence
  Description of Artificial Sequence: Synthetic oligonucleotide
gcaccugggaugccacccc

SEQ ID NO: 2924948 - RNA, 19 nt, Artificial Sequence
  Description of Artificial Sequence: Synthetic oligonucleotide
cgauguacagaucaccucu

SEQ ID NO: 2924949 - RNA, 19 nt, Artificial Sequence
  Description of Artificial Sequence: Synthetic oligonucleotide
cccucgauguacagaucac

SEQ ID NO: 2924950 - RNA, 19 nt, Artificial Sequence
  Description of Artificial Sequence: Synthetic oligonucleotide
gccugcuugccgcccaggc

SEQ ID NO: 2924951 - RNA, 19 nt, Artificial Sequence
  Description of Artificial Sequence: Synthetic oligonucleotide
caccgucccucgauguaca

SEQ ID NO: 2924952 - RNA, 19 nt, Artificial Sequence
  Description of Artificial Sequence: Synthetic oligonucleotide
gcucaccaggugcccauug

SEQ ID NO: 2924953 - RNA, 19 nt, Artificial Sequence
  Description of Artificial Sequence: Synthetic oligonucleotide
cuccucccgcaccauguca

SEQ ID NO: 2924954 - RNA, 19 nt, Artificial Sequence
  Description of Artificial Sequence: Synthetic oligonucleotide
gcauucgccagaacuuguc

SEQ ID NO: 2924955 - RNA, 19 nt, Artificial Sequence
  Description of Artificial Sequence: Synthetic oligonucleotide
cucaggcauucgccagaac

SEQ ID NO: 2924956 - RNA, 19 nt, Artificial Sequence
  Description of Artificial Sequence: Synthetic oligonucleotide
caccaggugcccauuguau

SEQ ID NO: 2924957 - RNA, 19 nt, Artificial Sequence
  Description of Artificial Sequence: Synthetic oligonucleotide
gcgcagguacuugauggug

SEQ ID NO: 2924958 - RNA, 19 nt, Artificial Sequence
  Description of Artificial Sequence: Synthetic oligonucleotide
gcaucuuccucuggagaca

SEQ ID NO: 2924959 - RNA, 19 nt, Artificial Sequence
  Description of Artificial Sequence: Synthetic oligonucleotide
guuugaccucggcccgcac

SEQ ID NO: 2924960 - RNA, 19 nt, Artificial Sequence
  Description of Artificial Sequence: Synthetic oligonucleotide
gcagguacuugauggugcu

SEQ ID NO: 2924961 - RNA, 19 nt, Artificial Sequence
  Description of Artificial Sequence: Synthetic oligonucleotide
gguugauguucauccaguu

SEQ ID NO: 2924962 - RNA, 19 nt, Artificial Sequence
  Description of Artificial Sequence: Synthetic oligonucleotide
ccgcccaggcuucuucucc

SEQ ID NO: 2924963 - RNA, 19 nt, Artificial Sequence
  Description of Artificial Sequence: Synthetic oligonucleotide
ccaugccucggccuuucug

SEQ ID NO: 2924964 - RNA, 19 nt, Artificial Sequence
  Description of Artificial Sequence: Synthetic oligonucleotide
cccuuggcggccuccuccc

SEQ ID NO: 2924965 - RNA, 19 nt, Artificial Sequence
  Description of Artificial Sequence: Synthetic oligonucleotide
gccgucuugagcagcgaca

SEQ ID NO: 2924966 - RNA, 19 nt, Artificial Sequence
  Description of Artificial Sequence: Synthetic oligonucleotide
ugaccucggcccgcaccug

SEQ ID NO: 2924967 - RNA, 19 nt, Artificial Sequence
  Description of Artificial Sequence: Synthetic oligonucleotide
ucggcccuuggcggccucc

SEQ ID NO: 2924968 - RNA, 19 nt, Artificial Sequence
  Description of Artificial Sequence: Synthetic oligonucleotide
cugcgccgucuugagcagc

SEQ ID NO: 2924969 - RNA, 19 nt, Artificial Sequence
  Description of Artificial Sequence: Synthetic oligonucleotide
cgcccaggcuucuucuccg

SEQ ID NO: 2924970 - RNA, 19 nt, Artificial Sequence
  Description of Artificial Sequence: Synthetic oligonucleotide
gccccggccaccaaacaca

SEQ ID NO: 2924971 - RNA, 19 nt, Artificial Sequence
  Description of Artificial Sequence: Synthetic oligonucleotide
cggauauagcacucaggca

SEQ ID NO: 2924972 - RNA, 19 nt, Artificial Sequence
  Description of Artificial Sequence: Synthetic oligonucleotide
gggaugccaccccggcccc

SEQ ID NO: 2924973 - RNA, 19 nt, Artificial Sequence
  Description of Artificial Sequence: Synthetic oligonucleotide
ggugauucugcgccgucuu

SEQ ID NO: 2924974 - RNA, 19 nt, Artificial Sequence
  Description of Artificial Sequence: Synthetic oligonucleotide
ccaggugcccauuguaugu

SEQ ID NO: 2924975 - RNA, 19 nt, Artificial Sequence
  Description of Artificial Sequence: Synthetic oligonucleotide
gccacggauauagcacuca

SEQ ID NO: 2924976 - RNA, 19 nt, Artificial Sequence
  Description of Artificial Sequence: Synthetic oligonucleotide
gccagcgccgcccaugccu

SEQ ID NO: 2924977 - RNA, 19 nt, Artificial Sequence
  Description of Artificial Sequence: Synthetic oligonucleotide
ccgcaccaugucaaugauc

SEQ ID NO: 2924978 - RNA, 19 nt, Artificial Sequence
  Description of Artificial Sequence: Synthetic oligonucleotide
ggcggccuccucccgcacc

SEQ ID NO: 2924979 - RNA, 19 nt, Artificial Sequence
  Description of Artificial Sequence: Synthetic oligonucleotide
gcagcgacaagggaagcau

SEQ ID NO: 2924980 - RNA, 19 nt, Artificial Sequence
  Description of Artificial Sequence: Synthetic oligonucleotide
gcaccaugucaaugaucuc

SEQ ID NO: 2924981 - RNA, 19 nt, Artificial Sequence
  Description of Artificial Sequence: Synthetic oligonucleotide
gugcugccacggauauagc

SEQ ID NO: 2924982 - RNA, 19 nt, Artificial Sequence
  Description of Artificial Sequence: Synthetic oligonucleotide
ggccuccucccgcaccaug

SEQ ID NO: 2924983 - RNA, 19 nt, Artificial Sequence
  Description of Artificial Sequence: Synthetic oligonucleotide
ccagcgccgcccaugccuc

SEQ ID NO: 2924984 - RNA, 19 nt, Artificial Sequence
  Description of Artificial Sequence: Synthetic oligonucleotide
ccgcugcacagccucucgc

SEQ ID NO: 2924985 - RNA, 19 nt, Artificial Sequence
  Description of Artificial Sequence: Synthetic oligonucleotide
cgucccucgauguacagau

SEQ ID NO: 2924986 - RNA, 19 nt, Artificial Sequence
  Description of Artificial Sequence: Synthetic oligonucleotide
uggcggccuccucccgcac

SEQ ID NO: 2924987 - RNA, 19 nt, Artificial Sequence
  Description of Artificial Sequence: Synthetic oligonucleotide
cgcccucggcccuuggcgg

SEQ ID NO: 2924988 - RNA, 19 nt, Artificial Sequence
  Description of Artificial Sequence: Synthetic oligonucleotide
uggugcugccacggauaua

SEQ ID NO: 2924989 - RNA, 19 nt, Artificial Sequence
  Description of Artificial Sequence: Synthetic oligonucleotide
gucccucgauguacagauc

SEQ ID NO: 2924990 - RNA, 19 nt, Artificial Sequence
  Description of Artificial Sequence: Synthetic oligonucleotide
caccucggccagcgccgcc

SEQ ID NO: 2924991 - RNA, 19 nt, Artificial Sequence
  Description of Artificial Sequence: Synthetic oligonucleotide
ggggugauucugcgccguc

SEQ ID NO: 2924992 - RNA, 19 nt, Artificial Sequence
  Description of Artificial Sequence: Synthetic oligonucleotide
ccggccccggccaccaaac

SEQ ID NO: 2924993 - RNA, 19 nt, Artificial Sequence
  Description of Artificial Sequence: Synthetic oligonucleotide
ccgucuugagcagcgacaa

SEQ ID NO: 2924994 - RNA, 19 nt, Artificial Sequence
  Description of Artificial Sequence: Synthetic oligonucleotide
gcccucggcccuuggcggc

SEQ ID NO: 2924995 - RNA, 19 nt, Artificial Sequence
  Description of Artificial Sequence: Synthetic oligonucleotide
gcuugccugcuugccgccc

SEQ ID NO: 2924996 - RNA, 19 nt, Artificial Sequence
  Description of Artificial Sequence: Synthetic oligonucleotide
ggaugccaccccggccccg

SEQ ID NO: 2924997 - RNA, 19 nt, Artificial Sequence
  Description of Artificial Sequence: Synthetic oligonucleotide
agcucaccaggugcccauu

SEQ ID NO: 2924998 - RNA, 19 nt, Artificial Sequence
  Description of Artificial Sequence: Synthetic oligonucleotide
ccuuggcggccuccucccg

SEQ ID NO: 2924999 - RNA, 19 nt, Artificial Sequence
  Description of Artificial Sequence: Synthetic oligonucleotide
cucgaagguugauguucau

SEQ ID NO: 2925000 - RNA, 19 nt, Artificial Sequence
  Description of Artificial Sequence: Synthetic oligonucleotide
gccaccccggccccggcca

SEQ ID NO: 2925001 - RNA, 19 nt, Artificial Sequence
  Description of Artificial Sequence: Synthetic oligonucleotide
ccuccucccgcaccauguc

SEQ ID NO: 2925002 - RNA, 19 nt, Artificial Sequence
  Description of Artificial Sequence: Synthetic oligonucleotide
ggcauucgccagaacuugu

SEQ ID NO: 2925003 - RNA, 19 nt, Artificial Sequence
  Description of Artificial Sequence: Synthetic oligonucleotide
cgucuugagcagcgacaag

SEQ ID NO: 2925004 - RNA, 19 nt, Artificial Sequence
  Description of Artificial Sequence: Synthetic oligonucleotide
cagcucaccaggugcccau

SEQ ID NO: 2925005 - RNA, 19 nt, Artificial Sequence
  Description of Artificial Sequence: Synthetic oligonucleotide
gccgcccaggcuucuucuc

SEQ ID NO: 2925006 - RNA, 19 nt, Artificial Sequence
  Description of Artificial Sequence: Synthetic oligonucleotide
cgccgucuugagcagcgac

SEQ ID NO: 2925007 - RNA, 19 nt, Artificial Sequence
  Description of Artificial Sequence: Synthetic oligonucleotide
gggugauucugcgccgucu

SEQ ID NO: 2925008 - RNA, 19 nt, Artificial Sequence
  Description of Artificial Sequence: Synthetic oligonucleotide
cccggccaccaaacacacc

SEQ ID NO: 2925009 - RNA, 19 nt, Artificial Sequence
  Description of Artificial Sequence: Synthetic oligonucleotide
ccguuugaccucggcccgc

SEQ ID NO: 2925010 - RNA, 19 nt, Artificial Sequence
  Description of Artificial Sequence: Synthetic oligonucleotide
caucagggaugcgcaggua

SEQ ID NO: 2925011 - RNA, 19 nt, Artificial Sequence
  Description of Artificial Sequence: Synthetic oligonucleotide
caccccggccccggccacc

SEQ ID NO: 2925012 - RNA, 19 nt, Artificial Sequence
  Description of Artificial Sequence: Synthetic oligonucleotide
cucggcccgcaccugggau

SEQ ID NO: 2925013 - RNA, 19 nt, Artificial Sequence
  Description of Artificial Sequence: Synthetic oligonucleotide
ccauuguaugucuccccau

SEQ ID NO: 2925014 - RNA, 19 nt, Artificial Sequence
  Description of Artificial Sequence: Synthetic oligonucleotide
cggccagcgccgcccaugc

SEQ ID NO: 2925015 - RNA, 19 nt, Artificial Sequence
  Description of Artificial Sequence: Synthetic oligonucleotide
cagggaugcgcagguacuu

SEQ ID NO: 2925016 - RNA, 19 nt, Artificial Sequence
  Description of Artificial Sequence: Synthetic oligonucleotide
cucggcccuuggcggccuc

SEQ ID NO: 2925017 - RNA, 19 nt, Artificial Sequence
  Description of Artificial Sequence: Synthetic oligonucleotide
gcccgcaccugggaugcca

SEQ ID NO: 2925018 - RNA, 19 nt, Artificial Sequence
  Description of Artificial Sequence: Synthetic oligonucleotide
ggccagcgccgcccaugcc

SEQ ID NO: 2925019 - RNA, 19 nt, Artificial Sequence
  Description of Artificial Sequence: Synthetic oligonucleotide
cggccaccaaacacaccuc

SEQ ID NO: 2925020 - RNA, 19 nt, Artificial Sequence
  Description of Artificial Sequence: Synthetic oligonucleotide
gcgccgcccaugccucggc

SEQ ID NO: 2925021 - RNA, 19 nt, Artificial Sequence
  Description of Artificial Sequence: Synthetic oligonucleotide
cccucggcccuuggcggcc

SEQ ID NO: 2925022 - RNA, 19 nt, Artificial Sequence
  Description of Artificial Sequence: Synthetic oligonucleotide
ggcccuuggcggccuccuc

SEQ ID NO: 2925023 - RNA, 19 nt, Artificial Sequence
  Description of Artificial Sequence: Synthetic oligonucleotide
ccgucccucgauguacaga

SEQ ID NO: 2925024 - RNA, 19 nt, Artificial Sequence
  Description of Artificial Sequence: Synthetic oligonucleotide
gccgcccaugccucggccu

SEQ ID NO: 2925025 - RNA, 19 nt, Artificial Sequence
  Description of Artificial Sequence: Synthetic oligonucleotide
gcccaugccucggccuuuc

SEQ ID NO: 2925026 - RNA, 19 nt, Artificial Sequence
  Description of Artificial Sequence: Synthetic oligonucleotide
gcgacaagggaagcaucuu

SEQ ID NO: 2925027 - RNA, 19 nt, Artificial Sequence
  Description of Artificial Sequence: Synthetic oligonucleotide
ccucgcccucggcccuugg

SEQ ID NO: 2925028 - RNA, 19 nt, Artificial Sequence
  Description of Artificial Sequence: Synthetic oligonucleotide
cguuugaccucggcccgca

SEQ ID NO: 2925029 - RNA, 19 nt, Artificial Sequence
  Description of Artificial Sequence: Synthetic oligonucleotide
gcccaggcuucuucuccgu

SEQ ID NO: 2925030 - RNA, 19 nt, Artificial Sequence
  Description of Artificial Sequence: Synthetic oligonucleotide
cgccgcccaugccucggcc

SEQ ID NO: 2925031 - RNA, 19 nt, Artificial Sequence
  Description of Artificial Sequence: Synthetic oligonucleotide
ccucggcccgcaccuggga

SEQ ID NO: 2925032 - RNA, 19 nt, Artificial Sequence
  Description of Artificial Sequence: Synthetic oligonucleotide
ccucucgaagguugauguu

SEQ ID NO: 2925033 - RNA, 19 nt, Artificial Sequence
  Description of Artificial Sequence: Synthetic oligonucleotide
cccgcaccaugucaaugau

SEQ ID NO: 2925034 - RNA, 19 nt, Artificial Sequence
  Description of Artificial Sequence: Synthetic oligonucleotide
cuugccgcccaggcuucuu

SEQ ID NO: 2925035 - RNA, 19 nt, Artificial Sequence
  Description of Artificial Sequence: Synthetic oligonucleotide
ccaccccggccccggccac

SEQ ID NO: 2925036 - RNA, 19 nt, Artificial Sequence
  Description of Artificial Sequence: Synthetic oligonucleotide
cccggccccggccaccaaa

SEQ ID NO: 2925037 - RNA, 19 nt, Artificial Sequence
  Description of Artificial Sequence: Synthetic oligonucleotide
ccucggccagcgccgccca

SEQ ID NO: 2925038 - RNA, 19 nt, Artificial Sequence
  Description of Artificial Sequence: Synthetic oligonucleotide
gcgccgucuugagcagcga

SEQ ID NO: 2925039 - RNA, 19 nt, Artificial Sequence
  Description of Artificial Sequence: Synthetic oligonucleotide
cgccgcugcacagccucuc

SEQ ID NO: 2925040 - RNA, 19 nt, Artificial Sequence
  Description of Artificial Sequence: Synthetic oligonucleotide
ggcccgcaccugggaugcc

SEQ ID NO: 2925041 - RNA, 19 nt, Artificial Sequence
  Description of Artificial Sequence: Synthetic oligonucleotide
cucggccuuucugcugcuu

SEQ ID NO: 2925042 - RNA, 19 nt, Artificial Sequence
  Description of Artificial Sequence: Synthetic oligonucleotide
ccucccgcaccaugucaau

SEQ ID NO: 2925043 - RNA, 19 nt, Artificial Sequence
  Description of Artificial Sequence: Synthetic oligonucleotide
cgccagaacuugucaccgu

SEQ ID NO: 2925044 - RNA, 19 nt, Artificial Sequence
  Description of Artificial Sequence: Synthetic oligonucleotide
cccucgcccucggcccuug

SEQ ID NO: 2925045 - RNA, 19 nt, Artificial Sequence
  Description of Artificial Sequence: Synthetic oligonucleotide
cucggccagcgccgcccau

SEQ ID NO: 2925046 - RNA, 19 nt, Artificial Sequence
  Description of Artificial Sequence: Synthetic oligonucleotide
gcuugccgcccaggcuucu

SEQ ID NO: 2925047 - RNA, 19 nt, Artificial Sequence
  Description of Artificial Sequence: Synthetic oligonucleotide
ccgcccaugccucggccuu

SEQ ID NO: 2925048 - RNA, 19 nt, Artificial Sequence
  Description of Artificial Sequence: Synthetic oligonucleotide
ccucggccuuucugcugcu

SEQ ID NO: 2925049 - RNA, 19 nt, Artificial Sequence
  Description of Artificial Sequence: Synthetic oligonucleotide
cggccccggccaccaaaca

SEQ ID NO: 2925050 - RNA, 19 nt, Artificial Sequence
  Description of Artificial Sequence: Synthetic oligonucleotide
cccaugccucggccuuucu

SEQ ID NO: 2925051 - RNA, 19 nt, Artificial Sequence
  Description of Artificial Sequence: Synthetic oligonucleotide
ccaccagcauggggugauu

SEQ ID NO: 2925052 - RNA, 19 nt, Artificial Sequence
  Description of Artificial Sequence: Synthetic oligonucleotide
ccucggcccuuggcggccu

SEQ ID NO: 2925053 - RNA, 19 nt, Artificial Sequence
  Description of Artificial Sequence: Synthetic oligonucleotide
cggcccuuggcggccuccu

SEQ ID NO: 2925054 - RNA, 19 nt, Artificial Sequence
  Description of Artificial Sequence: Synthetic oligonucleotide
cgcccaugccucggccuuu

SEQ ID NO: 2925055 - RNA, 19 nt, Artificial Sequence
  Description of Artificial Sequence: Synthetic oligonucleotide
ccccucgcccucggcccuu

SEQ ID NO: 2925056 - RNA, 19 nt, Artificial Sequence
  Description of Artificial Sequence: Synthetic oligonucleotide
cggccuccucccgcaccau

SEQ ID NO: 2925057 - RNA, 19 nt, Artificial Sequence
  Description of Artificial Sequence: Synthetic oligonucleotide
uuuguuacaaauuagguca

SEQ ID NO: 2925058 - RNA, 19 nt, Artificial Sequence
  Description of Artificial Sequence: Synthetic oligonucleotide
aauuaggucacacucuccc

SEQ ID NO: 2925059 - RNA, 19 nt, Artificial Sequence
  Description of Artificial Sequence: Synthetic oligonucleotide
aagacauaaugacugaggg

SEQ ID NO: 2925060 - RNA, 19 nt, Artificial Sequence
  Description of Artificial Sequence: Synthetic oligonucleotide
ugugaagacauaaugacug

SEQ ID NO: 2925061 - RNA, 19 nt, Artificial Sequence
  Description of Artificial Sequence: Synthetic oligonucleotide
aggaaaagcagucaggugg

SEQ ID NO: 2925062 - RNA, 19 nt, Artificial Sequence
  Description of Artificial Sequence: Synthetic oligonucleotide
auuuguuacaaauuagguc

SEQ ID NO: 2925063 - RNA, 19 nt, Artificial Sequence
  Description of Artificial Sequence: Synthetic oligonucleotide
gacauaaugacugagggag

SEQ ID NO: 2925064 - RNA, 19 nt, Artificial Sequence
  Description of Artificial Sequence: Synthetic oligonucleotide
uauauuuguuacaaauuag

SEQ ID NO: 2925065 - RNA, 19 nt, Artificial Sequence
  Description of Artificial Sequence: Synthetic oligonucleotide
uacaaauuaggucacacuc

SEQ ID NO: 2925066 - RNA, 19 nt, Artificial Sequence
  Description of Artificial Sequence: Synthetic oligonucleotide
uauuuguuacaaauuaggu

SEQ ID NO: 2925067 - RNA, 19 nt, Artificial Sequence
  Description of Artificial Sequence: Synthetic oligonucleotide
auauuuguuacaaauuagg

SEQ ID NO: 2925068 - RNA, 19 nt, Artificial Sequence
  Description of Artificial Sequence: Synthetic oligonucleotide
aguaguaauuguuggacag

SEQ ID NO: 2925069 - RNA, 19 nt, Artificial Sequence
  Description of Artificial Sequence: Synthetic oligonucleotide
ucugugaagacauaaugac

SEQ ID NO: 2925070 - RNA, 19 nt, Artificial Sequence
  Description of Artificial Sequence: Synthetic oligonucleotide
uucugugaagacauaauga

SEQ ID NO: 2925071 - RNA, 19 nt, Artificial Sequence
  Description of Artificial Sequence: Synthetic oligonucleotide
guaauuguuggacaguuug

SEQ ID NO: 2925072 - RNA, 19 nt, Artificial Sequence
  Description of Artificial Sequence: Synthetic oligonucleotide
aaggaggaaaagcagucag

SEQ ID NO: 2925073 - RNA, 19 nt, Artificial Sequence
  Description of Artificial Sequence: Synthetic oligonucleotide
gaagacauaaugacugagg

SEQ ID NO: 2925074 - RNA, 19 nt, Artificial Sequence
  Description of Artificial Sequence: Synthetic oligonucleotide
aauccaaggaggaaaagca

SEQ ID NO: 2925075 - RNA, 19 nt, Artificial Sequence
  Description of Artificial Sequence: Synthetic oligonucleotide
acaguuugugacuggggcc

SEQ ID NO: 2925076 - RNA, 19 nt, Artificial Sequence
  Description of Artificial Sequence: Synthetic oligonucleotide
uguauauuuguuacaaauu

SEQ ID NO: 2925077 - RNA, 19 nt, Artificial Sequence
  Description of Artificial Sequence: Synthetic oligonucleotide
aauuguuggacaguuugug

SEQ ID NO: 2925078 - RNA, 19 nt, Artificial Sequence
  Description of Artificial Sequence: Synthetic oligonucleotide
gacaguuugugacuggggc

SEQ ID NO: 2925079 - RNA, 19 nt, Artificial Sequence
  Description of Artificial Sequence: Synthetic oligonucleotide
auuaggucacacucucccc

SEQ ID NO: 2925080 - RNA, 19 nt, Artificial Sequence
  Description of Artificial Sequence: Synthetic oligonucleotide
guauauuuguuacaaauua

SEQ ID NO: 2925081 - RNA, 19 nt, Artificial Sequence
  Description of Artificial Sequence: Synthetic oligonucleotide
gaauccaaggaggaaaagc

SEQ ID NO: 2925082 - RNA, 19 nt, Artificial Sequence
  Description of Artificial Sequence: Synthetic oligonucleotide
uucauuggaggaccaggcg

SEQ ID NO: 2925083 - RNA, 19 nt, Artificial Sequence
  Description of Artificial Sequence: Synthetic oligonucleotide
ucacacucuccccagagga

SEQ ID NO: 2925084 - RNA, 19 nt, Artificial Sequence
  Description of Artificial Sequence: Synthetic oligonucleotide
ucauuggaggaccaggcgu

SEQ ID NO: 2925085 - RNA, 19 nt, Artificial Sequence
  Description of Artificial Sequence: Synthetic oligonucleotide
agcagugucacagguaugg

SEQ ID NO: 2925086 - RNA, 19 nt, Artificial Sequence
  Description of Artificial Sequence: Synthetic oligonucleotide
uuaggucacacucucccca

SEQ ID NO: 2925087 - RNA, 19 nt, Artificial Sequence
  Description of Artificial Sequence: Synthetic oligonucleotide
uccaaggaggaaaagcagu

SEQ ID NO: 2925088 - RNA, 19 nt, Artificial Sequence
  Description of Artificial Sequence: Synthetic oligonucleotide
uauggcuggucuuuggaca

SEQ ID NO: 2925089 - RNA, 19 nt, Artificial Sequence
  Description of Artificial Sequence: Synthetic oligonucleotide
aaauuaggucacacucucc

SEQ ID NO: 2925090 - RNA, 19 nt, Artificial Sequence
  Description of Artificial Sequence: Synthetic oligonucleotide
uuacaaauuaggucacacu

SEQ ID NO: 2925091 - RNA, 19 nt, Artificial Sequence
  Description of Artificial Sequence: Synthetic oligonucleotide
cuucauuggaggaccaggc

SEQ ID NO: 2925092 - RNA, 19 nt, Artificial Sequence
  Description of Artificial Sequence: Synthetic oligonucleotide
ugucuugcccgacaccagg

SEQ ID NO: 2925093 - RNA, 19 nt, Artificial Sequence
  Description of Artificial Sequence: Synthetic oligonucleotide
uaauuguuggacaguuugu

SEQ ID NO: 2925094 - RNA, 19 nt, Artificial Sequence
  Description of Artificial Sequence: Synthetic oligonucleotide
aaagcagucagguggccau

SEQ ID NO: 2925095 - RNA, 19 nt, Artificial Sequence
  Description of Artificial Sequence: Synthetic oligonucleotide
ugaagacauaaugacugag

SEQ ID NO: 2925096 - RNA, 19 nt, Artificial Sequence
  Description of Artificial Sequence: Synthetic oligonucleotide
caaauuaggucacacucuc

SEQ ID NO: 2925097 - RNA, 19 nt, Artificial Sequence
  Description of Artificial Sequence: Synthetic oligonucleotide
ugcccagacgcccaguugc

SEQ ID NO: 2925098 - RNA, 19 nt, Artificial Sequence
  Description of Artificial Sequence: Synthetic oligonucleotide
cucucagcugucuugcccg

SEQ ID NO: 2925099 - RNA, 19 nt, Artificial Sequence
  Description of Artificial Sequence: Synthetic oligonucleotide
cuggucuuuggacagcucc

SEQ ID NO: 2925100 - RNA, 19 nt, Artificial Sequence
  Description of Artificial Sequence: Synthetic oligonucleotide
gacaccagggccuucugug

SEQ ID NO: 2925101 - RNA, 19 nt, Artificial Sequence
  Description of Artificial Sequence: Synthetic oligonucleotide
ugcaguaguaauuguugga

SEQ ID NO: 2925102 - RNA, 19 nt, Artificial Sequence
  Description of Artificial Sequence: Synthetic oligonucleotide
gugcaguaguaauuguugg

SEQ ID NO: 2925103 - RNA, 19 nt, Artificial Sequence
  Description of Artificial Sequence: Synthetic oligonucleotide
accucuucauuggaggacc

SEQ ID NO: 2925104 - RNA, 19 nt, Artificial Sequence
  Description of Artificial Sequence: Synthetic oligonucleotide
cauaaugacugagggaggc

SEQ ID NO: 2925105 - RNA, 19 nt, Artificial Sequence
  Description of Artificial Sequence: Synthetic oligonucleotide
ucuuuggacagcucccacc

SEQ ID NO: 2925106 - RNA, 19 nt, Artificial Sequence
  Description of Artificial Sequence: Synthetic oligonucleotide
agugcaguaguaauuguug

SEQ ID NO: 2925107 - RNA, 19 nt, Artificial Sequence
  Description of Artificial Sequence: Synthetic oligonucleotide
gugacuggggcccacgggg

SEQ ID NO: 2925108 - RNA, 19 nt, Artificial Sequence
  Description of Artificial Sequence: Synthetic oligonucleotide
agcagucuggagcaguguc

SEQ ID NO: 2925109 - RNA, 19 nt, Artificial Sequence
  Description of Artificial Sequence: Synthetic oligonucleotide
ugaggacccggcaaagcag

SEQ ID NO: 2925110 - RNA, 19 nt, Artificial Sequence
  Description of Artificial Sequence: Synthetic oligonucleotide
auuguuggacaguuuguga

SEQ ID NO: 2925111 - RNA, 19 nt, Artificial Sequence
  Description of Artificial Sequence: Synthetic oligonucleotide
uccccagaggaauccaagg

SEQ ID NO: 2925112 - RNA, 19 nt, Artificial Sequence
  Description of Artificial Sequence: Synthetic oligonucleotide
agugucacagguauggcug

SEQ ID NO: 2925113 - RNA, 19 nt, Artificial Sequence
  Description of Artificial Sequence: Synthetic oligonucleotide
uguuggacaguuugugacu

SEQ ID NO: 2925114 - RNA, 19 nt, Artificial Sequence
  Description of Artificial Sequence: Synthetic oligonucleotide
uggacaguuugugacuggg

SEQ ID NO: 2925115 - RNA, 19 nt, Artificial Sequence
  Description of Artificial Sequence: Synthetic oligonucleotide
ugagcucucagcugucuug

SEQ ID NO: 2925116 - RNA, 19 nt, Artificial Sequence
  Description of Artificial Sequence: Synthetic oligonucleotide
gacgccauuucucuuccgc

SEQ ID NO: 2925117 - RNA, 19 nt, Artificial Sequence
  Description of Artificial Sequence: Synthetic oligonucleotide
guuacaaauuaggucacac

SEQ ID NO: 2925118 - RNA, 19 nt, Artificial Sequence
  Description of Artificial Sequence: Synthetic oligonucleotide
uuggcgaucuccugguagc

SEQ ID NO: 2925119 - RNA, 19 nt, Artificial Sequence
  Description of Artificial Sequence: Synthetic oligonucleotide
acugcuuucuucccagugu

SEQ ID NO: 2925120 - RNA, 19 nt, Artificial Sequence
  Description of Artificial Sequence: Synthetic oligonucleotide
uggucuuuggacagcuccc

SEQ ID NO: 2925121 - RNA, 19 nt, Artificial Sequence
  Description of Artificial Sequence: Synthetic oligonucleotide
uuguuacaaauuaggucac

SEQ ID NO: 2925122 - RNA, 19 nt, Artificial Sequence
  Description of Artificial Sequence: Synthetic oligonucleotide
agacauaaugacugaggga

SEQ ID NO: 2925123 - RNA, 19 nt, Artificial Sequence
  Description of Artificial Sequence: Synthetic oligonucleotide
ugugacuggggcccacggg

SEQ ID NO: 2925124 - RNA, 19 nt, Artificial Sequence
  Description of Artificial Sequence: Synthetic oligonucleotide
ucacagguauggcuggucu

SEQ ID NO: 2925125 - RNA, 19 nt, Artificial Sequence
  Description of Artificial Sequence: Synthetic oligonucleotide
ucagguggccaugaggacc

SEQ ID NO: 2925126 - RNA, 19 nt, Artificial Sequence
  Description of Artificial Sequence: Synthetic oligonucleotide
agucagguggccaugagga

SEQ ID NO: 2925127 - RNA, 19 nt, Artificial Sequence
  Description of Artificial Sequence: Synthetic oligonucleotide
uuaggaggaggcugcgucc

SEQ ID NO: 2925128 - RNA, 19 nt, Artificial Sequence
  Description of Artificial Sequence: Synthetic oligonucleotide
uaaugacugagggaggcac

SEQ ID NO: 2925129 - RNA, 19 nt, Artificial Sequence
  Description of Artificial Sequence: Synthetic oligonucleotide
ucgccugcaggucaugccc

SEQ ID NO: 2925130 - RNA, 19 nt, Artificial Sequence
  Description of Artificial Sequence: Synthetic oligonucleotide
acgagugcaguaguaauug

SEQ ID NO: 2925131 - RNA, 19 nt, Artificial Sequence
  Description of Artificial Sequence: Synthetic oligonucleotide
aaaagcagucagguggcca

SEQ ID NO: 2925132 - RNA, 19 nt, Artificial Sequence
  Description of Artificial Sequence: Synthetic oligonucleotide
cuuggcgaucuccugguag

SEQ ID NO: 2925133 - RNA, 19 nt, Artificial Sequence
  Description of Artificial Sequence: Synthetic oligonucleotide
ucuguauauuuguuacaaa

SEQ ID NO: 2925134 - RNA, 19 nt, Artificial Sequence
  Description of Artificial Sequence: Synthetic oligonucleotide
acaaauuaggucacacucu

SEQ ID NO: 2925135 - RNA, 19 nt, Artificial Sequence
  Description of Artificial Sequence: Synthetic oligonucleotide
auggcuggucuuuggacag

SEQ ID NO: 2925136 - RNA, 19 nt, Artificial Sequence
  Description of Artificial Sequence: Synthetic oligonucleotide
gucuggagcagugucacag

SEQ ID NO: 2925137 - RNA, 19 nt, Artificial Sequence
  Description of Artificial Sequence: Synthetic oligonucleotide
gucacugcuuucuucccag

SEQ ID NO: 2925138 - RNA, 19 nt, Artificial Sequence
  Description of Artificial Sequence: Synthetic oligonucleotide
gaggaaaagcagucaggug

SEQ ID NO: 2925139 - RNA, 19 nt, Artificial Sequence
  Description of Artificial Sequence: Synthetic oligonucleotide
caguuugugacuggggccc

SEQ ID NO: 2925140 - RNA, 19 nt, Artificial Sequence
  Description of Artificial Sequence: Synthetic oligonucleotide
cuguauauuuguuacaaau

SEQ ID NO: 2925141 - RNA, 19 nt, Artificial Sequence
  Description of Artificial Sequence: Synthetic oligonucleotide
uucccggcggccaucacga

SEQ ID NO: 2925142 - RNA, 19 nt, Artificial Sequence
  Description of Artificial Sequence: Synthetic oligonucleotide
ccagaggaauccaaggagg

SEQ ID NO: 2925143 - RNA, 19 nt, Artificial Sequence
  Description of Artificial Sequence: Synthetic oligonucleotide
uugugacuggggcccacgg

SEQ ID NO: 2925144 - RNA, 19 nt, Artificial Sequence
  Description of Artificial Sequence: Synthetic oligonucleotide
uagcagacgccauuucucu

SEQ ID NO: 2925145 - RNA, 19 nt, Artificial Sequence
  Description of Artificial Sequence: Synthetic oligonucleotide
cagguggccaugaggaccc

SEQ ID NO: 2925146 - RNA, 19 nt, Artificial Sequence
  Description of Artificial Sequence: Synthetic oligonucleotide
cauuggaggaccaggcguc

SEQ ID NO: 2925147 - RNA, 19 nt, Artificial Sequence
  Description of Artificial Sequence: Synthetic oligonucleotide
ucagcugucuugcccgaca

SEQ ID NO: 2925148 - RNA, 19 nt, Artificial Sequence
  Description of Artificial Sequence: Synthetic oligonucleotide
aggcacaacuucccggcgg

SEQ ID NO: 2925149 - RNA, 19 nt, Artificial Sequence
  Description of Artificial Sequence: Synthetic oligonucleotide
cuuucuucccagugucagc

SEQ ID NO: 2925150 - RNA, 19 nt, Artificial Sequence
  Description of Artificial Sequence: Synthetic oligonucleotide
uaguaauuguuggacaguu

SEQ ID NO: 2925151 - RNA, 19 nt, Artificial Sequence
  Description of Artificial Sequence: Synthetic oligonucleotide
gaggaauccaaggaggaaa

SEQ ID NO: 2925152 - RNA, 19 nt, Artificial Sequence
  Description of Artificial Sequence: Synthetic oligonucleotide
gacccggcaaagcagucug

SEQ ID NO: 2925153 - RNA, 19 nt, Artificial Sequence
  Description of Artificial Sequence: Synthetic oligonucleotide
uuggacaguuugugacugg

SEQ ID NO: 2925154 - RNA, 19 nt, Artificial Sequence
  Description of Artificial Sequence: Synthetic oligonucleotide
ugucagccacagcugagcu

SEQ ID NO: 2925155 - RNA, 19 nt, Artificial Sequence
  Description of Artificial Sequence: Synthetic oligonucleotide
cagucagguggccaugagg

SEQ ID NO: 2925156 - RNA, 19 nt, Artificial Sequence
  Description of Artificial Sequence: Synthetic oligonucleotide
ucacgagugcaguaguaau

SEQ ID NO: 2925157 - RNA, 19 nt, Artificial Sequence
  Description of Artificial Sequence: Synthetic oligonucleotide
uaggucacacucuccccag

SEQ ID NO: 2925158 - RNA, 19 nt, Artificial Sequence
  Description of Artificial Sequence: Synthetic oligonucleotide
guuggacaguuugugacug

SEQ ID NO: 2925159 - RNA, 19 nt, Artificial Sequence
  Description of Artificial Sequence: Synthetic oligonucleotide
ucuugcccgacaccagggc

SEQ ID NO: 2925160 - RNA, 19 nt, Artificial Sequence
  Description of Artificial Sequence: Synthetic oligonucleotide
agggaggcacaacuucccg

SEQ ID NO: 2925161 - RNA, 19 nt, Artificial Sequence
  Description of Artificial Sequence: Synthetic oligonucleotide
acagcugagcucucagcug

SEQ ID NO: 2925162 - RNA, 19 nt, Artificial Sequence
  Description of Artificial Sequence: Synthetic oligonucleotide
aggaggaaaagcagucagg

SEQ ID NO: 2925163 - RNA, 19 nt, Artificial Sequence
  Description of Artificial Sequence: Synthetic oligonucleotide
guauggcuggucuuuggac

SEQ ID NO: 2925164 - RNA, 19 nt, Artificial Sequence
  Description of Artificial Sequence: Synthetic oligonucleotide
acucuccccagaggaaucc

SEQ ID NO: 2925165 - RNA, 19 nt, Artificial Sequence
  Description of Artificial Sequence: Synthetic oligonucleotide
uuugugacuggggcccacg

SEQ ID NO: 2925166 - RNA, 19 nt, Artificial Sequence
  Description of Artificial Sequence: Synthetic oligonucleotide
cuucccggcggccaucacg

SEQ ID NO: 2925167 - RNA, 19 nt, Artificial Sequence
  Description of Artificial Sequence: Synthetic oligonucleotide
agcugucuugcccgacacc

SEQ ID NO: 2925168 - RNA, 19 nt, Artificial Sequence
  Description of Artificial Sequence: Synthetic oligonucleotide
cuugcccgacaccagggcc

SEQ ID NO: 2925169 - RNA, 19 nt, Artificial Sequence
  Description of Artificial Sequence: Synthetic oligonucleotide
gucacacucuccccagagg

SEQ ID NO: 2925170 - RNA, 19 nt, Artificial Sequence
  Description of Artificial Sequence: Synthetic oligonucleotide
ggcgucacugcuuucuucc

SEQ ID NO: 2925171 - RNA, 19 nt, Artificial Sequence
  Description of Artificial Sequence: Synthetic oligonucleotide
uguuacaaauuaggucaca

SEQ ID NO: 2925172 - RNA, 19 nt, Artificial Sequence
  Description of Artificial Sequence: Synthetic oligonucleotide
ggaggcacaacuucccggc

SEQ ID NO: 2925173 - RNA, 19 nt, Artificial Sequence
  Description of Artificial Sequence: Synthetic oligonucleotide
gugucacagguauggcugg

SEQ ID NO: 2925174 - RNA, 19 nt, Artificial Sequence
  Description of Artificial Sequence: Synthetic oligonucleotide
uugcccgacaccagggccu

SEQ ID NO: 2925175 - RNA, 19 nt, Artificial Sequence
  Description of Artificial Sequence: Synthetic oligonucleotide
uucgccugcaggucaugcc

SEQ ID NO: 2925176 - RNA, 19 nt, Artificial Sequence
  Description of Artificial Sequence: Synthetic oligonucleotide
acauaaugacugagggagg

SEQ ID NO: 2925177 - RNA, 19 nt, Artificial Sequence
  Description of Artificial Sequence: Synthetic oligonucleotide
uggcgcgcguagcagacgc

SEQ ID NO: 2925178 - RNA, 19 nt, Artificial Sequence
  Description of Artificial Sequence: Synthetic oligonucleotide
aggaccaggcgucacugcu

SEQ ID NO: 2925179 - RNA, 19 nt, Artificial Sequence
  Description of Artificial Sequence: Synthetic oligonucleotide
ggcaaagcagucuggagca

SEQ ID NO: 2925180 - RNA, 19 nt, Artificial Sequence
  Description of Artificial Sequence: Synthetic oligonucleotide
cugagggaggcacaacuuc

SEQ ID NO: 2925181 - RNA, 19 nt, Artificial Sequence
  Description of Artificial Sequence: Synthetic oligonucleotide
cugcuuucuucccaguguc

SEQ ID NO: 2925182 - RNA, 19 nt, Artificial Sequence
  Description of Artificial Sequence: Synthetic oligonucleotide
gcaguaguaauuguuggac

SEQ ID NO: 2925183 - RNA, 19 nt, Artificial Sequence
  Description of Artificial Sequence: Synthetic oligonucleotide
aaugacugagggaggcaca

SEQ ID NO: 2925184 - RNA, 19 nt, Artificial Sequence
  Description of Artificial Sequence: Synthetic oligonucleotide
caggucaugcccagacgcc

SEQ ID NO: 2925185 - RNA, 19 nt, Artificial Sequence
  Description of Artificial Sequence: Synthetic oligonucleotide
gacugagggaggcacaacu

SEQ ID NO: 2925186 - RNA, 19 nt, Artificial Sequence
  Description of Artificial Sequence: Synthetic oligonucleotide
gaggcacaacuucccggcg

SEQ ID NO: 2925187 - RNA, 19 nt, Artificial Sequence
  Description of Artificial Sequence: Synthetic oligonucleotide
uagcgcagcugcagcuucg

SEQ ID NO: 2925188 - RNA, 19 nt, Artificial Sequence
  Description of Artificial Sequence: Synthetic oligonucleotide
gugaagacauaaugacuga

SEQ ID NO: 2925189 - RNA, 19 nt, Artificial Sequence
  Description of Artificial Sequence: Synthetic oligonucleotide
guagcagacgccauuucuc

SEQ ID NO: 2925190 - RNA, 19 nt, Artificial Sequence
  Description of Artificial Sequence: Synthetic oligonucleotide
gagcucucagcugucuugc

SEQ ID NO: 2925191 - RNA, 19 nt, Artificial Sequence
  Description of Artificial Sequence: Synthetic oligonucleotide
ggaaaagcagucagguggc

SEQ ID NO: 2925192 - RNA, 19 nt, Artificial Sequence
  Description of Artificial Sequence: Synthetic oligonucleotide
cugcaggucaugcccagac

SEQ ID NO: 2925193 - RNA, 19 nt, Artificial Sequence
  Description of Artificial Sequence: Synthetic oligonucleotide
uggaggaccaggcgucacu

SEQ ID NO: 2925194 - RNA, 19 nt, Artificial Sequence
  Description of Artificial Sequence: Synthetic oligonucleotide
ggagcuuaggaggaggcug

SEQ ID NO: 2925195 - RNA, 19 nt, Artificial Sequence
  Description of Artificial Sequence: Synthetic oligonucleotide
cagaggaauccaaggagga

SEQ ID NO: 2925196 - RNA, 19 nt, Artificial Sequence
  Description of Artificial Sequence: Synthetic oligonucleotide
cugguagcgcagcugcagc

SEQ ID NO: 2925197 - RNA, 19 nt, Artificial Sequence
  Description of Artificial Sequence: Synthetic oligonucleotide
cucuggauggcgcgcguag

SEQ ID NO: 2925198 - RNA, 19 nt, Artificial Sequence
  Description of Artificial Sequence: Synthetic oligonucleotide
acgccauuucucuuccgcu

SEQ ID NO: 2925199 - RNA, 19 nt, Artificial Sequence
  Description of Artificial Sequence: Synthetic oligonucleotide
cagacgccauuucucuucc

SEQ ID NO: 2925200 - RNA, 19 nt, Artificial Sequence
  Description of Artificial Sequence: Synthetic oligonucleotide
gggaggcacaacuucccgg

SEQ ID NO: 2925201 - RNA, 19 nt, Artificial Sequence
  Description of Artificial Sequence: Synthetic oligonucleotide
cacugcuuucuucccagug

SEQ ID NO: 2925202 - RNA, 19 nt, Artificial Sequence
  Description of Artificial Sequence: Synthetic oligonucleotide
aggcgucacugcuuucuuc

SEQ ID NO: 2925203 - RNA, 19 nt, Artificial Sequence
  Description of Artificial Sequence: Synthetic oligonucleotide
cccagaggaauccaaggag

SEQ ID NO: 2925204 - RNA, 19 nt, Artificial Sequence
  Description of Artificial Sequence: Synthetic oligonucleotide
ugguagcgcagcugcagcu

SEQ ID NO: 2925205 - RNA, 19 nt, Artificial Sequence
  Description of Artificial Sequence: Synthetic oligonucleotide
ucuccccagaggaauccaa

SEQ ID NO: 2925206 - RNA, 19 nt, Artificial Sequence
  Description of Artificial Sequence: Synthetic oligonucleotide
aucacgagugcaguaguaa

SEQ ID NO: 2925207 - RNA, 19 nt, Artificial Sequence
  Description of Artificial Sequence: Synthetic oligonucleotide
gcucccaccucuucauugg

SEQ ID NO: 2925208 - RNA, 19 nt, Artificial Sequence
  Description of Artificial Sequence: Synthetic oligonucleotide
ccaaggaggaaaagcaguc

SEQ ID NO: 2925209 - RNA, 19 nt, Artificial Sequence
  Description of Artificial Sequence: Synthetic oligonucleotide
ccacggggagcuuaggagg

SEQ ID NO: 2925210 - RNA, 19 nt, Artificial Sequence
  Description of Artificial Sequence: Synthetic oligonucleotide
ggucacacucuccccagag

SEQ ID NO: 2925211 - RNA, 19 nt, Artificial Sequence
  Description of Artificial Sequence: Synthetic oligonucleotide
accagggccuucugugaag

SEQ ID NO: 2925212 - RNA, 19 nt, Artificial Sequence
  Description of Artificial Sequence: Synthetic oligonucleotide
uggcgaucuccugguagcg

SEQ ID NO: 2925213 - RNA, 19 nt, Artificial Sequence
  Description of Artificial Sequence: Synthetic oligonucleotide
gaaaagcagucagguggcc

SEQ ID NO: 2925214 - RNA, 19 nt, Artificial Sequence
  Description of Artificial Sequence: Synthetic oligonucleotide
uggagcagugucacaggua

SEQ ID NO: 2925215 - RNA, 19 nt, Artificial Sequence
  Description of Artificial Sequence: Synthetic oligonucleotide
cugugaagacauaaugacu

SEQ ID NO: 2925216 - RNA, 19 nt, Artificial Sequence
  Description of Artificial Sequence: Synthetic oligonucleotide
agggccuucugugaagaca

SEQ ID NO: 2925217 - RNA, 19 nt, Artificial Sequence
  Description of Artificial Sequence: Synthetic oligonucleotide
aggaggaggcugcguccgc

SEQ ID NO: 2925218 - RNA, 19 nt, Artificial Sequence
  Description of Artificial Sequence: Synthetic oligonucleotide
cuuuggacagcucccaccu

SEQ ID NO: 2925219 - RNA, 19 nt, Artificial Sequence
  Description of Artificial Sequence: Synthetic oligonucleotide
acaccagggccuucuguga

SEQ ID NO: 2925220 - RNA, 19 nt, Artificial Sequence
  Description of Artificial Sequence: Synthetic oligonucleotide
cagucuggagcagugucac

SEQ ID NO: 2925221 - RNA, 19 nt, Artificial Sequence
  Description of Artificial Sequence: Synthetic oligonucleotide
uggauggcgcgcguagcag

SEQ ID NO: 2925222 - RNA, 19 nt, Artificial Sequence
  Description of Artificial Sequence: Synthetic oligonucleotide
gugucagccacagcugagc

SEQ ID NO: 2925223 - RNA, 19 nt, Artificial Sequence
  Description of Artificial Sequence: Synthetic oligonucleotide
gccauuucucuuccgcucc

SEQ ID NO: 2925224 - RNA, 19 nt, Artificial Sequence
  Description of Artificial Sequence: Synthetic oligonucleotide
acuggggcccacggggagc

SEQ ID NO: 2925225 - RNA, 19 nt, Artificial Sequence
  Description of Artificial Sequence: Synthetic oligonucleotide
gucuugcccgacaccaggg

SEQ ID NO: 2925226 - RNA, 19 nt, Artificial Sequence
  Description of Artificial Sequence: Synthetic oligonucleotide
ucuccugguagcgcagcug

SEQ ID NO: 2925227 - RNA, 19 nt, Artificial Sequence
  Description of Artificial Sequence: Synthetic oligonucleotide
uccgcuuggcgaucuccug

SEQ ID NO: 2925228 - RNA, 19 nt, Artificial Sequence
  Description of Artificial Sequence: Synthetic oligonucleotide
cagacgcccaguugcgcag

SEQ ID NO: 2925229 - RNA, 19 nt, Artificial Sequence
  Description of Artificial Sequence: Synthetic oligonucleotide
ucuggauggcgcgcguagc

SEQ ID NO: 2925230 - RNA, 19 nt, Artificial Sequence
  Description of Artificial Sequence: Synthetic oligonucleotide
acagguauggcuggucuuu

SEQ ID NO: 2925231 - RNA, 19 nt, Artificial Sequence
  Description of Artificial Sequence: Synthetic oligonucleotide
agcgcagcugcagcuucgc

SEQ ID NO: 2925232 - RNA, 19 nt, Artificial Sequence
  Description of Artificial Sequence: Synthetic oligonucleotide
aggaauccaaggaggaaaa

SEQ ID NO: 2925233 - RNA, 19 nt, Artificial Sequence
  Description of Artificial Sequence: Synthetic oligonucleotide
gauggcgcgcguagcagac

SEQ ID NO: 2925234 - RNA, 19 nt, Artificial Sequence
  Description of Artificial Sequence: Synthetic oligonucleotide
acaacuucccggcggccau

SEQ ID NO: 2925235 - RNA, 19 nt, Artificial Sequence
  Description of Artificial Sequence: Synthetic oligonucleotide
agugucagccacagcugag

SEQ ID NO: 2925236 - RNA, 19 nt, Artificial Sequence
  Description of Artificial Sequence: Synthetic oligonucleotide
gguauggcuggucuuugga

SEQ ID NO: 2925237 - RNA, 19 nt, Artificial Sequence
  Description of Artificial Sequence: Synthetic oligonucleotide
gaggaccaggcgucacugc

SEQ ID NO: 2925238 - RNA, 19 nt, Artificial Sequence
  Description of Artificial Sequence: Synthetic oligonucleotide
cugucuugcccgacaccag

SEQ ID NO: 2925239 - RNA, 19 nt, Artificial Sequence
  Description of Artificial Sequence: Synthetic oligonucleotide
uuuggacagcucccaccuc

SEQ ID NO: 2925240 - RNA, 19 nt, Artificial Sequence
  Description of Artificial Sequence: Synthetic oligonucleotide
gccaucacgagugcaguag

SEQ ID NO: 2925241 - RNA, 19 nt, Artificial Sequence
  Description of Artificial Sequence: Synthetic oligonucleotide
gaucuccugguagcgcagc

SEQ ID NO: 2925242 - RNA, 19 nt, Artificial Sequence
  Description of Artificial Sequence: Synthetic oligonucleotide
gcagacgccauuucucuuc

SEQ ID NO: 2925243 - RNA, 19 nt, Artificial Sequence
  Description of Artificial Sequence: Synthetic oligonucleotide
agacgccauuucucuuccg

SEQ ID NO: 2925244 - RNA, 19 nt, Artificial Sequence
  Description of Artificial Sequence: Synthetic oligonucleotide
acacucuccccagaggaau

SEQ ID NO: 2925245 - RNA, 19 nt, Artificial Sequence
  Description of Artificial Sequence: Synthetic oligonucleotide
cggcaaagcagucuggagc

SEQ ID NO: 2925246 - RNA, 19 nt, Artificial Sequence
  Description of Artificial Sequence: Synthetic oligonucleotide
agaggaauccaaggaggaa

SEQ ID NO: 2925247 - RNA, 19 nt, Artificial Sequence
  Description of Artificial Sequence: Synthetic oligonucleotide
ucucagcugucuugcccga

SEQ ID NO: 2925248 - RNA, 19 nt, Artificial Sequence
  Description of Artificial Sequence: Synthetic oligonucleotide
cacagcugagcucucagcu

SEQ ID NO: 2925249 - RNA, 19 nt, Artificial Sequence
  Description of Artificial Sequence: Synthetic oligonucleotide
caccucuucauuggaggac

SEQ ID NO: 2925250 - RNA, 19 nt, Artificial Sequence
  Description of Artificial Sequence: Synthetic oligonucleotide
aucuccugguagcgcagcu

SEQ ID NO: 2925251 - RNA, 19 nt, Artificial Sequence
  Description of Artificial Sequence: Synthetic oligonucleotide
aacuucccggcggccauca

SEQ ID NO: 2925252 - RNA, 19 nt, Artificial Sequence
  Description of Artificial Sequence: Synthetic oligonucleotide
gcagccucuggauggcgcg

SEQ ID NO: 2925253 - RNA, 19 nt, Artificial Sequence
  Description of Artificial Sequence: Synthetic oligonucleotide
gcucucagcugucuugccc

SEQ ID NO: 2925254 - RNA, 19 nt, Artificial Sequence
  Description of Artificial Sequence: Synthetic oligonucleotide
ggagcagugucacagguau

SEQ ID NO: 2925255 - RNA, 19 nt, Artificial Sequence
  Description of Artificial Sequence: Synthetic oligonucleotide
cuucgccugcaggucaugc

SEQ ID NO: 2925256 - RNA, 19 nt, Artificial Sequence
  Description of Artificial Sequence: Synthetic oligonucleotide
augacugagggaggcacaa

SEQ ID NO: 2925257 - RNA, 19 nt, Artificial Sequence
  Description of Artificial Sequence: Synthetic oligonucleotide
aagcagucuggagcagugu

SEQ ID NO: 2925258 - RNA, 19 nt, Artificial Sequence
  Description of Artificial Sequence: Synthetic oligonucleotide
cucuucauuggaggaccag

SEQ ID NO: 2925259 - RNA, 19 nt, Artificial Sequence
  Description of Artificial Sequence: Synthetic oligonucleotide
caaggaggaaaagcaguca

SEQ ID NO: 2925260 - RNA, 19 nt, Artificial Sequence
  Description of Artificial Sequence: Synthetic oligonucleotide
gcugucuugcccgacacca

SEQ ID NO: 2925261 - RNA, 19 nt, Artificial Sequence
  Description of Artificial Sequence: Synthetic oligonucleotide
cccacggggagcuuaggag

SEQ ID NO: 2925262 - RNA, 19 nt, Artificial Sequence
  Description of Artificial Sequence: Synthetic oligonucleotide
aagcagucagguggccaug

SEQ ID NO: 2925263 - RNA, 19 nt, Artificial Sequence
  Description of Artificial Sequence: Synthetic oligonucleotide
ggaggaaaagcagucaggu

SEQ ID NO: 2925264 - RNA, 19 nt, Artificial Sequence
  Description of Artificial Sequence: Synthetic oligonucleotide
augcccagacgcccaguug

SEQ ID NO: 2925265 - RNA, 19 nt, Artificial Sequence
  Description of Artificial Sequence: Synthetic oligonucleotide
uccugguagcgcagcugca

SEQ ID NO: 2925266 - RNA, 19 nt, Artificial Sequence
  Description of Artificial Sequence: Synthetic oligonucleotide
agacgcccaguugcgcagc

SEQ ID NO: 2925267 - RNA, 19 nt, Artificial Sequence
  Description of Artificial Sequence: Synthetic oligonucleotide
guagcgcagcugcagcuuc

SEQ ID NO: 2925268 - RNA, 19 nt, Artificial Sequence
  Description of Artificial Sequence: Synthetic oligonucleotide
gucaugcccagacgcccag

SEQ ID NO: 2925269 - RNA, 19 nt, Artificial Sequence
  Description of Artificial Sequence: Synthetic oligonucleotide
ggacaguuugugacugggg

SEQ ID NO: 2925270 - RNA, 19 nt, Artificial Sequence
  Description of Artificial Sequence: Synthetic oligonucleotide
ucacugcuuucuucccagu

SEQ ID NO: 2925271 - RNA, 19 nt, Artificial Sequence
  Description of Artificial Sequence: Synthetic oligonucleotide
cagcugucuugcccgacac

SEQ ID NO: 2925272 - RNA, 19 nt, Artificial Sequence
  Description of Artificial Sequence: Synthetic oligonucleotide
cacucuccccagaggaauc

SEQ ID NO: 2925273 - RNA, 19 nt, Artificial Sequence
  Description of Artificial Sequence: Synthetic oligonucleotide
aguaauuguuggacaguuu

SEQ ID NO: 2925274 - RNA, 19 nt, Artificial Sequence
  Description of Artificial Sequence: Synthetic oligonucleotide
cagugucagccacagcuga

SEQ ID NO: 2925275 - RNA, 19 nt, Artificial Sequence
  Description of Artificial Sequence: Synthetic oligonucleotide
gucagguggccaugaggac

SEQ ID NO: 2925276 - RNA, 19 nt, Artificial Sequence
  Description of Artificial Sequence: Synthetic oligonucleotide
agccucuggauggcgcgcg

SEQ ID NO: 2925277 - RNA, 19 nt, Artificial Sequence
  Description of Artificial Sequence: Synthetic oligonucleotide
ugucacagguauggcuggu

SEQ ID NO: 2925278 - RNA, 19 nt, Artificial Sequence
  Description of Artificial Sequence: Synthetic oligonucleotide
ggaauccaaggaggaaaag

SEQ ID NO: 2925279 - RNA, 19 nt, Artificial Sequence
  Description of Artificial Sequence: Synthetic oligonucleotide
cacggggagcuuaggagga

SEQ ID NO: 2925280 - RNA, 19 nt, Artificial Sequence
  Description of Artificial Sequence: Synthetic oligonucleotide
auuggaggaccaggcguca

SEQ ID NO: 2925281 - RNA, 19 nt, Artificial Sequence
  Description of Artificial Sequence: Synthetic oligonucleotide
cccagugucagccacagcu

SEQ ID NO: 2925282 - RNA, 19 nt, Artificial Sequence
  Description of Artificial Sequence: Synthetic oligonucleotide
gaggcugcguccgcuuggc

SEQ ID NO: 2925283 - RNA, 19 nt, Artificial Sequence
  Description of Artificial Sequence: Synthetic oligonucleotide
cuggauggcgcgcguagca

SEQ ID NO: 2925284 - RNA, 19 nt, Artificial Sequence
  Description of Artificial Sequence: Synthetic oligonucleotide
guaguaauuguuggacagu

SEQ ID NO: 2925285 - RNA, 19 nt, Artificial Sequence
  Description of Artificial Sequence: Synthetic oligonucleotide
ccggcggccaucacgagug

SEQ ID NO: 2925286 - RNA, 19 nt, Artificial Sequence
  Description of Artificial Sequence: Synthetic oligonucleotide
gucagccacagcugagcuc

SEQ ID NO: 2925287 - RNA, 19 nt, Artificial Sequence
  Description of Artificial Sequence: Synthetic oligonucleotide
ugcgcagccucuggauggc

SEQ ID NO: 2925288 - RNA, 19 nt, Artificial Sequence
  Description of Artificial Sequence: Synthetic oligonucleotide
agcagucagguggccauga

SEQ ID NO: 2925289 - RNA, 19 nt, Artificial Sequence
  Description of Artificial Sequence: Synthetic oligonucleotide
agucuggagcagugucaca

SEQ ID NO: 2925290 - RNA, 19 nt, Artificial Sequence
  Description of Artificial Sequence: Synthetic oligonucleotide
cuucccagugucagccaca

SEQ ID NO: 2925291 - RNA, 19 nt, Artificial Sequence
  Description of Artificial Sequence: Synthetic oligonucleotide
agcagacgccauuucucuu

SEQ ID NO: 2925292 - RNA, 19 nt, Artificial Sequence
  Description of Artificial Sequence: Synthetic oligonucleotide
gccacagcugagcucucag

SEQ ID NO: 2925293 - RNA, 19 nt, Artificial Sequence
  Description of Artificial Sequence: Synthetic oligonucleotide
gagugcaguaguaauuguu

SEQ ID NO: 2925294 - RNA, 19 nt, Artificial Sequence
  Description of Artificial Sequence: Synthetic oligonucleotide
gcgaucuccugguagcgca

SEQ ID NO: 2925295 - RNA, 19 nt, Artificial Sequence
  Description of Artificial Sequence: Synthetic oligonucleotide
acugagggaggcacaacuu

SEQ ID NO: 2925296 - RNA, 19 nt, Artificial Sequence
  Description of Artificial Sequence: Synthetic oligonucleotide
aggucacacucuccccaga

SEQ ID NO: 2925297 - RNA, 19 nt, Artificial Sequence
  Description of Artificial Sequence: Synthetic oligonucleotide
ggaggaccaggcgucacug

SEQ ID NO: 2925298 - RNA, 19 nt, Artificial Sequence
  Description of Artificial Sequence: Synthetic oligonucleotide
ugacugagggaggcacaac

SEQ ID NO: 2925299 - RNA, 19 nt, Artificial Sequence
  Description of Artificial Sequence: Synthetic oligonucleotide
accaggcgucacugcuuuc

SEQ ID NO: 2925300 - RNA, 19 nt, Artificial Sequence
  Description of Artificial Sequence: Synthetic oligonucleotide
ccgcuuggcgaucuccugg

SEQ ID NO: 2925301 - RNA, 19 nt, Artificial Sequence
  Description of Artificial Sequence: Synthetic oligonucleotide
caucacgagugcaguagua

SEQ ID NO: 2925302 - RNA, 19 nt, Artificial Sequence
  Description of Artificial Sequence: Synthetic oligonucleotide
gagcagugucacagguaug

SEQ ID NO: 2925303 - RNA, 19 nt, Artificial Sequence
  Description of Artificial Sequence: Synthetic oligonucleotide
ggcugcguccgcuuggcga

SEQ ID NO: 2925304 - RNA, 19 nt, Artificial Sequence
  Description of Artificial Sequence: Synthetic oligonucleotide
ccauuucucuuccgcuccg

SEQ ID NO: 2925305 - RNA, 19 nt, Artificial Sequence
  Description of Artificial Sequence: Synthetic oligonucleotide
acuucccggcggccaucac

SEQ ID NO: 2925306 - RNA, 19 nt, Artificial Sequence
  Description of Artificial Sequence: Synthetic oligonucleotide
ucccagugucagccacagc

SEQ ID NO: 2925307 - RNA, 19 nt, Artificial Sequence
  Description of Artificial Sequence: Synthetic oligonucleotide
uuggaggaccaggcgucac

SEQ ID NO: 2925308 - RNA, 19 nt, Artificial Sequence
  Description of Artificial Sequence: Synthetic oligonucleotide
gcggccaucacgagugcag

SEQ ID NO: 2925309 - RNA, 19 nt, Artificial Sequence
  Description of Artificial Sequence: Synthetic oligonucleotide
cacacucuccccagaggaa

SEQ ID NO: 2925310 - RNA, 19 nt, Artificial Sequence
  Description of Artificial Sequence: Synthetic oligonucleotide
gucacagguauggcugguc

SEQ ID NO: 2925311 - RNA, 19 nt, Artificial Sequence
  Description of Artificial Sequence: Synthetic oligonucleotide
gaggacccggcaaagcagu

SEQ ID NO: 2925312 - RNA, 19 nt, Artificial Sequence
  Description of Artificial Sequence: Synthetic oligonucleotide
aguuugugacuggggccca

SEQ ID NO: 2925313 - RNA, 19 nt, Artificial Sequence
  Description of Artificial Sequence: Synthetic oligonucleotide
aggcugcguccgcuuggcg

SEQ ID NO: 2925314 - RNA, 19 nt, Artificial Sequence
  Description of Artificial Sequence: Synthetic oligonucleotide
aggacccggcaaagcaguc

SEQ ID NO: 2925315 - RNA, 19 nt, Artificial Sequence
  Description of Artificial Sequence: Synthetic oligonucleotide
cacgagugcaguaguaauu

SEQ ID NO: 2925316 - RNA, 19 nt, Artificial Sequence
  Description of Artificial Sequence: Synthetic oligonucleotide
ggggagcuuaggaggaggc

SEQ ID NO: 2925317 - RNA, 19 nt, Artificial Sequence
  Description of Artificial Sequence: Synthetic oligonucleotide
gccaugaggacccggcaaa

SEQ ID NO: 2925318 - RNA, 19 nt, Artificial Sequence
  Description of Artificial Sequence: Synthetic oligonucleotide
ccaguugcgcagccucugg

SEQ ID NO: 2925319 - RNA, 19 nt, Artificial Sequence
  Description of Artificial Sequence: Synthetic oligonucleotide
auggcgcgcguagcagacg

SEQ ID NO: 2925320 - RNA, 19 nt, Artificial Sequence
  Description of Artificial Sequence: Synthetic oligonucleotide
ccugguagcgcagcugcag

SEQ ID NO: 2925321 - RNA, 19 nt, Artificial Sequence
  Description of Artificial Sequence: Synthetic oligonucleotide
cagggccuucugugaagac

SEQ ID NO: 2925322 - RNA, 19 nt, Artificial Sequence
  Description of Artificial Sequence: Synthetic oligonucleotide
ggucuuuggacagcuccca

SEQ ID NO: 2925323 - RNA, 19 nt, Artificial Sequence
  Description of Artificial Sequence: Synthetic oligonucleotide
ggauggcgcgcguagcaga

SEQ ID NO: 2925324 - RNA, 19 nt, Artificial Sequence
  Description of Artificial Sequence: Synthetic oligonucleotide
ccggcaaagcagucuggag

SEQ ID NO: 2925325 - RNA, 19 nt, Artificial Sequence
  Description of Artificial Sequence: Synthetic oligonucleotide
ugcguccgcuuggcgaucu

SEQ ID NO: 2925326 - RNA, 19 nt, Artificial Sequence
  Description of Artificial Sequence: Synthetic oligonucleotide
cuggagcagugucacaggu

SEQ ID NO: 2925327 - RNA, 19 nt, Artificial Sequence
  Description of Artificial Sequence: Synthetic oligonucleotide
cagcuucgccugcagguca

SEQ ID NO: 2925328 - RNA, 19 nt, Artificial Sequence
  Description of Artificial Sequence: Synthetic oligonucleotide
acggggagcuuaggaggag

SEQ ID NO: 2925329 - RNA, 19 nt, Artificial Sequence
  Description of Artificial Sequence: Synthetic oligonucleotide
gcagucagguggccaugag

SEQ ID NO: 2925330 - RNA, 19 nt, Artificial Sequence
  Description of Artificial Sequence: Synthetic oligonucleotide
acccggcaaagcagucugg

SEQ ID NO: 2925331 - RNA, 19 nt, Artificial Sequence
  Description of Artificial Sequence: Synthetic oligonucleotide
gaccaggcgucacugcuuu

SEQ ID NO: 2925332 - RNA, 19 nt, Artificial Sequence
  Description of Artificial Sequence: Synthetic oligonucleotide
gcagucuggagcaguguca

SEQ ID NO: 2925333 - RNA, 19 nt, Artificial Sequence
  Description of Artificial Sequence: Synthetic oligonucleotide
ucaugcccagacgcccagu

SEQ ID NO: 2925334 - RNA, 19 nt, Artificial Sequence
  Description of Artificial Sequence: Synthetic oligonucleotide
gccuucugugaagacauaa

SEQ ID NO: 2925335 - RNA, 19 nt, Artificial Sequence
  Description of Artificial Sequence: Synthetic oligonucleotide
gcgucacugcuuucuuccc

SEQ ID NO: 2925336 - RNA, 19 nt, Artificial Sequence
  Description of Artificial Sequence: Synthetic oligonucleotide
gcagugucacagguauggc

SEQ ID NO: 2925337 - RNA, 19 nt, Artificial Sequence
  Description of Artificial Sequence: Synthetic oligonucleotide
guuugugacuggggcccac

SEQ ID NO: 2925338 - RNA, 19 nt, Artificial Sequence
  Description of Artificial Sequence: Synthetic oligonucleotide
cauuucucuuccgcuccga

SEQ ID NO: 2925339 - RNA, 19 nt, Artificial Sequence
  Description of Artificial Sequence: Synthetic oligonucleotide
ccccagaggaauccaagga

SEQ ID NO: 2925340 - RNA, 19 nt, Artificial Sequence
  Description of Artificial Sequence: Synthetic oligonucleotide
cagccucuggauggcgcgc

SEQ ID NO: 2925341 - RNA, 19 nt, Artificial Sequence
  Description of Artificial Sequence: Synthetic oligonucleotide
cucccaccucuucauugga

SEQ ID NO: 2925342 - RNA, 19 nt, Artificial Sequence
  Description of Artificial Sequence: Synthetic oligonucleotide
ggccaugaggacccggcaa

SEQ ID NO: 2925343 - RNA, 19 nt, Artificial Sequence
  Description of Artificial Sequence: Synthetic oligonucleotide
caccagggccuucugugaa

SEQ ID NO: 2925344 - RNA, 19 nt, Artificial Sequence
  Description of Artificial Sequence: Synthetic oligonucleotide
cucagcugucuugcccgac

SEQ ID NO: 2925345 - RNA, 19 nt, Artificial Sequence
  Description of Artificial Sequence: Synthetic oligonucleotide
ggcgaucuccugguagcgc

SEQ ID NO: 2925346 - RNA, 19 nt, Artificial Sequence
  Description of Artificial Sequence: Synthetic oligonucleotide
ccaccucuucauuggagga

SEQ ID NO: 2925347 - RNA, 19 nt, Artificial Sequence
  Description of Artificial Sequence: Synthetic oligonucleotide
ccagacgcccaguugcgca

SEQ ID NO: 2925348 - RNA, 19 nt, Artificial Sequence
  Description of Artificial Sequence: Synthetic oligonucleotide
gccugcaggucaugcccag

SEQ ID NO: 2925349 - RNA, 19 nt, Artificial Sequence
  Description of Artificial Sequence: Synthetic oligonucleotide
gcaaagcagucuggagcag

SEQ ID NO: 2925350 - RNA, 19 nt, Artificial Sequence
  Description of Artificial Sequence: Synthetic oligonucleotide
cgccauuucucuuccgcuc

SEQ ID NO: 2925351 - RNA, 19 nt, Artificial Sequence
  Description of Artificial Sequence: Synthetic oligonucleotide
ucccggcggccaucacgag

SEQ ID NO: 2925352 - RNA, 19 nt, Artificial Sequence
  Description of Artificial Sequence: Synthetic oligonucleotide
ccaugaggacccggcaaag

SEQ ID NO: 2925353 - RNA, 19 nt, Artificial Sequence
  Description of Artificial Sequence: Synthetic oligonucleotide
gcccagacgcccaguugcg

SEQ ID NO: 2925354 - RNA, 19 nt, Artificial Sequence
  Description of Artificial Sequence: Synthetic oligonucleotide
gggccuucugugaagacau

SEQ ID NO: 2925355 - RNA, 19 nt, Artificial Sequence
  Description of Artificial Sequence: Synthetic oligonucleotide
gcccacggggagcuuagga

SEQ ID NO: 2925356 - RNA, 19 nt, Artificial Sequence
  Description of Artificial Sequence: Synthetic oligonucleotide
agcuucgccugcaggucau

SEQ ID NO: 2925357 - RNA, 19 nt, Artificial Sequence
  Description of Artificial Sequence: Synthetic oligonucleotide
cucuccccagaggaaucca

SEQ ID NO: 2925358 - RNA, 19 nt, Artificial Sequence
  Description of Artificial Sequence: Synthetic oligonucleotide
cgcagccucuggauggcgc

SEQ ID NO: 2925359 - RNA, 19 nt, Artificial Sequence
  Description of Artificial Sequence: Synthetic oligonucleotide
cgaucuccugguagcgcag

SEQ ID NO: 2925360 - RNA, 19 nt, Artificial Sequence
  Description of Artificial Sequence: Synthetic oligonucleotide
caacuucccggcggccauc

SEQ ID NO: 2925361 - RNA, 19 nt, Artificial Sequence
  Description of Artificial Sequence: Synthetic oligonucleotide
ugcccgacaccagggccuu

SEQ ID NO: 2925362 - RNA, 19 nt, Artificial Sequence
  Description of Artificial Sequence: Synthetic oligonucleotide
gcugcguccgcuuggcgau

SEQ ID NO: 2925363 - RNA, 19 nt, Artificial Sequence
  Description of Artificial Sequence: Synthetic oligonucleotide
caugcccagacgcccaguu

SEQ ID NO: 2925364 - RNA, 19 nt, Artificial Sequence
  Description of Artificial Sequence: Synthetic oligonucleotide
cacagguauggcuggucuu

SEQ ID NO: 2925365 - RNA, 19 nt, Artificial Sequence
  Description of Artificial Sequence: Synthetic oligonucleotide
gcguagcagacgccauuuc

SEQ ID NO: 2925366 - RNA, 19 nt, Artificial Sequence
  Description of Artificial Sequence: Synthetic oligonucleotide
gaggaggcugcguccgcuu

SEQ ID NO: 2925367 - RNA, 19 nt, Artificial Sequence
  Description of Artificial Sequence: Synthetic oligonucleotide
cggggagcuuaggaggagg

SEQ ID NO: 2925368 - RNA, 19 nt, Artificial Sequence
  Description of Artificial Sequence: Synthetic oligonucleotide
ccucuucauuggaggacca

SEQ ID NO: 2925369 - RNA, 19 nt, Artificial Sequence
  Description of Artificial Sequence: Synthetic oligonucleotide
ggccaucacgagugcagua

SEQ ID NO: 2925370 - RNA, 19 nt, Artificial Sequence
  Description of Artificial Sequence: Synthetic oligonucleotide
gggcccacggggagcuuag

SEQ ID NO: 2925371 - RNA, 19 nt, Artificial Sequence
  Description of Artificial Sequence: Synthetic oligonucleotide
acgcccaguugcgcagccu

SEQ ID NO: 2925372 - RNA, 19 nt, Artificial Sequence
  Description of Artificial Sequence: Synthetic oligonucleotide
cgcccaguugcgcagccuc

SEQ ID NO: 2925373 - RNA, 19 nt, Artificial Sequence
  Description of Artificial Sequence: Synthetic oligonucleotide
gcgcgcguagcagacgcca

SEQ ID NO: 2925374 - RNA, 19 nt, Artificial Sequence
  Description of Artificial Sequence: Synthetic oligonucleotide
cguccgcuuggcgaucucc

SEQ ID NO: 2925375 - RNA, 19 nt, Artificial Sequence
  Description of Artificial Sequence: Synthetic oligonucleotide
cgucacugcuuucuuccca

SEQ ID NO: 2925376 - RNA, 19 nt, Artificial Sequence
  Description of Artificial Sequence: Synthetic oligonucleotide
ggcuggucuuuggacagcu

SEQ ID NO: 2925377 - RNA, 19 nt, Artificial Sequence
  Description of Artificial Sequence: Synthetic oligonucleotide
gcacaacuucccggcggcc

SEQ ID NO: 2925378 - RNA, 19 nt, Artificial Sequence
  Description of Artificial Sequence: Synthetic oligonucleotide
ccagggccuucugugaaga

SEQ ID NO: 2925379 - RNA, 19 nt, Artificial Sequence
  Description of Artificial Sequence: Synthetic oligonucleotide
cccggcaaagcagucugga

SEQ ID NO: 2925380 - RNA, 19 nt, Artificial Sequence
  Description of Artificial Sequence: Synthetic oligonucleotide
cccagacgcccaguugcgc

SEQ ID NO: 2925381 - RNA, 19 nt, Artificial Sequence
  Description of Artificial Sequence: Synthetic oligonucleotide
ggacccggcaaagcagucu

SEQ ID NO: 2925382 - RNA, 19 nt, Artificial Sequence
  Description of Artificial Sequence: Synthetic oligonucleotide
ccaucacgagugcaguagu

SEQ ID NO: 2925383 - RNA, 19 nt, Artificial Sequence
  Description of Artificial Sequence: Synthetic oligonucleotide
ggcggccaucacgagugca

SEQ ID NO: 2925384 - RNA, 19 nt, Artificial Sequence
  Description of Artificial Sequence: Synthetic oligonucleotide
gggagcuuaggaggaggcu

SEQ ID NO: 2925385 - RNA, 19 nt, Artificial Sequence
  Description of Artificial Sequence: Synthetic oligonucleotide
gcgcagccucuggauggcg

SEQ ID NO: 2925386 - RNA, 19 nt, Artificial Sequence
  Description of Artificial Sequence: Synthetic oligonucleotide
ccaggcgucacugcuuucu

SEQ ID NO: 2925387 - RNA, 19 nt, Artificial Sequence
  Description of Artificial Sequence: Synthetic oligonucleotide
gcuggucuuuggacagcuc

SEQ ID NO: 2925388 - RNA, 19 nt, Artificial Sequence
  Description of Artificial Sequence: Synthetic oligonucleotide
ggcgcgcguagcagacgcc

SEQ ID NO: 2925389 - RNA, 19 nt, Artificial Sequence
  Description of Artificial Sequence: Synthetic oligonucleotide
ggcccacggggagcuuagg

SEQ ID NO: 2925390 - RNA, 19 nt, Artificial Sequence
  Description of Artificial Sequence: Synthetic oligonucleotide
cugcguccgcuuggcgauc

SEQ ID NO: 2925391 - RNA, 19 nt, Artificial Sequence
  Description of Artificial Sequence: Synthetic oligonucleotide
gcuucgccugcaggucaug

SEQ ID NO: 2925392 - RNA, 19 nt, Artificial Sequence
  Description of Artificial Sequence: Synthetic oligonucleotide
ggaggaggcugcguccgcu

SEQ ID NO: 2925393 - RNA, 19 nt, Artificial Sequence
  Description of Artificial Sequence: Synthetic oligonucleotide
ccgacaccagggccuucug

SEQ ID NO: 2925394 - RNA, 19 nt, Artificial Sequence
  Description of Artificial Sequence: Synthetic oligonucleotide
cuggggcccacggggagcu

SEQ ID NO: 2925395 - RNA, 19 nt, Artificial Sequence
  Description of Artificial Sequence: Synthetic oligonucleotide
gguagcgcagcugcagcuu

SEQ ID NO: 2925396 - RNA, 19 nt, Artificial Sequence
  Description of Artificial Sequence: Synthetic oligonucleotide
caggcgucacugcuuucuu

SEQ ID NO: 2925397 - RNA, 19 nt, Artificial Sequence
  Description of Artificial Sequence: Synthetic oligonucleotide
gcuuggcgaucuccuggua

SEQ ID NO: 2925398 - RNA, 19 nt, Artificial Sequence
  Description of Artificial Sequence: Synthetic oligonucleotide
gcuuaggaggaggcugcgu

SEQ ID NO: 2925399 - RNA, 19 nt, Artificial Sequence
  Description of Artificial Sequence: Synthetic oligonucleotide
cgccugcaggucaugccca

SEQ ID NO: 2925400 - RNA, 19 nt, Artificial Sequence
  Description of Artificial Sequence: Synthetic oligonucleotide
cgagugcaguaguaauugu

SEQ ID NO: 2925401 - RNA, 19 nt, Artificial Sequence
  Description of Artificial Sequence: Synthetic oligonucleotide
ggggcccacggggagcuua

SEQ ID NO: 2925402 - RNA, 19 nt, Artificial Sequence
  Description of Artificial Sequence: Synthetic oligonucleotide
ggaccaggcgucacugcuu

SEQ ID NO: 2925403 - RNA, 19 nt, Artificial Sequence
  Description of Artificial Sequence: Synthetic oligonucleotide
ccugcaggucaugcccaga

SEQ ID NO: 2925404 - RNA, 19 nt, Artificial Sequence
  Description of Artificial Sequence: Synthetic oligonucleotide
cgcuuggcgaucuccuggu

SEQ ID NO: 2925405 - RNA, 19 nt, Artificial Sequence
  Description of Artificial Sequence: Synthetic oligonucleotide
gcgcguagcagacgccauu

SEQ ID NO: 2925406 - RNA, 19 nt, Artificial Sequence
  Description of Artificial Sequence: Synthetic oligonucleotide
ggccuucugugaagacaua

SEQ ID NO: 2925407 - RNA, 19 nt, Artificial Sequence
  Description of Artificial Sequence: Synthetic oligonucleotide
cccgacaccagggccuucu

SEQ ID NO: 2925408 - RNA, 19 nt, Artificial Sequence
  Description of Artificial Sequence: Synthetic oligonucleotide
cccggcggccaucacgagu

SEQ ID NO: 2925409 - RNA, 19 nt, Artificial Sequence
  Description of Artificial Sequence: Synthetic oligonucleotide
gcguccgcuuggcgaucuc

SEQ ID NO: 2925410 - RNA, 19 nt, Artificial Sequence
  Description of Artificial Sequence: Synthetic oligonucleotide
gcccaguugcgcagccucu

SEQ ID NO: 2925411 - RNA, 19 nt, Artificial Sequence
  Description of Artificial Sequence: Synthetic oligonucleotide
gccucuggauggcgcgcgu

SEQ ID NO: 2925412 - RNA, 19 nt, Artificial Sequence
  Description of Artificial Sequence: Synthetic oligonucleotide
uggggcccacggggagcuu

SEQ ID NO: 2925413 - RNA, 19 nt, Artificial Sequence
  Description of Artificial Sequence: Synthetic oligonucleotide
cggcggccaucacgagugc

SEQ ID NO: 2925414 - RNA, 19 nt, Artificial Sequence
  Description of Artificial Sequence: Synthetic oligonucleotide
ccucuggauggcgcgcgua

SEQ ID NO: 2925415 - RNA, 19 nt, Artificial Sequence
  Description of Artificial Sequence: Synthetic oligonucleotide
cgcguagcagacgccauuu

SEQ ID NO: 2925416 - RNA, 19 nt, Artificial Sequence
  Description of Artificial Sequence: Synthetic oligonucleotide
cggccaucacgagugcagu

SEQ ID NO: 2925417 - RNA, 19 nt, Artificial Sequence
  Description of Artificial Sequence: Synthetic oligonucleotide
gcccgacaccagggccuuc

SEQ ID NO: 2925418 - RNA, 19 nt, Artificial Sequence
  Description of Artificial Sequence: Synthetic oligonucleotide
cgcgcguagcagacgccau

SEQ ID NO: 2925419 - RNA, 19 nt, Artificial Sequence
  Description of Artificial Sequence: Synthetic oligonucleotide
aaagaugcaaagauuaucc

SEQ ID NO: 2925420 - RNA, 19 nt, Artificial Sequence
  Description of Artificial Sequence: Synthetic oligonucleotide
uucacauucugucagcagg

SEQ ID NO: 2925421 - RNA, 19 nt, Artificial Sequence
  Description of Artificial Sequence: Synthetic oligonucleotide
aaaagaugcaaagauuauc

SEQ ID NO: 2925422 - RNA, 19 nt, Artificial Sequence
  Description of Artificial Sequence: Synthetic oligonucleotide
uuuguucacauucugucag

SEQ ID NO: 2925423 - RNA, 19 nt, Artificial Sequence
  Description of Artificial Sequence: Synthetic oligonucleotide
aucccuuuuguucacauuc

SEQ ID NO: 2925424 - RNA, 19 nt, Artificial Sequence
  Description of Artificial Sequence: Synthetic oligonucleotide
aaagugguuaaucugggau

SEQ ID NO: 2925425 - RNA, 19 nt, Artificial Sequence
  Description of Artificial Sequence: Synthetic oligonucleotide
agggucuugauucuugagc

SEQ ID NO: 2925426 - RNA, 19 nt, Artificial Sequence
  Description of Artificial Sequence: Synthetic oligonucleotide
aaccccaucccuuuuguuc

SEQ ID NO: 2925427 - RNA, 19 nt, Artificial Sequence
  Description of Artificial Sequence: Synthetic oligonucleotide
caucucgucagcaugaggc

SEQ ID NO: 2925428 - RNA, 19 nt, Artificial Sequence
  Description of Artificial Sequence: Synthetic oligonucleotide
ugauucuugagcuucacaa

SEQ ID NO: 2925429 - RNA, 19 nt, Artificial Sequence
  Description of Artificial Sequence: Synthetic oligonucleotide
aucucaaccaccugccugc

SEQ ID NO: 2925430 - RNA, 19 nt, Artificial Sequence
  Description of Artificial Sequence: Synthetic oligonucleotide
aaggacucauuccucuccc

SEQ ID NO: 2925431 - RNA, 19 nt, Artificial Sequence
  Description of Artificial Sequence: Synthetic oligonucleotide
uuuccggagugucaggugg

SEQ ID NO: 2925432 - RNA, 19 nt, Artificial Sequence
  Description of Artificial Sequence: Synthetic oligonucleotide
guuaaucugggauuuccgg

SEQ ID NO: 2925433 - RNA, 19 nt, Artificial Sequence
  Description of Artificial Sequence: Synthetic oligonucleotide
cuuuuguucacauucuguc

SEQ ID NO: 2925434 - RNA, 19 nt, Artificial Sequence
  Description of Artificial Sequence: Synthetic oligonucleotide
auuuggucaggguuggcac

SEQ ID NO: 2925435 - RNA, 19 nt, Artificial Sequence
  Description of Artificial Sequence: Synthetic oligonucleotide
uugagcuucacaaugucau

SEQ ID NO: 2925436 - RNA, 19 nt, Artificial Sequence
  Description of Artificial Sequence: Synthetic oligonucleotide
aguaguggagguccaggcc

SEQ ID NO: 2925437 - RNA, 19 nt, Artificial Sequence
  Description of Artificial Sequence: Synthetic oligonucleotide
acuccuuggguuuugaggu

SEQ ID NO: 2925438 - RNA, 19 nt, Artificial Sequence
  Description of Artificial Sequence: Synthetic oligonucleotide
gauaacuggcccugcagag

SEQ ID NO: 2925439 - RNA, 19 nt, Artificial Sequence
  Description of Artificial Sequence: Synthetic oligonucleotide
uccgauuuggucaggguug

SEQ ID NO: 2925440 - RNA, 19 nt, Artificial Sequence
  Description of Artificial Sequence: Synthetic oligonucleotide
uuuuguucacauucuguca

SEQ ID NO: 2925441 - RNA, 19 nt, Artificial Sequence
  Description of Artificial Sequence: Synthetic oligonucleotide
uccuugagggucuugauuc

SEQ ID NO: 2925442 - RNA, 19 nt, Artificial Sequence
  Description of Artificial Sequence: Synthetic oligonucleotide
ucugugaaggacucauucc

SEQ ID NO: 2925443 - RNA, 19 nt, Artificial Sequence
  Description of Artificial Sequence: Synthetic oligonucleotide
ugauaacuggcccugcaga

SEQ ID NO: 2925444 - RNA, 19 nt, Artificial Sequence
  Description of Artificial Sequence: Synthetic oligonucleotide
uucugugaaggacucauuc

SEQ ID NO: 2925445 - RNA, 19 nt, Artificial Sequence
  Description of Artificial Sequence: Synthetic oligonucleotide
gauaucucaaccaccugcc

SEQ ID NO: 2925446 - RNA, 19 nt, Artificial Sequence
  Description of Artificial Sequence: Synthetic oligonucleotide
uaucucaaccaccugccug

SEQ ID NO: 2925447 - RNA, 19 nt, Artificial Sequence
  Description of Artificial Sequence: Synthetic oligonucleotide
aagaugcaaagauuaucca

SEQ ID NO: 2925448 - RNA, 19 nt, Artificial Sequence
  Description of Artificial Sequence: Synthetic oligonucleotide
uaacuggcccugcagagcc

SEQ ID NO: 2925449 - RNA, 19 nt, Artificial Sequence
  Description of Artificial Sequence: Synthetic oligonucleotide
acaaaagaugcaaagauua

SEQ ID NO: 2925450 - RNA, 19 nt, Artificial Sequence
  Description of Artificial Sequence: Synthetic oligonucleotide
ucucucucagugcugauaa

SEQ ID NO: 2925451 - RNA, 19 nt, Artificial Sequence
  Description of Artificial Sequence: Synthetic oligonucleotide
ucaggguuggcacuccuug

SEQ ID NO: 2925452 - RNA, 19 nt, Artificial Sequence
  Description of Artificial Sequence: Synthetic oligonucleotide
uggguuuugaggugccugg

SEQ ID NO: 2925453 - RNA, 19 nt, Artificial Sequence
  Description of Artificial Sequence: Synthetic oligonucleotide
ucaaccaccugccugcagu

SEQ ID NO: 2925454 - RNA, 19 nt, Artificial Sequence
  Description of Artificial Sequence: Synthetic oligonucleotide
aaaagugguuaaucuggga

SEQ ID NO: 2925455 - RNA, 19 nt, Artificial Sequence
  Description of Artificial Sequence: Synthetic oligonucleotide
cucagugcugauaacuggc

SEQ ID NO: 2925456 - RNA, 19 nt, Artificial Sequence
  Description of Artificial Sequence: Synthetic oligonucleotide
gaugcaaagauuauccaaa

SEQ ID NO: 2925457 - RNA, 19 nt, Artificial Sequence
  Description of Artificial Sequence: Synthetic oligonucleotide
agaugcaaagauuauccaa

SEQ ID NO: 2925458 - RNA, 19 nt, Artificial Sequence
  Description of Artificial Sequence: Synthetic oligonucleotide
guaguggagguccaggccc

SEQ ID NO: 2925459 - RNA, 19 nt, Artificial Sequence
  Description of Artificial Sequence: Synthetic oligonucleotide
accuucuccgauuugguca

SEQ ID NO: 2925460 - RNA, 19 nt, Artificial Sequence
  Description of Artificial Sequence: Synthetic oligonucleotide
cuugggaacagccuccuug

SEQ ID NO: 2925461 - RNA, 19 nt, Artificial Sequence
  Description of Artificial Sequence: Synthetic oligonucleotide
gaaggacucauuccucucc

SEQ ID NO: 2925462 - RNA, 19 nt, Artificial Sequence
  Description of Artificial Sequence: Synthetic oligonucleotide
ggauaucucaaccaccugc

SEQ ID NO: 2925463 - RNA, 19 nt, Artificial Sequence
  Description of Artificial Sequence: Synthetic oligonucleotide
uuucuccugggcuucagca

SEQ ID NO: 2925464 - RNA, 19 nt, Artificial Sequence
  Description of Artificial Sequence: Synthetic oligonucleotide
aagugguuaaucugggauu

SEQ ID NO: 2925465 - RNA, 19 nt, Artificial Sequence
  Description of Artificial Sequence: Synthetic oligonucleotide
uucuugagcuucacaaugu

SEQ ID NO: 2925466 - RNA, 19 nt, Artificial Sequence
  Description of Artificial Sequence: Synthetic oligonucleotide
uucagcaugggucucucuc

SEQ ID NO: 2925467 - RNA, 19 nt, Artificial Sequence
  Description of Artificial Sequence: Synthetic oligonucleotide
uuccucuccccacaaaaga

SEQ ID NO: 2925468 - RNA, 19 nt, Artificial Sequence
  Description of Artificial Sequence: Synthetic oligonucleotide
ucagugcugauaacuggcc

SEQ ID NO: 2925469 - RNA, 19 nt, Artificial Sequence
  Description of Artificial Sequence: Synthetic oligonucleotide
uuugaggugccugggaagc

SEQ ID NO: 2925470 - RNA, 19 nt, Artificial Sequence
  Description of Artificial Sequence: Synthetic oligonucleotide
uugggaacagccuccuugc

SEQ ID NO: 2925471 - RNA, 19 nt, Artificial Sequence
  Description of Artificial Sequence: Synthetic oligonucleotide
cuuccaguaguggaggucc

SEQ ID NO: 2925472 - RNA, 19 nt, Artificial Sequence
  Description of Artificial Sequence: Synthetic oligonucleotide
ucacauucugucagcaggu

SEQ ID NO: 2925473 - RNA, 19 nt, Artificial Sequence
  Description of Artificial Sequence: Synthetic oligonucleotide
agugcugauaacuggcccu

SEQ ID NO: 2925474 - RNA, 19 nt, Artificial Sequence
  Description of Artificial Sequence: Synthetic oligonucleotide
gagcuucacaaugucaucc

SEQ ID NO: 2925475 - RNA, 19 nt, Artificial Sequence
  Description of Artificial Sequence: Synthetic oligonucleotide
acaucgguuugccaccuuc

SEQ ID NO: 2925476 - RNA, 19 nt, Artificial Sequence
  Description of Artificial Sequence: Synthetic oligonucleotide
ucucucagugcugauaacu

SEQ ID NO: 2925477 - RNA, 19 nt, Artificial Sequence
  Description of Artificial Sequence: Synthetic oligonucleotide
auaacuggcccugcagagc

SEQ ID NO: 2925478 - RNA, 19 nt, Artificial Sequence
  Description of Artificial Sequence: Synthetic oligonucleotide
cugggcuucagcauggguc

SEQ ID NO: 2925479 - RNA, 19 nt, Artificial Sequence
  Description of Artificial Sequence: Synthetic oligonucleotide
ugguuaaucugggauuucc

SEQ ID NO: 2925480 - RNA, 19 nt, Artificial Sequence
  Description of Artificial Sequence: Synthetic oligonucleotide
ucgguuugccaccuucucc

SEQ ID NO: 2925481 - RNA, 19 nt, Artificial Sequence
  Description of Artificial Sequence: Synthetic oligonucleotide
ugucaggcuggauaucuca

SEQ ID NO: 2925482 - RNA, 19 nt, Artificial Sequence
  Description of Artificial Sequence: Synthetic oligonucleotide
aggguuggcacuccuuggg

SEQ ID NO: 2925483 - RNA, 19 nt, Artificial Sequence
  Description of Artificial Sequence: Synthetic oligonucleotide
uuuccuuccuugagggucu

SEQ ID NO: 2925484 - RNA, 19 nt, Artificial Sequence
  Description of Artificial Sequence: Synthetic oligonucleotide
ucuugauucuugagcuuca

SEQ ID NO: 2925485 - RNA, 19 nt, Artificial Sequence
  Description of Artificial Sequence: Synthetic oligonucleotide
uugauucuugagcuucaca

SEQ ID NO: 2925486 - RNA, 19 nt, Artificial Sequence
  Description of Artificial Sequence: Synthetic oligonucleotide
caggcuggauaucucaacc

SEQ ID NO: 2925487 - RNA, 19 nt, Artificial Sequence
  Description of Artificial Sequence: Synthetic oligonucleotide
acaaugucauccucuuucu

SEQ ID NO: 2925488 - RNA, 19 nt, Artificial Sequence
  Description of Artificial Sequence: Synthetic oligonucleotide
agcagguguucugucaggc

SEQ ID NO: 2925489 - RNA, 19 nt, Artificial Sequence
  Description of Artificial Sequence: Synthetic oligonucleotide
aguggucgcaucucgucag

SEQ ID NO: 2925490 - RNA, 19 nt, Artificial Sequence
  Description of Artificial Sequence: Synthetic oligonucleotide
ucugucaggcuggauaucu

SEQ ID NO: 2925491 - RNA, 19 nt, Artificial Sequence
  Description of Artificial Sequence: Synthetic oligonucleotide
cucucagugcugauaacug

SEQ ID NO: 2925492 - RNA, 19 nt, Artificial Sequence
  Description of Artificial Sequence: Synthetic oligonucleotide
agcaugaggcagugcuucc

SEQ ID NO: 2925493 - RNA, 19 nt, Artificial Sequence
  Description of Artificial Sequence: Synthetic oligonucleotide
agugcuuccaguaguggag

SEQ ID NO: 2925494 - RNA, 19 nt, Artificial Sequence
  Description of Artificial Sequence: Synthetic oligonucleotide
ggaacagccuccuugcagc

SEQ ID NO: 2925495 - RNA, 19 nt, Artificial Sequence
  Description of Artificial Sequence: Synthetic oligonucleotide
aaucugggauuuccggagu

SEQ ID NO: 2925496 - RNA, 19 nt, Artificial Sequence
  Description of Artificial Sequence: Synthetic oligonucleotide
ugugaaggacucauuccuc

SEQ ID NO: 2925497 - RNA, 19 nt, Artificial Sequence
  Description of Artificial Sequence: Synthetic oligonucleotide
gguggcacuucccaaaccc

SEQ ID NO: 2925498 - RNA, 19 nt, Artificial Sequence
  Description of Artificial Sequence: Synthetic oligonucleotide
gaggcagugcuuccaguag

SEQ ID NO: 2925499 - RNA, 19 nt, Artificial Sequence
  Description of Artificial Sequence: Synthetic oligonucleotide
cagguguucugucaggcug

SEQ ID NO: 2925500 - RNA, 19 nt, Artificial Sequence
  Description of Artificial Sequence: Synthetic oligonucleotide
ucugucagcagguguucug

SEQ ID NO: 2925501 - RNA, 19 nt, Artificial Sequence
  Description of Artificial Sequence: Synthetic oligonucleotide
augggucucucucagugcu

SEQ ID NO: 2925502 - RNA, 19 nt, Artificial Sequence
  Description of Artificial Sequence: Synthetic oligonucleotide
aggacucauuccucucccc

SEQ ID NO: 2925503 - RNA, 19 nt, Artificial Sequence
  Description of Artificial Sequence: Synthetic oligonucleotide
uuguucacauucugucagc

SEQ ID NO: 2925504 - RNA, 19 nt, Artificial Sequence
  Description of Artificial Sequence: Synthetic oligonucleotide
aucgguuugccaccuucuc

SEQ ID NO: 2925505 - RNA, 19 nt, Artificial Sequence
  Description of Artificial Sequence: Synthetic oligonucleotide
uggcacuucccaaacccca

SEQ ID NO: 2925506 - RNA, 19 nt, Artificial Sequence
  Description of Artificial Sequence: Synthetic oligonucleotide
cagcuuuccuuccuugagg

SEQ ID NO: 2925507 - RNA, 19 nt, Artificial Sequence
  Description of Artificial Sequence: Synthetic oligonucleotide
caguaguggagguccaggc

SEQ ID NO: 2925508 - RNA, 19 nt, Artificial Sequence
  Description of Artificial Sequence: Synthetic oligonucleotide
acauucugucagcaggugu

SEQ ID NO: 2925509 - RNA, 19 nt, Artificial Sequence
  Description of Artificial Sequence: Synthetic oligonucleotide
gauuuggucaggguuggca

SEQ ID NO: 2925510 - RNA, 19 nt, Artificial Sequence
  Description of Artificial Sequence: Synthetic oligonucleotide
cugauaacuggcccugcag

SEQ ID NO: 2925511 - RNA, 19 nt, Artificial Sequence
  Description of Artificial Sequence: Synthetic oligonucleotide
ugagggucuugauucuuga

SEQ ID NO: 2925512 - RNA, 19 nt, Artificial Sequence
  Description of Artificial Sequence: Synthetic oligonucleotide
ucccuuuuguucacauucu

SEQ ID NO: 2925513 - RNA, 19 nt, Artificial Sequence
  Description of Artificial Sequence: Synthetic oligonucleotide
gaacagccuccuugcagcg

SEQ ID NO: 2925514 - RNA, 19 nt, Artificial Sequence
  Description of Artificial Sequence: Synthetic oligonucleotide
accccaucccuuuuguuca

SEQ ID NO: 2925515 - RNA, 19 nt, Artificial Sequence
  Description of Artificial Sequence: Synthetic oligonucleotide
cugggaagcuccuccuugg

SEQ ID NO: 2925516 - RNA, 19 nt, Artificial Sequence
  Description of Artificial Sequence: Synthetic oligonucleotide
uuccggagugucagguggg

SEQ ID NO: 2925517 - RNA, 19 nt, Artificial Sequence
  Description of Artificial Sequence: Synthetic oligonucleotide
uucuccgauuuggucaggg

SEQ ID NO: 2925518 - RNA, 19 nt, Artificial Sequence
  Description of Artificial Sequence: Synthetic oligonucleotide
ucgcaucucgucagcauga

SEQ ID NO: 2925519 - RNA, 19 nt, Artificial Sequence
  Description of Artificial Sequence: Synthetic oligonucleotide
ugggauuuccggaguguca

SEQ ID NO: 2925520 - RNA, 19 nt, Artificial Sequence
  Description of Artificial Sequence: Synthetic oligonucleotide
ugggaagcuccuccuuggg

SEQ ID NO: 2925521 - RNA, 19 nt, Artificial Sequence
  Description of Artificial Sequence: Synthetic oligonucleotide
uuuggucaggguuggcacu

SEQ ID NO: 2925522 - RNA, 19 nt, Artificial Sequence
  Description of Artificial Sequence: Synthetic oligonucleotide
cacuucccaaaccccaucc

SEQ ID NO: 2925523 - RNA, 19 nt, Artificial Sequence
  Description of Artificial Sequence: Synthetic oligonucleotide
ucaggcuggauaucucaac

SEQ ID NO: 2925524 - RNA, 19 nt, Artificial Sequence
  Description of Artificial Sequence: Synthetic oligonucleotide
ugaggcagugcuuccagua

SEQ ID NO: 2925525 - RNA, 19 nt, Artificial Sequence
  Description of Artificial Sequence: Synthetic oligonucleotide
guucacauucugucagcag

SEQ ID NO: 2925526 - RNA, 19 nt, Artificial Sequence
  Description of Artificial Sequence: Synthetic oligonucleotide
uuggguuuugaggugccug

SEQ ID NO: 2925527 - RNA, 19 nt, Artificial Sequence
  Description of Artificial Sequence: Synthetic oligonucleotide
agcuucacaaugucauccu

SEQ ID NO: 2925528 - RNA, 19 nt, Artificial Sequence
  Description of Artificial Sequence: Synthetic oligonucleotide
ugucagguggggcagcuuu

SEQ ID NO: 2925529 - RNA, 19 nt, Artificial Sequence
  Description of Artificial Sequence: Synthetic oligonucleotide
augcaaagauuauccaaaa

SEQ ID NO: 2925530 - RNA, 19 nt, Artificial Sequence
  Description of Artificial Sequence: Synthetic oligonucleotide
gagggucuugauucuugag

SEQ ID NO: 2925531 - RNA, 19 nt, Artificial Sequence
  Description of Artificial Sequence: Synthetic oligonucleotide
gucgcaucucgucagcaug

SEQ ID NO: 2925532 - RNA, 19 nt, Artificial Sequence
  Description of Artificial Sequence: Synthetic oligonucleotide
ucucgucagcaugaggcag

SEQ ID NO: 2925533 - RNA, 19 nt, Artificial Sequence
  Description of Artificial Sequence: Synthetic oligonucleotide
gucagcaugaggcagugcu

SEQ ID NO: 2925534 - RNA, 19 nt, Artificial Sequence
  Description of Artificial Sequence: Synthetic oligonucleotide
uggauaucucaaccaccug

SEQ ID NO: 2925535 - RNA, 19 nt, Artificial Sequence
  Description of Artificial Sequence: Synthetic oligonucleotide
caugaggcagugcuuccag

SEQ ID NO: 2925536 - RNA, 19 nt, Artificial Sequence
  Description of Artificial Sequence: Synthetic oligonucleotide
caugggucucucucagugc

SEQ ID NO: 2925537 - RNA, 19 nt, Artificial Sequence
  Description of Artificial Sequence: Synthetic oligonucleotide
uuugccaccuucuccgauu

SEQ ID NO: 2925538 - RNA, 19 nt, Artificial Sequence
  Description of Artificial Sequence: Synthetic oligonucleotide
gguuaaucugggauuuccg

SEQ ID NO: 2925539 - RNA, 19 nt, Artificial Sequence
  Description of Artificial Sequence: Synthetic oligonucleotide
guuuugaggugccugggaa

SEQ ID NO: 2925540 - RNA, 19 nt, Artificial Sequence
  Description of Artificial Sequence: Synthetic oligonucleotide
auuuccggagugucaggug

SEQ ID NO: 2925541 - RNA, 19 nt, Artificial Sequence
  Description of Artificial Sequence: Synthetic oligonucleotide
acagccuccuugcagcggu

SEQ ID NO: 2925542 - RNA, 19 nt, Artificial Sequence
  Description of Artificial Sequence: Synthetic oligonucleotide
aggcccucuucugugaagg

SEQ ID NO: 2925543 - RNA, 19 nt, Artificial Sequence
  Description of Artificial Sequence: Synthetic oligonucleotide
ugaaggacucauuccucuc

SEQ ID NO: 2925544 - RNA, 19 nt, Artificial Sequence
  Description of Artificial Sequence: Synthetic oligonucleotide
cagugcugauaacuggccc

SEQ ID NO: 2925545 - RNA, 19 nt, Artificial Sequence
  Description of Artificial Sequence: Synthetic oligonucleotide
cuccuugggaacagccucc

SEQ ID NO: 2925546 - RNA, 19 nt, Artificial Sequence
  Description of Artificial Sequence: Synthetic oligonucleotide
ugagcuucacaaugucauc

SEQ ID NO: 2925547 - RNA, 19 nt, Artificial Sequence
  Description of Artificial Sequence: Synthetic oligonucleotide
aggcuggauaucucaacca

SEQ ID NO: 2925548 - RNA, 19 nt, Artificial Sequence
  Description of Artificial Sequence: Synthetic oligonucleotide
agugguuaaucugggauuu

SEQ ID NO: 2925549 - RNA, 19 nt, Artificial Sequence
  Description of Artificial Sequence: Synthetic oligonucleotide
acucauuccucuccccaca

SEQ ID NO: 2925550 - RNA, 19 nt, Artificial Sequence
  Description of Artificial Sequence: Synthetic oligonucleotide
uccucuuucuccugggcuu

SEQ ID NO: 2925551 - RNA, 19 nt, Artificial Sequence
  Description of Artificial Sequence: Synthetic oligonucleotide
gaagcuccuccuugggaac

SEQ ID NO: 2925552 - RNA, 19 nt, Artificial Sequence
  Description of Artificial Sequence: Synthetic oligonucleotide
aucucgucagcaugaggca

SEQ ID NO: 2925553 - RNA, 19 nt, Artificial Sequence
  Description of Artificial Sequence: Synthetic oligonucleotide
auucugucagcagguguuc

SEQ ID NO: 2925554 - RNA, 19 nt, Artificial Sequence
  Description of Artificial Sequence: Synthetic oligonucleotide
aucugggauuuccggagug

SEQ ID NO: 2925555 - RNA, 19 nt, Artificial Sequence
  Description of Artificial Sequence: Synthetic oligonucleotide
cuggauaucucaaccaccu

SEQ ID NO: 2925556 - RNA, 19 nt, Artificial Sequence
  Description of Artificial Sequence: Synthetic oligonucleotide
gcaugggucucucucagug

SEQ ID NO: 2925557 - RNA, 19 nt, Artificial Sequence
  Description of Artificial Sequence: Synthetic oligonucleotide
auaucucaaccaccugccu

SEQ ID NO: 2925558 - RNA, 19 nt, Artificial Sequence
  Description of Artificial Sequence: Synthetic oligonucleotide
cauuccucuccccacaaaa

SEQ ID NO: 2925559 - RNA, 19 nt, Artificial Sequence
  Description of Artificial Sequence: Synthetic oligonucleotide
caggguuggcacuccuugg

SEQ ID NO: 2925560 - RNA, 19 nt, Artificial Sequence
  Description of Artificial Sequence: Synthetic oligonucleotide
aacagccuccuugcagcgg

SEQ ID NO: 2925561 - RNA, 19 nt, Artificial Sequence
  Description of Artificial Sequence: Synthetic oligonucleotide
gauucuugagcuucacaau

SEQ ID NO: 2925562 - RNA, 19 nt, Artificial Sequence
  Description of Artificial Sequence: Synthetic oligonucleotide
ucuccccacaaaagaugca

SEQ ID NO: 2925563 - RNA, 19 nt, Artificial Sequence
  Description of Artificial Sequence: Synthetic oligonucleotide
cugcaguggucgcaucucg

SEQ ID NO: 2925564 - RNA, 19 nt, Artificial Sequence
  Description of Artificial Sequence: Synthetic oligonucleotide
ugcaguggucgcaucucgu

SEQ ID NO: 2925565 - RNA, 19 nt, Artificial Sequence
  Description of Artificial Sequence: Synthetic oligonucleotide
ugcagagccuucaucucuu

SEQ ID NO: 2925566 - RNA, 19 nt, Artificial Sequence
  Description of Artificial Sequence: Synthetic oligonucleotide
gggaacagccuccuugcag

SEQ ID NO: 2925567 - RNA, 19 nt, Artificial Sequence
  Description of Artificial Sequence: Synthetic oligonucleotide
aggcagugcuuccaguagu

SEQ ID NO: 2925568 - RNA, 19 nt, Artificial Sequence
  Description of Artificial Sequence: Synthetic oligonucleotide
gggauuuccggagugucag

SEQ ID NO: 2925569 - RNA, 19 nt, Artificial Sequence
  Description of Artificial Sequence: Synthetic oligonucleotide
ucagguggggcagcuuucc

SEQ ID NO: 2925570 - RNA, 19 nt, Artificial Sequence
  Description of Artificial Sequence: Synthetic oligonucleotide
gugccugggaagcuccucc

SEQ ID NO: 2925571 - RNA, 19 nt, Artificial Sequence
  Description of Artificial Sequence: Synthetic oligonucleotide
ucuccgauuuggucagggu

SEQ ID NO: 2925572 - RNA, 19 nt, Artificial Sequence
  Description of Artificial Sequence: Synthetic oligonucleotide
ggcuggauaucucaaccac

SEQ ID NO: 2925573 - RNA, 19 nt, Artificial Sequence
  Description of Artificial Sequence: Synthetic oligonucleotide
gccaccuucuccgauuugg

SEQ ID NO: 2925574 - RNA, 19 nt, Artificial Sequence
  Description of Artificial Sequence: Synthetic oligonucleotide
cugugaaggacucauuccu

SEQ ID NO: 2925575 - RNA, 19 nt, Artificial Sequence
  Description of Artificial Sequence: Synthetic oligonucleotide
ggaagcuccuccuugggaa

SEQ ID NO: 2925576 - RNA, 19 nt, Artificial Sequence
  Description of Artificial Sequence: Synthetic oligonucleotide
gugcuuccaguaguggagg

SEQ ID NO: 2925577 - RNA, 19 nt, Artificial Sequence
  Description of Artificial Sequence: Synthetic oligonucleotide
cauccucuuucuccugggc

SEQ ID NO: 2925578 - RNA, 19 nt, Artificial Sequence
  Description of Artificial Sequence: Synthetic oligonucleotide
cagugcuuccaguagugga

SEQ ID NO: 2925579 - RNA, 19 nt, Artificial Sequence
  Description of Artificial Sequence: Synthetic oligonucleotide
cgguuugccaccuucuccg

SEQ ID NO: 2925580 - RNA, 19 nt, Artificial Sequence
  Description of Artificial Sequence: Synthetic oligonucleotide
gucagcagguguucuguca

SEQ ID NO: 2925581 - RNA, 19 nt, Artificial Sequence
  Description of Artificial Sequence: Synthetic oligonucleotide
uccggagugucaggugggg

SEQ ID NO: 2925582 - RNA, 19 nt, Artificial Sequence
  Description of Artificial Sequence: Synthetic oligonucleotide
aaaccccaucccuuuuguu

SEQ ID NO: 2925583 - RNA, 19 nt, Artificial Sequence
  Description of Artificial Sequence: Synthetic oligonucleotide
cagcaugggucucucucag

SEQ ID NO: 2925584 - RNA, 19 nt, Artificial Sequence
  Description of Artificial Sequence: Synthetic oligonucleotide
ugcagcgguggcacuuccc

SEQ ID NO: 2925585 - RNA, 19 nt, Artificial Sequence
  Description of Artificial Sequence: Synthetic oligonucleotide
gggucuugauucuugagcu

SEQ ID NO: 2925586 - RNA, 19 nt, Artificial Sequence
  Description of Artificial Sequence: Synthetic oligonucleotide
cagcagguguucugucagg

SEQ ID NO: 2925587 - RNA, 19 nt, Artificial Sequence
  Description of Artificial Sequence: Synthetic oligonucleotide
caaccaccugccugcagug

SEQ ID NO: 2925588 - RNA, 19 nt, Artificial Sequence
  Description of Artificial Sequence: Synthetic oligonucleotide
ugggucucucucagugcug

SEQ ID NO: 2925589 - RNA, 19 nt, Artificial Sequence
  Description of Artificial Sequence: Synthetic oligonucleotide
gugaaggacucauuccucu

SEQ ID NO: 2925590 - RNA, 19 nt, Artificial Sequence
  Description of Artificial Sequence: Synthetic oligonucleotide
uuggucaggguuggcacuc

SEQ ID NO: 2925591 - RNA, 19 nt, Artificial Sequence
  Description of Artificial Sequence: Synthetic oligonucleotide
cagcaugaggcagugcuuc

SEQ ID NO: 2925592 - RNA, 19 nt, Artificial Sequence
  Description of Artificial Sequence: Synthetic oligonucleotide
ugggaacagccuccuugca

SEQ ID NO: 2925593 - RNA, 19 nt, Artificial Sequence
  Description of Artificial Sequence: Synthetic oligonucleotide
ccuucuccgauuuggucag

SEQ ID NO: 2925594 - RNA, 19 nt, Artificial Sequence
  Description of Artificial Sequence: Synthetic oligonucleotide
uccaggcccucuucuguga

SEQ ID NO: 2925595 - RNA, 19 nt, Artificial Sequence
  Description of Artificial Sequence: Synthetic oligonucleotide
guucugucaggcuggauau

SEQ ID NO: 2925596 - RNA, 19 nt, Artificial Sequence
  Description of Artificial Sequence: Synthetic oligonucleotide
gauuuccggagugucaggu

SEQ ID NO: 2925597 - RNA, 19 nt, Artificial Sequence
  Description of Artificial Sequence: Synthetic oligonucleotide
ugcuuccaguaguggaggu

SEQ ID NO: 2925598 - RNA, 19 nt, Artificial Sequence
  Description of Artificial Sequence: Synthetic oligonucleotide
gguggggcagcuuuccuuc

SEQ ID NO: 2925599 - RNA, 19 nt, Artificial Sequence
  Description of Artificial Sequence: Synthetic oligonucleotide
ugucagcagguguucuguc

SEQ ID NO: 2925600 - RNA, 19 nt, Artificial Sequence
  Description of Artificial Sequence: Synthetic oligonucleotide
agguccaggcccucuucug

SEQ ID NO: 2925601 - RNA, 19 nt, Artificial Sequence
  Description of Artificial Sequence: Synthetic oligonucleotide
uggggcagcuuuccuuccu

SEQ ID NO: 2925602 - RNA, 19 nt, Artificial Sequence
  Description of Artificial Sequence: Synthetic oligonucleotide
cacaaaagaugcaaagauu

SEQ ID NO: 2925603 - RNA, 19 nt, Artificial Sequence
  Description of Artificial Sequence: Synthetic oligonucleotide
accugccugcaguggucgc

SEQ ID NO: 2925604 - RNA, 19 nt, Artificial Sequence
  Description of Artificial Sequence: Synthetic oligonucleotide
gaggugccugggaagcucc

SEQ ID NO: 2925605 - RNA, 19 nt, Artificial Sequence
  Description of Artificial Sequence: Synthetic oligonucleotide
caccuucuccgauuugguc

SEQ ID NO: 2925606 - RNA, 19 nt, Artificial Sequence
  Description of Artificial Sequence: Synthetic oligonucleotide
caaaagaugcaaagauuau

SEQ ID NO: 2925607 - RNA, 19 nt, Artificial Sequence
  Description of Artificial Sequence: Synthetic oligonucleotide
ugaggugccugggaagcuc

SEQ ID NO: 2925608 - RNA, 19 nt, Artificial Sequence
  Description of Artificial Sequence: Synthetic oligonucleotide
uugccaccuucuccgauuu

SEQ ID NO: 2925609 - RNA, 19 nt, Artificial Sequence
  Description of Artificial Sequence: Synthetic oligonucleotide
gcuggauaucucaaccacc

SEQ ID NO: 2925610 - RNA, 19 nt, Artificial Sequence
  Description of Artificial Sequence: Synthetic oligonucleotide
uucugucagcagguguucu

SEQ ID NO: 2925611 - RNA, 19 nt, Artificial Sequence
  Description of Artificial Sequence: Synthetic oligonucleotide
gugcugauaacuggcccug

SEQ ID NO: 2925612 - RNA, 19 nt, Artificial Sequence
  Description of Artificial Sequence: Synthetic oligonucleotide
cauucugucagcagguguu

SEQ ID NO: 2925613 - RNA, 19 nt, Artificial Sequence
  Description of Artificial Sequence: Synthetic oligonucleotide
ucgucagcaugaggcagug

SEQ ID NO: 2925614 - RNA, 19 nt, Artificial Sequence
  Description of Artificial Sequence: Synthetic oligonucleotide
ggauuuccggagugucagg

SEQ ID NO: 2925615 - RNA, 19 nt, Artificial Sequence
  Description of Artificial Sequence: Synthetic oligonucleotide
cugggauuuccggaguguc

SEQ ID NO: 2925616 - RNA, 19 nt, Artificial Sequence
  Description of Artificial Sequence: Synthetic oligonucleotide
uugcagcgguggcacuucc

SEQ ID NO: 2925617 - RNA, 19 nt, Artificial Sequence
  Description of Artificial Sequence: Synthetic oligonucleotide
guggcacuucccaaacccc

SEQ ID NO: 2925618 - RNA, 19 nt, Artificial Sequence
  Description of Artificial Sequence: Synthetic oligonucleotide
ugccugggaagcuccuccu

SEQ ID NO: 2925619 - RNA, 19 nt, Artificial Sequence
  Description of Artificial Sequence: Synthetic oligonucleotide
ggacucauuccucucccca

SEQ ID NO: 2925620 - RNA, 19 nt, Artificial Sequence
  Description of Artificial Sequence: Synthetic oligonucleotide
agguggggcagcuuuccuu

SEQ ID NO: 2925621 - RNA, 19 nt, Artificial Sequence
  Description of Artificial Sequence: Synthetic oligonucleotide
cuccccacaaaagaugcaa

SEQ ID NO: 2925622 - RNA, 19 nt, Artificial Sequence
  Description of Artificial Sequence: Synthetic oligonucleotide
caccugccugcaguggucg

SEQ ID NO: 2925623 - RNA, 19 nt, Artificial Sequence
  Description of Artificial Sequence: Synthetic oligonucleotide
ugcugauaacuggcccugc

SEQ ID NO: 2925624 - RNA, 19 nt, Artificial Sequence
  Description of Artificial Sequence: Synthetic oligonucleotide
caguggucgcaucucguca

SEQ ID NO: 2925625 - RNA, 19 nt, Artificial Sequence
  Description of Artificial Sequence: Synthetic oligonucleotide
gcaucucgucagcaugagg

SEQ ID NO: 2925626 - RNA, 19 nt, Artificial Sequence
  Description of Artificial Sequence: Synthetic oligonucleotide
cacauucugucagcaggug

SEQ ID NO: 2925627 - RNA, 19 nt, Artificial Sequence
  Description of Artificial Sequence: Synthetic oligonucleotide
cucucucagugcugauaac

SEQ ID NO: 2925628 - RNA, 19 nt, Artificial Sequence
  Description of Artificial Sequence: Synthetic oligonucleotide
gguuuugaggugccuggga

SEQ ID NO: 2925629 - RNA, 19 nt, Artificial Sequence
  Description of Artificial Sequence: Synthetic oligonucleotide
agcaugggucucucucagu

SEQ ID NO: 2925630 - RNA, 19 nt, Artificial Sequence
  Description of Artificial Sequence: Synthetic oligonucleotide
uccuugggaacagccuccu

SEQ ID NO: 2925631 - RNA, 19 nt, Artificial Sequence
  Description of Artificial Sequence: Synthetic oligonucleotide
uggucgcaucucgucagca

SEQ ID NO: 2925632 - RNA, 19 nt, Artificial Sequence
  Description of Artificial Sequence: Synthetic oligonucleotide
ccuccuugggaacagccuc

SEQ ID NO: 2925633 - RNA, 19 nt, Artificial Sequence
  Description of Artificial Sequence: Synthetic oligonucleotide
caggcccucuucugugaag

SEQ ID NO: 2925634 - RNA, 19 nt, Artificial Sequence
  Description of Artificial Sequence: Synthetic oligonucleotide
uggagguccaggcccucuu

SEQ ID NO: 2925635 - RNA, 19 nt, Artificial Sequence
  Description of Artificial Sequence: Synthetic oligonucleotide
guggucgcaucucgucagc

SEQ ID NO: 2925636 - RNA, 19 nt, Artificial Sequence
  Description of Artificial Sequence: Synthetic oligonucleotide
ggagugucagguggggcag

SEQ ID NO: 2925637 - RNA, 19 nt, Artificial Sequence
  Description of Artificial Sequence: Synthetic oligonucleotide
uugaggugccugggaagcu

SEQ ID NO: 2925638 - RNA, 19 nt, Artificial Sequence
  Description of Artificial Sequence: Synthetic oligonucleotide
agccuccuugcagcggugg

SEQ ID NO: 2925639 - RNA, 19 nt, Artificial Sequence
  Description of Artificial Sequence: Synthetic oligonucleotide
ccaguaguggagguccagg

SEQ ID NO: 2925640 - RNA, 19 nt, Artificial Sequence
  Description of Artificial Sequence: Synthetic oligonucleotide
agcuccuccuugggaacag

SEQ ID NO: 2925641 - RNA, 19 nt, Artificial Sequence
  Description of Artificial Sequence: Synthetic oligonucleotide
ccacaaaagaugcaaagau

SEQ ID NO: 2925642 - RNA, 19 nt, Artificial Sequence
  Description of Artificial Sequence: Synthetic oligonucleotide
ggguuuugaggugccuggg

SEQ ID NO: 2925643 - RNA, 19 nt, Artificial Sequence
  Description of Artificial Sequence: Synthetic oligonucleotide
ccugggaagcuccuccuug

SEQ ID NO: 2925644 - RNA, 19 nt, Artificial Sequence
  Description of Artificial Sequence: Synthetic oligonucleotide
cucaaccaccugccugcag

SEQ ID NO: 2925645 - RNA, 19 nt, Artificial Sequence
  Description of Artificial Sequence: Synthetic oligonucleotide
ggcagugcuuccaguagug

SEQ ID NO: 2925646 - RNA, 19 nt, Artificial Sequence
  Description of Artificial Sequence: Synthetic oligonucleotide
ucucaaccaccugccugca

SEQ ID NO: 2925647 - RNA, 19 nt, Artificial Sequence
  Description of Artificial Sequence: Synthetic oligonucleotide
ugccaccuucuccgauuug

SEQ ID NO: 2925648 - RNA, 19 nt, Artificial Sequence
  Description of Artificial Sequence: Synthetic oligonucleotide
gcugauaacuggcccugca

SEQ ID NO: 2925649 - RNA, 19 nt, Artificial Sequence
  Description of Artificial Sequence: Synthetic oligonucleotide
cuugcagcgguggcacuuc

SEQ ID NO: 2925650 - RNA, 19 nt, Artificial Sequence
  Description of Artificial Sequence: Synthetic oligonucleotide
cccuuuuguucacauucug

SEQ ID NO: 2925651 - RNA, 19 nt, Artificial Sequence
  Description of Artificial Sequence: Synthetic oligonucleotide
gcagcgguggcacuuccca

SEQ ID NO: 2925652 - RNA, 19 nt, Artificial Sequence
  Description of Artificial Sequence: Synthetic oligonucleotide
gcagugcuuccaguagugg

SEQ ID NO: 2925653 - RNA, 19 nt, Artificial Sequence
  Description of Artificial Sequence: Synthetic oligonucleotide
gcaguggucgcaucucguc

SEQ ID NO: 2925654 - RNA, 19 nt, Artificial Sequence
  Description of Artificial Sequence: Synthetic oligonucleotide
guuggcacuccuuggguuu

SEQ ID NO: 2925655 - RNA, 19 nt, Artificial Sequence
  Description of Artificial Sequence: Synthetic oligonucleotide
guggggcagcuuuccuucc

SEQ ID NO: 2925656 - RNA, 19 nt, Artificial Sequence
  Description of Artificial Sequence: Synthetic oligonucleotide
cccacaaaagaugcaaaga

SEQ ID NO: 2925657 - RNA, 19 nt, Artificial Sequence
  Description of Artificial Sequence: Synthetic oligonucleotide
uucugucaggcuggauauc

SEQ ID NO: 2925658 - RNA, 19 nt, Artificial Sequence
  Description of Artificial Sequence: Synthetic oligonucleotide
uggucaggguuggcacucc

SEQ ID NO: 2925659 - RNA, 19 nt, Artificial Sequence
  Description of Artificial Sequence: Synthetic oligonucleotide
caucgguuugccaccuucu

SEQ ID NO: 2925660 - RNA, 19 nt, Artificial Sequence
  Description of Artificial Sequence: Synthetic oligonucleotide
cuccgauuuggucaggguu

SEQ ID NO: 2925661 - RNA, 19 nt, Artificial Sequence
  Description of Artificial Sequence: Synthetic oligonucleotide
ccucuucugugaaggacuc

SEQ ID NO: 2925662 - RNA, 19 nt, Artificial Sequence
  Description of Artificial Sequence: Synthetic oligonucleotide
gucaggcuggauaucucaa

SEQ ID NO: 2925663 - RNA, 19 nt, Artificial Sequence
  Description of Artificial Sequence: Synthetic oligonucleotide
cugcagagccuucaucucu

SEQ ID NO: 2925664 - RNA, 19 nt, Artificial Sequence
  Description of Artificial Sequence: Synthetic oligonucleotide
ccgauuuggucaggguugg

SEQ ID NO: 2925665 - RNA, 19 nt, Artificial Sequence
  Description of Artificial Sequence: Synthetic oligonucleotide
cucgucagcaugaggcagu

SEQ ID NO: 2925666 - RNA, 19 nt, Artificial Sequence
  Description of Artificial Sequence: Synthetic oligonucleotide
gggaagcuccuccuuggga

SEQ ID NO: 2925667 - RNA, 19 nt, Artificial Sequence
  Description of Artificial Sequence: Synthetic oligonucleotide
gagugucagguggggcagc

SEQ ID NO: 2925668 - RNA, 19 nt, Artificial Sequence
  Description of Artificial Sequence: Synthetic oligonucleotide
caaaccccaucccuuuugu

SEQ ID NO: 2925669 - RNA, 19 nt, Artificial Sequence
  Description of Artificial Sequence: Synthetic oligonucleotide
uuggcacuccuuggguuuu

SEQ ID NO: 2925670 - RNA, 19 nt, Artificial Sequence
  Description of Artificial Sequence: Synthetic oligonucleotide
ccuuuuguucacauucugu

SEQ ID NO: 2925671 - RNA, 19 nt, Artificial Sequence
  Description of Artificial Sequence: Synthetic oligonucleotide
gugguuaaucugggauuuc

SEQ ID NO: 2925672 - RNA, 19 nt, Artificial Sequence
  Description of Artificial Sequence: Synthetic oligonucleotide
cuucuccgauuuggucagg

SEQ ID NO: 2925673 - RNA, 19 nt, Artificial Sequence
  Description of Artificial Sequence: Synthetic oligonucleotide
uccuugcagcgguggcacu

SEQ ID NO: 2925674 - RNA, 19 nt, Artificial Sequence
  Description of Artificial Sequence: Synthetic oligonucleotide
cccugcagagccuucaucu

SEQ ID NO: 2925675 - RNA, 19 nt, Artificial Sequence
  Description of Artificial Sequence: Synthetic oligonucleotide
uggcacuccuuggguuuug

SEQ ID NO: 2925676 - RNA, 19 nt, Artificial Sequence
  Description of Artificial Sequence: Synthetic oligonucleotide
gucagguggggcagcuuuc

SEQ ID NO: 2925677 - RNA, 19 nt, Artificial Sequence
  Description of Artificial Sequence: Synthetic oligonucleotide
gggucucucucagugcuga

SEQ ID NO: 2925678 - RNA, 19 nt, Artificial Sequence
  Description of Artificial Sequence: Synthetic oligonucleotide
aacuggcccugcagagccu

SEQ ID NO: 2925679 - RNA, 19 nt, Artificial Sequence
  Description of Artificial Sequence: Synthetic oligonucleotide
gcccucuucugugaaggac

SEQ ID NO: 2925680 - RNA, 19 nt, Artificial Sequence
  Description of Artificial Sequence: Synthetic oligonucleotide
gcuuccaguaguggagguc

SEQ ID NO: 2925681 - RNA, 19 nt, Artificial Sequence
  Description of Artificial Sequence: Synthetic oligonucleotide
cugucagcagguguucugu

SEQ ID NO: 2925682 - RNA, 19 nt, Artificial Sequence
  Description of Artificial Sequence: Synthetic oligonucleotide
gguuugccaccuucuccga

SEQ ID NO: 2925683 - RNA, 19 nt, Artificial Sequence
  Description of Artificial Sequence: Synthetic oligonucleotide
gcacuucccaaaccccauc

SEQ ID NO: 2925684 - RNA, 19 nt, Artificial Sequence
  Description of Artificial Sequence: Synthetic oligonucleotide
cccucuucugugaaggacu

SEQ ID NO: 2925685 - RNA, 19 nt, Artificial Sequence
  Description of Artificial Sequence: Synthetic oligonucleotide
gccuccuugcagcgguggc

SEQ ID NO: 2925686 - RNA, 19 nt, Artificial Sequence
  Description of Artificial Sequence: Synthetic oligonucleotide
cggagugucagguggggca

SEQ ID NO: 2925687 - RNA, 19 nt, Artificial Sequence
  Description of Artificial Sequence: Synthetic oligonucleotide
guuugccaccuucuccgau

SEQ ID NO: 2925688 - RNA, 19 nt, Artificial Sequence
  Description of Artificial Sequence: Synthetic oligonucleotide
gguccaggcccucuucugu

SEQ ID NO: 2925689 - RNA, 19 nt, Artificial Sequence
  Description of Artificial Sequence: Synthetic oligonucleotide
cagagccuucaucucuucu

SEQ ID NO: 2925690 - RNA, 19 nt, Artificial Sequence
  Description of Artificial Sequence: Synthetic oligonucleotide
gcaugaggcagugcuucca

SEQ ID NO: 2925691 - RNA, 19 nt, Artificial Sequence
  Description of Artificial Sequence: Synthetic oligonucleotide
cagccuccuugcagcggug

SEQ ID NO: 2925692 - RNA, 19 nt, Artificial Sequence
  Description of Artificial Sequence: Synthetic oligonucleotide
ugccugcaguggucgcauc

SEQ ID NO: 2925693 - RNA, 19 nt, Artificial Sequence
  Description of Artificial Sequence: Synthetic oligonucleotide
cuucugugaaggacucauu

SEQ ID NO: 2925694 - RNA, 19 nt, Artificial Sequence
  Description of Artificial Sequence: Synthetic oligonucleotide
gguuggcacuccuuggguu

SEQ ID NO: 2925695 - RNA, 19 nt, Artificial Sequence
  Description of Artificial Sequence: Synthetic oligonucleotide
cagcgguggcacuucccaa

SEQ ID NO: 2925696 - RNA, 19 nt, Artificial Sequence
  Description of Artificial Sequence: Synthetic oligonucleotide
caucccuuuuguucacauu

SEQ ID NO: 2925697 - RNA, 19 nt, Artificial Sequence
  Description of Artificial Sequence: Synthetic oligonucleotide
ccaccugccugcagugguc

SEQ ID NO: 2925698 - RNA, 19 nt, Artificial Sequence
  Description of Artificial Sequence: Synthetic oligonucleotide
gcuucagcaugggucucuc

SEQ ID NO: 2925699 - RNA, 19 nt, Artificial Sequence
  Description of Artificial Sequence: Synthetic oligonucleotide
ccucuuucuccugggcuuc

SEQ ID NO: 2925700 - RNA, 19 nt, Artificial Sequence
  Description of Artificial Sequence: Synthetic oligonucleotide
cucuuucuccugggcuuca

SEQ ID NO: 2925701 - RNA, 19 nt, Artificial Sequence
  Description of Artificial Sequence: Synthetic oligonucleotide
ggguuggcacuccuugggu

SEQ ID NO: 2925702 - RNA, 19 nt, Artificial Sequence
  Description of Artificial Sequence: Synthetic oligonucleotide
gcagguguucugucaggcu

SEQ ID NO: 2925703 - RNA, 19 nt, Artificial Sequence
  Description of Artificial Sequence: Synthetic oligonucleotide
ggcccucuucugugaagga

SEQ ID NO: 2925704 - RNA, 19 nt, Artificial Sequence
  Description of Artificial Sequence: Synthetic oligonucleotide
ggugccugggaagcuccuc

SEQ ID NO: 2925705 - RNA, 19 nt, Artificial Sequence
  Description of Artificial Sequence: Synthetic oligonucleotide
ggucgcaucucgucagcau

SEQ ID NO: 2925706 - RNA, 19 nt, Artificial Sequence
  Description of Artificial Sequence: Synthetic oligonucleotide
cuucagcaugggucucucu

SEQ ID NO: 2925707 - RNA, 19 nt, Artificial Sequence
  Description of Artificial Sequence: Synthetic oligonucleotide
cuuggguuuugaggugccu

SEQ ID NO: 2925708 - RNA, 19 nt, Artificial Sequence
  Description of Artificial Sequence: Synthetic oligonucleotide
gccugcaguggucgcaucu

SEQ ID NO: 2925709 - RNA, 19 nt, Artificial Sequence
  Description of Artificial Sequence: Synthetic oligonucleotide
ggucuugauucuugagcuu

SEQ ID NO: 2925710 - RNA, 19 nt, Artificial Sequence
  Description of Artificial Sequence: Synthetic oligonucleotide
aggugccugggaagcuccu

SEQ ID NO: 2925711 - RNA, 19 nt, Artificial Sequence
  Description of Artificial Sequence: Synthetic oligonucleotide
cuugagggucuugauucuu

SEQ ID NO: 2925712 - RNA, 19 nt, Artificial Sequence
  Description of Artificial Sequence: Synthetic oligonucleotide
ccggagugucagguggggc

SEQ ID NO: 2925713 - RNA, 19 nt, Artificial Sequence
  Description of Artificial Sequence: Synthetic oligonucleotide
uuccuuccuugagggucuu

SEQ ID NO: 2925714 - RNA, 19 nt, Artificial Sequence
  Description of Artificial Sequence: Synthetic oligonucleotide
ccccaucccuuuuguucac

SEQ ID NO: 2925715 - RNA, 19 nt, Artificial Sequence
  Description of Artificial Sequence: Synthetic oligonucleotide
ggcacuccuuggguuuuga

SEQ ID NO: 2925716 - RNA, 19 nt, Artificial Sequence
  Description of Artificial Sequence: Synthetic oligonucleotide
cgguggcacuucccaaacc

SEQ ID NO: 2925717 - RNA, 19 nt, Artificial Sequence
  Description of Artificial Sequence: Synthetic oligonucleotide
ccuugagggucuugauucu

SEQ ID NO: 2925718 - RNA, 19 nt, Artificial Sequence
  Description of Artificial Sequence: Synthetic oligonucleotide
gacaucgguuugccaccuu

SEQ ID NO: 2925719 - RNA, 19 nt, Artificial Sequence
  Description of Artificial Sequence: Synthetic oligonucleotide
cgcaucucgucagcaugag

SEQ ID NO: 2925720 - RNA, 19 nt, Artificial Sequence
  Description of Artificial Sequence: Synthetic oligonucleotide
cagguggggcagcuuuccu

SEQ ID NO: 2925721 - RNA, 19 nt, Artificial Sequence
  Description of Artificial Sequence: Synthetic oligonucleotide
ccaccuucuccgauuuggu

SEQ ID NO: 2925722 - RNA, 19 nt, Artificial Sequence
  Description of Artificial Sequence: Synthetic oligonucleotide
ggcacuucccaaaccccau

SEQ ID NO: 2925723 - RNA, 19 nt, Artificial Sequence
  Description of Artificial Sequence: Synthetic oligonucleotide
ggacaucgguuugccaccu

SEQ ID NO: 2925724 - RNA, 19 nt, Artificial Sequence
  Description of Artificial Sequence: Synthetic oligonucleotide
ccaucccuuuuguucacau

SEQ ID NO: 2925725 - RNA, 19 nt, Artificial Sequence
  Description of Artificial Sequence: Synthetic oligonucleotide
cugccugcaguggucgcau

SEQ ID NO: 2925726 - RNA, 19 nt, Artificial Sequence
  Description of Artificial Sequence: Synthetic oligonucleotide
ccaggcccucuucugugaa

SEQ ID NO: 2925727 - RNA, 19 nt, Artificial Sequence
  Description of Artificial Sequence: Synthetic oligonucleotide
cgauuuggucaggguuggc

SEQ ID NO: 2925728 - RNA, 19 nt, Artificial Sequence
  Description of Artificial Sequence: Synthetic oligonucleotide
gggcuucagcaugggucuc

SEQ ID NO: 2925729 - RNA, 19 nt, Artificial Sequence
  Description of Artificial Sequence: Synthetic oligonucleotide
ggucucucucagugcugau

SEQ ID NO: 2925730 - RNA, 19 nt, Artificial Sequence
  Description of Artificial Sequence: Synthetic oligonucleotide
cccaucccuuuuguucaca

SEQ ID NO: 2925731 - RNA, 19 nt, Artificial Sequence
  Description of Artificial Sequence: Synthetic oligonucleotide
cgucagcaugaggcagugc

SEQ ID NO: 2925732 - RNA, 19 nt, Artificial Sequence
  Description of Artificial Sequence: Synthetic oligonucleotide
guguucugucaggcuggau

SEQ ID NO: 2925733 - RNA, 19 nt, Artificial Sequence
  Description of Artificial Sequence: Synthetic oligonucleotide
ccugggcuucagcaugggu

SEQ ID NO: 2925734 - RNA, 19 nt, Artificial Sequence
  Description of Artificial Sequence: Synthetic oligonucleotide
gccugggaagcuccuccuu

SEQ ID NO: 2925735 - RNA, 19 nt, Artificial Sequence
  Description of Artificial Sequence: Synthetic oligonucleotide
gugucagguggggcagcuu

SEQ ID NO: 2925736 - RNA, 19 nt, Artificial Sequence
  Description of Artificial Sequence: Synthetic oligonucleotide
ccuugcagcgguggcacuu

SEQ ID NO: 2925737 - RNA, 19 nt, Artificial Sequence
  Description of Artificial Sequence: Synthetic oligonucleotide
ccuugggaacagccuccuu

SEQ ID NO: 2925738 - RNA, 19 nt, Artificial Sequence
  Description of Artificial Sequence: Synthetic oligonucleotide
gagcacauaauccacagag

SEQ ID NO: 2925739 - RNA, 19 nt, Artificial Sequence
  Description of Artificial Sequence: Synthetic oligonucleotide
aaaggggccacgcaggccg

SEQ ID NO: 2925740 - RNA, 19 nt, Artificial Sequence
  Description of Artificial Sequence: Synthetic oligonucleotide
uaaggcaguagccugcucg

SEQ ID NO: 2925741 - RNA, 19 nt, Artificial Sequence
  Description of Artificial Sequence: Synthetic oligonucleotide
ugagcuaucacugaagcgu

SEQ ID NO: 2925742 - RNA, 19 nt, Artificial Sequence
  Description of Artificial Sequence: Synthetic oligonucleotide
aagagcacauaauccacag

SEQ ID NO: 2925743 - RNA, 19 nt, Artificial Sequence
  Description of Artificial Sequence: Synthetic oligonucleotide
ucuucugaugggcuggacg

SEQ ID NO: 2925744 - RNA, 19 nt, Artificial Sequence
  Description of Artificial Sequence: Synthetic oligonucleotide
aguaggaacgggcagcccg

SEQ ID NO: 2925745 - RNA, 19 nt, Artificial Sequence
  Description of Artificial Sequence: Synthetic oligonucleotide
agcggaagagcacauaauc

SEQ ID NO: 2925746 - RNA, 19 nt, Artificial Sequence
  Description of Artificial Sequence: Synthetic oligonucleotide
cugagcaggaguaggaacg

SEQ ID NO: 2925747 - RNA, 19 nt, Artificial Sequence
  Description of Artificial Sequence: Synthetic oligonucleotide
aagggacugucuucaaagg

SEQ ID NO: 2925748 - RNA, 19 nt, Artificial Sequence
  Description of Artificial Sequence: Synthetic oligonucleotide
gcacauaauccacagagcg

SEQ ID NO: 2925749 - RNA, 19 nt, Artificial Sequence
  Description of Artificial Sequence: Synthetic oligonucleotide
cuucugaugggcuggacgc

SEQ ID NO: 2925750 - RNA, 19 nt, Artificial Sequence
  Description of Artificial Sequence: Synthetic oligonucleotide
ugaagcgucgagcuggggc

SEQ ID NO: 2925751 - RNA, 19 nt, Artificial Sequence
  Description of Artificial Sequence: Synthetic oligonucleotide
aaggcaguagccugcucgg

SEQ ID NO: 2925752 - RNA, 19 nt, Artificial Sequence
  Description of Artificial Sequence: Synthetic oligonucleotide
uaauccacagagcgcacag

SEQ ID NO: 2925753 - RNA, 19 nt, Artificial Sequence
  Description of Artificial Sequence: Synthetic oligonucleotide
uggaguuccagcaggcaag

SEQ ID NO: 2925754 - RNA, 19 nt, Artificial Sequence
  Description of Artificial Sequence: Synthetic oligonucleotide
acauaauccacagagcgca

SEQ ID NO: 2925755 - RNA, 19 nt, Artificial Sequence
  Description of Artificial Sequence: Synthetic oligonucleotide
aucacugaagcgucgagcu

SEQ ID NO: 2925756 - RNA, 19 nt, Artificial Sequence
  Description of Artificial Sequence: Synthetic oligonucleotide
ggcaagagucuucugaugg

SEQ ID NO: 2925757 - RNA, 19 nt, Artificial Sequence
  Description of Artificial Sequence: Synthetic oligonucleotide
gaagcaaggccccacccag

SEQ ID NO: 2925758 - RNA, 19 nt, Artificial Sequence
  Description of Artificial Sequence: Synthetic oligonucleotide
agggacugucuucaaaggg

SEQ ID NO: 2925759 - RNA, 19 nt, Artificial Sequence
  Description of Artificial Sequence: Synthetic oligonucleotide
acugcgagcagcugugggg

SEQ ID NO: 2925760 - RNA, 19 nt, Artificial Sequence
  Description of Artificial Sequence: Synthetic oligonucleotide
auccacagagcgcacagag

SEQ ID NO: 2925761 - RNA, 19 nt, Artificial Sequence
  Description of Artificial Sequence: Synthetic oligonucleotide
cuucaaaggggccacgcag

SEQ ID NO: 2925762 - RNA, 19 nt, Artificial Sequence
  Description of Artificial Sequence: Synthetic oligonucleotide
aguuccagcaggcaagagu

SEQ ID NO: 2925763 - RNA, 19 nt, Artificial Sequence
  Description of Artificial Sequence: Synthetic oligonucleotide
cacauaauccacagagcgc

SEQ ID NO: 2925764 - RNA, 19 nt, Artificial Sequence
  Description of Artificial Sequence: Synthetic oligonucleotide
aacugcgagcagcuguggg

SEQ ID NO: 2925765 - RNA, 19 nt, Artificial Sequence
  Description of Artificial Sequence: Synthetic oligonucleotide
aggaguaggaacgggcagc

SEQ ID NO: 2925766 - RNA, 19 nt, Artificial Sequence
  Description of Artificial Sequence: Synthetic oligonucleotide
gacccgucgccucagcucg

SEQ ID NO: 2925767 - RNA, 19 nt, Artificial Sequence
  Description of Artificial Sequence: Synthetic oligonucleotide
accgguggcaacugcgagc

SEQ ID NO: 2925768 - RNA, 19 nt, Artificial Sequence
  Description of Artificial Sequence: Synthetic oligonucleotide
agcaggaguaggaacgggc

SEQ ID NO: 2925769 - RNA, 19 nt, Artificial Sequence
  Description of Artificial Sequence: Synthetic oligonucleotide
cacugaagcgucgagcugg

SEQ ID NO: 2925770 - RNA, 19 nt, Artificial Sequence
  Description of Artificial Sequence: Synthetic oligonucleotide
uaucacugaagcgucgagc

SEQ ID NO: 2925771 - RNA, 19 nt, Artificial Sequence
  Description of Artificial Sequence: Synthetic oligonucleotide
ucagcucggggaagcaagg

SEQ ID NO: 2925772 - RNA, 19 nt, Artificial Sequence
  Description of Artificial Sequence: Synthetic oligonucleotide
cuguggggcacccaguggg

SEQ ID NO: 2925773 - RNA, 19 nt, Artificial Sequence
  Description of Artificial Sequence: Synthetic oligonucleotide
uggggcucgggcaggaggg

SEQ ID NO: 2925774 - RNA, 19 nt, Artificial Sequence
  Description of Artificial Sequence: Synthetic oligonucleotide
gaggccagcccuccaaccg

SEQ ID NO: 2925775 - RNA, 19 nt, Artificial Sequence
  Description of Artificial Sequence: Synthetic oligonucleotide
cugagcuaucacugaagcg

SEQ ID NO: 2925776 - RNA, 19 nt, Artificial Sequence
  Description of Artificial Sequence: Synthetic oligonucleotide
ucuucaaaggggccacgca

SEQ ID NO: 2925777 - RNA, 19 nt, Artificial Sequence
  Description of Artificial Sequence: Synthetic oligonucleotide
ucaaaggggccacgcaggc

SEQ ID NO: 2925778 - RNA, 19 nt, Artificial Sequence
  Description of Artificial Sequence: Synthetic oligonucleotide
gucaccgaauggcugacag

SEQ ID NO: 2925779 - RNA, 19 nt, Artificial Sequence
  Description of Artificial Sequence: Synthetic oligonucleotide
caaggccccacccagggag

SEQ ID NO: 2925780 - RNA, 19 nt, Artificial Sequence
  Description of Artificial Sequence: Synthetic oligonucleotide
cucagcucggggaagcaag

SEQ ID NO: 2925781 - RNA, 19 nt, Artificial Sequence
  Description of Artificial Sequence: Synthetic oligonucleotide
guuccagcaggcaagaguc

SEQ ID NO: 2925782 - RNA, 19 nt, Artificial Sequence
  Description of Artificial Sequence: Synthetic oligonucleotide
aaccugagcuaucacugaa

SEQ ID NO: 2925783 - RNA, 19 nt, Artificial Sequence
  Description of Artificial Sequence: Synthetic oligonucleotide
gggacugucuucaaagggg

SEQ ID NO: 2925784 - RNA, 19 nt, Artificial Sequence
  Description of Artificial Sequence: Synthetic oligonucleotide
aaccgguggcaacugcgag

SEQ ID NO: 2925785 - RNA, 19 nt, Artificial Sequence
  Description of Artificial Sequence: Synthetic oligonucleotide
caagagucuucugaugggc

SEQ ID NO: 2925786 - RNA, 19 nt, Artificial Sequence
  Description of Artificial Sequence: Synthetic oligonucleotide
ucaggggcugagcaggagu

SEQ ID NO: 2925787 - RNA, 19 nt, Artificial Sequence
  Description of Artificial Sequence: Synthetic oligonucleotide
uguggggcacccagugggg

SEQ ID NO: 2925788 - RNA, 19 nt, Artificial Sequence
  Description of Artificial Sequence: Synthetic oligonucleotide
gauggagcggaagagcaca

SEQ ID NO: 2925789 - RNA, 19 nt, Artificial Sequence
  Description of Artificial Sequence: Synthetic oligonucleotide
ggaaccugagcuaucacug

SEQ ID NO: 2925790 - RNA, 19 nt, Artificial Sequence
  Description of Artificial Sequence: Synthetic oligonucleotide
acugucuucaaaggggcca

SEQ ID NO: 2925791 - RNA, 19 nt, Artificial Sequence
  Description of Artificial Sequence: Synthetic oligonucleotide
aggcuaaggcaguagccug

SEQ ID NO: 2925792 - RNA, 19 nt, Artificial Sequence
  Description of Artificial Sequence: Synthetic oligonucleotide
gaagagcacauaauccaca

SEQ ID NO: 2925793 - RNA, 19 nt, Artificial Sequence
  Description of Artificial Sequence: Synthetic oligonucleotide
ucugaugggcuggacgccc

SEQ ID NO: 2925794 - RNA, 19 nt, Artificial Sequence
  Description of Artificial Sequence: Synthetic oligonucleotide
uccucuggggacccgucgc

SEQ ID NO: 2925795 - RNA, 19 nt, Artificial Sequence
  Description of Artificial Sequence: Synthetic oligonucleotide
aagagucuucugaugggcu

SEQ ID NO: 2925796 - RNA, 19 nt, Artificial Sequence
  Description of Artificial Sequence: Synthetic oligonucleotide
ucacugaagcgucgagcug

SEQ ID NO: 2925797 - RNA, 19 nt, Artificial Sequence
  Description of Artificial Sequence: Synthetic oligonucleotide
caccgaauggcugacagca

SEQ ID NO: 2925798 - RNA, 19 nt, Artificial Sequence
  Description of Artificial Sequence: Synthetic oligonucleotide
gcaagagucuucugauggg

SEQ ID NO: 2925799 - RNA, 19 nt, Artificial Sequence
  Description of Artificial Sequence: Synthetic oligonucleotide
uggcaagggacugucuuca

SEQ ID NO: 2925800 - RNA, 19 nt, Artificial Sequence
  Description of Artificial Sequence: Synthetic oligonucleotide
gaggccggugccccggugg

SEQ ID NO: 2925801 - RNA, 19 nt, Artificial Sequence
  Description of Artificial Sequence: Synthetic oligonucleotide
ucaccgaauggcugacagc

SEQ ID NO: 2925802 - RNA, 19 nt, Artificial Sequence
  Description of Artificial Sequence: Synthetic oligonucleotide
acggucaccgaauggcuga

SEQ ID NO: 2925803 - RNA, 19 nt, Artificial Sequence
  Description of Artificial Sequence: Synthetic oligonucleotide
cuaucacugaagcgucgag

SEQ ID NO: 2925804 - RNA, 19 nt, Artificial Sequence
  Description of Artificial Sequence: Synthetic oligonucleotide
agcuguggggcacccagug

SEQ ID NO: 2925805 - RNA, 19 nt, Artificial Sequence
  Description of Artificial Sequence: Synthetic oligonucleotide
ccugagcuaucacugaagc

SEQ ID NO: 2925806 - RNA, 19 nt, Artificial Sequence
  Description of Artificial Sequence: Synthetic oligonucleotide
agagcacauaauccacaga

SEQ ID NO: 2925807 - RNA, 19 nt, Artificial Sequence
  Description of Artificial Sequence: Synthetic oligonucleotide
gaagcgucgagcuggggcu

SEQ ID NO: 2925808 - RNA, 19 nt, Artificial Sequence
  Description of Artificial Sequence: Synthetic oligonucleotide
aggccagcccuccaaccgg

SEQ ID NO: 2925809 - RNA, 19 nt, Artificial Sequence
  Description of Artificial Sequence: Synthetic oligonucleotide
agggaaccugagcuaucac

SEQ ID NO: 2925810 - RNA, 19 nt, Artificial Sequence
  Description of Artificial Sequence: Synthetic oligonucleotide
cacagagcccuggaguucc

SEQ ID NO: 2925811 - RNA, 19 nt, Artificial Sequence
  Description of Artificial Sequence: Synthetic oligonucleotide
gaaccugagcuaucacuga

SEQ ID NO: 2925812 - RNA, 19 nt, Artificial Sequence
  Description of Artificial Sequence: Synthetic oligonucleotide
cuggauggagcggaagagc

SEQ ID NO: 2925813 - RNA, 19 nt, Artificial Sequence
  Description of Artificial Sequence: Synthetic oligonucleotide
ggaacgggcagcccgcggg

SEQ ID NO: 2925814 - RNA, 19 nt, Artificial Sequence
  Description of Artificial Sequence: Synthetic oligonucleotide
caggaguaggaacgggcag

SEQ ID NO: 2925815 - RNA, 19 nt, Artificial Sequence
  Description of Artificial Sequence: Synthetic oligonucleotide
gaacgggcagcccgcgggg

SEQ ID NO: 2925816 - RNA, 19 nt, Artificial Sequence
  Description of Artificial Sequence: Synthetic oligonucleotide
ugagcggcugccuccucug

SEQ ID NO: 2925817 - RNA, 19 nt, Artificial Sequence
  Description of Artificial Sequence: Synthetic oligonucleotide
auaauccacagagcgcaca

SEQ ID NO: 2925818 - RNA, 19 nt, Artificial Sequence
  Description of Artificial Sequence: Synthetic oligonucleotide
agcggcugccuccucuggg

SEQ ID NO: 2925819 - RNA, 19 nt, Artificial Sequence
  Description of Artificial Sequence: Synthetic oligonucleotide
agcgcacagagcccuggag

SEQ ID NO: 2925820 - RNA, 19 nt, Artificial Sequence
  Description of Artificial Sequence: Synthetic oligonucleotide
cauaauccacagagcgcac

SEQ ID NO: 2925821 - RNA, 19 nt, Artificial Sequence
  Description of Artificial Sequence: Synthetic oligonucleotide
uccaaccgguggcaacugc

SEQ ID NO: 2925822 - RNA, 19 nt, Artificial Sequence
  Description of Artificial Sequence: Synthetic oligonucleotide
cacagagcgcacagagccc

SEQ ID NO: 2925823 - RNA, 19 nt, Artificial Sequence
  Description of Artificial Sequence: Synthetic oligonucleotide
cuggggcucgggcaggagg

SEQ ID NO: 2925824 - RNA, 19 nt, Artificial Sequence
  Description of Artificial Sequence: Synthetic oligonucleotide
gcaggcaagagucuucuga

SEQ ID NO: 2925825 - RNA, 19 nt, Artificial Sequence
  Description of Artificial Sequence: Synthetic oligonucleotide
gggacggucaccgaauggc

SEQ ID NO: 2925826 - RNA, 19 nt, Artificial Sequence
  Description of Artificial Sequence: Synthetic oligonucleotide
gagggaaccugagcuauca

SEQ ID NO: 2925827 - RNA, 19 nt, Artificial Sequence
  Description of Artificial Sequence: Synthetic oligonucleotide
cucggggaagcaaggcccc

SEQ ID NO: 2925828 - RNA, 19 nt, Artificial Sequence
  Description of Artificial Sequence: Synthetic oligonucleotide
acagagcgcacagagcccu

SEQ ID NO: 2925829 - RNA, 19 nt, Artificial Sequence
  Description of Artificial Sequence: Synthetic oligonucleotide
ugucuucaaaggggccacg

SEQ ID NO: 2925830 - RNA, 19 nt, Artificial Sequence
  Description of Artificial Sequence: Synthetic oligonucleotide
cugcgagcagcuguggggc

SEQ ID NO: 2925831 - RNA, 19 nt, Artificial Sequence
  Description of Artificial Sequence: Synthetic oligonucleotide
agcccuggaguuccagcag

SEQ ID NO: 2925832 - RNA, 19 nt, Artificial Sequence
  Description of Artificial Sequence: Synthetic oligonucleotide
gcggaagagcacauaaucc

SEQ ID NO: 2925833 - RNA, 19 nt, Artificial Sequence
  Description of Artificial Sequence: Synthetic oligonucleotide
aauccacagagcgcacaga

SEQ ID NO: 2925834 - RNA, 19 nt, Artificial Sequence
  Description of Artificial Sequence: Synthetic oligonucleotide
ccaaccgguggcaacugcg

SEQ ID NO: 2925835 - RNA, 19 nt, Artificial Sequence
  Description of Artificial Sequence: Synthetic oligonucleotide
aagcaaggccccacccagg

SEQ ID NO: 2925836 - RNA, 19 nt, Artificial Sequence
  Description of Artificial Sequence: Synthetic oligonucleotide
ucggcugcgcuggauggag

SEQ ID NO: 2925837 - RNA, 19 nt, Artificial Sequence
  Description of Artificial Sequence: Synthetic oligonucleotide
gacggucaccgaauggcug

SEQ ID NO: 2925838 - RNA, 19 nt, Artificial Sequence
  Description of Artificial Sequence: Synthetic oligonucleotide
accugagcuaucacugaag

SEQ ID NO: 2925839 - RNA, 19 nt, Artificial Sequence
  Description of Artificial Sequence: Synthetic oligonucleotide
gagcuaucacugaagcguc

SEQ ID NO: 2925840 - RNA, 19 nt, Artificial Sequence
  Description of Artificial Sequence: Synthetic oligonucleotide
uucugaugggcuggacgcc

SEQ ID NO: 2925841 - RNA, 19 nt, Artificial Sequence
  Description of Artificial Sequence: Synthetic oligonucleotide
gguggcaacugcgagcagc

SEQ ID NO: 2925842 - RNA, 19 nt, Artificial Sequence
  Description of Artificial Sequence: Synthetic oligonucleotide
ggacugucuucaaaggggc

SEQ ID NO: 2925843 - RNA, 19 nt, Artificial Sequence
  Description of Artificial Sequence: Synthetic oligonucleotide
ggagcggaagagcacauaa

SEQ ID NO: 2925844 - RNA, 19 nt, Artificial Sequence
  Description of Artificial Sequence: Synthetic oligonucleotide
ggcugcgcuggauggagcg

SEQ ID NO: 2925845 - RNA, 19 nt, Artificial Sequence
  Description of Artificial Sequence: Synthetic oligonucleotide
gucuucaaaggggccacgc

SEQ ID NO: 2925846 - RNA, 19 nt, Artificial Sequence
  Description of Artificial Sequence: Synthetic oligonucleotide
guggcaagggacugucuuc

SEQ ID NO: 2925847 - RNA, 19 nt, Artificial Sequence
  Description of Artificial Sequence: Synthetic oligonucleotide
cagcccuccaaccgguggc

SEQ ID NO: 2925848 - RNA, 19 nt, Artificial Sequence
  Description of Artificial Sequence: Synthetic oligonucleotide
gacugucuucaaaggggcc

SEQ ID NO: 2925849 - RNA, 19 nt, Artificial Sequence
  Description of Artificial Sequence: Synthetic oligonucleotide
ugaggaggccggugccccg

SEQ ID NO: 2925850 - RNA, 19 nt, Artificial Sequence
  Description of Artificial Sequence: Synthetic oligonucleotide
guaggaacgggcagcccgc

SEQ ID NO: 2925851 - RNA, 19 nt, Artificial Sequence
  Description of Artificial Sequence: Synthetic oligonucleotide
ccgaauggcugacagcacc

SEQ ID NO: 2925852 - RNA, 19 nt, Artificial Sequence
  Description of Artificial Sequence: Synthetic oligonucleotide
ugagggaaccugagcuauc

SEQ ID NO: 2925853 - RNA, 19 nt, Artificial Sequence
  Description of Artificial Sequence: Synthetic oligonucleotide
uuccagcaggcaagagucu

SEQ ID NO: 2925854 - RNA, 19 nt, Artificial Sequence
  Description of Artificial Sequence: Synthetic oligonucleotide
agcuaucacugaagcgucg

SEQ ID NO: 2925855 - RNA, 19 nt, Artificial Sequence
  Description of Artificial Sequence: Synthetic oligonucleotide
agagcgcacagagcccugg

SEQ ID NO: 2925856 - RNA, 19 nt, Artificial Sequence
  Description of Artificial Sequence: Synthetic oligonucleotide
cuccucuggggacccgucg

SEQ ID NO: 2925857 - RNA, 19 nt, Artificial Sequence
  Description of Artificial Sequence: Synthetic oligonucleotide
gcugagcaggaguaggaac

SEQ ID NO: 2925858 - RNA, 19 nt, Artificial Sequence
  Description of Artificial Sequence: Synthetic oligonucleotide
acugaagcgucgagcuggg

SEQ ID NO: 2925859 - RNA, 19 nt, Artificial Sequence
  Description of Artificial Sequence: Synthetic oligonucleotide
gcaguccaggcuaaggcag

SEQ ID NO: 2925860 - RNA, 19 nt, Artificial Sequence
  Description of Artificial Sequence: Synthetic oligonucleotide
cuggaguuccagcaggcaa

SEQ ID NO: 2925861 - RNA, 19 nt, Artificial Sequence
  Description of Artificial Sequence: Synthetic oligonucleotide
aggggacggucaccgaaug

SEQ ID NO: 2925862 - RNA, 19 nt, Artificial Sequence
  Description of Artificial Sequence: Synthetic oligonucleotide
aagcgucgagcuggggcuc

SEQ ID NO: 2925863 - RNA, 19 nt, Artificial Sequence
  Description of Artificial Sequence: Synthetic oligonucleotide
cugaugggcuggacgcccc

SEQ ID NO: 2925864 - RNA, 19 nt, Artificial Sequence
  Description of Artificial Sequence: Synthetic oligonucleotide
aggaacgggcagcccgcgg

SEQ ID NO: 2925865 - RNA, 19 nt, Artificial Sequence
  Description of Artificial Sequence: Synthetic oligonucleotide
uccagcaggcaagagucuu

SEQ ID NO: 2925866 - RNA, 19 nt, Artificial Sequence
  Description of Artificial Sequence: Synthetic oligonucleotide
ggaguaggaacgggcagcc

SEQ ID NO: 2925867 - RNA, 19 nt, Artificial Sequence
  Description of Artificial Sequence: Synthetic oligonucleotide
gggugagggaaccugagcu

SEQ ID NO: 2925868 - RNA, 19 nt, Artificial Sequence
  Description of Artificial Sequence: Synthetic oligonucleotide
gcuggauggagcggaagag

SEQ ID NO: 2925869 - RNA, 19 nt, Artificial Sequence
  Description of Artificial Sequence: Synthetic oligonucleotide
aggcaguagccugcucggc

SEQ ID NO: 2925870 - RNA, 19 nt, Artificial Sequence
  Description of Artificial Sequence: Synthetic oligonucleotide
uaggaacgggcagcccgcg

SEQ ID NO: 2925871 - RNA, 19 nt, Artificial Sequence
  Description of Artificial Sequence: Synthetic oligonucleotide
ggaagcaaggccccaccca

SEQ ID NO: 2925872 - RNA, 19 nt, Artificial Sequence
  Description of Artificial Sequence: Synthetic oligonucleotide
gcucggggaagcaaggccc

SEQ ID NO: 2925873 - RNA, 19 nt, Artificial Sequence
  Description of Artificial Sequence: Synthetic oligonucleotide
gucgagcuggggcucgggc

SEQ ID NO: 2925874 - RNA, 19 nt, Artificial Sequence
  Description of Artificial Sequence: Synthetic oligonucleotide
accgaauggcugacagcac

SEQ ID NO: 2925875 - RNA, 19 nt, Artificial Sequence
  Description of Artificial Sequence: Synthetic oligonucleotide
gcccuggaguuccagcagg

SEQ ID NO: 2925876 - RNA, 19 nt, Artificial Sequence
  Description of Artificial Sequence: Synthetic oligonucleotide
cggaagagcacauaaucca

SEQ ID NO: 2925877 - RNA, 19 nt, Artificial Sequence
  Description of Artificial Sequence: Synthetic oligonucleotide
aguagccugcucggcugcg

SEQ ID NO: 2925878 - RNA, 19 nt, Artificial Sequence
  Description of Artificial Sequence: Synthetic oligonucleotide
gaggaggccggugccccgg

SEQ ID NO: 2925879 - RNA, 19 nt, Artificial Sequence
  Description of Artificial Sequence: Synthetic oligonucleotide
aaggggccacgcaggccgc

SEQ ID NO: 2925880 - RNA, 19 nt, Artificial Sequence
  Description of Artificial Sequence: Synthetic oligonucleotide
caguagccugcucggcugc

SEQ ID NO: 2925881 - RNA, 19 nt, Artificial Sequence
  Description of Artificial Sequence: Synthetic oligonucleotide
guggcagcugagcggcugc

SEQ ID NO: 2925882 - RNA, 19 nt, Artificial Sequence
  Description of Artificial Sequence: Synthetic oligonucleotide
gagcggcugccuccucugg

SEQ ID NO: 2925883 - RNA, 19 nt, Artificial Sequence
  Description of Artificial Sequence: Synthetic oligonucleotide
gggguggggcuucaggggc

SEQ ID NO: 2925884 - RNA, 19 nt, Artificial Sequence
  Description of Artificial Sequence: Synthetic oligonucleotide
caaccgguggcaacugcga

SEQ ID NO: 2925885 - RNA, 19 nt, Artificial Sequence
  Description of Artificial Sequence: Synthetic oligonucleotide
gcaacugcgagcagcugug

SEQ ID NO: 2925886 - RNA, 19 nt, Artificial Sequence
  Description of Artificial Sequence: Synthetic oligonucleotide
agcaggcaagagucuucug

SEQ ID NO: 2925887 - RNA, 19 nt, Artificial Sequence
  Description of Artificial Sequence: Synthetic oligonucleotide
gcucggcugcgcuggaugg

SEQ ID NO: 2925888 - RNA, 19 nt, Artificial Sequence
  Description of Artificial Sequence: Synthetic oligonucleotide
ccgcaguccaggcuaaggc

SEQ ID NO: 2925889 - RNA, 19 nt, Artificial Sequence
  Description of Artificial Sequence: Synthetic oligonucleotide
caaaggggccacgcaggcc

SEQ ID NO: 2925890 - RNA, 19 nt, Artificial Sequence
  Description of Artificial Sequence: Synthetic oligonucleotide
gugaggaggccggugcccc

SEQ ID NO: 2925891 - RNA, 19 nt, Artificial Sequence
  Description of Artificial Sequence: Synthetic oligonucleotide
gggaagcaaggccccaccc

SEQ ID NO: 2925892 - RNA, 19 nt, Artificial Sequence
  Description of Artificial Sequence: Synthetic oligonucleotide
ggggacggucaccgaaugg

SEQ ID NO: 2925893 - RNA, 19 nt, Artificial Sequence
  Description of Artificial Sequence: Synthetic oligonucleotide
gcggcugccuccucugggg

SEQ ID NO: 2925894 - RNA, 19 nt, Artificial Sequence
  Description of Artificial Sequence: Synthetic oligonucleotide
gggaaccugagcuaucacu

SEQ ID NO: 2925895 - RNA, 19 nt, Artificial Sequence
  Description of Artificial Sequence: Synthetic oligonucleotide
gucgccucagcucggggaa

SEQ ID NO: 2925896 - RNA, 19 nt, Artificial Sequence
  Description of Artificial Sequence: Synthetic oligonucleotide
gcuguggggcacccagugg

SEQ ID NO: 2925897 - RNA, 19 nt, Artificial Sequence
  Description of Artificial Sequence: Synthetic oligonucleotide
ggaggccagcccuccaacc

SEQ ID NO: 2925898 - RNA, 19 nt, Artificial Sequence
  Description of Artificial Sequence: Synthetic oligonucleotide
gggguggcagcugagcggc

SEQ ID NO: 2925899 - RNA, 19 nt, Artificial Sequence
  Description of Artificial Sequence: Synthetic oligonucleotide
cacccagggaggccagccc

SEQ ID NO: 2925900 - RNA, 19 nt, Artificial Sequence
  Description of Artificial Sequence: Synthetic oligonucleotide
ugcgagcagcuguggggca

SEQ ID NO: 2925901 - RNA, 19 nt, Artificial Sequence
  Description of Artificial Sequence: Synthetic oligonucleotide
gaguuccagcaggcaagag

SEQ ID NO: 2925902 - RNA, 19 nt, Artificial Sequence
  Description of Artificial Sequence: Synthetic oligonucleotide
ggggaagcaaggccccacc

SEQ ID NO: 2925903 - RNA, 19 nt, Artificial Sequence
  Description of Artificial Sequence: Synthetic oligonucleotide
aggccccacccagggaggc

SEQ ID NO: 2925904 - RNA, 19 nt, Artificial Sequence
  Description of Artificial Sequence: Synthetic oligonucleotide
guccaggcuaaggcaguag

SEQ ID NO: 2925905 - RNA, 19 nt, Artificial Sequence
  Description of Artificial Sequence: Synthetic oligonucleotide
caacugcgagcagcugugg

SEQ ID NO: 2925906 - RNA, 19 nt, Artificial Sequence
  Description of Artificial Sequence: Synthetic oligonucleotide
caggccgcaguccaggcua

SEQ ID NO: 2925907 - RNA, 19 nt, Artificial Sequence
  Description of Artificial Sequence: Synthetic oligonucleotide
ggcaacugcgagcagcugu

SEQ ID NO: 2925908 - RNA, 19 nt, Artificial Sequence
  Description of Artificial Sequence: Synthetic oligonucleotide
gaguaggaacgggcagccc

SEQ ID NO: 2925909 - RNA, 19 nt, Artificial Sequence
  Description of Artificial Sequence: Synthetic oligonucleotide
agcgucgagcuggggcucg

SEQ ID NO: 2925910 - RNA, 19 nt, Artificial Sequence
  Description of Artificial Sequence: Synthetic oligonucleotide
cacgcaggccgcaguccag

SEQ ID NO: 2925911 - RNA, 19 nt, Artificial Sequence
  Description of Artificial Sequence: Synthetic oligonucleotide
ggugagggaaccugagcua

SEQ ID NO: 2925912 - RNA, 19 nt, Artificial Sequence
  Description of Artificial Sequence: Synthetic oligonucleotide
cagcucggggaagcaaggc

SEQ ID NO: 2925913 - RNA, 19 nt, Artificial Sequence
  Description of Artificial Sequence: Synthetic oligonucleotide
ucgccguggcaagggacug

SEQ ID NO: 2925914 - RNA, 19 nt, Artificial Sequence
  Description of Artificial Sequence: Synthetic oligonucleotide
gcaggaguaggaacgggca

SEQ ID NO: 2925915 - RNA, 19 nt, Artificial Sequence
  Description of Artificial Sequence: Synthetic oligonucleotide
gcuaucacugaagcgucga

SEQ ID NO: 2925916 - RNA, 19 nt, Artificial Sequence
  Description of Artificial Sequence: Synthetic oligonucleotide
cuaaggcaguagccugcuc

SEQ ID NO: 2925917 - RNA, 19 nt, Artificial Sequence
  Description of Artificial Sequence: Synthetic oligonucleotide
cuucaggggcugagcagga

SEQ ID NO: 2925918 - RNA, 19 nt, Artificial Sequence
  Description of Artificial Sequence: Synthetic oligonucleotide
ggacccgucgccucagcuc

SEQ ID NO: 2925919 - RNA, 19 nt, Artificial Sequence
  Description of Artificial Sequence: Synthetic oligonucleotide
agccugcucggcugcgcug

SEQ ID NO: 2925920 - RNA, 19 nt, Artificial Sequence
  Description of Artificial Sequence: Synthetic oligonucleotide
ccagcccuccaaccggugg

SEQ ID NO: 2925921 - RNA, 19 nt, Artificial Sequence
  Description of Artificial Sequence: Synthetic oligonucleotide
ccggugaggaggccggugc

SEQ ID NO: 2925922 - RNA, 19 nt, Artificial Sequence
  Description of Artificial Sequence: Synthetic oligonucleotide
ggugaggaggccggugccc

SEQ ID NO: 2925923 - RNA, 19 nt, Artificial Sequence
  Description of Artificial Sequence: Synthetic oligonucleotide
guagccugcucggcugcgc

SEQ ID NO: 2925924 - RNA, 19 nt, Artificial Sequence
  Description of Artificial Sequence: Synthetic oligonucleotide
gccgcaguccaggcuaagg

SEQ ID NO: 2925925 - RNA, 19 nt, Artificial Sequence
  Description of Artificial Sequence: Synthetic oligonucleotide
agcugagcggcugccuccu

SEQ ID NO: 2925926 - RNA, 19 nt, Artificial Sequence
  Description of Artificial Sequence: Synthetic oligonucleotide
uggcagcugagcggcugcc

SEQ ID NO: 2925927 - RNA, 19 nt, Artificial Sequence
  Description of Artificial Sequence: Synthetic oligonucleotide
cccuggaguuccagcaggc

SEQ ID NO: 2925928 - RNA, 19 nt, Artificial Sequence
  Description of Artificial Sequence: Synthetic oligonucleotide
ucgccucagcucggggaag

SEQ ID NO: 2925929 - RNA, 19 nt, Artificial Sequence
  Description of Artificial Sequence: Synthetic oligonucleotide
uggagcggaagagcacaua

SEQ ID NO: 2925930 - RNA, 19 nt, Artificial Sequence
  Description of Artificial Sequence: Synthetic oligonucleotide
gcaagggacugucuucaaa

SEQ ID NO: 2925931 - RNA, 19 nt, Artificial Sequence
  Description of Artificial Sequence: Synthetic oligonucleotide
gcugccuccucuggggacc

SEQ ID NO: 2925932 - RNA, 19 nt, Artificial Sequence
  Description of Artificial Sequence: Synthetic oligonucleotide
gccugcucggcugcgcugg

SEQ ID NO: 2925933 - RNA, 19 nt, Artificial Sequence
  Description of Artificial Sequence: Synthetic oligonucleotide
ccagcaggcaagagucuuc

SEQ ID NO: 2925934 - RNA, 19 nt, Artificial Sequence
  Description of Artificial Sequence: Synthetic oligonucleotide
gugagggaaccugagcuau

SEQ ID NO: 2925935 - RNA, 19 nt, Artificial Sequence
  Description of Artificial Sequence: Synthetic oligonucleotide
ucggggaagcaaggcccca

SEQ ID NO: 2925936 - RNA, 19 nt, Artificial Sequence
  Description of Artificial Sequence: Synthetic oligonucleotide
ggauggagcggaagagcac

SEQ ID NO: 2925937 - RNA, 19 nt, Artificial Sequence
  Description of Artificial Sequence: Synthetic oligonucleotide
cagagcgcacagagcccug

SEQ ID NO: 2925938 - RNA, 19 nt, Artificial Sequence
  Description of Artificial Sequence: Synthetic oligonucleotide
guggcaacugcgagcagcu

SEQ ID NO: 2925939 - RNA, 19 nt, Artificial Sequence
  Description of Artificial Sequence: Synthetic oligonucleotide
ggggucgccguggcaaggg

SEQ ID NO: 2925940 - RNA, 19 nt, Artificial Sequence
  Description of Artificial Sequence: Synthetic oligonucleotide
aguccaggcuaaggcagua

SEQ ID NO: 2925941 - RNA, 19 nt, Artificial Sequence
  Description of Artificial Sequence: Synthetic oligonucleotide
cugcgcuggauggagcgga

SEQ ID NO: 2925942 - RNA, 19 nt, Artificial Sequence
  Description of Artificial Sequence: Synthetic oligonucleotide
uggcaacugcgagcagcug

SEQ ID NO: 2925943 - RNA, 19 nt, Artificial Sequence
  Description of Artificial Sequence: Synthetic oligonucleotide
cagagcccuggaguuccag

SEQ ID NO: 2925944 - RNA, 19 nt, Artificial Sequence
  Description of Artificial Sequence: Synthetic oligonucleotide
ggaguuccagcaggcaaga

SEQ ID NO: 2925945 - RNA, 19 nt, Artificial Sequence
  Description of Artificial Sequence: Synthetic oligonucleotide
agcccuccaaccgguggca

SEQ ID NO: 2925946 - RNA, 19 nt, Artificial Sequence
  Description of Artificial Sequence: Synthetic oligonucleotide
cuccaaccgguggcaacug

SEQ ID NO: 2925947 - RNA, 19 nt, Artificial Sequence
  Description of Artificial Sequence: Synthetic oligonucleotide
cugaagcgucgagcugggg

SEQ ID NO: 2925948 - RNA, 19 nt, Artificial Sequence
  Description of Artificial Sequence: Synthetic oligonucleotide
gcugcgcuggauggagcgg

SEQ ID NO: 2925949 - RNA, 19 nt, Artificial Sequence
  Description of Artificial Sequence: Synthetic oligonucleotide
cuggggacccgucgccuca

SEQ ID NO: 2925950 - RNA, 19 nt, Artificial Sequence
  Description of Artificial Sequence: Synthetic oligonucleotide
gagcagcuguggggcaccc

SEQ ID NO: 2925951 - RNA, 19 nt, Artificial Sequence
  Description of Artificial Sequence: Synthetic oligonucleotide
auggagcggaagagcacau

SEQ ID NO: 2925952 - RNA, 19 nt, Artificial Sequence
  Description of Artificial Sequence: Synthetic oligonucleotide
ccucuggggacccgucgcc

SEQ ID NO: 2925953 - RNA, 19 nt, Artificial Sequence
  Description of Artificial Sequence: Synthetic oligonucleotide
gucgccguggcaagggacu

SEQ ID NO: 2925954 - RNA, 19 nt, Artificial Sequence
  Description of Artificial Sequence: Synthetic oligonucleotide
gagcggaagagcacauaau

SEQ ID NO: 2925955 - RNA, 19 nt, Artificial Sequence
  Description of Artificial Sequence: Synthetic oligonucleotide
gucuucugaugggcuggac

SEQ ID NO: 2925956 - RNA, 19 nt, Artificial Sequence
  Description of Artificial Sequence: Synthetic oligonucleotide
gaggggacggucaccgaau

SEQ ID NO: 2925957 - RNA, 19 nt, Artificial Sequence
  Description of Artificial Sequence: Synthetic oligonucleotide
ggggcuucaggggcugagc

SEQ ID NO: 2925958 - RNA, 19 nt, Artificial Sequence
  Description of Artificial Sequence: Synthetic oligonucleotide
ggcugccuccucuggggac

SEQ ID NO: 2925959 - RNA, 19 nt, Artificial Sequence
  Description of Artificial Sequence: Synthetic oligonucleotide
ccgguggcaacugcgagca

SEQ ID NO: 2925960 - RNA, 19 nt, Artificial Sequence
  Description of Artificial Sequence: Synthetic oligonucleotide
ggucgccguggcaagggac

SEQ ID NO: 2925961 - RNA, 19 nt, Artificial Sequence
  Description of Artificial Sequence: Synthetic oligonucleotide
gggcugagcaggaguagga

SEQ ID NO: 2925962 - RNA, 19 nt, Artificial Sequence
  Description of Artificial Sequence: Synthetic oligonucleotide
cgcaguccaggcuaaggca

SEQ ID NO: 2925963 - RNA, 19 nt, Artificial Sequence
  Description of Artificial Sequence: Synthetic oligonucleotide
aggaggccggugccccggu

SEQ ID NO: 2925964 - RNA, 19 nt, Artificial Sequence
  Description of Artificial Sequence: Synthetic oligonucleotide
caguccaggcuaaggcagu

SEQ ID NO: 2925965 - RNA, 19 nt, Artificial Sequence
  Description of Artificial Sequence: Synthetic oligonucleotide
cugagcggcugccuccucu

SEQ ID NO: 2925966 - RNA, 19 nt, Artificial Sequence
  Description of Artificial Sequence: Synthetic oligonucleotide
ggccacgcaggccgcaguc

SEQ ID NO: 2925967 - RNA, 19 nt, Artificial Sequence
  Description of Artificial Sequence: Synthetic oligonucleotide
cagcaggcaagagucuucu

SEQ ID NO: 2925968 - RNA, 19 nt, Artificial Sequence
  Description of Artificial Sequence: Synthetic oligonucleotide
ccacccagggaggccagcc

SEQ ID NO: 2925969 - RNA, 19 nt, Artificial Sequence
  Description of Artificial Sequence: Synthetic oligonucleotide
cccuccaaccgguggcaac

SEQ ID NO: 2925970 - RNA, 19 nt, Artificial Sequence
  Description of Artificial Sequence: Synthetic oligonucleotide
ggcugagcaggaguaggaa

SEQ ID NO: 2925971 - RNA, 19 nt, Artificial Sequence
  Description of Artificial Sequence: Synthetic oligonucleotide
gguggggcuucaggggcug

SEQ ID NO: 2925972 - RNA, 19 nt, Artificial Sequence
  Description of Artificial Sequence: Synthetic oligonucleotide
agcagcuguggggcaccca

SEQ ID NO: 2925973 - RNA, 19 nt, Artificial Sequence
  Description of Artificial Sequence: Synthetic oligonucleotide
cccgguggggugagggaac

SEQ ID NO: 2925974 - RNA, 19 nt, Artificial Sequence
  Description of Artificial Sequence: Synthetic oligonucleotide
gccguggcaagggacuguc

SEQ ID NO: 2925975 - RNA, 19 nt, Artificial Sequence
  Description of Artificial Sequence: Synthetic oligonucleotide
cucggcugcgcuggaugga

SEQ ID NO: 2925976 - RNA, 19 nt, Artificial Sequence
  Description of Artificial Sequence: Synthetic oligonucleotide
gccacgcaggccgcagucc

SEQ ID NO: 2925977 - RNA, 19 nt, Artificial Sequence
  Description of Artificial Sequence: Synthetic oligonucleotide
ccagggaggccagcccucc

SEQ ID NO: 2925978 - RNA, 19 nt, Artificial Sequence
  Description of Artificial Sequence: Synthetic oligonucleotide
ggcaagggacugucuucaa

SEQ ID NO: 2925979 - RNA, 19 nt, Artificial Sequence
  Description of Artificial Sequence: Synthetic oligonucleotide
gcacagagcccuggaguuc

SEQ ID NO: 2925980 - RNA, 19 nt, Artificial Sequence
  Description of Artificial Sequence: Synthetic oligonucleotide
acagagcccuggaguucca

SEQ ID NO: 2925981 - RNA, 19 nt, Artificial Sequence
  Description of Artificial Sequence: Synthetic oligonucleotide
ggggcucgggcaggagggg

SEQ ID NO: 2925982 - RNA, 19 nt, Artificial Sequence
  Description of Artificial Sequence: Synthetic oligonucleotide
ccacgcaggccgcagucca

SEQ ID NO: 2925983 - RNA, 19 nt, Artificial Sequence
  Description of Artificial Sequence: Synthetic oligonucleotide
gcgagcagcuguggggcac

SEQ ID NO: 2925984 - RNA, 19 nt, Artificial Sequence
  Description of Artificial Sequence: Synthetic oligonucleotide
acccgucgccucagcucgg

SEQ ID NO: 2925985 - RNA, 19 nt, Artificial Sequence
  Description of Artificial Sequence: Synthetic oligonucleotide
gcuaaggcaguagccugcu

SEQ ID NO: 2925986 - RNA, 19 nt, Artificial Sequence
  Description of Artificial Sequence: Synthetic oligonucleotide
ggacggucaccgaauggcu

SEQ ID NO: 2925987 - RNA, 19 nt, Artificial Sequence
  Description of Artificial Sequence: Synthetic oligonucleotide
ggugccccgguggggugag

SEQ ID NO: 2925988 - RNA, 19 nt, Artificial Sequence
  Description of Artificial Sequence: Synthetic oligonucleotide
gcaaggccccacccaggga

SEQ ID NO: 2925989 - RNA, 19 nt, Artificial Sequence
  Description of Artificial Sequence: Synthetic oligonucleotide
cccagggaggccagcccuc

SEQ ID NO: 2925990 - RNA, 19 nt, Artificial Sequence
  Description of Artificial Sequence: Synthetic oligonucleotide
ccgguggggugagggaacc

SEQ ID NO: 2925991 - RNA, 19 nt, Artificial Sequence
  Description of Artificial Sequence: Synthetic oligonucleotide
gcgcuggauggagcggaag

SEQ ID NO: 2925992 - RNA, 19 nt, Artificial Sequence
  Description of Artificial Sequence: Synthetic oligonucleotide
cggugaggaggccggugcc

SEQ ID NO: 2925993 - RNA, 19 nt, Artificial Sequence
  Description of Artificial Sequence: Synthetic oligonucleotide
ggggccacgcaggccgcag

SEQ ID NO: 2925994 - RNA, 19 nt, Artificial Sequence
  Description of Artificial Sequence: Synthetic oligonucleotide
cagggaggccagcccucca

SEQ ID NO: 2925995 - RNA, 19 nt, Artificial Sequence
  Description of Artificial Sequence: Synthetic oligonucleotide
ggaggccggugccccggug

SEQ ID NO: 2925996 - RNA, 19 nt, Artificial Sequence
  Description of Artificial Sequence: Synthetic oligonucleotide
gggucgccguggcaaggga

SEQ ID NO: 2925997 - RNA, 19 nt, Artificial Sequence
  Description of Artificial Sequence: Synthetic oligonucleotide
ccuccucuggggacccguc

SEQ ID NO: 2925998 - RNA, 19 nt, Artificial Sequence
  Description of Artificial Sequence: Synthetic oligonucleotide
ggucaccgaauggcugaca

SEQ ID NO: 2925999 - RNA, 19 nt, Artificial Sequence
  Description of Artificial Sequence: Synthetic oligonucleotide
cgucgccucagcucgggga

SEQ ID NO: 2926000 - RNA, 19 nt, Artificial Sequence
  Description of Artificial Sequence: Synthetic oligonucleotide
ccuggaguuccagcaggca

SEQ ID NO: 2926001 - RNA, 19 nt, Artificial Sequence
  Description of Artificial Sequence: Synthetic oligonucleotide
aggggccacgcaggccgca

SEQ ID NO: 2926002 - RNA, 19 nt, Artificial Sequence
  Description of Artificial Sequence: Synthetic oligonucleotide
ggggacccgucgccucagc

SEQ ID NO: 2926003 - RNA, 19 nt, Artificial Sequence
  Description of Artificial Sequence: Synthetic oligonucleotide
cgaggggacggucaccgaa

SEQ ID NO: 2926004 - RNA, 19 nt, Artificial Sequence
  Description of Artificial Sequence: Synthetic oligonucleotide
gggacccgucgccucagcu

SEQ ID NO: 2926005 - RNA, 19 nt, Artificial Sequence
  Description of Artificial Sequence: Synthetic oligonucleotide
ccgucgccucagcucgggg

SEQ ID NO: 2926006 - RNA, 19 nt, Artificial Sequence
  Description of Artificial Sequence: Synthetic oligonucleotide
cccgucgccucagcucggg

SEQ ID NO: 2926007 - RNA, 19 nt, Artificial Sequence
  Description of Artificial Sequence: Synthetic oligonucleotide
cagcuguggggcacccagu

SEQ ID NO: 2926008 - RNA, 19 nt, Artificial Sequence
  Description of Artificial Sequence: Synthetic oligonucleotide
ccuccaaccgguggcaacu

SEQ ID NO: 2926009 - RNA, 19 nt, Artificial Sequence
  Description of Artificial Sequence: Synthetic oligonucleotide
aggccgcaguccaggcuaa

SEQ ID NO: 2926010 - RNA, 19 nt, Artificial Sequence
  Description of Artificial Sequence: Synthetic oligonucleotide
ggccggugccccggugggg

SEQ ID NO: 2926011 - RNA, 19 nt, Artificial Sequence
  Description of Artificial Sequence: Synthetic oligonucleotide
cucuggggacccgucgccu

SEQ ID NO: 2926012 - RNA, 19 nt, Artificial Sequence
  Description of Artificial Sequence: Synthetic oligonucleotide
gcgucgagcuggggcucgg

SEQ ID NO: 2926013 - RNA, 19 nt, Artificial Sequence
  Description of Artificial Sequence: Synthetic oligonucleotide
gcaggccgcaguccaggcu

SEQ ID NO: 2926014 - RNA, 19 nt, Artificial Sequence
  Description of Artificial Sequence: Synthetic oligonucleotide
ggccgcaguccaggcuaag

SEQ ID NO: 2926015 - RNA, 19 nt, Artificial Sequence
  Description of Artificial Sequence: Synthetic oligonucleotide
cguggcaagggacugucuu

SEQ ID NO: 2926016 - RNA, 19 nt, Artificial Sequence
  Description of Artificial Sequence: Synthetic oligonucleotide
cggggaagcaaggccccac

SEQ ID NO: 2926017 - RNA, 19 nt, Artificial Sequence
  Description of Artificial Sequence: Synthetic oligonucleotide
gccucagcucggggaagca

SEQ ID NO: 2926018 - RNA, 19 nt, Artificial Sequence
  Description of Artificial Sequence: Synthetic oligonucleotide
cggcugcgcuggauggagc

SEQ ID NO: 2926019 - RNA, 19 nt, Artificial Sequence
  Description of Artificial Sequence: Synthetic oligonucleotide
gugccccgguggggugagg

SEQ ID NO: 2926020 - RNA, 19 nt, Artificial Sequence
  Description of Artificial Sequence: Synthetic oligonucleotide
cgcacagagcccuggaguu

SEQ ID NO: 2926021 - RNA, 19 nt, Artificial Sequence
  Description of Artificial Sequence: Synthetic oligonucleotide
ccucagcucggggaagcaa

SEQ ID NO: 2926022 - RNA, 19 nt, Artificial Sequence
  Description of Artificial Sequence: Synthetic oligonucleotide
cggucaccgaauggcugac

SEQ ID NO: 2926023 - RNA, 19 nt, Artificial Sequence
  Description of Artificial Sequence: Synthetic oligonucleotide
ccccgguggggugagggaa

SEQ ID NO: 2926024 - RNA, 19 nt, Artificial Sequence
  Description of Artificial Sequence: Synthetic oligonucleotide
ggcagcugagcggcugccu

SEQ ID NO: 2926025 - RNA, 19 nt, Artificial Sequence
  Description of Artificial Sequence: Synthetic oligonucleotide
cgucgagcuggggcucggg

SEQ ID NO: 2926026 - RNA, 19 nt, Artificial Sequence
  Description of Artificial Sequence: Synthetic oligonucleotide
cccacccagggaggccagc

SEQ ID NO: 2926027 - RNA, 19 nt, Artificial Sequence
  Description of Artificial Sequence: Synthetic oligonucleotide
gccggugccccgguggggu

SEQ ID NO: 2926028 - RNA, 19 nt, Artificial Sequence
  Description of Artificial Sequence: Synthetic oligonucleotide
ccggugccccgguggggug

SEQ ID NO: 2926029 - RNA, 19 nt, Artificial Sequence
  Description of Artificial Sequence: Synthetic oligonucleotide
ggccagcccuccaaccggu

SEQ ID NO: 2926030 - RNA, 19 nt, Artificial Sequence
  Description of Artificial Sequence: Synthetic oligonucleotide
gggccacgcaggccgcagu

SEQ ID NO: 2926031 - RNA, 19 nt, Artificial Sequence
  Description of Artificial Sequence: Synthetic oligonucleotide
guccggugaggaggccggu

SEQ ID NO: 2926032 - RNA, 19 nt, Artificial Sequence
  Description of Artificial Sequence: Synthetic oligonucleotide
ccgaggggacggucaccga

SEQ ID NO: 2926033 - RNA, 19 nt, Artificial Sequence
  Description of Artificial Sequence: Synthetic oligonucleotide
ccugcucggcugcgcugga

SEQ ID NO: 2926034 - RNA, 19 nt, Artificial Sequence
  Description of Artificial Sequence: Synthetic oligonucleotide
gcccuccaaccgguggcaa

SEQ ID NO: 2926035 - RNA, 19 nt, Artificial Sequence
  Description of Artificial Sequence: Synthetic oligonucleotide
cugcucggcugcgcuggau

SEQ ID NO: 2926036 - RNA, 19 nt, Artificial Sequence
  Description of Artificial Sequence: Synthetic oligonucleotide
ccguggcaagggacugucu

SEQ ID NO: 2926037 - RNA, 19 nt, Artificial Sequence
  Description of Artificial Sequence: Synthetic oligonucleotide
cggugccccggugggguga

SEQ ID NO: 2926038 - RNA, 19 nt, Artificial Sequence
  Description of Artificial Sequence: Synthetic oligonucleotide
cgccguggcaagggacugu

SEQ ID NO: 2926039 - RNA, 19 nt, Artificial Sequence
  Description of Artificial Sequence: Synthetic oligonucleotide
ugauaaaccugacagagcg

SEQ ID NO: 2926040 - RNA, 19 nt, Artificial Sequence
  Description of Artificial Sequence: Synthetic oligonucleotide
uuagcaaugacuuccauug

SEQ ID NO: 2926041 - RNA, 19 nt, Artificial Sequence
  Description of Artificial Sequence: Synthetic oligonucleotide
acccauacaaucaagaugc

SEQ ID NO: 2926042 - RNA, 19 nt, Artificial Sequence
  Description of Artificial Sequence: Synthetic oligonucleotide
aaggaguucauagaauucc

SEQ ID NO: 2926043 - RNA, 19 nt, Artificial Sequence
  Description of Artificial Sequence: Synthetic oligonucleotide
ucuucauccacccaggggc

SEQ ID NO: 2926044 - RNA, 19 nt, Artificial Sequence
  Description of Artificial Sequence: Synthetic oligonucleotide
uccauugggauuuugcucg

SEQ ID NO: 2926045 - RNA, 19 nt, Artificial Sequence
  Description of Artificial Sequence: Synthetic oligonucleotide
uccuucaccaccacgaagg

SEQ ID NO: 2926046 - RNA, 19 nt, Artificial Sequence
  Description of Artificial Sequence: Synthetic oligonucleotide
uuuaaagacccauacaauc

SEQ ID NO: 2926047 - RNA, 19 nt, Artificial Sequence
  Description of Artificial Sequence: Synthetic oligonucleotide
uuaaagacccauacaauca

SEQ ID NO: 2926048 - RNA, 19 nt, Artificial Sequence
  Description of Artificial Sequence: Synthetic oligonucleotide
auacaaucaagaugcagac

SEQ ID NO: 2926049 - RNA, 19 nt, Artificial Sequence
  Description of Artificial Sequence: Synthetic oligonucleotide
uauuaaggaguucauagaa

SEQ ID NO: 2926050 - RNA, 19 nt, Artificial Sequence
  Description of Artificial Sequence: Synthetic oligonucleotide
ucuuaugcuucacaucugg

SEQ ID NO: 2926051 - RNA, 19 nt, Artificial Sequence
  Description of Artificial Sequence: Synthetic oligonucleotide
ucaagaugcagacaacugc

SEQ ID NO: 2926052 - RNA, 19 nt, Artificial Sequence
  Description of Artificial Sequence: Synthetic oligonucleotide
acaaucaagaugcagacaa

SEQ ID NO: 2926053 - RNA, 19 nt, Artificial Sequence
  Description of Artificial Sequence: Synthetic oligonucleotide
uuugaugacguuagcaaug

SEQ ID NO: 2926054 - RNA, 19 nt, Artificial Sequence
  Description of Artificial Sequence: Synthetic oligonucleotide
ugagaucucgucuucaucu

SEQ ID NO: 2926055 - RNA, 19 nt, Artificial Sequence
  Description of Artificial Sequence: Synthetic oligonucleotide
aauuccugagaucucgucu

SEQ ID NO: 2926056 - RNA, 19 nt, Artificial Sequence
  Description of Artificial Sequence: Synthetic oligonucleotide
cugcugauaaaccugacag

SEQ ID NO: 2926057 - RNA, 19 nt, Artificial Sequence
  Description of Artificial Sequence: Synthetic oligonucleotide
cauacaaucaagaugcaga

SEQ ID NO: 2926058 - RNA, 19 nt, Artificial Sequence
  Description of Artificial Sequence: Synthetic oligonucleotide
gaucucucggaucuuaugc

SEQ ID NO: 2926059 - RNA, 19 nt, Artificial Sequence
  Description of Artificial Sequence: Synthetic oligonucleotide
ucucuuauuaaggaguuca

SEQ ID NO: 2926060 - RNA, 19 nt, Artificial Sequence
  Description of Artificial Sequence: Synthetic oligonucleotide
aguucauagaauuccugag

SEQ ID NO: 2926061 - RNA, 19 nt, Artificial Sequence
  Description of Artificial Sequence: Synthetic oligonucleotide
uuuaucuccagguuucugu

SEQ ID NO: 2926062 - RNA, 19 nt, Artificial Sequence
  Description of Artificial Sequence: Synthetic oligonucleotide
uucgucagcaucuucuucc

SEQ ID NO: 2926063 - RNA, 19 nt, Artificial Sequence
  Description of Artificial Sequence: Synthetic oligonucleotide
uuauuaaggaguucauaga

SEQ ID NO: 2926064 - RNA, 19 nt, Artificial Sequence
  Description of Artificial Sequence: Synthetic oligonucleotide
agcaaugacuuccauuggg

SEQ ID NO: 2926065 - RNA, 19 nt, Artificial Sequence
  Description of Artificial Sequence: Synthetic oligonucleotide
uuaaggaguucauagaauu

SEQ ID NO: 2926066 - RNA, 19 nt, Artificial Sequence
  Description of Artificial Sequence: Synthetic oligonucleotide
uuucaagucuucauccacc

SEQ ID NO: 2926067 - RNA, 19 nt, Artificial Sequence
  Description of Artificial Sequence: Synthetic oligonucleotide
aacgggauaugcuccacag

SEQ ID NO: 2926068 - RNA, 19 nt, Artificial Sequence
  Description of Artificial Sequence: Synthetic oligonucleotide
ucgaugaucucucggaucu

SEQ ID NO: 2926069 - RNA, 19 nt, Artificial Sequence
  Description of Artificial Sequence: Synthetic oligonucleotide
gacguuagcaaugacuucc

SEQ ID NO: 2926070 - RNA, 19 nt, Artificial Sequence
  Description of Artificial Sequence: Synthetic oligonucleotide
uagaauuccugagaucucg

SEQ ID NO: 2926071 - RNA, 19 nt, Artificial Sequence
  Description of Artificial Sequence: Synthetic oligonucleotide
gaucuuaugcuucacaucu

SEQ ID NO: 2926072 - RNA, 19 nt, Artificial Sequence
  Description of Artificial Sequence: Synthetic oligonucleotide
uaugcuucacaucuggguc

SEQ ID NO: 2926073 - RNA, 19 nt, Artificial Sequence
  Description of Artificial Sequence: Synthetic oligonucleotide
agugcugucuuucaagucu

SEQ ID NO: 2926074 - RNA, 19 nt, Artificial Sequence
  Description of Artificial Sequence: Synthetic oligonucleotide
auaaaccugacagagcguc

SEQ ID NO: 2926075 - RNA, 19 nt, Artificial Sequence
  Description of Artificial Sequence: Synthetic oligonucleotide
aaucaagaugcagacaacu

SEQ ID NO: 2926076 - RNA, 19 nt, Artificial Sequence
  Description of Artificial Sequence: Synthetic oligonucleotide
agcaucuucuuccucgugg

SEQ ID NO: 2926077 - RNA, 19 nt, Artificial Sequence
  Description of Artificial Sequence: Synthetic oligonucleotide
acaacugcuaccaacacug

SEQ ID NO: 2926078 - RNA, 19 nt, Artificial Sequence
  Description of Artificial Sequence: Synthetic oligonucleotide
gacccauacaaucaagaug

SEQ ID NO: 2926079 - RNA, 19 nt, Artificial Sequence
  Description of Artificial Sequence: Synthetic oligonucleotide
caagucuucauccacccag

SEQ ID NO: 2926080 - RNA, 19 nt, Artificial Sequence
  Description of Artificial Sequence: Synthetic oligonucleotide
agaugcagacaacugcuac

SEQ ID NO: 2926081 - RNA, 19 nt, Artificial Sequence
  Description of Artificial Sequence: Synthetic oligonucleotide
uuuuaaagacccauacaau

SEQ ID NO: 2926082 - RNA, 19 nt, Artificial Sequence
  Description of Artificial Sequence: Synthetic oligonucleotide
uuaugcuucacaucugggu

SEQ ID NO: 2926083 - RNA, 19 nt, Artificial Sequence
  Description of Artificial Sequence: Synthetic oligonucleotide
augcuucacaucugggucc

SEQ ID NO: 2926084 - RNA, 19 nt, Artificial Sequence
  Description of Artificial Sequence: Synthetic oligonucleotide
gaugcagacaacugcuacc

SEQ ID NO: 2926085 - RNA, 19 nt, Artificial Sequence
  Description of Artificial Sequence: Synthetic oligonucleotide
ggagugaggagaaacaugg

SEQ ID NO: 2926086 - RNA, 19 nt, Artificial Sequence
  Description of Artificial Sequence: Synthetic oligonucleotide
uucuuuaucuccagguuuc

SEQ ID NO: 2926087 - RNA, 19 nt, Artificial Sequence
  Description of Artificial Sequence: Synthetic oligonucleotide
acucuugccauucgucagc

SEQ ID NO: 2926088 - RNA, 19 nt, Artificial Sequence
  Description of Artificial Sequence: Synthetic oligonucleotide
ucuccucugacucuugcca

SEQ ID NO: 2926089 - RNA, 19 nt, Artificial Sequence
  Description of Artificial Sequence: Synthetic oligonucleotide
aucuggguccuucaccacc

SEQ ID NO: 2926090 - RNA, 19 nt, Artificial Sequence
  Description of Artificial Sequence: Synthetic oligonucleotide
uaaagacccauacaaucaa

SEQ ID NO: 2926091 - RNA, 19 nt, Artificial Sequence
  Description of Artificial Sequence: Synthetic oligonucleotide
agaucucgucuucaucucc

SEQ ID NO: 2926092 - RNA, 19 nt, Artificial Sequence
  Description of Artificial Sequence: Synthetic oligonucleotide
uucaagucuucauccaccc

SEQ ID NO: 2926093 - RNA, 19 nt, Artificial Sequence
  Description of Artificial Sequence: Synthetic oligonucleotide
ugaggagaaacauggucug

SEQ ID NO: 2926094 - RNA, 19 nt, Artificial Sequence
  Description of Artificial Sequence: Synthetic oligonucleotide
gaguucauagaauuccuga

SEQ ID NO: 2926095 - RNA, 19 nt, Artificial Sequence
  Description of Artificial Sequence: Synthetic oligonucleotide
gagagaacgggauaugcuc

SEQ ID NO: 2926096 - RNA, 19 nt, Artificial Sequence
  Description of Artificial Sequence: Synthetic oligonucleotide
accacgaagguccagggcu

SEQ ID NO: 2926097 - RNA, 19 nt, Artificial Sequence
  Description of Artificial Sequence: Synthetic oligonucleotide
acuuccauugggauuuugc

SEQ ID NO: 2926098 - RNA, 19 nt, Artificial Sequence
  Description of Artificial Sequence: Synthetic oligonucleotide
aaaucagugcugucuuuca

SEQ ID NO: 2926099 - RNA, 19 nt, Artificial Sequence
  Description of Artificial Sequence: Synthetic oligonucleotide
uccuucuuuaucuccaggu

SEQ ID NO: 2926100 - RNA, 19 nt, Artificial Sequence
  Description of Artificial Sequence: Synthetic oligonucleotide
aucuccagguuucugucgg

SEQ ID NO: 2926101 - RNA, 19 nt, Artificial Sequence
  Description of Artificial Sequence: Synthetic oligonucleotide
aaaccugacagagcgucuc

SEQ ID NO: 2926102 - RNA, 19 nt, Artificial Sequence
  Description of Artificial Sequence: Synthetic oligonucleotide
agagaacgggauaugcucc

SEQ ID NO: 2926103 - RNA, 19 nt, Artificial Sequence
  Description of Artificial Sequence: Synthetic oligonucleotide
ugagagaacgggauaugcu

SEQ ID NO: 2926104 - RNA, 19 nt, Artificial Sequence
  Description of Artificial Sequence: Synthetic oligonucleotide
ugacucuugccauucguca

SEQ ID NO: 2926105 - RNA, 19 nt, Artificial Sequence
  Description of Artificial Sequence: Synthetic oligonucleotide
uugccauucgucagcaucu

SEQ ID NO: 2926106 - RNA, 19 nt, Artificial Sequence
  Description of Artificial Sequence: Synthetic oligonucleotide
uaaggaguucauagaauuc

SEQ ID NO: 2926107 - RNA, 19 nt, Artificial Sequence
  Description of Artificial Sequence: Synthetic oligonucleotide
acugcuaccaacacuggag

SEQ ID NO: 2926108 - RNA, 19 nt, Artificial Sequence
  Description of Artificial Sequence: Synthetic oligonucleotide
uggagugaggagaaacaug

SEQ ID NO: 2926109 - RNA, 19 nt, Artificial Sequence
  Description of Artificial Sequence: Synthetic oligonucleotide
ucuuucaagucuucaucca

SEQ ID NO: 2926110 - RNA, 19 nt, Artificial Sequence
  Description of Artificial Sequence: Synthetic oligonucleotide
gcugauaaaccugacagag

SEQ ID NO: 2926111 - RNA, 19 nt, Artificial Sequence
  Description of Artificial Sequence: Synthetic oligonucleotide
cuuaugcuucacaucuggg

SEQ ID NO: 2926112 - RNA, 19 nt, Artificial Sequence
  Description of Artificial Sequence: Synthetic oligonucleotide
ucagugcugucuuucaagu

SEQ ID NO: 2926113 - RNA, 19 nt, Artificial Sequence
  Description of Artificial Sequence: Synthetic oligonucleotide
uaucuccagguuucugucg

SEQ ID NO: 2926114 - RNA, 19 nt, Artificial Sequence
  Description of Artificial Sequence: Synthetic oligonucleotide
agcgucucuuauuaaggag

SEQ ID NO: 2926115 - RNA, 19 nt, Artificial Sequence
  Description of Artificial Sequence: Synthetic oligonucleotide
cagagcgucucuuauuaag

SEQ ID NO: 2926116 - RNA, 19 nt, Artificial Sequence
  Description of Artificial Sequence: Synthetic oligonucleotide
cuuucaagucuucauccac

SEQ ID NO: 2926117 - RNA, 19 nt, Artificial Sequence
  Description of Artificial Sequence: Synthetic oligonucleotide
uccucgaugaucucucgga

SEQ ID NO: 2926118 - RNA, 19 nt, Artificial Sequence
  Description of Artificial Sequence: Synthetic oligonucleotide
aacugcuaccaacacugga

SEQ ID NO: 2926119 - RNA, 19 nt, Artificial Sequence
  Description of Artificial Sequence: Synthetic oligonucleotide
cauagaauuccugagaucu

SEQ ID NO: 2926120 - RNA, 19 nt, Artificial Sequence
  Description of Artificial Sequence: Synthetic oligonucleotide
agagcgucucuuauuaagg

SEQ ID NO: 2926121 - RNA, 19 nt, Artificial Sequence
  Description of Artificial Sequence: Synthetic oligonucleotide
cuugccauucgucagcauc

SEQ ID NO: 2926122 - RNA, 19 nt, Artificial Sequence
  Description of Artificial Sequence: Synthetic oligonucleotide
uaccgggugugagagaacg

SEQ ID NO: 2926123 - RNA, 19 nt, Artificial Sequence
  Description of Artificial Sequence: Synthetic oligonucleotide
uccucguggaggaaaucag

SEQ ID NO: 2926124 - RNA, 19 nt, Artificial Sequence
  Description of Artificial Sequence: Synthetic oligonucleotide
gacucuugccauucgucag

SEQ ID NO: 2926125 - RNA, 19 nt, Artificial Sequence
  Description of Artificial Sequence: Synthetic oligonucleotide
aagacccauacaaucaaga

SEQ ID NO: 2926126 - RNA, 19 nt, Artificial Sequence
  Description of Artificial Sequence: Synthetic oligonucleotide
agguccagggcucagugug

SEQ ID NO: 2926127 - RNA, 19 nt, Artificial Sequence
  Description of Artificial Sequence: Synthetic oligonucleotide
ucguggaggaaaucagugc

SEQ ID NO: 2926128 - RNA, 19 nt, Artificial Sequence
  Description of Artificial Sequence: Synthetic oligonucleotide
cucguggaggaaaucagug

SEQ ID NO: 2926129 - RNA, 19 nt, Artificial Sequence
  Description of Artificial Sequence: Synthetic oligonucleotide
agacaacugcuaccaacac

SEQ ID NO: 2926130 - RNA, 19 nt, Artificial Sequence
  Description of Artificial Sequence: Synthetic oligonucleotide
auugggauuuugcucgcug

SEQ ID NO: 2926131 - RNA, 19 nt, Artificial Sequence
  Description of Artificial Sequence: Synthetic oligonucleotide
aaagacccauacaaucaag

SEQ ID NO: 2926132 - RNA, 19 nt, Artificial Sequence
  Description of Artificial Sequence: Synthetic oligonucleotide
uuccauugggauuuugcuc

SEQ ID NO: 2926133 - RNA, 19 nt, Artificial Sequence
  Description of Artificial Sequence: Synthetic oligonucleotide
cugauaaaccugacagagc

SEQ ID NO: 2926134 - RNA, 19 nt, Artificial Sequence
  Description of Artificial Sequence: Synthetic oligonucleotide
ugcugauaaaccugacaga

SEQ ID NO: 2926135 - RNA, 19 nt, Artificial Sequence
  Description of Artificial Sequence: Synthetic oligonucleotide
ucuggguccuucaccacca

SEQ ID NO: 2926136 - RNA, 19 nt, Artificial Sequence
  Description of Artificial Sequence: Synthetic oligonucleotide
uuaucuccagguuucuguc

SEQ ID NO: 2926137 - RNA, 19 nt, Artificial Sequence
  Description of Artificial Sequence: Synthetic oligonucleotide
aagucuucauccacccagg

SEQ ID NO: 2926138 - RNA, 19 nt, Artificial Sequence
  Description of Artificial Sequence: Synthetic oligonucleotide
gaaaucagugcugucuuuc

SEQ ID NO: 2926139 - RNA, 19 nt, Artificial Sequence
  Description of Artificial Sequence: Synthetic oligonucleotide
gucuucauccacccagggg

SEQ ID NO: 2926140 - RNA, 19 nt, Artificial Sequence
  Description of Artificial Sequence: Synthetic oligonucleotide
augacuuccauugggauuu

SEQ ID NO: 2926141 - RNA, 19 nt, Artificial Sequence
  Description of Artificial Sequence: Synthetic oligonucleotide
auucgucagcaucuucuuc

SEQ ID NO: 2926142 - RNA, 19 nt, Artificial Sequence
  Description of Artificial Sequence: Synthetic oligonucleotide
uugaugacguuagcaauga

SEQ ID NO: 2926143 - RNA, 19 nt, Artificial Sequence
  Description of Artificial Sequence: Synthetic oligonucleotide
aaucagugcugucuuucaa

SEQ ID NO: 2926144 - RNA, 19 nt, Artificial Sequence
  Description of Artificial Sequence: Synthetic oligonucleotide
gaagguccagggcucagug

SEQ ID NO: 2926145 - RNA, 19 nt, Artificial Sequence
  Description of Artificial Sequence: Synthetic oligonucleotide
augacguuagcaaugacuu

SEQ ID NO: 2926146 - RNA, 19 nt, Artificial Sequence
  Description of Artificial Sequence: Synthetic oligonucleotide
accaacacuggagugagga

SEQ ID NO: 2926147 - RNA, 19 nt, Artificial Sequence
  Description of Artificial Sequence: Synthetic oligonucleotide
ucggaucuuaugcuucaca

SEQ ID NO: 2926148 - RNA, 19 nt, Artificial Sequence
  Description of Artificial Sequence: Synthetic oligonucleotide
ugaucucucggaucuuaug

SEQ ID NO: 2926149 - RNA, 19 nt, Artificial Sequence
  Description of Artificial Sequence: Synthetic oligonucleotide
cagacaacugcuaccaaca

SEQ ID NO: 2926150 - RNA, 19 nt, Artificial Sequence
  Description of Artificial Sequence: Synthetic oligonucleotide
gaugacguuagcaaugacu

SEQ ID NO: 2926151 - RNA, 19 nt, Artificial Sequence
  Description of Artificial Sequence: Synthetic oligonucleotide
gacagagcgucucuuauua

SEQ ID NO: 2926152 - RNA, 19 nt, Artificial Sequence
  Description of Artificial Sequence: Synthetic oligonucleotide
cucgcugcugauaaaccug

SEQ ID NO: 2926153 - RNA, 19 nt, Artificial Sequence
  Description of Artificial Sequence: Synthetic oligonucleotide
agacccauacaaucaagau

SEQ ID NO: 2926154 - RNA, 19 nt, Artificial Sequence
  Description of Artificial Sequence: Synthetic oligonucleotide
ucuuauuaaggaguucaua

SEQ ID NO: 2926155 - RNA, 19 nt, Artificial Sequence
  Description of Artificial Sequence: Synthetic oligonucleotide
aucucucggaucuuaugcu

SEQ ID NO: 2926156 - RNA, 19 nt, Artificial Sequence
  Description of Artificial Sequence: Synthetic oligonucleotide
ucaucuccugcucugggua

SEQ ID NO: 2926157 - RNA, 19 nt, Artificial Sequence
  Description of Artificial Sequence: Synthetic oligonucleotide
auuccugagaucucgucuu

SEQ ID NO: 2926158 - RNA, 19 nt, Artificial Sequence
  Description of Artificial Sequence: Synthetic oligonucleotide
uuccucguggaggaaauca

SEQ ID NO: 2926159 - RNA, 19 nt, Artificial Sequence
  Description of Artificial Sequence: Synthetic oligonucleotide
ucauagaauuccugagauc

SEQ ID NO: 2926160 - RNA, 19 nt, Artificial Sequence
  Description of Artificial Sequence: Synthetic oligonucleotide
ucucgucuucaucuccugc

SEQ ID NO: 2926161 - RNA, 19 nt, Artificial Sequence
  Description of Artificial Sequence: Synthetic oligonucleotide
ucgcugcugauaaaccuga

SEQ ID NO: 2926162 - RNA, 19 nt, Artificial Sequence
  Description of Artificial Sequence: Synthetic oligonucleotide
uucacaucuggguccuuca

SEQ ID NO: 2926163 - RNA, 19 nt, Artificial Sequence
  Description of Artificial Sequence: Synthetic oligonucleotide
agcuugagucuccuccuuc

SEQ ID NO: 2926164 - RNA, 19 nt, Artificial Sequence
  Description of Artificial Sequence: Synthetic oligonucleotide
ucucggaucuuaugcuuca

SEQ ID NO: 2926165 - RNA, 19 nt, Artificial Sequence
  Description of Artificial Sequence: Synthetic oligonucleotide
uccugcugcuuugaugacg

SEQ ID NO: 2926166 - RNA, 19 nt, Artificial Sequence
  Description of Artificial Sequence: Synthetic oligonucleotide
ucagugugggccccacuug

SEQ ID NO: 2926167 - RNA, 19 nt, Artificial Sequence
  Description of Artificial Sequence: Synthetic oligonucleotide
uccugcucuggguaccggg

SEQ ID NO: 2926168 - RNA, 19 nt, Artificial Sequence
  Description of Artificial Sequence: Synthetic oligonucleotide
cuucauccacccaggggcg

SEQ ID NO: 2926169 - RNA, 19 nt, Artificial Sequence
  Description of Artificial Sequence: Synthetic oligonucleotide
uggguaccgggugugagag

SEQ ID NO: 2926170 - RNA, 19 nt, Artificial Sequence
  Description of Artificial Sequence: Synthetic oligonucleotide
accaccacgaagguccagg

SEQ ID NO: 2926171 - RNA, 19 nt, Artificial Sequence
  Description of Artificial Sequence: Synthetic oligonucleotide
uggaggaaaucagugcugu

SEQ ID NO: 2926172 - RNA, 19 nt, Artificial Sequence
  Description of Artificial Sequence: Synthetic oligonucleotide
uggguccuucaccaccacg

SEQ ID NO: 2926173 - RNA, 19 nt, Artificial Sequence
  Description of Artificial Sequence: Synthetic oligonucleotide
uaaaccugacagagcgucu

SEQ ID NO: 2926174 - RNA, 19 nt, Artificial Sequence
  Description of Artificial Sequence: Synthetic oligonucleotide
aucaagaugcagacaacug

SEQ ID NO: 2926175 - RNA, 19 nt, Artificial Sequence
  Description of Artificial Sequence: Synthetic oligonucleotide
auaugcuccacagucuccu

SEQ ID NO: 2926176 - RNA, 19 nt, Artificial Sequence
  Description of Artificial Sequence: Synthetic oligonucleotide
ugugggccccacuuggagc

SEQ ID NO: 2926177 - RNA, 19 nt, Artificial Sequence
  Description of Artificial Sequence: Synthetic oligonucleotide
uucaucuccugcucugggu

SEQ ID NO: 2926178 - RNA, 19 nt, Artificial Sequence
  Description of Artificial Sequence: Synthetic oligonucleotide
aggaaaucagugcugucuu

SEQ ID NO: 2926179 - RNA, 19 nt, Artificial Sequence
  Description of Artificial Sequence: Synthetic oligonucleotide
aacacuggagugaggagaa

SEQ ID NO: 2926180 - RNA, 19 nt, Artificial Sequence
  Description of Artificial Sequence: Synthetic oligonucleotide
ucaagucuucauccaccca

SEQ ID NO: 2926181 - RNA, 19 nt, Artificial Sequence
  Description of Artificial Sequence: Synthetic oligonucleotide
cuucaucuccugcucuggg

SEQ ID NO: 2926182 - RNA, 19 nt, Artificial Sequence
  Description of Artificial Sequence: Synthetic oligonucleotide
gcugcuuugaugacguuag

SEQ ID NO: 2926183 - RNA, 19 nt, Artificial Sequence
  Description of Artificial Sequence: Synthetic oligonucleotide
ucagcaucuucuuccucgu

SEQ ID NO: 2926184 - RNA, 19 nt, Artificial Sequence
  Description of Artificial Sequence: Synthetic oligonucleotide
augcagacaacugcuacca

SEQ ID NO: 2926185 - RNA, 19 nt, Artificial Sequence
  Description of Artificial Sequence: Synthetic oligonucleotide
gugagagaacgggauaugc

SEQ ID NO: 2926186 - RNA, 19 nt, Artificial Sequence
  Description of Artificial Sequence: Synthetic oligonucleotide
auuaaggaguucauagaau

SEQ ID NO: 2926187 - RNA, 19 nt, Artificial Sequence
  Description of Artificial Sequence: Synthetic oligonucleotide
gagcgucucuuauuaagga

SEQ ID NO: 2926188 - RNA, 19 nt, Artificial Sequence
  Description of Artificial Sequence: Synthetic oligonucleotide
cugacucuugccauucguc

SEQ ID NO: 2926189 - RNA, 19 nt, Artificial Sequence
  Description of Artificial Sequence: Synthetic oligonucleotide
ucuuccucguggaggaaau

SEQ ID NO: 2926190 - RNA, 19 nt, Artificial Sequence
  Description of Artificial Sequence: Synthetic oligonucleotide
cagugugggccccacuugg

SEQ ID NO: 2926191 - RNA, 19 nt, Artificial Sequence
  Description of Artificial Sequence: Synthetic oligonucleotide
caaucaagaugcagacaac

SEQ ID NO: 2926192 - RNA, 19 nt, Artificial Sequence
  Description of Artificial Sequence: Synthetic oligonucleotide
auagaauuccugagaucuc

SEQ ID NO: 2926193 - RNA, 19 nt, Artificial Sequence
  Description of Artificial Sequence: Synthetic oligonucleotide
uacaaucaagaugcagaca

SEQ ID NO: 2926194 - RNA, 19 nt, Artificial Sequence
  Description of Artificial Sequence: Synthetic oligonucleotide
ugugagagaacgggauaug

SEQ ID NO: 2926195 - RNA, 19 nt, Artificial Sequence
  Description of Artificial Sequence: Synthetic oligonucleotide
gauaugcuccacagucucc

SEQ ID NO: 2926196 - RNA, 19 nt, Artificial Sequence
  Description of Artificial Sequence: Synthetic oligonucleotide
gaggaaaucagugcugucu

SEQ ID NO: 2926197 - RNA, 19 nt, Artificial Sequence
  Description of Artificial Sequence: Synthetic oligonucleotide
caagaugcagacaacugcu

SEQ ID NO: 2926198 - RNA, 19 nt, Artificial Sequence
  Description of Artificial Sequence: Synthetic oligonucleotide
aaccugacagagcgucucu

SEQ ID NO: 2926199 - RNA, 19 nt, Artificial Sequence
  Description of Artificial Sequence: Synthetic oligonucleotide
gcuuugaugacguuagcaa

SEQ ID NO: 2926200 - RNA, 19 nt, Artificial Sequence
  Description of Artificial Sequence: Synthetic oligonucleotide
gcgagcuugagucuccucc

SEQ ID NO: 2926201 - RNA, 19 nt, Artificial Sequence
  Description of Artificial Sequence: Synthetic oligonucleotide
uugagucuccuccuucuuu

SEQ ID NO: 2926202 - RNA, 19 nt, Artificial Sequence
  Description of Artificial Sequence: Synthetic oligonucleotide
ucgucuucaucuccugcuc

SEQ ID NO: 2926203 - RNA, 19 nt, Artificial Sequence
  Description of Artificial Sequence: Synthetic oligonucleotide
cucucggaucuuaugcuuc

SEQ ID NO: 2926204 - RNA, 19 nt, Artificial Sequence
  Description of Artificial Sequence: Synthetic oligonucleotide
gugaggagaaacauggucu

SEQ ID NO: 2926205 - RNA, 19 nt, Artificial Sequence
  Description of Artificial Sequence: Synthetic oligonucleotide
gagaucucgucuucaucuc

SEQ ID NO: 2926206 - RNA, 19 nt, Artificial Sequence
  Description of Artificial Sequence: Synthetic oligonucleotide
cucgaugaucucucggauc

SEQ ID NO: 2926207 - RNA, 19 nt, Artificial Sequence
  Description of Artificial Sequence: Synthetic oligonucleotide
acuggagugaggagaaaca

SEQ ID NO: 2926208 - RNA, 19 nt, Artificial Sequence
  Description of Artificial Sequence: Synthetic oligonucleotide
aagguccagggcucagugu

SEQ ID NO: 2926209 - RNA, 19 nt, Artificial Sequence
  Description of Artificial Sequence: Synthetic oligonucleotide
gagaacgggauaugcucca

SEQ ID NO: 2926210 - RNA, 19 nt, Artificial Sequence
  Description of Artificial Sequence: Synthetic oligonucleotide
cacuggagugaggagaaac

SEQ ID NO: 2926211 - RNA, 19 nt, Artificial Sequence
  Description of Artificial Sequence: Synthetic oligonucleotide
ucucucggaucuuaugcuu

SEQ ID NO: 2926212 - RNA, 19 nt, Artificial Sequence
  Description of Artificial Sequence: Synthetic oligonucleotide
ucuggguaccgggugugag

SEQ ID NO: 2926213 - RNA, 19 nt, Artificial Sequence
  Description of Artificial Sequence: Synthetic oligonucleotide
gcagacaacugcuaccaac

SEQ ID NO: 2926214 - RNA, 19 nt, Artificial Sequence
  Description of Artificial Sequence: Synthetic oligonucleotide
ugcucuggguaccgggugu

SEQ ID NO: 2926215 - RNA, 19 nt, Artificial Sequence
  Description of Artificial Sequence: Synthetic oligonucleotide
agcuguuccugcugcuuug

SEQ ID NO: 2926216 - RNA, 19 nt, Artificial Sequence
  Description of Artificial Sequence: Synthetic oligonucleotide
gacaacugcuaccaacacu

SEQ ID NO: 2926217 - RNA, 19 nt, Artificial Sequence
  Description of Artificial Sequence: Synthetic oligonucleotide
ucgucagcaucuucuuccu

SEQ ID NO: 2926218 - RNA, 19 nt, Artificial Sequence
  Description of Artificial Sequence: Synthetic oligonucleotide
ugacguuagcaaugacuuc

SEQ ID NO: 2926219 - RNA, 19 nt, Artificial Sequence
  Description of Artificial Sequence: Synthetic oligonucleotide
caacugcuaccaacacugg

SEQ ID NO: 2926220 - RNA, 19 nt, Artificial Sequence
  Description of Artificial Sequence: Synthetic oligonucleotide
gucuccucugacucuugcc

SEQ ID NO: 2926221 - RNA, 19 nt, Artificial Sequence
  Description of Artificial Sequence: Synthetic oligonucleotide
cuuccauugggauuuugcu

SEQ ID NO: 2926222 - RNA, 19 nt, Artificial Sequence
  Description of Artificial Sequence: Synthetic oligonucleotide
guccuucaccaccacgaag

SEQ ID NO: 2926223 - RNA, 19 nt, Artificial Sequence
  Description of Artificial Sequence: Synthetic oligonucleotide
ccaggggcgagcuugaguc

SEQ ID NO: 2926224 - RNA, 19 nt, Artificial Sequence
  Description of Artificial Sequence: Synthetic oligonucleotide
ugaugacguuagcaaugac

SEQ ID NO: 2926225 - RNA, 19 nt, Artificial Sequence
  Description of Artificial Sequence: Synthetic oligonucleotide
gaacgggauaugcuccaca

SEQ ID NO: 2926226 - RNA, 19 nt, Artificial Sequence
  Description of Artificial Sequence: Synthetic oligonucleotide
agaacgggauaugcuccac

SEQ ID NO: 2926227 - RNA, 19 nt, Artificial Sequence
  Description of Artificial Sequence: Synthetic oligonucleotide
aggaguucauagaauuccu

SEQ ID NO: 2926228 - RNA, 19 nt, Artificial Sequence
  Description of Artificial Sequence: Synthetic oligonucleotide
ggaucuuaugcuucacauc

SEQ ID NO: 2926229 - RNA, 19 nt, Artificial Sequence
  Description of Artificial Sequence: Synthetic oligonucleotide
ucuccugcucuggguaccg

SEQ ID NO: 2926230 - RNA, 19 nt, Artificial Sequence
  Description of Artificial Sequence: Synthetic oligonucleotide
cugagaucucgucuucauc

SEQ ID NO: 2926231 - RNA, 19 nt, Artificial Sequence
  Description of Artificial Sequence: Synthetic oligonucleotide
ggauuuugcucgcugcuga

SEQ ID NO: 2926232 - RNA, 19 nt, Artificial Sequence
  Description of Artificial Sequence: Synthetic oligonucleotide
cuuuaucuccagguuucug

SEQ ID NO: 2926233 - RNA, 19 nt, Artificial Sequence
  Description of Artificial Sequence: Synthetic oligonucleotide
ugacagagcgucucuuauu

SEQ ID NO: 2926234 - RNA, 19 nt, Artificial Sequence
  Description of Artificial Sequence: Synthetic oligonucleotide
uaccaacacuggagugagg

SEQ ID NO: 2926235 - RNA, 19 nt, Artificial Sequence
  Description of Artificial Sequence: Synthetic oligonucleotide
guuagcaaugacuuccauu

SEQ ID NO: 2926236 - RNA, 19 nt, Artificial Sequence
  Description of Artificial Sequence: Synthetic oligonucleotide
cuuugaugacguuagcaau

SEQ ID NO: 2926237 - RNA, 19 nt, Artificial Sequence
  Description of Artificial Sequence: Synthetic oligonucleotide
gugugggccccacuuggag

SEQ ID NO: 2926238 - RNA, 19 nt, Artificial Sequence
  Description of Artificial Sequence: Synthetic oligonucleotide
ucuccagguuucugucggc

SEQ ID NO: 2926239 - RNA, 19 nt, Artificial Sequence
  Description of Artificial Sequence: Synthetic oligonucleotide
cuucacaucuggguccuuc

SEQ ID NO: 2926240 - RNA, 19 nt, Artificial Sequence
  Description of Artificial Sequence: Synthetic oligonucleotide
ucauccacccaggggcgag

SEQ ID NO: 2926241 - RNA, 19 nt, Artificial Sequence
  Description of Artificial Sequence: Synthetic oligonucleotide
uuccugagaucucgucuuc

SEQ ID NO: 2926242 - RNA, 19 nt, Artificial Sequence
  Description of Artificial Sequence: Synthetic oligonucleotide
aggggcgagcuugagucuc

SEQ ID NO: 2926243 - RNA, 19 nt, Artificial Sequence
  Description of Artificial Sequence: Synthetic oligonucleotide
cagggcucagugugggccc

SEQ ID NO: 2926244 - RNA, 19 nt, Artificial Sequence
  Description of Artificial Sequence: Synthetic oligonucleotide
caucuucuuccucguggag

SEQ ID NO: 2926245 - RNA, 19 nt, Artificial Sequence
  Description of Artificial Sequence: Synthetic oligonucleotide
uccagguuucugucggcau

SEQ ID NO: 2926246 - RNA, 19 nt, Artificial Sequence
  Description of Artificial Sequence: Synthetic oligonucleotide
uccugagaucucgucuuca

SEQ ID NO: 2926247 - RNA, 19 nt, Artificial Sequence
  Description of Artificial Sequence: Synthetic oligonucleotide
acgggauaugcuccacagu

SEQ ID NO: 2926248 - RNA, 19 nt, Artificial Sequence
  Description of Artificial Sequence: Synthetic oligonucleotide
cgggauaugcuccacaguc

SEQ ID NO: 2926249 - RNA, 19 nt, Artificial Sequence
  Description of Artificial Sequence: Synthetic oligonucleotide
ggaguucauagaauuccug

SEQ ID NO: 2926250 - RNA, 19 nt, Artificial Sequence
  Description of Artificial Sequence: Synthetic oligonucleotide
agaauuccugagaucucgu

SEQ ID NO: 2926251 - RNA, 19 nt, Artificial Sequence
  Description of Artificial Sequence: Synthetic oligonucleotide
cagugcugucuuucaaguc

SEQ ID NO: 2926252 - RNA, 19 nt, Artificial Sequence
  Description of Artificial Sequence: Synthetic oligonucleotide
cuucuuuaucuccagguuu

SEQ ID NO: 2926253 - RNA, 19 nt, Artificial Sequence
  Description of Artificial Sequence: Synthetic oligonucleotide
gcugcugauaaaccugaca

SEQ ID NO: 2926254 - RNA, 19 nt, Artificial Sequence
  Description of Artificial Sequence: Synthetic oligonucleotide
caccacgaagguccagggc

SEQ ID NO: 2926255 - RNA, 19 nt, Artificial Sequence
  Description of Artificial Sequence: Synthetic oligonucleotide
ugcagacaacugcuaccaa

SEQ ID NO: 2926256 - RNA, 19 nt, Artificial Sequence
  Description of Artificial Sequence: Synthetic oligonucleotide
cuccacagucuccucugac

SEQ ID NO: 2926257 - RNA, 19 nt, Artificial Sequence
  Description of Artificial Sequence: Synthetic oligonucleotide
guccagggcucaguguggg

SEQ ID NO: 2926258 - RNA, 19 nt, Artificial Sequence
  Description of Artificial Sequence: Synthetic oligonucleotide
acagagcgucucuuauuaa

SEQ ID NO: 2926259 - RNA, 19 nt, Artificial Sequence
  Description of Artificial Sequence: Synthetic oligonucleotide
uccucugacucuugccauu

SEQ ID NO: 2926260 - RNA, 19 nt, Artificial Sequence
  Description of Artificial Sequence: Synthetic oligonucleotide
cugcuuugaugacguuagc

SEQ ID NO: 2926261 - RNA, 19 nt, Artificial Sequence
  Description of Artificial Sequence: Synthetic oligonucleotide
gcaaugacuuccauuggga

SEQ ID NO: 2926262 - RNA, 19 nt, Artificial Sequence
  Description of Artificial Sequence: Synthetic oligonucleotide
gguaccgggugugagagaa

SEQ ID NO: 2926263 - RNA, 19 nt, Artificial Sequence
  Description of Artificial Sequence: Synthetic oligonucleotide
gaucucgucuucaucuccu

SEQ ID NO: 2926264 - RNA, 19 nt, Artificial Sequence
  Description of Artificial Sequence: Synthetic oligonucleotide
ccgggugugagagaacggg

SEQ ID NO: 2926265 - RNA, 19 nt, Artificial Sequence
  Description of Artificial Sequence: Synthetic oligonucleotide
cugcucuggguaccgggug

SEQ ID NO: 2926266 - RNA, 19 nt, Artificial Sequence
  Description of Artificial Sequence: Synthetic oligonucleotide
ccccacuuggagcuguucc

SEQ ID NO: 2926267 - RNA, 19 nt, Artificial Sequence
  Description of Artificial Sequence: Synthetic oligonucleotide
uccagggcucagugugggc

SEQ ID NO: 2926268 - RNA, 19 nt, Artificial Sequence
  Description of Artificial Sequence: Synthetic oligonucleotide
acguuagcaaugacuucca

SEQ ID NO: 2926269 - RNA, 19 nt, Artificial Sequence
  Description of Artificial Sequence: Synthetic oligonucleotide
cuggguaccgggugugaga

SEQ ID NO: 2926270 - RNA, 19 nt, Artificial Sequence
  Description of Artificial Sequence: Synthetic oligonucleotide
cugucuuucaagucuucau

SEQ ID NO: 2926271 - RNA, 19 nt, Artificial Sequence
  Description of Artificial Sequence: Synthetic oligonucleotide
gauaaaccugacagagcgu

SEQ ID NO: 2926272 - RNA, 19 nt, Artificial Sequence
  Description of Artificial Sequence: Synthetic oligonucleotide
cuucaccaccacgaagguc

SEQ ID NO: 2926273 - RNA, 19 nt, Artificial Sequence
  Description of Artificial Sequence: Synthetic oligonucleotide
gggauuuugcucgcugcug

SEQ ID NO: 2926274 - RNA, 19 nt, Artificial Sequence
  Description of Artificial Sequence: Synthetic oligonucleotide
uucauccacccaggggcga

SEQ ID NO: 2926275 - RNA, 19 nt, Artificial Sequence
  Description of Artificial Sequence: Synthetic oligonucleotide
gacuuccauugggauuuug

SEQ ID NO: 2926276 - RNA, 19 nt, Artificial Sequence
  Description of Artificial Sequence: Synthetic oligonucleotide
ccaacacuggagugaggag

SEQ ID NO: 2926277 - RNA, 19 nt, Artificial Sequence
  Description of Artificial Sequence: Synthetic oligonucleotide
caaugacuuccauugggau

SEQ ID NO: 2926278 - RNA, 19 nt, Artificial Sequence
  Description of Artificial Sequence: Synthetic oligonucleotide
ccagggcucagugugggcc

SEQ ID NO: 2926279 - RNA, 19 nt, Artificial Sequence
  Description of Artificial Sequence: Synthetic oligonucleotide
gucucuuauuaaggaguuc

SEQ ID NO: 2926280 - RNA, 19 nt, Artificial Sequence
  Description of Artificial Sequence: Synthetic oligonucleotide
accgggugugagagaacgg

SEQ ID NO: 2926281 - RNA, 19 nt, Artificial Sequence
  Description of Artificial Sequence: Synthetic oligonucleotide
gugggccccacuuggagcu

SEQ ID NO: 2926282 - RNA, 19 nt, Artificial Sequence
  Description of Artificial Sequence: Synthetic oligonucleotide
gugugagagaacgggauau

SEQ ID NO: 2926283 - RNA, 19 nt, Artificial Sequence
  Description of Artificial Sequence: Synthetic oligonucleotide
ccaccacgaagguccaggg

SEQ ID NO: 2926284 - RNA, 19 nt, Artificial Sequence
  Description of Artificial Sequence: Synthetic oligonucleotide
ggugugagagaacgggaua

SEQ ID NO: 2926285 - RNA, 19 nt, Artificial Sequence
  Description of Artificial Sequence: Synthetic oligonucleotide
augaucucucggaucuuau

SEQ ID NO: 2926286 - RNA, 19 nt, Artificial Sequence
  Description of Artificial Sequence: Synthetic oligonucleotide
ccauucgucagcaucuucu

SEQ ID NO: 2926287 - RNA, 19 nt, Artificial Sequence
  Description of Artificial Sequence: Synthetic oligonucleotide
cucggaucuuaugcuucac

SEQ ID NO: 2926288 - RNA, 19 nt, Artificial Sequence
  Description of Artificial Sequence: Synthetic oligonucleotide
ccuccuucuuuaucuccag

SEQ ID NO: 2926289 - RNA, 19 nt, Artificial Sequence
  Description of Artificial Sequence: Synthetic oligonucleotide
ucuugccauucgucagcau

SEQ ID NO: 2926290 - RNA, 19 nt, Artificial Sequence
  Description of Artificial Sequence: Synthetic oligonucleotide
gguccagggcucagugugg

SEQ ID NO: 2926291 - RNA, 19 nt, Artificial Sequence
  Description of Artificial Sequence: Synthetic oligonucleotide
cagcaucuucuuccucgug

SEQ ID NO: 2926292 - RNA, 19 nt, Artificial Sequence
  Description of Artificial Sequence: Synthetic oligonucleotide
cucuugccauucgucagca

SEQ ID NO: 2926293 - RNA, 19 nt, Artificial Sequence
  Description of Artificial Sequence: Synthetic oligonucleotide
ggaggaaaucagugcuguc

SEQ ID NO: 2926294 - RNA, 19 nt, Artificial Sequence
  Description of Artificial Sequence: Synthetic oligonucleotide
acgaagguccagggcucag

SEQ ID NO: 2926295 - RNA, 19 nt, Artificial Sequence
  Description of Artificial Sequence: Synthetic oligonucleotide
gcgucucuuauuaaggagu

SEQ ID NO: 2926296 - RNA, 19 nt, Artificial Sequence
  Description of Artificial Sequence: Synthetic oligonucleotide
agugugggccccacuugga

SEQ ID NO: 2926297 - RNA, 19 nt, Artificial Sequence
  Description of Artificial Sequence: Synthetic oligonucleotide
ccauugggauuuugcucgc

SEQ ID NO: 2926298 - RNA, 19 nt, Artificial Sequence
  Description of Artificial Sequence: Synthetic oligonucleotide
cuccagguuucugucggca

SEQ ID NO: 2926299 - RNA, 19 nt, Artificial Sequence
  Description of Artificial Sequence: Synthetic oligonucleotide
cugacagagcgucucuuau

SEQ ID NO: 2926300 - RNA, 19 nt, Artificial Sequence
  Description of Artificial Sequence: Synthetic oligonucleotide
cucagugugggccccacuu

SEQ ID NO: 2926301 - RNA, 19 nt, Artificial Sequence
  Description of Artificial Sequence: Synthetic oligonucleotide
gagcuguuccugcugcuuu

SEQ ID NO: 2926302 - RNA, 19 nt, Artificial Sequence
  Description of Artificial Sequence: Synthetic oligonucleotide
gcucgcugcugauaaaccu

SEQ ID NO: 2926303 - RNA, 19 nt, Artificial Sequence
  Description of Artificial Sequence: Synthetic oligonucleotide
cauucgucagcaucuucuu

SEQ ID NO: 2926304 - RNA, 19 nt, Artificial Sequence
  Description of Artificial Sequence: Synthetic oligonucleotide
ccuccucgaugaucucucg

SEQ ID NO: 2926305 - RNA, 19 nt, Artificial Sequence
  Description of Artificial Sequence: Synthetic oligonucleotide
cuggagugaggagaaacau

SEQ ID NO: 2926306 - RNA, 19 nt, Artificial Sequence
  Description of Artificial Sequence: Synthetic oligonucleotide
ugccauucgucagcaucuu

SEQ ID NO: 2926307 - RNA, 19 nt, Artificial Sequence
  Description of Artificial Sequence: Synthetic oligonucleotide
ccacccaggggcgagcuug

SEQ ID NO: 2926308 - RNA, 19 nt, Artificial Sequence
  Description of Artificial Sequence: Synthetic oligonucleotide
ccugcugcuuugaugacgu

SEQ ID NO: 2926309 - RNA, 19 nt, Artificial Sequence
  Description of Artificial Sequence: Synthetic oligonucleotide
auccacccaggggcgagcu

SEQ ID NO: 2926310 - RNA, 19 nt, Artificial Sequence
  Description of Artificial Sequence: Synthetic oligonucleotide
ccacgaagguccagggcuc

SEQ ID NO: 2926311 - RNA, 19 nt, Artificial Sequence
  Description of Artificial Sequence: Synthetic oligonucleotide
cuggguccuucaccaccac

SEQ ID NO: 2926312 - RNA, 19 nt, Artificial Sequence
  Description of Artificial Sequence: Synthetic oligonucleotide
accugacagagcgucucuu

SEQ ID NO: 2926313 - RNA, 19 nt, Artificial Sequence
  Description of Artificial Sequence: Synthetic oligonucleotide
cguggaggaaaucagugcu

SEQ ID NO: 2926314 - RNA, 19 nt, Artificial Sequence
  Description of Artificial Sequence: Synthetic oligonucleotide
ccacuuggagcuguuccug

SEQ ID NO: 2926315 - RNA, 19 nt, Artificial Sequence
  Description of Artificial Sequence: Synthetic oligonucleotide
cacagucuccucugacucu

SEQ ID NO: 2926316 - RNA, 19 nt, Artificial Sequence
  Description of Artificial Sequence: Synthetic oligonucleotide
cuccugcucuggguaccgg

SEQ ID NO: 2926317 - RNA, 19 nt, Artificial Sequence
  Description of Artificial Sequence: Synthetic oligonucleotide
ccucugacucuugccauuc

SEQ ID NO: 2926318 - RNA, 19 nt, Artificial Sequence
  Description of Artificial Sequence: Synthetic oligonucleotide
cuccucugacucuugccau

SEQ ID NO: 2926319 - RNA, 19 nt, Artificial Sequence
  Description of Artificial Sequence: Synthetic oligonucleotide
gccauucgucagcaucuuc

SEQ ID NO: 2926320 - RNA, 19 nt, Artificial Sequence
  Description of Artificial Sequence: Synthetic oligonucleotide
uccacccaggggcgagcuu

SEQ ID NO: 2926321 - RNA, 19 nt, Artificial Sequence
  Description of Artificial Sequence: Synthetic oligonucleotide
gggauaugcuccacagucu

SEQ ID NO: 2926322 - RNA, 19 nt, Artificial Sequence
  Description of Artificial Sequence: Synthetic oligonucleotide
guaccgggugugagagaac

SEQ ID NO: 2926323 - RNA, 19 nt, Artificial Sequence
  Description of Artificial Sequence: Synthetic oligonucleotide
cacgaagguccagggcuca

SEQ ID NO: 2926324 - RNA, 19 nt, Artificial Sequence
  Description of Artificial Sequence: Synthetic oligonucleotide
acacuggagugaggagaaa

SEQ ID NO: 2926325 - RNA, 19 nt, Artificial Sequence
  Description of Artificial Sequence: Synthetic oligonucleotide
ccugacagagcgucucuua

SEQ ID NO: 2926326 - RNA, 19 nt, Artificial Sequence
  Description of Artificial Sequence: Synthetic oligonucleotide
cuugagucuccuccuucuu

SEQ ID NO: 2926327 - RNA, 19 nt, Artificial Sequence
  Description of Artificial Sequence: Synthetic oligonucleotide
ugacuuccauugggauuuu

SEQ ID NO: 2926328 - RNA, 19 nt, Artificial Sequence
  Description of Artificial Sequence: Synthetic oligonucleotide
agguuucugucggcauuuu

SEQ ID NO: 2926329 - RNA, 19 nt, Artificial Sequence
  Description of Artificial Sequence: Synthetic oligonucleotide
ggaaaucagugcugucuuu

SEQ ID NO: 2926330 - RNA, 19 nt, Artificial Sequence
  Description of Artificial Sequence: Synthetic oligonucleotide
ggggcgagcuugagucucc

SEQ ID NO: 2926331 - RNA, 19 nt, Artificial Sequence
  Description of Artificial Sequence: Synthetic oligonucleotide
caccaccacgaagguccag

SEQ ID NO: 2926332 - RNA, 19 nt, Artificial Sequence
  Description of Artificial Sequence: Synthetic oligonucleotide
gcuguuccugcugcuuuga

SEQ ID NO: 2926333 - RNA, 19 nt, Artificial Sequence
  Description of Artificial Sequence: Synthetic oligonucleotide
gcuccacagucuccucuga

SEQ ID NO: 2926334 - RNA, 19 nt, Artificial Sequence
  Description of Artificial Sequence: Synthetic oligonucleotide
gggugugagagaacgggau

SEQ ID NO: 2926335 - RNA, 19 nt, Artificial Sequence
  Description of Artificial Sequence: Synthetic oligonucleotide
cggaucuuaugcuucacau

SEQ ID NO: 2926336 - RNA, 19 nt, Artificial Sequence
  Description of Artificial Sequence: Synthetic oligonucleotide
cagguuucugucggcauuu

SEQ ID NO: 2926337 - RNA, 19 nt, Artificial Sequence
  Description of Artificial Sequence: Synthetic oligonucleotide
acccaggggcgagcuugag

SEQ ID NO: 2926338 - RNA, 19 nt, Artificial Sequence
  Description of Artificial Sequence: Synthetic oligonucleotide
cucuggguaccggguguga

SEQ ID NO: 2926339 - RNA, 19 nt, Artificial Sequence
  Description of Artificial Sequence: Synthetic oligonucleotide
cccauacaaucaagaugca

SEQ ID NO: 2926340 - RNA, 19 nt, Artificial Sequence
  Description of Artificial Sequence: Synthetic oligonucleotide
ccucguggaggaaaucagu

SEQ ID NO: 2926341 - RNA, 19 nt, Artificial Sequence
  Description of Artificial Sequence: Synthetic oligonucleotide
ggcgagcuugagucuccuc

SEQ ID NO: 2926342 - RNA, 19 nt, Artificial Sequence
  Description of Artificial Sequence: Synthetic oligonucleotide
cgggugugagagaacggga

SEQ ID NO: 2926343 - RNA, 19 nt, Artificial Sequence
  Description of Artificial Sequence: Synthetic oligonucleotide
cauugggauuuugcucgcu

SEQ ID NO: 2926344 - RNA, 19 nt, Artificial Sequence
  Description of Artificial Sequence: Synthetic oligonucleotide
ccugagaucucgucuucau

SEQ ID NO: 2926345 - RNA, 19 nt, Artificial Sequence
  Description of Artificial Sequence: Synthetic oligonucleotide
caggggcgagcuugagucu

SEQ ID NO: 2926346 - RNA, 19 nt, Artificial Sequence
  Description of Artificial Sequence: Synthetic oligonucleotide
cgcugcugauaaaccugac

SEQ ID NO: 2926347 - RNA, 19 nt, Artificial Sequence
  Description of Artificial Sequence: Synthetic oligonucleotide
cuucuuccucguggaggaa

SEQ ID NO: 2926348 - RNA, 19 nt, Artificial Sequence
  Description of Artificial Sequence: Synthetic oligonucleotide
ccugcucuggguaccgggu

SEQ ID NO: 2926349 - RNA, 19 nt, Artificial Sequence
  Description of Artificial Sequence: Synthetic oligonucleotide
ggguaccgggugugagaga

SEQ ID NO: 2926350 - RNA, 19 nt, Artificial Sequence
  Description of Artificial Sequence: Synthetic oligonucleotide
cuguuccugcugcuuugau

SEQ ID NO: 2926351 - RNA, 19 nt, Artificial Sequence
  Description of Artificial Sequence: Synthetic oligonucleotide
ggcucagugugggccccac

SEQ ID NO: 2926352 - RNA, 19 nt, Artificial Sequence
  Description of Artificial Sequence: Synthetic oligonucleotide
cgucucuuauuaaggaguu

SEQ ID NO: 2926353 - RNA, 19 nt, Artificial Sequence
  Description of Artificial Sequence: Synthetic oligonucleotide
cgucagcaucuucuuccuc

SEQ ID NO: 2926354 - RNA, 19 nt, Artificial Sequence
  Description of Artificial Sequence: Synthetic oligonucleotide
ccagguuucugucggcauu

SEQ ID NO: 2926355 - RNA, 19 nt, Artificial Sequence
  Description of Artificial Sequence: Synthetic oligonucleotide
ccuucaccaccacgaaggu

SEQ ID NO: 2926356 - RNA, 19 nt, Artificial Sequence
  Description of Artificial Sequence: Synthetic oligonucleotide
gccccacuuggagcuguuc

SEQ ID NO: 2926357 - RNA, 19 nt, Artificial Sequence
  Description of Artificial Sequence: Synthetic oligonucleotide
gcucagugugggccccacu

SEQ ID NO: 2926358 - RNA, 19 nt, Artificial Sequence
  Description of Artificial Sequence: Synthetic oligonucleotide
cccaggggcgagcuugagu

SEQ ID NO: 2926359 - RNA, 19 nt, Artificial Sequence
  Description of Artificial Sequence: Synthetic oligonucleotide
gggcucagugugggcccca

SEQ ID NO: 2926360 - RNA, 19 nt, Artificial Sequence
  Description of Artificial Sequence: Synthetic oligonucleotide
gggcgagcuugagucuccu

SEQ ID NO: 2926361 - RNA, 19 nt, Artificial Sequence
  Description of Artificial Sequence: Synthetic oligonucleotide
gggccccacuuggagcugu

SEQ ID NO: 2926362 - RNA, 19 nt, Artificial Sequence
  Description of Artificial Sequence: Synthetic oligonucleotide
cguuagcaaugacuuccau

SEQ ID NO: 2926363 - RNA, 19 nt, Artificial Sequence
  Description of Artificial Sequence: Synthetic oligonucleotide
cgaagguccagggcucagu

SEQ ID NO: 2926364 - RNA, 19 nt, Artificial Sequence
  Description of Artificial Sequence: Synthetic oligonucleotide
ggccccacuuggagcuguu

SEQ ID NO: 2926365 - RNA, 19 nt, Artificial Sequence
  Description of Artificial Sequence: Synthetic oligonucleotide
gcuucacaucuggguccuu

SEQ ID NO: 2926366 - RNA, 19 nt, Artificial Sequence
  Description of Artificial Sequence: Synthetic oligonucleotide
cgaugaucucucggaucuu

SEQ ID NO: 2926367 - RNA, 19 nt, Artificial Sequence
  Description of Artificial Sequence: Synthetic oligonucleotide
aaggucuuaccacagcggc

SEQ ID NO: 2926368 - RNA, 19 nt, Artificial Sequence
  Description of Artificial Sequence: Synthetic oligonucleotide
uucuugaagaccuuggagc

SEQ ID NO: 2926369 - RNA, 19 nt, Artificial Sequence
  Description of Artificial Sequence: Synthetic oligonucleotide
ugaaggucuuaccacagcg

SEQ ID NO: 2926370 - RNA, 19 nt, Artificial Sequence
  Description of Artificial Sequence: Synthetic oligonucleotide
uuggucauguugcugaagg

SEQ ID NO: 2926371 - RNA, 19 nt, Artificial Sequence
  Description of Artificial Sequence: Synthetic oligonucleotide
aagaccuuggagcaggcag

SEQ ID NO: 2926372 - RNA, 19 nt, Artificial Sequence
  Description of Artificial Sequence: Synthetic oligonucleotide
aacuuggucauguugcuga

SEQ ID NO: 2926373 - RNA, 19 nt, Artificial Sequence
  Description of Artificial Sequence: Synthetic oligonucleotide
guggguaccacccacgugg

SEQ ID NO: 2926374 - RNA, 19 nt, Artificial Sequence
  Description of Artificial Sequence: Synthetic oligonucleotide
ucuugaagaccuuggagca

SEQ ID NO: 2926375 - RNA, 19 nt, Artificial Sequence
  Description of Artificial Sequence: Synthetic oligonucleotide
agcuguggacuucucaccc

SEQ ID NO: 2926376 - RNA, 19 nt, Artificial Sequence
  Description of Artificial Sequence: Synthetic oligonucleotide
ugagcucagugccaaagcc

SEQ ID NO: 2926377 - RNA, 19 nt, Artificial Sequence
  Description of Artificial Sequence: Synthetic oligonucleotide
uaaagcugcgcugacacug

SEQ ID NO: 2926378 - RNA, 19 nt, Artificial Sequence
  Description of Artificial Sequence: Synthetic oligonucleotide
uuggcagagcuaaagcugc

SEQ ID NO: 2926379 - RNA, 19 nt, Artificial Sequence
  Description of Artificial Sequence: Synthetic oligonucleotide
agagguagcgggcuucccc

SEQ ID NO: 2926380 - RNA, 19 nt, Artificial Sequence
  Description of Artificial Sequence: Synthetic oligonucleotide
ugaagaggcgcagugcugg

SEQ ID NO: 2926381 - RNA, 19 nt, Artificial Sequence
  Description of Artificial Sequence: Synthetic oligonucleotide
uugaagaccuuggagcagg

SEQ ID NO: 2926382 - RNA, 19 nt, Artificial Sequence
  Description of Artificial Sequence: Synthetic oligonucleotide
agguguggguggcagacgc

SEQ ID NO: 2926383 - RNA, 19 nt, Artificial Sequence
  Description of Artificial Sequence: Synthetic oligonucleotide
cuucuugaagaccuuggag

SEQ ID NO: 2926384 - RNA, 19 nt, Artificial Sequence
  Description of Artificial Sequence: Synthetic oligonucleotide
ugggccaccagugugagcu

SEQ ID NO: 2926385 - RNA, 19 nt, Artificial Sequence
  Description of Artificial Sequence: Synthetic oligonucleotide
gagguagcgggcuuccccg

SEQ ID NO: 2926386 - RNA, 19 nt, Artificial Sequence
  Description of Artificial Sequence: Synthetic oligonucleotide
agugugggcucgccgaugg

SEQ ID NO: 2926387 - RNA, 19 nt, Artificial Sequence
  Description of Artificial Sequence: Synthetic oligonucleotide
acaguccacacagagguag

SEQ ID NO: 2926388 - RNA, 19 nt, Artificial Sequence
  Description of Artificial Sequence: Synthetic oligonucleotide
ugugagcucagugccaaag

SEQ ID NO: 2926389 - RNA, 19 nt, Artificial Sequence
  Description of Artificial Sequence: Synthetic oligonucleotide
agagaggccgccuucuuga

SEQ ID NO: 2926390 - RNA, 19 nt, Artificial Sequence
  Description of Artificial Sequence: Synthetic oligonucleotide
cucagugccaaagccacgg

SEQ ID NO: 2926391 - RNA, 19 nt, Artificial Sequence
  Description of Artificial Sequence: Synthetic oligonucleotide
ucuuaccacagcggcagcg

SEQ ID NO: 2926392 - RNA, 19 nt, Artificial Sequence
  Description of Artificial Sequence: Synthetic oligonucleotide
guuggcagagcuaaagcug

SEQ ID NO: 2926393 - RNA, 19 nt, Artificial Sequence
  Description of Artificial Sequence: Synthetic oligonucleotide
agcucagugccaaagccac

SEQ ID NO: 2926394 - RNA, 19 nt, Artificial Sequence
  Description of Artificial Sequence: Synthetic oligonucleotide
ggugucaucagccgggagc

SEQ ID NO: 2926395 - RNA, 19 nt, Artificial Sequence
  Description of Artificial Sequence: Synthetic oligonucleotide
uguugcugaaggucuuacc

SEQ ID NO: 2926396 - RNA, 19 nt, Artificial Sequence
  Description of Artificial Sequence: Synthetic oligonucleotide
agagcuaaagcugcgcuga

SEQ ID NO: 2926397 - RNA, 19 nt, Artificial Sequence
  Description of Artificial Sequence: Synthetic oligonucleotide
acacucguggguaccaccc

SEQ ID NO: 2926398 - RNA, 19 nt, Artificial Sequence
  Description of Artificial Sequence: Synthetic oligonucleotide
cuuggagcaggcaguacac

SEQ ID NO: 2926399 - RNA, 19 nt, Artificial Sequence
  Description of Artificial Sequence: Synthetic oligonucleotide
gaggccgccuucuugaaga

SEQ ID NO: 2926400 - RNA, 19 nt, Artificial Sequence
  Description of Artificial Sequence: Synthetic oligonucleotide
ucagccgguuggcagagcu

SEQ ID NO: 2926401 - RNA, 19 nt, Artificial Sequence
  Description of Artificial Sequence: Synthetic oligonucleotide
acucguggguaccacccac

SEQ ID NO: 2926402 - RNA, 19 nt, Artificial Sequence
  Description of Artificial Sequence: Synthetic oligonucleotide
agaggcgcagugcugggag

SEQ ID NO: 2926403 - RNA, 19 nt, Artificial Sequence
  Description of Artificial Sequence: Synthetic oligonucleotide
accacagcggcagcggugc

SEQ ID NO: 2926404 - RNA, 19 nt, Artificial Sequence
  Description of Artificial Sequence: Synthetic oligonucleotide
caggcaguacacucguggg

SEQ ID NO: 2926405 - RNA, 19 nt, Artificial Sequence
  Description of Artificial Sequence: Synthetic oligonucleotide
aaagcugcgcugacacugg

SEQ ID NO: 2926406 - RNA, 19 nt, Artificial Sequence
  Description of Artificial Sequence: Synthetic oligonucleotide
caauggguuggcagugugg

SEQ ID NO: 2926407 - RNA, 19 nt, Artificial Sequence
  Description of Artificial Sequence: Synthetic oligonucleotide
ucagccgggagcucugcag

SEQ ID NO: 2926408 - RNA, 19 nt, Artificial Sequence
  Description of Artificial Sequence: Synthetic oligonucleotide
aagcugcgcugacacuggc

SEQ ID NO: 2926409 - RNA, 19 nt, Artificial Sequence
  Description of Artificial Sequence: Synthetic oligonucleotide
cugggagcaauccccacag

SEQ ID NO: 2926410 - RNA, 19 nt, Artificial Sequence
  Description of Artificial Sequence: Synthetic oligonucleotide
gcaggcaguacacucgugg

SEQ ID NO: 2926411 - RNA, 19 nt, Artificial Sequence
  Description of Artificial Sequence: Synthetic oligonucleotide
gcuaaagcugcgcugacac

SEQ ID NO: 2926412 - RNA, 19 nt, Artificial Sequence
  Description of Artificial Sequence: Synthetic oligonucleotide
uggagcaggcaguacacuc

SEQ ID NO: 2926413 - RNA, 19 nt, Artificial Sequence
  Description of Artificial Sequence: Synthetic oligonucleotide
gagcuguggacuucucacc

SEQ ID NO: 2926414 - RNA, 19 nt, Artificial Sequence
  Description of Artificial Sequence: Synthetic oligonucleotide
gggagcaauccccacagcc

SEQ ID NO: 2926415 - RNA, 19 nt, Artificial Sequence
  Description of Artificial Sequence: Synthetic oligonucleotide
cuuaccacagcggcagcgg

SEQ ID NO: 2926416 - RNA, 19 nt, Artificial Sequence
  Description of Artificial Sequence: Synthetic oligonucleotide
gaagguguggguggcagac

SEQ ID NO: 2926417 - RNA, 19 nt, Artificial Sequence
  Description of Artificial Sequence: Synthetic oligonucleotide
uacacucguggguaccacc

SEQ ID NO: 2926418 - RNA, 19 nt, Artificial Sequence
  Description of Artificial Sequence: Synthetic oligonucleotide
ggagcuguggacuucucac

SEQ ID NO: 2926419 - RNA, 19 nt, Artificial Sequence
  Description of Artificial Sequence: Synthetic oligonucleotide
acagagguagcgggcuucc

SEQ ID NO: 2926420 - RNA, 19 nt, Artificial Sequence
  Description of Artificial Sequence: Synthetic oligonucleotide
gccaugagccaucagccgg

SEQ ID NO: 2926421 - RNA, 19 nt, Artificial Sequence
  Description of Artificial Sequence: Synthetic oligonucleotide
uggguaccacccacguggg

SEQ ID NO: 2926422 - RNA, 19 nt, Artificial Sequence
  Description of Artificial Sequence: Synthetic oligonucleotide
auguugcugaaggucuuac

SEQ ID NO: 2926423 - RNA, 19 nt, Artificial Sequence
  Description of Artificial Sequence: Synthetic oligonucleotide
ucgccgaugggccaccagu

SEQ ID NO: 2926424 - RNA, 19 nt, Artificial Sequence
  Description of Artificial Sequence: Synthetic oligonucleotide
acgccgggcccagagaugc

SEQ ID NO: 2926425 - RNA, 19 nt, Artificial Sequence
  Description of Artificial Sequence: Synthetic oligonucleotide
ggucuuaccacagcggcag

SEQ ID NO: 2926426 - RNA, 19 nt, Artificial Sequence
  Description of Artificial Sequence: Synthetic oligonucleotide
uggaagguguggguggcag

SEQ ID NO: 2926427 - RNA, 19 nt, Artificial Sequence
  Description of Artificial Sequence: Synthetic oligonucleotide
uggcagagcuaaagcugcg

SEQ ID NO: 2926428 - RNA, 19 nt, Artificial Sequence
  Description of Artificial Sequence: Synthetic oligonucleotide
gaagaggcgcagugcuggg

SEQ ID NO: 2926429 - RNA, 19 nt, Artificial Sequence
  Description of Artificial Sequence: Synthetic oligonucleotide
agugccaaagccacggcca

SEQ ID NO: 2926430 - RNA, 19 nt, Artificial Sequence
  Description of Artificial Sequence: Synthetic oligonucleotide
cagagcuaaagcugcgcug

SEQ ID NO: 2926431 - RNA, 19 nt, Artificial Sequence
  Description of Artificial Sequence: Synthetic oligonucleotide
agagaugcccggcgguguc

SEQ ID NO: 2926432 - RNA, 19 nt, Artificial Sequence
  Description of Artificial Sequence: Synthetic oligonucleotide
ugugggcucgccgaugggc

SEQ ID NO: 2926433 - RNA, 19 nt, Artificial Sequence
  Description of Artificial Sequence: Synthetic oligonucleotide
cucguggguaccacccacg

SEQ ID NO: 2926434 - RNA, 19 nt, Artificial Sequence
  Description of Artificial Sequence: Synthetic oligonucleotide
ugaagaccuuggagcaggc

SEQ ID NO: 2926435 - RNA, 19 nt, Artificial Sequence
  Description of Artificial Sequence: Synthetic oligonucleotide
cagugccaaagccacggcc

SEQ ID NO: 2926436 - RNA, 19 nt, Artificial Sequence
  Description of Artificial Sequence: Synthetic oligonucleotide
guguggguggcagacgccg

SEQ ID NO: 2926437 - RNA, 19 nt, Artificial Sequence
  Description of Artificial Sequence: Synthetic oligonucleotide
gguaccacccacgugggcc

SEQ ID NO: 2926438 - RNA, 19 nt, Artificial Sequence
  Description of Artificial Sequence: Synthetic oligonucleotide
ccagugugagcucagugcc

SEQ ID NO: 2926439 - RNA, 19 nt, Artificial Sequence
  Description of Artificial Sequence: Synthetic oligonucleotide
agcggcagcggugcaaugg

SEQ ID NO: 2926440 - RNA, 19 nt, Artificial Sequence
  Description of Artificial Sequence: Synthetic oligonucleotide
ugcaguggaaggugugggu

SEQ ID NO: 2926441 - RNA, 19 nt, Artificial Sequence
  Description of Artificial Sequence: Synthetic oligonucleotide
uggcagugugggcucgccg

SEQ ID NO: 2926442 - RNA, 19 nt, Artificial Sequence
  Description of Artificial Sequence: Synthetic oligonucleotide
cugacacuggcugcagugg

SEQ ID NO: 2926443 - RNA, 19 nt, Artificial Sequence
  Description of Artificial Sequence: Synthetic oligonucleotide
aagguguggguggcagacg

SEQ ID NO: 2926444 - RNA, 19 nt, Artificial Sequence
  Description of Artificial Sequence: Synthetic oligonucleotide
ucagugccaaagccacggc

SEQ ID NO: 2926445 - RNA, 19 nt, Artificial Sequence
  Description of Artificial Sequence: Synthetic oligonucleotide
aagccacggccacagucca

SEQ ID NO: 2926446 - RNA, 19 nt, Artificial Sequence
  Description of Artificial Sequence: Synthetic oligonucleotide
uggucauguugcugaaggu

SEQ ID NO: 2926447 - RNA, 19 nt, Artificial Sequence
  Description of Artificial Sequence: Synthetic oligonucleotide
ucaucagccgggagcucug

SEQ ID NO: 2926448 - RNA, 19 nt, Artificial Sequence
  Description of Artificial Sequence: Synthetic oligonucleotide
uaccacagcggcagcggug

SEQ ID NO: 2926449 - RNA, 19 nt, Artificial Sequence
  Description of Artificial Sequence: Synthetic oligonucleotide
uuaccacagcggcagcggu

SEQ ID NO: 2926450 - RNA, 19 nt, Artificial Sequence
  Description of Artificial Sequence: Synthetic oligonucleotide
gaacuuggucauguugcug

SEQ ID NO: 2926451 - RNA, 19 nt, Artificial Sequence
  Description of Artificial Sequence: Synthetic oligonucleotide
ggagcaggcaguacacucg

SEQ ID NO: 2926452 - RNA, 19 nt, Artificial Sequence
  Description of Artificial Sequence: Synthetic oligonucleotide
aggcaguacacucgugggu

SEQ ID NO: 2926453 - RNA, 19 nt, Artificial Sequence
  Description of Artificial Sequence: Synthetic oligonucleotide
ucguggguaccacccacgu

SEQ ID NO: 2926454 - RNA, 19 nt, Artificial Sequence
  Description of Artificial Sequence: Synthetic oligonucleotide
cuugaagaccuuggagcag

SEQ ID NO: 2926455 - RNA, 19 nt, Artificial Sequence
  Description of Artificial Sequence: Synthetic oligonucleotide
agguagcgggcuuccccgc

SEQ ID NO: 2926456 - RNA, 19 nt, Artificial Sequence
  Description of Artificial Sequence: Synthetic oligonucleotide
acacuggcugcaguggaag

SEQ ID NO: 2926457 - RNA, 19 nt, Artificial Sequence
  Description of Artificial Sequence: Synthetic oligonucleotide
cucugcagcuguugccucc

SEQ ID NO: 2926458 - RNA, 19 nt, Artificial Sequence
  Description of Artificial Sequence: Synthetic oligonucleotide
gcugacacuggcugcagug

SEQ ID NO: 2926459 - RNA, 19 nt, Artificial Sequence
  Description of Artificial Sequence: Synthetic oligonucleotide
guaccacccacgugggccc

SEQ ID NO: 2926460 - RNA, 19 nt, Artificial Sequence
  Description of Artificial Sequence: Synthetic oligonucleotide
ucauguugcugaaggucuu

SEQ ID NO: 2926461 - RNA, 19 nt, Artificial Sequence
  Description of Artificial Sequence: Synthetic oligonucleotide
agcggugcaauggguuggc

SEQ ID NO: 2926462 - RNA, 19 nt, Artificial Sequence
  Description of Artificial Sequence: Synthetic oligonucleotide
ugcgcugacacuggcugca

SEQ ID NO: 2926463 - RNA, 19 nt, Artificial Sequence
  Description of Artificial Sequence: Synthetic oligonucleotide
gcugcgcugacacuggcug

SEQ ID NO: 2926464 - RNA, 19 nt, Artificial Sequence
  Description of Artificial Sequence: Synthetic oligonucleotide
agaggccgccuucuugaag

SEQ ID NO: 2926465 - RNA, 19 nt, Artificial Sequence
  Description of Artificial Sequence: Synthetic oligonucleotide
ggagcaauccccacagccc

SEQ ID NO: 2926466 - RNA, 19 nt, Artificial Sequence
  Description of Artificial Sequence: Synthetic oligonucleotide
gaugggccaccagugugag

SEQ ID NO: 2926467 - RNA, 19 nt, Artificial Sequence
  Description of Artificial Sequence: Synthetic oligonucleotide
agacgccgggcccagagau

SEQ ID NO: 2926468 - RNA, 19 nt, Artificial Sequence
  Description of Artificial Sequence: Synthetic oligonucleotide
caguccacacagagguagc

SEQ ID NO: 2926469 - RNA, 19 nt, Artificial Sequence
  Description of Artificial Sequence: Synthetic oligonucleotide
cagugcugggagcaauccc

SEQ ID NO: 2926470 - RNA, 19 nt, Artificial Sequence
  Description of Artificial Sequence: Synthetic oligonucleotide
aguacacucguggguacca

SEQ ID NO: 2926471 - RNA, 19 nt, Artificial Sequence
  Description of Artificial Sequence: Synthetic oligonucleotide
ccggccaugagccaucagc

SEQ ID NO: 2926472 - RNA, 19 nt, Artificial Sequence
  Description of Artificial Sequence: Synthetic oligonucleotide
cugaagaggcgcagugcug

SEQ ID NO: 2926473 - RNA, 19 nt, Artificial Sequence
  Description of Artificial Sequence: Synthetic oligonucleotide
gagcucagugccaaagcca

SEQ ID NO: 2926474 - RNA, 19 nt, Artificial Sequence
  Description of Artificial Sequence: Synthetic oligonucleotide
agugugagcucagugccaa

SEQ ID NO: 2926475 - RNA, 19 nt, Artificial Sequence
  Description of Artificial Sequence: Synthetic oligonucleotide
guggguggcagacgccggg

SEQ ID NO: 2926476 - RNA, 19 nt, Artificial Sequence
  Description of Artificial Sequence: Synthetic oligonucleotide
guagcgggcuuccccgcgg

SEQ ID NO: 2926477 - RNA, 19 nt, Artificial Sequence
  Description of Artificial Sequence: Synthetic oligonucleotide
ggucauguugcugaagguc

SEQ ID NO: 2926478 - RNA, 19 nt, Artificial Sequence
  Description of Artificial Sequence: Synthetic oligonucleotide
gagcaauccccacagcccu

SEQ ID NO: 2926479 - RNA, 19 nt, Artificial Sequence
  Description of Artificial Sequence: Synthetic oligonucleotide
gucauguugcugaaggucu

SEQ ID NO: 2926480 - RNA, 19 nt, Artificial Sequence
  Description of Artificial Sequence: Synthetic oligonucleotide
caccagugugagcucagug

SEQ ID NO: 2926481 - RNA, 19 nt, Artificial Sequence
  Description of Artificial Sequence: Synthetic oligonucleotide
gugggcccggccaugagcc

SEQ ID NO: 2926482 - RNA, 19 nt, Artificial Sequence
  Description of Artificial Sequence: Synthetic oligonucleotide
gguuggcagagcuaaagcu

SEQ ID NO: 2926483 - RNA, 19 nt, Artificial Sequence
  Description of Artificial Sequence: Synthetic oligonucleotide
cagccgggagcucugcagc

SEQ ID NO: 2926484 - RNA, 19 nt, Artificial Sequence
  Description of Artificial Sequence: Synthetic oligonucleotide
gccaucagccgguuggcag

SEQ ID NO: 2926485 - RNA, 19 nt, Artificial Sequence
  Description of Artificial Sequence: Synthetic oligonucleotide
agaccuuggagcaggcagu

SEQ ID NO: 2926486 - RNA, 19 nt, Artificial Sequence
  Description of Artificial Sequence: Synthetic oligonucleotide
uggcugcaguggaaggugu

SEQ ID NO: 2926487 - RNA, 19 nt, Artificial Sequence
  Description of Artificial Sequence: Synthetic oligonucleotide
ggccaugagccaucagccg

SEQ ID NO: 2926488 - RNA, 19 nt, Artificial Sequence
  Description of Artificial Sequence: Synthetic oligonucleotide
aggccgccuucuugaagac

SEQ ID NO: 2926489 - RNA, 19 nt, Artificial Sequence
  Description of Artificial Sequence: Synthetic oligonucleotide
augggccaccagugugagc

SEQ ID NO: 2926490 - RNA, 19 nt, Artificial Sequence
  Description of Artificial Sequence: Synthetic oligonucleotide
gagaugcccggcggugucg

SEQ ID NO: 2926491 - RNA, 19 nt, Artificial Sequence
  Description of Artificial Sequence: Synthetic oligonucleotide
gccuucuugaagaccuugg

SEQ ID NO: 2926492 - RNA, 19 nt, Artificial Sequence
  Description of Artificial Sequence: Synthetic oligonucleotide
ggugcaauggguuggcagu

SEQ ID NO: 2926493 - RNA, 19 nt, Artificial Sequence
  Description of Artificial Sequence: Synthetic oligonucleotide
agaugcccggcggugucgg

SEQ ID NO: 2926494 - RNA, 19 nt, Artificial Sequence
  Description of Artificial Sequence: Synthetic oligonucleotide
cagcggugcaauggguugg

SEQ ID NO: 2926495 - RNA, 19 nt, Artificial Sequence
  Description of Artificial Sequence: Synthetic oligonucleotide
ugggagcaauccccacagc

SEQ ID NO: 2926496 - RNA, 19 nt, Artificial Sequence
  Description of Artificial Sequence: Synthetic oligonucleotide
agccgguuggcagagcuaa

SEQ ID NO: 2926497 - RNA, 19 nt, Artificial Sequence
  Description of Artificial Sequence: Synthetic oligonucleotide
ugcaauggguuggcagugu

SEQ ID NO: 2926498 - RNA, 19 nt, Artificial Sequence
  Description of Artificial Sequence: Synthetic oligonucleotide
aagaggcgcagugcuggga

SEQ ID NO: 2926499 - RNA, 19 nt, Artificial Sequence
  Description of Artificial Sequence: Synthetic oligonucleotide
agcuaaagcugcgcugaca

SEQ ID NO: 2926500 - RNA, 19 nt, Artificial Sequence
  Description of Artificial Sequence: Synthetic oligonucleotide
gugcaauggguuggcagug

SEQ ID NO: 2926501 - RNA, 19 nt, Artificial Sequence
  Description of Artificial Sequence: Synthetic oligonucleotide
uuggagcaggcaguacacu

SEQ ID NO: 2926502 - RNA, 19 nt, Artificial Sequence
  Description of Artificial Sequence: Synthetic oligonucleotide
gcagcggugcaauggguug

SEQ ID NO: 2926503 - RNA, 19 nt, Artificial Sequence
  Description of Artificial Sequence: Synthetic oligonucleotide
cccggugucaucagccggg

SEQ ID NO: 2926504 - RNA, 19 nt, Artificial Sequence
  Description of Artificial Sequence: Synthetic oligonucleotide
acccacgugggcccggcca

SEQ ID NO: 2926505 - RNA, 19 nt, Artificial Sequence
  Description of Artificial Sequence: Synthetic oligonucleotide
gaggcgcagugcugggagc

SEQ ID NO: 2926506 - RNA, 19 nt, Artificial Sequence
  Description of Artificial Sequence: Synthetic oligonucleotide
gagcuaaagcugcgcugac

SEQ ID NO: 2926507 - RNA, 19 nt, Artificial Sequence
  Description of Artificial Sequence: Synthetic oligonucleotide
caguacacucguggguacc

SEQ ID NO: 2926508 - RNA, 19 nt, Artificial Sequence
  Description of Artificial Sequence: Synthetic oligonucleotide
cugcgcugacacuggcugc

SEQ ID NO: 2926509 - RNA, 19 nt, Artificial Sequence
  Description of Artificial Sequence: Synthetic oligonucleotide
gcggcagcggugcaauggg

SEQ ID NO: 2926510 - RNA, 19 nt, Artificial Sequence
  Description of Artificial Sequence: Synthetic oligonucleotide
gcaauggguuggcagugug

SEQ ID NO: 2926511 - RNA, 19 nt, Artificial Sequence
  Description of Artificial Sequence: Synthetic oligonucleotide
ggcggcgugccccugaaga

SEQ ID NO: 2926512 - RNA, 19 nt, Artificial Sequence
  Description of Artificial Sequence: Synthetic oligonucleotide
gguagcgggcuuccccgcg

SEQ ID NO: 2926513 - RNA, 19 nt, Artificial Sequence
  Description of Artificial Sequence: Synthetic oligonucleotide
cuuccccgcgguguagccg

SEQ ID NO: 2926514 - RNA, 19 nt, Artificial Sequence
  Description of Artificial Sequence: Synthetic oligonucleotide
ggcagugugggcucgccga

SEQ ID NO: 2926515 - RNA, 19 nt, Artificial Sequence
  Description of Artificial Sequence: Synthetic oligonucleotide
augagccaucagccgguug

SEQ ID NO: 2926516 - RNA, 19 nt, Artificial Sequence
  Description of Artificial Sequence: Synthetic oligonucleotide
ggcccagagaugcccggcg

SEQ ID NO: 2926517 - RNA, 19 nt, Artificial Sequence
  Description of Artificial Sequence: Synthetic oligonucleotide
uuggcagugugggcucgcc

SEQ ID NO: 2926518 - RNA, 19 nt, Artificial Sequence
  Description of Artificial Sequence: Synthetic oligonucleotide
ccuuggagcaggcaguaca

SEQ ID NO: 2926519 - RNA, 19 nt, Artificial Sequence
  Description of Artificial Sequence: Synthetic oligonucleotide
cggccaugagccaucagcc

SEQ ID NO: 2926520 - RNA, 19 nt, Artificial Sequence
  Description of Artificial Sequence: Synthetic oligonucleotide
gcuguggacuucucacccc

SEQ ID NO: 2926521 - RNA, 19 nt, Artificial Sequence
  Description of Artificial Sequence: Synthetic oligonucleotide
ugcugggagcaauccccac

SEQ ID NO: 2926522 - RNA, 19 nt, Artificial Sequence
  Description of Artificial Sequence: Synthetic oligonucleotide
aggucuuaccacagcggca

SEQ ID NO: 2926523 - RNA, 19 nt, Artificial Sequence
  Description of Artificial Sequence: Synthetic oligonucleotide
aucagccgggagcucugca

SEQ ID NO: 2926524 - RNA, 19 nt, Artificial Sequence
  Description of Artificial Sequence: Synthetic oligonucleotide
uccccacagcccugggcug

SEQ ID NO: 2926525 - RNA, 19 nt, Artificial Sequence
  Description of Artificial Sequence: Synthetic oligonucleotide
gagcaggcaguacacucgu

SEQ ID NO: 2926526 - RNA, 19 nt, Artificial Sequence
  Description of Artificial Sequence: Synthetic oligonucleotide
gaagaccuuggagcaggca

SEQ ID NO: 2926527 - RNA, 19 nt, Artificial Sequence
  Description of Artificial Sequence: Synthetic oligonucleotide
gcgguguagccgcuggugc

SEQ ID NO: 2926528 - RNA, 19 nt, Artificial Sequence
  Description of Artificial Sequence: Synthetic oligonucleotide
uggguggcagacgccgggc

SEQ ID NO: 2926529 - RNA, 19 nt, Artificial Sequence
  Description of Artificial Sequence: Synthetic oligonucleotide
gcagacgccgggcccagag

SEQ ID NO: 2926530 - RNA, 19 nt, Artificial Sequence
  Description of Artificial Sequence: Synthetic oligonucleotide
cacagagguagcgggcuuc

SEQ ID NO: 2926531 - RNA, 19 nt, Artificial Sequence
  Description of Artificial Sequence: Synthetic oligonucleotide
gcugggagcaauccccaca

SEQ ID NO: 2926532 - RNA, 19 nt, Artificial Sequence
  Description of Artificial Sequence: Synthetic oligonucleotide
ugggcucgccgaugggcca

SEQ ID NO: 2926533 - RNA, 19 nt, Artificial Sequence
  Description of Artificial Sequence: Synthetic oligonucleotide
gugucaucagccgggagcu

SEQ ID NO: 2926534 - RNA, 19 nt, Artificial Sequence
  Description of Artificial Sequence: Synthetic oligonucleotide
ccacacagagguagcgggc

SEQ ID NO: 2926535 - RNA, 19 nt, Artificial Sequence
  Description of Artificial Sequence: Synthetic oligonucleotide
acagcggcagcggugcaau

SEQ ID NO: 2926536 - RNA, 19 nt, Artificial Sequence
  Description of Artificial Sequence: Synthetic oligonucleotide
caauccccacagcccuggg

SEQ ID NO: 2926537 - RNA, 19 nt, Artificial Sequence
  Description of Artificial Sequence: Synthetic oligonucleotide
ggcagagcuaaagcugcgc

SEQ ID NO: 2926538 - RNA, 19 nt, Artificial Sequence
  Description of Artificial Sequence: Synthetic oligonucleotide
aggcgcagugcugggagca

SEQ ID NO: 2926539 - RNA, 19 nt, Artificial Sequence
  Description of Artificial Sequence: Synthetic oligonucleotide
gguguagccgcuggugcug

SEQ ID NO: 2926540 - RNA, 19 nt, Artificial Sequence
  Description of Artificial Sequence: Synthetic oligonucleotide
ggugucggcggcgugcccc

SEQ ID NO: 2926541 - RNA, 19 nt, Artificial Sequence
  Description of Artificial Sequence: Synthetic oligonucleotide
ugccaaagccacggccaca

SEQ ID NO: 2926542 - RNA, 19 nt, Artificial Sequence
  Description of Artificial Sequence: Synthetic oligonucleotide
cuccagagaggccgccuuc

SEQ ID NO: 2926543 - RNA, 19 nt, Artificial Sequence
  Description of Artificial Sequence: Synthetic oligonucleotide
ugcuccagagaggccgccu

SEQ ID NO: 2926544 - RNA, 19 nt, Artificial Sequence
  Description of Artificial Sequence: Synthetic oligonucleotide
cagugugagcucagugcca

SEQ ID NO: 2926545 - RNA, 19 nt, Artificial Sequence
  Description of Artificial Sequence: Synthetic oligonucleotide
gucuuaccacagcggcagc

SEQ ID NO: 2926546 - RNA, 19 nt, Artificial Sequence
  Description of Artificial Sequence: Synthetic oligonucleotide
acacagagguagcgggcuu

SEQ ID NO: 2926547 - RNA, 19 nt, Artificial Sequence
  Description of Artificial Sequence: Synthetic oligonucleotide
ggaacuuggucauguugcu

SEQ ID NO: 2926548 - RNA, 19 nt, Artificial Sequence
  Description of Artificial Sequence: Synthetic oligonucleotide
uagcgggcuuccccgcggu

SEQ ID NO: 2926549 - RNA, 19 nt, Artificial Sequence
  Description of Artificial Sequence: Synthetic oligonucleotide
ggcaguacacucgugggua

SEQ ID NO: 2926550 - RNA, 19 nt, Artificial Sequence
  Description of Artificial Sequence: Synthetic oligonucleotide
aucagccgguuggcagagc

SEQ ID NO: 2926551 - RNA, 19 nt, Artificial Sequence
  Description of Artificial Sequence: Synthetic oligonucleotide
uguagccgcuggugcugcu

SEQ ID NO: 2926552 - RNA, 19 nt, Artificial Sequence
  Description of Artificial Sequence: Synthetic oligonucleotide
gcccagagaugcccggcgg

SEQ ID NO: 2926553 - RNA, 19 nt, Artificial Sequence
  Description of Artificial Sequence: Synthetic oligonucleotide
ccuucuugaagaccuugga

SEQ ID NO: 2926554 - RNA, 19 nt, Artificial Sequence
  Description of Artificial Sequence: Synthetic oligonucleotide
gcaguacacucguggguac

SEQ ID NO: 2926555 - RNA, 19 nt, Artificial Sequence
  Description of Artificial Sequence: Synthetic oligonucleotide
gcagugcugggagcaaucc

SEQ ID NO: 2926556 - RNA, 19 nt, Artificial Sequence
  Description of Artificial Sequence: Synthetic oligonucleotide
ggcgugccccugaagaggc

SEQ ID NO: 2926557 - RNA, 19 nt, Artificial Sequence
  Description of Artificial Sequence: Synthetic oligonucleotide
gggagcuguggacuucuca

SEQ ID NO: 2926558 - RNA, 19 nt, Artificial Sequence
  Description of Artificial Sequence: Synthetic oligonucleotide
guacacucguggguaccac

SEQ ID NO: 2926559 - RNA, 19 nt, Artificial Sequence
  Description of Artificial Sequence: Synthetic oligonucleotide
gugugggcucgccgauggg

SEQ ID NO: 2926560 - RNA, 19 nt, Artificial Sequence
  Description of Artificial Sequence: Synthetic oligonucleotide
gucaucagccgggagcucu

SEQ ID NO: 2926561 - RNA, 19 nt, Artificial Sequence
  Description of Artificial Sequence: Synthetic oligonucleotide
gcggcgugccccugaagag

SEQ ID NO: 2926562 - RNA, 19 nt, Artificial Sequence
  Description of Artificial Sequence: Synthetic oligonucleotide
ccgguuggcagagcuaaag

SEQ ID NO: 2926563 - RNA, 19 nt, Artificial Sequence
  Description of Artificial Sequence: Synthetic oligonucleotide
gaugcccggcggugucggc

SEQ ID NO: 2926564 - RNA, 19 nt, Artificial Sequence
  Description of Artificial Sequence: Synthetic oligonucleotide
ccgaugggccaccagugug

SEQ ID NO: 2926565 - RNA, 19 nt, Artificial Sequence
  Description of Artificial Sequence: Synthetic oligonucleotide
cgguuggcagagcuaaagc

SEQ ID NO: 2926566 - RNA, 19 nt, Artificial Sequence
  Description of Artificial Sequence: Synthetic oligonucleotide
cggugcaauggguuggcag

SEQ ID NO: 2926567 - RNA, 19 nt, Artificial Sequence
  Description of Artificial Sequence: Synthetic oligonucleotide
gcagagcuaaagcugcgcu

SEQ ID NO: 2926568 - RNA, 19 nt, Artificial Sequence
  Description of Artificial Sequence: Synthetic oligonucleotide
guuggcagugugggcucgc

SEQ ID NO: 2926569 - RNA, 19 nt, Artificial Sequence
  Description of Artificial Sequence: Synthetic oligonucleotide
gacgccgggcccagagaug

SEQ ID NO: 2926570 - RNA, 19 nt, Artificial Sequence
  Description of Artificial Sequence: Synthetic oligonucleotide
guguagccgcuggugcugc

SEQ ID NO: 2926571 - RNA, 19 nt, Artificial Sequence
  Description of Artificial Sequence: Synthetic oligonucleotide
gagaggccgccuucuugaa

SEQ ID NO: 2926572 - RNA, 19 nt, Artificial Sequence
  Description of Artificial Sequence: Synthetic oligonucleotide
cucgccgaugggccaccag

SEQ ID NO: 2926573 - RNA, 19 nt, Artificial Sequence
  Description of Artificial Sequence: Synthetic oligonucleotide
gaccuuggagcaggcagua

SEQ ID NO: 2926574 - RNA, 19 nt, Artificial Sequence
  Description of Artificial Sequence: Synthetic oligonucleotide
caucagccgggagcucugc

SEQ ID NO: 2926575 - RNA, 19 nt, Artificial Sequence
  Description of Artificial Sequence: Synthetic oligonucleotide
ucggcggcgugccccugaa

SEQ ID NO: 2926576 - RNA, 19 nt, Artificial Sequence
  Description of Artificial Sequence: Synthetic oligonucleotide
cuaaagcugcgcugacacu

SEQ ID NO: 2926577 - RNA, 19 nt, Artificial Sequence
  Description of Artificial Sequence: Synthetic oligonucleotide
gguuggcagugugggcucg

SEQ ID NO: 2926578 - RNA, 19 nt, Artificial Sequence
  Description of Artificial Sequence: Synthetic oligonucleotide
agcugcgcugacacuggcu

SEQ ID NO: 2926579 - RNA, 19 nt, Artificial Sequence
  Description of Artificial Sequence: Synthetic oligonucleotide
acgugggcccggccaugag

SEQ ID NO: 2926580 - RNA, 19 nt, Artificial Sequence
  Description of Artificial Sequence: Synthetic oligonucleotide
cacucguggguaccaccca

SEQ ID NO: 2926581 - RNA, 19 nt, Artificial Sequence
  Description of Artificial Sequence: Synthetic oligonucleotide
guagccgcuggugcugcuc

SEQ ID NO: 2926582 - RNA, 19 nt, Artificial Sequence
  Description of Artificial Sequence: Synthetic oligonucleotide
cagagguagcgggcuuccc

SEQ ID NO: 2926583 - RNA, 19 nt, Artificial Sequence
  Description of Artificial Sequence: Synthetic oligonucleotide
ccugaagaggcgcagugcu

SEQ ID NO: 2926584 - RNA, 19 nt, Artificial Sequence
  Description of Artificial Sequence: Synthetic oligonucleotide
gccgccuucuugaagaccu

SEQ ID NO: 2926585 - RNA, 19 nt, Artificial Sequence
  Description of Artificial Sequence: Synthetic oligonucleotide
guggcagacgccgggccca

SEQ ID NO: 2926586 - RNA, 19 nt, Artificial Sequence
  Description of Artificial Sequence: Synthetic oligonucleotide
gggagcucugcagcuguug

SEQ ID NO: 2926587 - RNA, 19 nt, Artificial Sequence
  Description of Artificial Sequence: Synthetic oligonucleotide
cacacagagguagcgggcu

SEQ ID NO: 2926588 - RNA, 19 nt, Artificial Sequence
  Description of Artificial Sequence: Synthetic oligonucleotide
agccaucagccgguuggca

SEQ ID NO: 2926589 - RNA, 19 nt, Artificial Sequence
  Description of Artificial Sequence: Synthetic oligonucleotide
gcucagugccaaagccacg

SEQ ID NO: 2926590 - RNA, 19 nt, Artificial Sequence
  Description of Artificial Sequence: Synthetic oligonucleotide
agccacggccacaguccac

SEQ ID NO: 2926591 - RNA, 19 nt, Artificial Sequence
  Description of Artificial Sequence: Synthetic oligonucleotide
ccccugaagaggcgcagug

SEQ ID NO: 2926592 - RNA, 19 nt, Artificial Sequence
  Description of Artificial Sequence: Synthetic oligonucleotide
ugggcccggccaugagcca

SEQ ID NO: 2926593 - RNA, 19 nt, Artificial Sequence
  Description of Artificial Sequence: Synthetic oligonucleotide
ggcggugucggcggcgugc

SEQ ID NO: 2926594 - RNA, 19 nt, Artificial Sequence
  Description of Artificial Sequence: Synthetic oligonucleotide
gccacggccacaguccaca

SEQ ID NO: 2926595 - RNA, 19 nt, Artificial Sequence
  Description of Artificial Sequence: Synthetic oligonucleotide
agcgggcuuccccgcggug

SEQ ID NO: 2926596 - RNA, 19 nt, Artificial Sequence
  Description of Artificial Sequence: Synthetic oligonucleotide
ccccggugucaucagccgg

SEQ ID NO: 2926597 - RNA, 19 nt, Artificial Sequence
  Description of Artificial Sequence: Synthetic oligonucleotide
uggcagacgccgggcccag

SEQ ID NO: 2926598 - RNA, 19 nt, Artificial Sequence
  Description of Artificial Sequence: Synthetic oligonucleotide
ggguuggcagugugggcuc

SEQ ID NO: 2926599 - RNA, 19 nt, Artificial Sequence
  Description of Artificial Sequence: Synthetic oligonucleotide
cccugaagaggcgcagugc

SEQ ID NO: 2926600 - RNA, 19 nt, Artificial Sequence
  Description of Artificial Sequence: Synthetic oligonucleotide
agcaggcaguacacucgug

SEQ ID NO: 2926601 - RNA, 19 nt, Artificial Sequence
  Description of Artificial Sequence: Synthetic oligonucleotide
cacggccacaguccacaca

SEQ ID NO: 2926602 - RNA, 19 nt, Artificial Sequence
  Description of Artificial Sequence: Synthetic oligonucleotide
cagugugggcucgccgaug

SEQ ID NO: 2926603 - RNA, 19 nt, Artificial Sequence
  Description of Artificial Sequence: Synthetic oligonucleotide
gcuuccccgcgguguagcc

SEQ ID NO: 2926604 - RNA, 19 nt, Artificial Sequence
  Description of Artificial Sequence: Synthetic oligonucleotide
agccgcuggugcugcucca

SEQ ID NO: 2926605 - RNA, 19 nt, Artificial Sequence
  Description of Artificial Sequence: Synthetic oligonucleotide
ugucaucagccgggagcuc

SEQ ID NO: 2926606 - RNA, 19 nt, Artificial Sequence
  Description of Artificial Sequence: Synthetic oligonucleotide
gguguggguggcagacgcc

SEQ ID NO: 2926607 - RNA, 19 nt, Artificial Sequence
  Description of Artificial Sequence: Synthetic oligonucleotide
ccagagaugcccggcggug

SEQ ID NO: 2926608 - RNA, 19 nt, Artificial Sequence
  Description of Artificial Sequence: Synthetic oligonucleotide
cccgcgguguagccgcugg

SEQ ID NO: 2926609 - RNA, 19 nt, Artificial Sequence
  Description of Artificial Sequence: Synthetic oligonucleotide
ccgggcccagagaugcccg

SEQ ID NO: 2926610 - RNA, 19 nt, Artificial Sequence
  Description of Artificial Sequence: Synthetic oligonucleotide
accacccacgugggcccgg

SEQ ID NO: 2926611 - RNA, 19 nt, Artificial Sequence
  Description of Artificial Sequence: Synthetic oligonucleotide
gcugcuccagagaggccgc

SEQ ID NO: 2926612 - RNA, 19 nt, Artificial Sequence
  Description of Artificial Sequence: Synthetic oligonucleotide
cgugggcccggccaugagc

SEQ ID NO: 2926613 - RNA, 19 nt, Artificial Sequence
  Description of Artificial Sequence: Synthetic oligonucleotide
ggguaccacccacgugggc

SEQ ID NO: 2926614 - RNA, 19 nt, Artificial Sequence
  Description of Artificial Sequence: Synthetic oligonucleotide
ggcuuccccgcgguguagc

SEQ ID NO: 2926615 - RNA, 19 nt, Artificial Sequence
  Description of Artificial Sequence: Synthetic oligonucleotide
gccgggcccagagaugccc

SEQ ID NO: 2926616 - RNA, 19 nt, Artificial Sequence
  Description of Artificial Sequence: Synthetic oligonucleotide
cagacgccgggcccagaga

SEQ ID NO: 2926617 - RNA, 19 nt, Artificial Sequence
  Description of Artificial Sequence: Synthetic oligonucleotide
gccaccagugugagcucag

SEQ ID NO: 2926618 - RNA, 19 nt, Artificial Sequence
  Description of Artificial Sequence: Synthetic oligonucleotide
gugccccugaagaggcgca

SEQ ID NO: 2926619 - RNA, 19 nt, Artificial Sequence
  Description of Artificial Sequence: Synthetic oligonucleotide
gucggcggcgugccccuga

SEQ ID NO: 2926620 - RNA, 19 nt, Artificial Sequence
  Description of Artificial Sequence: Synthetic oligonucleotide
gugugagcucagugccaaa

SEQ ID NO: 2926621 - RNA, 19 nt, Artificial Sequence
  Description of Artificial Sequence: Synthetic oligonucleotide
cgugccccugaagaggcgc

SEQ ID NO: 2926622 - RNA, 19 nt, Artificial Sequence
  Description of Artificial Sequence: Synthetic oligonucleotide
cgccgaugggccaccagug

SEQ ID NO: 2926623 - RNA, 19 nt, Artificial Sequence
  Description of Artificial Sequence: Synthetic oligonucleotide
cagcggcagcggugcaaug

SEQ ID NO: 2926624 - RNA, 19 nt, Artificial Sequence
  Description of Artificial Sequence: Synthetic oligonucleotide
ggccgccuucuugaagacc

SEQ ID NO: 2926625 - RNA, 19 nt, Artificial Sequence
  Description of Artificial Sequence: Synthetic oligonucleotide
cacccacgugggcccggcc

SEQ ID NO: 2926626 - RNA, 19 nt, Artificial Sequence
  Description of Artificial Sequence: Synthetic oligonucleotide
uccccgcgguguagccgcu

SEQ ID NO: 2926627 - RNA, 19 nt, Artificial Sequence
  Description of Artificial Sequence: Synthetic oligonucleotide
cgcagugcugggagcaauc

SEQ ID NO: 2926628 - RNA, 19 nt, Artificial Sequence
  Description of Artificial Sequence: Synthetic oligonucleotide
ggccaccagugugagcuca

SEQ ID NO: 2926629 - RNA, 19 nt, Artificial Sequence
  Description of Artificial Sequence: Synthetic oligonucleotide
ccccacagcccugggcugg

SEQ ID NO: 2926630 - RNA, 19 nt, Artificial Sequence
  Description of Artificial Sequence: Synthetic oligonucleotide
cacagcggcagcggugcaa

SEQ ID NO: 2926631 - RNA, 19 nt, Artificial Sequence
  Description of Artificial Sequence: Synthetic oligonucleotide
cggcgugccccugaagagg

SEQ ID NO: 2926632 - RNA, 19 nt, Artificial Sequence
  Description of Artificial Sequence: Synthetic oligonucleotide
gggcccagagaugcccggc

SEQ ID NO: 2926633 - RNA, 19 nt, Artificial Sequence
  Description of Artificial Sequence: Synthetic oligonucleotide
cacgugggcccggccauga

SEQ ID NO: 2926634 - RNA, 19 nt, Artificial Sequence
  Description of Artificial Sequence: Synthetic oligonucleotide
cguggguaccacccacgug

SEQ ID NO: 2926635 - RNA, 19 nt, Artificial Sequence
  Description of Artificial Sequence: Synthetic oligonucleotide
ccaugagccaucagccggu

SEQ ID NO: 2926636 - RNA, 19 nt, Artificial Sequence
  Description of Artificial Sequence: Synthetic oligonucleotide
gcggugucggcggcgugcc

SEQ ID NO: 2926637 - RNA, 19 nt, Artificial Sequence
  Description of Artificial Sequence: Synthetic oligonucleotide
cagccgguuggcagagcua

SEQ ID NO: 2926638 - RNA, 19 nt, Artificial Sequence
  Description of Artificial Sequence: Synthetic oligonucleotide
cagagaugcccggcggugu

SEQ ID NO: 2926639 - RNA, 19 nt, Artificial Sequence
  Description of Artificial Sequence: Synthetic oligonucleotide
ugucggcggcgugccccug

SEQ ID NO: 2926640 - RNA, 19 nt, Artificial Sequence
  Description of Artificial Sequence: Synthetic oligonucleotide
gugucggcggcgugccccu

SEQ ID NO: 2926641 - RNA, 19 nt, Artificial Sequence
  Description of Artificial Sequence: Synthetic oligonucleotide
cgccuucuugaagaccuug

SEQ ID NO: 2926642 - RNA, 19 nt, Artificial Sequence
  Description of Artificial Sequence: Synthetic oligonucleotide
cgcgguguagccgcuggug

SEQ ID NO: 2926643 - RNA, 19 nt, Artificial Sequence
  Description of Artificial Sequence: Synthetic oligonucleotide
gccgaugggccaccagugu

SEQ ID NO: 2926644 - RNA, 19 nt, Artificial Sequence
  Description of Artificial Sequence: Synthetic oligonucleotide
cgggcccagagaugcccgg

SEQ ID NO: 2926645 - RNA, 19 nt, Artificial Sequence
  Description of Artificial Sequence: Synthetic oligonucleotide
gcgcugacacuggcugcag

SEQ ID NO: 2926646 - RNA, 19 nt, Artificial Sequence
  Description of Artificial Sequence: Synthetic oligonucleotide
cccacagcccugggcuggg

SEQ ID NO: 2926647 - RNA, 19 nt, Artificial Sequence
  Description of Artificial Sequence: Synthetic oligonucleotide
ggcagcggugcaauggguu

SEQ ID NO: 2926648 - RNA, 19 nt, Artificial Sequence
  Description of Artificial Sequence: Synthetic oligonucleotide
gcgugccccugaagaggcg

SEQ ID NO: 2926649 - RNA, 19 nt, Artificial Sequence
  Description of Artificial Sequence: Synthetic oligonucleotide
gggcucgccgaugggccac

SEQ ID NO: 2926650 - RNA, 19 nt, Artificial Sequence
  Description of Artificial Sequence: Synthetic oligonucleotide
gggcuuccccgcgguguag

SEQ ID NO: 2926651 - RNA, 19 nt, Artificial Sequence
  Description of Artificial Sequence: Synthetic oligonucleotide
gggccaccagugugagcuc

SEQ ID NO: 2926652 - RNA, 19 nt, Artificial Sequence
  Description of Artificial Sequence: Synthetic oligonucleotide
gcuccagagaggccgccuu

SEQ ID NO: 2926653 - RNA, 19 nt, Artificial Sequence
  Description of Artificial Sequence: Synthetic oligonucleotide
gcagugugggcucgccgau

SEQ ID NO: 2926654 - RNA, 19 nt, Artificial Sequence
  Description of Artificial Sequence: Synthetic oligonucleotide
ggcucgccgaugggccacc

SEQ ID NO: 2926655 - RNA, 19 nt, Artificial Sequence
  Description of Artificial Sequence: Synthetic oligonucleotide
cggugucaucagccgggag

SEQ ID NO: 2926656 - RNA, 19 nt, Artificial Sequence
  Description of Artificial Sequence: Synthetic oligonucleotide
ggcccggccaugagccauc

SEQ ID NO: 2926657 - RNA, 19 nt, Artificial Sequence
  Description of Artificial Sequence: Synthetic oligonucleotide
cccagagaugcccggcggu

SEQ ID NO: 2926658 - RNA, 19 nt, Artificial Sequence
  Description of Artificial Sequence: Synthetic oligonucleotide
gcgggcuuccccgcggugu

SEQ ID NO: 2926659 - RNA, 19 nt, Artificial Sequence
  Description of Artificial Sequence: Synthetic oligonucleotide
ggcgcagugcugggagcaa

SEQ ID NO: 2926660 - RNA, 19 nt, Artificial Sequence
  Description of Artificial Sequence: Synthetic oligonucleotide
cccggcggugucggcggcg

SEQ ID NO: 2926661 - RNA, 19 nt, Artificial Sequence
  Description of Artificial Sequence: Synthetic oligonucleotide
caugagccaucagccgguu

SEQ ID NO: 2926662 - RNA, 19 nt, Artificial Sequence
  Description of Artificial Sequence: Synthetic oligonucleotide
gcggugcaauggguuggca

SEQ ID NO: 2926663 - RNA, 19 nt, Artificial Sequence
  Description of Artificial Sequence: Synthetic oligonucleotide
cccggccaugagccaucag

SEQ ID NO: 2926664 - RNA, 19 nt, Artificial Sequence
  Description of Artificial Sequence: Synthetic oligonucleotide
ccgggagcucugcagcugu

SEQ ID NO: 2926665 - RNA, 19 nt, Artificial Sequence
  Description of Artificial Sequence: Synthetic oligonucleotide
ccacagcccugggcugggg

SEQ ID NO: 2926666 - RNA, 19 nt, Artificial Sequence
  Description of Artificial Sequence: Synthetic oligonucleotide
ccgcuggugcugcuccaga

SEQ ID NO: 2926667 - RNA, 19 nt, Artificial Sequence
  Description of Artificial Sequence: Synthetic oligonucleotide
ccggugucaucagccggga

SEQ ID NO: 2926668 - RNA, 19 nt, Artificial Sequence
  Description of Artificial Sequence: Synthetic oligonucleotide
cgguguagccgcuggugcu

SEQ ID NO: 2926669 - RNA, 19 nt, Artificial Sequence
  Description of Artificial Sequence: Synthetic oligonucleotide
ccacgugggcccggccaug

SEQ ID NO: 2926670 - RNA, 19 nt, Artificial Sequence
  Description of Artificial Sequence: Synthetic oligonucleotide
gccgguuggcagagcuaaa

SEQ ID NO: 2926671 - RNA, 19 nt, Artificial Sequence
  Description of Artificial Sequence: Synthetic oligonucleotide
gcccggccaugagccauca

SEQ ID NO: 2926672 - RNA, 19 nt, Artificial Sequence
  Description of Artificial Sequence: Synthetic oligonucleotide
cgccgggcccagagaugcc

SEQ ID NO: 2926673 - RNA, 19 nt, Artificial Sequence
  Description of Artificial Sequence: Synthetic oligonucleotide
gggcccggccaugagccau

SEQ ID NO: 2926674 - RNA, 19 nt, Artificial Sequence
  Description of Artificial Sequence: Synthetic oligonucleotide
cccacgugggcccggccau

SEQ ID NO: 2926675 - RNA, 19 nt, Artificial Sequence
  Description of Artificial Sequence: Synthetic oligonucleotide
gcucgccgaugggccacca

SEQ ID NO: 2926676 - RNA, 19 nt, Artificial Sequence
  Description of Artificial Sequence: Synthetic oligonucleotide
gcgcagugcugggagcaau

SEQ ID NO: 2926677 - RNA, 19 nt, Artificial Sequence
  Description of Artificial Sequence: Synthetic oligonucleotide
ccaccagugugagcucagu

SEQ ID NO: 2926678 - RNA, 19 nt, Artificial Sequence
  Description of Artificial Sequence: Synthetic oligonucleotide
ggcagacgccgggcccaga

SEQ ID NO: 2926679 - RNA, 19 nt, Artificial Sequence
  Description of Artificial Sequence: Synthetic oligonucleotide
ccacagcggcagcggugca

SEQ ID NO: 2926680 - RNA, 19 nt, Artificial Sequence
  Description of Artificial Sequence: Synthetic oligonucleotide
cggccacaguccacacaga

SEQ ID NO: 2926681 - RNA, 19 nt, Artificial Sequence
  Description of Artificial Sequence: Synthetic oligonucleotide
cggugucggcggcgugccc

SEQ ID NO: 2926682 - RNA, 19 nt, Artificial Sequence
  Description of Artificial Sequence: Synthetic oligonucleotide
ccccgcgguguagccgcug

SEQ ID NO: 2926683 - RNA, 19 nt, Artificial Sequence
  Description of Artificial Sequence: Synthetic oligonucleotide
cgggcuuccccgcggugua

SEQ ID NO: 2926684 - RNA, 19 nt, Artificial Sequence
  Description of Artificial Sequence: Synthetic oligonucleotide
cgcugacacuggcugcagu

SEQ ID NO: 2926685 - RNA, 19 nt, Artificial Sequence
  Description of Artificial Sequence: Synthetic oligonucleotide
cggcagcggugcaaugggu

SEQ ID NO: 2926686 - RNA, 19 nt, Artificial Sequence
  Description of Artificial Sequence: Synthetic oligonucleotide
ccgcgguguagccgcuggu

SEQ ID NO: 2926687 - RNA, 19 nt, Artificial Sequence
  Description of Artificial Sequence: Synthetic oligonucleotide
cggcggugucggcggcgug

SEQ ID NO: 2926688 - RNA, 19 nt, Artificial Sequence
  Description of Artificial Sequence: Synthetic oligonucleotide
cgggagcucugcagcuguu

SEQ ID NO: 2926689 - RNA, 19 nt, Artificial Sequence
  Description of Artificial Sequence: Synthetic oligonucleotide
aauaacuuuggcuugaagc

SEQ ID NO: 2926690 - RNA, 19 nt, Artificial Sequence
  Description of Artificial Sequence: Synthetic oligonucleotide
uugaguaucaauaacuuug

SEQ ID NO: 2926691 - RNA, 19 nt, Artificial Sequence
  Description of Artificial Sequence: Synthetic oligonucleotide
uguagaauaaacauucuuc

SEQ ID NO: 2926692 - RNA, 19 nt, Artificial Sequence
  Description of Artificial Sequence: Synthetic oligonucleotide
ucuaccagcgucaugaucu

SEQ ID NO: 2926693 - RNA, 19 nt, Artificial Sequence
  Description of Artificial Sequence: Synthetic oligonucleotide
aaacauucuuccuacaccu

SEQ ID NO: 2926694 - RNA, 19 nt, Artificial Sequence
  Description of Artificial Sequence: Synthetic oligonucleotide
auaaacauucuuccuacac

SEQ ID NO: 2926695 - RNA, 19 nt, Artificial Sequence
  Description of Artificial Sequence: Synthetic oligonucleotide
aaucuguaugucugcaagc

SEQ ID NO: 2926696 - RNA, 19 nt, Artificial Sequence
  Description of Artificial Sequence: Synthetic oligonucleotide
guagaauaaacauucuucc

SEQ ID NO: 2926697 - RNA, 19 nt, Artificial Sequence
  Description of Artificial Sequence: Synthetic oligonucleotide
ucuuccuacaccuucauac

SEQ ID NO: 2926698 - RNA, 19 nt, Artificial Sequence
  Description of Artificial Sequence: Synthetic oligonucleotide
gauuguagaauaaacauuc

SEQ ID NO: 2926699 - RNA, 19 nt, Artificial Sequence
  Description of Artificial Sequence: Synthetic oligonucleotide
ugaguaucaauaacuuugg

SEQ ID NO: 2926700 - RNA, 19 nt, Artificial Sequence
  Description of Artificial Sequence: Synthetic oligonucleotide
uguucaaucuguaugucug

SEQ ID NO: 2926701 - RNA, 19 nt, Artificial Sequence
  Description of Artificial Sequence: Synthetic oligonucleotide
gauggagggagucaggagg

SEQ ID NO: 2926702 - RNA, 19 nt, Artificial Sequence
  Description of Artificial Sequence: Synthetic oligonucleotide
uugugaauuacuuccuugg

SEQ ID NO: 2926703 - RNA, 19 nt, Artificial Sequence
  Description of Artificial Sequence: Synthetic oligonucleotide
uaaacauucuuccuacacc

SEQ ID NO: 2926704 - RNA, 19 nt, Artificial Sequence
  Description of Artificial Sequence: Synthetic oligonucleotide
aguaucaauaacuuuggcu

SEQ ID NO: 2926705 - RNA, 19 nt, Artificial Sequence
  Description of Artificial Sequence: Synthetic oligonucleotide
auaacuuuggcuugaagcu

SEQ ID NO: 2926706 - RNA, 19 nt, Artificial Sequence
  Description of Artificial Sequence: Synthetic oligonucleotide
cugguugugaauuacuucc

SEQ ID NO: 2926707 - RNA, 19 nt, Artificial Sequence
  Description of Artificial Sequence: Synthetic oligonucleotide
auacauguuagucucaucu

SEQ ID NO: 2926708 - RNA, 19 nt, Artificial Sequence
  Description of Artificial Sequence: Synthetic oligonucleotide
uuagucucaucuaccagcg

SEQ ID NO: 2926709 - RNA, 19 nt, Artificial Sequence
  Description of Artificial Sequence: Synthetic oligonucleotide
uuggauuguagaauaaaca

SEQ ID NO: 2926710 - RNA, 19 nt, Artificial Sequence
  Description of Artificial Sequence: Synthetic oligonucleotide
acauguuagucucaucuac

SEQ ID NO: 2926711 - RNA, 19 nt, Artificial Sequence
  Description of Artificial Sequence: Synthetic oligonucleotide
agaacucuccagcagcucc

SEQ ID NO: 2926712 - RNA, 19 nt, Artificial Sequence
  Description of Artificial Sequence: Synthetic oligonucleotide
uuccuuaacacuccgcucc

SEQ ID NO: 2926713 - RNA, 19 nt, Artificial Sequence
  Description of Artificial Sequence: Synthetic oligonucleotide
gaauaaacauucuuccuac

SEQ ID NO: 2926714 - RNA, 19 nt, Artificial Sequence
  Description of Artificial Sequence: Synthetic oligonucleotide
ucaucuaccagcgucauga

SEQ ID NO: 2926715 - RNA, 19 nt, Artificial Sequence
  Description of Artificial Sequence: Synthetic oligonucleotide
uggauuguagaauaaacau

SEQ ID NO: 2926716 - RNA, 19 nt, Artificial Sequence
  Description of Artificial Sequence: Synthetic oligonucleotide
uuucuguugaguaucaaua

SEQ ID NO: 2926717 - RNA, 19 nt, Artificial Sequence
  Description of Artificial Sequence: Synthetic oligonucleotide
guuagucucaucuaccagc

SEQ ID NO: 2926718 - RNA, 19 nt, Artificial Sequence
  Description of Artificial Sequence: Synthetic oligonucleotide
aacacuccgcuccagguag

SEQ ID NO: 2926719 - RNA, 19 nt, Artificial Sequence
  Description of Artificial Sequence: Synthetic oligonucleotide
uacaccuucauacauguua

SEQ ID NO: 2926720 - RNA, 19 nt, Artificial Sequence
  Description of Artificial Sequence: Synthetic oligonucleotide
cuuggauuguagaauaaac

SEQ ID NO: 2926721 - RNA, 19 nt, Artificial Sequence
  Description of Artificial Sequence: Synthetic oligonucleotide
agucucaucuaccagcguc

SEQ ID NO: 2926722 - RNA, 19 nt, Artificial Sequence
  Description of Artificial Sequence: Synthetic oligonucleotide
uuucguucuguuuagcugu

SEQ ID NO: 2926723 - RNA, 19 nt, Artificial Sequence
  Description of Artificial Sequence: Synthetic oligonucleotide
agaauaaacauucuuccua

SEQ ID NO: 2926724 - RNA, 19 nt, Artificial Sequence
  Description of Artificial Sequence: Synthetic oligonucleotide
uagcuguucaaucuguaug

SEQ ID NO: 2926725 - RNA, 19 nt, Artificial Sequence
  Description of Artificial Sequence: Synthetic oligonucleotide
ugaauuacuuccuuggauu

SEQ ID NO: 2926726 - RNA, 19 nt, Artificial Sequence
  Description of Artificial Sequence: Synthetic oligonucleotide
cuucauacauguuagucuc

SEQ ID NO: 2926727 - RNA, 19 nt, Artificial Sequence
  Description of Artificial Sequence: Synthetic oligonucleotide
acauucuuccuacaccuuc

SEQ ID NO: 2926728 - RNA, 19 nt, Artificial Sequence
  Description of Artificial Sequence: Synthetic oligonucleotide
ucuguugaguaucaauaac

SEQ ID NO: 2926729 - RNA, 19 nt, Artificial Sequence
  Description of Artificial Sequence: Synthetic oligonucleotide
gaauuacuuccuuggauug

SEQ ID NO: 2926730 - RNA, 19 nt, Artificial Sequence
  Description of Artificial Sequence: Synthetic oligonucleotide
ugaucucugugucuguaag

SEQ ID NO: 2926731 - RNA, 19 nt, Artificial Sequence
  Description of Artificial Sequence: Synthetic oligonucleotide
uccagcagcuccuacugcg

SEQ ID NO: 2926732 - RNA, 19 nt, Artificial Sequence
  Description of Artificial Sequence: Synthetic oligonucleotide
uguugaguaucaauaacuu

SEQ ID NO: 2926733 - RNA, 19 nt, Artificial Sequence
  Description of Artificial Sequence: Synthetic oligonucleotide
aucagcaucucucggaugu

SEQ ID NO: 2926734 - RNA, 19 nt, Artificial Sequence
  Description of Artificial Sequence: Synthetic oligonucleotide
uaucaauaacuuuggcuug

SEQ ID NO: 2926735 - RNA, 19 nt, Artificial Sequence
  Description of Artificial Sequence: Synthetic oligonucleotide
aauaaacauucuuccuaca

SEQ ID NO: 2926736 - RNA, 19 nt, Artificial Sequence
  Description of Artificial Sequence: Synthetic oligonucleotide
caaucuguaugucugcaag

SEQ ID NO: 2926737 - RNA, 19 nt, Artificial Sequence
  Description of Artificial Sequence: Synthetic oligonucleotide
cauguuagucucaucuacc

SEQ ID NO: 2926738 - RNA, 19 nt, Artificial Sequence
  Description of Artificial Sequence: Synthetic oligonucleotide
ugaagcucugugaaggccu

SEQ ID NO: 2926739 - RNA, 19 nt, Artificial Sequence
  Description of Artificial Sequence: Synthetic oligonucleotide
ugugaauuacuuccuugga

SEQ ID NO: 2926740 - RNA, 19 nt, Artificial Sequence
  Description of Artificial Sequence: Synthetic oligonucleotide
uguuagucucaucuaccag

SEQ ID NO: 2926741 - RNA, 19 nt, Artificial Sequence
  Description of Artificial Sequence: Synthetic oligonucleotide
agcuguucaaucuguaugu

SEQ ID NO: 2926742 - RNA, 19 nt, Artificial Sequence
  Description of Artificial Sequence: Synthetic oligonucleotide
uguuggagagacugugggg

SEQ ID NO: 2926743 - RNA, 19 nt, Artificial Sequence
  Description of Artificial Sequence: Synthetic oligonucleotide
gaucucugugucuguaagg

SEQ ID NO: 2926744 - RNA, 19 nt, Artificial Sequence
  Description of Artificial Sequence: Synthetic oligonucleotide
cucagcuuccuuaacacuc

SEQ ID NO: 2926745 - RNA, 19 nt, Artificial Sequence
  Description of Artificial Sequence: Synthetic oligonucleotide
ugccugacaggauggaggg

SEQ ID NO: 2926746 - RNA, 19 nt, Artificial Sequence
  Description of Artificial Sequence: Synthetic oligonucleotide
uuguagaauaaacauucuu

SEQ ID NO: 2926747 - RNA, 19 nt, Artificial Sequence
  Description of Artificial Sequence: Synthetic oligonucleotide
uguaaggugugcaugcuuu

SEQ ID NO: 2926748 - RNA, 19 nt, Artificial Sequence
  Description of Artificial Sequence: Synthetic oligonucleotide
cuguaugucugcaagcuuc

SEQ ID NO: 2926749 - RNA, 19 nt, Artificial Sequence
  Description of Artificial Sequence: Synthetic oligonucleotide
guugugaauuacuuccuug

SEQ ID NO: 2926750 - RNA, 19 nt, Artificial Sequence
  Description of Artificial Sequence: Synthetic oligonucleotide
accuucauacauguuaguc

SEQ ID NO: 2926751 - RNA, 19 nt, Artificial Sequence
  Description of Artificial Sequence: Synthetic oligonucleotide
guguuggagagacuguggg

SEQ ID NO: 2926752 - RNA, 19 nt, Artificial Sequence
  Description of Artificial Sequence: Synthetic oligonucleotide
guuggagagacuguggggc

SEQ ID NO: 2926753 - RNA, 19 nt, Artificial Sequence
  Description of Artificial Sequence: Synthetic oligonucleotide
agcgucaugaucucugugu

SEQ ID NO: 2926754 - RNA, 19 nt, Artificial Sequence
  Description of Artificial Sequence: Synthetic oligonucleotide
ucuucugcuacuuucuguu

SEQ ID NO: 2926755 - RNA, 19 nt, Artificial Sequence
  Description of Artificial Sequence: Synthetic oligonucleotide
ucuaacagcugguugugaa

SEQ ID NO: 2926756 - RNA, 19 nt, Artificial Sequence
  Description of Artificial Sequence: Synthetic oligonucleotide
cuuaacacuccgcuccagg

SEQ ID NO: 2926757 - RNA, 19 nt, Artificial Sequence
  Description of Artificial Sequence: Synthetic oligonucleotide
uucuguugaguaucaauaa

SEQ ID NO: 2926758 - RNA, 19 nt, Artificial Sequence
  Description of Artificial Sequence: Synthetic oligonucleotide
uccuacaccuucauacaug

SEQ ID NO: 2926759 - RNA, 19 nt, Artificial Sequence
  Description of Artificial Sequence: Synthetic oligonucleotide
uguaugucugcaagcuuca

SEQ ID NO: 2926760 - RNA, 19 nt, Artificial Sequence
  Description of Artificial Sequence: Synthetic oligonucleotide
caagguguuggagagacug

SEQ ID NO: 2926761 - RNA, 19 nt, Artificial Sequence
  Description of Artificial Sequence: Synthetic oligonucleotide
auguuagucucaucuacca

SEQ ID NO: 2926762 - RNA, 19 nt, Artificial Sequence
  Description of Artificial Sequence: Synthetic oligonucleotide
uuaacacuccgcuccaggu

SEQ ID NO: 2926763 - RNA, 19 nt, Artificial Sequence
  Description of Artificial Sequence: Synthetic oligonucleotide
gaggggagaacucuccagc

SEQ ID NO: 2926764 - RNA, 19 nt, Artificial Sequence
  Description of Artificial Sequence: Synthetic oligonucleotide
ucugcaagcuucacuuucu

SEQ ID NO: 2926765 - RNA, 19 nt, Artificial Sequence
  Description of Artificial Sequence: Synthetic oligonucleotide
gucuguaaggugugcaugc

SEQ ID NO: 2926766 - RNA, 19 nt, Artificial Sequence
  Description of Artificial Sequence: Synthetic oligonucleotide
acuuccuuggauuguagaa

SEQ ID NO: 2926767 - RNA, 19 nt, Artificial Sequence
  Description of Artificial Sequence: Synthetic oligonucleotide
uucacuuucuguugaguau

SEQ ID NO: 2926768 - RNA, 19 nt, Artificial Sequence
  Description of Artificial Sequence: Synthetic oligonucleotide
caagcuucacuuucuguug

SEQ ID NO: 2926769 - RNA, 19 nt, Artificial Sequence
  Description of Artificial Sequence: Synthetic oligonucleotide
aagcuucacuuucuguuga

SEQ ID NO: 2926770 - RNA, 19 nt, Artificial Sequence
  Description of Artificial Sequence: Synthetic oligonucleotide
uuggagagacuguggggcg

SEQ ID NO: 2926771 - RNA, 19 nt, Artificial Sequence
  Description of Artificial Sequence: Synthetic oligonucleotide
gcuugaagcucugugaagg

SEQ ID NO: 2926772 - RNA, 19 nt, Artificial Sequence
  Description of Artificial Sequence: Synthetic oligonucleotide
aauuacuuccuuggauugu

SEQ ID NO: 2926773 - RNA, 19 nt, Artificial Sequence
  Description of Artificial Sequence: Synthetic oligonucleotide
ugcuccagcucuuuaauuu

SEQ ID NO: 2926774 - RNA, 19 nt, Artificial Sequence
  Description of Artificial Sequence: Synthetic oligonucleotide
uuagcuguucaaucuguau

SEQ ID NO: 2926775 - RNA, 19 nt, Artificial Sequence
  Description of Artificial Sequence: Synthetic oligonucleotide
aacuuuggcuugaagcucu

SEQ ID NO: 2926776 - RNA, 19 nt, Artificial Sequence
  Description of Artificial Sequence: Synthetic oligonucleotide
gucaugaucucugugucug

SEQ ID NO: 2926777 - RNA, 19 nt, Artificial Sequence
  Description of Artificial Sequence: Synthetic oligonucleotide
gagacuguggggcgugagg

SEQ ID NO: 2926778 - RNA, 19 nt, Artificial Sequence
  Description of Artificial Sequence: Synthetic oligonucleotide
cuugaagcucugugaaggc

SEQ ID NO: 2926779 - RNA, 19 nt, Artificial Sequence
  Description of Artificial Sequence: Synthetic oligonucleotide
acaccuucauacauguuag

SEQ ID NO: 2926780 - RNA, 19 nt, Artificial Sequence
  Description of Artificial Sequence: Synthetic oligonucleotide
uuccuuggauuguagaaua

SEQ ID NO: 2926781 - RNA, 19 nt, Artificial Sequence
  Description of Artificial Sequence: Synthetic oligonucleotide
agcagcuccuacugcgccc

SEQ ID NO: 2926782 - RNA, 19 nt, Artificial Sequence
  Description of Artificial Sequence: Synthetic oligonucleotide
uggcuugaagcucugugaa

SEQ ID NO: 2926783 - RNA, 19 nt, Artificial Sequence
  Description of Artificial Sequence: Synthetic oligonucleotide
gaguaucaauaacuuuggc

SEQ ID NO: 2926784 - RNA, 19 nt, Artificial Sequence
  Description of Artificial Sequence: Synthetic oligonucleotide
uuacuuccuuggauuguag

SEQ ID NO: 2926785 - RNA, 19 nt, Artificial Sequence
  Description of Artificial Sequence: Synthetic oligonucleotide
aucucugugucuguaaggu

SEQ ID NO: 2926786 - RNA, 19 nt, Artificial Sequence
  Description of Artificial Sequence: Synthetic oligonucleotide
acuguggggcgugaggggc

SEQ ID NO: 2926787 - RNA, 19 nt, Artificial Sequence
  Description of Artificial Sequence: Synthetic oligonucleotide
uccuacugcgcccuucgug

SEQ ID NO: 2926788 - RNA, 19 nt, Artificial Sequence
  Description of Artificial Sequence: Synthetic oligonucleotide
uuuagcuguucaaucugua

SEQ ID NO: 2926789 - RNA, 19 nt, Artificial Sequence
  Description of Artificial Sequence: Synthetic oligonucleotide
ucacuuucuguugaguauc

SEQ ID NO: 2926790 - RNA, 19 nt, Artificial Sequence
  Description of Artificial Sequence: Synthetic oligonucleotide
uuucuaacagcugguugug

SEQ ID NO: 2926791 - RNA, 19 nt, Artificial Sequence
  Description of Artificial Sequence: Synthetic oligonucleotide
aucuguaugucugcaagcu

SEQ ID NO: 2926792 - RNA, 19 nt, Artificial Sequence
  Description of Artificial Sequence: Synthetic oligonucleotide
guucaaucuguaugucugc

SEQ ID NO: 2926793 - RNA, 19 nt, Artificial Sequence
  Description of Artificial Sequence: Synthetic oligonucleotide
ugucuguaaggugugcaug

SEQ ID NO: 2926794 - RNA, 19 nt, Artificial Sequence
  Description of Artificial Sequence: Synthetic oligonucleotide
uucauacauguuagucuca

SEQ ID NO: 2926795 - RNA, 19 nt, Artificial Sequence
  Description of Artificial Sequence: Synthetic oligonucleotide
uucaaucuguaugucugca

SEQ ID NO: 2926796 - RNA, 19 nt, Artificial Sequence
  Description of Artificial Sequence: Synthetic oligonucleotide
ugugucuguaaggugugca

SEQ ID NO: 2926797 - RNA, 19 nt, Artificial Sequence
  Description of Artificial Sequence: Synthetic oligonucleotide
ugguugugaauuacuuccu

SEQ ID NO: 2926798 - RNA, 19 nt, Artificial Sequence
  Description of Artificial Sequence: Synthetic oligonucleotide
uucugcuacuuucuguuuu

SEQ ID NO: 2926799 - RNA, 19 nt, Artificial Sequence
  Description of Artificial Sequence: Synthetic oligonucleotide
uucuguuuagcuguucaau

SEQ ID NO: 2926800 - RNA, 19 nt, Artificial Sequence
  Description of Artificial Sequence: Synthetic oligonucleotide
uugaagcucugugaaggcc

SEQ ID NO: 2926801 - RNA, 19 nt, Artificial Sequence
  Description of Artificial Sequence: Synthetic oligonucleotide
gucaagguguuggagagac

SEQ ID NO: 2926802 - RNA, 19 nt, Artificial Sequence
  Description of Artificial Sequence: Synthetic oligonucleotide
cuguugaguaucaauaacu

SEQ ID NO: 2926803 - RNA, 19 nt, Artificial Sequence
  Description of Artificial Sequence: Synthetic oligonucleotide
uacuuccuuggauuguaga

SEQ ID NO: 2926804 - RNA, 19 nt, Artificial Sequence
  Description of Artificial Sequence: Synthetic oligonucleotide
acaggauggagggagucag

SEQ ID NO: 2926805 - RNA, 19 nt, Artificial Sequence
  Description of Artificial Sequence: Synthetic oligonucleotide
uacauguuagucucaucua

SEQ ID NO: 2926806 - RNA, 19 nt, Artificial Sequence
  Description of Artificial Sequence: Synthetic oligonucleotide
gugccaucagcaucucucg

SEQ ID NO: 2926807 - RNA, 19 nt, Artificial Sequence
  Description of Artificial Sequence: Synthetic oligonucleotide
caucucucggauguugucc

SEQ ID NO: 2926808 - RNA, 19 nt, Artificial Sequence
  Description of Artificial Sequence: Synthetic oligonucleotide
aucucucggauguuguccu

SEQ ID NO: 2926809 - RNA, 19 nt, Artificial Sequence
  Description of Artificial Sequence: Synthetic oligonucleotide
uuccuacaccuucauacau

SEQ ID NO: 2926810 - RNA, 19 nt, Artificial Sequence
  Description of Artificial Sequence: Synthetic oligonucleotide
ucauacauguuagucucau

SEQ ID NO: 2926811 - RNA, 19 nt, Artificial Sequence
  Description of Artificial Sequence: Synthetic oligonucleotide
aucaauaacuuuggcuuga

SEQ ID NO: 2926812 - RNA, 19 nt, Artificial Sequence
  Description of Artificial Sequence: Synthetic oligonucleotide
uuguccucagcuuccuuaa

SEQ ID NO: 2926813 - RNA, 19 nt, Artificial Sequence
  Description of Artificial Sequence: Synthetic oligonucleotide
ucucggauguuguccucag

SEQ ID NO: 2926814 - RNA, 19 nt, Artificial Sequence
  Description of Artificial Sequence: Synthetic oligonucleotide
ugcaagcuucacuuucugu

SEQ ID NO: 2926815 - RNA, 19 nt, Artificial Sequence
  Description of Artificial Sequence: Synthetic oligonucleotide
caauaacuuuggcuugaag

SEQ ID NO: 2926816 - RNA, 19 nt, Artificial Sequence
  Description of Artificial Sequence: Synthetic oligonucleotide
auggagggagucaggaggg

SEQ ID NO: 2926817 - RNA, 19 nt, Artificial Sequence
  Description of Artificial Sequence: Synthetic oligonucleotide
uccuuaacacuccgcucca

SEQ ID NO: 2926818 - RNA, 19 nt, Artificial Sequence
  Description of Artificial Sequence: Synthetic oligonucleotide
aacagcugguugugaauua

SEQ ID NO: 2926819 - RNA, 19 nt, Artificial Sequence
  Description of Artificial Sequence: Synthetic oligonucleotide
ucaggaggggagaacucuc

SEQ ID NO: 2926820 - RNA, 19 nt, Artificial Sequence
  Description of Artificial Sequence: Synthetic oligonucleotide
uaacuuuggcuugaagcuc

SEQ ID NO: 2926821 - RNA, 19 nt, Artificial Sequence
  Description of Artificial Sequence: Synthetic oligonucleotide
gacuguggggcgugagggg

SEQ ID NO: 2926822 - RNA, 19 nt, Artificial Sequence
  Description of Artificial Sequence: Synthetic oligonucleotide
ccuacugcgcccuucgugc

SEQ ID NO: 2926823 - RNA, 19 nt, Artificial Sequence
  Description of Artificial Sequence: Synthetic oligonucleotide
cauucuuccuacaccuuca

SEQ ID NO: 2926824 - RNA, 19 nt, Artificial Sequence
  Description of Artificial Sequence: Synthetic oligonucleotide
gagggagucaggaggggag

SEQ ID NO: 2926825 - RNA, 19 nt, Artificial Sequence
  Description of Artificial Sequence: Synthetic oligonucleotide
uaacacuccgcuccaggua

SEQ ID NO: 2926826 - RNA, 19 nt, Artificial Sequence
  Description of Artificial Sequence: Synthetic oligonucleotide
cuuccuuaacacuccgcuc

SEQ ID NO: 2926827 - RNA, 19 nt, Artificial Sequence
  Description of Artificial Sequence: Synthetic oligonucleotide
cuucacuuucuguugagua

SEQ ID NO: 2926828 - RNA, 19 nt, Artificial Sequence
  Description of Artificial Sequence: Synthetic oligonucleotide
cuuccuacaccuucauaca

SEQ ID NO: 2926829 - RNA, 19 nt, Artificial Sequence
  Description of Artificial Sequence: Synthetic oligonucleotide
ucuguaugucugcaagcuu

SEQ ID NO: 2926830 - RNA, 19 nt, Artificial Sequence
  Description of Artificial Sequence: Synthetic oligonucleotide
agcuucacuuucuguugag

SEQ ID NO: 2926831 - RNA, 19 nt, Artificial Sequence
  Description of Artificial Sequence: Synthetic oligonucleotide
gucugcaagcuucacuuuc

SEQ ID NO: 2926832 - RNA, 19 nt, Artificial Sequence
  Description of Artificial Sequence: Synthetic oligonucleotide
auuguagaauaaacauucu

SEQ ID NO: 2926833 - RNA, 19 nt, Artificial Sequence
  Description of Artificial Sequence: Synthetic oligonucleotide
cucugugucuguaaggugu

SEQ ID NO: 2926834 - RNA, 19 nt, Artificial Sequence
  Description of Artificial Sequence: Synthetic oligonucleotide
agguguuggagagacugug

SEQ ID NO: 2926835 - RNA, 19 nt, Artificial Sequence
  Description of Artificial Sequence: Synthetic oligonucleotide
auuacuuccuuggauugua

SEQ ID NO: 2926836 - RNA, 19 nt, Artificial Sequence
  Description of Artificial Sequence: Synthetic oligonucleotide
uccuuggauuguagaauaa

SEQ ID NO: 2926837 - RNA, 19 nt, Artificial Sequence
  Description of Artificial Sequence: Synthetic oligonucleotide
aggggagaacucuccagca

SEQ ID NO: 2926838 - RNA, 19 nt, Artificial Sequence
  Description of Artificial Sequence: Synthetic oligonucleotide
caggaggggagaacucucc

SEQ ID NO: 2926839 - RNA, 19 nt, Artificial Sequence
  Description of Artificial Sequence: Synthetic oligonucleotide
gggcgugaggggcagaggg

SEQ ID NO: 2926840 - RNA, 19 nt, Artificial Sequence
  Description of Artificial Sequence: Synthetic oligonucleotide
ggauguuguccucagcuuc

SEQ ID NO: 2926841 - RNA, 19 nt, Artificial Sequence
  Description of Artificial Sequence: Synthetic oligonucleotide
guuguccucagcuuccuua

SEQ ID NO: 2926842 - RNA, 19 nt, Artificial Sequence
  Description of Artificial Sequence: Synthetic oligonucleotide
cugccugccugacaggaug

SEQ ID NO: 2926843 - RNA, 19 nt, Artificial Sequence
  Description of Artificial Sequence: Synthetic oligonucleotide
ucuguaaggugugcaugcu

SEQ ID NO: 2926844 - RNA, 19 nt, Artificial Sequence
  Description of Artificial Sequence: Synthetic oligonucleotide
cauacauguuagucucauc

SEQ ID NO: 2926845 - RNA, 19 nt, Artificial Sequence
  Description of Artificial Sequence: Synthetic oligonucleotide
agcuuccuuaacacuccgc

SEQ ID NO: 2926846 - RNA, 19 nt, Artificial Sequence
  Description of Artificial Sequence: Synthetic oligonucleotide
aggauggagggagucagga

SEQ ID NO: 2926847 - RNA, 19 nt, Artificial Sequence
  Description of Artificial Sequence: Synthetic oligonucleotide
augaucucugugucuguaa

SEQ ID NO: 2926848 - RNA, 19 nt, Artificial Sequence
  Description of Artificial Sequence: Synthetic oligonucleotide
gcgucaagguguuggagag

SEQ ID NO: 2926849 - RNA, 19 nt, Artificial Sequence
  Description of Artificial Sequence: Synthetic oligonucleotide
cuucgugccaucagcaucu

SEQ ID NO: 2926850 - RNA, 19 nt, Artificial Sequence
  Description of Artificial Sequence: Synthetic oligonucleotide
accagcgucaugaucucug

SEQ ID NO: 2926851 - RNA, 19 nt, Artificial Sequence
  Description of Artificial Sequence: Synthetic oligonucleotide
gugaauuacuuccuuggau

SEQ ID NO: 2926852 - RNA, 19 nt, Artificial Sequence
  Description of Artificial Sequence: Synthetic oligonucleotide
ucaauaacuuuggcuugaa

SEQ ID NO: 2926853 - RNA, 19 nt, Artificial Sequence
  Description of Artificial Sequence: Synthetic oligonucleotide
gguguuggagagacugugg

SEQ ID NO: 2926854 - RNA, 19 nt, Artificial Sequence
  Description of Artificial Sequence: Synthetic oligonucleotide
aggaggggagaacucucca

SEQ ID NO: 2926855 - RNA, 19 nt, Artificial Sequence
  Description of Artificial Sequence: Synthetic oligonucleotide
acccugcacagccccugcc

SEQ ID NO: 2926856 - RNA, 19 nt, Artificial Sequence
  Description of Artificial Sequence: Synthetic oligonucleotide
aagguguuggagagacugu

SEQ ID NO: 2926857 - RNA, 19 nt, Artificial Sequence
  Description of Artificial Sequence: Synthetic oligonucleotide
gcagagggaggccagcacc

SEQ ID NO: 2926858 - RNA, 19 nt, Artificial Sequence
  Description of Artificial Sequence: Synthetic oligonucleotide
uucuuccuacaccuucaua

SEQ ID NO: 2926859 - RNA, 19 nt, Artificial Sequence
  Description of Artificial Sequence: Synthetic oligonucleotide
auucuuccuacaccuucau

SEQ ID NO: 2926860 - RNA, 19 nt, Artificial Sequence
  Description of Artificial Sequence: Synthetic oligonucleotide
guucuguuuagcuguucaa

SEQ ID NO: 2926861 - RNA, 19 nt, Artificial Sequence
  Description of Artificial Sequence: Synthetic oligonucleotide
caggauggagggagucagg

SEQ ID NO: 2926862 - RNA, 19 nt, Artificial Sequence
  Description of Artificial Sequence: Synthetic oligonucleotide
ucaagguguuggagagacu

SEQ ID NO: 2926863 - RNA, 19 nt, Artificial Sequence
  Description of Artificial Sequence: Synthetic oligonucleotide
cagcuuccuuaacacuccg

SEQ ID NO: 2926864 - RNA, 19 nt, Artificial Sequence
  Description of Artificial Sequence: Synthetic oligonucleotide
gcugguugugaauuacuuc

SEQ ID NO: 2926865 - RNA, 19 nt, Artificial Sequence
  Description of Artificial Sequence: Synthetic oligonucleotide
gucucaucuaccagcguca

SEQ ID NO: 2926866 - RNA, 19 nt, Artificial Sequence
  Description of Artificial Sequence: Synthetic oligonucleotide
ggcgucaagguguuggaga

SEQ ID NO: 2926867 - RNA, 19 nt, Artificial Sequence
  Description of Artificial Sequence: Synthetic oligonucleotide
gugaggggcagagggaggc

SEQ ID NO: 2926868 - RNA, 19 nt, Artificial Sequence
  Description of Artificial Sequence: Synthetic oligonucleotide
uucuaacagcugguuguga

SEQ ID NO: 2926869 - RNA, 19 nt, Artificial Sequence
  Description of Artificial Sequence: Synthetic oligonucleotide
agucaggaggggagaacuc

SEQ ID NO: 2926870 - RNA, 19 nt, Artificial Sequence
  Description of Artificial Sequence: Synthetic oligonucleotide
guugaguaucaauaacuuu

SEQ ID NO: 2926871 - RNA, 19 nt, Artificial Sequence
  Description of Artificial Sequence: Synthetic oligonucleotide
gacaggauggagggaguca

SEQ ID NO: 2926872 - RNA, 19 nt, Artificial Sequence
  Description of Artificial Sequence: Synthetic oligonucleotide
gcuccuacugcgcccuucg

SEQ ID NO: 2926873 - RNA, 19 nt, Artificial Sequence
  Description of Artificial Sequence: Synthetic oligonucleotide
ggauggagggagucaggag

SEQ ID NO: 2926874 - RNA, 19 nt, Artificial Sequence
  Description of Artificial Sequence: Synthetic oligonucleotide
uggggcgugaggggcagag

SEQ ID NO: 2926875 - RNA, 19 nt, Artificial Sequence
  Description of Artificial Sequence: Synthetic oligonucleotide
cgugccaucagcaucucuc

SEQ ID NO: 2926876 - RNA, 19 nt, Artificial Sequence
  Description of Artificial Sequence: Synthetic oligonucleotide
ggcuugaagcucugugaag

SEQ ID NO: 2926877 - RNA, 19 nt, Artificial Sequence
  Description of Artificial Sequence: Synthetic oligonucleotide
cuacugcgcccuucgugcc

SEQ ID NO: 2926878 - RNA, 19 nt, Artificial Sequence
  Description of Artificial Sequence: Synthetic oligonucleotide
uacugcgcccuucgugcca

SEQ ID NO: 2926879 - RNA, 19 nt, Artificial Sequence
  Description of Artificial Sequence: Synthetic oligonucleotide
ugcacagccccugccugcc

SEQ ID NO: 2926880 - RNA, 19 nt, Artificial Sequence
  Description of Artificial Sequence: Synthetic oligonucleotide
uggagggagucaggagggg

SEQ ID NO: 2926881 - RNA, 19 nt, Artificial Sequence
  Description of Artificial Sequence: Synthetic oligonucleotide
ugacaggauggagggaguc

SEQ ID NO: 2926882 - RNA, 19 nt, Artificial Sequence
  Description of Artificial Sequence: Synthetic oligonucleotide
gagggaggccagcacccug

SEQ ID NO: 2926883 - RNA, 19 nt, Artificial Sequence
  Description of Artificial Sequence: Synthetic oligonucleotide
cacuuucuguugaguauca

SEQ ID NO: 2926884 - RNA, 19 nt, Artificial Sequence
  Description of Artificial Sequence: Synthetic oligonucleotide
gagucaggaggggagaacu

SEQ ID NO: 2926885 - RNA, 19 nt, Artificial Sequence
  Description of Artificial Sequence: Synthetic oligonucleotide
uucguucuguuuagcuguu

SEQ ID NO: 2926886 - RNA, 19 nt, Artificial Sequence
  Description of Artificial Sequence: Synthetic oligonucleotide
cagcagcuccuacugcgcc

SEQ ID NO: 2926887 - RNA, 19 nt, Artificial Sequence
  Description of Artificial Sequence: Synthetic oligonucleotide
cuguucaaucuguaugucu

SEQ ID NO: 2926888 - RNA, 19 nt, Artificial Sequence
  Description of Artificial Sequence: Synthetic oligonucleotide
caucagcaucucucggaug

SEQ ID NO: 2926889 - RNA, 19 nt, Artificial Sequence
  Description of Artificial Sequence: Synthetic oligonucleotide
gcuuccuuaacacuccgcu

SEQ ID NO: 2926890 - RNA, 19 nt, Artificial Sequence
  Description of Artificial Sequence: Synthetic oligonucleotide
uagucucaucuaccagcgu

SEQ ID NO: 2926891 - RNA, 19 nt, Artificial Sequence
  Description of Artificial Sequence: Synthetic oligonucleotide
gccccugccugccugacag

SEQ ID NO: 2926892 - RNA, 19 nt, Artificial Sequence
  Description of Artificial Sequence: Synthetic oligonucleotide
cagcacccugcacagcccc

SEQ ID NO: 2926893 - RNA, 19 nt, Artificial Sequence
  Description of Artificial Sequence: Synthetic oligonucleotide
cuaccagcgucaugaucuc

SEQ ID NO: 2926894 - RNA, 19 nt, Artificial Sequence
  Description of Artificial Sequence: Synthetic oligonucleotide
agcaucucucggauguugu

SEQ ID NO: 2926895 - RNA, 19 nt, Artificial Sequence
  Description of Artificial Sequence: Synthetic oligonucleotide
aacauucuuccuacaccuu

SEQ ID NO: 2926896 - RNA, 19 nt, Artificial Sequence
  Description of Artificial Sequence: Synthetic oligonucleotide
agcugguugugaauuacuu

SEQ ID NO: 2926897 - RNA, 19 nt, Artificial Sequence
  Description of Artificial Sequence: Synthetic oligonucleotide
ccuucauacauguuagucu

SEQ ID NO: 2926898 - RNA, 19 nt, Artificial Sequence
  Description of Artificial Sequence: Synthetic oligonucleotide
gcaagcuucacuuucuguu

SEQ ID NO: 2926899 - RNA, 19 nt, Artificial Sequence
  Description of Artificial Sequence: Synthetic oligonucleotide
uguggggcgugaggggcag

SEQ ID NO: 2926900 - RNA, 19 nt, Artificial Sequence
  Description of Artificial Sequence: Synthetic oligonucleotide
uggagagacuguggggcgu

SEQ ID NO: 2926901 - RNA, 19 nt, Artificial Sequence
  Description of Artificial Sequence: Synthetic oligonucleotide
agagacuguggggcgugag

SEQ ID NO: 2926902 - RNA, 19 nt, Artificial Sequence
  Description of Artificial Sequence: Synthetic oligonucleotide
cucaucuaccagcgucaug

SEQ ID NO: 2926903 - RNA, 19 nt, Artificial Sequence
  Description of Artificial Sequence: Synthetic oligonucleotide
guuuagcuguucaaucugu

SEQ ID NO: 2926904 - RNA, 19 nt, Artificial Sequence
  Description of Artificial Sequence: Synthetic oligonucleotide
acuccgcuccagguaggac

SEQ ID NO: 2926905 - RNA, 19 nt, Artificial Sequence
  Description of Artificial Sequence: Synthetic oligonucleotide
ucgugccaucagcaucucu

SEQ ID NO: 2926906 - RNA, 19 nt, Artificial Sequence
  Description of Artificial Sequence: Synthetic oligonucleotide
cuccgcuccagguaggacu

SEQ ID NO: 2926907 - RNA, 19 nt, Artificial Sequence
  Description of Artificial Sequence: Synthetic oligonucleotide
agcuccuacugcgcccuuc

SEQ ID NO: 2926908 - RNA, 19 nt, Artificial Sequence
  Description of Artificial Sequence: Synthetic oligonucleotide
ccuucgugccaucagcauc

SEQ ID NO: 2926909 - RNA, 19 nt, Artificial Sequence
  Description of Artificial Sequence: Synthetic oligonucleotide
ugaggggcagagggaggcc

SEQ ID NO: 2926910 - RNA, 19 nt, Artificial Sequence
  Description of Artificial Sequence: Synthetic oligonucleotide
gcgucaugaucucuguguc

SEQ ID NO: 2926911 - RNA, 19 nt, Artificial Sequence
  Description of Artificial Sequence: Synthetic oligonucleotide
cugugucuguaaggugugc

SEQ ID NO: 2926912 - RNA, 19 nt, Artificial Sequence
  Description of Artificial Sequence: Synthetic oligonucleotide
cagcgucaugaucucugug

SEQ ID NO: 2926913 - RNA, 19 nt, Artificial Sequence
  Description of Artificial Sequence: Synthetic oligonucleotide
ucucucggauguuguccuc

SEQ ID NO: 2926914 - RNA, 19 nt, Artificial Sequence
  Description of Artificial Sequence: Synthetic oligonucleotide
gagaacucuccagcagcuc

SEQ ID NO: 2926915 - RNA, 19 nt, Artificial Sequence
  Description of Artificial Sequence: Synthetic oligonucleotide
cuuccuuggauuguagaau

SEQ ID NO: 2926916 - RNA, 19 nt, Artificial Sequence
  Description of Artificial Sequence: Synthetic oligonucleotide
cuaacagcugguugugaau

SEQ ID NO: 2926917 - RNA, 19 nt, Artificial Sequence
  Description of Artificial Sequence: Synthetic oligonucleotide
cacagccccugccugccug

SEQ ID NO: 2926918 - RNA, 19 nt, Artificial Sequence
  Description of Artificial Sequence: Synthetic oligonucleotide
ggauuguagaauaaacauu

SEQ ID NO: 2926919 - RNA, 19 nt, Artificial Sequence
  Description of Artificial Sequence: Synthetic oligonucleotide
acuuucuguugaguaucaa

SEQ ID NO: 2926920 - RNA, 19 nt, Artificial Sequence
  Description of Artificial Sequence: Synthetic oligonucleotide
acagccccugccugccuga

SEQ ID NO: 2926921 - RNA, 19 nt, Artificial Sequence
  Description of Artificial Sequence: Synthetic oligonucleotide
cucuccagcagcuccuacu

SEQ ID NO: 2926922 - RNA, 19 nt, Artificial Sequence
  Description of Artificial Sequence: Synthetic oligonucleotide
gcgugaggggcagagggag

SEQ ID NO: 2926923 - RNA, 19 nt, Artificial Sequence
  Description of Artificial Sequence: Synthetic oligonucleotide
ugcgcccuucgugccauca

SEQ ID NO: 2926924 - RNA, 19 nt, Artificial Sequence
  Description of Artificial Sequence: Synthetic oligonucleotide
gugucuguaaggugugcau

SEQ ID NO: 2926925 - RNA, 19 nt, Artificial Sequence
  Description of Artificial Sequence: Synthetic oligonucleotide
ccagcagcuccuacugcgc

SEQ ID NO: 2926926 - RNA, 19 nt, Artificial Sequence
  Description of Artificial Sequence: Synthetic oligonucleotide
ccuacaccuucauacaugu

SEQ ID NO: 2926927 - RNA, 19 nt, Artificial Sequence
  Description of Artificial Sequence: Synthetic oligonucleotide
cacccugcacagccccugc

SEQ ID NO: 2926928 - RNA, 19 nt, Artificial Sequence
  Description of Artificial Sequence: Synthetic oligonucleotide
caugaucucugugucugua

SEQ ID NO: 2926929 - RNA, 19 nt, Artificial Sequence
  Description of Artificial Sequence: Synthetic oligonucleotide
uaccagcgucaugaucucu

SEQ ID NO: 2926930 - RNA, 19 nt, Artificial Sequence
  Description of Artificial Sequence: Synthetic oligonucleotide
ucguucuguuuagcuguuc

SEQ ID NO: 2926931 - RNA, 19 nt, Artificial Sequence
  Description of Artificial Sequence: Synthetic oligonucleotide
acuuuggcuugaagcucug

SEQ ID NO: 2926932 - RNA, 19 nt, Artificial Sequence
  Description of Artificial Sequence: Synthetic oligonucleotide
gcaucucucggauguuguc

SEQ ID NO: 2926933 - RNA, 19 nt, Artificial Sequence
  Description of Artificial Sequence: Synthetic oligonucleotide
acacuccgcuccagguagg

SEQ ID NO: 2926934 - RNA, 19 nt, Artificial Sequence
  Description of Artificial Sequence: Synthetic oligonucleotide
cguucuguuuagcuguuca

SEQ ID NO: 2926935 - RNA, 19 nt, Artificial Sequence
  Description of Artificial Sequence: Synthetic oligonucleotide
ggagagacuguggggcgug

SEQ ID NO: 2926936 - RNA, 19 nt, Artificial Sequence
  Description of Artificial Sequence: Synthetic oligonucleotide
guaaggugugcaugcuuuu

SEQ ID NO: 2926937 - RNA, 19 nt, Artificial Sequence
  Description of Artificial Sequence: Synthetic oligonucleotide
gcuguucaaucuguauguc

SEQ ID NO: 2926938 - RNA, 19 nt, Artificial Sequence
  Description of Artificial Sequence: Synthetic oligonucleotide
ggagucaggaggggagaac

SEQ ID NO: 2926939 - RNA, 19 nt, Artificial Sequence
  Description of Artificial Sequence: Synthetic oligonucleotide
acugcgcccuucgugccau

SEQ ID NO: 2926940 - RNA, 19 nt, Artificial Sequence
  Description of Artificial Sequence: Synthetic oligonucleotide
cuguggggcgugaggggca

SEQ ID NO: 2926941 - RNA, 19 nt, Artificial Sequence
  Description of Artificial Sequence: Synthetic oligonucleotide
ggagggagucaggagggga

SEQ ID NO: 2926942 - RNA, 19 nt, Artificial Sequence
  Description of Artificial Sequence: Synthetic oligonucleotide
ccuuggauuguagaauaaa

SEQ ID NO: 2926943 - RNA, 19 nt, Artificial Sequence
  Description of Artificial Sequence: Synthetic oligonucleotide
gguugugaauuacuuccuu

SEQ ID NO: 2926944 - RNA, 19 nt, Artificial Sequence
  Description of Artificial Sequence: Synthetic oligonucleotide
agccccugccugccugaca

SEQ ID NO: 2926945 - RNA, 19 nt, Artificial Sequence
  Description of Artificial Sequence: Synthetic oligonucleotide
gggcgucaagguguuggag

SEQ ID NO: 2926946 - RNA, 19 nt, Artificial Sequence
  Description of Artificial Sequence: Synthetic oligonucleotide
ggggcgucaagguguugga

SEQ ID NO: 2926947 - RNA, 19 nt, Artificial Sequence
  Description of Artificial Sequence: Synthetic oligonucleotide
ggagaacucuccagcagcu

SEQ ID NO: 2926948 - RNA, 19 nt, Artificial Sequence
  Description of Artificial Sequence: Synthetic oligonucleotide
cugacaggauggagggagu

SEQ ID NO: 2926949 - RNA, 19 nt, Artificial Sequence
  Description of Artificial Sequence: Synthetic oligonucleotide
uucgugccaucagcaucuc

SEQ ID NO: 2926950 - RNA, 19 nt, Artificial Sequence
  Description of Artificial Sequence: Synthetic oligonucleotide
cgugaggggcagagggagg

SEQ ID NO: 2926951 - RNA, 19 nt, Artificial Sequence
  Description of Artificial Sequence: Synthetic oligonucleotide
cgcccuucgugccaucagc

SEQ ID NO: 2926952 - RNA, 19 nt, Artificial Sequence
  Description of Artificial Sequence: Synthetic oligonucleotide
caccuucauacauguuagu

SEQ ID NO: 2926953 - RNA, 19 nt, Artificial Sequence
  Description of Artificial Sequence: Synthetic oligonucleotide
cuguaaggugugcaugcuu

SEQ ID NO: 2926954 - RNA, 19 nt, Artificial Sequence
  Description of Artificial Sequence: Synthetic oligonucleotide
gcgcccuucgugccaucag

SEQ ID NO: 2926955 - RNA, 19 nt, Artificial Sequence
  Description of Artificial Sequence: Synthetic oligonucleotide
cuucugcuacuuucuguuu

SEQ ID NO: 2926956 - RNA, 19 nt, Artificial Sequence
  Description of Artificial Sequence: Synthetic oligonucleotide
ccuuaacacuccgcuccag

SEQ ID NO: 2926957 - RNA, 19 nt, Artificial Sequence
  Description of Artificial Sequence: Synthetic oligonucleotide
agcacccugcacagccccu

SEQ ID NO: 2926958 - RNA, 19 nt, Artificial Sequence
  Description of Artificial Sequence: Synthetic oligonucleotide
gcuccagcucuuuaauuuu

SEQ ID NO: 2926959 - RNA, 19 nt, Artificial Sequence
  Description of Artificial Sequence: Synthetic oligonucleotide
gcccuucgugccaucagca

SEQ ID NO: 2926960 - RNA, 19 nt, Artificial Sequence
  Description of Artificial Sequence: Synthetic oligonucleotide
cacuccgcuccagguagga

SEQ ID NO: 2926961 - RNA, 19 nt, Artificial Sequence
  Description of Artificial Sequence: Synthetic oligonucleotide
gcacccugcacagccccug

SEQ ID NO: 2926962 - RNA, 19 nt, Artificial Sequence
  Description of Artificial Sequence: Synthetic oligonucleotide
ggaggccagcacccugcac

SEQ ID NO: 2926963 - RNA, 19 nt, Artificial Sequence
  Description of Artificial Sequence: Synthetic oligonucleotide
ggggcgugaggggcagagg

SEQ ID NO: 2926964 - RNA, 19 nt, Artificial Sequence
  Description of Artificial Sequence: Synthetic oligonucleotide
gcuucacuuucuguugagu

SEQ ID NO: 2926965 - RNA, 19 nt, Artificial Sequence
  Description of Artificial Sequence: Synthetic oligonucleotide
ggcgugaggggcagaggga

SEQ ID NO: 2926966 - RNA, 19 nt, Artificial Sequence
  Description of Artificial Sequence: Synthetic oligonucleotide
caucuaccagcgucaugau

SEQ ID NO: 2926967 - RNA, 19 nt, Artificial Sequence
  Description of Artificial Sequence: Synthetic oligonucleotide
gggagucaggaggggagaa

SEQ ID NO: 2926968 - RNA, 19 nt, Artificial Sequence
  Description of Artificial Sequence: Synthetic oligonucleotide
ccaucagcaucucucggau

SEQ ID NO: 2926969 - RNA, 19 nt, Artificial Sequence
  Description of Artificial Sequence: Synthetic oligonucleotide
cuuuggcuugaagcucugu

SEQ ID NO: 2926970 - RNA, 19 nt, Artificial Sequence
  Description of Artificial Sequence: Synthetic oligonucleotide
gggaggccagcacccugca

SEQ ID NO: 2926971 - RNA, 19 nt, Artificial Sequence
  Description of Artificial Sequence: Synthetic oligonucleotide
cuacaccuucauacauguu

SEQ ID NO: 2926972 - RNA, 19 nt, Artificial Sequence
  Description of Artificial Sequence: Synthetic oligonucleotide
cagccccugccugccugac

SEQ ID NO: 2926973 - RNA, 19 nt, Artificial Sequence
  Description of Artificial Sequence: Synthetic oligonucleotide
gcagcuccuacugcgcccu

SEQ ID NO: 2926974 - RNA, 19 nt, Artificial Sequence
  Description of Artificial Sequence: Synthetic oligonucleotide
cccugccugccugacagga

SEQ ID NO: 2926975 - RNA, 19 nt, Artificial Sequence
  Description of Artificial Sequence: Synthetic oligonucleotide
ccccugccugccugacagg

SEQ ID NO: 2926976 - RNA, 19 nt, Artificial Sequence
  Description of Artificial Sequence: Synthetic oligonucleotide
ccagcgucaugaucucugu

SEQ ID NO: 2926977 - RNA, 19 nt, Artificial Sequence
  Description of Artificial Sequence: Synthetic oligonucleotide
cgucaugaucucugugucu

SEQ ID NO: 2926978 - RNA, 19 nt, Artificial Sequence
  Description of Artificial Sequence: Synthetic oligonucleotide
cugcgcccuucgugccauc

SEQ ID NO: 2926979 - RNA, 19 nt, Artificial Sequence
  Description of Artificial Sequence: Synthetic oligonucleotide
cuccuacugcgcccuucgu

SEQ ID NO: 2926980 - RNA, 19 nt, Artificial Sequence
  Description of Artificial Sequence: Synthetic oligonucleotide
gccugacaggauggaggga

SEQ ID NO: 2926981 - RNA, 19 nt, Artificial Sequence
  Description of Artificial Sequence: Synthetic oligonucleotide
cccugcacagccccugccu

SEQ ID NO: 2926982 - RNA, 19 nt, Artificial Sequence
  Description of Artificial Sequence: Synthetic oligonucleotide
cccuucgugccaucagcau

SEQ ID NO: 2926983 - RNA, 19 nt, Artificial Sequence
  Description of Artificial Sequence: Synthetic oligonucleotide
cgucaagguguuggagaga

SEQ ID NO: 2926984 - RNA, 19 nt, Artificial Sequence
  Description of Artificial Sequence: Synthetic oligonucleotide
cggauguuguccucagcuu

SEQ ID NO: 2926985 - RNA, 19 nt, Artificial Sequence
  Description of Artificial Sequence: Synthetic oligonucleotide
guggggcgugaggggcaga

SEQ ID NO: 2926986 - RNA, 19 nt, Artificial Sequence
  Description of Artificial Sequence: Synthetic oligonucleotide
gcacagccccugccugccu

SEQ ID NO: 2926987 - RNA, 19 nt, Artificial Sequence
  Description of Artificial Sequence: Synthetic oligonucleotide
cagcuccuacugcgcccuu

SEQ ID NO: 2926988 - RNA, 19 nt, Artificial Sequence
  Description of Artificial Sequence: Synthetic oligonucleotide
ucuuucaugaccaagaaga

SEQ ID NO: 2926989 - RNA, 19 nt, Artificial Sequence
  Description of Artificial Sequence: Synthetic oligonucleotide
aauuauuucaugccuauga

SEQ ID NO: 2926990 - RNA, 19 nt, Artificial Sequence
  Description of Artificial Sequence: Synthetic oligonucleotide
uuucuuaucaguaugaauu

SEQ ID NO: 2926991 - RNA, 19 nt, Artificial Sequence
  Description of Artificial Sequence: Synthetic oligonucleotide
uauuucaugccuaugaaga

SEQ ID NO: 2926992 - RNA, 19 nt, Artificial Sequence
  Description of Artificial Sequence: Synthetic oligonucleotide
uaugauuucuuucaugacc

SEQ ID NO: 2926993 - RNA, 19 nt, Artificial Sequence
  Description of Artificial Sequence: Synthetic oligonucleotide
uucaugaccaagaagauuc

SEQ ID NO: 2926994 - RNA, 19 nt, Artificial Sequence
  Description of Artificial Sequence: Synthetic oligonucleotide
aagacuacucuucugaaca

SEQ ID NO: 2926995 - RNA, 19 nt, Artificial Sequence
  Description of Artificial Sequence: Synthetic oligonucleotide
aguaugauuucuuucauga

SEQ ID NO: 2926996 - RNA, 19 nt, Artificial Sequence
  Description of Artificial Sequence: Synthetic oligonucleotide
uguuuuaugcauuugaauu

SEQ ID NO: 2926997 - RNA, 19 nt, Artificial Sequence
  Description of Artificial Sequence: Synthetic oligonucleotide
augcauuugaauucucucc

SEQ ID NO: 2926998 - RNA, 19 nt, Artificial Sequence
  Description of Artificial Sequence: Synthetic oligonucleotide
uaugaauucuuucauggcu

SEQ ID NO: 2926999 - RNA, 19 nt, Artificial Sequence
  Description of Artificial Sequence: Synthetic oligonucleotide
uaugaauucuuucaugacu

SEQ ID NO: 2927000 - RNA, 19 nt, Artificial Sequence
  Description of Artificial Sequence: Synthetic oligonucleotide
uaugaauuauuucaugccu

SEQ ID NO: 2927001 - RNA, 19 nt, Artificial Sequence
  Description of Artificial Sequence: Synthetic oligonucleotide
gaagauucuucuuugcugc

SEQ ID NO: 2927002 - RNA, 19 nt, Artificial Sequence
  Description of Artificial Sequence: Synthetic oligonucleotide
ggauuuagcacacugauug

SEQ ID NO: 2927003 - RNA, 19 nt, Artificial Sequence
  Description of Artificial Sequence: Synthetic oligonucleotide
uguuguuuuaugcauuuga

SEQ ID NO: 2927004 - RNA, 19 nt, Artificial Sequence
  Description of Artificial Sequence: Synthetic oligonucleotide
uacucuucugaacaaaggc

SEQ ID NO: 2927005 - RNA, 19 nt, Artificial Sequence
  Description of Artificial Sequence: Synthetic oligonucleotide
agaagauacuucuucagug

SEQ ID NO: 2927006 - RNA, 19 nt, Artificial Sequence
  Description of Artificial Sequence: Synthetic oligonucleotide
aagacuacucuucugugca

SEQ ID NO: 2927007 - RNA, 19 nt, Artificial Sequence
  Description of Artificial Sequence: Synthetic oligonucleotide
uuauuucaugccuaugaag

SEQ ID NO: 2927008 - RNA, 19 nt, Artificial Sequence
  Description of Artificial Sequence: Synthetic oligonucleotide
uugaagacuacucuucugu

SEQ ID NO: 2927009 - RNA, 19 nt, Artificial Sequence
  Description of Artificial Sequence: Synthetic oligonucleotide
gaagauacuucuucagugc

SEQ ID NO: 2927010 - RNA, 19 nt, Artificial Sequence
  Description of Artificial Sequence: Synthetic oligonucleotide
uugaauucucuccaguaug

SEQ ID NO: 2927011 - RNA, 19 nt, Artificial Sequence
  Description of Artificial Sequence: Synthetic oligonucleotide
aaggauuuagcacacugau

SEQ ID NO: 2927012 - RNA, 19 nt, Artificial Sequence
  Description of Artificial Sequence: Synthetic oligonucleotide
uucauaggguuucuuauca

SEQ ID NO: 2927013 - RNA, 19 nt, Artificial Sequence
  Description of Artificial Sequence: Synthetic oligonucleotide
guaugaauuauuucaugcc

SEQ ID NO: 2927014 - RNA, 19 nt, Artificial Sequence
  Description of Artificial Sequence: Synthetic oligonucleotide
uucauggcugagaagauac

SEQ ID NO: 2927015 - RNA, 19 nt, Artificial Sequence
  Description of Artificial Sequence: Synthetic oligonucleotide
ugcauuugaauucucucca

SEQ ID NO: 2927016 - RNA, 19 nt, Artificial Sequence
  Description of Artificial Sequence: Synthetic oligonucleotide
aagaagauucuucuuugcu

SEQ ID NO: 2927017 - RNA, 19 nt, Artificial Sequence
  Description of Artificial Sequence: Synthetic oligonucleotide
agaagauucuucuuugcug

SEQ ID NO: 2927018 - RNA, 19 nt, Artificial Sequence
  Description of Artificial Sequence: Synthetic oligonucleotide
auuucaugccuaugaagac

SEQ ID NO: 2927019 - RNA, 19 nt, Artificial Sequence
  Description of Artificial Sequence: Synthetic oligonucleotide
uuaucaguaugaauuauuu

SEQ ID NO: 2927020 - RNA, 19 nt, Artificial Sequence
  Description of Artificial Sequence: Synthetic oligonucleotide
ugagaagauacuucuucag

SEQ ID NO: 2927021 - RNA, 19 nt, Artificial Sequence
  Description of Artificial Sequence: Synthetic oligonucleotide
augcauaggguuucucucc

SEQ ID NO: 2927022 - RNA, 19 nt, Artificial Sequence
  Description of Artificial Sequence: Synthetic oligonucleotide
auucauaggguuucuuauc

SEQ ID NO: 2927023 - RNA, 19 nt, Artificial Sequence
  Description of Artificial Sequence: Synthetic oligonucleotide
guuuuaugcauuugaauuc

SEQ ID NO: 2927024 - RNA, 19 nt, Artificial Sequence
  Description of Artificial Sequence: Synthetic oligonucleotide
augaagacuacucuucuga

SEQ ID NO: 2927025 - RNA, 19 nt, Artificial Sequence
  Description of Artificial Sequence: Synthetic oligonucleotide
ugaauucucuccaguauga

SEQ ID NO: 2927026 - RNA, 19 nt, Artificial Sequence
  Description of Artificial Sequence: Synthetic oligonucleotide
aagauacuucuucagugca

SEQ ID NO: 2927027 - RNA, 19 nt, Artificial Sequence
  Description of Artificial Sequence: Synthetic oligonucleotide
uuauugcauuugaagauga

SEQ ID NO: 2927028 - RNA, 19 nt, Artificial Sequence
  Description of Artificial Sequence: Synthetic oligonucleotide
aauucuuucaugacuuuga

SEQ ID NO: 2927029 - RNA, 19 nt, Artificial Sequence
  Description of Artificial Sequence: Synthetic oligonucleotide
uuugaauucucuccaguau

SEQ ID NO: 2927030 - RNA, 19 nt, Artificial Sequence
  Description of Artificial Sequence: Synthetic oligonucleotide
ugaccaagaagauucuucu

SEQ ID NO: 2927031 - RNA, 19 nt, Artificial Sequence
  Description of Artificial Sequence: Synthetic oligonucleotide
uuaugcauuugaauucucu

SEQ ID NO: 2927032 - RNA, 19 nt, Artificial Sequence
  Description of Artificial Sequence: Synthetic oligonucleotide
uauguguuguuuuaugcau

SEQ ID NO: 2927033 - RNA, 19 nt, Artificial Sequence
  Description of Artificial Sequence: Synthetic oligonucleotide
uaugcguccuuuuauugca

SEQ ID NO: 2927034 - RNA, 19 nt, Artificial Sequence
  Description of Artificial Sequence: Synthetic oligonucleotide
gaagacuacucuucugugc

SEQ ID NO: 2927035 - RNA, 19 nt, Artificial Sequence
  Description of Artificial Sequence: Synthetic oligonucleotide
ugacuuugaagacuacucu

SEQ ID NO: 2927036 - RNA, 19 nt, Artificial Sequence
  Description of Artificial Sequence: Synthetic oligonucleotide
uucaugacuuugaagacua

SEQ ID NO: 2927037 - RNA, 19 nt, Artificial Sequence
  Description of Artificial Sequence: Synthetic oligonucleotide
uuuuaugcauuugaauucu

SEQ ID NO: 2927038 - RNA, 19 nt, Artificial Sequence
  Description of Artificial Sequence: Synthetic oligonucleotide
ugcugcaaaggcuuuacca

SEQ ID NO: 2927039 - RNA, 19 nt, Artificial Sequence
  Description of Artificial Sequence: Synthetic oligonucleotide
augacuuugaagacuacuc

SEQ ID NO: 2927040 - RNA, 19 nt, Artificial Sequence
  Description of Artificial Sequence: Synthetic oligonucleotide
uucagugcaaaggauuuag

SEQ ID NO: 2927041 - RNA, 19 nt, Artificial Sequence
  Description of Artificial Sequence: Synthetic oligonucleotide
uucuuucaugaccaagaag

SEQ ID NO: 2927042 - RNA, 19 nt, Artificial Sequence
  Description of Artificial Sequence: Synthetic oligonucleotide
auugcauucauaaggccuc

SEQ ID NO: 2927043 - RNA, 19 nt, Artificial Sequence
  Description of Artificial Sequence: Synthetic oligonucleotide
auuauuucaugccuaugaa

SEQ ID NO: 2927044 - RNA, 19 nt, Artificial Sequence
  Description of Artificial Sequence: Synthetic oligonucleotide
auuucuuucaugaccaaga

SEQ ID NO: 2927045 - RNA, 19 nt, Artificial Sequence
  Description of Artificial Sequence: Synthetic oligonucleotide
ugaauuauuucaugccuau

SEQ ID NO: 2927046 - RNA, 19 nt, Artificial Sequence
  Description of Artificial Sequence: Synthetic oligonucleotide
acuuugaagacuacucuuc

SEQ ID NO: 2927047 - RNA, 19 nt, Artificial Sequence
  Description of Artificial Sequence: Synthetic oligonucleotide
uuugaagacuacucuucug

SEQ ID NO: 2927048 - RNA, 19 nt, Artificial Sequence
  Description of Artificial Sequence: Synthetic oligonucleotide
ccuuuuauugcauuugaag

SEQ ID NO: 2927049 - RNA, 19 nt, Artificial Sequence
  Description of Artificial Sequence: Synthetic oligonucleotide
uuguuuuaugcauuugaau

SEQ ID NO: 2927050 - RNA, 19 nt, Artificial Sequence
  Description of Artificial Sequence: Synthetic oligonucleotide
gauuucuuucaugaccaag

SEQ ID NO: 2927051 - RNA, 19 nt, Artificial Sequence
  Description of Artificial Sequence: Synthetic oligonucleotide
augaccaagaagauucuuc

SEQ ID NO: 2927052 - RNA, 19 nt, Artificial Sequence
  Description of Artificial Sequence: Synthetic oligonucleotide
auugcauuugaagaugacu

SEQ ID NO: 2927053 - RNA, 19 nt, Artificial Sequence
  Description of Artificial Sequence: Synthetic oligonucleotide
gauuuagcacacugauugc

SEQ ID NO: 2927054 - RNA, 19 nt, Artificial Sequence
  Description of Artificial Sequence: Synthetic oligonucleotide
cuuucaugacuuugaagac

SEQ ID NO: 2927055 - RNA, 19 nt, Artificial Sequence
  Description of Artificial Sequence: Synthetic oligonucleotide
augauuucuuucaugacca

SEQ ID NO: 2927056 - RNA, 19 nt, Artificial Sequence
  Description of Artificial Sequence: Synthetic oligonucleotide
aaggccucucuccaguaug

SEQ ID NO: 2927057 - RNA, 19 nt, Artificial Sequence
  Description of Artificial Sequence: Synthetic oligonucleotide
ucuucagugcaaaggauuu

SEQ ID NO: 2927058 - RNA, 19 nt, Artificial Sequence
  Description of Artificial Sequence: Synthetic oligonucleotide
uucaugccuaugaagacua

SEQ ID NO: 2927059 - RNA, 19 nt, Artificial Sequence
  Description of Artificial Sequence: Synthetic oligonucleotide
uucuuugcugcaaaggcuu

SEQ ID NO: 2927060 - RNA, 19 nt, Artificial Sequence
  Description of Artificial Sequence: Synthetic oligonucleotide
aggguuucuuaucaguaug

SEQ ID NO: 2927061 - RNA, 19 nt, Artificial Sequence
  Description of Artificial Sequence: Synthetic oligonucleotide
uuucuuucaugaccaagaa

SEQ ID NO: 2927062 - RNA, 19 nt, Artificial Sequence
  Description of Artificial Sequence: Synthetic oligonucleotide
accaagaagauucuucuuu

SEQ ID NO: 2927063 - RNA, 19 nt, Artificial Sequence
  Description of Artificial Sequence: Synthetic oligonucleotide
ugaagacuacucuucugug

SEQ ID NO: 2927064 - RNA, 19 nt, Artificial Sequence
  Description of Artificial Sequence: Synthetic oligonucleotide
uaucaguaugaauuauuuc

SEQ ID NO: 2927065 - RNA, 19 nt, Artificial Sequence
  Description of Artificial Sequence: Synthetic oligonucleotide
guaugcguccuuuuauugc

SEQ ID NO: 2927066 - RNA, 19 nt, Artificial Sequence
  Description of Artificial Sequence: Synthetic oligonucleotide
gaagacuacucuucugaac

SEQ ID NO: 2927067 - RNA, 19 nt, Artificial Sequence
  Description of Artificial Sequence: Synthetic oligonucleotide
gaauucuuucaugacuuug

SEQ ID NO: 2927068 - RNA, 19 nt, Artificial Sequence
  Description of Artificial Sequence: Synthetic oligonucleotide
auuugaauucucuccagua

SEQ ID NO: 2927069 - RNA, 19 nt, Artificial Sequence
  Description of Artificial Sequence: Synthetic oligonucleotide
uuucaugacuuugaagacu

SEQ ID NO: 2927070 - RNA, 19 nt, Artificial Sequence
  Description of Artificial Sequence: Synthetic oligonucleotide
uucuuaucaguaugaauua

SEQ ID NO: 2927071 - RNA, 19 nt, Artificial Sequence
  Description of Artificial Sequence: Synthetic oligonucleotide
caagaagauucuucuuugc

SEQ ID NO: 2927072 - RNA, 19 nt, Artificial Sequence
  Description of Artificial Sequence: Synthetic oligonucleotide
uggcugagaagauacuucu

SEQ ID NO: 2927073 - RNA, 19 nt, Artificial Sequence
  Description of Artificial Sequence: Synthetic oligonucleotide
augccuaugaagacuacuc

SEQ ID NO: 2927074 - RNA, 19 nt, Artificial Sequence
  Description of Artificial Sequence: Synthetic oligonucleotide
caugcauaggguuucucuc

SEQ ID NO: 2927075 - RNA, 19 nt, Artificial Sequence
  Description of Artificial Sequence: Synthetic oligonucleotide
uuucaugccuaugaagacu

SEQ ID NO: 2927076 - RNA, 19 nt, Artificial Sequence
  Description of Artificial Sequence: Synthetic oligonucleotide
ugcaaaggauuuagcacac

SEQ ID NO: 2927077 - RNA, 19 nt, Artificial Sequence
  Description of Artificial Sequence: Synthetic oligonucleotide
ugccuaugaagacuacucu

SEQ ID NO: 2927078 - RNA, 19 nt, Artificial Sequence
  Description of Artificial Sequence: Synthetic oligonucleotide
ucagugcaaaggauuuagc

SEQ ID NO: 2927079 - RNA, 19 nt, Artificial Sequence
  Description of Artificial Sequence: Synthetic oligonucleotide
acuacucuucugaacaaag

SEQ ID NO: 2927080 - RNA, 19 nt, Artificial Sequence
  Description of Artificial Sequence: Synthetic oligonucleotide
uauugcauuugaagaugac

SEQ ID NO: 2927081 - RNA, 19 nt, Artificial Sequence
  Description of Artificial Sequence: Synthetic oligonucleotide
auuuagcacacugauugca

SEQ ID NO: 2927082 - RNA, 19 nt, Artificial Sequence
  Description of Artificial Sequence: Synthetic oligonucleotide
acuacucuucugugcaaag

SEQ ID NO: 2927083 - RNA, 19 nt, Artificial Sequence
  Description of Artificial Sequence: Synthetic oligonucleotide
auggcugagaagauacuuc

SEQ ID NO: 2927084 - RNA, 19 nt, Artificial Sequence
  Description of Artificial Sequence: Synthetic oligonucleotide
ugaagacuacucuucugaa

SEQ ID NO: 2927085 - RNA, 19 nt, Artificial Sequence
  Description of Artificial Sequence: Synthetic oligonucleotide
cagugcaaaggauuuagca

SEQ ID NO: 2927086 - RNA, 19 nt, Artificial Sequence
  Description of Artificial Sequence: Synthetic oligonucleotide
acucuucugaacaaaggcu

SEQ ID NO: 2927087 - RNA, 19 nt, Artificial Sequence
  Description of Artificial Sequence: Synthetic oligonucleotide
cugagaagauacuucuuca

SEQ ID NO: 2927088 - RNA, 19 nt, Artificial Sequence
  Description of Artificial Sequence: Synthetic oligonucleotide
caguaugauuucuuucaug

SEQ ID NO: 2927089 - RNA, 19 nt, Artificial Sequence
  Description of Artificial Sequence: Synthetic oligonucleotide
uuugcugcaaaggcuuuac

SEQ ID NO: 2927090 - RNA, 19 nt, Artificial Sequence
  Description of Artificial Sequence: Synthetic oligonucleotide
gauacuucuucagugcaaa

SEQ ID NO: 2927091 - RNA, 19 nt, Artificial Sequence
  Description of Artificial Sequence: Synthetic oligonucleotide
uuuaugcauuugaauucuc

SEQ ID NO: 2927092 - RNA, 19 nt, Artificial Sequence
  Description of Artificial Sequence: Synthetic oligonucleotide
gaauuauuucaugccuaug

SEQ ID NO: 2927093 - RNA, 19 nt, Artificial Sequence
  Description of Artificial Sequence: Synthetic oligonucleotide
ucaugaccaagaagauucu

SEQ ID NO: 2927094 - RNA, 19 nt, Artificial Sequence
  Description of Artificial Sequence: Synthetic oligonucleotide
gagaagauacuucuucagu

SEQ ID NO: 2927095 - RNA, 19 nt, Artificial Sequence
  Description of Artificial Sequence: Synthetic oligonucleotide
gcugcaaaggcuuuaccac

SEQ ID NO: 2927096 - RNA, 19 nt, Artificial Sequence
  Description of Artificial Sequence: Synthetic oligonucleotide
auacuucuucagugcaaag

SEQ ID NO: 2927097 - RNA, 19 nt, Artificial Sequence
  Description of Artificial Sequence: Synthetic oligonucleotide
ucuuaucaguaugaauuau

SEQ ID NO: 2927098 - RNA, 19 nt, Artificial Sequence
  Description of Artificial Sequence: Synthetic oligonucleotide
ccuaugaagacuacucuuc

SEQ ID NO: 2927099 - RNA, 19 nt, Artificial Sequence
  Description of Artificial Sequence: Synthetic oligonucleotide
guuguuuuaugcauuugaa

SEQ ID NO: 2927100 - RNA, 19 nt, Artificial Sequence
  Description of Artificial Sequence: Synthetic oligonucleotide
uuucaugaccaagaagauu

SEQ ID NO: 2927101 - RNA, 19 nt, Artificial Sequence
  Description of Artificial Sequence: Synthetic oligonucleotide
uuagcacacugauugcauu

SEQ ID NO: 2927102 - RNA, 19 nt, Artificial Sequence
  Description of Artificial Sequence: Synthetic oligonucleotide
ccaagaagauucuucuuug

SEQ ID NO: 2927103 - RNA, 19 nt, Artificial Sequence
  Description of Artificial Sequence: Synthetic oligonucleotide
ucauggcugagaagauacu

SEQ ID NO: 2927104 - RNA, 19 nt, Artificial Sequence
  Description of Artificial Sequence: Synthetic oligonucleotide
uugcugcaaaggcuuuacc

SEQ ID NO: 2927105 - RNA, 19 nt, Artificial Sequence
  Description of Artificial Sequence: Synthetic oligonucleotide
augaauuauuucaugccua

SEQ ID NO: 2927106 - RNA, 19 nt, Artificial Sequence
  Description of Artificial Sequence: Synthetic oligonucleotide
uuucauggcugagaagaua

SEQ ID NO: 2927107 - RNA, 19 nt, Artificial Sequence
  Description of Artificial Sequence: Synthetic oligonucleotide
gacuuugaagacuacucuu

SEQ ID NO: 2927108 - RNA, 19 nt, Artificial Sequence
  Description of Artificial Sequence: Synthetic oligonucleotide
cauucauaggguuucuuau

SEQ ID NO: 2927109 - RNA, 19 nt, Artificial Sequence
  Description of Artificial Sequence: Synthetic oligonucleotide
ugauuucuuucaugaccaa

SEQ ID NO: 2927110 - RNA, 19 nt, Artificial Sequence
  Description of Artificial Sequence: Synthetic oligonucleotide
uaaggccucucuccaguau

SEQ ID NO: 2927111 - RNA, 19 nt, Artificial Sequence
  Description of Artificial Sequence: Synthetic oligonucleotide
cuuaucaguaugaauuauu

SEQ ID NO: 2927112 - RNA, 19 nt, Artificial Sequence
  Description of Artificial Sequence: Synthetic oligonucleotide
ucaugacuuugaagacuac

SEQ ID NO: 2927113 - RNA, 19 nt, Artificial Sequence
  Description of Artificial Sequence: Synthetic oligonucleotide
agacuacucuucugaacaa

SEQ ID NO: 2927114 - RNA, 19 nt, Artificial Sequence
  Description of Artificial Sequence: Synthetic oligonucleotide
gcauuugaauucucuccag

SEQ ID NO: 2927115 - RNA, 19 nt, Artificial Sequence
  Description of Artificial Sequence: Synthetic oligonucleotide
agcacacugauugcauuca

SEQ ID NO: 2927116 - RNA, 19 nt, Artificial Sequence
  Description of Artificial Sequence: Synthetic oligonucleotide
cuucuuugcugcaaaggcu

SEQ ID NO: 2927117 - RNA, 19 nt, Artificial Sequence
  Description of Artificial Sequence: Synthetic oligonucleotide
ucaugccuaugaagacuac

SEQ ID NO: 2927118 - RNA, 19 nt, Artificial Sequence
  Description of Artificial Sequence: Synthetic oligonucleotide
cuuugaagacuacucuucu

SEQ ID NO: 2927119 - RNA, 19 nt, Artificial Sequence
  Description of Artificial Sequence: Synthetic oligonucleotide
cucuucugaacaaaggcuu

SEQ ID NO: 2927120 - RNA, 19 nt, Artificial Sequence
  Description of Artificial Sequence: Synthetic oligonucleotide
cuaugaagacuacucuucu

SEQ ID NO: 2927121 - RNA, 19 nt, Artificial Sequence
  Description of Artificial Sequence: Synthetic oligonucleotide
gacuacucuucugugcaaa

SEQ ID NO: 2927122 - RNA, 19 nt, Artificial Sequence
  Description of Artificial Sequence: Synthetic oligonucleotide
cauuugaauucucuccagu

SEQ ID NO: 2927123 - RNA, 19 nt, Artificial Sequence
  Description of Artificial Sequence: Synthetic oligonucleotide
gacuacucuucugaacaaa

SEQ ID NO: 2927124 - RNA, 19 nt, Artificial Sequence
  Description of Artificial Sequence: Synthetic oligonucleotide
auaaggccucucuccagua

SEQ ID NO: 2927125 - RNA, 19 nt, Artificial Sequence
  Description of Artificial Sequence: Synthetic oligonucleotide
ugcguccuuuuauugcauu

SEQ ID NO: 2927126 - RNA, 19 nt, Artificial Sequence
  Description of Artificial Sequence: Synthetic oligonucleotide
agacuacucuucugugcaa

SEQ ID NO: 2927127 - RNA, 19 nt, Artificial Sequence
  Description of Artificial Sequence: Synthetic oligonucleotide
caugacuuugaagacuacu

SEQ ID NO: 2927128 - RNA, 19 nt, Artificial Sequence
  Description of Artificial Sequence: Synthetic oligonucleotide
cuuucaugaccaagaagau

SEQ ID NO: 2927129 - RNA, 19 nt, Artificial Sequence
  Description of Artificial Sequence: Synthetic oligonucleotide
aggauuuagcacacugauu

SEQ ID NO: 2927130 - RNA, 19 nt, Artificial Sequence
  Description of Artificial Sequence: Synthetic oligonucleotide
gguuucuuaucaguaugaa

SEQ ID NO: 2927131 - RNA, 19 nt, Artificial Sequence
  Description of Artificial Sequence: Synthetic oligonucleotide
cuucugaacaaaggcuuua

SEQ ID NO: 2927132 - RNA, 19 nt, Artificial Sequence
  Description of Artificial Sequence: Synthetic oligonucleotide
gaccaagaagauucuucuu

SEQ ID NO: 2927133 - RNA, 19 nt, Artificial Sequence
  Description of Artificial Sequence: Synthetic oligonucleotide
caugccuaugaagacuacu

SEQ ID NO: 2927134 - RNA, 19 nt, Artificial Sequence
  Description of Artificial Sequence: Synthetic oligonucleotide
cuuucauggcugagaagau

SEQ ID NO: 2927135 - RNA, 19 nt, Artificial Sequence
  Description of Artificial Sequence: Synthetic oligonucleotide
cauggcugagaagauacuu

SEQ ID NO: 2927136 - RNA, 19 nt, Artificial Sequence
  Description of Artificial Sequence: Synthetic oligonucleotide
cuucagugcaaaggauuua

SEQ ID NO: 2927137 - RNA, 19 nt, Artificial Sequence
  Description of Artificial Sequence: Synthetic oligonucleotide
gccuaugaagacuacucuu

SEQ ID NO: 2927138 - RNA, 19 nt, Artificial Sequence
  Description of Artificial Sequence: Synthetic oligonucleotide
augcguccuuuuauugcau

SEQ ID NO: 2927139 - RNA, 19 nt, Artificial Sequence
  Description of Artificial Sequence: Synthetic oligonucleotide
caugaccaagaagauucuu

SEQ ID NO: 2927140 - RNA, 19 nt, Artificial Sequence
  Description of Artificial Sequence: Synthetic oligonucleotide
gcguccuuuuauugcauuu

SEQ ID NO: 2927141 - RNA, 19 nt, Artificial Sequence
  Description of Artificial Sequence: Synthetic oligonucleotide
gccucucuccaguaugauu

SEQ ID NO: 2927142 - RNA, 19 nt, Artificial Sequence
  Description of Artificial Sequence: Synthetic oligonucleotide
gcaaaggauuuagcacacu

SEQ ID NO: 2927143 - RNA, 19 nt, Artificial Sequence
  Description of Artificial Sequence: Synthetic oligonucleotide
ggccucucuccaguaugau

SEQ ID NO: 2927144 - RNA, 19 nt, Artificial Sequence
  Description of Artificial Sequence: Synthetic oligonucleotide
aauucaauguuauugccac

SEQ ID NO: 2927145 - RNA, 19 nt, Artificial Sequence
  Description of Artificial Sequence: Synthetic oligonucleotide
aaaaguuagucucuggugg

SEQ ID NO: 2927146 - RNA, 19 nt, Artificial Sequence
  Description of Artificial Sequence: Synthetic oligonucleotide
aauaauaucagagucaccu

SEQ ID NO: 2927147 - RNA, 19 nt, Artificial Sequence
  Description of Artificial Sequence: Synthetic oligonucleotide
uguaguauuucccacaugc

SEQ ID NO: 2927148 - RNA, 19 nt, Artificial Sequence
  Description of Artificial Sequence: Synthetic oligonucleotide
ucaaugauagccaaugugc

SEQ ID NO: 2927149 - RNA, 19 nt, Artificial Sequence
  Description of Artificial Sequence: Synthetic oligonucleotide
ugccugaucaucuugagcg

SEQ ID NO: 2927150 - RNA, 19 nt, Artificial Sequence
  Description of Artificial Sequence: Synthetic oligonucleotide
uuuuauuaaaggaaggcgu

SEQ ID NO: 2927151 - RNA, 19 nt, Artificial Sequence
  Description of Artificial Sequence: Synthetic oligonucleotide
uaauaucagagucaccugg

SEQ ID NO: 2927152 - RNA, 19 nt, Artificial Sequence
  Description of Artificial Sequence: Synthetic oligonucleotide
ucuaauaauaucagaguca

SEQ ID NO: 2927153 - RNA, 19 nt, Artificial Sequence
  Description of Artificial Sequence: Synthetic oligonucleotide
ucuauuucagauuuccuca

SEQ ID NO: 2927154 - RNA, 19 nt, Artificial Sequence
  Description of Artificial Sequence: Synthetic oligonucleotide
uuaaaaguuagucucuggu

SEQ ID NO: 2927155 - RNA, 19 nt, Artificial Sequence
  Description of Artificial Sequence: Synthetic oligonucleotide
uucuaauaauaucagaguc

SEQ ID NO: 2927156 - RNA, 19 nt, Artificial Sequence
  Description of Artificial Sequence: Synthetic oligonucleotide
uaaaggaaggcguuucugg

SEQ ID NO: 2927157 - RNA, 19 nt, Artificial Sequence
  Description of Artificial Sequence: Synthetic oligonucleotide
uucaucaccagcuggagcc

SEQ ID NO: 2927158 - RNA, 19 nt, Artificial Sequence
  Description of Artificial Sequence: Synthetic oligonucleotide
uucagauuuccucagggcc

SEQ ID NO: 2927159 - RNA, 19 nt, Artificial Sequence
  Description of Artificial Sequence: Synthetic oligonucleotide
aauguuauugccacuguag

SEQ ID NO: 2927160 - RNA, 19 nt, Artificial Sequence
  Description of Artificial Sequence: Synthetic oligonucleotide
caugcuucuaauaauauca

SEQ ID NO: 2927161 - RNA, 19 nt, Artificial Sequence
  Description of Artificial Sequence: Synthetic oligonucleotide
guuuuauuaaaggaaggcg

SEQ ID NO: 2927162 - RNA, 19 nt, Artificial Sequence
  Description of Artificial Sequence: Synthetic oligonucleotide
ucagauuuccucagggccg

SEQ ID NO: 2927163 - RNA, 19 nt, Artificial Sequence
  Description of Artificial Sequence: Synthetic oligonucleotide
auuucagauuuccucaggg

SEQ ID NO: 2927164 - RNA, 19 nt, Artificial Sequence
  Description of Artificial Sequence: Synthetic oligonucleotide
gaguugauggacuccaggg

SEQ ID NO: 2927165 - RNA, 19 nt, Artificial Sequence
  Description of Artificial Sequence: Synthetic oligonucleotide
cuguuuguagcccaggacg

SEQ ID NO: 2927166 - RNA, 19 nt, Artificial Sequence
  Description of Artificial Sequence: Synthetic oligonucleotide
auagccaaugugcauacuc

SEQ ID NO: 2927167 - RNA, 19 nt, Artificial Sequence
  Description of Artificial Sequence: Synthetic oligonucleotide
uuuaaaaguuagucucugg

SEQ ID NO: 2927168 - RNA, 19 nt, Artificial Sequence
  Description of Artificial Sequence: Synthetic oligonucleotide
uaaaaguuagucucuggug

SEQ ID NO: 2927169 - RNA, 19 nt, Artificial Sequence
  Description of Artificial Sequence: Synthetic oligonucleotide
ucaccugggucaaugauag

SEQ ID NO: 2927170 - RNA, 19 nt, Artificial Sequence
  Description of Artificial Sequence: Synthetic oligonucleotide
ugguuuuauuaaaggaagg

SEQ ID NO: 2927171 - RNA, 19 nt, Artificial Sequence
  Description of Artificial Sequence: Synthetic oligonucleotide
accugggucaaugauagcc

SEQ ID NO: 2927172 - RNA, 19 nt, Artificial Sequence
  Description of Artificial Sequence: Synthetic oligonucleotide
cuaauaauaucagagucac

SEQ ID NO: 2927173 - RNA, 19 nt, Artificial Sequence
  Description of Artificial Sequence: Synthetic oligonucleotide
auuucccacaugcugugcc

SEQ ID NO: 2927174 - RNA, 19 nt, Artificial Sequence
  Description of Artificial Sequence: Synthetic oligonucleotide
ucuggugguuuuauuaaag

SEQ ID NO: 2927175 - RNA, 19 nt, Artificial Sequence
  Description of Artificial Sequence: Synthetic oligonucleotide
aguacucuauuucagauuu

SEQ ID NO: 2927176 - RNA, 19 nt, Artificial Sequence
  Description of Artificial Sequence: Synthetic oligonucleotide
ucuggcaugcuucuaauaa

SEQ ID NO: 2927177 - RNA, 19 nt, Artificial Sequence
  Description of Artificial Sequence: Synthetic oligonucleotide
augaaccccggucuuagcc

SEQ ID NO: 2927178 - RNA, 19 nt, Artificial Sequence
  Description of Artificial Sequence: Synthetic oligonucleotide
aaugugcauacucuguagu

SEQ ID NO: 2927179 - RNA, 19 nt, Artificial Sequence
  Description of Artificial Sequence: Synthetic oligonucleotide
aauaucagagucaccuggg

SEQ ID NO: 2927180 - RNA, 19 nt, Artificial Sequence
  Description of Artificial Sequence: Synthetic oligonucleotide
ucugguuuacuacuucuca

SEQ ID NO: 2927181 - RNA, 19 nt, Artificial Sequence
  Description of Artificial Sequence: Synthetic oligonucleotide
uucaauguuauugccacug

SEQ ID NO: 2927182 - RNA, 19 nt, Artificial Sequence
  Description of Artificial Sequence: Synthetic oligonucleotide
uggagccucgaguugaugg

SEQ ID NO: 2927183 - RNA, 19 nt, Artificial Sequence
  Description of Artificial Sequence: Synthetic oligonucleotide
uuuauuaaaggaaggcguu

SEQ ID NO: 2927184 - RNA, 19 nt, Artificial Sequence
  Description of Artificial Sequence: Synthetic oligonucleotide
acuacuucucaccagucug

SEQ ID NO: 2927185 - RNA, 19 nt, Artificial Sequence
  Description of Artificial Sequence: Synthetic oligonucleotide
aucagagucaccuggguca

SEQ ID NO: 2927186 - RNA, 19 nt, Artificial Sequence
  Description of Artificial Sequence: Synthetic oligonucleotide
ugguuuacuacuucucacc

SEQ ID NO: 2927187 - RNA, 19 nt, Artificial Sequence
  Description of Artificial Sequence: Synthetic oligonucleotide
cucuauuucagauuuccuc

SEQ ID NO: 2927188 - RNA, 19 nt, Artificial Sequence
  Description of Artificial Sequence: Synthetic oligonucleotide
uuguuggcgaggaugacca

SEQ ID NO: 2927189 - RNA, 19 nt, Artificial Sequence
  Description of Artificial Sequence: Synthetic oligonucleotide
gcuucuaauaauaucagag

SEQ ID NO: 2927190 - RNA, 19 nt, Artificial Sequence
  Description of Artificial Sequence: Synthetic oligonucleotide
cauacucuguaguauuucc

SEQ ID NO: 2927191 - RNA, 19 nt, Artificial Sequence
  Description of Artificial Sequence: Synthetic oligonucleotide
uguuauugccacuguagug

SEQ ID NO: 2927192 - RNA, 19 nt, Artificial Sequence
  Description of Artificial Sequence: Synthetic oligonucleotide
aaaguuagucucugguggu

SEQ ID NO: 2927193 - RNA, 19 nt, Artificial Sequence
  Description of Artificial Sequence: Synthetic oligonucleotide
uacucuauuucagauuucc

SEQ ID NO: 2927194 - RNA, 19 nt, Artificial Sequence
  Description of Artificial Sequence: Synthetic oligonucleotide
gucaaugauagccaaugug

SEQ ID NO: 2927195 - RNA, 19 nt, Artificial Sequence
  Description of Artificial Sequence: Synthetic oligonucleotide
uuuuaaaaguuagucucug

SEQ ID NO: 2927196 - RNA, 19 nt, Artificial Sequence
  Description of Artificial Sequence: Synthetic oligonucleotide
aucuuccugccucaggcgc

SEQ ID NO: 2927197 - RNA, 19 nt, Artificial Sequence
  Description of Artificial Sequence: Synthetic oligonucleotide
uggugguuuuauuaaagga

SEQ ID NO: 2927198 - RNA, 19 nt, Artificial Sequence
  Description of Artificial Sequence: Synthetic oligonucleotide
uacucuguaguauuuccca

SEQ ID NO: 2927199 - RNA, 19 nt, Artificial Sequence
  Description of Artificial Sequence: Synthetic oligonucleotide
gugguuuuauuaaaggaag

SEQ ID NO: 2927200 - RNA, 19 nt, Artificial Sequence
  Description of Artificial Sequence: Synthetic oligonucleotide
aaugauagccaaugugcau

SEQ ID NO: 2927201 - RNA, 19 nt, Artificial Sequence
  Description of Artificial Sequence: Synthetic oligonucleotide
acuguagugaugaaccccg

SEQ ID NO: 2927202 - RNA, 19 nt, Artificial Sequence
  Description of Artificial Sequence: Synthetic oligonucleotide
cuggugguuuuauuaaagg

SEQ ID NO: 2927203 - RNA, 19 nt, Artificial Sequence
  Description of Artificial Sequence: Synthetic oligonucleotide
uugagcgucuguuuguagc

SEQ ID NO: 2927204 - RNA, 19 nt, Artificial Sequence
  Description of Artificial Sequence: Synthetic oligonucleotide
uuucagauuuccucagggc

SEQ ID NO: 2927205 - RNA, 19 nt, Artificial Sequence
  Description of Artificial Sequence: Synthetic oligonucleotide
auaguacucuauuucagau

SEQ ID NO: 2927206 - RNA, 19 nt, Artificial Sequence
  Description of Artificial Sequence: Synthetic oligonucleotide
cuuggcuuuacccugccug

SEQ ID NO: 2927207 - RNA, 19 nt, Artificial Sequence
  Description of Artificial Sequence: Synthetic oligonucleotide
auugccacuguagugauga

SEQ ID NO: 2927208 - RNA, 19 nt, Artificial Sequence
  Description of Artificial Sequence: Synthetic oligonucleotide
uagugaugaaccccggucu

SEQ ID NO: 2927209 - RNA, 19 nt, Artificial Sequence
  Description of Artificial Sequence: Synthetic oligonucleotide
guuauugccacuguaguga

SEQ ID NO: 2927210 - RNA, 19 nt, Artificial Sequence
  Description of Artificial Sequence: Synthetic oligonucleotide
acucuguaguauuucccac

SEQ ID NO: 2927211 - RNA, 19 nt, Artificial Sequence
  Description of Artificial Sequence: Synthetic oligonucleotide
auaauaucagagucaccug

SEQ ID NO: 2927212 - RNA, 19 nt, Artificial Sequence
  Description of Artificial Sequence: Synthetic oligonucleotide
uuucugguuuacuacuucu

SEQ ID NO: 2927213 - RNA, 19 nt, Artificial Sequence
  Description of Artificial Sequence: Synthetic oligonucleotide
uguuuguagcccaggacgu

SEQ ID NO: 2927214 - RNA, 19 nt, Artificial Sequence
  Description of Artificial Sequence: Synthetic oligonucleotide
ugagcgucuguuuguagcc

SEQ ID NO: 2927215 - RNA, 19 nt, Artificial Sequence
  Description of Artificial Sequence: Synthetic oligonucleotide
uggcauaguacucuauuuc

SEQ ID NO: 2927216 - RNA, 19 nt, Artificial Sequence
  Description of Artificial Sequence: Synthetic oligonucleotide
auacucuguaguauuuccc

SEQ ID NO: 2927217 - RNA, 19 nt, Artificial Sequence
  Description of Artificial Sequence: Synthetic oligonucleotide
uguucuggcaugcuucuaa

SEQ ID NO: 2927218 - RNA, 19 nt, Artificial Sequence
  Description of Artificial Sequence: Synthetic oligonucleotide
ucuguaguauuucccacau

SEQ ID NO: 2927219 - RNA, 19 nt, Artificial Sequence
  Description of Artificial Sequence: Synthetic oligonucleotide
ugcugugcccaauucaaug

SEQ ID NO: 2927220 - RNA, 19 nt, Artificial Sequence
  Description of Artificial Sequence: Synthetic oligonucleotide
ucuguuuguagcccaggac

SEQ ID NO: 2927221 - RNA, 19 nt, Artificial Sequence
  Description of Artificial Sequence: Synthetic oligonucleotide
auguuauugccacuguagu

SEQ ID NO: 2927222 - RNA, 19 nt, Artificial Sequence
  Description of Artificial Sequence: Synthetic oligonucleotide
cuauuucagauuuccucag

SEQ ID NO: 2927223 - RNA, 19 nt, Artificial Sequence
  Description of Artificial Sequence: Synthetic oligonucleotide
aggaugaccagcuuggcuu

SEQ ID NO: 2927224 - RNA, 19 nt, Artificial Sequence
  Description of Artificial Sequence: Synthetic oligonucleotide
uagcccaggacguacuucc

SEQ ID NO: 2927225 - RNA, 19 nt, Artificial Sequence
  Description of Artificial Sequence: Synthetic oligonucleotide
uagccaaugugcauacucu

SEQ ID NO: 2927226 - RNA, 19 nt, Artificial Sequence
  Description of Artificial Sequence: Synthetic oligonucleotide
uuaaaggaaggcguuucug

SEQ ID NO: 2927227 - RNA, 19 nt, Artificial Sequence
  Description of Artificial Sequence: Synthetic oligonucleotide
uauuaaaggaaggcguuuc

SEQ ID NO: 2927228 - RNA, 19 nt, Artificial Sequence
  Description of Artificial Sequence: Synthetic oligonucleotide
auuaaaggaaggcguuucu

SEQ ID NO: 2927229 - RNA, 19 nt, Artificial Sequence
  Description of Artificial Sequence: Synthetic oligonucleotide
ugcuucuaauaauaucaga

SEQ ID NO: 2927230 - RNA, 19 nt, Artificial Sequence
  Description of Artificial Sequence: Synthetic oligonucleotide
uuuucgucuucuuggcggc

SEQ ID NO: 2927231 - RNA, 19 nt, Artificial Sequence
  Description of Artificial Sequence: Synthetic oligonucleotide
uaauaauaucagagucacc

SEQ ID NO: 2927232 - RNA, 19 nt, Artificial Sequence
  Description of Artificial Sequence: Synthetic oligonucleotide
caauucaauguuauugcca

SEQ ID NO: 2927233 - RNA, 19 nt, Artificial Sequence
  Description of Artificial Sequence: Synthetic oligonucleotide
ucucuggugguuuuauuaa

SEQ ID NO: 2927234 - RNA, 19 nt, Artificial Sequence
  Description of Artificial Sequence: Synthetic oligonucleotide
ucuuccugccucaggcgcg

SEQ ID NO: 2927235 - RNA, 19 nt, Artificial Sequence
  Description of Artificial Sequence: Synthetic oligonucleotide
uacuacuucucaccagucu

SEQ ID NO: 2927236 - RNA, 19 nt, Artificial Sequence
  Description of Artificial Sequence: Synthetic oligonucleotide
ccggucuuagccaacaugg

SEQ ID NO: 2927237 - RNA, 19 nt, Artificial Sequence
  Description of Artificial Sequence: Synthetic oligonucleotide
uucuuggcggccaccaucu

SEQ ID NO: 2927238 - RNA, 19 nt, Artificial Sequence
  Description of Artificial Sequence: Synthetic oligonucleotide
caaugugcauacucuguag

SEQ ID NO: 2927239 - RNA, 19 nt, Artificial Sequence
  Description of Artificial Sequence: Synthetic oligonucleotide
uuacccugccugaucaucu

SEQ ID NO: 2927240 - RNA, 19 nt, Artificial Sequence
  Description of Artificial Sequence: Synthetic oligonucleotide
guuuacuacuucucaccag

SEQ ID NO: 2927241 - RNA, 19 nt, Artificial Sequence
  Description of Artificial Sequence: Synthetic oligonucleotide
guagugaugaaccccgguc

SEQ ID NO: 2927242 - RNA, 19 nt, Artificial Sequence
  Description of Artificial Sequence: Synthetic oligonucleotide
uuggcgaggaugaccagcu

SEQ ID NO: 2927243 - RNA, 19 nt, Artificial Sequence
  Description of Artificial Sequence: Synthetic oligonucleotide
accagcuuggcuuuacccu

SEQ ID NO: 2927244 - RNA, 19 nt, Artificial Sequence
  Description of Artificial Sequence: Synthetic oligonucleotide
cugguuuacuacuucucac

SEQ ID NO: 2927245 - RNA, 19 nt, Artificial Sequence
  Description of Artificial Sequence: Synthetic oligonucleotide
cauaguacucuauuucaga

SEQ ID NO: 2927246 - RNA, 19 nt, Artificial Sequence
  Description of Artificial Sequence: Synthetic oligonucleotide
cccaauucaauguuauugc

SEQ ID NO: 2927247 - RNA, 19 nt, Artificial Sequence
  Description of Artificial Sequence: Synthetic oligonucleotide
ugauagccaaugugcauac

SEQ ID NO: 2927248 - RNA, 19 nt, Artificial Sequence
  Description of Artificial Sequence: Synthetic oligonucleotide
uggcaugcuucuaauaaua

SEQ ID NO: 2927249 - RNA, 19 nt, Artificial Sequence
  Description of Artificial Sequence: Synthetic oligonucleotide
uucugguuuacuacuucuc

SEQ ID NO: 2927250 - RNA, 19 nt, Artificial Sequence
  Description of Artificial Sequence: Synthetic oligonucleotide
uguagugaugaaccccggu

SEQ ID NO: 2927251 - RNA, 19 nt, Artificial Sequence
  Description of Artificial Sequence: Synthetic oligonucleotide
caucuugagcgucuguuug

SEQ ID NO: 2927252 - RNA, 19 nt, Artificial Sequence
  Description of Artificial Sequence: Synthetic oligonucleotide
ugaaccccggucuuagcca

SEQ ID NO: 2927253 - RNA, 19 nt, Artificial Sequence
  Description of Artificial Sequence: Synthetic oligonucleotide
gaccagcuuggcuuuaccc

SEQ ID NO: 2927254 - RNA, 19 nt, Artificial Sequence
  Description of Artificial Sequence: Synthetic oligonucleotide
ugaugaaccccggucuuag

SEQ ID NO: 2927255 - RNA, 19 nt, Artificial Sequence
  Description of Artificial Sequence: Synthetic oligonucleotide
caaugauagccaaugugca

SEQ ID NO: 2927256 - RNA, 19 nt, Artificial Sequence
  Description of Artificial Sequence: Synthetic oligonucleotide
ugugcauacucuguaguau

SEQ ID NO: 2927257 - RNA, 19 nt, Artificial Sequence
  Description of Artificial Sequence: Synthetic oligonucleotide
uuggcuuuacccugccuga

SEQ ID NO: 2927258 - RNA, 19 nt, Artificial Sequence
  Description of Artificial Sequence: Synthetic oligonucleotide
uacuucccgcucuucauca

SEQ ID NO: 2927259 - RNA, 19 nt, Artificial Sequence
  Description of Artificial Sequence: Synthetic oligonucleotide
uuucccacaugcugugccc

SEQ ID NO: 2927260 - RNA, 19 nt, Artificial Sequence
  Description of Artificial Sequence: Synthetic oligonucleotide
ucuguucuggcaugcuucu

SEQ ID NO: 2927261 - RNA, 19 nt, Artificial Sequence
  Description of Artificial Sequence: Synthetic oligonucleotide
ucaggcgcggcgcagcccc

SEQ ID NO: 2927262 - RNA, 19 nt, Artificial Sequence
  Description of Artificial Sequence: Synthetic oligonucleotide
aacauggcauaguacucua

SEQ ID NO: 2927263 - RNA, 19 nt, Artificial Sequence
  Description of Artificial Sequence: Synthetic oligonucleotide
uagccaacauggcauagua

SEQ ID NO: 2927264 - RNA, 19 nt, Artificial Sequence
  Description of Artificial Sequence: Synthetic oligonucleotide
uuuguagcccaggacguac

SEQ ID NO: 2927265 - RNA, 19 nt, Artificial Sequence
  Description of Artificial Sequence: Synthetic oligonucleotide
agccaaugugcauacucug

SEQ ID NO: 2927266 - RNA, 19 nt, Artificial Sequence
  Description of Artificial Sequence: Synthetic oligonucleotide
ucaccagucuguucuggca

SEQ ID NO: 2927267 - RNA, 19 nt, Artificial Sequence
  Description of Artificial Sequence: Synthetic oligonucleotide
gccacuguagugaugaacc

SEQ ID NO: 2927268 - RNA, 19 nt, Artificial Sequence
  Description of Artificial Sequence: Synthetic oligonucleotide
ucuucaucaccagcuggag

SEQ ID NO: 2927269 - RNA, 19 nt, Artificial Sequence
  Description of Artificial Sequence: Synthetic oligonucleotide
aaggaaggcguuucugguu

SEQ ID NO: 2927270 - RNA, 19 nt, Artificial Sequence
  Description of Artificial Sequence: Synthetic oligonucleotide
gcccaauucaauguuauug

SEQ ID NO: 2927271 - RNA, 19 nt, Artificial Sequence
  Description of Artificial Sequence: Synthetic oligonucleotide
auaucagagucaccugggu

SEQ ID NO: 2927272 - RNA, 19 nt, Artificial Sequence
  Description of Artificial Sequence: Synthetic oligonucleotide
guuguuggcgaggaugacc

SEQ ID NO: 2927273 - RNA, 19 nt, Artificial Sequence
  Description of Artificial Sequence: Synthetic oligonucleotide
ugugcccaauucaauguua

SEQ ID NO: 2927274 - RNA, 19 nt, Artificial Sequence
  Description of Artificial Sequence: Synthetic oligonucleotide
uucccgcucuucaucacca

SEQ ID NO: 2927275 - RNA, 19 nt, Artificial Sequence
  Description of Artificial Sequence: Synthetic oligonucleotide
ggcauaguacucuauuuca

SEQ ID NO: 2927276 - RNA, 19 nt, Artificial Sequence
  Description of Artificial Sequence: Synthetic oligonucleotide
auggcauaguacucuauuu

SEQ ID NO: 2927277 - RNA, 19 nt, Artificial Sequence
  Description of Artificial Sequence: Synthetic oligonucleotide
cuucaucaccagcuggagc

SEQ ID NO: 2927278 - RNA, 19 nt, Artificial Sequence
  Description of Artificial Sequence: Synthetic oligonucleotide
ggugguuuuauuaaaggaa

SEQ ID NO: 2927279 - RNA, 19 nt, Artificial Sequence
  Description of Artificial Sequence: Synthetic oligonucleotide
uuauuaaaggaaggcguuu

SEQ ID NO: 2927280 - RNA, 19 nt, Artificial Sequence
  Description of Artificial Sequence: Synthetic oligonucleotide
auuuccucagggccgggca

SEQ ID NO: 2927281 - RNA, 19 nt, Artificial Sequence
  Description of Artificial Sequence: Synthetic oligonucleotide
augauagccaaugugcaua

SEQ ID NO: 2927282 - RNA, 19 nt, Artificial Sequence
  Description of Artificial Sequence: Synthetic oligonucleotide
uaguacucuauuucagauu

SEQ ID NO: 2927283 - RNA, 19 nt, Artificial Sequence
  Description of Artificial Sequence: Synthetic oligonucleotide
uuacuacuucucaccaguc

SEQ ID NO: 2927284 - RNA, 19 nt, Artificial Sequence
  Description of Artificial Sequence: Synthetic oligonucleotide
ccaauucaauguuauugcc

SEQ ID NO: 2927285 - RNA, 19 nt, Artificial Sequence
  Description of Artificial Sequence: Synthetic oligonucleotide
uuagccaacauggcauagu

SEQ ID NO: 2927286 - RNA, 19 nt, Artificial Sequence
  Description of Artificial Sequence: Synthetic oligonucleotide
augcuucuaauaauaucag

SEQ ID NO: 2927287 - RNA, 19 nt, Artificial Sequence
  Description of Artificial Sequence: Synthetic oligonucleotide
caugcugugcccaauucaa

SEQ ID NO: 2927288 - RNA, 19 nt, Artificial Sequence
  Description of Artificial Sequence: Synthetic oligonucleotide
aucuugagcgucuguuugu

SEQ ID NO: 2927289 - RNA, 19 nt, Artificial Sequence
  Description of Artificial Sequence: Synthetic oligonucleotide
cucuucaucaccagcugga

SEQ ID NO: 2927290 - RNA, 19 nt, Artificial Sequence
  Description of Artificial Sequence: Synthetic oligonucleotide
uuauugccacuguagugau

SEQ ID NO: 2927291 - RNA, 19 nt, Artificial Sequence
  Description of Artificial Sequence: Synthetic oligonucleotide
cucaccagucuguucuggc

SEQ ID NO: 2927292 - RNA, 19 nt, Artificial Sequence
  Description of Artificial Sequence: Synthetic oligonucleotide
accaucuuccugccucagg

SEQ ID NO: 2927293 - RNA, 19 nt, Artificial Sequence
  Description of Artificial Sequence: Synthetic oligonucleotide
agagucaccugggucaaug

SEQ ID NO: 2927294 - RNA, 19 nt, Artificial Sequence
  Description of Artificial Sequence: Synthetic oligonucleotide
ucaucuugagcgucuguuu

SEQ ID NO: 2927295 - RNA, 19 nt, Artificial Sequence
  Description of Artificial Sequence: Synthetic oligonucleotide
aggaaggcguuucugguuu

SEQ ID NO: 2927296 - RNA, 19 nt, Artificial Sequence
  Description of Artificial Sequence: Synthetic oligonucleotide
auucaauguuauugccacu

SEQ ID NO: 2927297 - RNA, 19 nt, Artificial Sequence
  Description of Artificial Sequence: Synthetic oligonucleotide
guuucugguuuacuacuuc

SEQ ID NO: 2927298 - RNA, 19 nt, Artificial Sequence
  Description of Artificial Sequence: Synthetic oligonucleotide
ucucaccagucuguucugg

SEQ ID NO: 2927299 - RNA, 19 nt, Artificial Sequence
  Description of Artificial Sequence: Synthetic oligonucleotide
ucuuagccaacauggcaua

SEQ ID NO: 2927300 - RNA, 19 nt, Artificial Sequence
  Description of Artificial Sequence: Synthetic oligonucleotide
uuuacccugccugaucauc

SEQ ID NO: 2927301 - RNA, 19 nt, Artificial Sequence
  Description of Artificial Sequence: Synthetic oligonucleotide
augugcauacucuguagua

SEQ ID NO: 2927302 - RNA, 19 nt, Artificial Sequence
  Description of Artificial Sequence: Synthetic oligonucleotide
agcuuggcuuuacccugcc

SEQ ID NO: 2927303 - RNA, 19 nt, Artificial Sequence
  Description of Artificial Sequence: Synthetic oligonucleotide
cucuguaguauuucccaca

SEQ ID NO: 2927304 - RNA, 19 nt, Artificial Sequence
  Description of Artificial Sequence: Synthetic oligonucleotide
gggucaaugauagccaaug

SEQ ID NO: 2927305 - RNA, 19 nt, Artificial Sequence
  Description of Artificial Sequence: Synthetic oligonucleotide
cuucccgcucuucaucacc

SEQ ID NO: 2927306 - RNA, 19 nt, Artificial Sequence
  Description of Artificial Sequence: Synthetic oligonucleotide
ugaccagcuuggcuuuacc

SEQ ID NO: 2927307 - RNA, 19 nt, Artificial Sequence
  Description of Artificial Sequence: Synthetic oligonucleotide
agggccgggcaguuguugg

SEQ ID NO: 2927308 - RNA, 19 nt, Artificial Sequence
  Description of Artificial Sequence: Synthetic oligonucleotide
gucucuggugguuuuauua

SEQ ID NO: 2927309 - RNA, 19 nt, Artificial Sequence
  Description of Artificial Sequence: Synthetic oligonucleotide
gguuuacuacuucucacca

SEQ ID NO: 2927310 - RNA, 19 nt, Artificial Sequence
  Description of Artificial Sequence: Synthetic oligonucleotide
ucgaguugauggacuccag

SEQ ID NO: 2927311 - RNA, 19 nt, Artificial Sequence
  Description of Artificial Sequence: Synthetic oligonucleotide
aggacguacuucccgcucu

SEQ ID NO: 2927312 - RNA, 19 nt, Artificial Sequence
  Description of Artificial Sequence: Synthetic oligonucleotide
caguuguuggcgaggauga

SEQ ID NO: 2927313 - RNA, 19 nt, Artificial Sequence
  Description of Artificial Sequence: Synthetic oligonucleotide
acguacuucccgcucuuca

SEQ ID NO: 2927314 - RNA, 19 nt, Artificial Sequence
  Description of Artificial Sequence: Synthetic oligonucleotide
cuucuuggcggccaccauc

SEQ ID NO: 2927315 - RNA, 19 nt, Artificial Sequence
  Description of Artificial Sequence: Synthetic oligonucleotide
cugccugaucaucuugagc

SEQ ID NO: 2927316 - RNA, 19 nt, Artificial Sequence
  Description of Artificial Sequence: Synthetic oligonucleotide
acuucccgcucuucaucac

SEQ ID NO: 2927317 - RNA, 19 nt, Artificial Sequence
  Description of Artificial Sequence: Synthetic oligonucleotide
aucaucuugagcgucuguu

SEQ ID NO: 2927318 - RNA, 19 nt, Artificial Sequence
  Description of Artificial Sequence: Synthetic oligonucleotide
cuugagcgucuguuuguag

SEQ ID NO: 2927319 - RNA, 19 nt, Artificial Sequence
  Description of Artificial Sequence: Synthetic oligonucleotide
cagauuuccucagggccgg

SEQ ID NO: 2927320 - RNA, 19 nt, Artificial Sequence
  Description of Artificial Sequence: Synthetic oligonucleotide
gcggccaccaucuuccugc

SEQ ID NO: 2927321 - RNA, 19 nt, Artificial Sequence
  Description of Artificial Sequence: Synthetic oligonucleotide
ggcguuucugguuuacuac

SEQ ID NO: 2927322 - RNA, 19 nt, Artificial Sequence
  Description of Artificial Sequence: Synthetic oligonucleotide
ugccacuguagugaugaac

SEQ ID NO: 2927323 - RNA, 19 nt, Artificial Sequence
  Description of Artificial Sequence: Synthetic oligonucleotide
ggucuuagccaacauggca

SEQ ID NO: 2927324 - RNA, 19 nt, Artificial Sequence
  Description of Artificial Sequence: Synthetic oligonucleotide
ugaucaucuugagcgucug

SEQ ID NO: 2927325 - RNA, 19 nt, Artificial Sequence
  Description of Artificial Sequence: Synthetic oligonucleotide
uuguagcccaggacguacu

SEQ ID NO: 2927326 - RNA, 19 nt, Artificial Sequence
  Description of Artificial Sequence: Synthetic oligonucleotide
gaugaaccccggucuuagc

SEQ ID NO: 2927327 - RNA, 19 nt, Artificial Sequence
  Description of Artificial Sequence: Synthetic oligonucleotide
agcgucuguuuguagccca

SEQ ID NO: 2927328 - RNA, 19 nt, Artificial Sequence
  Description of Artificial Sequence: Synthetic oligonucleotide
agucaccugggucaaugau

SEQ ID NO: 2927329 - RNA, 19 nt, Artificial Sequence
  Description of Artificial Sequence: Synthetic oligonucleotide
accagucuguucuggcaug

SEQ ID NO: 2927330 - RNA, 19 nt, Artificial Sequence
  Description of Artificial Sequence: Synthetic oligonucleotide
agugaugaaccccggucuu

SEQ ID NO: 2927331 - RNA, 19 nt, Artificial Sequence
  Description of Artificial Sequence: Synthetic oligonucleotide
cuguagugaugaaccccgg

SEQ ID NO: 2927332 - RNA, 19 nt, Artificial Sequence
  Description of Artificial Sequence: Synthetic oligonucleotide
gcaguuguuggcgaggaug

SEQ ID NO: 2927333 - RNA, 19 nt, Artificial Sequence
  Description of Artificial Sequence: Synthetic oligonucleotide
uucucaccagucuguucug

SEQ ID NO: 2927334 - RNA, 19 nt, Artificial Sequence
  Description of Artificial Sequence: Synthetic oligonucleotide
aggcguuucugguuuacua

SEQ ID NO: 2927335 - RNA, 19 nt, Artificial Sequence
  Description of Artificial Sequence: Synthetic oligonucleotide
ggcgaggaugaccagcuug

SEQ ID NO: 2927336 - RNA, 19 nt, Artificial Sequence
  Description of Artificial Sequence: Synthetic oligonucleotide
gucuguucuggcaugcuuc

SEQ ID NO: 2927337 - RNA, 19 nt, Artificial Sequence
  Description of Artificial Sequence: Synthetic oligonucleotide
gucuguuuguagcccagga

SEQ ID NO: 2927338 - RNA, 19 nt, Artificial Sequence
  Description of Artificial Sequence: Synthetic oligonucleotide
gcauaguacucuauuucag

SEQ ID NO: 2927339 - RNA, 19 nt, Artificial Sequence
  Description of Artificial Sequence: Synthetic oligonucleotide
cuuagccaacauggcauag

SEQ ID NO: 2927340 - RNA, 19 nt, Artificial Sequence
  Description of Artificial Sequence: Synthetic oligonucleotide
uccugccucaggcgcggcg

SEQ ID NO: 2927341 - RNA, 19 nt, Artificial Sequence
  Description of Artificial Sequence: Synthetic oligonucleotide
gcaugcuucuaauaauauc

SEQ ID NO: 2927342 - RNA, 19 nt, Artificial Sequence
  Description of Artificial Sequence: Synthetic oligonucleotide
agccaacauggcauaguac

SEQ ID NO: 2927343 - RNA, 19 nt, Artificial Sequence
  Description of Artificial Sequence: Synthetic oligonucleotide
uauuucccacaugcugugc

SEQ ID NO: 2927344 - RNA, 19 nt, Artificial Sequence
  Description of Artificial Sequence: Synthetic oligonucleotide
gcgaggaugaccagcuugg

SEQ ID NO: 2927345 - RNA, 19 nt, Artificial Sequence
  Description of Artificial Sequence: Synthetic oligonucleotide
ugggucaaugauagccaau

SEQ ID NO: 2927346 - RNA, 19 nt, Artificial Sequence
  Description of Artificial Sequence: Synthetic oligonucleotide
cuuggcggccaccaucuuc

SEQ ID NO: 2927347 - RNA, 19 nt, Artificial Sequence
  Description of Artificial Sequence: Synthetic oligonucleotide
agucuguucuggcaugcuu

SEQ ID NO: 2927348 - RNA, 19 nt, Artificial Sequence
  Description of Artificial Sequence: Synthetic oligonucleotide
gauuuccucagggccgggc

SEQ ID NO: 2927349 - RNA, 19 nt, Artificial Sequence
  Description of Artificial Sequence: Synthetic oligonucleotide
gcuuuacccugccugauca

SEQ ID NO: 2927350 - RNA, 19 nt, Artificial Sequence
  Description of Artificial Sequence: Synthetic oligonucleotide
aaggcguuucugguuuacu

SEQ ID NO: 2927351 - RNA, 19 nt, Artificial Sequence
  Description of Artificial Sequence: Synthetic oligonucleotide
guacuucccgcucuucauc

SEQ ID NO: 2927352 - RNA, 19 nt, Artificial Sequence
  Description of Artificial Sequence: Synthetic oligonucleotide
ucuugagcgucuguuugua

SEQ ID NO: 2927353 - RNA, 19 nt, Artificial Sequence
  Description of Artificial Sequence: Synthetic oligonucleotide
uucgucuucuuggcggcca

SEQ ID NO: 2927354 - RNA, 19 nt, Artificial Sequence
  Description of Artificial Sequence: Synthetic oligonucleotide
cucgaguugauggacucca

SEQ ID NO: 2927355 - RNA, 19 nt, Artificial Sequence
  Description of Artificial Sequence: Synthetic oligonucleotide
aaguuagucucuggugguu

SEQ ID NO: 2927356 - RNA, 19 nt, Artificial Sequence
  Description of Artificial Sequence: Synthetic oligonucleotide
uguagcccaggacguacuu

SEQ ID NO: 2927357 - RNA, 19 nt, Artificial Sequence
  Description of Artificial Sequence: Synthetic oligonucleotide
acucuauuucagauuuccu

SEQ ID NO: 2927358 - RNA, 19 nt, Artificial Sequence
  Description of Artificial Sequence: Synthetic oligonucleotide
cacaugcugugcccaauuc

SEQ ID NO: 2927359 - RNA, 19 nt, Artificial Sequence
  Description of Artificial Sequence: Synthetic oligonucleotide
uguuggcgaggaugaccag

SEQ ID NO: 2927360 - RNA, 19 nt, Artificial Sequence
  Description of Artificial Sequence: Synthetic oligonucleotide
gagucaccugggucaauga

SEQ ID NO: 2927361 - RNA, 19 nt, Artificial Sequence
  Description of Artificial Sequence: Synthetic oligonucleotide
gucuuagccaacauggcau

SEQ ID NO: 2927362 - RNA, 19 nt, Artificial Sequence
  Description of Artificial Sequence: Synthetic oligonucleotide
gagcgucuguuuguagccc

SEQ ID NO: 2927363 - RNA, 19 nt, Artificial Sequence
  Description of Artificial Sequence: Synthetic oligonucleotide
cuguaguauuucccacaug

SEQ ID NO: 2927364 - RNA, 19 nt, Artificial Sequence
  Description of Artificial Sequence: Synthetic oligonucleotide
aucaccagcuggagccucg

SEQ ID NO: 2927365 - RNA, 19 nt, Artificial Sequence
  Description of Artificial Sequence: Synthetic oligonucleotide
gaggaugaccagcuuggcu

SEQ ID NO: 2927366 - RNA, 19 nt, Artificial Sequence
  Description of Artificial Sequence: Synthetic oligonucleotide
gaaccccggucuuagccaa

SEQ ID NO: 2927367 - RNA, 19 nt, Artificial Sequence
  Description of Artificial Sequence: Synthetic oligonucleotide
gaaggcguuucugguuuac

SEQ ID NO: 2927368 - RNA, 19 nt, Artificial Sequence
  Description of Artificial Sequence: Synthetic oligonucleotide
acccugccugaucaucuug

SEQ ID NO: 2927369 - RNA, 19 nt, Artificial Sequence
  Description of Artificial Sequence: Synthetic oligonucleotide
ugauggacuccagggacuu

SEQ ID NO: 2927370 - RNA, 19 nt, Artificial Sequence
  Description of Artificial Sequence: Synthetic oligonucleotide
aguuagucucuggugguuu

SEQ ID NO: 2927371 - RNA, 19 nt, Artificial Sequence
  Description of Artificial Sequence: Synthetic oligonucleotide
auggacuccagggacuuuu

SEQ ID NO: 2927372 - RNA, 19 nt, Artificial Sequence
  Description of Artificial Sequence: Synthetic oligonucleotide
cucuggugguuuuauuaaa

SEQ ID NO: 2927373 - RNA, 19 nt, Artificial Sequence
  Description of Artificial Sequence: Synthetic oligonucleotide
uuucgucuucuuggcggcc

SEQ ID NO: 2927374 - RNA, 19 nt, Artificial Sequence
  Description of Artificial Sequence: Synthetic oligonucleotide
ucgucuucuuggcggccac

SEQ ID NO: 2927375 - RNA, 19 nt, Artificial Sequence
  Description of Artificial Sequence: Synthetic oligonucleotide
cuuccugccucaggcgcgg

SEQ ID NO: 2927376 - RNA, 19 nt, Artificial Sequence
  Description of Artificial Sequence: Synthetic oligonucleotide
uuagucucuggugguuuua

SEQ ID NO: 2927377 - RNA, 19 nt, Artificial Sequence
  Description of Artificial Sequence: Synthetic oligonucleotide
ucaucaccagcuggagccu

SEQ ID NO: 2927378 - RNA, 19 nt, Artificial Sequence
  Description of Artificial Sequence: Synthetic oligonucleotide
ugcccaauucaauguuauu

SEQ ID NO: 2927379 - RNA, 19 nt, Artificial Sequence
  Description of Artificial Sequence: Synthetic oligonucleotide
gagccucgaguugauggac

SEQ ID NO: 2927380 - RNA, 19 nt, Artificial Sequence
  Description of Artificial Sequence: Synthetic oligonucleotide
ucccgcucuucaucaccag

SEQ ID NO: 2927381 - RNA, 19 nt, Artificial Sequence
  Description of Artificial Sequence: Synthetic oligonucleotide
gucaccugggucaaugaua

SEQ ID NO: 2927382 - RNA, 19 nt, Artificial Sequence
  Description of Artificial Sequence: Synthetic oligonucleotide
ggagccucgaguugaugga

SEQ ID NO: 2927383 - RNA, 19 nt, Artificial Sequence
  Description of Artificial Sequence: Synthetic oligonucleotide
cccaggacguacuucccgc

SEQ ID NO: 2927384 - RNA, 19 nt, Artificial Sequence
  Description of Artificial Sequence: Synthetic oligonucleotide
cuacuucucaccagucugu

SEQ ID NO: 2927385 - RNA, 19 nt, Artificial Sequence
  Description of Artificial Sequence: Synthetic oligonucleotide
cugggucaaugauagccaa

SEQ ID NO: 2927386 - RNA, 19 nt, Artificial Sequence
  Description of Artificial Sequence: Synthetic oligonucleotide
ccacuguagugaugaaccc

SEQ ID NO: 2927387 - RNA, 19 nt, Artificial Sequence
  Description of Artificial Sequence: Synthetic oligonucleotide
cgaguugauggacuccagg

SEQ ID NO: 2927388 - RNA, 19 nt, Artificial Sequence
  Description of Artificial Sequence: Synthetic oligonucleotide
uacuucucaccagucuguu

SEQ ID NO: 2927389 - RNA, 19 nt, Artificial Sequence
  Description of Artificial Sequence: Synthetic oligonucleotide
caggacguacuucccgcuc

SEQ ID NO: 2927390 - RNA, 19 nt, Artificial Sequence
  Description of Artificial Sequence: Synthetic oligonucleotide
gcccaggacguacuucccg

SEQ ID NO: 2927391 - RNA, 19 nt, Artificial Sequence
  Description of Artificial Sequence: Synthetic oligonucleotide
agcccaggacguacuuccc

SEQ ID NO: 2927392 - RNA, 19 nt, Artificial Sequence
  Description of Artificial Sequence: Synthetic oligonucleotide
cauggcauaguacucuauu

SEQ ID NO: 2927393 - RNA, 19 nt, Artificial Sequence
  Description of Artificial Sequence: Synthetic oligonucleotide
cugaucaucuugagcgucu

SEQ ID NO: 2927394 - RNA, 19 nt, Artificial Sequence
  Description of Artificial Sequence: Synthetic oligonucleotide
caacauggcauaguacucu

SEQ ID NO: 2927395 - RNA, 19 nt, Artificial Sequence
  Description of Artificial Sequence: Synthetic oligonucleotide
aaccccggucuuagccaac

SEQ ID NO: 2927396 - RNA, 19 nt, Artificial Sequence
  Description of Artificial Sequence: Synthetic oligonucleotide
guaguauuucccacaugcu

SEQ ID NO: 2927397 - RNA, 19 nt, Artificial Sequence
  Description of Artificial Sequence: Synthetic oligonucleotide
ccugggucaaugauagcca

SEQ ID NO: 2927398 - RNA, 19 nt, Artificial Sequence
  Description of Artificial Sequence: Synthetic oligonucleotide
ucccacaugcugugcccaa

SEQ ID NO: 2927399 - RNA, 19 nt, Artificial Sequence
  Description of Artificial Sequence: Synthetic oligonucleotide
gugcauacucuguaguauu

SEQ ID NO: 2927400 - RNA, 19 nt, Artificial Sequence
  Description of Artificial Sequence: Synthetic oligonucleotide
gcugugcccaauucaaugu

SEQ ID NO: 2927401 - RNA, 19 nt, Artificial Sequence
  Description of Artificial Sequence: Synthetic oligonucleotide
guagcccaggacguacuuc

SEQ ID NO: 2927402 - RNA, 19 nt, Artificial Sequence
  Description of Artificial Sequence: Synthetic oligonucleotide
cuggcaugcuucuaauaau

SEQ ID NO: 2927403 - RNA, 19 nt, Artificial Sequence
  Description of Artificial Sequence: Synthetic oligonucleotide
gcauacucuguaguauuuc

SEQ ID NO: 2927404 - RNA, 19 nt, Artificial Sequence
  Description of Artificial Sequence: Synthetic oligonucleotide
uacccugccugaucaucuu

SEQ ID NO: 2927405 - RNA, 19 nt, Artificial Sequence
  Description of Artificial Sequence: Synthetic oligonucleotide
guacucuauuucagauuuc

SEQ ID NO: 2927406 - RNA, 19 nt, Artificial Sequence
  Description of Artificial Sequence: Synthetic oligonucleotide
gaucaucuugagcgucugu

SEQ ID NO: 2927407 - RNA, 19 nt, Artificial Sequence
  Description of Artificial Sequence: Synthetic oligonucleotide
agccucgaguugauggacu

SEQ ID NO: 2927408 - RNA, 19 nt, Artificial Sequence
  Description of Artificial Sequence: Synthetic oligonucleotide
ucaccagcuggagccucga

SEQ ID NO: 2927409 - RNA, 19 nt, Artificial Sequence
  Description of Artificial Sequence: Synthetic oligonucleotide
cccggucuuagccaacaug

SEQ ID NO: 2927410 - RNA, 19 nt, Artificial Sequence
  Description of Artificial Sequence: Synthetic oligonucleotide
ggcuuuacccugccugauc

SEQ ID NO: 2927411 - RNA, 19 nt, Artificial Sequence
  Description of Artificial Sequence: Synthetic oligonucleotide
agauuuccucagggccggg

SEQ ID NO: 2927412 - RNA, 19 nt, Artificial Sequence
  Description of Artificial Sequence: Synthetic oligonucleotide
uggcuuuacccugccugau

SEQ ID NO: 2927413 - RNA, 19 nt, Artificial Sequence
  Description of Artificial Sequence: Synthetic oligonucleotide
cagcuggagccucgaguug

SEQ ID NO: 2927414 - RNA, 19 nt, Artificial Sequence
  Description of Artificial Sequence: Synthetic oligonucleotide
ggcgcagccccaaccaagc

SEQ ID NO: 2927415 - RNA, 19 nt, Artificial Sequence
  Description of Artificial Sequence: Synthetic oligonucleotide
caccugggucaaugauagc

SEQ ID NO: 2927416 - RNA, 19 nt, Artificial Sequence
  Description of Artificial Sequence: Synthetic oligonucleotide
ggccgggcaguuguuggcg

SEQ ID NO: 2927417 - RNA, 19 nt, Artificial Sequence
  Description of Artificial Sequence: Synthetic oligonucleotide
ccaaugugcauacucugua

SEQ ID NO: 2927418 - RNA, 19 nt, Artificial Sequence
  Description of Artificial Sequence: Synthetic oligonucleotide
uugccacuguagugaugaa

SEQ ID NO: 2927419 - RNA, 19 nt, Artificial Sequence
  Description of Artificial Sequence: Synthetic oligonucleotide
accccggucuuagccaaca

SEQ ID NO: 2927420 - RNA, 19 nt, Artificial Sequence
  Description of Artificial Sequence: Synthetic oligonucleotide
ggucaaugauagccaaugu

SEQ ID NO: 2927421 - RNA, 19 nt, Artificial Sequence
  Description of Artificial Sequence: Synthetic oligonucleotide
guucuggcaugcuucuaau

SEQ ID NO: 2927422 - RNA, 19 nt, Artificial Sequence
  Description of Artificial Sequence: Synthetic oligonucleotide
acauggcauaguacucuau

SEQ ID NO: 2927423 - RNA, 19 nt, Artificial Sequence
  Description of Artificial Sequence: Synthetic oligonucleotide
guuagucucuggugguuuu

SEQ ID NO: 2927424 - RNA, 19 nt, Artificial Sequence
  Description of Artificial Sequence: Synthetic oligonucleotide
cccgcucuucaucaccagc

SEQ ID NO: 2927425 - RNA, 19 nt, Artificial Sequence
  Description of Artificial Sequence: Synthetic oligonucleotide
ccagucuguucuggcaugc

SEQ ID NO: 2927426 - RNA, 19 nt, Artificial Sequence
  Description of Artificial Sequence: Synthetic oligonucleotide
ccugaucaucuugagcguc

SEQ ID NO: 2927427 - RNA, 19 nt, Artificial Sequence
  Description of Artificial Sequence: Synthetic oligonucleotide
caucaccagcuggagccuc

SEQ ID NO: 2927428 - RNA, 19 nt, Artificial Sequence
  Description of Artificial Sequence: Synthetic oligonucleotide
guuuguagcccaggacgua

SEQ ID NO: 2927429 - RNA, 19 nt, Artificial Sequence
  Description of Artificial Sequence: Synthetic oligonucleotide
caccagcuggagccucgag

SEQ ID NO: 2927430 - RNA, 19 nt, Artificial Sequence
  Description of Artificial Sequence: Synthetic oligonucleotide
augcugugcccaauucaau

SEQ ID NO: 2927431 - RNA, 19 nt, Artificial Sequence
  Description of Artificial Sequence: Synthetic oligonucleotide
cggucuuagccaacauggc

SEQ ID NO: 2927432 - RNA, 19 nt, Artificial Sequence
  Description of Artificial Sequence: Synthetic oligonucleotide
caccaucuuccugccucag

SEQ ID NO: 2927433 - RNA, 19 nt, Artificial Sequence
  Description of Artificial Sequence: Synthetic oligonucleotide
gugcccaauucaauguuau

SEQ ID NO: 2927434 - RNA, 19 nt, Artificial Sequence
  Description of Artificial Sequence: Synthetic oligonucleotide
caccagucuguucuggcau

SEQ ID NO: 2927435 - RNA, 19 nt, Artificial Sequence
  Description of Artificial Sequence: Synthetic oligonucleotide
gugaugaaccccggucuua

SEQ ID NO: 2927436 - RNA, 19 nt, Artificial Sequence
  Description of Artificial Sequence: Synthetic oligonucleotide
gggccgggcaguuguuggc

SEQ ID NO: 2927437 - RNA, 19 nt, Artificial Sequence
  Description of Artificial Sequence: Synthetic oligonucleotide
gauagccaaugugcauacu

SEQ ID NO: 2927438 - RNA, 19 nt, Artificial Sequence
  Description of Artificial Sequence: Synthetic oligonucleotide
cagggccgggcaguuguug

SEQ ID NO: 2927439 - RNA, 19 nt, Artificial Sequence
  Description of Artificial Sequence: Synthetic oligonucleotide
cccugccugaucaucuuga

SEQ ID NO: 2927440 - RNA, 19 nt, Artificial Sequence
  Description of Artificial Sequence: Synthetic oligonucleotide
ccucgaguugauggacucc

SEQ ID NO: 2927441 - RNA, 19 nt, Artificial Sequence
  Description of Artificial Sequence: Synthetic oligonucleotide
ccugccucaggcgcggcgc

SEQ ID NO: 2927442 - RNA, 19 nt, Artificial Sequence
  Description of Artificial Sequence: Synthetic oligonucleotide
uggcgaggaugaccagcuu

SEQ ID NO: 2927443 - RNA, 19 nt, Artificial Sequence
  Description of Artificial Sequence: Synthetic oligonucleotide
cuggagccucgaguugaug

SEQ ID NO: 2927444 - RNA, 19 nt, Artificial Sequence
  Description of Artificial Sequence: Synthetic oligonucleotide
gaugaccagcuuggcuuua

SEQ ID NO: 2927445 - RNA, 19 nt, Artificial Sequence
  Description of Artificial Sequence: Synthetic oligonucleotide
cucaggcgcggcgcagccc

SEQ ID NO: 2927446 - RNA, 19 nt, Artificial Sequence
  Description of Artificial Sequence: Synthetic oligonucleotide
gcgucuguuuguagcccag

SEQ ID NO: 2927447 - RNA, 19 nt, Artificial Sequence
  Description of Artificial Sequence: Synthetic oligonucleotide
cugugcccaauucaauguu

SEQ ID NO: 2927448 - RNA, 19 nt, Artificial Sequence
  Description of Artificial Sequence: Synthetic oligonucleotide
ggcggccaccaucuuccug

SEQ ID NO: 2927449 - RNA, 19 nt, Artificial Sequence
  Description of Artificial Sequence: Synthetic oligonucleotide
gccaaugugcauacucugu

SEQ ID NO: 2927450 - RNA, 19 nt, Artificial Sequence
  Description of Artificial Sequence: Synthetic oligonucleotide
ccgcucuucaucaccagcu

SEQ ID NO: 2927451 - RNA, 19 nt, Artificial Sequence
  Description of Artificial Sequence: Synthetic oligonucleotide
gggcaguuguuggcgagga

SEQ ID NO: 2927452 - RNA, 19 nt, Artificial Sequence
  Description of Artificial Sequence: Synthetic oligonucleotide
ccgggcaguuguuggcgag

SEQ ID NO: 2927453 - RNA, 19 nt, Artificial Sequence
  Description of Artificial Sequence: Synthetic oligonucleotide
uccucagggccgggcaguu

SEQ ID NO: 2927454 - RNA, 19 nt, Artificial Sequence
  Description of Artificial Sequence: Synthetic oligonucleotide
cgcucuucaucaccagcug

SEQ ID NO: 2927455 - RNA, 19 nt, Artificial Sequence
  Description of Artificial Sequence: Synthetic oligonucleotide
ggcaugcuucuaauaauau

SEQ ID NO: 2927456 - RNA, 19 nt, Artificial Sequence
  Description of Artificial Sequence: Synthetic oligonucleotide
cuuuacccugccugaucau

SEQ ID NO: 2927457 - RNA, 19 nt, Artificial Sequence
  Description of Artificial Sequence: Synthetic oligonucleotide
ccagcuggagccucgaguu

SEQ ID NO: 2927458 - RNA, 19 nt, Artificial Sequence
  Description of Artificial Sequence: Synthetic oligonucleotide
cgucuguuuguagcccagg

SEQ ID NO: 2927459 - RNA, 19 nt, Artificial Sequence
  Description of Artificial Sequence: Synthetic oligonucleotide
ggaugaccagcuuggcuuu

SEQ ID NO: 2927460 - RNA, 19 nt, Artificial Sequence
  Description of Artificial Sequence: Synthetic oligonucleotide
ccucaggcgcggcgcagcc

SEQ ID NO: 2927461 - RNA, 19 nt, Artificial Sequence
  Description of Artificial Sequence: Synthetic oligonucleotide
cggcgcagccccaaccaag

SEQ ID NO: 2927462 - RNA, 19 nt, Artificial Sequence
  Description of Artificial Sequence: Synthetic oligonucleotide
gccugaucaucuugagcgu

SEQ ID NO: 2927463 - RNA, 19 nt, Artificial Sequence
  Description of Artificial Sequence: Synthetic oligonucleotide
uuccugccucaggcgcggc

SEQ ID NO: 2927464 - RNA, 19 nt, Artificial Sequence
  Description of Artificial Sequence: Synthetic oligonucleotide
ggaaggcguuucugguuua

SEQ ID NO: 2927465 - RNA, 19 nt, Artificial Sequence
  Description of Artificial Sequence: Synthetic oligonucleotide
cugccucaggcgcggcgca

SEQ ID NO: 2927466 - RNA, 19 nt, Artificial Sequence
  Description of Artificial Sequence: Synthetic oligonucleotide
gcgcggcgcagccccaacc

SEQ ID NO: 2927467 - RNA, 19 nt, Artificial Sequence
  Description of Artificial Sequence: Synthetic oligonucleotide
cgggcaguuguuggcgagg

SEQ ID NO: 2927468 - RNA, 19 nt, Artificial Sequence
  Description of Artificial Sequence: Synthetic oligonucleotide
gccgggcaguuguuggcga

SEQ ID NO: 2927469 - RNA, 19 nt, Artificial Sequence
  Description of Artificial Sequence: Synthetic oligonucleotide
cgaggaugaccagcuuggc

SEQ ID NO: 2927470 - RNA, 19 nt, Artificial Sequence
  Description of Artificial Sequence: Synthetic oligonucleotide
gccucaggcgcggcgcagc

SEQ ID NO: 2927471 - RNA, 19 nt, Artificial Sequence
  Description of Artificial Sequence: Synthetic oligonucleotide
cuguucuggcaugcuucua

SEQ ID NO: 2927472 - RNA, 19 nt, Artificial Sequence
  Description of Artificial Sequence: Synthetic oligonucleotide
cggccaccaucuuccugcc

SEQ ID NO: 2927473 - RNA, 19 nt, Artificial Sequence
  Description of Artificial Sequence: Synthetic oligonucleotide
gcuuggcuuuacccugccu

SEQ ID NO: 2927474 - RNA, 19 nt, Artificial Sequence
  Description of Artificial Sequence: Synthetic oligonucleotide
ggacguacuucccgcucuu

SEQ ID NO: 2927475 - RNA, 19 nt, Artificial Sequence
  Description of Artificial Sequence: Synthetic oligonucleotide
cguacuucccgcucuucau

SEQ ID NO: 2927476 - RNA, 19 nt, Artificial Sequence
  Description of Artificial Sequence: Synthetic oligonucleotide
ggcgcggcgcagccccaac

SEQ ID NO: 2927477 - RNA, 19 nt, Artificial Sequence
  Description of Artificial Sequence: Synthetic oligonucleotide
ccaggacguacuucccgcu

SEQ ID NO: 2927478 - RNA, 19 nt, Artificial Sequence
  Description of Artificial Sequence: Synthetic oligonucleotide
gcggcgcagccccaaccaa

SEQ ID NO: 2927479 - RNA, 19 nt, Artificial Sequence
  Description of Artificial Sequence: Synthetic oligonucleotide
cguuucugguuuacuacuu

SEQ ID NO: 2927480 - RNA, 19 nt, Artificial Sequence
  Description of Artificial Sequence: Synthetic oligonucleotide
cgcggcgcagccccaacca

SEQ ID NO: 2927481 - RNA, 19 nt, Artificial Sequence
  Description of Artificial Sequence: Synthetic oligonucleotide
aggcgcggcgcagccccaa

SEQ ID NO: 2927482 - RNA, 19 nt, Artificial Sequence
  Description of Artificial Sequence: Synthetic oligonucleotide
ggcaguuguuggcgaggau

SEQ ID NO: 2927483 - RNA, 19 nt, Artificial Sequence
  Description of Artificial Sequence: Synthetic oligonucleotide
caggcgcggcgcagcccca

SEQ ID NO: 2927484 - RNA, 19 nt, Artificial Sequence
  Description of Artificial Sequence: Synthetic oligonucleotide
ccucagggccgggcaguug

SEQ ID NO: 2927485 - RNA, 19 nt, Artificial Sequence
  Description of Artificial Sequence: Synthetic oligonucleotide
ccacaugcugugcccaauu

SEQ ID NO: 2927486 - RNA, 19 nt, Artificial Sequence
  Description of Artificial Sequence: Synthetic oligonucleotide
ggccaccaucuuccugccu

SEQ ID NO: 2927487 - RNA, 19 nt, Artificial Sequence
  Description of Artificial Sequence: Synthetic oligonucleotide
gcuggagccucgaguugau

SEQ ID NO: 2927488 - RNA, 19 nt, Artificial Sequence
  Description of Artificial Sequence: Synthetic oligonucleotide
cagagucaccugggucaau

SEQ ID NO: 2927489 - RNA, 19 nt, Artificial Sequence
  Description of Artificial Sequence: Synthetic oligonucleotide
cccacaugcugugcccaau

SEQ ID NO: 2927490 - RNA, 19 nt, Artificial Sequence
  Description of Artificial Sequence: Synthetic oligonucleotide
ccccggucuuagccaacau

SEQ ID NO: 2927491 - RNA, 19 nt, Artificial Sequence
  Description of Artificial Sequence: Synthetic oligonucleotide
auugcuacugauuagcugc

SEQ ID NO: 2927492 - RNA, 19 nt, Artificial Sequence
  Description of Artificial Sequence: Synthetic oligonucleotide
aguuccuugauauugcuac

SEQ ID NO: 2927493 - RNA, 19 nt, Artificial Sequence
  Description of Artificial Sequence: Synthetic oligonucleotide
aauuccucuaggcacacgg

SEQ ID NO: 2927494 - RNA, 19 nt, Artificial Sequence
  Description of Artificial Sequence: Synthetic oligonucleotide
ucugauacaaacuuacagc

SEQ ID NO: 2927495 - RNA, 19 nt, Artificial Sequence
  Description of Artificial Sequence: Synthetic oligonucleotide
aaugucucuggacugguac

SEQ ID NO: 2927496 - RNA, 19 nt, Artificial Sequence
  Description of Artificial Sequence: Synthetic oligonucleotide
uucugauacaaacuuacag

SEQ ID NO: 2927497 - RNA, 19 nt, Artificial Sequence
  Description of Artificial Sequence: Synthetic oligonucleotide
uuuucugauacaaacuuac

SEQ ID NO: 2927498 - RNA, 19 nt, Artificial Sequence
  Description of Artificial Sequence: Synthetic oligonucleotide
cugauacaaacuuacagcc

SEQ ID NO: 2927499 - RNA, 19 nt, Artificial Sequence
  Description of Artificial Sequence: Synthetic oligonucleotide
caaacuuacagccaccucc

SEQ ID NO: 2927500 - RNA, 19 nt, Artificial Sequence
  Description of Artificial Sequence: Synthetic oligonucleotide
acucauucgaauccagucc

SEQ ID NO: 2927501 - RNA, 19 nt, Artificial Sequence
  Description of Artificial Sequence: Synthetic oligonucleotide
ucugacagauaugugaugg

SEQ ID NO: 2927502 - RNA, 19 nt, Artificial Sequence
  Description of Artificial Sequence: Synthetic oligonucleotide
gaauccaguccauacacgg

SEQ ID NO: 2927503 - RNA, 19 nt, Artificial Sequence
  Description of Artificial Sequence: Synthetic oligonucleotide
gauacaaacuuacagccac

SEQ ID NO: 2927504 - RNA, 19 nt, Artificial Sequence
  Description of Artificial Sequence: Synthetic oligonucleotide
aaucgcuguacacauccac

SEQ ID NO: 2927505 - RNA, 19 nt, Artificial Sequence
  Description of Artificial Sequence: Synthetic oligonucleotide
uugauauugcuacugauua

SEQ ID NO: 2927506 - RNA, 19 nt, Artificial Sequence
  Description of Artificial Sequence: Synthetic oligonucleotide
uccguuuagacuuccuucg

SEQ ID NO: 2927507 - RNA, 19 nt, Artificial Sequence
  Description of Artificial Sequence: Synthetic oligonucleotide
gauauugcuacugauuagc

SEQ ID NO: 2927508 - RNA, 19 nt, Artificial Sequence
  Description of Artificial Sequence: Synthetic oligonucleotide
uccauuuucacgucacagg

SEQ ID NO: 2927509 - RNA, 19 nt, Artificial Sequence
  Description of Artificial Sequence: Synthetic oligonucleotide
aguguuucgagcacggucc

SEQ ID NO: 2927510 - RNA, 19 nt, Artificial Sequence
  Description of Artificial Sequence: Synthetic oligonucleotide
auucgaauccaguccauac

SEQ ID NO: 2927511 - RNA, 19 nt, Artificial Sequence
  Description of Artificial Sequence: Synthetic oligonucleotide
auuuucacgucacaggacu

SEQ ID NO: 2927512 - RNA, 19 nt, Artificial Sequence
  Description of Artificial Sequence: Synthetic oligonucleotide
cugauuagcugcuucacag

SEQ ID NO: 2927513 - RNA, 19 nt, Artificial Sequence
  Description of Artificial Sequence: Synthetic oligonucleotide
ucuggaauuccucuaggca

SEQ ID NO: 2927514 - RNA, 19 nt, Artificial Sequence
  Description of Artificial Sequence: Synthetic oligonucleotide
aacuccaguguuucgagca

SEQ ID NO: 2927515 - RNA, 19 nt, Artificial Sequence
  Description of Artificial Sequence: Synthetic oligonucleotide
gauuagcugcuucacaggc

SEQ ID NO: 2927516 - RNA, 19 nt, Artificial Sequence
  Description of Artificial Sequence: Synthetic oligonucleotide
guuuagacuuccuucgucc

SEQ ID NO: 2927517 - RNA, 19 nt, Artificial Sequence
  Description of Artificial Sequence: Synthetic oligonucleotide
acauccacucauucgaauc

SEQ ID NO: 2927518 - RNA, 19 nt, Artificial Sequence
  Description of Artificial Sequence: Synthetic oligonucleotide
aaacuuacagccaccuccg

SEQ ID NO: 2927519 - RNA, 19 nt, Artificial Sequence
  Description of Artificial Sequence: Synthetic oligonucleotide
cuuacagccaccuccgcag

SEQ ID NO: 2927520 - RNA, 19 nt, Artificial Sequence
  Description of Artificial Sequence: Synthetic oligonucleotide
cuggaauuccucuaggcac

SEQ ID NO: 2927521 - RNA, 19 nt, Artificial Sequence
  Description of Artificial Sequence: Synthetic oligonucleotide
uuagcugcuucacaggcgu

SEQ ID NO: 2927522 - RNA, 19 nt, Artificial Sequence
  Description of Artificial Sequence: Synthetic oligonucleotide
acuuccuucgucccauggc

SEQ ID NO: 2927523 - RNA, 19 nt, Artificial Sequence
  Description of Artificial Sequence: Synthetic oligonucleotide
ucgaauccaguccauacac

SEQ ID NO: 2927524 - RNA, 19 nt, Artificial Sequence
  Description of Artificial Sequence: Synthetic oligonucleotide
acagauaugugaugggugu

SEQ ID NO: 2927525 - RNA, 19 nt, Artificial Sequence
  Description of Artificial Sequence: Synthetic oligonucleotide
ugauuagcugcuucacagg

SEQ ID NO: 2927526 - RNA, 19 nt, Artificial Sequence
  Description of Artificial Sequence: Synthetic oligonucleotide
acaggcgucuauccaaucg

SEQ ID NO: 2927527 - RNA, 19 nt, Artificial Sequence
  Description of Artificial Sequence: Synthetic oligonucleotide
ugauauugcuacugauuag

SEQ ID NO: 2927528 - RNA, 19 nt, Artificial Sequence
  Description of Artificial Sequence: Synthetic oligonucleotide
acacacauccacucauucg

SEQ ID NO: 2927529 - RNA, 19 nt, Artificial Sequence
  Description of Artificial Sequence: Synthetic oligonucleotide
ugauacaaacuuacagcca

SEQ ID NO: 2927530 - RNA, 19 nt, Artificial Sequence
  Description of Artificial Sequence: Synthetic oligonucleotide
gaaggggcaagugaacugg

SEQ ID NO: 2927531 - RNA, 19 nt, Artificial Sequence
  Description of Artificial Sequence: Synthetic oligonucleotide
acaggagauaacuccagug

SEQ ID NO: 2927532 - RNA, 19 nt, Artificial Sequence
  Description of Artificial Sequence: Synthetic oligonucleotide
agugaacugggucuccagg

SEQ ID NO: 2927533 - RNA, 19 nt, Artificial Sequence
  Description of Artificial Sequence: Synthetic oligonucleotide
agcacgguccauuuucacg

SEQ ID NO: 2927534 - RNA, 19 nt, Artificial Sequence
  Description of Artificial Sequence: Synthetic oligonucleotide
auccaguccauacacggag

SEQ ID NO: 2927535 - RNA, 19 nt, Artificial Sequence
  Description of Artificial Sequence: Synthetic oligonucleotide
uauugcuacugauuagcug

SEQ ID NO: 2927536 - RNA, 19 nt, Artificial Sequence
  Description of Artificial Sequence: Synthetic oligonucleotide
augucucuggacugguacc

SEQ ID NO: 2927537 - RNA, 19 nt, Artificial Sequence
  Description of Artificial Sequence: Synthetic oligonucleotide
uauccaaucgcuguacaca

SEQ ID NO: 2927538 - RNA, 19 nt, Artificial Sequence
  Description of Artificial Sequence: Synthetic oligonucleotide
uucgaauccaguccauaca

SEQ ID NO: 2927539 - RNA, 19 nt, Artificial Sequence
  Description of Artificial Sequence: Synthetic oligonucleotide
auaacuccaguguuucgag

SEQ ID NO: 2927540 - RNA, 19 nt, Artificial Sequence
  Description of Artificial Sequence: Synthetic oligonucleotide
uuuagacuuccuucguccc

SEQ ID NO: 2927541 - RNA, 19 nt, Artificial Sequence
  Description of Artificial Sequence: Synthetic oligonucleotide
cauccacugguucugacag

SEQ ID NO: 2927542 - RNA, 19 nt, Artificial Sequence
  Description of Artificial Sequence: Synthetic oligonucleotide
aguccauacacggagggag

SEQ ID NO: 2927543 - RNA, 19 nt, Artificial Sequence
  Description of Artificial Sequence: Synthetic oligonucleotide
gugaacugggucuccaggg

SEQ ID NO: 2927544 - RNA, 19 nt, Artificial Sequence
  Description of Artificial Sequence: Synthetic oligonucleotide
uggaauuccucuaggcaca

SEQ ID NO: 2927545 - RNA, 19 nt, Artificial Sequence
  Description of Artificial Sequence: Synthetic oligonucleotide
uuucugauacaaacuuaca

SEQ ID NO: 2927546 - RNA, 19 nt, Artificial Sequence
  Description of Artificial Sequence: Synthetic oligonucleotide
uccaguguuucgagcacgg

SEQ ID NO: 2927547 - RNA, 19 nt, Artificial Sequence
  Description of Artificial Sequence: Synthetic oligonucleotide
cauccacucauucgaaucc

SEQ ID NO: 2927548 - RNA, 19 nt, Artificial Sequence
  Description of Artificial Sequence: Synthetic oligonucleotide
aacugggucuccagggugc

SEQ ID NO: 2927549 - RNA, 19 nt, Artificial Sequence
  Description of Artificial Sequence: Synthetic oligonucleotide
uaugugaugggugucugga

SEQ ID NO: 2927550 - RNA, 19 nt, Artificial Sequence
  Description of Artificial Sequence: Synthetic oligonucleotide
gguucugacagauauguga

SEQ ID NO: 2927551 - RNA, 19 nt, Artificial Sequence
  Description of Artificial Sequence: Synthetic oligonucleotide
gauaacuccaguguuucga

SEQ ID NO: 2927552 - RNA, 19 nt, Artificial Sequence
  Description of Artificial Sequence: Synthetic oligonucleotide
ugugaugggugucuggaau

SEQ ID NO: 2927553 - RNA, 19 nt, Artificial Sequence
  Description of Artificial Sequence: Synthetic oligonucleotide
gucacaggacuucucgugg

SEQ ID NO: 2927554 - RNA, 19 nt, Artificial Sequence
  Description of Artificial Sequence: Synthetic oligonucleotide
uggacugguacccggguca

SEQ ID NO: 2927555 - RNA, 19 nt, Artificial Sequence
  Description of Artificial Sequence: Synthetic oligonucleotide
uguacacauccacugguuc

SEQ ID NO: 2927556 - RNA, 19 nt, Artificial Sequence
  Description of Artificial Sequence: Synthetic oligonucleotide
aacuuacagccaccuccgc

SEQ ID NO: 2927557 - RNA, 19 nt, Artificial Sequence
  Description of Artificial Sequence: Synthetic oligonucleotide
cugucauugcccuggaaug

SEQ ID NO: 2927558 - RNA, 19 nt, Artificial Sequence
  Description of Artificial Sequence: Synthetic oligonucleotide
uuccguuuagacuuccuuc

SEQ ID NO: 2927559 - RNA, 19 nt, Artificial Sequence
  Description of Artificial Sequence: Synthetic oligonucleotide
uccuugauauugcuacuga

SEQ ID NO: 2927560 - RNA, 19 nt, Artificial Sequence
  Description of Artificial Sequence: Synthetic oligonucleotide
ucgugguugcagaaggggc

SEQ ID NO: 2927561 - RNA, 19 nt, Artificial Sequence
  Description of Artificial Sequence: Synthetic oligonucleotide
ucgagcacgguccauuuuc

SEQ ID NO: 2927562 - RNA, 19 nt, Artificial Sequence
  Description of Artificial Sequence: Synthetic oligonucleotide
uugcagaaggggcaaguga

SEQ ID NO: 2927563 - RNA, 19 nt, Artificial Sequence
  Description of Artificial Sequence: Synthetic oligonucleotide
cacucauucgaauccaguc

SEQ ID NO: 2927564 - RNA, 19 nt, Artificial Sequence
  Description of Artificial Sequence: Synthetic oligonucleotide
cacgucacaggacuucucg

SEQ ID NO: 2927565 - RNA, 19 nt, Artificial Sequence
  Description of Artificial Sequence: Synthetic oligonucleotide
uucacaggcgucuauccaa

SEQ ID NO: 2927566 - RNA, 19 nt, Artificial Sequence
  Description of Artificial Sequence: Synthetic oligonucleotide
uuagacuuccuucguccca

SEQ ID NO: 2927567 - RNA, 19 nt, Artificial Sequence
  Description of Artificial Sequence: Synthetic oligonucleotide
gacagauaugugaugggug

SEQ ID NO: 2927568 - RNA, 19 nt, Artificial Sequence
  Description of Artificial Sequence: Synthetic oligonucleotide
uccaguccauacacggagg

SEQ ID NO: 2927569 - RNA, 19 nt, Artificial Sequence
  Description of Artificial Sequence: Synthetic oligonucleotide
ucgcuguacacauccacug

SEQ ID NO: 2927570 - RNA, 19 nt, Artificial Sequence
  Description of Artificial Sequence: Synthetic oligonucleotide
aagugaacugggucuccag

SEQ ID NO: 2927571 - RNA, 19 nt, Artificial Sequence
  Description of Artificial Sequence: Synthetic oligonucleotide
auaugugaugggugucugg

SEQ ID NO: 2927572 - RNA, 19 nt, Artificial Sequence
  Description of Artificial Sequence: Synthetic oligonucleotide
ucuauccaaucgcuguaca

SEQ ID NO: 2927573 - RNA, 19 nt, Artificial Sequence
  Description of Artificial Sequence: Synthetic oligonucleotide
cacacauccacucauucga

SEQ ID NO: 2927574 - RNA, 19 nt, Artificial Sequence
  Description of Artificial Sequence: Synthetic oligonucleotide
ugacagauaugugaugggu

SEQ ID NO: 2927575 - RNA, 19 nt, Artificial Sequence
  Description of Artificial Sequence: Synthetic oligonucleotide
uccucuaggcacacgguac

SEQ ID NO: 2927576 - RNA, 19 nt, Artificial Sequence
  Description of Artificial Sequence: Synthetic oligonucleotide
agaaggggcaagugaacug

SEQ ID NO: 2927577 - RNA, 19 nt, Artificial Sequence
  Description of Artificial Sequence: Synthetic oligonucleotide
acaaacuuacagccaccuc

SEQ ID NO: 2927578 - RNA, 19 nt, Artificial Sequence
  Description of Artificial Sequence: Synthetic oligonucleotide
agauaacuccaguguuucg

SEQ ID NO: 2927579 - RNA, 19 nt, Artificial Sequence
  Description of Artificial Sequence: Synthetic oligonucleotide
ccugucaucuucuucuugg

SEQ ID NO: 2927580 - RNA, 19 nt, Artificial Sequence
  Description of Artificial Sequence: Synthetic oligonucleotide
cugacagauaugugauggg

SEQ ID NO: 2927581 - RNA, 19 nt, Artificial Sequence
  Description of Artificial Sequence: Synthetic oligonucleotide
acugauuagcugcuucaca

SEQ ID NO: 2927582 - RNA, 19 nt, Artificial Sequence
  Description of Artificial Sequence: Synthetic oligonucleotide
uacaaacuuacagccaccu

SEQ ID NO: 2927583 - RNA, 19 nt, Artificial Sequence
  Description of Artificial Sequence: Synthetic oligonucleotide
ugaacugggucuccagggu

SEQ ID NO: 2927584 - RNA, 19 nt, Artificial Sequence
  Description of Artificial Sequence: Synthetic oligonucleotide
cuauccaaucgcuguacac

SEQ ID NO: 2927585 - RNA, 19 nt, Artificial Sequence
  Description of Artificial Sequence: Synthetic oligonucleotide
ucucuggacugguacccgg

SEQ ID NO: 2927586 - RNA, 19 nt, Artificial Sequence
  Description of Artificial Sequence: Synthetic oligonucleotide
uacaggagauaacuccagu

SEQ ID NO: 2927587 - RNA, 19 nt, Artificial Sequence
  Description of Artificial Sequence: Synthetic oligonucleotide
aggcacacgguacaggaga

SEQ ID NO: 2927588 - RNA, 19 nt, Artificial Sequence
  Description of Artificial Sequence: Synthetic oligonucleotide
acuccaguguuucgagcac

SEQ ID NO: 2927589 - RNA, 19 nt, Artificial Sequence
  Description of Artificial Sequence: Synthetic oligonucleotide
gggucaguacugcugaggg

SEQ ID NO: 2927590 - RNA, 19 nt, Artificial Sequence
  Description of Artificial Sequence: Synthetic oligonucleotide
gugucuggaauuccucuag

SEQ ID NO: 2927591 - RNA, 19 nt, Artificial Sequence
  Description of Artificial Sequence: Synthetic oligonucleotide
uacacauccacugguucug

SEQ ID NO: 2927592 - RNA, 19 nt, Artificial Sequence
  Description of Artificial Sequence: Synthetic oligonucleotide
ucuaggcacacgguacagg

SEQ ID NO: 2927593 - RNA, 19 nt, Artificial Sequence
  Description of Artificial Sequence: Synthetic oligonucleotide
uccacucauucgaauccag

SEQ ID NO: 2927594 - RNA, 19 nt, Artificial Sequence
  Description of Artificial Sequence: Synthetic oligonucleotide
gagauaacuccaguguuuc

SEQ ID NO: 2927595 - RNA, 19 nt, Artificial Sequence
  Description of Artificial Sequence: Synthetic oligonucleotide
acuuacagccaccuccgca

SEQ ID NO: 2927596 - RNA, 19 nt, Artificial Sequence
  Description of Artificial Sequence: Synthetic oligonucleotide
gucuggaauuccucuaggc

SEQ ID NO: 2927597 - RNA, 19 nt, Artificial Sequence
  Description of Artificial Sequence: Synthetic oligonucleotide
uccauacacggagggaggg

SEQ ID NO: 2927598 - RNA, 19 nt, Artificial Sequence
  Description of Artificial Sequence: Synthetic oligonucleotide
ccaaucgcuguacacaucc

SEQ ID NO: 2927599 - RNA, 19 nt, Artificial Sequence
  Description of Artificial Sequence: Synthetic oligonucleotide
ugucucuggacugguaccc

SEQ ID NO: 2927600 - RNA, 19 nt, Artificial Sequence
  Description of Artificial Sequence: Synthetic oligonucleotide
caggcgucuauccaaucgc

SEQ ID NO: 2927601 - RNA, 19 nt, Artificial Sequence
  Description of Artificial Sequence: Synthetic oligonucleotide
ugcccuggaaugucucugg

SEQ ID NO: 2927602 - RNA, 19 nt, Artificial Sequence
  Description of Artificial Sequence: Synthetic oligonucleotide
gacuuccuucgucccaugg

SEQ ID NO: 2927603 - RNA, 19 nt, Artificial Sequence
  Description of Artificial Sequence: Synthetic oligonucleotide
acauccacugguucugaca

SEQ ID NO: 2927604 - RNA, 19 nt, Artificial Sequence
  Description of Artificial Sequence: Synthetic oligonucleotide
agggcugucauugcccugg

SEQ ID NO: 2927605 - RNA, 19 nt, Artificial Sequence
  Description of Artificial Sequence: Synthetic oligonucleotide
cucauucgaauccagucca

SEQ ID NO: 2927606 - RNA, 19 nt, Artificial Sequence
  Description of Artificial Sequence: Synthetic oligonucleotide
cauuuucacgucacaggac

SEQ ID NO: 2927607 - RNA, 19 nt, Artificial Sequence
  Description of Artificial Sequence: Synthetic oligonucleotide
auuagcugcuucacaggcg

SEQ ID NO: 2927608 - RNA, 19 nt, Artificial Sequence
  Description of Artificial Sequence: Synthetic oligonucleotide
guccauuuucacgucacag

SEQ ID NO: 2927609 - RNA, 19 nt, Artificial Sequence
  Description of Artificial Sequence: Synthetic oligonucleotide
gaacugggucuccagggug

SEQ ID NO: 2927610 - RNA, 19 nt, Artificial Sequence
  Description of Artificial Sequence: Synthetic oligonucleotide
auccaaucgcuguacacau

SEQ ID NO: 2927611 - RNA, 19 nt, Artificial Sequence
  Description of Artificial Sequence: Synthetic oligonucleotide
aggagauaacuccaguguu

SEQ ID NO: 2927612 - RNA, 19 nt, Artificial Sequence
  Description of Artificial Sequence: Synthetic oligonucleotide
agauaugugaugggugucu

SEQ ID NO: 2927613 - RNA, 19 nt, Artificial Sequence
  Description of Artificial Sequence: Synthetic oligonucleotide
uccgcagccccacacacau

SEQ ID NO: 2927614 - RNA, 19 nt, Artificial Sequence
  Description of Artificial Sequence: Synthetic oligonucleotide
cuaggcacacgguacagga

SEQ ID NO: 2927615 - RNA, 19 nt, Artificial Sequence
  Description of Artificial Sequence: Synthetic oligonucleotide
gauaugugaugggugucug

SEQ ID NO: 2927616 - RNA, 19 nt, Artificial Sequence
  Description of Artificial Sequence: Synthetic oligonucleotide
cuggaaugucucuggacug

SEQ ID NO: 2927617 - RNA, 19 nt, Artificial Sequence
  Description of Artificial Sequence: Synthetic oligonucleotide
uaacuccaguguuucgagc

SEQ ID NO: 2927618 - RNA, 19 nt, Artificial Sequence
  Description of Artificial Sequence: Synthetic oligonucleotide
caguguuucgagcacgguc

SEQ ID NO: 2927619 - RNA, 19 nt, Artificial Sequence
  Description of Artificial Sequence: Synthetic oligonucleotide
cucgugguugcagaagggg

SEQ ID NO: 2927620 - RNA, 19 nt, Artificial Sequence
  Description of Artificial Sequence: Synthetic oligonucleotide
uccuucgucccauggcugc

SEQ ID NO: 2927621 - RNA, 19 nt, Artificial Sequence
  Description of Artificial Sequence: Synthetic oligonucleotide
uuccucuaggcacacggua

SEQ ID NO: 2927622 - RNA, 19 nt, Artificial Sequence
  Description of Artificial Sequence: Synthetic oligonucleotide
cuacugauuagcugcuuca

SEQ ID NO: 2927623 - RNA, 19 nt, Artificial Sequence
  Description of Artificial Sequence: Synthetic oligonucleotide
ucauugcccuggaaugucu

SEQ ID NO: 2927624 - RNA, 19 nt, Artificial Sequence
  Description of Artificial Sequence: Synthetic oligonucleotide
uaggcacacgguacaggag

SEQ ID NO: 2927625 - RNA, 19 nt, Artificial Sequence
  Description of Artificial Sequence: Synthetic oligonucleotide
caggacuucucgugguugc

SEQ ID NO: 2927626 - RNA, 19 nt, Artificial Sequence
  Description of Artificial Sequence: Synthetic oligonucleotide
guggcuuccguuuagacuu

SEQ ID NO: 2927627 - RNA, 19 nt, Artificial Sequence
  Description of Artificial Sequence: Synthetic oligonucleotide
ugucauugcccuggaaugu

SEQ ID NO: 2927628 - RNA, 19 nt, Artificial Sequence
  Description of Artificial Sequence: Synthetic oligonucleotide
uucgucccauggcugcagg

SEQ ID NO: 2927629 - RNA, 19 nt, Artificial Sequence
  Description of Artificial Sequence: Synthetic oligonucleotide
uugcuacugauuagcugcu

SEQ ID NO: 2927630 - RNA, 19 nt, Artificial Sequence
  Description of Artificial Sequence: Synthetic oligonucleotide
aauccaguccauacacgga

SEQ ID NO: 2927631 - RNA, 19 nt, Artificial Sequence
  Description of Artificial Sequence: Synthetic oligonucleotide
uacugauuagcugcuucac

SEQ ID NO: 2927632 - RNA, 19 nt, Artificial Sequence
  Description of Artificial Sequence: Synthetic oligonucleotide
cucuggacugguacccggg

SEQ ID NO: 2927633 - RNA, 19 nt, Artificial Sequence
  Description of Artificial Sequence: Synthetic oligonucleotide
ucacaggacuucucguggu

SEQ ID NO: 2927634 - RNA, 19 nt, Artificial Sequence
  Description of Artificial Sequence: Synthetic oligonucleotide
uuucacgucacaggacuuc

SEQ ID NO: 2927635 - RNA, 19 nt, Artificial Sequence
  Description of Artificial Sequence: Synthetic oligonucleotide
auugcccuggaaugucucu

SEQ ID NO: 2927636 - RNA, 19 nt, Artificial Sequence
  Description of Artificial Sequence: Synthetic oligonucleotide
ucuggacugguacccgggu

SEQ ID NO: 2927637 - RNA, 19 nt, Artificial Sequence
  Description of Artificial Sequence: Synthetic oligonucleotide
auauugcuacugauuagcu

SEQ ID NO: 2927638 - RNA, 19 nt, Artificial Sequence
  Description of Artificial Sequence: Synthetic oligonucleotide
uucacgucacaggacuucu

SEQ ID NO: 2927639 - RNA, 19 nt, Artificial Sequence
  Description of Artificial Sequence: Synthetic oligonucleotide
uuacagccaccuccgcagc

SEQ ID NO: 2927640 - RNA, 19 nt, Artificial Sequence
  Description of Artificial Sequence: Synthetic oligonucleotide
gacuucucgugguugcaga

SEQ ID NO: 2927641 - RNA, 19 nt, Artificial Sequence
  Description of Artificial Sequence: Synthetic oligonucleotide
ucacaggcgucuauccaau

SEQ ID NO: 2927642 - RNA, 19 nt, Artificial Sequence
  Description of Artificial Sequence: Synthetic oligonucleotide
guacaggagauaacuccag

SEQ ID NO: 2927643 - RNA, 19 nt, Artificial Sequence
  Description of Artificial Sequence: Synthetic oligonucleotide
cuugauauugcuacugauu

SEQ ID NO: 2927644 - RNA, 19 nt, Artificial Sequence
  Description of Artificial Sequence: Synthetic oligonucleotide
uuuucacgucacaggacuu

SEQ ID NO: 2927645 - RNA, 19 nt, Artificial Sequence
  Description of Artificial Sequence: Synthetic oligonucleotide
ucgucccauggcugcaggg

SEQ ID NO: 2927646 - RNA, 19 nt, Artificial Sequence
  Description of Artificial Sequence: Synthetic oligonucleotide
gaugggugucuggaauucc

SEQ ID NO: 2927647 - RNA, 19 nt, Artificial Sequence
  Description of Artificial Sequence: Synthetic oligonucleotide
ugaugggugucuggaauuc

SEQ ID NO: 2927648 - RNA, 19 nt, Artificial Sequence
  Description of Artificial Sequence: Synthetic oligonucleotide
ggagggagggcugucauug

SEQ ID NO: 2927649 - RNA, 19 nt, Artificial Sequence
  Description of Artificial Sequence: Synthetic oligonucleotide
ucuccagggugccugucau

SEQ ID NO: 2927650 - RNA, 19 nt, Artificial Sequence
  Description of Artificial Sequence: Synthetic oligonucleotide
ugggugucuggaauuccuc

SEQ ID NO: 2927651 - RNA, 19 nt, Artificial Sequence
  Description of Artificial Sequence: Synthetic oligonucleotide
uugcccuggaaugucucug

SEQ ID NO: 2927652 - RNA, 19 nt, Artificial Sequence
  Description of Artificial Sequence: Synthetic oligonucleotide
ugggucuccagggugccug

SEQ ID NO: 2927653 - RNA, 19 nt, Artificial Sequence
  Description of Artificial Sequence: Synthetic oligonucleotide
guugcagaaggggcaagug

SEQ ID NO: 2927654 - RNA, 19 nt, Artificial Sequence
  Description of Artificial Sequence: Synthetic oligonucleotide
aucgcuguacacauccacu

SEQ ID NO: 2927655 - RNA, 19 nt, Artificial Sequence
  Description of Artificial Sequence: Synthetic oligonucleotide
uagacuuccuucgucccau

SEQ ID NO: 2927656 - RNA, 19 nt, Artificial Sequence
  Description of Artificial Sequence: Synthetic oligonucleotide
acgguacaggagauaacuc

SEQ ID NO: 2927657 - RNA, 19 nt, Artificial Sequence
  Description of Artificial Sequence: Synthetic oligonucleotide
gguacaggagauaacucca

SEQ ID NO: 2927658 - RNA, 19 nt, Artificial Sequence
  Description of Artificial Sequence: Synthetic oligonucleotide
ucauucgaauccaguccau

SEQ ID NO: 2927659 - RNA, 19 nt, Artificial Sequence
  Description of Artificial Sequence: Synthetic oligonucleotide
acugggucuccagggugcc

SEQ ID NO: 2927660 - RNA, 19 nt, Artificial Sequence
  Description of Artificial Sequence: Synthetic oligonucleotide
cuccaguguuucgagcacg

SEQ ID NO: 2927661 - RNA, 19 nt, Artificial Sequence
  Description of Artificial Sequence: Synthetic oligonucleotide
acaggacuucucgugguug

SEQ ID NO: 2927662 - RNA, 19 nt, Artificial Sequence
  Description of Artificial Sequence: Synthetic oligonucleotide
cuucucgugguugcagaag

SEQ ID NO: 2927663 - RNA, 19 nt, Artificial Sequence
  Description of Artificial Sequence: Synthetic oligonucleotide
guccauacacggagggagg

SEQ ID NO: 2927664 - RNA, 19 nt, Artificial Sequence
  Description of Artificial Sequence: Synthetic oligonucleotide
guacacauccacugguucu

SEQ ID NO: 2927665 - RNA, 19 nt, Artificial Sequence
  Description of Artificial Sequence: Synthetic oligonucleotide
caggagauaacuccagugu

SEQ ID NO: 2927666 - RNA, 19 nt, Artificial Sequence
  Description of Artificial Sequence: Synthetic oligonucleotide
ggucaguacugcugagggg

SEQ ID NO: 2927667 - RNA, 19 nt, Artificial Sequence
  Description of Artificial Sequence: Synthetic oligonucleotide
gcuucacaggcgucuaucc

SEQ ID NO: 2927668 - RNA, 19 nt, Artificial Sequence
  Description of Artificial Sequence: Synthetic oligonucleotide
cagggugccugucaucuuc

SEQ ID NO: 2927669 - RNA, 19 nt, Artificial Sequence
  Description of Artificial Sequence: Synthetic oligonucleotide
uuucgagcacgguccauuu

SEQ ID NO: 2927670 - RNA, 19 nt, Artificial Sequence
  Description of Artificial Sequence: Synthetic oligonucleotide
ccauuuucacgucacagga

SEQ ID NO: 2927671 - RNA, 19 nt, Artificial Sequence
  Description of Artificial Sequence: Synthetic oligonucleotide
acgucacaggacuucucgu

SEQ ID NO: 2927672 - RNA, 19 nt, Artificial Sequence
  Description of Artificial Sequence: Synthetic oligonucleotide
ugcuucacaggcgucuauc

SEQ ID NO: 2927673 - RNA, 19 nt, Artificial Sequence
  Description of Artificial Sequence: Synthetic oligonucleotide
cugguucugacagauaugu

SEQ ID NO: 2927674 - RNA, 19 nt, Artificial Sequence
  Description of Artificial Sequence: Synthetic oligonucleotide
gaauuccucuaggcacacg

SEQ ID NO: 2927675 - RNA, 19 nt, Artificial Sequence
  Description of Artificial Sequence: Synthetic oligonucleotide
cauugcccuggaaugucuc

SEQ ID NO: 2927676 - RNA, 19 nt, Artificial Sequence
  Description of Artificial Sequence: Synthetic oligonucleotide
gcuacugauuagcugcuuc

SEQ ID NO: 2927677 - RNA, 19 nt, Artificial Sequence
  Description of Artificial Sequence: Synthetic oligonucleotide
cacacgguacaggagauaa

SEQ ID NO: 2927678 - RNA, 19 nt, Artificial Sequence
  Description of Artificial Sequence: Synthetic oligonucleotide
acgguccauuuucacguca

SEQ ID NO: 2927679 - RNA, 19 nt, Artificial Sequence
  Description of Artificial Sequence: Synthetic oligonucleotide
agcugcuucacaggcgucu

SEQ ID NO: 2927680 - RNA, 19 nt, Artificial Sequence
  Description of Artificial Sequence: Synthetic oligonucleotide
acugguucugacagauaug

SEQ ID NO: 2927681 - RNA, 19 nt, Artificial Sequence
  Description of Artificial Sequence: Synthetic oligonucleotide
gucuauccaaucgcuguac

SEQ ID NO: 2927682 - RNA, 19 nt, Artificial Sequence
  Description of Artificial Sequence: Synthetic oligonucleotide
cuucacaggcgucuaucca

SEQ ID NO: 2927683 - RNA, 19 nt, Artificial Sequence
  Description of Artificial Sequence: Synthetic oligonucleotide
ccaguccauacacggaggg

SEQ ID NO: 2927684 - RNA, 19 nt, Artificial Sequence
  Description of Artificial Sequence: Synthetic oligonucleotide
uccaaucgcuguacacauc

SEQ ID NO: 2927685 - RNA, 19 nt, Artificial Sequence
  Description of Artificial Sequence: Synthetic oligonucleotide
cuuccuucgucccauggcu

SEQ ID NO: 2927686 - RNA, 19 nt, Artificial Sequence
  Description of Artificial Sequence: Synthetic oligonucleotide
acugguacccgggucagua

SEQ ID NO: 2927687 - RNA, 19 nt, Artificial Sequence
  Description of Artificial Sequence: Synthetic oligonucleotide
acacgguacaggagauaac

SEQ ID NO: 2927688 - RNA, 19 nt, Artificial Sequence
  Description of Artificial Sequence: Synthetic oligonucleotide
ggcaguuccuugauauugc

SEQ ID NO: 2927689 - RNA, 19 nt, Artificial Sequence
  Description of Artificial Sequence: Synthetic oligonucleotide
augggugucuggaauuccu

SEQ ID NO: 2927690 - RNA, 19 nt, Artificial Sequence
  Description of Artificial Sequence: Synthetic oligonucleotide
ggggcaagugaacuggguc

SEQ ID NO: 2927691 - RNA, 19 nt, Artificial Sequence
  Description of Artificial Sequence: Synthetic oligonucleotide
gagcacgguccauuuucac

SEQ ID NO: 2927692 - RNA, 19 nt, Artificial Sequence
  Description of Artificial Sequence: Synthetic oligonucleotide
cacgguacaggagauaacu

SEQ ID NO: 2927693 - RNA, 19 nt, Artificial Sequence
  Description of Artificial Sequence: Synthetic oligonucleotide
auccacucauucgaaucca

SEQ ID NO: 2927694 - RNA, 19 nt, Artificial Sequence
  Description of Artificial Sequence: Synthetic oligonucleotide
gagggagggcugucauugc

SEQ ID NO: 2927695 - RNA, 19 nt, Artificial Sequence
  Description of Artificial Sequence: Synthetic oligonucleotide
guucugacagauaugugau

SEQ ID NO: 2927696 - RNA, 19 nt, Artificial Sequence
  Description of Artificial Sequence: Synthetic oligonucleotide
ucacgucacaggacuucuc

SEQ ID NO: 2927697 - RNA, 19 nt, Artificial Sequence
  Description of Artificial Sequence: Synthetic oligonucleotide
uacacggagggagggcugu

SEQ ID NO: 2927698 - RNA, 19 nt, Artificial Sequence
  Description of Artificial Sequence: Synthetic oligonucleotide
gucucuggacugguacccg

SEQ ID NO: 2927699 - RNA, 19 nt, Artificial Sequence
  Description of Artificial Sequence: Synthetic oligonucleotide
cacauccacugguucugac

SEQ ID NO: 2927700 - RNA, 19 nt, Artificial Sequence
  Description of Artificial Sequence: Synthetic oligonucleotide
cucuaggcacacgguacag

SEQ ID NO: 2927701 - RNA, 19 nt, Artificial Sequence
  Description of Artificial Sequence: Synthetic oligonucleotide
cagccccacacacauccac

SEQ ID NO: 2927702 - RNA, 19 nt, Artificial Sequence
  Description of Artificial Sequence: Synthetic oligonucleotide
cgcagccccacacacaucc

SEQ ID NO: 2927703 - RNA, 19 nt, Artificial Sequence
  Description of Artificial Sequence: Synthetic oligonucleotide
cagauaugugauggguguc

SEQ ID NO: 2927704 - RNA, 19 nt, Artificial Sequence
  Description of Artificial Sequence: Synthetic oligonucleotide
gucauugcccuggaauguc

SEQ ID NO: 2927705 - RNA, 19 nt, Artificial Sequence
  Description of Artificial Sequence: Synthetic oligonucleotide
cuggacugguacccggguc

SEQ ID NO: 2927706 - RNA, 19 nt, Artificial Sequence
  Description of Artificial Sequence: Synthetic oligonucleotide
gcacgguccauuuucacgu

SEQ ID NO: 2927707 - RNA, 19 nt, Artificial Sequence
  Description of Artificial Sequence: Synthetic oligonucleotide
uucgagcacgguccauuuu

SEQ ID NO: 2927708 - RNA, 19 nt, Artificial Sequence
  Description of Artificial Sequence: Synthetic oligonucleotide
gcugucauugcccuggaau

SEQ ID NO: 2927709 - RNA, 19 nt, Artificial Sequence
  Description of Artificial Sequence: Synthetic oligonucleotide
gucuccagggugccuguca

SEQ ID NO: 2927710 - RNA, 19 nt, Artificial Sequence
  Description of Artificial Sequence: Synthetic oligonucleotide
cgaauccaguccauacacg

SEQ ID NO: 2927711 - RNA, 19 nt, Artificial Sequence
  Description of Artificial Sequence: Synthetic oligonucleotide
gguggcuuccguuuagacu

SEQ ID NO: 2927712 - RNA, 19 nt, Artificial Sequence
  Description of Artificial Sequence: Synthetic oligonucleotide
uacccgggucaguacugcu

SEQ ID NO: 2927713 - RNA, 19 nt, Artificial Sequence
  Description of Artificial Sequence: Synthetic oligonucleotide
auccacugguucugacaga

SEQ ID NO: 2927714 - RNA, 19 nt, Artificial Sequence
  Description of Artificial Sequence: Synthetic oligonucleotide
auuccucuaggcacacggu

SEQ ID NO: 2927715 - RNA, 19 nt, Artificial Sequence
  Description of Artificial Sequence: Synthetic oligonucleotide
ugguugcagaaggggcaag

SEQ ID NO: 2927716 - RNA, 19 nt, Artificial Sequence
  Description of Artificial Sequence: Synthetic oligonucleotide
gagggcugucauugcccug

SEQ ID NO: 2927717 - RNA, 19 nt, Artificial Sequence
  Description of Artificial Sequence: Synthetic oligonucleotide
ggugccugucaucuucuuc

SEQ ID NO: 2927718 - RNA, 19 nt, Artificial Sequence
  Description of Artificial Sequence: Synthetic oligonucleotide
gggcaagugaacugggucu

SEQ ID NO: 2927719 - RNA, 19 nt, Artificial Sequence
  Description of Artificial Sequence: Synthetic oligonucleotide
guacccgggucaguacugc

SEQ ID NO: 2927720 - RNA, 19 nt, Artificial Sequence
  Description of Artificial Sequence: Synthetic oligonucleotide
guuccuugauauugcuacu

SEQ ID NO: 2927721 - RNA, 19 nt, Artificial Sequence
  Description of Artificial Sequence: Synthetic oligonucleotide
agacuuccuucgucccaug

SEQ ID NO: 2927722 - RNA, 19 nt, Artificial Sequence
  Description of Artificial Sequence: Synthetic oligonucleotide
cuucgucccauggcugcag

SEQ ID NO: 2927723 - RNA, 19 nt, Artificial Sequence
  Description of Artificial Sequence: Synthetic oligonucleotide
acggagggagggcugucau

SEQ ID NO: 2927724 - RNA, 19 nt, Artificial Sequence
  Description of Artificial Sequence: Synthetic oligonucleotide
ggugucuggaauuccucua

SEQ ID NO: 2927725 - RNA, 19 nt, Artificial Sequence
  Description of Artificial Sequence: Synthetic oligonucleotide
caaucgcuguacacaucca

SEQ ID NO: 2927726 - RNA, 19 nt, Artificial Sequence
  Description of Artificial Sequence: Synthetic oligonucleotide
caagugaacugggucucca

SEQ ID NO: 2927727 - RNA, 19 nt, Artificial Sequence
  Description of Artificial Sequence: Synthetic oligonucleotide
ugccugucaucuucuucuu

SEQ ID NO: 2927728 - RNA, 19 nt, Artificial Sequence
  Description of Artificial Sequence: Synthetic oligonucleotide
ggacuucucgugguugcag

SEQ ID NO: 2927729 - RNA, 19 nt, Artificial Sequence
  Description of Artificial Sequence: Synthetic oligonucleotide
aggcgucuauccaaucgcu

SEQ ID NO: 2927730 - RNA, 19 nt, Artificial Sequence
  Description of Artificial Sequence: Synthetic oligonucleotide
cgucacaggacuucucgug

SEQ ID NO: 2927731 - RNA, 19 nt, Artificial Sequence
  Description of Artificial Sequence: Synthetic oligonucleotide
gcuguacacauccacuggu

SEQ ID NO: 2927732 - RNA, 19 nt, Artificial Sequence
  Description of Artificial Sequence: Synthetic oligonucleotide
acccgggucaguacugcug

SEQ ID NO: 2927733 - RNA, 19 nt, Artificial Sequence
  Description of Artificial Sequence: Synthetic oligonucleotide
cacgguccauuuucacguc

SEQ ID NO: 2927734 - RNA, 19 nt, Artificial Sequence
  Description of Artificial Sequence: Synthetic oligonucleotide
uggcuuccguuuagacuuc

SEQ ID NO: 2927735 - RNA, 19 nt, Artificial Sequence
  Description of Artificial Sequence: Synthetic oligonucleotide
guguuucgagcacggucca

SEQ ID NO: 2927736 - RNA, 19 nt, Artificial Sequence
  Description of Artificial Sequence: Synthetic oligonucleotide
cauacacggagggagggcu

SEQ ID NO: 2927737 - RNA, 19 nt, Artificial Sequence
  Description of Artificial Sequence: Synthetic oligonucleotide
gggagggcugucauugccc

SEQ ID NO: 2927738 - RNA, 19 nt, Artificial Sequence
  Description of Artificial Sequence: Synthetic oligonucleotide
auacacggagggagggcug

SEQ ID NO: 2927739 - RNA, 19 nt, Artificial Sequence
  Description of Artificial Sequence: Synthetic oligonucleotide
aggacuucucgugguugca

SEQ ID NO: 2927740 - RNA, 19 nt, Artificial Sequence
  Description of Artificial Sequence: Synthetic oligonucleotide
caguuccuugauauugcua

SEQ ID NO: 2927741 - RNA, 19 nt, Artificial Sequence
  Description of Artificial Sequence: Synthetic oligonucleotide
cacaggcgucuauccaauc

SEQ ID NO: 2927742 - RNA, 19 nt, Artificial Sequence
  Description of Artificial Sequence: Synthetic oligonucleotide
gcgucuauccaaucgcugu

SEQ ID NO: 2927743 - RNA, 19 nt, Artificial Sequence
  Description of Artificial Sequence: Synthetic oligonucleotide
gguccauuuucacgucaca

SEQ ID NO: 2927744 - RNA, 19 nt, Artificial Sequence
  Description of Artificial Sequence: Synthetic oligonucleotide
ggcgucuauccaaucgcug

SEQ ID NO: 2927745 - RNA, 19 nt, Artificial Sequence
  Description of Artificial Sequence: Synthetic oligonucleotide
uguuucgagcacgguccau

SEQ ID NO: 2927746 - RNA, 19 nt, Artificial Sequence
  Description of Artificial Sequence: Synthetic oligonucleotide
acacauccacucauucgaa

SEQ ID NO: 2927747 - RNA, 19 nt, Artificial Sequence
  Description of Artificial Sequence: Synthetic oligonucleotide
gguacccgggucaguacug

SEQ ID NO: 2927748 - RNA, 19 nt, Artificial Sequence
  Description of Artificial Sequence: Synthetic oligonucleotide
cuuccguuuagacuuccuu

SEQ ID NO: 2927749 - RNA, 19 nt, Artificial Sequence
  Description of Artificial Sequence: Synthetic oligonucleotide
uagcugcuucacaggcguc

SEQ ID NO: 2927750 - RNA, 19 nt, Artificial Sequence
  Description of Artificial Sequence: Synthetic oligonucleotide
gugaugggugucuggaauu

SEQ ID NO: 2927751 - RNA, 19 nt, Artificial Sequence
  Description of Artificial Sequence: Synthetic oligonucleotide
cauucgaauccaguccaua

SEQ ID NO: 2927752 - RNA, 19 nt, Artificial Sequence
  Description of Artificial Sequence: Synthetic oligonucleotide
cccuggaaugucucuggac

SEQ ID NO: 2927753 - RNA, 19 nt, Artificial Sequence
  Description of Artificial Sequence: Synthetic oligonucleotide
cguuuagacuuccuucguc

SEQ ID NO: 2927754 - RNA, 19 nt, Artificial Sequence
  Description of Artificial Sequence: Synthetic oligonucleotide
ggguggcuuccguuuagac

SEQ ID NO: 2927755 - RNA, 19 nt, Artificial Sequence
  Description of Artificial Sequence: Synthetic oligonucleotide
aggggcaagugaacugggu

SEQ ID NO: 2927756 - RNA, 19 nt, Artificial Sequence
  Description of Artificial Sequence: Synthetic oligonucleotide
agggugccugucaucuucu

SEQ ID NO: 2927757 - RNA, 19 nt, Artificial Sequence
  Description of Artificial Sequence: Synthetic oligonucleotide
gugguugcagaaggggcaa

SEQ ID NO: 2927758 - RNA, 19 nt, Artificial Sequence
  Description of Artificial Sequence: Synthetic oligonucleotide
gccugucaucuucuucuug

SEQ ID NO: 2927759 - RNA, 19 nt, Artificial Sequence
  Description of Artificial Sequence: Synthetic oligonucleotide
cuccagggugccugucauc

SEQ ID NO: 2927760 - RNA, 19 nt, Artificial Sequence
  Description of Artificial Sequence: Synthetic oligonucleotide
acacggagggagggcuguc

SEQ ID NO: 2927761 - RNA, 19 nt, Artificial Sequence
  Description of Artificial Sequence: Synthetic oligonucleotide
cgugguugcagaaggggca

SEQ ID NO: 2927762 - RNA, 19 nt, Artificial Sequence
  Description of Artificial Sequence: Synthetic oligonucleotide
ugcuacugauuagcugcuu

SEQ ID NO: 2927763 - RNA, 19 nt, Artificial Sequence
  Description of Artificial Sequence: Synthetic oligonucleotide
ggaauuccucuaggcacac

SEQ ID NO: 2927764 - RNA, 19 nt, Artificial Sequence
  Description of Artificial Sequence: Synthetic oligonucleotide
gccccacacacauccacuc

SEQ ID NO: 2927765 - RNA, 19 nt, Artificial Sequence
  Description of Artificial Sequence: Synthetic oligonucleotide
gcagaaggggcaagugaac

SEQ ID NO: 2927766 - RNA, 19 nt, Artificial Sequence
  Description of Artificial Sequence: Synthetic oligonucleotide
guuucgagcacgguccauu

SEQ ID NO: 2927767 - RNA, 19 nt, Artificial Sequence
  Description of Artificial Sequence: Synthetic oligonucleotide
gggugucuggaauuccucu

SEQ ID NO: 2927768 - RNA, 19 nt, Artificial Sequence
  Description of Artificial Sequence: Synthetic oligonucleotide
caguccauacacggaggga

SEQ ID NO: 2927769 - RNA, 19 nt, Artificial Sequence
  Description of Artificial Sequence: Synthetic oligonucleotide
gcaagugaacugggucucc

SEQ ID NO: 2927770 - RNA, 19 nt, Artificial Sequence
  Description of Artificial Sequence: Synthetic oligonucleotide
ggacugguacccgggucag

SEQ ID NO: 2927771 - RNA, 19 nt, Artificial Sequence
  Description of Artificial Sequence: Synthetic oligonucleotide
cuguacacauccacugguu

SEQ ID NO: 2927772 - RNA, 19 nt, Artificial Sequence
  Description of Artificial Sequence: Synthetic oligonucleotide
cgucccauggcugcagggg

SEQ ID NO: 2927773 - RNA, 19 nt, Artificial Sequence
  Description of Artificial Sequence: Synthetic oligonucleotide
cacauccacucauucgaau

SEQ ID NO: 2927774 - RNA, 19 nt, Artificial Sequence
  Description of Artificial Sequence: Synthetic oligonucleotide
ccauacacggagggagggc

SEQ ID NO: 2927775 - RNA, 19 nt, Artificial Sequence
  Description of Artificial Sequence: Synthetic oligonucleotide
ccuccgcagccccacacac

SEQ ID NO: 2927776 - RNA, 19 nt, Artificial Sequence
  Description of Artificial Sequence: Synthetic oligonucleotide
cgguccauuuucacgucac

SEQ ID NO: 2927777 - RNA, 19 nt, Artificial Sequence
  Description of Artificial Sequence: Synthetic oligonucleotide
cuccgcagccccacacaca

SEQ ID NO: 2927778 - RNA, 19 nt, Artificial Sequence
  Description of Artificial Sequence: Synthetic oligonucleotide
ggagggcugucauugcccu

SEQ ID NO: 2927779 - RNA, 19 nt, Artificial Sequence
  Description of Artificial Sequence: Synthetic oligonucleotide
ccucuaggcacacgguaca

SEQ ID NO: 2927780 - RNA, 19 nt, Artificial Sequence
  Description of Artificial Sequence: Synthetic oligonucleotide
gcaguuccuugauauugcu

SEQ ID NO: 2927781 - RNA, 19 nt, Artificial Sequence
  Description of Artificial Sequence: Synthetic oligonucleotide
cccgggucaguacugcuga

SEQ ID NO: 2927782 - RNA, 19 nt, Artificial Sequence
  Description of Artificial Sequence: Synthetic oligonucleotide
cgggucaguacugcugagg

SEQ ID NO: 2927783 - RNA, 19 nt, Artificial Sequence
  Description of Artificial Sequence: Synthetic oligonucleotide
ggcuuccguuuagacuucc

SEQ ID NO: 2927784 - RNA, 19 nt, Artificial Sequence
  Description of Artificial Sequence: Synthetic oligonucleotide
cacggagggagggcuguca

SEQ ID NO: 2927785 - RNA, 19 nt, Artificial Sequence
  Description of Artificial Sequence: Synthetic oligonucleotide
ccuugauauugcuacugau

SEQ ID NO: 2927786 - RNA, 19 nt, Artificial Sequence
  Description of Artificial Sequence: Synthetic oligonucleotide
gcccuggaaugucucugga

SEQ ID NO: 2927787 - RNA, 19 nt, Artificial Sequence
  Description of Artificial Sequence: Synthetic oligonucleotide
cgagcacgguccauuuuca

SEQ ID NO: 2927788 - RNA, 19 nt, Artificial Sequence
  Description of Artificial Sequence: Synthetic oligonucleotide
ccgggucaguacugcugag

SEQ ID NO: 2927789 - RNA, 19 nt, Artificial Sequence
  Description of Artificial Sequence: Synthetic oligonucleotide
ccacucauucgaauccagu

SEQ ID NO: 2927790 - RNA, 19 nt, Artificial Sequence
  Description of Artificial Sequence: Synthetic oligonucleotide
cacaggacuucucgugguu

SEQ ID NO: 2927791 - RNA, 19 nt, Artificial Sequence
  Description of Artificial Sequence: Synthetic oligonucleotide
gccaccuccgcagccccac

SEQ ID NO: 2927792 - RNA, 19 nt, Artificial Sequence
  Description of Artificial Sequence: Synthetic oligonucleotide
gggguggcuuccguuuaga

SEQ ID NO: 2927793 - RNA, 19 nt, Artificial Sequence
  Description of Artificial Sequence: Synthetic oligonucleotide
ccccacacacauccacuca

SEQ ID NO: 2927794 - RNA, 19 nt, Artificial Sequence
  Description of Artificial Sequence: Synthetic oligonucleotide
cccacacacauccacucau

SEQ ID NO: 2927795 - RNA, 19 nt, Artificial Sequence
  Description of Artificial Sequence: Synthetic oligonucleotide
cgucuauccaaucgcugua

SEQ ID NO: 2927796 - RNA, 19 nt, Artificial Sequence
  Description of Artificial Sequence: Synthetic oligonucleotide
gcugcuucacaggcgucua

SEQ ID NO: 2927797 - RNA, 19 nt, Artificial Sequence
  Description of Artificial Sequence: Synthetic oligonucleotide
ggcugucauugcccuggaa

SEQ ID NO: 2927798 - RNA, 19 nt, Artificial Sequence
  Description of Artificial Sequence: Synthetic oligonucleotide
gacugguacccgggucagu

SEQ ID NO: 2927799 - RNA, 19 nt, Artificial Sequence
  Description of Artificial Sequence: Synthetic oligonucleotide
gggcugucauugcccugga

SEQ ID NO: 2927800 - RNA, 19 nt, Artificial Sequence
  Description of Artificial Sequence: Synthetic oligonucleotide
agccaccuccgcagcccca

SEQ ID NO: 2927801 - RNA, 19 nt, Artificial Sequence
  Description of Artificial Sequence: Synthetic oligonucleotide
ggcacacgguacaggagau

SEQ ID NO: 2927802 - RNA, 19 nt, Artificial Sequence
  Description of Artificial Sequence: Synthetic oligonucleotide
cugcuucacaggcgucuau

SEQ ID NO: 2927803 - RNA, 19 nt, Artificial Sequence
  Description of Artificial Sequence: Synthetic oligonucleotide
ccguuuagacuuccuucgu

SEQ ID NO: 2927804 - RNA, 19 nt, Artificial Sequence
  Description of Artificial Sequence: Synthetic oligonucleotide
ggucuccagggugccuguc

SEQ ID NO: 2927805 - RNA, 19 nt, Artificial Sequence
  Description of Artificial Sequence: Synthetic oligonucleotide
ccuucgucccauggcugca

SEQ ID NO: 2927806 - RNA, 19 nt, Artificial Sequence
  Description of Artificial Sequence: Synthetic oligonucleotide
gcuuccguuuagacuuccu

SEQ ID NO: 2927807 - RNA, 19 nt, Artificial Sequence
  Description of Artificial Sequence: Synthetic oligonucleotide
gcagccccacacacaucca

SEQ ID NO: 2927808 - RNA, 19 nt, Artificial Sequence
  Description of Artificial Sequence: Synthetic oligonucleotide
gcacacgguacaggagaua

SEQ ID NO: 2927809 - RNA, 19 nt, Artificial Sequence
  Description of Artificial Sequence: Synthetic oligonucleotide
ccacugguucugacagaua

SEQ ID NO: 2927810 - RNA, 19 nt, Artificial Sequence
  Description of Artificial Sequence: Synthetic oligonucleotide
ccgcagccccacacacauc

SEQ ID NO: 2927811 - RNA, 19 nt, Artificial Sequence
  Description of Artificial Sequence: Synthetic oligonucleotide
cugggucuccagggugccu

SEQ ID NO: 2927812 - RNA, 19 nt, Artificial Sequence
  Description of Artificial Sequence: Synthetic oligonucleotide
gggugccugucaucuucuu

SEQ ID NO: 2927813 - RNA, 19 nt, Artificial Sequence
  Description of Artificial Sequence: Synthetic oligonucleotide
ccaguguuucgagcacggu

SEQ ID NO: 2927814 - RNA, 19 nt, Artificial Sequence
  Description of Artificial Sequence: Synthetic oligonucleotide
ccaccuccgcagccccaca

SEQ ID NO: 2927815 - RNA, 19 nt, Artificial Sequence
  Description of Artificial Sequence: Synthetic oligonucleotide
cggagggagggcugucauu

SEQ ID NO: 2927816 - RNA, 19 nt, Artificial Sequence
  Description of Artificial Sequence: Synthetic oligonucleotide
aaauaccucauccaccucc

SEQ ID NO: 2927817 - RNA, 19 nt, Artificial Sequence
  Description of Artificial Sequence: Synthetic oligonucleotide
uuuaauuuagcucuggagu

SEQ ID NO: 2927818 - RNA, 19 nt, Artificial Sequence
  Description of Artificial Sequence: Synthetic oligonucleotide
aaugccaggggccagcaac

SEQ ID NO: 2927819 - RNA, 19 nt, Artificial Sequence
  Description of Artificial Sequence: Synthetic oligonucleotide
ucuugaauagcuagguagg

SEQ ID NO: 2927820 - RNA, 19 nt, Artificial Sequence
  Description of Artificial Sequence: Synthetic oligonucleotide
uuuuaauuuagcucuggag

SEQ ID NO: 2927821 - RNA, 19 nt, Artificial Sequence
  Description of Artificial Sequence: Synthetic oligonucleotide
aagacaggcauuguguagc

SEQ ID NO: 2927822 - RNA, 19 nt, Artificial Sequence
  Description of Artificial Sequence: Synthetic oligonucleotide
cucuugaauagcuagguag

SEQ ID NO: 2927823 - RNA, 19 nt, Artificial Sequence
  Description of Artificial Sequence: Synthetic oligonucleotide
ucaaauaccucauccaccu

SEQ ID NO: 2927824 - RNA, 19 nt, Artificial Sequence
  Description of Artificial Sequence: Synthetic oligonucleotide
ugaauagcuagguagggcu

SEQ ID NO: 2927825 - RNA, 19 nt, Artificial Sequence
  Description of Artificial Sequence: Synthetic oligonucleotide
ucauacacaggcugcaggg

SEQ ID NO: 2927826 - RNA, 19 nt, Artificial Sequence
  Description of Artificial Sequence: Synthetic oligonucleotide
aauuuagcucuggaguagc

SEQ ID NO: 2927827 - RNA, 19 nt, Artificial Sequence
  Description of Artificial Sequence: Synthetic oligonucleotide
agguagggcugauaaaugc

SEQ ID NO: 2927828 - RNA, 19 nt, Artificial Sequence
  Description of Artificial Sequence: Synthetic oligonucleotide
cucagaugaaggcagaggc

SEQ ID NO: 2927829 - RNA, 19 nt, Artificial Sequence
  Description of Artificial Sequence: Synthetic oligonucleotide
uucaaauaccucauccacc

SEQ ID NO: 2927830 - RNA, 19 nt, Artificial Sequence
  Description of Artificial Sequence: Synthetic oligonucleotide
agacaguucaaauaccuca

SEQ ID NO: 2927831 - RNA, 19 nt, Artificial Sequence
  Description of Artificial Sequence: Synthetic oligonucleotide
guugguauacccuugguuc

SEQ ID NO: 2927832 - RNA, 19 nt, Artificial Sequence
  Description of Artificial Sequence: Synthetic oligonucleotide
gaaguggccacccuggcag

SEQ ID NO: 2927833 - RNA, 19 nt, Artificial Sequence
  Description of Artificial Sequence: Synthetic oligonucleotide
acuuuaaaggccaagccuc

SEQ ID NO: 2927834 - RNA, 19 nt, Artificial Sequence
  Description of Artificial Sequence: Synthetic oligonucleotide
uuaauuuagcucuggagua

SEQ ID NO: 2927835 - RNA, 19 nt, Artificial Sequence
  Description of Artificial Sequence: Synthetic oligonucleotide
auacccuugguucuguguc

SEQ ID NO: 2927836 - RNA, 19 nt, Artificial Sequence
  Description of Artificial Sequence: Synthetic oligonucleotide
gugaauucagugaugacag

SEQ ID NO: 2927837 - RNA, 19 nt, Artificial Sequence
  Description of Artificial Sequence: Synthetic oligonucleotide
gaaguugguauacccuugg

SEQ ID NO: 2927838 - RNA, 19 nt, Artificial Sequence
  Description of Artificial Sequence: Synthetic oligonucleotide
agccucaacuccuaggcac

SEQ ID NO: 2927839 - RNA, 19 nt, Artificial Sequence
  Description of Artificial Sequence: Synthetic oligonucleotide
ugugucugcagcagguggg

SEQ ID NO: 2927840 - RNA, 19 nt, Artificial Sequence
  Description of Artificial Sequence: Synthetic oligonucleotide
ggcagaggcacuuuaaagg

SEQ ID NO: 2927841 - RNA, 19 nt, Artificial Sequence
  Description of Artificial Sequence: Synthetic oligonucleotide
uccccggucauacacaggc

SEQ ID NO: 2927842 - RNA, 19 nt, Artificial Sequence
  Description of Artificial Sequence: Synthetic oligonucleotide
uaaaggccaagccucaacu

SEQ ID NO: 2927843 - RNA, 19 nt, Artificial Sequence
  Description of Artificial Sequence: Synthetic oligonucleotide
caguucaaauaccucaucc

SEQ ID NO: 2927844 - RNA, 19 nt, Artificial Sequence
  Description of Artificial Sequence: Synthetic oligonucleotide
aguucaaauaccucaucca

SEQ ID NO: 2927845 - RNA, 19 nt, Artificial Sequence
  Description of Artificial Sequence: Synthetic oligonucleotide
cugauaaaugccaggggcc

SEQ ID NO: 2927846 - RNA, 19 nt, Artificial Sequence
  Description of Artificial Sequence: Synthetic oligonucleotide
uuagcucuggaguagccug

SEQ ID NO: 2927847 - RNA, 19 nt, Artificial Sequence
  Description of Artificial Sequence: Synthetic oligonucleotide
ugugguccacgcaagaaga

SEQ ID NO: 2927848 - RNA, 19 nt, Artificial Sequence
  Description of Artificial Sequence: Synthetic oligonucleotide
cacguuggcaagcacaggg

SEQ ID NO: 2927849 - RNA, 19 nt, Artificial Sequence
  Description of Artificial Sequence: Synthetic oligonucleotide
uucagggugaauucaguga

SEQ ID NO: 2927850 - RNA, 19 nt, Artificial Sequence
  Description of Artificial Sequence: Synthetic oligonucleotide
caagccucaacuccuaggc

SEQ ID NO: 2927851 - RNA, 19 nt, Artificial Sequence
  Description of Artificial Sequence: Synthetic oligonucleotide
cuaugguugccuuuccccg

SEQ ID NO: 2927852 - RNA, 19 nt, Artificial Sequence
  Description of Artificial Sequence: Synthetic oligonucleotide
aagaagacaggcauugugu

SEQ ID NO: 2927853 - RNA, 19 nt, Artificial Sequence
  Description of Artificial Sequence: Synthetic oligonucleotide
ucagggugaauucagugau

SEQ ID NO: 2927854 - RNA, 19 nt, Artificial Sequence
  Description of Artificial Sequence: Synthetic oligonucleotide
ucgggguugggccugaggc

SEQ ID NO: 2927855 - RNA, 19 nt, Artificial Sequence
  Description of Artificial Sequence: Synthetic oligonucleotide
uagccugcucagaugaagg

SEQ ID NO: 2927856 - RNA, 19 nt, Artificial Sequence
  Description of Artificial Sequence: Synthetic oligonucleotide
cuaggcaccucuugaauag

SEQ ID NO: 2927857 - RNA, 19 nt, Artificial Sequence
  Description of Artificial Sequence: Synthetic oligonucleotide
cauuguguagcggaagugg

SEQ ID NO: 2927858 - RNA, 19 nt, Artificial Sequence
  Description of Artificial Sequence: Synthetic oligonucleotide
gaugacagcugugaggccc

SEQ ID NO: 2927859 - RNA, 19 nt, Artificial Sequence
  Description of Artificial Sequence: Synthetic oligonucleotide
gaagacaggcauuguguag

SEQ ID NO: 2927860 - RNA, 19 nt, Artificial Sequence
  Description of Artificial Sequence: Synthetic oligonucleotide
aauucagugaugacagcug

SEQ ID NO: 2927861 - RNA, 19 nt, Artificial Sequence
  Description of Artificial Sequence: Synthetic oligonucleotide
ugugaggccccagacacgg

SEQ ID NO: 2927862 - RNA, 19 nt, Artificial Sequence
  Description of Artificial Sequence: Synthetic oligonucleotide
auuguguagcggaaguggc

SEQ ID NO: 2927863 - RNA, 19 nt, Artificial Sequence
  Description of Artificial Sequence: Synthetic oligonucleotide
uaugguugccuuuccccgg

SEQ ID NO: 2927864 - RNA, 19 nt, Artificial Sequence
  Description of Artificial Sequence: Synthetic oligonucleotide
uaauuuagcucuggaguag

SEQ ID NO: 2927865 - RNA, 19 nt, Artificial Sequence
  Description of Artificial Sequence: Synthetic oligonucleotide
accuccucgggguugggcc

SEQ ID NO: 2927866 - RNA, 19 nt, Artificial Sequence
  Description of Artificial Sequence: Synthetic oligonucleotide
ucagugaugacagcuguga

SEQ ID NO: 2927867 - RNA, 19 nt, Artificial Sequence
  Description of Artificial Sequence: Synthetic oligonucleotide
caagaagacaggcauugug

SEQ ID NO: 2927868 - RNA, 19 nt, Artificial Sequence
  Description of Artificial Sequence: Synthetic oligonucleotide
acaggcauuguguagcgga

SEQ ID NO: 2927869 - RNA, 19 nt, Artificial Sequence
  Description of Artificial Sequence: Synthetic oligonucleotide
ggggccagcaacuucaggg

SEQ ID NO: 2927870 - RNA, 19 nt, Artificial Sequence
  Description of Artificial Sequence: Synthetic oligonucleotide
ucagaugaaggcagaggca

SEQ ID NO: 2927871 - RNA, 19 nt, Artificial Sequence
  Description of Artificial Sequence: Synthetic oligonucleotide
uuaaaggccaagccucaac

SEQ ID NO: 2927872 - RNA, 19 nt, Artificial Sequence
  Description of Artificial Sequence: Synthetic oligonucleotide
ucaacuccuaggcaccucu

SEQ ID NO: 2927873 - RNA, 19 nt, Artificial Sequence
  Description of Artificial Sequence: Synthetic oligonucleotide
agcacagggacuaugguug

SEQ ID NO: 2927874 - RNA, 19 nt, Artificial Sequence
  Description of Artificial Sequence: Synthetic oligonucleotide
ucuggaguagccugcucag

SEQ ID NO: 2927875 - RNA, 19 nt, Artificial Sequence
  Description of Artificial Sequence: Synthetic oligonucleotide
uugguucugugucugcagc

SEQ ID NO: 2927876 - RNA, 19 nt, Artificial Sequence
  Description of Artificial Sequence: Synthetic oligonucleotide
uugaauagcuagguagggc

SEQ ID NO: 2927877 - RNA, 19 nt, Artificial Sequence
  Description of Artificial Sequence: Synthetic oligonucleotide
aacuccuaggcaccucuug

SEQ ID NO: 2927878 - RNA, 19 nt, Artificial Sequence
  Description of Artificial Sequence: Synthetic oligonucleotide
acaguucaaauaccucauc

SEQ ID NO: 2927879 - RNA, 19 nt, Artificial Sequence
  Description of Artificial Sequence: Synthetic oligonucleotide
aggcagaggcacuuuaaag

SEQ ID NO: 2927880 - RNA, 19 nt, Artificial Sequence
  Description of Artificial Sequence: Synthetic oligonucleotide
uuuccccggucauacacag

SEQ ID NO: 2927881 - RNA, 19 nt, Artificial Sequence
  Description of Artificial Sequence: Synthetic oligonucleotide
cuugaauagcuagguaggg

SEQ ID NO: 2927882 - RNA, 19 nt, Artificial Sequence
  Description of Artificial Sequence: Synthetic oligonucleotide
aacuucagggugaauucag

SEQ ID NO: 2927883 - RNA, 19 nt, Artificial Sequence
  Description of Artificial Sequence: Synthetic oligonucleotide
agccugcucagaugaaggc

SEQ ID NO: 2927884 - RNA, 19 nt, Artificial Sequence
  Description of Artificial Sequence: Synthetic oligonucleotide
ugauaaaugccaggggcca

SEQ ID NO: 2927885 - RNA, 19 nt, Artificial Sequence
  Description of Artificial Sequence: Synthetic oligonucleotide
aagcacagggacuaugguu

SEQ ID NO: 2927886 - RNA, 19 nt, Artificial Sequence
  Description of Artificial Sequence: Synthetic oligonucleotide
uuguguagcggaaguggcc

SEQ ID NO: 2927887 - RNA, 19 nt, Artificial Sequence
  Description of Artificial Sequence: Synthetic oligonucleotide
ccagagacaguucaaauac

SEQ ID NO: 2927888 - RNA, 19 nt, Artificial Sequence
  Description of Artificial Sequence: Synthetic oligonucleotide
uugguauacccuugguucu

SEQ ID NO: 2927889 - RNA, 19 nt, Artificial Sequence
  Description of Artificial Sequence: Synthetic oligonucleotide
cuucagggugaauucagug

SEQ ID NO: 2927890 - RNA, 19 nt, Artificial Sequence
  Description of Artificial Sequence: Synthetic oligonucleotide
uguguagcggaaguggcca

SEQ ID NO: 2927891 - RNA, 19 nt, Artificial Sequence
  Description of Artificial Sequence: Synthetic oligonucleotide
gaguagccugcucagauga

SEQ ID NO: 2927892 - RNA, 19 nt, Artificial Sequence
  Description of Artificial Sequence: Synthetic oligonucleotide
uagguagggcugauaaaug

SEQ ID NO: 2927893 - RNA, 19 nt, Artificial Sequence
  Description of Artificial Sequence: Synthetic oligonucleotide
cagggcaccccacacaugc

SEQ ID NO: 2927894 - RNA, 19 nt, Artificial Sequence
  Description of Artificial Sequence: Synthetic oligonucleotide
uagggcugauaaaugccag

SEQ ID NO: 2927895 - RNA, 19 nt, Artificial Sequence
  Description of Artificial Sequence: Synthetic oligonucleotide
aauagcuagguagggcuga

SEQ ID NO: 2927896 - RNA, 19 nt, Artificial Sequence
  Description of Artificial Sequence: Synthetic oligonucleotide
ucauccaccuccucggggu

SEQ ID NO: 2927897 - RNA, 19 nt, Artificial Sequence
  Description of Artificial Sequence: Synthetic oligonucleotide
aaggcagaggcacuuuaaa

SEQ ID NO: 2927898 - RNA, 19 nt, Artificial Sequence
  Description of Artificial Sequence: Synthetic oligonucleotide
agagacaguucaaauaccu

SEQ ID NO: 2927899 - RNA, 19 nt, Artificial Sequence
  Description of Artificial Sequence: Synthetic oligonucleotide
agggcugauaaaugccagg

SEQ ID NO: 2927900 - RNA, 19 nt, Artificial Sequence
  Description of Artificial Sequence: Synthetic oligonucleotide
uucugugucugcagcaggu

SEQ ID NO: 2927901 - RNA, 19 nt, Artificial Sequence
  Description of Artificial Sequence: Synthetic oligonucleotide
cuugggcaccucuaggccc

SEQ ID NO: 2927902 - RNA, 19 nt, Artificial Sequence
  Description of Artificial Sequence: Synthetic oligonucleotide
cagaugaaggcagaggcac

SEQ ID NO: 2927903 - RNA, 19 nt, Artificial Sequence
  Description of Artificial Sequence: Synthetic oligonucleotide
uauacccuugguucugugu

SEQ ID NO: 2927904 - RNA, 19 nt, Artificial Sequence
  Description of Artificial Sequence: Synthetic oligonucleotide
ggugaauucagugaugaca

SEQ ID NO: 2927905 - RNA, 19 nt, Artificial Sequence
  Description of Artificial Sequence: Synthetic oligonucleotide
gugugguccacgcaagaag

SEQ ID NO: 2927906 - RNA, 19 nt, Artificial Sequence
  Description of Artificial Sequence: Synthetic oligonucleotide
uggaguagccugcucagau

SEQ ID NO: 2927907 - RNA, 19 nt, Artificial Sequence
  Description of Artificial Sequence: Synthetic oligonucleotide
auacacaggcugcagggca

SEQ ID NO: 2927908 - RNA, 19 nt, Artificial Sequence
  Description of Artificial Sequence: Synthetic oligonucleotide
caccucuaggcccagcucc

SEQ ID NO: 2927909 - RNA, 19 nt, Artificial Sequence
  Description of Artificial Sequence: Synthetic oligonucleotide
ugaggccccagacacggug

SEQ ID NO: 2927910 - RNA, 19 nt, Artificial Sequence
  Description of Artificial Sequence: Synthetic oligonucleotide
ucugcagauccagugggcc

SEQ ID NO: 2927911 - RNA, 19 nt, Artificial Sequence
  Description of Artificial Sequence: Synthetic oligonucleotide
caccucuugaauagcuagg

SEQ ID NO: 2927912 - RNA, 19 nt, Artificial Sequence
  Description of Artificial Sequence: Synthetic oligonucleotide
aguugguauacccuugguu

SEQ ID NO: 2927913 - RNA, 19 nt, Artificial Sequence
  Description of Artificial Sequence: Synthetic oligonucleotide
agacaggcauuguguagcg

SEQ ID NO: 2927914 - RNA, 19 nt, Artificial Sequence
  Description of Artificial Sequence: Synthetic oligonucleotide
cagcaggugggccagagac

SEQ ID NO: 2927915 - RNA, 19 nt, Artificial Sequence
  Description of Artificial Sequence: Synthetic oligonucleotide
gcagaggcacuuuaaaggc

SEQ ID NO: 2927916 - RNA, 19 nt, Artificial Sequence
  Description of Artificial Sequence: Synthetic oligonucleotide
agcaacuucagggugaauu

SEQ ID NO: 2927917 - RNA, 19 nt, Artificial Sequence
  Description of Artificial Sequence: Synthetic oligonucleotide
cugugucugcagcaggugg

SEQ ID NO: 2927918 - RNA, 19 nt, Artificial Sequence
  Description of Artificial Sequence: Synthetic oligonucleotide
cuugguucugugucugcag

SEQ ID NO: 2927919 - RNA, 19 nt, Artificial Sequence
  Description of Artificial Sequence: Synthetic oligonucleotide
aauaccucauccaccuccu

SEQ ID NO: 2927920 - RNA, 19 nt, Artificial Sequence
  Description of Artificial Sequence: Synthetic oligonucleotide
auuuagcucuggaguagcc

SEQ ID NO: 2927921 - RNA, 19 nt, Artificial Sequence
  Description of Artificial Sequence: Synthetic oligonucleotide
aaguugguauacccuuggu

SEQ ID NO: 2927922 - RNA, 19 nt, Artificial Sequence
  Description of Artificial Sequence: Synthetic oligonucleotide
auccagugggcccacguug

SEQ ID NO: 2927923 - RNA, 19 nt, Artificial Sequence
  Description of Artificial Sequence: Synthetic oligonucleotide
cagagacaguucaaauacc

SEQ ID NO: 2927924 - RNA, 19 nt, Artificial Sequence
  Description of Artificial Sequence: Synthetic oligonucleotide
gaauucagugaugacagcu

SEQ ID NO: 2927925 - RNA, 19 nt, Artificial Sequence
  Description of Artificial Sequence: Synthetic oligonucleotide
agaagacaggcauugugua

SEQ ID NO: 2927926 - RNA, 19 nt, Artificial Sequence
  Description of Artificial Sequence: Synthetic oligonucleotide
cacacaugcuccuugggca

SEQ ID NO: 2927927 - RNA, 19 nt, Artificial Sequence
  Description of Artificial Sequence: Synthetic oligonucleotide
uccacgcaagaagacaggc

SEQ ID NO: 2927928 - RNA, 19 nt, Artificial Sequence
  Description of Artificial Sequence: Synthetic oligonucleotide
agggugaauucagugauga

SEQ ID NO: 2927929 - RNA, 19 nt, Artificial Sequence
  Description of Artificial Sequence: Synthetic oligonucleotide
ugaauucagugaugacagc

SEQ ID NO: 2927930 - RNA, 19 nt, Artificial Sequence
  Description of Artificial Sequence: Synthetic oligonucleotide
ggcagaaguugguauaccc

SEQ ID NO: 2927931 - RNA, 19 nt, Artificial Sequence
  Description of Artificial Sequence: Synthetic oligonucleotide
gacacggugugguccacgc

SEQ ID NO: 2927932 - RNA, 19 nt, Artificial Sequence
  Description of Artificial Sequence: Synthetic oligonucleotide
acuccuaggcaccucuuga

SEQ ID NO: 2927933 - RNA, 19 nt, Artificial Sequence
  Description of Artificial Sequence: Synthetic oligonucleotide
cagaggcacuuuaaaggcc

SEQ ID NO: 2927934 - RNA, 19 nt, Artificial Sequence
  Description of Artificial Sequence: Synthetic oligonucleotide
ugaggcucugcagauccag

SEQ ID NO: 2927935 - RNA, 19 nt, Artificial Sequence
  Description of Artificial Sequence: Synthetic oligonucleotide
gauaaaugccaggggccag

SEQ ID NO: 2927936 - RNA, 19 nt, Artificial Sequence
  Description of Artificial Sequence: Synthetic oligonucleotide
agaggcacuuuaaaggcca

SEQ ID NO: 2927937 - RNA, 19 nt, Artificial Sequence
  Description of Artificial Sequence: Synthetic oligonucleotide
ugaaggcagaggcacuuua

SEQ ID NO: 2927938 - RNA, 19 nt, Artificial Sequence
  Description of Artificial Sequence: Synthetic oligonucleotide
gaauagcuagguagggcug

SEQ ID NO: 2927939 - RNA, 19 nt, Artificial Sequence
  Description of Artificial Sequence: Synthetic oligonucleotide
uugggcaccucuaggccca

SEQ ID NO: 2927940 - RNA, 19 nt, Artificial Sequence
  Description of Artificial Sequence: Synthetic oligonucleotide
aagccucaacuccuaggca

SEQ ID NO: 2927941 - RNA, 19 nt, Artificial Sequence
  Description of Artificial Sequence: Synthetic oligonucleotide
gcugugaggccccagacac

SEQ ID NO: 2927942 - RNA, 19 nt, Artificial Sequence
  Description of Artificial Sequence: Synthetic oligonucleotide
aggcucugcagauccagug

SEQ ID NO: 2927943 - RNA, 19 nt, Artificial Sequence
  Description of Artificial Sequence: Synthetic oligonucleotide
ugguucugugucugcagca

SEQ ID NO: 2927944 - RNA, 19 nt, Artificial Sequence
  Description of Artificial Sequence: Synthetic oligonucleotide
gcaccucuugaauagcuag

SEQ ID NO: 2927945 - RNA, 19 nt, Artificial Sequence
  Description of Artificial Sequence: Synthetic oligonucleotide
ggcacuuuaaaggccaagc

SEQ ID NO: 2927946 - RNA, 19 nt, Artificial Sequence
  Description of Artificial Sequence: Synthetic oligonucleotide
gcacuuuaaaggccaagcc

SEQ ID NO: 2927947 - RNA, 19 nt, Artificial Sequence
  Description of Artificial Sequence: Synthetic oligonucleotide
uacacaggcugcagggcac

SEQ ID NO: 2927948 - RNA, 19 nt, Artificial Sequence
  Description of Artificial Sequence: Synthetic oligonucleotide
uagcucuggaguagccugc

SEQ ID NO: 2927949 - RNA, 19 nt, Artificial Sequence
  Description of Artificial Sequence: Synthetic oligonucleotide
cuuuaaaggccaagccuca

SEQ ID NO: 2927950 - RNA, 19 nt, Artificial Sequence
  Description of Artificial Sequence: Synthetic oligonucleotide
gggcugauaaaugccaggg

SEQ ID NO: 2927951 - RNA, 19 nt, Artificial Sequence
  Description of Artificial Sequence: Synthetic oligonucleotide
guagccugcucagaugaag

SEQ ID NO: 2927952 - RNA, 19 nt, Artificial Sequence
  Description of Artificial Sequence: Synthetic oligonucleotide
agcggaaguggccacccug

SEQ ID NO: 2927953 - RNA, 19 nt, Artificial Sequence
  Description of Artificial Sequence: Synthetic oligonucleotide
accucuugaauagcuaggu

SEQ ID NO: 2927954 - RNA, 19 nt, Artificial Sequence
  Description of Artificial Sequence: Synthetic oligonucleotide
ccugcucagaugaaggcag

SEQ ID NO: 2927955 - RNA, 19 nt, Artificial Sequence
  Description of Artificial Sequence: Synthetic oligonucleotide
acagcugugaggccccaga

SEQ ID NO: 2927956 - RNA, 19 nt, Artificial Sequence
  Description of Artificial Sequence: Synthetic oligonucleotide
gcucugcagauccaguggg

SEQ ID NO: 2927957 - RNA, 19 nt, Artificial Sequence
  Description of Artificial Sequence: Synthetic oligonucleotide
cugcagauccagugggccc

SEQ ID NO: 2927958 - RNA, 19 nt, Artificial Sequence
  Description of Artificial Sequence: Synthetic oligonucleotide
agaaguugguauacccuug

SEQ ID NO: 2927959 - RNA, 19 nt, Artificial Sequence
  Description of Artificial Sequence: Synthetic oligonucleotide
augacagcugugaggcccc

SEQ ID NO: 2927960 - RNA, 19 nt, Artificial Sequence
  Description of Artificial Sequence: Synthetic oligonucleotide
ggcucugcagauccagugg

SEQ ID NO: 2927961 - RNA, 19 nt, Artificial Sequence
  Description of Artificial Sequence: Synthetic oligonucleotide
gcaagcacagggacuaugg

SEQ ID NO: 2927962 - RNA, 19 nt, Artificial Sequence
  Description of Artificial Sequence: Synthetic oligonucleotide
ugguccacgcaagaagaca

SEQ ID NO: 2927963 - RNA, 19 nt, Artificial Sequence
  Description of Artificial Sequence: Synthetic oligonucleotide
gguccacgcaagaagacag

SEQ ID NO: 2927964 - RNA, 19 nt, Artificial Sequence
  Description of Artificial Sequence: Synthetic oligonucleotide
cucuggaguagccugcuca

SEQ ID NO: 2927965 - RNA, 19 nt, Artificial Sequence
  Description of Artificial Sequence: Synthetic oligonucleotide
guagggcugauaaaugcca

SEQ ID NO: 2927966 - RNA, 19 nt, Artificial Sequence
  Description of Artificial Sequence: Synthetic oligonucleotide
agugggcccacguuggcaa

SEQ ID NO: 2927967 - RNA, 19 nt, Artificial Sequence
  Description of Artificial Sequence: Synthetic oligonucleotide
gguagggcugauaaaugcc

SEQ ID NO: 2927968 - RNA, 19 nt, Artificial Sequence
  Description of Artificial Sequence: Synthetic oligonucleotide
gagacaguucaaauaccuc

SEQ ID NO: 2927969 - RNA, 19 nt, Artificial Sequence
  Description of Artificial Sequence: Synthetic oligonucleotide
uguagcggaaguggccacc

SEQ ID NO: 2927970 - RNA, 19 nt, Artificial Sequence
  Description of Artificial Sequence: Synthetic oligonucleotide
cacuuuaaaggccaagccu

SEQ ID NO: 2927971 - RNA, 19 nt, Artificial Sequence
  Description of Artificial Sequence: Synthetic oligonucleotide
ccugaggcucugcagaucc

SEQ ID NO: 2927972 - RNA, 19 nt, Artificial Sequence
  Description of Artificial Sequence: Synthetic oligonucleotide
cucugcagauccagugggc

SEQ ID NO: 2927973 - RNA, 19 nt, Artificial Sequence
  Description of Artificial Sequence: Synthetic oligonucleotide
cagugaugacagcugugag

SEQ ID NO: 2927974 - RNA, 19 nt, Artificial Sequence
  Description of Artificial Sequence: Synthetic oligonucleotide
uugggccugaggcucugca

SEQ ID NO: 2927975 - RNA, 19 nt, Artificial Sequence
  Description of Artificial Sequence: Synthetic oligonucleotide
ugggccugaggcucugcag

SEQ ID NO: 2927976 - RNA, 19 nt, Artificial Sequence
  Description of Artificial Sequence: Synthetic oligonucleotide
agauccagugggcccacgu

SEQ ID NO: 2927977 - RNA, 19 nt, Artificial Sequence
  Description of Artificial Sequence: Synthetic oligonucleotide
ugccuuuccccggucauac

SEQ ID NO: 2927978 - RNA, 19 nt, Artificial Sequence
  Description of Artificial Sequence: Synthetic oligonucleotide
cuggcagaaguugguauac

SEQ ID NO: 2927979 - RNA, 19 nt, Artificial Sequence
  Description of Artificial Sequence: Synthetic oligonucleotide
uacccuugguucugugucu

SEQ ID NO: 2927980 - RNA, 19 nt, Artificial Sequence
  Description of Artificial Sequence: Synthetic oligonucleotide
ugguauacccuugguucug

SEQ ID NO: 2927981 - RNA, 19 nt, Artificial Sequence
  Description of Artificial Sequence: Synthetic oligonucleotide
agcuccucuugagucuccc

SEQ ID NO: 2927982 - RNA, 19 nt, Artificial Sequence
  Description of Artificial Sequence: Synthetic oligonucleotide
acagggacuaugguugccu

SEQ ID NO: 2927983 - RNA, 19 nt, Artificial Sequence
  Description of Artificial Sequence: Synthetic oligonucleotide
uuuaaaggccaagccucaa

SEQ ID NO: 2927984 - RNA, 19 nt, Artificial Sequence
  Description of Artificial Sequence: Synthetic oligonucleotide
uggccacccuggcagaagu

SEQ ID NO: 2927985 - RNA, 19 nt, Artificial Sequence
  Description of Artificial Sequence: Synthetic oligonucleotide
uccaccuccucgggguugg

SEQ ID NO: 2927986 - RNA, 19 nt, Artificial Sequence
  Description of Artificial Sequence: Synthetic oligonucleotide
cuagguagggcugauaaau

SEQ ID NO: 2927987 - RNA, 19 nt, Artificial Sequence
  Description of Artificial Sequence: Synthetic oligonucleotide
uaaaugccaggggccagca

SEQ ID NO: 2927988 - RNA, 19 nt, Artificial Sequence
  Description of Artificial Sequence: Synthetic oligonucleotide
acacaggcugcagggcacc

SEQ ID NO: 2927989 - RNA, 19 nt, Artificial Sequence
  Description of Artificial Sequence: Synthetic oligonucleotide
uuccccggucauacacagg

SEQ ID NO: 2927990 - RNA, 19 nt, Artificial Sequence
  Description of Artificial Sequence: Synthetic oligonucleotide
acaggcugcagggcacccc

SEQ ID NO: 2927991 - RNA, 19 nt, Artificial Sequence
  Description of Artificial Sequence: Synthetic oligonucleotide
gacaggcauuguguagcgg

SEQ ID NO: 2927992 - RNA, 19 nt, Artificial Sequence
  Description of Artificial Sequence: Synthetic oligonucleotide
augguugccuuuccccggu

SEQ ID NO: 2927993 - RNA, 19 nt, Artificial Sequence
  Description of Artificial Sequence: Synthetic oligonucleotide
cuccucuugagucucccga

SEQ ID NO: 2927994 - RNA, 19 nt, Artificial Sequence
  Description of Artificial Sequence: Synthetic oligonucleotide
gcaggugggccagagacag

SEQ ID NO: 2927995 - RNA, 19 nt, Artificial Sequence
  Description of Artificial Sequence: Synthetic oligonucleotide
ccaagccucaacuccuagg

SEQ ID NO: 2927996 - RNA, 19 nt, Artificial Sequence
  Description of Artificial Sequence: Synthetic oligonucleotide
auaccucauccaccuccuc

SEQ ID NO: 2927997 - RNA, 19 nt, Artificial Sequence
  Description of Artificial Sequence: Synthetic oligonucleotide
cagggugaauucagugaug

SEQ ID NO: 2927998 - RNA, 19 nt, Artificial Sequence
  Description of Artificial Sequence: Synthetic oligonucleotide
cacgcaagaagacaggcau

SEQ ID NO: 2927999 - RNA, 19 nt, Artificial Sequence
  Description of Artificial Sequence: Synthetic oligonucleotide
uaggcccagcuccucuuga

SEQ ID NO: 2928000 - RNA, 19 nt, Artificial Sequence
  Description of Artificial Sequence: Synthetic oligonucleotide
uggcagaaguugguauacc

SEQ ID NO: 2928001 - RNA, 19 nt, Artificial Sequence
  Description of Artificial Sequence: Synthetic oligonucleotide
ccacacaugcuccuugggc

SEQ ID NO: 2928002 - RNA, 19 nt, Artificial Sequence
  Description of Artificial Sequence: Synthetic oligonucleotide
accccacacaugcuccuug

SEQ ID NO: 2928003 - RNA, 19 nt, Artificial Sequence
  Description of Artificial Sequence: Synthetic oligonucleotide
cugugaggccccagacacg

SEQ ID NO: 2928004 - RNA, 19 nt, Artificial Sequence
  Description of Artificial Sequence: Synthetic oligonucleotide
cuuuccccggucauacaca

SEQ ID NO: 2928005 - RNA, 19 nt, Artificial Sequence
  Description of Artificial Sequence: Synthetic oligonucleotide
gguucugugucugcagcag

SEQ ID NO: 2928006 - RNA, 19 nt, Artificial Sequence
  Description of Artificial Sequence: Synthetic oligonucleotide
ugcuccuugggcaccucua

SEQ ID NO: 2928007 - RNA, 19 nt, Artificial Sequence
  Description of Artificial Sequence: Synthetic oligonucleotide
guagcggaaguggccaccc

SEQ ID NO: 2928008 - RNA, 19 nt, Artificial Sequence
  Description of Artificial Sequence: Synthetic oligonucleotide
cacggugugguccacgcaa

SEQ ID NO: 2928009 - RNA, 19 nt, Artificial Sequence
  Description of Artificial Sequence: Synthetic oligonucleotide
ggaguagccugcucagaug

SEQ ID NO: 2928010 - RNA, 19 nt, Artificial Sequence
  Description of Artificial Sequence: Synthetic oligonucleotide
aggcauuguguagcggaag

SEQ ID NO: 2928011 - RNA, 19 nt, Artificial Sequence
  Description of Artificial Sequence: Synthetic oligonucleotide
guauacccuugguucugug

SEQ ID NO: 2928012 - RNA, 19 nt, Artificial Sequence
  Description of Artificial Sequence: Synthetic oligonucleotide
gacaguucaaauaccucau

SEQ ID NO: 2928013 - RNA, 19 nt, Artificial Sequence
  Description of Artificial Sequence: Synthetic oligonucleotide
aaguggccacccuggcaga

SEQ ID NO: 2928014 - RNA, 19 nt, Artificial Sequence
  Description of Artificial Sequence: Synthetic oligonucleotide
uaggcaccucuugaauagc

SEQ ID NO: 2928015 - RNA, 19 nt, Artificial Sequence
  Description of Artificial Sequence: Synthetic oligonucleotide
aggggccagcaacuucagg

SEQ ID NO: 2928016 - RNA, 19 nt, Artificial Sequence
  Description of Artificial Sequence: Synthetic oligonucleotide
guccacgcaagaagacagg

SEQ ID NO: 2928017 - RNA, 19 nt, Artificial Sequence
  Description of Artificial Sequence: Synthetic oligonucleotide
gaaggcagaggcacuuuaa

SEQ ID NO: 2928018 - RNA, 19 nt, Artificial Sequence
  Description of Artificial Sequence: Synthetic oligonucleotide
ucuaggcccagcuccucuu

SEQ ID NO: 2928019 - RNA, 19 nt, Artificial Sequence
  Description of Artificial Sequence: Synthetic oligonucleotide
acuucagggugaauucagu

SEQ ID NO: 2928020 - RNA, 19 nt, Artificial Sequence
  Description of Artificial Sequence: Synthetic oligonucleotide
aaaugccaggggccagcaa

SEQ ID NO: 2928021 - RNA, 19 nt, Artificial Sequence
  Description of Artificial Sequence: Synthetic oligonucleotide
ccuuuccccggucauacac

SEQ ID NO: 2928022 - RNA, 19 nt, Artificial Sequence
  Description of Artificial Sequence: Synthetic oligonucleotide
cagaaguugguauacccuu

SEQ ID NO: 2928023 - RNA, 19 nt, Artificial Sequence
  Description of Artificial Sequence: Synthetic oligonucleotide
ccacccuggcagaaguugg

SEQ ID NO: 2928024 - RNA, 19 nt, Artificial Sequence
  Description of Artificial Sequence: Synthetic oligonucleotide
gccagagacaguucaaaua

SEQ ID NO: 2928025 - RNA, 19 nt, Artificial Sequence
  Description of Artificial Sequence: Synthetic oligonucleotide
gggacuaugguugccuuuc

SEQ ID NO: 2928026 - RNA, 19 nt, Artificial Sequence
  Description of Artificial Sequence: Synthetic oligonucleotide
cuaggcccagcuccucuug

SEQ ID NO: 2928027 - RNA, 19 nt, Artificial Sequence
  Description of Artificial Sequence: Synthetic oligonucleotide
caaauaccucauccaccuc

SEQ ID NO: 2928028 - RNA, 19 nt, Artificial Sequence
  Description of Artificial Sequence: Synthetic oligonucleotide
ccggucauacacaggcugc

SEQ ID NO: 2928029 - RNA, 19 nt, Artificial Sequence
  Description of Artificial Sequence: Synthetic oligonucleotide
gcuccuugggcaccucuag

SEQ ID NO: 2928030 - RNA, 19 nt, Artificial Sequence
  Description of Artificial Sequence: Synthetic oligonucleotide
cucgggguugggccugagg

SEQ ID NO: 2928031 - RNA, 19 nt, Artificial Sequence
  Description of Artificial Sequence: Synthetic oligonucleotide
cagcugugaggccccagac

SEQ ID NO: 2928032 - RNA, 19 nt, Artificial Sequence
  Description of Artificial Sequence: Synthetic oligonucleotide
agaugaaggcagaggcacu

SEQ ID NO: 2928033 - RNA, 19 nt, Artificial Sequence
  Description of Artificial Sequence: Synthetic oligonucleotide
agggacuaugguugccuuu

SEQ ID NO: 2928034 - RNA, 19 nt, Artificial Sequence
  Description of Artificial Sequence: Synthetic oligonucleotide
gcggaaguggccacccugg

SEQ ID NO: 2928035 - RNA, 19 nt, Artificial Sequence
  Description of Artificial Sequence: Synthetic oligonucleotide
acccuugguucugugucug

SEQ ID NO: 2928036 - RNA, 19 nt, Artificial Sequence
  Description of Artificial Sequence: Synthetic oligonucleotide
aggcaccucuugaauagcu

SEQ ID NO: 2928037 - RNA, 19 nt, Artificial Sequence
  Description of Artificial Sequence: Synthetic oligonucleotide
cccggucauacacaggcug

SEQ ID NO: 2928038 - RNA, 19 nt, Artificial Sequence
  Description of Artificial Sequence: Synthetic oligonucleotide
ggucauacacaggcugcag

SEQ ID NO: 2928039 - RNA, 19 nt, Artificial Sequence
  Description of Artificial Sequence: Synthetic oligonucleotide
cuccuaggcaccucuugaa

SEQ ID NO: 2928040 - RNA, 19 nt, Artificial Sequence
  Description of Artificial Sequence: Synthetic oligonucleotide
gaugaaggcagaggcacuu

SEQ ID NO: 2928041 - RNA, 19 nt, Artificial Sequence
  Description of Artificial Sequence: Synthetic oligonucleotide
acguuggcaagcacaggga

SEQ ID NO: 2928042 - RNA, 19 nt, Artificial Sequence
  Description of Artificial Sequence: Synthetic oligonucleotide
cgcaagaagacaggcauug

SEQ ID NO: 2928043 - RNA, 19 nt, Artificial Sequence
  Description of Artificial Sequence: Synthetic oligonucleotide
ugggcccacguuggcaagc

SEQ ID NO: 2928044 - RNA, 19 nt, Artificial Sequence
  Description of Artificial Sequence: Synthetic oligonucleotide
cacagggacuaugguugcc

SEQ ID NO: 2928045 - RNA, 19 nt, Artificial Sequence
  Description of Artificial Sequence: Synthetic oligonucleotide
ccaggggccagcaacuuca

SEQ ID NO: 2928046 - RNA, 19 nt, Artificial Sequence
  Description of Artificial Sequence: Synthetic oligonucleotide
ggacuaugguugccuuucc

SEQ ID NO: 2928047 - RNA, 19 nt, Artificial Sequence
  Description of Artificial Sequence: Synthetic oligonucleotide
aggccccagacacggugug

SEQ ID NO: 2928048 - RNA, 19 nt, Artificial Sequence
  Description of Artificial Sequence: Synthetic oligonucleotide
gcauuguguagcggaagug

SEQ ID NO: 2928049 - RNA, 19 nt, Artificial Sequence
  Description of Artificial Sequence: Synthetic oligonucleotide
ggccagcaacuucagggug

SEQ ID NO: 2928050 - RNA, 19 nt, Artificial Sequence
  Description of Artificial Sequence: Synthetic oligonucleotide
gggccugaggcucugcaga

SEQ ID NO: 2928051 - RNA, 19 nt, Artificial Sequence
  Description of Artificial Sequence: Synthetic oligonucleotide
acggugugguccacgcaag

SEQ ID NO: 2928052 - RNA, 19 nt, Artificial Sequence
  Description of Artificial Sequence: Synthetic oligonucleotide
gcuccucuugagucucccg

SEQ ID NO: 2928053 - RNA, 19 nt, Artificial Sequence
  Description of Artificial Sequence: Synthetic oligonucleotide
acacggugugguccacgca

SEQ ID NO: 2928054 - RNA, 19 nt, Artificial Sequence
  Description of Artificial Sequence: Synthetic oligonucleotide
ggaaguggccacccuggca

SEQ ID NO: 2928055 - RNA, 19 nt, Artificial Sequence
  Description of Artificial Sequence: Synthetic oligonucleotide
guguagcggaaguggccac

SEQ ID NO: 2928056 - RNA, 19 nt, Artificial Sequence
  Description of Artificial Sequence: Synthetic oligonucleotide
caggcugcagggcacccca

SEQ ID NO: 2928057 - RNA, 19 nt, Artificial Sequence
  Description of Artificial Sequence: Synthetic oligonucleotide
uagcggaaguggccacccu

SEQ ID NO: 2928058 - RNA, 19 nt, Artificial Sequence
  Description of Artificial Sequence: Synthetic oligonucleotide
acaugcuccuugggcaccu

SEQ ID NO: 2928059 - RNA, 19 nt, Artificial Sequence
  Description of Artificial Sequence: Synthetic oligonucleotide
ggcauuguguagcggaagu

SEQ ID NO: 2928060 - RNA, 19 nt, Artificial Sequence
  Description of Artificial Sequence: Synthetic oligonucleotide
gugguccacgcaagaagac

SEQ ID NO: 2928061 - RNA, 19 nt, Artificial Sequence
  Description of Artificial Sequence: Synthetic oligonucleotide
auagcuagguagggcugau

SEQ ID NO: 2928062 - RNA, 19 nt, Artificial Sequence
  Description of Artificial Sequence: Synthetic oligonucleotide
augccaggggccagcaacu

SEQ ID NO: 2928063 - RNA, 19 nt, Artificial Sequence
  Description of Artificial Sequence: Synthetic oligonucleotide
gacagcugugaggccccag

SEQ ID NO: 2928064 - RNA, 19 nt, Artificial Sequence
  Description of Artificial Sequence: Synthetic oligonucleotide
agcucuggaguagccugcu

SEQ ID NO: 2928065 - RNA, 19 nt, Artificial Sequence
  Description of Artificial Sequence: Synthetic oligonucleotide
caggggccagcaacuucag

SEQ ID NO: 2928066 - RNA, 19 nt, Artificial Sequence
  Description of Artificial Sequence: Synthetic oligonucleotide
ggcaccccacacaugcucc

SEQ ID NO: 2928067 - RNA, 19 nt, Artificial Sequence
  Description of Artificial Sequence: Synthetic oligonucleotide
gggugaauucagugaugac

SEQ ID NO: 2928068 - RNA, 19 nt, Artificial Sequence
  Description of Artificial Sequence: Synthetic oligonucleotide
cccagacacgguguggucc

SEQ ID NO: 2928069 - RNA, 19 nt, Artificial Sequence
  Description of Artificial Sequence: Synthetic oligonucleotide
ccccacacaugcuccuugg

SEQ ID NO: 2928070 - RNA, 19 nt, Artificial Sequence
  Description of Artificial Sequence: Synthetic oligonucleotide
gcacagggacuaugguugc

SEQ ID NO: 2928071 - RNA, 19 nt, Artificial Sequence
  Description of Artificial Sequence: Synthetic oligonucleotide
gcugcagggcaccccacac

SEQ ID NO: 2928072 - RNA, 19 nt, Artificial Sequence
  Description of Artificial Sequence: Synthetic oligonucleotide
gccacccuggcagaaguug

SEQ ID NO: 2928073 - RNA, 19 nt, Artificial Sequence
  Description of Artificial Sequence: Synthetic oligonucleotide
ggcaagcacagggacuaug

SEQ ID NO: 2928074 - RNA, 19 nt, Artificial Sequence
  Description of Artificial Sequence: Synthetic oligonucleotide
accucuaggcccagcuccu

SEQ ID NO: 2928075 - RNA, 19 nt, Artificial Sequence
  Description of Artificial Sequence: Synthetic oligonucleotide
uugccuuuccccggucaua

SEQ ID NO: 2928076 - RNA, 19 nt, Artificial Sequence
  Description of Artificial Sequence: Synthetic oligonucleotide
gccucaacuccuaggcacc

SEQ ID NO: 2928077 - RNA, 19 nt, Artificial Sequence
  Description of Artificial Sequence: Synthetic oligonucleotide
gguugccuuuccccgguca

SEQ ID NO: 2928078 - RNA, 19 nt, Artificial Sequence
  Description of Artificial Sequence: Synthetic oligonucleotide
cugcucagaugaaggcaga

SEQ ID NO: 2928079 - RNA, 19 nt, Artificial Sequence
  Description of Artificial Sequence: Synthetic oligonucleotide
gugggcccacguuggcaag

SEQ ID NO: 2928080 - RNA, 19 nt, Artificial Sequence
  Description of Artificial Sequence: Synthetic oligonucleotide
cagcuccucuugagucucc

SEQ ID NO: 2928081 - RNA, 19 nt, Artificial Sequence
  Description of Artificial Sequence: Synthetic oligonucleotide
gccaagccucaacuccuag

SEQ ID NO: 2928082 - RNA, 19 nt, Artificial Sequence
  Description of Artificial Sequence: Synthetic oligonucleotide
guggccacccuggcagaag

SEQ ID NO: 2928083 - RNA, 19 nt, Artificial Sequence
  Description of Artificial Sequence: Synthetic oligonucleotide
gcuagguagggcugauaaa

SEQ ID NO: 2928084 - RNA, 19 nt, Artificial Sequence
  Description of Artificial Sequence: Synthetic oligonucleotide
gggcaccccacacaugcuc

SEQ ID NO: 2928085 - RNA, 19 nt, Artificial Sequence
  Description of Artificial Sequence: Synthetic oligonucleotide
cucaacuccuaggcaccuc

SEQ ID NO: 2928086 - RNA, 19 nt, Artificial Sequence
  Description of Artificial Sequence: Synthetic oligonucleotide
ccuaggcaccucuugaaua

SEQ ID NO: 2928087 - RNA, 19 nt, Artificial Sequence
  Description of Artificial Sequence: Synthetic oligonucleotide
guugccuuuccccggucau

SEQ ID NO: 2928088 - RNA, 19 nt, Artificial Sequence
  Description of Artificial Sequence: Synthetic oligonucleotide
ugguugccuuuccccgguc

SEQ ID NO: 2928089 - RNA, 19 nt, Artificial Sequence
  Description of Artificial Sequence: Synthetic oligonucleotide
cccacacaugcuccuuggg

SEQ ID NO: 2928090 - RNA, 19 nt, Artificial Sequence
  Description of Artificial Sequence: Synthetic oligonucleotide
caagcacagggacuauggu

SEQ ID NO: 2928091 - RNA, 19 nt, Artificial Sequence
  Description of Artificial Sequence: Synthetic oligonucleotide
gggguugggccugaggcuc

SEQ ID NO: 2928092 - RNA, 19 nt, Artificial Sequence
  Description of Artificial Sequence: Synthetic oligonucleotide
gcagaaguugguauacccu

SEQ ID NO: 2928093 - RNA, 19 nt, Artificial Sequence
  Description of Artificial Sequence: Synthetic oligonucleotide
augaaggcagaggcacuuu

SEQ ID NO: 2928094 - RNA, 19 nt, Artificial Sequence
  Description of Artificial Sequence: Synthetic oligonucleotide
gccagcaacuucaggguga

SEQ ID NO: 2928095 - RNA, 19 nt, Artificial Sequence
  Description of Artificial Sequence: Synthetic oligonucleotide
cacaggcugcagggcaccc

SEQ ID NO: 2928096 - RNA, 19 nt, Artificial Sequence
  Description of Artificial Sequence: Synthetic oligonucleotide
ggugugguccacgcaagaa

SEQ ID NO: 2928097 - RNA, 19 nt, Artificial Sequence
  Description of Artificial Sequence: Synthetic oligonucleotide
caccuccucgggguugggc

SEQ ID NO: 2928098 - RNA, 19 nt, Artificial Sequence
  Description of Artificial Sequence: Synthetic oligonucleotide
aguagccugcucagaugaa

SEQ ID NO: 2928099 - RNA, 19 nt, Artificial Sequence
  Description of Artificial Sequence: Synthetic oligonucleotide
ccacgcaagaagacaggca

SEQ ID NO: 2928100 - RNA, 19 nt, Artificial Sequence
  Description of Artificial Sequence: Synthetic oligonucleotide
ccuggcagaaguugguaua

SEQ ID NO: 2928101 - RNA, 19 nt, Artificial Sequence
  Description of Artificial Sequence: Synthetic oligonucleotide
gaggcacuuuaaaggccaa

SEQ ID NO: 2928102 - RNA, 19 nt, Artificial Sequence
  Description of Artificial Sequence: Synthetic oligonucleotide
cugaggcucugcagaucca

SEQ ID NO: 2928103 - RNA, 19 nt, Artificial Sequence
  Description of Artificial Sequence: Synthetic oligonucleotide
acgcaagaagacaggcauu

SEQ ID NO: 2928104 - RNA, 19 nt, Artificial Sequence
  Description of Artificial Sequence: Synthetic oligonucleotide
aguggccacccuggcagaa

SEQ ID NO: 2928105 - RNA, 19 nt, Artificial Sequence
  Description of Artificial Sequence: Synthetic oligonucleotide
ggcaccucuaggcccagcu

SEQ ID NO: 2928106 - RNA, 19 nt, Artificial Sequence
  Description of Artificial Sequence: Synthetic oligonucleotide
uagcuagguagggcugaua

SEQ ID NO: 2928107 - RNA, 19 nt, Artificial Sequence
  Description of Artificial Sequence: Synthetic oligonucleotide
ugacagcugugaggcccca

SEQ ID NO: 2928108 - RNA, 19 nt, Artificial Sequence
  Description of Artificial Sequence: Synthetic oligonucleotide
gcccacguuggcaagcaca

SEQ ID NO: 2928109 - RNA, 19 nt, Artificial Sequence
  Description of Artificial Sequence: Synthetic oligonucleotide
acccuggcagaaguuggua

SEQ ID NO: 2928110 - RNA, 19 nt, Artificial Sequence
  Description of Artificial Sequence: Synthetic oligonucleotide
gggccagcaacuucagggu

SEQ ID NO: 2928111 - RNA, 19 nt, Artificial Sequence
  Description of Artificial Sequence: Synthetic oligonucleotide
cuggaguagccugcucaga

SEQ ID NO: 2928112 - RNA, 19 nt, Artificial Sequence
  Description of Artificial Sequence: Synthetic oligonucleotide
cagauccagugggcccacg

SEQ ID NO: 2928113 - RNA, 19 nt, Artificial Sequence
  Description of Artificial Sequence: Synthetic oligonucleotide
guugggccugaggcucugc

SEQ ID NO: 2928114 - RNA, 19 nt, Artificial Sequence
  Description of Artificial Sequence: Synthetic oligonucleotide
gaggccccagacacggugu

SEQ ID NO: 2928115 - RNA, 19 nt, Artificial Sequence
  Description of Artificial Sequence: Synthetic oligonucleotide
gaggcucugcagauccagu

SEQ ID NO: 2928116 - RNA, 19 nt, Artificial Sequence
  Description of Artificial Sequence: Synthetic oligonucleotide
cucuaggcccagcuccucu

SEQ ID NO: 2928117 - RNA, 19 nt, Artificial Sequence
  Description of Artificial Sequence: Synthetic oligonucleotide
ggccccagacacggugugg

SEQ ID NO: 2928118 - RNA, 19 nt, Artificial Sequence
  Description of Artificial Sequence: Synthetic oligonucleotide
ggcugcagggcaccccaca

SEQ ID NO: 2928119 - RNA, 19 nt, Artificial Sequence
  Description of Artificial Sequence: Synthetic oligonucleotide
ggccagagacaguucaaau

SEQ ID NO: 2928120 - RNA, 19 nt, Artificial Sequence
  Description of Artificial Sequence: Synthetic oligonucleotide
aggcugcagggcaccccac

SEQ ID NO: 2928121 - RNA, 19 nt, Artificial Sequence
  Description of Artificial Sequence: Synthetic oligonucleotide
cccuugguucugugucugc

SEQ ID NO: 2928122 - RNA, 19 nt, Artificial Sequence
  Description of Artificial Sequence: Synthetic oligonucleotide
ccuugguucugugucugca

SEQ ID NO: 2928123 - RNA, 19 nt, Artificial Sequence
  Description of Artificial Sequence: Synthetic oligonucleotide
ugggcaccucuaggcccag

SEQ ID NO: 2928124 - RNA, 19 nt, Artificial Sequence
  Description of Artificial Sequence: Synthetic oligonucleotide
ugccaggggccagcaacuu

SEQ ID NO: 2928125 - RNA, 19 nt, Artificial Sequence
  Description of Artificial Sequence: Synthetic oligonucleotide
gccaggggccagcaacuuc

SEQ ID NO: 2928126 - RNA, 19 nt, Artificial Sequence
  Description of Artificial Sequence: Synthetic oligonucleotide
agggcaccccacacaugcu

SEQ ID NO: 2928127 - RNA, 19 nt, Artificial Sequence
  Description of Artificial Sequence: Synthetic oligonucleotide
uggcaagcacagggacuau

SEQ ID NO: 2928128 - RNA, 19 nt, Artificial Sequence
  Description of Artificial Sequence: Synthetic oligonucleotide
ggcaccucuugaauagcua

SEQ ID NO: 2928129 - RNA, 19 nt, Artificial Sequence
  Description of Artificial Sequence: Synthetic oligonucleotide
ccagugggcccacguuggc

SEQ ID NO: 2928130 - RNA, 19 nt, Artificial Sequence
  Description of Artificial Sequence: Synthetic oligonucleotide
uccucgggguugggccuga

SEQ ID NO: 2928131 - RNA, 19 nt, Artificial Sequence
  Description of Artificial Sequence: Synthetic oligonucleotide
cagacacggugugguccac

SEQ ID NO: 2928132 - RNA, 19 nt, Artificial Sequence
  Description of Artificial Sequence: Synthetic oligonucleotide
ccacguuggcaagcacagg

SEQ ID NO: 2928133 - RNA, 19 nt, Artificial Sequence
  Description of Artificial Sequence: Synthetic oligonucleotide
gguauacccuugguucugu

SEQ ID NO: 2928134 - RNA, 19 nt, Artificial Sequence
  Description of Artificial Sequence: Synthetic oligonucleotide
ccucuugaauagcuaggua

SEQ ID NO: 2928135 - RNA, 19 nt, Artificial Sequence
  Description of Artificial Sequence: Synthetic oligonucleotide
gcagcaggugggccagaga

SEQ ID NO: 2928136 - RNA, 19 nt, Artificial Sequence
  Description of Artificial Sequence: Synthetic oligonucleotide
caugcuccuugggcaccuc

SEQ ID NO: 2928137 - RNA, 19 nt, Artificial Sequence
  Description of Artificial Sequence: Synthetic oligonucleotide
gcucuggaguagccugcuc

SEQ ID NO: 2928138 - RNA, 19 nt, Artificial Sequence
  Description of Artificial Sequence: Synthetic oligonucleotide
cggaaguggccacccuggc

SEQ ID NO: 2928139 - RNA, 19 nt, Artificial Sequence
  Description of Artificial Sequence: Synthetic oligonucleotide
gguugggccugaggcucug

SEQ ID NO: 2928140 - RNA, 19 nt, Artificial Sequence
  Description of Artificial Sequence: Synthetic oligonucleotide
ggcccagcuccucuugagu

SEQ ID NO: 2928141 - RNA, 19 nt, Artificial Sequence
  Description of Artificial Sequence: Synthetic oligonucleotide
cagggacuaugguugccuu

SEQ ID NO: 2928142 - RNA, 19 nt, Artificial Sequence
  Description of Artificial Sequence: Synthetic oligonucleotide
gcaagaagacaggcauugu

SEQ ID NO: 2928143 - RNA, 19 nt, Artificial Sequence
  Description of Artificial Sequence: Synthetic oligonucleotide
ggcccacguuggcaagcac

SEQ ID NO: 2928144 - RNA, 19 nt, Artificial Sequence
  Description of Artificial Sequence: Synthetic oligonucleotide
gggcccacguuggcaagca

SEQ ID NO: 2928145 - RNA, 19 nt, Artificial Sequence
  Description of Artificial Sequence: Synthetic oligonucleotide
ccagcaacuucagggugaa

SEQ ID NO: 2928146 - RNA, 19 nt, Artificial Sequence
  Description of Artificial Sequence: Synthetic oligonucleotide
ggccugaggcucugcagau

SEQ ID NO: 2928147 - RNA, 19 nt, Artificial Sequence
  Description of Artificial Sequence: Synthetic oligonucleotide
gccuuuccccggucauaca

SEQ ID NO: 2928148 - RNA, 19 nt, Artificial Sequence
  Description of Artificial Sequence: Synthetic oligonucleotide
ccccagacacggugugguc

SEQ ID NO: 2928149 - RNA, 19 nt, Artificial Sequence
  Description of Artificial Sequence: Synthetic oligonucleotide
caacuccuaggcaccucuu

SEQ ID NO: 2928150 - RNA, 19 nt, Artificial Sequence
  Description of Artificial Sequence: Synthetic oligonucleotide
gcagggcaccccacacaug

SEQ ID NO: 2928151 - RNA, 19 nt, Artificial Sequence
  Description of Artificial Sequence: Synthetic oligonucleotide
gcagauccagugggcccac

SEQ ID NO: 2928152 - RNA, 19 nt, Artificial Sequence
  Description of Artificial Sequence: Synthetic oligonucleotide
gccugaggcucugcagauc

SEQ ID NO: 2928153 - RNA, 19 nt, Artificial Sequence
  Description of Artificial Sequence: Synthetic oligonucleotide
gcaccccacacaugcuccu

SEQ ID NO: 2928154 - RNA, 19 nt, Artificial Sequence
  Description of Artificial Sequence: Synthetic oligonucleotide
cccuggcagaaguugguau

SEQ ID NO: 2928155 - RNA, 19 nt, Artificial Sequence
  Description of Artificial Sequence: Synthetic oligonucleotide
cggucauacacaggcugca

SEQ ID NO: 2928156 - RNA, 19 nt, Artificial Sequence
  Description of Artificial Sequence: Synthetic oligonucleotide
cauccaccuccucgggguu

SEQ ID NO: 2928157 - RNA, 19 nt, Artificial Sequence
  Description of Artificial Sequence: Synthetic oligonucleotide
ggccaagccucaacuccua

SEQ ID NO: 2928158 - RNA, 19 nt, Artificial Sequence
  Description of Artificial Sequence: Synthetic oligonucleotide
ccucuaggcccagcuccuc

SEQ ID NO: 2928159 - RNA, 19 nt, Artificial Sequence
  Description of Artificial Sequence: Synthetic oligonucleotide
caggugggccagagacagu

SEQ ID NO: 2928160 - RNA, 19 nt, Artificial Sequence
  Description of Artificial Sequence: Synthetic oligonucleotide
gggcaccucuaggcccagc

SEQ ID NO: 2928161 - RNA, 19 nt, Artificial Sequence
  Description of Artificial Sequence: Synthetic oligonucleotide
ccuccucgggguugggccu

SEQ ID NO: 2928162 - RNA, 19 nt, Artificial Sequence
  Description of Artificial Sequence: Synthetic oligonucleotide
cggugugguccacgcaaga

SEQ ID NO: 2928163 - RNA, 19 nt, Artificial Sequence
  Description of Artificial Sequence: Synthetic oligonucleotide
cugcagcaggugggccaga

SEQ ID NO: 2928164 - RNA, 19 nt, Artificial Sequence
  Description of Artificial Sequence: Synthetic oligonucleotide
gugaggccccagacacggu

SEQ ID NO: 2928165 - RNA, 19 nt, Artificial Sequence
  Description of Artificial Sequence: Synthetic oligonucleotide
ccucaacuccuaggcaccu

SEQ ID NO: 2928166 - RNA, 19 nt, Artificial Sequence
  Description of Artificial Sequence: Synthetic oligonucleotide
ggguugggccugaggcucu

SEQ ID NO: 2928167 - RNA, 19 nt, Artificial Sequence
  Description of Artificial Sequence: Synthetic oligonucleotide
cgggguugggccugaggcu

SEQ ID NO: 2928168 - RNA, 19 nt, Artificial Sequence
  Description of Artificial Sequence: Synthetic oligonucleotide
ccaccuccucgggguuggg

SEQ ID NO: 2928169 - RNA, 19 nt, Artificial Sequence
  Description of Artificial Sequence: Synthetic oligonucleotide
caccccacacaugcuccuu

SEQ ID NO: 2928170 - RNA, 19 nt, Artificial Sequence
  Description of Artificial Sequence: Synthetic oligonucleotide
ccccggucauacacaggcu

SEQ ID NO: 2928171 - RNA, 19 nt, Artificial Sequence
  Description of Artificial Sequence: Synthetic oligonucleotide
cagcaacuucagggugaau

SEQ ID NO: 2928172 - RNA, 19 nt, Artificial Sequence
  Description of Artificial Sequence: Synthetic oligonucleotide
ggccacccuggcagaaguu

SEQ ID NO: 2928173 - RNA, 19 nt, Artificial Sequence
  Description of Artificial Sequence: Synthetic oligonucleotide
guuaaguccacauucaggg

SEQ ID NO: 2928174 - RNA, 19 nt, Artificial Sequence
  Description of Artificial Sequence: Synthetic oligonucleotide
aucuuuugggaccacaucc

SEQ ID NO: 2928175 - RNA, 19 nt, Artificial Sequence
  Description of Artificial Sequence: Synthetic oligonucleotide
uugaugguagcaauagccg

SEQ ID NO: 2928176 - RNA, 19 nt, Artificial Sequence
  Description of Artificial Sequence: Synthetic oligonucleotide
uggaauuccguuaagucca

SEQ ID NO: 2928177 - RNA, 19 nt, Artificial Sequence
  Description of Artificial Sequence: Synthetic oligonucleotide
uuaauacccaccuuaaauc

SEQ ID NO: 2928178 - RNA, 19 nt, Artificial Sequence
  Description of Artificial Sequence: Synthetic oligonucleotide
cuuaaauccaguugggcac

SEQ ID NO: 2928179 - RNA, 19 nt, Artificial Sequence
  Description of Artificial Sequence: Synthetic oligonucleotide
uaauacccaccuuaaaucc

SEQ ID NO: 2928180 - RNA, 19 nt, Artificial Sequence
  Description of Artificial Sequence: Synthetic oligonucleotide
aauuggauagugcgcuugg

SEQ ID NO: 2928181 - RNA, 19 nt, Artificial Sequence
  Description of Artificial Sequence: Synthetic oligonucleotide
augacuggggcguaggugg

SEQ ID NO: 2928182 - RNA, 19 nt, Artificial Sequence
  Description of Artificial Sequence: Synthetic oligonucleotide
cuggaauuccguuaagucc

SEQ ID NO: 2928183 - RNA, 19 nt, Artificial Sequence
  Description of Artificial Sequence: Synthetic oligonucleotide
ucagcugagaugacugggg

SEQ ID NO: 2928184 - RNA, 19 nt, Artificial Sequence
  Description of Artificial Sequence: Synthetic oligonucleotide
ucacacuugaccauuuggu

SEQ ID NO: 2928185 - RNA, 19 nt, Artificial Sequence
  Description of Artificial Sequence: Synthetic oligonucleotide
cacuugaccauuugguugg

SEQ ID NO: 2928186 - RNA, 19 nt, Artificial Sequence
  Description of Artificial Sequence: Synthetic oligonucleotide
aauuccguuaaguccacau

SEQ ID NO: 2928187 - RNA, 19 nt, Artificial Sequence
  Description of Artificial Sequence: Synthetic oligonucleotide
uuccguuaaguccacauuc

SEQ ID NO: 2928188 - RNA, 19 nt, Artificial Sequence
  Description of Artificial Sequence: Synthetic oligonucleotide
gaugguagcaauagccgcg

SEQ ID NO: 2928189 - RNA, 19 nt, Artificial Sequence
  Description of Artificial Sequence: Synthetic oligonucleotide
uucucagcugagaugacug

SEQ ID NO: 2928190 - RNA, 19 nt, Artificial Sequence
  Description of Artificial Sequence: Synthetic oligonucleotide
ugaccauuugguuggcugg

SEQ ID NO: 2928191 - RNA, 19 nt, Artificial Sequence
  Description of Artificial Sequence: Synthetic oligonucleotide
ucuuuugggaccacauccc

SEQ ID NO: 2928192 - RNA, 19 nt, Artificial Sequence
  Description of Artificial Sequence: Synthetic oligonucleotide
ugguaguuaauacccaccu

SEQ ID NO: 2928193 - RNA, 19 nt, Artificial Sequence
  Description of Artificial Sequence: Synthetic oligonucleotide
uccaguugggcaccaaucc

SEQ ID NO: 2928194 - RNA, 19 nt, Artificial Sequence
  Description of Artificial Sequence: Synthetic oligonucleotide
ucuggaauuccguuaaguc

SEQ ID NO: 2928195 - RNA, 19 nt, Artificial Sequence
  Description of Artificial Sequence: Synthetic oligonucleotide
acacuugaccauuugguug

SEQ ID NO: 2928196 - RNA, 19 nt, Artificial Sequence
  Description of Artificial Sequence: Synthetic oligonucleotide
uccacaaauuggauagugc

SEQ ID NO: 2928197 - RNA, 19 nt, Artificial Sequence
  Description of Artificial Sequence: Synthetic oligonucleotide
cacaaauuggauagugcgc

SEQ ID NO: 2928198 - RNA, 19 nt, Artificial Sequence
  Description of Artificial Sequence: Synthetic oligonucleotide
acaaauuggauagugcgcu

SEQ ID NO: 2928199 - RNA, 19 nt, Artificial Sequence
  Description of Artificial Sequence: Synthetic oligonucleotide
caugguaugccuucucagc

SEQ ID NO: 2928200 - RNA, 19 nt, Artificial Sequence
  Description of Artificial Sequence: Synthetic oligonucleotide
aauagccgcguugacaucu

SEQ ID NO: 2928201 - RNA, 19 nt, Artificial Sequence
  Description of Artificial Sequence: Synthetic oligonucleotide
aaguccacauucagggccc

SEQ ID NO: 2928202 - RNA, 19 nt, Artificial Sequence
  Description of Artificial Sequence: Synthetic oligonucleotide
ucaugguaugccuucucag

SEQ ID NO: 2928203 - RNA, 19 nt, Artificial Sequence
  Description of Artificial Sequence: Synthetic oligonucleotide
guaguuaauacccaccuua

SEQ ID NO: 2928204 - RNA, 19 nt, Artificial Sequence
  Description of Artificial Sequence: Synthetic oligonucleotide
auguauuugccauggcgag

SEQ ID NO: 2928205 - RNA, 19 nt, Artificial Sequence
  Description of Artificial Sequence: Synthetic oligonucleotide
ccacaaauuggauagugcg

SEQ ID NO: 2928206 - RNA, 19 nt, Artificial Sequence
  Description of Artificial Sequence: Synthetic oligonucleotide
aaauuggauagugcgcuug

SEQ ID NO: 2928207 - RNA, 19 nt, Artificial Sequence
  Description of Artificial Sequence: Synthetic oligonucleotide
cauuugguuggcuggcucg

SEQ ID NO: 2928208 - RNA, 19 nt, Artificial Sequence
  Description of Artificial Sequence: Synthetic oligonucleotide
acuuuggccaggucucccc

SEQ ID NO: 2928209 - RNA, 19 nt, Artificial Sequence
  Description of Artificial Sequence: Synthetic oligonucleotide
ccaccuuaaauccaguugg

SEQ ID NO: 2928210 - RNA, 19 nt, Artificial Sequence
  Description of Artificial Sequence: Synthetic oligonucleotide
uccguuaaguccacauuca

SEQ ID NO: 2928211 - RNA, 19 nt, Artificial Sequence
  Description of Artificial Sequence: Synthetic oligonucleotide
guuaauacccaccuuaaau

SEQ ID NO: 2928212 - RNA, 19 nt, Artificial Sequence
  Description of Artificial Sequence: Synthetic oligonucleotide
uaguuaauacccaccuuaa

SEQ ID NO: 2928213 - RNA, 19 nt, Artificial Sequence
  Description of Artificial Sequence: Synthetic oligonucleotide
accuuaaauccaguugggc

SEQ ID NO: 2928214 - RNA, 19 nt, Artificial Sequence
  Description of Artificial Sequence: Synthetic oligonucleotide
uuaaguccacauucagggc

SEQ ID NO: 2928215 - RNA, 19 nt, Artificial Sequence
  Description of Artificial Sequence: Synthetic oligonucleotide
ucgaagcaggcauugguga

SEQ ID NO: 2928216 - RNA, 19 nt, Artificial Sequence
  Description of Artificial Sequence: Synthetic oligonucleotide
ugcacuuuggccaggucuc

SEQ ID NO: 2928217 - RNA, 19 nt, Artificial Sequence
  Description of Artificial Sequence: Synthetic oligonucleotide
caaaccucgagggaggcag

SEQ ID NO: 2928218 - RNA, 19 nt, Artificial Sequence
  Description of Artificial Sequence: Synthetic oligonucleotide
ucgagggaggcagugauug

SEQ ID NO: 2928219 - RNA, 19 nt, Artificial Sequence
  Description of Artificial Sequence: Synthetic oligonucleotide
cauccaaaccucgagggag

SEQ ID NO: 2928220 - RNA, 19 nt, Artificial Sequence
  Description of Artificial Sequence: Synthetic oligonucleotide
agcccucugcacuuuggcc

SEQ ID NO: 2928221 - RNA, 19 nt, Artificial Sequence
  Description of Artificial Sequence: Synthetic oligonucleotide
uuaaauccaguugggcacc

SEQ ID NO: 2928222 - RNA, 19 nt, Artificial Sequence
  Description of Artificial Sequence: Synthetic oligonucleotide
agcugagaugacuggggcg

SEQ ID NO: 2928223 - RNA, 19 nt, Artificial Sequence
  Description of Artificial Sequence: Synthetic oligonucleotide
aauccaguugggcaccaau

SEQ ID NO: 2928224 - RNA, 19 nt, Artificial Sequence
  Description of Artificial Sequence: Synthetic oligonucleotide
uggucuggaauuccguuaa

SEQ ID NO: 2928225 - RNA, 19 nt, Artificial Sequence
  Description of Artificial Sequence: Synthetic oligonucleotide
ggcaccaauccacaaauug

SEQ ID NO: 2928226 - RNA, 19 nt, Artificial Sequence
  Description of Artificial Sequence: Synthetic oligonucleotide
aauacccaccuuaaaucca

SEQ ID NO: 2928227 - RNA, 19 nt, Artificial Sequence
  Description of Artificial Sequence: Synthetic oligonucleotide
cucgaagcaggcauuggug

SEQ ID NO: 2928228 - RNA, 19 nt, Artificial Sequence
  Description of Artificial Sequence: Synthetic oligonucleotide
cuuuugggaccacaucccc

SEQ ID NO: 2928229 - RNA, 19 nt, Artificial Sequence
  Description of Artificial Sequence: Synthetic oligonucleotide
caccuuaaauccaguuggg

SEQ ID NO: 2928230 - RNA, 19 nt, Artificial Sequence
  Description of Artificial Sequence: Synthetic oligonucleotide
caccaauccacaaauugga

SEQ ID NO: 2928231 - RNA, 19 nt, Artificial Sequence
  Description of Artificial Sequence: Synthetic oligonucleotide
gaggguauggcaccgaggu

SEQ ID NO: 2928232 - RNA, 19 nt, Artificial Sequence
  Description of Artificial Sequence: Synthetic oligonucleotide
caguugggcaccaauccac

SEQ ID NO: 2928233 - RNA, 19 nt, Artificial Sequence
  Description of Artificial Sequence: Synthetic oligonucleotide
gcaccaauccacaaauugg

SEQ ID NO: 2928234 - RNA, 19 nt, Artificial Sequence
  Description of Artificial Sequence: Synthetic oligonucleotide
auggcaccgagguuggucu

SEQ ID NO: 2928235 - RNA, 19 nt, Artificial Sequence
  Description of Artificial Sequence: Synthetic oligonucleotide
uugggcaccaauccacaaa

SEQ ID NO: 2928236 - RNA, 19 nt, Artificial Sequence
  Description of Artificial Sequence: Synthetic oligonucleotide
guagcaauagccgcguuga

SEQ ID NO: 2928237 - RNA, 19 nt, Artificial Sequence
  Description of Artificial Sequence: Synthetic oligonucleotide
cucagcugagaugacuggg

SEQ ID NO: 2928238 - RNA, 19 nt, Artificial Sequence
  Description of Artificial Sequence: Synthetic oligonucleotide
ugguaugccuucucagcug

SEQ ID NO: 2928239 - RNA, 19 nt, Artificial Sequence
  Description of Artificial Sequence: Synthetic oligonucleotide
gaugacuggggcguaggug

SEQ ID NO: 2928240 - RNA, 19 nt, Artificial Sequence
  Description of Artificial Sequence: Synthetic oligonucleotide
aguggaugcgaggguaugg

SEQ ID NO: 2928241 - RNA, 19 nt, Artificial Sequence
  Description of Artificial Sequence: Synthetic oligonucleotide
auccacaaauuggauagug

SEQ ID NO: 2928242 - RNA, 19 nt, Artificial Sequence
  Description of Artificial Sequence: Synthetic oligonucleotide
auacccaccuuaaauccag

SEQ ID NO: 2928243 - RNA, 19 nt, Artificial Sequence
  Description of Artificial Sequence: Synthetic oligonucleotide
augcacacagcccucugca

SEQ ID NO: 2928244 - RNA, 19 nt, Artificial Sequence
  Description of Artificial Sequence: Synthetic oligonucleotide
uuggucuggaauuccguua

SEQ ID NO: 2928245 - RNA, 19 nt, Artificial Sequence
  Description of Artificial Sequence: Synthetic oligonucleotide
aguuaauacccaccuuaaa

SEQ ID NO: 2928246 - RNA, 19 nt, Artificial Sequence
  Description of Artificial Sequence: Synthetic oligonucleotide
agugcgcuuggucuugaug

SEQ ID NO: 2928247 - RNA, 19 nt, Artificial Sequence
  Description of Artificial Sequence: Synthetic oligonucleotide
gguacaacaugcagcaggc

SEQ ID NO: 2928248 - RNA, 19 nt, Artificial Sequence
  Description of Artificial Sequence: Synthetic oligonucleotide
gguagcaauagccgcguug

SEQ ID NO: 2928249 - RNA, 19 nt, Artificial Sequence
  Description of Artificial Sequence: Synthetic oligonucleotide
ggggcugguaguuaauacc

SEQ ID NO: 2928250 - RNA, 19 nt, Artificial Sequence
  Description of Artificial Sequence: Synthetic oligonucleotide
ggguauggcaccgagguug

SEQ ID NO: 2928251 - RNA, 19 nt, Artificial Sequence
  Description of Artificial Sequence: Synthetic oligonucleotide
auccaguugggcaccaauc

SEQ ID NO: 2928252 - RNA, 19 nt, Artificial Sequence
  Description of Artificial Sequence: Synthetic oligonucleotide
agcaauagccgcguugaca

SEQ ID NO: 2928253 - RNA, 19 nt, Artificial Sequence
  Description of Artificial Sequence: Synthetic oligonucleotide
cccauccaaaccucgaggg

SEQ ID NO: 2928254 - RNA, 19 nt, Artificial Sequence
  Description of Artificial Sequence: Synthetic oligonucleotide
ugccuucucagcugagaug

SEQ ID NO: 2928255 - RNA, 19 nt, Artificial Sequence
  Description of Artificial Sequence: Synthetic oligonucleotide
auuccguuaaguccacauu

SEQ ID NO: 2928256 - RNA, 19 nt, Artificial Sequence
  Description of Artificial Sequence: Synthetic oligonucleotide
gagaugacuggggcguagg

SEQ ID NO: 2928257 - RNA, 19 nt, Artificial Sequence
  Description of Artificial Sequence: Synthetic oligonucleotide
accgagguuggucuggaau

SEQ ID NO: 2928258 - RNA, 19 nt, Artificial Sequence
  Description of Artificial Sequence: Synthetic oligonucleotide
ccuuaaauccaguugggca

SEQ ID NO: 2928259 - RNA, 19 nt, Artificial Sequence
  Description of Artificial Sequence: Synthetic oligonucleotide
agugggaaguggaugcgag

SEQ ID NO: 2928260 - RNA, 19 nt, Artificial Sequence
  Description of Artificial Sequence: Synthetic oligonucleotide
gugggaaguggaugcgagg

SEQ ID NO: 2928261 - RNA, 19 nt, Artificial Sequence
  Description of Artificial Sequence: Synthetic oligonucleotide
gauagugcgcuuggucuug

SEQ ID NO: 2928262 - RNA, 19 nt, Artificial Sequence
  Description of Artificial Sequence: Synthetic oligonucleotide
aauccacaaauuggauagu

SEQ ID NO: 2928263 - RNA, 19 nt, Artificial Sequence
  Description of Artificial Sequence: Synthetic oligonucleotide
uauggcaccgagguugguc

SEQ ID NO: 2928264 - RNA, 19 nt, Artificial Sequence
  Description of Artificial Sequence: Synthetic oligonucleotide
caucuuuugggaccacauc

SEQ ID NO: 2928265 - RNA, 19 nt, Artificial Sequence
  Description of Artificial Sequence: Synthetic oligonucleotide
cguuaaguccacauucagg

SEQ ID NO: 2928266 - RNA, 19 nt, Artificial Sequence
  Description of Artificial Sequence: Synthetic oligonucleotide
cagcugagaugacuggggc

SEQ ID NO: 2928267 - RNA, 19 nt, Artificial Sequence
  Description of Artificial Sequence: Synthetic oligonucleotide
auccaaaccucgagggagg

SEQ ID NO: 2928268 - RNA, 19 nt, Artificial Sequence
  Description of Artificial Sequence: Synthetic oligonucleotide
gaccauuugguuggcuggc

SEQ ID NO: 2928269 - RNA, 19 nt, Artificial Sequence
  Description of Artificial Sequence: Synthetic oligonucleotide
aaguggaugcgaggguaug

SEQ ID NO: 2928270 - RNA, 19 nt, Artificial Sequence
  Description of Artificial Sequence: Synthetic oligonucleotide
uggaugcgaggguauggca

SEQ ID NO: 2928271 - RNA, 19 nt, Artificial Sequence
  Description of Artificial Sequence: Synthetic oligonucleotide
ggcguagguggccaguggg

SEQ ID NO: 2928272 - RNA, 19 nt, Artificial Sequence
  Description of Artificial Sequence: Synthetic oligonucleotide
cgcguugacaucuuuuggg

SEQ ID NO: 2928273 - RNA, 19 nt, Artificial Sequence
  Description of Artificial Sequence: Synthetic oligonucleotide
gcagugauugaugacacga

SEQ ID NO: 2928274 - RNA, 19 nt, Artificial Sequence
  Description of Artificial Sequence: Synthetic oligonucleotide
uggcgagggucacacuuga

SEQ ID NO: 2928275 - RNA, 19 nt, Artificial Sequence
  Description of Artificial Sequence: Synthetic oligonucleotide
cgguacaacaugcagcagg

SEQ ID NO: 2928276 - RNA, 19 nt, Artificial Sequence
  Description of Artificial Sequence: Synthetic oligonucleotide
acaacaugcagcaggccau

SEQ ID NO: 2928277 - RNA, 19 nt, Artificial Sequence
  Description of Artificial Sequence: Synthetic oligonucleotide
agaugacuggggcguaggu

SEQ ID NO: 2928278 - RNA, 19 nt, Artificial Sequence
  Description of Artificial Sequence: Synthetic oligonucleotide
cccaccuuaaauccaguug

SEQ ID NO: 2928279 - RNA, 19 nt, Artificial Sequence
  Description of Artificial Sequence: Synthetic oligonucleotide
acaucuuuugggaccacau

SEQ ID NO: 2928280 - RNA, 19 nt, Artificial Sequence
  Description of Artificial Sequence: Synthetic oligonucleotide
acuugaccauuugguuggc

SEQ ID NO: 2928281 - RNA, 19 nt, Artificial Sequence
  Description of Artificial Sequence: Synthetic oligonucleotide
ugacuggggcguagguggc

SEQ ID NO: 2928282 - RNA, 19 nt, Artificial Sequence
  Description of Artificial Sequence: Synthetic oligonucleotide
gccuucucagcugagauga

SEQ ID NO: 2928283 - RNA, 19 nt, Artificial Sequence
  Description of Artificial Sequence: Synthetic oligonucleotide
gccgcguugacaucuuuug

SEQ ID NO: 2928284 - RNA, 19 nt, Artificial Sequence
  Description of Artificial Sequence: Synthetic oligonucleotide
aaccucgagggaggcagug

SEQ ID NO: 2928285 - RNA, 19 nt, Artificial Sequence
  Description of Artificial Sequence: Synthetic oligonucleotide
auuugguuggcuggcucga

SEQ ID NO: 2928286 - RNA, 19 nt, Artificial Sequence
  Description of Artificial Sequence: Synthetic oligonucleotide
uccaaaccucgagggaggc

SEQ ID NO: 2928287 - RNA, 19 nt, Artificial Sequence
  Description of Artificial Sequence: Synthetic oligonucleotide
gguaugccuucucagcuga

SEQ ID NO: 2928288 - RNA, 19 nt, Artificial Sequence
  Description of Artificial Sequence: Synthetic oligonucleotide
augguagcaauagccgcgu

SEQ ID NO: 2928289 - RNA, 19 nt, Artificial Sequence
  Description of Artificial Sequence: Synthetic oligonucleotide
aacaugcagcaggccaugu

SEQ ID NO: 2928290 - RNA, 19 nt, Artificial Sequence
  Description of Artificial Sequence: Synthetic oligonucleotide
gcaauagccgcguugacau

SEQ ID NO: 2928291 - RNA, 19 nt, Artificial Sequence
  Description of Artificial Sequence: Synthetic oligonucleotide
uagcaauagccgcguugac

SEQ ID NO: 2928292 - RNA, 19 nt, Artificial Sequence
  Description of Artificial Sequence: Synthetic oligonucleotide
gguauggcaccgagguugg

SEQ ID NO: 2928293 - RNA, 19 nt, Artificial Sequence
  Description of Artificial Sequence: Synthetic oligonucleotide
uggcucgaagcaggcauug

SEQ ID NO: 2928294 - RNA, 19 nt, Artificial Sequence
  Description of Artificial Sequence: Synthetic oligonucleotide
ccccgguacaacaugcagc

SEQ ID NO: 2928295 - RNA, 19 nt, Artificial Sequence
  Description of Artificial Sequence: Synthetic oligonucleotide
uacccaccuuaaauccagu

SEQ ID NO: 2928296 - RNA, 19 nt, Artificial Sequence
  Description of Artificial Sequence: Synthetic oligonucleotide
acccaccuuaaauccaguu

SEQ ID NO: 2928297 - RNA, 19 nt, Artificial Sequence
  Description of Artificial Sequence: Synthetic oligonucleotide
gcguugacaucuuuuggga

SEQ ID NO: 2928298 - RNA, 19 nt, Artificial Sequence
  Description of Artificial Sequence: Synthetic oligonucleotide
cugcacuuuggccaggucu

SEQ ID NO: 2928299 - RNA, 19 nt, Artificial Sequence
  Description of Artificial Sequence: Synthetic oligonucleotide
aguugggcaccaauccaca

SEQ ID NO: 2928300 - RNA, 19 nt, Artificial Sequence
  Description of Artificial Sequence: Synthetic oligonucleotide
cccgguacaacaugcagca

SEQ ID NO: 2928301 - RNA, 19 nt, Artificial Sequence
  Description of Artificial Sequence: Synthetic oligonucleotide
gcccucugcacuuuggcca

SEQ ID NO: 2928302 - RNA, 19 nt, Artificial Sequence
  Description of Artificial Sequence: Synthetic oligonucleotide
gggaggcagugauugauga

SEQ ID NO: 2928303 - RNA, 19 nt, Artificial Sequence
  Description of Artificial Sequence: Synthetic oligonucleotide
uggccagugggaaguggau

SEQ ID NO: 2928304 - RNA, 19 nt, Artificial Sequence
  Description of Artificial Sequence: Synthetic oligonucleotide
agggaggcagugauugaug

SEQ ID NO: 2928305 - RNA, 19 nt, Artificial Sequence
  Description of Artificial Sequence: Synthetic oligonucleotide
acagcccucugcacuuugg

SEQ ID NO: 2928306 - RNA, 19 nt, Artificial Sequence
  Description of Artificial Sequence: Synthetic oligonucleotide
ucugcacuuuggccagguc

SEQ ID NO: 2928307 - RNA, 19 nt, Artificial Sequence
  Description of Artificial Sequence: Synthetic oligonucleotide
gauggcggugguguugcuc

SEQ ID NO: 2928308 - RNA, 19 nt, Artificial Sequence
  Description of Artificial Sequence: Synthetic oligonucleotide
augcgaggguauggcaccg

SEQ ID NO: 2928309 - RNA, 19 nt, Artificial Sequence
  Description of Artificial Sequence: Synthetic oligonucleotide
accaauccacaaauuggau

SEQ ID NO: 2928310 - RNA, 19 nt, Artificial Sequence
  Description of Artificial Sequence: Synthetic oligonucleotide
ccccauccaaaccucgagg

SEQ ID NO: 2928311 - RNA, 19 nt, Artificial Sequence
  Description of Artificial Sequence: Synthetic oligonucleotide
ccguuaaguccacauucag

SEQ ID NO: 2928312 - RNA, 19 nt, Artificial Sequence
  Description of Artificial Sequence: Synthetic oligonucleotide
guacaacaugcagcaggcc

SEQ ID NO: 2928313 - RNA, 19 nt, Artificial Sequence
  Description of Artificial Sequence: Synthetic oligonucleotide
caacaugcagcaggccaug

SEQ ID NO: 2928314 - RNA, 19 nt, Artificial Sequence
  Description of Artificial Sequence: Synthetic oligonucleotide
cacuuuggccaggucuccc

SEQ ID NO: 2928315 - RNA, 19 nt, Artificial Sequence
  Description of Artificial Sequence: Synthetic oligonucleotide
ccaauccacaaauuggaua

SEQ ID NO: 2928316 - RNA, 19 nt, Artificial Sequence
  Description of Artificial Sequence: Synthetic oligonucleotide
uuugguuggcuggcucgaa

SEQ ID NO: 2928317 - RNA, 19 nt, Artificial Sequence
  Description of Artificial Sequence: Synthetic oligonucleotide
guggccagugggaagugga

SEQ ID NO: 2928318 - RNA, 19 nt, Artificial Sequence
  Description of Artificial Sequence: Synthetic oligonucleotide
aaauccaguugggcaccaa

SEQ ID NO: 2928319 - RNA, 19 nt, Artificial Sequence
  Description of Artificial Sequence: Synthetic oligonucleotide
acuggggcguagguggcca

SEQ ID NO: 2928320 - RNA, 19 nt, Artificial Sequence
  Description of Artificial Sequence: Synthetic oligonucleotide
gccccauccaaaccucgag

SEQ ID NO: 2928321 - RNA, 19 nt, Artificial Sequence
  Description of Artificial Sequence: Synthetic oligonucleotide
guugggcaccaauccacaa

SEQ ID NO: 2928322 - RNA, 19 nt, Artificial Sequence
  Description of Artificial Sequence: Synthetic oligonucleotide
accauuugguuggcuggcu

SEQ ID NO: 2928323 - RNA, 19 nt, Artificial Sequence
  Description of Artificial Sequence: Synthetic oligonucleotide
agggccccauccaaaccuc

SEQ ID NO: 2928324 - RNA, 19 nt, Artificial Sequence
  Description of Artificial Sequence: Synthetic oligonucleotide
aaaccucgagggaggcagu

SEQ ID NO: 2928325 - RNA, 19 nt, Artificial Sequence
  Description of Artificial Sequence: Synthetic oligonucleotide
cacacuugaccauuugguu

SEQ ID NO: 2928326 - RNA, 19 nt, Artificial Sequence
  Description of Artificial Sequence: Synthetic oligonucleotide
ggucuggaauuccguuaag

SEQ ID NO: 2928327 - RNA, 19 nt, Artificial Sequence
  Description of Artificial Sequence: Synthetic oligonucleotide
uggcaccgagguuggucug

SEQ ID NO: 2928328 - RNA, 19 nt, Artificial Sequence
  Description of Artificial Sequence: Synthetic oligonucleotide
caauagccgcguugacauc

SEQ ID NO: 2928329 - RNA, 19 nt, Artificial Sequence
  Description of Artificial Sequence: Synthetic oligonucleotide
uggcggugguguugcucag

SEQ ID NO: 2928330 - RNA, 19 nt, Artificial Sequence
  Description of Artificial Sequence: Synthetic oligonucleotide
ccgcguugacaucuuuugg

SEQ ID NO: 2928331 - RNA, 19 nt, Artificial Sequence
  Description of Artificial Sequence: Synthetic oligonucleotide
gcgaggguauggcaccgag

SEQ ID NO: 2928332 - RNA, 19 nt, Artificial Sequence
  Description of Artificial Sequence: Synthetic oligonucleotide
auucagggccccauccaaa

SEQ ID NO: 2928333 - RNA, 19 nt, Artificial Sequence
  Description of Artificial Sequence: Synthetic oligonucleotide
gacuggggcguagguggcc

SEQ ID NO: 2928334 - RNA, 19 nt, Artificial Sequence
  Description of Artificial Sequence: Synthetic oligonucleotide
cguugacaucuuuugggac

SEQ ID NO: 2928335 - RNA, 19 nt, Artificial Sequence
  Description of Artificial Sequence: Synthetic oligonucleotide
gaauuccguuaaguccaca

SEQ ID NO: 2928336 - RNA, 19 nt, Artificial Sequence
  Description of Artificial Sequence: Synthetic oligonucleotide
ggcaccgagguuggucugg

SEQ ID NO: 2928337 - RNA, 19 nt, Artificial Sequence
  Description of Artificial Sequence: Synthetic oligonucleotide
cacagcccucugcacuuug

SEQ ID NO: 2928338 - RNA, 19 nt, Artificial Sequence
  Description of Artificial Sequence: Synthetic oligonucleotide
gagggaggcagugauugau

SEQ ID NO: 2928339 - RNA, 19 nt, Artificial Sequence
  Description of Artificial Sequence: Synthetic oligonucleotide
gcugagaugacuggggcgu

SEQ ID NO: 2928340 - RNA, 19 nt, Artificial Sequence
  Description of Artificial Sequence: Synthetic oligonucleotide
guaugccuucucagcugag

SEQ ID NO: 2928341 - RNA, 19 nt, Artificial Sequence
  Description of Artificial Sequence: Synthetic oligonucleotide
aggguauggcaccgagguu

SEQ ID NO: 2928342 - RNA, 19 nt, Artificial Sequence
  Description of Artificial Sequence: Synthetic oligonucleotide
cccucugcacuuuggccag

SEQ ID NO: 2928343 - RNA, 19 nt, Artificial Sequence
  Description of Artificial Sequence: Synthetic oligonucleotide
gggcguagguggccagugg

SEQ ID NO: 2928344 - RNA, 19 nt, Artificial Sequence
  Description of Artificial Sequence: Synthetic oligonucleotide
auagugcgcuuggucuuga

SEQ ID NO: 2928345 - RNA, 19 nt, Artificial Sequence
  Description of Artificial Sequence: Synthetic oligonucleotide
gcggugguguugcucagca

SEQ ID NO: 2928346 - RNA, 19 nt, Artificial Sequence
  Description of Artificial Sequence: Synthetic oligonucleotide
ugcgaggguauggcaccga

SEQ ID NO: 2928347 - RNA, 19 nt, Artificial Sequence
  Description of Artificial Sequence: Synthetic oligonucleotide
gcuggcucgaagcaggcau

SEQ ID NO: 2928348 - RNA, 19 nt, Artificial Sequence
  Description of Artificial Sequence: Synthetic oligonucleotide
gcgauggcggugguguugc

SEQ ID NO: 2928349 - RNA, 19 nt, Artificial Sequence
  Description of Artificial Sequence: Synthetic oligonucleotide
accucgagggaggcaguga

SEQ ID NO: 2928350 - RNA, 19 nt, Artificial Sequence
  Description of Artificial Sequence: Synthetic oligonucleotide
gcucgaagcaggcauuggu

SEQ ID NO: 2928351 - RNA, 19 nt, Artificial Sequence
  Description of Artificial Sequence: Synthetic oligonucleotide
ugguagcaauagccgcguu

SEQ ID NO: 2928352 - RNA, 19 nt, Artificial Sequence
  Description of Artificial Sequence: Synthetic oligonucleotide
ccauuugguuggcuggcuc

SEQ ID NO: 2928353 - RNA, 19 nt, Artificial Sequence
  Description of Artificial Sequence: Synthetic oligonucleotide
ggcucgaagcaggcauugg

SEQ ID NO: 2928354 - RNA, 19 nt, Artificial Sequence
  Description of Artificial Sequence: Synthetic oligonucleotide
cgaggguauggcaccgagg

SEQ ID NO: 2928355 - RNA, 19 nt, Artificial Sequence
  Description of Artificial Sequence: Synthetic oligonucleotide
uugccauggcgagggucac

SEQ ID NO: 2928356 - RNA, 19 nt, Artificial Sequence
  Description of Artificial Sequence: Synthetic oligonucleotide
ccagugggaaguggaugcg

SEQ ID NO: 2928357 - RNA, 19 nt, Artificial Sequence
  Description of Artificial Sequence: Synthetic oligonucleotide
uggggcguagguggccagu

SEQ ID NO: 2928358 - RNA, 19 nt, Artificial Sequence
  Description of Artificial Sequence: Synthetic oligonucleotide
ugccauggcgagggucaca

SEQ ID NO: 2928359 - RNA, 19 nt, Artificial Sequence
  Description of Artificial Sequence: Synthetic oligonucleotide
ccaguugggcaccaaucca

SEQ ID NO: 2928360 - RNA, 19 nt, Artificial Sequence
  Description of Artificial Sequence: Synthetic oligonucleotide
uagugcgcuuggucuugau

SEQ ID NO: 2928361 - RNA, 19 nt, Artificial Sequence
  Description of Artificial Sequence: Synthetic oligonucleotide
ggaauuccguuaaguccac

SEQ ID NO: 2928362 - RNA, 19 nt, Artificial Sequence
  Description of Artificial Sequence: Synthetic oligonucleotide
cagugggaaguggaugcga

SEQ ID NO: 2928363 - RNA, 19 nt, Artificial Sequence
  Description of Artificial Sequence: Synthetic oligonucleotide
augcagcaggccauguauu

SEQ ID NO: 2928364 - RNA, 19 nt, Artificial Sequence
  Description of Artificial Sequence: Synthetic oligonucleotide
gcacacagcccucugcacu

SEQ ID NO: 2928365 - RNA, 19 nt, Artificial Sequence
  Description of Artificial Sequence: Synthetic oligonucleotide
uagccgcguugacaucuuu

SEQ ID NO: 2928366 - RNA, 19 nt, Artificial Sequence
  Description of Artificial Sequence: Synthetic oligonucleotide
agccgcguugacaucuuuu

SEQ ID NO: 2928367 - RNA, 19 nt, Artificial Sequence
  Description of Artificial Sequence: Synthetic oligonucleotide
gguaguuaauacccaccuu

SEQ ID NO: 2928368 - RNA, 19 nt, Artificial Sequence
  Description of Artificial Sequence: Synthetic oligonucleotide
ggcugguaguuaauaccca

SEQ ID NO: 2928369 - RNA, 19 nt, Artificial Sequence
  Description of Artificial Sequence: Synthetic oligonucleotide
caaauuggauagugcgcuu

SEQ ID NO: 2928370 - RNA, 19 nt, Artificial Sequence
  Description of Artificial Sequence: Synthetic oligonucleotide
cacacagcccucugcacuu

SEQ ID NO: 2928371 - RNA, 19 nt, Artificial Sequence
  Description of Artificial Sequence: Synthetic oligonucleotide
ccauccaaaccucgaggga

SEQ ID NO: 2928372 - RNA, 19 nt, Artificial Sequence
  Description of Artificial Sequence: Synthetic oligonucleotide
ggauagugcgcuuggucuu

SEQ ID NO: 2928373 - RNA, 19 nt, Artificial Sequence
  Description of Artificial Sequence: Synthetic oligonucleotide
gggccccauccaaaccucg

SEQ ID NO: 2928374 - RNA, 19 nt, Artificial Sequence
  Description of Artificial Sequence: Synthetic oligonucleotide
ggggcguagguggccagug

SEQ ID NO: 2928375 - RNA, 19 nt, Artificial Sequence
  Description of Artificial Sequence: Synthetic oligonucleotide
gcacuuuggccaggucucc

SEQ ID NO: 2928376 - RNA, 19 nt, Artificial Sequence
  Description of Artificial Sequence: Synthetic oligonucleotide
auagccgcguugacaucuu

SEQ ID NO: 2928377 - RNA, 19 nt, Artificial Sequence
  Description of Artificial Sequence: Synthetic oligonucleotide
ccuucucagcugagaugac

SEQ ID NO: 2928378 - RNA, 19 nt, Artificial Sequence
  Description of Artificial Sequence: Synthetic oligonucleotide
cgagguuggucuggaauuc

SEQ ID NO: 2928379 - RNA, 19 nt, Artificial Sequence
  Description of Artificial Sequence: Synthetic oligonucleotide
ggcggugguguugcucagc

SEQ ID NO: 2928380 - RNA, 19 nt, Artificial Sequence
  Description of Artificial Sequence: Synthetic oligonucleotide
cuugaccauuugguuggcu

SEQ ID NO: 2928381 - RNA, 19 nt, Artificial Sequence
  Description of Artificial Sequence: Synthetic oligonucleotide
ccgagguuggucuggaauu

SEQ ID NO: 2928382 - RNA, 19 nt, Artificial Sequence
  Description of Artificial Sequence: Synthetic oligonucleotide
ggccccauccaaaccucga

SEQ ID NO: 2928383 - RNA, 19 nt, Artificial Sequence
  Description of Artificial Sequence: Synthetic oligonucleotide
cuggcucgaagcaggcauu

SEQ ID NO: 2928384 - RNA, 19 nt, Artificial Sequence
  Description of Artificial Sequence: Synthetic oligonucleotide
acacagcccucugcacuuu

SEQ ID NO: 2928385 - RNA, 19 nt, Artificial Sequence
  Description of Artificial Sequence: Synthetic oligonucleotide
cucugcacuuuggccaggu

SEQ ID NO: 2928386 - RNA, 19 nt, Artificial Sequence
  Description of Artificial Sequence: Synthetic oligonucleotide
cccagggaccacggugggg

SEQ ID NO: 2928387 - RNA, 19 nt, Artificial Sequence
  Description of Artificial Sequence: Synthetic oligonucleotide
cugagaugacuggggcgua

SEQ ID NO: 2928388 - RNA, 19 nt, Artificial Sequence
  Description of Artificial Sequence: Synthetic oligonucleotide
cucgagggaggcagugauu

SEQ ID NO: 2928389 - RNA, 19 nt, Artificial Sequence
  Description of Artificial Sequence: Synthetic oligonucleotide
caccgagguuggucuggaa

SEQ ID NO: 2928390 - RNA, 19 nt, Artificial Sequence
  Description of Artificial Sequence: Synthetic oligonucleotide
gcaccgagguuggucugga

SEQ ID NO: 2928391 - RNA, 19 nt, Artificial Sequence
  Description of Artificial Sequence: Synthetic oligonucleotide
ccgguacaacaugcagcag

SEQ ID NO: 2928392 - RNA, 19 nt, Artificial Sequence
  Description of Artificial Sequence: Synthetic oligonucleotide
ccucgagggaggcagugau

SEQ ID NO: 2928393 - RNA, 19 nt, Artificial Sequence
  Description of Artificial Sequence: Synthetic oligonucleotide
ccaaaccucgagggaggca

SEQ ID NO: 2928394 - RNA, 19 nt, Artificial Sequence
  Description of Artificial Sequence: Synthetic oligonucleotide
cgagggaggcagugauuga

SEQ ID NO: 2928395 - RNA, 19 nt, Artificial Sequence
  Description of Artificial Sequence: Synthetic oligonucleotide
guauggcaccgagguuggu

SEQ ID NO: 2928396 - RNA, 19 nt, Artificial Sequence
  Description of Artificial Sequence: Synthetic oligonucleotide
gggucacacuugaccauuu

SEQ ID NO: 2928397 - RNA, 19 nt, Artificial Sequence
  Description of Artificial Sequence: Synthetic oligonucleotide
gggcaccaauccacaaauu

SEQ ID NO: 2928398 - RNA, 19 nt, Artificial Sequence
  Description of Artificial Sequence: Synthetic oligonucleotide
uuuagcaaugacaacagcg

SEQ ID NO: 2928399 - RNA, 19 nt, Artificial Sequence
  Description of Artificial Sequence: Synthetic oligonucleotide
aaaguuuaugauuauugag

SEQ ID NO: 2928400 - RNA, 19 nt, Artificial Sequence
  Description of Artificial Sequence: Synthetic oligonucleotide
uuuaugauuauugagaagu

SEQ ID NO: 2928401 - RNA, 19 nt, Artificial Sequence
  Description of Artificial Sequence: Synthetic oligonucleotide
uucuaaaugguacucuugg

SEQ ID NO: 2928402 - RNA, 19 nt, Artificial Sequence
  Description of Artificial Sequence: Synthetic oligonucleotide
aauuccuuugguucuugcc

SEQ ID NO: 2928403 - RNA, 19 nt, Artificial Sequence
  Description of Artificial Sequence: Synthetic oligonucleotide
ucuacaacagaaaucuugc

SEQ ID NO: 2928404 - RNA, 19 nt, Artificial Sequence
  Description of Artificial Sequence: Synthetic oligonucleotide
guucacaacauucuuaucc

SEQ ID NO: 2928405 - RNA, 19 nt, Artificial Sequence
  Description of Artificial Sequence: Synthetic oligonucleotide
auuuacaucuuucaguucu

SEQ ID NO: 2928406 - RNA, 19 nt, Artificial Sequence
  Description of Artificial Sequence: Synthetic oligonucleotide
uuugggaauguucacaaca

SEQ ID NO: 2928407 - RNA, 19 nt, Artificial Sequence
  Description of Artificial Sequence: Synthetic oligonucleotide
uucuacaacagaaaucuug

SEQ ID NO: 2928408 - RNA, 19 nt, Artificial Sequence
  Description of Artificial Sequence: Synthetic oligonucleotide
acauauacgucuuuuagca

SEQ ID NO: 2928409 - RNA, 19 nt, Artificial Sequence
  Description of Artificial Sequence: Synthetic oligonucleotide
aacauucuuauccacguga

SEQ ID NO: 2928410 - RNA, 19 nt, Artificial Sequence
  Description of Artificial Sequence: Synthetic oligonucleotide
uguuaucuuuccuagaaac

SEQ ID NO: 2928411 - RNA, 19 nt, Artificial Sequence
  Description of Artificial Sequence: Synthetic oligonucleotide
aaguuuaugauuauugaga

SEQ ID NO: 2928412 - RNA, 19 nt, Artificial Sequence
  Description of Artificial Sequence: Synthetic oligonucleotide
uuuccuagaaacuucuucu

SEQ ID NO: 2928413 - RNA, 19 nt, Artificial Sequence
  Description of Artificial Sequence: Synthetic oligonucleotide
uuagcaaugacaacagcgu

SEQ ID NO: 2928414 - RNA, 19 nt, Artificial Sequence
  Description of Artificial Sequence: Synthetic oligonucleotide
aacagcguguuaucuuucc

SEQ ID NO: 2928415 - RNA, 19 nt, Artificial Sequence
  Description of Artificial Sequence: Synthetic oligonucleotide
uuggacuccacauauacgu

SEQ ID NO: 2928416 - RNA, 19 nt, Artificial Sequence
  Description of Artificial Sequence: Synthetic oligonucleotide
cuaaaugguacucuugggc

SEQ ID NO: 2928417 - RNA, 19 nt, Artificial Sequence
  Description of Artificial Sequence: Synthetic oligonucleotide
uacaacagaaaucuugccu

SEQ ID NO: 2928418 - RNA, 19 nt, Artificial Sequence
  Description of Artificial Sequence: Synthetic oligonucleotide
uaaaugguacucuugggca

SEQ ID NO: 2928419 - RNA, 19 nt, Artificial Sequence
  Description of Artificial Sequence: Synthetic oligonucleotide
uuucaguucuaaaugguac

SEQ ID NO: 2928420 - RNA, 19 nt, Artificial Sequence
  Description of Artificial Sequence: Synthetic oligonucleotide
ugauuauugagaaguguca

SEQ ID NO: 2928421 - RNA, 19 nt, Artificial Sequence
  Description of Artificial Sequence: Synthetic oligonucleotide
uuauugagaagugucaaug

SEQ ID NO: 2928422 - RNA, 19 nt, Artificial Sequence
  Description of Artificial Sequence: Synthetic oligonucleotide
uggagaaaguuuaugauua

SEQ ID NO: 2928423 - RNA, 19 nt, Artificial Sequence
  Description of Artificial Sequence: Synthetic oligonucleotide
guugaaguuccucacggcg

SEQ ID NO: 2928424 - RNA, 19 nt, Artificial Sequence
  Description of Artificial Sequence: Synthetic oligonucleotide
aaugacaacagcguguuau

SEQ ID NO: 2928425 - RNA, 19 nt, Artificial Sequence
  Description of Artificial Sequence: Synthetic oligonucleotide
agaaaguuuaugauuauug

SEQ ID NO: 2928426 - RNA, 19 nt, Artificial Sequence
  Description of Artificial Sequence: Synthetic oligonucleotide
ugucaaugcuucuacaaca

SEQ ID NO: 2928427 - RNA, 19 nt, Artificial Sequence
  Description of Artificial Sequence: Synthetic oligonucleotide
gaaaguuuaugauuauuga

SEQ ID NO: 2928428 - RNA, 19 nt, Artificial Sequence
  Description of Artificial Sequence: Synthetic oligonucleotide
gaagacaccggaucuuugg

SEQ ID NO: 2928429 - RNA, 19 nt, Artificial Sequence
  Description of Artificial Sequence: Synthetic oligonucleotide
ucuaaaugguacucuuggg

SEQ ID NO: 2928430 - RNA, 19 nt, Artificial Sequence
  Description of Artificial Sequence: Synthetic oligonucleotide
augauuauugagaaguguc

SEQ ID NO: 2928431 - RNA, 19 nt, Artificial Sequence
  Description of Artificial Sequence: Synthetic oligonucleotide
aguuuaugauuauugagaa

SEQ ID NO: 2928432 - RNA, 19 nt, Artificial Sequence
  Description of Artificial Sequence: Synthetic oligonucleotide
uauugagaagugucaaugc

SEQ ID NO: 2928433 - RNA, 19 nt, Artificial Sequence
  Description of Artificial Sequence: Synthetic oligonucleotide
uuuggacuccacauauacg

SEQ ID NO: 2928434 - RNA, 19 nt, Artificial Sequence
  Description of Artificial Sequence: Synthetic oligonucleotide
cuuuuagcaaugacaacag

SEQ ID NO: 2928435 - RNA, 19 nt, Artificial Sequence
  Description of Artificial Sequence: Synthetic oligonucleotide
ugaaguuccucacggcgcg

SEQ ID NO: 2928436 - RNA, 19 nt, Artificial Sequence
  Description of Artificial Sequence: Synthetic oligonucleotide
ucuugggcaauuuucucag

SEQ ID NO: 2928437 - RNA, 19 nt, Artificial Sequence
  Description of Artificial Sequence: Synthetic oligonucleotide
uucacaacauucuuaucca

SEQ ID NO: 2928438 - RNA, 19 nt, Artificial Sequence
  Description of Artificial Sequence: Synthetic oligonucleotide
uuaugauuauugagaagug

SEQ ID NO: 2928439 - RNA, 19 nt, Artificial Sequence
  Description of Artificial Sequence: Synthetic oligonucleotide
uuaccgguagggaagacac

SEQ ID NO: 2928440 - RNA, 19 nt, Artificial Sequence
  Description of Artificial Sequence: Synthetic oligonucleotide
gaaaucuugccuuugggaa

SEQ ID NO: 2928441 - RNA, 19 nt, Artificial Sequence
  Description of Artificial Sequence: Synthetic oligonucleotide
cacauauacgucuuuuagc

SEQ ID NO: 2928442 - RNA, 19 nt, Artificial Sequence
  Description of Artificial Sequence: Synthetic oligonucleotide
cacaacauucuuauccacg

SEQ ID NO: 2928443 - RNA, 19 nt, Artificial Sequence
  Description of Artificial Sequence: Synthetic oligonucleotide
caucuuucaguucuaaaug

SEQ ID NO: 2928444 - RNA, 19 nt, Artificial Sequence
  Description of Artificial Sequence: Synthetic oligonucleotide
agguugaaguuccucacgg

SEQ ID NO: 2928445 - RNA, 19 nt, Artificial Sequence
  Description of Artificial Sequence: Synthetic oligonucleotide
ugaucucucgcuccgcgcg

SEQ ID NO: 2928446 - RNA, 19 nt, Artificial Sequence
  Description of Artificial Sequence: Synthetic oligonucleotide
ucugaauuccuuugguucu

SEQ ID NO: 2928447 - RNA, 19 nt, Artificial Sequence
  Description of Artificial Sequence: Synthetic oligonucleotide
uuugguucuugccauauuu

SEQ ID NO: 2928448 - RNA, 19 nt, Artificial Sequence
  Description of Artificial Sequence: Synthetic oligonucleotide
acaacauucuuauccacgu

SEQ ID NO: 2928449 - RNA, 19 nt, Artificial Sequence
  Description of Artificial Sequence: Synthetic oligonucleotide
uauacgucuuuuagcaaug

SEQ ID NO: 2928450 - RNA, 19 nt, Artificial Sequence
  Description of Artificial Sequence: Synthetic oligonucleotide
auuccuuugguucuugcca

SEQ ID NO: 2928451 - RNA, 19 nt, Artificial Sequence
  Description of Artificial Sequence: Synthetic oligonucleotide
aauuuucucagcaguccac

SEQ ID NO: 2928452 - RNA, 19 nt, Artificial Sequence
  Description of Artificial Sequence: Synthetic oligonucleotide
auauacgucuuuuagcaau

SEQ ID NO: 2928453 - RNA, 19 nt, Artificial Sequence
  Description of Artificial Sequence: Synthetic oligonucleotide
acagaaaucuugccuuugg

SEQ ID NO: 2928454 - RNA, 19 nt, Artificial Sequence
  Description of Artificial Sequence: Synthetic oligonucleotide
auugagaagugucaaugcu

SEQ ID NO: 2928455 - RNA, 19 nt, Artificial Sequence
  Description of Artificial Sequence: Synthetic oligonucleotide
uugccauauuucaacaucu

SEQ ID NO: 2928456 - RNA, 19 nt, Artificial Sequence
  Description of Artificial Sequence: Synthetic oligonucleotide
uccacauuucuggagaaag

SEQ ID NO: 2928457 - RNA, 19 nt, Artificial Sequence
  Description of Artificial Sequence: Synthetic oligonucleotide
aagggaauuuacaucuuuc

SEQ ID NO: 2928458 - RNA, 19 nt, Artificial Sequence
  Description of Artificial Sequence: Synthetic oligonucleotide
cuuuggacuccacauauac

SEQ ID NO: 2928459 - RNA, 19 nt, Artificial Sequence
  Description of Artificial Sequence: Synthetic oligonucleotide
agaaaucuugccuuuggga

SEQ ID NO: 2928460 - RNA, 19 nt, Artificial Sequence
  Description of Artificial Sequence: Synthetic oligonucleotide
uccacgugauguccuaucg

SEQ ID NO: 2928461 - RNA, 19 nt, Artificial Sequence
  Description of Artificial Sequence: Synthetic oligonucleotide
acaacagaaaucuugccuu

SEQ ID NO: 2928462 - RNA, 19 nt, Artificial Sequence
  Description of Artificial Sequence: Synthetic oligonucleotide
uucuccagguugaaguucc

SEQ ID NO: 2928463 - RNA, 19 nt, Artificial Sequence
  Description of Artificial Sequence: Synthetic oligonucleotide
uugaaguuccucacggcgc

SEQ ID NO: 2928464 - RNA, 19 nt, Artificial Sequence
  Description of Artificial Sequence: Synthetic oligonucleotide
ugggugcugacucagcugc

SEQ ID NO: 2928465 - RNA, 19 nt, Artificial Sequence
  Description of Artificial Sequence: Synthetic oligonucleotide
ucuuucaguucuaaauggu

SEQ ID NO: 2928466 - RNA, 19 nt, Artificial Sequence
  Description of Artificial Sequence: Synthetic oligonucleotide
gaaacuucuucuuugauuu

SEQ ID NO: 2928467 - RNA, 19 nt, Artificial Sequence
  Description of Artificial Sequence: Synthetic oligonucleotide
uucaguucuaaaugguacu

SEQ ID NO: 2928468 - RNA, 19 nt, Artificial Sequence
  Description of Artificial Sequence: Synthetic oligonucleotide
uuugauuucugggugcuga

SEQ ID NO: 2928469 - RNA, 19 nt, Artificial Sequence
  Description of Artificial Sequence: Synthetic oligonucleotide
aaaucuugccuuugggaau

SEQ ID NO: 2928470 - RNA, 19 nt, Artificial Sequence
  Description of Artificial Sequence: Synthetic oligonucleotide
uacucuugggcaauuuucu

SEQ ID NO: 2928471 - RNA, 19 nt, Artificial Sequence
  Description of Artificial Sequence: Synthetic oligonucleotide
gaagugucaaugcuucuac

SEQ ID NO: 2928472 - RNA, 19 nt, Artificial Sequence
  Description of Artificial Sequence: Synthetic oligonucleotide
auguucacaacauucuuau

SEQ ID NO: 2928473 - RNA, 19 nt, Artificial Sequence
  Description of Artificial Sequence: Synthetic oligonucleotide
uaugauuauugagaagugu

SEQ ID NO: 2928474 - RNA, 19 nt, Artificial Sequence
  Description of Artificial Sequence: Synthetic oligonucleotide
agcguguuaucuuuccuag

SEQ ID NO: 2928475 - RNA, 19 nt, Artificial Sequence
  Description of Artificial Sequence: Synthetic oligonucleotide
aaacuucuucuuugauuuc

SEQ ID NO: 2928476 - RNA, 19 nt, Artificial Sequence
  Description of Artificial Sequence: Synthetic oligonucleotide
uuaucuuuccuagaaacuu

SEQ ID NO: 2928477 - RNA, 19 nt, Artificial Sequence
  Description of Artificial Sequence: Synthetic oligonucleotide
cacgugauguccuaucggc

SEQ ID NO: 2928478 - RNA, 19 nt, Artificial Sequence
  Description of Artificial Sequence: Synthetic oligonucleotide
gauuucugggugcugacuc

SEQ ID NO: 2928479 - RNA, 19 nt, Artificial Sequence
  Description of Artificial Sequence: Synthetic oligonucleotide
aacuucuucuuugauuucu

SEQ ID NO: 2928480 - RNA, 19 nt, Artificial Sequence
  Description of Artificial Sequence: Synthetic oligonucleotide
cagcaguccacauuucugg

SEQ ID NO: 2928481 - RNA, 19 nt, Artificial Sequence
  Description of Artificial Sequence: Synthetic oligonucleotide
guucuugccauauuucaac

SEQ ID NO: 2928482 - RNA, 19 nt, Artificial Sequence
  Description of Artificial Sequence: Synthetic oligonucleotide
cuugccauauuucaacauc

SEQ ID NO: 2928483 - RNA, 19 nt, Artificial Sequence
  Description of Artificial Sequence: Synthetic oligonucleotide
agaaacuucuucuuugauu

SEQ ID NO: 2928484 - RNA, 19 nt, Artificial Sequence
  Description of Artificial Sequence: Synthetic oligonucleotide
gucugaauuccuuugguuc

SEQ ID NO: 2928485 - RNA, 19 nt, Artificial Sequence
  Description of Artificial Sequence: Synthetic oligonucleotide
uuuuagcaaugacaacagc

SEQ ID NO: 2928486 - RNA, 19 nt, Artificial Sequence
  Description of Artificial Sequence: Synthetic oligonucleotide
uaucuuuccuagaaacuuc

SEQ ID NO: 2928487 - RNA, 19 nt, Artificial Sequence
  Description of Artificial Sequence: Synthetic oligonucleotide
uguccuaucggcagucuga

SEQ ID NO: 2928488 - RNA, 19 nt, Artificial Sequence
  Description of Artificial Sequence: Synthetic oligonucleotide
guuuaugauuauugagaag

SEQ ID NO: 2928489 - RNA, 19 nt, Artificial Sequence
  Description of Artificial Sequence: Synthetic oligonucleotide
aaucuugccuuugggaaug

SEQ ID NO: 2928490 - RNA, 19 nt, Artificial Sequence
  Description of Artificial Sequence: Synthetic oligonucleotide
uucuuugauuucugggugc

SEQ ID NO: 2928491 - RNA, 19 nt, Artificial Sequence
  Description of Artificial Sequence: Synthetic oligonucleotide
aaaugguacucuugggcaa

SEQ ID NO: 2928492 - RNA, 19 nt, Artificial Sequence
  Description of Artificial Sequence: Synthetic oligonucleotide
agugucaaugcuucuacaa

SEQ ID NO: 2928493 - RNA, 19 nt, Artificial Sequence
  Description of Artificial Sequence: Synthetic oligonucleotide
cuucuuugauuucugggug

SEQ ID NO: 2928494 - RNA, 19 nt, Artificial Sequence
  Description of Artificial Sequence: Synthetic oligonucleotide
ugcuucuacaacagaaauc

SEQ ID NO: 2928495 - RNA, 19 nt, Artificial Sequence
  Description of Artificial Sequence: Synthetic oligonucleotide
accgguagggaagacaccg

SEQ ID NO: 2928496 - RNA, 19 nt, Artificial Sequence
  Description of Artificial Sequence: Synthetic oligonucleotide
augacaacagcguguuauc

SEQ ID NO: 2928497 - RNA, 19 nt, Artificial Sequence
  Description of Artificial Sequence: Synthetic oligonucleotide
agacaccggaucuuuggac

SEQ ID NO: 2928498 - RNA, 19 nt, Artificial Sequence
  Description of Artificial Sequence: Synthetic oligonucleotide
uagcaaugacaacagcgug

SEQ ID NO: 2928499 - RNA, 19 nt, Artificial Sequence
  Description of Artificial Sequence: Synthetic oligonucleotide
uugagaagugucaaugcuu

SEQ ID NO: 2928500 - RNA, 19 nt, Artificial Sequence
  Description of Artificial Sequence: Synthetic oligonucleotide
aaugcuucuacaacagaaa

SEQ ID NO: 2928501 - RNA, 19 nt, Artificial Sequence
  Description of Artificial Sequence: Synthetic oligonucleotide
auuauugagaagugucaau

SEQ ID NO: 2928502 - RNA, 19 nt, Artificial Sequence
  Description of Artificial Sequence: Synthetic oligonucleotide
uagggaagacaccggaucu

SEQ ID NO: 2928503 - RNA, 19 nt, Artificial Sequence
  Description of Artificial Sequence: Synthetic oligonucleotide
aucuuuggacuccacauau

SEQ ID NO: 2928504 - RNA, 19 nt, Artificial Sequence
  Description of Artificial Sequence: Synthetic oligonucleotide
cuugccuuugggaauguuc

SEQ ID NO: 2928505 - RNA, 19 nt, Artificial Sequence
  Description of Artificial Sequence: Synthetic oligonucleotide
ugggcaauuuucucagcag

SEQ ID NO: 2928506 - RNA, 19 nt, Artificial Sequence
  Description of Artificial Sequence: Synthetic oligonucleotide
uucuugccauauuucaaca

SEQ ID NO: 2928507 - RNA, 19 nt, Artificial Sequence
  Description of Artificial Sequence: Synthetic oligonucleotide
ucuuauccacgugaugucc

SEQ ID NO: 2928508 - RNA, 19 nt, Artificial Sequence
  Description of Artificial Sequence: Synthetic oligonucleotide
cagaaaucuugccuuuggg

SEQ ID NO: 2928509 - RNA, 19 nt, Artificial Sequence
  Description of Artificial Sequence: Synthetic oligonucleotide
ucugggugcugacucagcu

SEQ ID NO: 2928510 - RNA, 19 nt, Artificial Sequence
  Description of Artificial Sequence: Synthetic oligonucleotide
caaugcuucuacaacagaa

SEQ ID NO: 2928511 - RNA, 19 nt, Artificial Sequence
  Description of Artificial Sequence: Synthetic oligonucleotide
cuacaacagaaaucuugcc

SEQ ID NO: 2928512 - RNA, 19 nt, Artificial Sequence
  Description of Artificial Sequence: Synthetic oligonucleotide
aguucuaaaugguacucuu

SEQ ID NO: 2928513 - RNA, 19 nt, Artificial Sequence
  Description of Artificial Sequence: Synthetic oligonucleotide
ucaaugcuucuacaacaga

SEQ ID NO: 2928514 - RNA, 19 nt, Artificial Sequence
  Description of Artificial Sequence: Synthetic oligonucleotide
acucuugggcaauuuucuc

SEQ ID NO: 2928515 - RNA, 19 nt, Artificial Sequence
  Description of Artificial Sequence: Synthetic oligonucleotide
aaguuccucacggcgcggc

SEQ ID NO: 2928516 - RNA, 19 nt, Artificial Sequence
  Description of Artificial Sequence: Synthetic oligonucleotide
uuuaccgguagggaagaca

SEQ ID NO: 2928517 - RNA, 19 nt, Artificial Sequence
  Description of Artificial Sequence: Synthetic oligonucleotide
gauuauugagaagugucaa

SEQ ID NO: 2928518 - RNA, 19 nt, Artificial Sequence
  Description of Artificial Sequence: Synthetic oligonucleotide
uugguucuugccauauuuc

SEQ ID NO: 2928519 - RNA, 19 nt, Artificial Sequence
  Description of Artificial Sequence: Synthetic oligonucleotide
acaacagcguguuaucuuu

SEQ ID NO: 2928520 - RNA, 19 nt, Artificial Sequence
  Description of Artificial Sequence: Synthetic oligonucleotide
guagggaagacaccggauc

SEQ ID NO: 2928521 - RNA, 19 nt, Artificial Sequence
  Description of Artificial Sequence: Synthetic oligonucleotide
aagugucaaugcuucuaca

SEQ ID NO: 2928522 - RNA, 19 nt, Artificial Sequence
  Description of Artificial Sequence: Synthetic oligonucleotide
aacagaaaucuugccuuug

SEQ ID NO: 2928523 - RNA, 19 nt, Artificial Sequence
  Description of Artificial Sequence: Synthetic oligonucleotide
cuaucggcagucugaauuc

SEQ ID NO: 2928524 - RNA, 19 nt, Artificial Sequence
  Description of Artificial Sequence: Synthetic oligonucleotide
gugucaaugcuucuacaac

SEQ ID NO: 2928525 - RNA, 19 nt, Artificial Sequence
  Description of Artificial Sequence: Synthetic oligonucleotide
gucaaugcuucuacaacag

SEQ ID NO: 2928526 - RNA, 19 nt, Artificial Sequence
  Description of Artificial Sequence: Synthetic oligonucleotide
uacgucuuuuagcaaugac

SEQ ID NO: 2928527 - RNA, 19 nt, Artificial Sequence
  Description of Artificial Sequence: Synthetic oligonucleotide
augcuucuacaacagaaau

SEQ ID NO: 2928528 - RNA, 19 nt, Artificial Sequence
  Description of Artificial Sequence: Synthetic oligonucleotide
ucacgcgaagcucccaucu

SEQ ID NO: 2928529 - RNA, 19 nt, Artificial Sequence
  Description of Artificial Sequence: Synthetic oligonucleotide
cuagaaacuucuucuuuga

SEQ ID NO: 2928530 - RNA, 19 nt, Artificial Sequence
  Description of Artificial Sequence: Synthetic oligonucleotide
ggaauuuacaucuuucagu

SEQ ID NO: 2928531 - RNA, 19 nt, Artificial Sequence
  Description of Artificial Sequence: Synthetic oligonucleotide
uuuacaucuuucaguucua

SEQ ID NO: 2928532 - RNA, 19 nt, Artificial Sequence
  Description of Artificial Sequence: Synthetic oligonucleotide
ugcuugggagccguggagg

SEQ ID NO: 2928533 - RNA, 19 nt, Artificial Sequence
  Description of Artificial Sequence: Synthetic oligonucleotide
gaauuccuuugguucuugc

SEQ ID NO: 2928534 - RNA, 19 nt, Artificial Sequence
  Description of Artificial Sequence: Synthetic oligonucleotide
uccuagaaacuucuucuuu

SEQ ID NO: 2928535 - RNA, 19 nt, Artificial Sequence
  Description of Artificial Sequence: Synthetic oligonucleotide
acaccggaucuuuggacuc

SEQ ID NO: 2928536 - RNA, 19 nt, Artificial Sequence
  Description of Artificial Sequence: Synthetic oligonucleotide
cagguugaaguuccucacg

SEQ ID NO: 2928537 - RNA, 19 nt, Artificial Sequence
  Description of Artificial Sequence: Synthetic oligonucleotide
auccacgugauguccuauc

SEQ ID NO: 2928538 - RNA, 19 nt, Artificial Sequence
  Description of Artificial Sequence: Synthetic oligonucleotide
uccacauauacgucuuuua

SEQ ID NO: 2928539 - RNA, 19 nt, Artificial Sequence
  Description of Artificial Sequence: Synthetic oligonucleotide
ucuugccauauuucaacau

SEQ ID NO: 2928540 - RNA, 19 nt, Artificial Sequence
  Description of Artificial Sequence: Synthetic oligonucleotide
ucuuugauuucugggugcu

SEQ ID NO: 2928541 - RNA, 19 nt, Artificial Sequence
  Description of Artificial Sequence: Synthetic oligonucleotide
uagaaacuucuucuuugau

SEQ ID NO: 2928542 - RNA, 19 nt, Artificial Sequence
  Description of Artificial Sequence: Synthetic oligonucleotide
gcuucuacaacagaaaucu

SEQ ID NO: 2928543 - RNA, 19 nt, Artificial Sequence
  Description of Artificial Sequence: Synthetic oligonucleotide
auuuucucagcaguccaca

SEQ ID NO: 2928544 - RNA, 19 nt, Artificial Sequence
  Description of Artificial Sequence: Synthetic oligonucleotide
agcaaugacaacagcgugu

SEQ ID NO: 2928545 - RNA, 19 nt, Artificial Sequence
  Description of Artificial Sequence: Synthetic oligonucleotide
uuccuuugguucuugccau

SEQ ID NO: 2928546 - RNA, 19 nt, Artificial Sequence
  Description of Artificial Sequence: Synthetic oligonucleotide
gcagucugaauuccuuugg

SEQ ID NO: 2928547 - RNA, 19 nt, Artificial Sequence
  Description of Artificial Sequence: Synthetic oligonucleotide
guucuaaaugguacucuug

SEQ ID NO: 2928548 - RNA, 19 nt, Artificial Sequence
  Description of Artificial Sequence: Synthetic oligonucleotide
agucugaauuccuuugguu

SEQ ID NO: 2928549 - RNA, 19 nt, Artificial Sequence
  Description of Artificial Sequence: Synthetic oligonucleotide
ugguccugcugaucucucg

SEQ ID NO: 2928550 - RNA, 19 nt, Artificial Sequence
  Description of Artificial Sequence: Synthetic oligonucleotide
gggaauguucacaacauuc

SEQ ID NO: 2928551 - RNA, 19 nt, Artificial Sequence
  Description of Artificial Sequence: Synthetic oligonucleotide
auuucugggugcugacuca

SEQ ID NO: 2928552 - RNA, 19 nt, Artificial Sequence
  Description of Artificial Sequence: Synthetic oligonucleotide
caauuuucucagcagucca

SEQ ID NO: 2928553 - RNA, 19 nt, Artificial Sequence
  Description of Artificial Sequence: Synthetic oligonucleotide
aaugguacucuugggcaau

SEQ ID NO: 2928554 - RNA, 19 nt, Artificial Sequence
  Description of Artificial Sequence: Synthetic oligonucleotide
ccacauauacgucuuuuag

SEQ ID NO: 2928555 - RNA, 19 nt, Artificial Sequence
  Description of Artificial Sequence: Synthetic oligonucleotide
cuuucaguucuaaauggua

SEQ ID NO: 2928556 - RNA, 19 nt, Artificial Sequence
  Description of Artificial Sequence: Synthetic oligonucleotide
uugauuucugggugcugac

SEQ ID NO: 2928557 - RNA, 19 nt, Artificial Sequence
  Description of Artificial Sequence: Synthetic oligonucleotide
guacucuugggcaauuuuc

SEQ ID NO: 2928558 - RNA, 19 nt, Artificial Sequence
  Description of Artificial Sequence: Synthetic oligonucleotide
guggacgggugcuugggag

SEQ ID NO: 2928559 - RNA, 19 nt, Artificial Sequence
  Description of Artificial Sequence: Synthetic oligonucleotide
ugacaacagcguguuaucu

SEQ ID NO: 2928560 - RNA, 19 nt, Artificial Sequence
  Description of Artificial Sequence: Synthetic oligonucleotide
gaucucucgcuccgcgcgg

SEQ ID NO: 2928561 - RNA, 19 nt, Artificial Sequence
  Description of Artificial Sequence: Synthetic oligonucleotide
ugacucagcugcucgcgca

SEQ ID NO: 2928562 - RNA, 19 nt, Artificial Sequence
  Description of Artificial Sequence: Synthetic oligonucleotide
uuccuagaaacuucuucuu

SEQ ID NO: 2928563 - RNA, 19 nt, Artificial Sequence
  Description of Artificial Sequence: Synthetic oligonucleotide
uggacgggugcuugggagc

SEQ ID NO: 2928564 - RNA, 19 nt, Artificial Sequence
  Description of Artificial Sequence: Synthetic oligonucleotide
uggacuccacauauacguc

SEQ ID NO: 2928565 - RNA, 19 nt, Artificial Sequence
  Description of Artificial Sequence: Synthetic oligonucleotide
aucuuuccuagaaacuucu

SEQ ID NO: 2928566 - RNA, 19 nt, Artificial Sequence
  Description of Artificial Sequence: Synthetic oligonucleotide
ucgcgcaggaggucgcgcg

SEQ ID NO: 2928567 - RNA, 19 nt, Artificial Sequence
  Description of Artificial Sequence: Synthetic oligonucleotide
auguccuaucggcagucug

SEQ ID NO: 2928568 - RNA, 19 nt, Artificial Sequence
  Description of Artificial Sequence: Synthetic oligonucleotide
cuuugggaauguucacaac

SEQ ID NO: 2928569 - RNA, 19 nt, Artificial Sequence
  Description of Artificial Sequence: Synthetic oligonucleotide
gacaccggaucuuuggacu

SEQ ID NO: 2928570 - RNA, 19 nt, Artificial Sequence
  Description of Artificial Sequence: Synthetic oligonucleotide
agaagugucaaugcuucua

SEQ ID NO: 2928571 - RNA, 19 nt, Artificial Sequence
  Description of Artificial Sequence: Synthetic oligonucleotide
gcaauuuucucagcagucc

SEQ ID NO: 2928572 - RNA, 19 nt, Artificial Sequence
  Description of Artificial Sequence: Synthetic oligonucleotide
acagcguguuaucuuuccu

SEQ ID NO: 2928573 - RNA, 19 nt, Artificial Sequence
  Description of Artificial Sequence: Synthetic oligonucleotide
ugcugacucagcugcucgc

SEQ ID NO: 2928574 - RNA, 19 nt, Artificial Sequence
  Description of Artificial Sequence: Synthetic oligonucleotide
agcaguccacauuucugga

SEQ ID NO: 2928575 - RNA, 19 nt, Artificial Sequence
  Description of Artificial Sequence: Synthetic oligonucleotide
ggcagucugaauuccuuug

SEQ ID NO: 2928576 - RNA, 19 nt, Artificial Sequence
  Description of Artificial Sequence: Synthetic oligonucleotide
aggaggucgcgcguggacg

SEQ ID NO: 2928577 - RNA, 19 nt, Artificial Sequence
  Description of Artificial Sequence: Synthetic oligonucleotide
ugggaauguucacaacauu

SEQ ID NO: 2928578 - RNA, 19 nt, Artificial Sequence
  Description of Artificial Sequence: Synthetic oligonucleotide
ucuuuggacuccacauaua

SEQ ID NO: 2928579 - RNA, 19 nt, Artificial Sequence
  Description of Artificial Sequence: Synthetic oligonucleotide
ugaauuccuuugguucuug

SEQ ID NO: 2928580 - RNA, 19 nt, Artificial Sequence
  Description of Artificial Sequence: Synthetic oligonucleotide
uguucacaacauucuuauc

SEQ ID NO: 2928581 - RNA, 19 nt, Artificial Sequence
  Description of Artificial Sequence: Synthetic oligonucleotide
cugcugaucucucgcuccg

SEQ ID NO: 2928582 - RNA, 19 nt, Artificial Sequence
  Description of Artificial Sequence: Synthetic oligonucleotide
ugccauauuucaacaucuu

SEQ ID NO: 2928583 - RNA, 19 nt, Artificial Sequence
  Description of Artificial Sequence: Synthetic oligonucleotide
caacauucuuauccacgug

SEQ ID NO: 2928584 - RNA, 19 nt, Artificial Sequence
  Description of Artificial Sequence: Synthetic oligonucleotide
gucuuuuagcaaugacaac

SEQ ID NO: 2928585 - RNA, 19 nt, Artificial Sequence
  Description of Artificial Sequence: Synthetic oligonucleotide
uaucggcagucugaauucc

SEQ ID NO: 2928586 - RNA, 19 nt, Artificial Sequence
  Description of Artificial Sequence: Synthetic oligonucleotide
ugauuucugggugcugacu

SEQ ID NO: 2928587 - RNA, 19 nt, Artificial Sequence
  Description of Artificial Sequence: Synthetic oligonucleotide
uuacaucuuucaguucuaa

SEQ ID NO: 2928588 - RNA, 19 nt, Artificial Sequence
  Description of Artificial Sequence: Synthetic oligonucleotide
uuauccacgugauguccua

SEQ ID NO: 2928589 - RNA, 19 nt, Artificial Sequence
  Description of Artificial Sequence: Synthetic oligonucleotide
uccugcugaucucucgcuc

SEQ ID NO: 2928590 - RNA, 19 nt, Artificial Sequence
  Description of Artificial Sequence: Synthetic oligonucleotide
cagcugcucgcgcaggagg

SEQ ID NO: 2928591 - RNA, 19 nt, Artificial Sequence
  Description of Artificial Sequence: Synthetic oligonucleotide
cugaucucucgcuccgcgc

SEQ ID NO: 2928592 - RNA, 19 nt, Artificial Sequence
  Description of Artificial Sequence: Synthetic oligonucleotide
cucacggcgcggcucacgc

SEQ ID NO: 2928593 - RNA, 19 nt, Artificial Sequence
  Description of Artificial Sequence: Synthetic oligonucleotide
ucuuuccuagaaacuucuu

SEQ ID NO: 2928594 - RNA, 19 nt, Artificial Sequence
  Description of Artificial Sequence: Synthetic oligonucleotide
guuaucuuuccuagaaacu

SEQ ID NO: 2928595 - RNA, 19 nt, Artificial Sequence
  Description of Artificial Sequence: Synthetic oligonucleotide
ucggcagucugaauuccuu

SEQ ID NO: 2928596 - RNA, 19 nt, Artificial Sequence
  Description of Artificial Sequence: Synthetic oligonucleotide
ucucgcuccgcgcgguucu

SEQ ID NO: 2928597 - RNA, 19 nt, Artificial Sequence
  Description of Artificial Sequence: Synthetic oligonucleotide
uucugggugcugacucagc

SEQ ID NO: 2928598 - RNA, 19 nt, Artificial Sequence
  Description of Artificial Sequence: Synthetic oligonucleotide
gcugaucucucgcuccgcg

SEQ ID NO: 2928599 - RNA, 19 nt, Artificial Sequence
  Description of Artificial Sequence: Synthetic oligonucleotide
gguugaaguuccucacggc

SEQ ID NO: 2928600 - RNA, 19 nt, Artificial Sequence
  Description of Artificial Sequence: Synthetic oligonucleotide
agccguggagggcuugguc

SEQ ID NO: 2928601 - RNA, 19 nt, Artificial Sequence
  Description of Artificial Sequence: Synthetic oligonucleotide
acauuucuggagaaaguuu

SEQ ID NO: 2928602 - RNA, 19 nt, Artificial Sequence
  Description of Artificial Sequence: Synthetic oligonucleotide
uaccgguagggaagacacc

SEQ ID NO: 2928603 - RNA, 19 nt, Artificial Sequence
  Description of Artificial Sequence: Synthetic oligonucleotide
ugauguccuaucggcaguc

SEQ ID NO: 2928604 - RNA, 19 nt, Artificial Sequence
  Description of Artificial Sequence: Synthetic oligonucleotide
cgucuuuuagcaaugacaa

SEQ ID NO: 2928605 - RNA, 19 nt, Artificial Sequence
  Description of Artificial Sequence: Synthetic oligonucleotide
gccguggagggcuuggucc

SEQ ID NO: 2928606 - RNA, 19 nt, Artificial Sequence
  Description of Artificial Sequence: Synthetic oligonucleotide
cugggugcugacucagcug

SEQ ID NO: 2928607 - RNA, 19 nt, Artificial Sequence
  Description of Artificial Sequence: Synthetic oligonucleotide
gguccugcugaucucucgc

SEQ ID NO: 2928608 - RNA, 19 nt, Artificial Sequence
  Description of Artificial Sequence: Synthetic oligonucleotide
gcaguccacauuucuggag

SEQ ID NO: 2928609 - RNA, 19 nt, Artificial Sequence
  Description of Artificial Sequence: Synthetic oligonucleotide
gaagggaauuuacaucuuu

SEQ ID NO: 2928610 - RNA, 19 nt, Artificial Sequence
  Description of Artificial Sequence: Synthetic oligonucleotide
guguuaucuuuccuagaaa

SEQ ID NO: 2928611 - RNA, 19 nt, Artificial Sequence
  Description of Artificial Sequence: Synthetic oligonucleotide
cuggagaaaguuuaugauu

SEQ ID NO: 2928612 - RNA, 19 nt, Artificial Sequence
  Description of Artificial Sequence: Synthetic oligonucleotide
cugacucagcugcucgcgc

SEQ ID NO: 2928613 - RNA, 19 nt, Artificial Sequence
  Description of Artificial Sequence: Synthetic oligonucleotide
ggaggucgcgcguggacgg

SEQ ID NO: 2928614 - RNA, 19 nt, Artificial Sequence
  Description of Artificial Sequence: Synthetic oligonucleotide
cauauacgucuuuuagcaa

SEQ ID NO: 2928615 - RNA, 19 nt, Artificial Sequence
  Description of Artificial Sequence: Synthetic oligonucleotide
gugcuugggagccguggag

SEQ ID NO: 2928616 - RNA, 19 nt, Artificial Sequence
  Description of Artificial Sequence: Synthetic oligonucleotide
cuccgcgcgguucuccagg

SEQ ID NO: 2928617 - RNA, 19 nt, Artificial Sequence
  Description of Artificial Sequence: Synthetic oligonucleotide
cgugauguccuaucggcag

SEQ ID NO: 2928618 - RNA, 19 nt, Artificial Sequence
  Description of Artificial Sequence: Synthetic oligonucleotide
ccugcugaucucucgcucc

SEQ ID NO: 2928619 - RNA, 19 nt, Artificial Sequence
  Description of Artificial Sequence: Synthetic oligonucleotide
caacagcguguuaucuuuc

SEQ ID NO: 2928620 - RNA, 19 nt, Artificial Sequence
  Description of Artificial Sequence: Synthetic oligonucleotide
gaaguuccucacggcgcgg

SEQ ID NO: 2928621 - RNA, 19 nt, Artificial Sequence
  Description of Artificial Sequence: Synthetic oligonucleotide
ggaauguucacaacauucu

SEQ ID NO: 2928622 - RNA, 19 nt, Artificial Sequence
  Description of Artificial Sequence: Synthetic oligonucleotide
gacaacagcguguuaucuu

SEQ ID NO: 2928623 - RNA, 19 nt, Artificial Sequence
  Description of Artificial Sequence: Synthetic oligonucleotide
auacgucuuuuagcaauga

SEQ ID NO: 2928624 - RNA, 19 nt, Artificial Sequence
  Description of Artificial Sequence: Synthetic oligonucleotide
ucucagcaguccacauuuc

SEQ ID NO: 2928625 - RNA, 19 nt, Artificial Sequence
  Description of Artificial Sequence: Synthetic oligonucleotide
cugcucgcgcaggaggucg

SEQ ID NO: 2928626 - RNA, 19 nt, Artificial Sequence
  Description of Artificial Sequence: Synthetic oligonucleotide
ccagguugaaguuccucac

SEQ ID NO: 2928627 - RNA, 19 nt, Artificial Sequence
  Description of Artificial Sequence: Synthetic oligonucleotide
cuuauccacgugauguccu

SEQ ID NO: 2928628 - RNA, 19 nt, Artificial Sequence
  Description of Artificial Sequence: Synthetic oligonucleotide
guucuccagguugaaguuc

SEQ ID NO: 2928629 - RNA, 19 nt, Artificial Sequence
  Description of Artificial Sequence: Synthetic oligonucleotide
ccauauuucaacaucuuuu

SEQ ID NO: 2928630 - RNA, 19 nt, Artificial Sequence
  Description of Artificial Sequence: Synthetic oligonucleotide
gcugacucagcugcucgcg

SEQ ID NO: 2928631 - RNA, 19 nt, Artificial Sequence
  Description of Artificial Sequence: Synthetic oligonucleotide
cagcguguuaucuuuccua

SEQ ID NO: 2928632 - RNA, 19 nt, Artificial Sequence
  Description of Artificial Sequence: Synthetic oligonucleotide
uugguccugcugaucucuc

SEQ ID NO: 2928633 - RNA, 19 nt, Artificial Sequence
  Description of Artificial Sequence: Synthetic oligonucleotide
ucacggcgcggcucacgcg

SEQ ID NO: 2928634 - RNA, 19 nt, Artificial Sequence
  Description of Artificial Sequence: Synthetic oligonucleotide
cuuugauuucugggugcug

SEQ ID NO: 2928635 - RNA, 19 nt, Artificial Sequence
  Description of Artificial Sequence: Synthetic oligonucleotide
gagaaaguuuaugauuauu

SEQ ID NO: 2928636 - RNA, 19 nt, Artificial Sequence
  Description of Artificial Sequence: Synthetic oligonucleotide
aguuccucacggcgcggcu

SEQ ID NO: 2928637 - RNA, 19 nt, Artificial Sequence
  Description of Artificial Sequence: Synthetic oligonucleotide
ccacgugauguccuaucgg

SEQ ID NO: 2928638 - RNA, 19 nt, Artificial Sequence
  Description of Artificial Sequence: Synthetic oligonucleotide
uuuuaccgguagggaagac

SEQ ID NO: 2928639 - RNA, 19 nt, Artificial Sequence
  Description of Artificial Sequence: Synthetic oligonucleotide
ugcucgcgcaggaggucgc

SEQ ID NO: 2928640 - RNA, 19 nt, Artificial Sequence
  Description of Artificial Sequence: Synthetic oligonucleotide
cuugggagccguggagggc

SEQ ID NO: 2928641 - RNA, 19 nt, Artificial Sequence
  Description of Artificial Sequence: Synthetic oligonucleotide
cucacgcgaagcucccauc

SEQ ID NO: 2928642 - RNA, 19 nt, Artificial Sequence
  Description of Artificial Sequence: Synthetic oligonucleotide
acgugauguccuaucggca

SEQ ID NO: 2928643 - RNA, 19 nt, Artificial Sequence
  Description of Artificial Sequence: Synthetic oligonucleotide
uccuuugguucuugccaua

SEQ ID NO: 2928644 - RNA, 19 nt, Artificial Sequence
  Description of Artificial Sequence: Synthetic oligonucleotide
uauccacgugauguccuau

SEQ ID NO: 2928645 - RNA, 19 nt, Artificial Sequence
  Description of Artificial Sequence: Synthetic oligonucleotide
acucagcugcucgcgcagg

SEQ ID NO: 2928646 - RNA, 19 nt, Artificial Sequence
  Description of Artificial Sequence: Synthetic oligonucleotide
ggacuccacauauacgucu

SEQ ID NO: 2928647 - RNA, 19 nt, Artificial Sequence
  Description of Artificial Sequence: Synthetic oligonucleotide
ccuuugggaauguucacaa

SEQ ID NO: 2928648 - RNA, 19 nt, Artificial Sequence
  Description of Artificial Sequence: Synthetic oligonucleotide
caccggaucuuuggacucc

SEQ ID NO: 2928649 - RNA, 19 nt, Artificial Sequence
  Description of Artificial Sequence: Synthetic oligonucleotide
gagaagugucaaugcuucu

SEQ ID NO: 2928650 - RNA, 19 nt, Artificial Sequence
  Description of Artificial Sequence: Synthetic oligonucleotide
caggaggucgcgcguggac

SEQ ID NO: 2928651 - RNA, 19 nt, Artificial Sequence
  Description of Artificial Sequence: Synthetic oligonucleotide
cucagcaguccacauuucu

SEQ ID NO: 2928652 - RNA, 19 nt, Artificial Sequence
  Description of Artificial Sequence: Synthetic oligonucleotide
cguguuaucuuuccuagaa

SEQ ID NO: 2928653 - RNA, 19 nt, Artificial Sequence
  Description of Artificial Sequence: Synthetic oligonucleotide
cacauuucuggagaaaguu

SEQ ID NO: 2928654 - RNA, 19 nt, Artificial Sequence
  Description of Artificial Sequence: Synthetic oligonucleotide
gguucuugccauauuucaa

SEQ ID NO: 2928655 - RNA, 19 nt, Artificial Sequence
  Description of Artificial Sequence: Synthetic oligonucleotide
acuccacauauacgucuuu

SEQ ID NO: 2928656 - RNA, 19 nt, Artificial Sequence
  Description of Artificial Sequence: Synthetic oligonucleotide
ugcugaucucucgcuccgc

SEQ ID NO: 2928657 - RNA, 19 nt, Artificial Sequence
  Description of Artificial Sequence: Synthetic oligonucleotide
ggugcuugggagccgugga

SEQ ID NO: 2928658 - RNA, 19 nt, Artificial Sequence
  Description of Artificial Sequence: Synthetic oligonucleotide
ggcuugguccugcugaucu

SEQ ID NO: 2928659 - RNA, 19 nt, Artificial Sequence
  Description of Artificial Sequence: Synthetic oligonucleotide
gggcaauuuucucagcagu

SEQ ID NO: 2928660 - RNA, 19 nt, Artificial Sequence
  Description of Artificial Sequence: Synthetic oligonucleotide
uccgcgcgguucuccaggu

SEQ ID NO: 2928661 - RNA, 19 nt, Artificial Sequence
  Description of Artificial Sequence: Synthetic oligonucleotide
cacgcgaagcucccaucuc

SEQ ID NO: 2928662 - RNA, 19 nt, Artificial Sequence
  Description of Artificial Sequence: Synthetic oligonucleotide
cacggcgcggcucacgcga

SEQ ID NO: 2928663 - RNA, 19 nt, Artificial Sequence
  Description of Artificial Sequence: Synthetic oligonucleotide
aucggcagucugaauuccu

SEQ ID NO: 2928664 - RNA, 19 nt, Artificial Sequence
  Description of Artificial Sequence: Synthetic oligonucleotide
agcugcucgcgcaggaggu

SEQ ID NO: 2928665 - RNA, 19 nt, Artificial Sequence
  Description of Artificial Sequence: Synthetic oligonucleotide
gggugcuugggagccgugg

SEQ ID NO: 2928666 - RNA, 19 nt, Artificial Sequence
  Description of Artificial Sequence: Synthetic oligonucleotide
accggaucuuuggacucca

SEQ ID NO: 2928667 - RNA, 19 nt, Artificial Sequence
  Description of Artificial Sequence: Synthetic oligonucleotide
gugauguccuaucggcagu

SEQ ID NO: 2928668 - RNA, 19 nt, Artificial Sequence
  Description of Artificial Sequence: Synthetic oligonucleotide
gaggucgcgcguggacggg

SEQ ID NO: 2928669 - RNA, 19 nt, Artificial Sequence
  Description of Artificial Sequence: Synthetic oligonucleotide
gacgggugcuugggagccg

SEQ ID NO: 2928670 - RNA, 19 nt, Artificial Sequence
  Description of Artificial Sequence: Synthetic oligonucleotide
cagucugaauuccuuuggu

SEQ ID NO: 2928671 - RNA, 19 nt, Artificial Sequence
  Description of Artificial Sequence: Synthetic oligonucleotide
uccuaucggcagucugaau

SEQ ID NO: 2928672 - RNA, 19 nt, Artificial Sequence
  Description of Artificial Sequence: Synthetic oligonucleotide
ggaagacaccggaucuuug

SEQ ID NO: 2928673 - RNA, 19 nt, Artificial Sequence
  Description of Artificial Sequence: Synthetic oligonucleotide
agggaagacaccggaucuu

SEQ ID NO: 2928674 - RNA, 19 nt, Artificial Sequence
  Description of Artificial Sequence: Synthetic oligonucleotide
ggacgggugcuugggagcc

SEQ ID NO: 2928675 - RNA, 19 nt, Artificial Sequence
  Description of Artificial Sequence: Synthetic oligonucleotide
gcggcucacgcgaagcucc

SEQ ID NO: 2928676 - RNA, 19 nt, Artificial Sequence
  Description of Artificial Sequence: Synthetic oligonucleotide
gccuuugggaauguucaca

SEQ ID NO: 2928677 - RNA, 19 nt, Artificial Sequence
  Description of Artificial Sequence: Synthetic oligonucleotide
ccuaucggcagucugaauu

SEQ ID NO: 2928678 - RNA, 19 nt, Artificial Sequence
  Description of Artificial Sequence: Synthetic oligonucleotide
guccuaucggcagucugaa

SEQ ID NO: 2928679 - RNA, 19 nt, Artificial Sequence
  Description of Artificial Sequence: Synthetic oligonucleotide
caguucuaaaugguacucu

SEQ ID NO: 2928680 - RNA, 19 nt, Artificial Sequence
  Description of Artificial Sequence: Synthetic oligonucleotide
ugguacucuugggcaauuu

SEQ ID NO: 2928681 - RNA, 19 nt, Artificial Sequence
  Description of Artificial Sequence: Synthetic oligonucleotide
ccgguagggaagacaccgg

SEQ ID NO: 2928682 - RNA, 19 nt, Artificial Sequence
  Description of Artificial Sequence: Synthetic oligonucleotide
cucagcugcucgcgcagga

SEQ ID NO: 2928683 - RNA, 19 nt, Artificial Sequence
  Description of Artificial Sequence: Synthetic oligonucleotide
ggagccguggagggcuugg

SEQ ID NO: 2928684 - RNA, 19 nt, Artificial Sequence
  Description of Artificial Sequence: Synthetic oligonucleotide
cuugguccugcugaucucu

SEQ ID NO: 2928685 - RNA, 19 nt, Artificial Sequence
  Description of Artificial Sequence: Synthetic oligonucleotide
acgggugcuugggagccgu

SEQ ID NO: 2928686 - RNA, 19 nt, Artificial Sequence
  Description of Artificial Sequence: Synthetic oligonucleotide
gucgcgcguggacgggugc

SEQ ID NO: 2928687 - RNA, 19 nt, Artificial Sequence
  Description of Artificial Sequence: Synthetic oligonucleotide
gacuccacauauacgucuu

SEQ ID NO: 2928688 - RNA, 19 nt, Artificial Sequence
  Description of Artificial Sequence: Synthetic oligonucleotide
caacagaaaucuugccuuu

SEQ ID NO: 2928689 - RNA, 19 nt, Artificial Sequence
  Description of Artificial Sequence: Synthetic oligonucleotide
guuccucacggcgcggcuc

SEQ ID NO: 2928690 - RNA, 19 nt, Artificial Sequence
  Description of Artificial Sequence: Synthetic oligonucleotide
gccauauuucaacaucuuu

SEQ ID NO: 2928691 - RNA, 19 nt, Artificial Sequence
  Description of Artificial Sequence: Synthetic oligonucleotide
ggagaaaguuuaugauuau

SEQ ID NO: 2928692 - RNA, 19 nt, Artificial Sequence
  Description of Artificial Sequence: Synthetic oligonucleotide
cucgcgcaggaggucgcgc

SEQ ID NO: 2928693 - RNA, 19 nt, Artificial Sequence
  Description of Artificial Sequence: Synthetic oligonucleotide
ucgcgcguggacgggugcu

SEQ ID NO: 2928694 - RNA, 19 nt, Artificial Sequence
  Description of Artificial Sequence: Synthetic oligonucleotide
gguacucuugggcaauuuu

SEQ ID NO: 2928695 - RNA, 19 nt, Artificial Sequence
  Description of Artificial Sequence: Synthetic oligonucleotide
aucucucgcuccgcgcggu

SEQ ID NO: 2928696 - RNA, 19 nt, Artificial Sequence
  Description of Artificial Sequence: Synthetic oligonucleotide
guccacauuucuggagaaa

SEQ ID NO: 2928697 - RNA, 19 nt, Artificial Sequence
  Description of Artificial Sequence: Synthetic oligonucleotide
gauguccuaucggcagucu

SEQ ID NO: 2928698 - RNA, 19 nt, Artificial Sequence
  Description of Artificial Sequence: Synthetic oligonucleotide
gcguguuaucuuuccuaga

SEQ ID NO: 2928699 - RNA, 19 nt, Artificial Sequence
  Description of Artificial Sequence: Synthetic oligonucleotide
cgcgcgguucuccagguug

SEQ ID NO: 2928700 - RNA, 19 nt, Artificial Sequence
  Description of Artificial Sequence: Synthetic oligonucleotide
guccugcugaucucucgcu

SEQ ID NO: 2928701 - RNA, 19 nt, Artificial Sequence
  Description of Artificial Sequence: Synthetic oligonucleotide
ucgcuccgcgcgguucucc

SEQ ID NO: 2928702 - RNA, 19 nt, Artificial Sequence
  Description of Artificial Sequence: Synthetic oligonucleotide
aucuugccuuugggaaugu

SEQ ID NO: 2928703 - RNA, 19 nt, Artificial Sequence
  Description of Artificial Sequence: Synthetic oligonucleotide
gcguggacgggugcuuggg

SEQ ID NO: 2928704 - RNA, 19 nt, Artificial Sequence
  Description of Artificial Sequence: Synthetic oligonucleotide
gguucuccagguugaaguu

SEQ ID NO: 2928705 - RNA, 19 nt, Artificial Sequence
  Description of Artificial Sequence: Synthetic oligonucleotide
gcaaugacaacagcguguu

SEQ ID NO: 2928706 - RNA, 19 nt, Artificial Sequence
  Description of Artificial Sequence: Synthetic oligonucleotide
ucucucgcuccgcgcgguu

SEQ ID NO: 2928707 - RNA, 19 nt, Artificial Sequence
  Description of Artificial Sequence: Synthetic oligonucleotide
cucucgcuccgcgcgguuc

SEQ ID NO: 2928708 - RNA, 19 nt, Artificial Sequence
  Description of Artificial Sequence: Synthetic oligonucleotide
gcuugguccugcugaucuc

SEQ ID NO: 2928709 - RNA, 19 nt, Artificial Sequence
  Description of Artificial Sequence: Synthetic oligonucleotide
augguacucuugggcaauu

SEQ ID NO: 2928710 - RNA, 19 nt, Artificial Sequence
  Description of Artificial Sequence: Synthetic oligonucleotide
gcgguucuccagguugaag

SEQ ID NO: 2928711 - RNA, 19 nt, Artificial Sequence
  Description of Artificial Sequence: Synthetic oligonucleotide
ggcgcggcucacgcgaagc

SEQ ID NO: 2928712 - RNA, 19 nt, Artificial Sequence
  Description of Artificial Sequence: Synthetic oligonucleotide
cgguucuccagguugaagu

SEQ ID NO: 2928713 - RNA, 19 nt, Artificial Sequence
  Description of Artificial Sequence: Synthetic oligonucleotide
cuucuacaacagaaaucuu

SEQ ID NO: 2928714 - RNA, 19 nt, Artificial Sequence
  Description of Artificial Sequence: Synthetic oligonucleotide
cuccacauauacgucuuuu

SEQ ID NO: 2928715 - RNA, 19 nt, Artificial Sequence
  Description of Artificial Sequence: Synthetic oligonucleotide
aggucgcgcguggacgggu

SEQ ID NO: 2928716 - RNA, 19 nt, Artificial Sequence
  Description of Artificial Sequence: Synthetic oligonucleotide
ugggagccguggagggcuu

SEQ ID NO: 2928717 - RNA, 19 nt, Artificial Sequence
  Description of Artificial Sequence: Synthetic oligonucleotide
ccacauuucuggagaaagu

SEQ ID NO: 2928718 - RNA, 19 nt, Artificial Sequence
  Description of Artificial Sequence: Synthetic oligonucleotide
caaugacaacagcguguua

SEQ ID NO: 2928719 - RNA, 19 nt, Artificial Sequence
  Description of Artificial Sequence: Synthetic oligonucleotide
cggaucuuuggacuccaca

SEQ ID NO: 2928720 - RNA, 19 nt, Artificial Sequence
  Description of Artificial Sequence: Synthetic oligonucleotide
gcuccgcgcgguucuccag

SEQ ID NO: 2928721 - RNA, 19 nt, Artificial Sequence
  Description of Artificial Sequence: Synthetic oligonucleotide
gguagggaagacaccggau

SEQ ID NO: 2928722 - RNA, 19 nt, Artificial Sequence
  Description of Artificial Sequence: Synthetic oligonucleotide
cugaauuccuuugguucuu

SEQ ID NO: 2928723 - RNA, 19 nt, Artificial Sequence
  Description of Artificial Sequence: Synthetic oligonucleotide
gcucgcgcaggaggucgcg

SEQ ID NO: 2928724 - RNA, 19 nt, Artificial Sequence
  Description of Artificial Sequence: Synthetic oligonucleotide
cgcguggacgggugcuugg

SEQ ID NO: 2928725 - RNA, 19 nt, Artificial Sequence
  Description of Artificial Sequence: Synthetic oligonucleotide
cgguagggaagacaccgga

SEQ ID NO: 2928726 - RNA, 19 nt, Artificial Sequence
  Description of Artificial Sequence: Synthetic oligonucleotide
cgcaggaggucgcgcgugg

SEQ ID NO: 2928727 - RNA, 19 nt, Artificial Sequence
  Description of Artificial Sequence: Synthetic oligonucleotide
ggucgcgcguggacgggug

SEQ ID NO: 2928728 - RNA, 19 nt, Artificial Sequence
  Description of Artificial Sequence: Synthetic oligonucleotide
gcucacgcgaagcucccau

SEQ ID NO: 2928729 - RNA, 19 nt, Artificial Sequence
  Description of Artificial Sequence: Synthetic oligonucleotide
uccucacggcgcggcucac

SEQ ID NO: 2928730 - RNA, 19 nt, Artificial Sequence
  Description of Artificial Sequence: Synthetic oligonucleotide
ccggaucuuuggacuccac

SEQ ID NO: 2928731 - RNA, 19 nt, Artificial Sequence
  Description of Artificial Sequence: Synthetic oligonucleotide
ccucacggcgcggcucacg

SEQ ID NO: 2928732 - RNA, 19 nt, Artificial Sequence
  Description of Artificial Sequence: Synthetic oligonucleotide
gcgcgguucuccagguuga

SEQ ID NO: 2928733 - RNA, 19 nt, Artificial Sequence
  Description of Artificial Sequence: Synthetic oligonucleotide
gcgcaggaggucgcgcgug

SEQ ID NO: 2928734 - RNA, 19 nt, Artificial Sequence
  Description of Artificial Sequence: Synthetic oligonucleotide
cucgcuccgcgcgguucuc

SEQ ID NO: 2928735 - RNA, 19 nt, Artificial Sequence
  Description of Artificial Sequence: Synthetic oligonucleotide
gagccguggagggcuuggu

SEQ ID NO: 2928736 - RNA, 19 nt, Artificial Sequence
  Description of Artificial Sequence: Synthetic oligonucleotide
gcugcucgcgcaggagguc

SEQ ID NO: 2928737 - RNA, 19 nt, Artificial Sequence
  Description of Artificial Sequence: Synthetic oligonucleotide
gcgcguggacgggugcuug

SEQ ID NO: 2928738 - RNA, 19 nt, Artificial Sequence
  Description of Artificial Sequence: Synthetic oligonucleotide
cggcucacgcgaagcuccc

SEQ ID NO: 2928739 - RNA, 19 nt, Artificial Sequence
  Description of Artificial Sequence: Synthetic oligonucleotide
ccguggagggcuugguccu

SEQ ID NO: 2928740 - RNA, 19 nt, Artificial Sequence
  Description of Artificial Sequence: Synthetic oligonucleotide
gcaggaggucgcgcgugga

SEQ ID NO: 2928741 - RNA, 19 nt, Artificial Sequence
  Description of Artificial Sequence: Synthetic oligonucleotide
ccuuugguucuugccauau

SEQ ID NO: 2928742 - RNA, 19 nt, Artificial Sequence
  Description of Artificial Sequence: Synthetic oligonucleotide
gggagccguggagggcuug

SEQ ID NO: 2928743 - RNA, 19 nt, Artificial Sequence
  Description of Artificial Sequence: Synthetic oligonucleotide
ggcucacgcgaagcuccca

SEQ ID NO: 2928744 - RNA, 19 nt, Artificial Sequence
  Description of Artificial Sequence: Synthetic oligonucleotide
acggcgcggcucacgcgaa

SEQ ID NO: 2928745 - RNA, 19 nt, Artificial Sequence
  Description of Artificial Sequence: Synthetic oligonucleotide
cguggacgggugcuuggga

SEQ ID NO: 2928746 - RNA, 19 nt, Artificial Sequence
  Description of Artificial Sequence: Synthetic oligonucleotide
cgcggcucacgcgaagcuc

SEQ ID NO: 2928747 - RNA, 19 nt, Artificial Sequence
  Description of Artificial Sequence: Synthetic oligonucleotide
gcgcggcucacgcgaagcu

SEQ ID NO: 2928748 - RNA, 19 nt, Artificial Sequence
  Description of Artificial Sequence: Synthetic oligonucleotide
cguggagggcuugguccug

SEQ ID NO: 2928749 - RNA, 19 nt, Artificial Sequence
  Description of Artificial Sequence: Synthetic oligonucleotide
cgcuccgcgcgguucucca

SEQ ID NO: 2928750 - RNA, 19 nt, Artificial Sequence
  Description of Artificial Sequence: Synthetic oligonucleotide
cgggugcuugggagccgug

SEQ ID NO: 2928751 - RNA, 19 nt, Artificial Sequence
  Description of Artificial Sequence: Synthetic oligonucleotide
cggcagucugaauuccuuu

SEQ ID NO: 2928752 - RNA, 19 nt, Artificial Sequence
  Description of Artificial Sequence: Synthetic oligonucleotide
cggcgcggcucacgcgaag

SEQ ID NO: 2928753 - RNA, 19 nt, Artificial Sequence
  Description of Artificial Sequence: Synthetic oligonucleotide
cgcgguucuccagguugaa

SEQ ID NO: 2928754 - RNA, 19 nt, Artificial Sequence
  Description of Artificial Sequence: Synthetic oligonucleotide
cgcgcaggaggucgcgcgu

SEQ ID NO: 2928755 - RNA, 19 nt, Artificial Sequence
  Description of Artificial Sequence: Synthetic oligonucleotide
ccgcgcgguucuccagguu

SEQ ID NO: 2928756 - RNA, 19 nt, Artificial Sequence
  Description of Artificial Sequence: Synthetic oligonucleotide
cgcgcguggacgggugcuu

SEQ ID NO: 2928757 - RNA, 19 nt, Artificial Sequence
  Description of Artificial Sequence: Synthetic oligonucleotide
aaaaguaagaucugcagcc

SEQ ID NO: 2928758 - RNA, 19 nt, Artificial Sequence
  Description of Artificial Sequence: Synthetic oligonucleotide
aagaucugcagccacaucc

SEQ ID NO: 2928759 - RNA, 19 nt, Artificial Sequence
  Description of Artificial Sequence: Synthetic oligonucleotide
aaagcuacagaccacaaug

SEQ ID NO: 2928760 - RNA, 19 nt, Artificial Sequence
  Description of Artificial Sequence: Synthetic oligonucleotide
uauauacacaguuagagga

SEQ ID NO: 2928761 - RNA, 19 nt, Artificial Sequence
  Description of Artificial Sequence: Synthetic oligonucleotide
aaagagcucuuauauacac

SEQ ID NO: 2928762 - RNA, 19 nt, Artificial Sequence
  Description of Artificial Sequence: Synthetic oligonucleotide
uuaucagcuauacaugggg

SEQ ID NO: 2928763 - RNA, 19 nt, Artificial Sequence
  Description of Artificial Sequence: Synthetic oligonucleotide
uuguuaaucaggaagcuca

SEQ ID NO: 2928764 - RNA, 19 nt, Artificial Sequence
  Description of Artificial Sequence: Synthetic oligonucleotide
uuauauacacaguuagagg

SEQ ID NO: 2928765 - RNA, 19 nt, Artificial Sequence
  Description of Artificial Sequence: Synthetic oligonucleotide
aaaugauuaauggugacca

SEQ ID NO: 2928766 - RNA, 19 nt, Artificial Sequence
  Description of Artificial Sequence: Synthetic oligonucleotide
caaaagagcucuuauauac

SEQ ID NO: 2928767 - RNA, 19 nt, Artificial Sequence
  Description of Artificial Sequence: Synthetic oligonucleotide
uuaaucaggaagcucagga

SEQ ID NO: 2928768 - RNA, 19 nt, Artificial Sequence
  Description of Artificial Sequence: Synthetic oligonucleotide
uauacauggggccagugag

SEQ ID NO: 2928769 - RNA, 19 nt, Artificial Sequence
  Description of Artificial Sequence: Synthetic oligonucleotide
ucuacaugcuuccaaaggc

SEQ ID NO: 2928770 - RNA, 19 nt, Artificial Sequence
  Description of Artificial Sequence: Synthetic oligonucleotide
cuuauauacacaguuagag

SEQ ID NO: 2928771 - RNA, 19 nt, Artificial Sequence
  Description of Artificial Sequence: Synthetic oligonucleotide
ucauuaaugagccuuucca

SEQ ID NO: 2928772 - RNA, 19 nt, Artificial Sequence
  Description of Artificial Sequence: Synthetic oligonucleotide
aaggaaaaguaagaucugc

SEQ ID NO: 2928773 - RNA, 19 nt, Artificial Sequence
  Description of Artificial Sequence: Synthetic oligonucleotide
gaaaaguaagaucugcagc

SEQ ID NO: 2928774 - RNA, 19 nt, Artificial Sequence
  Description of Artificial Sequence: Synthetic oligonucleotide
agagcucuuauauacacag

SEQ ID NO: 2928775 - RNA, 19 nt, Artificial Sequence
  Description of Artificial Sequence: Synthetic oligonucleotide
ugauuaauggugaccacag

SEQ ID NO: 2928776 - RNA, 19 nt, Artificial Sequence
  Description of Artificial Sequence: Synthetic oligonucleotide
gaggaaaugauuaauggug

SEQ ID NO: 2928777 - RNA, 19 nt, Artificial Sequence
  Description of Artificial Sequence: Synthetic oligonucleotide
aaucaggaagcucaggacu

SEQ ID NO: 2928778 - RNA, 19 nt, Artificial Sequence
  Description of Artificial Sequence: Synthetic oligonucleotide
uacaucuucauucuccaug

SEQ ID NO: 2928779 - RNA, 19 nt, Artificial Sequence
  Description of Artificial Sequence: Synthetic oligonucleotide
aucagcuauacauggggcc

SEQ ID NO: 2928780 - RNA, 19 nt, Artificial Sequence
  Description of Artificial Sequence: Synthetic oligonucleotide
uucuacaucuucauucucc

SEQ ID NO: 2928781 - RNA, 19 nt, Artificial Sequence
  Description of Artificial Sequence: Synthetic oligonucleotide
cucaggacuucuuuaaugg

SEQ ID NO: 2928782 - RNA, 19 nt, Artificial Sequence
  Description of Artificial Sequence: Synthetic oligonucleotide
uguugaaaagcuacagacc

SEQ ID NO: 2928783 - RNA, 19 nt, Artificial Sequence
  Description of Artificial Sequence: Synthetic oligonucleotide
aaugauuaauggugaccac

SEQ ID NO: 2928784 - RNA, 19 nt, Artificial Sequence
  Description of Artificial Sequence: Synthetic oligonucleotide
guugaaaagcuacagacca

SEQ ID NO: 2928785 - RNA, 19 nt, Artificial Sequence
  Description of Artificial Sequence: Synthetic oligonucleotide
guguugaaaagcuacagac

SEQ ID NO: 2928786 - RNA, 19 nt, Artificial Sequence
  Description of Artificial Sequence: Synthetic oligonucleotide
ugacagguuguuaaucagg

SEQ ID NO: 2928787 - RNA, 19 nt, Artificial Sequence
  Description of Artificial Sequence: Synthetic oligonucleotide
auuaauggugaccacagaa

SEQ ID NO: 2928788 - RNA, 19 nt, Artificial Sequence
  Description of Artificial Sequence: Synthetic oligonucleotide
ucuuuaauggcaucuacau

SEQ ID NO: 2928789 - RNA, 19 nt, Artificial Sequence
  Description of Artificial Sequence: Synthetic oligonucleotide
aaguaagaucugcagccac

SEQ ID NO: 2928790 - RNA, 19 nt, Artificial Sequence
  Description of Artificial Sequence: Synthetic oligonucleotide
aguuguggaaucuccuggc

SEQ ID NO: 2928791 - RNA, 19 nt, Artificial Sequence
  Description of Artificial Sequence: Synthetic oligonucleotide
cagguuguuaaucaggaag

SEQ ID NO: 2928792 - RNA, 19 nt, Artificial Sequence
  Description of Artificial Sequence: Synthetic oligonucleotide
aaugagccuuuccaagaac

SEQ ID NO: 2928793 - RNA, 19 nt, Artificial Sequence
  Description of Artificial Sequence: Synthetic oligonucleotide
uaauggugaccacagaacu

SEQ ID NO: 2928794 - RNA, 19 nt, Artificial Sequence
  Description of Artificial Sequence: Synthetic oligonucleotide
aucuacaugcuuccaaagg

SEQ ID NO: 2928795 - RNA, 19 nt, Artificial Sequence
  Description of Artificial Sequence: Synthetic oligonucleotide
agguuguuaaucaggaagc

SEQ ID NO: 2928796 - RNA, 19 nt, Artificial Sequence
  Description of Artificial Sequence: Synthetic oligonucleotide
aaucuccuggcccuuauca

SEQ ID NO: 2928797 - RNA, 19 nt, Artificial Sequence
  Description of Artificial Sequence: Synthetic oligonucleotide
uacaugcuuccaaaggccg

SEQ ID NO: 2928798 - RNA, 19 nt, Artificial Sequence
  Description of Artificial Sequence: Synthetic oligonucleotide
uuaaugagccuuuccaaga

SEQ ID NO: 2928799 - RNA, 19 nt, Artificial Sequence
  Description of Artificial Sequence: Synthetic oligonucleotide
cuuuccaagaacuggcagc

SEQ ID NO: 2928800 - RNA, 19 nt, Artificial Sequence
  Description of Artificial Sequence: Synthetic oligonucleotide
uucuuuaauggcaucuaca

SEQ ID NO: 2928801 - RNA, 19 nt, Artificial Sequence
  Description of Artificial Sequence: Synthetic oligonucleotide
ucuuauauacacaguuaga

SEQ ID NO: 2928802 - RNA, 19 nt, Artificial Sequence
  Description of Artificial Sequence: Synthetic oligonucleotide
auggcaucuacaugcuucc

SEQ ID NO: 2928803 - RNA, 19 nt, Artificial Sequence
  Description of Artificial Sequence: Synthetic oligonucleotide
agcuacagaccacaaugcc

SEQ ID NO: 2928804 - RNA, 19 nt, Artificial Sequence
  Description of Artificial Sequence: Synthetic oligonucleotide
agaggaaaugauuaauggu

SEQ ID NO: 2928805 - RNA, 19 nt, Artificial Sequence
  Description of Artificial Sequence: Synthetic oligonucleotide
gaguuguggaaucuccugg

SEQ ID NO: 2928806 - RNA, 19 nt, Artificial Sequence
  Description of Artificial Sequence: Synthetic oligonucleotide
gaaaugauuaauggugacc

SEQ ID NO: 2928807 - RNA, 19 nt, Artificial Sequence
  Description of Artificial Sequence: Synthetic oligonucleotide
uucauuaaugagccuuucc

SEQ ID NO: 2928808 - RNA, 19 nt, Artificial Sequence
  Description of Artificial Sequence: Synthetic oligonucleotide
aagcuacagaccacaaugc

SEQ ID NO: 2928809 - RNA, 19 nt, Artificial Sequence
  Description of Artificial Sequence: Synthetic oligonucleotide
uuucucucugaguacuggg

SEQ ID NO: 2928810 - RNA, 19 nt, Artificial Sequence
  Description of Artificial Sequence: Synthetic oligonucleotide
cuuaucagcuauacauggg

SEQ ID NO: 2928811 - RNA, 19 nt, Artificial Sequence
  Description of Artificial Sequence: Synthetic oligonucleotide
ugaaaagcuacagaccaca

SEQ ID NO: 2928812 - RNA, 19 nt, Artificial Sequence
  Description of Artificial Sequence: Synthetic oligonucleotide
ucuacaucuucauucucca

SEQ ID NO: 2928813 - RNA, 19 nt, Artificial Sequence
  Description of Artificial Sequence: Synthetic oligonucleotide
ugaccacagaacuccaggg

SEQ ID NO: 2928814 - RNA, 19 nt, Artificial Sequence
  Description of Artificial Sequence: Synthetic oligonucleotide
uguuaaucaggaagcucag

SEQ ID NO: 2928815 - RNA, 19 nt, Artificial Sequence
  Description of Artificial Sequence: Synthetic oligonucleotide
ggaaaaguaagaucugcag

SEQ ID NO: 2928816 - RNA, 19 nt, Artificial Sequence
  Description of Artificial Sequence: Synthetic oligonucleotide
uagccuuucucucugagua

SEQ ID NO: 2928817 - RNA, 19 nt, Artificial Sequence
  Description of Artificial Sequence: Synthetic oligonucleotide
uaucagcuauacauggggc

SEQ ID NO: 2928818 - RNA, 19 nt, Artificial Sequence
  Description of Artificial Sequence: Synthetic oligonucleotide
cuacaugcuuccaaaggcc

SEQ ID NO: 2928819 - RNA, 19 nt, Artificial Sequence
  Description of Artificial Sequence: Synthetic oligonucleotide
acaucuucauucuccauga

SEQ ID NO: 2928820 - RNA, 19 nt, Artificial Sequence
  Description of Artificial Sequence: Synthetic oligonucleotide
acuucuacaucuucauucu

SEQ ID NO: 2928821 - RNA, 19 nt, Artificial Sequence
  Description of Artificial Sequence: Synthetic oligonucleotide
aaaagcuacagaccacaau

SEQ ID NO: 2928822 - RNA, 19 nt, Artificial Sequence
  Description of Artificial Sequence: Synthetic oligonucleotide
aauggugaccacagaacuc

SEQ ID NO: 2928823 - RNA, 19 nt, Artificial Sequence
  Description of Artificial Sequence: Synthetic oligonucleotide
ugcagccacauccuccucg

SEQ ID NO: 2928824 - RNA, 19 nt, Artificial Sequence
  Description of Artificial Sequence: Synthetic oligonucleotide
gaccacagaacuccagggg

SEQ ID NO: 2928825 - RNA, 19 nt, Artificial Sequence
  Description of Artificial Sequence: Synthetic oligonucleotide
uuguggaaucuccuggccc

SEQ ID NO: 2928826 - RNA, 19 nt, Artificial Sequence
  Description of Artificial Sequence: Synthetic oligonucleotide
uucucucugaguacugggc

SEQ ID NO: 2928827 - RNA, 19 nt, Artificial Sequence
  Description of Artificial Sequence: Synthetic oligonucleotide
ugaguuguggaaucuccug

SEQ ID NO: 2928828 - RNA, 19 nt, Artificial Sequence
  Description of Artificial Sequence: Synthetic oligonucleotide
uuuucauuaaugagccuuu

SEQ ID NO: 2928829 - RNA, 19 nt, Artificial Sequence
  Description of Artificial Sequence: Synthetic oligonucleotide
uaaucaggaagcucaggac

SEQ ID NO: 2928830 - RNA, 19 nt, Artificial Sequence
  Description of Artificial Sequence: Synthetic oligonucleotide
uguggaaucuccuggcccu

SEQ ID NO: 2928831 - RNA, 19 nt, Artificial Sequence
  Description of Artificial Sequence: Synthetic oligonucleotide
gaaguggguguugaaaagc

SEQ ID NO: 2928832 - RNA, 19 nt, Artificial Sequence
  Description of Artificial Sequence: Synthetic oligonucleotide
uucauucuccaugacaggu

SEQ ID NO: 2928833 - RNA, 19 nt, Artificial Sequence
  Description of Artificial Sequence: Synthetic oligonucleotide
agccuuuccaagaacuggc

SEQ ID NO: 2928834 - RNA, 19 nt, Artificial Sequence
  Description of Artificial Sequence: Synthetic oligonucleotide
ucucucugaguacugggcu

SEQ ID NO: 2928835 - RNA, 19 nt, Artificial Sequence
  Description of Artificial Sequence: Synthetic oligonucleotide
gggguuuucauuaaugagc

SEQ ID NO: 2928836 - RNA, 19 nt, Artificial Sequence
  Description of Artificial Sequence: Synthetic oligonucleotide
augacagguuguuaaucag

SEQ ID NO: 2928837 - RNA, 19 nt, Artificial Sequence
  Description of Artificial Sequence: Synthetic oligonucleotide
uaaugagccuuuccaagaa

SEQ ID NO: 2928838 - RNA, 19 nt, Artificial Sequence
  Description of Artificial Sequence: Synthetic oligonucleotide
uacacaguuagaggaaaug

SEQ ID NO: 2928839 - RNA, 19 nt, Artificial Sequence
  Description of Artificial Sequence: Synthetic oligonucleotide
aaaagagcucuuauauaca

SEQ ID NO: 2928840 - RNA, 19 nt, Artificial Sequence
  Description of Artificial Sequence: Synthetic oligonucleotide
ucaggacuucuuuaauggc

SEQ ID NO: 2928841 - RNA, 19 nt, Artificial Sequence
  Description of Artificial Sequence: Synthetic oligonucleotide
ucuccuggcccuuaucagc

SEQ ID NO: 2928842 - RNA, 19 nt, Artificial Sequence
  Description of Artificial Sequence: Synthetic oligonucleotide
gaacuggcagcccaccugc

SEQ ID NO: 2928843 - RNA, 19 nt, Artificial Sequence
  Description of Artificial Sequence: Synthetic oligonucleotide
ccuuaucagcuauacaugg

SEQ ID NO: 2928844 - RNA, 19 nt, Artificial Sequence
  Description of Artificial Sequence: Synthetic oligonucleotide
aaaggccgggguaacaaag

SEQ ID NO: 2928845 - RNA, 19 nt, Artificial Sequence
  Description of Artificial Sequence: Synthetic oligonucleotide
aaaguaagaucugcagcca

SEQ ID NO: 2928846 - RNA, 19 nt, Artificial Sequence
  Description of Artificial Sequence: Synthetic oligonucleotide
caugacagguuguuaauca

SEQ ID NO: 2928847 - RNA, 19 nt, Artificial Sequence
  Description of Artificial Sequence: Synthetic oligonucleotide
gagccuuuccaagaacugg

SEQ ID NO: 2928848 - RNA, 19 nt, Artificial Sequence
  Description of Artificial Sequence: Synthetic oligonucleotide
aagcucaggacuucuuuaa

SEQ ID NO: 2928849 - RNA, 19 nt, Artificial Sequence
  Description of Artificial Sequence: Synthetic oligonucleotide
augauuaauggugaccaca

SEQ ID NO: 2928850 - RNA, 19 nt, Artificial Sequence
  Description of Artificial Sequence: Synthetic oligonucleotide
ucagcuauacauggggcca

SEQ ID NO: 2928851 - RNA, 19 nt, Artificial Sequence
  Description of Artificial Sequence: Synthetic oligonucleotide
ggaacuaccugaguugugg

SEQ ID NO: 2928852 - RNA, 19 nt, Artificial Sequence
  Description of Artificial Sequence: Synthetic oligonucleotide
uugaaaagcuacagaccac

SEQ ID NO: 2928853 - RNA, 19 nt, Artificial Sequence
  Description of Artificial Sequence: Synthetic oligonucleotide
cauucuccaugacagguug

SEQ ID NO: 2928854 - RNA, 19 nt, Artificial Sequence
  Description of Artificial Sequence: Synthetic oligonucleotide
cugaguacugggcucacug

SEQ ID NO: 2928855 - RNA, 19 nt, Artificial Sequence
  Description of Artificial Sequence: Synthetic oligonucleotide
cuucuuuaauggcaucuac

SEQ ID NO: 2928856 - RNA, 19 nt, Artificial Sequence
  Description of Artificial Sequence: Synthetic oligonucleotide
uacauggggccagugagcc

SEQ ID NO: 2928857 - RNA, 19 nt, Artificial Sequence
  Description of Artificial Sequence: Synthetic oligonucleotide
uuccuugagggccucuccc

SEQ ID NO: 2928858 - RNA, 19 nt, Artificial Sequence
  Description of Artificial Sequence: Synthetic oligonucleotide
uggguguugaaaagcuaca

SEQ ID NO: 2928859 - RNA, 19 nt, Artificial Sequence
  Description of Artificial Sequence: Synthetic oligonucleotide
uccuugagggccucucccg

SEQ ID NO: 2928860 - RNA, 19 nt, Artificial Sequence
  Description of Artificial Sequence: Synthetic oligonucleotide
acacaguuagaggaaauga

SEQ ID NO: 2928861 - RNA, 19 nt, Artificial Sequence
  Description of Artificial Sequence: Synthetic oligonucleotide
agaacuggcagcccaccug

SEQ ID NO: 2928862 - RNA, 19 nt, Artificial Sequence
  Description of Artificial Sequence: Synthetic oligonucleotide
cuacagaccacaaugccaa

SEQ ID NO: 2928863 - RNA, 19 nt, Artificial Sequence
  Description of Artificial Sequence: Synthetic oligonucleotide
uauacacaguuagaggaaa

SEQ ID NO: 2928864 - RNA, 19 nt, Artificial Sequence
  Description of Artificial Sequence: Synthetic oligonucleotide
gacagguuguuaaucagga

SEQ ID NO: 2928865 - RNA, 19 nt, Artificial Sequence
  Description of Artificial Sequence: Synthetic oligonucleotide
cuucauucuccaugacagg

SEQ ID NO: 2928866 - RNA, 19 nt, Artificial Sequence
  Description of Artificial Sequence: Synthetic oligonucleotide
cugcccgcuuccuugaggg

SEQ ID NO: 2928867 - RNA, 19 nt, Artificial Sequence
  Description of Artificial Sequence: Synthetic oligonucleotide
aaguggguguugaaaagcu

SEQ ID NO: 2928868 - RNA, 19 nt, Artificial Sequence
  Description of Artificial Sequence: Synthetic oligonucleotide
ccaaggaaaaguaagaucu

SEQ ID NO: 2928869 - RNA, 19 nt, Artificial Sequence
  Description of Artificial Sequence: Synthetic oligonucleotide
ggguuuucauuaaugagcc

SEQ ID NO: 2928870 - RNA, 19 nt, Artificial Sequence
  Description of Artificial Sequence: Synthetic oligonucleotide
ugaguacugggcucacugc

SEQ ID NO: 2928871 - RNA, 19 nt, Artificial Sequence
  Description of Artificial Sequence: Synthetic oligonucleotide
aagaacuggcagcccaccu

SEQ ID NO: 2928872 - RNA, 19 nt, Artificial Sequence
  Description of Artificial Sequence: Synthetic oligonucleotide
acagaccacaaugccaagg

SEQ ID NO: 2928873 - RNA, 19 nt, Artificial Sequence
  Description of Artificial Sequence: Synthetic oligonucleotide
aacuaccugaguuguggaa

SEQ ID NO: 2928874 - RNA, 19 nt, Artificial Sequence
  Description of Artificial Sequence: Synthetic oligonucleotide
caucuacaugcuuccaaag

SEQ ID NO: 2928875 - RNA, 19 nt, Artificial Sequence
  Description of Artificial Sequence: Synthetic oligonucleotide
aggaaaugauuaaugguga

SEQ ID NO: 2928876 - RNA, 19 nt, Artificial Sequence
  Description of Artificial Sequence: Synthetic oligonucleotide
caguuagaggaaaugauua

SEQ ID NO: 2928877 - RNA, 19 nt, Artificial Sequence
  Description of Artificial Sequence: Synthetic oligonucleotide
aaggccgggguaacaaagg

SEQ ID NO: 2928878 - RNA, 19 nt, Artificial Sequence
  Description of Artificial Sequence: Synthetic oligonucleotide
cuuucucucugaguacugg

SEQ ID NO: 2928879 - RNA, 19 nt, Artificial Sequence
  Description of Artificial Sequence: Synthetic oligonucleotide
auacauggggccagugagc

SEQ ID NO: 2928880 - RNA, 19 nt, Artificial Sequence
  Description of Artificial Sequence: Synthetic oligonucleotide
caugcuuccaaaggccggg

SEQ ID NO: 2928881 - RNA, 19 nt, Artificial Sequence
  Description of Artificial Sequence: Synthetic oligonucleotide
cauuaaugagccuuuccaa

SEQ ID NO: 2928882 - RNA, 19 nt, Artificial Sequence
  Description of Artificial Sequence: Synthetic oligonucleotide
gaguacugggcucacugca

SEQ ID NO: 2928883 - RNA, 19 nt, Artificial Sequence
  Description of Artificial Sequence: Synthetic oligonucleotide
agccuuucucucugaguac

SEQ ID NO: 2928884 - RNA, 19 nt, Artificial Sequence
  Description of Artificial Sequence: Synthetic oligonucleotide
aggccgggguaacaaaggg

SEQ ID NO: 2928885 - RNA, 19 nt, Artificial Sequence
  Description of Artificial Sequence: Synthetic oligonucleotide
guggguguugaaaagcuac

SEQ ID NO: 2928886 - RNA, 19 nt, Artificial Sequence
  Description of Artificial Sequence: Synthetic oligonucleotide
aucuccuggcccuuaucag

SEQ ID NO: 2928887 - RNA, 19 nt, Artificial Sequence
  Description of Artificial Sequence: Synthetic oligonucleotide
guuaaucaggaagcucagg

SEQ ID NO: 2928888 - RNA, 19 nt, Artificial Sequence
  Description of Artificial Sequence: Synthetic oligonucleotide
cuuagccuuucucucugag

SEQ ID NO: 2928889 - RNA, 19 nt, Artificial Sequence
  Description of Artificial Sequence: Synthetic oligonucleotide
guuguggaaucuccuggcc

SEQ ID NO: 2928890 - RNA, 19 nt, Artificial Sequence
  Description of Artificial Sequence: Synthetic oligonucleotide
ucauucuccaugacagguu

SEQ ID NO: 2928891 - RNA, 19 nt, Artificial Sequence
  Description of Artificial Sequence: Synthetic oligonucleotide
aagagcucuuauauacaca

SEQ ID NO: 2928892 - RNA, 19 nt, Artificial Sequence
  Description of Artificial Sequence: Synthetic oligonucleotide
acugggcucacugcaaaag

SEQ ID NO: 2928893 - RNA, 19 nt, Artificial Sequence
  Description of Artificial Sequence: Synthetic oligonucleotide
ucucugaguacugggcuca

SEQ ID NO: 2928894 - RNA, 19 nt, Artificial Sequence
  Description of Artificial Sequence: Synthetic oligonucleotide
cuggcagcccaccugcccg

SEQ ID NO: 2928895 - RNA, 19 nt, Artificial Sequence
  Description of Artificial Sequence: Synthetic oligonucleotide
acuaccugaguuguggaau

SEQ ID NO: 2928896 - RNA, 19 nt, Artificial Sequence
  Description of Artificial Sequence: Synthetic oligonucleotide
ugccaaggaaaaguaagau

SEQ ID NO: 2928897 - RNA, 19 nt, Artificial Sequence
  Description of Artificial Sequence: Synthetic oligonucleotide
accuuagccuuucucucug

SEQ ID NO: 2928898 - RNA, 19 nt, Artificial Sequence
  Description of Artificial Sequence: Synthetic oligonucleotide
cuaccugaguuguggaauc

SEQ ID NO: 2928899 - RNA, 19 nt, Artificial Sequence
  Description of Artificial Sequence: Synthetic oligonucleotide
acaguuagaggaaaugauu

SEQ ID NO: 2928900 - RNA, 19 nt, Artificial Sequence
  Description of Artificial Sequence: Synthetic oligonucleotide
augagccuuuccaagaacu

SEQ ID NO: 2928901 - RNA, 19 nt, Artificial Sequence
  Description of Artificial Sequence: Synthetic oligonucleotide
gaccacaaugccaaggaaa

SEQ ID NO: 2928902 - RNA, 19 nt, Artificial Sequence
  Description of Artificial Sequence: Synthetic oligonucleotide
gaagcucaggacuucuuua

SEQ ID NO: 2928903 - RNA, 19 nt, Artificial Sequence
  Description of Artificial Sequence: Synthetic oligonucleotide
gauuaauggugaccacaga

SEQ ID NO: 2928904 - RNA, 19 nt, Artificial Sequence
  Description of Artificial Sequence: Synthetic oligonucleotide
accacaaugccaaggaaaa

SEQ ID NO: 2928905 - RNA, 19 nt, Artificial Sequence
  Description of Artificial Sequence: Synthetic oligonucleotide
ggaaaugauuaauggugac

SEQ ID NO: 2928906 - RNA, 19 nt, Artificial Sequence
  Description of Artificial Sequence: Synthetic oligonucleotide
agccacauccuccucggga

SEQ ID NO: 2928907 - RNA, 19 nt, Artificial Sequence
  Description of Artificial Sequence: Synthetic oligonucleotide
guuguuaaucaggaagcuc

SEQ ID NO: 2928908 - RNA, 19 nt, Artificial Sequence
  Description of Artificial Sequence: Synthetic oligonucleotide
uugagggccucucccgccc

SEQ ID NO: 2928909 - RNA, 19 nt, Artificial Sequence
  Description of Artificial Sequence: Synthetic oligonucleotide
gguguugaaaagcuacaga

SEQ ID NO: 2928910 - RNA, 19 nt, Artificial Sequence
  Description of Artificial Sequence: Synthetic oligonucleotide
aguaagaucugcagccaca

SEQ ID NO: 2928911 - RNA, 19 nt, Artificial Sequence
  Description of Artificial Sequence: Synthetic oligonucleotide
cagaccacaaugccaagga

SEQ ID NO: 2928912 - RNA, 19 nt, Artificial Sequence
  Description of Artificial Sequence: Synthetic oligonucleotide
cuauacauggggccaguga

SEQ ID NO: 2928913 - RNA, 19 nt, Artificial Sequence
  Description of Artificial Sequence: Synthetic oligonucleotide
gcucaggacuucuuuaaug

SEQ ID NO: 2928914 - RNA, 19 nt, Artificial Sequence
  Description of Artificial Sequence: Synthetic oligonucleotide
guuuucauuaaugagccuu

SEQ ID NO: 2928915 - RNA, 19 nt, Artificial Sequence
  Description of Artificial Sequence: Synthetic oligonucleotide
ccugaguuguggaaucucc

SEQ ID NO: 2928916 - RNA, 19 nt, Artificial Sequence
  Description of Artificial Sequence: Synthetic oligonucleotide
auauacacaguuagaggaa

SEQ ID NO: 2928917 - RNA, 19 nt, Artificial Sequence
  Description of Artificial Sequence: Synthetic oligonucleotide
gaacuaccugaguugugga

SEQ ID NO: 2928918 - RNA, 19 nt, Artificial Sequence
  Description of Artificial Sequence: Synthetic oligonucleotide
acaugcuuccaaaggccgg

SEQ ID NO: 2928919 - RNA, 19 nt, Artificial Sequence
  Description of Artificial Sequence: Synthetic oligonucleotide
cuuccuugagggccucucc

SEQ ID NO: 2928920 - RNA, 19 nt, Artificial Sequence
  Description of Artificial Sequence: Synthetic oligonucleotide
augccaaggaaaaguaaga

SEQ ID NO: 2928921 - RNA, 19 nt, Artificial Sequence
  Description of Artificial Sequence: Synthetic oligonucleotide
gccaaggaaaaguaagauc

SEQ ID NO: 2928922 - RNA, 19 nt, Artificial Sequence
  Description of Artificial Sequence: Synthetic oligonucleotide
cucacugcaaaagagcucu

SEQ ID NO: 2928923 - RNA, 19 nt, Artificial Sequence
  Description of Artificial Sequence: Synthetic oligonucleotide
cucucugaguacugggcuc

SEQ ID NO: 2928924 - RNA, 19 nt, Artificial Sequence
  Description of Artificial Sequence: Synthetic oligonucleotide
gacuucuuuaauggcaucu

SEQ ID NO: 2928925 - RNA, 19 nt, Artificial Sequence
  Description of Artificial Sequence: Synthetic oligonucleotide
uccuccucgggaccuuagc

SEQ ID NO: 2928926 - RNA, 19 nt, Artificial Sequence
  Description of Artificial Sequence: Synthetic oligonucleotide
aggacuucuuuaauggcau

SEQ ID NO: 2928927 - RNA, 19 nt, Artificial Sequence
  Description of Artificial Sequence: Synthetic oligonucleotide
gcccuuaucagcuauacau

SEQ ID NO: 2928928 - RNA, 19 nt, Artificial Sequence
  Description of Artificial Sequence: Synthetic oligonucleotide
accugaguuguggaaucuc

SEQ ID NO: 2928929 - RNA, 19 nt, Artificial Sequence
  Description of Artificial Sequence: Synthetic oligonucleotide
uaagaucugcagccacauc

SEQ ID NO: 2928930 - RNA, 19 nt, Artificial Sequence
  Description of Artificial Sequence: Synthetic oligonucleotide
acagguuguuaaucaggaa

SEQ ID NO: 2928931 - RNA, 19 nt, Artificial Sequence
  Description of Artificial Sequence: Synthetic oligonucleotide
gggaaguggguguugaaaa

SEQ ID NO: 2928932 - RNA, 19 nt, Artificial Sequence
  Description of Artificial Sequence: Synthetic oligonucleotide
aacuggcagcccaccugcc

SEQ ID NO: 2928933 - RNA, 19 nt, Artificial Sequence
  Description of Artificial Sequence: Synthetic oligonucleotide
uucuccaugacagguuguu

SEQ ID NO: 2928934 - RNA, 19 nt, Artificial Sequence
  Description of Artificial Sequence: Synthetic oligonucleotide
guuagaggaaaugauuaau

SEQ ID NO: 2928935 - RNA, 19 nt, Artificial Sequence
  Description of Artificial Sequence: Synthetic oligonucleotide
ggguguugaaaagcuacag

SEQ ID NO: 2928936 - RNA, 19 nt, Artificial Sequence
  Description of Artificial Sequence: Synthetic oligonucleotide
cuucuacaucuucauucuc

SEQ ID NO: 2928937 - RNA, 19 nt, Artificial Sequence
  Description of Artificial Sequence: Synthetic oligonucleotide
agaucugcagccacauccu

SEQ ID NO: 2928938 - RNA, 19 nt, Artificial Sequence
  Description of Artificial Sequence: Synthetic oligonucleotide
ugcuuccaaaggccggggu

SEQ ID NO: 2928939 - RNA, 19 nt, Artificial Sequence
  Description of Artificial Sequence: Synthetic oligonucleotide
uccucgggaccuuagccuu

SEQ ID NO: 2928940 - RNA, 19 nt, Artificial Sequence
  Description of Artificial Sequence: Synthetic oligonucleotide
uggcccuuaucagcuauac

SEQ ID NO: 2928941 - RNA, 19 nt, Artificial Sequence
  Description of Artificial Sequence: Synthetic oligonucleotide
cccuuaucagcuauacaug

SEQ ID NO: 2928942 - RNA, 19 nt, Artificial Sequence
  Description of Artificial Sequence: Synthetic oligonucleotide
uggugaccacagaacucca

SEQ ID NO: 2928943 - RNA, 19 nt, Artificial Sequence
  Description of Artificial Sequence: Synthetic oligonucleotide
agaccacaaugccaaggaa

SEQ ID NO: 2928944 - RNA, 19 nt, Artificial Sequence
  Description of Artificial Sequence: Synthetic oligonucleotide
caaugccaaggaaaaguaa

SEQ ID NO: 2928945 - RNA, 19 nt, Artificial Sequence
  Description of Artificial Sequence: Synthetic oligonucleotide
caagaacuggcagcccacc

SEQ ID NO: 2928946 - RNA, 19 nt, Artificial Sequence
  Description of Artificial Sequence: Synthetic oligonucleotide
cacaguuagaggaaaugau

SEQ ID NO: 2928947 - RNA, 19 nt, Artificial Sequence
  Description of Artificial Sequence: Synthetic oligonucleotide
gaaaagcuacagaccacaa

SEQ ID NO: 2928948 - RNA, 19 nt, Artificial Sequence
  Description of Artificial Sequence: Synthetic oligonucleotide
gaaucuccuggcccuuauc

SEQ ID NO: 2928949 - RNA, 19 nt, Artificial Sequence
  Description of Artificial Sequence: Synthetic oligonucleotide
gggccagugagccuucccc

SEQ ID NO: 2928950 - RNA, 19 nt, Artificial Sequence
  Description of Artificial Sequence: Synthetic oligonucleotide
gcuacagaccacaaugcca

SEQ ID NO: 2928951 - RNA, 19 nt, Artificial Sequence
  Description of Artificial Sequence: Synthetic oligonucleotide
uacugggcucacugcaaaa

SEQ ID NO: 2928952 - RNA, 19 nt, Artificial Sequence
  Description of Artificial Sequence: Synthetic oligonucleotide
gcaucuacaugcuuccaaa

SEQ ID NO: 2928953 - RNA, 19 nt, Artificial Sequence
  Description of Artificial Sequence: Synthetic oligonucleotide
cugggcucacugcaaaaga

SEQ ID NO: 2928954 - RNA, 19 nt, Artificial Sequence
  Description of Artificial Sequence: Synthetic oligonucleotide
ccuuuccaagaacuggcag

SEQ ID NO: 2928955 - RNA, 19 nt, Artificial Sequence
  Description of Artificial Sequence: Synthetic oligonucleotide
gggaccuuagccuuucucu

SEQ ID NO: 2928956 - RNA, 19 nt, Artificial Sequence
  Description of Artificial Sequence: Synthetic oligonucleotide
uaccugaguuguggaaucu

SEQ ID NO: 2928957 - RNA, 19 nt, Artificial Sequence
  Description of Artificial Sequence: Synthetic oligonucleotide
ucaggaagcucaggacuuc

SEQ ID NO: 2928958 - RNA, 19 nt, Artificial Sequence
  Description of Artificial Sequence: Synthetic oligonucleotide
caucuucauucuccaugac

SEQ ID NO: 2928959 - RNA, 19 nt, Artificial Sequence
  Description of Artificial Sequence: Synthetic oligonucleotide
gcaaaagagcucuuauaua

SEQ ID NO: 2928960 - RNA, 19 nt, Artificial Sequence
  Description of Artificial Sequence: Synthetic oligonucleotide
ugaggggaaguggguguug

SEQ ID NO: 2928961 - RNA, 19 nt, Artificial Sequence
  Description of Artificial Sequence: Synthetic oligonucleotide
cuuccaaaggccgggguaa

SEQ ID NO: 2928962 - RNA, 19 nt, Artificial Sequence
  Description of Artificial Sequence: Synthetic oligonucleotide
auacacaguuagaggaaau

SEQ ID NO: 2928963 - RNA, 19 nt, Artificial Sequence
  Description of Artificial Sequence: Synthetic oligonucleotide
cagcuauacauggggccag

SEQ ID NO: 2928964 - RNA, 19 nt, Artificial Sequence
  Description of Artificial Sequence: Synthetic oligonucleotide
gggcucacugcaaaagagc

SEQ ID NO: 2928965 - RNA, 19 nt, Artificial Sequence
  Description of Artificial Sequence: Synthetic oligonucleotide
gaggggaaguggguguuga

SEQ ID NO: 2928966 - RNA, 19 nt, Artificial Sequence
  Description of Artificial Sequence: Synthetic oligonucleotide
augcuuccaaaggccgggg

SEQ ID NO: 2928967 - RNA, 19 nt, Artificial Sequence
  Description of Artificial Sequence: Synthetic oligonucleotide
ucugaguacugggcucacu

SEQ ID NO: 2928968 - RNA, 19 nt, Artificial Sequence
  Description of Artificial Sequence: Synthetic oligonucleotide
ggcaucuacaugcuuccaa

SEQ ID NO: 2928969 - RNA, 19 nt, Artificial Sequence
  Description of Artificial Sequence: Synthetic oligonucleotide
ccuccucgggaccuuagcc

SEQ ID NO: 2928970 - RNA, 19 nt, Artificial Sequence
  Description of Artificial Sequence: Synthetic oligonucleotide
aguacugggcucacugcaa

SEQ ID NO: 2928971 - RNA, 19 nt, Artificial Sequence
  Description of Artificial Sequence: Synthetic oligonucleotide
guacugggcucacugcaaa

SEQ ID NO: 2928972 - RNA, 19 nt, Artificial Sequence
  Description of Artificial Sequence: Synthetic oligonucleotide
gcgggugaggggaaguggg

SEQ ID NO: 2928973 - RNA, 19 nt, Artificial Sequence
  Description of Artificial Sequence: Synthetic oligonucleotide
ggccgggguaacaaagggg

SEQ ID NO: 2928974 - RNA, 19 nt, Artificial Sequence
  Description of Artificial Sequence: Synthetic oligonucleotide
cugaguuguggaaucuccu

SEQ ID NO: 2928975 - RNA, 19 nt, Artificial Sequence
  Description of Artificial Sequence: Synthetic oligonucleotide
agggccucucccgcccugc

SEQ ID NO: 2928976 - RNA, 19 nt, Artificial Sequence
  Description of Artificial Sequence: Synthetic oligonucleotide
uggcagcccaccugcccgc

SEQ ID NO: 2928977 - RNA, 19 nt, Artificial Sequence
  Description of Artificial Sequence: Synthetic oligonucleotide
ccaagaacuggcagcccac

SEQ ID NO: 2928978 - RNA, 19 nt, Artificial Sequence
  Description of Artificial Sequence: Synthetic oligonucleotide
ggugaccacagaacuccag

SEQ ID NO: 2928979 - RNA, 19 nt, Artificial Sequence
  Description of Artificial Sequence: Synthetic oligonucleotide
guaagaucugcagccacau

SEQ ID NO: 2928980 - RNA, 19 nt, Artificial Sequence
  Description of Artificial Sequence: Synthetic oligonucleotide
caaaggccgggguaacaaa

SEQ ID NO: 2928981 - RNA, 19 nt, Artificial Sequence
  Description of Artificial Sequence: Synthetic oligonucleotide
auucuccaugacagguugu

SEQ ID NO: 2928982 - RNA, 19 nt, Artificial Sequence
  Description of Artificial Sequence: Synthetic oligonucleotide
aguggguguugaaaagcua

SEQ ID NO: 2928983 - RNA, 19 nt, Artificial Sequence
  Description of Artificial Sequence: Synthetic oligonucleotide
acauggggccagugagccu

SEQ ID NO: 2928984 - RNA, 19 nt, Artificial Sequence
  Description of Artificial Sequence: Synthetic oligonucleotide
uggcaucuacaugcuucca

SEQ ID NO: 2928985 - RNA, 19 nt, Artificial Sequence
  Description of Artificial Sequence: Synthetic oligonucleotide
ucacugcaaaagagcucuu

SEQ ID NO: 2928986 - RNA, 19 nt, Artificial Sequence
  Description of Artificial Sequence: Synthetic oligonucleotide
ugcccgcuuccuugagggc

SEQ ID NO: 2928987 - RNA, 19 nt, Artificial Sequence
  Description of Artificial Sequence: Synthetic oligonucleotide
ggcgggugaggggaagugg

SEQ ID NO: 2928988 - RNA, 19 nt, Artificial Sequence
  Description of Artificial Sequence: Synthetic oligonucleotide
cuccucgggaccuuagccu

SEQ ID NO: 2928989 - RNA, 19 nt, Artificial Sequence
  Description of Artificial Sequence: Synthetic oligonucleotide
agcuauacauggggccagu

SEQ ID NO: 2928990 - RNA, 19 nt, Artificial Sequence
  Description of Artificial Sequence: Synthetic oligonucleotide
ucccgcccugccugggcag

SEQ ID NO: 2928991 - RNA, 19 nt, Artificial Sequence
  Description of Artificial Sequence: Synthetic oligonucleotide
aggggaaguggguguugaa

SEQ ID NO: 2928992 - RNA, 19 nt, Artificial Sequence
  Description of Artificial Sequence: Synthetic oligonucleotide
ccuugagggccucucccgc

SEQ ID NO: 2928993 - RNA, 19 nt, Artificial Sequence
  Description of Artificial Sequence: Synthetic oligonucleotide
gcucuuauauacacaguua

SEQ ID NO: 2928994 - RNA, 19 nt, Artificial Sequence
  Description of Artificial Sequence: Synthetic oligonucleotide
cagcccaccugcccgcuuc

SEQ ID NO: 2928995 - RNA, 19 nt, Artificial Sequence
  Description of Artificial Sequence: Synthetic oligonucleotide
ccuuucucucugaguacug

SEQ ID NO: 2928996 - RNA, 19 nt, Artificial Sequence
  Description of Artificial Sequence: Synthetic oligonucleotide
ccaccugcccgcuuccuug

SEQ ID NO: 2928997 - RNA, 19 nt, Artificial Sequence
  Description of Artificial Sequence: Synthetic oligonucleotide
gccucucccgcccugccug

SEQ ID NO: 2928998 - RNA, 19 nt, Artificial Sequence
  Description of Artificial Sequence: Synthetic oligonucleotide
ccaugacagguuguuaauc

SEQ ID NO: 2928999 - RNA, 19 nt, Artificial Sequence
  Description of Artificial Sequence: Synthetic oligonucleotide
ggugaggggaagugggugu

SEQ ID NO: 2929000 - RNA, 19 nt, Artificial Sequence
  Description of Artificial Sequence: Synthetic oligonucleotide
gcccgcuuccuugagggcc

SEQ ID NO: 2929001 - RNA, 19 nt, Artificial Sequence
  Description of Artificial Sequence: Synthetic oligonucleotide
accugcccgcuuccuugag

SEQ ID NO: 2929002 - RNA, 19 nt, Artificial Sequence
  Description of Artificial Sequence: Synthetic oligonucleotide
gguuguuaaucaggaagcu

SEQ ID NO: 2929003 - RNA, 19 nt, Artificial Sequence
  Description of Artificial Sequence: Synthetic oligonucleotide
ucgggaccuuagccuuucu

SEQ ID NO: 2929004 - RNA, 19 nt, Artificial Sequence
  Description of Artificial Sequence: Synthetic oligonucleotide
gcuuccaaaggccggggua

SEQ ID NO: 2929005 - RNA, 19 nt, Artificial Sequence
  Description of Artificial Sequence: Synthetic oligonucleotide
cagccacauccuccucggg

SEQ ID NO: 2929006 - RNA, 19 nt, Artificial Sequence
  Description of Artificial Sequence: Synthetic oligonucleotide
cucgggaccuuagccuuuc

SEQ ID NO: 2929007 - RNA, 19 nt, Artificial Sequence
  Description of Artificial Sequence: Synthetic oligonucleotide
ggggaaguggguguugaaa

SEQ ID NO: 2929008 - RNA, 19 nt, Artificial Sequence
  Description of Artificial Sequence: Synthetic oligonucleotide
gagggccucucccgcccug

SEQ ID NO: 2929009 - RNA, 19 nt, Artificial Sequence
  Description of Artificial Sequence: Synthetic oligonucleotide
uggaaucuccuggcccuua

SEQ ID NO: 2929010 - RNA, 19 nt, Artificial Sequence
  Description of Artificial Sequence: Synthetic oligonucleotide
gcuauacauggggccagug

SEQ ID NO: 2929011 - RNA, 19 nt, Artificial Sequence
  Description of Artificial Sequence: Synthetic oligonucleotide
ccugcccgcuuccuugagg

SEQ ID NO: 2929012 - RNA, 19 nt, Artificial Sequence
  Description of Artificial Sequence: Synthetic oligonucleotide
gagcucuuauauacacagu

SEQ ID NO: 2929013 - RNA, 19 nt, Artificial Sequence
  Description of Artificial Sequence: Synthetic oligonucleotide
cacugcaaaagagcucuua

SEQ ID NO: 2929014 - RNA, 19 nt, Artificial Sequence
  Description of Artificial Sequence: Synthetic oligonucleotide
ggaagcucaggacuucuuu

SEQ ID NO: 2929015 - RNA, 19 nt, Artificial Sequence
  Description of Artificial Sequence: Synthetic oligonucleotide
cucugaguacugggcucac

SEQ ID NO: 2929016 - RNA, 19 nt, Artificial Sequence
  Description of Artificial Sequence: Synthetic oligonucleotide
ggcccuuaucagcuauaca

SEQ ID NO: 2929017 - RNA, 19 nt, Artificial Sequence
  Description of Artificial Sequence: Synthetic oligonucleotide
auccuccucgggaccuuag

SEQ ID NO: 2929018 - RNA, 19 nt, Artificial Sequence
  Description of Artificial Sequence: Synthetic oligonucleotide
uccuggcccuuaucagcua

SEQ ID NO: 2929019 - RNA, 19 nt, Artificial Sequence
  Description of Artificial Sequence: Synthetic oligonucleotide
gcucacugcaaaagagcuc

SEQ ID NO: 2929020 - RNA, 19 nt, Artificial Sequence
  Description of Artificial Sequence: Synthetic oligonucleotide
cauggggccagugagccuu

SEQ ID NO: 2929021 - RNA, 19 nt, Artificial Sequence
  Description of Artificial Sequence: Synthetic oligonucleotide
gggaacuaccugaguugug

SEQ ID NO: 2929022 - RNA, 19 nt, Artificial Sequence
  Description of Artificial Sequence: Synthetic oligonucleotide
ccccagguugucaggcuug

SEQ ID NO: 2929023 - RNA, 19 nt, Artificial Sequence
  Description of Artificial Sequence: Synthetic oligonucleotide
aggaagcucaggacuucuu

SEQ ID NO: 2929024 - RNA, 19 nt, Artificial Sequence
  Description of Artificial Sequence: Synthetic oligonucleotide
ggggccagugagccuuccc

SEQ ID NO: 2929025 - RNA, 19 nt, Artificial Sequence
  Description of Artificial Sequence: Synthetic oligonucleotide
gguuuucauuaaugagccu

SEQ ID NO: 2929026 - RNA, 19 nt, Artificial Sequence
  Description of Artificial Sequence: Synthetic oligonucleotide
ggggaacuaccugaguugu

SEQ ID NO: 2929027 - RNA, 19 nt, Artificial Sequence
  Description of Artificial Sequence: Synthetic oligonucleotide
caccugcccgcuuccuuga

SEQ ID NO: 2929028 - RNA, 19 nt, Artificial Sequence
  Description of Artificial Sequence: Synthetic oligonucleotide
cuacaucuucauucuccau

SEQ ID NO: 2929029 - RNA, 19 nt, Artificial Sequence
  Description of Artificial Sequence: Synthetic oligonucleotide
cuggcccuuaucagcuaua

SEQ ID NO: 2929030 - RNA, 19 nt, Artificial Sequence
  Description of Artificial Sequence: Synthetic oligonucleotide
uggggccagugagccuucc

SEQ ID NO: 2929031 - RNA, 19 nt, Artificial Sequence
  Description of Artificial Sequence: Synthetic oligonucleotide
auggggccagugagccuuc

SEQ ID NO: 2929032 - RNA, 19 nt, Artificial Sequence
  Description of Artificial Sequence: Synthetic oligonucleotide
gcuuccuugagggccucuc

SEQ ID NO: 2929033 - RNA, 19 nt, Artificial Sequence
  Description of Artificial Sequence: Synthetic oligonucleotide
gccuuuccaagaacuggca

SEQ ID NO: 2929034 - RNA, 19 nt, Artificial Sequence
  Description of Artificial Sequence: Synthetic oligonucleotide
cucccgcccugccugggca

SEQ ID NO: 2929035 - RNA, 19 nt, Artificial Sequence
  Description of Artificial Sequence: Synthetic oligonucleotide
cucucccgcccugccuggg

SEQ ID NO: 2929036 - RNA, 19 nt, Artificial Sequence
  Description of Artificial Sequence: Synthetic oligonucleotide
gccuuucucucugaguacu

SEQ ID NO: 2929037 - RNA, 19 nt, Artificial Sequence
  Description of Artificial Sequence: Synthetic oligonucleotide
ccaaaggccgggguaacaa

SEQ ID NO: 2929038 - RNA, 19 nt, Artificial Sequence
  Description of Artificial Sequence: Synthetic oligonucleotide
cacauccuccucgggaccu

SEQ ID NO: 2929039 - RNA, 19 nt, Artificial Sequence
  Description of Artificial Sequence: Synthetic oligonucleotide
gggcgggugaggggaagug

SEQ ID NO: 2929040 - RNA, 19 nt, Artificial Sequence
  Description of Artificial Sequence: Synthetic oligonucleotide
caggaagcucaggacuucu

SEQ ID NO: 2929041 - RNA, 19 nt, Artificial Sequence
  Description of Artificial Sequence: Synthetic oligonucleotide
ccucucccgcccugccugg

SEQ ID NO: 2929042 - RNA, 19 nt, Artificial Sequence
  Description of Artificial Sequence: Synthetic oligonucleotide
acauccuccucgggaccuu

SEQ ID NO: 2929043 - RNA, 19 nt, Artificial Sequence
  Description of Artificial Sequence: Synthetic oligonucleotide
ggaaucuccuggcccuuau

SEQ ID NO: 2929044 - RNA, 19 nt, Artificial Sequence
  Description of Artificial Sequence: Synthetic oligonucleotide
ccuuagccuuucucucuga

SEQ ID NO: 2929045 - RNA, 19 nt, Artificial Sequence
  Description of Artificial Sequence: Synthetic oligonucleotide
cgggaccuuagccuuucuc

SEQ ID NO: 2929046 - RNA, 19 nt, Artificial Sequence
  Description of Artificial Sequence: Synthetic oligonucleotide
gugaggggaaguggguguu

SEQ ID NO: 2929047 - RNA, 19 nt, Artificial Sequence
  Description of Artificial Sequence: Synthetic oligonucleotide
gcccugccugggcagccug

SEQ ID NO: 2929048 - RNA, 19 nt, Artificial Sequence
  Description of Artificial Sequence: Synthetic oligonucleotide
cauccuccucgggaccuua

SEQ ID NO: 2929049 - RNA, 19 nt, Artificial Sequence
  Description of Artificial Sequence: Synthetic oligonucleotide
cccgcuuccuugagggccu

SEQ ID NO: 2929050 - RNA, 19 nt, Artificial Sequence
  Description of Artificial Sequence: Synthetic oligonucleotide
guggaaucuccuggcccuu

SEQ ID NO: 2929051 - RNA, 19 nt, Artificial Sequence
  Description of Artificial Sequence: Synthetic oligonucleotide
ccuggcccuuaucagcuau

SEQ ID NO: 2929052 - RNA, 19 nt, Artificial Sequence
  Description of Artificial Sequence: Synthetic oligonucleotide
cccgcccugccugggcagc

SEQ ID NO: 2929053 - RNA, 19 nt, Artificial Sequence
  Description of Artificial Sequence: Synthetic oligonucleotide
ccgcccugccugggcagcc

SEQ ID NO: 2929054 - RNA, 19 nt, Artificial Sequence
  Description of Artificial Sequence: Synthetic oligonucleotide
ggggcgggugaggggaagu

SEQ ID NO: 2929055 - RNA, 19 nt, Artificial Sequence
  Description of Artificial Sequence: Synthetic oligonucleotide
ccucgggaccuuagccuuu

SEQ ID NO: 2929056 - RNA, 19 nt, Artificial Sequence
  Description of Artificial Sequence: Synthetic oligonucleotide
cccaccugcccgcuuccuu

SEQ ID NO: 2929057 - RNA, 19 nt, Artificial Sequence
  Description of Artificial Sequence: Synthetic oligonucleotide
ccgcuuccuugagggccuc

SEQ ID NO: 2929058 - RNA, 19 nt, Artificial Sequence
  Description of Artificial Sequence: Synthetic oligonucleotide
gcagcccaccugcccgcuu

SEQ ID NO: 2929059 - RNA, 19 nt, Artificial Sequence
  Description of Artificial Sequence: Synthetic oligonucleotide
gcccaccugcccgcuuccu

SEQ ID NO: 2929060 - RNA, 19 nt, Artificial Sequence
  Description of Artificial Sequence: Synthetic oligonucleotide
cgcuuccuugagggccucu

SEQ ID NO: 2929061 - RNA, 19 nt, Artificial Sequence
  Description of Artificial Sequence: Synthetic oligonucleotide
cgcccugccugggcagccu

SEQ ID NO: 2929062 - RNA, 19 nt, Artificial Sequence
  Description of Artificial Sequence: Synthetic oligonucleotide
aacgaugugauacugggcc

SEQ ID NO: 2929063 - RNA, 19 nt, Artificial Sequence
  Description of Artificial Sequence: Synthetic oligonucleotide
aaacaggagaaauuggugc

SEQ ID NO: 2929064 - RNA, 19 nt, Artificial Sequence
  Description of Artificial Sequence: Synthetic oligonucleotide
aaugaaggaaccauugccc

SEQ ID NO: 2929065 - RNA, 19 nt, Artificial Sequence
  Description of Artificial Sequence: Synthetic oligonucleotide
uccacaaacaaacaggaga

SEQ ID NO: 2929066 - RNA, 19 nt, Artificial Sequence
  Description of Artificial Sequence: Synthetic oligonucleotide
gauggaacugucuucaacc

SEQ ID NO: 2929067 - RNA, 19 nt, Artificial Sequence
  Description of Artificial Sequence: Synthetic oligonucleotide
aaacaaacaggagaaauug

SEQ ID NO: 2929068 - RNA, 19 nt, Artificial Sequence
  Description of Artificial Sequence: Synthetic oligonucleotide
aaauuggugcuucguaacg

SEQ ID NO: 2929069 - RNA, 19 nt, Artificial Sequence
  Description of Artificial Sequence: Synthetic oligonucleotide
agaacgaugugauacuggg

SEQ ID NO: 2929070 - RNA, 19 nt, Artificial Sequence
  Description of Artificial Sequence: Synthetic oligonucleotide
ucuuccucuggccagauca

SEQ ID NO: 2929071 - RNA, 19 nt, Artificial Sequence
  Description of Artificial Sequence: Synthetic oligonucleotide
ucagcguuccauucaaugg

SEQ ID NO: 2929072 - RNA, 19 nt, Artificial Sequence
  Description of Artificial Sequence: Synthetic oligonucleotide
acugucuucaacccauccc

SEQ ID NO: 2929073 - RNA, 19 nt, Artificial Sequence
  Description of Artificial Sequence: Synthetic oligonucleotide
acuugugugacccucucuc

SEQ ID NO: 2929074 - RNA, 19 nt, Artificial Sequence
  Description of Artificial Sequence: Synthetic oligonucleotide
agaggauuucuugagaagg

SEQ ID NO: 2929075 - RNA, 19 nt, Artificial Sequence
  Description of Artificial Sequence: Synthetic oligonucleotide
aacugucuucaacccaucc

SEQ ID NO: 2929076 - RNA, 19 nt, Artificial Sequence
  Description of Artificial Sequence: Synthetic oligonucleotide
caaugaaggaaccauugcc

SEQ ID NO: 2929077 - RNA, 19 nt, Artificial Sequence
  Description of Artificial Sequence: Synthetic oligonucleotide
aacaggagaaauuggugcu

SEQ ID NO: 2929078 - RNA, 19 nt, Artificial Sequence
  Description of Artificial Sequence: Synthetic oligonucleotide
uagaugagaaccaggcucc

SEQ ID NO: 2929079 - RNA, 19 nt, Artificial Sequence
  Description of Artificial Sequence: Synthetic oligonucleotide
uuucuugagaaggggaugg

SEQ ID NO: 2929080 - RNA, 19 nt, Artificial Sequence
  Description of Artificial Sequence: Synthetic oligonucleotide
guagaugagaaccaggcuc

SEQ ID NO: 2929081 - RNA, 19 nt, Artificial Sequence
  Description of Artificial Sequence: Synthetic oligonucleotide
uaacguggggcucaguucc

SEQ ID NO: 2929082 - RNA, 19 nt, Artificial Sequence
  Description of Artificial Sequence: Synthetic oligonucleotide
aaugguacuucuuccucug

SEQ ID NO: 2929083 - RNA, 19 nt, Artificial Sequence
  Description of Artificial Sequence: Synthetic oligonucleotide
ucaaugaaggaaccauugc

SEQ ID NO: 2929084 - RNA, 19 nt, Artificial Sequence
  Description of Artificial Sequence: Synthetic oligonucleotide
uucaugguaaccccuggcc

SEQ ID NO: 2929085 - RNA, 19 nt, Artificial Sequence
  Description of Artificial Sequence: Synthetic oligonucleotide
auggaacugucuucaaccc

SEQ ID NO: 2929086 - RNA, 19 nt, Artificial Sequence
  Description of Artificial Sequence: Synthetic oligonucleotide
agguagaugagaaccaggc

SEQ ID NO: 2929087 - RNA, 19 nt, Artificial Sequence
  Description of Artificial Sequence: Synthetic oligonucleotide
uucaacccaucccagagcu

SEQ ID NO: 2929088 - RNA, 19 nt, Artificial Sequence
  Description of Artificial Sequence: Synthetic oligonucleotide
aacaaacaggagaaauugg

SEQ ID NO: 2929089 - RNA, 19 nt, Artificial Sequence
  Description of Artificial Sequence: Synthetic oligonucleotide
cauucaaugguacuucuuc

SEQ ID NO: 2929090 - RNA, 19 nt, Artificial Sequence
  Description of Artificial Sequence: Synthetic oligonucleotide
cucaaugaaggaaccauug

SEQ ID NO: 2929091 - RNA, 19 nt, Artificial Sequence
  Description of Artificial Sequence: Synthetic oligonucleotide
cuugagaaggggauggaac

SEQ ID NO: 2929092 - RNA, 19 nt, Artificial Sequence
  Description of Artificial Sequence: Synthetic oligonucleotide
gaaauuggugcuucguaac

SEQ ID NO: 2929093 - RNA, 19 nt, Artificial Sequence
  Description of Artificial Sequence: Synthetic oligonucleotide
ucaugguaaccccuggccc

SEQ ID NO: 2929094 - RNA, 19 nt, Artificial Sequence
  Description of Artificial Sequence: Synthetic oligonucleotide
uugagaaggggauggaacu

SEQ ID NO: 2929095 - RNA, 19 nt, Artificial Sequence
  Description of Artificial Sequence: Synthetic oligonucleotide
uguguucccgacuugugug

SEQ ID NO: 2929096 - RNA, 19 nt, Artificial Sequence
  Description of Artificial Sequence: Synthetic oligonucleotide
ugguaggugcucaaugaag

SEQ ID NO: 2929097 - RNA, 19 nt, Artificial Sequence
  Description of Artificial Sequence: Synthetic oligonucleotide
ggaaccauugcccagccag

SEQ ID NO: 2929098 - RNA, 19 nt, Artificial Sequence
  Description of Artificial Sequence: Synthetic oligonucleotide
caaacaggagaaauuggug

SEQ ID NO: 2929099 - RNA, 19 nt, Artificial Sequence
  Description of Artificial Sequence: Synthetic oligonucleotide
agaaauuggugcuucguaa

SEQ ID NO: 2929100 - RNA, 19 nt, Artificial Sequence
  Description of Artificial Sequence: Synthetic oligonucleotide
uucaaugguacuucuuccu

SEQ ID NO: 2929101 - RNA, 19 nt, Artificial Sequence
  Description of Artificial Sequence: Synthetic oligonucleotide
uggugcuucguaacguggg

SEQ ID NO: 2929102 - RNA, 19 nt, Artificial Sequence
  Description of Artificial Sequence: Synthetic oligonucleotide
aggguccacaaacaaacag

SEQ ID NO: 2929103 - RNA, 19 nt, Artificial Sequence
  Description of Artificial Sequence: Synthetic oligonucleotide
uuguauuccuguguucccg

SEQ ID NO: 2929104 - RNA, 19 nt, Artificial Sequence
  Description of Artificial Sequence: Synthetic oligonucleotide
gaggauuucuugagaaggg

SEQ ID NO: 2929105 - RNA, 19 nt, Artificial Sequence
  Description of Artificial Sequence: Synthetic oligonucleotide
uuggugcuucguaacgugg

SEQ ID NO: 2929106 - RNA, 19 nt, Artificial Sequence
  Description of Artificial Sequence: Synthetic oligonucleotide
gauacugggccaccugucc

SEQ ID NO: 2929107 - RNA, 19 nt, Artificial Sequence
  Description of Artificial Sequence: Synthetic oligonucleotide
gagaggauuucuugagaag

SEQ ID NO: 2929108 - RNA, 19 nt, Artificial Sequence
  Description of Artificial Sequence: Synthetic oligonucleotide
aguuccuccagcaccaggg

SEQ ID NO: 2929109 - RNA, 19 nt, Artificial Sequence
  Description of Artificial Sequence: Synthetic oligonucleotide
uugugugacccucucucag

SEQ ID NO: 2929110 - RNA, 19 nt, Artificial Sequence
  Description of Artificial Sequence: Synthetic oligonucleotide
ugguacuucuuccucuggc

SEQ ID NO: 2929111 - RNA, 19 nt, Artificial Sequence
  Description of Artificial Sequence: Synthetic oligonucleotide
acaaacaggagaaauuggu

SEQ ID NO: 2929112 - RNA, 19 nt, Artificial Sequence
  Description of Artificial Sequence: Synthetic oligonucleotide
uccagucaugcuuuggcug

SEQ ID NO: 2929113 - RNA, 19 nt, Artificial Sequence
  Description of Artificial Sequence: Synthetic oligonucleotide
aggauaaggucagcguucc

SEQ ID NO: 2929114 - RNA, 19 nt, Artificial Sequence
  Description of Artificial Sequence: Synthetic oligonucleotide
ucaaugguacuucuuccuc

SEQ ID NO: 2929115 - RNA, 19 nt, Artificial Sequence
  Description of Artificial Sequence: Synthetic oligonucleotide
ugaaguaggggaagcggcu

SEQ ID NO: 2929116 - RNA, 19 nt, Artificial Sequence
  Description of Artificial Sequence: Synthetic oligonucleotide
uacaggauaaggucagcgu

SEQ ID NO: 2929117 - RNA, 19 nt, Artificial Sequence
  Description of Artificial Sequence: Synthetic oligonucleotide
ugaaggaaccauugcccag

SEQ ID NO: 2929118 - RNA, 19 nt, Artificial Sequence
  Description of Artificial Sequence: Synthetic oligonucleotide
aggaugcugaaguagggga

SEQ ID NO: 2929119 - RNA, 19 nt, Artificial Sequence
  Description of Artificial Sequence: Synthetic oligonucleotide
aauuggugcuucguaacgu

SEQ ID NO: 2929120 - RNA, 19 nt, Artificial Sequence
  Description of Artificial Sequence: Synthetic oligonucleotide
gguaggugcucaaugaagg

SEQ ID NO: 2929121 - RNA, 19 nt, Artificial Sequence
  Description of Artificial Sequence: Synthetic oligonucleotide
aggugcucaaugaaggaac

SEQ ID NO: 2929122 - RNA, 19 nt, Artificial Sequence
  Description of Artificial Sequence: Synthetic oligonucleotide
augaaggaaccauugccca

SEQ ID NO: 2929123 - RNA, 19 nt, Artificial Sequence
  Description of Artificial Sequence: Synthetic oligonucleotide
aaggucagcguuccauuca

SEQ ID NO: 2929124 - RNA, 19 nt, Artificial Sequence
  Description of Artificial Sequence: Synthetic oligonucleotide
caacccaucccagagcugg

SEQ ID NO: 2929125 - RNA, 19 nt, Artificial Sequence
  Description of Artificial Sequence: Synthetic oligonucleotide
uuggcuggcuucaugguaa

SEQ ID NO: 2929126 - RNA, 19 nt, Artificial Sequence
  Description of Artificial Sequence: Synthetic oligonucleotide
gaaggaaccauugcccagc

SEQ ID NO: 2929127 - RNA, 19 nt, Artificial Sequence
  Description of Artificial Sequence: Synthetic oligonucleotide
augagaaccaggcuccagu

SEQ ID NO: 2929128 - RNA, 19 nt, Artificial Sequence
  Description of Artificial Sequence: Synthetic oligonucleotide
uugcccagccaguagagga

SEQ ID NO: 2929129 - RNA, 19 nt, Artificial Sequence
  Description of Artificial Sequence: Synthetic oligonucleotide
cuguccaggguccacaaac

SEQ ID NO: 2929130 - RNA, 19 nt, Artificial Sequence
  Description of Artificial Sequence: Synthetic oligonucleotide
guacaggauaaggucagcg

SEQ ID NO: 2929131 - RNA, 19 nt, Artificial Sequence
  Description of Artificial Sequence: Synthetic oligonucleotide
auuggugcuucguaacgug

SEQ ID NO: 2929132 - RNA, 19 nt, Artificial Sequence
  Description of Artificial Sequence: Synthetic oligonucleotide
cuggagaggauuucuugag

SEQ ID NO: 2929133 - RNA, 19 nt, Artificial Sequence
  Description of Artificial Sequence: Synthetic oligonucleotide
guagaggaugcugaaguag

SEQ ID NO: 2929134 - RNA, 19 nt, Artificial Sequence
  Description of Artificial Sequence: Synthetic oligonucleotide
uccacugcuggguagugcu

SEQ ID NO: 2929135 - RNA, 19 nt, Artificial Sequence
  Description of Artificial Sequence: Synthetic oligonucleotide
cagaacgaugugauacugg

SEQ ID NO: 2929136 - RNA, 19 nt, Artificial Sequence
  Description of Artificial Sequence: Synthetic oligonucleotide
gaugcugaaguaggggaag

SEQ ID NO: 2929137 - RNA, 19 nt, Artificial Sequence
  Description of Artificial Sequence: Synthetic oligonucleotide
aggauuucuugagaagggg

SEQ ID NO: 2929138 - RNA, 19 nt, Artificial Sequence
  Description of Artificial Sequence: Synthetic oligonucleotide
ugugauacugggccaccug

SEQ ID NO: 2929139 - RNA, 19 nt, Artificial Sequence
  Description of Artificial Sequence: Synthetic oligonucleotide
cuuguauuccuguguuccc

SEQ ID NO: 2929140 - RNA, 19 nt, Artificial Sequence
  Description of Artificial Sequence: Synthetic oligonucleotide
cucucagccggccugguag

SEQ ID NO: 2929141 - RNA, 19 nt, Artificial Sequence
  Description of Artificial Sequence: Synthetic oligonucleotide
gaucacguccacugcuggg

SEQ ID NO: 2929142 - RNA, 19 nt, Artificial Sequence
  Description of Artificial Sequence: Synthetic oligonucleotide
agaaccaggcuccagucau

SEQ ID NO: 2929143 - RNA, 19 nt, Artificial Sequence
  Description of Artificial Sequence: Synthetic oligonucleotide
acaggauaaggucagcguu

SEQ ID NO: 2929144 - RNA, 19 nt, Artificial Sequence
  Description of Artificial Sequence: Synthetic oligonucleotide
caguacaggauaaggucag

SEQ ID NO: 2929145 - RNA, 19 nt, Artificial Sequence
  Description of Artificial Sequence: Synthetic oligonucleotide
ugucuucaacccaucccag

SEQ ID NO: 2929146 - RNA, 19 nt, Artificial Sequence
  Description of Artificial Sequence: Synthetic oligonucleotide
ugugugacccucucucagc

SEQ ID NO: 2929147 - RNA, 19 nt, Artificial Sequence
  Description of Artificial Sequence: Synthetic oligonucleotide
gugacccucucucagccgg

SEQ ID NO: 2929148 - RNA, 19 nt, Artificial Sequence
  Description of Artificial Sequence: Synthetic oligonucleotide
uggagaggauuucuugaga

SEQ ID NO: 2929149 - RNA, 19 nt, Artificial Sequence
  Description of Artificial Sequence: Synthetic oligonucleotide
agaucacguccacugcugg

SEQ ID NO: 2929150 - RNA, 19 nt, Artificial Sequence
  Description of Artificial Sequence: Synthetic oligonucleotide
uggaacugucuucaaccca

SEQ ID NO: 2929151 - RNA, 19 nt, Artificial Sequence
  Description of Artificial Sequence: Synthetic oligonucleotide
aggggauggaacugucuuc

SEQ ID NO: 2929152 - RNA, 19 nt, Artificial Sequence
  Description of Artificial Sequence: Synthetic oligonucleotide
uguauuccuguguucccga

SEQ ID NO: 2929153 - RNA, 19 nt, Artificial Sequence
  Description of Artificial Sequence: Synthetic oligonucleotide
uguccaggguccacaaaca

SEQ ID NO: 2929154 - RNA, 19 nt, Artificial Sequence
  Description of Artificial Sequence: Synthetic oligonucleotide
cugucuucaacccauccca

SEQ ID NO: 2929155 - RNA, 19 nt, Artificial Sequence
  Description of Artificial Sequence: Synthetic oligonucleotide
ugcuucguaacguggggcu

SEQ ID NO: 2929156 - RNA, 19 nt, Artificial Sequence
  Description of Artificial Sequence: Synthetic oligonucleotide
ugggccagaacgaugugau

SEQ ID NO: 2929157 - RNA, 19 nt, Artificial Sequence
  Description of Artificial Sequence: Synthetic oligonucleotide
aggagaaauuggugcuucg

SEQ ID NO: 2929158 - RNA, 19 nt, Artificial Sequence
  Description of Artificial Sequence: Synthetic oligonucleotide
cuggcuucaugguaacccc

SEQ ID NO: 2929159 - RNA, 19 nt, Artificial Sequence
  Description of Artificial Sequence: Synthetic oligonucleotide
uauuccuguguucccgacu

SEQ ID NO: 2929160 - RNA, 19 nt, Artificial Sequence
  Description of Artificial Sequence: Synthetic oligonucleotide
uuuggcuggcuucauggua

SEQ ID NO: 2929161 - RNA, 19 nt, Artificial Sequence
  Description of Artificial Sequence: Synthetic oligonucleotide
ugcugaaguaggggaagcg

SEQ ID NO: 2929162 - RNA, 19 nt, Artificial Sequence
  Description of Artificial Sequence: Synthetic oligonucleotide
ugcucaaugaaggaaccau

SEQ ID NO: 2929163 - RNA, 19 nt, Artificial Sequence
  Description of Artificial Sequence: Synthetic oligonucleotide
ccaggguccacaaacaaac

SEQ ID NO: 2929164 - RNA, 19 nt, Artificial Sequence
  Description of Artificial Sequence: Synthetic oligonucleotide
ggguccacaaacaaacagg

SEQ ID NO: 2929165 - RNA, 19 nt, Artificial Sequence
  Description of Artificial Sequence: Synthetic oligonucleotide
uucccgacuugugugaccc

SEQ ID NO: 2929166 - RNA, 19 nt, Artificial Sequence
  Description of Artificial Sequence: Synthetic oligonucleotide
caggcaguacaggauaagg

SEQ ID NO: 2929167 - RNA, 19 nt, Artificial Sequence
  Description of Artificial Sequence: Synthetic oligonucleotide
uccauucaaugguacuucu

SEQ ID NO: 2929168 - RNA, 19 nt, Artificial Sequence
  Description of Artificial Sequence: Synthetic oligonucleotide
auuucuugagaaggggaug

SEQ ID NO: 2929169 - RNA, 19 nt, Artificial Sequence
  Description of Artificial Sequence: Synthetic oligonucleotide
caggauaaggucagcguuc

SEQ ID NO: 2929170 - RNA, 19 nt, Artificial Sequence
  Description of Artificial Sequence: Synthetic oligonucleotide
auuccuguguucccgacuu

SEQ ID NO: 2929171 - RNA, 19 nt, Artificial Sequence
  Description of Artificial Sequence: Synthetic oligonucleotide
cuucaugguaaccccuggc

SEQ ID NO: 2929172 - RNA, 19 nt, Artificial Sequence
  Description of Artificial Sequence: Synthetic oligonucleotide
uccaggguccacaaacaaa

SEQ ID NO: 2929173 - RNA, 19 nt, Artificial Sequence
  Description of Artificial Sequence: Synthetic oligonucleotide
ggcaguacaggauaagguc

SEQ ID NO: 2929174 - RNA, 19 nt, Artificial Sequence
  Description of Artificial Sequence: Synthetic oligonucleotide
ucuggccagaucacgucca

SEQ ID NO: 2929175 - RNA, 19 nt, Artificial Sequence
  Description of Artificial Sequence: Synthetic oligonucleotide
gguacuucuuccucuggcc

SEQ ID NO: 2929176 - RNA, 19 nt, Artificial Sequence
  Description of Artificial Sequence: Synthetic oligonucleotide
ugagaaggggauggaacug

SEQ ID NO: 2929177 - RNA, 19 nt, Artificial Sequence
  Description of Artificial Sequence: Synthetic oligonucleotide
aguacaggauaaggucagc

SEQ ID NO: 2929178 - RNA, 19 nt, Artificial Sequence
  Description of Artificial Sequence: Synthetic oligonucleotide
uccuccagcaccagggcuc

SEQ ID NO: 2929179 - RNA, 19 nt, Artificial Sequence
  Description of Artificial Sequence: Synthetic oligonucleotide
ugagaaccaggcuccaguc

SEQ ID NO: 2929180 - RNA, 19 nt, Artificial Sequence
  Description of Artificial Sequence: Synthetic oligonucleotide
uaaggucagcguuccauuc

SEQ ID NO: 2929181 - RNA, 19 nt, Artificial Sequence
  Description of Artificial Sequence: Synthetic oligonucleotide
gagaaauuggugcuucgua

SEQ ID NO: 2929182 - RNA, 19 nt, Artificial Sequence
  Description of Artificial Sequence: Synthetic oligonucleotide
gcuuguauuccuguguucc

SEQ ID NO: 2929183 - RNA, 19 nt, Artificial Sequence
  Description of Artificial Sequence: Synthetic oligonucleotide
ucaugcuuuggcuggcuuc

SEQ ID NO: 2929184 - RNA, 19 nt, Artificial Sequence
  Description of Artificial Sequence: Synthetic oligonucleotide
uccucuggccagaucacgu

SEQ ID NO: 2929185 - RNA, 19 nt, Artificial Sequence
  Description of Artificial Sequence: Synthetic oligonucleotide
cuucaacccaucccagagc

SEQ ID NO: 2929186 - RNA, 19 nt, Artificial Sequence
  Description of Artificial Sequence: Synthetic oligonucleotide
ccagagcugggccagaacg

SEQ ID NO: 2929187 - RNA, 19 nt, Artificial Sequence
  Description of Artificial Sequence: Synthetic oligonucleotide
agccaggugcuuguauucc

SEQ ID NO: 2929188 - RNA, 19 nt, Artificial Sequence
  Description of Artificial Sequence: Synthetic oligonucleotide
auaaggucagcguuccauu

SEQ ID NO: 2929189 - RNA, 19 nt, Artificial Sequence
  Description of Artificial Sequence: Synthetic oligonucleotide
uuccauucaaugguacuuc

SEQ ID NO: 2929190 - RNA, 19 nt, Artificial Sequence
  Description of Artificial Sequence: Synthetic oligonucleotide
ugcugauguggguggcugg

SEQ ID NO: 2929191 - RNA, 19 nt, Artificial Sequence
  Description of Artificial Sequence: Synthetic oligonucleotide
ugauacugggccaccuguc

SEQ ID NO: 2929192 - RNA, 19 nt, Artificial Sequence
  Description of Artificial Sequence: Synthetic oligonucleotide
gauguggguggcugggcug

SEQ ID NO: 2929193 - RNA, 19 nt, Artificial Sequence
  Description of Artificial Sequence: Synthetic oligonucleotide
ugugacccucucucagccg

SEQ ID NO: 2929194 - RNA, 19 nt, Artificial Sequence
  Description of Artificial Sequence: Synthetic oligonucleotide
agaggaugcugaaguaggg

SEQ ID NO: 2929195 - RNA, 19 nt, Artificial Sequence
  Description of Artificial Sequence: Synthetic oligonucleotide
ucucagccggccugguagg

SEQ ID NO: 2929196 - RNA, 19 nt, Artificial Sequence
  Description of Artificial Sequence: Synthetic oligonucleotide
ugggcuguggcuggagagg

SEQ ID NO: 2929197 - RNA, 19 nt, Artificial Sequence
  Description of Artificial Sequence: Synthetic oligonucleotide
gcucucuguagccaggugc

SEQ ID NO: 2929198 - RNA, 19 nt, Artificial Sequence
  Description of Artificial Sequence: Synthetic oligonucleotide
cauugcccagccaguagag

SEQ ID NO: 2929199 - RNA, 19 nt, Artificial Sequence
  Description of Artificial Sequence: Synthetic oligonucleotide
gugugacccucucucagcc

SEQ ID NO: 2929200 - RNA, 19 nt, Artificial Sequence
  Description of Artificial Sequence: Synthetic oligonucleotide
augguacuucuuccucugg

SEQ ID NO: 2929201 - RNA, 19 nt, Artificial Sequence
  Description of Artificial Sequence: Synthetic oligonucleotide
cucuggccagaucacgucc

SEQ ID NO: 2929202 - RNA, 19 nt, Artificial Sequence
  Description of Artificial Sequence: Synthetic oligonucleotide
uaggugcucaaugaaggaa

SEQ ID NO: 2929203 - RNA, 19 nt, Artificial Sequence
  Description of Artificial Sequence: Synthetic oligonucleotide
accauugcccagccaguag

SEQ ID NO: 2929204 - RNA, 19 nt, Artificial Sequence
  Description of Artificial Sequence: Synthetic oligonucleotide
uguagccaggugcuuguau

SEQ ID NO: 2929205 - RNA, 19 nt, Artificial Sequence
  Description of Artificial Sequence: Synthetic oligonucleotide
agcggcugcaggcaguaca

SEQ ID NO: 2929206 - RNA, 19 nt, Artificial Sequence
  Description of Artificial Sequence: Synthetic oligonucleotide
cagaucacguccacugcug

SEQ ID NO: 2929207 - RNA, 19 nt, Artificial Sequence
  Description of Artificial Sequence: Synthetic oligonucleotide
guaacguggggcucaguuc

SEQ ID NO: 2929208 - RNA, 19 nt, Artificial Sequence
  Description of Artificial Sequence: Synthetic oligonucleotide
ccagucaugcuuuggcugg

SEQ ID NO: 2929209 - RNA, 19 nt, Artificial Sequence
  Description of Artificial Sequence: Synthetic oligonucleotide
gaaguaggggaagcggcug

SEQ ID NO: 2929210 - RNA, 19 nt, Artificial Sequence
  Description of Artificial Sequence: Synthetic oligonucleotide
aguagaggaugcugaagua

SEQ ID NO: 2929211 - RNA, 19 nt, Artificial Sequence
  Description of Artificial Sequence: Synthetic oligonucleotide
ucuugagaaggggauggaa

SEQ ID NO: 2929212 - RNA, 19 nt, Artificial Sequence
  Description of Artificial Sequence: Synthetic oligonucleotide
ggccagaucacguccacug

SEQ ID NO: 2929213 - RNA, 19 nt, Artificial Sequence
  Description of Artificial Sequence: Synthetic oligonucleotide
ugcuuuggcuggcuucaug

SEQ ID NO: 2929214 - RNA, 19 nt, Artificial Sequence
  Description of Artificial Sequence: Synthetic oligonucleotide
uuccucuggccagaucacg

SEQ ID NO: 2929215 - RNA, 19 nt, Artificial Sequence
  Description of Artificial Sequence: Synthetic oligonucleotide
gaacgaugugauacugggc

SEQ ID NO: 2929216 - RNA, 19 nt, Artificial Sequence
  Description of Artificial Sequence: Synthetic oligonucleotide
ggugcuucguaacgugggg

SEQ ID NO: 2929217 - RNA, 19 nt, Artificial Sequence
  Description of Artificial Sequence: Synthetic oligonucleotide
gcuggcuucaugguaaccc

SEQ ID NO: 2929218 - RNA, 19 nt, Artificial Sequence
  Description of Artificial Sequence: Synthetic oligonucleotide
ggagaggauuucuugagaa

SEQ ID NO: 2929219 - RNA, 19 nt, Artificial Sequence
  Description of Artificial Sequence: Synthetic oligonucleotide
guacuucuuccucuggcca

SEQ ID NO: 2929220 - RNA, 19 nt, Artificial Sequence
  Description of Artificial Sequence: Synthetic oligonucleotide
ggccagaacgaugugauac

SEQ ID NO: 2929221 - RNA, 19 nt, Artificial Sequence
  Description of Artificial Sequence: Synthetic oligonucleotide
gcugaaguaggggaagcgg

SEQ ID NO: 2929222 - RNA, 19 nt, Artificial Sequence
  Description of Artificial Sequence: Synthetic oligonucleotide
auacugggccaccugucca

SEQ ID NO: 2929223 - RNA, 19 nt, Artificial Sequence
  Description of Artificial Sequence: Synthetic oligonucleotide
gaugagaaccaggcuccag

SEQ ID NO: 2929224 - RNA, 19 nt, Artificial Sequence
  Description of Artificial Sequence: Synthetic oligonucleotide
aggugcuuguauuccugug

SEQ ID NO: 2929225 - RNA, 19 nt, Artificial Sequence
  Description of Artificial Sequence: Synthetic oligonucleotide
acgaugugauacugggcca

SEQ ID NO: 2929226 - RNA, 19 nt, Artificial Sequence
  Description of Artificial Sequence: Synthetic oligonucleotide
gauaaggucagcguuccau

SEQ ID NO: 2929227 - RNA, 19 nt, Artificial Sequence
  Description of Artificial Sequence: Synthetic oligonucleotide
aucacguccacugcugggu

SEQ ID NO: 2929228 - RNA, 19 nt, Artificial Sequence
  Description of Artificial Sequence: Synthetic oligonucleotide
uagccaggugcuuguauuc

SEQ ID NO: 2929229 - RNA, 19 nt, Artificial Sequence
  Description of Artificial Sequence: Synthetic oligonucleotide
gaugugauacugggccacc

SEQ ID NO: 2929230 - RNA, 19 nt, Artificial Sequence
  Description of Artificial Sequence: Synthetic oligonucleotide
guaggugcucaaugaagga

SEQ ID NO: 2929231 - RNA, 19 nt, Artificial Sequence
  Description of Artificial Sequence: Synthetic oligonucleotide
uccuguguucccgacuugu

SEQ ID NO: 2929232 - RNA, 19 nt, Artificial Sequence
  Description of Artificial Sequence: Synthetic oligonucleotide
gauuucuugagaaggggau

SEQ ID NO: 2929233 - RNA, 19 nt, Artificial Sequence
  Description of Artificial Sequence: Synthetic oligonucleotide
agcaccagggcucucugua

SEQ ID NO: 2929234 - RNA, 19 nt, Artificial Sequence
  Description of Artificial Sequence: Synthetic oligonucleotide
caaacaaacaggagaaauu

SEQ ID NO: 2929235 - RNA, 19 nt, Artificial Sequence
  Description of Artificial Sequence: Synthetic oligonucleotide
aggcaguacaggauaaggu

SEQ ID NO: 2929236 - RNA, 19 nt, Artificial Sequence
  Description of Artificial Sequence: Synthetic oligonucleotide
uggcuucaugguaaccccu

SEQ ID NO: 2929237 - RNA, 19 nt, Artificial Sequence
  Description of Artificial Sequence: Synthetic oligonucleotide
gcuccagucaugcuuuggc

SEQ ID NO: 2929238 - RNA, 19 nt, Artificial Sequence
  Description of Artificial Sequence: Synthetic oligonucleotide
caguagaggaugcugaagu

SEQ ID NO: 2929239 - RNA, 19 nt, Artificial Sequence
  Description of Artificial Sequence: Synthetic oligonucleotide
gagaaccaggcuccaguca

SEQ ID NO: 2929240 - RNA, 19 nt, Artificial Sequence
  Description of Artificial Sequence: Synthetic oligonucleotide
agcugggccagaacgaugu

SEQ ID NO: 2929241 - RNA, 19 nt, Artificial Sequence
  Description of Artificial Sequence: Synthetic oligonucleotide
gguccacaaacaaacagga

SEQ ID NO: 2929242 - RNA, 19 nt, Artificial Sequence
  Description of Artificial Sequence: Synthetic oligonucleotide
ugcuuguauuccuguguuc

SEQ ID NO: 2929243 - RNA, 19 nt, Artificial Sequence
  Description of Artificial Sequence: Synthetic oligonucleotide
ucaacccaucccagagcug

SEQ ID NO: 2929244 - RNA, 19 nt, Artificial Sequence
  Description of Artificial Sequence: Synthetic oligonucleotide
agaaggggauggaacuguc

SEQ ID NO: 2929245 - RNA, 19 nt, Artificial Sequence
  Description of Artificial Sequence: Synthetic oligonucleotide
cagccggccugguaggugc

SEQ ID NO: 2929246 - RNA, 19 nt, Artificial Sequence
  Description of Artificial Sequence: Synthetic oligonucleotide
cuggcccugcugauguggg

SEQ ID NO: 2929247 - RNA, 19 nt, Artificial Sequence
  Description of Artificial Sequence: Synthetic oligonucleotide
ggauggaacugucuucaac

SEQ ID NO: 2929248 - RNA, 19 nt, Artificial Sequence
  Description of Artificial Sequence: Synthetic oligonucleotide
cuuccucuggccagaucac

SEQ ID NO: 2929249 - RNA, 19 nt, Artificial Sequence
  Description of Artificial Sequence: Synthetic oligonucleotide
ccacaaacaaacaggagaa

SEQ ID NO: 2929250 - RNA, 19 nt, Artificial Sequence
  Description of Artificial Sequence: Synthetic oligonucleotide
aggucagcguuccauucaa

SEQ ID NO: 2929251 - RNA, 19 nt, Artificial Sequence
  Description of Artificial Sequence: Synthetic oligonucleotide
gcuggagaggauuucuuga

SEQ ID NO: 2929252 - RNA, 19 nt, Artificial Sequence
  Description of Artificial Sequence: Synthetic oligonucleotide
ugggccaccuguccagggu

SEQ ID NO: 2929253 - RNA, 19 nt, Artificial Sequence
  Description of Artificial Sequence: Synthetic oligonucleotide
cuugugugacccucucuca

SEQ ID NO: 2929254 - RNA, 19 nt, Artificial Sequence
  Description of Artificial Sequence: Synthetic oligonucleotide
ggcuggagaggauuucuug

SEQ ID NO: 2929255 - RNA, 19 nt, Artificial Sequence
  Description of Artificial Sequence: Synthetic oligonucleotide
caugcuuuggcuggcuuca

SEQ ID NO: 2929256 - RNA, 19 nt, Artificial Sequence
  Description of Artificial Sequence: Synthetic oligonucleotide
ugcccagccaguagaggau

SEQ ID NO: 2929257 - RNA, 19 nt, Artificial Sequence
  Description of Artificial Sequence: Synthetic oligonucleotide
gcuucaugguaaccccugg

SEQ ID NO: 2929258 - RNA, 19 nt, Artificial Sequence
  Description of Artificial Sequence: Synthetic oligonucleotide
guccacaaacaaacaggag

SEQ ID NO: 2929259 - RNA, 19 nt, Artificial Sequence
  Description of Artificial Sequence: Synthetic oligonucleotide
acccaucccagagcugggc

SEQ ID NO: 2929260 - RNA, 19 nt, Artificial Sequence
  Description of Artificial Sequence: Synthetic oligonucleotide
caggagaaauuggugcuuc

SEQ ID NO: 2929261 - RNA, 19 nt, Artificial Sequence
  Description of Artificial Sequence: Synthetic oligonucleotide
gcaguacaggauaagguca

SEQ ID NO: 2929262 - RNA, 19 nt, Artificial Sequence
  Description of Artificial Sequence: Synthetic oligonucleotide
uucuugagaaggggaugga

SEQ ID NO: 2929263 - RNA, 19 nt, Artificial Sequence
  Description of Artificial Sequence: Synthetic oligonucleotide
uccagcaccagggcucucu

SEQ ID NO: 2929264 - RNA, 19 nt, Artificial Sequence
  Description of Artificial Sequence: Synthetic oligonucleotide
aacccaucccagagcuggg

SEQ ID NO: 2929265 - RNA, 19 nt, Artificial Sequence
  Description of Artificial Sequence: Synthetic oligonucleotide
aaccauugcccagccagua

SEQ ID NO: 2929266 - RNA, 19 nt, Artificial Sequence
  Description of Artificial Sequence: Synthetic oligonucleotide
ggauuucuugagaagggga

SEQ ID NO: 2929267 - RNA, 19 nt, Artificial Sequence
  Description of Artificial Sequence: Synthetic oligonucleotide
ugacccucucucagccggc

SEQ ID NO: 2929268 - RNA, 19 nt, Artificial Sequence
  Description of Artificial Sequence: Synthetic oligonucleotide
guauuccuguguucccgac

SEQ ID NO: 2929269 - RNA, 19 nt, Artificial Sequence
  Description of Artificial Sequence: Synthetic oligonucleotide
ggugcucaaugaaggaacc

SEQ ID NO: 2929270 - RNA, 19 nt, Artificial Sequence
  Description of Artificial Sequence: Synthetic oligonucleotide
caaugguacuucuuccucu

SEQ ID NO: 2929271 - RNA, 19 nt, Artificial Sequence
  Description of Artificial Sequence: Synthetic oligonucleotide
uuccuguguucccgacuug

SEQ ID NO: 2929272 - RNA, 19 nt, Artificial Sequence
  Description of Artificial Sequence: Synthetic oligonucleotide
uguucccgacuugugugac

SEQ ID NO: 2929273 - RNA, 19 nt, Artificial Sequence
  Description of Artificial Sequence: Synthetic oligonucleotide
guucccgacuugugugacc

SEQ ID NO: 2929274 - RNA, 19 nt, Artificial Sequence
  Description of Artificial Sequence: Synthetic oligonucleotide
uucguaacguggggcucag

SEQ ID NO: 2929275 - RNA, 19 nt, Artificial Sequence
  Description of Artificial Sequence: Synthetic oligonucleotide
gugcuucguaacguggggc

SEQ ID NO: 2929276 - RNA, 19 nt, Artificial Sequence
  Description of Artificial Sequence: Synthetic oligonucleotide
caucccagagcugggccag

SEQ ID NO: 2929277 - RNA, 19 nt, Artificial Sequence
  Description of Artificial Sequence: Synthetic oligonucleotide
cacguccacugcuggguag

SEQ ID NO: 2929278 - RNA, 19 nt, Artificial Sequence
  Description of Artificial Sequence: Synthetic oligonucleotide
caugguaaccccuggcccu

SEQ ID NO: 2929279 - RNA, 19 nt, Artificial Sequence
  Description of Artificial Sequence: Synthetic oligonucleotide
guguucccgacuuguguga

SEQ ID NO: 2929280 - RNA, 19 nt, Artificial Sequence
  Description of Artificial Sequence: Synthetic oligonucleotide
gugauacugggccaccugu

SEQ ID NO: 2929281 - RNA, 19 nt, Artificial Sequence
  Description of Artificial Sequence: Synthetic oligonucleotide
cagagcugggccagaacga

SEQ ID NO: 2929282 - RNA, 19 nt, Artificial Sequence
  Description of Artificial Sequence: Synthetic oligonucleotide
ucacguccacugcugggua

SEQ ID NO: 2929283 - RNA, 19 nt, Artificial Sequence
  Description of Artificial Sequence: Synthetic oligonucleotide
cucucuguagccaggugcu

SEQ ID NO: 2929284 - RNA, 19 nt, Artificial Sequence
  Description of Artificial Sequence: Synthetic oligonucleotide
uggcuggagaggauuucuu

SEQ ID NO: 2929285 - RNA, 19 nt, Artificial Sequence
  Description of Artificial Sequence: Synthetic oligonucleotide
cugguaggugcucaaugaa

SEQ ID NO: 2929286 - RNA, 19 nt, Artificial Sequence
  Description of Artificial Sequence: Synthetic oligonucleotide
cugcugauguggguggcug

SEQ ID NO: 2929287 - RNA, 19 nt, Artificial Sequence
  Description of Artificial Sequence: Synthetic oligonucleotide
cagcguuccauucaauggu

SEQ ID NO: 2929288 - RNA, 19 nt, Artificial Sequence
  Description of Artificial Sequence: Synthetic oligonucleotide
ggggauggaacugucuuca

SEQ ID NO: 2929289 - RNA, 19 nt, Artificial Sequence
  Description of Artificial Sequence: Synthetic oligonucleotide
guaaccccuggcccugcug

SEQ ID NO: 2929290 - RNA, 19 nt, Artificial Sequence
  Description of Artificial Sequence: Synthetic oligonucleotide
gagaaggggauggaacugu

SEQ ID NO: 2929291 - RNA, 19 nt, Artificial Sequence
  Description of Artificial Sequence: Synthetic oligonucleotide
gccugguaggugcucaaug

SEQ ID NO: 2929292 - RNA, 19 nt, Artificial Sequence
  Description of Artificial Sequence: Synthetic oligonucleotide
gaaccaggcuccagucaug

SEQ ID NO: 2929293 - RNA, 19 nt, Artificial Sequence
  Description of Artificial Sequence: Synthetic oligonucleotide
ggugcuuguauuccugugu

SEQ ID NO: 2929294 - RNA, 19 nt, Artificial Sequence
  Description of Artificial Sequence: Synthetic oligonucleotide
ggcugcaggcaguacagga

SEQ ID NO: 2929295 - RNA, 19 nt, Artificial Sequence
  Description of Artificial Sequence: Synthetic oligonucleotide
acaggagaaauuggugcuu

SEQ ID NO: 2929296 - RNA, 19 nt, Artificial Sequence
  Description of Artificial Sequence: Synthetic oligonucleotide
augguaaccccuggcccug

SEQ ID NO: 2929297 - RNA, 19 nt, Artificial Sequence
  Description of Artificial Sequence: Synthetic oligonucleotide
ucagccggccugguaggug

SEQ ID NO: 2929298 - RNA, 19 nt, Artificial Sequence
  Description of Artificial Sequence: Synthetic oligonucleotide
cuucguaacguggggcuca

SEQ ID NO: 2929299 - RNA, 19 nt, Artificial Sequence
  Description of Artificial Sequence: Synthetic oligonucleotide
guuccauucaaugguacuu

SEQ ID NO: 2929300 - RNA, 19 nt, Artificial Sequence
  Description of Artificial Sequence: Synthetic oligonucleotide
ccugguaggugcucaauga

SEQ ID NO: 2929301 - RNA, 19 nt, Artificial Sequence
  Description of Artificial Sequence: Synthetic oligonucleotide
augugauacugggccaccu

SEQ ID NO: 2929302 - RNA, 19 nt, Artificial Sequence
  Description of Artificial Sequence: Synthetic oligonucleotide
auguggguggcugggcugu

SEQ ID NO: 2929303 - RNA, 19 nt, Artificial Sequence
  Description of Artificial Sequence: Synthetic oligonucleotide
guagccaggugcuuguauu

SEQ ID NO: 2929304 - RNA, 19 nt, Artificial Sequence
  Description of Artificial Sequence: Synthetic oligonucleotide
aaccccuggcccugcugau

SEQ ID NO: 2929305 - RNA, 19 nt, Artificial Sequence
  Description of Artificial Sequence: Synthetic oligonucleotide
cugauguggguggcugggc

SEQ ID NO: 2929306 - RNA, 19 nt, Artificial Sequence
  Description of Artificial Sequence: Synthetic oligonucleotide
guccaggguccacaaacaa

SEQ ID NO: 2929307 - RNA, 19 nt, Artificial Sequence
  Description of Artificial Sequence: Synthetic oligonucleotide
guaggggaagcggcugcag

SEQ ID NO: 2929308 - RNA, 19 nt, Artificial Sequence
  Description of Artificial Sequence: Synthetic oligonucleotide
uggcuggcuucaugguaac

SEQ ID NO: 2929309 - RNA, 19 nt, Artificial Sequence
  Description of Artificial Sequence: Synthetic oligonucleotide
gaacugucuucaacccauc

SEQ ID NO: 2929310 - RNA, 19 nt, Artificial Sequence
  Description of Artificial Sequence: Synthetic oligonucleotide
ggcuucaugguaaccccug

SEQ ID NO: 2929311 - RNA, 19 nt, Artificial Sequence
  Description of Artificial Sequence: Synthetic oligonucleotide
caggguccacaaacaaaca

SEQ ID NO: 2929312 - RNA, 19 nt, Artificial Sequence
  Description of Artificial Sequence: Synthetic oligonucleotide
aagcggcugcaggcaguac

SEQ ID NO: 2929313 - RNA, 19 nt, Artificial Sequence
  Description of Artificial Sequence: Synthetic oligonucleotide
cuggccagaucacguccac

SEQ ID NO: 2929314 - RNA, 19 nt, Artificial Sequence
  Description of Artificial Sequence: Synthetic oligonucleotide
gguagaugagaaccaggcu

SEQ ID NO: 2929315 - RNA, 19 nt, Artificial Sequence
  Description of Artificial Sequence: Synthetic oligonucleotide
accuguccaggguccacaa

SEQ ID NO: 2929316 - RNA, 19 nt, Artificial Sequence
  Description of Artificial Sequence: Synthetic oligonucleotide
agaugagaaccaggcucca

SEQ ID NO: 2929317 - RNA, 19 nt, Artificial Sequence
  Description of Artificial Sequence: Synthetic oligonucleotide
guggggcucaguuccucca

SEQ ID NO: 2929318 - RNA, 19 nt, Artificial Sequence
  Description of Artificial Sequence: Synthetic oligonucleotide
gccagaucacguccacugc

SEQ ID NO: 2929319 - RNA, 19 nt, Artificial Sequence
  Description of Artificial Sequence: Synthetic oligonucleotide
gcccugcugaugugggugg

SEQ ID NO: 2929320 - RNA, 19 nt, Artificial Sequence
  Description of Artificial Sequence: Synthetic oligonucleotide
aggaaccauugcccagcca

SEQ ID NO: 2929321 - RNA, 19 nt, Artificial Sequence
  Description of Artificial Sequence: Synthetic oligonucleotide
cagucaugcuuuggcuggc

SEQ ID NO: 2929322 - RNA, 19 nt, Artificial Sequence
  Description of Artificial Sequence: Synthetic oligonucleotide
ccaggugcuuguauuccug

SEQ ID NO: 2929323 - RNA, 19 nt, Artificial Sequence
  Description of Artificial Sequence: Synthetic oligonucleotide
agggcucucuguagccagg

SEQ ID NO: 2929324 - RNA, 19 nt, Artificial Sequence
  Description of Artificial Sequence: Synthetic oligonucleotide
acguccacugcuggguagu

SEQ ID NO: 2929325 - RNA, 19 nt, Artificial Sequence
  Description of Artificial Sequence: Synthetic oligonucleotide
gacuugugugacccucucu

SEQ ID NO: 2929326 - RNA, 19 nt, Artificial Sequence
  Description of Artificial Sequence: Synthetic oligonucleotide
cugggccagaacgauguga

SEQ ID NO: 2929327 - RNA, 19 nt, Artificial Sequence
  Description of Artificial Sequence: Synthetic oligonucleotide
gcaccagggcucucuguag

SEQ ID NO: 2929328 - RNA, 19 nt, Artificial Sequence
  Description of Artificial Sequence: Synthetic oligonucleotide
gugcucaaugaaggaacca

SEQ ID NO: 2929329 - RNA, 19 nt, Artificial Sequence
  Description of Artificial Sequence: Synthetic oligonucleotide
cuguguucccgacuugugu

SEQ ID NO: 2929330 - RNA, 19 nt, Artificial Sequence
  Description of Artificial Sequence: Synthetic oligonucleotide
ggaacugucuucaacccau

SEQ ID NO: 2929331 - RNA, 19 nt, Artificial Sequence
  Description of Artificial Sequence: Synthetic oligonucleotide
agcguuccauucaauggua

SEQ ID NO: 2929332 - RNA, 19 nt, Artificial Sequence
  Description of Artificial Sequence: Synthetic oligonucleotide
agucaugcuuuggcuggcu

SEQ ID NO: 2929333 - RNA, 19 nt, Artificial Sequence
  Description of Artificial Sequence: Synthetic oligonucleotide
aacguggggcucaguuccu

SEQ ID NO: 2929334 - RNA, 19 nt, Artificial Sequence
  Description of Artificial Sequence: Synthetic oligonucleotide
gugcuuguauuccuguguu

SEQ ID NO: 2929335 - RNA, 19 nt, Artificial Sequence
  Description of Artificial Sequence: Synthetic oligonucleotide
acguggggcucaguuccuc

SEQ ID NO: 2929336 - RNA, 19 nt, Artificial Sequence
  Description of Artificial Sequence: Synthetic oligonucleotide
gaaggggauggaacugucu

SEQ ID NO: 2929337 - RNA, 19 nt, Artificial Sequence
  Description of Artificial Sequence: Synthetic oligonucleotide
ccagaacgaugugauacug

SEQ ID NO: 2929338 - RNA, 19 nt, Artificial Sequence
  Description of Artificial Sequence: Synthetic oligonucleotide
cuccagucaugcuuuggcu

SEQ ID NO: 2929339 - RNA, 19 nt, Artificial Sequence
  Description of Artificial Sequence: Synthetic oligonucleotide
uggccagaucacguccacu

SEQ ID NO: 2929340 - RNA, 19 nt, Artificial Sequence
  Description of Artificial Sequence: Synthetic oligonucleotide
ggcccugcugaugugggug

SEQ ID NO: 2929341 - RNA, 19 nt, Artificial Sequence
  Description of Artificial Sequence: Synthetic oligonucleotide
ccaguagaggaugcugaag

SEQ ID NO: 2929342 - RNA, 19 nt, Artificial Sequence
  Description of Artificial Sequence: Synthetic oligonucleotide
guccacugcuggguagugc

SEQ ID NO: 2929343 - RNA, 19 nt, Artificial Sequence
  Description of Artificial Sequence: Synthetic oligonucleotide
cacaaacaaacaggagaaa

SEQ ID NO: 2929344 - RNA, 19 nt, Artificial Sequence
  Description of Artificial Sequence: Synthetic oligonucleotide
gaagcggcugcaggcagua

SEQ ID NO: 2929345 - RNA, 19 nt, Artificial Sequence
  Description of Artificial Sequence: Synthetic oligonucleotide
uggcccugcugaugugggu

SEQ ID NO: 2929346 - RNA, 19 nt, Artificial Sequence
  Description of Artificial Sequence: Synthetic oligonucleotide
ggaugcugaaguaggggaa

SEQ ID NO: 2929347 - RNA, 19 nt, Artificial Sequence
  Description of Artificial Sequence: Synthetic oligonucleotide
gcggcugcaggcaguacag

SEQ ID NO: 2929348 - RNA, 19 nt, Artificial Sequence
  Description of Artificial Sequence: Synthetic oligonucleotide
gaaccauugcccagccagu

SEQ ID NO: 2929349 - RNA, 19 nt, Artificial Sequence
  Description of Artificial Sequence: Synthetic oligonucleotide
cuuuggcuggcuucauggu

SEQ ID NO: 2929350 - RNA, 19 nt, Artificial Sequence
  Description of Artificial Sequence: Synthetic oligonucleotide
ccauugcccagccaguaga

SEQ ID NO: 2929351 - RNA, 19 nt, Artificial Sequence
  Description of Artificial Sequence: Synthetic oligonucleotide
cccaucccagagcugggcc

SEQ ID NO: 2929352 - RNA, 19 nt, Artificial Sequence
  Description of Artificial Sequence: Synthetic oligonucleotide
aggcuccagucaugcuuug

SEQ ID NO: 2929353 - RNA, 19 nt, Artificial Sequence
  Description of Artificial Sequence: Synthetic oligonucleotide
ggcuccagucaugcuuugg

SEQ ID NO: 2929354 - RNA, 19 nt, Artificial Sequence
  Description of Artificial Sequence: Synthetic oligonucleotide
ccuggcccugcugaugugg

SEQ ID NO: 2929355 - RNA, 19 nt, Artificial Sequence
  Description of Artificial Sequence: Synthetic oligonucleotide
ucccagagcugggccagaa

SEQ ID NO: 2929356 - RNA, 19 nt, Artificial Sequence
  Description of Artificial Sequence: Synthetic oligonucleotide
ggagaaauuggugcuucgu

SEQ ID NO: 2929357 - RNA, 19 nt, Artificial Sequence
  Description of Artificial Sequence: Synthetic oligonucleotide
uguggguggcugggcugug

SEQ ID NO: 2929358 - RNA, 19 nt, Artificial Sequence
  Description of Artificial Sequence: Synthetic oligonucleotide
ugguaaccccuggcccugc

SEQ ID NO: 2929359 - RNA, 19 nt, Artificial Sequence
  Description of Artificial Sequence: Synthetic oligonucleotide
ucccgacuugugugacccu

SEQ ID NO: 2929360 - RNA, 19 nt, Artificial Sequence
  Description of Artificial Sequence: Synthetic oligonucleotide
gccagaacgaugugauacu

SEQ ID NO: 2929361 - RNA, 19 nt, Artificial Sequence
  Description of Artificial Sequence: Synthetic oligonucleotide
ucucuguagccaggugcuu

SEQ ID NO: 2929362 - RNA, 19 nt, Artificial Sequence
  Description of Artificial Sequence: Synthetic oligonucleotide
caggugcuuguauuccugu

SEQ ID NO: 2929363 - RNA, 19 nt, Artificial Sequence
  Description of Artificial Sequence: Synthetic oligonucleotide
ccucuggccagaucacguc

SEQ ID NO: 2929364 - RNA, 19 nt, Artificial Sequence
  Description of Artificial Sequence: Synthetic oligonucleotide
ggcucucuguagccaggug

SEQ ID NO: 2929365 - RNA, 19 nt, Artificial Sequence
  Description of Artificial Sequence: Synthetic oligonucleotide
caggcuccagucaugcuuu

SEQ ID NO: 2929366 - RNA, 19 nt, Artificial Sequence
  Description of Artificial Sequence: Synthetic oligonucleotide
gggccaccuguccaggguc

SEQ ID NO: 2929367 - RNA, 19 nt, Artificial Sequence
  Description of Artificial Sequence: Synthetic oligonucleotide
accccuggcccugcugaug

SEQ ID NO: 2929368 - RNA, 19 nt, Artificial Sequence
  Description of Artificial Sequence: Synthetic oligonucleotide
caccuguccaggguccaca

SEQ ID NO: 2929369 - RNA, 19 nt, Artificial Sequence
  Description of Artificial Sequence: Synthetic oligonucleotide
cacugcuggguagugcuua

SEQ ID NO: 2929370 - RNA, 19 nt, Artificial Sequence
  Description of Artificial Sequence: Synthetic oligonucleotide
gcguuccauucaaugguac

SEQ ID NO: 2929371 - RNA, 19 nt, Artificial Sequence
  Description of Artificial Sequence: Synthetic oligonucleotide
cgaugugauacugggccac

SEQ ID NO: 2929372 - RNA, 19 nt, Artificial Sequence
  Description of Artificial Sequence: Synthetic oligonucleotide
cguggggcucaguuccucc

SEQ ID NO: 2929373 - RNA, 19 nt, Artificial Sequence
  Description of Artificial Sequence: Synthetic oligonucleotide
ggauaaggucagcguucca

SEQ ID NO: 2929374 - RNA, 19 nt, Artificial Sequence
  Description of Artificial Sequence: Synthetic oligonucleotide
ccaucccagagcugggcca

SEQ ID NO: 2929375 - RNA, 19 nt, Artificial Sequence
  Description of Artificial Sequence: Synthetic oligonucleotide
ggccaccuguccagggucc

SEQ ID NO: 2929376 - RNA, 19 nt, Artificial Sequence
  Description of Artificial Sequence: Synthetic oligonucleotide
gcccagccaguagaggaug

SEQ ID NO: 2929377 - RNA, 19 nt, Artificial Sequence
  Description of Artificial Sequence: Synthetic oligonucleotide
cccgacuugugugacccuc

SEQ ID NO: 2929378 - RNA, 19 nt, Artificial Sequence
  Description of Artificial Sequence: Synthetic oligonucleotide
gcuucguaacguggggcuc

SEQ ID NO: 2929379 - RNA, 19 nt, Artificial Sequence
  Description of Artificial Sequence: Synthetic oligonucleotide
gggcuguggcuggagagga

SEQ ID NO: 2929380 - RNA, 19 nt, Artificial Sequence
  Description of Artificial Sequence: Synthetic oligonucleotide
ccagaucacguccacugcu

SEQ ID NO: 2929381 - RNA, 19 nt, Artificial Sequence
  Description of Artificial Sequence: Synthetic oligonucleotide
ccagcaccagggcucucug

SEQ ID NO: 2929382 - RNA, 19 nt, Artificial Sequence
  Description of Artificial Sequence: Synthetic oligonucleotide
gucaugcuuuggcuggcuu

SEQ ID NO: 2929383 - RNA, 19 nt, Artificial Sequence
  Description of Artificial Sequence: Synthetic oligonucleotide
gggauggaacugucuucaa

SEQ ID NO: 2929384 - RNA, 19 nt, Artificial Sequence
  Description of Artificial Sequence: Synthetic oligonucleotide
gccaggugcuuguauuccu

SEQ ID NO: 2929385 - RNA, 19 nt, Artificial Sequence
  Description of Artificial Sequence: Synthetic oligonucleotide
ucguaacguggggcucagu

SEQ ID NO: 2929386 - RNA, 19 nt, Artificial Sequence
  Description of Artificial Sequence: Synthetic oligonucleotide
cuguggcuggagaggauuu

SEQ ID NO: 2929387 - RNA, 19 nt, Artificial Sequence
  Description of Artificial Sequence: Synthetic oligonucleotide
gcucaaugaaggaaccauu

SEQ ID NO: 2929388 - RNA, 19 nt, Artificial Sequence
  Description of Artificial Sequence: Synthetic oligonucleotide
augcuuuggcuggcuucau

SEQ ID NO: 2929389 - RNA, 19 nt, Artificial Sequence
  Description of Artificial Sequence: Synthetic oligonucleotide
uggcugggcuguggcugga

SEQ ID NO: 2929390 - RNA, 19 nt, Artificial Sequence
  Description of Artificial Sequence: Synthetic oligonucleotide
cccagagcugggccagaac

SEQ ID NO: 2929391 - RNA, 19 nt, Artificial Sequence
  Description of Artificial Sequence: Synthetic oligonucleotide
ccaggcuccagucaugcuu

SEQ ID NO: 2929392 - RNA, 19 nt, Artificial Sequence
  Description of Artificial Sequence: Synthetic oligonucleotide
aucccagagcugggccaga

SEQ ID NO: 2929393 - RNA, 19 nt, Artificial Sequence
  Description of Artificial Sequence: Synthetic oligonucleotide
cguuccauucaaugguacu

SEQ ID NO: 2929394 - RNA, 19 nt, Artificial Sequence
  Description of Artificial Sequence: Synthetic oligonucleotide
cgacuugugugacccucuc

SEQ ID NO: 2929395 - RNA, 19 nt, Artificial Sequence
  Description of Artificial Sequence: Synthetic oligonucleotide
cguaacguggggcucaguu

SEQ ID NO: 2929396 - RNA, 19 nt, Artificial Sequence
  Description of Artificial Sequence: Synthetic oligonucleotide
ggcugggcuguggcuggag

SEQ ID NO: 2929397 - RNA, 19 nt, Artificial Sequence
  Description of Artificial Sequence: Synthetic oligonucleotide
cccugcugauguggguggc

SEQ ID NO: 2929398 - RNA, 19 nt, Artificial Sequence
  Description of Artificial Sequence: Synthetic oligonucleotide
gggccagaacgaugugaua

SEQ ID NO: 2929399 - RNA, 19 nt, Artificial Sequence
  Description of Artificial Sequence: Synthetic oligonucleotide
ccauucaaugguacuucuu

SEQ ID NO: 2929400 - RNA, 19 nt, Artificial Sequence
  Description of Artificial Sequence: Synthetic oligonucleotide
cagcaccagggcucucugu

SEQ ID NO: 2929401 - RNA, 19 nt, Artificial Sequence
  Description of Artificial Sequence: Synthetic oligonucleotide
gguaaccccuggcccugcu

SEQ ID NO: 2929402 - RNA, 19 nt, Artificial Sequence
  Description of Artificial Sequence: Synthetic oligonucleotide
ccgacuugugugacccucu

SEQ ID NO: 2929403 - RNA, 19 nt, Artificial Sequence
  Description of Artificial Sequence: Synthetic oligonucleotide
ccaccuguccaggguccac

SEQ ID NO: 2929404 - RNA, 19 nt, Artificial Sequence
  Description of Artificial Sequence: Synthetic oligonucleotide
gccaccuguccagggucca

SEQ ID NO: 2929405 - RNA, 19 nt, Artificial Sequence
  Description of Artificial Sequence: Synthetic oligonucleotide
gggcucucuguagccaggu

SEQ ID NO: 2929406 - RNA, 19 nt, Artificial Sequence
  Description of Artificial Sequence: Synthetic oligonucleotide
cuucuuccucuggccagau

SEQ ID NO: 2929407 - RNA, 19 nt, Artificial Sequence
  Description of Artificial Sequence: Synthetic oligonucleotide
ccccuggcccugcugaugu

SEQ ID NO: 2929408 - RNA, 19 nt, Artificial Sequence
  Description of Artificial Sequence: Synthetic oligonucleotide
ccuguccaggguccacaaa

SEQ ID NO: 2929409 - RNA, 19 nt, Artificial Sequence
  Description of Artificial Sequence: Synthetic oligonucleotide
cguccacugcuggguagug

SEQ ID NO: 2929410 - RNA, 19 nt, Artificial Sequence
  Description of Artificial Sequence: Synthetic oligonucleotide
cuccagcaccagggcucuc

SEQ ID NO: 2929411 - RNA, 19 nt, Artificial Sequence
  Description of Artificial Sequence: Synthetic oligonucleotide
ggucagcguuccauucaau

SEQ ID NO: 2929412 - RNA, 19 nt, Artificial Sequence
  Description of Artificial Sequence: Synthetic oligonucleotide
cucucucagccggccuggu

SEQ ID NO: 2929413 - RNA, 19 nt, Artificial Sequence
  Description of Artificial Sequence: Synthetic oligonucleotide
gccggccugguaggugcuc

SEQ ID NO: 2929414 - RNA, 19 nt, Artificial Sequence
  Description of Artificial Sequence: Synthetic oligonucleotide
ccugcugauguggguggcu

SEQ ID NO: 2929415 - RNA, 19 nt, Artificial Sequence
  Description of Artificial Sequence: Synthetic oligonucleotide
ggccugguaggugcucaau

SEQ ID NO: 2929416 - RNA, 19 nt, Artificial Sequence
  Description of Artificial Sequence: Synthetic oligonucleotide
ccuccagcaccagggcucu

SEQ ID NO: 2929417 - RNA, 19 nt, Artificial Sequence
  Description of Artificial Sequence: Synthetic oligonucleotide
ccacugcuggguagugcuu

SEQ ID NO: 2929418 - RNA, 19 nt, Artificial Sequence
  Description of Artificial Sequence: Synthetic oligonucleotide
cggccugguaggugcucaa

SEQ ID NO: 2929419 - RNA, 19 nt, Artificial Sequence
  Description of Artificial Sequence: Synthetic oligonucleotide
ugucguaaaacucagagcu

SEQ ID NO: 2929420 - RNA, 19 nt, Artificial Sequence
  Description of Artificial Sequence: Synthetic oligonucleotide
auauccaugagccugguac

SEQ ID NO: 2929421 - RNA, 19 nt, Artificial Sequence
  Description of Artificial Sequence: Synthetic oligonucleotide
gacaacaucaucaauaaag

SEQ ID NO: 2929422 - RNA, 19 nt, Artificial Sequence
  Description of Artificial Sequence: Synthetic oligonucleotide
gaugucguaaaacucagag

SEQ ID NO: 2929423 - RNA, 19 nt, Artificial Sequence
  Description of Artificial Sequence: Synthetic oligonucleotide
gaacaaaccagcuuguugc

SEQ ID NO: 2929424 - RNA, 19 nt, Artificial Sequence
  Description of Artificial Sequence: Synthetic oligonucleotide
aaaacucagagcuguugcc

SEQ ID NO: 2929425 - RNA, 19 nt, Artificial Sequence
  Description of Artificial Sequence: Synthetic oligonucleotide
ucuucuacgcccgagaagg

SEQ ID NO: 2929426 - RNA, 19 nt, Artificial Sequence
  Description of Artificial Sequence: Synthetic oligonucleotide
aauaaagcgcugugugacc

SEQ ID NO: 2929427 - RNA, 19 nt, Artificial Sequence
  Description of Artificial Sequence: Synthetic oligonucleotide
aaucacacuggccuuggcg

SEQ ID NO: 2929428 - RNA, 19 nt, Artificial Sequence
  Description of Artificial Sequence: Synthetic oligonucleotide
uaaaacucagagcuguugc

SEQ ID NO: 2929429 - RNA, 19 nt, Artificial Sequence
  Description of Artificial Sequence: Synthetic oligonucleotide
acaacaucaucaauaaagc

SEQ ID NO: 2929430 - RNA, 19 nt, Artificial Sequence
  Description of Artificial Sequence: Synthetic oligonucleotide
accagaacaaaccagcuug

SEQ ID NO: 2929431 - RNA, 19 nt, Artificial Sequence
  Description of Artificial Sequence: Synthetic oligonucleotide
gaaggcauauccaugagcc

SEQ ID NO: 2929432 - RNA, 19 nt, Artificial Sequence
  Description of Artificial Sequence: Synthetic oligonucleotide
caaaccagaacaaaccagc

SEQ ID NO: 2929433 - RNA, 19 nt, Artificial Sequence
  Description of Artificial Sequence: Synthetic oligonucleotide
aguagagcaguucuucuac

SEQ ID NO: 2929434 - RNA, 19 nt, Artificial Sequence
  Description of Artificial Sequence: Synthetic oligonucleotide
aacaaaccagcuuguugcc

SEQ ID NO: 2929435 - RNA, 19 nt, Artificial Sequence
  Description of Artificial Sequence: Synthetic oligonucleotide
aucaauaaagcgcugugug

SEQ ID NO: 2929436 - RNA, 19 nt, Artificial Sequence
  Description of Artificial Sequence: Synthetic oligonucleotide
agaaggcauauccaugagc

SEQ ID NO: 2929437 - RNA, 19 nt, Artificial Sequence
  Description of Artificial Sequence: Synthetic oligonucleotide
augucguaaaacucagagc

SEQ ID NO: 2929438 - RNA, 19 nt, Artificial Sequence
  Description of Artificial Sequence: Synthetic oligonucleotide
caaaggcaggcauugaugc

SEQ ID NO: 2929439 - RNA, 19 nt, Artificial Sequence
  Description of Artificial Sequence: Synthetic oligonucleotide
agagcaguucuucuacgcc

SEQ ID NO: 2929440 - RNA, 19 nt, Artificial Sequence
  Description of Artificial Sequence: Synthetic oligonucleotide
ucaucaauaaagcgcugug

SEQ ID NO: 2929441 - RNA, 19 nt, Artificial Sequence
  Description of Artificial Sequence: Synthetic oligonucleotide
agaacaaaccagcuuguug

SEQ ID NO: 2929442 - RNA, 19 nt, Artificial Sequence
  Description of Artificial Sequence: Synthetic oligonucleotide
acucucauacgccacuugg

SEQ ID NO: 2929443 - RNA, 19 nt, Artificial Sequence
  Description of Artificial Sequence: Synthetic oligonucleotide
caacaucaucaauaaagcg

SEQ ID NO: 2929444 - RNA, 19 nt, Artificial Sequence
  Description of Artificial Sequence: Synthetic oligonucleotide
uacgccacuugguacaggg

SEQ ID NO: 2929445 - RNA, 19 nt, Artificial Sequence
  Description of Artificial Sequence: Synthetic oligonucleotide
ucacagaagucacuguggc

SEQ ID NO: 2929446 - RNA, 19 nt, Artificial Sequence
  Description of Artificial Sequence: Synthetic oligonucleotide
auaaagcgcugugugaccc

SEQ ID NO: 2929447 - RNA, 19 nt, Artificial Sequence
  Description of Artificial Sequence: Synthetic oligonucleotide
cagcaaaccagaacaaacc

SEQ ID NO: 2929448 - RNA, 19 nt, Artificial Sequence
  Description of Artificial Sequence: Synthetic oligonucleotide
ugggucauguugacaaagg

SEQ ID NO: 2929449 - RNA, 19 nt, Artificial Sequence
  Description of Artificial Sequence: Synthetic oligonucleotide
caggcauugaugcugacug

SEQ ID NO: 2929450 - RNA, 19 nt, Artificial Sequence
  Description of Artificial Sequence: Synthetic oligonucleotide
ucaauaaagcgcuguguga

SEQ ID NO: 2929451 - RNA, 19 nt, Artificial Sequence
  Description of Artificial Sequence: Synthetic oligonucleotide
uaggacagcagagacaaca

SEQ ID NO: 2929452 - RNA, 19 nt, Artificial Sequence
  Description of Artificial Sequence: Synthetic oligonucleotide
agagcuguugcccuuguca

SEQ ID NO: 2929453 - RNA, 19 nt, Artificial Sequence
  Description of Artificial Sequence: Synthetic oligonucleotide
acaucaucaauaaagcgcu

SEQ ID NO: 2929454 - RNA, 19 nt, Artificial Sequence
  Description of Artificial Sequence: Synthetic oligonucleotide
acauggcuccagcaaaggc

SEQ ID NO: 2929455 - RNA, 19 nt, Artificial Sequence
  Description of Artificial Sequence: Synthetic oligonucleotide
gacagcagagacaacauca

SEQ ID NO: 2929456 - RNA, 19 nt, Artificial Sequence
  Description of Artificial Sequence: Synthetic oligonucleotide
agcuucagcaaaccagaac

SEQ ID NO: 2929457 - RNA, 19 nt, Artificial Sequence
  Description of Artificial Sequence: Synthetic oligonucleotide
agcaaaccagaacaaacca

SEQ ID NO: 2929458 - RNA, 19 nt, Artificial Sequence
  Description of Artificial Sequence: Synthetic oligonucleotide
caaaccagcuuguugcccc

SEQ ID NO: 2929459 - RNA, 19 nt, Artificial Sequence
  Description of Artificial Sequence: Synthetic oligonucleotide
uucuguagcgugcaggguc

SEQ ID NO: 2929460 - RNA, 19 nt, Artificial Sequence
  Description of Artificial Sequence: Synthetic oligonucleotide
agcagagacaacaucauca

SEQ ID NO: 2929461 - RNA, 19 nt, Artificial Sequence
  Description of Artificial Sequence: Synthetic oligonucleotide
cuugucacucucauacgcc

SEQ ID NO: 2929462 - RNA, 19 nt, Artificial Sequence
  Description of Artificial Sequence: Synthetic oligonucleotide
gagcaguucuucuacgccc

SEQ ID NO: 2929463 - RNA, 19 nt, Artificial Sequence
  Description of Artificial Sequence: Synthetic oligonucleotide
acagguugcccugagcccc

SEQ ID NO: 2929464 - RNA, 19 nt, Artificial Sequence
  Description of Artificial Sequence: Synthetic oligonucleotide
gagacaacaucaucaauaa

SEQ ID NO: 2929465 - RNA, 19 nt, Artificial Sequence
  Description of Artificial Sequence: Synthetic oligonucleotide
gcuucagcaaaccagaaca

SEQ ID NO: 2929466 - RNA, 19 nt, Artificial Sequence
  Description of Artificial Sequence: Synthetic oligonucleotide
caauaaagcgcugugugac

SEQ ID NO: 2929467 - RNA, 19 nt, Artificial Sequence
  Description of Artificial Sequence: Synthetic oligonucleotide
aaggcaggcauugaugcug

SEQ ID NO: 2929468 - RNA, 19 nt, Artificial Sequence
  Description of Artificial Sequence: Synthetic oligonucleotide
ugcagggucacagaaguca

SEQ ID NO: 2929469 - RNA, 19 nt, Artificial Sequence
  Description of Artificial Sequence: Synthetic oligonucleotide
cuugguacagggcuuuccc

SEQ ID NO: 2929470 - RNA, 19 nt, Artificial Sequence
  Description of Artificial Sequence: Synthetic oligonucleotide
aacgcugggucauguugac

SEQ ID NO: 2929471 - RNA, 19 nt, Artificial Sequence
  Description of Artificial Sequence: Synthetic oligonucleotide
aucacacuggccuuggcga

SEQ ID NO: 2929472 - RNA, 19 nt, Artificial Sequence
  Description of Artificial Sequence: Synthetic oligonucleotide
uguggcgaugaccacgaug

SEQ ID NO: 2929473 - RNA, 19 nt, Artificial Sequence
  Description of Artificial Sequence: Synthetic oligonucleotide
ucguaaaacucagagcugu

SEQ ID NO: 2929474 - RNA, 19 nt, Artificial Sequence
  Description of Artificial Sequence: Synthetic oligonucleotide
agagacaacaucaucaaua

SEQ ID NO: 2929475 - RNA, 19 nt, Artificial Sequence
  Description of Artificial Sequence: Synthetic oligonucleotide
auagcuggcccguaggaca

SEQ ID NO: 2929476 - RNA, 19 nt, Artificial Sequence
  Description of Artificial Sequence: Synthetic oligonucleotide
agggcuuucccuucuguag

SEQ ID NO: 2929477 - RNA, 19 nt, Artificial Sequence
  Description of Artificial Sequence: Synthetic oligonucleotide
uagagcaguucuucuacgc

SEQ ID NO: 2929478 - RNA, 19 nt, Artificial Sequence
  Description of Artificial Sequence: Synthetic oligonucleotide
gucacuguggcaugaauca

SEQ ID NO: 2929479 - RNA, 19 nt, Artificial Sequence
  Description of Artificial Sequence: Synthetic oligonucleotide
ugcccugagccccagcuag

SEQ ID NO: 2929480 - RNA, 19 nt, Artificial Sequence
  Description of Artificial Sequence: Synthetic oligonucleotide
uuucccuucuguagcgugc

SEQ ID NO: 2929481 - RNA, 19 nt, Artificial Sequence
  Description of Artificial Sequence: Synthetic oligonucleotide
ucauguugacaaagguggc

SEQ ID NO: 2929482 - RNA, 19 nt, Artificial Sequence
  Description of Artificial Sequence: Synthetic oligonucleotide
uucuucuacgcccgagaag

SEQ ID NO: 2929483 - RNA, 19 nt, Artificial Sequence
  Description of Artificial Sequence: Synthetic oligonucleotide
ucucauacgccacuuggua

SEQ ID NO: 2929484 - RNA, 19 nt, Artificial Sequence
  Description of Artificial Sequence: Synthetic oligonucleotide
uggcaugaaucacacuggc

SEQ ID NO: 2929485 - RNA, 19 nt, Artificial Sequence
  Description of Artificial Sequence: Synthetic oligonucleotide
cagcuagugacauggcucc

SEQ ID NO: 2929486 - RNA, 19 nt, Artificial Sequence
  Description of Artificial Sequence: Synthetic oligonucleotide
agucacuguggcaugaauc

SEQ ID NO: 2929487 - RNA, 19 nt, Artificial Sequence
  Description of Artificial Sequence: Synthetic oligonucleotide
uugucacucucauacgcca

SEQ ID NO: 2929488 - RNA, 19 nt, Artificial Sequence
  Description of Artificial Sequence: Synthetic oligonucleotide
ucuguagcgugcaggguca

SEQ ID NO: 2929489 - RNA, 19 nt, Artificial Sequence
  Description of Artificial Sequence: Synthetic oligonucleotide
uuccacggaccacagguug

SEQ ID NO: 2929490 - RNA, 19 nt, Artificial Sequence
  Description of Artificial Sequence: Synthetic oligonucleotide
augcugacuggccauagcu

SEQ ID NO: 2929491 - RNA, 19 nt, Artificial Sequence
  Description of Artificial Sequence: Synthetic oligonucleotide
aaaggcaggcauugaugcu

SEQ ID NO: 2929492 - RNA, 19 nt, Artificial Sequence
  Description of Artificial Sequence: Synthetic oligonucleotide
ugaguagagcaguucuucu

SEQ ID NO: 2929493 - RNA, 19 nt, Artificial Sequence
  Description of Artificial Sequence: Synthetic oligonucleotide
acuguggcaugaaucacac

SEQ ID NO: 2929494 - RNA, 19 nt, Artificial Sequence
  Description of Artificial Sequence: Synthetic oligonucleotide
cauggcuccagcaaaggca

SEQ ID NO: 2929495 - RNA, 19 nt, Artificial Sequence
  Description of Artificial Sequence: Synthetic oligonucleotide
agugacauggcuccagcaa

SEQ ID NO: 2929496 - RNA, 19 nt, Artificial Sequence
  Description of Artificial Sequence: Synthetic oligonucleotide
guagagcaguucuucuacg

SEQ ID NO: 2929497 - RNA, 19 nt, Artificial Sequence
  Description of Artificial Sequence: Synthetic oligonucleotide
uauccaugagccugguacu

SEQ ID NO: 2929498 - RNA, 19 nt, Artificial Sequence
  Description of Artificial Sequence: Synthetic oligonucleotide
gucacagaagucacugugg

SEQ ID NO: 2929499 - RNA, 19 nt, Artificial Sequence
  Description of Artificial Sequence: Synthetic oligonucleotide
gcugacuggccauagcugg

SEQ ID NO: 2929500 - RNA, 19 nt, Artificial Sequence
  Description of Artificial Sequence: Synthetic oligonucleotide
acaaaccagcuuguugccc

SEQ ID NO: 2929501 - RNA, 19 nt, Artificial Sequence
  Description of Artificial Sequence: Synthetic oligonucleotide
aaccagaacaaaccagcuu

SEQ ID NO: 2929502 - RNA, 19 nt, Artificial Sequence
  Description of Artificial Sequence: Synthetic oligonucleotide
aguucuucuacgcccgaga

SEQ ID NO: 2929503 - RNA, 19 nt, Artificial Sequence
  Description of Artificial Sequence: Synthetic oligonucleotide
acuugguacagggcuuucc

SEQ ID NO: 2929504 - RNA, 19 nt, Artificial Sequence
  Description of Artificial Sequence: Synthetic oligonucleotide
guaaaacucagagcuguug

SEQ ID NO: 2929505 - RNA, 19 nt, Artificial Sequence
  Description of Artificial Sequence: Synthetic oligonucleotide
ugaaucacacuggccuugg

SEQ ID NO: 2929506 - RNA, 19 nt, Artificial Sequence
  Description of Artificial Sequence: Synthetic oligonucleotide
cucauacgccacuugguac

SEQ ID NO: 2929507 - RNA, 19 nt, Artificial Sequence
  Description of Artificial Sequence: Synthetic oligonucleotide
aggcauauccaugagccug

SEQ ID NO: 2929508 - RNA, 19 nt, Artificial Sequence
  Description of Artificial Sequence: Synthetic oligonucleotide
aaggcauauccaugagccu

SEQ ID NO: 2929509 - RNA, 19 nt, Artificial Sequence
  Description of Artificial Sequence: Synthetic oligonucleotide
aaaccagaacaaaccagcu

SEQ ID NO: 2929510 - RNA, 19 nt, Artificial Sequence
  Description of Artificial Sequence: Synthetic oligonucleotide
ggucacagaagucacugug

SEQ ID NO: 2929511 - RNA, 19 nt, Artificial Sequence
  Description of Artificial Sequence: Synthetic oligonucleotide
cugagccccagcuagugac

SEQ ID NO: 2929512 - RNA, 19 nt, Artificial Sequence
  Description of Artificial Sequence: Synthetic oligonucleotide
augaccacgaugucguaaa

SEQ ID NO: 2929513 - RNA, 19 nt, Artificial Sequence
  Description of Artificial Sequence: Synthetic oligonucleotide
ucuacgcccgagaaggcau

SEQ ID NO: 2929514 - RNA, 19 nt, Artificial Sequence
  Description of Artificial Sequence: Synthetic oligonucleotide
gagaaggcauauccaugag

SEQ ID NO: 2929515 - RNA, 19 nt, Artificial Sequence
  Description of Artificial Sequence: Synthetic oligonucleotide
gcccuugucacucucauac

SEQ ID NO: 2929516 - RNA, 19 nt, Artificial Sequence
  Description of Artificial Sequence: Synthetic oligonucleotide
uggagcagggacucggcca

SEQ ID NO: 2929517 - RNA, 19 nt, Artificial Sequence
  Description of Artificial Sequence: Synthetic oligonucleotide
agcaaaggcaggcauugau

SEQ ID NO: 2929518 - RNA, 19 nt, Artificial Sequence
  Description of Artificial Sequence: Synthetic oligonucleotide
cuagugacauggcuccagc

SEQ ID NO: 2929519 - RNA, 19 nt, Artificial Sequence
  Description of Artificial Sequence: Synthetic oligonucleotide
uuggcgagcuucagcaaac

SEQ ID NO: 2929520 - RNA, 19 nt, Artificial Sequence
  Description of Artificial Sequence: Synthetic oligonucleotide
guagcgugcagggucacag

SEQ ID NO: 2929521 - RNA, 19 nt, Artificial Sequence
  Description of Artificial Sequence: Synthetic oligonucleotide
uggcccguaggacagcaga

SEQ ID NO: 2929522 - RNA, 19 nt, Artificial Sequence
  Description of Artificial Sequence: Synthetic oligonucleotide
agggucacagaagucacug

SEQ ID NO: 2929523 - RNA, 19 nt, Artificial Sequence
  Description of Artificial Sequence: Synthetic oligonucleotide
accacagguugcccugagc

SEQ ID NO: 2929524 - RNA, 19 nt, Artificial Sequence
  Description of Artificial Sequence: Synthetic oligonucleotide
uuguccaggugcaggggug

SEQ ID NO: 2929525 - RNA, 19 nt, Artificial Sequence
  Description of Artificial Sequence: Synthetic oligonucleotide
uucagcaaaccagaacaaa

SEQ ID NO: 2929526 - RNA, 19 nt, Artificial Sequence
  Description of Artificial Sequence: Synthetic oligonucleotide
uagcuggcccguaggacag

SEQ ID NO: 2929527 - RNA, 19 nt, Artificial Sequence
  Description of Artificial Sequence: Synthetic oligonucleotide
ucacacuggccuuggcgag

SEQ ID NO: 2929528 - RNA, 19 nt, Artificial Sequence
  Description of Artificial Sequence: Synthetic oligonucleotide
gaugcugacuggccauagc

SEQ ID NO: 2929529 - RNA, 19 nt, Artificial Sequence
  Description of Artificial Sequence: Synthetic oligonucleotide
ccuucuguagcgugcaggg

SEQ ID NO: 2929530 - RNA, 19 nt, Artificial Sequence
  Description of Artificial Sequence: Synthetic oligonucleotide
agcaguucuucuacgcccg

SEQ ID NO: 2929531 - RNA, 19 nt, Artificial Sequence
  Description of Artificial Sequence: Synthetic oligonucleotide
acuggccauagcuggcccg

SEQ ID NO: 2929532 - RNA, 19 nt, Artificial Sequence
  Description of Artificial Sequence: Synthetic oligonucleotide
gcaugaaucacacuggccu

SEQ ID NO: 2929533 - RNA, 19 nt, Artificial Sequence
  Description of Artificial Sequence: Synthetic oligonucleotide
cuuucccuucuguagcgug

SEQ ID NO: 2929534 - RNA, 19 nt, Artificial Sequence
  Description of Artificial Sequence: Synthetic oligonucleotide
gacauggcuccagcaaagg

SEQ ID NO: 2929535 - RNA, 19 nt, Artificial Sequence
  Description of Artificial Sequence: Synthetic oligonucleotide
ucggccacugaacgcuggg

SEQ ID NO: 2929536 - RNA, 19 nt, Artificial Sequence
  Description of Artificial Sequence: Synthetic oligonucleotide
aagucacuguggcaugaau

SEQ ID NO: 2929537 - RNA, 19 nt, Artificial Sequence
  Description of Artificial Sequence: Synthetic oligonucleotide
gggacucggccacugaacg

SEQ ID NO: 2929538 - RNA, 19 nt, Artificial Sequence
  Description of Artificial Sequence: Synthetic oligonucleotide
ugucacucucauacgccac

SEQ ID NO: 2929539 - RNA, 19 nt, Artificial Sequence
  Description of Artificial Sequence: Synthetic oligonucleotide
aggcauugaugcugacugg

SEQ ID NO: 2929540 - RNA, 19 nt, Artificial Sequence
  Description of Artificial Sequence: Synthetic oligonucleotide
uugacaaagguggccuccc

SEQ ID NO: 2929541 - RNA, 19 nt, Artificial Sequence
  Description of Artificial Sequence: Synthetic oligonucleotide
guugacaaagguggccucc

SEQ ID NO: 2929542 - RNA, 19 nt, Artificial Sequence
  Description of Artificial Sequence: Synthetic oligonucleotide
agggguguggcgaugacca

SEQ ID NO: 2929543 - RNA, 19 nt, Artificial Sequence
  Description of Artificial Sequence: Synthetic oligonucleotide
uguuguccaggugcagggg

SEQ ID NO: 2929544 - RNA, 19 nt, Artificial Sequence
  Description of Artificial Sequence: Synthetic oligonucleotide
uugguacagggcuuucccu

SEQ ID NO: 2929545 - RNA, 19 nt, Artificial Sequence
  Description of Artificial Sequence: Synthetic oligonucleotide
cacagguugcccugagccc

SEQ ID NO: 2929546 - RNA, 19 nt, Artificial Sequence
  Description of Artificial Sequence: Synthetic oligonucleotide
uaaagcgcugugugacccc

SEQ ID NO: 2929547 - RNA, 19 nt, Artificial Sequence
  Description of Artificial Sequence: Synthetic oligonucleotide
ccacagguugcccugagcc

SEQ ID NO: 2929548 - RNA, 19 nt, Artificial Sequence
  Description of Artificial Sequence: Synthetic oligonucleotide
ugacaaagguggccucccc

SEQ ID NO: 2929549 - RNA, 19 nt, Artificial Sequence
  Description of Artificial Sequence: Synthetic oligonucleotide
cauugaugcugacuggcca

SEQ ID NO: 2929550 - RNA, 19 nt, Artificial Sequence
  Description of Artificial Sequence: Synthetic oligonucleotide
cugggucauguugacaaag

SEQ ID NO: 2929551 - RNA, 19 nt, Artificial Sequence
  Description of Artificial Sequence: Synthetic oligonucleotide
ugguacagggcuuucccuu

SEQ ID NO: 2929552 - RNA, 19 nt, Artificial Sequence
  Description of Artificial Sequence: Synthetic oligonucleotide
uagugacauggcuccagca

SEQ ID NO: 2929553 - RNA, 19 nt, Artificial Sequence
  Description of Artificial Sequence: Synthetic oligonucleotide
ggcgaugaccacgaugucg

SEQ ID NO: 2929554 - RNA, 19 nt, Artificial Sequence
  Description of Artificial Sequence: Synthetic oligonucleotide
acgaugucguaaaacucag

SEQ ID NO: 2929555 - RNA, 19 nt, Artificial Sequence
  Description of Artificial Sequence: Synthetic oligonucleotide
guggcgaugaccacgaugu

SEQ ID NO: 2929556 - RNA, 19 nt, Artificial Sequence
  Description of Artificial Sequence: Synthetic oligonucleotide
augaaucacacuggccuug

SEQ ID NO: 2929557 - RNA, 19 nt, Artificial Sequence
  Description of Artificial Sequence: Synthetic oligonucleotide
ccuugucacucucauacgc

SEQ ID NO: 2929558 - RNA, 19 nt, Artificial Sequence
  Description of Artificial Sequence: Synthetic oligonucleotide
acuggccuuggcgagcuuc

SEQ ID NO: 2929559 - RNA, 19 nt, Artificial Sequence
  Description of Artificial Sequence: Synthetic oligonucleotide
gcaaaccagaacaaaccag

SEQ ID NO: 2929560 - RNA, 19 nt, Artificial Sequence
  Description of Artificial Sequence: Synthetic oligonucleotide
gaguagagcaguucuucua

SEQ ID NO: 2929561 - RNA, 19 nt, Artificial Sequence
  Description of Artificial Sequence: Synthetic oligonucleotide
cacuguggcaugaaucaca

SEQ ID NO: 2929562 - RNA, 19 nt, Artificial Sequence
  Description of Artificial Sequence: Synthetic oligonucleotide
gaacgcugggucauguuga

SEQ ID NO: 2929563 - RNA, 19 nt, Artificial Sequence
  Description of Artificial Sequence: Synthetic oligonucleotide
uucuacgcccgagaaggca

SEQ ID NO: 2929564 - RNA, 19 nt, Artificial Sequence
  Description of Artificial Sequence: Synthetic oligonucleotide
cugacuggccauagcuggc

SEQ ID NO: 2929565 - RNA, 19 nt, Artificial Sequence
  Description of Artificial Sequence: Synthetic oligonucleotide
ugaugcugacuggccauag

SEQ ID NO: 2929566 - RNA, 19 nt, Artificial Sequence
  Description of Artificial Sequence: Synthetic oligonucleotide
uccagcaaaggcaggcauu

SEQ ID NO: 2929567 - RNA, 19 nt, Artificial Sequence
  Description of Artificial Sequence: Synthetic oligonucleotide
gaccacgaugucguaaaac

SEQ ID NO: 2929568 - RNA, 19 nt, Artificial Sequence
  Description of Artificial Sequence: Synthetic oligonucleotide
ugacuggccauagcuggcc

SEQ ID NO: 2929569 - RNA, 19 nt, Artificial Sequence
  Description of Artificial Sequence: Synthetic oligonucleotide
accuggagcagggacucgg

SEQ ID NO: 2929570 - RNA, 19 nt, Artificial Sequence
  Description of Artificial Sequence: Synthetic oligonucleotide
ccagcuagugacauggcuc

SEQ ID NO: 2929571 - RNA, 19 nt, Artificial Sequence
  Description of Artificial Sequence: Synthetic oligonucleotide
gugacauggcuccagcaaa

SEQ ID NO: 2929572 - RNA, 19 nt, Artificial Sequence
  Description of Artificial Sequence: Synthetic oligonucleotide
gcgagcuucagcaaaccag

SEQ ID NO: 2929573 - RNA, 19 nt, Artificial Sequence
  Description of Artificial Sequence: Synthetic oligonucleotide
agcgugcagggucacagaa

SEQ ID NO: 2929574 - RNA, 19 nt, Artificial Sequence
  Description of Artificial Sequence: Synthetic oligonucleotide
uugcccuugucacucucau

SEQ ID NO: 2929575 - RNA, 19 nt, Artificial Sequence
  Description of Artificial Sequence: Synthetic oligonucleotide
agggacucggccacugaac

SEQ ID NO: 2929576 - RNA, 19 nt, Artificial Sequence
  Description of Artificial Sequence: Synthetic oligonucleotide
ggcauauccaugagccugg

SEQ ID NO: 2929577 - RNA, 19 nt, Artificial Sequence
  Description of Artificial Sequence: Synthetic oligonucleotide
ggcuuucccuucuguagcg

SEQ ID NO: 2929578 - RNA, 19 nt, Artificial Sequence
  Description of Artificial Sequence: Synthetic oligonucleotide
ggcauugaugcugacuggc

SEQ ID NO: 2929579 - RNA, 19 nt, Artificial Sequence
  Description of Artificial Sequence: Synthetic oligonucleotide
gccccagcuagugacaugg

SEQ ID NO: 2929580 - RNA, 19 nt, Artificial Sequence
  Description of Artificial Sequence: Synthetic oligonucleotide
acggaccacagguugcccu

SEQ ID NO: 2929581 - RNA, 19 nt, Artificial Sequence
  Description of Artificial Sequence: Synthetic oligonucleotide
uacagggcuuucccuucug

SEQ ID NO: 2929582 - RNA, 19 nt, Artificial Sequence
  Description of Artificial Sequence: Synthetic oligonucleotide
cauagcuggcccguaggac

SEQ ID NO: 2929583 - RNA, 19 nt, Artificial Sequence
  Description of Artificial Sequence: Synthetic oligonucleotide
gucguaaaacucagagcug

SEQ ID NO: 2929584 - RNA, 19 nt, Artificial Sequence
  Description of Artificial Sequence: Synthetic oligonucleotide
gcuguuguccaggugcagg

SEQ ID NO: 2929585 - RNA, 19 nt, Artificial Sequence
  Description of Artificial Sequence: Synthetic oligonucleotide
gaugaccacgaugucguaa

SEQ ID NO: 2929586 - RNA, 19 nt, Artificial Sequence
  Description of Artificial Sequence: Synthetic oligonucleotide
cagaagucacuguggcaug

SEQ ID NO: 2929587 - RNA, 19 nt, Artificial Sequence
  Description of Artificial Sequence: Synthetic oligonucleotide
caucaucaauaaagcgcug

SEQ ID NO: 2929588 - RNA, 19 nt, Artificial Sequence
  Description of Artificial Sequence: Synthetic oligonucleotide
gggcuuucccuucuguagc

SEQ ID NO: 2929589 - RNA, 19 nt, Artificial Sequence
  Description of Artificial Sequence: Synthetic oligonucleotide
uucccuucuguagcgugca

SEQ ID NO: 2929590 - RNA, 19 nt, Artificial Sequence
  Description of Artificial Sequence: Synthetic oligonucleotide
guucuucuacgcccgagaa

SEQ ID NO: 2929591 - RNA, 19 nt, Artificial Sequence
  Description of Artificial Sequence: Synthetic oligonucleotide
agaagucacuguggcauga

SEQ ID NO: 2929592 - RNA, 19 nt, Artificial Sequence
  Description of Artificial Sequence: Synthetic oligonucleotide
cuucagcaaaccagaacaa

SEQ ID NO: 2929593 - RNA, 19 nt, Artificial Sequence
  Description of Artificial Sequence: Synthetic oligonucleotide
ucacuguggcaugaaucac

SEQ ID NO: 2929594 - RNA, 19 nt, Artificial Sequence
  Description of Artificial Sequence: Synthetic oligonucleotide
cuggagcagggacucggcc

SEQ ID NO: 2929595 - RNA, 19 nt, Artificial Sequence
  Description of Artificial Sequence: Synthetic oligonucleotide
cuucuacgcccgagaaggc

SEQ ID NO: 2929596 - RNA, 19 nt, Artificial Sequence
  Description of Artificial Sequence: Synthetic oligonucleotide
acagggcuuucccuucugu

SEQ ID NO: 2929597 - RNA, 19 nt, Artificial Sequence
  Description of Artificial Sequence: Synthetic oligonucleotide
gcaaaggcaggcauugaug

SEQ ID NO: 2929598 - RNA, 19 nt, Artificial Sequence
  Description of Artificial Sequence: Synthetic oligonucleotide
gccuuggcgagcuucagca

SEQ ID NO: 2929599 - RNA, 19 nt, Artificial Sequence
  Description of Artificial Sequence: Synthetic oligonucleotide
acagcagagacaacaucau

SEQ ID NO: 2929600 - RNA, 19 nt, Artificial Sequence
  Description of Artificial Sequence: Synthetic oligonucleotide
ugcugcuguuguccaggug

SEQ ID NO: 2929601 - RNA, 19 nt, Artificial Sequence
  Description of Artificial Sequence: Synthetic oligonucleotide
cagcagagacaacaucauc

SEQ ID NO: 2929602 - RNA, 19 nt, Artificial Sequence
  Description of Artificial Sequence: Synthetic oligonucleotide
gccauagcuggcccguagg

SEQ ID NO: 2929603 - RNA, 19 nt, Artificial Sequence
  Description of Artificial Sequence: Synthetic oligonucleotide
cauacgccacuugguacag

SEQ ID NO: 2929604 - RNA, 19 nt, Artificial Sequence
  Description of Artificial Sequence: Synthetic oligonucleotide
ugaccacgaugucguaaaa

SEQ ID NO: 2929605 - RNA, 19 nt, Artificial Sequence
  Description of Artificial Sequence: Synthetic oligonucleotide
cucggccacugaacgcugg

SEQ ID NO: 2929606 - RNA, 19 nt, Artificial Sequence
  Description of Artificial Sequence: Synthetic oligonucleotide
gaccacagguugcccugag

SEQ ID NO: 2929607 - RNA, 19 nt, Artificial Sequence
  Description of Artificial Sequence: Synthetic oligonucleotide
ugcagggguguggcgauga

SEQ ID NO: 2929608 - RNA, 19 nt, Artificial Sequence
  Description of Artificial Sequence: Synthetic oligonucleotide
cagugaguagagcaguucu

SEQ ID NO: 2929609 - RNA, 19 nt, Artificial Sequence
  Description of Artificial Sequence: Synthetic oligonucleotide
acugaacgcugggucaugu

SEQ ID NO: 2929610 - RNA, 19 nt, Artificial Sequence
  Description of Artificial Sequence: Synthetic oligonucleotide
ggguguggcgaugaccacg

SEQ ID NO: 2929611 - RNA, 19 nt, Artificial Sequence
  Description of Artificial Sequence: Synthetic oligonucleotide
cacagaagucacuguggca

SEQ ID NO: 2929612 - RNA, 19 nt, Artificial Sequence
  Description of Artificial Sequence: Synthetic oligonucleotide
ucccuucuguagcgugcag

SEQ ID NO: 2929613 - RNA, 19 nt, Artificial Sequence
  Description of Artificial Sequence: Synthetic oligonucleotide
gacucggccacugaacgcu

SEQ ID NO: 2929614 - RNA, 19 nt, Artificial Sequence
  Description of Artificial Sequence: Synthetic oligonucleotide
guugcccugagccccagcu

SEQ ID NO: 2929615 - RNA, 19 nt, Artificial Sequence
  Description of Artificial Sequence: Synthetic oligonucleotide
cagggguguggcgaugacc

SEQ ID NO: 2929616 - RNA, 19 nt, Artificial Sequence
  Description of Artificial Sequence: Synthetic oligonucleotide
agugaguagagcaguucuu

SEQ ID NO: 2929617 - RNA, 19 nt, Artificial Sequence
  Description of Artificial Sequence: Synthetic oligonucleotide
uagcgugcagggucacaga

SEQ ID NO: 2929618 - RNA, 19 nt, Artificial Sequence
  Description of Artificial Sequence: Synthetic oligonucleotide
aggacagcagagacaacau

SEQ ID NO: 2929619 - RNA, 19 nt, Artificial Sequence
  Description of Artificial Sequence: Synthetic oligonucleotide
gcuagugacauggcuccag

SEQ ID NO: 2929620 - RNA, 19 nt, Artificial Sequence
  Description of Artificial Sequence: Synthetic oligonucleotide
ggcuccagcaaaggcaggc

SEQ ID NO: 2929621 - RNA, 19 nt, Artificial Sequence
  Description of Artificial Sequence: Synthetic oligonucleotide
cucagagcuguugcccuug

SEQ ID NO: 2929622 - RNA, 19 nt, Artificial Sequence
  Description of Artificial Sequence: Synthetic oligonucleotide
uggcgagcuucagcaaacc

SEQ ID NO: 2929623 - RNA, 19 nt, Artificial Sequence
  Description of Artificial Sequence: Synthetic oligonucleotide
uguagcgugcagggucaca

SEQ ID NO: 2929624 - RNA, 19 nt, Artificial Sequence
  Description of Artificial Sequence: Synthetic oligonucleotide
cgcccgagaaggcauaucc

SEQ ID NO: 2929625 - RNA, 19 nt, Artificial Sequence
  Description of Artificial Sequence: Synthetic oligonucleotide
acgccacuugguacagggc

SEQ ID NO: 2929626 - RNA, 19 nt, Artificial Sequence
  Description of Artificial Sequence: Synthetic oligonucleotide
cgagaaggcauauccauga

SEQ ID NO: 2929627 - RNA, 19 nt, Artificial Sequence
  Description of Artificial Sequence: Synthetic oligonucleotide
caguucuucuacgcccgag

SEQ ID NO: 2929628 - RNA, 19 nt, Artificial Sequence
  Description of Artificial Sequence: Synthetic oligonucleotide
guuguccaggugcaggggu

SEQ ID NO: 2929629 - RNA, 19 nt, Artificial Sequence
  Description of Artificial Sequence: Synthetic oligonucleotide
ccgagaaggcauauccaug

SEQ ID NO: 2929630 - RNA, 19 nt, Artificial Sequence
  Description of Artificial Sequence: Synthetic oligonucleotide
uugaugcugacuggccaua

SEQ ID NO: 2929631 - RNA, 19 nt, Artificial Sequence
  Description of Artificial Sequence: Synthetic oligonucleotide
cccguaggacagcagagac

SEQ ID NO: 2929632 - RNA, 19 nt, Artificial Sequence
  Description of Artificial Sequence: Synthetic oligonucleotide
caucaauaaagcgcugugu

SEQ ID NO: 2929633 - RNA, 19 nt, Artificial Sequence
  Description of Artificial Sequence: Synthetic oligonucleotide
ggccacugaacgcuggguc

SEQ ID NO: 2929634 - RNA, 19 nt, Artificial Sequence
  Description of Artificial Sequence: Synthetic oligonucleotide
cacacuggccuuggcgagc

SEQ ID NO: 2929635 - RNA, 19 nt, Artificial Sequence
  Description of Artificial Sequence: Synthetic oligonucleotide
ggacagcagagacaacauc

SEQ ID NO: 2929636 - RNA, 19 nt, Artificial Sequence
  Description of Artificial Sequence: Synthetic oligonucleotide
gcauugaugcugacuggcc

SEQ ID NO: 2929637 - RNA, 19 nt, Artificial Sequence
  Description of Artificial Sequence: Synthetic oligonucleotide
uugcccugagccccagcua

SEQ ID NO: 2929638 - RNA, 19 nt, Artificial Sequence
  Description of Artificial Sequence: Synthetic oligonucleotide
gucacucucauacgccacu

SEQ ID NO: 2929639 - RNA, 19 nt, Artificial Sequence
  Description of Artificial Sequence: Synthetic oligonucleotide
cucucauacgccacuuggu

SEQ ID NO: 2929640 - RNA, 19 nt, Artificial Sequence
  Description of Artificial Sequence: Synthetic oligonucleotide
gccacugaacgcuggguca

SEQ ID NO: 2929641 - RNA, 19 nt, Artificial Sequence
  Description of Artificial Sequence: Synthetic oligonucleotide
ggacucggccacugaacgc

SEQ ID NO: 2929642 - RNA, 19 nt, Artificial Sequence
  Description of Artificial Sequence: Synthetic oligonucleotide
cuggccuuggcgagcuuca

SEQ ID NO: 2929643 - RNA, 19 nt, Artificial Sequence
  Description of Artificial Sequence: Synthetic oligonucleotide
acucagagcuguugcccuu

SEQ ID NO: 2929644 - RNA, 19 nt, Artificial Sequence
  Description of Artificial Sequence: Synthetic oligonucleotide
auacgccacuugguacagg

SEQ ID NO: 2929645 - RNA, 19 nt, Artificial Sequence
  Description of Artificial Sequence: Synthetic oligonucleotide
caggugcagggguguggcg

SEQ ID NO: 2929646 - RNA, 19 nt, Artificial Sequence
  Description of Artificial Sequence: Synthetic oligonucleotide
cgagcuucagcaaaccaga

SEQ ID NO: 2929647 - RNA, 19 nt, Artificial Sequence
  Description of Artificial Sequence: Synthetic oligonucleotide
gaagucacuguggcaugaa

SEQ ID NO: 2929648 - RNA, 19 nt, Artificial Sequence
  Description of Artificial Sequence: Synthetic oligonucleotide
cccuugucacucucauacg

SEQ ID NO: 2929649 - RNA, 19 nt, Artificial Sequence
  Description of Artificial Sequence: Synthetic oligonucleotide
acacuggccuuggcgagcu

SEQ ID NO: 2929650 - RNA, 19 nt, Artificial Sequence
  Description of Artificial Sequence: Synthetic oligonucleotide
gguguggcgaugaccacga

SEQ ID NO: 2929651 - RNA, 19 nt, Artificial Sequence
  Description of Artificial Sequence: Synthetic oligonucleotide
cccuucuguagcgugcagg

SEQ ID NO: 2929652 - RNA, 19 nt, Artificial Sequence
  Description of Artificial Sequence: Synthetic oligonucleotide
agcagggacucggccacug

SEQ ID NO: 2929653 - RNA, 19 nt, Artificial Sequence
  Description of Artificial Sequence: Synthetic oligonucleotide
ccuuccacggaccacaggu

SEQ ID NO: 2929654 - RNA, 19 nt, Artificial Sequence
  Description of Artificial Sequence: Synthetic oligonucleotide
ggccauagcuggcccguag

SEQ ID NO: 2929655 - RNA, 19 nt, Artificial Sequence
  Description of Artificial Sequence: Synthetic oligonucleotide
agccccagcuagugacaug

SEQ ID NO: 2929656 - RNA, 19 nt, Artificial Sequence
  Description of Artificial Sequence: Synthetic oligonucleotide
ugcccuugucacucucaua

SEQ ID NO: 2929657 - RNA, 19 nt, Artificial Sequence
  Description of Artificial Sequence: Synthetic oligonucleotide
caugaaucacacuggccuu

SEQ ID NO: 2929658 - RNA, 19 nt, Artificial Sequence
  Description of Artificial Sequence: Synthetic oligonucleotide
uggcgaugaccacgauguc

SEQ ID NO: 2929659 - RNA, 19 nt, Artificial Sequence
  Description of Artificial Sequence: Synthetic oligonucleotide
ggccuuggcgagcuucagc

SEQ ID NO: 2929660 - RNA, 19 nt, Artificial Sequence
  Description of Artificial Sequence: Synthetic oligonucleotide
cagggcuuucccuucugua

SEQ ID NO: 2929661 - RNA, 19 nt, Artificial Sequence
  Description of Artificial Sequence: Synthetic oligonucleotide
ggcgagcuucagcaaacca

SEQ ID NO: 2929662 - RNA, 19 nt, Artificial Sequence
  Description of Artificial Sequence: Synthetic oligonucleotide
gcagggucacagaagucac

SEQ ID NO: 2929663 - RNA, 19 nt, Artificial Sequence
  Description of Artificial Sequence: Synthetic oligonucleotide
ggcccguaggacagcagag

SEQ ID NO: 2929664 - RNA, 19 nt, Artificial Sequence
  Description of Artificial Sequence: Synthetic oligonucleotide
cuggcccguaggacagcag

SEQ ID NO: 2929665 - RNA, 19 nt, Artificial Sequence
  Description of Artificial Sequence: Synthetic oligonucleotide
uggccuuggcgagcuucag

SEQ ID NO: 2929666 - RNA, 19 nt, Artificial Sequence
  Description of Artificial Sequence: Synthetic oligonucleotide
agcuggcccguaggacagc

SEQ ID NO: 2929667 - RNA, 19 nt, Artificial Sequence
  Description of Artificial Sequence: Synthetic oligonucleotide
cagggacucggccacugaa

SEQ ID NO: 2929668 - RNA, 19 nt, Artificial Sequence
  Description of Artificial Sequence: Synthetic oligonucleotide
acgcccgagaaggcauauc

SEQ ID NO: 2929669 - RNA, 19 nt, Artificial Sequence
  Description of Artificial Sequence: Synthetic oligonucleotide
gagcuucagcaaaccagaa

SEQ ID NO: 2929670 - RNA, 19 nt, Artificial Sequence
  Description of Artificial Sequence: Synthetic oligonucleotide
ccaggugcagggguguggc

SEQ ID NO: 2929671 - RNA, 19 nt, Artificial Sequence
  Description of Artificial Sequence: Synthetic oligonucleotide
cgcugggucauguugacaa

SEQ ID NO: 2929672 - RNA, 19 nt, Artificial Sequence
  Description of Artificial Sequence: Synthetic oligonucleotide
uacgcccgagaaggcauau

SEQ ID NO: 2929673 - RNA, 19 nt, Artificial Sequence
  Description of Artificial Sequence: Synthetic oligonucleotide
cagagcuguugcccuuguc

SEQ ID NO: 2929674 - RNA, 19 nt, Artificial Sequence
  Description of Artificial Sequence: Synthetic oligonucleotide
gcgaugaccacgaugucgu

SEQ ID NO: 2929675 - RNA, 19 nt, Artificial Sequence
  Description of Artificial Sequence: Synthetic oligonucleotide
cacggaccacagguugccc

SEQ ID NO: 2929676 - RNA, 19 nt, Artificial Sequence
  Description of Artificial Sequence: Synthetic oligonucleotide
agcuagugacauggcucca

SEQ ID NO: 2929677 - RNA, 19 nt, Artificial Sequence
  Description of Artificial Sequence: Synthetic oligonucleotide
guacagggcuuucccuucu

SEQ ID NO: 2929678 - RNA, 19 nt, Artificial Sequence
  Description of Artificial Sequence: Synthetic oligonucleotide
cacugaacgcugggucaug

SEQ ID NO: 2929679 - RNA, 19 nt, Artificial Sequence
  Description of Artificial Sequence: Synthetic oligonucleotide
ccagugaguagagcaguuc

SEQ ID NO: 2929680 - RNA, 19 nt, Artificial Sequence
  Description of Artificial Sequence: Synthetic oligonucleotide
gcgugcagggucacagaag

SEQ ID NO: 2929681 - RNA, 19 nt, Artificial Sequence
  Description of Artificial Sequence: Synthetic oligonucleotide
acucggccacugaacgcug

SEQ ID NO: 2929682 - RNA, 19 nt, Artificial Sequence
  Description of Artificial Sequence: Synthetic oligonucleotide
ccacggaccacagguugcc

SEQ ID NO: 2929683 - RNA, 19 nt, Artificial Sequence
  Description of Artificial Sequence: Synthetic oligonucleotide
cauauccaugagccuggua

SEQ ID NO: 2929684 - RNA, 19 nt, Artificial Sequence
  Description of Artificial Sequence: Synthetic oligonucleotide
acgcugggucauguugaca

SEQ ID NO: 2929685 - RNA, 19 nt, Artificial Sequence
  Description of Artificial Sequence: Synthetic oligonucleotide
cagguugcccugagcccca

SEQ ID NO: 2929686 - RNA, 19 nt, Artificial Sequence
  Description of Artificial Sequence: Synthetic oligonucleotide
cacuugguacagggcuuuc

SEQ ID NO: 2929687 - RNA, 19 nt, Artificial Sequence
  Description of Artificial Sequence: Synthetic oligonucleotide
caccuggagcagggacucg

SEQ ID NO: 2929688 - RNA, 19 nt, Artificial Sequence
  Description of Artificial Sequence: Synthetic oligonucleotide
ccccaccuggagcagggac

SEQ ID NO: 2929689 - RNA, 19 nt, Artificial Sequence
  Description of Artificial Sequence: Synthetic oligonucleotide
cgugcagggucacagaagu

SEQ ID NO: 2929690 - RNA, 19 nt, Artificial Sequence
  Description of Artificial Sequence: Synthetic oligonucleotide
cuacgcccgagaaggcaua

SEQ ID NO: 2929691 - RNA, 19 nt, Artificial Sequence
  Description of Artificial Sequence: Synthetic oligonucleotide
gugcagggucacagaaguc

SEQ ID NO: 2929692 - RNA, 19 nt, Artificial Sequence
  Description of Artificial Sequence: Synthetic oligonucleotide
cagggucacagaagucacu

SEQ ID NO: 2929693 - RNA, 19 nt, Artificial Sequence
  Description of Artificial Sequence: Synthetic oligonucleotide
cggaccacagguugcccug

SEQ ID NO: 2929694 - RNA, 19 nt, Artificial Sequence
  Description of Artificial Sequence: Synthetic oligonucleotide
cuguagcgugcagggucac

SEQ ID NO: 2929695 - RNA, 19 nt, Artificial Sequence
  Description of Artificial Sequence: Synthetic oligonucleotide
ccaccuggagcagggacuc

SEQ ID NO: 2929696 - RNA, 19 nt, Artificial Sequence
  Description of Artificial Sequence: Synthetic oligonucleotide
gcugggucauguugacaaa

SEQ ID NO: 2929697 - RNA, 19 nt, Artificial Sequence
  Description of Artificial Sequence: Synthetic oligonucleotide
cuuccacggaccacagguu

SEQ ID NO: 2929698 - RNA, 19 nt, Artificial Sequence
  Description of Artificial Sequence: Synthetic oligonucleotide
cccgagaaggcauauccau

SEQ ID NO: 2929699 - RNA, 19 nt, Artificial Sequence
  Description of Artificial Sequence: Synthetic oligonucleotide
ccagaacaaaccagcuugu

SEQ ID NO: 2929700 - RNA, 19 nt, Artificial Sequence
  Description of Artificial Sequence: Synthetic oligonucleotide
gguugcccugagccccagc

SEQ ID NO: 2929701 - RNA, 19 nt, Artificial Sequence
  Description of Artificial Sequence: Synthetic oligonucleotide
gcccguaggacagcagaga

SEQ ID NO: 2929702 - RNA, 19 nt, Artificial Sequence
  Description of Artificial Sequence: Synthetic oligonucleotide
cagcaaaggcaggcauuga

SEQ ID NO: 2929703 - RNA, 19 nt, Artificial Sequence
  Description of Artificial Sequence: Synthetic oligonucleotide
gcaggcauugaugcugacu

SEQ ID NO: 2929704 - RNA, 19 nt, Artificial Sequence
  Description of Artificial Sequence: Synthetic oligonucleotide
gcccgagaaggcauaucca

SEQ ID NO: 2929705 - RNA, 19 nt, Artificial Sequence
  Description of Artificial Sequence: Synthetic oligonucleotide
gggucacagaagucacugu

SEQ ID NO: 2929706 - RNA, 19 nt, Artificial Sequence
  Description of Artificial Sequence: Synthetic oligonucleotide
gcaguucuucuacgcccga

SEQ ID NO: 2929707 - RNA, 19 nt, Artificial Sequence
  Description of Artificial Sequence: Synthetic oligonucleotide
cuggccauagcuggcccgu

SEQ ID NO: 2929708 - RNA, 19 nt, Artificial Sequence
  Description of Artificial Sequence: Synthetic oligonucleotide
gggguguggcgaugaccac

SEQ ID NO: 2929709 - RNA, 19 nt, Artificial Sequence
  Description of Artificial Sequence: Synthetic oligonucleotide
cccuuccacggaccacagg

SEQ ID NO: 2929710 - RNA, 19 nt, Artificial Sequence
  Description of Artificial Sequence: Synthetic oligonucleotide
gagccccagcuagugacau

SEQ ID NO: 2929711 - RNA, 19 nt, Artificial Sequence
  Description of Artificial Sequence: Synthetic oligonucleotide
gcuggcccguaggacagca

SEQ ID NO: 2929712 - RNA, 19 nt, Artificial Sequence
  Description of Artificial Sequence: Synthetic oligonucleotide
cccugagccccagcuagug

SEQ ID NO: 2929713 - RNA, 19 nt, Artificial Sequence
  Description of Artificial Sequence: Synthetic oligonucleotide
gugcagggguguggcgaug

SEQ ID NO: 2929714 - RNA, 19 nt, Artificial Sequence
  Description of Artificial Sequence: Synthetic oligonucleotide
cuucuguagcgugcagggu

SEQ ID NO: 2929715 - RNA, 19 nt, Artificial Sequence
  Description of Artificial Sequence: Synthetic oligonucleotide
ccccagcuagugacauggc

SEQ ID NO: 2929716 - RNA, 19 nt, Artificial Sequence
  Description of Artificial Sequence: Synthetic oligonucleotide
gcagggguguggcgaugac

SEQ ID NO: 2929717 - RNA, 19 nt, Artificial Sequence
  Description of Artificial Sequence: Synthetic oligonucleotide
uggccauagcuggcccgua

SEQ ID NO: 2929718 - RNA, 19 nt, Artificial Sequence
  Description of Artificial Sequence: Synthetic oligonucleotide
ggcaggcauugaugcugac

SEQ ID NO: 2929719 - RNA, 19 nt, Artificial Sequence
  Description of Artificial Sequence: Synthetic oligonucleotide
ggugcagggguguggcgau

SEQ ID NO: 2929720 - RNA, 19 nt, Artificial Sequence
  Description of Artificial Sequence: Synthetic oligonucleotide
gcagggacucggccacuga

SEQ ID NO: 2929721 - RNA, 19 nt, Artificial Sequence
  Description of Artificial Sequence: Synthetic oligonucleotide
ccccuuccacggaccacag

SEQ ID NO: 2929722 - RNA, 19 nt, Artificial Sequence
  Description of Artificial Sequence: Synthetic oligonucleotide
cagaacaaaccagcuuguu

SEQ ID NO: 2929723 - RNA, 19 nt, Artificial Sequence
  Description of Artificial Sequence: Synthetic oligonucleotide
cccaccuggagcagggacu

SEQ ID NO: 2929724 - RNA, 19 nt, Artificial Sequence
  Description of Artificial Sequence: Synthetic oligonucleotide
cuguggcaugaaucacacu

SEQ ID NO: 2929725 - RNA, 19 nt, Artificial Sequence
  Description of Artificial Sequence: Synthetic oligonucleotide
cccagcuagugacauggcu

SEQ ID NO: 2929726 - RNA, 19 nt, Artificial Sequence
  Description of Artificial Sequence: Synthetic oligonucleotide
cgccacuugguacagggcu

SEQ ID NO: 2929727 - RNA, 19 nt, Artificial Sequence
  Description of Artificial Sequence: Synthetic oligonucleotide
ccugagccccagcuaguga

SEQ ID NO: 2929728 - RNA, 19 nt, Artificial Sequence
  Description of Artificial Sequence: Synthetic oligonucleotide
ggaccacagguugcccuga

SEQ ID NO: 2929729 - RNA, 19 nt, Artificial Sequence
  Description of Artificial Sequence: Synthetic oligonucleotide
cgaugucguaaaacucaga

SEQ ID NO: 2929730 - RNA, 19 nt, Artificial Sequence
  Description of Artificial Sequence: Synthetic oligonucleotide
ccuuggcgagcuucagcaa

SEQ ID NO: 2929731 - RNA, 19 nt, Artificial Sequence
  Description of Artificial Sequence: Synthetic oligonucleotide
gcuuucccuucuguagcgu

SEQ ID NO: 2929732 - RNA, 19 nt, Artificial Sequence
  Description of Artificial Sequence: Synthetic oligonucleotide
gccacuugguacagggcuu

SEQ ID NO: 2929733 - RNA, 19 nt, Artificial Sequence
  Description of Artificial Sequence: Synthetic oligonucleotide
gagcagggacucggccacu

SEQ ID NO: 2929734 - RNA, 19 nt, Artificial Sequence
  Description of Artificial Sequence: Synthetic oligonucleotide
gcauauccaugagccuggu

SEQ ID NO: 2929735 - RNA, 19 nt, Artificial Sequence
  Description of Artificial Sequence: Synthetic oligonucleotide
cccagugaguagagcaguu

SEQ ID NO: 2929736 - RNA, 19 nt, Artificial Sequence
  Description of Artificial Sequence: Synthetic oligonucleotide
cguaaaacucagagcuguu

SEQ ID NO: 2929737 - RNA, 19 nt, Artificial Sequence
  Description of Artificial Sequence: Synthetic oligonucleotide
ccccagugaguagagcagu

SEQ ID NO: 2929738 - RNA, 19 nt, Artificial Sequence
  Description of Artificial Sequence: Synthetic oligonucleotide
ccacugaacgcugggucau

SEQ ID NO: 2929739 - RNA, 19 nt, Artificial Sequence
  Description of Artificial Sequence: Synthetic oligonucleotide
guguggcgaugaccacgau

SEQ ID NO: 2929740 - RNA, 19 nt, Artificial Sequence
  Description of Artificial Sequence: Synthetic oligonucleotide
ccacuugguacagggcuuu

SEQ ID NO: 2929741 - RNA, 19 nt, Artificial Sequence
  Description of Artificial Sequence: Synthetic oligonucleotide
gcccugagccccagcuagu

SEQ ID NO: 2929742 - RNA, 19 nt, Artificial Sequence
  Description of Artificial Sequence: Synthetic oligonucleotide
cacuggccuuggcgagcuu

SEQ ID NO: 2929743 - RNA, 19 nt, Artificial Sequence
  Description of Artificial Sequence: Synthetic oligonucleotide
cggccacugaacgcugggu

SEQ ID NO: 2929744 - RNA, 19 nt, Artificial Sequence
  Description of Artificial Sequence: Synthetic oligonucleotide
aacaucaaggucgauaacc

SEQ ID NO: 2929745 - RNA, 19 nt, Artificial Sequence
  Description of Artificial Sequence: Synthetic oligonucleotide
aauaucuuugcugacagag

SEQ ID NO: 2929746 - RNA, 19 nt, Artificial Sequence
  Description of Artificial Sequence: Synthetic oligonucleotide
ugaagcuggaucuuggugg

SEQ ID NO: 2929747 - RNA, 19 nt, Artificial Sequence
  Description of Artificial Sequence: Synthetic oligonucleotide
aacacaugaagcuggaucu

SEQ ID NO: 2929748 - RNA, 19 nt, Artificial Sequence
  Description of Artificial Sequence: Synthetic oligonucleotide
aagucgcuggcccugaacc

SEQ ID NO: 2929749 - RNA, 19 nt, Artificial Sequence
  Description of Artificial Sequence: Synthetic oligonucleotide
uaucuuugcugacagagcc

SEQ ID NO: 2929750 - RNA, 19 nt, Artificial Sequence
  Description of Artificial Sequence: Synthetic oligonucleotide
augacgaugaugaaaaugg

SEQ ID NO: 2929751 - RNA, 19 nt, Artificial Sequence
  Description of Artificial Sequence: Synthetic oligonucleotide
ugguaguucagauacagug

SEQ ID NO: 2929752 - RNA, 19 nt, Artificial Sequence
  Description of Artificial Sequence: Synthetic oligonucleotide
aaugacagcaauaucuuug

SEQ ID NO: 2929753 - RNA, 19 nt, Artificial Sequence
  Description of Artificial Sequence: Synthetic oligonucleotide
augacagcaauaucuuugc

SEQ ID NO: 2929754 - RNA, 19 nt, Artificial Sequence
  Description of Artificial Sequence: Synthetic oligonucleotide
acgaugaugaaaauggugg

SEQ ID NO: 2929755 - RNA, 19 nt, Artificial Sequence
  Description of Artificial Sequence: Synthetic oligonucleotide
augaaaaugguggaggacg

SEQ ID NO: 2929756 - RNA, 19 nt, Artificial Sequence
  Description of Artificial Sequence: Synthetic oligonucleotide
ugauccaucccuucuaucc

SEQ ID NO: 2929757 - RNA, 19 nt, Artificial Sequence
  Description of Artificial Sequence: Synthetic oligonucleotide
uucagauacagugcuaugg

SEQ ID NO: 2929758 - RNA, 19 nt, Artificial Sequence
  Description of Artificial Sequence: Synthetic oligonucleotide
acagcaauaucuuugcuga

SEQ ID NO: 2929759 - RNA, 19 nt, Artificial Sequence
  Description of Artificial Sequence: Synthetic oligonucleotide
aaugacgaugaugaaaaug

SEQ ID NO: 2929760 - RNA, 19 nt, Artificial Sequence
  Description of Artificial Sequence: Synthetic oligonucleotide
cugcggaacaucaaggucg

SEQ ID NO: 2929761 - RNA, 19 nt, Artificial Sequence
  Description of Artificial Sequence: Synthetic oligonucleotide
ucuuuugcagggcugguag

SEQ ID NO: 2929762 - RNA, 19 nt, Artificial Sequence
  Description of Artificial Sequence: Synthetic oligonucleotide
uuugagaagucgcuggccc

SEQ ID NO: 2929763 - RNA, 19 nt, Artificial Sequence
  Description of Artificial Sequence: Synthetic oligonucleotide
auggugaucacagccaugc

SEQ ID NO: 2929764 - RNA, 19 nt, Artificial Sequence
  Description of Artificial Sequence: Synthetic oligonucleotide
ugcuauggugaucacagcc

SEQ ID NO: 2929765 - RNA, 19 nt, Artificial Sequence
  Description of Artificial Sequence: Synthetic oligonucleotide
agcuggauuccucaaaccg

SEQ ID NO: 2929766 - RNA, 19 nt, Artificial Sequence
  Description of Artificial Sequence: Synthetic oligonucleotide
ucgauaaccaucccauucc

SEQ ID NO: 2929767 - RNA, 19 nt, Artificial Sequence
  Description of Artificial Sequence: Synthetic oligonucleotide
agagauuccggccaucauc

SEQ ID NO: 2929768 - RNA, 19 nt, Artificial Sequence
  Description of Artificial Sequence: Synthetic oligonucleotide
uuguacaacacaugaagcu

SEQ ID NO: 2929769 - RNA, 19 nt, Artificial Sequence
  Description of Artificial Sequence: Synthetic oligonucleotide
ucccauuccagauacacac

SEQ ID NO: 2929770 - RNA, 19 nt, Artificial Sequence
  Description of Artificial Sequence: Synthetic oligonucleotide
cuuguacaacacaugaagc

SEQ ID NO: 2929771 - RNA, 19 nt, Artificial Sequence
  Description of Artificial Sequence: Synthetic oligonucleotide
gaaaugacgaugaugaaaa

SEQ ID NO: 2929772 - RNA, 19 nt, Artificial Sequence
  Description of Artificial Sequence: Synthetic oligonucleotide
augaugaaaaugguggagg

SEQ ID NO: 2929773 - RNA, 19 nt, Artificial Sequence
  Description of Artificial Sequence: Synthetic oligonucleotide
accaucccauuccagauac

SEQ ID NO: 2929774 - RNA, 19 nt, Artificial Sequence
  Description of Artificial Sequence: Synthetic oligonucleotide
uguacaacacaugaagcug

SEQ ID NO: 2929775 - RNA, 19 nt, Artificial Sequence
  Description of Artificial Sequence: Synthetic oligonucleotide
agugcuauggugaucacag

SEQ ID NO: 2929776 - RNA, 19 nt, Artificial Sequence
  Description of Artificial Sequence: Synthetic oligonucleotide
guggaaaugacgaugauga

SEQ ID NO: 2929777 - RNA, 19 nt, Artificial Sequence
  Description of Artificial Sequence: Synthetic oligonucleotide
augguggaggacgugaucc

SEQ ID NO: 2929778 - RNA, 19 nt, Artificial Sequence
  Description of Artificial Sequence: Synthetic oligonucleotide
auaaccaucccauuccaga

SEQ ID NO: 2929779 - RNA, 19 nt, Artificial Sequence
  Description of Artificial Sequence: Synthetic oligonucleotide
agauacacaccagagcugg

SEQ ID NO: 2929780 - RNA, 19 nt, Artificial Sequence
  Description of Artificial Sequence: Synthetic oligonucleotide
ucagauacagugcuauggu

SEQ ID NO: 2929781 - RNA, 19 nt, Artificial Sequence
  Description of Artificial Sequence: Synthetic oligonucleotide
gcuuguacaacacaugaag

SEQ ID NO: 2929782 - RNA, 19 nt, Artificial Sequence
  Description of Artificial Sequence: Synthetic oligonucleotide
agccuagcugguuaguggc

SEQ ID NO: 2929783 - RNA, 19 nt, Artificial Sequence
  Description of Artificial Sequence: Synthetic oligonucleotide
uucuauccauaucugguug

SEQ ID NO: 2929784 - RNA, 19 nt, Artificial Sequence
  Description of Artificial Sequence: Synthetic oligonucleotide
aucuuggugguuuugagaa

SEQ ID NO: 2929785 - RNA, 19 nt, Artificial Sequence
  Description of Artificial Sequence: Synthetic oligonucleotide
uacagugcuauggugauca

SEQ ID NO: 2929786 - RNA, 19 nt, Artificial Sequence
  Description of Artificial Sequence: Synthetic oligonucleotide
uccagauacacaccagagc

SEQ ID NO: 2929787 - RNA, 19 nt, Artificial Sequence
  Description of Artificial Sequence: Synthetic oligonucleotide
gaugaugaaaaugguggag

SEQ ID NO: 2929788 - RNA, 19 nt, Artificial Sequence
  Description of Artificial Sequence: Synthetic oligonucleotide
aaaaugguggaggacguga

SEQ ID NO: 2929789 - RNA, 19 nt, Artificial Sequence
  Description of Artificial Sequence: Synthetic oligonucleotide
uucuggguggccuucugcg

SEQ ID NO: 2929790 - RNA, 19 nt, Artificial Sequence
  Description of Artificial Sequence: Synthetic oligonucleotide
aagcaucugauccaucccu

SEQ ID NO: 2929791 - RNA, 19 nt, Artificial Sequence
  Description of Artificial Sequence: Synthetic oligonucleotide
gcugacagagccuagcugg

SEQ ID NO: 2929792 - RNA, 19 nt, Artificial Sequence
  Description of Artificial Sequence: Synthetic oligonucleotide
aaggucgauaaccauccca

SEQ ID NO: 2929793 - RNA, 19 nt, Artificial Sequence
  Description of Artificial Sequence: Synthetic oligonucleotide
auccauaucugguugccag

SEQ ID NO: 2929794 - RNA, 19 nt, Artificial Sequence
  Description of Artificial Sequence: Synthetic oligonucleotide
aaugguggaggacgugauc

SEQ ID NO: 2929795 - RNA, 19 nt, Artificial Sequence
  Description of Artificial Sequence: Synthetic oligonucleotide
ugaugaaaaugguggagga

SEQ ID NO: 2929796 - RNA, 19 nt, Artificial Sequence
  Description of Artificial Sequence: Synthetic oligonucleotide
agcaguagguuccaguaug

SEQ ID NO: 2929797 - RNA, 19 nt, Artificial Sequence
  Description of Artificial Sequence: Synthetic oligonucleotide
cuucugcggaacaucaagg

SEQ ID NO: 2929798 - RNA, 19 nt, Artificial Sequence
  Description of Artificial Sequence: Synthetic oligonucleotide
gguuuugagaagucgcugg

SEQ ID NO: 2929799 - RNA, 19 nt, Artificial Sequence
  Description of Artificial Sequence: Synthetic oligonucleotide
ucuauccauaucugguugc

SEQ ID NO: 2929800 - RNA, 19 nt, Artificial Sequence
  Description of Artificial Sequence: Synthetic oligonucleotide
guagguuccaguaugguuc

SEQ ID NO: 2929801 - RNA, 19 nt, Artificial Sequence
  Description of Artificial Sequence: Synthetic oligonucleotide
caacacaugaagcuggauc

SEQ ID NO: 2929802 - RNA, 19 nt, Artificial Sequence
  Description of Artificial Sequence: Synthetic oligonucleotide
aucaaggucgauaaccauc

SEQ ID NO: 2929803 - RNA, 19 nt, Artificial Sequence
  Description of Artificial Sequence: Synthetic oligonucleotide
uccagaguggccucacagg

SEQ ID NO: 2929804 - RNA, 19 nt, Artificial Sequence
  Description of Artificial Sequence: Synthetic oligonucleotide
guacaacacaugaagcugg

SEQ ID NO: 2929805 - RNA, 19 nt, Artificial Sequence
  Description of Artificial Sequence: Synthetic oligonucleotide
auuccagauacacaccaga

SEQ ID NO: 2929806 - RNA, 19 nt, Artificial Sequence
  Description of Artificial Sequence: Synthetic oligonucleotide
ugaaccuccagaguggccu

SEQ ID NO: 2929807 - RNA, 19 nt, Artificial Sequence
  Description of Artificial Sequence: Synthetic oligonucleotide
cuggauuccucaaaccgag

SEQ ID NO: 2929808 - RNA, 19 nt, Artificial Sequence
  Description of Artificial Sequence: Synthetic oligonucleotide
auaucugguugccagggca

SEQ ID NO: 2929809 - RNA, 19 nt, Artificial Sequence
  Description of Artificial Sequence: Synthetic oligonucleotide
auaucuuugcugacagagc

SEQ ID NO: 2929810 - RNA, 19 nt, Artificial Sequence
  Description of Artificial Sequence: Synthetic oligonucleotide
guuucuuuugcagggcugg

SEQ ID NO: 2929811 - RNA, 19 nt, Artificial Sequence
  Description of Artificial Sequence: Synthetic oligonucleotide
aggcuuguacaacacauga

SEQ ID NO: 2929812 - RNA, 19 nt, Artificial Sequence
  Description of Artificial Sequence: Synthetic oligonucleotide
gacgaugaugaaaauggug

SEQ ID NO: 2929813 - RNA, 19 nt, Artificial Sequence
  Description of Artificial Sequence: Synthetic oligonucleotide
gaugcaggcaagcaucuga

SEQ ID NO: 2929814 - RNA, 19 nt, Artificial Sequence
  Description of Artificial Sequence: Synthetic oligonucleotide
uguuucuuuugcagggcug

SEQ ID NO: 2929815 - RNA, 19 nt, Artificial Sequence
  Description of Artificial Sequence: Synthetic oligonucleotide
gagccuagcugguuagugg

SEQ ID NO: 2929816 - RNA, 19 nt, Artificial Sequence
  Description of Artificial Sequence: Synthetic oligonucleotide
agcccuuggacaaugacag

SEQ ID NO: 2929817 - RNA, 19 nt, Artificial Sequence
  Description of Artificial Sequence: Synthetic oligonucleotide
uccauaucugguugccagg

SEQ ID NO: 2929818 - RNA, 19 nt, Artificial Sequence
  Description of Artificial Sequence: Synthetic oligonucleotide
aaaccgaggcuuguacaac

SEQ ID NO: 2929819 - RNA, 19 nt, Artificial Sequence
  Description of Artificial Sequence: Synthetic oligonucleotide
ucaaaccgaggcuuguaca

SEQ ID NO: 2929820 - RNA, 19 nt, Artificial Sequence
  Description of Artificial Sequence: Synthetic oligonucleotide
aaccgaggcuuguacaaca

SEQ ID NO: 2929821 - RNA, 19 nt, Artificial Sequence
  Description of Artificial Sequence: Synthetic oligonucleotide
agauacagugcuaugguga

SEQ ID NO: 2929822 - RNA, 19 nt, Artificial Sequence
  Description of Artificial Sequence: Synthetic oligonucleotide
uuaguggcugugcagcagu

SEQ ID NO: 2929823 - RNA, 19 nt, Artificial Sequence
  Description of Artificial Sequence: Synthetic oligonucleotide
acaggagagauuccggcca

SEQ ID NO: 2929824 - RNA, 19 nt, Artificial Sequence
  Description of Artificial Sequence: Synthetic oligonucleotide
guuccaguaugguucuggg

SEQ ID NO: 2929825 - RNA, 19 nt, Artificial Sequence
  Description of Artificial Sequence: Synthetic oligonucleotide
cugugcagcaguagguucc

SEQ ID NO: 2929826 - RNA, 19 nt, Artificial Sequence
  Description of Artificial Sequence: Synthetic oligonucleotide
gcaggcaagcaucugaucc

SEQ ID NO: 2929827 - RNA, 19 nt, Artificial Sequence
  Description of Artificial Sequence: Synthetic oligonucleotide
gcaauaucuuugcugacag

SEQ ID NO: 2929828 - RNA, 19 nt, Artificial Sequence
  Description of Artificial Sequence: Synthetic oligonucleotide
augaagcuggaucuuggug

SEQ ID NO: 2929829 - RNA, 19 nt, Artificial Sequence
  Description of Artificial Sequence: Synthetic oligonucleotide
guuuugagaagucgcuggc

SEQ ID NO: 2929830 - RNA, 19 nt, Artificial Sequence
  Description of Artificial Sequence: Synthetic oligonucleotide
ugguuaguggcugugcagc

SEQ ID NO: 2929831 - RNA, 19 nt, Artificial Sequence
  Description of Artificial Sequence: Synthetic oligonucleotide
ucugcggaacaucaagguc

SEQ ID NO: 2929832 - RNA, 19 nt, Artificial Sequence
  Description of Artificial Sequence: Synthetic oligonucleotide
gucgauaaccaucccauuc

SEQ ID NO: 2929833 - RNA, 19 nt, Artificial Sequence
  Description of Artificial Sequence: Synthetic oligonucleotide
uucugcggaacaucaaggu

SEQ ID NO: 2929834 - RNA, 19 nt, Artificial Sequence
  Description of Artificial Sequence: Synthetic oligonucleotide
uacacaccagagcuggugu

SEQ ID NO: 2929835 - RNA, 19 nt, Artificial Sequence
  Description of Artificial Sequence: Synthetic oligonucleotide
agaguggccucacaggaga

SEQ ID NO: 2929836 - RNA, 19 nt, Artificial Sequence
  Description of Artificial Sequence: Synthetic oligonucleotide
uuugcugacagagccuagc

SEQ ID NO: 2929837 - RNA, 19 nt, Artificial Sequence
  Description of Artificial Sequence: Synthetic oligonucleotide
cucacaggagagauuccgg

SEQ ID NO: 2929838 - RNA, 19 nt, Artificial Sequence
  Description of Artificial Sequence: Synthetic oligonucleotide
ggugaucacagccaugccc

SEQ ID NO: 2929839 - RNA, 19 nt, Artificial Sequence
  Description of Artificial Sequence: Synthetic oligonucleotide
uggugguuuugagaagucg

SEQ ID NO: 2929840 - RNA, 19 nt, Artificial Sequence
  Description of Artificial Sequence: Synthetic oligonucleotide
uggcccugaaccuccagag

SEQ ID NO: 2929841 - RNA, 19 nt, Artificial Sequence
  Description of Artificial Sequence: Synthetic oligonucleotide
gcaagcaucugauccaucc

SEQ ID NO: 2929842 - RNA, 19 nt, Artificial Sequence
  Description of Artificial Sequence: Synthetic oligonucleotide
gaucuuggugguuuugaga

SEQ ID NO: 2929843 - RNA, 19 nt, Artificial Sequence
  Description of Artificial Sequence: Synthetic oligonucleotide
uuuugagaagucgcuggcc

SEQ ID NO: 2929844 - RNA, 19 nt, Artificial Sequence
  Description of Artificial Sequence: Synthetic oligonucleotide
ggaacaucaaggucgauaa

SEQ ID NO: 2929845 - RNA, 19 nt, Artificial Sequence
  Description of Artificial Sequence: Synthetic oligonucleotide
aguagguuccaguaugguu

SEQ ID NO: 2929846 - RNA, 19 nt, Artificial Sequence
  Description of Artificial Sequence: Synthetic oligonucleotide
gacgugaucccuucgugca

SEQ ID NO: 2929847 - RNA, 19 nt, Artificial Sequence
  Description of Artificial Sequence: Synthetic oligonucleotide
ugacgaugaugaaaauggu

SEQ ID NO: 2929848 - RNA, 19 nt, Artificial Sequence
  Description of Artificial Sequence: Synthetic oligonucleotide
uacaacacaugaagcugga

SEQ ID NO: 2929849 - RNA, 19 nt, Artificial Sequence
  Description of Artificial Sequence: Synthetic oligonucleotide
aguucagauacagugcuau

SEQ ID NO: 2929850 - RNA, 19 nt, Artificial Sequence
  Description of Artificial Sequence: Synthetic oligonucleotide
uggugugggguuucccugg

SEQ ID NO: 2929851 - RNA, 19 nt, Artificial Sequence
  Description of Artificial Sequence: Synthetic oligonucleotide
ucuggguggccuucugcgg

SEQ ID NO: 2929852 - RNA, 19 nt, Artificial Sequence
  Description of Artificial Sequence: Synthetic oligonucleotide
ugguugccagggcagcugg

SEQ ID NO: 2929853 - RNA, 19 nt, Artificial Sequence
  Description of Artificial Sequence: Synthetic oligonucleotide
ggauuccucaaaccgaggc

SEQ ID NO: 2929854 - RNA, 19 nt, Artificial Sequence
  Description of Artificial Sequence: Synthetic oligonucleotide
agcaauaucuuugcugaca

SEQ ID NO: 2929855 - RNA, 19 nt, Artificial Sequence
  Description of Artificial Sequence: Synthetic oligonucleotide
ugcugacagagccuagcug

SEQ ID NO: 2929856 - RNA, 19 nt, Artificial Sequence
  Description of Artificial Sequence: Synthetic oligonucleotide
caucccauuccagauacac

SEQ ID NO: 2929857 - RNA, 19 nt, Artificial Sequence
  Description of Artificial Sequence: Synthetic oligonucleotide
ucugauccaucccuucuau

SEQ ID NO: 2929858 - RNA, 19 nt, Artificial Sequence
  Description of Artificial Sequence: Synthetic oligonucleotide
cuucgugcagcccuuggac

SEQ ID NO: 2929859 - RNA, 19 nt, Artificial Sequence
  Description of Artificial Sequence: Synthetic oligonucleotide
gauccaucccuucuaucca

SEQ ID NO: 2929860 - RNA, 19 nt, Artificial Sequence
  Description of Artificial Sequence: Synthetic oligonucleotide
gauaaccaucccauuccag

SEQ ID NO: 2929861 - RNA, 19 nt, Artificial Sequence
  Description of Artificial Sequence: Synthetic oligonucleotide
uggauuccucaaaccgagg

SEQ ID NO: 2929862 - RNA, 19 nt, Artificial Sequence
  Description of Artificial Sequence: Synthetic oligonucleotide
cucaaaccgaggcuuguac

SEQ ID NO: 2929863 - RNA, 19 nt, Artificial Sequence
  Description of Artificial Sequence: Synthetic oligonucleotide
uauggugaucacagccaug

SEQ ID NO: 2929864 - RNA, 19 nt, Artificial Sequence
  Description of Artificial Sequence: Synthetic oligonucleotide
cauuccagauacacaccag

SEQ ID NO: 2929865 - RNA, 19 nt, Artificial Sequence
  Description of Artificial Sequence: Synthetic oligonucleotide
aaaugacgaugaugaaaau

SEQ ID NO: 2929866 - RNA, 19 nt, Artificial Sequence
  Description of Artificial Sequence: Synthetic oligonucleotide
guaguucagauacagugcu

SEQ ID NO: 2929867 - RNA, 19 nt, Artificial Sequence
  Description of Artificial Sequence: Synthetic oligonucleotide
gggcugguaguucagauac

SEQ ID NO: 2929868 - RNA, 19 nt, Artificial Sequence
  Description of Artificial Sequence: Synthetic oligonucleotide
ugcggaacaucaaggucga

SEQ ID NO: 2929869 - RNA, 19 nt, Artificial Sequence
  Description of Artificial Sequence: Synthetic oligonucleotide
gguaguucagauacagugc

SEQ ID NO: 2929870 - RNA, 19 nt, Artificial Sequence
  Description of Artificial Sequence: Synthetic oligonucleotide
acaucaaggucgauaacca

SEQ ID NO: 2929871 - RNA, 19 nt, Artificial Sequence
  Description of Artificial Sequence: Synthetic oligonucleotide
cagauacagugcuauggug

SEQ ID NO: 2929872 - RNA, 19 nt, Artificial Sequence
  Description of Artificial Sequence: Synthetic oligonucleotide
acaugaagcuggaucuugg

SEQ ID NO: 2929873 - RNA, 19 nt, Artificial Sequence
  Description of Artificial Sequence: Synthetic oligonucleotide
ugguuuugagaagucgcug

SEQ ID NO: 2929874 - RNA, 19 nt, Artificial Sequence
  Description of Artificial Sequence: Synthetic oligonucleotide
ugcagcaguagguuccagu

SEQ ID NO: 2929875 - RNA, 19 nt, Artificial Sequence
  Description of Artificial Sequence: Synthetic oligonucleotide
cuauccauaucugguugcc

SEQ ID NO: 2929876 - RNA, 19 nt, Artificial Sequence
  Description of Artificial Sequence: Synthetic oligonucleotide
ggugguuuugagaagucgc

SEQ ID NO: 2929877 - RNA, 19 nt, Artificial Sequence
  Description of Artificial Sequence: Synthetic oligonucleotide
ucccuucuauccauaucug

SEQ ID NO: 2929878 - RNA, 19 nt, Artificial Sequence
  Description of Artificial Sequence: Synthetic oligonucleotide
uuccuccuguuucuuuugc

SEQ ID NO: 2929879 - RNA, 19 nt, Artificial Sequence
  Description of Artificial Sequence: Synthetic oligonucleotide
cuccagaguggccucacag

SEQ ID NO: 2929880 - RNA, 19 nt, Artificial Sequence
  Description of Artificial Sequence: Synthetic oligonucleotide
ucuuugcugacagagccua

SEQ ID NO: 2929881 - RNA, 19 nt, Artificial Sequence
  Description of Artificial Sequence: Synthetic oligonucleotide
uucgugcagcccuuggaca

SEQ ID NO: 2929882 - RNA, 19 nt, Artificial Sequence
  Description of Artificial Sequence: Synthetic oligonucleotide
uggaucuuggugguuuuga

SEQ ID NO: 2929883 - RNA, 19 nt, Artificial Sequence
  Description of Artificial Sequence: Synthetic oligonucleotide
gugaucacagccaugccca

SEQ ID NO: 2929884 - RNA, 19 nt, Artificial Sequence
  Description of Artificial Sequence: Synthetic oligonucleotide
cugguuaguggcugugcag

SEQ ID NO: 2929885 - RNA, 19 nt, Artificial Sequence
  Description of Artificial Sequence: Synthetic oligonucleotide
auacacaccagagcuggug

SEQ ID NO: 2929886 - RNA, 19 nt, Artificial Sequence
  Description of Artificial Sequence: Synthetic oligonucleotide
uagguuccaguaugguucu

SEQ ID NO: 2929887 - RNA, 19 nt, Artificial Sequence
  Description of Artificial Sequence: Synthetic oligonucleotide
cagauacacaccagagcug

SEQ ID NO: 2929888 - RNA, 19 nt, Artificial Sequence
  Description of Artificial Sequence: Synthetic oligonucleotide
gguggaaaugacgaugaug

SEQ ID NO: 2929889 - RNA, 19 nt, Artificial Sequence
  Description of Artificial Sequence: Synthetic oligonucleotide
ugacagcaauaucuuugcu

SEQ ID NO: 2929890 - RNA, 19 nt, Artificial Sequence
  Description of Artificial Sequence: Synthetic oligonucleotide
uugcagggcugguaguuca

SEQ ID NO: 2929891 - RNA, 19 nt, Artificial Sequence
  Description of Artificial Sequence: Synthetic oligonucleotide
aggacgugaucccuucgug

SEQ ID NO: 2929892 - RNA, 19 nt, Artificial Sequence
  Description of Artificial Sequence: Synthetic oligonucleotide
agcugguuaguggcugugc

SEQ ID NO: 2929893 - RNA, 19 nt, Artificial Sequence
  Description of Artificial Sequence: Synthetic oligonucleotide
uugagaagucgcuggcccu

SEQ ID NO: 2929894 - RNA, 19 nt, Artificial Sequence
  Description of Artificial Sequence: Synthetic oligonucleotide
aaccaucccauuccagaua

SEQ ID NO: 2929895 - RNA, 19 nt, Artificial Sequence
  Description of Artificial Sequence: Synthetic oligonucleotide
gcugguaguucagauacag

SEQ ID NO: 2929896 - RNA, 19 nt, Artificial Sequence
  Description of Artificial Sequence: Synthetic oligonucleotide
uccuccuguuucuuuugca

SEQ ID NO: 2929897 - RNA, 19 nt, Artificial Sequence
  Description of Artificial Sequence: Synthetic oligonucleotide
gaggcuuguacaacacaug

SEQ ID NO: 2929898 - RNA, 19 nt, Artificial Sequence
  Description of Artificial Sequence: Synthetic oligonucleotide
guucagauacagugcuaug

SEQ ID NO: 2929899 - RNA, 19 nt, Artificial Sequence
  Description of Artificial Sequence: Synthetic oligonucleotide
caggguggaaaugacgaug

SEQ ID NO: 2929900 - RNA, 19 nt, Artificial Sequence
  Description of Artificial Sequence: Synthetic oligonucleotide
auuccucaaaccgaggcuu

SEQ ID NO: 2929901 - RNA, 19 nt, Artificial Sequence
  Description of Artificial Sequence: Synthetic oligonucleotide
ucgugcagcccuuggacaa

SEQ ID NO: 2929902 - RNA, 19 nt, Artificial Sequence
  Description of Artificial Sequence: Synthetic oligonucleotide
caaaccgaggcuuguacaa

SEQ ID NO: 2929903 - RNA, 19 nt, Artificial Sequence
  Description of Artificial Sequence: Synthetic oligonucleotide
cauaucugguugccagggc

SEQ ID NO: 2929904 - RNA, 19 nt, Artificial Sequence
  Description of Artificial Sequence: Synthetic oligonucleotide
gguuccaguaugguucugg

SEQ ID NO: 2929905 - RNA, 19 nt, Artificial Sequence
  Description of Artificial Sequence: Synthetic oligonucleotide
cacaccagagcuggugugg

SEQ ID NO: 2929906 - RNA, 19 nt, Artificial Sequence
  Description of Artificial Sequence: Synthetic oligonucleotide
gaucacagccaugcccagg

SEQ ID NO: 2929907 - RNA, 19 nt, Artificial Sequence
  Description of Artificial Sequence: Synthetic oligonucleotide
aggucgauaaccaucccau

SEQ ID NO: 2929908 - RNA, 19 nt, Artificial Sequence
  Description of Artificial Sequence: Synthetic oligonucleotide
uuccaguaugguucugggu

SEQ ID NO: 2929909 - RNA, 19 nt, Artificial Sequence
  Description of Artificial Sequence: Synthetic oligonucleotide
agggcagcuggauuccuca

SEQ ID NO: 2929910 - RNA, 19 nt, Artificial Sequence
  Description of Artificial Sequence: Synthetic oligonucleotide
ugguggaggacgugauccc

SEQ ID NO: 2929911 - RNA, 19 nt, Artificial Sequence
  Description of Artificial Sequence: Synthetic oligonucleotide
ggaucuuggugguuuugag

SEQ ID NO: 2929912 - RNA, 19 nt, Artificial Sequence
  Description of Artificial Sequence: Synthetic oligonucleotide
agagccuagcugguuagug

SEQ ID NO: 2929913 - RNA, 19 nt, Artificial Sequence
  Description of Artificial Sequence: Synthetic oligonucleotide
gauacagugcuauggugau

SEQ ID NO: 2929914 - RNA, 19 nt, Artificial Sequence
  Description of Artificial Sequence: Synthetic oligonucleotide
aucugguugccagggcagc

SEQ ID NO: 2929915 - RNA, 19 nt, Artificial Sequence
  Description of Artificial Sequence: Synthetic oligonucleotide
gaaaaugguggaggacgug

SEQ ID NO: 2929916 - RNA, 19 nt, Artificial Sequence
  Description of Artificial Sequence: Synthetic oligonucleotide
ggaaaugacgaugaugaaa

SEQ ID NO: 2929917 - RNA, 19 nt, Artificial Sequence
  Description of Artificial Sequence: Synthetic oligonucleotide
aggguggaaaugacgauga

SEQ ID NO: 2929918 - RNA, 19 nt, Artificial Sequence
  Description of Artificial Sequence: Synthetic oligonucleotide
uuuugcagggcugguaguu

SEQ ID NO: 2929919 - RNA, 19 nt, Artificial Sequence
  Description of Artificial Sequence: Synthetic oligonucleotide
uauccauaucugguugcca

SEQ ID NO: 2929920 - RNA, 19 nt, Artificial Sequence
  Description of Artificial Sequence: Synthetic oligonucleotide
ugcagggcugguaguucag

SEQ ID NO: 2929921 - RNA, 19 nt, Artificial Sequence
  Description of Artificial Sequence: Synthetic oligonucleotide
aaaugguggaggacgugau

SEQ ID NO: 2929922 - RNA, 19 nt, Artificial Sequence
  Description of Artificial Sequence: Synthetic oligonucleotide
gaacaucaaggucgauaac

SEQ ID NO: 2929923 - RNA, 19 nt, Artificial Sequence
  Description of Artificial Sequence: Synthetic oligonucleotide
cagcuggauuccucaaacc

SEQ ID NO: 2929924 - RNA, 19 nt, Artificial Sequence
  Description of Artificial Sequence: Synthetic oligonucleotide
ugaucacagccaugcccag

SEQ ID NO: 2929925 - RNA, 19 nt, Artificial Sequence
  Description of Artificial Sequence: Synthetic oligonucleotide
gacagagccuagcugguua

SEQ ID NO: 2929926 - RNA, 19 nt, Artificial Sequence
  Description of Artificial Sequence: Synthetic oligonucleotide
gaagucgcuggcccugaac

SEQ ID NO: 2929927 - RNA, 19 nt, Artificial Sequence
  Description of Artificial Sequence: Synthetic oligonucleotide
cuggugugggguuucccug

SEQ ID NO: 2929928 - RNA, 19 nt, Artificial Sequence
  Description of Artificial Sequence: Synthetic oligonucleotide
uuggugguuuugagaaguc

SEQ ID NO: 2929929 - RNA, 19 nt, Artificial Sequence
  Description of Artificial Sequence: Synthetic oligonucleotide
cacagccaugcccagggug

SEQ ID NO: 2929930 - RNA, 19 nt, Artificial Sequence
  Description of Artificial Sequence: Synthetic oligonucleotide
cacaugaagcuggaucuug

SEQ ID NO: 2929931 - RNA, 19 nt, Artificial Sequence
  Description of Artificial Sequence: Synthetic oligonucleotide
uggaaaugacgaugaugaa

SEQ ID NO: 2929932 - RNA, 19 nt, Artificial Sequence
  Description of Artificial Sequence: Synthetic oligonucleotide
ccuucugcggaacaucaag

SEQ ID NO: 2929933 - RNA, 19 nt, Artificial Sequence
  Description of Artificial Sequence: Synthetic oligonucleotide
cagaguggccucacaggag

SEQ ID NO: 2929934 - RNA, 19 nt, Artificial Sequence
  Description of Artificial Sequence: Synthetic oligonucleotide
uggugaucacagccaugcc

SEQ ID NO: 2929935 - RNA, 19 nt, Artificial Sequence
  Description of Artificial Sequence: Synthetic oligonucleotide
guucuggguggccuucugc

SEQ ID NO: 2929936 - RNA, 19 nt, Artificial Sequence
  Description of Artificial Sequence: Synthetic oligonucleotide
ggacgugaucccuucgugc

SEQ ID NO: 2929937 - RNA, 19 nt, Artificial Sequence
  Description of Artificial Sequence: Synthetic oligonucleotide
guuaguggcugugcagcag

SEQ ID NO: 2929938 - RNA, 19 nt, Artificial Sequence
  Description of Artificial Sequence: Synthetic oligonucleotide
gcagcuggauuccucaaac

SEQ ID NO: 2929939 - RNA, 19 nt, Artificial Sequence
  Description of Artificial Sequence: Synthetic oligonucleotide
acaccagagcugguguggg

SEQ ID NO: 2929940 - RNA, 19 nt, Artificial Sequence
  Description of Artificial Sequence: Synthetic oligonucleotide
acagugcuauggugaucac

SEQ ID NO: 2929941 - RNA, 19 nt, Artificial Sequence
  Description of Artificial Sequence: Synthetic oligonucleotide
ucgcuggcccugaaccucc

SEQ ID NO: 2929942 - RNA, 19 nt, Artificial Sequence
  Description of Artificial Sequence: Synthetic oligonucleotide
cccuucuauccauaucugg

SEQ ID NO: 2929943 - RNA, 19 nt, Artificial Sequence
  Description of Artificial Sequence: Synthetic oligonucleotide
acgugaucccuucgugcag

SEQ ID NO: 2929944 - RNA, 19 nt, Artificial Sequence
  Description of Artificial Sequence: Synthetic oligonucleotide
uaguucagauacagugcua

SEQ ID NO: 2929945 - RNA, 19 nt, Artificial Sequence
  Description of Artificial Sequence: Synthetic oligonucleotide
caggcaagcaucugaucca

SEQ ID NO: 2929946 - RNA, 19 nt, Artificial Sequence
  Description of Artificial Sequence: Synthetic oligonucleotide
gaagcuggaucuugguggu

SEQ ID NO: 2929947 - RNA, 19 nt, Artificial Sequence
  Description of Artificial Sequence: Synthetic oligonucleotide
augcccaggguggaaauga

SEQ ID NO: 2929948 - RNA, 19 nt, Artificial Sequence
  Description of Artificial Sequence: Synthetic oligonucleotide
uaugguucuggguggccuu

SEQ ID NO: 2929949 - RNA, 19 nt, Artificial Sequence
  Description of Artificial Sequence: Synthetic oligonucleotide
cuuugcugacagagccuag

SEQ ID NO: 2929950 - RNA, 19 nt, Artificial Sequence
  Description of Artificial Sequence: Synthetic oligonucleotide
uuugcagggcugguaguuc

SEQ ID NO: 2929951 - RNA, 19 nt, Artificial Sequence
  Description of Artificial Sequence: Synthetic oligonucleotide
ccagauacacaccagagcu

SEQ ID NO: 2929952 - RNA, 19 nt, Artificial Sequence
  Description of Artificial Sequence: Synthetic oligonucleotide
uggaggacgugaucccuuc

SEQ ID NO: 2929953 - RNA, 19 nt, Artificial Sequence
  Description of Artificial Sequence: Synthetic oligonucleotide
agucgcuggcccugaaccu

SEQ ID NO: 2929954 - RNA, 19 nt, Artificial Sequence
  Description of Artificial Sequence: Synthetic oligonucleotide
auacagugcuauggugauc

SEQ ID NO: 2929955 - RNA, 19 nt, Artificial Sequence
  Description of Artificial Sequence: Synthetic oligonucleotide
accgaggcuuguacaacac

SEQ ID NO: 2929956 - RNA, 19 nt, Artificial Sequence
  Description of Artificial Sequence: Synthetic oligonucleotide
auccaucccuucuauccau

SEQ ID NO: 2929957 - RNA, 19 nt, Artificial Sequence
  Description of Artificial Sequence: Synthetic oligonucleotide
accagagcugguguggggu

SEQ ID NO: 2929958 - RNA, 19 nt, Artificial Sequence
  Description of Artificial Sequence: Synthetic oligonucleotide
ccucacaggagagauuccg

SEQ ID NO: 2929959 - RNA, 19 nt, Artificial Sequence
  Description of Artificial Sequence: Synthetic oligonucleotide
agagcuggugugggguuuc

SEQ ID NO: 2929960 - RNA, 19 nt, Artificial Sequence
  Description of Artificial Sequence: Synthetic oligonucleotide
cugaaccuccagaguggcc

SEQ ID NO: 2929961 - RNA, 19 nt, Artificial Sequence
  Description of Artificial Sequence: Synthetic oligonucleotide
uuucuuuugcagggcuggu

SEQ ID NO: 2929962 - RNA, 19 nt, Artificial Sequence
  Description of Artificial Sequence: Synthetic oligonucleotide
gcaguagguuccaguaugg

SEQ ID NO: 2929963 - RNA, 19 nt, Artificial Sequence
  Description of Artificial Sequence: Synthetic oligonucleotide
cuuggugguuuugagaagu

SEQ ID NO: 2929964 - RNA, 19 nt, Artificial Sequence
  Description of Artificial Sequence: Synthetic oligonucleotide
ccauaucugguugccaggg

SEQ ID NO: 2929965 - RNA, 19 nt, Artificial Sequence
  Description of Artificial Sequence: Synthetic oligonucleotide
ucugguugccagggcagcu

SEQ ID NO: 2929966 - RNA, 19 nt, Artificial Sequence
  Description of Artificial Sequence: Synthetic oligonucleotide
ggccucacaggagagauuc

SEQ ID NO: 2929967 - RNA, 19 nt, Artificial Sequence
  Description of Artificial Sequence: Synthetic oligonucleotide
ugcccaggguggaaaugac

SEQ ID NO: 2929968 - RNA, 19 nt, Artificial Sequence
  Description of Artificial Sequence: Synthetic oligonucleotide
agggcugguaguucagaua

SEQ ID NO: 2929969 - RNA, 19 nt, Artificial Sequence
  Description of Artificial Sequence: Synthetic oligonucleotide
cagcaauaucuuugcugac

SEQ ID NO: 2929970 - RNA, 19 nt, Artificial Sequence
  Description of Artificial Sequence: Synthetic oligonucleotide
uucuuuugcagggcuggua

SEQ ID NO: 2929971 - RNA, 19 nt, Artificial Sequence
  Description of Artificial Sequence: Synthetic oligonucleotide
agcuggugugggguuuccc

SEQ ID NO: 2929972 - RNA, 19 nt, Artificial Sequence
  Description of Artificial Sequence: Synthetic oligonucleotide
cugauccaucccuucuauc

SEQ ID NO: 2929973 - RNA, 19 nt, Artificial Sequence
  Description of Artificial Sequence: Synthetic oligonucleotide
ugcaggcaagcaucugauc

SEQ ID NO: 2929974 - RNA, 19 nt, Artificial Sequence
  Description of Artificial Sequence: Synthetic oligonucleotide
caaggucgauaaccauccc

SEQ ID NO: 2929975 - RNA, 19 nt, Artificial Sequence
  Description of Artificial Sequence: Synthetic oligonucleotide
ugcagcccuuggacaauga

SEQ ID NO: 2929976 - RNA, 19 nt, Artificial Sequence
  Description of Artificial Sequence: Synthetic oligonucleotide
uccaucccuucuauccaua

SEQ ID NO: 2929977 - RNA, 19 nt, Artificial Sequence
  Description of Artificial Sequence: Synthetic oligonucleotide
cccaggguggaaaugacga

SEQ ID NO: 2929978 - RNA, 19 nt, Artificial Sequence
  Description of Artificial Sequence: Synthetic oligonucleotide
gcuauggugaucacagcca

SEQ ID NO: 2929979 - RNA, 19 nt, Artificial Sequence
  Description of Artificial Sequence: Synthetic oligonucleotide
gaggacgugaucccuucgu

SEQ ID NO: 2929980 - RNA, 19 nt, Artificial Sequence
  Description of Artificial Sequence: Synthetic oligonucleotide
augguucuggguggccuuc

SEQ ID NO: 2929981 - RNA, 19 nt, Artificial Sequence
  Description of Artificial Sequence: Synthetic oligonucleotide
cccugaaccuccagagugg

SEQ ID NO: 2929982 - RNA, 19 nt, Artificial Sequence
  Description of Artificial Sequence: Synthetic oligonucleotide
caccagagcuggugugggg

SEQ ID NO: 2929983 - RNA, 19 nt, Artificial Sequence
  Description of Artificial Sequence: Synthetic oligonucleotide
aucccauuccagauacaca

SEQ ID NO: 2929984 - RNA, 19 nt, Artificial Sequence
  Description of Artificial Sequence: Synthetic oligonucleotide
agcuggaucuuggugguuu

SEQ ID NO: 2929985 - RNA, 19 nt, Artificial Sequence
  Description of Artificial Sequence: Synthetic oligonucleotide
aucuuugcugacagagccu

SEQ ID NO: 2929986 - RNA, 19 nt, Artificial Sequence
  Description of Artificial Sequence: Synthetic oligonucleotide
gugcuauggugaucacagc

SEQ ID NO: 2929987 - RNA, 19 nt, Artificial Sequence
  Description of Artificial Sequence: Synthetic oligonucleotide
gaaccuccagaguggccuc

SEQ ID NO: 2929988 - RNA, 19 nt, Artificial Sequence
  Description of Artificial Sequence: Synthetic oligonucleotide
caauaucuuugcugacaga

SEQ ID NO: 2929989 - RNA, 19 nt, Artificial Sequence
  Description of Artificial Sequence: Synthetic oligonucleotide
gugaucccuucgugcagcc

SEQ ID NO: 2929990 - RNA, 19 nt, Artificial Sequence
  Description of Artificial Sequence: Synthetic oligonucleotide
uccucaaaccgaggcuugu

SEQ ID NO: 2929991 - RNA, 19 nt, Artificial Sequence
  Description of Artificial Sequence: Synthetic oligonucleotide
cuucuauccauaucugguu

SEQ ID NO: 2929992 - RNA, 19 nt, Artificial Sequence
  Description of Artificial Sequence: Synthetic oligonucleotide
uagcugguuaguggcugug

SEQ ID NO: 2929993 - RNA, 19 nt, Artificial Sequence
  Description of Artificial Sequence: Synthetic oligonucleotide
gcagcaguagguuccagua

SEQ ID NO: 2929994 - RNA, 19 nt, Artificial Sequence
  Description of Artificial Sequence: Synthetic oligonucleotide
ggugugggguuucccuggg

SEQ ID NO: 2929995 - RNA, 19 nt, Artificial Sequence
  Description of Artificial Sequence: Synthetic oligonucleotide
ggggaugcaggcaagcauc

SEQ ID NO: 2929996 - RNA, 19 nt, Artificial Sequence
  Description of Artificial Sequence: Synthetic oligonucleotide
gaguggccucacaggagag

SEQ ID NO: 2929997 - RNA, 19 nt, Artificial Sequence
  Description of Artificial Sequence: Synthetic oligonucleotide
ggaggacgugaucccuucg

SEQ ID NO: 2929998 - RNA, 19 nt, Artificial Sequence
  Description of Artificial Sequence: Synthetic oligonucleotide
gcugguuaguggcugugca

SEQ ID NO: 2929999 - RNA, 19 nt, Artificial Sequence
  Description of Artificial Sequence: Synthetic oligonucleotide
uugccagggcagcuggauu

SEQ ID NO: 2930000 - RNA, 19 nt, Artificial Sequence
  Description of Artificial Sequence: Synthetic oligonucleotide
gcuggauuccucaaaccga

SEQ ID NO: 2930001 - RNA, 19 nt, Artificial Sequence
  Description of Artificial Sequence: Synthetic oligonucleotide
gugugggguuucccugggg

SEQ ID NO: 2930002 - RNA, 19 nt, Artificial Sequence
  Description of Artificial Sequence: Synthetic oligonucleotide
aguggccucacaggagaga

SEQ ID NO: 2930003 - RNA, 19 nt, Artificial Sequence
  Description of Artificial Sequence: Synthetic oligonucleotide
ccuucuauccauaucuggu

SEQ ID NO: 2930004 - RNA, 19 nt, Artificial Sequence
  Description of Artificial Sequence: Synthetic oligonucleotide
cuggguggccuucugcgga

SEQ ID NO: 2930005 - RNA, 19 nt, Artificial Sequence
  Description of Artificial Sequence: Synthetic oligonucleotide
augcaggcaagcaucugau

SEQ ID NO: 2930006 - RNA, 19 nt, Artificial Sequence
  Description of Artificial Sequence: Synthetic oligonucleotide
cuggcccugaaccuccaga

SEQ ID NO: 2930007 - RNA, 19 nt, Artificial Sequence
  Description of Artificial Sequence: Synthetic oligonucleotide
gguuaguggcugugcagca

SEQ ID NO: 2930008 - RNA, 19 nt, Artificial Sequence
  Description of Artificial Sequence: Synthetic oligonucleotide
cccauuccagauacacacc

SEQ ID NO: 2930009 - RNA, 19 nt, Artificial Sequence
  Description of Artificial Sequence: Synthetic oligonucleotide
gugguuuugagaagucgcu

SEQ ID NO: 2930010 - RNA, 19 nt, Artificial Sequence
  Description of Artificial Sequence: Synthetic oligonucleotide
caugcccaggguggaaaug

SEQ ID NO: 2930011 - RNA, 19 nt, Artificial Sequence
  Description of Artificial Sequence: Synthetic oligonucleotide
cugguugccagggcagcug

SEQ ID NO: 2930012 - RNA, 19 nt, Artificial Sequence
  Description of Artificial Sequence: Synthetic oligonucleotide
uggccuucugcggaacauc

SEQ ID NO: 2930013 - RNA, 19 nt, Artificial Sequence
  Description of Artificial Sequence: Synthetic oligonucleotide
aggagagauuccggccauc

SEQ ID NO: 2930014 - RNA, 19 nt, Artificial Sequence
  Description of Artificial Sequence: Synthetic oligonucleotide
aaccuccagaguggccuca

SEQ ID NO: 2930015 - RNA, 19 nt, Artificial Sequence
  Description of Artificial Sequence: Synthetic oligonucleotide
uggguggccuucugcggaa

SEQ ID NO: 2930016 - RNA, 19 nt, Artificial Sequence
  Description of Artificial Sequence: Synthetic oligonucleotide
ccagaguggccucacagga

SEQ ID NO: 2930017 - RNA, 19 nt, Artificial Sequence
  Description of Artificial Sequence: Synthetic oligonucleotide
ggagagauuccggccauca

SEQ ID NO: 2930018 - RNA, 19 nt, Artificial Sequence
  Description of Artificial Sequence: Synthetic oligonucleotide
gcugugcagcaguagguuc

SEQ ID NO: 2930019 - RNA, 19 nt, Artificial Sequence
  Description of Artificial Sequence: Synthetic oligonucleotide
caugaagcuggaucuuggu

SEQ ID NO: 2930020 - RNA, 19 nt, Artificial Sequence
  Description of Artificial Sequence: Synthetic oligonucleotide
caucugauccaucccuucu

SEQ ID NO: 2930021 - RNA, 19 nt, Artificial Sequence
  Description of Artificial Sequence: Synthetic oligonucleotide
aggcaagcaucugauccau

SEQ ID NO: 2930022 - RNA, 19 nt, Artificial Sequence
  Description of Artificial Sequence: Synthetic oligonucleotide
cccuuggacaaugacagca

SEQ ID NO: 2930023 - RNA, 19 nt, Artificial Sequence
  Description of Artificial Sequence: Synthetic oligonucleotide
cuauggugaucacagccau

SEQ ID NO: 2930024 - RNA, 19 nt, Artificial Sequence
  Description of Artificial Sequence: Synthetic oligonucleotide
cuggaucuuggugguuuug

SEQ ID NO: 2930025 - RNA, 19 nt, Artificial Sequence
  Description of Artificial Sequence: Synthetic oligonucleotide
acaacacaugaagcuggau

SEQ ID NO: 2930026 - RNA, 19 nt, Artificial Sequence
  Description of Artificial Sequence: Synthetic oligonucleotide
cuguuucuuuugcagggcu

SEQ ID NO: 2930027 - RNA, 19 nt, Artificial Sequence
  Description of Artificial Sequence: Synthetic oligonucleotide
gcaucugauccaucccuuc

SEQ ID NO: 2930028 - RNA, 19 nt, Artificial Sequence
  Description of Artificial Sequence: Synthetic oligonucleotide
agcaucugauccaucccuu

SEQ ID NO: 2930029 - RNA, 19 nt, Artificial Sequence
  Description of Artificial Sequence: Synthetic oligonucleotide
gucgcuggcccugaaccuc

SEQ ID NO: 2930030 - RNA, 19 nt, Artificial Sequence
  Description of Artificial Sequence: Synthetic oligonucleotide
cagugcuauggugaucaca

SEQ ID NO: 2930031 - RNA, 19 nt, Artificial Sequence
  Description of Artificial Sequence: Synthetic oligonucleotide
ccuguuucuuuugcagggc

SEQ ID NO: 2930032 - RNA, 19 nt, Artificial Sequence
  Description of Artificial Sequence: Synthetic oligonucleotide
guaugguucuggguggccu

SEQ ID NO: 2930033 - RNA, 19 nt, Artificial Sequence
  Description of Artificial Sequence: Synthetic oligonucleotide
gcagcccuuggacaaugac

SEQ ID NO: 2930034 - RNA, 19 nt, Artificial Sequence
  Description of Artificial Sequence: Synthetic oligonucleotide
acacaugaagcuggaucuu

SEQ ID NO: 2930035 - RNA, 19 nt, Artificial Sequence
  Description of Artificial Sequence: Synthetic oligonucleotide
ccuagcugguuaguggcug

SEQ ID NO: 2930036 - RNA, 19 nt, Artificial Sequence
  Description of Artificial Sequence: Synthetic oligonucleotide
cuuggacaaugacagcaau

SEQ ID NO: 2930037 - RNA, 19 nt, Artificial Sequence
  Description of Artificial Sequence: Synthetic oligonucleotide
ugguucuggguggccuucu

SEQ ID NO: 2930038 - RNA, 19 nt, Artificial Sequence
  Description of Artificial Sequence: Synthetic oligonucleotide
ugacagagccuagcugguu

SEQ ID NO: 2930039 - RNA, 19 nt, Artificial Sequence
  Description of Artificial Sequence: Synthetic oligonucleotide
ccugaaccuccagaguggc

SEQ ID NO: 2930040 - RNA, 19 nt, Artificial Sequence
  Description of Artificial Sequence: Synthetic oligonucleotide
gcccaggguggaaaugacg

SEQ ID NO: 2930041 - RNA, 19 nt, Artificial Sequence
  Description of Artificial Sequence: Synthetic oligonucleotide
cgaugaugaaaauggugga

SEQ ID NO: 2930042 - RNA, 19 nt, Artificial Sequence
  Description of Artificial Sequence: Synthetic oligonucleotide
cugguaguucagauacagu

SEQ ID NO: 2930043 - RNA, 19 nt, Artificial Sequence
  Description of Artificial Sequence: Synthetic oligonucleotide
gugcagcccuuggacaaug

SEQ ID NO: 2930044 - RNA, 19 nt, Artificial Sequence
  Description of Artificial Sequence: Synthetic oligonucleotide
uggccucacaggagagauu

SEQ ID NO: 2930045 - RNA, 19 nt, Artificial Sequence
  Description of Artificial Sequence: Synthetic oligonucleotide
agaagucgcuggcccugaa

SEQ ID NO: 2930046 - RNA, 19 nt, Artificial Sequence
  Description of Artificial Sequence: Synthetic oligonucleotide
gguucuggguggccuucug

SEQ ID NO: 2930047 - RNA, 19 nt, Artificial Sequence
  Description of Artificial Sequence: Synthetic oligonucleotide
gagagauuccggccaucau

SEQ ID NO: 2930048 - RNA, 19 nt, Artificial Sequence
  Description of Artificial Sequence: Synthetic oligonucleotide
cuuuugcagggcugguagu

SEQ ID NO: 2930049 - RNA, 19 nt, Artificial Sequence
  Description of Artificial Sequence: Synthetic oligonucleotide
ggcagcuggauuccucaaa

SEQ ID NO: 2930050 - RNA, 19 nt, Artificial Sequence
  Description of Artificial Sequence: Synthetic oligonucleotide
cuagcugguuaguggcugu

SEQ ID NO: 2930051 - RNA, 19 nt, Artificial Sequence
  Description of Artificial Sequence: Synthetic oligonucleotide
ggcuuguacaacacaugaa

SEQ ID NO: 2930052 - RNA, 19 nt, Artificial Sequence
  Description of Artificial Sequence: Synthetic oligonucleotide
caucaaggucgauaaccau

SEQ ID NO: 2930053 - RNA, 19 nt, Artificial Sequence
  Description of Artificial Sequence: Synthetic oligonucleotide
gagcuggugugggguuucc

SEQ ID NO: 2930054 - RNA, 19 nt, Artificial Sequence
  Description of Artificial Sequence: Synthetic oligonucleotide
ggccuucugcggaacauca

SEQ ID NO: 2930055 - RNA, 19 nt, Artificial Sequence
  Description of Artificial Sequence: Synthetic oligonucleotide
ccuuggacaaugacagcaa

SEQ ID NO: 2930056 - RNA, 19 nt, Artificial Sequence
  Description of Artificial Sequence: Synthetic oligonucleotide
cugacagagccuagcuggu

SEQ ID NO: 2930057 - RNA, 19 nt, Artificial Sequence
  Description of Artificial Sequence: Synthetic oligonucleotide
guggccucacaggagagau

SEQ ID NO: 2930058 - RNA, 19 nt, Artificial Sequence
  Description of Artificial Sequence: Synthetic oligonucleotide
ucccuucgugcagcccuug

SEQ ID NO: 2930059 - RNA, 19 nt, Artificial Sequence
  Description of Artificial Sequence: Synthetic oligonucleotide
cgugaucccuucgugcagc

SEQ ID NO: 2930060 - RNA, 19 nt, Artificial Sequence
  Description of Artificial Sequence: Synthetic oligonucleotide
gauacacaccagagcuggu

SEQ ID NO: 2930061 - RNA, 19 nt, Artificial Sequence
  Description of Artificial Sequence: Synthetic oligonucleotide
gguggccuucugcggaaca

SEQ ID NO: 2930062 - RNA, 19 nt, Artificial Sequence
  Description of Artificial Sequence: Synthetic oligonucleotide
ggaugcaggcaagcaucug

SEQ ID NO: 2930063 - RNA, 19 nt, Artificial Sequence
  Description of Artificial Sequence: Synthetic oligonucleotide
aagcuggaucuuggugguu

SEQ ID NO: 2930064 - RNA, 19 nt, Artificial Sequence
  Description of Artificial Sequence: Synthetic oligonucleotide
cagggcugguaguucagau

SEQ ID NO: 2930065 - RNA, 19 nt, Artificial Sequence
  Description of Artificial Sequence: Synthetic oligonucleotide
cccuucgugcagcccuugg

SEQ ID NO: 2930066 - RNA, 19 nt, Artificial Sequence
  Description of Artificial Sequence: Synthetic oligonucleotide
gcccuuggacaaugacagc

SEQ ID NO: 2930067 - RNA, 19 nt, Artificial Sequence
  Description of Artificial Sequence: Synthetic oligonucleotide
guugccagggcagcuggau

SEQ ID NO: 2930068 - RNA, 19 nt, Artificial Sequence
  Description of Artificial Sequence: Synthetic oligonucleotide
ccuucgugcagcccuugga

SEQ ID NO: 2930069 - RNA, 19 nt, Artificial Sequence
  Description of Artificial Sequence: Synthetic oligonucleotide
agguuccaguaugguucug

SEQ ID NO: 2930070 - RNA, 19 nt, Artificial Sequence
  Description of Artificial Sequence: Synthetic oligonucleotide
gugcagcaguagguuccag

SEQ ID NO: 2930071 - RNA, 19 nt, Artificial Sequence
  Description of Artificial Sequence: Synthetic oligonucleotide
cgauaaccaucccauucca

SEQ ID NO: 2930072 - RNA, 19 nt, Artificial Sequence
  Description of Artificial Sequence: Synthetic oligonucleotide
cgaggcuuguacaacacau

SEQ ID NO: 2930073 - RNA, 19 nt, Artificial Sequence
  Description of Artificial Sequence: Synthetic oligonucleotide
cagcaguagguuccaguau

SEQ ID NO: 2930074 - RNA, 19 nt, Artificial Sequence
  Description of Artificial Sequence: Synthetic oligonucleotide
caguagguuccaguauggu

SEQ ID NO: 2930075 - RNA, 19 nt, Artificial Sequence
  Description of Artificial Sequence: Synthetic oligonucleotide
ccgaggcuuguacaacaca

SEQ ID NO: 2930076 - RNA, 19 nt, Artificial Sequence
  Description of Artificial Sequence: Synthetic oligonucleotide
cggaacaucaaggucgaua

SEQ ID NO: 2930077 - RNA, 19 nt, Artificial Sequence
  Description of Artificial Sequence: Synthetic oligonucleotide
gguggaggacgugaucccu

SEQ ID NO: 2930078 - RNA, 19 nt, Artificial Sequence
  Description of Artificial Sequence: Synthetic oligonucleotide
aucccuucgugcagcccuu

SEQ ID NO: 2930079 - RNA, 19 nt, Artificial Sequence
  Description of Artificial Sequence: Synthetic oligonucleotide
ggcugguaguucagauaca

SEQ ID NO: 2930080 - RNA, 19 nt, Artificial Sequence
  Description of Artificial Sequence: Synthetic oligonucleotide
caggagagauuccggccau

SEQ ID NO: 2930081 - RNA, 19 nt, Artificial Sequence
  Description of Artificial Sequence: Synthetic oligonucleotide
gccucacaggagagauucc

SEQ ID NO: 2930082 - RNA, 19 nt, Artificial Sequence
  Description of Artificial Sequence: Synthetic oligonucleotide
agccaugcccaggguggaa

SEQ ID NO: 2930083 - RNA, 19 nt, Artificial Sequence
  Description of Artificial Sequence: Synthetic oligonucleotide
gcagggcugguaguucaga

SEQ ID NO: 2930084 - RNA, 19 nt, Artificial Sequence
  Description of Artificial Sequence: Synthetic oligonucleotide
gggaugcaggcaagcaucu

SEQ ID NO: 2930085 - RNA, 19 nt, Artificial Sequence
  Description of Artificial Sequence: Synthetic oligonucleotide
ggucgauaaccaucccauu

SEQ ID NO: 2930086 - RNA, 19 nt, Artificial Sequence
  Description of Artificial Sequence: Synthetic oligonucleotide
gccaugcccaggguggaaa

SEQ ID NO: 2930087 - RNA, 19 nt, Artificial Sequence
  Description of Artificial Sequence: Synthetic oligonucleotide
cagccaugcccagggugga

SEQ ID NO: 2930088 - RNA, 19 nt, Artificial Sequence
  Description of Artificial Sequence: Synthetic oligonucleotide
ggcaagcaucugauccauc

SEQ ID NO: 2930089 - RNA, 19 nt, Artificial Sequence
  Description of Artificial Sequence: Synthetic oligonucleotide
gggcagcuggauuccucaa

SEQ ID NO: 2930090 - RNA, 19 nt, Artificial Sequence
  Description of Artificial Sequence: Synthetic oligonucleotide
guggaggacgugaucccuu

SEQ ID NO: 2930091 - RNA, 19 nt, Artificial Sequence
  Description of Artificial Sequence: Synthetic oligonucleotide
ggcugugcagcaguagguu

SEQ ID NO: 2930092 - RNA, 19 nt, Artificial Sequence
  Description of Artificial Sequence: Synthetic oligonucleotide
gguugccagggcagcugga

SEQ ID NO: 2930093 - RNA, 19 nt, Artificial Sequence
  Description of Artificial Sequence: Synthetic oligonucleotide
gcuggaucuuggugguuuu

SEQ ID NO: 2930094 - RNA, 19 nt, Artificial Sequence
  Description of Artificial Sequence: Synthetic oligonucleotide
ccaucccauuccagauaca

SEQ ID NO: 2930095 - RNA, 19 nt, Artificial Sequence
  Description of Artificial Sequence: Synthetic oligonucleotide
cagagccuagcugguuagu

SEQ ID NO: 2930096 - RNA, 19 nt, Artificial Sequence
  Description of Artificial Sequence: Synthetic oligonucleotide
ggguggaaaugacgaugau

SEQ ID NO: 2930097 - RNA, 19 nt, Artificial Sequence
  Description of Artificial Sequence: Synthetic oligonucleotide
ccaucccuucuauccauau

SEQ ID NO: 2930098 - RNA, 19 nt, Artificial Sequence
  Description of Artificial Sequence: Synthetic oligonucleotide
gccuucugcggaacaucaa

SEQ ID NO: 2930099 - RNA, 19 nt, Artificial Sequence
  Description of Artificial Sequence: Synthetic oligonucleotide
ccaggguggaaaugacgau

SEQ ID NO: 2930100 - RNA, 19 nt, Artificial Sequence
  Description of Artificial Sequence: Synthetic oligonucleotide
ggguggccuucugcggaac

SEQ ID NO: 2930101 - RNA, 19 nt, Artificial Sequence
  Description of Artificial Sequence: Synthetic oligonucleotide
ccucaaaccgaggcuugua

SEQ ID NO: 2930102 - RNA, 19 nt, Artificial Sequence
  Description of Artificial Sequence: Synthetic oligonucleotide
cagagcuggugugggguuu

SEQ ID NO: 2930103 - RNA, 19 nt, Artificial Sequence
  Description of Artificial Sequence: Synthetic oligonucleotide
gccuagcugguuaguggcu

SEQ ID NO: 2930104 - RNA, 19 nt, Artificial Sequence
  Description of Artificial Sequence: Synthetic oligonucleotide
ccaugcccaggguggaaau

SEQ ID NO: 2930105 - RNA, 19 nt, Artificial Sequence
  Description of Artificial Sequence: Synthetic oligonucleotide
ccagagcuggugugggguu

SEQ ID NO: 2930106 - RNA, 19 nt, Artificial Sequence
  Description of Artificial Sequence: Synthetic oligonucleotide
cgcuggcccugaaccucca

SEQ ID NO: 2930107 - RNA, 19 nt, Artificial Sequence
  Description of Artificial Sequence: Synthetic oligonucleotide
gcggaacaucaaggucgau

SEQ ID NO: 2930108 - RNA, 19 nt, Artificial Sequence
  Description of Artificial Sequence: Synthetic oligonucleotide
ccguuuccuccuguuucuu

SEQ ID NO: 2930109 - RNA, 19 nt, Artificial Sequence
  Description of Artificial Sequence: Synthetic oligonucleotide
cgugcagcccuuggacaau

SEQ ID NO: 2930110 - RNA, 19 nt, Artificial Sequence
  Description of Artificial Sequence: Synthetic oligonucleotide
uaaaagauggcccagaugg

SEQ ID NO: 2930111 - RNA, 19 nt, Artificial Sequence
  Description of Artificial Sequence: Synthetic oligonucleotide
aagaagagcagucauaaac

SEQ ID NO: 2930112 - RNA, 19 nt, Artificial Sequence
  Description of Artificial Sequence: Synthetic oligonucleotide
auuucaauggcagagaggc

SEQ ID NO: 2930113 - RNA, 19 nt, Artificial Sequence
  Description of Artificial Sequence: Synthetic oligonucleotide
ugaguguuguaaaagaugg

SEQ ID NO: 2930114 - RNA, 19 nt, Artificial Sequence
  Description of Artificial Sequence: Synthetic oligonucleotide
aggacaaagauuugcaugc

SEQ ID NO: 2930115 - RNA, 19 nt, Artificial Sequence
  Description of Artificial Sequence: Synthetic oligonucleotide
uuaauuauaucucuguuaa

SEQ ID NO: 2930116 - RNA, 19 nt, Artificial Sequence
  Description of Artificial Sequence: Synthetic oligonucleotide
aaaugaacagaagaagagc

SEQ ID NO: 2930117 - RNA, 19 nt, Artificial Sequence
  Description of Artificial Sequence: Synthetic oligonucleotide
aauagugacaaacacugca

SEQ ID NO: 2930118 - RNA, 19 nt, Artificial Sequence
  Description of Artificial Sequence: Synthetic oligonucleotide
aauuauaucucuguuaagu

SEQ ID NO: 2930119 - RNA, 19 nt, Artificial Sequence
  Description of Artificial Sequence: Synthetic oligonucleotide
uagucaaagguaaagacug

SEQ ID NO: 2930120 - RNA, 19 nt, Artificial Sequence
  Description of Artificial Sequence: Synthetic oligonucleotide
ugggaugucauuucaaugg

SEQ ID NO: 2930121 - RNA, 19 nt, Artificial Sequence
  Description of Artificial Sequence: Synthetic oligonucleotide
aacaauuaauuauaucucu

SEQ ID NO: 2930122 - RNA, 19 nt, Artificial Sequence
  Description of Artificial Sequence: Synthetic oligonucleotide
ugcuaugugaaacuacugg

SEQ ID NO: 2930123 - RNA, 19 nt, Artificial Sequence
  Description of Artificial Sequence: Synthetic oligonucleotide
acuuuuaacaauuaauuau

SEQ ID NO: 2930124 - RNA, 19 nt, Artificial Sequence
  Description of Artificial Sequence: Synthetic oligonucleotide
uaaagugguugccagaaag

SEQ ID NO: 2930125 - RNA, 19 nt, Artificial Sequence
  Description of Artificial Sequence: Synthetic oligonucleotide
agagcagucauaaacagac

SEQ ID NO: 2930126 - RNA, 19 nt, Artificial Sequence
  Description of Artificial Sequence: Synthetic oligonucleotide
uaagugugcauacugggag

SEQ ID NO: 2930127 - RNA, 19 nt, Artificial Sequence
  Description of Artificial Sequence: Synthetic oligonucleotide
uaaacagaccaccugagcu

SEQ ID NO: 2930128 - RNA, 19 nt, Artificial Sequence
  Description of Artificial Sequence: Synthetic oligonucleotide
uauaucucuguuaagugcu

SEQ ID NO: 2930129 - RNA, 19 nt, Artificial Sequence
  Description of Artificial Sequence: Synthetic oligonucleotide
ucauaaacagaccaccuga

SEQ ID NO: 2930130 - RNA, 19 nt, Artificial Sequence
  Description of Artificial Sequence: Synthetic oligonucleotide
aaagguaaagacuggcuca

SEQ ID NO: 2930131 - RNA, 19 nt, Artificial Sequence
  Description of Artificial Sequence: Synthetic oligonucleotide
cauacugggaggaugagag

SEQ ID NO: 2930132 - RNA, 19 nt, Artificial Sequence
  Description of Artificial Sequence: Synthetic oligonucleotide
uuauaucucuguuaagugc

SEQ ID NO: 2930133 - RNA, 19 nt, Artificial Sequence
  Description of Artificial Sequence: Synthetic oligonucleotide
ucuguuaagugcuauguga

SEQ ID NO: 2930134 - RNA, 19 nt, Artificial Sequence
  Description of Artificial Sequence: Synthetic oligonucleotide
augagaguaaagugguugc

SEQ ID NO: 2930135 - RNA, 19 nt, Artificial Sequence
  Description of Artificial Sequence: Synthetic oligonucleotide
auaccaaaugaacagaaga

SEQ ID NO: 2930136 - RNA, 19 nt, Artificial Sequence
  Description of Artificial Sequence: Synthetic oligonucleotide
ugaugaauagggcugugag

SEQ ID NO: 2930137 - RNA, 19 nt, Artificial Sequence
  Description of Artificial Sequence: Synthetic oligonucleotide
gaggaugagaguaaagugg

SEQ ID NO: 2930138 - RNA, 19 nt, Artificial Sequence
  Description of Artificial Sequence: Synthetic oligonucleotide
uaacaauuaauuauaucuc

SEQ ID NO: 2930139 - RNA, 19 nt, Artificial Sequence
  Description of Artificial Sequence: Synthetic oligonucleotide
aacacugcauagucaaagg

SEQ ID NO: 2930140 - RNA, 19 nt, Artificial Sequence
  Description of Artificial Sequence: Synthetic oligonucleotide
ugacuagucaagaacgaag

SEQ ID NO: 2930141 - RNA, 19 nt, Artificial Sequence
  Description of Artificial Sequence: Synthetic oligonucleotide
caaaugaacagaagaagag

SEQ ID NO: 2930142 - RNA, 19 nt, Artificial Sequence
  Description of Artificial Sequence: Synthetic oligonucleotide
aguaagugugcauacuggg

SEQ ID NO: 2930143 - RNA, 19 nt, Artificial Sequence
  Description of Artificial Sequence: Synthetic oligonucleotide
aauguauacagguccaaaa

SEQ ID NO: 2930144 - RNA, 19 nt, Artificial Sequence
  Description of Artificial Sequence: Synthetic oligonucleotide
aagauuugcaugcacaaua

SEQ ID NO: 2930145 - RNA, 19 nt, Artificial Sequence
  Description of Artificial Sequence: Synthetic oligonucleotide
ugcacaauaccaaaugaac

SEQ ID NO: 2930146 - RNA, 19 nt, Artificial Sequence
  Description of Artificial Sequence: Synthetic oligonucleotide
auuauaucucuguuaagug

SEQ ID NO: 2930147 - RNA, 19 nt, Artificial Sequence
  Description of Artificial Sequence: Synthetic oligonucleotide
aauuaauuauaucucuguu

SEQ ID NO: 2930148 - RNA, 19 nt, Artificial Sequence
  Description of Artificial Sequence: Synthetic oligonucleotide
ugaguaagugugcauacug

SEQ ID NO: 2930149 - RNA, 19 nt, Artificial Sequence
  Description of Artificial Sequence: Synthetic oligonucleotide
auaaacagaccaccugagc

SEQ ID NO: 2930150 - RNA, 19 nt, Artificial Sequence
  Description of Artificial Sequence: Synthetic oligonucleotide
ucaaacuucuuguugagau

SEQ ID NO: 2930151 - RNA, 19 nt, Artificial Sequence
  Description of Artificial Sequence: Synthetic oligonucleotide
aaacacugcauagucaaag

SEQ ID NO: 2930152 - RNA, 19 nt, Artificial Sequence
  Description of Artificial Sequence: Synthetic oligonucleotide
ucauuucaauggcagagag

SEQ ID NO: 2930153 - RNA, 19 nt, Artificial Sequence
  Description of Artificial Sequence: Synthetic oligonucleotide
cauagucaaagguaaagac

SEQ ID NO: 2930154 - RNA, 19 nt, Artificial Sequence
  Description of Artificial Sequence: Synthetic oligonucleotide
uguuguaaaagauggccca

SEQ ID NO: 2930155 - RNA, 19 nt, Artificial Sequence
  Description of Artificial Sequence: Synthetic oligonucleotide
ugucauuucaauggcagag

SEQ ID NO: 2930156 - RNA, 19 nt, Artificial Sequence
  Description of Artificial Sequence: Synthetic oligonucleotide
ugugaaacuacugggaugu

SEQ ID NO: 2930157 - RNA, 19 nt, Artificial Sequence
  Description of Artificial Sequence: Synthetic oligonucleotide
aaacuucuuguugagauga

SEQ ID NO: 2930158 - RNA, 19 nt, Artificial Sequence
  Description of Artificial Sequence: Synthetic oligonucleotide
uagucaagaacgaaggaaa

SEQ ID NO: 2930159 - RNA, 19 nt, Artificial Sequence
  Description of Artificial Sequence: Synthetic oligonucleotide
gaggacaaagauuugcaug

SEQ ID NO: 2930160 - RNA, 19 nt, Artificial Sequence
  Description of Artificial Sequence: Synthetic oligonucleotide
auuaauuauaucucuguua

SEQ ID NO: 2930161 - RNA, 19 nt, Artificial Sequence
  Description of Artificial Sequence: Synthetic oligonucleotide
gaugucauuucaauggcag

SEQ ID NO: 2930162 - RNA, 19 nt, Artificial Sequence
  Description of Artificial Sequence: Synthetic oligonucleotide
gacuagucaagaacgaagg

SEQ ID NO: 2930163 - RNA, 19 nt, Artificial Sequence
  Description of Artificial Sequence: Synthetic oligonucleotide
agugacaaacacugcauag

SEQ ID NO: 2930164 - RNA, 19 nt, Artificial Sequence
  Description of Artificial Sequence: Synthetic oligonucleotide
aaggagaggacaaagauuu

SEQ ID NO: 2930165 - RNA, 19 nt, Artificial Sequence
  Description of Artificial Sequence: Synthetic oligonucleotide
ugagcuagcaauagugaca

SEQ ID NO: 2930166 - RNA, 19 nt, Artificial Sequence
  Description of Artificial Sequence: Synthetic oligonucleotide
uuuaacaauuaauuauauc

SEQ ID NO: 2930167 - RNA, 19 nt, Artificial Sequence
  Description of Artificial Sequence: Synthetic oligonucleotide
gaagagcagucauaaacag

SEQ ID NO: 2930168 - RNA, 19 nt, Artificial Sequence
  Description of Artificial Sequence: Synthetic oligonucleotide
gaugagaguaaagugguug

SEQ ID NO: 2930169 - RNA, 19 nt, Artificial Sequence
  Description of Artificial Sequence: Synthetic oligonucleotide
uaccaaaugaacagaagaa

SEQ ID NO: 2930170 - RNA, 19 nt, Artificial Sequence
  Description of Artificial Sequence: Synthetic oligonucleotide
uuuuaacaauuaauuauau

SEQ ID NO: 2930171 - RNA, 19 nt, Artificial Sequence
  Description of Artificial Sequence: Synthetic oligonucleotide
uuugcaugcacaauaccaa

SEQ ID NO: 2930172 - RNA, 19 nt, Artificial Sequence
  Description of Artificial Sequence: Synthetic oligonucleotide
ugacacauacuuuuaacaa

SEQ ID NO: 2930173 - RNA, 19 nt, Artificial Sequence
  Description of Artificial Sequence: Synthetic oligonucleotide
augacacauacuuuuaaca

SEQ ID NO: 2930174 - RNA, 19 nt, Artificial Sequence
  Description of Artificial Sequence: Synthetic oligonucleotide
uaugacacauacuuuuaac

SEQ ID NO: 2930175 - RNA, 19 nt, Artificial Sequence
  Description of Artificial Sequence: Synthetic oligonucleotide
aagugugcauacugggagg

SEQ ID NO: 2930176 - RNA, 19 nt, Artificial Sequence
  Description of Artificial Sequence: Synthetic oligonucleotide
acaaacacugcauagucaa

SEQ ID NO: 2930177 - RNA, 19 nt, Artificial Sequence
  Description of Artificial Sequence: Synthetic oligonucleotide
agcagucauaaacagacca

SEQ ID NO: 2930178 - RNA, 19 nt, Artificial Sequence
  Description of Artificial Sequence: Synthetic oligonucleotide
aaagugguugccagaaagg

SEQ ID NO: 2930179 - RNA, 19 nt, Artificial Sequence
  Description of Artificial Sequence: Synthetic oligonucleotide
uacuuuuaacaauuaauua

SEQ ID NO: 2930180 - RNA, 19 nt, Artificial Sequence
  Description of Artificial Sequence: Synthetic oligonucleotide
aaaggcucuuuacgcaggg

SEQ ID NO: 2930181 - RNA, 19 nt, Artificial Sequence
  Description of Artificial Sequence: Synthetic oligonucleotide
agaguaaagugguugccag

SEQ ID NO: 2930182 - RNA, 19 nt, Artificial Sequence
  Description of Artificial Sequence: Synthetic oligonucleotide
ucaaagguaaagacuggcu

SEQ ID NO: 2930183 - RNA, 19 nt, Artificial Sequence
  Description of Artificial Sequence: Synthetic oligonucleotide
uaugugaaacuacugggau

SEQ ID NO: 2930184 - RNA, 19 nt, Artificial Sequence
  Description of Artificial Sequence: Synthetic oligonucleotide
agaugaguguuguaaaaga

SEQ ID NO: 2930185 - RNA, 19 nt, Artificial Sequence
  Description of Artificial Sequence: Synthetic oligonucleotide
gcuaugugaaacuacuggg

SEQ ID NO: 2930186 - RNA, 19 nt, Artificial Sequence
  Description of Artificial Sequence: Synthetic oligonucleotide
aaagacuggcucaaacuuc

SEQ ID NO: 2930187 - RNA, 19 nt, Artificial Sequence
  Description of Artificial Sequence: Synthetic oligonucleotide
aauaccaaaugaacagaag

SEQ ID NO: 2930188 - RNA, 19 nt, Artificial Sequence
  Description of Artificial Sequence: Synthetic oligonucleotide
ugacaaacacugcauaguc

SEQ ID NO: 2930189 - RNA, 19 nt, Artificial Sequence
  Description of Artificial Sequence: Synthetic oligonucleotide
acuacugggaugucauuuc

SEQ ID NO: 2930190 - RNA, 19 nt, Artificial Sequence
  Description of Artificial Sequence: Synthetic oligonucleotide
gauggcgagaggcucacag

SEQ ID NO: 2930191 - RNA, 19 nt, Artificial Sequence
  Description of Artificial Sequence: Synthetic oligonucleotide
aacgugaugaauagggcug

SEQ ID NO: 2930192 - RNA, 19 nt, Artificial Sequence
  Description of Artificial Sequence: Synthetic oligonucleotide
accaaaugaacagaagaag

SEQ ID NO: 2930193 - RNA, 19 nt, Artificial Sequence
  Description of Artificial Sequence: Synthetic oligonucleotide
aggaaaacaggaguccagc

SEQ ID NO: 2930194 - RNA, 19 nt, Artificial Sequence
  Description of Artificial Sequence: Synthetic oligonucleotide
agauggcccagauggaugg

SEQ ID NO: 2930195 - RNA, 19 nt, Artificial Sequence
  Description of Artificial Sequence: Synthetic oligonucleotide
auuugcaugcacaauacca

SEQ ID NO: 2930196 - RNA, 19 nt, Artificial Sequence
  Description of Artificial Sequence: Synthetic oligonucleotide
uagcaauagugacaaacac

SEQ ID NO: 2930197 - RNA, 19 nt, Artificial Sequence
  Description of Artificial Sequence: Synthetic oligonucleotide
auacuuuuaacaauuaauu

SEQ ID NO: 2930198 - RNA, 19 nt, Artificial Sequence
  Description of Artificial Sequence: Synthetic oligonucleotide
caaagguaaagacuggcuc

SEQ ID NO: 2930199 - RNA, 19 nt, Artificial Sequence
  Description of Artificial Sequence: Synthetic oligonucleotide
gagaugaguguuguaaaag

SEQ ID NO: 2930200 - RNA, 19 nt, Artificial Sequence
  Description of Artificial Sequence: Synthetic oligonucleotide
gacugugaggcuaugacac

SEQ ID NO: 2930201 - RNA, 19 nt, Artificial Sequence
  Description of Artificial Sequence: Synthetic oligonucleotide
acuggcucaaacuucuugu

SEQ ID NO: 2930202 - RNA, 19 nt, Artificial Sequence
  Description of Artificial Sequence: Synthetic oligonucleotide
gaaaacaggaguccagcca

SEQ ID NO: 2930203 - RNA, 19 nt, Artificial Sequence
  Description of Artificial Sequence: Synthetic oligonucleotide
ugaacagaagaagagcagu

SEQ ID NO: 2930204 - RNA, 19 nt, Artificial Sequence
  Description of Artificial Sequence: Synthetic oligonucleotide
uuacgcaggggacugugag

SEQ ID NO: 2930205 - RNA, 19 nt, Artificial Sequence
  Description of Artificial Sequence: Synthetic oligonucleotide
cauaaacagaccaccugag

SEQ ID NO: 2930206 - RNA, 19 nt, Artificial Sequence
  Description of Artificial Sequence: Synthetic oligonucleotide
gaguaagugugcauacugg

SEQ ID NO: 2930207 - RNA, 19 nt, Artificial Sequence
  Description of Artificial Sequence: Synthetic oligonucleotide
uaauuauaucucuguuaag

SEQ ID NO: 2930208 - RNA, 19 nt, Artificial Sequence
  Description of Artificial Sequence: Synthetic oligonucleotide
ugugaguaagugugcauac

SEQ ID NO: 2930209 - RNA, 19 nt, Artificial Sequence
  Description of Artificial Sequence: Synthetic oligonucleotide
agauuugcaugcacaauac

SEQ ID NO: 2930210 - RNA, 19 nt, Artificial Sequence
  Description of Artificial Sequence: Synthetic oligonucleotide
auagucaaagguaaagacu

SEQ ID NO: 2930211 - RNA, 19 nt, Artificial Sequence
  Description of Artificial Sequence: Synthetic oligonucleotide
aaacagaccaccugagcua

SEQ ID NO: 2930212 - RNA, 19 nt, Artificial Sequence
  Description of Artificial Sequence: Synthetic oligonucleotide
gaggcuaugacacauacuu

SEQ ID NO: 2930213 - RNA, 19 nt, Artificial Sequence
  Description of Artificial Sequence: Synthetic oligonucleotide
gggaacgugaugaauaggg

SEQ ID NO: 2930214 - RNA, 19 nt, Artificial Sequence
  Description of Artificial Sequence: Synthetic oligonucleotide
aacagaagaagagcaguca

SEQ ID NO: 2930215 - RNA, 19 nt, Artificial Sequence
  Description of Artificial Sequence: Synthetic oligonucleotide
cuagcaauagugacaaaca

SEQ ID NO: 2930216 - RNA, 19 nt, Artificial Sequence
  Description of Artificial Sequence: Synthetic oligonucleotide
uguaaaagauggcccagau

SEQ ID NO: 2930217 - RNA, 19 nt, Artificial Sequence
  Description of Artificial Sequence: Synthetic oligonucleotide
uucuuguugagaugagugu

SEQ ID NO: 2930218 - RNA, 19 nt, Artificial Sequence
  Description of Artificial Sequence: Synthetic oligonucleotide
augaauagggcugugagua

SEQ ID NO: 2930219 - RNA, 19 nt, Artificial Sequence
  Description of Artificial Sequence: Synthetic oligonucleotide
acaauuaauuauaucucug

SEQ ID NO: 2930220 - RNA, 19 nt, Artificial Sequence
  Description of Artificial Sequence: Synthetic oligonucleotide
uggcgagaggcucacagug

SEQ ID NO: 2930221 - RNA, 19 nt, Artificial Sequence
  Description of Artificial Sequence: Synthetic oligonucleotide
aagugcuaugugaaacuac

SEQ ID NO: 2930222 - RNA, 19 nt, Artificial Sequence
  Description of Artificial Sequence: Synthetic oligonucleotide
agaagaagagcagucauaa

SEQ ID NO: 2930223 - RNA, 19 nt, Artificial Sequence
  Description of Artificial Sequence: Synthetic oligonucleotide
agaagagcagucauaaaca

SEQ ID NO: 2930224 - RNA, 19 nt, Artificial Sequence
  Description of Artificial Sequence: Synthetic oligonucleotide
gauuugcaugcacaauacc

SEQ ID NO: 2930225 - RNA, 19 nt, Artificial Sequence
  Description of Artificial Sequence: Synthetic oligonucleotide
gucauaaacagaccaccug

SEQ ID NO: 2930226 - RNA, 19 nt, Artificial Sequence
  Description of Artificial Sequence: Synthetic oligonucleotide
aacagaccaccugagcuag

SEQ ID NO: 2930227 - RNA, 19 nt, Artificial Sequence
  Description of Artificial Sequence: Synthetic oligonucleotide
aaaaggcucuuuacgcagg

SEQ ID NO: 2930228 - RNA, 19 nt, Artificial Sequence
  Description of Artificial Sequence: Synthetic oligonucleotide
acgcaggggacugugaggc

SEQ ID NO: 2930229 - RNA, 19 nt, Artificial Sequence
  Description of Artificial Sequence: Synthetic oligonucleotide
aagugguugccagaaagga

SEQ ID NO: 2930230 - RNA, 19 nt, Artificial Sequence
  Description of Artificial Sequence: Synthetic oligonucleotide
ugagaugaguguuguaaaa

SEQ ID NO: 2930231 - RNA, 19 nt, Artificial Sequence
  Description of Artificial Sequence: Synthetic oligonucleotide
guugccagaaaggagagga

SEQ ID NO: 2930232 - RNA, 19 nt, Artificial Sequence
  Description of Artificial Sequence: Synthetic oligonucleotide
cauacuuuuaacaauuaau

SEQ ID NO: 2930233 - RNA, 19 nt, Artificial Sequence
  Description of Artificial Sequence: Synthetic oligonucleotide
agggcugugaguaagugug

SEQ ID NO: 2930234 - RNA, 19 nt, Artificial Sequence
  Description of Artificial Sequence: Synthetic oligonucleotide
cagucauaaacagaccacc

SEQ ID NO: 2930235 - RNA, 19 nt, Artificial Sequence
  Description of Artificial Sequence: Synthetic oligonucleotide
ugaaacuacugggauguca

SEQ ID NO: 2930236 - RNA, 19 nt, Artificial Sequence
  Description of Artificial Sequence: Synthetic oligonucleotide
cugagcuagcaauagugac

SEQ ID NO: 2930237 - RNA, 19 nt, Artificial Sequence
  Description of Artificial Sequence: Synthetic oligonucleotide
acauacuuuuaacaauuaa

SEQ ID NO: 2930238 - RNA, 19 nt, Artificial Sequence
  Description of Artificial Sequence: Synthetic oligonucleotide
agugcuaugugaaacuacu

SEQ ID NO: 2930239 - RNA, 19 nt, Artificial Sequence
  Description of Artificial Sequence: Synthetic oligonucleotide
augugaaacuacugggaug

SEQ ID NO: 2930240 - RNA, 19 nt, Artificial Sequence
  Description of Artificial Sequence: Synthetic oligonucleotide
aagacuggcucaaacuucu

SEQ ID NO: 2930241 - RNA, 19 nt, Artificial Sequence
  Description of Artificial Sequence: Synthetic oligonucleotide
uggcucaaacuucuuguug

SEQ ID NO: 2930242 - RNA, 19 nt, Artificial Sequence
  Description of Artificial Sequence: Synthetic oligonucleotide
caggaguccagccaccagg

SEQ ID NO: 2930243 - RNA, 19 nt, Artificial Sequence
  Description of Artificial Sequence: Synthetic oligonucleotide
uugagaugaguguuguaaa

SEQ ID NO: 2930244 - RNA, 19 nt, Artificial Sequence
  Description of Artificial Sequence: Synthetic oligonucleotide
acaaagauuugcaugcaca

SEQ ID NO: 2930245 - RNA, 19 nt, Artificial Sequence
  Description of Artificial Sequence: Synthetic oligonucleotide
gacaaagauuugcaugcac

SEQ ID NO: 2930246 - RNA, 19 nt, Artificial Sequence
  Description of Artificial Sequence: Synthetic oligonucleotide
guugagaugaguguuguaa

SEQ ID NO: 2930247 - RNA, 19 nt, Artificial Sequence
  Description of Artificial Sequence: Synthetic oligonucleotide
ugugcauacugggaggaug

SEQ ID NO: 2930248 - RNA, 19 nt, Artificial Sequence
  Description of Artificial Sequence: Synthetic oligonucleotide
cuaugugaaacuacuggga

SEQ ID NO: 2930249 - RNA, 19 nt, Artificial Sequence
  Description of Artificial Sequence: Synthetic oligonucleotide
acagaagaagagcagucau

SEQ ID NO: 2930250 - RNA, 19 nt, Artificial Sequence
  Description of Artificial Sequence: Synthetic oligonucleotide
ggaggaugagaguaaagug

SEQ ID NO: 2930251 - RNA, 19 nt, Artificial Sequence
  Description of Artificial Sequence: Synthetic oligonucleotide
guguuguaaaagauggccc

SEQ ID NO: 2930252 - RNA, 19 nt, Artificial Sequence
  Description of Artificial Sequence: Synthetic oligonucleotide
gaaaggagaggacaaagau

SEQ ID NO: 2930253 - RNA, 19 nt, Artificial Sequence
  Description of Artificial Sequence: Synthetic oligonucleotide
guaaaagauggcccagaug

SEQ ID NO: 2930254 - RNA, 19 nt, Artificial Sequence
  Description of Artificial Sequence: Synthetic oligonucleotide
auggcagagaggcgggaac

SEQ ID NO: 2930255 - RNA, 19 nt, Artificial Sequence
  Description of Artificial Sequence: Synthetic oligonucleotide
aaaggagaggacaaagauu

SEQ ID NO: 2930256 - RNA, 19 nt, Artificial Sequence
  Description of Artificial Sequence: Synthetic oligonucleotide
aguaaagugguugccagaa

SEQ ID NO: 2930257 - RNA, 19 nt, Artificial Sequence
  Description of Artificial Sequence: Synthetic oligonucleotide
ugccaggaaaacaggaguc

SEQ ID NO: 2930258 - RNA, 19 nt, Artificial Sequence
  Description of Artificial Sequence: Synthetic oligonucleotide
aguccagccaccagguggc

SEQ ID NO: 2930259 - RNA, 19 nt, Artificial Sequence
  Description of Artificial Sequence: Synthetic oligonucleotide
cagauggauggcgagaggc

SEQ ID NO: 2930260 - RNA, 19 nt, Artificial Sequence
  Description of Artificial Sequence: Synthetic oligonucleotide
agcaauagugacaaacacu

SEQ ID NO: 2930261 - RNA, 19 nt, Artificial Sequence
  Description of Artificial Sequence: Synthetic oligonucleotide
acacugcauagucaaaggu

SEQ ID NO: 2930262 - RNA, 19 nt, Artificial Sequence
  Description of Artificial Sequence: Synthetic oligonucleotide
gacuggcucaaacuucuug

SEQ ID NO: 2930263 - RNA, 19 nt, Artificial Sequence
  Description of Artificial Sequence: Synthetic oligonucleotide
aaacaggaguccagccacc

SEQ ID NO: 2930264 - RNA, 19 nt, Artificial Sequence
  Description of Artificial Sequence: Synthetic oligonucleotide
ugagaguaaagugguugcc

SEQ ID NO: 2930265 - RNA, 19 nt, Artificial Sequence
  Description of Artificial Sequence: Synthetic oligonucleotide
aaagauuugcaugcacaau

SEQ ID NO: 2930266 - RNA, 19 nt, Artificial Sequence
  Description of Artificial Sequence: Synthetic oligonucleotide
acugggaugucauuucaau

SEQ ID NO: 2930267 - RNA, 19 nt, Artificial Sequence
  Description of Artificial Sequence: Synthetic oligonucleotide
acugcauagucaaagguaa

SEQ ID NO: 2930268 - RNA, 19 nt, Artificial Sequence
  Description of Artificial Sequence: Synthetic oligonucleotide
ugcaugcacaauaccaaau

SEQ ID NO: 2930269 - RNA, 19 nt, Artificial Sequence
  Description of Artificial Sequence: Synthetic oligonucleotide
agaggcgggaacgugauga

SEQ ID NO: 2930270 - RNA, 19 nt, Artificial Sequence
  Description of Artificial Sequence: Synthetic oligonucleotide
acuagucaagaacgaagga

SEQ ID NO: 2930271 - RNA, 19 nt, Artificial Sequence
  Description of Artificial Sequence: Synthetic oligonucleotide
acaauaccaaaugaacaga

SEQ ID NO: 2930272 - RNA, 19 nt, Artificial Sequence
  Description of Artificial Sequence: Synthetic oligonucleotide
gaacgugaugaauagggcu

SEQ ID NO: 2930273 - RNA, 19 nt, Artificial Sequence
  Description of Artificial Sequence: Synthetic oligonucleotide
aggcucuuuacgcagggga

SEQ ID NO: 2930274 - RNA, 19 nt, Artificial Sequence
  Description of Artificial Sequence: Synthetic oligonucleotide
cugggaugucauuucaaug

SEQ ID NO: 2930275 - RNA, 19 nt, Artificial Sequence
  Description of Artificial Sequence: Synthetic oligonucleotide
gucaaagguaaagacuggc

SEQ ID NO: 2930276 - RNA, 19 nt, Artificial Sequence
  Description of Artificial Sequence: Synthetic oligonucleotide
ugguugccagaaaggagag

SEQ ID NO: 2930277 - RNA, 19 nt, Artificial Sequence
  Description of Artificial Sequence: Synthetic oligonucleotide
uacgcaggggacugugagg

SEQ ID NO: 2930278 - RNA, 19 nt, Artificial Sequence
  Description of Artificial Sequence: Synthetic oligonucleotide
accugagcuagcaauagug

SEQ ID NO: 2930279 - RNA, 19 nt, Artificial Sequence
  Description of Artificial Sequence: Synthetic oligonucleotide
ugccagaaaggagaggaca

SEQ ID NO: 2930280 - RNA, 19 nt, Artificial Sequence
  Description of Artificial Sequence: Synthetic oligonucleotide
aucucuguuaagugcuaug

SEQ ID NO: 2930281 - RNA, 19 nt, Artificial Sequence
  Description of Artificial Sequence: Synthetic oligonucleotide
gcuagcaauagugacaaac

SEQ ID NO: 2930282 - RNA, 19 nt, Artificial Sequence
  Description of Artificial Sequence: Synthetic oligonucleotide
caauagugacaaacacugc

SEQ ID NO: 2930283 - RNA, 19 nt, Artificial Sequence
  Description of Artificial Sequence: Synthetic oligonucleotide
caaagauuugcaugcacaa

SEQ ID NO: 2930284 - RNA, 19 nt, Artificial Sequence
  Description of Artificial Sequence: Synthetic oligonucleotide
caauuaauuauaucucugu

SEQ ID NO: 2930285 - RNA, 19 nt, Artificial Sequence
  Description of Artificial Sequence: Synthetic oligonucleotide
caugcacaauaccaaauga

SEQ ID NO: 2930286 - RNA, 19 nt, Artificial Sequence
  Description of Artificial Sequence: Synthetic oligonucleotide
caauaccaaaugaacagaa

SEQ ID NO: 2930287 - RNA, 19 nt, Artificial Sequence
  Description of Artificial Sequence: Synthetic oligonucleotide
uagugacaaacacugcaua

SEQ ID NO: 2930288 - RNA, 19 nt, Artificial Sequence
  Description of Artificial Sequence: Synthetic oligonucleotide
gguaaagacuggcucaaac

SEQ ID NO: 2930289 - RNA, 19 nt, Artificial Sequence
  Description of Artificial Sequence: Synthetic oligonucleotide
gaacagaagaagagcaguc

SEQ ID NO: 2930290 - RNA, 19 nt, Artificial Sequence
  Description of Artificial Sequence: Synthetic oligonucleotide
agaggacaaagauuugcau

SEQ ID NO: 2930291 - RNA, 19 nt, Artificial Sequence
  Description of Artificial Sequence: Synthetic oligonucleotide
caggaaaacaggaguccag

SEQ ID NO: 2930292 - RNA, 19 nt, Artificial Sequence
  Description of Artificial Sequence: Synthetic oligonucleotide
guaaagacuggcucaaacu

SEQ ID NO: 2930293 - RNA, 19 nt, Artificial Sequence
  Description of Artificial Sequence: Synthetic oligonucleotide
guuguaaaagauggcccag

SEQ ID NO: 2930294 - RNA, 19 nt, Artificial Sequence
  Description of Artificial Sequence: Synthetic oligonucleotide
aggaugagaguaaaguggu

SEQ ID NO: 2930295 - RNA, 19 nt, Artificial Sequence
  Description of Artificial Sequence: Synthetic oligonucleotide
gagaggacaaagauuugca

SEQ ID NO: 2930296 - RNA, 19 nt, Artificial Sequence
  Description of Artificial Sequence: Synthetic oligonucleotide
gugguugccagaaaggaga

SEQ ID NO: 2930297 - RNA, 19 nt, Artificial Sequence
  Description of Artificial Sequence: Synthetic oligonucleotide
gugccugccaggaaaacag

SEQ ID NO: 2930298 - RNA, 19 nt, Artificial Sequence
  Description of Artificial Sequence: Synthetic oligonucleotide
augaacagaagaagagcag

SEQ ID NO: 2930299 - RNA, 19 nt, Artificial Sequence
  Description of Artificial Sequence: Synthetic oligonucleotide
aagauggcccagauggaug

SEQ ID NO: 2930300 - RNA, 19 nt, Artificial Sequence
  Description of Artificial Sequence: Synthetic oligonucleotide
ugggaggaugagaguaaag

SEQ ID NO: 2930301 - RNA, 19 nt, Artificial Sequence
  Description of Artificial Sequence: Synthetic oligonucleotide
agaggcucacagugccugc

SEQ ID NO: 2930302 - RNA, 19 nt, Artificial Sequence
  Description of Artificial Sequence: Synthetic oligonucleotide
aagguaaagacuggcucaa

SEQ ID NO: 2930303 - RNA, 19 nt, Artificial Sequence
  Description of Artificial Sequence: Synthetic oligonucleotide
uacugggaggaugagagua

SEQ ID NO: 2930304 - RNA, 19 nt, Artificial Sequence
  Description of Artificial Sequence: Synthetic oligonucleotide
cuagucaagaacgaaggaa

SEQ ID NO: 2930305 - RNA, 19 nt, Artificial Sequence
  Description of Artificial Sequence: Synthetic oligonucleotide
uugcaugcacaauaccaaa

SEQ ID NO: 2930306 - RNA, 19 nt, Artificial Sequence
  Description of Artificial Sequence: Synthetic oligonucleotide
gcaugcacaauaccaaaug

SEQ ID NO: 2930307 - RNA, 19 nt, Artificial Sequence
  Description of Artificial Sequence: Synthetic oligonucleotide
uuguaaaagauggcccaga

SEQ ID NO: 2930308 - RNA, 19 nt, Artificial Sequence
  Description of Artificial Sequence: Synthetic oligonucleotide
ccaaaugaacagaagaaga

SEQ ID NO: 2930309 - RNA, 19 nt, Artificial Sequence
  Description of Artificial Sequence: Synthetic oligonucleotide
agaaaggagaggacaaaga

SEQ ID NO: 2930310 - RNA, 19 nt, Artificial Sequence
  Description of Artificial Sequence: Synthetic oligonucleotide
gagaguaaagugguugcca

SEQ ID NO: 2930311 - RNA, 19 nt, Artificial Sequence
  Description of Artificial Sequence: Synthetic oligonucleotide
ugaggcuaugacacauacu

SEQ ID NO: 2930312 - RNA, 19 nt, Artificial Sequence
  Description of Artificial Sequence: Synthetic oligonucleotide
gacacauacuuuuaacaau

SEQ ID NO: 2930313 - RNA, 19 nt, Artificial Sequence
  Description of Artificial Sequence: Synthetic oligonucleotide
uuuacgcaggggacuguga

SEQ ID NO: 2930314 - RNA, 19 nt, Artificial Sequence
  Description of Artificial Sequence: Synthetic oligonucleotide
gugaggcuaugacacauac

SEQ ID NO: 2930315 - RNA, 19 nt, Artificial Sequence
  Description of Artificial Sequence: Synthetic oligonucleotide
cucuguuaagugcuaugug

SEQ ID NO: 2930316 - RNA, 19 nt, Artificial Sequence
  Description of Artificial Sequence: Synthetic oligonucleotide
ggagaggacaaagauuugc

SEQ ID NO: 2930317 - RNA, 19 nt, Artificial Sequence
  Description of Artificial Sequence: Synthetic oligonucleotide
cuguuaagugcuaugugaa

SEQ ID NO: 2930318 - RNA, 19 nt, Artificial Sequence
  Description of Artificial Sequence: Synthetic oligonucleotide
uggcagagaggcgggaacg

SEQ ID NO: 2930319 - RNA, 19 nt, Artificial Sequence
  Description of Artificial Sequence: Synthetic oligonucleotide
agugguugccagaaaggag

SEQ ID NO: 2930320 - RNA, 19 nt, Artificial Sequence
  Description of Artificial Sequence: Synthetic oligonucleotide
gagcuagcaauagugacaa

SEQ ID NO: 2930321 - RNA, 19 nt, Artificial Sequence
  Description of Artificial Sequence: Synthetic oligonucleotide
augucauuucaauggcaga

SEQ ID NO: 2930322 - RNA, 19 nt, Artificial Sequence
  Description of Artificial Sequence: Synthetic oligonucleotide
ggaaaacaggaguccagcc

SEQ ID NO: 2930323 - RNA, 19 nt, Artificial Sequence
  Description of Artificial Sequence: Synthetic oligonucleotide
ggcucaaacuucuuguuga

SEQ ID NO: 2930324 - RNA, 19 nt, Artificial Sequence
  Description of Artificial Sequence: Synthetic oligonucleotide
agucaaagguaaagacugg

SEQ ID NO: 2930325 - RNA, 19 nt, Artificial Sequence
  Description of Artificial Sequence: Synthetic oligonucleotide
uuguugagaugaguguugu

SEQ ID NO: 2930326 - RNA, 19 nt, Artificial Sequence
  Description of Artificial Sequence: Synthetic oligonucleotide
uagggcugugaguaagugu

SEQ ID NO: 2930327 - RNA, 19 nt, Artificial Sequence
  Description of Artificial Sequence: Synthetic oligonucleotide
auagugacaaacacugcau

SEQ ID NO: 2930328 - RNA, 19 nt, Artificial Sequence
  Description of Artificial Sequence: Synthetic oligonucleotide
gaugaauagggcugugagu

SEQ ID NO: 2930329 - RNA, 19 nt, Artificial Sequence
  Description of Artificial Sequence: Synthetic oligonucleotide
aaaagauggcccagaugga

SEQ ID NO: 2930330 - RNA, 19 nt, Artificial Sequence
  Description of Artificial Sequence: Synthetic oligonucleotide
gagaggcucacagugccug

SEQ ID NO: 2930331 - RNA, 19 nt, Artificial Sequence
  Description of Artificial Sequence: Synthetic oligonucleotide
uaagugcuaugugaaacua

SEQ ID NO: 2930332 - RNA, 19 nt, Artificial Sequence
  Description of Artificial Sequence: Synthetic oligonucleotide
agucauaaacagaccaccu

SEQ ID NO: 2930333 - RNA, 19 nt, Artificial Sequence
  Description of Artificial Sequence: Synthetic oligonucleotide
gaguguuguaaaagauggc

SEQ ID NO: 2930334 - RNA, 19 nt, Artificial Sequence
  Description of Artificial Sequence: Synthetic oligonucleotide
gacaaacacugcauaguca

SEQ ID NO: 2930335 - RNA, 19 nt, Artificial Sequence
  Description of Artificial Sequence: Synthetic oligonucleotide
uacugggaugucauuucaa

SEQ ID NO: 2930336 - RNA, 19 nt, Artificial Sequence
  Description of Artificial Sequence: Synthetic oligonucleotide
gggaugucauuucaauggc

SEQ ID NO: 2930337 - RNA, 19 nt, Artificial Sequence
  Description of Artificial Sequence: Synthetic oligonucleotide
aaggcucuuuacgcagggg

SEQ ID NO: 2930338 - RNA, 19 nt, Artificial Sequence
  Description of Artificial Sequence: Synthetic oligonucleotide
gauggauggcgagaggcuc

SEQ ID NO: 2930339 - RNA, 19 nt, Artificial Sequence
  Description of Artificial Sequence: Synthetic oligonucleotide
cacugcauagucaaaggua

SEQ ID NO: 2930340 - RNA, 19 nt, Artificial Sequence
  Description of Artificial Sequence: Synthetic oligonucleotide
augcacaauaccaaaugaa

SEQ ID NO: 2930341 - RNA, 19 nt, Artificial Sequence
  Description of Artificial Sequence: Synthetic oligonucleotide
ugaauagggcugugaguaa

SEQ ID NO: 2930342 - RNA, 19 nt, Artificial Sequence
  Description of Artificial Sequence: Synthetic oligonucleotide
gaguaaagugguugccaga

SEQ ID NO: 2930343 - RNA, 19 nt, Artificial Sequence
  Description of Artificial Sequence: Synthetic oligonucleotide
aacaggaguccagccacca

SEQ ID NO: 2930344 - RNA, 19 nt, Artificial Sequence
  Description of Artificial Sequence: Synthetic oligonucleotide
uugccagaaaggagaggac

SEQ ID NO: 2930345 - RNA, 19 nt, Artificial Sequence
  Description of Artificial Sequence: Synthetic oligonucleotide
gaaacuacugggaugucau

SEQ ID NO: 2930346 - RNA, 19 nt, Artificial Sequence
  Description of Artificial Sequence: Synthetic oligonucleotide
guaagugugcauacuggga

SEQ ID NO: 2930347 - RNA, 19 nt, Artificial Sequence
  Description of Artificial Sequence: Synthetic oligonucleotide
aauggcagagaggcgggaa

SEQ ID NO: 2930348 - RNA, 19 nt, Artificial Sequence
  Description of Artificial Sequence: Synthetic oligonucleotide
cuaugacacauacuuuuaa

SEQ ID NO: 2930349 - RNA, 19 nt, Artificial Sequence
  Description of Artificial Sequence: Synthetic oligonucleotide
ugugaggcuaugacacaua

SEQ ID NO: 2930350 - RNA, 19 nt, Artificial Sequence
  Description of Artificial Sequence: Synthetic oligonucleotide
agugccugccaggaaaaca

SEQ ID NO: 2930351 - RNA, 19 nt, Artificial Sequence
  Description of Artificial Sequence: Synthetic oligonucleotide
aaacuacugggaugucauu

SEQ ID NO: 2930352 - RNA, 19 nt, Artificial Sequence
  Description of Artificial Sequence: Synthetic oligonucleotide
gaugaguguuguaaaagau

SEQ ID NO: 2930353 - RNA, 19 nt, Artificial Sequence
  Description of Artificial Sequence: Synthetic oligonucleotide
gggacugugaggcuaugac

SEQ ID NO: 2930354 - RNA, 19 nt, Artificial Sequence
  Description of Artificial Sequence: Synthetic oligonucleotide
acugacuagucaagaacga

SEQ ID NO: 2930355 - RNA, 19 nt, Artificial Sequence
  Description of Artificial Sequence: Synthetic oligonucleotide
auagggcugugaguaagug

SEQ ID NO: 2930356 - RNA, 19 nt, Artificial Sequence
  Description of Artificial Sequence: Synthetic oligonucleotide
gcacaauaccaaaugaaca

SEQ ID NO: 2930357 - RNA, 19 nt, Artificial Sequence
  Description of Artificial Sequence: Synthetic oligonucleotide
cuuuacgcaggggacugug

SEQ ID NO: 2930358 - RNA, 19 nt, Artificial Sequence
  Description of Artificial Sequence: Synthetic oligonucleotide
cucuuuacgcaggggacug

SEQ ID NO: 2930359 - RNA, 19 nt, Artificial Sequence
  Description of Artificial Sequence: Synthetic oligonucleotide
gaagaagagcagucauaaa

SEQ ID NO: 2930360 - RNA, 19 nt, Artificial Sequence
  Description of Artificial Sequence: Synthetic oligonucleotide
gucauuucaauggcagaga

SEQ ID NO: 2930361 - RNA, 19 nt, Artificial Sequence
  Description of Artificial Sequence: Synthetic oligonucleotide
gcucaaacuucuuguugag

SEQ ID NO: 2930362 - RNA, 19 nt, Artificial Sequence
  Description of Artificial Sequence: Synthetic oligonucleotide
uaucucuguuaagugcuau

SEQ ID NO: 2930363 - RNA, 19 nt, Artificial Sequence
  Description of Artificial Sequence: Synthetic oligonucleotide
auggcgagaggcucacagu

SEQ ID NO: 2930364 - RNA, 19 nt, Artificial Sequence
  Description of Artificial Sequence: Synthetic oligonucleotide
ggaacgugaugaauagggc

SEQ ID NO: 2930365 - RNA, 19 nt, Artificial Sequence
  Description of Artificial Sequence: Synthetic oligonucleotide
gcauagucaaagguaaaga

SEQ ID NO: 2930366 - RNA, 19 nt, Artificial Sequence
  Description of Artificial Sequence: Synthetic oligonucleotide
auacugggaggaugagagu

SEQ ID NO: 2930367 - RNA, 19 nt, Artificial Sequence
  Description of Artificial Sequence: Synthetic oligonucleotide
gcgggaacgugaugaauag

SEQ ID NO: 2930368 - RNA, 19 nt, Artificial Sequence
  Description of Artificial Sequence: Synthetic oligonucleotide
cagagaggcgggaacguga

SEQ ID NO: 2930369 - RNA, 19 nt, Artificial Sequence
  Description of Artificial Sequence: Synthetic oligonucleotide
uguugagaugaguguugua

SEQ ID NO: 2930370 - RNA, 19 nt, Artificial Sequence
  Description of Artificial Sequence: Synthetic oligonucleotide
agucaagaacgaaggaaaa

SEQ ID NO: 2930371 - RNA, 19 nt, Artificial Sequence
  Description of Artificial Sequence: Synthetic oligonucleotide
ugcauacugggaggaugag

SEQ ID NO: 2930372 - RNA, 19 nt, Artificial Sequence
  Description of Artificial Sequence: Synthetic oligonucleotide
ggacugugaggcuaugaca

SEQ ID NO: 2930373 - RNA, 19 nt, Artificial Sequence
  Description of Artificial Sequence: Synthetic oligonucleotide
cuacugggaugucauuuca

SEQ ID NO: 2930374 - RNA, 19 nt, Artificial Sequence
  Description of Artificial Sequence: Synthetic oligonucleotide
agauggauggcgagaggcu

SEQ ID NO: 2930375 - RNA, 19 nt, Artificial Sequence
  Description of Artificial Sequence: Synthetic oligonucleotide
gcgagaggcucacagugcc

SEQ ID NO: 2930376 - RNA, 19 nt, Artificial Sequence
  Description of Artificial Sequence: Synthetic oligonucleotide
gugcauacugggaggauga

SEQ ID NO: 2930377 - RNA, 19 nt, Artificial Sequence
  Description of Artificial Sequence: Synthetic oligonucleotide
gugcuaugugaaacuacug

SEQ ID NO: 2930378 - RNA, 19 nt, Artificial Sequence
  Description of Artificial Sequence: Synthetic oligonucleotide
cagaagaagagcagucaua

SEQ ID NO: 2930379 - RNA, 19 nt, Artificial Sequence
  Description of Artificial Sequence: Synthetic oligonucleotide
accagguggcagccugcac

SEQ ID NO: 2930380 - RNA, 19 nt, Artificial Sequence
  Description of Artificial Sequence: Synthetic oligonucleotide
gaggcucacagugccugcc

SEQ ID NO: 2930381 - RNA, 19 nt, Artificial Sequence
  Description of Artificial Sequence: Synthetic oligonucleotide
gaccaccugagcuagcaau

SEQ ID NO: 2930382 - RNA, 19 nt, Artificial Sequence
  Description of Artificial Sequence: Synthetic oligonucleotide
gcagucauaaacagaccac

SEQ ID NO: 2930383 - RNA, 19 nt, Artificial Sequence
  Description of Artificial Sequence: Synthetic oligonucleotide
ggcuaugacacauacuuuu

SEQ ID NO: 2930384 - RNA, 19 nt, Artificial Sequence
  Description of Artificial Sequence: Synthetic oligonucleotide
gugacaaacacugcauagu

SEQ ID NO: 2930385 - RNA, 19 nt, Artificial Sequence
  Description of Artificial Sequence: Synthetic oligonucleotide
acgugaugaauagggcugu

SEQ ID NO: 2930386 - RNA, 19 nt, Artificial Sequence
  Description of Artificial Sequence: Synthetic oligonucleotide
cugugaguaagugugcaua

SEQ ID NO: 2930387 - RNA, 19 nt, Artificial Sequence
  Description of Artificial Sequence: Synthetic oligonucleotide
gugaugaauagggcuguga

SEQ ID NO: 2930388 - RNA, 19 nt, Artificial Sequence
  Description of Artificial Sequence: Synthetic oligonucleotide
cucacagugccugccagga

SEQ ID NO: 2930389 - RNA, 19 nt, Artificial Sequence
  Description of Artificial Sequence: Synthetic oligonucleotide
gccaggaaaacaggagucc

SEQ ID NO: 2930390 - RNA, 19 nt, Artificial Sequence
  Description of Artificial Sequence: Synthetic oligonucleotide
cugccaggaaaacaggagu

SEQ ID NO: 2930391 - RNA, 19 nt, Artificial Sequence
  Description of Artificial Sequence: Synthetic oligonucleotide
gcucacagugccugccagg

SEQ ID NO: 2930392 - RNA, 19 nt, Artificial Sequence
  Description of Artificial Sequence: Synthetic oligonucleotide
guaaagugguugccagaaa

SEQ ID NO: 2930393 - RNA, 19 nt, Artificial Sequence
  Description of Artificial Sequence: Synthetic oligonucleotide
gggaggaugagaguaaagu

SEQ ID NO: 2930394 - RNA, 19 nt, Artificial Sequence
  Description of Artificial Sequence: Synthetic oligonucleotide
uccagccaccagguggcag

SEQ ID NO: 2930395 - RNA, 19 nt, Artificial Sequence
  Description of Artificial Sequence: Synthetic oligonucleotide
cucaaacuucuuguugaga

SEQ ID NO: 2930396 - RNA, 19 nt, Artificial Sequence
  Description of Artificial Sequence: Synthetic oligonucleotide
aggcucacagugccugcca

SEQ ID NO: 2930397 - RNA, 19 nt, Artificial Sequence
  Description of Artificial Sequence: Synthetic oligonucleotide
auggauggcgagaggcuca

SEQ ID NO: 2930398 - RNA, 19 nt, Artificial Sequence
  Description of Artificial Sequence: Synthetic oligonucleotide
cugacuagucaagaacgaa

SEQ ID NO: 2930399 - RNA, 19 nt, Artificial Sequence
  Description of Artificial Sequence: Synthetic oligonucleotide
caaacacugcauagucaaa

SEQ ID NO: 2930400 - RNA, 19 nt, Artificial Sequence
  Description of Artificial Sequence: Synthetic oligonucleotide
uggauggcgagaggcucac

SEQ ID NO: 2930401 - RNA, 19 nt, Artificial Sequence
  Description of Artificial Sequence: Synthetic oligonucleotide
ucuuuacgcaggggacugu

SEQ ID NO: 2930402 - RNA, 19 nt, Artificial Sequence
  Description of Artificial Sequence: Synthetic oligonucleotide
gauggcccagauggauggc

SEQ ID NO: 2930403 - RNA, 19 nt, Artificial Sequence
  Description of Artificial Sequence: Synthetic oligonucleotide
ccugagcuagcaauaguga

SEQ ID NO: 2930404 - RNA, 19 nt, Artificial Sequence
  Description of Artificial Sequence: Synthetic oligonucleotide
gagaggcgggaacgugaug

SEQ ID NO: 2930405 - RNA, 19 nt, Artificial Sequence
  Description of Artificial Sequence: Synthetic oligonucleotide
cccagauggauggcgagag

SEQ ID NO: 2930406 - RNA, 19 nt, Artificial Sequence
  Description of Artificial Sequence: Synthetic oligonucleotide
ggcucacagugccugccag

SEQ ID NO: 2930407 - RNA, 19 nt, Artificial Sequence
  Description of Artificial Sequence: Synthetic oligonucleotide
agagaggcgggaacgugau

SEQ ID NO: 2930408 - RNA, 19 nt, Artificial Sequence
  Description of Artificial Sequence: Synthetic oligonucleotide
agaccaccugagcuagcaa

SEQ ID NO: 2930409 - RNA, 19 nt, Artificial Sequence
  Description of Artificial Sequence: Synthetic oligonucleotide
accaccugagcuagcaaua

SEQ ID NO: 2930410 - RNA, 19 nt, Artificial Sequence
  Description of Artificial Sequence: Synthetic oligonucleotide
gguugccagaaaggagagg

SEQ ID NO: 2930411 - RNA, 19 nt, Artificial Sequence
  Description of Artificial Sequence: Synthetic oligonucleotide
ggcucuuuacgcaggggac

SEQ ID NO: 2930412 - RNA, 19 nt, Artificial Sequence
  Description of Artificial Sequence: Synthetic oligonucleotide
ggaugucauuucaauggca

SEQ ID NO: 2930413 - RNA, 19 nt, Artificial Sequence
  Description of Artificial Sequence: Synthetic oligonucleotide
aggagaggacaaagauuug

SEQ ID NO: 2930414 - RNA, 19 nt, Artificial Sequence
  Description of Artificial Sequence: Synthetic oligonucleotide
gccaccagguggcagccug

SEQ ID NO: 2930415 - RNA, 19 nt, Artificial Sequence
  Description of Artificial Sequence: Synthetic oligonucleotide
cugcauagucaaagguaaa

SEQ ID NO: 2930416 - RNA, 19 nt, Artificial Sequence
  Description of Artificial Sequence: Synthetic oligonucleotide
gaggcgggaacgugaugaa

SEQ ID NO: 2930417 - RNA, 19 nt, Artificial Sequence
  Description of Artificial Sequence: Synthetic oligonucleotide
auaucucuguuaagugcua

SEQ ID NO: 2930418 - RNA, 19 nt, Artificial Sequence
  Description of Artificial Sequence: Synthetic oligonucleotide
ggcgggaacgugaugaaua

SEQ ID NO: 2930419 - RNA, 19 nt, Artificial Sequence
  Description of Artificial Sequence: Synthetic oligonucleotide
ggcccagauggauggcgag

SEQ ID NO: 2930420 - RNA, 19 nt, Artificial Sequence
  Description of Artificial Sequence: Synthetic oligonucleotide
ggcgagaggcucacagugc

SEQ ID NO: 2930421 - RNA, 19 nt, Artificial Sequence
  Description of Artificial Sequence: Synthetic oligonucleotide
cagguggcagccugcacua

SEQ ID NO: 2930422 - RNA, 19 nt, Artificial Sequence
  Description of Artificial Sequence: Synthetic oligonucleotide
ggcugugaguaagugugca

SEQ ID NO: 2930423 - RNA, 19 nt, Artificial Sequence
  Description of Artificial Sequence: Synthetic oligonucleotide
gugaguaagugugcauacu

SEQ ID NO: 2930424 - RNA, 19 nt, Artificial Sequence
  Description of Artificial Sequence: Synthetic oligonucleotide
ccaccugagcuagcaauag

SEQ ID NO: 2930425 - RNA, 19 nt, Artificial Sequence
  Description of Artificial Sequence: Synthetic oligonucleotide
aggcuaugacacauacuuu

SEQ ID NO: 2930426 - RNA, 19 nt, Artificial Sequence
  Description of Artificial Sequence: Synthetic oligonucleotide
ccagauggauggcgagagg

SEQ ID NO: 2930427 - RNA, 19 nt, Artificial Sequence
  Description of Artificial Sequence: Synthetic oligonucleotide
ggacaaagauuugcaugca

SEQ ID NO: 2930428 - RNA, 19 nt, Artificial Sequence
  Description of Artificial Sequence: Synthetic oligonucleotide
gcauacugggaggaugaga

SEQ ID NO: 2930429 - RNA, 19 nt, Artificial Sequence
  Description of Artificial Sequence: Synthetic oligonucleotide
gcuaugacacauacuuuua

SEQ ID NO: 2930430 - RNA, 19 nt, Artificial Sequence
  Description of Artificial Sequence: Synthetic oligonucleotide
cagccaccagguggcagcc

SEQ ID NO: 2930431 - RNA, 19 nt, Artificial Sequence
  Description of Artificial Sequence: Synthetic oligonucleotide
agguaaagacuggcucaaa

SEQ ID NO: 2930432 - RNA, 19 nt, Artificial Sequence
  Description of Artificial Sequence: Synthetic oligonucleotide
ccaggaaaacaggagucca

SEQ ID NO: 2930433 - RNA, 19 nt, Artificial Sequence
  Description of Artificial Sequence: Synthetic oligonucleotide
ggaguccagccaccaggug

SEQ ID NO: 2930434 - RNA, 19 nt, Artificial Sequence
  Description of Artificial Sequence: Synthetic oligonucleotide
agcuagcaauagugacaaa

SEQ ID NO: 2930435 - RNA, 19 nt, Artificial Sequence
  Description of Artificial Sequence: Synthetic oligonucleotide
gcagagaggcgggaacgug

SEQ ID NO: 2930436 - RNA, 19 nt, Artificial Sequence
  Description of Artificial Sequence: Synthetic oligonucleotide
cagugccugccaggaaaac

SEQ ID NO: 2930437 - RNA, 19 nt, Artificial Sequence
  Description of Artificial Sequence: Synthetic oligonucleotide
cuggcucaaacuucuuguu

SEQ ID NO: 2930438 - RNA, 19 nt, Artificial Sequence
  Description of Artificial Sequence: Synthetic oligonucleotide
cugugaggcuaugacacau

SEQ ID NO: 2930439 - RNA, 19 nt, Artificial Sequence
  Description of Artificial Sequence: Synthetic oligonucleotide
aggcgggaacgugaugaau

SEQ ID NO: 2930440 - RNA, 19 nt, Artificial Sequence
  Description of Artificial Sequence: Synthetic oligonucleotide
gggcugugaguaagugugc

SEQ ID NO: 2930441 - RNA, 19 nt, Artificial Sequence
  Description of Artificial Sequence: Synthetic oligonucleotide
gugaaacuacugggauguc

SEQ ID NO: 2930442 - RNA, 19 nt, Artificial Sequence
  Description of Artificial Sequence: Synthetic oligonucleotide
ccaccagguggcagccugc

SEQ ID NO: 2930443 - RNA, 19 nt, Artificial Sequence
  Description of Artificial Sequence: Synthetic oligonucleotide
ccagguggcagccugcacu

SEQ ID NO: 2930444 - RNA, 19 nt, Artificial Sequence
  Description of Artificial Sequence: Synthetic oligonucleotide
caccugagcuagcaauagu

SEQ ID NO: 2930445 - RNA, 19 nt, Artificial Sequence
  Description of Artificial Sequence: Synthetic oligonucleotide
caauggcagagaggcggga

SEQ ID NO: 2930446 - RNA, 19 nt, Artificial Sequence
  Description of Artificial Sequence: Synthetic oligonucleotide
gcugugaguaagugugcau

SEQ ID NO: 2930447 - RNA, 19 nt, Artificial Sequence
  Description of Artificial Sequence: Synthetic oligonucleotide
gcucuuuacgcaggggacu

SEQ ID NO: 2930448 - RNA, 19 nt, Artificial Sequence
  Description of Artificial Sequence: Synthetic oligonucleotide
caccagguggcagccugca

SEQ ID NO: 2930449 - RNA, 19 nt, Artificial Sequence
  Description of Artificial Sequence: Synthetic oligonucleotide
aggggacugugaggcuaug

SEQ ID NO: 2930450 - RNA, 19 nt, Artificial Sequence
  Description of Artificial Sequence: Synthetic oligonucleotide
ggggacugugaggcuauga

SEQ ID NO: 2930451 - RNA, 19 nt, Artificial Sequence
  Description of Artificial Sequence: Synthetic oligonucleotide
gcaggggacugugaggcua

SEQ ID NO: 2930452 - RNA, 19 nt, Artificial Sequence
  Description of Artificial Sequence: Synthetic oligonucleotide
cgggaacgugaugaauagg

SEQ ID NO: 2930453 - RNA, 19 nt, Artificial Sequence
  Description of Artificial Sequence: Synthetic oligonucleotide
gcccagauggauggcgaga

SEQ ID NO: 2930454 - RNA, 19 nt, Artificial Sequence
  Description of Artificial Sequence: Synthetic oligonucleotide
agacuggcucaaacuucuu

SEQ ID NO: 2930455 - RNA, 19 nt, Artificial Sequence
  Description of Artificial Sequence: Synthetic oligonucleotide
caggggacugugaggcuau

SEQ ID NO: 2930456 - RNA, 19 nt, Artificial Sequence
  Description of Artificial Sequence: Synthetic oligonucleotide
agccaccagguggcagccu

SEQ ID NO: 2930457 - RNA, 19 nt, Artificial Sequence
  Description of Artificial Sequence: Synthetic oligonucleotide
cgugaugaauagggcugug

SEQ ID NO: 2930458 - RNA, 19 nt, Artificial Sequence
  Description of Artificial Sequence: Synthetic oligonucleotide
ggcagagaggcgggaacgu

SEQ ID NO: 2930459 - RNA, 19 nt, Artificial Sequence
  Description of Artificial Sequence: Synthetic oligonucleotide
ggaugagaguaaagugguu

SEQ ID NO: 2930460 - RNA, 19 nt, Artificial Sequence
  Description of Artificial Sequence: Synthetic oligonucleotide
ggauggcgagaggcucaca

SEQ ID NO: 2930461 - RNA, 19 nt, Artificial Sequence
  Description of Artificial Sequence: Synthetic oligonucleotide
cgagaggcucacagugccu

SEQ ID NO: 2930462 - RNA, 19 nt, Artificial Sequence
  Description of Artificial Sequence: Synthetic oligonucleotide
cgcaggggacugugaggcu

SEQ ID NO: 2930463 - RNA, 19 nt, Artificial Sequence
  Description of Artificial Sequence: Synthetic oligonucleotide
acagaaauaaaucagacgc

SEQ ID NO: 2930464 - RNA, 19 nt, Artificial Sequence
  Description of Artificial Sequence: Synthetic oligonucleotide
uuaagagucaucaagggca

SEQ ID NO: 2930465 - RNA, 19 nt, Artificial Sequence
  Description of Artificial Sequence: Synthetic oligonucleotide
ugaacuacgagcuaacaag

SEQ ID NO: 2930466 - RNA, 19 nt, Artificial Sequence
  Description of Artificial Sequence: Synthetic oligonucleotide
ucaaggaccaaguaguggg

SEQ ID NO: 2930467 - RNA, 19 nt, Artificial Sequence
  Description of Artificial Sequence: Synthetic oligonucleotide
aagaggucaaugcuggggc

SEQ ID NO: 2930468 - RNA, 19 nt, Artificial Sequence
  Description of Artificial Sequence: Synthetic oligonucleotide
aaaucagacgcagugauuc

SEQ ID NO: 2930469 - RNA, 19 nt, Artificial Sequence
  Description of Artificial Sequence: Synthetic oligonucleotide
aaugggaaaggagucaacc

SEQ ID NO: 2930470 - RNA, 19 nt, Artificial Sequence
  Description of Artificial Sequence: Synthetic oligonucleotide
acuacgagcuaacaagucc

SEQ ID NO: 2930471 - RNA, 19 nt, Artificial Sequence
  Description of Artificial Sequence: Synthetic oligonucleotide
ugagguguggccaggaugg

SEQ ID NO: 2930472 - RNA, 19 nt, Artificial Sequence
  Description of Artificial Sequence: Synthetic oligonucleotide
aaaggagucaaccuacuca

SEQ ID NO: 2930473 - RNA, 19 nt, Artificial Sequence
  Description of Artificial Sequence: Synthetic oligonucleotide
aauacauuaggugucccag

SEQ ID NO: 2930474 - RNA, 19 nt, Artificial Sequence
  Description of Artificial Sequence: Synthetic oligonucleotide
ucaggcagcacccaauggg

SEQ ID NO: 2930475 - RNA, 19 nt, Artificial Sequence
  Description of Artificial Sequence: Synthetic oligonucleotide
aacuccuuuccucaggcag

SEQ ID NO: 2930476 - RNA, 19 nt, Artificial Sequence
  Description of Artificial Sequence: Synthetic oligonucleotide
aaugcuggggcugaacuac

SEQ ID NO: 2930477 - RNA, 19 nt, Artificial Sequence
  Description of Artificial Sequence: Synthetic oligonucleotide
ucccuuaagagucaucaag

SEQ ID NO: 2930478 - RNA, 19 nt, Artificial Sequence
  Description of Artificial Sequence: Synthetic oligonucleotide
ucugguucucccuuaagag

SEQ ID NO: 2930479 - RNA, 19 nt, Artificial Sequence
  Description of Artificial Sequence: Synthetic oligonucleotide
auuccaguagcaugguccc

SEQ ID NO: 2930480 - RNA, 19 nt, Artificial Sequence
  Description of Artificial Sequence: Synthetic oligonucleotide
agaaauaaaucagacgcag

SEQ ID NO: 2930481 - RNA, 19 nt, Artificial Sequence
  Description of Artificial Sequence: Synthetic oligonucleotide
aaucagacgcagugauucc

SEQ ID NO: 2930482 - RNA, 19 nt, Artificial Sequence
  Description of Artificial Sequence: Synthetic oligonucleotide
uacacacacacacacacac

SEQ ID NO: 2930483 - RNA, 19 nt, Artificial Sequence
  Description of Artificial Sequence: Synthetic oligonucleotide
aaugaagaggucaaugcug

SEQ ID NO: 2930484 - RNA, 19 nt, Artificial Sequence
  Description of Artificial Sequence: Synthetic oligonucleotide
cacagaaauaaaucagacg

SEQ ID NO: 2930485 - RNA, 19 nt, Artificial Sequence
  Description of Artificial Sequence: Synthetic oligonucleotide
gcuaacaaguccuagacug

SEQ ID NO: 2930486 - RNA, 19 nt, Artificial Sequence
  Description of Artificial Sequence: Synthetic oligonucleotide
aaguccuagacugaggugu

SEQ ID NO: 2930487 - RNA, 19 nt, Artificial Sequence
  Description of Artificial Sequence: Synthetic oligonucleotide
aaggagucaaccuacucaa

SEQ ID NO: 2930488 - RNA, 19 nt, Artificial Sequence
  Description of Artificial Sequence: Synthetic oligonucleotide
cuuaagagucaucaagggc

SEQ ID NO: 2930489 - RNA, 19 nt, Artificial Sequence
  Description of Artificial Sequence: Synthetic oligonucleotide
uguccuacacacauguaca

SEQ ID NO: 2930490 - RNA, 19 nt, Artificial Sequence
  Description of Artificial Sequence: Synthetic oligonucleotide
uacauuaggugucccaggc

SEQ ID NO: 2930491 - RNA, 19 nt, Artificial Sequence
  Description of Artificial Sequence: Synthetic oligonucleotide
accuacucaagacagucuc

SEQ ID NO: 2930492 - RNA, 19 nt, Artificial Sequence
  Description of Artificial Sequence: Synthetic oligonucleotide
aagggcaacuccuuuccuc

SEQ ID NO: 2930493 - RNA, 19 nt, Artificial Sequence
  Description of Artificial Sequence: Synthetic oligonucleotide
aauaaaucagacgcaguga

SEQ ID NO: 2930494 - RNA, 19 nt, Artificial Sequence
  Description of Artificial Sequence: Synthetic oligonucleotide
cacacguacacacacacac

SEQ ID NO: 2930495 - RNA, 19 nt, Artificial Sequence
  Description of Artificial Sequence: Synthetic oligonucleotide
ggaaggacaggcaagaggg

SEQ ID NO: 2930496 - RNA, 19 nt, Artificial Sequence
  Description of Artificial Sequence: Synthetic oligonucleotide
uuggccuucaucucaagga

SEQ ID NO: 2930497 - RNA, 19 nt, Artificial Sequence
  Description of Artificial Sequence: Synthetic oligonucleotide
guguauguguccuacacac

SEQ ID NO: 2930498 - RNA, 19 nt, Artificial Sequence
  Description of Artificial Sequence: Synthetic oligonucleotide
caagagggaauacauuagg

SEQ ID NO: 2930499 - RNA, 19 nt, Artificial Sequence
  Description of Artificial Sequence: Synthetic oligonucleotide
ucaagggcaacuccuuucc

SEQ ID NO: 2930500 - RNA, 19 nt, Artificial Sequence
  Description of Artificial Sequence: Synthetic oligonucleotide
guacucaagacucugguuc

SEQ ID NO: 2930501 - RNA, 19 nt, Artificial Sequence
  Description of Artificial Sequence: Synthetic oligonucleotide
ucucccacagaaauaaauc

SEQ ID NO: 2930502 - RNA, 19 nt, Artificial Sequence
  Description of Artificial Sequence: Synthetic oligonucleotide
cauuaggugucccaggcag

SEQ ID NO: 2930503 - RNA, 19 nt, Artificial Sequence
  Description of Artificial Sequence: Synthetic oligonucleotide
gacgcagugauuccaguag

SEQ ID NO: 2930504 - RNA, 19 nt, Artificial Sequence
  Description of Artificial Sequence: Synthetic oligonucleotide
agucaucaagggcaacucc

SEQ ID NO: 2930505 - RNA, 19 nt, Artificial Sequence
  Description of Artificial Sequence: Synthetic oligonucleotide
ucucccuuaagagucauca

SEQ ID NO: 2930506 - RNA, 19 nt, Artificial Sequence
  Description of Artificial Sequence: Synthetic oligonucleotide
acaaguccuagacugaggu

SEQ ID NO: 2930507 - RNA, 19 nt, Artificial Sequence
  Description of Artificial Sequence: Synthetic oligonucleotide
gaagaggucaaugcugggg

SEQ ID NO: 2930508 - RNA, 19 nt, Artificial Sequence
  Description of Artificial Sequence: Synthetic oligonucleotide
ugguucucccuuaagaguc

SEQ ID NO: 2930509 - RNA, 19 nt, Artificial Sequence
  Description of Artificial Sequence: Synthetic oligonucleotide
guagcauggucccaggaag

SEQ ID NO: 2930510 - RNA, 19 nt, Artificial Sequence
  Description of Artificial Sequence: Synthetic oligonucleotide
gauugagggaaggacaggc

SEQ ID NO: 2930511 - RNA, 19 nt, Artificial Sequence
  Description of Artificial Sequence: Synthetic oligonucleotide
ucaaugcuggggcugaacu

SEQ ID NO: 2930512 - RNA, 19 nt, Artificial Sequence
  Description of Artificial Sequence: Synthetic oligonucleotide
cauguacacacacacguac

SEQ ID NO: 2930513 - RNA, 19 nt, Artificial Sequence
  Description of Artificial Sequence: Synthetic oligonucleotide
uucaucucaaggaccaagu

SEQ ID NO: 2930514 - RNA, 19 nt, Artificial Sequence
  Description of Artificial Sequence: Synthetic oligonucleotide
aucaagggcaacuccuuuc

SEQ ID NO: 2930515 - RNA, 19 nt, Artificial Sequence
  Description of Artificial Sequence: Synthetic oligonucleotide
gagcuaacaaguccuagac

SEQ ID NO: 2930516 - RNA, 19 nt, Artificial Sequence
  Description of Artificial Sequence: Synthetic oligonucleotide
guaucugcuggcuuccagg

SEQ ID NO: 2930517 - RNA, 19 nt, Artificial Sequence
  Description of Artificial Sequence: Synthetic oligonucleotide
cacacacacacacacacac

SEQ ID NO: 2930518 - RNA, 19 nt, Artificial Sequence
  Description of Artificial Sequence: Synthetic oligonucleotide
ugagggaaggacaggcaag

SEQ ID NO: 2930519 - RNA, 19 nt, Artificial Sequence
  Description of Artificial Sequence: Synthetic oligonucleotide
caagacagucuccaugucc

SEQ ID NO: 2930520 - RNA, 19 nt, Artificial Sequence
  Description of Artificial Sequence: Synthetic oligonucleotide
auacauuaggugucccagg

SEQ ID NO: 2930521 - RNA, 19 nt, Artificial Sequence
  Description of Artificial Sequence: Synthetic oligonucleotide
ugggagagagggauugagg

SEQ ID NO: 2930522 - RNA, 19 nt, Artificial Sequence
  Description of Artificial Sequence: Synthetic oligonucleotide
gagggaauacauuaggugu

SEQ ID NO: 2930523 - RNA, 19 nt, Artificial Sequence
  Description of Artificial Sequence: Synthetic oligonucleotide
gagucaaccuacucaagac

SEQ ID NO: 2930524 - RNA, 19 nt, Artificial Sequence
  Description of Artificial Sequence: Synthetic oligonucleotide
aagacagucuccauguccu

SEQ ID NO: 2930525 - RNA, 19 nt, Artificial Sequence
  Description of Artificial Sequence: Synthetic oligonucleotide
augaagaggucaaugcugg

SEQ ID NO: 2930526 - RNA, 19 nt, Artificial Sequence
  Description of Artificial Sequence: Synthetic oligonucleotide
acucaagacagucuccaug

SEQ ID NO: 2930527 - RNA, 19 nt, Artificial Sequence
  Description of Artificial Sequence: Synthetic oligonucleotide
auguguccuacacacaugu

SEQ ID NO: 2930528 - RNA, 19 nt, Artificial Sequence
  Description of Artificial Sequence: Synthetic oligonucleotide
uggggcugaacuacgagcu

SEQ ID NO: 2930529 - RNA, 19 nt, Artificial Sequence
  Description of Artificial Sequence: Synthetic oligonucleotide
guguccuacacacauguac

SEQ ID NO: 2930530 - RNA, 19 nt, Artificial Sequence
  Description of Artificial Sequence: Synthetic oligonucleotide
gaguguauguguccuacac

SEQ ID NO: 2930531 - RNA, 19 nt, Artificial Sequence
  Description of Artificial Sequence: Synthetic oligonucleotide
cuuccaggcaaugaagagg

SEQ ID NO: 2930532 - RNA, 19 nt, Artificial Sequence
  Description of Artificial Sequence: Synthetic oligonucleotide
aucucaaggaccaaguagu

SEQ ID NO: 2930533 - RNA, 19 nt, Artificial Sequence
  Description of Artificial Sequence: Synthetic oligonucleotide
ucugcuggcuuccaggcaa

SEQ ID NO: 2930534 - RNA, 19 nt, Artificial Sequence
  Description of Artificial Sequence: Synthetic oligonucleotide
cuuuccucaggcagcaccc

SEQ ID NO: 2930535 - RNA, 19 nt, Artificial Sequence
  Description of Artificial Sequence: Synthetic oligonucleotide
aaguagugggcacaggcua

SEQ ID NO: 2930536 - RNA, 19 nt, Artificial Sequence
  Description of Artificial Sequence: Synthetic oligonucleotide
gucaaccuacucaagacag

SEQ ID NO: 2930537 - RNA, 19 nt, Artificial Sequence
  Description of Artificial Sequence: Synthetic oligonucleotide
acgcagugauuccaguagc

SEQ ID NO: 2930538 - RNA, 19 nt, Artificial Sequence
  Description of Artificial Sequence: Synthetic oligonucleotide
gcaaugaagaggucaaugc

SEQ ID NO: 2930539 - RNA, 19 nt, Artificial Sequence
  Description of Artificial Sequence: Synthetic oligonucleotide
ugggaaaggagucaaccua

SEQ ID NO: 2930540 - RNA, 19 nt, Artificial Sequence
  Description of Artificial Sequence: Synthetic oligonucleotide
ucagacgcagugauuccag

SEQ ID NO: 2930541 - RNA, 19 nt, Artificial Sequence
  Description of Artificial Sequence: Synthetic oligonucleotide
uaacaaguccuagacugag

SEQ ID NO: 2930542 - RNA, 19 nt, Artificial Sequence
  Description of Artificial Sequence: Synthetic oligonucleotide
agcugcagguacucaagac

SEQ ID NO: 2930543 - RNA, 19 nt, Artificial Sequence
  Description of Artificial Sequence: Synthetic oligonucleotide
agucaaccuacucaagaca

SEQ ID NO: 2930544 - RNA, 19 nt, Artificial Sequence
  Description of Artificial Sequence: Synthetic oligonucleotide
uugagggaaggacaggcaa

SEQ ID NO: 2930545 - RNA, 19 nt, Artificial Sequence
  Description of Artificial Sequence: Synthetic oligonucleotide
cacguacacacacacacac

SEQ ID NO: 2930546 - RNA, 19 nt, Artificial Sequence
  Description of Artificial Sequence: Synthetic oligonucleotide
uaucugcuggcuuccaggc

SEQ ID NO: 2930547 - RNA, 19 nt, Artificial Sequence
  Description of Artificial Sequence: Synthetic oligonucleotide
gucccaggaaggaagaggg

SEQ ID NO: 2930548 - RNA, 19 nt, Artificial Sequence
  Description of Artificial Sequence: Synthetic oligonucleotide
aagagggaauacauuaggu

SEQ ID NO: 2930549 - RNA, 19 nt, Artificial Sequence
  Description of Artificial Sequence: Synthetic oligonucleotide
gaauacauuagguguccca

SEQ ID NO: 2930550 - RNA, 19 nt, Artificial Sequence
  Description of Artificial Sequence: Synthetic oligonucleotide
acaggucucccacagaaau

SEQ ID NO: 2930551 - RNA, 19 nt, Artificial Sequence
  Description of Artificial Sequence: Synthetic oligonucleotide
agucuccauguccuuggcc

SEQ ID NO: 2930552 - RNA, 19 nt, Artificial Sequence
  Description of Artificial Sequence: Synthetic oligonucleotide
uauguguccuacacacaug

SEQ ID NO: 2930553 - RNA, 19 nt, Artificial Sequence
  Description of Artificial Sequence: Synthetic oligonucleotide
aacuacgagcuaacaaguc

SEQ ID NO: 2930554 - RNA, 19 nt, Artificial Sequence
  Description of Artificial Sequence: Synthetic oligonucleotide
aggaccaaguagugggcac

SEQ ID NO: 2930555 - RNA, 19 nt, Artificial Sequence
  Description of Artificial Sequence: Synthetic oligonucleotide
cuuggccuucaucucaagg

SEQ ID NO: 2930556 - RNA, 19 nt, Artificial Sequence
  Description of Artificial Sequence: Synthetic oligonucleotide
cugcagguacucaagacuc

SEQ ID NO: 2930557 - RNA, 19 nt, Artificial Sequence
  Description of Artificial Sequence: Synthetic oligonucleotide
aguguauguguccuacaca

SEQ ID NO: 2930558 - RNA, 19 nt, Artificial Sequence
  Description of Artificial Sequence: Synthetic oligonucleotide
ucucaaggaccaaguagug

SEQ ID NO: 2930559 - RNA, 19 nt, Artificial Sequence
  Description of Artificial Sequence: Synthetic oligonucleotide
agggaauacauuagguguc

SEQ ID NO: 2930560 - RNA, 19 nt, Artificial Sequence
  Description of Artificial Sequence: Synthetic oligonucleotide
cccuuaagagucaucaagg

SEQ ID NO: 2930561 - RNA, 19 nt, Artificial Sequence
  Description of Artificial Sequence: Synthetic oligonucleotide
uggccuucaucucaaggac

SEQ ID NO: 2930562 - RNA, 19 nt, Artificial Sequence
  Description of Artificial Sequence: Synthetic oligonucleotide
uaagagucaucaagggcaa

SEQ ID NO: 2930563 - RNA, 19 nt, Artificial Sequence
  Description of Artificial Sequence: Synthetic oligonucleotide
augggaaaggagucaaccu

SEQ ID NO: 2930564 - RNA, 19 nt, Artificial Sequence
  Description of Artificial Sequence: Synthetic oligonucleotide
uccaguagcauggucccag

SEQ ID NO: 2930565 - RNA, 19 nt, Artificial Sequence
  Description of Artificial Sequence: Synthetic oligonucleotide
gauggugggaguguaugug

SEQ ID NO: 2930566 - RNA, 19 nt, Artificial Sequence
  Description of Artificial Sequence: Synthetic oligonucleotide
aacaaguccuagacugagg

SEQ ID NO: 2930567 - RNA, 19 nt, Artificial Sequence
  Description of Artificial Sequence: Synthetic oligonucleotide
cacacacacguacacacac

SEQ ID NO: 2930568 - RNA, 19 nt, Artificial Sequence
  Description of Artificial Sequence: Synthetic oligonucleotide
cacacacguacacacacac

SEQ ID NO: 2930569 - RNA, 19 nt, Artificial Sequence
  Description of Artificial Sequence: Synthetic oligonucleotide
cagugauuccaguagcaug

SEQ ID NO: 2930570 - RNA, 19 nt, Artificial Sequence
  Description of Artificial Sequence: Synthetic oligonucleotide
cuggggcugaacuacgagc

SEQ ID NO: 2930571 - RNA, 19 nt, Artificial Sequence
  Description of Artificial Sequence: Synthetic oligonucleotide
aguagcauggucccaggaa

SEQ ID NO: 2930572 - RNA, 19 nt, Artificial Sequence
  Description of Artificial Sequence: Synthetic oligonucleotide
uacucaagacucugguucu

SEQ ID NO: 2930573 - RNA, 19 nt, Artificial Sequence
  Description of Artificial Sequence: Synthetic oligonucleotide
cacauguacacacacaugu

SEQ ID NO: 2930574 - RNA, 19 nt, Artificial Sequence
  Description of Artificial Sequence: Synthetic oligonucleotide
uguauguguccuacacaca

SEQ ID NO: 2930575 - RNA, 19 nt, Artificial Sequence
  Description of Artificial Sequence: Synthetic oligonucleotide
ugucccaggcaguaucugc

SEQ ID NO: 2930576 - RNA, 19 nt, Artificial Sequence
  Description of Artificial Sequence: Synthetic oligonucleotide
ucaagacucugguucuccc

SEQ ID NO: 2930577 - RNA, 19 nt, Artificial Sequence
  Description of Artificial Sequence: Synthetic oligonucleotide
aagacucugguucucccuu

SEQ ID NO: 2930578 - RNA, 19 nt, Artificial Sequence
  Description of Artificial Sequence: Synthetic oligonucleotide
ugaagaggucaaugcuggg

SEQ ID NO: 2930579 - RNA, 19 nt, Artificial Sequence
  Description of Artificial Sequence: Synthetic oligonucleotide
agguacucaagacucuggu

SEQ ID NO: 2930580 - RNA, 19 nt, Artificial Sequence
  Description of Artificial Sequence: Synthetic oligonucleotide
agagucaucaagggcaacu

SEQ ID NO: 2930581 - RNA, 19 nt, Artificial Sequence
  Description of Artificial Sequence: Synthetic oligonucleotide
agggcaacuccuuuccuca

SEQ ID NO: 2930582 - RNA, 19 nt, Artificial Sequence
  Description of Artificial Sequence: Synthetic oligonucleotide
gaaaggagucaaccuacuc

SEQ ID NO: 2930583 - RNA, 19 nt, Artificial Sequence
  Description of Artificial Sequence: Synthetic oligonucleotide
ccuuaagagucaucaaggg

SEQ ID NO: 2930584 - RNA, 19 nt, Artificial Sequence
  Description of Artificial Sequence: Synthetic oligonucleotide
cagaaauaaaucagacgca

SEQ ID NO: 2930585 - RNA, 19 nt, Artificial Sequence
  Description of Artificial Sequence: Synthetic oligonucleotide
cucaaggaccaaguagugg

SEQ ID NO: 2930586 - RNA, 19 nt, Artificial Sequence
  Description of Artificial Sequence: Synthetic oligonucleotide
cuucaucucaaggaccaag

SEQ ID NO: 2930587 - RNA, 19 nt, Artificial Sequence
  Description of Artificial Sequence: Synthetic oligonucleotide
gagggauugagggaaggac

SEQ ID NO: 2930588 - RNA, 19 nt, Artificial Sequence
  Description of Artificial Sequence: Synthetic oligonucleotide
cagguacucaagacucugg

SEQ ID NO: 2930589 - RNA, 19 nt, Artificial Sequence
  Description of Artificial Sequence: Synthetic oligonucleotide
agugggcacaggcuacagg

SEQ ID NO: 2930590 - RNA, 19 nt, Artificial Sequence
  Description of Artificial Sequence: Synthetic oligonucleotide
gguguggccaggauggugg

SEQ ID NO: 2930591 - RNA, 19 nt, Artificial Sequence
  Description of Artificial Sequence: Synthetic oligonucleotide
gaaggaagagggugggaga

SEQ ID NO: 2930592 - RNA, 19 nt, Artificial Sequence
  Description of Artificial Sequence: Synthetic oligonucleotide
aguagugggcacaggcuac

SEQ ID NO: 2930593 - RNA, 19 nt, Artificial Sequence
  Description of Artificial Sequence: Synthetic oligonucleotide
agcuaacaaguccuagacu

SEQ ID NO: 2930594 - RNA, 19 nt, Artificial Sequence
  Description of Artificial Sequence: Synthetic oligonucleotide
ggaaggaagagggugggag

SEQ ID NO: 2930595 - RNA, 19 nt, Artificial Sequence
  Description of Artificial Sequence: Synthetic oligonucleotide
caaggaccaaguagugggc

SEQ ID NO: 2930596 - RNA, 19 nt, Artificial Sequence
  Description of Artificial Sequence: Synthetic oligonucleotide
caaccuacucaagacaguc

SEQ ID NO: 2930597 - RNA, 19 nt, Artificial Sequence
  Description of Artificial Sequence: Synthetic oligonucleotide
ucaucucaaggaccaagua

SEQ ID NO: 2930598 - RNA, 19 nt, Artificial Sequence
  Description of Artificial Sequence: Synthetic oligonucleotide
caggcuacaggucucccac

SEQ ID NO: 2930599 - RNA, 19 nt, Artificial Sequence
  Description of Artificial Sequence: Synthetic oligonucleotide
auggugggaguguaugugu

SEQ ID NO: 2930600 - RNA, 19 nt, Artificial Sequence
  Description of Artificial Sequence: Synthetic oligonucleotide
ccaaguagugggcacaggc

SEQ ID NO: 2930601 - RNA, 19 nt, Artificial Sequence
  Description of Artificial Sequence: Synthetic oligonucleotide
ggcaagagggaauacauua

SEQ ID NO: 2930602 - RNA, 19 nt, Artificial Sequence
  Description of Artificial Sequence: Synthetic oligonucleotide
cugagguguggccaggaug

SEQ ID NO: 2930603 - RNA, 19 nt, Artificial Sequence
  Description of Artificial Sequence: Synthetic oligonucleotide
ucaucaagggcaacuccuu

SEQ ID NO: 2930604 - RNA, 19 nt, Artificial Sequence
  Description of Artificial Sequence: Synthetic oligonucleotide
aaggaccaaguagugggca

SEQ ID NO: 2930605 - RNA, 19 nt, Artificial Sequence
  Description of Artificial Sequence: Synthetic oligonucleotide
aggucucccacagaaauaa

SEQ ID NO: 2930606 - RNA, 19 nt, Artificial Sequence
  Description of Artificial Sequence: Synthetic oligonucleotide
uccuacacacauguacaca

SEQ ID NO: 2930607 - RNA, 19 nt, Artificial Sequence
  Description of Artificial Sequence: Synthetic oligonucleotide
ccacagaaauaaaucagac

SEQ ID NO: 2930608 - RNA, 19 nt, Artificial Sequence
  Description of Artificial Sequence: Synthetic oligonucleotide
cuacaggucucccacagaa

SEQ ID NO: 2930609 - RNA, 19 nt, Artificial Sequence
  Description of Artificial Sequence: Synthetic oligonucleotide
ggagucaaccuacucaaga

SEQ ID NO: 2930610 - RNA, 19 nt, Artificial Sequence
  Description of Artificial Sequence: Synthetic oligonucleotide
cucaagacagucuccaugu

SEQ ID NO: 2930611 - RNA, 19 nt, Artificial Sequence
  Description of Artificial Sequence: Synthetic oligonucleotide
cucugguucucccuuaaga

SEQ ID NO: 2930612 - RNA, 19 nt, Artificial Sequence
  Description of Artificial Sequence: Synthetic oligonucleotide
acaggcaagagggaauaca

SEQ ID NO: 2930613 - RNA, 19 nt, Artificial Sequence
  Description of Artificial Sequence: Synthetic oligonucleotide
cuaacaaguccuagacuga

SEQ ID NO: 2930614 - RNA, 19 nt, Artificial Sequence
  Description of Artificial Sequence: Synthetic oligonucleotide
guauguguccuacacacau

SEQ ID NO: 2930615 - RNA, 19 nt, Artificial Sequence
  Description of Artificial Sequence: Synthetic oligonucleotide
ccaggaaggaagagggugg

SEQ ID NO: 2930616 - RNA, 19 nt, Artificial Sequence
  Description of Artificial Sequence: Synthetic oligonucleotide
gagagggauugagggaagg

SEQ ID NO: 2930617 - RNA, 19 nt, Artificial Sequence
  Description of Artificial Sequence: Synthetic oligonucleotide
aagagucaucaagggcaac

SEQ ID NO: 2930618 - RNA, 19 nt, Artificial Sequence
  Description of Artificial Sequence: Synthetic oligonucleotide
agggauugagggaaggaca

SEQ ID NO: 2930619 - RNA, 19 nt, Artificial Sequence
  Description of Artificial Sequence: Synthetic oligonucleotide
cugaacuacgagcuaacaa

SEQ ID NO: 2930620 - RNA, 19 nt, Artificial Sequence
  Description of Artificial Sequence: Synthetic oligonucleotide
acccaaugggaaaggaguc

SEQ ID NO: 2930621 - RNA, 19 nt, Artificial Sequence
  Description of Artificial Sequence: Synthetic oligonucleotide
aggauggugggaguguaug

SEQ ID NO: 2930622 - RNA, 19 nt, Artificial Sequence
  Description of Artificial Sequence: Synthetic oligonucleotide
gacagucuccauguccuug

SEQ ID NO: 2930623 - RNA, 19 nt, Artificial Sequence
  Description of Artificial Sequence: Synthetic oligonucleotide
acauuaggugucccaggca

SEQ ID NO: 2930624 - RNA, 19 nt, Artificial Sequence
  Description of Artificial Sequence: Synthetic oligonucleotide
cguacacacacacacacac

SEQ ID NO: 2930625 - RNA, 19 nt, Artificial Sequence
  Description of Artificial Sequence: Synthetic oligonucleotide
cucaagacucugguucucc

SEQ ID NO: 2930626 - RNA, 19 nt, Artificial Sequence
  Description of Artificial Sequence: Synthetic oligonucleotide
uggugggaguguauguguc

SEQ ID NO: 2930627 - RNA, 19 nt, Artificial Sequence
  Description of Artificial Sequence: Synthetic oligonucleotide
ggcaaugaagaggucaaug

SEQ ID NO: 2930628 - RNA, 19 nt, Artificial Sequence
  Description of Artificial Sequence: Synthetic oligonucleotide
guccuacacacauguacac

SEQ ID NO: 2930629 - RNA, 19 nt, Artificial Sequence
  Description of Artificial Sequence: Synthetic oligonucleotide
cucaggcagcacccaaugg

SEQ ID NO: 2930630 - RNA, 19 nt, Artificial Sequence
  Description of Artificial Sequence: Synthetic oligonucleotide
aaccuacucaagacagucu

SEQ ID NO: 2930631 - RNA, 19 nt, Artificial Sequence
  Description of Artificial Sequence: Synthetic oligonucleotide
caaguccuagacugaggug

SEQ ID NO: 2930632 - RNA, 19 nt, Artificial Sequence
  Description of Artificial Sequence: Synthetic oligonucleotide
cuacgagcuaacaaguccu

SEQ ID NO: 2930633 - RNA, 19 nt, Artificial Sequence
  Description of Artificial Sequence: Synthetic oligonucleotide
gggauugagggaaggacag

SEQ ID NO: 2930634 - RNA, 19 nt, Artificial Sequence
  Description of Artificial Sequence: Synthetic oligonucleotide
ucaagacagucuccauguc

SEQ ID NO: 2930635 - RNA, 19 nt, Artificial Sequence
  Description of Artificial Sequence: Synthetic oligonucleotide
gaccaaguagugggcacag

SEQ ID NO: 2930636 - RNA, 19 nt, Artificial Sequence
  Description of Artificial Sequence: Synthetic oligonucleotide
ggucccaggaaggaagagg

SEQ ID NO: 2930637 - RNA, 19 nt, Artificial Sequence
  Description of Artificial Sequence: Synthetic oligonucleotide
gagggaaggacaggcaaga

SEQ ID NO: 2930638 - RNA, 19 nt, Artificial Sequence
  Description of Artificial Sequence: Synthetic oligonucleotide
cuacucaagacagucucca

SEQ ID NO: 2930639 - RNA, 19 nt, Artificial Sequence
  Description of Artificial Sequence: Synthetic oligonucleotide
gugggcacaggcuacaggu

SEQ ID NO: 2930640 - RNA, 19 nt, Artificial Sequence
  Description of Artificial Sequence: Synthetic oligonucleotide
cacccaaugggaaaggagu

SEQ ID NO: 2930641 - RNA, 19 nt, Artificial Sequence
  Description of Artificial Sequence: Synthetic oligonucleotide
uuaggugucccaggcagua

SEQ ID NO: 2930642 - RNA, 19 nt, Artificial Sequence
  Description of Artificial Sequence: Synthetic oligonucleotide
gcaacuccuuuccucaggc

SEQ ID NO: 2930643 - RNA, 19 nt, Artificial Sequence
  Description of Artificial Sequence: Synthetic oligonucleotide
agaggucaaugcuggggcu

SEQ ID NO: 2930644 - RNA, 19 nt, Artificial Sequence
  Description of Artificial Sequence: Synthetic oligonucleotide
uccuuggccuucaucucaa

SEQ ID NO: 2930645 - RNA, 19 nt, Artificial Sequence
  Description of Artificial Sequence: Synthetic oligonucleotide
uacaggucucccacagaaa

SEQ ID NO: 2930646 - RNA, 19 nt, Artificial Sequence
  Description of Artificial Sequence: Synthetic oligonucleotide
cuagacugagguguggcca

SEQ ID NO: 2930647 - RNA, 19 nt, Artificial Sequence
  Description of Artificial Sequence: Synthetic oligonucleotide
gcaagagggaauacauuag

SEQ ID NO: 2930648 - RNA, 19 nt, Artificial Sequence
  Description of Artificial Sequence: Synthetic oligonucleotide
gugggagagagggauugag

SEQ ID NO: 2930649 - RNA, 19 nt, Artificial Sequence
  Description of Artificial Sequence: Synthetic oligonucleotide
caggaaggaagaggguggg

SEQ ID NO: 2930650 - RNA, 19 nt, Artificial Sequence
  Description of Artificial Sequence: Synthetic oligonucleotide
agacgcagugauuccagua

SEQ ID NO: 2930651 - RNA, 19 nt, Artificial Sequence
  Description of Artificial Sequence: Synthetic oligonucleotide
aucagacgcagugauucca

SEQ ID NO: 2930652 - RNA, 19 nt, Artificial Sequence
  Description of Artificial Sequence: Synthetic oligonucleotide
acucugguucucccuuaag

SEQ ID NO: 2930653 - RNA, 19 nt, Artificial Sequence
  Description of Artificial Sequence: Synthetic oligonucleotide
acgagcuaacaaguccuag

SEQ ID NO: 2930654 - RNA, 19 nt, Artificial Sequence
  Description of Artificial Sequence: Synthetic oligonucleotide
gaacuacgagcuaacaagu

SEQ ID NO: 2930655 - RNA, 19 nt, Artificial Sequence
  Description of Artificial Sequence: Synthetic oligonucleotide
caggcaaugaagaggucaa

SEQ ID NO: 2930656 - RNA, 19 nt, Artificial Sequence
  Description of Artificial Sequence: Synthetic oligonucleotide
ggcuacaggucucccacag

SEQ ID NO: 2930657 - RNA, 19 nt, Artificial Sequence
  Description of Artificial Sequence: Synthetic oligonucleotide
gaaauaaaucagacgcagu

SEQ ID NO: 2930658 - RNA, 19 nt, Artificial Sequence
  Description of Artificial Sequence: Synthetic oligonucleotide
ggcaacuccuuuccucagg

SEQ ID NO: 2930659 - RNA, 19 nt, Artificial Sequence
  Description of Artificial Sequence: Synthetic oligonucleotide
uacgagcuaacaaguccua

SEQ ID NO: 2930660 - RNA, 19 nt, Artificial Sequence
  Description of Artificial Sequence: Synthetic oligonucleotide
ucccaggcaguaucugcug

SEQ ID NO: 2930661 - RNA, 19 nt, Artificial Sequence
  Description of Artificial Sequence: Synthetic oligonucleotide
uccucaggcagcacccaau

SEQ ID NO: 2930662 - RNA, 19 nt, Artificial Sequence
  Description of Artificial Sequence: Synthetic oligonucleotide
ugcuggggcugaacuacga

SEQ ID NO: 2930663 - RNA, 19 nt, Artificial Sequence
  Description of Artificial Sequence: Synthetic oligonucleotide
ccuuuccucaggcagcacc

SEQ ID NO: 2930664 - RNA, 19 nt, Artificial Sequence
  Description of Artificial Sequence: Synthetic oligonucleotide
agagggauugagggaagga

SEQ ID NO: 2930665 - RNA, 19 nt, Artificial Sequence
  Description of Artificial Sequence: Synthetic oligonucleotide
gggaauacauuaggugucc

SEQ ID NO: 2930666 - RNA, 19 nt, Artificial Sequence
  Description of Artificial Sequence: Synthetic oligonucleotide
cuggcuuccaggcaaugaa

SEQ ID NO: 2930667 - RNA, 19 nt, Artificial Sequence
  Description of Artificial Sequence: Synthetic oligonucleotide
caggcagcacccaauggga

SEQ ID NO: 2930668 - RNA, 19 nt, Artificial Sequence
  Description of Artificial Sequence: Synthetic oligonucleotide
gggaaaggagucaaccuac

SEQ ID NO: 2930669 - RNA, 19 nt, Artificial Sequence
  Description of Artificial Sequence: Synthetic oligonucleotide
acucaagacucugguucuc

SEQ ID NO: 2930670 - RNA, 19 nt, Artificial Sequence
  Description of Artificial Sequence: Synthetic oligonucleotide
cccacagaaauaaaucaga

SEQ ID NO: 2930671 - RNA, 19 nt, Artificial Sequence
  Description of Artificial Sequence: Synthetic oligonucleotide
auugagggaaggacaggca

SEQ ID NO: 2930672 - RNA, 19 nt, Artificial Sequence
  Description of Artificial Sequence: Synthetic oligonucleotide
cauguccuuggccuucauc

SEQ ID NO: 2930673 - RNA, 19 nt, Artificial Sequence
  Description of Artificial Sequence: Synthetic oligonucleotide
uacucaagacagucuccau

SEQ ID NO: 2930674 - RNA, 19 nt, Artificial Sequence
  Description of Artificial Sequence: Synthetic oligonucleotide
uuccucaggcagcacccaa

SEQ ID NO: 2930675 - RNA, 19 nt, Artificial Sequence
  Description of Artificial Sequence: Synthetic oligonucleotide
ccuacucaagacagucucc

SEQ ID NO: 2930676 - RNA, 19 nt, Artificial Sequence
  Description of Artificial Sequence: Synthetic oligonucleotide
gucaucaagggcaacuccu

SEQ ID NO: 2930677 - RNA, 19 nt, Artificial Sequence
  Description of Artificial Sequence: Synthetic oligonucleotide
ucccaggaaggaagagggu

SEQ ID NO: 2930678 - RNA, 19 nt, Artificial Sequence
  Description of Artificial Sequence: Synthetic oligonucleotide
gcagcacccaaugggaaag

SEQ ID NO: 2930679 - RNA, 19 nt, Artificial Sequence
  Description of Artificial Sequence: Synthetic oligonucleotide
agcauggucccaggaagga

SEQ ID NO: 2930680 - RNA, 19 nt, Artificial Sequence
  Description of Artificial Sequence: Synthetic oligonucleotide
uucucccuuaagagucauc

SEQ ID NO: 2930681 - RNA, 19 nt, Artificial Sequence
  Description of Artificial Sequence: Synthetic oligonucleotide
ccuagacugagguguggcc

SEQ ID NO: 2930682 - RNA, 19 nt, Artificial Sequence
  Description of Artificial Sequence: Synthetic oligonucleotide
caaguagugggcacaggcu

SEQ ID NO: 2930683 - RNA, 19 nt, Artificial Sequence
  Description of Artificial Sequence: Synthetic oligonucleotide
guguggccaggaugguggg

SEQ ID NO: 2930684 - RNA, 19 nt, Artificial Sequence
  Description of Artificial Sequence: Synthetic oligonucleotide
cugguucucccuuaagagu

SEQ ID NO: 2930685 - RNA, 19 nt, Artificial Sequence
  Description of Artificial Sequence: Synthetic oligonucleotide
agagagggauugagggaag

SEQ ID NO: 2930686 - RNA, 19 nt, Artificial Sequence
  Description of Artificial Sequence: Synthetic oligonucleotide
aguccuagacugaggugug

SEQ ID NO: 2930687 - RNA, 19 nt, Artificial Sequence
  Description of Artificial Sequence: Synthetic oligonucleotide
caggcaagagggaauacau

SEQ ID NO: 2930688 - RNA, 19 nt, Artificial Sequence
  Description of Artificial Sequence: Synthetic oligonucleotide
uggucccaggaaggaagag

SEQ ID NO: 2930689 - RNA, 19 nt, Artificial Sequence
  Description of Artificial Sequence: Synthetic oligonucleotide
uagugggcacaggcuacag

SEQ ID NO: 2930690 - RNA, 19 nt, Artificial Sequence
  Description of Artificial Sequence: Synthetic oligonucleotide
auuaggugucccaggcagu

SEQ ID NO: 2930691 - RNA, 19 nt, Artificial Sequence
  Description of Artificial Sequence: Synthetic oligonucleotide
accaaguagugggcacagg

SEQ ID NO: 2930692 - RNA, 19 nt, Artificial Sequence
  Description of Artificial Sequence: Synthetic oligonucleotide
acacguacacacacacaca

SEQ ID NO: 2930693 - RNA, 19 nt, Artificial Sequence
  Description of Artificial Sequence: Synthetic oligonucleotide
gcugcagguacucaagacu

SEQ ID NO: 2930694 - RNA, 19 nt, Artificial Sequence
  Description of Artificial Sequence: Synthetic oligonucleotide
ggauugagggaaggacagg

SEQ ID NO: 2930695 - RNA, 19 nt, Artificial Sequence
  Description of Artificial Sequence: Synthetic oligonucleotide
gacucugguucucccuuaa

SEQ ID NO: 2930696 - RNA, 19 nt, Artificial Sequence
  Description of Artificial Sequence: Synthetic oligonucleotide
cccaggaaggaagagggug

SEQ ID NO: 2930697 - RNA, 19 nt, Artificial Sequence
  Description of Artificial Sequence: Synthetic oligonucleotide
ggaauacauuagguguccc

SEQ ID NO: 2930698 - RNA, 19 nt, Artificial Sequence
  Description of Artificial Sequence: Synthetic oligonucleotide
acauguacacacacaugua

SEQ ID NO: 2930699 - RNA, 19 nt, Artificial Sequence
  Description of Artificial Sequence: Synthetic oligonucleotide
agcacccaaugggaaagga

SEQ ID NO: 2930700 - RNA, 19 nt, Artificial Sequence
  Description of Artificial Sequence: Synthetic oligonucleotide
gcuggggcugaacuacgag

SEQ ID NO: 2930701 - RNA, 19 nt, Artificial Sequence
  Description of Artificial Sequence: Synthetic oligonucleotide
gaaggacaggcaagaggga

SEQ ID NO: 2930702 - RNA, 19 nt, Artificial Sequence
  Description of Artificial Sequence: Synthetic oligonucleotide
aggucaaugcuggggcuga

SEQ ID NO: 2930703 - RNA, 19 nt, Artificial Sequence
  Description of Artificial Sequence: Synthetic oligonucleotide
guacacacacacacacaca

SEQ ID NO: 2930704 - RNA, 19 nt, Artificial Sequence
  Description of Artificial Sequence: Synthetic oligonucleotide
guccuagacugaggugugg

SEQ ID NO: 2930705 - RNA, 19 nt, Artificial Sequence
  Description of Artificial Sequence: Synthetic oligonucleotide
acacacacacacacacaca

SEQ ID NO: 2930706 - RNA, 19 nt, Artificial Sequence
  Description of Artificial Sequence: Synthetic oligonucleotide
gggaguguauguguccuac

SEQ ID NO: 2930707 - RNA, 19 nt, Artificial Sequence
  Description of Artificial Sequence: Synthetic oligonucleotide
gcacccaaugggaaaggag

SEQ ID NO: 2930708 - RNA, 19 nt, Artificial Sequence
  Description of Artificial Sequence: Synthetic oligonucleotide
acacacacguacacacaca

SEQ ID NO: 2930709 - RNA, 19 nt, Artificial Sequence
  Description of Artificial Sequence: Synthetic oligonucleotide
gacaggcaagagggaauac

SEQ ID NO: 2930710 - RNA, 19 nt, Artificial Sequence
  Description of Artificial Sequence: Synthetic oligonucleotide
gcagguacucaagacucug

SEQ ID NO: 2930711 - RNA, 19 nt, Artificial Sequence
  Description of Artificial Sequence: Synthetic oligonucleotide
aggagucaaccuacucaag

SEQ ID NO: 2930712 - RNA, 19 nt, Artificial Sequence
  Description of Artificial Sequence: Synthetic oligonucleotide
gagggugggagagagggau

SEQ ID NO: 2930713 - RNA, 19 nt, Artificial Sequence
  Description of Artificial Sequence: Synthetic oligonucleotide
acacacacacguacacaca

SEQ ID NO: 2930714 - RNA, 19 nt, Artificial Sequence
  Description of Artificial Sequence: Synthetic oligonucleotide
gccuucaucucaaggacca

SEQ ID NO: 2930715 - RNA, 19 nt, Artificial Sequence
  Description of Artificial Sequence: Synthetic oligonucleotide
augcuggggcugaacuacg

SEQ ID NO: 2930716 - RNA, 19 nt, Artificial Sequence
  Description of Artificial Sequence: Synthetic oligonucleotide
agguguggccaggauggug

SEQ ID NO: 2930717 - RNA, 19 nt, Artificial Sequence
  Description of Artificial Sequence: Synthetic oligonucleotide
caaugcuggggcugaacua

SEQ ID NO: 2930718 - RNA, 19 nt, Artificial Sequence
  Description of Artificial Sequence: Synthetic oligonucleotide
ugggaguguauguguccua

SEQ ID NO: 2930719 - RNA, 19 nt, Artificial Sequence
  Description of Artificial Sequence: Synthetic oligonucleotide
acguacacacacacacaca

SEQ ID NO: 2930720 - RNA, 19 nt, Artificial Sequence
  Description of Artificial Sequence: Synthetic oligonucleotide
gggugggagagagggauug

SEQ ID NO: 2930721 - RNA, 19 nt, Artificial Sequence
  Description of Artificial Sequence: Synthetic oligonucleotide
ggcuuccaggcaaugaaga

SEQ ID NO: 2930722 - RNA, 19 nt, Artificial Sequence
  Description of Artificial Sequence: Synthetic oligonucleotide
gucaaugcuggggcugaac

SEQ ID NO: 2930723 - RNA, 19 nt, Artificial Sequence
  Description of Artificial Sequence: Synthetic oligonucleotide
acacacguacacacacaca

SEQ ID NO: 2930724 - RNA, 19 nt, Artificial Sequence
  Description of Artificial Sequence: Synthetic oligonucleotide
uccaggcaaugaagagguc

SEQ ID NO: 2930725 - RNA, 19 nt, Artificial Sequence
  Description of Artificial Sequence: Synthetic oligonucleotide
gucucccacagaaauaaau

SEQ ID NO: 2930726 - RNA, 19 nt, Artificial Sequence
  Description of Artificial Sequence: Synthetic oligonucleotide
uuccaguagcaugguccca

SEQ ID NO: 2930727 - RNA, 19 nt, Artificial Sequence
  Description of Artificial Sequence: Synthetic oligonucleotide
aggcuacaggucucccaca

SEQ ID NO: 2930728 - RNA, 19 nt, Artificial Sequence
  Description of Artificial Sequence: Synthetic oligonucleotide
cagcacccaaugggaaagg

SEQ ID NO: 2930729 - RNA, 19 nt, Artificial Sequence
  Description of Artificial Sequence: Synthetic oligonucleotide
uguggccaggaugguggga

SEQ ID NO: 2930730 - RNA, 19 nt, Artificial Sequence
  Description of Artificial Sequence: Synthetic oligonucleotide
gcaguaucugcuggcuucc

SEQ ID NO: 2930731 - RNA, 19 nt, Artificial Sequence
  Description of Artificial Sequence: Synthetic oligonucleotide
ggccuucaucucaaggacc

SEQ ID NO: 2930732 - RNA, 19 nt, Artificial Sequence
  Description of Artificial Sequence: Synthetic oligonucleotide
guagugggcacaggcuaca

SEQ ID NO: 2930733 - RNA, 19 nt, Artificial Sequence
  Description of Artificial Sequence: Synthetic oligonucleotide
aggaagagggugggagaga

SEQ ID NO: 2930734 - RNA, 19 nt, Artificial Sequence
  Description of Artificial Sequence: Synthetic oligonucleotide
ggaguguauguguccuaca

SEQ ID NO: 2930735 - RNA, 19 nt, Artificial Sequence
  Description of Artificial Sequence: Synthetic oligonucleotide
caagacucugguucucccu

SEQ ID NO: 2930736 - RNA, 19 nt, Artificial Sequence
  Description of Artificial Sequence: Synthetic oligonucleotide
cucccuuaagagucaucaa

SEQ ID NO: 2930737 - RNA, 19 nt, Artificial Sequence
  Description of Artificial Sequence: Synthetic oligonucleotide
ccaguagcauggucccagg

SEQ ID NO: 2930738 - RNA, 19 nt, Artificial Sequence
  Description of Artificial Sequence: Synthetic oligonucleotide
agacagucuccauguccuu

SEQ ID NO: 2930739 - RNA, 19 nt, Artificial Sequence
  Description of Artificial Sequence: Synthetic oligonucleotide
ccucaggcagcacccaaug

SEQ ID NO: 2930740 - RNA, 19 nt, Artificial Sequence
  Description of Artificial Sequence: Synthetic oligonucleotide
caacuccuuuccucaggca

SEQ ID NO: 2930741 - RNA, 19 nt, Artificial Sequence
  Description of Artificial Sequence: Synthetic oligonucleotide
cuccuuuccucaggcagca

SEQ ID NO: 2930742 - RNA, 19 nt, Artificial Sequence
  Description of Artificial Sequence: Synthetic oligonucleotide
cgagcuaacaaguccuaga

SEQ ID NO: 2930743 - RNA, 19 nt, Artificial Sequence
  Description of Artificial Sequence: Synthetic oligonucleotide
cacaggcuacaggucuccc

SEQ ID NO: 2930744 - RNA, 19 nt, Artificial Sequence
  Description of Artificial Sequence: Synthetic oligonucleotide
cuccauguccuuggccuuc

SEQ ID NO: 2930745 - RNA, 19 nt, Artificial Sequence
  Description of Artificial Sequence: Synthetic oligonucleotide
ggcagcacccaaugggaaa

SEQ ID NO: 2930746 - RNA, 19 nt, Artificial Sequence
  Description of Artificial Sequence: Synthetic oligonucleotide
ugcuggcuuccaggcaaug

SEQ ID NO: 2930747 - RNA, 19 nt, Artificial Sequence
  Description of Artificial Sequence: Synthetic oligonucleotide
gugggaguguauguguccu

SEQ ID NO: 2930748 - RNA, 19 nt, Artificial Sequence
  Description of Artificial Sequence: Synthetic oligonucleotide
caguagcauggucccagga

SEQ ID NO: 2930749 - RNA, 19 nt, Artificial Sequence
  Description of Artificial Sequence: Synthetic oligonucleotide
gggcaacuccuuuccucag

SEQ ID NO: 2930750 - RNA, 19 nt, Artificial Sequence
  Description of Artificial Sequence: Synthetic oligonucleotide
ggaccaaguagugggcaca

SEQ ID NO: 2930751 - RNA, 19 nt, Artificial Sequence
  Description of Artificial Sequence: Synthetic oligonucleotide
aggcaagagggaauacauu

SEQ ID NO: 2930752 - RNA, 19 nt, Artificial Sequence
  Description of Artificial Sequence: Synthetic oligonucleotide
ggcugaacuacgagcuaac

SEQ ID NO: 2930753 - RNA, 19 nt, Artificial Sequence
  Description of Artificial Sequence: Synthetic oligonucleotide
aggcaaugaagaggucaau

SEQ ID NO: 2930754 - RNA, 19 nt, Artificial Sequence
  Description of Artificial Sequence: Synthetic oligonucleotide
gggcacaggcuacaggucu

SEQ ID NO: 2930755 - RNA, 19 nt, Artificial Sequence
  Description of Artificial Sequence: Synthetic oligonucleotide
gucccaggcaguaucugcu

SEQ ID NO: 2930756 - RNA, 19 nt, Artificial Sequence
  Description of Artificial Sequence: Synthetic oligonucleotide
ggauggugggaguguaugu

SEQ ID NO: 2930757 - RNA, 19 nt, Artificial Sequence
  Description of Artificial Sequence: Synthetic oligonucleotide
gggcugaacuacgagcuaa

SEQ ID NO: 2930758 - RNA, 19 nt, Artificial Sequence
  Description of Artificial Sequence: Synthetic oligonucleotide
gcugaacuacgagcuaaca

SEQ ID NO: 2930759 - RNA, 19 nt, Artificial Sequence
  Description of Artificial Sequence: Synthetic oligonucleotide
gguacucaagacucugguu

SEQ ID NO: 2930760 - RNA, 19 nt, Artificial Sequence
  Description of Artificial Sequence: Synthetic oligonucleotide
gguucucccuuaagaguca

SEQ ID NO: 2930761 - RNA, 19 nt, Artificial Sequence
  Description of Artificial Sequence: Synthetic oligonucleotide
gcuacaggucucccacaga

SEQ ID NO: 2930762 - RNA, 19 nt, Artificial Sequence
  Description of Artificial Sequence: Synthetic oligonucleotide
uccuuuccucaggcagcac

SEQ ID NO: 2930763 - RNA, 19 nt, Artificial Sequence
  Description of Artificial Sequence: Synthetic oligonucleotide
cccaaugggaaaggaguca

SEQ ID NO: 2930764 - RNA, 19 nt, Artificial Sequence
  Description of Artificial Sequence: Synthetic oligonucleotide
caucaagggcaacuccuuu

SEQ ID NO: 2930765 - RNA, 19 nt, Artificial Sequence
  Description of Artificial Sequence: Synthetic oligonucleotide
ggaaaggagucaaccuacu

SEQ ID NO: 2930766 - RNA, 19 nt, Artificial Sequence
  Description of Artificial Sequence: Synthetic oligonucleotide
cgcagugauuccaguagca

SEQ ID NO: 2930767 - RNA, 19 nt, Artificial Sequence
  Description of Artificial Sequence: Synthetic oligonucleotide
cagacgcagugauuccagu

SEQ ID NO: 2930768 - RNA, 19 nt, Artificial Sequence
  Description of Artificial Sequence: Synthetic oligonucleotide
caagggcaacuccuuuccu

SEQ ID NO: 2930769 - RNA, 19 nt, Artificial Sequence
  Description of Artificial Sequence: Synthetic oligonucleotide
gugauuccaguagcauggu

SEQ ID NO: 2930770 - RNA, 19 nt, Artificial Sequence
  Description of Artificial Sequence: Synthetic oligonucleotide
caggcaguaucugcuggcu

SEQ ID NO: 2930771 - RNA, 19 nt, Artificial Sequence
  Description of Artificial Sequence: Synthetic oligonucleotide
ggugggagagagggauuga

SEQ ID NO: 2930772 - RNA, 19 nt, Artificial Sequence
  Description of Artificial Sequence: Synthetic oligonucleotide
ggugucccaggcaguaucu

SEQ ID NO: 2930773 - RNA, 19 nt, Artificial Sequence
  Description of Artificial Sequence: Synthetic oligonucleotide
agggugggagagagggauu

SEQ ID NO: 2930774 - RNA, 19 nt, Artificial Sequence
  Description of Artificial Sequence: Synthetic oligonucleotide
gcauggucccaggaaggaa

SEQ ID NO: 2930775 - RNA, 19 nt, Artificial Sequence
  Description of Artificial Sequence: Synthetic oligonucleotide
guucucccuuaagagucau

SEQ ID NO: 2930776 - RNA, 19 nt, Artificial Sequence
  Description of Artificial Sequence: Synthetic oligonucleotide
caggauggugggaguguau

SEQ ID NO: 2930777 - RNA, 19 nt, Artificial Sequence
  Description of Artificial Sequence: Synthetic oligonucleotide
ggggcugaacuacgagcua

SEQ ID NO: 2930778 - RNA, 19 nt, Artificial Sequence
  Description of Artificial Sequence: Synthetic oligonucleotide
ggucucccacagaaauaaa

SEQ ID NO: 2930779 - RNA, 19 nt, Artificial Sequence
  Description of Artificial Sequence: Synthetic oligonucleotide
cugcuggcuuccaggcaau

SEQ ID NO: 2930780 - RNA, 19 nt, Artificial Sequence
  Description of Artificial Sequence: Synthetic oligonucleotide
ccaggauggugggagugua

SEQ ID NO: 2930781 - RNA, 19 nt, Artificial Sequence
  Description of Artificial Sequence: Synthetic oligonucleotide
ggucaaugcuggggcugaa

SEQ ID NO: 2930782 - RNA, 19 nt, Artificial Sequence
  Description of Artificial Sequence: Synthetic oligonucleotide
ccuucaucucaaggaccaa

SEQ ID NO: 2930783 - RNA, 19 nt, Artificial Sequence
  Description of Artificial Sequence: Synthetic oligonucleotide
ccauguccuuggccuucau

SEQ ID NO: 2930784 - RNA, 19 nt, Artificial Sequence
  Description of Artificial Sequence: Synthetic oligonucleotide
uuuauauggauuuugaaga

SEQ ID NO: 2930785 - RNA, 19 nt, Artificial Sequence
  Description of Artificial Sequence: Synthetic oligonucleotide
uuuuauauggauuuugaag

SEQ ID NO: 2930786 - RNA, 19 nt, Artificial Sequence
  Description of Artificial Sequence: Synthetic oligonucleotide
aacuucaagaagucuaagc

SEQ ID NO: 2930787 - RNA, 19 nt, Artificial Sequence
  Description of Artificial Sequence: Synthetic oligonucleotide
ugucacuuaacucagagga

SEQ ID NO: 2930788 - RNA, 19 nt, Artificial Sequence
  Description of Artificial Sequence: Synthetic oligonucleotide
augaugucaauuuucaggg

SEQ ID NO: 2930789 - RNA, 19 nt, Artificial Sequence
  Description of Artificial Sequence: Synthetic oligonucleotide
ugaguuuuccuaaugauga

SEQ ID NO: 2930790 - RNA, 19 nt, Artificial Sequence
  Description of Artificial Sequence: Synthetic oligonucleotide
cauuuuguugauaaaacgc

SEQ ID NO: 2930791 - RNA, 19 nt, Artificial Sequence
  Description of Artificial Sequence: Synthetic oligonucleotide
acaugaugaaccuucaagg

SEQ ID NO: 2930792 - RNA, 19 nt, Artificial Sequence
  Description of Artificial Sequence: Synthetic oligonucleotide
aaaacgcuucuucaaauuc

SEQ ID NO: 2930793 - RNA, 19 nt, Artificial Sequence
  Description of Artificial Sequence: Synthetic oligonucleotide
uuuaugaugucaauuuuca

SEQ ID NO: 2930794 - RNA, 19 nt, Artificial Sequence
  Description of Artificial Sequence: Synthetic oligonucleotide
ucuuguauuccuuauauuc

SEQ ID NO: 2930795 - RNA, 19 nt, Artificial Sequence
  Description of Artificial Sequence: Synthetic oligonucleotide
uucaagaagucuaagcuug

SEQ ID NO: 2930796 - RNA, 19 nt, Artificial Sequence
  Description of Artificial Sequence: Synthetic oligonucleotide
guaauucaggcauagaagc

SEQ ID NO: 2930797 - RNA, 19 nt, Artificial Sequence
  Description of Artificial Sequence: Synthetic oligonucleotide
uuuugaagagucuuguuug

SEQ ID NO: 2930798 - RNA, 19 nt, Artificial Sequence
  Description of Artificial Sequence: Synthetic oligonucleotide
gggaacauauuuuauaugg

SEQ ID NO: 2930799 - RNA, 19 nt, Artificial Sequence
  Description of Artificial Sequence: Synthetic oligonucleotide
uucaagaugucacuuaacu

SEQ ID NO: 2930800 - RNA, 19 nt, Artificial Sequence
  Description of Artificial Sequence: Synthetic oligonucleotide
uuguuugcugauaagaacu

SEQ ID NO: 2930801 - RNA, 19 nt, Artificial Sequence
  Description of Artificial Sequence: Synthetic oligonucleotide
acuucaagaagucuaagcu

SEQ ID NO: 2930802 - RNA, 19 nt, Artificial Sequence
  Description of Artificial Sequence: Synthetic oligonucleotide
uuccuuauauuccucaagc

SEQ ID NO: 2930803 - RNA, 19 nt, Artificial Sequence
  Description of Artificial Sequence: Synthetic oligonucleotide
uauuuuauauggauuuuga

SEQ ID NO: 2930804 - RNA, 19 nt, Artificial Sequence
  Description of Artificial Sequence: Synthetic oligonucleotide
ucuucaaauucccguaacg

SEQ ID NO: 2930805 - RNA, 19 nt, Artificial Sequence
  Description of Artificial Sequence: Synthetic oligonucleotide
aaagcuguuccaguaauuc

SEQ ID NO: 2930806 - RNA, 19 nt, Artificial Sequence
  Description of Artificial Sequence: Synthetic oligonucleotide
uuaauuuucuuguauuccu

SEQ ID NO: 2930807 - RNA, 19 nt, Artificial Sequence
  Description of Artificial Sequence: Synthetic oligonucleotide
uuucucuugauuuucuuca

SEQ ID NO: 2930808 - RNA, 19 nt, Artificial Sequence
  Description of Artificial Sequence: Synthetic oligonucleotide
ugauaagaacuucaagaag

SEQ ID NO: 2930809 - RNA, 19 nt, Artificial Sequence
  Description of Artificial Sequence: Synthetic oligonucleotide
uuugcugauaagaacuuca

SEQ ID NO: 2930810 - RNA, 19 nt, Artificial Sequence
  Description of Artificial Sequence: Synthetic oligonucleotide
cuuguauuccuuauauucc

SEQ ID NO: 2930811 - RNA, 19 nt, Artificial Sequence
  Description of Artificial Sequence: Synthetic oligonucleotide
uaacucagaggacagacug

SEQ ID NO: 2930812 - RNA, 19 nt, Artificial Sequence
  Description of Artificial Sequence: Synthetic oligonucleotide
uuggcuuuaauuuucuugu

SEQ ID NO: 2930813 - RNA, 19 nt, Artificial Sequence
  Description of Artificial Sequence: Synthetic oligonucleotide
acuugauaagcggagaucg

SEQ ID NO: 2930814 - RNA, 19 nt, Artificial Sequence
  Description of Artificial Sequence: Synthetic oligonucleotide
aaacgcuucuucaaauucc

SEQ ID NO: 2930815 - RNA, 19 nt, Artificial Sequence
  Description of Artificial Sequence: Synthetic oligonucleotide
gacacgauccucuuucugg

SEQ ID NO: 2930816 - RNA, 19 nt, Artificial Sequence
  Description of Artificial Sequence: Synthetic oligonucleotide
ucagaggacagacugacac

SEQ ID NO: 2930817 - RNA, 19 nt, Artificial Sequence
  Description of Artificial Sequence: Synthetic oligonucleotide
ugaugaaccuucaaggaac

SEQ ID NO: 2930818 - RNA, 19 nt, Artificial Sequence
  Description of Artificial Sequence: Synthetic oligonucleotide
uaagcggagaucgagagcc

SEQ ID NO: 2930819 - RNA, 19 nt, Artificial Sequence
  Description of Artificial Sequence: Synthetic oligonucleotide
caagaugucacuuaacuca

SEQ ID NO: 2930820 - RNA, 19 nt, Artificial Sequence
  Description of Artificial Sequence: Synthetic oligonucleotide
gaugucacuuaacucagag

SEQ ID NO: 2930821 - RNA, 19 nt, Artificial Sequence
  Description of Artificial Sequence: Synthetic oligonucleotide
uuauauggauuuugaagag

SEQ ID NO: 2930822 - RNA, 19 nt, Artificial Sequence
  Description of Artificial Sequence: Synthetic oligonucleotide
uuauauuccucaagcacug

SEQ ID NO: 2930823 - RNA, 19 nt, Artificial Sequence
  Description of Artificial Sequence: Synthetic oligonucleotide
cuaaugaugauugugugug

SEQ ID NO: 2930824 - RNA, 19 nt, Artificial Sequence
  Description of Artificial Sequence: Synthetic oligonucleotide
uaacguuuuacguaguuuc

SEQ ID NO: 2930825 - RNA, 19 nt, Artificial Sequence
  Description of Artificial Sequence: Synthetic oligonucleotide
gauaagcggagaucgagag

SEQ ID NO: 2930826 - RNA, 19 nt, Artificial Sequence
  Description of Artificial Sequence: Synthetic oligonucleotide
acugacaccaucuucuucu

SEQ ID NO: 2930827 - RNA, 19 nt, Artificial Sequence
  Description of Artificial Sequence: Synthetic oligonucleotide
uuccuaaugaugauugugu

SEQ ID NO: 2930828 - RNA, 19 nt, Artificial Sequence
  Description of Artificial Sequence: Synthetic oligonucleotide
auucccguaacguuuuacg

SEQ ID NO: 2930829 - RNA, 19 nt, Artificial Sequence
  Description of Artificial Sequence: Synthetic oligonucleotide
aacgcuucuucaaauuccc

SEQ ID NO: 2930830 - RNA, 19 nt, Artificial Sequence
  Description of Artificial Sequence: Synthetic oligonucleotide
uugauaaaacgcuucuuca

SEQ ID NO: 2930831 - RNA, 19 nt, Artificial Sequence
  Description of Artificial Sequence: Synthetic oligonucleotide
aauucaggcauagaagcug

SEQ ID NO: 2930832 - RNA, 19 nt, Artificial Sequence
  Description of Artificial Sequence: Synthetic oligonucleotide
uuuguugauaaaacgcuuc

SEQ ID NO: 2930833 - RNA, 19 nt, Artificial Sequence
  Description of Artificial Sequence: Synthetic oligonucleotide
cuuggcuuuaauuuucuug

SEQ ID NO: 2930834 - RNA, 19 nt, Artificial Sequence
  Description of Artificial Sequence: Synthetic oligonucleotide
uuuucaagaugucacuuaa

SEQ ID NO: 2930835 - RNA, 19 nt, Artificial Sequence
  Description of Artificial Sequence: Synthetic oligonucleotide
auauggauuuugaagaguc

SEQ ID NO: 2930836 - RNA, 19 nt, Artificial Sequence
  Description of Artificial Sequence: Synthetic oligonucleotide
aagaagucuaagcuuggcu

SEQ ID NO: 2930837 - RNA, 19 nt, Artificial Sequence
  Description of Artificial Sequence: Synthetic oligonucleotide
cuuuaugaugucaauuuuc

SEQ ID NO: 2930838 - RNA, 19 nt, Artificial Sequence
  Description of Artificial Sequence: Synthetic oligonucleotide
ucaaauucccguaacguuu

SEQ ID NO: 2930839 - RNA, 19 nt, Artificial Sequence
  Description of Artificial Sequence: Synthetic oligonucleotide
cacaugaugaaccuucaag

SEQ ID NO: 2930840 - RNA, 19 nt, Artificial Sequence
  Description of Artificial Sequence: Synthetic oligonucleotide
gauaagaacuucaagaagu

SEQ ID NO: 2930841 - RNA, 19 nt, Artificial Sequence
  Description of Artificial Sequence: Synthetic oligonucleotide
auauuccucaagcacuggg

SEQ ID NO: 2930842 - RNA, 19 nt, Artificial Sequence
  Description of Artificial Sequence: Synthetic oligonucleotide
auuuugaagagucuuguuu

SEQ ID NO: 2930843 - RNA, 19 nt, Artificial Sequence
  Description of Artificial Sequence: Synthetic oligonucleotide
ucuuguuugcugauaagaa

SEQ ID NO: 2930844 - RNA, 19 nt, Artificial Sequence
  Description of Artificial Sequence: Synthetic oligonucleotide
auuccucaagcacugggac

SEQ ID NO: 2930845 - RNA, 19 nt, Artificial Sequence
  Description of Artificial Sequence: Synthetic oligonucleotide
aagcacugggacacgaucc

SEQ ID NO: 2930846 - RNA, 19 nt, Artificial Sequence
  Description of Artificial Sequence: Synthetic oligonucleotide
cuugauuuucuucagcauc

SEQ ID NO: 2930847 - RNA, 19 nt, Artificial Sequence
  Description of Artificial Sequence: Synthetic oligonucleotide
gcugauaagaacuucaaga

SEQ ID NO: 2930848 - RNA, 19 nt, Artificial Sequence
  Description of Artificial Sequence: Synthetic oligonucleotide
gaugauuguguguguacag

SEQ ID NO: 2930849 - RNA, 19 nt, Artificial Sequence
  Description of Artificial Sequence: Synthetic oligonucleotide
acaacugacuuuaugaugu

SEQ ID NO: 2930850 - RNA, 19 nt, Artificial Sequence
  Description of Artificial Sequence: Synthetic oligonucleotide
uggauuuugaagagucuug

SEQ ID NO: 2930851 - RNA, 19 nt, Artificial Sequence
  Description of Artificial Sequence: Synthetic oligonucleotide
aucagauucugaguuuucc

SEQ ID NO: 2930852 - RNA, 19 nt, Artificial Sequence
  Description of Artificial Sequence: Synthetic oligonucleotide
augaugauuguguguguac

SEQ ID NO: 2930853 - RNA, 19 nt, Artificial Sequence
  Description of Artificial Sequence: Synthetic oligonucleotide
cauuccuuccauuuuguug

SEQ ID NO: 2930854 - RNA, 19 nt, Artificial Sequence
  Description of Artificial Sequence: Synthetic oligonucleotide
cuuguuugcugauaagaac

SEQ ID NO: 2930855 - RNA, 19 nt, Artificial Sequence
  Description of Artificial Sequence: Synthetic oligonucleotide
uuuccuaaugaugauugug

SEQ ID NO: 2930856 - RNA, 19 nt, Artificial Sequence
  Description of Artificial Sequence: Synthetic oligonucleotide
uuugaagagucuuguuugc

SEQ ID NO: 2930857 - RNA, 19 nt, Artificial Sequence
  Description of Artificial Sequence: Synthetic oligonucleotide
auuuuguugauaaaacgcu

SEQ ID NO: 2930858 - RNA, 19 nt, Artificial Sequence
  Description of Artificial Sequence: Synthetic oligonucleotide
cugaguuuuccuaaugaug

SEQ ID NO: 2930859 - RNA, 19 nt, Artificial Sequence
  Description of Artificial Sequence: Synthetic oligonucleotide
accuucaaggaacacaacu

SEQ ID NO: 2930860 - RNA, 19 nt, Artificial Sequence
  Description of Artificial Sequence: Synthetic oligonucleotide
ucuggcuuuccaaagcugu

SEQ ID NO: 2930861 - RNA, 19 nt, Artificial Sequence
  Description of Artificial Sequence: Synthetic oligonucleotide
ugaagagucuuguuugcug

SEQ ID NO: 2930862 - RNA, 19 nt, Artificial Sequence
  Description of Artificial Sequence: Synthetic oligonucleotide
ucaagaagucuaagcuugg

SEQ ID NO: 2930863 - RNA, 19 nt, Artificial Sequence
  Description of Artificial Sequence: Synthetic oligonucleotide
uuguugauaaaacgcuucu

SEQ ID NO: 2930864 - RNA, 19 nt, Artificial Sequence
  Description of Artificial Sequence: Synthetic oligonucleotide
uuuucagggaacauauuuu

SEQ ID NO: 2930865 - RNA, 19 nt, Artificial Sequence
  Description of Artificial Sequence: Synthetic oligonucleotide
uauuccucaagcacuggga

SEQ ID NO: 2930866 - RNA, 19 nt, Artificial Sequence
  Description of Artificial Sequence: Synthetic oligonucleotide
ugauaaaacgcuucuucaa

SEQ ID NO: 2930867 - RNA, 19 nt, Artificial Sequence
  Description of Artificial Sequence: Synthetic oligonucleotide
uguuccaguaauucaggca

SEQ ID NO: 2930868 - RNA, 19 nt, Artificial Sequence
  Description of Artificial Sequence: Synthetic oligonucleotide
ugcugauaagaacuucaag

SEQ ID NO: 2930869 - RNA, 19 nt, Artificial Sequence
  Description of Artificial Sequence: Synthetic oligonucleotide
ucacuuaacucagaggaca

SEQ ID NO: 2930870 - RNA, 19 nt, Artificial Sequence
  Description of Artificial Sequence: Synthetic oligonucleotide
auuuucuucagcaucagau

SEQ ID NO: 2930871 - RNA, 19 nt, Artificial Sequence
  Description of Artificial Sequence: Synthetic oligonucleotide
auuccuuauauuccucaag

SEQ ID NO: 2930872 - RNA, 19 nt, Artificial Sequence
  Description of Artificial Sequence: Synthetic oligonucleotide
auagaagcugcccgaguac

SEQ ID NO: 2930873 - RNA, 19 nt, Artificial Sequence
  Description of Artificial Sequence: Synthetic oligonucleotide
gauaaaacgcuucuucaaa

SEQ ID NO: 2930874 - RNA, 19 nt, Artificial Sequence
  Description of Artificial Sequence: Synthetic oligonucleotide
gagaucgagagccaguuuc

SEQ ID NO: 2930875 - RNA, 19 nt, Artificial Sequence
  Description of Artificial Sequence: Synthetic oligonucleotide
uuaugaugucaauuuucag

SEQ ID NO: 2930876 - RNA, 19 nt, Artificial Sequence
  Description of Artificial Sequence: Synthetic oligonucleotide
ugaaccuucaaggaacaca

SEQ ID NO: 2930877 - RNA, 19 nt, Artificial Sequence
  Description of Artificial Sequence: Synthetic oligonucleotide
ugauuguguguguacagcu

SEQ ID NO: 2930878 - RNA, 19 nt, Artificial Sequence
  Description of Artificial Sequence: Synthetic oligonucleotide
auaagcggagaucgagagc

SEQ ID NO: 2930879 - RNA, 19 nt, Artificial Sequence
  Description of Artificial Sequence: Synthetic oligonucleotide
gaugucaauuuucagggaa

SEQ ID NO: 2930880 - RNA, 19 nt, Artificial Sequence
  Description of Artificial Sequence: Synthetic oligonucleotide
augauuguguguguacagc

SEQ ID NO: 2930881 - RNA, 19 nt, Artificial Sequence
  Description of Artificial Sequence: Synthetic oligonucleotide
acagcuguuuucaagaugu

SEQ ID NO: 2930882 - RNA, 19 nt, Artificial Sequence
  Description of Artificial Sequence: Synthetic oligonucleotide
uaauucaggcauagaagcu

SEQ ID NO: 2930883 - RNA, 19 nt, Artificial Sequence
  Description of Artificial Sequence: Synthetic oligonucleotide
aagaacuucaagaagucua

SEQ ID NO: 2930884 - RNA, 19 nt, Artificial Sequence
  Description of Artificial Sequence: Synthetic oligonucleotide
uugauaagcggagaucgag

SEQ ID NO: 2930885 - RNA, 19 nt, Artificial Sequence
  Description of Artificial Sequence: Synthetic oligonucleotide
ucaagaugucacuuaacuc

SEQ ID NO: 2930886 - RNA, 19 nt, Artificial Sequence
  Description of Artificial Sequence: Synthetic oligonucleotide
aauucccguaacguuuuac

SEQ ID NO: 2930887 - RNA, 19 nt, Artificial Sequence
  Description of Artificial Sequence: Synthetic oligonucleotide
agaagucuaagcuuggcuu

SEQ ID NO: 2930888 - RNA, 19 nt, Artificial Sequence
  Description of Artificial Sequence: Synthetic oligonucleotide
cuuaacucagaggacagac

SEQ ID NO: 2930889 - RNA, 19 nt, Artificial Sequence
  Description of Artificial Sequence: Synthetic oligonucleotide
ugauaagcggagaucgaga

SEQ ID NO: 2930890 - RNA, 19 nt, Artificial Sequence
  Description of Artificial Sequence: Synthetic oligonucleotide
uucaaggaacacaacugac

SEQ ID NO: 2930891 - RNA, 19 nt, Artificial Sequence
  Description of Artificial Sequence: Synthetic oligonucleotide
agcucuggcuuuccaaagc

SEQ ID NO: 2930892 - RNA, 19 nt, Artificial Sequence
  Description of Artificial Sequence: Synthetic oligonucleotide
uuucagggaacauauuuua

SEQ ID NO: 2930893 - RNA, 19 nt, Artificial Sequence
  Description of Artificial Sequence: Synthetic oligonucleotide
aagaugucacuuaacucag

SEQ ID NO: 2930894 - RNA, 19 nt, Artificial Sequence
  Description of Artificial Sequence: Synthetic oligonucleotide
acagacugacaccaucuuc

SEQ ID NO: 2930895 - RNA, 19 nt, Artificial Sequence
  Description of Artificial Sequence: Synthetic oligonucleotide
auuuuauauggauuuugaa

SEQ ID NO: 2930896 - RNA, 19 nt, Artificial Sequence
  Description of Artificial Sequence: Synthetic oligonucleotide
auaagaacuucaagaaguc

SEQ ID NO: 2930897 - RNA, 19 nt, Artificial Sequence
  Description of Artificial Sequence: Synthetic oligonucleotide
uuuuguugauaaaacgcuu

SEQ ID NO: 2930898 - RNA, 19 nt, Artificial Sequence
  Description of Artificial Sequence: Synthetic oligonucleotide
ucagggaacauauuuuaua

SEQ ID NO: 2930899 - RNA, 19 nt, Artificial Sequence
  Description of Artificial Sequence: Synthetic oligonucleotide
uccuaaugaugauugugug

SEQ ID NO: 2930900 - RNA, 19 nt, Artificial Sequence
  Description of Artificial Sequence: Synthetic oligonucleotide
acacgauccucuuucuggg

SEQ ID NO: 2930901 - RNA, 19 nt, Artificial Sequence
  Description of Artificial Sequence: Synthetic oligonucleotide
ucaauuuucagggaacaua

SEQ ID NO: 2930902 - RNA, 19 nt, Artificial Sequence
  Description of Artificial Sequence: Synthetic oligonucleotide
cugauaagaacuucaagaa

SEQ ID NO: 2930903 - RNA, 19 nt, Artificial Sequence
  Description of Artificial Sequence: Synthetic oligonucleotide
ucagauucugaguuuuccu

SEQ ID NO: 2930904 - RNA, 19 nt, Artificial Sequence
  Description of Artificial Sequence: Synthetic oligonucleotide
acucagaggacagacugac

SEQ ID NO: 2930905 - RNA, 19 nt, Artificial Sequence
  Description of Artificial Sequence: Synthetic oligonucleotide
augucacuuaacucagagg

SEQ ID NO: 2930906 - RNA, 19 nt, Artificial Sequence
  Description of Artificial Sequence: Synthetic oligonucleotide
auaaaacgcuucuucaaau

SEQ ID NO: 2930907 - RNA, 19 nt, Artificial Sequence
  Description of Artificial Sequence: Synthetic oligonucleotide
aagcuguuccaguaauuca

SEQ ID NO: 2930908 - RNA, 19 nt, Artificial Sequence
  Description of Artificial Sequence: Synthetic oligonucleotide
gaagagucuuguuugcuga

SEQ ID NO: 2930909 - RNA, 19 nt, Artificial Sequence
  Description of Artificial Sequence: Synthetic oligonucleotide
caggcauagaagcugcccg

SEQ ID NO: 2930910 - RNA, 19 nt, Artificial Sequence
  Description of Artificial Sequence: Synthetic oligonucleotide
auucaggcauagaagcugc

SEQ ID NO: 2930911 - RNA, 19 nt, Artificial Sequence
  Description of Artificial Sequence: Synthetic oligonucleotide
cuuauauuccucaagcacu

SEQ ID NO: 2930912 - RNA, 19 nt, Artificial Sequence
  Description of Artificial Sequence: Synthetic oligonucleotide
ugggacacgauccucuuuc

SEQ ID NO: 2930913 - RNA, 19 nt, Artificial Sequence
  Description of Artificial Sequence: Synthetic oligonucleotide
uucuucagcaucagauucu

SEQ ID NO: 2930914 - RNA, 19 nt, Artificial Sequence
  Description of Artificial Sequence: Synthetic oligonucleotide
uuuucuuguauuccuuaua

SEQ ID NO: 2930915 - RNA, 19 nt, Artificial Sequence
  Description of Artificial Sequence: Synthetic oligonucleotide
uuaacucagaggacagacu

SEQ ID NO: 2930916 - RNA, 19 nt, Artificial Sequence
  Description of Artificial Sequence: Synthetic oligonucleotide
uauggauuuugaagagucu

SEQ ID NO: 2930917 - RNA, 19 nt, Artificial Sequence
  Description of Artificial Sequence: Synthetic oligonucleotide
uacagcuguuuucaagaug

SEQ ID NO: 2930918 - RNA, 19 nt, Artificial Sequence
  Description of Artificial Sequence: Synthetic oligonucleotide
uucaaauucccguaacguu

SEQ ID NO: 2930919 - RNA, 19 nt, Artificial Sequence
  Description of Artificial Sequence: Synthetic oligonucleotide
ccauuuuguugauaaaacg

SEQ ID NO: 2930920 - RNA, 19 nt, Artificial Sequence
  Description of Artificial Sequence: Synthetic oligonucleotide
uaagcuuggcuuuaauuuu

SEQ ID NO: 2930921 - RNA, 19 nt, Artificial Sequence
  Description of Artificial Sequence: Synthetic oligonucleotide
ucagcaucagauucugagu

SEQ ID NO: 2930922 - RNA, 19 nt, Artificial Sequence
  Description of Artificial Sequence: Synthetic oligonucleotide
ugaugauuguguguguaca

SEQ ID NO: 2930923 - RNA, 19 nt, Artificial Sequence
  Description of Artificial Sequence: Synthetic oligonucleotide
cacaacugacuuuaugaug

SEQ ID NO: 2930924 - RNA, 19 nt, Artificial Sequence
  Description of Artificial Sequence: Synthetic oligonucleotide
augaugaaccuucaaggaa

SEQ ID NO: 2930925 - RNA, 19 nt, Artificial Sequence
  Description of Artificial Sequence: Synthetic oligonucleotide
aagcuuggcuuuaauuuuc

SEQ ID NO: 2930926 - RNA, 19 nt, Artificial Sequence
  Description of Artificial Sequence: Synthetic oligonucleotide
ucuaagcuuggcuuuaauu

SEQ ID NO: 2930927 - RNA, 19 nt, Artificial Sequence
  Description of Artificial Sequence: Synthetic oligonucleotide
cucuugauuuucuucagca

SEQ ID NO: 2930928 - RNA, 19 nt, Artificial Sequence
  Description of Artificial Sequence: Synthetic oligonucleotide
agcuguuccaguaauucag

SEQ ID NO: 2930929 - RNA, 19 nt, Artificial Sequence
  Description of Artificial Sequence: Synthetic oligonucleotide
aggacagacugacaccauc

SEQ ID NO: 2930930 - RNA, 19 nt, Artificial Sequence
  Description of Artificial Sequence: Synthetic oligonucleotide
uccaguaauucaggcauag

SEQ ID NO: 2930931 - RNA, 19 nt, Artificial Sequence
  Description of Artificial Sequence: Synthetic oligonucleotide
uucuucaaauucccguaac

SEQ ID NO: 2930932 - RNA, 19 nt, Artificial Sequence
  Description of Artificial Sequence: Synthetic oligonucleotide
uauauggauuuugaagagu

SEQ ID NO: 2930933 - RNA, 19 nt, Artificial Sequence
  Description of Artificial Sequence: Synthetic oligonucleotide
caguaauucaggcauagaa

SEQ ID NO: 2930934 - RNA, 19 nt, Artificial Sequence
  Description of Artificial Sequence: Synthetic oligonucleotide
gaguacuugauaagcggag

SEQ ID NO: 2930935 - RNA, 19 nt, Artificial Sequence
  Description of Artificial Sequence: Synthetic oligonucleotide
ugucaauuuucagggaaca

SEQ ID NO: 2930936 - RNA, 19 nt, Artificial Sequence
  Description of Artificial Sequence: Synthetic oligonucleotide
gaaccuucaaggaacacaa

SEQ ID NO: 2930937 - RNA, 19 nt, Artificial Sequence
  Description of Artificial Sequence: Synthetic oligonucleotide
uguguguacagcuguuuuc

SEQ ID NO: 2930938 - RNA, 19 nt, Artificial Sequence
  Description of Artificial Sequence: Synthetic oligonucleotide
uccucaagcacugggacac

SEQ ID NO: 2930939 - RNA, 19 nt, Artificial Sequence
  Description of Artificial Sequence: Synthetic oligonucleotide
caugaugaaccuucaagga

SEQ ID NO: 2930940 - RNA, 19 nt, Artificial Sequence
  Description of Artificial Sequence: Synthetic oligonucleotide
uuucaagaugucacuuaac

SEQ ID NO: 2930941 - RNA, 19 nt, Artificial Sequence
  Description of Artificial Sequence: Synthetic oligonucleotide
cuuucugggcauuccuucc

SEQ ID NO: 2930942 - RNA, 19 nt, Artificial Sequence
  Description of Artificial Sequence: Synthetic oligonucleotide
agggaacauauuuuauaug

SEQ ID NO: 2930943 - RNA, 19 nt, Artificial Sequence
  Description of Artificial Sequence: Synthetic oligonucleotide
auuuucuuguauuccuuau

SEQ ID NO: 2930944 - RNA, 19 nt, Artificial Sequence
  Description of Artificial Sequence: Synthetic oligonucleotide
augucaauuuucagggaac

SEQ ID NO: 2930945 - RNA, 19 nt, Artificial Sequence
  Description of Artificial Sequence: Synthetic oligonucleotide
agauucugaguuuuccuaa

SEQ ID NO: 2930946 - RNA, 19 nt, Artificial Sequence
  Description of Artificial Sequence: Synthetic oligonucleotide
gacuuuaugaugucaauuu

SEQ ID NO: 2930947 - RNA, 19 nt, Artificial Sequence
  Description of Artificial Sequence: Synthetic oligonucleotide
uaaaacgcuucuucaaauu

SEQ ID NO: 2930948 - RNA, 19 nt, Artificial Sequence
  Description of Artificial Sequence: Synthetic oligonucleotide
uguauuccuuauauuccuc

SEQ ID NO: 2930949 - RNA, 19 nt, Artificial Sequence
  Description of Artificial Sequence: Synthetic oligonucleotide
acacaacugacuuuaugau

SEQ ID NO: 2930950 - RNA, 19 nt, Artificial Sequence
  Description of Artificial Sequence: Synthetic oligonucleotide
aaugaugauugugugugua

SEQ ID NO: 2930951 - RNA, 19 nt, Artificial Sequence
  Description of Artificial Sequence: Synthetic oligonucleotide
cuucaaggaacacaacuga

SEQ ID NO: 2930952 - RNA, 19 nt, Artificial Sequence
  Description of Artificial Sequence: Synthetic oligonucleotide
ucagcucuggcuuuccaaa

SEQ ID NO: 2930953 - RNA, 19 nt, Artificial Sequence
  Description of Artificial Sequence: Synthetic oligonucleotide
uucccguaacguuuuacgu

SEQ ID NO: 2930954 - RNA, 19 nt, Artificial Sequence
  Description of Artificial Sequence: Synthetic oligonucleotide
guguacagcuguuuucaag

SEQ ID NO: 2930955 - RNA, 19 nt, Artificial Sequence
  Description of Artificial Sequence: Synthetic oligonucleotide
agaggacagacugacacca

SEQ ID NO: 2930956 - RNA, 19 nt, Artificial Sequence
  Description of Artificial Sequence: Synthetic oligonucleotide
guauuccuuauauuccuca

SEQ ID NO: 2930957 - RNA, 19 nt, Artificial Sequence
  Description of Artificial Sequence: Synthetic oligonucleotide
uuuuccuaaugaugauugu

SEQ ID NO: 2930958 - RNA, 19 nt, Artificial Sequence
  Description of Artificial Sequence: Synthetic oligonucleotide
ucuugauuuucuucagcau

SEQ ID NO: 2930959 - RNA, 19 nt, Artificial Sequence
  Description of Artificial Sequence: Synthetic oligonucleotide
uuucugggcauuccuucca

SEQ ID NO: 2930960 - RNA, 19 nt, Artificial Sequence
  Description of Artificial Sequence: Synthetic oligonucleotide
ucuucagcaucagauucug

SEQ ID NO: 2930961 - RNA, 19 nt, Artificial Sequence
  Description of Artificial Sequence: Synthetic oligonucleotide
cacuuaacucagaggacag

SEQ ID NO: 2930962 - RNA, 19 nt, Artificial Sequence
  Description of Artificial Sequence: Synthetic oligonucleotide
uaagaacuucaagaagucu

SEQ ID NO: 2930963 - RNA, 19 nt, Artificial Sequence
  Description of Artificial Sequence: Synthetic oligonucleotide
uugcugauaagaacuucaa

SEQ ID NO: 2930964 - RNA, 19 nt, Artificial Sequence
  Description of Artificial Sequence: Synthetic oligonucleotide
uucagggaacauauuuuau

SEQ ID NO: 2930965 - RNA, 19 nt, Artificial Sequence
  Description of Artificial Sequence: Synthetic oligonucleotide
ccuuauauuccucaagcac

SEQ ID NO: 2930966 - RNA, 19 nt, Artificial Sequence
  Description of Artificial Sequence: Synthetic oligonucleotide
uguuugcugauaagaacuu

SEQ ID NO: 2930967 - RNA, 19 nt, Artificial Sequence
  Description of Artificial Sequence: Synthetic oligonucleotide
uccaaagcuguuccaguaa

SEQ ID NO: 2930968 - RNA, 19 nt, Artificial Sequence
  Description of Artificial Sequence: Synthetic oligonucleotide
cuaagcuuggcuuuaauuu

SEQ ID NO: 2930969 - RNA, 19 nt, Artificial Sequence
  Description of Artificial Sequence: Synthetic oligonucleotide
aggaacacaacugacuuua

SEQ ID NO: 2930970 - RNA, 19 nt, Artificial Sequence
  Description of Artificial Sequence: Synthetic oligonucleotide
cuguuccaguaauucaggc

SEQ ID NO: 2930971 - RNA, 19 nt, Artificial Sequence
  Description of Artificial Sequence: Synthetic oligonucleotide
guuccaguaauucaggcau

SEQ ID NO: 2930972 - RNA, 19 nt, Artificial Sequence
  Description of Artificial Sequence: Synthetic oligonucleotide
aacguuuuacguaguuucu

SEQ ID NO: 2930973 - RNA, 19 nt, Artificial Sequence
  Description of Artificial Sequence: Synthetic oligonucleotide
ucaggcauagaagcugccc

SEQ ID NO: 2930974 - RNA, 19 nt, Artificial Sequence
  Description of Artificial Sequence: Synthetic oligonucleotide
gagucuuguuugcugauaa

SEQ ID NO: 2930975 - RNA, 19 nt, Artificial Sequence
  Description of Artificial Sequence: Synthetic oligonucleotide
ugacuuuaugaugucaauu

SEQ ID NO: 2930976 - RNA, 19 nt, Artificial Sequence
  Description of Artificial Sequence: Synthetic oligonucleotide
ccuucaaggaacacaacug

SEQ ID NO: 2930977 - RNA, 19 nt, Artificial Sequence
  Description of Artificial Sequence: Synthetic oligonucleotide
agucuuguuugcugauaag

SEQ ID NO: 2930978 - RNA, 19 nt, Artificial Sequence
  Description of Artificial Sequence: Synthetic oligonucleotide
gucuuguuugcugauaaga

SEQ ID NO: 2930979 - RNA, 19 nt, Artificial Sequence
  Description of Artificial Sequence: Synthetic oligonucleotide
aaggaacacaacugacuuu

SEQ ID NO: 2930980 - RNA, 19 nt, Artificial Sequence
  Description of Artificial Sequence: Synthetic oligonucleotide
ugaugucaauuuucaggga

SEQ ID NO: 2930981 - RNA, 19 nt, Artificial Sequence
  Description of Artificial Sequence: Synthetic oligonucleotide
ucccguaacguuuuacgua

SEQ ID NO: 2930982 - RNA, 19 nt, Artificial Sequence
  Description of Artificial Sequence: Synthetic oligonucleotide
ucgagagccaguuucucuu

SEQ ID NO: 2930983 - RNA, 19 nt, Artificial Sequence
  Description of Artificial Sequence: Synthetic oligonucleotide
uaaugaugauugugugugu

SEQ ID NO: 2930984 - RNA, 19 nt, Artificial Sequence
  Description of Artificial Sequence: Synthetic oligonucleotide
cagaggacagacugacacc

SEQ ID NO: 2930985 - RNA, 19 nt, Artificial Sequence
  Description of Artificial Sequence: Synthetic oligonucleotide
caauuuucagggaacauau

SEQ ID NO: 2930986 - RNA, 19 nt, Artificial Sequence
  Description of Artificial Sequence: Synthetic oligonucleotide
ugauuuucuucagcaucag

SEQ ID NO: 2930987 - RNA, 19 nt, Artificial Sequence
  Description of Artificial Sequence: Synthetic oligonucleotide
acugacuuuaugaugucaa

SEQ ID NO: 2930988 - RNA, 19 nt, Artificial Sequence
  Description of Artificial Sequence: Synthetic oligonucleotide
uuccaaagcuguuccagua

SEQ ID NO: 2930989 - RNA, 19 nt, Artificial Sequence
  Description of Artificial Sequence: Synthetic oligonucleotide
uuccucaagcacugggaca

SEQ ID NO: 2930990 - RNA, 19 nt, Artificial Sequence
  Description of Artificial Sequence: Synthetic oligonucleotide
aagagucuuguuugcugau

SEQ ID NO: 2930991 - RNA, 19 nt, Artificial Sequence
  Description of Artificial Sequence: Synthetic oligonucleotide
ugcccgaguacuugauaag

SEQ ID NO: 2930992 - RNA, 19 nt, Artificial Sequence
  Description of Artificial Sequence: Synthetic oligonucleotide
gaacuucaagaagucuaag

SEQ ID NO: 2930993 - RNA, 19 nt, Artificial Sequence
  Description of Artificial Sequence: Synthetic oligonucleotide
aguacuugauaagcggaga

SEQ ID NO: 2930994 - RNA, 19 nt, Artificial Sequence
  Description of Artificial Sequence: Synthetic oligonucleotide
cccguaacguuuuacguag

SEQ ID NO: 2930995 - RNA, 19 nt, Artificial Sequence
  Description of Artificial Sequence: Synthetic oligonucleotide
auggauuuugaagagucuu

SEQ ID NO: 2930996 - RNA, 19 nt, Artificial Sequence
  Description of Artificial Sequence: Synthetic oligonucleotide
agaacuucaagaagucuaa

SEQ ID NO: 2930997 - RNA, 19 nt, Artificial Sequence
  Description of Artificial Sequence: Synthetic oligonucleotide
uacuugauaagcggagauc

SEQ ID NO: 2930998 - RNA, 19 nt, Artificial Sequence
  Description of Artificial Sequence: Synthetic oligonucleotide
guuuucaagaugucacuua

SEQ ID NO: 2930999 - RNA, 19 nt, Artificial Sequence
  Description of Artificial Sequence: Synthetic oligonucleotide
uugaagagucuuguuugcu

SEQ ID NO: 2931000 - RNA, 19 nt, Artificial Sequence
  Description of Artificial Sequence: Synthetic oligonucleotide
gaagcugcccgaguacuug

SEQ ID NO: 2931001 - RNA, 19 nt, Artificial Sequence
  Description of Artificial Sequence: Synthetic oligonucleotide
ccgaguacuugauaagcgg

SEQ ID NO: 2931002 - RNA, 19 nt, Artificial Sequence
  Description of Artificial Sequence: Synthetic oligonucleotide
caagcacugggacacgauc

SEQ ID NO: 2931003 - RNA, 19 nt, Artificial Sequence
  Description of Artificial Sequence: Synthetic oligonucleotide
uucuuguauuccuuauauu

SEQ ID NO: 2931004 - RNA, 19 nt, Artificial Sequence
  Description of Artificial Sequence: Synthetic oligonucleotide
caagaagucuaagcuuggc

SEQ ID NO: 2931005 - RNA, 19 nt, Artificial Sequence
  Description of Artificial Sequence: Synthetic oligonucleotide
uucaggcauagaagcugcc

SEQ ID NO: 2931006 - RNA, 19 nt, Artificial Sequence
  Description of Artificial Sequence: Synthetic oligonucleotide
guguguacagcuguuuuca

SEQ ID NO: 2931007 - RNA, 19 nt, Artificial Sequence
  Description of Artificial Sequence: Synthetic oligonucleotide
uagaagcugcccgaguacu

SEQ ID NO: 2931008 - RNA, 19 nt, Artificial Sequence
  Description of Artificial Sequence: Synthetic oligonucleotide
agcacugggacacgauccu

SEQ ID NO: 2931009 - RNA, 19 nt, Artificial Sequence
  Description of Artificial Sequence: Synthetic oligonucleotide
gaugaaccuucaaggaaca

SEQ ID NO: 2931010 - RNA, 19 nt, Artificial Sequence
  Description of Artificial Sequence: Synthetic oligonucleotide
aagcugcccgaguacuuga

SEQ ID NO: 2931011 - RNA, 19 nt, Artificial Sequence
  Description of Artificial Sequence: Synthetic oligonucleotide
aaccuucaaggaacacaac

SEQ ID NO: 2931012 - RNA, 19 nt, Artificial Sequence
  Description of Artificial Sequence: Synthetic oligonucleotide
aguuuuccuaaugaugauu

SEQ ID NO: 2931013 - RNA, 19 nt, Artificial Sequence
  Description of Artificial Sequence: Synthetic oligonucleotide
aggcauagaagcugcccga

SEQ ID NO: 2931014 - RNA, 19 nt, Artificial Sequence
  Description of Artificial Sequence: Synthetic oligonucleotide
uguugauaaaacgcuucuu

SEQ ID NO: 2931015 - RNA, 19 nt, Artificial Sequence
  Description of Artificial Sequence: Synthetic oligonucleotide
cauagaagcugcccgagua

SEQ ID NO: 2931016 - RNA, 19 nt, Artificial Sequence
  Description of Artificial Sequence: Synthetic oligonucleotide
aacucagaggacagacuga

SEQ ID NO: 2931017 - RNA, 19 nt, Artificial Sequence
  Description of Artificial Sequence: Synthetic oligonucleotide
cccgaguacuugauaagcg

SEQ ID NO: 2931018 - RNA, 19 nt, Artificial Sequence
  Description of Artificial Sequence: Synthetic oligonucleotide
cagauucugaguuuuccua

SEQ ID NO: 2931019 - RNA, 19 nt, Artificial Sequence
  Description of Artificial Sequence: Synthetic oligonucleotide
ucaagcacugggacacgau

SEQ ID NO: 2931020 - RNA, 19 nt, Artificial Sequence
  Description of Artificial Sequence: Synthetic oligonucleotide
cagggaacauauuuuauau

SEQ ID NO: 2931021 - RNA, 19 nt, Artificial Sequence
  Description of Artificial Sequence: Synthetic oligonucleotide
augaaccuucaaggaacac

SEQ ID NO: 2931022 - RNA, 19 nt, Artificial Sequence
  Description of Artificial Sequence: Synthetic oligonucleotide
ugggcauuccuuccauuuu

SEQ ID NO: 2931023 - RNA, 19 nt, Artificial Sequence
  Description of Artificial Sequence: Synthetic oligonucleotide
gggcauuccuuccauuuug

SEQ ID NO: 2931024 - RNA, 19 nt, Artificial Sequence
  Description of Artificial Sequence: Synthetic oligonucleotide
gaagucuaagcuuggcuuu

SEQ ID NO: 2931025 - RNA, 19 nt, Artificial Sequence
  Description of Artificial Sequence: Synthetic oligonucleotide
cuugauaagcggagaucga

SEQ ID NO: 2931026 - RNA, 19 nt, Artificial Sequence
  Description of Artificial Sequence: Synthetic oligonucleotide
agcaucagauucugaguuu

SEQ ID NO: 2931027 - RNA, 19 nt, Artificial Sequence
  Description of Artificial Sequence: Synthetic oligonucleotide
uggcuuuccaaagcuguuc

SEQ ID NO: 2931028 - RNA, 19 nt, Artificial Sequence
  Description of Artificial Sequence: Synthetic oligonucleotide
cagcucuggcuuuccaaag

SEQ ID NO: 2931029 - RNA, 19 nt, Artificial Sequence
  Description of Artificial Sequence: Synthetic oligonucleotide
ucucagcucuggcuuucca

SEQ ID NO: 2931030 - RNA, 19 nt, Artificial Sequence
  Description of Artificial Sequence: Synthetic oligonucleotide
cugcccgaguacuugauaa

SEQ ID NO: 2931031 - RNA, 19 nt, Artificial Sequence
  Description of Artificial Sequence: Synthetic oligonucleotide
caucagauucugaguuuuc

SEQ ID NO: 2931032 - RNA, 19 nt, Artificial Sequence
  Description of Artificial Sequence: Synthetic oligonucleotide
gucacuuaacucagaggac

SEQ ID NO: 2931033 - RNA, 19 nt, Artificial Sequence
  Description of Artificial Sequence: Synthetic oligonucleotide
ggaacauauuuuauaugga

SEQ ID NO: 2931034 - RNA, 19 nt, Artificial Sequence
  Description of Artificial Sequence: Synthetic oligonucleotide
aagucuaagcuuggcuuua

SEQ ID NO: 2931035 - RNA, 19 nt, Artificial Sequence
  Description of Artificial Sequence: Synthetic oligonucleotide
uucugggcauuccuuccau

SEQ ID NO: 2931036 - RNA, 19 nt, Artificial Sequence
  Description of Artificial Sequence: Synthetic oligonucleotide
cuucaaauucccguaacgu

SEQ ID NO: 2931037 - RNA, 19 nt, Artificial Sequence
  Description of Artificial Sequence: Synthetic oligonucleotide
uggcuuuaauuuucuugua

SEQ ID NO: 2931038 - RNA, 19 nt, Artificial Sequence
  Description of Artificial Sequence: Synthetic oligonucleotide
uuccaguaauucaggcaua

SEQ ID NO: 2931039 - RNA, 19 nt, Artificial Sequence
  Description of Artificial Sequence: Synthetic oligonucleotide
aauuuucagggaacauauu

SEQ ID NO: 2931040 - RNA, 19 nt, Artificial Sequence
  Description of Artificial Sequence: Synthetic oligonucleotide
agaucgagagccaguuucu

SEQ ID NO: 2931041 - RNA, 19 nt, Artificial Sequence
  Description of Artificial Sequence: Synthetic oligonucleotide
guuugcugauaagaacuuc

SEQ ID NO: 2931042 - RNA, 19 nt, Artificial Sequence
  Description of Artificial Sequence: Synthetic oligonucleotide
gauucugaguuuuccuaau

SEQ ID NO: 2931043 - RNA, 19 nt, Artificial Sequence
  Description of Artificial Sequence: Synthetic oligonucleotide
cacgauccucuuucugggc

SEQ ID NO: 2931044 - RNA, 19 nt, Artificial Sequence
  Description of Artificial Sequence: Synthetic oligonucleotide
gcuguuccaguaauucagg

SEQ ID NO: 2931045 - RNA, 19 nt, Artificial Sequence
  Description of Artificial Sequence: Synthetic oligonucleotide
caaggaacacaacugacuu

SEQ ID NO: 2931046 - RNA, 19 nt, Artificial Sequence
  Description of Artificial Sequence: Synthetic oligonucleotide
uuguguguguacagcuguu

SEQ ID NO: 2931047 - RNA, 19 nt, Artificial Sequence
  Description of Artificial Sequence: Synthetic oligonucleotide
cuucuucaaauucccguaa

SEQ ID NO: 2931048 - RNA, 19 nt, Artificial Sequence
  Description of Artificial Sequence: Synthetic oligonucleotide
acacaugaugaaccuucaa

SEQ ID NO: 2931049 - RNA, 19 nt, Artificial Sequence
  Description of Artificial Sequence: Synthetic oligonucleotide
uguguguguacagcuguuu

SEQ ID NO: 2931050 - RNA, 19 nt, Artificial Sequence
  Description of Artificial Sequence: Synthetic oligonucleotide
aaauucccguaacguuuua

SEQ ID NO: 2931051 - RNA, 19 nt, Artificial Sequence
  Description of Artificial Sequence: Synthetic oligonucleotide
agagccaguuucucuugau

SEQ ID NO: 2931052 - RNA, 19 nt, Artificial Sequence
  Description of Artificial Sequence: Synthetic oligonucleotide
cuucaagaagucuaagcuu

SEQ ID NO: 2931053 - RNA, 19 nt, Artificial Sequence
  Description of Artificial Sequence: Synthetic oligonucleotide
gagagccaguuucucuuga

SEQ ID NO: 2931054 - RNA, 19 nt, Artificial Sequence
  Description of Artificial Sequence: Synthetic oligonucleotide
acuuaacucagaggacaga

SEQ ID NO: 2931055 - RNA, 19 nt, Artificial Sequence
  Description of Artificial Sequence: Synthetic oligonucleotide
gauuuugaagagucuuguu

SEQ ID NO: 2931056 - RNA, 19 nt, Artificial Sequence
  Description of Artificial Sequence: Synthetic oligonucleotide
caacugacuuuaugauguc

SEQ ID NO: 2931057 - RNA, 19 nt, Artificial Sequence
  Description of Artificial Sequence: Synthetic oligonucleotide
agcggagaucgagagccag

SEQ ID NO: 2931058 - RNA, 19 nt, Artificial Sequence
  Description of Artificial Sequence: Synthetic oligonucleotide
guacuugauaagcggagau

SEQ ID NO: 2931059 - RNA, 19 nt, Artificial Sequence
  Description of Artificial Sequence: Synthetic oligonucleotide
gcuucuucaaauucccgua

SEQ ID NO: 2931060 - RNA, 19 nt, Artificial Sequence
  Description of Artificial Sequence: Synthetic oligonucleotide
uuucucagcucuggcuuuc

SEQ ID NO: 2931061 - RNA, 19 nt, Artificial Sequence
  Description of Artificial Sequence: Synthetic oligonucleotide
agacugacaccaucuucuu

SEQ ID NO: 2931062 - RNA, 19 nt, Artificial Sequence
  Description of Artificial Sequence: Synthetic oligonucleotide
gaucgagagccaguuucuc

SEQ ID NO: 2931063 - RNA, 19 nt, Artificial Sequence
  Description of Artificial Sequence: Synthetic oligonucleotide
acguuuuacguaguuucuu

SEQ ID NO: 2931064 - RNA, 19 nt, Artificial Sequence
  Description of Artificial Sequence: Synthetic oligonucleotide
cuuccauuuuguugauaaa

SEQ ID NO: 2931065 - RNA, 19 nt, Artificial Sequence
  Description of Artificial Sequence: Synthetic oligonucleotide
guuuuacguaguuucuuuu

SEQ ID NO: 2931066 - RNA, 19 nt, Artificial Sequence
  Description of Artificial Sequence: Synthetic oligonucleotide
acgcuucuucaaauucccg

SEQ ID NO: 2931067 - RNA, 19 nt, Artificial Sequence
  Description of Artificial Sequence: Synthetic oligonucleotide
cucagcucuggcuuuccaa

SEQ ID NO: 2931068 - RNA, 19 nt, Artificial Sequence
  Description of Artificial Sequence: Synthetic oligonucleotide
uucucagcucuggcuuucc

SEQ ID NO: 2931069 - RNA, 19 nt, Artificial Sequence
  Description of Artificial Sequence: Synthetic oligonucleotide
ggacacgauccucuuucug

SEQ ID NO: 2931070 - RNA, 19 nt, Artificial Sequence
  Description of Artificial Sequence: Synthetic oligonucleotide
gcccgaguacuugauaagc

SEQ ID NO: 2931071 - RNA, 19 nt, Artificial Sequence
  Description of Artificial Sequence: Synthetic oligonucleotide
agagucuuguuugcugaua

SEQ ID NO: 2931072 - RNA, 19 nt, Artificial Sequence
  Description of Artificial Sequence: Synthetic oligonucleotide
ggcauagaagcugcccgag

SEQ ID NO: 2931073 - RNA, 19 nt, Artificial Sequence
  Description of Artificial Sequence: Synthetic oligonucleotide
gaguuuuccuaaugaugau

SEQ ID NO: 2931074 - RNA, 19 nt, Artificial Sequence
  Description of Artificial Sequence: Synthetic oligonucleotide
ucugggcauuccuuccauu

SEQ ID NO: 2931075 - RNA, 19 nt, Artificial Sequence
  Description of Artificial Sequence: Synthetic oligonucleotide
ggauuuugaagagucuugu

SEQ ID NO: 2931076 - RNA, 19 nt, Artificial Sequence
  Description of Artificial Sequence: Synthetic oligonucleotide
ggcuuuaauuuucuuguau

SEQ ID NO: 2931077 - RNA, 19 nt, Artificial Sequence
  Description of Artificial Sequence: Synthetic oligonucleotide
cagcaucagauucugaguu

SEQ ID NO: 2931078 - RNA, 19 nt, Artificial Sequence
  Description of Artificial Sequence: Synthetic oligonucleotide
uuccuuccauuuuguugau

SEQ ID NO: 2931079 - RNA, 19 nt, Artificial Sequence
  Description of Artificial Sequence: Synthetic oligonucleotide
guaacguuuuacguaguuu

SEQ ID NO: 2931080 - RNA, 19 nt, Artificial Sequence
  Description of Artificial Sequence: Synthetic oligonucleotide
cagcuguuuucaagauguc

SEQ ID NO: 2931081 - RNA, 19 nt, Artificial Sequence
  Description of Artificial Sequence: Synthetic oligonucleotide
caaauucccguaacguuuu

SEQ ID NO: 2931082 - RNA, 19 nt, Artificial Sequence
  Description of Artificial Sequence: Synthetic oligonucleotide
cucagaggacagacugaca

SEQ ID NO: 2931083 - RNA, 19 nt, Artificial Sequence
  Description of Artificial Sequence: Synthetic oligonucleotide
cacugggacacgauccucu

SEQ ID NO: 2931084 - RNA, 19 nt, Artificial Sequence
  Description of Artificial Sequence: Synthetic oligonucleotide
agaugucacuuaacucaga

SEQ ID NO: 2931085 - RNA, 19 nt, Artificial Sequence
  Description of Artificial Sequence: Synthetic oligonucleotide
cauauuuuauauggauuuu

SEQ ID NO: 2931086 - RNA, 19 nt, Artificial Sequence
  Description of Artificial Sequence: Synthetic oligonucleotide
gacagacugacaccaucuu

SEQ ID NO: 2931087 - RNA, 19 nt, Artificial Sequence
  Description of Artificial Sequence: Synthetic oligonucleotide
cugacuuuaugaugucaau

SEQ ID NO: 2931088 - RNA, 19 nt, Artificial Sequence
  Description of Artificial Sequence: Synthetic oligonucleotide
agucuaagcuuggcuuuaa

SEQ ID NO: 2931089 - RNA, 19 nt, Artificial Sequence
  Description of Artificial Sequence: Synthetic oligonucleotide
cgaguacuugauaagcgga

SEQ ID NO: 2931090 - RNA, 19 nt, Artificial Sequence
  Description of Artificial Sequence: Synthetic oligonucleotide
guacagcuguuuucaagau

SEQ ID NO: 2931091 - RNA, 19 nt, Artificial Sequence
  Description of Artificial Sequence: Synthetic oligonucleotide
cucaagcacugggacacga

SEQ ID NO: 2931092 - RNA, 19 nt, Artificial Sequence
  Description of Artificial Sequence: Synthetic oligonucleotide
ccuaaugaugauugugugu

SEQ ID NO: 2931093 - RNA, 19 nt, Artificial Sequence
  Description of Artificial Sequence: Synthetic oligonucleotide
gagccaguuucucuugauu

SEQ ID NO: 2931094 - RNA, 19 nt, Artificial Sequence
  Description of Artificial Sequence: Synthetic oligonucleotide
guguguguacagcuguuuu

SEQ ID NO: 2931095 - RNA, 19 nt, Artificial Sequence
  Description of Artificial Sequence: Synthetic oligonucleotide
cugggcauuccuuccauuu

SEQ ID NO: 2931096 - RNA, 19 nt, Artificial Sequence
  Description of Artificial Sequence: Synthetic oligonucleotide
gcuuuccaaagcuguucca

SEQ ID NO: 2931097 - RNA, 19 nt, Artificial Sequence
  Description of Artificial Sequence: Synthetic oligonucleotide
ggacagacugacaccaucu

SEQ ID NO: 2931098 - RNA, 19 nt, Artificial Sequence
  Description of Artificial Sequence: Synthetic oligonucleotide
agaagcugcccgaguacuu

SEQ ID NO: 2931099 - RNA, 19 nt, Artificial Sequence
  Description of Artificial Sequence: Synthetic oligonucleotide
gucaauuuucagggaacau

SEQ ID NO: 2931100 - RNA, 19 nt, Artificial Sequence
  Description of Artificial Sequence: Synthetic oligonucleotide
gcucuggcuuuccaaagcu

SEQ ID NO: 2931101 - RNA, 19 nt, Artificial Sequence
  Description of Artificial Sequence: Synthetic oligonucleotide
caaagcuguuccaguaauu

SEQ ID NO: 2931102 - RNA, 19 nt, Artificial Sequence
  Description of Artificial Sequence: Synthetic oligonucleotide
gucuaagcuuggcuuuaau

SEQ ID NO: 2931103 - RNA, 19 nt, Artificial Sequence
  Description of Artificial Sequence: Synthetic oligonucleotide
cgagagccaguuucucuug

SEQ ID NO: 2931104 - RNA, 19 nt, Artificial Sequence
  Description of Artificial Sequence: Synthetic oligonucleotide
gcaucagauucugaguuuu

SEQ ID NO: 2931105 - RNA, 19 nt, Artificial Sequence
  Description of Artificial Sequence: Synthetic oligonucleotide
agcugcccgaguacuugau

SEQ ID NO: 2931106 - RNA, 19 nt, Artificial Sequence
  Description of Artificial Sequence: Synthetic oligonucleotide
ggcauuccuuccauuuugu

SEQ ID NO: 2931107 - RNA, 19 nt, Artificial Sequence
  Description of Artificial Sequence: Synthetic oligonucleotide
ccaaagcuguuccaguaau

SEQ ID NO: 2931108 - RNA, 19 nt, Artificial Sequence
  Description of Artificial Sequence: Synthetic oligonucleotide
gcugcccgaguacuugaua

SEQ ID NO: 2931109 - RNA, 19 nt, Artificial Sequence
  Description of Artificial Sequence: Synthetic oligonucleotide
gauccucuuucugggcauu

SEQ ID NO: 2931110 - RNA, 19 nt, Artificial Sequence
  Description of Artificial Sequence: Synthetic oligonucleotide
ccucaagcacugggacacg

SEQ ID NO: 2931111 - RNA, 19 nt, Artificial Sequence
  Description of Artificial Sequence: Synthetic oligonucleotide
cguuuuacguaguuucuuu

SEQ ID NO: 2931112 - RNA, 19 nt, Artificial Sequence
  Description of Artificial Sequence: Synthetic oligonucleotide
gggacacgauccucuuucu

SEQ ID NO: 2931113 - RNA, 19 nt, Artificial Sequence
  Description of Artificial Sequence: Synthetic oligonucleotide
gaggacagacugacaccau

SEQ ID NO: 2931114 - RNA, 19 nt, Artificial Sequence
  Description of Artificial Sequence: Synthetic oligonucleotide
ccaguaauucaggcauaga

SEQ ID NO: 2931115 - RNA, 19 nt, Artificial Sequence
  Description of Artificial Sequence: Synthetic oligonucleotide
gcacugggacacgauccuc

SEQ ID NO: 2931116 - RNA, 19 nt, Artificial Sequence
  Description of Artificial Sequence: Synthetic oligonucleotide
gcauuccuuccauuuuguu

SEQ ID NO: 2931117 - RNA, 19 nt, Artificial Sequence
  Description of Artificial Sequence: Synthetic oligonucleotide
ggagaucgagagccaguuu

SEQ ID NO: 2931118 - RNA, 19 nt, Artificial Sequence
  Description of Artificial Sequence: Synthetic oligonucleotide
cugggacacgauccucuuu

SEQ ID NO: 2931119 - RNA, 19 nt, Artificial Sequence
  Description of Artificial Sequence: Synthetic oligonucleotide
ggaacacaacugacuuuau

SEQ ID NO: 2931120 - RNA, 19 nt, Artificial Sequence
  Description of Artificial Sequence: Synthetic oligonucleotide
cguaacguuuuacguaguu

SEQ ID NO: 2931121 - RNA, 19 nt, Artificial Sequence
  Description of Artificial Sequence: Synthetic oligonucleotide
gcggagaucgagagccagu

SEQ ID NO: 2931122 - RNA, 19 nt, Artificial Sequence
  Description of Artificial Sequence: Synthetic oligonucleotide
ccguaacguuuuacguagu

SEQ ID NO: 2931123 - RNA, 19 nt, Artificial Sequence
  Description of Artificial Sequence: Synthetic oligonucleotide
cgauccucuuucugggcau

SEQ ID NO: 2931124 - RNA, 19 nt, Artificial Sequence
  Description of Artificial Sequence: Synthetic oligonucleotide
cggagaucgagagccaguu

SEQ ID NO: 2931125 - RNA, 19 nt, Artificial Sequence
  Description of Artificial Sequence: Synthetic oligonucleotide
uuaaauuuguuuauuaucc

SEQ ID NO: 2931126 - RNA, 19 nt, Artificial Sequence
  Description of Artificial Sequence: Synthetic oligonucleotide
caaauuguggauaagaagg

SEQ ID NO: 2931127 - RNA, 19 nt, Artificial Sequence
  Description of Artificial Sequence: Synthetic oligonucleotide
auugauuucaccgugauuc

SEQ ID NO: 2931128 - RNA, 19 nt, Artificial Sequence
  Description of Artificial Sequence: Synthetic oligonucleotide
augaauggaaucuucaagc

SEQ ID NO: 2931129 - RNA, 19 nt, Artificial Sequence
  Description of Artificial Sequence: Synthetic oligonucleotide
aucaauagaugcuagaagg

SEQ ID NO: 2931130 - RNA, 19 nt, Artificial Sequence
  Description of Artificial Sequence: Synthetic oligonucleotide
uucaggauugauuucaccg

SEQ ID NO: 2931131 - RNA, 19 nt, Artificial Sequence
  Description of Artificial Sequence: Synthetic oligonucleotide
aaaagccaauuauaaagac

SEQ ID NO: 2931132 - RNA, 19 nt, Artificial Sequence
  Description of Artificial Sequence: Synthetic oligonucleotide
ucaguuauagaauucagga

SEQ ID NO: 2931133 - RNA, 19 nt, Artificial Sequence
  Description of Artificial Sequence: Synthetic oligonucleotide
agacuguuuaaccagaagg

SEQ ID NO: 2931134 - RNA, 19 nt, Artificial Sequence
  Description of Artificial Sequence: Synthetic oligonucleotide
aaauuuguuuauuauccag

SEQ ID NO: 2931135 - RNA, 19 nt, Artificial Sequence
  Description of Artificial Sequence: Synthetic oligonucleotide
uguuucuucaguauaagga

SEQ ID NO: 2931136 - RNA, 19 nt, Artificial Sequence
  Description of Artificial Sequence: Synthetic oligonucleotide
aagccaauuauaaagacuc

SEQ ID NO: 2931137 - RNA, 19 nt, Artificial Sequence
  Description of Artificial Sequence: Synthetic oligonucleotide
uugaugacaacaugaaugg

SEQ ID NO: 2931138 - RNA, 19 nt, Artificial Sequence
  Description of Artificial Sequence: Synthetic oligonucleotide
aauagaugcuagaaggugc

SEQ ID NO: 2931139 - RNA, 19 nt, Artificial Sequence
  Description of Artificial Sequence: Synthetic oligonucleotide
gaaucuucaagcauggugg

SEQ ID NO: 2931140 - RNA, 19 nt, Artificial Sequence
  Description of Artificial Sequence: Synthetic oligonucleotide
auuauaaagacucugcuuu

SEQ ID NO: 2931141 - RNA, 19 nt, Artificial Sequence
  Description of Artificial Sequence: Synthetic oligonucleotide
uucaguuauagaauucagg

SEQ ID NO: 2931142 - RNA, 19 nt, Artificial Sequence
  Description of Artificial Sequence: Synthetic oligonucleotide
aaaagugcccauaugauug

SEQ ID NO: 2931143 - RNA, 19 nt, Artificial Sequence
  Description of Artificial Sequence: Synthetic oligonucleotide
uuguuuauuauccagucuc

SEQ ID NO: 2931144 - RNA, 19 nt, Artificial Sequence
  Description of Artificial Sequence: Synthetic oligonucleotide
aacacucuggaaaagugcc

SEQ ID NO: 2931145 - RNA, 19 nt, Artificial Sequence
  Description of Artificial Sequence: Synthetic oligonucleotide
uuauuauccagucucgcug

SEQ ID NO: 2931146 - RNA, 19 nt, Artificial Sequence
  Description of Artificial Sequence: Synthetic oligonucleotide
aaagacucugcuuugcaug

SEQ ID NO: 2931147 - RNA, 19 nt, Artificial Sequence
  Description of Artificial Sequence: Synthetic oligonucleotide
agaaggaagaguucuaaag

SEQ ID NO: 2931148 - RNA, 19 nt, Artificial Sequence
  Description of Artificial Sequence: Synthetic oligonucleotide
auuuguuuauuauccaguc

SEQ ID NO: 2931149 - RNA, 19 nt, Artificial Sequence
  Description of Artificial Sequence: Synthetic oligonucleotide
uuugcaugaucccacauga

SEQ ID NO: 2931150 - RNA, 19 nt, Artificial Sequence
  Description of Artificial Sequence: Synthetic oligonucleotide
guugaugacaacaugaaug

SEQ ID NO: 2931151 - RNA, 19 nt, Artificial Sequence
  Description of Artificial Sequence: Synthetic oligonucleotide
uaguuucauaccaaaagcc

SEQ ID NO: 2931152 - RNA, 19 nt, Artificial Sequence
  Description of Artificial Sequence: Synthetic oligonucleotide
caugagaggagcauggagg

SEQ ID NO: 2931153 - RNA, 19 nt, Artificial Sequence
  Description of Artificial Sequence: Synthetic oligonucleotide
aguuauagaauucaggauu

SEQ ID NO: 2931154 - RNA, 19 nt, Artificial Sequence
  Description of Artificial Sequence: Synthetic oligonucleotide
guauguaguaguuucauac

SEQ ID NO: 2931155 - RNA, 19 nt, Artificial Sequence
  Description of Artificial Sequence: Synthetic oligonucleotide
aauggaaucuucaagcaug

SEQ ID NO: 2931156 - RNA, 19 nt, Artificial Sequence
  Description of Artificial Sequence: Synthetic oligonucleotide
gacaucuucaguuauagaa

SEQ ID NO: 2931157 - RNA, 19 nt, Artificial Sequence
  Description of Artificial Sequence: Synthetic oligonucleotide
agauccagacuguuuaacc

SEQ ID NO: 2931158 - RNA, 19 nt, Artificial Sequence
  Description of Artificial Sequence: Synthetic oligonucleotide
uguuuauuauccagucucg

SEQ ID NO: 2931159 - RNA, 19 nt, Artificial Sequence
  Description of Artificial Sequence: Synthetic oligonucleotide
ugcacguuacacaaagacg

SEQ ID NO: 2931160 - RNA, 19 nt, Artificial Sequence
  Description of Artificial Sequence: Synthetic oligonucleotide
aaucuucaagcaugguggc

SEQ ID NO: 2931161 - RNA, 19 nt, Artificial Sequence
  Description of Artificial Sequence: Synthetic oligonucleotide
uauccagucucgcugaucc

SEQ ID NO: 2931162 - RNA, 19 nt, Artificial Sequence
  Description of Artificial Sequence: Synthetic oligonucleotide
agaagaaucuucuuuaaau

SEQ ID NO: 2931163 - RNA, 19 nt, Artificial Sequence
  Description of Artificial Sequence: Synthetic oligonucleotide
uucuaaagaagaaucuucu

SEQ ID NO: 2931164 - RNA, 19 nt, Artificial Sequence
  Description of Artificial Sequence: Synthetic oligonucleotide
uagaauucaggauugauuu

SEQ ID NO: 2931165 - RNA, 19 nt, Artificial Sequence
  Description of Artificial Sequence: Synthetic oligonucleotide
guaguuucauaccaaaagc

SEQ ID NO: 2931166 - RNA, 19 nt, Artificial Sequence
  Description of Artificial Sequence: Synthetic oligonucleotide
aauuauaaagacucugcuu

SEQ ID NO: 2931167 - RNA, 19 nt, Artificial Sequence
  Description of Artificial Sequence: Synthetic oligonucleotide
acaaagacgacaacugucc

SEQ ID NO: 2931168 - RNA, 19 nt, Artificial Sequence
  Description of Artificial Sequence: Synthetic oligonucleotide
uaaagaagaaucuucuuua

SEQ ID NO: 2931169 - RNA, 19 nt, Artificial Sequence
  Description of Artificial Sequence: Synthetic oligonucleotide
agaguucuaaagaagaauc

SEQ ID NO: 2931170 - RNA, 19 nt, Artificial Sequence
  Description of Artificial Sequence: Synthetic oligonucleotide
gacuguuuaaccagaaggg

SEQ ID NO: 2931171 - RNA, 19 nt, Artificial Sequence
  Description of Artificial Sequence: Synthetic oligonucleotide
uggauaagaaggaagaguu

SEQ ID NO: 2931172 - RNA, 19 nt, Artificial Sequence
  Description of Artificial Sequence: Synthetic oligonucleotide
gauuccaggaaagaagccg

SEQ ID NO: 2931173 - RNA, 19 nt, Artificial Sequence
  Description of Artificial Sequence: Synthetic oligonucleotide
gaucaauagaugcuagaag

SEQ ID NO: 2931174 - RNA, 19 nt, Artificial Sequence
  Description of Artificial Sequence: Synthetic oligonucleotide
uuguggauaagaaggaaga

SEQ ID NO: 2931175 - RNA, 19 nt, Artificial Sequence
  Description of Artificial Sequence: Synthetic oligonucleotide
ccaaaagccaauuauaaag

SEQ ID NO: 2931176 - RNA, 19 nt, Artificial Sequence
  Description of Artificial Sequence: Synthetic oligonucleotide
aagaaucuucuuuaaauuu

SEQ ID NO: 2931177 - RNA, 19 nt, Artificial Sequence
  Description of Artificial Sequence: Synthetic oligonucleotide
ucaguauaaggacuguaug

SEQ ID NO: 2931178 - RNA, 19 nt, Artificial Sequence
  Description of Artificial Sequence: Synthetic oligonucleotide
aaggaagaguucuaaagaa

SEQ ID NO: 2931179 - RNA, 19 nt, Artificial Sequence
  Description of Artificial Sequence: Synthetic oligonucleotide
cuggcuauccaaauugugg

SEQ ID NO: 2931180 - RNA, 19 nt, Artificial Sequence
  Description of Artificial Sequence: Synthetic oligonucleotide
aagcaugguggcucgaaac

SEQ ID NO: 2931181 - RNA, 19 nt, Artificial Sequence
  Description of Artificial Sequence: Synthetic oligonucleotide
uauguaguaguuucauacc

SEQ ID NO: 2931182 - RNA, 19 nt, Artificial Sequence
  Description of Artificial Sequence: Synthetic oligonucleotide
agggaauucucauaggaug

SEQ ID NO: 2931183 - RNA, 19 nt, Artificial Sequence
  Description of Artificial Sequence: Synthetic oligonucleotide
cuguccaaggauuugcugg

SEQ ID NO: 2931184 - RNA, 19 nt, Artificial Sequence
  Description of Artificial Sequence: Synthetic oligonucleotide
uauaaggacuguauguagu

SEQ ID NO: 2931185 - RNA, 19 nt, Artificial Sequence
  Description of Artificial Sequence: Synthetic oligonucleotide
guuucuucaguauaaggac

SEQ ID NO: 2931186 - RNA, 19 nt, Artificial Sequence
  Description of Artificial Sequence: Synthetic oligonucleotide
aauuuguuuauuauccagu

SEQ ID NO: 2931187 - RNA, 19 nt, Artificial Sequence
  Description of Artificial Sequence: Synthetic oligonucleotide
uaugauugaggacaucuuc

SEQ ID NO: 2931188 - RNA, 19 nt, Artificial Sequence
  Description of Artificial Sequence: Synthetic oligonucleotide
aagacgacaacuguccaag

SEQ ID NO: 2931189 - RNA, 19 nt, Artificial Sequence
  Description of Artificial Sequence: Synthetic oligonucleotide
uucuucaguauaaggacug

SEQ ID NO: 2931190 - RNA, 19 nt, Artificial Sequence
  Description of Artificial Sequence: Synthetic oligonucleotide
gaaggaagaguucuaaaga

SEQ ID NO: 2931191 - RNA, 19 nt, Artificial Sequence
  Description of Artificial Sequence: Synthetic oligonucleotide
uuuauuauccagucucgcu

SEQ ID NO: 2931192 - RNA, 19 nt, Artificial Sequence
  Description of Artificial Sequence: Synthetic oligonucleotide
aauucucauaggauguuuc

SEQ ID NO: 2931193 - RNA, 19 nt, Artificial Sequence
  Description of Artificial Sequence: Synthetic oligonucleotide
uaaauuuguuuauuaucca

SEQ ID NO: 2931194 - RNA, 19 nt, Artificial Sequence
  Description of Artificial Sequence: Synthetic oligonucleotide
ugcaugaucccacaugaga

SEQ ID NO: 2931195 - RNA, 19 nt, Artificial Sequence
  Description of Artificial Sequence: Synthetic oligonucleotide
auugaggacaucuucaguu

SEQ ID NO: 2931196 - RNA, 19 nt, Artificial Sequence
  Description of Artificial Sequence: Synthetic oligonucleotide
cagaagggaauucucauag

SEQ ID NO: 2931197 - RNA, 19 nt, Artificial Sequence
  Description of Artificial Sequence: Synthetic oligonucleotide
aaggacuguauguaguagu

SEQ ID NO: 2931198 - RNA, 19 nt, Artificial Sequence
  Description of Artificial Sequence: Synthetic oligonucleotide
uguuuaaccagaagggaau

SEQ ID NO: 2931199 - RNA, 19 nt, Artificial Sequence
  Description of Artificial Sequence: Synthetic oligonucleotide
ucaauagaugcuagaaggu

SEQ ID NO: 2931200 - RNA, 19 nt, Artificial Sequence
  Description of Artificial Sequence: Synthetic oligonucleotide
ugauccagaacacucugga

SEQ ID NO: 2931201 - RNA, 19 nt, Artificial Sequence
  Description of Artificial Sequence: Synthetic oligonucleotide
uaccaaaagccaauuauaa

SEQ ID NO: 2931202 - RNA, 19 nt, Artificial Sequence
  Description of Artificial Sequence: Synthetic oligonucleotide
uuacacaaagacgacaacu

SEQ ID NO: 2931203 - RNA, 19 nt, Artificial Sequence
  Description of Artificial Sequence: Synthetic oligonucleotide
ucuucaguuauagaauuca

SEQ ID NO: 2931204 - RNA, 19 nt, Artificial Sequence
  Description of Artificial Sequence: Synthetic oligonucleotide
gacuguauguaguaguuuc

SEQ ID NO: 2931205 - RNA, 19 nt, Artificial Sequence
  Description of Artificial Sequence: Synthetic oligonucleotide
ugaauggaaucuucaagca

SEQ ID NO: 2931206 - RNA, 19 nt, Artificial Sequence
  Description of Artificial Sequence: Synthetic oligonucleotide
uucaguauaaggacuguau

SEQ ID NO: 2931207 - RNA, 19 nt, Artificial Sequence
  Description of Artificial Sequence: Synthetic oligonucleotide
auguuucuucaguauaagg

SEQ ID NO: 2931208 - RNA, 19 nt, Artificial Sequence
  Description of Artificial Sequence: Synthetic oligonucleotide
uuuguuuauuauccagucu

SEQ ID NO: 2931209 - RNA, 19 nt, Artificial Sequence
  Description of Artificial Sequence: Synthetic oligonucleotide
uuucuucaguauaaggacu

SEQ ID NO: 2931210 - RNA, 19 nt, Artificial Sequence
  Description of Artificial Sequence: Synthetic oligonucleotide
aagcgggagagauccagac

SEQ ID NO: 2931211 - RNA, 19 nt, Artificial Sequence
  Description of Artificial Sequence: Synthetic oligonucleotide
gaagggaauucucauagga

SEQ ID NO: 2931212 - RNA, 19 nt, Artificial Sequence
  Description of Artificial Sequence: Synthetic oligonucleotide
aaagaagaaucuucuuuaa

SEQ ID NO: 2931213 - RNA, 19 nt, Artificial Sequence
  Description of Artificial Sequence: Synthetic oligonucleotide
auucaggauugauuucacc

SEQ ID NO: 2931214 - RNA, 19 nt, Artificial Sequence
  Description of Artificial Sequence: Synthetic oligonucleotide
ucuccucucaacaucuggc

SEQ ID NO: 2931215 - RNA, 19 nt, Artificial Sequence
  Description of Artificial Sequence: Synthetic oligonucleotide
aaagccaauuauaaagacu

SEQ ID NO: 2931216 - RNA, 19 nt, Artificial Sequence
  Description of Artificial Sequence: Synthetic oligonucleotide
ucucauaggauguuucuuc

SEQ ID NO: 2931217 - RNA, 19 nt, Artificial Sequence
  Description of Artificial Sequence: Synthetic oligonucleotide
auguaguaguuucauacca

SEQ ID NO: 2931218 - RNA, 19 nt, Artificial Sequence
  Description of Artificial Sequence: Synthetic oligonucleotide
uuauaaagacucugcuuug

SEQ ID NO: 2931219 - RNA, 19 nt, Artificial Sequence
  Description of Artificial Sequence: Synthetic oligonucleotide
guauaaggacuguauguag

SEQ ID NO: 2931220 - RNA, 19 nt, Artificial Sequence
  Description of Artificial Sequence: Synthetic oligonucleotide
uuaaccagaagggaauucu

SEQ ID NO: 2931221 - RNA, 19 nt, Artificial Sequence
  Description of Artificial Sequence: Synthetic oligonucleotide
aagacucugcuuugcauga

SEQ ID NO: 2931222 - RNA, 19 nt, Artificial Sequence
  Description of Artificial Sequence: Synthetic oligonucleotide
ggaggugaucaauagaugc

SEQ ID NO: 2931223 - RNA, 19 nt, Artificial Sequence
  Description of Artificial Sequence: Synthetic oligonucleotide
uggcuauccaaauugugga

SEQ ID NO: 2931224 - RNA, 19 nt, Artificial Sequence
  Description of Artificial Sequence: Synthetic oligonucleotide
caucuggcuauccaaauug

SEQ ID NO: 2931225 - RNA, 19 nt, Artificial Sequence
  Description of Artificial Sequence: Synthetic oligonucleotide
agaaucuucuuuaaauuug

SEQ ID NO: 2931226 - RNA, 19 nt, Artificial Sequence
  Description of Artificial Sequence: Synthetic oligonucleotide
auuugcuggcuauugucuc

SEQ ID NO: 2931227 - RNA, 19 nt, Artificial Sequence
  Description of Artificial Sequence: Synthetic oligonucleotide
uuucauaccaaaagccaau

SEQ ID NO: 2931228 - RNA, 19 nt, Artificial Sequence
  Description of Artificial Sequence: Synthetic oligonucleotide
gaauucaggauugauuuca

SEQ ID NO: 2931229 - RNA, 19 nt, Artificial Sequence
  Description of Artificial Sequence: Synthetic oligonucleotide
ucaggauugauuucaccgu

SEQ ID NO: 2931230 - RNA, 19 nt, Artificial Sequence
  Description of Artificial Sequence: Synthetic oligonucleotide
agaauucaggauugauuuc

SEQ ID NO: 2931231 - RNA, 19 nt, Artificial Sequence
  Description of Artificial Sequence: Synthetic oligonucleotide
ugaucaauagaugcuagaa

SEQ ID NO: 2931232 - RNA, 19 nt, Artificial Sequence
  Description of Artificial Sequence: Synthetic oligonucleotide
auuguggauaagaaggaag

SEQ ID NO: 2931233 - RNA, 19 nt, Artificial Sequence
  Description of Artificial Sequence: Synthetic oligonucleotide
aagaagaaucuucuuuaaa

SEQ ID NO: 2931234 - RNA, 19 nt, Artificial Sequence
  Description of Artificial Sequence: Synthetic oligonucleotide
aagaguucuaaagaagaau

SEQ ID NO: 2931235 - RNA, 19 nt, Artificial Sequence
  Description of Artificial Sequence: Synthetic oligonucleotide
ucaacaucuggcuauccaa

SEQ ID NO: 2931236 - RNA, 19 nt, Artificial Sequence
  Description of Artificial Sequence: Synthetic oligonucleotide
caaaagccaauuauaaaga

SEQ ID NO: 2931237 - RNA, 19 nt, Artificial Sequence
  Description of Artificial Sequence: Synthetic oligonucleotide
uauuauccagucucgcuga

SEQ ID NO: 2931238 - RNA, 19 nt, Artificial Sequence
  Description of Artificial Sequence: Synthetic oligonucleotide
uguaguaguuucauaccaa

SEQ ID NO: 2931239 - RNA, 19 nt, Artificial Sequence
  Description of Artificial Sequence: Synthetic oligonucleotide
ggaaucuucaagcauggug

SEQ ID NO: 2931240 - RNA, 19 nt, Artificial Sequence
  Description of Artificial Sequence: Synthetic oligonucleotide
aauucaggauugauuucac

SEQ ID NO: 2931241 - RNA, 19 nt, Artificial Sequence
  Description of Artificial Sequence: Synthetic oligonucleotide
auccagaacacucuggaaa

SEQ ID NO: 2931242 - RNA, 19 nt, Artificial Sequence
  Description of Artificial Sequence: Synthetic oligonucleotide
aaauuguggauaagaagga

SEQ ID NO: 2931243 - RNA, 19 nt, Artificial Sequence
  Description of Artificial Sequence: Synthetic oligonucleotide
gauccagacuguuuaacca

SEQ ID NO: 2931244 - RNA, 19 nt, Artificial Sequence
  Description of Artificial Sequence: Synthetic oligonucleotide
caugaucccacaugagagg

SEQ ID NO: 2931245 - RNA, 19 nt, Artificial Sequence
  Description of Artificial Sequence: Synthetic oligonucleotide
aggugcacguuacacaaag

SEQ ID NO: 2931246 - RNA, 19 nt, Artificial Sequence
  Description of Artificial Sequence: Synthetic oligonucleotide
gaugacaacaugaauggaa

SEQ ID NO: 2931247 - RNA, 19 nt, Artificial Sequence
  Description of Artificial Sequence: Synthetic oligonucleotide
aaagacgacaacuguccaa

SEQ ID NO: 2931248 - RNA, 19 nt, Artificial Sequence
  Description of Artificial Sequence: Synthetic oligonucleotide
uauaaagacucugcuuugc

SEQ ID NO: 2931249 - RNA, 19 nt, Artificial Sequence
  Description of Artificial Sequence: Synthetic oligonucleotide
auccagacuguuuaaccag

SEQ ID NO: 2931250 - RNA, 19 nt, Artificial Sequence
  Description of Artificial Sequence: Synthetic oligonucleotide
gauaagaaggaagaguucu

SEQ ID NO: 2931251 - RNA, 19 nt, Artificial Sequence
  Description of Artificial Sequence: Synthetic oligonucleotide
ucuggaaaagugcccauau

SEQ ID NO: 2931252 - RNA, 19 nt, Artificial Sequence
  Description of Artificial Sequence: Synthetic oligonucleotide
ccaauuauaaagacucugc

SEQ ID NO: 2931253 - RNA, 19 nt, Artificial Sequence
  Description of Artificial Sequence: Synthetic oligonucleotide
cuucaguuauagaauucag

SEQ ID NO: 2931254 - RNA, 19 nt, Artificial Sequence
  Description of Artificial Sequence: Synthetic oligonucleotide
uguccaaggauuugcuggc

SEQ ID NO: 2931255 - RNA, 19 nt, Artificial Sequence
  Description of Artificial Sequence: Synthetic oligonucleotide
aacaugaauggaaucuuca

SEQ ID NO: 2931256 - RNA, 19 nt, Artificial Sequence
  Description of Artificial Sequence: Synthetic oligonucleotide
acaugagaggagcauggag

SEQ ID NO: 2931257 - RNA, 19 nt, Artificial Sequence
  Description of Artificial Sequence: Synthetic oligonucleotide
ggaaagaagccguugauga

SEQ ID NO: 2931258 - RNA, 19 nt, Artificial Sequence
  Description of Artificial Sequence: Synthetic oligonucleotide
ucuggcuauccaaauugug

SEQ ID NO: 2931259 - RNA, 19 nt, Artificial Sequence
  Description of Artificial Sequence: Synthetic oligonucleotide
gaaggugcacguuacacaa

SEQ ID NO: 2931260 - RNA, 19 nt, Artificial Sequence
  Description of Artificial Sequence: Synthetic oligonucleotide
gugauuccaggaaagaagc

SEQ ID NO: 2931261 - RNA, 19 nt, Artificial Sequence
  Description of Artificial Sequence: Synthetic oligonucleotide
gauuucaccgugauuccag

SEQ ID NO: 2931262 - RNA, 19 nt, Artificial Sequence
  Description of Artificial Sequence: Synthetic oligonucleotide
uguggauaagaaggaagag

SEQ ID NO: 2931263 - RNA, 19 nt, Artificial Sequence
  Description of Artificial Sequence: Synthetic oligonucleotide
cacaaagacgacaacuguc

SEQ ID NO: 2931264 - RNA, 19 nt, Artificial Sequence
  Description of Artificial Sequence: Synthetic oligonucleotide
ucugcuuugcaugauccca

SEQ ID NO: 2931265 - RNA, 19 nt, Artificial Sequence
  Description of Artificial Sequence: Synthetic oligonucleotide
uuugcuggcuauugucucc

SEQ ID NO: 2931266 - RNA, 19 nt, Artificial Sequence
  Description of Artificial Sequence: Synthetic oligonucleotide
aagaaggaagaguucuaaa

SEQ ID NO: 2931267 - RNA, 19 nt, Artificial Sequence
  Description of Artificial Sequence: Synthetic oligonucleotide
uugucuccucucaacaucu

SEQ ID NO: 2931268 - RNA, 19 nt, Artificial Sequence
  Description of Artificial Sequence: Synthetic oligonucleotide
gauguuucuucaguauaag

SEQ ID NO: 2931269 - RNA, 19 nt, Artificial Sequence
  Description of Artificial Sequence: Synthetic oligonucleotide
agaugcuagaaggugcacg

SEQ ID NO: 2931270 - RNA, 19 nt, Artificial Sequence
  Description of Artificial Sequence: Synthetic oligonucleotide
gugcacguuacacaaagac

SEQ ID NO: 2931271 - RNA, 19 nt, Artificial Sequence
  Description of Artificial Sequence: Synthetic oligonucleotide
cuuugcaugaucccacaug

SEQ ID NO: 2931272 - RNA, 19 nt, Artificial Sequence
  Description of Artificial Sequence: Synthetic oligonucleotide
agaaggugcacguuacaca

SEQ ID NO: 2931273 - RNA, 19 nt, Artificial Sequence
  Description of Artificial Sequence: Synthetic oligonucleotide
aguuucauaccaaaagcca

SEQ ID NO: 2931274 - RNA, 19 nt, Artificial Sequence
  Description of Artificial Sequence: Synthetic oligonucleotide
uucaccgugauuccaggaa

SEQ ID NO: 2931275 - RNA, 19 nt, Artificial Sequence
  Description of Artificial Sequence: Synthetic oligonucleotide
auuucaccgugauuccagg

SEQ ID NO: 2931276 - RNA, 19 nt, Artificial Sequence
  Description of Artificial Sequence: Synthetic oligonucleotide
agaagggaauucucauagg

SEQ ID NO: 2931277 - RNA, 19 nt, Artificial Sequence
  Description of Artificial Sequence: Synthetic oligonucleotide
aaggauuugcuggcuauug

SEQ ID NO: 2931278 - RNA, 19 nt, Artificial Sequence
  Description of Artificial Sequence: Synthetic oligonucleotide
aaagugcccauaugauuga

SEQ ID NO: 2931279 - RNA, 19 nt, Artificial Sequence
  Description of Artificial Sequence: Synthetic oligonucleotide
ucauaggauguuucuucag

SEQ ID NO: 2931280 - RNA, 19 nt, Artificial Sequence
  Description of Artificial Sequence: Synthetic oligonucleotide
gaacacucuggaaaagugc

SEQ ID NO: 2931281 - RNA, 19 nt, Artificial Sequence
  Description of Artificial Sequence: Synthetic oligonucleotide
auucucauaggauguuucu

SEQ ID NO: 2931282 - RNA, 19 nt, Artificial Sequence
  Description of Artificial Sequence: Synthetic oligonucleotide
ucuucaagcaugguggcuc

SEQ ID NO: 2931283 - RNA, 19 nt, Artificial Sequence
  Description of Artificial Sequence: Synthetic oligonucleotide
auaaagacucugcuuugca

SEQ ID NO: 2931284 - RNA, 19 nt, Artificial Sequence
  Description of Artificial Sequence: Synthetic oligonucleotide
uugauuucaccgugauucc

SEQ ID NO: 2931285 - RNA, 19 nt, Artificial Sequence
  Description of Artificial Sequence: Synthetic oligonucleotide
ugauuccaggaaagaagcc

SEQ ID NO: 2931286 - RNA, 19 nt, Artificial Sequence
  Description of Artificial Sequence: Synthetic oligonucleotide
aggacaucuucaguuauag

SEQ ID NO: 2931287 - RNA, 19 nt, Artificial Sequence
  Description of Artificial Sequence: Synthetic oligonucleotide
aacaucuggcuauccaaau

SEQ ID NO: 2931288 - RNA, 19 nt, Artificial Sequence
  Description of Artificial Sequence: Synthetic oligonucleotide
gaagccguugaugacaaca

SEQ ID NO: 2931289 - RNA, 19 nt, Artificial Sequence
  Description of Artificial Sequence: Synthetic oligonucleotide
gucucgcugauccagaaca

SEQ ID NO: 2931290 - RNA, 19 nt, Artificial Sequence
  Description of Artificial Sequence: Synthetic oligonucleotide
gagagauccagacuguuua

SEQ ID NO: 2931291 - RNA, 19 nt, Artificial Sequence
  Description of Artificial Sequence: Synthetic oligonucleotide
aguauaaggacuguaugua

SEQ ID NO: 2931292 - RNA, 19 nt, Artificial Sequence
  Description of Artificial Sequence: Synthetic oligonucleotide
augagaggagcauggaggu

SEQ ID NO: 2931293 - RNA, 19 nt, Artificial Sequence
  Description of Artificial Sequence: Synthetic oligonucleotide
aggagcauggaggugauca

SEQ ID NO: 2931294 - RNA, 19 nt, Artificial Sequence
  Description of Artificial Sequence: Synthetic oligonucleotide
caauagaugcuagaaggug

SEQ ID NO: 2931295 - RNA, 19 nt, Artificial Sequence
  Description of Artificial Sequence: Synthetic oligonucleotide
auggaggugaucaauagau

SEQ ID NO: 2931296 - RNA, 19 nt, Artificial Sequence
  Description of Artificial Sequence: Synthetic oligonucleotide
uaguaguuucauaccaaaa

SEQ ID NO: 2931297 - RNA, 19 nt, Artificial Sequence
  Description of Artificial Sequence: Synthetic oligonucleotide
uaaggacuguauguaguag

SEQ ID NO: 2931298 - RNA, 19 nt, Artificial Sequence
  Description of Artificial Sequence: Synthetic oligonucleotide
gaucccacaugagaggagc

SEQ ID NO: 2931299 - RNA, 19 nt, Artificial Sequence
  Description of Artificial Sequence: Synthetic oligonucleotide
ucuaaagaagaaucuucuu

SEQ ID NO: 2931300 - RNA, 19 nt, Artificial Sequence
  Description of Artificial Sequence: Synthetic oligonucleotide
uggaggugaucaauagaug

SEQ ID NO: 2931301 - RNA, 19 nt, Artificial Sequence
  Description of Artificial Sequence: Synthetic oligonucleotide
uauagaauucaggauugau

SEQ ID NO: 2931302 - RNA, 19 nt, Artificial Sequence
  Description of Artificial Sequence: Synthetic oligonucleotide
acgacaacuguccaaggau

SEQ ID NO: 2931303 - RNA, 19 nt, Artificial Sequence
  Description of Artificial Sequence: Synthetic oligonucleotide
auaaggacuguauguagua

SEQ ID NO: 2931304 - RNA, 19 nt, Artificial Sequence
  Description of Artificial Sequence: Synthetic oligonucleotide
ccaaauuguggauaagaag

SEQ ID NO: 2931305 - RNA, 19 nt, Artificial Sequence
  Description of Artificial Sequence: Synthetic oligonucleotide
uccagacuguuuaaccaga

SEQ ID NO: 2931306 - RNA, 19 nt, Artificial Sequence
  Description of Artificial Sequence: Synthetic oligonucleotide
ugcuagaaggugcacguua

SEQ ID NO: 2931307 - RNA, 19 nt, Artificial Sequence
  Description of Artificial Sequence: Synthetic oligonucleotide
uaaagacucugcuuugcau

SEQ ID NO: 2931308 - RNA, 19 nt, Artificial Sequence
  Description of Artificial Sequence: Synthetic oligonucleotide
auccaaauuguggauaaga

SEQ ID NO: 2931309 - RNA, 19 nt, Artificial Sequence
  Description of Artificial Sequence: Synthetic oligonucleotide
acacaaagacgacaacugu

SEQ ID NO: 2931310 - RNA, 19 nt, Artificial Sequence
  Description of Artificial Sequence: Synthetic oligonucleotide
auaggauguuucuucagua

SEQ ID NO: 2931311 - RNA, 19 nt, Artificial Sequence
  Description of Artificial Sequence: Synthetic oligonucleotide
acaugaauggaaucuucaa

SEQ ID NO: 2931312 - RNA, 19 nt, Artificial Sequence
  Description of Artificial Sequence: Synthetic oligonucleotide
uagaaggugcacguuacac

SEQ ID NO: 2931313 - RNA, 19 nt, Artificial Sequence
  Description of Artificial Sequence: Synthetic oligonucleotide
gugcccauaugauugagga

SEQ ID NO: 2931314 - RNA, 19 nt, Artificial Sequence
  Description of Artificial Sequence: Synthetic oligonucleotide
agcaugguggcucgaaacu

SEQ ID NO: 2931315 - RNA, 19 nt, Artificial Sequence
  Description of Artificial Sequence: Synthetic oligonucleotide
accaaaagccaauuauaaa

SEQ ID NO: 2931316 - RNA, 19 nt, Artificial Sequence
  Description of Artificial Sequence: Synthetic oligonucleotide
gaagaaucuucuuuaaauu

SEQ ID NO: 2931317 - RNA, 19 nt, Artificial Sequence
  Description of Artificial Sequence: Synthetic oligonucleotide
aggaagaguucuaaagaag

SEQ ID NO: 2931318 - RNA, 19 nt, Artificial Sequence
  Description of Artificial Sequence: Synthetic oligonucleotide
cugauccagaacacucugg

SEQ ID NO: 2931319 - RNA, 19 nt, Artificial Sequence
  Description of Artificial Sequence: Synthetic oligonucleotide
acuguuuaaccagaaggga

SEQ ID NO: 2931320 - RNA, 19 nt, Artificial Sequence
  Description of Artificial Sequence: Synthetic oligonucleotide
ucgcugauccagaacacuc

SEQ ID NO: 2931321 - RNA, 19 nt, Artificial Sequence
  Description of Artificial Sequence: Synthetic oligonucleotide
auagaauucaggauugauu

SEQ ID NO: 2931322 - RNA, 19 nt, Artificial Sequence
  Description of Artificial Sequence: Synthetic oligonucleotide
uaaccagaagggaauucuc

SEQ ID NO: 2931323 - RNA, 19 nt, Artificial Sequence
  Description of Artificial Sequence: Synthetic oligonucleotide
agaacacucuggaaaagug

SEQ ID NO: 2931324 - RNA, 19 nt, Artificial Sequence
  Description of Artificial Sequence: Synthetic oligonucleotide
gaugcuagaaggugcacgu

SEQ ID NO: 2931325 - RNA, 19 nt, Artificial Sequence
  Description of Artificial Sequence: Synthetic oligonucleotide
uguauguaguaguuucaua

SEQ ID NO: 2931326 - RNA, 19 nt, Artificial Sequence
  Description of Artificial Sequence: Synthetic oligonucleotide
aaccagaagggaauucuca

SEQ ID NO: 2931327 - RNA, 19 nt, Artificial Sequence
  Description of Artificial Sequence: Synthetic oligonucleotide
auggaaucuucaagcaugg

SEQ ID NO: 2931328 - RNA, 19 nt, Artificial Sequence
  Description of Artificial Sequence: Synthetic oligonucleotide
ucaccgugauuccaggaaa

SEQ ID NO: 2931329 - RNA, 19 nt, Artificial Sequence
  Description of Artificial Sequence: Synthetic oligonucleotide
ucauaccaaaagccaauua

SEQ ID NO: 2931330 - RNA, 19 nt, Artificial Sequence
  Description of Artificial Sequence: Synthetic oligonucleotide
augauugaggacaucuuca

SEQ ID NO: 2931331 - RNA, 19 nt, Artificial Sequence
  Description of Artificial Sequence: Synthetic oligonucleotide
guuuauuauccagucucgc

SEQ ID NO: 2931332 - RNA, 19 nt, Artificial Sequence
  Description of Artificial Sequence: Synthetic oligonucleotide
cuucaagcaugguggcucg

SEQ ID NO: 2931333 - RNA, 19 nt, Artificial Sequence
  Description of Artificial Sequence: Synthetic oligonucleotide
aguucuaaagaagaaucuu

SEQ ID NO: 2931334 - RNA, 19 nt, Artificial Sequence
  Description of Artificial Sequence: Synthetic oligonucleotide
uccagucucgcugauccag

SEQ ID NO: 2931335 - RNA, 19 nt, Artificial Sequence
  Description of Artificial Sequence: Synthetic oligonucleotide
uaggauguuucuucaguau

SEQ ID NO: 2931336 - RNA, 19 nt, Artificial Sequence
  Description of Artificial Sequence: Synthetic oligonucleotide
gacgacaacuguccaagga

SEQ ID NO: 2931337 - RNA, 19 nt, Artificial Sequence
  Description of Artificial Sequence: Synthetic oligonucleotide
aggaaagaagccguugaug

SEQ ID NO: 2931338 - RNA, 19 nt, Artificial Sequence
  Description of Artificial Sequence: Synthetic oligonucleotide
cuguuuaaccagaagggaa

SEQ ID NO: 2931339 - RNA, 19 nt, Artificial Sequence
  Description of Artificial Sequence: Synthetic oligonucleotide
agucucgcugauccagaac

SEQ ID NO: 2931340 - RNA, 19 nt, Artificial Sequence
  Description of Artificial Sequence: Synthetic oligonucleotide
guaguaguuucauaccaaa

SEQ ID NO: 2931341 - RNA, 19 nt, Artificial Sequence
  Description of Artificial Sequence: Synthetic oligonucleotide
ggaagaguucuaaagaaga

SEQ ID NO: 2931342 - RNA, 19 nt, Artificial Sequence
  Description of Artificial Sequence: Synthetic oligonucleotide
caacaugaauggaaucuuc

SEQ ID NO: 2931343 - RNA, 19 nt, Artificial Sequence
  Description of Artificial Sequence: Synthetic oligonucleotide
ugaggacaucuucaguuau

SEQ ID NO: 2931344 - RNA, 19 nt, Artificial Sequence
  Description of Artificial Sequence: Synthetic oligonucleotide
aagggaauucucauaggau

SEQ ID NO: 2931345 - RNA, 19 nt, Artificial Sequence
  Description of Artificial Sequence: Synthetic oligonucleotide
caggauugauuucaccgug

SEQ ID NO: 2931346 - RNA, 19 nt, Artificial Sequence
  Description of Artificial Sequence: Synthetic oligonucleotide
aggauguuucuucaguaua

SEQ ID NO: 2931347 - RNA, 19 nt, Artificial Sequence
  Description of Artificial Sequence: Synthetic oligonucleotide
uugaggacaucuucaguua

SEQ ID NO: 2931348 - RNA, 19 nt, Artificial Sequence
  Description of Artificial Sequence: Synthetic oligonucleotide
ugaucccacaugagaggag

SEQ ID NO: 2931349 - RNA, 19 nt, Artificial Sequence
  Description of Artificial Sequence: Synthetic oligonucleotide
cauaccaaaagccaauuau

SEQ ID NO: 2931350 - RNA, 19 nt, Artificial Sequence
  Description of Artificial Sequence: Synthetic oligonucleotide
uuuaaccagaagggaauuc

SEQ ID NO: 2931351 - RNA, 19 nt, Artificial Sequence
  Description of Artificial Sequence: Synthetic oligonucleotide
uaagcgggagagauccaga

SEQ ID NO: 2931352 - RNA, 19 nt, Artificial Sequence
  Description of Artificial Sequence: Synthetic oligonucleotide
gcacguuacacaaagacga

SEQ ID NO: 2931353 - RNA, 19 nt, Artificial Sequence
  Description of Artificial Sequence: Synthetic oligonucleotide
ugacaacaugaauggaauc

SEQ ID NO: 2931354 - RNA, 19 nt, Artificial Sequence
  Description of Artificial Sequence: Synthetic oligonucleotide
cuauccaaauuguggauaa

SEQ ID NO: 2931355 - RNA, 19 nt, Artificial Sequence
  Description of Artificial Sequence: Synthetic oligonucleotide
aucuucaguuauagaauuc

SEQ ID NO: 2931356 - RNA, 19 nt, Artificial Sequence
  Description of Artificial Sequence: Synthetic oligonucleotide
gcaugaucccacaugagag

SEQ ID NO: 2931357 - RNA, 19 nt, Artificial Sequence
  Description of Artificial Sequence: Synthetic oligonucleotide
uggcuauugucuccucuca

SEQ ID NO: 2931358 - RNA, 19 nt, Artificial Sequence
  Description of Artificial Sequence: Synthetic oligonucleotide
uugcaugaucccacaugag

SEQ ID NO: 2931359 - RNA, 19 nt, Artificial Sequence
  Description of Artificial Sequence: Synthetic oligonucleotide
augacaacaugaauggaau

SEQ ID NO: 2931360 - RNA, 19 nt, Artificial Sequence
  Description of Artificial Sequence: Synthetic oligonucleotide
uuauagaauucaggauuga

SEQ ID NO: 2931361 - RNA, 19 nt, Artificial Sequence
  Description of Artificial Sequence: Synthetic oligonucleotide
acacucuggaaaagugccc

SEQ ID NO: 2931362 - RNA, 19 nt, Artificial Sequence
  Description of Artificial Sequence: Synthetic oligonucleotide
auagaugcuagaaggugca

SEQ ID NO: 2931363 - RNA, 19 nt, Artificial Sequence
  Description of Artificial Sequence: Synthetic oligonucleotide
cauaugauugaggacaucu

SEQ ID NO: 2931364 - RNA, 19 nt, Artificial Sequence
  Description of Artificial Sequence: Synthetic oligonucleotide
cgugauuccaggaaagaag

SEQ ID NO: 2931365 - RNA, 19 nt, Artificial Sequence
  Description of Artificial Sequence: Synthetic oligonucleotide
gaagaguucuaaagaagaa

SEQ ID NO: 2931366 - RNA, 19 nt, Artificial Sequence
  Description of Artificial Sequence: Synthetic oligonucleotide
auuccaggaaagaagccgu

SEQ ID NO: 2931367 - RNA, 19 nt, Artificial Sequence
  Description of Artificial Sequence: Synthetic oligonucleotide
cuggcuauugucuccucuc

SEQ ID NO: 2931368 - RNA, 19 nt, Artificial Sequence
  Description of Artificial Sequence: Synthetic oligonucleotide
guuucauaccaaaagccaa

SEQ ID NO: 2931369 - RNA, 19 nt, Artificial Sequence
  Description of Artificial Sequence: Synthetic oligonucleotide
auaccaaaagccaauuaua

SEQ ID NO: 2931370 - RNA, 19 nt, Artificial Sequence
  Description of Artificial Sequence: Synthetic oligonucleotide
uuucaccgugauuccagga

SEQ ID NO: 2931371 - RNA, 19 nt, Artificial Sequence
  Description of Artificial Sequence: Synthetic oligonucleotide
cagacuguuuaaccagaag

SEQ ID NO: 2931372 - RNA, 19 nt, Artificial Sequence
  Description of Artificial Sequence: Synthetic oligonucleotide
aggauuugcuggcuauugu

SEQ ID NO: 2931373 - RNA, 19 nt, Artificial Sequence
  Description of Artificial Sequence: Synthetic oligonucleotide
cucauaggauguuucuuca

SEQ ID NO: 2931374 - RNA, 19 nt, Artificial Sequence
  Description of Artificial Sequence: Synthetic oligonucleotide
cugcuuugcaugaucccac

SEQ ID NO: 2931375 - RNA, 19 nt, Artificial Sequence
  Description of Artificial Sequence: Synthetic oligonucleotide
caauuauaaagacucugcu

SEQ ID NO: 2931376 - RNA, 19 nt, Artificial Sequence
  Description of Artificial Sequence: Synthetic oligonucleotide
uccaggaaagaagccguug

SEQ ID NO: 2931377 - RNA, 19 nt, Artificial Sequence
  Description of Artificial Sequence: Synthetic oligonucleotide
gaaaagugcccauaugauu

SEQ ID NO: 2931378 - RNA, 19 nt, Artificial Sequence
  Description of Artificial Sequence: Synthetic oligonucleotide
ugauuucaccgugauucca

SEQ ID NO: 2931379 - RNA, 19 nt, Artificial Sequence
  Description of Artificial Sequence: Synthetic oligonucleotide
caguauaaggacuguaugu

SEQ ID NO: 2931380 - RNA, 19 nt, Artificial Sequence
  Description of Artificial Sequence: Synthetic oligonucleotide
cucugcuuugcaugauccc

SEQ ID NO: 2931381 - RNA, 19 nt, Artificial Sequence
  Description of Artificial Sequence: Synthetic oligonucleotide
uauccaaauuguggauaag

SEQ ID NO: 2931382 - RNA, 19 nt, Artificial Sequence
  Description of Artificial Sequence: Synthetic oligonucleotide
agugcccauaugauugagg

SEQ ID NO: 2931383 - RNA, 19 nt, Artificial Sequence
  Description of Artificial Sequence: Synthetic oligonucleotide
agacgacaacuguccaagg

SEQ ID NO: 2931384 - RNA, 19 nt, Artificial Sequence
  Description of Artificial Sequence: Synthetic oligonucleotide
gcccauaugauugaggaca

SEQ ID NO: 2931385 - RNA, 19 nt, Artificial Sequence
  Description of Artificial Sequence: Synthetic oligonucleotide
gugaucaauagaugcuaga

SEQ ID NO: 2931386 - RNA, 19 nt, Artificial Sequence
  Description of Artificial Sequence: Synthetic oligonucleotide
caccgugauuccaggaaag

SEQ ID NO: 2931387 - RNA, 19 nt, Artificial Sequence
  Description of Artificial Sequence: Synthetic oligonucleotide
ucucgcugauccagaacac

SEQ ID NO: 2931388 - RNA, 19 nt, Artificial Sequence
  Description of Artificial Sequence: Synthetic oligonucleotide
gagauccagacuguuuaac

SEQ ID NO: 2931389 - RNA, 19 nt, Artificial Sequence
  Description of Artificial Sequence: Synthetic oligonucleotide
cacguuacacaaagacgac

SEQ ID NO: 2931390 - RNA, 19 nt, Artificial Sequence
  Description of Artificial Sequence: Synthetic oligonucleotide
gccaauuauaaagacucug

SEQ ID NO: 2931391 - RNA, 19 nt, Artificial Sequence
  Description of Artificial Sequence: Synthetic oligonucleotide
ggauuugcuggcuauuguc

SEQ ID NO: 2931392 - RNA, 19 nt, Artificial Sequence
  Description of Artificial Sequence: Synthetic oligonucleotide
aacuguccaaggauuugcu

SEQ ID NO: 2931393 - RNA, 19 nt, Artificial Sequence
  Description of Artificial Sequence: Synthetic oligonucleotide
ccacaugagaggagcaugg

SEQ ID NO: 2931394 - RNA, 19 nt, Artificial Sequence
  Description of Artificial Sequence: Synthetic oligonucleotide
gacucugcuuugcaugauc

SEQ ID NO: 2931395 - RNA, 19 nt, Artificial Sequence
  Description of Artificial Sequence: Synthetic oligonucleotide
acaacaugaauggaaucuu

SEQ ID NO: 2931396 - RNA, 19 nt, Artificial Sequence
  Description of Artificial Sequence: Synthetic oligonucleotide
ugaugacaacaugaaugga

SEQ ID NO: 2931397 - RNA, 19 nt, Artificial Sequence
  Description of Artificial Sequence: Synthetic oligonucleotide
ugcuuugcaugaucccaca

SEQ ID NO: 2931398 - RNA, 19 nt, Artificial Sequence
  Description of Artificial Sequence: Synthetic oligonucleotide
acaucuggcuauccaaauu

SEQ ID NO: 2931399 - RNA, 19 nt, Artificial Sequence
  Description of Artificial Sequence: Synthetic oligonucleotide
uccucucaacaucuggcua

SEQ ID NO: 2931400 - RNA, 19 nt, Artificial Sequence
  Description of Artificial Sequence: Synthetic oligonucleotide
acaacuguccaaggauuug

SEQ ID NO: 2931401 - RNA, 19 nt, Artificial Sequence
  Description of Artificial Sequence: Synthetic oligonucleotide
aagugcccauaugauugag

SEQ ID NO: 2931402 - RNA, 19 nt, Artificial Sequence
  Description of Artificial Sequence: Synthetic oligonucleotide
aagaagccguugaugacaa

SEQ ID NO: 2931403 - RNA, 19 nt, Artificial Sequence
  Description of Artificial Sequence: Synthetic oligonucleotide
uccaaggauuugcuggcua

SEQ ID NO: 2931404 - RNA, 19 nt, Artificial Sequence
  Description of Artificial Sequence: Synthetic oligonucleotide
gcuauugucuccucucaac

SEQ ID NO: 2931405 - RNA, 19 nt, Artificial Sequence
  Description of Artificial Sequence: Synthetic oligonucleotide
acuguauguaguaguuuca

SEQ ID NO: 2931406 - RNA, 19 nt, Artificial Sequence
  Description of Artificial Sequence: Synthetic oligonucleotide
cuggaaaagugcccauaug

SEQ ID NO: 2931407 - RNA, 19 nt, Artificial Sequence
  Description of Artificial Sequence: Synthetic oligonucleotide
ucuucaguauaaggacugu

SEQ ID NO: 2931408 - RNA, 19 nt, Artificial Sequence
  Description of Artificial Sequence: Synthetic oligonucleotide
aagccguugaugacaacau

SEQ ID NO: 2931409 - RNA, 19 nt, Artificial Sequence
  Description of Artificial Sequence: Synthetic oligonucleotide
cucaacaucuggcuaucca

SEQ ID NO: 2931410 - RNA, 19 nt, Artificial Sequence
  Description of Artificial Sequence: Synthetic oligonucleotide
ugcccauaugauugaggac

SEQ ID NO: 2931411 - RNA, 19 nt, Artificial Sequence
  Description of Artificial Sequence: Synthetic oligonucleotide
agagauccagacuguuuaa

SEQ ID NO: 2931412 - RNA, 19 nt, Artificial Sequence
  Description of Artificial Sequence: Synthetic oligonucleotide
gaauggaaucuucaagcau

SEQ ID NO: 2931413 - RNA, 19 nt, Artificial Sequence
  Description of Artificial Sequence: Synthetic oligonucleotide
gauuugcuggcuauugucu

SEQ ID NO: 2931414 - RNA, 19 nt, Artificial Sequence
  Description of Artificial Sequence: Synthetic oligonucleotide
gcauggaggugaucaauag

SEQ ID NO: 2931415 - RNA, 19 nt, Artificial Sequence
  Description of Artificial Sequence: Synthetic oligonucleotide
uucauaccaaaagccaauu

SEQ ID NO: 2931416 - RNA, 19 nt, Artificial Sequence
  Description of Artificial Sequence: Synthetic oligonucleotide
gaguucuaaagaagaaucu

SEQ ID NO: 2931417 - RNA, 19 nt, Artificial Sequence
  Description of Artificial Sequence: Synthetic oligonucleotide
uucucauaggauguuucuu

SEQ ID NO: 2931418 - RNA, 19 nt, Artificial Sequence
  Description of Artificial Sequence: Synthetic oligonucleotide
agccguugaugacaacaug

SEQ ID NO: 2931419 - RNA, 19 nt, Artificial Sequence
  Description of Artificial Sequence: Synthetic oligonucleotide
acguuacacaaagacgaca

SEQ ID NO: 2931420 - RNA, 19 nt, Artificial Sequence
  Description of Artificial Sequence: Synthetic oligonucleotide
cauggaggugaucaauaga

SEQ ID NO: 2931421 - RNA, 19 nt, Artificial Sequence
  Description of Artificial Sequence: Synthetic oligonucleotide
ggugaucaauagaugcuag

SEQ ID NO: 2931422 - RNA, 19 nt, Artificial Sequence
  Description of Artificial Sequence: Synthetic oligonucleotide
cauaggauguuucuucagu

SEQ ID NO: 2931423 - RNA, 19 nt, Artificial Sequence
  Description of Artificial Sequence: Synthetic oligonucleotide
ugucuccucucaacaucug

SEQ ID NO: 2931424 - RNA, 19 nt, Artificial Sequence
  Description of Artificial Sequence: Synthetic oligonucleotide
guggauaagaaggaagagu

SEQ ID NO: 2931425 - RNA, 19 nt, Artificial Sequence
  Description of Artificial Sequence: Synthetic oligonucleotide
aggugaucaauagaugcua

SEQ ID NO: 2931426 - RNA, 19 nt, Artificial Sequence
  Description of Artificial Sequence: Synthetic oligonucleotide
agcgggagagauccagacu

SEQ ID NO: 2931427 - RNA, 19 nt, Artificial Sequence
  Description of Artificial Sequence: Synthetic oligonucleotide
gauugaggacaucuucagu

SEQ ID NO: 2931428 - RNA, 19 nt, Artificial Sequence
  Description of Artificial Sequence: Synthetic oligonucleotide
caacaucuggcuauccaaa

SEQ ID NO: 2931429 - RNA, 19 nt, Artificial Sequence
  Description of Artificial Sequence: Synthetic oligonucleotide
ucaagcaugguggcucgaa

SEQ ID NO: 2931430 - RNA, 19 nt, Artificial Sequence
  Description of Artificial Sequence: Synthetic oligonucleotide
gaggugaucaauagaugcu

SEQ ID NO: 2931431 - RNA, 19 nt, Artificial Sequence
  Description of Artificial Sequence: Synthetic oligonucleotide
agaagccguugaugacaac

SEQ ID NO: 2931432 - RNA, 19 nt, Artificial Sequence
  Description of Artificial Sequence: Synthetic oligonucleotide
auaagaaggaagaguucua

SEQ ID NO: 2931433 - RNA, 19 nt, Artificial Sequence
  Description of Artificial Sequence: Synthetic oligonucleotide
cacucuggaaaagugccca

SEQ ID NO: 2931434 - RNA, 19 nt, Artificial Sequence
  Description of Artificial Sequence: Synthetic oligonucleotide
uugcuggcuauugucuccu

SEQ ID NO: 2931435 - RNA, 19 nt, Artificial Sequence
  Description of Artificial Sequence: Synthetic oligonucleotide
ucucaacaucuggcuaucc

SEQ ID NO: 2931436 - RNA, 19 nt, Artificial Sequence
  Description of Artificial Sequence: Synthetic oligonucleotide
auaugauugaggacaucuu

SEQ ID NO: 2931437 - RNA, 19 nt, Artificial Sequence
  Description of Artificial Sequence: Synthetic oligonucleotide
gccguugaugacaacauga

SEQ ID NO: 2931438 - RNA, 19 nt, Artificial Sequence
  Description of Artificial Sequence: Synthetic oligonucleotide
caaagacgacaacugucca

SEQ ID NO: 2931439 - RNA, 19 nt, Artificial Sequence
  Description of Artificial Sequence: Synthetic oligonucleotide
auuauccagucucgcugau

SEQ ID NO: 2931440 - RNA, 19 nt, Artificial Sequence
  Description of Artificial Sequence: Synthetic oligonucleotide
aggauugauuucaccguga

SEQ ID NO: 2931441 - RNA, 19 nt, Artificial Sequence
  Description of Artificial Sequence: Synthetic oligonucleotide
ggauguuucuucaguauaa

SEQ ID NO: 2931442 - RNA, 19 nt, Artificial Sequence
  Description of Artificial Sequence: Synthetic oligonucleotide
caucuucaguuauagaauu

SEQ ID NO: 2931443 - RNA, 19 nt, Artificial Sequence
  Description of Artificial Sequence: Synthetic oligonucleotide
aggacuguauguaguaguu

SEQ ID NO: 2931444 - RNA, 19 nt, Artificial Sequence
  Description of Artificial Sequence: Synthetic oligonucleotide
caguuauagaauucaggau

SEQ ID NO: 2931445 - RNA, 19 nt, Artificial Sequence
  Description of Artificial Sequence: Synthetic oligonucleotide
uuauccagucucgcugauc

SEQ ID NO: 2931446 - RNA, 19 nt, Artificial Sequence
  Description of Artificial Sequence: Synthetic oligonucleotide
aucuggcuauccaaauugu

SEQ ID NO: 2931447 - RNA, 19 nt, Artificial Sequence
  Description of Artificial Sequence: Synthetic oligonucleotide
agcauggaggugaucaaua

SEQ ID NO: 2931448 - RNA, 19 nt, Artificial Sequence
  Description of Artificial Sequence: Synthetic oligonucleotide
ugguggcucgaaacuuuuc

SEQ ID NO: 2931449 - RNA, 19 nt, Artificial Sequence
  Description of Artificial Sequence: Synthetic oligonucleotide
aucuucaagcaugguggcu

SEQ ID NO: 2931450 - RNA, 19 nt, Artificial Sequence
  Description of Artificial Sequence: Synthetic oligonucleotide
acucuggaaaagugcccau

SEQ ID NO: 2931451 - RNA, 19 nt, Artificial Sequence
  Description of Artificial Sequence: Synthetic oligonucleotide
accgugauuccaggaaaga

SEQ ID NO: 2931452 - RNA, 19 nt, Artificial Sequence
  Description of Artificial Sequence: Synthetic oligonucleotide
gguggcucgaaacuuuucu

SEQ ID NO: 2931453 - RNA, 19 nt, Artificial Sequence
  Description of Artificial Sequence: Synthetic oligonucleotide
agccaauuauaaagacucu

SEQ ID NO: 2931454 - RNA, 19 nt, Artificial Sequence
  Description of Artificial Sequence: Synthetic oligonucleotide
ucccacaugagaggagcau

SEQ ID NO: 2931455 - RNA, 19 nt, Artificial Sequence
  Description of Artificial Sequence: Synthetic oligonucleotide
cuagaaggugcacguuaca

SEQ ID NO: 2931456 - RNA, 19 nt, Artificial Sequence
  Description of Artificial Sequence: Synthetic oligonucleotide
gcuagaaggugcacguuac

SEQ ID NO: 2931457 - RNA, 19 nt, Artificial Sequence
  Description of Artificial Sequence: Synthetic oligonucleotide
uagaugcuagaaggugcac

SEQ ID NO: 2931458 - RNA, 19 nt, Artificial Sequence
  Description of Artificial Sequence: Synthetic oligonucleotide
cguuacacaaagacgacaa

SEQ ID NO: 2931459 - RNA, 19 nt, Artificial Sequence
  Description of Artificial Sequence: Synthetic oligonucleotide
ggauaagaaggaagaguuc

SEQ ID NO: 2931460 - RNA, 19 nt, Artificial Sequence
  Description of Artificial Sequence: Synthetic oligonucleotide
uggaaucuucaagcauggu

SEQ ID NO: 2931461 - RNA, 19 nt, Artificial Sequence
  Description of Artificial Sequence: Synthetic oligonucleotide
cucucaacaucuggcuauc

SEQ ID NO: 2931462 - RNA, 19 nt, Artificial Sequence
  Description of Artificial Sequence: Synthetic oligonucleotide
gauugauuucaccgugauu

SEQ ID NO: 2931463 - RNA, 19 nt, Artificial Sequence
  Description of Artificial Sequence: Synthetic oligonucleotide
gaggacaucuucaguuaua

SEQ ID NO: 2931464 - RNA, 19 nt, Artificial Sequence
  Description of Artificial Sequence: Synthetic oligonucleotide
cuucaguauaaggacugua

SEQ ID NO: 2931465 - RNA, 19 nt, Artificial Sequence
  Description of Artificial Sequence: Synthetic oligonucleotide
gaauucucauaggauguuu

SEQ ID NO: 2931466 - RNA, 19 nt, Artificial Sequence
  Description of Artificial Sequence: Synthetic oligonucleotide
auccagucucgcugaucca

SEQ ID NO: 2931467 - RNA, 19 nt, Artificial Sequence
  Description of Artificial Sequence: Synthetic oligonucleotide
cuccucucaacaucuggcu

SEQ ID NO: 2931468 - RNA, 19 nt, Artificial Sequence
  Description of Artificial Sequence: Synthetic oligonucleotide
caagcaugguggcucgaaa

SEQ ID NO: 2931469 - RNA, 19 nt, Artificial Sequence
  Description of Artificial Sequence: Synthetic oligonucleotide
gcuauccaaauuguggaua

SEQ ID NO: 2931470 - RNA, 19 nt, Artificial Sequence
  Description of Artificial Sequence: Synthetic oligonucleotide
aaggugcacguuacacaaa

SEQ ID NO: 2931471 - RNA, 19 nt, Artificial Sequence
  Description of Artificial Sequence: Synthetic oligonucleotide
gacaacuguccaaggauuu

SEQ ID NO: 2931472 - RNA, 19 nt, Artificial Sequence
  Description of Artificial Sequence: Synthetic oligonucleotide
cagaacacucuggaaaagu

SEQ ID NO: 2931473 - RNA, 19 nt, Artificial Sequence
  Description of Artificial Sequence: Synthetic oligonucleotide
uucaagcaugguggcucga

SEQ ID NO: 2931474 - RNA, 19 nt, Artificial Sequence
  Description of Artificial Sequence: Synthetic oligonucleotide
ggaaaagugcccauaugau

SEQ ID NO: 2931475 - RNA, 19 nt, Artificial Sequence
  Description of Artificial Sequence: Synthetic oligonucleotide
ggacaucuucaguuauaga

SEQ ID NO: 2931476 - RNA, 19 nt, Artificial Sequence
  Description of Artificial Sequence: Synthetic oligonucleotide
cccacaugagaggagcaug

SEQ ID NO: 2931477 - RNA, 19 nt, Artificial Sequence
  Description of Artificial Sequence: Synthetic oligonucleotide
cuguauguaguaguuucau

SEQ ID NO: 2931478 - RNA, 19 nt, Artificial Sequence
  Description of Artificial Sequence: Synthetic oligonucleotide
aucccacaugagaggagca

SEQ ID NO: 2931479 - RNA, 19 nt, Artificial Sequence
  Description of Artificial Sequence: Synthetic oligonucleotide
ggauugauuucaccgugau

SEQ ID NO: 2931480 - RNA, 19 nt, Artificial Sequence
  Description of Artificial Sequence: Synthetic oligonucleotide
cacaugagaggagcaugga

SEQ ID NO: 2931481 - RNA, 19 nt, Artificial Sequence
  Description of Artificial Sequence: Synthetic oligonucleotide
ccguugaugacaacaugaa

SEQ ID NO: 2931482 - RNA, 19 nt, Artificial Sequence
  Description of Artificial Sequence: Synthetic oligonucleotide
ggagcauggaggugaucaa

SEQ ID NO: 2931483 - RNA, 19 nt, Artificial Sequence
  Description of Artificial Sequence: Synthetic oligonucleotide
caugguggcucgaaacuuu

SEQ ID NO: 2931484 - RNA, 19 nt, Artificial Sequence
  Description of Artificial Sequence: Synthetic oligonucleotide
ggcuauugucuccucucaa

SEQ ID NO: 2931485 - RNA, 19 nt, Artificial Sequence
  Description of Artificial Sequence: Synthetic oligonucleotide
guuuaaccagaagggaauu

SEQ ID NO: 2931486 - RNA, 19 nt, Artificial Sequence
  Description of Artificial Sequence: Synthetic oligonucleotide
ccagaacacucuggaaaag

SEQ ID NO: 2931487 - RNA, 19 nt, Artificial Sequence
  Description of Artificial Sequence: Synthetic oligonucleotide
augguggcucgaaacuuuu

SEQ ID NO: 2931488 - RNA, 19 nt, Artificial Sequence
  Description of Artificial Sequence: Synthetic oligonucleotide
ugcuggcuauugucuccuc

SEQ ID NO: 2931489 - RNA, 19 nt, Artificial Sequence
  Description of Artificial Sequence: Synthetic oligonucleotide
caggaaagaagccguugau

SEQ ID NO: 2931490 - RNA, 19 nt, Artificial Sequence
  Description of Artificial Sequence: Synthetic oligonucleotide
cagucucgcugauccagaa

SEQ ID NO: 2931491 - RNA, 19 nt, Artificial Sequence
  Description of Artificial Sequence: Synthetic oligonucleotide
gagcauggaggugaucaau

SEQ ID NO: 2931492 - RNA, 19 nt, Artificial Sequence
  Description of Artificial Sequence: Synthetic oligonucleotide
cucuggaaaagugcccaua

SEQ ID NO: 2931493 - RNA, 19 nt, Artificial Sequence
  Description of Artificial Sequence: Synthetic oligonucleotide
agaggagcauggaggugau

SEQ ID NO: 2931494 - RNA, 19 nt, Artificial Sequence
  Description of Artificial Sequence: Synthetic oligonucleotide
agacucugcuuugcaugau

SEQ ID NO: 2931495 - RNA, 19 nt, Artificial Sequence
  Description of Artificial Sequence: Synthetic oligonucleotide
ccagaagggaauucucaua

SEQ ID NO: 2931496 - RNA, 19 nt, Artificial Sequence
  Description of Artificial Sequence: Synthetic oligonucleotide
ggcuauccaaauuguggau

SEQ ID NO: 2931497 - RNA, 19 nt, Artificial Sequence
  Description of Artificial Sequence: Synthetic oligonucleotide
augcuagaaggugcacguu

SEQ ID NO: 2931498 - RNA, 19 nt, Artificial Sequence
  Description of Artificial Sequence: Synthetic oligonucleotide
ggugcacguuacacaaaga

SEQ ID NO: 2931499 - RNA, 19 nt, Artificial Sequence
  Description of Artificial Sequence: Synthetic oligonucleotide
cucgcugauccagaacacu

SEQ ID NO: 2931500 - RNA, 19 nt, Artificial Sequence
  Description of Artificial Sequence: Synthetic oligonucleotide
ccagacuguuuaaccagaa

SEQ ID NO: 2931501 - RNA, 19 nt, Artificial Sequence
  Description of Artificial Sequence: Synthetic oligonucleotide
gcuggcuauugucuccucu

SEQ ID NO: 2931502 - RNA, 19 nt, Artificial Sequence
  Description of Artificial Sequence: Synthetic oligonucleotide
ccucucaacaucuggcuau

SEQ ID NO: 2931503 - RNA, 19 nt, Artificial Sequence
  Description of Artificial Sequence: Synthetic oligonucleotide
gaggagcauggaggugauc

SEQ ID NO: 2931504 - RNA, 19 nt, Artificial Sequence
  Description of Artificial Sequence: Synthetic oligonucleotide
ccagucucgcugauccaga

SEQ ID NO: 2931505 - RNA, 19 nt, Artificial Sequence
  Description of Artificial Sequence: Synthetic oligonucleotide
ccgugauuccaggaaagaa

SEQ ID NO: 2931506 - RNA, 19 nt, Artificial Sequence
  Description of Artificial Sequence: Synthetic oligonucleotide
ggaauucucauaggauguu

SEQ ID NO: 2931507 - RNA, 19 nt, Artificial Sequence
  Description of Artificial Sequence: Synthetic oligonucleotide
ccaaggauuugcuggcuau

SEQ ID NO: 2931508 - RNA, 19 nt, Artificial Sequence
  Description of Artificial Sequence: Synthetic oligonucleotide
ggagagauccagacuguuu

SEQ ID NO: 2931509 - RNA, 19 nt, Artificial Sequence
  Description of Artificial Sequence: Synthetic oligonucleotide
caaggauuugcuggcuauu

SEQ ID NO: 2931510 - RNA, 19 nt, Artificial Sequence
  Description of Artificial Sequence: Synthetic oligonucleotide
ccauaugauugaggacauc

SEQ ID NO: 2931511 - RNA, 19 nt, Artificial Sequence
  Description of Artificial Sequence: Synthetic oligonucleotide
guccaaggauuugcuggcu

SEQ ID NO: 2931512 - RNA, 19 nt, Artificial Sequence
  Description of Artificial Sequence: Synthetic oligonucleotide
gcuuugcaugaucccacau

SEQ ID NO: 2931513 - RNA, 19 nt, Artificial Sequence
  Description of Artificial Sequence: Synthetic oligonucleotide
ggacuguauguaguaguuu

SEQ ID NO: 2931514 - RNA, 19 nt, Artificial Sequence
  Description of Artificial Sequence: Synthetic oligonucleotide
cccauaugauugaggacau

SEQ ID NO: 2931515 - RNA, 19 nt, Artificial Sequence
  Description of Artificial Sequence: Synthetic oligonucleotide
gcaugguggcucgaaacuu

SEQ ID NO: 2931516 - RNA, 19 nt, Artificial Sequence
  Description of Artificial Sequence: Synthetic oligonucleotide
cguugaugacaacaugaau

SEQ ID NO: 2931517 - RNA, 19 nt, Artificial Sequence
  Description of Artificial Sequence: Synthetic oligonucleotide
cgcugauccagaacacucu

SEQ ID NO: 2931518 - RNA, 19 nt, Artificial Sequence
  Description of Artificial Sequence: Synthetic oligonucleotide
cgacaacuguccaaggauu

SEQ ID NO: 2931519 - RNA, 19 nt, Artificial Sequence
  Description of Artificial Sequence: Synthetic oligonucleotide
gggagagauccagacuguu

SEQ ID NO: 2931520 - RNA, 19 nt, Artificial Sequence
  Description of Artificial Sequence: Synthetic oligonucleotide
cgggagagauccagacugu

SEQ ID NO: 2931521 - RNA, 19 nt, Artificial Sequence
  Description of Artificial Sequence: Synthetic oligonucleotide
aaauccuccauuuuggggc

SEQ ID NO: 2931522 - RNA, 19 nt, Artificial Sequence
  Description of Artificial Sequence: Synthetic oligonucleotide
aguaauacuacucaaagag

SEQ ID NO: 2931523 - RNA, 19 nt, Artificial Sequence
  Description of Artificial Sequence: Synthetic oligonucleotide
aguucauucacacagauag

SEQ ID NO: 2931524 - RNA, 19 nt, Artificial Sequence
  Description of Artificial Sequence: Synthetic oligonucleotide
uaagauauaguaaauuagg

SEQ ID NO: 2931525 - RNA, 19 nt, Artificial Sequence
  Description of Artificial Sequence: Synthetic oligonucleotide
uauaaguucgcacauauac

SEQ ID NO: 2931526 - RNA, 19 nt, Artificial Sequence
  Description of Artificial Sequence: Synthetic oligonucleotide
aauaagauauaguaaauua

SEQ ID NO: 2931527 - RNA, 19 nt, Artificial Sequence
  Description of Artificial Sequence: Synthetic oligonucleotide
aaaaucauguaccagacuu

SEQ ID NO: 2931528 - RNA, 19 nt, Artificial Sequence
  Description of Artificial Sequence: Synthetic oligonucleotide
ucauggaaguauaaguucg

SEQ ID NO: 2931529 - RNA, 19 nt, Artificial Sequence
  Description of Artificial Sequence: Synthetic oligonucleotide
gauagaaaauaagauauag

SEQ ID NO: 2931530 - RNA, 19 nt, Artificial Sequence
  Description of Artificial Sequence: Synthetic oligonucleotide
aguagauaaguaugcaggc

SEQ ID NO: 2931531 - RNA, 19 nt, Artificial Sequence
  Description of Artificial Sequence: Synthetic oligonucleotide
auacuacucaaagagaugc

SEQ ID NO: 2931532 - RNA, 19 nt, Artificial Sequence
  Description of Artificial Sequence: Synthetic oligonucleotide
uaaauuucgguucuaaguc

SEQ ID NO: 2931533 - RNA, 19 nt, Artificial Sequence
  Description of Artificial Sequence: Synthetic oligonucleotide
aguaaaauccuccauuuug

SEQ ID NO: 2931534 - RNA, 19 nt, Artificial Sequence
  Description of Artificial Sequence: Synthetic oligonucleotide
auacauaacaugaugauag

SEQ ID NO: 2931535 - RNA, 19 nt, Artificial Sequence
  Description of Artificial Sequence: Synthetic oligonucleotide
aaaauccuccauuuugggg

SEQ ID NO: 2931536 - RNA, 19 nt, Artificial Sequence
  Description of Artificial Sequence: Synthetic oligonucleotide
uuagguuucuaaauuucgg

SEQ ID NO: 2931537 - RNA, 19 nt, Artificial Sequence
  Description of Artificial Sequence: Synthetic oligonucleotide
uagauaaguaugcaggcag

SEQ ID NO: 2931538 - RNA, 19 nt, Artificial Sequence
  Description of Artificial Sequence: Synthetic oligonucleotide
caguagauaaguaugcagg

SEQ ID NO: 2931539 - RNA, 19 nt, Artificial Sequence
  Description of Artificial Sequence: Synthetic oligonucleotide
uaauacuacucaaagagau

SEQ ID NO: 2931540 - RNA, 19 nt, Artificial Sequence
  Description of Artificial Sequence: Synthetic oligonucleotide
ucauguaccagacuucugc

SEQ ID NO: 2931541 - RNA, 19 nt, Artificial Sequence
  Description of Artificial Sequence: Synthetic oligonucleotide
ucaccuucccacaucaugg

SEQ ID NO: 2931542 - RNA, 19 nt, Artificial Sequence
  Description of Artificial Sequence: Synthetic oligonucleotide
ucaaagagaugccuggucc

SEQ ID NO: 2931543 - RNA, 19 nt, Artificial Sequence
  Description of Artificial Sequence: Synthetic oligonucleotide
ugaugauagaaaauaagau

SEQ ID NO: 2931544 - RNA, 19 nt, Artificial Sequence
  Description of Artificial Sequence: Synthetic oligonucleotide
gauauaguaaauuagguuu

SEQ ID NO: 2931545 - RNA, 19 nt, Artificial Sequence
  Description of Artificial Sequence: Synthetic oligonucleotide
ugguaaguacuucuugucg

SEQ ID NO: 2931546 - RNA, 19 nt, Artificial Sequence
  Description of Artificial Sequence: Synthetic oligonucleotide
aauuagguuucuaaauuuc

SEQ ID NO: 2931547 - RNA, 19 nt, Artificial Sequence
  Description of Artificial Sequence: Synthetic oligonucleotide
auaacaugaugauagaaaa

SEQ ID NO: 2931548 - RNA, 19 nt, Artificial Sequence
  Description of Artificial Sequence: Synthetic oligonucleotide
gaugauagaaaauaagaua

SEQ ID NO: 2931549 - RNA, 19 nt, Artificial Sequence
  Description of Artificial Sequence: Synthetic oligonucleotide
aucauggaaguauaaguuc

SEQ ID NO: 2931550 - RNA, 19 nt, Artificial Sequence
  Description of Artificial Sequence: Synthetic oligonucleotide
uaaauuagguuucuaaauu

SEQ ID NO: 2931551 - RNA, 19 nt, Artificial Sequence
  Description of Artificial Sequence: Synthetic oligonucleotide
caugaugauagaaaauaag

SEQ ID NO: 2931552 - RNA, 19 nt, Artificial Sequence
  Description of Artificial Sequence: Synthetic oligonucleotide
acauauacauaacaugaug

SEQ ID NO: 2931553 - RNA, 19 nt, Artificial Sequence
  Description of Artificial Sequence: Synthetic oligonucleotide
aaagcgaguccgcaucagc

SEQ ID NO: 2931554 - RNA, 19 nt, Artificial Sequence
  Description of Artificial Sequence: Synthetic oligonucleotide
uaugcaggcaguaauacua

SEQ ID NO: 2931555 - RNA, 19 nt, Artificial Sequence
  Description of Artificial Sequence: Synthetic oligonucleotide
aaauuagguuucuaaauuu

SEQ ID NO: 2931556 - RNA, 19 nt, Artificial Sequence
  Description of Artificial Sequence: Synthetic oligonucleotide
augauagaaaauaagauau

SEQ ID NO: 2931557 - RNA, 19 nt, Artificial Sequence
  Description of Artificial Sequence: Synthetic oligonucleotide
ucugcagagauucuucagc

SEQ ID NO: 2931558 - RNA, 19 nt, Artificial Sequence
  Description of Artificial Sequence: Synthetic oligonucleotide
acaucauggaaguauaagu

SEQ ID NO: 2931559 - RNA, 19 nt, Artificial Sequence
  Description of Artificial Sequence: Synthetic oligonucleotide
ucuucagcauacuuguucc

SEQ ID NO: 2931560 - RNA, 19 nt, Artificial Sequence
  Description of Artificial Sequence: Synthetic oligonucleotide
aguaaauuagguuucuaaa

SEQ ID NO: 2931561 - RNA, 19 nt, Artificial Sequence
  Description of Artificial Sequence: Synthetic oligonucleotide
cauauacauaacaugauga

SEQ ID NO: 2931562 - RNA, 19 nt, Artificial Sequence
  Description of Artificial Sequence: Synthetic oligonucleotide
uacucaaagagaugccugg

SEQ ID NO: 2931563 - RNA, 19 nt, Artificial Sequence
  Description of Artificial Sequence: Synthetic oligonucleotide
aaauuucgguucuaagucu

SEQ ID NO: 2931564 - RNA, 19 nt, Artificial Sequence
  Description of Artificial Sequence: Synthetic oligonucleotide
guaaaauccuccauuuugg

SEQ ID NO: 2931565 - RNA, 19 nt, Artificial Sequence
  Description of Artificial Sequence: Synthetic oligonucleotide
uucauucacacagauagug

SEQ ID NO: 2931566 - RNA, 19 nt, Artificial Sequence
  Description of Artificial Sequence: Synthetic oligonucleotide
ucuaaauuucgguucuaag

SEQ ID NO: 2931567 - RNA, 19 nt, Artificial Sequence
  Description of Artificial Sequence: Synthetic oligonucleotide
uaaaauccuccauuuuggg

SEQ ID NO: 2931568 - RNA, 19 nt, Artificial Sequence
  Description of Artificial Sequence: Synthetic oligonucleotide
auaguguccugguaaguac

SEQ ID NO: 2931569 - RNA, 19 nt, Artificial Sequence
  Description of Artificial Sequence: Synthetic oligonucleotide
uaaguucgcacauauacau

SEQ ID NO: 2931570 - RNA, 19 nt, Artificial Sequence
  Description of Artificial Sequence: Synthetic oligonucleotide
uucgcacauauacauaaca

SEQ ID NO: 2931571 - RNA, 19 nt, Artificial Sequence
  Description of Artificial Sequence: Synthetic oligonucleotide
aagauauaguaaauuaggu

SEQ ID NO: 2931572 - RNA, 19 nt, Artificial Sequence
  Description of Artificial Sequence: Synthetic oligonucleotide
aaauaagauauaguaaauu

SEQ ID NO: 2931573 - RNA, 19 nt, Artificial Sequence
  Description of Artificial Sequence: Synthetic oligonucleotide
augaugauagaaaauaaga

SEQ ID NO: 2931574 - RNA, 19 nt, Artificial Sequence
  Description of Artificial Sequence: Synthetic oligonucleotide
uucuaagucuccuugucga

SEQ ID NO: 2931575 - RNA, 19 nt, Artificial Sequence
  Description of Artificial Sequence: Synthetic oligonucleotide
uaguaaauuagguuucuaa

SEQ ID NO: 2931576 - RNA, 19 nt, Artificial Sequence
  Description of Artificial Sequence: Synthetic oligonucleotide
agauauaguaaauuagguu

SEQ ID NO: 2931577 - RNA, 19 nt, Artificial Sequence
  Description of Artificial Sequence: Synthetic oligonucleotide
uguaccagacuucugcaga

SEQ ID NO: 2931578 - RNA, 19 nt, Artificial Sequence
  Description of Artificial Sequence: Synthetic oligonucleotide
auuagguuucuaaauuucg

SEQ ID NO: 2931579 - RNA, 19 nt, Artificial Sequence
  Description of Artificial Sequence: Synthetic oligonucleotide
aguauaaguucgcacauau

SEQ ID NO: 2931580 - RNA, 19 nt, Artificial Sequence
  Description of Artificial Sequence: Synthetic oligonucleotide
auauaguaaauuagguuuc

SEQ ID NO: 2931581 - RNA, 19 nt, Artificial Sequence
  Description of Artificial Sequence: Synthetic oligonucleotide
uaccaguagauaaguaugc

SEQ ID NO: 2931582 - RNA, 19 nt, Artificial Sequence
  Description of Artificial Sequence: Synthetic oligonucleotide
uaaguaugcaggcaguaau

SEQ ID NO: 2931583 - RNA, 19 nt, Artificial Sequence
  Description of Artificial Sequence: Synthetic oligonucleotide
aauuucgguucuaagucuc

SEQ ID NO: 2931584 - RNA, 19 nt, Artificial Sequence
  Description of Artificial Sequence: Synthetic oligonucleotide
gguaaguacuucuugucgg

SEQ ID NO: 2931585 - RNA, 19 nt, Artificial Sequence
  Description of Artificial Sequence: Synthetic oligonucleotide
ugucgauaccaguagauaa

SEQ ID NO: 2931586 - RNA, 19 nt, Artificial Sequence
  Description of Artificial Sequence: Synthetic oligonucleotide
auauacauaacaugaugau

SEQ ID NO: 2931587 - RNA, 19 nt, Artificial Sequence
  Description of Artificial Sequence: Synthetic oligonucleotide
uucaccuucccacaucaug

SEQ ID NO: 2931588 - RNA, 19 nt, Artificial Sequence
  Description of Artificial Sequence: Synthetic oligonucleotide
aaaucauguaccagacuuc

SEQ ID NO: 2931589 - RNA, 19 nt, Artificial Sequence
  Description of Artificial Sequence: Synthetic oligonucleotide
aaucauguaccagacuucu

SEQ ID NO: 2931590 - RNA, 19 nt, Artificial Sequence
  Description of Artificial Sequence: Synthetic oligonucleotide
aguucgcacauauacauaa

SEQ ID NO: 2931591 - RNA, 19 nt, Artificial Sequence
  Description of Artificial Sequence: Synthetic oligonucleotide
aguacuucuugucggcaac

SEQ ID NO: 2931592 - RNA, 19 nt, Artificial Sequence
  Description of Artificial Sequence: Synthetic oligonucleotide
uagguuucuaaauuucggu

SEQ ID NO: 2931593 - RNA, 19 nt, Artificial Sequence
  Description of Artificial Sequence: Synthetic oligonucleotide
ucaaaagcgaguccgcauc

SEQ ID NO: 2931594 - RNA, 19 nt, Artificial Sequence
  Description of Artificial Sequence: Synthetic oligonucleotide
acagauaguguccugguaa

SEQ ID NO: 2931595 - RNA, 19 nt, Artificial Sequence
  Description of Artificial Sequence: Synthetic oligonucleotide
cauaacaugaugauagaaa

SEQ ID NO: 2931596 - RNA, 19 nt, Artificial Sequence
  Description of Artificial Sequence: Synthetic oligonucleotide
aguaugcaggcaguaauac

SEQ ID NO: 2931597 - RNA, 19 nt, Artificial Sequence
  Description of Artificial Sequence: Synthetic oligonucleotide
auucacacagauagugucc

SEQ ID NO: 2931598 - RNA, 19 nt, Artificial Sequence
  Description of Artificial Sequence: Synthetic oligonucleotide
uccauuuuggggcugcuuc

SEQ ID NO: 2931599 - RNA, 19 nt, Artificial Sequence
  Description of Artificial Sequence: Synthetic oligonucleotide
uccccagccgcucaaaagc

SEQ ID NO: 2931600 - RNA, 19 nt, Artificial Sequence
  Description of Artificial Sequence: Synthetic oligonucleotide
aaagagaugccuggucccg

SEQ ID NO: 2931601 - RNA, 19 nt, Artificial Sequence
  Description of Artificial Sequence: Synthetic oligonucleotide
gauucuucagcauacuugu

SEQ ID NO: 2931602 - RNA, 19 nt, Artificial Sequence
  Description of Artificial Sequence: Synthetic oligonucleotide
cauucacacagauaguguc

SEQ ID NO: 2931603 - RNA, 19 nt, Artificial Sequence
  Description of Artificial Sequence: Synthetic oligonucleotide
ggaaguauaaguucgcaca

SEQ ID NO: 2931604 - RNA, 19 nt, Artificial Sequence
  Description of Artificial Sequence: Synthetic oligonucleotide
uaagucuccuugucgauac

SEQ ID NO: 2931605 - RNA, 19 nt, Artificial Sequence
  Description of Artificial Sequence: Synthetic oligonucleotide
caucagcucgccaaguccg

SEQ ID NO: 2931606 - RNA, 19 nt, Artificial Sequence
  Description of Artificial Sequence: Synthetic oligonucleotide
gcaguaauacuacucaaag

SEQ ID NO: 2931607 - RNA, 19 nt, Artificial Sequence
  Description of Artificial Sequence: Synthetic oligonucleotide
aauacuacucaaagagaug

SEQ ID NO: 2931608 - RNA, 19 nt, Artificial Sequence
  Description of Artificial Sequence: Synthetic oligonucleotide
aacuucaccuucccacauc

SEQ ID NO: 2931609 - RNA, 19 nt, Artificial Sequence
  Description of Artificial Sequence: Synthetic oligonucleotide
ucgguucuaagucuccuug

SEQ ID NO: 2931610 - RNA, 19 nt, Artificial Sequence
  Description of Artificial Sequence: Synthetic oligonucleotide
uuuggggcugcuucucucg

SEQ ID NO: 2931611 - RNA, 19 nt, Artificial Sequence
  Description of Artificial Sequence: Synthetic oligonucleotide
ucauucacacagauagugu

SEQ ID NO: 2931612 - RNA, 19 nt, Artificial Sequence
  Description of Artificial Sequence: Synthetic oligonucleotide
uccuugucgauaccaguag

SEQ ID NO: 2931613 - RNA, 19 nt, Artificial Sequence
  Description of Artificial Sequence: Synthetic oligonucleotide
auaccaguagauaaguaug

SEQ ID NO: 2931614 - RNA, 19 nt, Artificial Sequence
  Description of Artificial Sequence: Synthetic oligonucleotide
gauaccaguagauaaguau

SEQ ID NO: 2931615 - RNA, 19 nt, Artificial Sequence
  Description of Artificial Sequence: Synthetic oligonucleotide
agauucuucagcauacuug

SEQ ID NO: 2931616 - RNA, 19 nt, Artificial Sequence
  Description of Artificial Sequence: Synthetic oligonucleotide
uggaaguauaaguucgcac

SEQ ID NO: 2931617 - RNA, 19 nt, Artificial Sequence
  Description of Artificial Sequence: Synthetic oligonucleotide
ucagcauacuuguucccag

SEQ ID NO: 2931618 - RNA, 19 nt, Artificial Sequence
  Description of Artificial Sequence: Synthetic oligonucleotide
ugauagaaaauaagauaua

SEQ ID NO: 2931619 - RNA, 19 nt, Artificial Sequence
  Description of Artificial Sequence: Synthetic oligonucleotide
cuaaauuucgguucuaagu

SEQ ID NO: 2931620 - RNA, 19 nt, Artificial Sequence
  Description of Artificial Sequence: Synthetic oligonucleotide
uauacauaacaugaugaua

SEQ ID NO: 2931621 - RNA, 19 nt, Artificial Sequence
  Description of Artificial Sequence: Synthetic oligonucleotide
ucgcacauauacauaacau

SEQ ID NO: 2931622 - RNA, 19 nt, Artificial Sequence
  Description of Artificial Sequence: Synthetic oligonucleotide
uguccugguaaguacuucu

SEQ ID NO: 2931623 - RNA, 19 nt, Artificial Sequence
  Description of Artificial Sequence: Synthetic oligonucleotide
uaacaugaugauagaaaau

SEQ ID NO: 2931624 - RNA, 19 nt, Artificial Sequence
  Description of Artificial Sequence: Synthetic oligonucleotide
guaaguacuucuugucggc

SEQ ID NO: 2931625 - RNA, 19 nt, Artificial Sequence
  Description of Artificial Sequence: Synthetic oligonucleotide
caaagagaugccugguccc

SEQ ID NO: 2931626 - RNA, 19 nt, Artificial Sequence
  Description of Artificial Sequence: Synthetic oligonucleotide
agguccugguaguaaaauc

SEQ ID NO: 2931627 - RNA, 19 nt, Artificial Sequence
  Description of Artificial Sequence: Synthetic oligonucleotide
cagagauucuucagcauac

SEQ ID NO: 2931628 - RNA, 19 nt, Artificial Sequence
  Description of Artificial Sequence: Synthetic oligonucleotide
cauggaaguauaaguucgc

SEQ ID NO: 2931629 - RNA, 19 nt, Artificial Sequence
  Description of Artificial Sequence: Synthetic oligonucleotide
uacuacucaaagagaugcc

SEQ ID NO: 2931630 - RNA, 19 nt, Artificial Sequence
  Description of Artificial Sequence: Synthetic oligonucleotide
cuacucaaagagaugccug

SEQ ID NO: 2931631 - RNA, 19 nt, Artificial Sequence
  Description of Artificial Sequence: Synthetic oligonucleotide
cuucuugucggcaacuuca

SEQ ID NO: 2931632 - RNA, 19 nt, Artificial Sequence
  Description of Artificial Sequence: Synthetic oligonucleotide
uauaguaaauuagguuucu

SEQ ID NO: 2931633 - RNA, 19 nt, Artificial Sequence
  Description of Artificial Sequence: Synthetic oligonucleotide
acuucaccuucccacauca

SEQ ID NO: 2931634 - RNA, 19 nt, Artificial Sequence
  Description of Artificial Sequence: Synthetic oligonucleotide
acuucuugucggcaacuuc

SEQ ID NO: 2931635 - RNA, 19 nt, Artificial Sequence
  Description of Artificial Sequence: Synthetic oligonucleotide
uccugguaaguacuucuug

SEQ ID NO: 2931636 - RNA, 19 nt, Artificial Sequence
  Description of Artificial Sequence: Synthetic oligonucleotide
uacauaacaugaugauaga

SEQ ID NO: 2931637 - RNA, 19 nt, Artificial Sequence
  Description of Artificial Sequence: Synthetic oligonucleotide
guaaauuagguuucuaaau

SEQ ID NO: 2931638 - RNA, 19 nt, Artificial Sequence
  Description of Artificial Sequence: Synthetic oligonucleotide
gguuucuaaauuucgguuc

SEQ ID NO: 2931639 - RNA, 19 nt, Artificial Sequence
  Description of Artificial Sequence: Synthetic oligonucleotide
aauccuccauuuuggggcu

SEQ ID NO: 2931640 - RNA, 19 nt, Artificial Sequence
  Description of Artificial Sequence: Synthetic oligonucleotide
cacacagauaguguccugg

SEQ ID NO: 2931641 - RNA, 19 nt, Artificial Sequence
  Description of Artificial Sequence: Synthetic oligonucleotide
aagucuccuugucgauacc

SEQ ID NO: 2931642 - RNA, 19 nt, Artificial Sequence
  Description of Artificial Sequence: Synthetic oligonucleotide
gguccugguaguaaaaucc

SEQ ID NO: 2931643 - RNA, 19 nt, Artificial Sequence
  Description of Artificial Sequence: Synthetic oligonucleotide
aaguacuucuugucggcaa

SEQ ID NO: 2931644 - RNA, 19 nt, Artificial Sequence
  Description of Artificial Sequence: Synthetic oligonucleotide
cagauaguguccugguaag

SEQ ID NO: 2931645 - RNA, 19 nt, Artificial Sequence
  Description of Artificial Sequence: Synthetic oligonucleotide
cacaucauggaaguauaag

SEQ ID NO: 2931646 - RNA, 19 nt, Artificial Sequence
  Description of Artificial Sequence: Synthetic oligonucleotide
acuacucaaagagaugccu

SEQ ID NO: 2931647 - RNA, 19 nt, Artificial Sequence
  Description of Artificial Sequence: Synthetic oligonucleotide
ugccuggucccguaggucc

SEQ ID NO: 2931648 - RNA, 19 nt, Artificial Sequence
  Description of Artificial Sequence: Synthetic oligonucleotide
aaguccggacgcccgcccc

SEQ ID NO: 2931649 - RNA, 19 nt, Artificial Sequence
  Description of Artificial Sequence: Synthetic oligonucleotide
gucgauaccaguagauaag

SEQ ID NO: 2931650 - RNA, 19 nt, Artificial Sequence
  Description of Artificial Sequence: Synthetic oligonucleotide
ccugguaguaaaauccucc

SEQ ID NO: 2931651 - RNA, 19 nt, Artificial Sequence
  Description of Artificial Sequence: Synthetic oligonucleotide
uucagcauacuuguuccca

SEQ ID NO: 2931652 - RNA, 19 nt, Artificial Sequence
  Description of Artificial Sequence: Synthetic oligonucleotide
agguuucuaaauuucgguu

SEQ ID NO: 2931653 - RNA, 19 nt, Artificial Sequence
  Description of Artificial Sequence: Synthetic oligonucleotide
ggcaacuucaccuucccac

SEQ ID NO: 2931654 - RNA, 19 nt, Artificial Sequence
  Description of Artificial Sequence: Synthetic oligonucleotide
uaguguccugguaaguacu

SEQ ID NO: 2931655 - RNA, 19 nt, Artificial Sequence
  Description of Artificial Sequence: Synthetic oligonucleotide
auguaccagacuucugcag

SEQ ID NO: 2931656 - RNA, 19 nt, Artificial Sequence
  Description of Artificial Sequence: Synthetic oligonucleotide
uucacacagauaguguccu

SEQ ID NO: 2931657 - RNA, 19 nt, Artificial Sequence
  Description of Artificial Sequence: Synthetic oligonucleotide
auaaguucgcacauauaca

SEQ ID NO: 2931658 - RNA, 19 nt, Artificial Sequence
  Description of Artificial Sequence: Synthetic oligonucleotide
guaccagacuucugcagag

SEQ ID NO: 2931659 - RNA, 19 nt, Artificial Sequence
  Description of Artificial Sequence: Synthetic oligonucleotide
cugguaaguacuucuuguc

SEQ ID NO: 2931660 - RNA, 19 nt, Artificial Sequence
  Description of Artificial Sequence: Synthetic oligonucleotide
gucccguagguccugguag

SEQ ID NO: 2931661 - RNA, 19 nt, Artificial Sequence
  Description of Artificial Sequence: Synthetic oligonucleotide
auuucgguucuaagucucc

SEQ ID NO: 2931662 - RNA, 19 nt, Artificial Sequence
  Description of Artificial Sequence: Synthetic oligonucleotide
ucgauaccaguagauaagu

SEQ ID NO: 2931663 - RNA, 19 nt, Artificial Sequence
  Description of Artificial Sequence: Synthetic oligonucleotide
agcgaguccgcaucagcuc

SEQ ID NO: 2931664 - RNA, 19 nt, Artificial Sequence
  Description of Artificial Sequence: Synthetic oligonucleotide
uucuaaauuucgguucuaa

SEQ ID NO: 2931665 - RNA, 19 nt, Artificial Sequence
  Description of Artificial Sequence: Synthetic oligonucleotide
ugguaguaaaauccuccau

SEQ ID NO: 2931666 - RNA, 19 nt, Artificial Sequence
  Description of Artificial Sequence: Synthetic oligonucleotide
uccgcaucagcucgccaag

SEQ ID NO: 2931667 - RNA, 19 nt, Artificial Sequence
  Description of Artificial Sequence: Synthetic oligonucleotide
aaaagcgaguccgcaucag

SEQ ID NO: 2931668 - RNA, 19 nt, Artificial Sequence
  Description of Artificial Sequence: Synthetic oligonucleotide
agaugccuggucccguagg

SEQ ID NO: 2931669 - RNA, 19 nt, Artificial Sequence
  Description of Artificial Sequence: Synthetic oligonucleotide
ucuugucggcaacuucacc

SEQ ID NO: 2931670 - RNA, 19 nt, Artificial Sequence
  Description of Artificial Sequence: Synthetic oligonucleotide
guaauacuacucaaagaga

SEQ ID NO: 2931671 - RNA, 19 nt, Artificial Sequence
  Description of Artificial Sequence: Synthetic oligonucleotide
ucccacaucauggaaguau

SEQ ID NO: 2931672 - RNA, 19 nt, Artificial Sequence
  Description of Artificial Sequence: Synthetic oligonucleotide
caggcaguaauacuacuca

SEQ ID NO: 2931673 - RNA, 19 nt, Artificial Sequence
  Description of Artificial Sequence: Synthetic oligonucleotide
ccaguagauaaguaugcag

SEQ ID NO: 2931674 - RNA, 19 nt, Artificial Sequence
  Description of Artificial Sequence: Synthetic oligonucleotide
uucucucguccccagccgc

SEQ ID NO: 2931675 - RNA, 19 nt, Artificial Sequence
  Description of Artificial Sequence: Synthetic oligonucleotide
uucuugucggcaacuucac

SEQ ID NO: 2931676 - RNA, 19 nt, Artificial Sequence
  Description of Artificial Sequence: Synthetic oligonucleotide
agcucgccaaguccggacg

SEQ ID NO: 2931677 - RNA, 19 nt, Artificial Sequence
  Description of Artificial Sequence: Synthetic oligonucleotide
caguaauacuacucaaaga

SEQ ID NO: 2931678 - RNA, 19 nt, Artificial Sequence
  Description of Artificial Sequence: Synthetic oligonucleotide
cuugucggcaacuucaccu

SEQ ID NO: 2931679 - RNA, 19 nt, Artificial Sequence
  Description of Artificial Sequence: Synthetic oligonucleotide
guuucuaaauuucgguucu

SEQ ID NO: 2931680 - RNA, 19 nt, Artificial Sequence
  Description of Artificial Sequence: Synthetic oligonucleotide
uaguaaaauccuccauuuu

SEQ ID NO: 2931681 - RNA, 19 nt, Artificial Sequence
  Description of Artificial Sequence: Synthetic oligonucleotide
acauaacaugaugauagaa

SEQ ID NO: 2931682 - RNA, 19 nt, Artificial Sequence
  Description of Artificial Sequence: Synthetic oligonucleotide
aagcgaguccgcaucagcu

SEQ ID NO: 2931683 - RNA, 19 nt, Artificial Sequence
  Description of Artificial Sequence: Synthetic oligonucleotide
gauaguguccugguaagua

SEQ ID NO: 2931684 - RNA, 19 nt, Artificial Sequence
  Description of Artificial Sequence: Synthetic oligonucleotide
uguucccagcaguucauuc

SEQ ID NO: 2931685 - RNA, 19 nt, Artificial Sequence
  Description of Artificial Sequence: Synthetic oligonucleotide
cucaaagagaugccugguc

SEQ ID NO: 2931686 - RNA, 19 nt, Artificial Sequence
  Description of Artificial Sequence: Synthetic oligonucleotide
uaaguacuucuugucggca

SEQ ID NO: 2931687 - RNA, 19 nt, Artificial Sequence
  Description of Artificial Sequence: Synthetic oligonucleotide
ucggcaacuucaccuuccc

SEQ ID NO: 2931688 - RNA, 19 nt, Artificial Sequence
  Description of Artificial Sequence: Synthetic oligonucleotide
acacagauaguguccuggu

SEQ ID NO: 2931689 - RNA, 19 nt, Artificial Sequence
  Description of Artificial Sequence: Synthetic oligonucleotide
gaaguauaaguucgcacau

SEQ ID NO: 2931690 - RNA, 19 nt, Artificial Sequence
  Description of Artificial Sequence: Synthetic oligonucleotide
uccugguaguaaaauccuc

SEQ ID NO: 2931691 - RNA, 19 nt, Artificial Sequence
  Description of Artificial Sequence: Synthetic oligonucleotide
acaugaugauagaaaauaa

SEQ ID NO: 2931692 - RNA, 19 nt, Artificial Sequence
  Description of Artificial Sequence: Synthetic oligonucleotide
cugguaguaaaauccucca

SEQ ID NO: 2931693 - RNA, 19 nt, Artificial Sequence
  Description of Artificial Sequence: Synthetic oligonucleotide
agccgcucaaaagcgaguc

SEQ ID NO: 2931694 - RNA, 19 nt, Artificial Sequence
  Description of Artificial Sequence: Synthetic oligonucleotide
ucuaagucuccuugucgau

SEQ ID NO: 2931695 - RNA, 19 nt, Artificial Sequence
  Description of Artificial Sequence: Synthetic oligonucleotide
guaguaaaauccuccauuu

SEQ ID NO: 2931696 - RNA, 19 nt, Artificial Sequence
  Description of Artificial Sequence: Synthetic oligonucleotide
guagauaaguaugcaggca

SEQ ID NO: 2931697 - RNA, 19 nt, Artificial Sequence
  Description of Artificial Sequence: Synthetic oligonucleotide
cugcagagauucuucagca

SEQ ID NO: 2931698 - RNA, 19 nt, Artificial Sequence
  Description of Artificial Sequence: Synthetic oligonucleotide
augcaggcaguaauacuac

SEQ ID NO: 2931699 - RNA, 19 nt, Artificial Sequence
  Description of Artificial Sequence: Synthetic oligonucleotide
cuucucucguccccagccg

SEQ ID NO: 2931700 - RNA, 19 nt, Artificial Sequence
  Description of Artificial Sequence: Synthetic oligonucleotide
auaaguaugcaggcaguaa

SEQ ID NO: 2931701 - RNA, 19 nt, Artificial Sequence
  Description of Artificial Sequence: Synthetic oligonucleotide
aaguaugcaggcaguaaua

SEQ ID NO: 2931702 - RNA, 19 nt, Artificial Sequence
  Description of Artificial Sequence: Synthetic oligonucleotide
ucacggcgcacgcauggcc

SEQ ID NO: 2931703 - RNA, 19 nt, Artificial Sequence
  Description of Artificial Sequence: Synthetic oligonucleotide
auuuuggggcugcuucucu

SEQ ID NO: 2931704 - RNA, 19 nt, Artificial Sequence
  Description of Artificial Sequence: Synthetic oligonucleotide
uuuuggggcugcuucucuc

SEQ ID NO: 2931705 - RNA, 19 nt, Artificial Sequence
  Description of Artificial Sequence: Synthetic oligonucleotide
uuucgguucuaagucuccu

SEQ ID NO: 2931706 - RNA, 19 nt, Artificial Sequence
  Description of Artificial Sequence: Synthetic oligonucleotide
cauguaccagacuucugca

SEQ ID NO: 2931707 - RNA, 19 nt, Artificial Sequence
  Description of Artificial Sequence: Synthetic oligonucleotide
auggaaguauaaguucgca

SEQ ID NO: 2931708 - RNA, 19 nt, Artificial Sequence
  Description of Artificial Sequence: Synthetic oligonucleotide
ugcaggcaguaauacuacu

SEQ ID NO: 2931709 - RNA, 19 nt, Artificial Sequence
  Description of Artificial Sequence: Synthetic oligonucleotide
gauaaguaugcaggcagua

SEQ ID NO: 2931710 - RNA, 19 nt, Artificial Sequence
  Description of Artificial Sequence: Synthetic oligonucleotide
caucauggaaguauaaguu

SEQ ID NO: 2931711 - RNA, 19 nt, Artificial Sequence
  Description of Artificial Sequence: Synthetic oligonucleotide
uugucgauaccaguagaua

SEQ ID NO: 2931712 - RNA, 19 nt, Artificial Sequence
  Description of Artificial Sequence: Synthetic oligonucleotide
accaguagauaaguaugca

SEQ ID NO: 2931713 - RNA, 19 nt, Artificial Sequence
  Description of Artificial Sequence: Synthetic oligonucleotide
aaguauaaguucgcacaua

SEQ ID NO: 2931714 - RNA, 19 nt, Artificial Sequence
  Description of Artificial Sequence: Synthetic oligonucleotide
cauacuuguucccagcagu

SEQ ID NO: 2931715 - RNA, 19 nt, Artificial Sequence
  Description of Artificial Sequence: Synthetic oligonucleotide
agauaaguaugcaggcagu

SEQ ID NO: 2931716 - RNA, 19 nt, Artificial Sequence
  Description of Artificial Sequence: Synthetic oligonucleotide
agucuccuugucgauacca

SEQ ID NO: 2931717 - RNA, 19 nt, Artificial Sequence
  Description of Artificial Sequence: Synthetic oligonucleotide
aggcaguaauacuacucaa

SEQ ID NO: 2931718 - RNA, 19 nt, Artificial Sequence
  Description of Artificial Sequence: Synthetic oligonucleotide
cacggcgcacgcauggccc

SEQ ID NO: 2931719 - RNA, 19 nt, Artificial Sequence
  Description of Artificial Sequence: Synthetic oligonucleotide
cgcacauauacauaacaug

SEQ ID NO: 2931720 - RNA, 19 nt, Artificial Sequence
  Description of Artificial Sequence: Synthetic oligonucleotide
ugcagagauucuucagcau

SEQ ID NO: 2931721 - RNA, 19 nt, Artificial Sequence
  Description of Artificial Sequence: Synthetic oligonucleotide
acgcccgccccucacggcg

SEQ ID NO: 2931722 - RNA, 19 nt, Artificial Sequence
  Description of Artificial Sequence: Synthetic oligonucleotide
gcuucucucguccccagcc

SEQ ID NO: 2931723 - RNA, 19 nt, Artificial Sequence
  Description of Artificial Sequence: Synthetic oligonucleotide
acggcgcacgcauggcccc

SEQ ID NO: 2931724 - RNA, 19 nt, Artificial Sequence
  Description of Artificial Sequence: Synthetic oligonucleotide
gagaugccuggucccguag

SEQ ID NO: 2931725 - RNA, 19 nt, Artificial Sequence
  Description of Artificial Sequence: Synthetic oligonucleotide
gguaguaaaauccuccauu

SEQ ID NO: 2931726 - RNA, 19 nt, Artificial Sequence
  Description of Artificial Sequence: Synthetic oligonucleotide
gguucuaagucuccuuguc

SEQ ID NO: 2931727 - RNA, 19 nt, Artificial Sequence
  Description of Artificial Sequence: Synthetic oligonucleotide
guccccagccgcucaaaag

SEQ ID NO: 2931728 - RNA, 19 nt, Artificial Sequence
  Description of Artificial Sequence: Synthetic oligonucleotide
uugucggcaacuucaccuu

SEQ ID NO: 2931729 - RNA, 19 nt, Artificial Sequence
  Description of Artificial Sequence: Synthetic oligonucleotide
gcgaguccgcaucagcucg

SEQ ID NO: 2931730 - RNA, 19 nt, Artificial Sequence
  Description of Artificial Sequence: Synthetic oligonucleotide
ucacacagauaguguccug

SEQ ID NO: 2931731 - RNA, 19 nt, Artificial Sequence
  Description of Artificial Sequence: Synthetic oligonucleotide
gcaucagcucgccaagucc

SEQ ID NO: 2931732 - RNA, 19 nt, Artificial Sequence
  Description of Artificial Sequence: Synthetic oligonucleotide
ucccgggccacgcgcgucg

SEQ ID NO: 2931733 - RNA, 19 nt, Artificial Sequence
  Description of Artificial Sequence: Synthetic oligonucleotide
uucgguucuaagucuccuu

SEQ ID NO: 2931734 - RNA, 19 nt, Artificial Sequence
  Description of Artificial Sequence: Synthetic oligonucleotide
gcauacuuguucccagcag

SEQ ID NO: 2931735 - RNA, 19 nt, Artificial Sequence
  Description of Artificial Sequence: Synthetic oligonucleotide
ugucggcaacuucaccuuc

SEQ ID NO: 2931736 - RNA, 19 nt, Artificial Sequence
  Description of Artificial Sequence: Synthetic oligonucleotide
gucuccuugucgauaccag

SEQ ID NO: 2931737 - RNA, 19 nt, Artificial Sequence
  Description of Artificial Sequence: Synthetic oligonucleotide
ucucucguccccagccgcu

SEQ ID NO: 2931738 - RNA, 19 nt, Artificial Sequence
  Description of Artificial Sequence: Synthetic oligonucleotide
uagguccugguaguaaaau

SEQ ID NO: 2931739 - RNA, 19 nt, Artificial Sequence
  Description of Artificial Sequence: Synthetic oligonucleotide
ucccguagguccugguagu

SEQ ID NO: 2931740 - RNA, 19 nt, Artificial Sequence
  Description of Artificial Sequence: Synthetic oligonucleotide
agagauucuucagcauacu

SEQ ID NO: 2931741 - RNA, 19 nt, Artificial Sequence
  Description of Artificial Sequence: Synthetic oligonucleotide
aagagaugccuggucccgu

SEQ ID NO: 2931742 - RNA, 19 nt, Artificial Sequence
  Description of Artificial Sequence: Synthetic oligonucleotide
acucaaagagaugccuggu

SEQ ID NO: 2931743 - RNA, 19 nt, Artificial Sequence
  Description of Artificial Sequence: Synthetic oligonucleotide
cuccuugucgauaccagua

SEQ ID NO: 2931744 - RNA, 19 nt, Artificial Sequence
  Description of Artificial Sequence: Synthetic oligonucleotide
ugcuucucucguccccagc

SEQ ID NO: 2931745 - RNA, 19 nt, Artificial Sequence
  Description of Artificial Sequence: Synthetic oligonucleotide
caaaagcgaguccgcauca

SEQ ID NO: 2931746 - RNA, 19 nt, Artificial Sequence
  Description of Artificial Sequence: Synthetic oligonucleotide
uacuuguucccagcaguuc

SEQ ID NO: 2931747 - RNA, 19 nt, Artificial Sequence
  Description of Artificial Sequence: Synthetic oligonucleotide
cuucccacaucauggaagu

SEQ ID NO: 2931748 - RNA, 19 nt, Artificial Sequence
  Description of Artificial Sequence: Synthetic oligonucleotide
auaguaaauuagguuucua

SEQ ID NO: 2931749 - RNA, 19 nt, Artificial Sequence
  Description of Artificial Sequence: Synthetic oligonucleotide
ggggcugcuucucucgucc

SEQ ID NO: 2931750 - RNA, 19 nt, Artificial Sequence
  Description of Artificial Sequence: Synthetic oligonucleotide
ucccagcaguucauucaca
